United States Patent Application Publication US 2013/0129668 A1 - sequence listing, part 22

SEQ ID NO: 362241 - DNA, 122 bp, Homo sapiens
gcgcgctctccaggagctttggctcggtgggtactgtcgcggaggcttgtcattctgacccggggattcctcacagcgtctggcaggttggtcgtgaggggctggtgccttccaggatgcga

SEQ ID NO: 362242 - DNA, 122 bp, Homo sapiens
gaatttgtcttttctagttcaaaaaagccttcccgaactcttagcaaacaagccagtgatcgcctcctcgccttcgccacttcagttcagcctctttagtccccatggagagccgggatgaa

SEQ ID NO: 362243 - DNA, 122 bp, Homo sapiens
gggaagcttgatcgccgcctgttctcgccaatctctatgcctttgcactgcccagcaacccggtcactgcccaggacctgttaaaagttgaatggacctcccagaatcacgccgctgccacc

SEQ ID NO: 362244 - DNA, 122 bp, Homo sapiens
gcctcccgggttcaagcgattctcccacctcaaccccctgagtagctgggagtacaggcacgtgctaccaccctggcatatttttatatttttggtagagacagggtttcaccatgttgaca

SEQ ID NO: 362245 - DNA, 122 bp, Homo sapiens
cagaggcagaggccggctggctccagccgtggtaccgcacggctgccaccctcggacttccgtcttgagtctcctgaggctgagaagcagcagatgccgaacctgccccctgacgtggacgt

SEQ ID NO: 362246 - DNA, 122 bp, Homo sapiens
ttcatgtcaccactatctcttattgtatttctgcaacggtttccaacctgtgtctcttctcgagtatatttttgcaaaatacaagcatggcttgttaattctccaggctcatctaaacttat

SEQ ID NO: 362247 - DNA, 122 bp, Homo sapiens
tccttcttcttccgggcctcctcctccggcgtgaggtccacctcccgcaccaccaggtgccgcagccacacggtgtccacgaaccagctgggcccaaagccctcgcccgtgtgcccgagccg

SEQ ID NO: 362248 - DNA, 122 bp, Homo sapiens
ctcccccaagggctgcggcgtcgtccggctctccggtcctccaaagggccgaggggtgtacgccccggaaaccctgcaaaccctacatccgctccaatggccggaagttcgagcgcgcgaga

SEQ ID NO: 362249 - DNA, 122 bp, Homo sapiens
aataaagccacaacgtatcgaggcccgcagtgaatgctcaatccaagacatgcatcagggcggtgcacatccggaagaaagctttacacacgtcttgcaccaagaaagcaactatggtttgg

SEQ ID NO: 362250 - DNA, 122 bp, Homo sapiens
gctctgccggaccactttgcggaaggacatgtctgcgggacagagaggcctgggtcagtccggcccatcccaacaactccagccctccccaggctgctgaaggtgagccgggaggatgcaac

SEQ ID NO: 362251 - DNA, 122 bp, Homo sapiens
gataggctcagacacaaggagaggcttggagagagcagacgccttctggattcaagaagacgaggtgagctgaggtacctggctttagtgaagaccctgtgggggcttcctggctgcggctt

SEQ ID NO: 362252 - DNA, 122 bp, Homo sapiens
tgatggggagtgcccccaaaccccagtgaggctgttacatggtaaattgtgccaaataatcgttgtacattgaagaattctgaattccaaaacccatctgcccaagggttttaaacatgcag

SEQ ID NO: 362253 - DNA, 122 bp, Homo sapiens
ggctgcgggccggggctcagggtgggcgcagccgggggcgcgggatctgggccgggagcccgccagtgcgcacgcaccttcccggagcctcgggcaccccctcccccccgcgccctcacact

SEQ ID NO: 362254 - DNA, 122 bp, Homo sapiens
gatatggacactcagatgaagacagtgaaaaagtcattgctgttagggagttgtcacatccggcttccttagattctaagaaggcccctggaattgcaggggaattaagatttctgagaaaa

SEQ ID NO: 362255 - DNA, 122 bp, Homo sapiens
tccttggatgagccatgcatcccactagaaaacagtccagctctgagaagagtgtgggggcggaggacaggaaacagaacagaacagcagaatgtatgtggttctggggctgaccctggacc

SEQ ID NO: 362256 - DNA, 122 bp, Homo sapiens
ggaagaaatctaataagtcgggagtcatttgcacacatactacacagtattcacagtaagcgctttagcaagaaactgctgaaatgtcaggctgggcctaaaacatatgagacctagtaaaa

SEQ ID NO: 362257 - DNA, 122 bp, Homo sapiens
cttatctgcccctggaaacagatttgctcttggatcttgcacgaagagccctgtgagaaacgaaaagggaacttgtgtgatggcggcagataacgaacattagggtagaaacttaggttctt

SEQ ID NO: 362258 - DNA, 122 bp, Homo sapiens
taaacccaattaatccttaactatgaaagcagcatcctaaagtctactttcacttgttagcggcatctgtggaagtagccgagggtctcaggcagtgcagtagctctctgaatagcctctct

SEQ ID NO: 362259 - DNA, 122 bp, Homo sapiens
gagcgctgcgcccggcagaagttggaggcttgaccgggtggcaggggttggggacaattccgggatcctgggcacctgagctgggagttcccggagaaacggccagacccaggaaatcggag

SEQ ID NO: 362260 - DNA, 122 bp, Homo sapiens
ctgccaacgccctcgctcctgccagatgtcggcgcccgcggggttaaccctttccggcagcgcagccttcccctgcgtccggccgcttctccaggcagctgtttttaaaaacgtccgcctcc

SEQ ID NO: 362261 - DNA, 122 bp, Homo sapiens
gcgtcccggcagttcccggcgggaggctgacgagacgcaacgcgtctgcgcacatccccgcgttgttctcactgcgcatgtgcagttgcaaccgggatactagaacctacgcttggtgcgcc

SEQ ID NO: 362262 - DNA, 122 bp, Homo sapiens
tggtcctacacactgggcatagagatgaacacgcctgaagagccggcttctcctaggagacgcatctcttagcatctctaacctgctgagattgttcattctgttcattctctgaagagttc

SEQ ID NO: 362263 - DNA, 122 bp, Homo sapiens
tctggttctaaactctgccaaaaatctttttctctgtcacttatgctagataactgagttcgagcattctgtgtcctcttgctagtttccatcttttctctataattttcccccgaatgatt

SEQ ID NO: 362264 - DNA, 122 bp, Homo sapiens
gcaatggttggcacgtcctgagtgggtggctaggtttgttcaccaagtgaattgcttctgcgcctcagccttccagaactccaaacgcattcatgtctcagcagaattgcaaattactctgg

SEQ ID NO: 362265 - DNA, 122 bp, Homo sapiens
cgccggccaccccagccccagggaagaacgttcctttggtgggtgtcggcaaatggggaccggaccccagagtccagaggcggggctagcgcgcgctcccaaactgttggctctttcctccc

SEQ ID NO: 362266 - DNA, 122 bp, Homo sapiens
ccaggcagattggctccatcggtctaatcaagctgcacttgacgctccgcgggcctgctgcgcccccgccccctcaggcgaaaactcgcctctgcccaaggctgtgcggggcgtccgccccc

SEQ ID NO: 362267 - DNA, 122 bp, Homo sapiens
cgccttttttttttttcctactgtaaagacagggtcttgcttttttgcccagtcttgtttcgaactcctggccccaagaaatcctcctgccccagcctcccaaagtactgggattacaggca

SEQ ID NO: 362268 - DNA, 122 bp, Homo sapiens
tatttcaggacatttatagaatgcttttttcctctgaggacatgatgactgactgtaatccgcaatctctgatttctaccctgatgcttcaagaaatgtacaaataatgagaacatctactc

SEQ ID NO: 362269 - DNA, 122 bp, Homo sapiens
cccctcatcccgaaaggccaccagcggcaatgcgaagtgattgcctgctctccggaagcccggcctccccgaaggtccctccacgcaccgccgccctcacccgggactcaccaggggtccgg

SEQ ID NO: 362270 - DNA, 122 bp, Homo sapiens
gtgggtataaacatattggaatcacatctttaaaaacaacaatagcaagcaaacccaagccgtccgaccttagcaaactttaaaaaattgttattttacgtctttcttttgtgtaacaatgt

SEQ ID NO: 362271 - DNA, 122 bp, Homo sapiens
gcctccttccacactctctgtagcagcagccgcagccatggcggggatgaagacagcctccggggactacatcgactcgtcatgggagctgcgggtgtttgtgggagaggaggacccagagg

SEQ ID NO: 362272 - DNA, 122 bp, Homo sapiens
tcggaggattagctgagcacgaggaagcccctgagagaaagactctggcctggattgggtcgaattaagcccgtcgctctgctcagtaccaaaatgacagcgccaatgtggcagccatcttt

SEQ ID NO: 362273 - DNA, 122 bp, Homo sapiens
cattcaccgtgaagtccgtgtctataggaggggacacgggcaggctggcacgggctctagcgctaaagcaccctagagaaactgtcagagaatgtcccctttgctaattcgtctctgaaaga

SEQ ID NO: 362274 - DNA, 122 bp, Homo sapiens
ggcgagatttcgggggcagggcggggggcgggcctaggccggggtctcacagcgactgcgcggacgggttcctgagtggaacatggcgacttgcgccgaaatcctgcggagcgagttccccg

SEQ ID NO: 362275 - DNA, 122 bp, Homo sapiens
aggcatttacctttaaaatgaatcccaacacgccaaaaacagtttcagtgtcttcctagtcgttctaatatcactgcagaaagcattctcagtctttacaaagatgttttttaagattatgt

SEQ ID NO: 362276 - DNA, 122 bp, Homo sapiens
ctgggcctggtatctcacagtagcgggtaaggcaggcccggcagaagttgtggccgcagtcgatagtgaccggctccctcagggtaccctgacagatggggcagttgacttcatctgccagg

SEQ ID NO: 362277 - DNA, 122 bp, Homo sapiens
ggagggctcgtcctgcgcccccacctcatcctggaatagagagatccgctgctcccacgacgtcagcttgggctcgcccctctgtgcccctgctccgtgcccccagtccccggaccccggga

SEQ ID NO: 362278 - DNA, 122 bp, Homo sapiens
agcatccccgggcgtgggacacatgcctcgcagcagagttgggggacacggggctgtgcccgccctccctgcactagaaccagcagcagcaaacagcccccagctcggccgctgaccatgtc

SEQ ID NO: 362279 - DNA, 122 bp, Homo sapiens
tgacgtcttaccctccacagaatcggaagttctggactgcagttgagtggaaatgggcaacggcgggcggagcggcctgcagcaggggaaggggaacgtggatggggtggcagcgactccta

SEQ ID NO: 362280 - DNA, 122 bp, Homo sapiens
cctgcccccttccaggcctagggctttgggccttgatcacctctgctgagtagctgactgcggggctggggctctgatgctcaggacccacctctctgggacccacagtctttttccactgt

SEQ ID NO: 362281 - DNA, 122 bp, Homo sapiens
caggccctctggctaccaaacctcccagcgcccccgcgcccctttggagttctgaccccgcgggtgcacccgtgtctcctggacacagaggctgccctctgattgggttgagcaccttgggc

SEQ ID NO: 362282 - DNA, 122 bp, Homo sapiens
gcaaaaccaacaaaacaaccaaatacaggtctcaagcgatttacagctcggtgcttaactcggtcaccggccgaggggcagccctctggcgccaaagccccgcctctctatgacgtcacacg

SEQ ID NO: 362283 - DNA, 122 bp, Homo sapiens
ccatgtctcccacttggaaccaggaggttgcggggcgtggcggacggcagtgcgcaggcgcggagcctgggaagtacccgaggcagcggcgcctgcgccggcggcagcgacgcctgcgcctg

SEQ ID NO: 362284 - DNA, 122 bp, Homo sapiens
ctaggaggctgtggtgttatgatatatatatgtattggttttcatccacagttcctgggtcgtaactcctatagcccttgttacaatgttctgtgataatgttgggtgtgttaggcctcagg

SEQ ID NO: 362285 - DNA, 122 bp, Homo sapiens
ataaatttgttgttagatcaagtgatgttgttttactccattccctctctgatatctctgcgtcatttgactgtgctcttgctaaaactcttcctctctccctttgtctctcaccagaggtg

SEQ ID NO: 362286 - DNA, 122 bp, Homo sapiens
gaggtagaggaggtggaaaagtcggccctaggcggcgggaggtccttccggcggaggatccgaaatgtggaaaatcgaaaaggcttggagctaaaggtggtggccaagacccttcttctcgg

SEQ ID NO: 362287 - DNA, 122 bp, Homo sapiens
tgggaggtgagagtggctgacaccgacccaacgtccgggttgccggaaggctgcagcgcccggagcggtgtcgggcaaaccgctaccctggtattgctggagcctctcctggggacttttga

SEQ ID NO: 362288 - DNA, 122 bp, Homo sapiens
gagcagggcggggagcggggttaggcctgtcgggccacccctgggtctgggaaaagctggcggcgccacctcttcccggtctcggcgaggcccgagcacctacgggcggcggcgtgctctcc

SEQ ID NO: 362289 - DNA, 122 bp, Homo sapiens
gatgggagctctggggcacccgggggctccagcaagtgttgtggatcctgttcttagtgccggggtaggatgttttatgacagcctctgactcttgtttgtggagctgactctagggttgtg

SEQ ID NO: 362290 - DNA, 122 bp, Homo sapiens
gggggccttgggtggttgggtccccgagacaggccatctcgctccttgtgtggcaggctgcggggccctgcttgcctgggtcccacgtggtagaactcggcgtttggtgggggcctgctggg

SEQ ID NO: 362291 - DNA, 122 bp, Homo sapiens
cctgcgaggtcgcagccatgagctggcgggggtgagtacacaagcccagatcccccaacccgaactgcggctgccagcctcagagaaaggcgcccaggtgtgcgggcagggccgagaccccc

SEQ ID NO: 362292 - DNA, 122 bp, Homo sapiens
aatgagctattttcgcccacagccaaaatcagcaacagcaaattacactgcaaacaatggcgagggcgcctgctcggctcggctcgaaactccggagaggcagcgcaaagattctgactttt

SEQ ID NO: 362293 - DNA, 122 bp, Homo sapiens
cactgaaggcactaaccgaaggccggttgccctgccaaccctgtcgcgtcctgcttaggacgaaccaatcaggccttgagttccctccacgcgccgcctttccatttgtaatgtgcgagtcc

SEQ ID NO: 362294 - DNA, 122 bp, Homo sapiens
tgatcttggacaagttgcctaattgctcccagtctctgtttcctcatctatagaatgaggcgaatactacctaccccataggatagtaatgaaaattaaatccatgaaagtatatgacatga

SEQ ID NO: 362295 - DNA, 122 bp, Homo sapiens
attaattgatacagatttccggttcagttcaccctgcgcccgcggttgagcaatgatctgcgtggtcagagtttgtgactgcggtggtctcgggggcgcagggctgtccgccatgtgaggca

SEQ ID NO: 362296 - DNA, 122 bp, Homo sapiens
ttccttggcaagtggctatccatttgtcccagcactgtttgttgaagattattctttttccgctgaactgttctggcatctttgttacaaatcaattgtccatatatgtaagggtttatttc

SEQ ID NO: 362297 - DNA, 122 bp, Homo sapiens
gcagcacagccagacaggggggtggagaagcctggggcacaaggaaaaaagacagggacacggcttccagaaggtggtcagagggctcagagtccaaggaaaataggaatttacagaggcca

SEQ ID NO: 362298 - DNA, 122 bp, Homo sapiens
gggatttctcaggcaatttggccagtgatgcatggggcagtagatcctcgcgcactcttccgtgcttctgccaagccagcaataacaaaaacttattttttgccagggaaacggatatgagt

SEQ ID NO: 362299 - DNA, 122 bp, Homo sapiens
agcaggggctggcacccccgacgccccacccgccccccgtggcctagcagcagggcggggcgaggcgggtcatgcacccctaccagccagccactcccacccagccctcggctcccgcaact

SEQ ID NO: 362300 - DNA, 122 bp, Homo sapiens
tggaggtggccctcggaacccagggtgcggaacccacagtgcggatccactttggcccagcgccacacccacctgctccagtctgcaggggcgcagtctcgcccccttccctcgctcctcca

SEQ ID NO: 362301 - DNA, 122 bp, Homo sapiens
aggcatgtgtctgacttacggaacaaaggccatttcataacacaagcggtctctgtcctccgtgacagaggaaggcggatttccccgaggcatcctggcagcccgcgcaatgcatggaagct

SEQ ID NO: 362302 - DNA, 122 bp, Homo sapiens
agaataagtcataagaatagtgggctttttttctttttttcagatgtagtcttgctctgtcgcccaggctggagtgcagtgtcatgatttcagctcactgcaacctcgcctcccgggttcaa

SEQ ID NO: 362303 - DNA, 122 bp, Homo sapiens
tactgtggctcacccagattccctgaggacacttcaactccttgcctctgcacctccacgcgtgcctgctggtttccagccagtgactggagcatgcgcgctggaaatatggcaccgtgagc

SEQ ID NO: 362304 - DNA, 122 bp, Homo sapiens
cttcatccaccccataggggtaaggctcgtaggtctcatacgggtaagggtcatagggatcgtagtaggtggactgctggctgcggaggtagtggaaccaccaatgagggtcatcttcatac

SEQ ID NO: 362305 - DNA, 122 bp, Homo sapiens
ccaggctgcagttcgctctcttgaccgtgaggtagaaggggtaatccttggccaccatggcggctgccgggcctgccctttgggatgtcaccgctgaccctaggcgactacaaaactcccag

SEQ ID NO: 362306 - DNA, 122 bp, Homo sapiens
agcctgcaaaccagcgctcagggcgcgagccaaggaagagcagggcctagagtgggagggcgtgtgccacacggctaccctaaggccgtcgggcccagccctgcagcctctaccgtgggctc

SEQ ID NO: 362307 - DNA, 122 bp, Homo sapiens
taagtcaagtgggctaaaatgctttaaaaagaccaaaaatgcaatggatcaaatccagtacgagcttacttctctcgtgtagcaggcctgggtgggtatttcaggccactgggtggctgtac

SEQ ID NO: 362308 - DNA, 122 bp, Homo sapiens
ggtgttctcagggcagccaagaggtcagtgtggctcagctggagtgggcaagaggccaggcgggtggaggggagttcagagaggaaaaaggaagctttgtaggctattgttttgtgggtttt

SEQ ID NO: 362309 - DNA, 122 bp, Homo sapiens
atctccaggactcgcctccctcctggctgctggtctgcacctgctccccgaccccctaggcgactctccactgtgcccgcctgtgacgcttctcgacgaggctccatttacatgctgctccc

SEQ ID NO: 362310 - DNA, 122 bp, Homo sapiens
ccgcgtctgggcggtgccccagtgccccggcctcgccatttcccgctcagccctggagcgcgtagctctaccaagaatggccactgtgccagatgcccctgaccagcgttgcccatttgaat

SEQ ID NO: 362311 - DNA, 122 bp, Homo sapiens
cgaaatacttcttgagaaagtagccttctcgtgcccaagaaagtgtgaatcgctgaggctcggccccatggcctggcgtgggtgctgacctcagtttaaaaccaagggcctgttttcttacc

SEQ ID NO: 362312 - DNA, 122 bp, Homo sapiens
ggagccccgacagccaggaaccataacagccatgaaccccgggagccaggaggcccgcagcggagtgcccagacttggcagggtcagagccccccagcgggatccagagcccgccgccgagg

SEQ ID NO: 362313 - DNA, 122 bp, Homo sapiens
ctgtgatagcacccagggctcatggtctctctctgctgtgtaccaaatgcgtcgaactagcgctgaggacttcttgcaggggatgtctgtttaacagcggtcatttctgcttccctggcggt

SEQ ID NO: 362314 - DNA, 122 bp, Homo sapiens
ggccggctggcgcggctggagctggagcgggcacagctggagatgcagagccagcagctgcgcgagtccaaccagcagctggacctgagcgcctgccggctgaccacgcagtgtgaggtgtg

SEQ ID NO: 362315 - DNA, 122 bp, Homo sapiens
gttttatttactttatttagagacaggtctcactgtcacccacactggagtgcagaggtgcgatgttggctcactgcaatctctgcctcctgggctcaagcaattctcccacctcagcttca

SEQ ID NO: 362316 - DNA, 122 bp, Homo sapiens
tgtgcaccagggggcgctgccgcccgccttggccatcccgggctgggaagtccgacccttcgattaagccccgcctgattgggaaaggctctgagaaactatttgcatgatcttgaaagagc

SEQ ID NO: 362317 - DNA, 122 bp, Homo sapiens
ggcacctcctcccatctcctccagtcccctcctgcaccacagcctttgtccctctgcccccggtggcctattcaggggtctcactcgccctgcaggagctgctaccgtttccccagtgccag

SEQ ID NO: 362318 - DNA, 122 bp, Homo sapiens
cagcagggggagccgggatgtggctcacatgcctggggctgctccgtggccatctggatgcgtgcacacggcagcaggggcagccgggatgtggcttacgtgcctggggctgctccgtggcc

SEQ ID NO: 362319 - DNA, 122 bp, Homo sapiens
aggcctggaggcctacccctgggctaccctggcctcggtttccctcgccctagcctagcacgtgcagctctgggccgcacactggcgtccttcggtgcctgttccagagaggggatgagggt

SEQ ID NO: 362320 - DNA, 122 bp, Homo sapiens
tgcggcaggaaaaggaatagtcttgaagaggggaggggcttccgaggctactcaccacagcggctgggtgtgtccatatctgtccaggagccgttggccaggcacttgcggaccttgggccc

SEQ ID NO: 362321 - DNA, 122 bp, Homo sapiens
accaaccctccaccaggagcctcgcgggggggcgccgtgggcaccgcagccaggtgcaggcgcctccgcgccctcactccccacgccgaggaggtggccctggctccctgcggccgcagccg

SEQ ID NO: 362322 - DNA, 122 bp, Homo sapiens
ccctccccaggccagtgatgagcccaaaagctcctctggaaaacgttgatctttgcacggcgcccatgcaggcttccaggccaccagggcatgggcaggactcagcccgccatgggcgcctg

SEQ ID NO: 362323 - DNA, 122 bp, Homo sapiens
gcccgcggggatcctggaaacggtccccagcttatctcctttcatcaagcggccttgggccgccttgaaaccgcggagccagtaattgcttttttcaggaggcccagtgcggactggacaac

SEQ ID NO: 362324 - DNA, 122 bp, Homo sapiens
gaggaaatgtggaaaggtcaaggttctttgaccagacgtgtactggggagagatggaagacgaccctcagacacgtgagattgttgttactgtacctcttagtttgttcctgtctttcctct

SEQ ID NO: 362325 - DNA, 122 bp, Homo sapiens
cgggcatggtgctgcggcagctggacccgccgcgagctccccgcgctccgccgccgcctgcgccgcggagttggcccagctgcaaataaacagcagtccccccgcctcccccggccatcgcc

SEQ ID NO: 362326 - DNA, 122 bp, Homo sapiens
accctgcactaaagcagacacgaaagagatgacctccctaaaaatactgctgttggaatacgtccttccttcccgccccctcgcagtgcggtgcagcctcagtggaagctttggcgaacctg

SEQ ID NO: 362327 - DNA, 122 bp, Homo sapiens
gaagtgggggtgagtcagtccccagcaattgggaatgtcacaggggccatgcagggcaggcgggggctgggtttggttaccaccctcctccctcccttcagaagagctctctcatcttaggc

SEQ ID NO: 362328 - DNA, 122 bp, Homo sapiens
agtcccggcgagtccgttccccggagtggagctacaagtcccaaagggtcttcctcagcgcgaaatcgttcccagatatttgagttaagttgtttgactccagctgtcccctttcagctcta

SEQ ID NO: 362329 - DNA, 122 bp, Homo sapiens
ggaaaggcaatcatttcctcactaaatgaaaaaggagatatgaatctgaggaacacaatccggcactgattgaaagtaaattaccagttgattagacggctgtaaattcagggagagaagcc

SEQ ID NO: 362330 - DNA, 122 bp, Homo sapiens
taagtatttgattgcaggttggtatcctgtatccaagcacagcgcttggcatcgagtaggcgctcaattttatttggtgaatatgagttggaggaatatttgatgaatgaatggaagatgaa

SEQ ID NO: 362331 - DNA, 122 bp, Homo sapiens
ttacattcattttagaggtcagcaaactgagaggttaagtggcttgccacagctcagacccggtcctcctgacccccaggcccacgcctttcccacttggcacactgcctcctgctcttagc

SEQ ID NO: 362332 - DNA, 122 bp, Homo sapiens
ccccaggttccaccccaagtacacttggaagccaggcccctccacacaggctgagcaccacgcttccacaaactgaaaacagagagaatccacttggtttcaaagttagaatagggatagcg

SEQ ID NO: 362333 - DNA, 122 bp, Homo sapiens
tgccgccgagagggggcagcagccgcctgcaggaccagcgcccagtgcccagcgcccagccgggcccgcctgcaacggaacatcttttgcttttggaaacaaaacaagcggttcgcacgtct

SEQ ID NO: 362334 - DNA, 122 bp, Homo sapiens
acaggcatgagccaccgcgcccggcggagcagcttccatcttatggatggtggggactaacgccaagctgggcaaggagaactcagggcacagattgtggagctgactgcggggagccctga

SEQ ID NO: 362335 - DNA, 122 bp, Homo sapiens
tggagggctggcccttttaaaagcgggtcacatgtccagataaagttcaggttgctatcccgcccccctgaacccttcctattggcccgaagagaagcaaggctccacgccgcacgggtcag

SEQ ID NO: 362336 - DNA, 122 bp, Homo sapiens
agagcaaatgcccccgcagcctgctccccttgcccatggctcatgtcagtaatcaacctacgtacctttcccactgaaccaggacagggcctccaggcctcagcacagaactgcagacagcc

SEQ ID NO: 362337 - DNA, 122 bp, Homo sapiens
cacgggaagctgctacaggcactgggaggagaatgggcagcagcaaacggccttgggagacgaaaagcgtctcaaaaccaattgtggtgacggctgcaactccatgaatgtcctgaaaccca

SEQ ID NO: 362338 - DNA, 122 bp, Homo sapiens
gtaatctcaccacctaacaatagtggaccagggcagacattcaaatatctatgaataggccgggtgtggtggctcacacctgtaatcccaacactctgggaagccaaggcgggcggattgct

SEQ ID NO: 362339 - DNA, 122 bp, Homo sapiens
gtactaggaatttacatagtggtgaaatctgacctacttcattccatgagcaggtgacaccgagctgaacattgatgcataagcagaaactgacaaaaggaagccattgccaccattgatag

SEQ ID NO: 362340 - DNA, 122 bp, Homo sapiens
tcctgggtctcccggctcaggtagtgccaggaagctgcgggcatggcggacagctgtcctcggtctggaggcgccatcctggctttcaaatctgctccagaggttatctggggaggggctgc

SEQ ID NO: 362341 - DNA, 122 bp, Homo sapiens
ccgaggccgaacaggacgagcagctgccccccgagctgcaggaggaggcggcggccgccgcgcagcccgagcacaagcagcagaagctgtggcacctcttccagaactcggccaccgccgtg

SEQ ID NO: 362342 - DNA, 122 bp, Homo sapiens
gggcgccctcggcgggagggagtgctgggccgggtgctggcgcagcgctacgcagggtggcggaacccagaggaccggacgggctcgttcagggtggcggcccggcgggggcgatgcccgcc

SEQ ID NO: 362343 - DNA, 122 bp, Homo sapiens
gtttgacattatgatgaattttcaaacactcttacagctacttcttacaacaccgtctcacgcatactctgcaagacagacagacacacacacagagatgtctcccctactggcctgccata

SEQ ID NO: 362344 - DNA, 122 bp, Homo sapiens
atgtcagctgtactaaagcagttttgccaaggggtgtgaagaaaacacttaagtgtaaaacgtattccttgatcctcaaggagcttacaacagggctggggagattagccgtgtaactgaca

SEQ ID NO: 362345 - DNA, 122 bp, Homo sapiens
ggggtttgtgggctcttcccaggtggccaatatcctgctcaacggcgtgaagtatgagagcgagctgacgggctccagcgagcgcgcggagcagcctctgtccgtggggcgcctctgctcca

SEQ ID NO: 362346 - DNA, 122 bp, Homo sapiens
tgaagcaatactgaactacagatctagtttatttatctgcatgcctttctgtcaaattcacgcttgtgtgcataaacacttttttttcttatatatgctttctgtgccgaggaaagttcagc

SEQ ID NO: 362347 - DNA, 122 bp, Homo sapiens
ataagtaatatttatcattcccattctctggatgagagcaccaagcctcagcaagataaacgtctggaagatgtcacgcagctagcaggtaaaaaaaaggtaggtttatcactcccaaagct

SEQ ID NO: 362348 - DNA, 122 bp, Homo sapiens
atctctcctcgtgtcggcttccagaaacgacgcctgccatttgcagatgaaaaatgtcggcgagccggctggaagcggcaggcacatggcagaaaggttagctctcctgcctctcccccgaa

SEQ ID NO: 362349 - DNA, 122 bp, Homo sapiens
tggcacccagagcttcggaggataatgggtttcttcaaactcaaactcggtaaggatggacgacggacgattcgcttagagctggtggtggcggtggtcttgcatgccatccctgacctgtt

SEQ ID NO: 362350 - DNA, 122 bp, Homo sapiens
actattttatgtctccaaatatgcagatcattttctttaatgaaagatgcttgacgtctccgatccaattaatatgcaaatgcaggagaggatttatttgtgacattctgtctgggtgagag

SEQ ID NO: 362351 - DNA, 122 bp, Homo sapiens
acgcatgagctcttcgcctggcgcattgacttctggatttgtagtttttttggataaatgcgaactgctgagtactcattggctgcttcggaaggcggaagtgaaaagtgagggagccaatc

SEQ ID NO: 362352 - DNA, 122 bp, Homo sapiens
gagtccgcagagcgagaaccgtgcgacagtgcgtctgccaatacctggaatgtaggtgttcgttgcagtgtggccttcccagccggcctctcagcacacccggccaggcagccagtgttccc

SEQ ID NO: 362353 - DNA, 122 bp, Homo sapiens
cccgcgcgcctccatcgcccgcacgctgcgcaccatcgtgcgggaggagggcgccgtgcgcggcctctacaaaggcttgagcatgaactgggtcaagggtcccatcgccgtgggcatcagct

SEQ ID NO: 362354 - DNA, 122 bp, Homo sapiens
agaaaaacaatataagaagcctccttcttttcttataatgtccttacccctggactaaggcgaagtgcttgaatcagaggatgagtccactgccctagctgaaagtgactcctccaaggaga

SEQ ID NO: 362355 - DNA, 122 bp, Homo sapiens
agaccttacccctcacggtccttaagtctcggtcgccctcgcctcgcagcctgccacccgcgctcagctgcccgcctcctcagccagccatgctggagcatctgagctcgctgcccacgcag

SEQ ID NO: 362356 - DNA, 122 bp, Homo sapiens
attcttctagctgtagtcactactaattagacggcatgggtaccatagcacctacagggtcggcaccttgttttcctgagaaagcccctctcagggaagatttttgccttgtgctctttacc

SEQ ID NO: 362357 - DNA, 122 bp, Homo sapiens
gtaaacacaaaaaccagcctcatgtggtgatcttgaccttgatcttttctgcccactgggcgattttgacctgggaagtgtctgaggagggggatgagtttgtccagaaggtcccatatttt

SEQ ID NO: 362358 - DNA, 122 bp, Homo sapiens
gggtgagctgcaggtgggggagtcacggtgcgagggcagccccgggtcgcggctgttccgcgctaatccccttctccccactcgccctgacctctcgtccccaccctgggcgagcgccccct

SEQ ID NO: 362359 - DNA, 122 bp, Homo sapiens
ggcgcgtgtccagagcctgaggccccggggcaggaagtcagaccaagtcgggatttctgacgtgacgtttccacccaaaggtgctccagggtcggtggttggtcctccaggtacagagcggc

SEQ ID NO: 362360 - DNA, 122 bp, Homo sapiens
cgcagaacctgccgtgcagcttggcgtcgggggacaggccgctgcgcacctctacaaagtcgtacttacagacctgcaagggagcatgatggggagcttcccagagtccctgtccccacccc

SEQ ID NO: 362361 - DNA, 122 bp, Homo sapiens
gctgttccggactattccgggagtggaagtggtggccacaattggaatttgcgccgccatcgcactccgagtcttcccctggtccccccacctttttcccagcgcgggccttggaacttcct

SEQ ID NO: 362362 - DNA, 122 bp, Homo sapiens
ttgtttctcctttaggctgccctctgccatttgagtcagcttctttatctgttctcatgtcggtggtgtagcctggcgggtcttctccgtcttctgttgtttctctgagacgctcagcttcg

SEQ ID NO: 362363 - DNA, 122 bp, Homo sapiens
tcaggaagtgactgagggtcctcaggggtgggagtcgccgagactcttgcaggctctgggcggcctatgtccccctccctgcctcacgccccccaatttacctgggcgccgaggcccgggcc

SEQ ID NO: 362364 - DNA, 122 bp, Homo sapiens
cagtgttctggcgcgtacccacagtgcccccagaccctccgctcgcccgtgcgccgaggtcgttgggttttagacccagagagcacgttccgtaagctcccggcccaaatcccctcggaaaa

SEQ ID NO: 362365 - DNA, 122 bp, Homo sapiens
acagggccctgctggatggtgccccaggctcagtccagaccaggtactgcctgccatgtccgagatggcactgccagaatgcactccccaaggtaaaaacagactcccaatagcttggtctg

SEQ ID NO: 362366 - DNA, 122 bp, Homo sapiens
gctgcgtcggagccgaggcctccaggggtttcccaggggggtgggcgttggaggagtgagcggcttgtgcgggggcgtggcgaggcggcggagcgccaacggccctgcggggtttctgctga

SEQ ID NO: 362367 - DNA, 122 bp, Homo sapiens
cgcagtttcttttctccctctcccaacctacgtagggtccttcatcctggatactcacgacgcggacccagttctcactcccattgggtgtcgggtttccagagaagccaatcagtgtcgtc

SEQ ID NO: 362368 - DNA, 122 bp, Homo sapiens
gaatccccatgtatccttgggcaacatctctgtaatttaacagcctttaaaacttaaaatcgtaagaaaagacaacacagcccttagcattacatactttacttttcaatccttactattca

SEQ ID NO: 362369 - DNA, 122 bp, Homo sapiens
tttgacccaattcccattcgatggaaaagaagaacagagaggcaaggacgtgggcttcagcgtcacggaggcctgagtttaaacccttggatctatgacaacccactagccgtgaggttcaa

SEQ ID NO: 362370 - DNA, 122 bp, Homo sapiens
ccctgcatcctgttctgtgcacaggggtgggcagagccagtcatgggagacccctctgtgcgtgtgtctgtgtgtgcgcgcgcgctgggagctgcctcacacctgataaaaaagccagtgga

SEQ ID NO: 362371 - DNA, 122 bp, Homo sapiens
gctgggaaccgtccaatcaggcacgcagctggagcggacaggacggcttccgggatgtggcggggcctttgtctctcgccgcagcctgagctccaggtctccccttcgctgctctgtgtcct

SEQ ID NO: 362372 - DNA, 122 bp, Homo sapiens
tctgggggaggtttcatttaaaagtgctgggagcaggtgagccacaggcaactcttctctcggaacctgcacacaaactggggctatagagattctccaaggacagatggcagtggagctag

SEQ ID NO: 362373 - DNA, 122 bp, Homo sapiens
agttattcaattgagacatgcatcacattattccttacttttcaagaaaaatatgttttacgacttgaggttatcctgtctagtgatcttgcagccgcacggcaagagaaacagggtcttca

SEQ ID NO: 362374 - DNA, 122 bp, Homo sapiens
tctcctctcacagtgcactagggttgtcattgtgaccaactgtatacagcaaaaatggtacgttacttccaagattgcattataaaagacaaaatcttcagcttgggtgcctactctccctc

SEQ ID NO: 362375 - DNA, 122 bp, Homo sapiens
ggctgggccccagggctggggtcaccctggcagtaagcgtgggcagcagcctgcctggctcgagctgcccatggccccgtggcgtgggccctgctgccagggtgccgtgctctgcccgcccg

SEQ ID NO: 362376 - DNA, 122 bp, Homo sapiens
gcgtcccgacgtagctggcgcccccaacaccataagccttcacagacgccagagcagccccgcaccaccctcgagcttcaccatggggtgtggtgggctttagtttagtcccagaaatggag

SEQ ID NO: 362377 - DNA, 122 bp, Homo sapiens
gatatccaacatcctgtgaaacccagagatcttgctccagccggattcagagaaatttagcgggaaaggagaggccaaaggctgaacccaatggtgcaaggttttacggttcggtcatcctc

SEQ ID NO: 362378 - DNA, 122 bp, Homo sapiens
tgctctactcagaatggctgacaccttgaaagcaccatactctgatctaatcttagccatcgtgcaaaggatgtggtgaagtcagtcagaaagagtcttatgtcccctggctttttgaaggt

SEQ ID NO: 362379 - DNA, 122 bp, Homo sapiens
ggccgcctccagccgcgagagctcctggccccgctgggccgccttctgtcgctcgctctccgtcttctggctgagcagcttcgactcctcctgcagctgcagtgtctgctgctgcttctgcc

SEQ ID NO: 362380 - DNA, 122 bp, Homo sapiens
aggctgtcctagtgactttctaggtgccttccgccagcagccaggggaccaagaagctcccgagcagcaggggaaggcagggagagcaggtgagggggatcacgtcccacttccctccagag

SEQ ID NO: 362381 - DNA, 122 bp, Homo sapiens
cttgaattagtggggaaaatgggaccccagggttgtaagatccccatgacctcacacaggcgaggggtagaattcatgtattctcttggtttcctagttggaatatttgcaaatttttttca

SEQ ID NO: 362382 - DNA, 122 bp, Homo sapiens
ccgcagcgccacctaggggccgggcgccgcctcccgccctcaggggcaccccccttactccgcaaggactccgggtctccccagttctcccggcagccggaccctcccagcctcggccgccg

SEQ ID NO: 362383 - DNA, 122 bp, Homo sapiens
aggtgctagagtgtagtagctgcttctaagcacagactccagagccccatggcctgggttcgaaccctggctcttcctagctgtgtgatcttgggcaagttacttaaccattcttggtctca

SEQ ID NO: 362384 - DNA, 122 bp, Homo sapiens
gttaggcccagagtggctgctcttcctgctgtggcagcactgtcctgattttagcacagacgtttctactttccgggaagtctctggaaaactgggagggttggccccctaatcctgggagt

SEQ ID NO: 362385 - DNA, 122 bp, Homo sapiens
gacctcaagtgacccacttgcctcagcctcccaaagtgctggaattgcaggcatgagccacgccactgtgcccaaccccctgtgtttaaatgagtaaccaggcctgtgtcgttatctccaca

SEQ ID NO: 362386 - DNA, 122 bp, Homo sapiens
cagggacttcaaaccttttgtccaggccgccggaggtgcctgtgattagtcggcatttcgcggctgaggctgattcagcccattacatcaattccgcagctgctgtcttcaatttggaggcg

SEQ ID NO: 362387 - DNA, 122 bp, Homo sapiens
taggtgctccataaagatttgtggataaataaatacaataaagaatgcataatgcatacacgagtgagtgaatgaaccaaaggtaatctaggatcagaactgtgatgatctaggacttctaa

SEQ ID NO: 362388 - DNA, 122 bp, Homo sapiens
cggccggcgaaacctagcgcgggttcccgactgcaccgggcgcctccaagcggcccggcgcggcctcgcgcaggcggaagcaccgcccagccccgccgccccatgccccacgacgaccttga

SEQ ID NO: 362389 - DNA, 122 bp, Homo sapiens
tctgggtccttccccttgcaacgctgcctgctcgcctcggacagcgccggccccgctctgcgcattaccctgcgccgacaaaaccgagttccacacgccccggaagggagggagcagaggaa

SEQ ID NO: 362390 - DNA, 122 bp, Homo sapiens
tcttcggagttcctggaggtggtgccagactagagtggcagctgtagtaaccaatagacacggactttgttggaccagaagccaatgaagaattacgtggaggagaagcggcgataatctgt

SEQ ID NO: 362391 - DNA, 122 bp, Homo sapiens
tttgttctcaggtttttccccggctagtgggggttaatccacaaggcccttggctccttccgtgagaggtgcagccactatcagtgcaaggagaggacgcggggaagtggctcttagggcgt

SEQ ID NO: 362392 - DNA, 122 bp, Homo sapiens
cccctgaggcctccacctctgaaatctgcagaacagccaggaaacaagcccggcccatggcgccacctgctgcctgcctgcctccgctcatgcaccctgggctgggatggtacttctgttcg

SEQ ID NO: 362393 - DNA, 122 bp, Homo sapiens
attctgactcagcaggtctgaggcggggcctgacattctgcacggctggcctgctccgggcgctgctgatgctgctggttcctggaccacccttgagaccctggatgacctctgaggtgctg

SEQ ID NO: 362394 - DNA, 122 bp, Homo sapiens
cgtgagaggcccaatgaccgagctggtgctggagtttattcagcatctcacaagatttaccgaggggctttgctggccagggcaggttgggtacccaggctcggggtgaacaagtcccagag

SEQ ID NO: 362395 - DNA, 122 bp, Homo sapiens
ctgtggccttaggaatgtgggccggggcggggcggcttgggagcgcgctgcagccaacgccgcgttcagccccgggcgcaactgcagccgtgccgggggcctccggggccccgaccgaccga

SEQ ID NO: 362396 - DNA, 122 bp, Homo sapiens
ctggactacaagcaacaacaaagcattctggattccctgtgaggatggataatgctgtaccgattgtaccccaggcaccagctgctcagccactacagattcagtcaggagttctcacgcag

SEQ ID NO: 362397 - DNA, 122 bp, Homo sapiens
gttctggccctggccggctccttcccacagaaaagctgggaagagatcttggtaggtgtccggccccacacaccatcctgctgggggtggctgggttggacttcaccatccccacagccctg

SEQ ID NO: 362398 - DNA, 122 bp, Homo sapiens
aaggaggacacggccctcccagacccagggttgtgagctgacttttccatgctatggactcgccctgtccccgtagctgccacgcagacactgtccagcattgcaggtgcttccctggtcat

SEQ ID NO: 362399 - DNA, 122 bp, Homo sapiens
ctaaggggtctcccctactccacatggagaaaatcccttgtaggttgcaagggcagtggccgggtggaatccctgctagggacagagcaggaaggcctcgcagcctcaccaagcagcagccc

SEQ ID NO: 362400 - DNA, 122 bp, Homo sapiens
ggggctggtcctcatgccctctgccctgctgcttcccctgtgaaaggagaagttgggaggcgagctttcaggacattgcggttcccgaggctcctcctctgtggatggtcactgcccctcca

SEQ ID NO: 362401 - DNA, 122 bp, Homo sapiens
aagaaggagaagctgcgggaggccacggaggccaagcgtaacctgcggaaggagatcgagcgtctccgcgccgagaacgagaagaagatgaaagaggccaacgagtcacggctgcgcctgaa

SEQ ID NO: 362402 - DNA, 122 bp, Homo sapiens
gaggtttcatgtgtgtgtcggggacatcttgggtgttcatggagtggcaagagcagtcctcggcatcctgccattctttttcttattccagctcaacttgccatctgcgtacctctgtgaga

SEQ ID NO: 362403 - DNA, 122 bp, Homo sapiens
gcagccgggaccccacccggcccccgtgctgaggcgcggcagtcacgtggcccgggggctcggtcacgtgagctcgctgctgccctagcccccacctggcgtccatggtccaggccgcgtgg

SEQ ID NO: 362404 - DNA, 122 bp, Homo sapiens
agaaatgaaaaacactgcacctgcaagtgttttagcatctaccactattcggcttacttacgtaacctccttcccaagaccaagtcagtaggattgtttttaaagcaacctctccatttcta

SEQ ID NO: 362405 - DNA, 122 bp, Homo sapiens
acaggagcttagctccggcctgagtggcagaggcagccacccagccagcactgggaatgccgggccactctcagagcttcctctgactgtctcttggtgtcatctgagggccaaacccctca

SEQ ID NO: 362406 - DNA, 122 bp, Homo sapiens
gtcggaggattacttcagcagcacggcgggggtgggcttggtggtcacccagagccctggcgcgcagcccgcgggggccacggtgcaggagcagctgcggcagctctttgagcgggactgga

SEQ ID NO: 362407 - DNA, 122 bp, Homo sapiens
cagcgaaaggcctcaatttcctgtcctctgcttactgcccctttttttgcctgcgaatggcggcgatttgaagttggggcttttcgtttcctccaaaacattgatatctggaaagggagccc

SEQ ID NO: 362408 - DNA, 122 bp, Homo sapiens
ccctcagttcccacctctttcagttcagtaagaggaaactgcaaggacttttcgagagtgcggctgatgaccgcataataaagaataactaataaatattaatgaagtatcccctctggcca

SEQ ID NO: 362409 - DNA, 122 bp, Homo sapiens
atgacgagcaagtaggctcaggacggcgtatccggggaattctgggaaatgtagttcacacgctgcgcggggtaggggcacttccgctcccggggggcgaggttgctgcagtgcattcggtg

SEQ ID NO: 362410 - DNA, 122 bp, Homo sapiens
cgagcttggctggtaattagggtcgttagtggagacggagccagctggggctgatgccagcgtgggcgcagagcaggcagagcccaggctgcggggaggggcggccccaggacggtcggggc

SEQ ID NO: 362411 - DNA, 122 bp, Homo sapiens
gtcgctggacagggagttacggtcttcctgaaagctcctgcgggatggtaatgagttttccgcccccatctcaggacacaatggacagcccagaactttgaggtctgggatcaggactgcct

SEQ ID NO: 362412 - DNA, 122 bp, Homo sapiens
gtggtaaggactgagggaaggaaagcgttctatagtcttataactgcactccagactgggcgacagagcgagcctccgtctcaaaaagaaaactacttgttggactaaatttctgagttgcg

SEQ ID NO: 362413 - DNA, 122 bp, Homo sapiens
ccattcacgagaggggcttccttccttttgaccttgggaggggtccagagacccgggggacgatctgggagcagaagctggtcgttctgagttttccatccaaatggtttgcttatgaaatt

SEQ ID NO: 362414 - DNA, 122 bp, Homo sapiens
ccctcccgccctggtctcaggttagagacttacgtcgatgccgtcggatccaggcactcccggcggtcccgggggacccggggggccccgctctcccggtggacctctctgaaaaacacaca

SEQ ID NO: 362415 - DNA, 122 bp, Homo sapiens
ggtagagacagacccatgtggggctggggtttatgagcggagaccgacccaaggaacctacggagtgatgaaaatgttccgtgtcttgtctgtgatgatggtggttacgtggtacgtacatc

SEQ ID NO: 362416 - DNA, 122 bp, Homo sapiens
gtctgcgcctccagggttttgagagctgccccgtttcccctcctgtcgggtggcgtccggcgcgcgtgactcggttccgctttgggctgctctgttgggccctagcgcaggagctcggtccg

SEQ ID NO: 362417 - DNA, 122 bp, Homo sapiens
gtcgcgcggcttctctctgagtggtcggcgaggctgctgctccgcgcaagttgtggctcccggcccatctacattggaggaatcctgcactgacctggtggcagtgatcaccttgtagccag

SEQ ID NO: 362418 - DNA, 122 bp, Homo sapiens
gcctgcttcatagccttgtcatatgaaccaagtgacaaacgttagcagttgtcagcagaccgtagtactcgctatcatcctggtttcctttcccatacctctgcgcagcccctgcccctgtc

SEQ ID NO: 362419 - DNA, 122 bp, Homo sapiens
agtgtttggaactggctgagagtcccaggaggcatcagggcctagttaaaagctgctggtcgggtcagtgtatctggagacttcccctatctcagcctggaggaagaaaagttctcaagcct

SEQ ID NO: 362420 - DNA, 122 bp, Homo sapiens
gtgatgcttttgtcatggttattttgtttgcctctgcaggagagaaatatgaacttcacgcgggaacagagtcgacacccagcgtggtggttcatgtctgtgaaagtgaaactgaagaggaa

SEQ ID NO: 362421 - DNA, 122 bp, Homo sapiens
gataaaaatcttagcaagcaagggtgacgaagtgtcttcaaatgctttaaaaatacaaaccgaagagctgaagttaatgaccccaaaccagattatagtttcatatacattatgggggaaat

SEQ ID NO: 362422 - DNA, 122 bp, Homo sapiens
aaatcatagaatcatttttgtgcatccaacagcaatatgctgaagagattttcagggagtcgtgcatcatccatctgccaagtctcatttcaaggaaactggaagttgtatttggttgtata

SEQ ID NO: 362423 - DNA, 122 bp, Homo sapiens
ttgttaaagctcactttatgaaacaaagcctggctttaaaaaccactaatcttaagaccccgcaaagccagtctaagatgcaaatagttgtcaagatggtcttttgcaaatattattttcac

SEQ ID NO: 362424 - DNA, 122 bp, Homo sapiens
actgcggccacagcttctgcctcaggtgcatctccgagttctgcgagaagtcggacggcgcgcagggcggcgtctacgcctgtccgcagtgccggggccccttccggccctcgggctttcgc

SEQ ID NO: 362425 - DNA, 122 bp, Homo sapiens
cacaccctcacacatgtaacatgcccttacatgtaacacgctcacacatgcacacacccacgcatgtatgcacatccacacgtacacaccacacatgtacccacacattacacatacaccca

SEQ ID NO: 362426 - DNA, 122 bp, Homo sapiens
tcatttttgtatggatcctttcacttgatcatatgacgaaatgcttatagagagtagctccgacctagatgatgattcttcctgtagcatctggcccctcacaatgtcagaggatttaattg

SEQ ID NO: 362427 - DNA, 122 bp, Homo sapiens
gactggcaggaaattctgcaagcaaggaaagggaaagagaaatgaactggtgcaggtctgcgggaagagaatgaggctggatcctcaaaatcacaggaggaagcaggcccagacctcagagg

SEQ ID NO: 362428 - DNA, 122 bp, Homo sapiens
ctaatttctgtgagctgcgtgagatactgtttctgaagctccaggcacagagtaagcccccgctcattaattgccttcccttactccctgaccttgccttttcgcacttcactcgctgccac

SEQ ID NO: 362429 - DNA, 122 bp, Homo sapiens
ttgccagtgaaagagcaaatttgcatatatgaataattaattaactggaaagaacgctctcggaatcaaactggacaatggggaaaacaagcctcccgtagaactacaactcccagaaggcc

SEQ ID NO: 362430 - DNA, 122 bp, Homo sapiens
gctccctgcttttatatgggaaaagcagaaattaaactgtgtttcctcgtaagaagtcagcgttgttctgatctgtgcaaatcttgagttggggttgggcccctgtcctaaagagggcaggt

SEQ ID NO: 362431 - DNA, 122 bp, Homo sapiens
acatacacatctttttaacttctcttcatttgcaaggggacagtgggatctattttggaccgaaaagatgaaacaaagacacaggcagttgtatgtcagcagcttgatttaatccacctgaa

SEQ ID NO: 362432 - DNA, 122 bp, Homo sapiens
tcaagaccagtggctctcagaagtaggcaattttgcttctcagcagacattgaggaatgtcggagacatttatggttatcatagcgaggtggcaggtgctgctgtcatctagtggctagagg

SEQ ID NO: 362433 - DNA, 122 bp, Homo sapiens
cgctggaccgccctgtgcttctcctcttcagtgcgcccatcgtcgctctccatggcgatccgcaggtggtactgggggcttgattcaatctctggagccaactgggctgcacgcagctctca

SEQ ID NO: 362434 - DNA, 122 bp, Homo sapiens
gagagagcctgaagggaggccaggagaggggagcattcaggctgagtaatagttggggctcggcttagtggaatctccagtcaggcctcagtgacacctagagaggcagggaggtggggcaa

SEQ ID NO: 362435 - DNA, 122 bp, Homo sapiens
ttctctaagggatcagagtccttctcctaccatttccctttgctgcagccgttgaggactcggaccaggaaagaggagatgctgattctgacgaaggccaggagctcctggctctgggcctc

SEQ ID NO: 362436 - DNA, 122 bp, Homo sapiens
ctgtccccagcggggccaggggtcgcggtcggaggtagcagacttgggggtcgggacagccgctggggtcaagggtcgggggtcggggccgcggtcaccttgagcagcacgaagaactcgaa

SEQ ID NO: 362437 - DNA, 122 bp, Homo sapiens
catagagctgccggggtgagtgcgatcgctgcggggaaaggtcacagtgacatcctgaggcgggaaactggacctttagagagtcgcacattgtgctggtgttgggcctgggtgaacagcct

SEQ ID NO: 362438 - DNA, 122 bp, Homo sapiens
aagccggggaccatctttgctccagggaggtcagctgacccgggctggcactggccctggcgcagttcccgcccctcccgggagcgctggcaccgccccttggcaccaccccctccccgcgc

SEQ ID NO: 362439 - DNA, 122 bp, Homo sapiens
accgcagtaaccccgagcgtctcttaaggagcgtggggagaggcggctgggagcaagctccgccgtgagaatgctttcgtttgagtgaaggcctccacaggcccctgccgtggattgcttat

SEQ ID NO: 362440 - DNA, 122 bp, Homo sapiens
gctcaggacaagtaaaccaaccagcaggacccagaacattcaacccggctaatcttgagacgagaccaagctgctgctgaggacaacaaccctgccctggtcactccggaggctgaccagtc

SEQ ID NO: 362441 - DNA, 122 bp, Homo sapiens
gccatctcccctctctgccaggacacccagaggcccttgtgaatagcaaagcccacttaacggctgagggcaggtgggggtatttccttctcaattctgctcaaggcccgttgctgttcttt

SEQ ID NO: 362442 - DNA, 122 bp, Homo sapiens
aaggcggtccagacagacccctcaagaagatggggcttcgaggctgagggagctcggccccgaaaagacgcctgcgggagatggcacacctagctaggaccccatactgggcaggcgatcct

SEQ ID NO: 362443 - DNA, 122 bp, Homo sapiens
tacatacgtcacccagtgaatgatgtggtccccaaactgaaggtctagccatctgtggttcggatcgccgaggtagcgcacgaaatcttcaaactggatcccccgggtctctgtccggttcc

SEQ ID NO: 362444 - DNA, 122 bp, Homo sapiens
ttagctttttattagccctggcagacattctaacaggtggcctgggtgccagagccagcacgcaaacatgttctgtttggcccaacagtgttggccaacacataaaaatcagatttgtggcc

SEQ ID NO: 362445 - DNA, 122 bp, Homo sapiens
aggcctgagggtgcagaggaggcgccttccagccacagggcagcacccaggagctcagggcggtctgccggtgtcctgagacctggcctccatcatgctgggagccacatcctgccatgcag

SEQ ID NO: 362446 - DNA, 122 bp, Homo sapiens
cctctgagcctctatttccccatcttaaaaatgcgagtgctgtcagcatgtgcgtgtgtgcgcttgtgtgtgctgggggtttactgtgcgttcttggccctgactgcccacccccgggatgg

SEQ ID NO: 362447 - DNA, 122 bp, Homo sapiens
aatatgtataaggaagaggcaaatatgtataaggaagagggggaatctttcaactcaacccgggcattcaggtgatcatgtaagatctcacacaataagaaaaagaggtgcatctgttgctg

SEQ ID NO: 362448 - DNA, 122 bp, Homo sapiens
tacacccaggaccttcctcaccttaaataaaactgccccgagattaaagatctacaccttcgccaggccaaaaggcccttcccacctctccagtttcttctttatgcctaggccacactggc

SEQ ID NO: 362449 - DNA, 122 bp, Homo sapiens
gcgaggccagctcgtagggggctgggcggtcagcggggtcaagggacagccacgctgggacggaggacggggacaggggagcccctgcggcgccacttcttcctctccgagtcctgtctgcc

SEQ ID NO: 362450 - DNA, 122 bp, Homo sapiens
ttggtcttccctgtgtcttttatgggaacacgttcctgcctgcgccccacgggacagagccgttttcccgccccgccacgccgcgcccgcaggccccgctgcccgcagcctcttcccgacgc

SEQ ID NO: 362451 - DNA, 122 bp, Homo sapiens
tatggatctgtacatgggtctgggctgagagtgcctctgttaacaaggatgactgatgcacgcatacttcttgtatttgggagaaggctggctggggttaggacagtactctgtggtcatgg

SEQ ID NO: 362452 - DNA, 122 bp, Homo sapiens
tcttccgattccccacagcagcgcgggccatgggactttccttcggtattggaaatgtaccgtagctgcactgtccagcatggtagtcaccggccttatgtggcaattgtgcgcttgaaatg

SEQ ID NO: 362453 - DNA, 122 bp, Homo sapiens
gaggttttaagcgagaagttctacggacttgaggtctgggatttttgctccgcatccacccgcggacccctcctcaccaagccgctcgatctgtttgaaatcatccgtttgaaggcccaaag

SEQ ID NO: 362454 - DNA, 122 bp, Homo sapiens
ggggggggggggggggaatgcacgcatgcgcagtcgtttctgtgtggtctcctaggagaccgccccaacagccctctaggttaaaggtcttggggaggggaggggttttcaaaataacccga

SEQ ID NO: 362455 - DNA, 122 bp, Homo sapiens
tctgcccttctcttcctacagcctggtctcctttggcgtttgcgcccctgcatctgagcacgtcccagagggcgccggaatgtcaggccctagacatagcagcggtttgggggctagggggc

SEQ ID NO: 362456 - DNA, 122 bp, Homo sapiens
gattcgggagctttcaaaaactatttttggaaaacccagatcccggtcttcagccagcgtcgcctgcagtggctagcactacccacaagggagaagccgacgctgcagggctttgccaaatg

SEQ ID NO: 362457 - DNA, 122 bp, Homo sapiens
tttccctgggccatgggacaaggagctggagactgcggaaatgcccctgatactcccaaacgacaggatattatgtaactattaaaaacactgtttagagaaaaaattttaattgcatggag

SEQ ID NO: 362458 - DNA, 122 bp, Homo sapiens
gttttccagcgccttccctgcctgcccggctccccggactctgctcctcccgctgcccaccgaagtggccctgcctcaagtgtcctccagctcacactgtgcttctcaagcagtggctcccc

SEQ ID NO: 362459 - DNA, 122 bp, Homo sapiens
ttgtatttttagtagagacggggtttcaccgtgttagccaggatgatctccatctcctgacgtcatgatccgccctcccaaagtgctggcattacaggcctcggcctcccaaagtgctggga

SEQ ID NO: 362460 - DNA, 122 bp, Homo sapiens
ggggccaccaggtgggccgggggcgcggtggaagcggatggtctgggtcgacgggagaagcgaagcgggcgcgggaggcgggcgcgggaggcgggcgcgggaggcgggcgcgggaggcgggc

SEQ ID NO: 362461 - DNA, 122 bp, Homo sapiens
ctccacgggaggctccaatgcacagggtgacctgcctggagcctaacggctgctgctgtccgcagagaggggacagactcccgtgtgggggcctggcttgtcccggcttagtggggtgtggg

SEQ ID NO: 362462 - DNA, 122 bp, Homo sapiens
attacataattaggctgtattgtaagtcattcttgtctttagaagccaaacacacagacacgagaaacctgacctgatactgtagccgtgggtgctgcccaatcagggcactaatgtcataa

SEQ ID NO: 362463 - DNA, 122 bp, Homo sapiens
tgtaaactgcattgcccttcttagacacgcagcagccaggagctggtcatctgcacctcccgcgatttcctcctcagaaccccagtcctgccagatttgcgtccttccctggctcctcaaac

SEQ ID NO: 362464 - DNA, 122 bp, Homo sapiens
aagggtcttgacactctcaagcctcattatgcctgatagttcatccttactggaaagaagcgcagcacagcggtaagactggctcactgggagtgcggcatgaaggagtacccacccagcaa

SEQ ID NO: 362465 - DNA, 122 bp, Homo sapiens
ctctcaggctggtgacccgacacaaacttccaggatgaagtcctgaagggagcacctgttcgcagggcactttcagcagaatctagagccccagggatttgaggatggatgcggacacccgg

SEQ ID NO: 362466 - DNA, 122 bp, Homo sapiens
cattccactgttccacaggggttggtgacagtgtgtgggagacaggggtggacagaagtgcgttaaccaagatacagactagagaaggaagcgtcagttcttaggacaggggtcagtttgta

SEQ ID NO: 362467 - DNA, 122 bp, Homo sapiens
gagagcaaacacaccacctggccaaaggtagcagggaggttggctttccacactgaataccgtggatagtccggaaacagtcttcagtagctttcctgcaatgcgacactgaggtcggcgtg

SEQ ID NO: 362468 - DNA, 122 bp, Homo sapiens
gatgagaatgagatgaatttaacacaaaaattctctgcagctgtggactgcaggatgcagcgcaggctcctgcaacctcttgtgtctagtgggtcctgctcagaagcttcttcatgtaaaca

SEQ ID NO: 362469 - DNA, 122 bp, Homo sapiens
tgcccacgcggccgccgccacacacccgcacacccgccgaggcacgcccggggacggacacgccacccacactgccgctggtcagacgctcagcagcgcacaaccacacagtcccacgctct

SEQ ID NO: 362470 - DNA, 122 bp, Homo sapiens
cagcaactggcagtaggtattttcaatggtcggcaggtactcatgacggaagttgccgctcgcccacttgtgcagcagcgtacttttccccacaccagcggtgccgactaccacgacgcggt

SEQ ID NO: 362471 - DNA, 122 bp, Homo sapiens
cagaggagatgccggccctctacctcctcccaaggggatctgcaaacttcatgtcctttgcgttccctttgtgtctgcaaaccagccagcccatttacttccagtccttctgagatcctccc

SEQ ID NO: 362472 - DNA, 122 bp, Homo sapiens
taagggagaaagctaatgttttccacaagactgaacaacgtgtatttacacgagggtagacggcagatgcctgacagagagtgggttggcagacaacacactagcattttcacgggtgtggg

SEQ ID NO: 362473 - DNA, 122 bp, Homo sapiens
ggctgctagggtctgggttcaaatggccttgggcaagctgggggctctccctctgcccctcgtttacatgcgtgtgcgtgggagatgataatgacaccacctcttagggttgcagtgaggac

SEQ ID NO: 362474 - DNA, 122 bp, Homo sapiens
ttagcacaaagttttttgcattcattcaagttgtaacgtgttgtaccgtgttcctttttacggttgagtaatattccattgtatgtgtatacacaatttgttgagccatccatttgttaatg

SEQ ID NO: 362475 - DNA, 122 bp, Homo sapiens
ctctcctttagcaccttgtagatgtccatgcacacttccaccctcgcgccccacacgcgacgcagccctaccctggccagcagctgtgctttgctgcgggttccatgctgtagcagggacag

SEQ ID NO: 362476 - DNA, 122 bp, Homo sapiens
ttgcacccataattattatacttgttgatgccacactttcaggttttaacctttccaaagcgcagccccgccccagcgcagcccaagtccctgcacgcagaggcgccgatcacgggtgggag

SEQ ID NO: 362477 - DNA, 122 bp, Homo sapiens
ttgagctcctgacctcaggtcacctgcccccttcagcctccccaagtgctgggattacagcgtgagccactgtgctctgcctatttgtttaggtttttaagtttctcagtttgatccttgat

SEQ ID NO: 362478 - DNA, 122 bp, Homo sapiens
ccactgcagaaagaccggggacgggaccagcctcagggcaactttaaactcaaaaggaagcgactcacggactctcacccggacgtttcaatttgctctgggttgagaaaagaggggccgga

SEQ ID NO: 362479 - DNA, 122 bp, Homo sapiens
cctacgcccaccgtttcttctgcgtctgtctggctcgcgtgtttctttctgcctgtgtcccgccgggtcaggctctccccgtctctcagactttcccgtccccgtgtcctccgcggccgtct

SEQ ID NO: 362480 - DNA, 122 bp, Homo sapiens
ctgagccaggatgagatcgtgctgggcaccaaggctgtcatccagggactggagactctgcgtggggagcatcgtgccctgctggctcctctggttgcacctgaggccggcgaagccgagcc

SEQ ID NO: 362481 - DNA, 122 bp, Homo sapiens
agtacttggcgccagagcgcccaacattgtgcatacatggtcgctcctaattcgtgggcccgggggacattatcagccttactttgggatattttaggagcctcggaatgcagaaagtggtt

SEQ ID NO: 362482 - DNA, 122 bp, Homo sapiens
gattgcagcctctgtcccgccgccaccccgtctaggaagtgaggagcgtctctgcctggccgcccttcgtctgggatgtgaagagcccctctgcccggccgcccagtctgggaagtgaggag

SEQ ID NO: 362483 - DNA, 122 bp, Homo sapiens
cggccccgcgcccgccggctccccgtcgcagcaccagttccacccgggtcgccggaaacgcgagaacaaggccagcacctacggcctcaactacctgctgtccggcagccgcgcggccgctc

SEQ ID NO: 362484 - DNA, 122 bp, Homo sapiens
gcagggcagaggggaggcatctctatcgcccgatgcttgttcccggcttccccaccaccccgccaatctccgccactccctgcaggcactgcaccacacgtccctgaacacacccaggctgc

SEQ ID NO: 362485 - DNA, 122 bp, Homo sapiens
cgcactcagcaacggccatgaggtttctttaaacccaacagcacaactcagcggtgcccgcgcccctcattccctgctcgctgaagactgctactcaagttcaaccactcactggaggattg

SEQ ID NO: 362486 - DNA, 122 bp, Homo sapiens
ttttactgcgaaatgcaatttactggtgagacgaacggctcacgtggagatgatgagcatcgcgcggtgttttaagcggatacccacaacacttgagctcactgcaatagcaacaggaggtg

SEQ ID NO: 362487 - DNA, 122 bp, Homo sapiens
ggtgcaggatataatcttgtgatgcgccgtttttcaagccggtcggaaaagcacagtattcgggtgggagtgacctgattttccaggtgctgtccgtcacccctttttttgactcggaaagg

SEQ ID NO: 362488 - DNA, 122 bp, Homo sapiens
cctccggggcccatcttggccctgggaaagggctctcctctctgattggtccctaggccacgggccggcccccagacaccattcaccgacccactgcaggctgtcctccaaccatggggtgg

SEQ ID NO: 362489 - DNA, 122 bp, Homo sapiens
gtcccgccagcggccgcgggaagagctgctggaagactagacggtggaccgcctagctcccgggactccgcggctgggggctgaggcgcgcgcagggatcggcgccctttcctctgattggg

SEQ ID NO: 362490 - DNA, 122 bp, Homo sapiens
acggacttccctattccttgttaaaaggaagacacattatcccaaactccctttccctcccggcgccatccttcccgtgaagtttagataaaggtagaaggtttgaaaaaccatccgagtgg

SEQ ID NO: 362491 - DNA, 122 bp, Homo sapiens
gtaaaatgacgacgacccctgctcagagatcagggtaggctagatggttggcagctggatcgtggaggctggcctaaacaaggaagtcatggaaaggatcttaaagcagaaaaatgctggca

SEQ ID NO: 362492 - DNA, 122 bp, Homo sapiens
atggaatactttttcttcctgtgtttaaatttctacggaaaatctgaccggcgcggccaccgcccctgccataggcgggcggagagcgcttatatctttaaggcaaaggcgggccggctggc

SEQ ID NO: 362493 - DNA, 122 bp, Homo sapiens
gtccccggcaggctccggcccagaccaggcccccggcctctcaccccgacctcaggtttccgccacagcccccagcccaggccctggacacgcgtccggcccctgcctccgtgcccggcccc

SEQ ID NO: 362494 - DNA, 122 bp, Homo sapiens
aggagtgcgggggagggagtggtccttagctgaatgcgcctgcgttgtggcggcctccggcgccccaaggtactttctccccagcaaggaatccgcgtgcgcgtaagcagtattgttgatta

SEQ ID NO: 362495 - DNA, 122 bp, Homo sapiens
agaccagcctgaccaacacggcgaaaccccatctctaccaaaaacacaaaattcacaggacgtggtgacacatgcctgtaatccaagctactcaggaggctgaggcaggagactcgcttgaa

SEQ ID NO: 362496 - DNA, 122 bp, Homo sapiens
cgaggcccagtcctcttctgagccccagccagggctctgttcttctccttctgtggatgccggggtcctactgcctctcttgagacccggattgaattccgacctccccttgggagcttccc

SEQ ID NO: 362497 - DNA, 122 bp, Homo sapiens
ggtttatctcactagcgagtgccagacagtgggctcaggccagtgggtgcgcgcaccctgcgcgagccgaagcagggcgaggcattgcctcacttgggaagcacaaggggtcagggagttcc

SEQ ID NO: 362498 - DNA, 122 bp, Homo sapiens
ggggaatccctgacccagggagcccacggtccctaatggaaatgttatggggtcagggagcgccaaggctgtgaggtggcggggttatgggggccttggggagagggtggtagcgagcacca

SEQ ID NO: 362499 - DNA, 122 bp, Homo sapiens
ttgctgggggctctagggagcccaggggctcctccacgccagactcggaggagagggaaacggagccccgtagagcctgcaccccgtctgctactttgcgttttattttttttataccgcag

SEQ ID NO: 362500 - DNA, 122 bp, Homo sapiens
cttctttgtcttcttgctgtttcttttattcctcaggcctgcggggcgggggcggggtggcgcccaggacgactccccgggctcagcttggctgcctgcctccttctgtaagtgcttttttt

SEQ ID NO: 362501 - DNA, 122 bp, Homo sapiens
ggtaaggtgggcatgggtcttgggcctgacacccaccaaggatgacctgtggactgccatcggatgctgaacagggagatgaaaggaggtcctcttaccatacccctctgccaaccccccag

SEQ ID NO: 362502 - DNA, 122 bp, Homo sapiens
gtgctctcgccgtgttgaggtcccagtgaggggaaggagaagcggaagagggtctctagtcggggcctagggcaaagggactacaaaaaggatgcagatgactatagaaatgaggacgacga

SEQ ID NO: 362503 - DNA, 122 bp, Homo sapiens
gacccggggacgcgtggactcaccctgggggcagggacgacagatttgggggaccggacacggaccaggccctgttggaccctgtcacagacccacacaccggggacagaacaaagaacgga

SEQ ID NO: 362504 - DNA, 122 bp, Homo sapiens
ctacgtgctggcatttagtacactgttgtttatggctgtttgatgagaaaagcctagggacggctggtttaaggtaagaacattcacagtgtgttatctgcatgcccagggctgtgagggag

SEQ ID NO: 362505 - DNA, 122 bp, Homo sapiens
ccggtggcctgggtccggcagagacatgggcgcacaccgccactttgcggcggccagcggcgtggcatcctacagagaggctagtgctcagggcctgatttgccacctacttgccctgctct

SEQ ID NO: 362506 - DNA, 122 bp, Homo sapiens
agttccatgatgacccccatttccgtggcagtccttggcaggctaaacagcaggtcatagcggaggtcaggaaatacatacatgaacaagacattgaccctgtccttgtagtccctcacaca

SEQ ID NO: 362507 - DNA, 122 bp, Homo sapiens
ccagccggcgcgcccgcctcccgcaggtgcgtctctgcctgcgccgggccggggtctccgcggcctctcccgctcgggctccggcttcgaggtcccgaccaagcactgctctcgcgggactg

SEQ ID NO: 362508 - DNA, 122 bp, Homo sapiens
aaatagcactgcgaaaagcagcagcattcgtctttaaatggatatggtcccccccttctccgcccccctcctggctcttcctcagcccggcgcagacagacaccgcccctaccctcccccaa

SEQ ID NO: 362509 - DNA, 122 bp, Homo sapiens
tagtagggaagcccctggaaagatgctgcgttccgaacctgtgcctaatacacgcaagggcgctgtcccgcccaaccccgcctttaaacgccacaaataaagagcattgttaccgccaccac

SEQ ID NO: 362510 - DNA, 122 bp, Homo sapiens
ggcctctccgttgggccggaagttgcccttctgcgtgaacttgttggacatggtggccgccgtaacgacggctttgaggctgcgcttgcgcttgggcacgttctgctccgggtggaagagga

SEQ ID NO: 362511 - DNA, 122 bp, Homo sapiens
gggtggaggtcggtctaggagaaacctcttgaagctgcagcacacggctctctggcagtccggcaagactgcctttctcctttccgcattacatgcactcctctccttccttctttcatctc

SEQ ID NO: 362512 - DNA, 122 bp, Homo sapiens
cgaactcctgacctgaagtgatccacccaccttagcctcccaaagtgctgggattacaggcgtgagccaccgcgtcctgcctgttattacttttttacataagtggctattctgttttagcc

SEQ ID NO: 362513 - DNA, 122 bp, Homo sapiens
gtcaagccagctgctttagaacggttgggaacaccgtgagaccagtgaattccacgagcacgaacccactgctgcgcttcatttgctgtgaagtgagtcccttgatcagagcaatgctgtgt

SEQ ID NO: 362514 - DNA, 122 bp, Homo sapiens
cagccgacccttccccatcagtatcacgtgcacctggaagtacgtgggtgggacctaaagcgcccacggaagtgacgtcggtcgccccgagtcgcatgatgtggcaaaatgaaaaaaaaaaa

SEQ ID NO: 362515 - DNA, 122 bp, Homo sapiens
gtggctccgaacggctggctgcgctgatatttattgaatacaagacaagggggcagggtacggacggtgagtcgtccaagtaattgataaggtgaagcaagtcacgtgatcataggacaggg

SEQ ID NO: 362516 - DNA, 122 bp, Homo sapiens
ttagtcattcaggaaatgcaaatgaaaaccacacgaggtaccatatgagtccacacatcacggaatggctgttgtgaaaagcagtggccacaataaaggctgagaagggcccgggtgggtcc

SEQ ID NO: 362517 - DNA, 122 bp, Homo sapiens
tctttcactcaccctgagcacataaatatttatttggtgaaagagcttacactttaacatcgcactgaaatagctcattccaaagaaagagctaattctaacctctcacaagtgcttgagca

SEQ ID NO: 362518 - DNA, 122 bp, Homo sapiens
ccggtattctttataccctttcatatttcagaattaatttcaaattatgtaggctggtttcgtgcccagcagactcaatgctcagcagaatagcacaagtggtacatttactagagctcagg

SEQ ID NO: 362519 - DNA, 122 bp, Homo sapiens
acacccggatcacctccctcagcgccttcagcccctccatgcttttgtccttcacggccacggcgaggaggactgctctgtttccagcttcttgagacacaaacgctaccaggttctttgca

SEQ ID NO: 362520 - DNA, 122 bp, Homo sapiens
ttagcatgcaaaaagacactcttaccgcactccaggattcctagggtcagaggggctgcgcgctgggaaactgagacaaaggctgaatctgtgttgatggcacagtcactctgggtcgtgtg

SEQ ID NO: 362521 - DNA, 122 bp, Homo sapiens
ctgctaaaaagatggatggatgtagtcccaaggacagttctgaggggactcgaagaataacgtacttttggtttgcaatttgccagtaagaccacattaggtgacagaaatgaggcaaattg

SEQ ID NO: 362522 - DNA, 122 bp, Homo sapiens
ccacactgtgattttggacttctggcctccagaactgtgagagaatatgaatttctgttacgccacctactttatggtatttctatttcagcagcctcaggaaagtaatacattgccccagg

SEQ ID NO: 362523 - DNA, 122 bp, Homo sapiens
gttctctcgcgagcgtttatttctcccacccccacggaccgcgggattttttttttctttcgcactgtcttctgggaattgtagtctctcctaggctaggcggcccgtccaaagcgcatgcg

SEQ ID NO: 362524 - DNA, 122 bp, Homo sapiens
ggggcgggagggggcgagccgggcggggccgggctgggggtgcacacgggtgaggaccggcgcggggcctggcttgctcgcgggaggatgcaggaagtcttccctgccctgattttatgaac

SEQ ID NO: 362525 - DNA, 122 bp, Homo sapiens
tagaccctgcctacaccgcggcggggacaggtggaggtttcaacccctgtttggcaacctcgggcgcagccaggccccgcccagaaatttccgggacacgccccggaagtactgagagggac

SEQ ID NO: 362526 - DNA, 122 bp, Homo sapiens
ttaagaggcgattaggccatgagactaaatgcccttgtaaaggggcttgctggagggagccggctctctcttgccttctgccagtggtcctccagctttagctgcatcagaatcactgagaa

SEQ ID NO: 362527 - DNA, 122 bp, Homo sapiens
cgactacgaggggagcggctccaccgcaggctccgtcagctccctgaactcatccagttccggggaccaagactacgattacctcaacgactgggggcccagattcaagaagctggcggaca

SEQ ID NO: 362528 - DNA, 122 bp, Homo sapiens
cgtgcacaccacgagagagaaaacagtcacaactctgtggttgaactggcagcttcaccccgacttccacttcacgtgctttctgggtacttgctgccttgagttgtcggttgctgctgctt

SEQ ID NO: 362529 - DNA, 122 bp, Homo sapiens
cctgatattccactctgaagcatataggatcttttttatgttactagtgttttgaaattacgggatgatgtatcttgttttgagatgagtctgtgtactgtgcacttcatggattctttcaa

SEQ ID NO: 362530 - DNA, 122 bp, Homo sapiens
gaccctcagaatctagctgggtctgtggctcagtgggcgtgaagctgcccggccgctcctcgcagagagctgccgcgaaggacgagagcacggagcgcagcagggtccggaggtcggcactg

SEQ ID NO: 362531 - DNA, 122 bp, Homo sapiens
ccccatctctattaaaaaatacaaaaaatcagctgggcgtggtggcaggtcccagctactcgcgaggatgaggcaggagaatggtgtgaacctgggaggcggagcttgcagtgagctgagat

SEQ ID NO: 362532 - DNA, 122 bp, Homo sapiens
atgaaaggaagtaatgcatatgcttcagaactgtgcctgacacacagagggactcactttcggagttaagatggttgtgtcagggctgatagagggaatctcacgggaaggctgcagggcca

SEQ ID NO: 362533 - DNA, 122 bp, Homo sapiens
tctgggaactccccatgccctccacctcctactcccaaattccgcccccgcccgcccccgcggccaagtaggcctggtctctagacgcatggaaagcgttcaggtccactcagactgtgctg

SEQ ID NO: 362534 - DNA, 122 bp, Homo sapiens
agggcgctcagcagttccgcctctgtttccagcagcttctccacacctccgtcttcccaccgtgcagcctggacgccaggcctgtcgcttgcagccccctcgggaccttctggcctccccgt

SEQ ID NO: 362535 - DNA, 122 bp, Homo sapiens
ttgcccagagggtaattgcagcatgggtcctcatcctaggtccccaccccggcctagccccggcggcctgcactactcagacgaggacatctgcaacaagtacaacggcgccgtgctgaccg

SEQ ID NO: 362536 - DNA, 122 bp, Homo sapiens
aacgtttcctatccaaaatccttgtccaaggaggctgtttctgtctgcaaaggagtaagtcgatttggataccttttgtgatcatggaccaagagctttggtaggagaaatactttccccac

SEQ ID NO: 362537 - DNA, 122 bp, Homo sapiens
agtgtgcccgtgtgcctactgcccactggtcctagaagaatctcttccatgtggcagcctcgagatctttggagacagtggccactcctcccatggtccctaagtcttttcttcctcagttt

SEQ ID NO: 362538 - DNA, 122 bp, Homo sapiens
agtcatttctttcccgctctggtctcagtggttccagtcagcgagcaggacagaggagcccggaagaggcgccgtgcacttccgggtcgaagagcgcacggcggcggcagaggcggcggcgg

SEQ ID NO: 362539 - DNA, 122 bp, Homo sapiens
ttgctctcatcttcgtcttcaattcggatcccggcctgtcccaggagagaggcctgggggcgggggtctcagccacccacctctgcacccccgccaggccccgagcgccccggctccgcacc

SEQ ID NO: 362540 - DNA, 122 bp, Homo sapiens
atcaggagttttatccctcacgtcagaaatcagggttccaggcgccttggtttttcttggcgccagcggcttggctatagaagaaaaactgaaggggccaggtgcggtggctcacacctgta

SEQ ID NO: 362541 - DNA, 122 bp, Homo sapiens
gttcccgggctgtgacccattctcgggacactggtggataagaatggggtctctggagtccgacgcctggattcacgtcctggctagtcgcgtgaaccttggtgctctcatctgtgcagtgg

SEQ ID NO: 362542 - DNA, 122 bp, Homo sapiens
catatcggctaaacattcacgaggttcctataacatgccctcacataccttaccttattccgtgaccgcaacaactttgtgagatcgttttatcacccccattttacagatgaggaaactga

SEQ ID NO: 362543 - DNA, 122 bp, Homo sapiens
ccccccgcctccctccctcccctctttcggccccgcctccggccgccccgcatgccaaggcgcaggcgcgcccagggccagtcggccccaatgcccttaccgccagggtttcattcccacct

SEQ ID NO: 362544 - DNA, 122 bp, Homo sapiens
catttagggcctattttcctcatctatgagtgcgggaaggagagttactggggtctctagcgacctttccaacactgattttcaagggcgaaagaattctgcttaggtaaggcccaaatccc

SEQ ID NO: 362545 - DNA, 122 bp, Homo sapiens
gtgggcttttccggttgctagtaacacatagaattacagagttcacgttttagtcccagacgggagactgaggctcgagactgaggaaggcatctgccgtccggggttggagctcctgagga

SEQ ID NO: 362546 - DNA, 122 bp, Homo sapiens
tgccacacagctttgagttgctctgatgaaagacaaactgcggggattcttatgggcctccgaggacgctgacagtattacctcatgccaggaataacaatgaggggcctaggcgagctcgc

SEQ ID NO: 362547 - DNA, 122 bp, Homo sapiens
aaaactggacagatgggtggacccccatgccggggtatcgcccgttcatctgtcagtctgcgcccaggtgggaattagcatcctcctcagatcctcccactcttctcccgggacccccgcca

SEQ ID NO: 362548 - DNA, 122 bp, Homo sapiens
cttcaaaatcattttggtttaagagacaaataccgatactttgcttgtttgatgagagcccggtttgaagaacataagaatgaaaaggatatggcgaaggccacccagctgctgaaggaggc

SEQ ID NO: 362549 - DNA, 122 bp, Homo sapiens
gaggatgtggaaagcagagatgaatacgaaaggcaaaggagagaggaagagtaccagtcacgctaccgaagtgatccgaatttggcccgttatccagtaaagccacaaccctatgaagaaca

SEQ ID NO: 362550 - DNA, 122 bp, Homo sapiens
atatagtagcatatgttagaatttccttcctttttaaggctgaataatatatatataccacgttttgtttatccattcatccgtggatggacagttgggttgcttccaccttttgctattgt

SEQ ID NO: 362551 - DNA, 122 bp, Homo sapiens
cccacccaccagctaaagccaagaggactccttggaccaaaaaatactctctccagacaccggaaatcgccaggtggcacccaccgaggcacagtccgggcaggggtggggctgcccccagg

SEQ ID NO: 362552 - DNA, 122 bp, Homo sapiens
acacagaaggtcccggagcaggagctggccccgagccagcagctttgtgccctgtgttaccggatcttcagaatgcgcctccagcctgttgaccatcttactgctcacctgggtccgcagcc

SEQ ID NO: 362553 - DNA, 122 bp, Homo sapiens
tccgtctgtcacctgtaggtcaccacccaggaggaccataaatcagtaccaggcaaggcccggagcccgtggctgacctttcctggggtcgtcctctggatcaatggcagtgcagctcgcag

SEQ ID NO: 362554 - DNA, 122 bp, Homo sapiens
caggttgctggggggctgggcaggggtggggagggagagccggttccgcgcaggtgccaacgcccgcccacatgtccggccaggttccctagtgctcttcggcagctgcaccttctgcctca

SEQ ID NO: 362555 - DNA, 122 bp, Homo sapiens
acgggctccagggcctccagggcttcagcatctccatgcaggacaccatcacctaccggccgccgaccccagcatgaagaattcagccaagggcgagctcccggatgccaagagcccgtggt

SEQ ID NO: 362556 - DNA, 122 bp, Homo sapiens
ccagaaagacagcatacagggcacaagggcggcgacatgggtgcgcatggccacacctgccggggagtatgaagaatcagctcgaatggagatcaggaggaacaggaaggatcgtcgcaggc

SEQ ID NO: 362557 - DNA, 122 bp, Homo sapiens
accggggcagttggaaacccaggagacacacccttcagtatactacgaaggtgtgcgccacgaaaacagagggggagtccttccttaggcagttactgcccaggttcccactccggtccgct

SEQ ID NO: 362558 - DNA, 122 bp, Homo sapiens
gtggtcccccgggcccagctgtctttttttctatctctttctcctgtgtctttatttctacgatctctcatctccgcacacgaggagaaaaacccacaggccctgtaaggcttgaccctacc

SEQ ID NO: 362559 - DNA, 122 bp, Homo sapiens
ggggcaagacgctacgagggactgaccccacaagcaatggaaagctgagcagttctgctccgagtctcctggccatagtgcaagcagggggctggccaagacaggcaggggtgctgacctgc

SEQ ID NO: 362560 - DNA, 122 bp, Homo sapiens
tgcgcagctgcaatctgcaaacccttgcagggcgcggggtttcgtacacccgctcaaggacgcaaagaacctccattctctgccatacaaagcactcctggcccagagagcaggaaagagca

SEQ ID NO: 362561 - DNA, 122 bp, Homo sapiens
acctgcaccttccagactgacagtgctcggggccctctctccctcttgcgatttttatttcggggccacgtttgtttacttgcggcgtgacttgctctggcctgtgcacggcagccacaggc

SEQ ID NO: 362562 - DNA, 122 bp, Homo sapiens
gacctgtgagaggaaccacaagcaaacaccctctaggaggctctgagaaacagcagggcacgtgggtgcggcctgggaacagatcaggattgacctgcgtgcgagccagcttgtcacagtga

SEQ ID NO: 362563 - DNA, 122 bp, Homo sapiens
caggctgtttcccatcacttagattctgatcagagctgtttgtcgagtcttattggaacgcgggaccctatgcaccagtcccaaggctggacacttcatttttatcactagtttcactattt

SEQ ID NO: 362564 - DNA, 122 bp, Homo sapiens
ttttcagacggctaacgcttaggaaagcgggtgcctttgaaaggaccagcgttgcccgcccggcgcctcccgggcttccctgctcgtccgcggacggggcgctgcggggccggggggcgccg

SEQ ID NO: 362565 - DNA, 122 bp, Homo sapiens
aggtaccgacacaggtccacacctggaagccggtgcacagtgctcggcacagatgcaaagcggcaggtgtgcgcaggtgcgtgtcaacgccaccctgggaacccaggatggctgcggacact

SEQ ID NO: 362566 - DNA, 122 bp, Homo sapiens
gtggaagcagggctgcagatgcgatagggctctccatggaaacctgtccatatttggcctcgttaccatggagaaggcaggcaccatgtctaactcagggatctgagcagccttggagtctg

SEQ ID NO: 362567 - DNA, 122 bp, Homo sapiens
acacggatcctctaaggcccagagtgtcccgagtagcggcagtggggagtgctcagggtacgctaatggtgagtggttgcagttgatgggacaaaaaactgtgatgggagttagtgtgggtg

SEQ ID NO: 362568 - DNA, 122 bp, Homo sapiens
tttaagatatcaagaataacaagagatacacatagagaaagttaccaagttccaggatctcggggagtcacatcatcatggttcctgaatttttctgagatgattaaagggactgaattggt

SEQ ID NO: 362569 - DNA, 122 bp, Homo sapiens
agaagaggccgtgacaggacgctgctttgtgatctgagaatcgggccgggtgggcggtgccgagctgcctggacacggcgtcggcccctcctgacggtgtcagtccggtgtcacaagtagat

SEQ ID NO: 362570 - DNA, 122 bp, Homo sapiens
ttgggagtggtgacagagccacagagggctgtgagcttgcccggccccaggtaacgctggcggtgggtgggcctccagcttggagcagagaccccccgaggcatctgcagacagaactggat

SEQ ID NO: 362571 - DNA, 122 bp, Homo sapiens
gctattagatatctcgcggtgctggggccacttcccctagcaccgcccccggctcctccccgcggaagtgcttgtcgaaattctcgatcgctgattggtccttctgcttcaggggcggagcc

SEQ ID NO: 362572 - DNA, 122 bp, Homo sapiens
cggcctagcccgcgtttcaggtgcccagacgggttggaaaggcggggatgggggatgggacgcaccccagaggatgctcctccaaagcttatcctgggcgggctcagtggctcacgcctgta

SEQ ID NO: 362573 - DNA, 122 bp, Homo sapiens
cacccaacctctggtacatctgtgtcctcaacagggaaacaaggacaactaacctatctgcgtcttctagagtagtctggtcacagctagtgtgaaccccccggtcacactgttagtggcaa

SEQ ID NO: 362574 - DNA, 122 bp, Homo sapiens
taaactgcgccttctgctgctcggcggccaccaggcgctgcaactccgcttcatcggcttcgcccagctccgccattgttcgcctcaggctcgccaccttccgacagctgtgtttgcgcatg

SEQ ID NO: 362575 - DNA, 122 bp, Homo sapiens
gtaggcggaagcgaaacggaaggggcgggtgcggacgtggagcttccggccttgcagttccgcttctggttgcagcggccgcgcggatctgaaggaggcgccagagcactaggcaggggcct

SEQ ID NO: 362576 - DNA, 122 bp, Homo sapiens
atcatagctcactgcaacctctacctcctgggcttaagcaatcctcctgcctcagccccccgggtgggtaggactactggtgtgtaccaccatgcccgactaatttttttaattgtttgtag

SEQ ID NO: 362577 - DNA, 122 bp, Homo sapiens
gctcgtcctgcgcccaccgacgtcccctgcgccagtgccacacagcggccagggtgacaacgtgacccacaaccaccagggagggaaacaggctgcccgagggctccatagccgccacgcgg

SEQ ID NO: 362578 - DNA, 122 bp, Homo sapiens
cctcggctgcttgcagctgccttccaggaagtgctggaacagcagaagcagctagcagtgcgctcaagaagtggtcagcagttgggagcagctggaggaggggaggccagtgagcaagtatc

SEQ ID NO: 362579 - DNA, 122 bp, Homo sapiens
gtgattgatgagctgcactatacagccaagggggaactggagctggcggaactcaagacacgcaggcgccctatgctccctctggaagctcagaagaagaaagactgttttcaagtcagcct

SEQ ID NO: 362580 - DNA, 122 bp, Homo sapiens
tttctcactctctaaggcatcaaggctcccccgcctcggtcttggactcggctctttctccgggaccctggttctcgtcagtggagaatgagatttggaaaccaagctccggacccttggcg

SEQ ID NO: 362581 - DNA, 122 bp, Homo sapiens
caactggagcggacagcacagcttccgggatttggcggggcctttgtctctcgctgcagccggcgctccacgtctagtcttcactgctctgcgtcctgtgctgataaaggctcgccgctgtg

SEQ ID NO: 362582 - DNA, 122 bp, Homo sapiens
gcgcccctggctctggccccagtgtcccagttacagctcacaggagcttgtggtgcccagcggctgcttctgattgagagtcgaggtcggaggctttgggaggctgagaggctgctcggttt

SEQ ID NO: 362583 - DNA, 122 bp, Homo sapiens
ctgccaggggacgcttcgcaacaccgagagtctcagcgtttctcgagataggtgaggctgcgcgttccggaactggtttcccggaaggagcatgtctgcgcccgcgatccgaccggaagttg

SEQ ID NO: 362584 - DNA, 122 bp, Homo sapiens
catgttcacccgccgtctgtgtttgaacctgctctgcgcttcctggttggctgcttcaggcgcgcgcgtacgctcgggggtagagcccggggggcggggcccgcgttgaccacgcccccggc

SEQ ID NO: 362585 - DNA, 122 bp, Homo sapiens
tgctgaaggcccacgttggccccaaggctctggcctgtcgtcttctctttgtgtcctttgcgcattcacaggagcactcaggcagccttcaacatccagggaaaggggacacaattaattcg

SEQ ID NO: 362586 - DNA, 122 bp, Homo sapiens
gctttgctctagagacagaactaaagcccccaccctcttctactctgttagtggagcctgcggtttttatgggcacaggatgagggcggggcaggccatgagtggttttgaaaaaggcaaca

SEQ ID NO: 362587 - DNA, 122 bp, Homo sapiens
atttaggccagagaagaggtctcagcagaaaacacatgtgtgactgggctcagccaatagcggcaaggaagagcaaggactgcaccctgggaggacaaggtgcagccggtggtcctgcagat

SEQ ID NO: 362588 - DNA, 122 bp, Homo sapiens
agcagccaaggcacagaaactggtacagcaggaagtgggaaactgggaatcggtcatccccgcctgatgctcagggtgcacattccaaaaagatgattccatatggtccccagggctcgctt

SEQ ID NO: 362589 - DNA, 122 bp, Homo sapiens
ttaagagtggggtgttgcctgaatatggtcgacccctatctagaatcccaaccccctacccgcctacacacacacacacacacacacacacacacacacacccccacacaccatattgcctc

SEQ ID NO: 362590 - DNA, 122 bp, Homo sapiens
gatgacgcataaaacagcgcttgctcaggtccaggacgccagaagaaacagcccggtgagcgcacttccgacttcggcgcgggctgtgacgcaggaatcgggactccgggggagcgacgccc

SEQ ID NO: 362591 - DNA, 122 bp, Homo sapiens
cggggctctgcctctgagccaccctcggagaaaagacagctctgtgcgtcccgcggcgcccgcagctttcggcaaacatgtttaaaggagctccccgaaggaactggggacgtccgtccgct

SEQ ID NO: 362592 - DNA, 122 bp, Homo sapiens
gtccctcggcttctatctcagcaccttcctaccctgggaactgcggggaggagggggcgacgcacagcaaaatcctgacattacagcattagtctgttgaagtttctccaaagctatgtcca

SEQ ID NO: 362593 - DNA, 122 bp, Homo sapiens
ggcaggtgtggcatcacggtgccacgcgtggccgggcacccgtgtggatggtgggccacgcgcaggggactacacttttggtggtggttactgataagggcgtaggagcctgactgtgtttc

SEQ ID NO: 362594 - DNA, 122 bp, Homo sapiens
gaaccatgctgcaactatgttgaactcttcttggagcatgtcaggtgttccaagaacacacgttattcatccaagctttgaataaattcgtggttttgtggtatagtagacagtcctggctc

SEQ ID NO: 362595 - DNA, 122 bp, Homo sapiens
caccaccactgcaccccagagttccaggccaatgaggtgcggaaggtcaagaagtttgaacggggctttatcatggaccccgtggtactaagcccctcacacactgtgggtgatgtgctgga

SEQ ID NO: 362596 - DNA, 122 bp, Homo sapiens
tctcctctgagctgctgactcagagttagggaaaataaagataccattcatgaatccaagcggggtcctggatagagccagaatattgtggggcaggtacagagcacaagacagtactgttt

SEQ ID NO: 362597 - DNA, 122 bp, Homo sapiens
cgtgttggtcgggtggttcatcattagtaagctcccgtgggccagcggcagcctgaccaccgccaccctcctggaggggcttttcccacgggaatccttatgccggaagacaaagtctctgc

SEQ ID NO: 362598 - DNA, 122 bp, Homo sapiens
gaagcaaaagcatcggccacacaaaggctggagcgcggacattcgaggcagtattattcacgacagcccccaactggcaaccacccgaacggacaaagaaagtgtggagagcctctgcagcg

SEQ ID NO: 362599 - DNA, 122 bp, Homo sapiens
ccagtgaacccgttacagggtgggactgggtggagcagccttcaggccgccccggcccctcgtgggaatgcgccgcgccccccggactctggagcggcccgaccctgcttcccaggccccgg

SEQ ID NO: 362600 - DNA, 122 bp, Homo sapiens
aaaggtgagcaattgaagtgtaatatgaagtcgtaggtgctgccataggcacctgcccagcgtgctgtgagaacagaggggaaaacaatttttccagagaagccttatctaagggagtggca

SEQ ID NO: 362601 - DNA, 122 bp, Homo sapiens
gccctccaaggcagagagaagaccaactctcctggcttccttgacattctccttacctgacgttctgcagcctcttgggagactctcggatgtacccataggaggctgtgggagacagaggg

SEQ ID NO: 362602 - DNA, 122 bp, Homo sapiens
ctgcccccggccgggactcggcacttctgcagctctcccagccacgtcagggtcaggaggcgtttacaggggcagggcggcgaggtggggggcggggggcacatgtgggcggagactagggg

SEQ ID NO: 362603 - DNA, 122 bp, Homo sapiens
gaggtgggcgccgtcggccaggcgccctctcggtgcgcacacacgcgcgtccccaggcgccgctgtgcccccgccgcccaccacgtgccctggccaagcccgccaagggccgtgcgcgtttg

SEQ ID NO: 362604 - DNA, 122 bp, Homo sapiens
gcaggactcagagcccatcaaaacatggatttcatagcttggcgtctggctgctaagcaacgcacttcttacattcaaaacagagttgtaaaagtagaatcttggtgccaactctgggtatt

SEQ ID NO: 362605 - DNA, 122 bp, Homo sapiens
cagcttcagcagctgcagcgccgagaaccgctgcttcatggccggcgaactgggcttctgcggcttgccagtgtcttggacggcctctgagtgcggcccgcacccctctccccgccccttgg

SEQ ID NO: 362606 - DNA, 122 bp, Homo sapiens
aaaccgaggtcctggcgcagcagggaggagaaaagctgctcccggatccgcaagttgattcgagacatggtgtaggtgaagcagcctcctcggcagcctgcagacagtgagctgtggggtag

SEQ ID NO: 362607 - DNA, 122 bp, Homo sapiens
tgggaggctgaggcgcgtggattgcccgagctcaggagcttgagaccagtctggggaacacggtgaaaccccgtctctactaaaaatacaaaaaattagccaggcatggtggcttgtgcctg

SEQ ID NO: 362608 - DNA, 122 bp, Homo sapiens
cacaaaagggaatagttcgggagcttgctccagctcttcagaactaactcactgctcctccgagggctgttctgaagacatacagcccaggactagagatgctccaattcgataaggggatt

SEQ ID NO: 362609 - DNA, 122 bp, Homo sapiens
caccccagccttccttgctcttccctgaagatgctcttgctgcaaagcctttgtgattgccgtttcctctgcaaggggtggttttcctcgaggtatctgtagggcttgttctcacatttcct

SEQ ID NO: 362610 - DNA, 122 bp, Homo sapiens
catgtgttaactgagctaacacgtgtaaagaatgtaggacagtgcctggcatgtagagagcgctgacacatgatagctgatattttctccaacataaatatggcaaacatataacaataacg

SEQ ID NO: 362611 - DNA, 122 bp, Homo sapiens
ccagtctgggaagtgaagagcgcctcttcccggccgccatcctgtctaggaagtgaggagcgtctctgcccagccgcccatcgtctgagatgcggggagcacctcttccccgccaccccgtc

SEQ ID NO: 362612 - DNA, 122 bp, Homo sapiens
tcgggagataacaggcccaggatccccccaatctcaggcagaaggcggccttggcttctccgcttgccagggtcctgccctgggcactccctgggggcctcagtccagagtgagtgacccgt

SEQ ID NO: 362613 - DNA, 122 bp, Homo sapiens
attcctttctggcccctaaatccttcaggatccacattcccctacaaaacaagcctatgccgattgcaaccctaggactgcaacctaagcttaacttctaaaactgagttctgttttaggaa

SEQ ID NO: 362614 - DNA, 122 bp, Homo sapiens
tggcgctgggtgaatgtgaatcgccgacacggtctcctgcagggctgcggcgtcctggcccgtggctgtcattctgtcccggtgcttcacccccggccggtgtgaagccagtgtgaatccat

SEQ ID NO: 362615 - DNA, 122 bp, Homo sapiens
aattctctaactccagatctccaccctgggaatgacactagaggagcccctctctactcccggcctgagccagttgttctgcccccagcctcaagctcttggaggctccagcacacccacgc

SEQ ID NO: 362616 - DNA, 122 bp, Homo sapiens
agcagtaggcattccttagtgacattctgctgttttttccagaatggtacttccagtttccgactgactcaatttctggtcacccagttggaagacatgcctgggcatgtcaggacaacaat

SEQ ID NO: 362617 - DNA, 122 bp, Homo sapiens
gaacgcggaaatgcgaagcagctgctggtggagcccgcaggccagggtgggactgtcgcccggggcggggctaggaggggaggggcggggcgaggaggggcggggcgaggcgaggttggcca

SEQ ID NO: 362618 - DNA, 122 bp, Homo sapiens
ctcggaggtattttgactttttcaaagtcactgattatttaacctcctagtttctcttctcgtcgactgcagcaagcttccggttgctctgcctgccctcagtgtcccccatctaccagctg

SEQ ID NO: 362619 - DNA, 122 bp, Homo sapiens
ctcaaggtttctagagtccagagggcctcattgacatgtaaacgagggtccctataaaggcggcgctgcctcgcactggtgcatggactgcaacatgggcacggagcctgctgcccggggca

SEQ ID NO: 362620 - DNA, 122 bp, Homo sapiens
gttctcctgtggatggtcactggcttttccagtattctgccgttacaatgacactgtgagcgccttcatccccttctccacgcacaagagcgtgaggttctctgggaaacatctgtgactta

SEQ ID NO: 362621 - DNA, 122 bp, Homo sapiens
acaccaggaagcagcctgtagcccctgagctgacgcagacacaatgccattctccagcagcgtctctgaaaattttaatttgttctgacaacgaaactaacacagcataaggacttaagccc

SEQ ID NO: 362622 - DNA, 122 bp, Homo sapiens
tcaggattttgaagcgttttcagattttttttatctttttctctttttttcctcaggctgcgaagcccgaaagcggcggaggcggcagcgacccggggcggagagaggcggccgagggagcc

SEQ ID NO: 362623 - DNA, 122 bp, Homo sapiens
ctaagaattctccaagctgcccctgaaatgcgctgagtgatcagtgggaggtctgccggtcgggggcggtggggggcacctgttcctcgggcacatttggggaagtagggcaaggatgggtt

SEQ ID NO: 362624 - DNA, 122 bp, Homo sapiens
gcgccggcaccacggcagagcaagtgcccactcagtgccgggcacctactgtgtgctgggcggggtggggggacggaggacacagccatgtgcgacctggggcgccaccacagcaggccaga

SEQ ID NO: 362625 - DNA, 122 bp, Homo sapiens
acttgagcaatgaagattggctgaagagaatcccagagcagcctgttgtgccttgtgcctcgaagaggtttggtatctgccagtttctccctcgctgtttttatggctttcaaaagcagaag

SEQ ID NO: 362626 - DNA, 122 bp, Homo sapiens
aaaacgcaagcagcatttttaacattttagatattcctgaaacgcaggtgcagatgtgagcgagcaggcgctgagcaaggcaggagatgactcaagactgccgcgtggttctttctgcaatt

SEQ ID NO: 362627 - DNA, 122 bp, Homo sapiens
ttggatctctgtgtcccagtctctgtggaaggacagaatcctaattttgataactgtcagcgagcaggcacacctgacccactcacatttacaatgaccaactatcttagcctggagctgct

SEQ ID NO: 362628 - DNA, 122 bp, Homo sapiens
gaggtttcaccgtcttggccaggccgatcttaaattcctgacctcatgatccacctgcttcggcctcccaaagtgctgggattacaggcatgagccactgcgcccggccctttgtcattttt

SEQ ID NO: 362629 - DNA, 122 bp, Homo sapiens
gtaaaaggtaggtgaataacagtattcacctccttctgtgtgactcagctttggagtcagcggaccgggttcaaatcccagccctgcaagtgattagccaggtgaccctgggcagagggaat

SEQ ID NO: 362630 - DNA, 122 bp, Homo sapiens
acttccgacagacctttccactcccaccgtctgtggcctgagggccttcccttctcctcccgcccacccctctggatgtttcggggagttagaagggagctggattgagagactgtgttagg

SEQ ID NO: 362631 - DNA, 122 bp, Homo sapiens
ttaggtgcaaatatcggcaccccatactgtctcaggacaaagaggcggaaacctgtgctgcgcctcgcggctgagggtttccaacacccgaggaagaggatggggtgagcggtgccgggttt

SEQ ID NO: 362632 - DNA, 122 bp, Homo sapiens
ccacaacggggccactgggaacccatgatgttggttaccaatgtgattggaggttcggaacgacggacgtgtggccctgaagtgggaaacagaaaagctgaagggcgagacctgggagggag

SEQ ID NO: 362633 - DNA, 122 bp, Homo sapiens
accgccggtctcgtcagtaacatagggagtcgccatcttgaaaacgcaaaccacttccggcgtgagcgggctggggtcccgcccccctccccaccggaagtggagtcccgatcgtagcaagc

SEQ ID NO: 362634 - DNA, 122 bp, Homo sapiens
ttgagcaggcttagaactggctggtttgaagaatttcagtggggccggtggggagggtggcgactcagagggttgtccttagtcatctggtacttggccctggggcaatgaggacaggtgca

SEQ ID NO: 362635 - DNA, 122 bp, Homo sapiens
gcacccacctgggccctctgcagcttcaggctccgatggggtgcctgggcctgctgctgacgcctctgctctgctccccgcagcttgcacgcggacaccaggtggcgctgtcgtctatcagc

SEQ ID NO: 362636 - DNA, 122 bp, Homo sapiens
acgatgagcccagtcagctctggtttgctctctgtagccaagaccagcggggttaaggggcgagatgggagtggaggaaggcccaactcatctgccagcctccagccctcacgcagggaggg

SEQ ID NO: 362637 - DNA, 122 bp, Homo sapiens
gcgacgggctgttctccggccccgccccattcccaggctccgccccccgcccctcttcctcgtggccgcagcctcaggccgccctctagccccgccccgcccaggccccgcctctcctctgt

SEQ ID NO: 362638 - DNA, 122 bp, Homo sapiens
gtgaagagtgtttagctggttctccgggaagcagcgcctgagatacaggctcagggctgccggctcagtcgggagtgaggctcaggggaaaggggtgggggaagagcaaggtgggtgcgggg

SEQ ID NO: 362639 - DNA, 122 bp, Homo sapiens
ccagtctctactgaaaatacaaaaatcagccaggtgcggtggcaggtgcctgtaatcccacgtactcgggaggctgaggcaggagaatttcttgaacccaggaggtagaggttgtagtgagc

SEQ ID NO: 362640 - DNA, 122 bp, Homo sapiens
ggttcttgagcgggctgatgggttttggctggtcggccatggtcagtccgtctgtcactccgtctgtcagttctcgggccgtcctggcttctcagccccagctgcagtgccggcgccgccga

SEQ ID NO: 362641 - DNA, 122 bp, Homo sapiens
agccgccaggatgagaaacacagagaagtgtgggatgaggagcaggaggcagctccgaagcgggtcagaatcccacagggaaacccacatgggtgccaggcacttcatgtcacctctaccga

SEQ ID NO: 362642 - DNA, 122 bp, Homo sapiens
acagtggaaaacgctcccgtccttcgccgggcagaggcagctcctgaaataaagcagcagcgccccctggtggcagacctcagtgctgcatcccgtggaaggccaataccctccttaagaga

SEQ ID NO: 362643 - DNA, 122 bp, Homo sapiens
ggcgcccccggccccgggcccgagcccggctctgagcgaggccacggcggacacgggaaacggtgagcgtgctggacccggagctggactcccgcccccaccccgcacagggctcccctcca

SEQ ID NO: 362644 - DNA, 122 bp, Homo sapiens
tcccttagtctcacccacgccagggagctggtggggtggtgtctgaatagcaaagatgtgcgaacaaaccaaatcaggaaaactgcaaagagtaccttagtctttctagacgctacaagagc

SEQ ID NO: 362645 - DNA, 122 bp, Homo sapiens
atgtgaagcagctcccctttgccaagagatatagggcttctagtggaaaagtacaacaaacgaacctaacaacttaggaacagcttcatcctttctttattaaaacagctttaaggcacagg

SEQ ID NO: 362646 - DNA, 122 bp, Homo sapiens
ggcagagttcatcaatttaggaggcttatcactgaagcagcaataacttggggcccaatgcgaaggctgctaaatgggtccagcaaagctcttggttcagcttctagaaaggaacagtgtac

SEQ ID NO: 362647 - DNA, 122 bp, Homo sapiens
ttaaaacttttcaaatattctgtttgaactcttcttactgatttccagtggcttgtaacccggatgagcaagtactcacatctactgtttcccaagaaaagtattttatccttagattttgg

SEQ ID NO: 362648 - DNA, 122 bp, Homo sapiens
gggccataaccttgctggcgactaagtctgaagaacttcccgtgatttaattcttttcttcgagtttagtcttagctttgacattttaaccaaaaggttacacgttaatttatggtatgagg

SEQ ID NO: 362649 - DNA, 122 bp, Homo sapiens
gcgcccgggcgtatggcggcgtcgctgggatgccagatcccagggagctcaccgaggccacgccgatggccacccgggtggagcctgggctgtgggcttcgcctgcgtccccgcggcctgtc

SEQ ID NO: 362650 - DNA, 122 bp, Homo sapiens
ggtttgcgcggcctcaggcgccgcgggaacccagcgagtggcggcgggcgatggcgggggcggcttcctcctgaggctggactagtcctccgagttctgagtggcatttgtggcccgtttgc

SEQ ID NO: 362651 - DNA, 122 bp, Homo sapiens
gaaagtgccaccagacgccctcacaagtctgctttctttgctgggaaacagcagccgcgccgcagcctccgcccgctctggggaagccccaccttggcaacaagccgctgattggctggctc

SEQ ID NO: 362652 - DNA, 122 bp, Homo sapiens
gtttgagccggtgtgccacctccagggccgactccaccttgacgatgcagatgtcagacacgtcctcatcctcatcctcatcctcttcctcggctttcagctccaagtcttcatccagtggg

SEQ ID NO: 362653 - DNA, 122 bp, Homo sapiens
aaaatagaaaggggaaaagggtatgttaattaatttaattttctggttaattcagcttgacgagtatttgtctaactgctgggctcagaatgctgtaggtgcagtagagaaaaaacgagaac

SEQ ID NO: 362654 - DNA, 122 bp, Homo sapiens
gaaagcaccccaagctggctgaccccgcgcacccccggccacacccgcccatcctggcttcgagattaagaagcccagtttggcaccccaattatgtttggcaatgtccccggtgccccaga

SEQ ID NO: 362655 - DNA, 122 bp, Homo sapiens
gaaaaggtcagtggacaaaacacaggccctgactaacaaaagaggagaatacacacacagcgaagacccttccctcgggcacacacggctaaaggtttcgccaagtccccagcagagacgga

SEQ ID NO: 362656 - DNA, 122 bp, Homo sapiens
ataacagaaggtagcatgtcagaagaccatgggcagcccccaggctgtatttgcagtccccgttctgcataatgtgtccagttggtatgtaatgatgcacgcacagaagagaaccaaacact

SEQ ID NO: 362657 - DNA, 122 bp, Homo sapiens
ccaatcagggacgctgggctgggacccgtccaatcaggcacgcagctggagcggacaggacggcttccgggatttggcggggcctttgtctctcgctgcagtcgcagctccaggtctcgtct

SEQ ID NO: 362658 - DNA, 122 bp, Homo sapiens
ctcagtcttccaatggcgaaagggaacgtgctcctgctgggcgggacggcggacggctggcggcggcgcggcctccaattctcgccaacgcgccccgcacccccgtgcactggcgggccctc

SEQ ID NO: 362659 - DNA, 122 bp, Homo sapiens
gccggcctacctaaatccccggccgacttgatgtcgatgttgtcaaaaccactgccaatccggacgatgatgcggagggctttgaacttctccaggtcctccctggtgagagtgatggtgtg

SEQ ID NO: 362660 - DNA, 122 bp, Homo sapiens
caggtagggaagcgaagtggactcgtggtttttctccgagggacccaggctttgggatcccgggctccggggctctctgccccccttcccattctctttccggaatccaggccttccgtctt

SEQ ID NO: 362661 - DNA, 122 bp, Homo sapiens
cacgacaactttcagaaccttgtttgtatccagaaccacttccagcactacgtccaacaccgcggccagttccccttcctcgcccagggcagtgtgagattccagagccacgtccatgcctg

SEQ ID NO: 362662 - DNA, 122 bp, Homo sapiens
agaaacattgcagggaaaggcagcagccttaatttccgaggtgaatgagatggatagctccggtgcccagcggtaaacctcttagtatttatgaaactgaaattacaccgttccaataaaag

SEQ ID NO: 362663 - DNA, 122 bp, Homo sapiens
ctttgttggtggctagggcggagcagagccgagtcagagaccggctgcacgcaccttggccgccgagcagcggatcagccgctgccgccgcaagatgctggagctgcagcagcagcagcagc

SEQ ID NO: 362664 - DNA, 122 bp, Homo sapiens
gccaggcgcaggcggtcctcacccagcttcaatgcgctggaggcttggcagagctggtcgcgaggaagtacaagcaggctgccaaatgcttcctgctggcttcgtttgatcactgtgacgtc

SEQ ID NO: 362665 - DNA, 122 bp, Homo sapiens
gcactccagcctgggtgatagattgagactgtcttaaaaaaaaaaaaaaaaaaagagcaacgagaacacttactctccattttggaatgaagcattgcctgatgctagactcacaataaaga

SEQ ID NO: 362666 - DNA, 122 bp, Homo sapiens
tctccgttcctttcatcctccagcctcgtgggggagtcaagtctccgtaggcggagagcccggatgcaggcgcggctaggctgccctctctatggtgagccccccggtccctcctccgcagc

SEQ ID NO: 362667 - DNA, 122 bp, Homo sapiens
gccaggttcaagggcagcaggaaagacgagatcctgggcatcgccaacaaccgactgatccgcatcgacttggccgtgggcgacgtggtcaagacctggcgtttcagcaacatgcgccagtg

SEQ ID NO: 362668 - DNA, 122 bp, Homo sapiens
aaaggcgcctgggctggtgacggtgtcaagtgtaggcaagaaatacggctgatcaagaagcgacttcacctccctcgcacaacactgagtccctttgcggcaggggccctccccgccgcgaa

SEQ ID NO: 362669 - DNA, 122 bp, Homo sapiens
gggcggggtgttgcttccctatggaaagcttctgacctggagcaaatcactgagccagatcgcgctccctcatctgtaacatgcggaggaggagggtcccatctttttcacgttagtgagga

SEQ ID NO: 362670 - DNA, 122 bp, Homo sapiens
taatttctaagatccttctcagctggaaatgtctatgctcctatagccataatatgtaaacgttcagtaatggatcttctttcctaagtagccacttcctccaccttgaaaaacccttcagc

SEQ ID NO: 362671 - DNA, 122 bp, Homo sapiens
caccggccactgacgggcctgtcgaagggctctgctgtcccacagggaggtgggtctgtccgggaggaggaggggccctgccctgaccactggcccaacccttcccttcctgggcatctgca

SEQ ID NO: 362672 - DNA, 122 bp, Homo sapiens
tgtttgtttgtggttgttttttagagaggtgtgaaaaaatgcatacttaggcaaaacccgcgtggtgaaacatcttcgatttgaattcactttctgccgggaaagctgctgcataggcaaag

SEQ ID NO: 362673 - DNA, 122 bp, Homo sapiens
gttcttttgaaacgtgtgcttgcagtcgcccctgcagacgcagcggctgcgctgtttgtgcgctgctccagagcccacggaaggagaatgggcttcagaacgaaacagatctggactcctcc

SEQ ID NO: 362674 - DNA, 122 bp, Homo sapiens
atctggacaaggccacccttcggggaggcgacagcagccccagcgagtaatgaggagcagcggcagtgacggggcagagtcggggctgggagattagagagcccctcccagggcctttccct

SEQ ID NO: 362675 - DNA, 122 bp, Homo sapiens
tttgtcatgtctctgcctaggcccaggccagagtgtcaggcaaaagcatagttcgggccgcggggcgcgtgcgcagtcgcccagcctcaccaagcgacttggtccaaaaaggattagataaa

SEQ ID NO: 362676 - DNA, 122 bp, Homo sapiens
tcctcggctacccttgagaagcaaagcccccttttcccttgcccaccacgccagtgctggcgctcaggtgctgcctcccctgtaacccacagcccggttctgggtgcaggcgtgtgtgttag

SEQ ID NO: 362677 - DNA, 122 bp, Homo sapiens
gcaacatggtgaaacctcgtctctacaaaaaaatacaaaaaaatcagctggccctggtgacgcatgcctgtagtcccagctactccggaggctgaggtgggaggactacctgaactggggaa

SEQ ID NO: 362678 - DNA, 122 bp, Homo sapiens
attatgcagttatcgagcaattattaatggccaacccaattatacgctacaaggaaatgacggtcacagggaagctcaaagccccgaagcgagggaagccctgctcctcaccggcccctccg

SEQ ID NO: 362679 - DNA, 122 bp, Homo sapiens
ggcctgaggcaaaaaaaatggatttgtgccgcgggcggtagagcttcgggctgttcccgacgttttgaaactaccatttaggattttggctactgaaaattgggagaaatggggctaactgg

SEQ ID NO: 362680 - DNA, 122 bp, Homo sapiens
caagtggtctactggctattcaaaactagttagcatttattggcagttactgagtgaccacgttaccgaaacagcctggcacaacagtaagttcagtaaatggtagatattaccattcattc

SEQ ID NO: 362681 - DNA, 122 bp, Homo sapiens
atggcccaggtgtgagccggtgggcagaggggtggccctgggtccagctgagaaggctcccgggattgacaggggttggggttggggagttctgccttcctgcgtggcccagtgctgggagg

SEQ ID NO: 362682 - DNA, 122 bp, Homo sapiens
actctgggtaagttttgacacatttaaaaaatatccacttaagttttccatggctccccacgctctgctgaacaaattccagactccagcattcaaatgttctcatgatctgaactcaccct

SEQ ID NO: 362683 - DNA, 122 bp, Homo sapiens
cgctgtctgaggcgtgtcgggagcgacacccctgcggaggatacggtgccggggtccttccgatcgcaaaaaccggcgttcctcagccttcaagactgtgagcgctcagggccctcggccgc

SEQ ID NO: 362684 - DNA, 122 bp, Homo sapiens
acgggaagacagcgcagccacgggcagagccgcctccgtccacgcttccggaggacgtggcgggcagggggctcacaccctgctcaggcgacccttggccacttccgggcccctcgcccctc

SEQ ID NO: 362685 - DNA, 122 bp, Homo sapiens
cagaactatccccaaacaaaaacaagctaagggtagaataaacaccttgccgggtctgatcgctgatgggtcttttccagctaagaatttcatgttttctcttttagatcctgctttctcag

SEQ ID NO: 362686 - DNA, 122 bp, Homo sapiens
tagttatcctcccccatccccggcttctggtcccctccctgtgctcagagtcccccatcccgtctcgcaccctgtcgtcaggctctcggctgagggtccagagcaccagcagcgtgatgcac

SEQ ID NO: 362687 - DNA, 122 bp, Homo sapiens
gctcgcgagcccagcatggcgctggtgaggccgggacgagctcggattgacgtcattccccggcaggcatgcgcagtggcacccgcaggatgcaatcctagtctgccaggctgggcggcggt

SEQ ID NO: 362688 - DNA, 122 bp, Homo sapiens
cttcggcctgcagggaaggccctgatggttcagtgctttgcagacggtgcccttcgtccgcggccatctccccacggcgtgcaaggggagaagccggccccgatccccccacccccagctca

SEQ ID NO: 362689 - DNA, 122 bp, Homo sapiens
ctggtatgactcacgcgtcattttctttccccaatgtgaagtaacatttggagaaacaaacgcttgttgagttgaattatcaaagaattgtaaggaaggggctcctgtagtgctagctgctc

SEQ ID NO: 362690 - DNA, 122 bp, Homo sapiens
ttttttttttgagacagggtctcactttgtcacccaggctggagtgcagtagtgtgatctcggttcagtgcatcttccatctccggggttcaagcaattctcgtgtctcagcctcccaagta

SEQ ID NO: 362691 - DNA, 122 bp, Homo sapiens
cctgaaatctgctgaccttggcactgactctggtcctcttacattaaggtgaagctggggcggggttgaggaatcaagactgagaaaccttgctgtcctgcagcagaatagagatacatgga

SEQ ID NO: 362692 - DNA, 122 bp, Homo sapiens
ctggaggacaggggctcctcagagcctcaggcccagagaacgggccccacgaccgggaagcgaatactccacagggcacagtctcccaatgcaaaatgggcacctggacccaatcatttctg

SEQ ID NO: 362693 - DNA, 122 bp, Homo sapiens
ggtgcctccaggccacgtgggctggcagtcaactcacctgtttctcagaggagtccaggacgcacagaaggtgccggtcactgccctctgccggacccatggaggggtaagggtgtccggcc

SEQ ID NO: 362694 - DNA, 122 bp, Homo sapiens
gagagactcgcaaaattatggctcaaggctattgtaaaaattgtcgagcgtaaatgactgcgatttcaaacatctttggaagaaagaaggggaaaaagcgagccccccctccctccctctcc

SEQ ID NO: 362695 - DNA, 122 bp, Homo sapiens
tgctcccatctgtgtttgcccttctctcctcccgtttccatggagaggctggcaccaggacgcgtgactgacagtgctgtctcccccagcagtcccctctgagtctgtcgggtgtgggctcc

SEQ ID NO: 362696 - DNA, 122 bp, Homo sapiens
tctgggagcgatgccccccgctcctcgcaccccccgggaacgccgcgagcatggagaagtcgagtagcgaggattcttcgatccatcggagtccatctttggacagcaaggactcggacttt

SEQ ID NO: 362697 - DNA, 122 bp, Homo sapiens
accggaagaactaggtagtctcttctcgcgagaaagggaggggtcgcaggcccaggcgctcggagcgttaccagggaaacaggtctcggttttgcggctcccactcagctgcgggagaaagc

SEQ ID NO: 362698 - DNA, 122 bp, Homo sapiens
aagtgaggagcacctcttcccggctgccatcccgtctaggaagtgaggagtgtctctgcccggcagcccatcgtctgagatgtggggaccacctctgccccgccgccccgtctgggatggga

SEQ ID NO: 362699 - DNA, 122 bp, Homo sapiens
gtctcgttcactcagtgctcaatggtgcccaggctggagtgcagtggcgtgatctcggctcgctgcagccacctcccagccgcctgccttggcctcccggagagccgagattgcagcctctg

SEQ ID NO: 362700 - DNA, 122 bp, Homo sapiens
cagaagaaccagttcttgctccagctctgctgtggacagttcactgtctgggcctgggttcgccggtccgcaagacagggctagcggtggatgctgttatggggagtgggcccctttgatta

SEQ ID NO: 362701 - DNA, 122 bp, Homo sapiens
aattttaaaaccaaggacggaatgaaacataaataataagtaatcctccttaatcataaacgtactcccacaaatcaggactttcagcaggagagagaactcactgacaattaaggttttca

SEQ ID NO: 362702 - DNA, 122 bp, Homo sapiens
ggactgggaggggccatggggtgggctgggaccagagactgctgcttgcgatagggcgtccggcagttgctgctgcccccggggttgccgctgctgctggggaagatcatcgctgcgggccg

SEQ ID NO: 362703 - DNA, 122 bp, Homo sapiens
gggctggttggaaatgaggaagacctctgaggtcatccaagtctgctagggaaatgcagccgagctgggaaggaaggtatcccctacccccatcacattctgatctgggctgttctcccaca

SEQ ID NO: 362704 - DNA, 122 bp, Homo sapiens
ttgtcccgggacacctaggctagggtggggagagacgggccctggtggtggctcgggaggcgaagcgttgtcctcagccccgcgtggaactcgtgtctggcacagcctggctgtggcctaac

SEQ ID NO: 362705 - DNA, 122 bp, Homo sapiens
tcaccttggctcctgctggctgcaccctcaagccattgccagggtctccagccagccatccggactggctgtccgctcccaatcttcactgtgagatcactttgcccttttcccatggacct

SEQ ID NO: 362706 - DNA, 122 bp, Homo sapiens
gtgtgccacgttgctcacacctgtccacaatgacatgcagacctgcatattggagctggacggagaaactgggctaatgtgacagacagcaacaagagtaaggcagttgcttcgctattgag

SEQ ID NO: 362707 - DNA, 122 bp, Homo sapiens
ctgccctgcccctggagggtggccccaccggccgagacagcgaggtgagtacagtcccgacgtggccacacgctagcccactctctgtctcttgttggctttttggcctgcatggtgtgtgt

SEQ ID NO: 362708 - DNA, 122 bp, Homo sapiens
ctcctacctggagagcccaccaggaagcccagcaggcctgtcaggcccaggatggaaacacgtggctgccatggggtctgcacctgacctgaccctggagacccccttgctcaagaaggctc

SEQ ID NO: 362709 - DNA, 122 bp, Homo sapiens
ttccggccgccgagaagatgccaagatgctactgcagggcggcccgggaagcggctgagccgcagccggtggcccagtcagtggggctgccaggaggggaacagctgccgcagcctggctct

SEQ ID NO: 362710 - DNA, 122 bp, Homo sapiens
caagcatttgaaccccttggctagcttagggcgcaggacttcatccccaatctctggcgtcgttactggcccccaaccctggtctacctgcagccagttaggacgcgccaagagcccacctg

SEQ ID NO: 362711 - DNA, 122 bp, Homo sapiens
cactcgcgatctagaggcagcccaggccattctccaccacctgggcgcccaagctgcaggcgccctctacctgctggcaacagctgcctggccactcccaagctggctggcgctcccaagcc

SEQ ID NO: 362712 - DNA, 122 bp, Homo sapiens
ggttctcgccttacctgggtatcctgggttggtttagcgggcccagagttgtcttctgcgcgctccgccgaggccttggtccattgtagcacgggatgctaatgtctcctcccaggttctgc

SEQ ID NO: 362713 - DNA, 122 bp, Homo sapiens
tgctgaccaagaaggctcctcccaggggtggggaagcctcggcagggggcggcatgtgagcgccagaaggcagggatttcacggaaatgaaagtggaagcaaacagcctgcgagcagagcct

SEQ ID NO: 362714 - DNA, 122 bp, Homo sapiens
cagtcaccctgacaggacaaacactcgcgcgcagcgacaagtgcactcctctcaccagcccgttcctgccaggtgagccaccacacactcaacctcgcccacccgagacggagccccaggcc

SEQ ID NO: 362715 - DNA, 122 bp, Homo sapiens
aaaaaaaaagtttttgttgaatgagcgcatgaaggggcagaggctgcaattgcgcccctacgtcttccacaccgggcgtgtgggttgaaacgccagggtctcgcctgggagagaaggaggct

SEQ ID NO: 362716 - DNA, 122 bp, Homo sapiens
gaagtttccccgtgagctcatcgctactgcccactgaatgcttcgttttgcaaacagaaacgaagtaggaaaaaaataagttccagcctagatctgccaaacaggggtcccccatctaaagt

SEQ ID NO: 362717 - DNA, 122 bp, Homo sapiens
ccaccgtgatgtttccctgctgtgtccagcgctgaggctgtgtgacgatgttgttcttcacgcagagccctggagaggccgttcagttcccctctagggtccaactgcggctgagggccggt

SEQ ID NO: 362718 - DNA, 122 bp, Homo sapiens
gcaaatatctactcagggacttagggcagcacaagggcactgaagataaaataggattagcgaagagcatgagatctggcagagagggacaggacagggaaagtgtcctccacctgcttttc

SEQ ID NO: 362719 - DNA, 122 bp, Homo sapiens
aaccccaaactctatggcccaaagacacttgttctctttctgtctggtagtgatgtttcccgtgctctagctgcatgtggtctggtctgcaacggggcataggtgttgacttcaaggatttg

SEQ ID NO: 362720 - DNA, 122 bp, Homo sapiens
tgctgaccgtgttcgctggcgggcctgtccccctgcccccggtcaagtttgtggtaggtgcgattgcaggcgccaacaccttgactggcatttcctgtggccttctagcctcagtcgatgcc

SEQ ID NO: 362721 - DNA, 122 bp, Homo sapiens
gcggtctttttaggcggacaccaggcacgcaacttagtctcacacgccttggagagcaagcgagtcttgccattggataattccaccgtctttcttctgcaagtccctcctttccccctccc

SEQ ID NO: 362722 - DNA, 122 bp, Homo sapiens
cagatgaggaaactgaggcacagagagctaagatcactctgtgagaaagaggcagagccccgatttgaggctgtgtctgatgcagagcctgcttctgactccaaatgtgccacgtctacacc

SEQ ID NO: 362723 - DNA, 122 bp, Homo sapiens
cagatgagcagaataactggcgcctctgttgtaatgagagttcaggtgcccatgccatctcgggaccgttcctccctgactccccaggtcccttctgaaggcaagaaccacagggagaacag

SEQ ID NO: 362724 - DNA, 122 bp, Homo sapiens
agaactctttcccactgggcttatctcgggcttcccccggcgaggcaggagcgggactgacgggctggctgaaaggcagctgagagatccctacccagggctgactgagcgagcagggagac

SEQ ID NO: 362725 - DNA, 122 bp, Homo sapiens
agcagctatgctggagttactagagggccgagcatctgcgaaccttgggggcagatccagcgtactcaccattaaggcagttcataaaattatttcctccttattctaaccagcatcgacat

SEQ ID NO: 362726 - DNA, 122 bp, Homo sapiens
gagtgacatgaaagaaacattcaggtcatatactaacagatacaaaagggaaaggtggcacgtattggtggcaagaaggctggtttgtgccctgcggcagggatttcattctcaacctgccc

SEQ ID NO: 362727 - DNA, 122 bp, Homo sapiens
ggtgatccgcccacctcggcctcccaaagtgctgggattacatgcatgagccacggcgcccggcccaccagagttttttatcagttcaaaatgtttgcgtttcaaccgctaaccttgaatga

SEQ ID NO: 362728 - DNA, 122 bp, Homo sapiens
tgaacctgctggagggataagtagacctgcaaaaaaagtcaatggaaacggtaacggatccgctcacacacgtgtgatgagtccgaggcggtttccagcttcagtgggcaaattccggttcc

SEQ ID NO: 362729 - DNA, 122 bp, Homo sapiens
gctctctgggctcccgcacggcggtccgcagcaggtgggaaaccgcccgcgccctctgatcgcccccgcagtgccagtgctctgcgagtccccgcggccgcccccaccagggcaggaggcgc

SEQ ID NO: 362730 - DNA, 122 bp, Homo sapiens
aaacatgcaccctaacactttccttctcactcttgtccccgttttcactcagtttctgaccgttcacctctcgtaggtaaccaccattattaattttccgatttttccagggcttctttgtg

SEQ ID NO: 362731 - DNA, 122 bp, Homo sapiens
aggcttggaagtctccttgccccagatcctcttttataccctgctcagggctgatgtcatcggatgcagcactctttccttgtcattgtttgttctgatgagcaggcaattatcaaattagg

SEQ ID NO: 362732 - DNA, 122 bp, Homo sapiens
ctatattcaatttggcaaactctttcatgcacgcctgtggtagccaaatgatcagatacccggggcacacggctgtcagggccttaagcacgtttccttatttgctaccacgggaacccccc

SEQ ID NO: 362733 - DNA, 122 bp, Homo sapiens
ttcacctgacccacacatagcataaaccaccaagtgatctctatgccacccaagtaataacggtcttgaatctgattacttctgtccactatttgtctccattatcttcgtgtagagtgtaa

SEQ ID NO: 362734 - DNA, 122 bp, Homo sapiens
agccaagcttgggtttccccttatccccgcctccttctctaagctcgacccactttagggcgggaccacccacttcagccaattctggaagccgaaccctggcggtttgtactatttctttc

SEQ ID NO: 362735 - DNA, 122 bp, Homo sapiens
cggccccgcggtgggttcgctcggggacgcacgcgggtggactaggggaccgagcccaggcgcccatgacccgggccgcgacagccgagccgggccgcgtgtctcccgcctcgcccgcgcgc

SEQ ID NO: 362736 - DNA, 122 bp, Homo sapiens
tcgccagcggcccccaagtactgcctgggcggtggcgggagtctggagcttggctgaaggcgcgagctgccgacgccgtctcctagcaaccaagcggcggtcacgtgacccgctccagcccg

SEQ ID NO: 362737 - DNA, 122 bp, Homo sapiens
gcgtcggtgtctgagccacgtgctcctgtcccgacccctttcccgtgtctctccggtgtccgcccctcggtcccgtgtctgtgtcgccctcgtccgtgtctgcctcccgcttccccgcctcg

SEQ ID NO: 362738 - DNA, 122 bp, Homo sapiens
gcagcgaggactccatttcccagcgtgcctcaggaagggcgccaggactgcattttgctccggagcgtccagagtcctggccctgagcgggaatcgcagtggccgaggctgagcggcaggta

SEQ ID NO: 362739 - DNA, 122 bp, Homo sapiens
gattacaggcgtgagccactgcgcctggcctctaatcactgttagctaccaagtgcttatcgtgtgcctggctcggtgcagactctttgtggcacctcatttaatccgcccagcaactttac

SEQ ID NO: 362740 - DNA, 122 bp, Homo sapiens
ccacgggtacgcagcctcgggcgttaattatgagattccaccagctgtgagatcaacctgcggcattcttatttacagctttgtggagatgcaacgtctgagtcctgatcgtcatggtggtt

SEQ ID NO: 362741 - DNA, 122 bp, Homo sapiens
agctcctgctccagtctgtgctgcgggtggggtcgggttgagcagcccggcgccccccaccgcgccccccaccgcaccgccctcgatctaaccccgcccccgggcgctcattggcctgcagc

SEQ ID NO: 362742 - DNA, 122 bp, Homo sapiens
gacgggggtttcaccatgttgcccaggctggtcttgaactcctgagttcaggcatccacccgcccaaagtgctaagattacaggcgtgagccaccacttctggtttattttttattttattt

SEQ ID NO: 362743 - DNA, 122 bp, Homo sapiens
tggccaggtgggggcgtggccagtgggagcggcaggtggggcggggctcgtcggtcggggcggagccaggtgaaggcggggccagttaggggcgtggctagtgtgcgcggccaggtgagttc

SEQ ID NO: 362744 - DNA, 122 bp, Homo sapiens
ataaaaatggaatcacccgccatatgtccttttgtgtctggcttctttcacttagcataacgtttttcatcatttgcactaaaaatatcagtgtttcctggtgtttctcacagcaccctgac

SEQ ID NO: 362745 - DNA, 122 bp, Homo sapiens
cctttccaagttctctgctttactgtatcctgtttattttcaaactcaaatggaaaaaaacgaaacaaaaaccttgggcttcaagaggcatcctgccgcaaggcccagcgatgtgaattttc

SEQ ID NO: 362746 - DNA, 122 bp, Homo sapiens
tgtggggcggagccggggcctgccgggggcggggggtgttgggaggggcgccccgaggggcggggccgggccgccgtcggttcccacggcaaccgactcaacagtaaggccccgcgggcgtc

SEQ ID NO: 362747 - DNA, 122 bp, Homo sapiens
cccagagaaaggggtgggccacttttggtcctaacaagcagttcaccaagaacagggcaacggctaaaagatgaagggtgtccagacgccgatgagggatcccaggccctggagaaagacgg

SEQ ID NO: 362748 - DNA, 122 bp, Homo sapiens
ctcgaggggcagcggggcttaagtcaagctctgtaaatgcggcacccgacgtctgaggcccgccacgctgcaggttcccatctccaaagcccgtggtgctgggcacggcagagccgtaggcg

SEQ ID NO: 362749 - DNA, 122 bp, Homo sapiens
ggcggcccaggcagcagaaagtcggaaagcaccgcccacaccatccccttcccaaggcagcgctgggccgtggccctggggaccctcatccgcccctggggaccagcccaggtgcctggctt

SEQ ID NO: 362750 - DNA, 122 bp, Homo sapiens
cactttccagaagaagacacggaggttcagagaggctcagagacaccttcaaggccacaccgctcactcaagtaactgtttgttgttttctgagttatcacacctaaggtgcccagcacaag

SEQ ID NO: 362751 - DNA, 122 bp, Homo sapiens
gactctctgttgaaacgccacaactctgttcagtgatgggttgccgtgggcctgtgcccacggctgtgttgccatggcagctcaccagggcattcggctcaaagctccacgtagtctctgct

SEQ ID NO: 362752 - DNA, 122 bp, Homo sapiens
gcccaccccaggtactcagacaccgacaggagtttgtggtgaccccagcgtcaggtggcacgttaggcaccaagtgtggacttgccagtctcctgactccactgttagatcattttccttgg

SEQ ID NO: 362753 - DNA, 122 bp, Homo sapiens
cgattaaactctcgcccacatctcccgtttaccgcggctcctcctcggggccctcctctccggccagagtcagcacaacacccagatgacgccactacacggcctgcgggagctccggcttc

SEQ ID NO: 362754 - DNA, 122 bp, Homo sapiens
gaaaggggtgacagacacacctggaaaatcgggtcactcccacccgaatattgcacctttcggaccagcttaaaaaacagcgcaccacgagattatatcccacacctggctcggagggtcct

SEQ ID NO: 362755 - DNA, 122 bp, Homo sapiens
gctatgaaggcaaataatcttgcataagtcactagattttacttctctcttactcaaggacgttactgtagcagttctccctcatttggacattatgatttattgcttttgtctatattgct

SEQ ID NO: 362756 - DNA, 122 bp, Homo sapiens
ctaattttgtggatctggaaatggacttacagagaggtgaaatgattgctcaaaattatacggctagttggatttgtactcaggtagtctggatctagagtgatgactgttcttaagcatga

SEQ ID NO: 362757 - DNA, 122 bp, Homo sapiens
cttgaatcgcctggccttttcccctccaatcgccaaggctccggtggtttccaggagtaacgaggggacctggcgggctcctgccccgttaggcgtccccgcgcatgcgcaccgcttcccgt

SEQ ID NO: 362758 - DNA, 122 bp, Homo sapiens
caaatgttaaaacattcttcctgttgatcagctaagtttgtggactgtgcaaaaggagttcgtaacgagggcaagggataccaggaaagcagttgtcatttctgcctttctttcctggttta

SEQ ID NO: 362759 - DNA, 122 bp, Homo sapiens
gaaagactgctaaacaggtcttgcatgactggcctaagtgcaaagtgaagcagcccatcacgctccagctctccaaatcggagccggcatttcacccatgtgatacaggtatttttcatagt

SEQ ID NO: 362760 - DNA, 122 bp, Homo sapiens
acccccgccccactcgcccacatccactccgggcacccatgggcacccttcccgtgcccacgccccagtccccagcccctgagctatcctaggatgccttccctggccccctaattagcccg

SEQ ID NO: 362761 - DNA, 122 bp, Homo sapiens
agcccgaggtcgccatcgtggccgtggtcgccatgattcagagtccgcggaagagcacagcgcgcgccgctgccgacctcgctgccgctgccgacctcgctgtgccgctgccgacctcgctg

SEQ ID NO: 362762 - DNA, 122 bp, Homo sapiens
cagctccccgtgacttccgctttcggtctcaactcctctccctgaggagagtggtttaaacggtgaaggctgcggggcgtcgccggaagtgtcgtaaacgtcggatatccggttcttctggg

SEQ ID NO: 362763 - DNA, 122 bp, Homo sapiens
agaaacgaatttttaagtcgaacgaggcaaacaaaaacttagaaaacatgcatctccgggcgctgaaaatttgcatctctgggctactaaggagcccatctcgatcagattgttcttgggca

SEQ ID NO: 362764 - DNA, 122 bp, Homo sapiens
cggcgggcacagctgcaggagcgcctggaggctgccagggagcgtacgctgcagtgggtacgacccgccctaggtggggggcgctccggaccccaggcttccacagccgggcggggaggaac

SEQ ID NO: 362765 - DNA, 122 bp, Homo sapiens
tccaggtcatccagctcgcggcggagctggcacagccggaggtgctcctgcaggcgctcccgccgctctccagccagctccttcaggccggcatacagcttgtccacctgggcttggcggat

SEQ ID NO: 362766 - DNA, 122 bp, Homo sapiens
ctggctggctggcgggtgggccggttgaggaatctgttatcgaggctcaggatccattcgcgccaacaacttctcccgcgaagtgcaagaaggcgaagacagtggcgcgcggtgatgacgtc

SEQ ID NO: 362767 - DNA, 122 bp, Homo sapiens
ggccaatgagcgctctgtgctcataaagacacgcgcaattccactattcacctactaactcggcaaagcacacaaatttgatgcagacccagttctggggggctgcggtgaaacaggaatgc

SEQ ID NO: 362768 - DNA, 122 bp, Homo sapiens
cgtccctgttgcattttggcgtttggggctttgggtttatccacatgagctctgaacgtccgttatagttagggtgattggaaggtctccatcactgggtgttttaaaggtgattcaccacc

SEQ ID NO: 362769 - DNA, 122 bp, Homo sapiens
ctgctgggaagtgtctcctgtccgaccctcacctgcagctgtcccagcaattgcatggtccgttcattaggaattgtctggttgatactgacaagagcggaggagaactctgcatagcggcg

SEQ ID NO: 362770 - DNA, 122 bp, Homo sapiens
cgtcacttgatcaatagttcagtttcagtgtggctaatagtgttaaaaactggccgggcgcggtggctcacgcctgtaatcccaacactttgggaggccgaggcgggcggatcacctcaggt

SEQ ID NO: 362771 - DNA, 122 bp, Homo sapiens
ggcgggcacgtctgcagcatcttcctggggaggaggaaaggtcgggatgttctcaaaaaacgtgtgcatcgctggaaatgtgaggtcctgcatgttgaggtcttggccccaagaagccagta

SEQ ID NO: 362772 - DNA, 122 bp, Homo sapiens
cacgtcacaagaaggtgcagaaaggggatgaaaaagcctcatccctttgcaacgtcaatgcgatcatgggcaccaggctcctcggctgtgcagccctgtgtctcctggcagcagatgcgccc

SEQ ID NO: 362773 - DNA, 122 bp, Homo sapiens
cgctgtaccccatttcttcccacttctttcccaatgtagcctggtccctttatccagttccgagtctccgtaaacaccctgctcccaacacacacacccctccacgctccagcccgcgcccc

SEQ ID NO: 362774 - DNA, 122 bp, Homo sapiens
gaccacacaacctgggctgccagctcatcaccaagtctctgaggatgcagccaccaccttcgtcggcttccctcagcctccaactcagcaagacacaggcagatccatagcatggctgagct

SEQ ID NO: 362775 - DNA, 122 bp, Homo sapiens
ggggctctggtcctctgtttccctatccgtagaatggagacggctactctgtgagaagcccgaggtgcgcaggacccaagtgaggagccggcaacctgaagtcctcaggatggggagggatc

SEQ ID NO: 362776 - DNA, 122 bp, Homo sapiens
gcagcaggaactggtgcttcatgtgctgcccgtggaggagctggaggaggaacacgtggccggggatgccctgcagcttcaggctcaggtcccgcacctgcagctcagccatcttggcatgg

SEQ ID NO: 362777 - DNA, 122 bp, Homo sapiens
ccgggcgttacgagcgtgctccctgtgtgtgtctgagcgtaggatgggcgattgtgtgcccggggtgttgcgtgactgcgaatgttgtgtgtccgtgagttctgtgcgcaagaaaaggtgat

SEQ ID NO: 362778 - DNA, 122 bp, Homo sapiens
tgaagatggggcttaaaaataacaaaactggaactgcaagacgggcccacagaatgcattcgcgtagggagacaggaaaacgttagcggagggggcggaggtggcagagaggaaaacatggg

SEQ ID NO: 362779 - DNA, 122 bp, Homo sapiens
gaggggccttgccgcggccttcaggaggacagggaaccggcttcgaggtcatcctttggccgggattttattaacttcaagtcaggctcgaggcaggtgaaggagcctctcctccaccccaa

SEQ ID NO: 362780 - DNA, 122 bp, Homo sapiens
ctgccaggatcatcctctggggcttaacagcttcgttgtggctattgaaggaaaattgatcgtaacgagttggaaagtcaccagatgtcctctatgacactgagcgctggagaccaggcata

SEQ ID NO: 362781 - DNA, 122 bp, Homo sapiens
taaggaaatctgcgtttctccaggggcgtgagtctcaggcagtgtctgtgtgggcatcatcgactgctatgctccaaatgtcagctgaggagaaggaaatgaacagacttagggtgcaacaa

SEQ ID NO: 362782 - DNA, 122 bp, Homo sapiens
ccccgggagcgggggaccaccagtgggcagcatcacggccagccggcttcctggaggccgcgctcctttcctggagccgcacccccgcccggcccccgccggcaacacgtcaccgcctgcgc

SEQ ID NO: 362783 - DNA, 122 bp, Homo sapiens
gcttaccgatccggatgacgtggggcatcccgcgcgagtccgggatccagaaggcgcacacgaggagcccggcccagtattcccaaaccagactccggaggcgccgccagggagcggtcatc

SEQ ID NO: 362784 - DNA, 122 bp, Homo sapiens
gcagagcaaagagcaaaacccgctggctcctttttcatcaacttccgaaagatcctaaatcgttttggctgccaagtcagtagcaaataacttaatttgagggagactggtcaggctttata

SEQ ID NO: 362785 - DNA, 122 bp, Homo sapiens
ggcggcgggtgtgggcgctcccgggccggccacgcgccctcccgcacccgcccacctccccgccaagccccgagggaagccgcggaccccaagaagttcccacgtccccgacacgcccgccg

SEQ ID NO: 362786 - DNA, 122 bp, Homo sapiens
agaccccggccccgcaagcacgccaggaccctggaatcctaggggattccctgtgtgggccggtgtatttatttaaattcccgttgcagcgaaggccgcccttctgtcttcctgccagccct

SEQ ID NO: 362787 - DNA, 122 bp, Homo sapiens
ctgggaggaaagcagagctctttgtctgaataaggaaaagttcagttgttccttaggtttcgggcatatcagctattgctgtcattgggagtgtttcccagaactgaaagtgagccttttag

SEQ ID NO: 362788 - DNA, 122 bp, Homo sapiens
gctgaactgaatagacagagaaagtactttccagtcagatcatatctggcccactttcctcgtgtatgttaccctcctcactcctgtaggcatttgcatgtgtagtcacaagcaaatgtggt

SEQ ID NO: 362789 - DNA, 122 bp, Homo sapiens
aggcacgcagggagcgtcagggacaaggatgcgccctgagggggcgttgcccggagtgctcgggccgccaagggggcgggctggcggtttgtgcgcatgcgccgggcttctgcgcatgccca

SEQ ID NO: 362790 - DNA, 122 bp, Homo sapiens
atgaatcttcattaataggacagcctcaaccatctcgaacccaggaagcagggaggcgcgcggagccctgttgatgatccccggcaaacacaccgaggtctgccttctctgaacgccagcgc

SEQ ID NO: 362791 - DNA, 122 bp, Homo sapiens
gctaacccgccatatcttacacagctaagggctgccgacgccattttgcagggtgggctgcgcagactcttggcgggaggccggcgcgcttgagcgggagaggacgtggaagggttggaggt

SEQ ID NO: 362792 - DNA, 122 bp, Homo sapiens
gcctggcgcgggggctgcgagcacaggcccggggctgatcgtaatcgggtgagtctcatccggcagcagggctcgccttctggccgctctgcaggcgatgtgcgcggtgttctccgcccgcg

SEQ ID NO: 362793 - DNA, 122 bp, Homo sapiens
caagcctggccgggccgtctgcagcatttctcagccaaaatagaaatcaggtgacaccaacgtgaccacggcaagagcgagctggagcggagcctcgggtagccatgactaacagacatggt

SEQ ID NO: 362794 - DNA, 122 bp, Homo sapiens
gggcaggggcgcatcagctgtccggcttggaccggcgtgggcgtgggctgggggcttttccgatttgctgagtcagccgcgggcgccgcgggctttggtgtttccagcccaagcgactgtgc

SEQ ID NO: 362795 - DNA, 122 bp, Homo sapiens
ccttaaaggttaattaagaacctgaagctggccagcgtgcgtggccgatgacggtggatgcggcgtctctccaggccattaaacactaattaggtttagaaagtctatcgagctcctgaggt

SEQ ID NO: 362796 - DNA, 122 bp, Homo sapiens
gacggttccagccctgggccaggcagagaggaaaatgggcctgtctctgccgttcaaagacgcttttgagtttgggtgatggctgatgctggctgtgctagattttcccatggtgccgttcc

SEQ ID NO: 362797 - DNA, 122 bp, Homo sapiens
cctacaatccccagccctccaagggcttttaaagcattgagtgtgtgatgggggtaagtccgtatgctgcacttactccaaacataattatcaagctataaaggagacaccttaaacacaca

SEQ ID NO: 362798 - DNA, 122 bp, Homo sapiens
gttgggagcagctgcatggagacagttccttgctctgtgtgctccaggagtgggtgttcacgcgctccgccagcaagacctggcgtctgcaaaacacaggcgtgaggggcgtgcttactaat

SEQ ID NO: 362799 - DNA, 122 bp, Homo sapiens
acagaagaagggagacaaagctccctcctgtgtgtccctggtggtctagtggctaggattcggcgctttcaccgccgcggcccgggttcgattcccggccagggaattgttttacactggcc

SEQ ID NO: 362800 - DNA, 122 bp, Homo sapiens
gacgttcaggtcccatcagcacatgtgagtcaacacatccctgaagtgggaggacaaccacgtgaagaagtgaattctcctaccaccactatctgtcctactcatcttcctctttgcttccc

SEQ ID NO: 362801 - DNA, 122 bp, Homo sapiens
taccacctctgtctgcagagccatggggaagccctggaggagtcacactaccagaacactcggggcctctgcctgcctttgtctcctggagtcagatctgcttctccttcagccagattttc

SEQ ID NO: 362802 - DNA, 122 bp, Homo sapiens
actgggcagcttgtgcaggctgtgtgctaaatgcactgggaaacatgccctataaatagccgttcattgtcagcatgtgtgaaaagacaagagagcattccgtgctatgattcaggcctaat

SEQ ID NO: 362803 - DNA, 122 bp, Homo sapiens
ggtcttactgtgtttcccatggtagtctcaaacccctgggcttatgggacccttccacctcggccgctgggattatgagcataagccaccatgcccggcccagaatgcacttagctaaaccc

SEQ ID NO: 362804 - DNA, 122 bp, Homo sapiens
cttacttcatgtctctgtgtcacattttggtaattctcaaaatatttcaaacttgctaggcgcagtggctcatgcctgcaatctcagcactcgggaggccaaggcaggtgaatcacctgagg

SEQ ID NO: 362805 - DNA, 122 bp, Homo sapiens
cgcgccctgagccctgcgcccccccaccccccaggtgtacctgtccttcgtttatcccaacgactacactcgcctcacccacatggagacggacaacaagtgcttctaccgcgagtctccgc

SEQ ID NO: 362806 - DNA, 122 bp, Homo sapiens
tgtagtaaggatcagaccaaggacaaggaatcttactctaatcttgactcccatccctaccgacaactggccgtgaaacaaggcaagatatttcatctctctgagcccgagttcccttttag

SEQ ID NO: 362807 - DNA, 122 bp, Homo sapiens
ccctgcgcattccccggcgggcggcgggagccgcgcggagcgttcgccgctgcggggcggcggccgagctcccccacaaccccggggtgccccccttgctgggatccttagccttctcacgt

SEQ ID NO: 362808 - DNA, 122 bp, Homo sapiens
ggagccacttgtgcagatatttgagagaatggctttgtggtctagtgccaggactctgagcgcttacactgcaatcgatgtcgttgggcctcagtatgcggagccgggaaataagggcacat

SEQ ID NO: 362809 - DNA, 122 bp, Homo sapiens
ttgtatcattttcaaacctacattctagtattttctctcaaattgccaacacatagttaacggcagaaaaacatagtatttttgttgattagttcaagatgacagacattccacaacagaag

SEQ ID NO: 362810 - DNA, 122 bp, Homo sapiens
acagagtcacctgcatatgaaaatgagactgaagaatgtagcctgagcatccccttcctgcgcacttggccctggagtctataggattcccctccaccccatccaagccctccaggatttca

SEQ ID NO: 362811 - DNA, 122 bp, Homo sapiens
ggaaaccccaggcgcagaggccaggagcgagggcagcgaggatcagaggccaggccttcccggctgccggcgctcctcggaggtcagggcagatgaggaacatgactctcccccttcggagg

SEQ ID NO: 362812 - DNA, 122 bp, Homo sapiens
atacttctgctaatacactcatacaaatatttatttgaaatactcatgcaaatactcatacgaatactcatattcattcacaaagaagccaggtgtggtggctcacacttgtaatcccagca

SEQ ID NO: 362813 - DNA, 122 bp, Homo sapiens
catgaatgtaactagtagtataaagacactcactcagcttgtaacagacagacctaggatcggaaccataaagacactcagctagtaagcagtagagttaggatgtgaacactgccttgttt

SEQ ID NO: 362814 - DNA, 122 bp, Homo sapiens
cggcctcacacacaccctcgaggcccctctcgagcccccgcggagccctccgcggccgcacgcagaggaaggctgcctcctgtagcagagcccagccattcgcgggtgcccagttcatcttc

SEQ ID NO: 362815 - DNA, 122 bp, Homo sapiens
ggaatagcaaacgccgggcatacacggcgtgatgagtgaaggccgctgtgactctgggcccgcgggaaatcatctcgggagttttgtggggaccaagcacaagggaggagaggcgccccagc

SEQ ID NO: 362816 - DNA, 122 bp, Homo sapiens
ataagctaacatatgccaagaagtatgatttcacacccttgatagcactttggaaatgtccgggtggaagagagtccctcataaaaataagcacagttttctgcaggattggaggtcctatt

SEQ ID NO: 362817 - DNA, 122 bp, Homo sapiens
taatttcaagttttcaaaatttcctgaggcttatgatatacccagtatagggtatattttcgtggttgttccatgtgatttgaaaagaatgtgtattttgtccttgtttgggtataatattc

SEQ ID NO: 362818 - DNA, 122 bp, Homo sapiens
gtcccaactcttggttttccattacacagacagagtgcaagacgatgacttgcaaaatgtcgcagctggaacgcaacatagagaccatcatcaacaccttccaccaatactctgtgaagctg

SEQ ID NO: 362819 - DNA, 122 bp, Homo sapiens
gtcttctgtttctgaattccctcccattgcttccctctccggacaggcacacacacagagcgactccaggaagggctggaacaacgcctgcacgtgatcaacagcatccgcacacccggatc

SEQ ID NO: 362820 - DNA, 122 bp, Homo sapiens
ccccctctccactgccacctcttcagaggccccttgaggagaaccctttataatctgcgccgggagccctggttctagctcagagttcttttgcctatatatgtgtcctcctgggttggtct

SEQ ID NO: 362821 - DNA, 122 bp, Homo sapiens
tacaacatgccattcaaccagaactgtttaagctcaacaacaaaactaatacaagctttccgtattaagaattgaagtttttcctgtattaagagtttacacttgcaagtctgtgtcagatt

SEQ ID NO: 362822 - DNA, 122 bp, Homo sapiens
gggcctctggtgccttgttgaggtcttggacctttcagatgctactgtgactgtggtttccggcttcctgagttctcacactcagcttggtgctgcagagatcacaccccagttcctgcttt

SEQ ID NO: 362823 - DNA, 122 bp, Homo sapiens
gcaaagtgcagagggtgtggcaggactctggggcacaccctcccctcttccccacgcctgcggctcctgatgccacaggggtgcagggtaaggagagcctactgtttcctaaaggcgctcac

SEQ ID NO: 362824 - DNA, 122 bp, Homo sapiens
tgcaacctcaaacttctgcccaagcgatcctcccacctcagcatccgcagaagcaggggccgcacaggcgcgcagatgtgtgactttctaaggtccggccgcccaaagctacgccgaccaat

SEQ ID NO: 362825 - DNA, 122 bp, Homo sapiens
ctccgctggcggcccggcgcgctccgcgtgcaggtggagcagcagcgagggaggcgggggcgttggggtcgccaaggtcacattttctaacccgcggctcctcggcctctgggtctcacagc

SEQ ID NO: 362826 - DNA, 122 bp, Homo sapiens
cggggaccagatttgagctggacgtgagctttattccagacggagcagctactttgtaagcgatctccctgggatcgatatcatggaggggcacagatgggcttcagctgtgctgggtggaa

SEQ ID NO: 362827 - DNA, 122 bp, Homo sapiens
tgcaatctggagatatctggatgattcagttcctttagtgtggctcagaaacaagtaacccggagttcctctgggctcccatttgatagagactacggtaaagtgtaattgattagacgtgg

SEQ ID NO: 362828 - DNA, 122 bp, Homo sapiens
cttgccacctccaagcaccactggctcctcctggattatcacaacattctctcaggtcatcgccttctgccctcacccccctttagtctgttgggtctgcagccagaaggatcctgttaaca

SEQ ID NO: 362829 - DNA, 122 bp, Homo sapiens
gcaccagcaacagcaacagcgagcgggacggagttaggaccgctcggagcgcacaggtctcgaggtagtataaggtttgctatccttccacttgctggcagttgcagaagaagatctgcttt

SEQ ID NO: 362830 - DNA, 122 bp, Homo sapiens
ttaaagtttgagtggagggagaagcagtttttgcaaacacgggcttctctgttcagcgcccgggggtctctacaaacaggaggctgccgggctgtgtttgcccctctgcacctaaatttaga

SEQ ID NO: 362831 - DNA, 122 bp, Homo sapiens
ccaccaactgcttctgcctgcatgaactggtttcccatttttgctttaataaggcagttccgatggcaaaggctgtatgcactgtagcagtctcttctttttaaatgcatgatctatttgct

SEQ ID NO: 362832 - DNA, 122 bp, Homo sapiens
cccaggtggaggaagtggcgaagggggcactgaatgtagccttgggacattccaaacgggcgatcaccacagagaaagtcatttcttcctctctttagaagcagctgtgtttcctcaagaaa

SEQ ID NO: 362833 - DNA, 122 bp, Homo sapiens
tccaaatatccatcagctgatgaaaggccaaaccgatgtgttatatccatgcaatggaatcgttttttggacatgaaaaagaaggatgaacaggtccccacaaggatgaacctagaaatcat

SEQ ID NO: 362834 - DNA, 122 bp, Homo sapiens
tgacaggtatgcccagcaagacctgaagaaaggcttgcacctgtacggcacgcagggcaacgtgggcctcaccaacgcctggagcatcatccagaccgacgtgaggcgtgggcaggtgggcg

SEQ ID NO: 362835 - DNA, 122 bp, Homo sapiens
ctaattaaatgccatctgggtggttcctctgggtttttgagtccatcacccagttcagatcgagtcagaggccaaggaggagaacatgatgatggacctttttgaaactggctcctatttct

SEQ ID NO: 362836 - DNA, 122 bp, Homo sapiens
ttctccagagactggtgcggccacagaggaggattagcctcaggccttctccctaccgagcgcagtgagtttgaagtcctccccgaggaaaacctggactttccgaaacagctgaccgctca

SEQ ID NO: 362837 - DNA, 122 bp, Homo sapiens
gggggacgtgaaaagggaggaggtaggggggtatagcgaggcgtgtccgtccttccgtcccgtcagggcgaggaattcagcttttaaggtttatcgggggtcctcttggccaaaagggggtc

SEQ ID NO: 362838 - DNA, 122 bp, Homo sapiens
cgaactcctgatctctggtgattcacccacctcagcctcccaaagtgctgggattacaggcgtgagccaccgcgcccagccagcaaatgtttttaaaatagggcattcatgggcttttgggg

SEQ ID NO: 362839 - DNA, 122 bp, Homo sapiens
aaacaactcatcgccaggtaactcccagcccaggtgctcgtccatacaggggtgaacgcacggcagggggctgctcgaactctcactaagcctgcctctgttctttgcaaaatatttgatag

SEQ ID NO: 362840 - DNA, 122 bp, Homo sapiens
tggggcatggggcggacagggaatcaaatctcctttcccctttcaaatcttagagacagacgaggggcgaggcctctgacctgggtttccttctctgaggaagtgttgggtcccgaagccct

SEQ ID NO: 362841 - DNA, 122 bp, Homo sapiens
agctctttctctgcctatcctgttctttctcctgagcgcaccccggcagtgccagcagtgcggcgtcttcagcatgccaggagcatgtctggctccttggtgctccttccggagtcctgtgg

SEQ ID NO: 362842 - DNA, 122 bp, Homo sapiens
ccaagctctcacaaaagctcatagcctcttacctgtccactcgttccttaaaatcattgacggttgtcatctttacaaacaggacaagatcatgaggtgatgtccctgctccatgtgtccat

SEQ ID NO: 362843 - DNA, 122 bp, Homo sapiens
aggcgtagtaagccacctcggcggcagtgaccatcccgtagaagaactctacaacctgcacggtcttcactccttggccaaacaggagcggcagtcaggtaatgatgaaactaataatacct

SEQ ID NO: 362844 - DNA, 122 bp, Homo sapiens
cggaccctcccgcccctagctgggtgttggagaacagctgtcagcattgactgaaggctgcgaggcgcgcgtcggcaggaggcgctgcacgcgggcgctcgtcggtctgatcggttataact

SEQ ID NO: 362845 - DNA, 122 bp, Homo sapiens
gttacctggatacctggtacagattatttttgtttactttctgaaaaacacaaagcaggccgtgcgcagtggctcactcctgtagagtcccagtactttgggaggccggggcgggcggatca

SEQ ID NO: 362846 - DNA, 122 bp, Homo sapiens
gtgaagacttcgttctttcgctctttgcaatgactcttggtgctactcactctgggttcacgctgcctttatgagttgtgagactcaccgcgaaggtctgtagcttcacagctgaagccatc

SEQ ID NO: 362847 - DNA, 122 bp, Homo sapiens
agagagtgataacattgataatctccatatggcttaatgtttctttgctctccctcctttcggaaattctctgtgcctcgttaaatggagaagattccattaatattcaatgatacatgaac

SEQ ID NO: 362848 - DNA, 122 bp, Homo sapiens
ggtgagctctcgtgcttgcccttcacacaggaatgctgctggtctcctgtgtctggttcccgtctgcattttcagtcctcagtgttgagtgtgtgcaaatcccttctatcacctgacattta

SEQ ID NO: 362849 - DNA, 122 bp, Homo sapiens
ggaggcgggcacgggctagctgagcgagtcgcccgcaggagggctcaggtggctggaaggcgttcggacagacgcccgcggtgcgcgccgggacgggcggcggggagcctcgggacgcacgg

SEQ ID NO: 362850 - DNA, 122 bp, Homo sapiens
aaagctgttttctcatttgggtacatctggtttttaacaggtgggtccagaatacaatggcgtgttcatatcaatattaatccttttgaagttctagtaaatgtgtgtgaaatgctcaatta

SEQ ID NO: 362851 - DNA, 122 bp, Homo sapiens
tcgctttctcccagagctaagagcctaggctccggacctagggtttgggagcagtcagcacgacgtcctcgccccatcccgcggctgatgacacccgtgcccagaacgtgggtgtgggtagg

SEQ ID NO: 362852 - DNA, 122 bp, Homo sapiens
tctagctactctactagagctacttcaggaagaagatagtttggcattgtgacaggagtacggcctttggaatcaggatgtgtagacctctgtttgacttcttttgatgaccgtgcccttgc

SEQ ID NO: 362853 - DNA, 122 bp, Homo sapiens
cgtaagtaccgcgaggcaggggaggggcgccccgctggggatcggcgacctcaccgccgccgcctgtgctgcaggctttggggagcagaacctgagacattttcaaacaccttttaccccga

SEQ ID NO: 362854 - DNA, 122 bp, Homo sapiens
gggcccggctcgggaagggcagtgcgcgcgcatgcgttggggcggggcgcctgggacctgcgggccccaggcccagcgcgccgccagccggagtgcccggcgcccgtcgaaaggcccctgcg

SEQ ID NO: 362855 - DNA, 122 bp, Homo sapiens
atttgaggtaacttctgagccacctggtgcggcggcagcgtctctagctaaatgaagagacgcagccttggcagcacggcaggtggtttttctcccgttggcgtccgctgtgctttgttggg

SEQ ID NO: 362856 - DNA, 122 bp, Homo sapiens
ctacccccgtgacattggccataaaactgacacccgtttgtgctgtgctttcacgtacatcgcacctgtgatcctccgatcaccctgcgagttacgaggcctgctttacaagccttataaga

SEQ ID NO: 362857 - DNA, 122 bp, Homo sapiens
gccctggattagacttggggagtggggcaaaaggtcttgaagagcaagtttgggcaggaacggtaagctctgagcttctcaaaagcaaaaagccactccaggaagtgaagggaccatttggc

SEQ ID NO: 362858 - DNA, 122 bp, Homo sapiens
ctcctttcagagttccatcatttattccctcctctcattgccctgcacatgttctcttggcgatttcacctctggaacttccaccactgccatatggaatagtgatcctgcgtgtgtgtcta

SEQ ID NO: 362859 - DNA, 122 bp, Homo sapiens
gtcacatgtgagcgtctgtaccatctctggccctttcaagtgtgtcccctgggacacacacgtacagagagtggggtctccctaaagattcgcctcctcgctgcccttaatgctgttatttg

SEQ ID NO: 362860 - DNA, 122 bp, Homo sapiens
ggcaaatatgttcctcgtgccatcctggtggatctagaacctgggaccatggactctgttcgctcaggtccttttggccagatctttagaccagacaactttgtatttggtgagttatacag

SEQ ID NO: 362861 - DNA, 122 bp, Homo sapiens
cgtggaaaggaggatccgggaacgaggctgacagtcggcaacaaccgagcacattgttcccgcggcgcccggcctccccctcctcccgcgggcccggcccgtgcccaccctgcagccccagg

SEQ ID NO: 362862 - DNA, 122 bp, Homo sapiens
cttcgcataccaatctcgtcttccaggctctagggcatagacaactggaggtggacaggtcgttaaaagtaacaacgtcactctgcatttcgaatcatggataaatatacagccacgctgga

SEQ ID NO: 362863 - DNA, 122 bp, Homo sapiens
taaattcctattactgaaatacttgaaagggctagattaataaattaacaaagccttcttcggagcaactgtgctgaaattccgtacgcgtgacgttcccaccctctgccactcggtgacgt

SEQ ID NO: 362864 - DNA, 122 bp, Homo sapiens
gtaatgagtaaaataacactcttgcaacagctgaatgcttttctcatattctgagttgcccgaattaggggaaatgggtctaaatggctgcaagaggcagttttgtcagctagacgtctttt

SEQ ID NO: 362865 - DNA, 122 bp, Homo sapiens
gacggccctgtcccacacaggctgagtctgtctacccgagtgtcccgctcagttcacaggcgtaggcgtgcagagacgtagaacttacacaacagtacttggttgtcaggagacaaatgaca

SEQ ID NO: 362866 - DNA, 122 bp, Homo sapiens
cccgggccctggctcctggccccgcccttggtcccgccccgggcccctggctcctggccccgccccagcccaggcaggtcactgcgccatttcctgtccaaagctgggcgaatcaggtcggt

SEQ ID NO: 362867 - DNA, 122 bp, Homo sapiens
ttttaatgcctattattgcttcctagatggccctctcttaaatgtacagccttctagtagcgtatgtgggctatttgaaaacctctgcttccaatcagtttctgttttcaaaactagcctag

SEQ ID NO: 362868 - DNA, 122 bp, Homo sapiens
ccggcagttccaaaagccactgggacttggagagggacttccttcccctccagggaggcccggcggcgggacggtcccgctggaaagtggcccccgccgccctgcgtcggacctgtccaccg

SEQ ID NO: 362869 - DNA, 122 bp, Homo sapiens
atggctcaggcctgtaatcccagcactttgggaggccaaggcagatggatcacccgaggtcgggggctcgagaccagcctgaccaacatggagacctgcctctactaaaatagccaggcgtg

SEQ ID NO: 362870 - DNA, 122 bp, Homo sapiens
gtcctaggctgcttgcactctgaatttgggctattcaggtagtgtgctcaaagttgaaaccgcatacagcacaactcaagtttgcatcagactgggaagcgaacttaagccagcggtgcgtg

SEQ ID NO: 362871 - DNA, 122 bp, Homo sapiens
gggatggtccaaaagggtggcctcaccagccctgtgttccctagggaggccacacggttacggagccgatggctgacgtatttcatggcagtcaagtccaatggcagcgtcttcgtccggga

SEQ ID NO: 362872 - DNA, 122 bp, Homo sapiens
agccccacctctcccttagggacctccgcccaccctaccctcaagccaggatgcccggagcgtccccggaagtgggtgtggttcaggtgatttaactcattatttaatacgcccgcagggtg

SEQ ID NO: 362873 - DNA, 122 bp, Homo sapiens
gagaatcttaccagttctgcagctgatccaagcaagcattgggcggccccccaatacaggcgctctgctgtctccgcttccactccactagttcatcattaatcagggcattctgggtaagt

SEQ ID NO: 362874 - DNA, 122 bp, Homo sapiens
gtccaaagtttgggctgagcccacggcagaacgtgaacaccctctggcactgggggcctccgcggtcaacccaaatgccaccggcgtgctgagagacgcaggcggaccgtaacatctggaag

SEQ ID NO: 362875 - DNA, 122 bp, Homo sapiens
acagccatcgcccgtctcccatctccaagatggcggaggcagcttcaacctcacctctcgcgaggggtgcgtcccactgtctctgattagccccgaggtcagaggtaacgtttcctgggaag

SEQ ID NO: 362876 - DNA, 122 bp, Homo sapiens
tatacccgaaaggaataattatttctattttatttgccttgttttttgagttgcttcaggcggatcatttagaacaaacagggaagaacaggacttgccaaactaaaaagaaaaacatgtta

SEQ ID NO: 362877 - DNA, 122 bp, Homo sapiens
ccattggggcctgagccaaggaactttccttctactgccttatagtgcttaaacattctccgcctccagggtgcagattcagagctggccagagtttcagtgatagccgtatgttaaacaga

SEQ ID NO: 362878 - DNA, 122 bp, Homo sapiens
agggacagggctagagggatgatgggaattcagagtttggtgatggactaactgtatcttcgagatgacagaattgaaggatgagtcttttgagacaaatttgacaatatagcttttaaaaa

SEQ ID NO: 362879 - DNA, 122 bp, Homo sapiens
gaccgtgcctccgaaaattctcattgtagggactaagtcctctcactctgaactcacacccgtctgttcgcagcctgacctcatatcctggtctggatgtgcggcctcaccggggtgtcgtg

SEQ ID NO: 362880 - DNA, 122 bp, Homo sapiens
ggaggcccgggctcctcggtccccgccggctcccgctccatggccgcgtgtcgccgcgcccggctcctccgccgctcacgcccgcccgcgccggcctcttaggttatcatcactcgcggccc

SEQ ID NO: 362881 - DNA, 122 bp, Homo sapiens
cagggagcaggatctgcttcccggactctgagcagaacaatgggagccccagcaggctggcgaggctgacaagccctaggacggtgacctctccgatctccagatcggaaactcagaaacgt

SEQ ID NO: 362882 - DNA, 122 bp, Homo sapiens
cagcgagtcagaagggtgcagcagccgggtcggggatggccgggcgaggctgacccctgccgggcagcgcgggtggcgccacgggcggaggcgacttcctgggccctggtgcacggcgcccc

SEQ ID NO: 362883 - DNA, 122 bp, Homo sapiens
gcatactcattacagctgccttatttaggttagctgccttggtcttgaaccctggctgcacgttacgatcaccctgctgcctgggaactagttctgcaagtaattctgatctgggctggagt

SEQ ID NO: 362884 - DNA, 122 bp, Homo sapiens
gtctccctcaggtctctgggtcagccggcgccccagtgcgtgcctcgggggcagggatcccggcttttcactactgttagtaacagctcgcgcgcgctgcttcacagcaggtgggtgagcct

SEQ ID NO: 362885 - DNA, 122 bp, Homo sapiens
gcccctgaagaacgcggcggtgtgcgcgggcagcgacgtgcggctgcgggtggtggtgagcgggacgccccagcccagcctccgctggttccgggatgggcagctcctgcccgcgccggccc

SEQ ID NO: 362886 - DNA, 122 bp, Homo sapiens
ctctattgtgcctcgcagatactgcacttgtttttacaaattggaagtttgtggtaactccgttggggcacatctgtgggtcccgttttcaaacagcttgtgctcacttcatatctctgttt

SEQ ID NO: 362887 - DNA, 122 bp, Homo sapiens
cggggggcagagaaaggggggtgccggagccgcctcctgatgtcaaggctttaaaggggccggggagccccgcccctggccctgaccccgcctccctcctccctagcagccaatccacgttc

SEQ ID NO: 362888 - DNA, 122 bp, Homo sapiens
agcagaaggctctgagaaaagtgcatcacagtggcccattatgatgtctgtctatggtcacgtgagctggcatatgagagtgctctgtgagcctcagtgccttcagtggcatcattgcactg

SEQ ID NO: 362889 - DNA, 122 bp, Homo sapiens
aaaagaactctgacttgctggtaacgaaacacagctccggacatcctttgagaaagtcgccgtccccacctcagaaaacacacacacacacacacgtgtcccggaacttacacacacacaca

SEQ ID NO: 362890 - DNA, 122 bp, Homo sapiens
gcaggttggagtgaaaagcagtttgtacaggaggaggccgccactgggctgggcctggaccggtgcggggagctgccccgcagcccaggcagcgtttccgaagccaggactgtggttgtcgg

SEQ ID NO: 362891 - DNA, 122 bp, Homo sapiens
gcccctgtccagttcctccttctccttctggaactgctccatgcgttccacccgggcctgcgggcagggacggcctatcaactctggggagtcgtctgtcccttacccccgccccataccca

SEQ ID NO: 362892 - DNA, 122 bp, Homo sapiens
ttgtttacagctcccggtaacgacacaggtaacaccggaagtgacgtcagagcaggaggccgagagacaacttaaatggcgatccgaagttaccataggaacctggcttctttccagaacca

SEQ ID NO: 362893 - DNA, 122 bp, Homo sapiens
agctctgactcacaaacagcacatcaaagcagcaacgataagaaactggcagtaattgtgcgtgtgagcagtgttttcctgatgctctttgaggcttgggggcccctctgggcagcctgatt

SEQ ID NO: 362894 - DNA, 122 bp, Homo sapiens
attatgacgctggattatgacgcaggcagtgggcgcggactctgcggttcgcttgactgacggcgcagcctccgggcctagccacagcagcaacggcagaggccagcgggcgaggtcaagat

SEQ ID NO: 362895 - DNA, 122 bp, Homo sapiens
ttgcaggcccgcgccgccatgcctgactggtttttgtattttttggtggagacggggtttcgccgtgttggccggactggtctccagctcctgaccgcaagtgatctgcccgccttggcctc

SEQ ID NO: 362896 - DNA, 122 bp, Homo sapiens
gctcagcgcccaggcaccctgcccggtgccgaggctgagagcagcaggcaatctacaggccgagtcagctcgcgggcggtggccgcggtgtccgcagggctggctccggctccggaagactc

SEQ ID NO: 362897 - DNA, 122 bp, Homo sapiens
cacgccatgtcatcatcaacaccactgtctgtctcaatgccacagtccagttctgtaccacggcaggcctgggtgttagaaaataaatatttatttataaaaatttgtgtgtgaacacataa

SEQ ID NO: 362898 - DNA, 122 bp, Homo sapiens
catttaaaatatgtctcttgtgttctccataacaaaggccagctctccagaggaaactaccggagccttatctgacctggaggaagggcaattagtcaactcccaccccctacagatttcct

SEQ ID NO: 362899 - DNA, 122 bp, Homo sapiens
attttttttaacttatcagtgatatctgatgttatcagtatactaaaagtggacatagaacgttaaagaaggaaccaaagaggcaaagatacctggagttattagggacctattttgagatt

SEQ ID NO: 362900 - DNA, 122 bp, Homo sapiens
gacctgagccctctgttgtattctgccaacccacagcgtcacaggaagtactctgcctctcgggcctccaagcccgggtggggaaagagggcgccaggcggcgaggctgcgccccttccccc

SEQ ID NO: 362901 - DNA, 122 bp, Homo sapiens
tccaactggtgcctgaaattttcatgtggctttaagagctgctccccatcattgcacatgcggttatggctttcctccatgggctggtttatgttctcactggcgccctgtgctccaggcag

SEQ ID NO: 362902 - DNA, 122 bp, Homo sapiens
ccccgcaagcggccgccggcgccggctgcctcctgggcagcagccgcgtcctgcgccgcccgtccgcccgcaggcgtcctcggcggctactgtacctgctaaatttagctgcgccgggtatt

SEQ ID NO: 362903 - DNA, 122 bp, Homo sapiens
cttccttgtcatactgagagattgtggtgagccattgtttatcatccagaaaattaccgccgtccgaccgccccccggctgcagccaccgccgcggcagctgcgagagactgactgcaccaa

SEQ ID NO: 362904 - DNA, 122 bp, Homo sapiens
atcctcatacagaggccccaagagcggcctggccccttgacgtggtgaggactcagggaccgcgccgtcccagaaccagaaggctctccccaggcagtgtctgctggtacctggatcttgga

SEQ ID NO: 362905 - DNA, 122 bp, Homo sapiens
tctggcttttctggcctcctctgcatctcagacaatttctttggaatccttggcgtttgccgggagcactagcgtatcagaatctgcagttcctgtttgagaactgcccagggcccatttcc

SEQ ID NO: 362906 - DNA, 122 bp, Homo sapiens
tcccccccccgccccccggcccgctcccctgtttaatatttcagtgctgggtggtgtgagcgccagtcgccggccttcagcgtggcggctgctgggcggcggcagggtggcggacggagcgg

SEQ ID NO: 362907 - DNA, 122 bp, Homo sapiens
agcctcagccacgcctctgtgcagcggggaagactcctctcgcgccttctcagtcagtcacggatgatgctgacccagcgctccggggctttctaccaagtaatcagtccagacaaatgcca

SEQ ID NO: 362908 - DNA, 122 bp, Homo sapiens
tgggtcgggatggggatgtcaggccagcaggatcatggtacctgcctccagggagggcaacgtccacccactgagtccagcccgcccaccccacccactccggagcacctggctctgccctc

SEQ ID NO: 362909 - DNA, 122 bp, Homo sapiens
tacgatacctggttccgcttgctcatggtagctctgggtaaagacagaagacaggttccgcgacggattcgcgacgatacagaggcgcttagctgtgacgtcactgggccacgcccccgatg

SEQ ID NO: 362910 - DNA, 122 bp, Homo sapiens
acccagggccggcgctcctcaccaacgcgctgcagctacgggctcaggagggagccgcagcgtcggaggaggaaagcatttaagaatagcacaaagccttaggctcgaggaagcgtgactgc

SEQ ID NO: 362911 - DNA, 122 bp, Homo sapiens
gccttctcaggggttacccagagactagcagaatgaatagatctcttctctgtgctcccacggcaagccacatatcctttctcatagtatttgtacagtctctgatgtgtattgtaggtaat

SEQ ID NO: 362912 - DNA, 122 bp, Homo sapiens
ctgccaagacacacagtgcagtgggggcagcagggtgccctggtttgcctgcagttggatcgtctatcatgatctttctttccagggttcttcttgctgcagggggcctggccactcatggg

SEQ ID NO: 362913 - DNA, 122 bp, Homo sapiens
ccaggttggagtgcaatggtggagtgtcactcttgttgctcgggctggagtgcaatgacacgatctcagctcactgcaacgtccgcctcccggatcaagcgattctcctgcctcagcctccc

SEQ ID NO: 362914 - DNA, 122 bp, Homo sapiens
aggcagaaacaaatctcacaggcaggaaatgccttttacagagccctacctcctacaaaccgcctaacaacaacataacccacatccatccttcatttatcctcaagcatatattcatgaag

SEQ ID NO: 362915 - DNA, 122 bp, Homo sapiens
ttttaagctctactaaatgatcgtatcctttctggcttcgaaacttttgtacctaaaaatcgagagaggcgctgcattttttcagttgaaactgtcaaaacttggagaagggggacctcgga

SEQ ID NO: 362916 - DNA, 122 bp, Homo sapiens
cacccggagtggtggggttagctctcgtctggcaggcctcggaggatcccgtcccagtgacggtccagagaggggcctggggaggcgggaggagggacgcgagagccagagaagtgggcgcc

SEQ ID NO: 362917 - DNA, 122 bp, Homo sapiens
gtgtctgaaaagcagggagaggcacttcctggctctgtttgagttggatgggcctgtgctcgaggctttgcctgctcttctgtcacgaaggatgtttacggggaagccaggactgaccctat

SEQ ID NO: 362918 - DNA, 122 bp, Homo sapiens
cccacacacagccccagggtgcacggccccacacacatagccccagcgtacacggccccccgcactcagccctagcgtgcacggccccacacacacagccccagcgtgcacagccccacccc

SEQ ID NO: 362919 - DNA, 122 bp, Homo sapiens
agccttgggggacctggtttggaaatccaggttggggtgacgtctggggtcacccaaagacgggctggctcccagtgtgtcctcagacaagcctttctgtccctggccctagaccctgcctg

SEQ ID NO: 362920 - DNA, 122 bp, Homo sapiens
tgggagcagagtgggtggtgggtgctgtgtgctcacgagcgtgttcagggatcagggccccgcctgtgacttcactttatcacttccttcaaggccctccccagacgcagccacacgggggc

SEQ ID NO: 362921 - DNA, 122 bp, Homo sapiens
ttttcttttttacccaactccggattattttccccctcaaggtgagggcagtgagagcagcgagggcacagtccgcacaaaaagggggaaaataatcgcaaaccaaggaaccaaaagtgaaa

SEQ ID NO: 362922 - DNA, 122 bp, Homo sapiens
gtgagtgttacagttcttaaaagatggtgtgtctggagtttgttccttccgatgttcgggcgagtcccgagtttcttcctcctagtgggttcgtggtctccctgacttcaggagtgaagctg

SEQ ID NO: 362923 - DNA, 122 bp, Homo sapiens
ctttagcatctcgccaagcctccctcatcaaaggagggaagtgaaatcagagccccactccggctgttttagaagttttcccgaatccgtgatccctttacaaagcccgggccctggcctgc

SEQ ID NO: 362924 - DNA, 122 bp, Homo sapiens
gcttaggcccctcaggacccagggaatgccagggacattttcaagacacagacaaagtcccgtgccctgtttccaatgccaattcatctcagcaatcacaagccaaggtctgaacccttcca

SEQ ID NO: 362925 - DNA, 122 bp, Homo sapiens
gttctgagttcaagttgcctcggaagtcccagttggggatacgctctcgcgcaccaggtacgcctggtgtttctttgtggtttttcggattctttttggggagtgcggggagtcacagttag

SEQ ID NO: 362926 - DNA, 122 bp, Homo sapiens
ccaggaaaacttatattctcctctaagtaactctgcaggcttcttgaattccaaccaaggcgaagtgttgaaagagatgtgagatcaagagcttccccattcatttgagaaggtgcagccca

SEQ ID NO: 362927 - DNA, 122 bp, Homo sapiens
tagggtcgtgcggtgcgtgttccagtgtagggtcgtgcggtgcctgttccagtgtagggtcgtgcggtgcgtgttccagtgtagggtcgtgcggtgcgtgttccagtgtagggtcgtgcggt

SEQ ID NO: 362928 - DNA, 122 bp, Homo sapiens
ggggcgaggaggagatgcttgggtggccaggccattgctggcactcagtctatctcagttcgtacactgtgttaggtgtgaccccagccccttgcaggcaccctgggcttcctgctccagtt

SEQ ID NO: 362929 - DNA, 122 bp, Homo sapiens
ccattcttctttccagtgacctatgagggaagaagatggcagcgtcagaagcagcagcctcgtcctgggtcattcttcacagacaatgccgcaggaggctcttggtccttctcccctgggaa

SEQ ID NO: 362930 - DNA, 122 bp, Homo sapiens
ctactggagggagaggggtgaatgtcacccctcccctcaaaagcaacatataccagctctcgctgtcatagacactagaaaacagcttgacatataagctaggattccggcaaaccgtacat

SEQ ID NO: 362931 - DNA, 122 bp, Homo sapiens
attgcaacaagaccaaaacgaaagaggaacagggcctgacaatgttcagagaaggaaaaccgaagaagtaaccatccccaagttaaaaatgacgtggggatgaaaaaataggttgcctgttg

SEQ ID NO: 362932 - DNA, 122 bp, Homo sapiens
agctactcgggaggctgaggcagaattgcttgaacccaggaggcagaggttgcagtgagccgagattgcgccactccactccagcccagtcaacagagtgagactctgtctcaaaaaaaaaa

SEQ ID NO: 362933 - DNA, 122 bp, Homo sapiens
gtgttccaggattcgccttggtaaaccttgttccctgttccttgttcggagttccctggccgggcattgcatttcatgatttcttcttcctttcgctccctcttaactatcctcccctaatg

SEQ ID NO: 362934 - DNA, 122 bp, Homo sapiens
actggagaaattgctatttctgtgggcaatttgtaagaagccaggcattttctttggaagcgtcccaagtttaggttgggattgaaatggctggaaagaatacttatctgatggatttcata

SEQ ID NO: 362935 - DNA, 122 bp, Homo sapiens
gcggagagtgcagggccggggaacgcgagccctcgggggcagctgcaaggcgttgggcagcgcttgcctgcgccgagcgagtctccccttcccggcgctccgccgccccgcaccccactctc

SEQ ID NO: 362936 - DNA, 122 bp, Homo sapiens
agctccctctcctcctgccccagccggtctgcaggaaggacacacggaggccagtgcacacgctcttcacacagcctgagataaatatttcccgggaaacggaacttgttctctcagtgttt

SEQ ID NO: 362937 - DNA, 122 bp, Homo sapiens
gagtgctcctgggaggaaaggcgggagctgcgggccttggcttgggtgctgttggggccacgttggggatacctctgcctaagaagcattctgatgctgccacccacgtggctgcaggctgc

SEQ ID NO: 362938 - DNA, 122 bp, Homo sapiens
attctttttcctaccatctcttttttttctgtaacacttcataggaaaatgcagagatttcgatggtgttttatggcagtattcccaggaacattaaaacttcataaacttcgtatcatgtg

SEQ ID NO: 362939 - DNA, 122 bp, Homo sapiens
gcggcgagatgggcacgaacctcgcgctcacttgctgctcagtgccagggcgaggggcgtcgctctgcccccagaatccaactggtaatgtgggaaaggtgtggtccaggaccggtgacctc

SEQ ID NO: 362940 - DNA, 122 bp, Homo sapiens
tgggtcggttaaaagttgtagtaaagaagttttgggagggccctcactagaaactcaaggcgggtttcagctgatttaacctggtttcctacacatttttgcggtgattctgctctggaaat

SEQ ID NO: 362941 - DNA, 122 bp, Homo sapiens
gcggcggcctacctggaggggccagtcgtggcggcacccttccagcctgttgggacggcgcgtggtcccccagcgacgccacgcctcctccggcgttcgattggtcatcgtgcccgggccgc

SEQ ID NO: 362942 - DNA, 122 bp, Homo sapiens
ggggccccgtgttttcagagtcatggaggcgctaattcctgtcataaacaagctccaggacgtcttcaacacggtgggcgccgacatcatccagctgcctcaaatcgtcgtagtgggaacgc

SEQ ID NO: 362943 - DNA, 122 bp, Homo sapiens
gttttgcagctgcacgcttccattcccagccccagccagagaagaggagccaactcctcacggcagatcccttgatagaggaggatgaaccgaatccatgaccctccagacccgggaagcga

SEQ ID NO: 362944 - DNA, 122 bp, Homo sapiens
ccattgcctcagttcaacatgaacaccacctcactagtcttctgccaatgcaaccacttccgctacccctcaccccctccacctctcactgccactgtcaccctcacccaaccccaagcagt

SEQ ID NO: 362945 - DNA, 122 bp, Homo sapiens
tctgtccttttcactgctggcacacagtagttgctcaacaaaaatgtgcgaagtgaaactcgaacaggcggtcaggctcacagtccacgcctcttcctactgtggtcccgctgtgtttggac

SEQ ID NO: 362946 - DNA, 122 bp, Homo sapiens
agtctgcccataacagagtagaaggacctgatcgcttttccctttagccggcctcaaggccggcagcaggctgcttggcaggaggaagcgatttcctctgcttctctgggtttcaggaaggc

SEQ ID NO: 362947 - DNA, 122 bp, Homo sapiens
atggagagtggagaggagacaaactgagagagaacagaacagagagaaaatgcagagaagcgttatttagggaaatagccctagaagagcaaatgtgcttgtgttcaaatgaatgccaccaa

SEQ ID NO: 362948 - DNA, 122 bp, Homo sapiens
gactggctgatagcaggtgagaaataacaagcactgaaaggccaagataaatgtcatatacgagaacctattaccaagttgtcaaggctcttctgatctaaggatttttgacaacagatggc

SEQ ID NO: 362949 - DNA, 122 bp, Homo sapiens
cccagtgcatgagtgtgggtgtgtgagtgtgccctgccataggatggtatcctgtgcaagcgtgggtcctgccttgtgccctgagctgctggatatgctcagccacctgcgaccctgaactg

SEQ ID NO: 362950 - DNA, 122 bp, Homo sapiens
atcaggggacacaggggcggcggggcggggcctccgcgagggtcctcacctggccccgcacgtgtctatcttatcccggctgcccgaccaatcacggcccgaggatctgcgcctgcccctct

SEQ ID NO: 362951 - DNA, 122 bp, Homo sapiens
ggcgaggccctggacggcggcggcagtggggctcctccttctgtttcccagaccgagagccgcgccggcaccatgtcagcttaccctaaaagctacaatccgttcgacgacgacggggagga

SEQ ID NO: 362952 - DNA, 122 bp, Homo sapiens
tgggctgcggaacagagtggctgggagaagtcctcctagacagggttgagagtttgccgacggcccctgagaagctggggcgttccgaattggctgagcgcgcggccgggggcggggagttt

SEQ ID NO: 362953 - DNA, 122 bp, Homo sapiens
gccagagggagccagcagaggccgttggggggcaagcaaggacttgcttctgaggggagacgtgggtctcggcagtgcggacccgtccggtcatgctgaggtccccgaccttacccgcgttt

SEQ ID NO: 362954 - DNA, 122 bp, Homo sapiens
acagaagagaagctctgagtaatatttttatttccattgctaaggagctattcaccaccccggggtttcagtacctaaagtagattaaagtaaagaaagaaacaaagcagtccccttaaaga

SEQ ID NO: 362955 - DNA, 122 bp, Homo sapiens
cccccgccctcctggtctggctgcctcaaggaatgttccagggcacgtgagtctcacctgcggccttagaaggtagcaccccactcagacgcaatttgaaccccatgatcacagccgcccag

SEQ ID NO: 362956 - DNA, 122 bp, Homo sapiens
caaccgtgtctacctgcagataattgaacttgttgtcaccgctcccttgaccggctgaaacgtgcttctgaagtggctctggtcacaggagccttctggaccacgagccacatctctctaaa

SEQ ID NO: 362957 - DNA, 122 bp, Homo sapiens
ctgctgcagaatgagctcttcctgaacgtgggcaccaaggacttcccagacggagagcttcgggggcacgtggctgccctgccctactgtgggcatagcgcccgccatgacagtgagtgtcc

SEQ ID NO: 362958 - DNA, 122 bp, Homo sapiens
gggccccgtctcagagcctgatgcgcaggggtgatgcgatgcgcctcttggaggctccatcgcagggccctttgaccagctggaagaaatcctaggctgggagtctgctgctgctcactctg

SEQ ID NO: 362959 - DNA, 122 bp, Homo sapiens
atgaatttcttcaccacgtgggttgtctggccaggtcttcacaggttctcctctgtgtctcgccctgcacaggatctcatggccaaagtcagagcgatgcttgcagcttccaaaaacctgca

SEQ ID NO: 362960 - DNA, 122 bp, Homo sapiens
tgcctcctggatggagccatgaagccagcttcctttcaccagggtcagtgcgttaggtcccgcagaactccctgagacactagctacactgcagcttaagtaggcgggtccgggatccagca

SEQ ID NO: 362961 - DNA, 122 bp, Homo sapiens
agggcctgtcgtctttcacaccttccttctttcactcagcttcatgtctgtgagatgatccgagtcgccccgtcatggctaaattccactgttccattgtatgaaaataaaataatcttcct

SEQ ID NO: 362962 - DNA, 122 bp, Homo sapiens
tacatattatttggccattttaaattatataccacttttacatttaatgtagccatttgacggagttacttcaaaattttcatataagccttgtcaaaaggtctcattctgtacttttacca

SEQ ID NO: 362963 - DNA, 122 bp, Homo sapiens
gctcagcacctaccagggtcgagctcacacacgtgcctacgacccgccgcggcgcctgcgcggtagcatcgcggagtcggtgctttagtacgccgctggcacctttactctcgccggccgcg

SEQ ID NO: 362964 - DNA, 122 bp, Homo sapiens
ttttgagcaggagtcggatgtgtggggaggtatgggggccggcgagcatgtcctggaccccgcgtcccctgcccacccggcagagggagcgttgtgcggggagactccagaaacaaaatccg

SEQ ID NO: 362965 - DNA, 122 bp, Homo sapiens
ggcggggctgcagtccatgggcttcgcgccccggctggatggaggggctggccctcggggcgcacccctgctcgcgcctgggccccgctgccttgggctgtggctttgcctccccggcgggg

SEQ ID NO: 362966 - DNA, 122 bp, Homo sapiens
accactcagatgcgctcgtgcttggcttggagccactgttgtctgtaaaaggtacaattacgctgctaacgctgtacctctggcttggggctcacgcccagactcgcacccaggctcgcttg

SEQ ID NO: 362967 - DNA, 122 bp, Homo sapiens
cgtggcagtgtccccggtcgggggtggatgcagtggacctctttcctccagaaggagcagcgatgcctcgtccgcagttgacgcgtctctgaatcccaccgcagaccccccgctgggtcccc

SEQ ID NO: 362968 - DNA, 122 bp, Homo sapiens
gattcctactgtcatacatcacataggacagtaaagaaatacatagtttttcccaatatacggcatcacacaggagctcctccctaaagctaggaccaaaatttctatcctcagtataaaga

SEQ ID NO: 362969 - DNA, 122 bp, Homo sapiens
agtcagatggtagggccaggaggaccgggctcagggccaggggccttcgggcacgtgctgcggaggagcgcttgtgagatgcacatgccatgtctgcagccggcgatgcccttggaagaagc

SEQ ID NO: 362970 - DNA, 122 bp, Homo sapiens
cgcctcccacgtggggatgatgagacacatgcggatgatgagacacgtgcgctataggggcgggttgcttgggagggggacgcacaacgcccacgatatctggcacgtccatggccactgca

SEQ ID NO: 362971 - DNA, 122 bp, Homo sapiens
tgcccggtgccccagccttctgcactggcttgtgttctggccagatttgctgggtgaccccggcagcctcaggctgacacagtccttccacgggcagccctggcggaacagcctgtcctttt

SEQ ID NO: 362972 - DNA, 122 bp, Homo sapiens
tagccaagtcatcaaccagccctcaacatgcccgccctcaagactaaaccctcggccaatcgggaaaccggagtcgcccggcacgtcacttattttgcatatgccctcctctccccgccccc

SEQ ID NO: 362973 - DNA, 122 bp, Homo sapiens
gagcatccaaccctgctgatgtttctgaccttagagcagatgatcaggttaatcaaacaccgtctgaacagactaaaggcaaggcatctagccaagctaataatgtacagcatgaacagagt

SEQ ID NO: 362974 - DNA, 122 bp, Homo sapiens
ccctgacatgttcttcatgaggtgatgacagggacattgacaggatgaatttctatcccccgctcccttcacacttcccattacggcaacttgagaatgagcagtagggaattctgggaccc

SEQ ID NO: 362975 - DNA, 122 bp, Homo sapiens
actggaggctagctcttgtcgcggccgcggcgagttaacatcgtttttccaatctgtccgcggctgccgccacccaagacagagccagaatgttcaggatgctgaacagcagttttgaggat

SEQ ID NO: 362976 - DNA, 122 bp, Homo sapiens
gtgaaatctgaataccagttggagtttagggtaatgtgatattcacagcatttggagctacgtacctaacattcataacgtagtaacacaccagtgttggtttctaagctgtatcaaatgta

SEQ ID NO: 362977 - DNA, 122 bp, Homo sapiens
cttcagctgcgccaggtgggccgcgtagccatccgtgatgaactgcggggtcagtgaggacggctgtcacaggctggggctccccgagctgcccgcctgcacccgcccccacaatgcgccca

SEQ ID NO: 362978 - DNA, 122 bp, Homo sapiens
gagtaacagcagcccaacccttcccggtggcctgtcagccttggcccctacgggctcagtcggtgctccctgagcacccacgggggccctatcagaccgccctggtgcatgggtgtggggtg

SEQ ID NO: 362979 - DNA, 122 bp, Homo sapiens
agatggcgagggaggctccaaagagtttcgggagggggcgccggatctggtttaagagaccgcggaacagatggtggagagctcctggatgaaagtttttgaacaggcactcgctaatagac

SEQ ID NO: 362980 - DNA, 122 bp, Homo sapiens
ccgctttcacactgcaggcagctaagtcgccgagaaaggcagcaacttgacgcccgaccccgccacccaaacccgctcgctctgcgaccccagagcagccggcgccaacccgtccccttcgc

SEQ ID NO: 362981 - DNA, 122 bp, Homo sapiens
tcactctattccctttataccaacctgaacctaatatttaggaccaccaaggctagacatcgttcagccacctggcaattagtgtggaaaggctgaggtatcacctgttttcagaaaacatc

SEQ ID NO: 362982 - DNA, 122 bp, Homo sapiens
ccgcccgggtggacccgccctgttcaagcgcggaggggcggaggcctggttgggttgtagcgtggtgcggagcaggacgccgcctcgtgccatggtcactggagacgcacgcccatcttccc

SEQ ID NO: 362983 - DNA, 122 bp, Homo sapiens
ggcgaggccctcagcagctgtggagtctgtgccctgaggccccacactgggaactggggacgaggagacggggacgcggcccgggtcttgacctcctcaggctcaccagacactgcgttcag

SEQ ID NO: 362984 - DNA, 122 bp, Homo sapiens
cgcgccgtccgcgtggccagtgcgcaggcgcggccgtgggggccgctgggagttgtagtccgcgccgggcgggggcacgaggcctgggttccgcttccttccggtcgttaacgcccacgggc

SEQ ID NO: 362985 - DNA, 122 bp, Homo sapiens
tgactccttcctgccatgtctagcttcagcctcaggctacgcggactggccaggaccgggcgcaagcggggaggacattagggggagtggctttttctcgggtggttgttggtgagagtgta

SEQ ID NO: 362986 - DNA, 122 bp, Homo sapiens
aagtgtggacttgccagtctcctgactccactgttagatcattttccttgggtgtgggggcggggcggggcgcggcggggagacggggtagcaaaaagaaccgtgaagaaaccacgcctgcc

SEQ ID NO: 362987 - DNA, 122 bp, Homo sapiens
attttagacatacaaccatccctccaattatttctgtaataatgtccttcctgtgcctagcggaactgccaaatccggccacagcacagctgattatgaacttgtgactcagtggccgacat

SEQ ID NO: 362988 - DNA, 122 bp, Homo sapiens
aaaatgctacctcatcgcgttattggcaggtcctcgattatcggcgagtcactgaggttccgagaggggcgtctctgctcacgcaaacagctacccagccgcctcccacggtctgacctcag

SEQ ID NO: 362989 - DNA, 122 bp, Homo sapiens
ggaaaggaggtcaccgcgcctgcgtgttaggaagcgtgacccgggtgggaaaaccctccgcgtccgccattttggctgcctctgtcggtctgttcagttaccacgtgaaccgccgacggaga

SEQ ID NO: 362990 - DNA, 122 bp, Homo sapiens
cataaaccgaaacgtgtctgcttccatcaaaatatttgtcacattatctgaggcccaggtcgggctgctccaccgctcctccttcgccctcctttatccggcccaccggggaggattcagcc

SEQ ID NO: 362991 - DNA, 122 bp, Homo sapiens
gaaaccgagcacagctggggctaagcggcctagttgccgaaaagactgcagcggccaccgcgtctgctgcttagtttgagtagtaacatgtgtctgagagtttgtaaagcgggatcccttcc

SEQ ID NO: 362992 - DNA, 122 bp, Homo sapiens
ggtaccaggaggcagcacaagcaggcggggtggagaggggcagggcgaggccccgggagccgtcaccatggcaacccagtctgctttccagaacaatgtctctaaccaggaaaacagctcca

SEQ ID NO: 362993 - DNA, 122 bp, Homo sapiens
tgctagacgctgaagggaaggacagtggaggggaggggtggtgattcgcttggtaacagacgactcctgtttttgggaggagagacttgaagctaattcatattgttcacagtggcatttct

SEQ ID NO: 362994 - DNA, 122 bp, Homo sapiens
gggccccttctcctccaggcgctccagtttcatggaaaggcttccctatgaaactgaaaacgcgctggtaagaaggagaaatgcgaccggactgcaattcccagaagccgtcgcaggccctc

SEQ ID NO: 362995 - DNA, 122 bp, Homo sapiens
ccatgtgaagatgaaggcggagatcagagcaatgcttcttcaagccaagaaacaccaaagcgttatcagcaaaccaccatgagctggaagaaaagcctggagcaggttctccttcccagccc

SEQ ID NO: 362996 - DNA, 122 bp, Homo sapiens
cgtcgtagaccgtgcagctctccttgggtggctgcgagtgccttggccgtgggccctgtgcgcggccagccccggcggcgggagggcgataattgcccagagacgcagcacttacctgggcc

SEQ ID NO: 362997 - DNA, 122 bp, Homo sapiens
agtagctgggaccacaagcacactctgctaatttttcaatttttttgtagagatgggactcgctctgttgtgcaggttggtctcaaactcctggcctcaagtggtcctatcacctcagcctc

SEQ ID NO: 362998 - DNA, 122 bp, Homo sapiens
cctggcgcctaccttgatggtggtgaactccttcctccagggcagcaggtacaggtgcaccgcggcgagctccagaagctcgaaggcgcgagccaggccgcgtagcgcgggcgccaggtcgg

SEQ ID NO: 362999 - DNA, 122 bp, Homo sapiens
ggggcgaggaggaggggacccgccgccgggggctggctgcttcgctccgagccgacttttcgccaatggtccaaagggacatgtccaagtcgcctcccacagcggcggcggcggtggcgcag

SEQ ID NO: 363000 - DNA, 122 bp, Homo sapiens
aggtcgggtgacagccaagctccgtgttccagtgggaaggtcccatgggtctgtgttccacgcctcttgtcatgaatatgggggattcacttagaaccaaagcatttgttccaggtcccacc

SEQ ID NO: 363001 - DNA, 122 bp, Homo sapiens
ccacgcggctctccctgcagcagccgcgggcggagctgccgggccagcctgagatgaagacgcagctggagcaggacagcatcatcgaggccctgctgccgctgagcatggaggccaagatc

SEQ ID NO: 363002 - DNA, 122 bp, Homo sapiens
acccagcgcctccatccccggtgcgtggactccggcgccccagctcccggcttcaagccacgtccttggactcgacctccaaggagccactggcactctggcgggcggccgctgctcagctg

SEQ ID NO: 363003 - DNA, 122 bp, Homo sapiens
cagagctaaattgggaattatttgacctgcagcttctggagaatggttttgcctcctccccgcgacatcaactaactcacttgctgttagctaagggcaaggacaatgtctcctctaccaga

SEQ ID NO: 363004 - DNA, 122 bp, Homo sapiens
ttttcattggggaccccgtccccgtcggcatccggatcgcaggcgtctccgatgccatcgcggtccacatcctcctgccctgagttgggcacagtcacgcagttgtcctgggggcgggcaca

SEQ ID NO: 363005 - DNA, 122 bp, Homo sapiens
cgccggagagttggagagtctgtggttcagaatgcgaggtgacaacgtgctagcagccctcgctcgctctcggcgcctcctcggccttggcgtccattctggccgtgctggaggagcccttc

SEQ ID NO: 363006 - DNA, 122 bp, Homo sapiens
tgcagaggcggggaagacccgccacaggctggcgtgcggagccccaggccggcggccttccgtgattaacgagtgtttacaagactctattagtaatgacacagacaccaatggttggagac

SEQ ID NO: 363007 - DNA, 122 bp, Homo sapiens
agacaacgaagcaagggacagagagagccacggtgttgctccagacgggcatcaggcactcggtgtctgtgtctcacctgcccaatatcgggatgcccagcaacaggagggccgtgttatta

SEQ ID NO: 363008 - DNA, 122 bp, Homo sapiens
tctcaggcctccccccgggagcgtctcaggccccgtttacgctgagtgtctggggaaagacgtggtttggttttgtttttctagtaacccagatgaaatgtttaaaagcatggttggcagca

SEQ ID NO: 363009 - DNA, 122 bp, Homo sapiens
ttctggattttcttactttggatgacctctgatgggcagacccctcttccccaaatgctccgtctcaccctgctatggctccttggaagacatggccctggcagtcattgctgggacagcct

SEQ ID NO: 363010 - DNA, 122 bp, Homo sapiens
actgccagtccctccagggaccccaccaacgctacccggcacacccaggctccccaccgacgtgccccccacggtcactgccccgtgttctgcttggttccctggtggttggccaggagcct

SEQ ID NO: 363011 - DNA, 122 bp, Homo sapiens
cccatctccacaacgtcacaagagcagcggatacagacaagatggagacagcttctttctcgcctttccgagattatttactatctgcgagacacttccggacgcacagcgcaacccgcccc

SEQ ID NO: 363012 - DNA, 122 bp, Homo sapiens
gagagcagagaggaagctacggccgcgcggtctgcatttatatcaaagcgtgctgcgtcacgcgctgagagcgtcagattgtcgcctcccggaaaagaaagcgggaggagcgctgaggccgg

SEQ ID NO: 363013 - DNA, 122 bp, Homo sapiens
cacataatgctaccaggagttcctgccggctgcagactctccgcctcctctcccaagagccgagggtctgcctgcccagattcctttatatacagaagtcaggcttgttttcagctgcacat

SEQ ID NO: 363014 - DNA, 122 bp, Homo sapiens
gtgcgccccgggacgggtagttttgggttcctcgacgcttggccaggtttaggaaagacccgctgtcttccttgctgcccccacctaggagactcggcgccttgcgctccgtcctttttaat

SEQ ID NO: 363015 - DNA, 122 bp, Homo sapiens
acagagagcagcacacaggagaccgcaggcgctcagagctcagagagggcttcctggaggcggtgcctcagaccagggtggtgctgtgggcccggtgggaggggcggtctcacctacccctc

SEQ ID NO: 363016 - DNA, 122 bp, Homo sapiens
gtgtgtggcagcgtgcgcgcgccggggtgtgcgcccgcgagtgtggggggcgtgggcgagcgcgctccccgctccccagccgagagcccgagacccagccccgcagccggctcctgtgtgtc

SEQ ID NO: 363017 - DNA, 122 bp, Homo sapiens
ctacctcaacacgcaattcagaaacaaaccagaacaccggccgcattaggtcagcactggcgccattaggcacctccgagagcaaagctgacaggcagggaaggaatgtcagcatttagcat

SEQ ID NO: 363018 - DNA, 122 bp, Homo sapiens
tttaagcctgtctctctggaacccagagcccacatttgcaatgagccctagaggctcttacgagttggaagcggtcacttgatattgatttagggcccttgggtttctggaagcatgccaaa

SEQ ID NO: 363019 - DNA, 122 bp, Homo sapiens
cccaggagaacaagagacaggtcctgacaagcagtagagtcggtgcagcgcgcccgggttcggatagggttaaggccaacacctgcagctgaagtacgacccacatgggaagtaggaagtgc

SEQ ID NO: 363020 - DNA, 122 bp, Homo sapiens
gaagtagctgctggaatgactgaccatgtggggttcattaagctgttgtgcattcacccacgagaaaggctgggatgcttgtgaagggaactccactcttcatttcagaaattttaacgccc

SEQ ID NO: 363021 - DNA, 122 bp, Homo sapiens
gactcagatgttgaattttagggcacccacaccgtagtcaatccgctctcctccggaagacggtcactcttcggggacctgaaaattcttaggtggcgctccccctccgagccagccgtcct

SEQ ID NO: 363022 - DNA, 122 bp, Homo sapiens
tgccaccgaaaacaacgtgagaaggtaatgctttagaccactgccgtggaattctgccatcgactggtctgccacaagcatggtttccacatagcggtgactggacacaaatcgcttctttc

SEQ ID NO: 363023 - DNA, 122 bp, Homo sapiens
ctccgtgtgcatgagctcacacccactggcagttgtgttctgtttcacttcgggagccagcgactccactctgctgagacggcttgcaccaatctctctggaatctatcagctcctgtaatg

SEQ ID NO: 363024 - DNA, 122 bp, Homo sapiens
ctctagtctgactgcctgggtttcacatttcagtacttactagctgttggaccatagctacgtttttgtgtgtttgtttgtttttgagacagagtctgtgtcacccaggctggagcacagtg

SEQ ID NO: 363025 - DNA, 122 bp, Homo sapiens
ttacaaatctggcctctgtttacctaacactttcctcttgcgggctgccttgtctcatttcgaaggcattgcaggaactgtttatgaccctggcctgctcactcccctacagctggtttatt

SEQ ID NO: 363026 - DNA, 122 bp, Homo sapiens
gcgcaggggcccagttatctgagaaaccccacagcctgtcccccgtccaggaagtctcagcgagctcacgccgcgcagtcgcagttttaatttatctgtaattcccgcgcttttccgttgcc

SEQ ID NO: 363027 - DNA, 122 bp, Homo sapiens
gaactgctcattcgctgcttgtctcatttaggagataaactgaggccctaaaaggtttaacgttacactgacacggcaaagtgaaagaagaaattagagaatgggatgtaaagactaaaaat

SEQ ID NO: 363028 - DNA, 122 bp, Homo sapiens
ctcgatttccttacctcgtgatccgcccacctcggcctcccaaagcgctgggattacaggcgtgagccaccacgcccagctgaaagcatttattgtagtgaatatggctaagaaatttgagg

SEQ ID NO: 363029 - DNA, 122 bp, Homo sapiens
cacgtcacatttatgggaatctcagtaagaattctagcatattatcatcaaaaacaatgacgtctaataggtaatgggatgacatattctaattggtaaaacaaaaaaatgcaatcaacaat

SEQ ID NO: 363030 - DNA, 122 bp, Homo sapiens
tgttcaaccgtgcgaggctccctgaccccgccacggcaggccgcgacgaacacggtgtcccgccacggaagagagcagcagcccagaggccagaacgcaagcaccaaggccacgacgggact

SEQ ID NO: 363031 - DNA, 122 bp, Homo sapiens
aatgccactgaactctacgcttaaaaatggttaaagcggtcctgggctgcggtggcacggcggtcgccatgatggtcactgggcttggcggctgacccccgggctaggagagggcccagcgc

SEQ ID NO: 363032 - DNA, 122 bp, Homo sapiens
tccctctgtggagtacagcccctgggaaatatcctacctccaatactgcaacctcctggccgttgcgcagcagccggaacgtcagaggatgtttagaatccaaacccgggatcacctcgcag

SEQ ID NO: 363033 - DNA, 122 bp, Homo sapiens
gacagcgggaaactgaggcccaaagccgggcagggtcccggcgggggctggtgtcctcagcgctcccggtcacaggctgcccgggccctggtactgggggaaggggccgcatatgtaggtcg

SEQ ID NO: 363034 - DNA, 122 bp, Homo sapiens
cagcaggaatcacccagccggagatcagggcaggcactgcaggcagcatgctcaaaggcacgaaggagtgaggtggtgggggagcagcggaagttcctagcgcagcgtgggggtgctctgtg

SEQ ID NO: 363035 - DNA, 122 bp, Homo sapiens
tcccatccaggaggaggagacacagctcctagaaacaggatccgccgggtcctcctcctgcgcgggtagacgcagaacgttcccacagtctactttatgcgagcgtggcacccctgcttgag

SEQ ID NO: 363036 - DNA, 122 bp, Homo sapiens
taggggtcccccgtctgggttcccaccccgcccagaactgggctaccgtcgcgccccacccggcgaccgccgcccaccattcccggagcccgaccccaacccagctaccgtgcgcgggtcgt

SEQ ID NO: 363037 - DNA, 122 bp, Homo sapiens
atgactacagtttctggggaataaacttgaggccagttggatatgacttgagtgaagtaacggtggtgcaatagagcagtgaaatcagaacagtctaactagccaataaggatgaatcataa

SEQ ID NO: 363038 - DNA, 122 bp, Homo sapiens
gcagagggcggggagggcagcccggacctcccaccagcacagcgcggtgcacgcgcttcccgctgagatgccaggccctgccgcctctttgacttggaaaagaaggaaagagccacgacctc

SEQ ID NO: 363039 - DNA, 122 bp, Homo sapiens
gcaggccagttccgagtggcaggtgcccggcccacgccgcctcaggttaagtagggcgcacggagccaggcactgccactgagaggcgccagacctcacccagatatcctgcttctcgccga

SEQ ID NO: 363040 - DNA, 122 bp, Homo sapiens
gtgcttgccccgcccggtggactaactcgcttaattttaaataaaaagtcgaggacacggcggtcgttttcccgaagacatgggccctcccatgggccatttgctccctggaggccctcgcg

SEQ ID NO: 363041 - DNA, 122 bp, Homo sapiens
aagtgaaaaattacacaaggcctacacaaggtctgaaatggaaagtgcagctggtgataccgagtagtatattttatgaattgaggaacagggaatttctaggtatcacagagcaatcagca

SEQ ID NO: 363042 - DNA, 122 bp, Homo sapiens
agcaaccctacactcagacactcactgcggtcccaactgaggacccaggaagccctcccgcgtcccaagggcgctgtgccacaaccctacactcagacgctcactgcggtcccagctgagga

SEQ ID NO: 363043 - DNA, 122 bp, Homo sapiens
aaactaccagtatctcggaagcctccctctggcaaatggtatatgtttttgagttaaatacgtggattcgaatgttgacatttggactttcttcttgcctctggtaagttatttaacctctc

SEQ ID NO: 363044 - DNA, 122 bp, Homo sapiens
tgtgatatgtcctttaatatagattgcccaattgcccagagagtacttctagagcatactcgaggatgcagaagcaaggtaaagggatgtggggacaggcggggctgtgtctgttgccatca

SEQ ID NO: 363045 - DNA, 122 bp, Homo sapiens
tggccctagcggaggccgcgccggggccgcgggccgcccgactgcgctaccttcccgccgcgctctcagtacagcccgcgctctggctccggctccggctccggctcccgctcgggctcggc

SEQ ID NO: 363046 - DNA, 122 bp, Homo sapiens
tacagtactggcatctcagtcttaaaattatttcttcaaagacaacctcagctgggtaaacggcaaaaagtaatttaagtcatcattgtgccagctattaaacctatctgtcaagaatacat

SEQ ID NO: 363047 - DNA, 122 bp, Homo sapiens
gctctgtgcttctctggtttatggctccctccttgagaatctgagtccacctggcttgtgcgttcacaggacaggctccaggtcagcagattccgatcaagcagattttacagaccgccttg

SEQ ID NO: 363048 - DNA, 122 bp, Homo sapiens
atcatatatttgtgtaaaagaaataatttgtagactgggtcattagaaatatttttctatcgaagtagaagttcttggccattacagattaattagccttcagctcttcagaaggataggtg

SEQ ID NO: 363049 - DNA, 122 bp, Homo sapiens
gaggagctgcaggcttctcaaaagacccagggggccaactgtgacatatgatctgtaagccgaatatttataaatggaatcagatctcctcctaggttgatgcctttatttgtatgttcctt

SEQ ID NO: 363050 - DNA, 122 bp, Homo sapiens
aatattgagtcgcggccgctgggggtgccggaggaggggtgcacaggccaggctgccgggcgtagttctgcctcggagccaggctgcgggatatgtctaaagagcggtcaaaatactgattc

SEQ ID NO: 363051 - DNA, 122 bp, Homo sapiens
cctctgtcttggccaggtcctttcccccatctctgctcatcctcactccttctggaaagccggtcaggctcgtggtgagctctgtgcctcctgccgtcatccacatggtgtctttgtgattc

SEQ ID NO: 363052 - DNA, 122 bp, Homo sapiens
aagaggagggacacaagtgatgtctgtgatggggctggcccaggctaggcctttgcctgacgccctcagcctctgcccacagccctcaggcctccctgcctctacacatgcagtaccccagc

SEQ ID NO: 363053 - DNA, 122 bp, Homo sapiens
cctcatggaacttcatcctagtgggaaacaccgacaattaatggcaaaacaattatataccgtggcaggtagtgattaggatctgggaaatattattcttcccctggctaagaaacaccaag

SEQ ID NO: 363054 - DNA, 122 bp, Homo sapiens
gccctcataccccgacaaaagcagatgcactttgacttctgacagctctacctcaagccccggagaactcagcggcgctttcctcgcaacccgagctcggcgagtcgtcgtcttcttcttct

SEQ ID NO: 363055 - DNA, 122 bp, Homo sapiens
gagagccacaagagcgtgtgccccagaagtggtccagacagacgctcgagacccggagcccgtttccatggtgagacaagcgcccccttggaaaacatgtttaccagacacagccaacgaga

SEQ ID NO: 363056 - DNA, 122 bp, Homo sapiens
ctggctcgagcggacccgcccccagtgataataacacaactggtcgcgtacacagcggcccgaggaggacaccaggtactcggtgccacaacggcagcagaccctacaggaggagtcgccgg

SEQ ID NO: 363057 - DNA, 122 bp, Homo sapiens
tcacattattcatttcttcagatcagcatcattcaccatggcaaccagcaggcatctgtacgcacgatgctttcagggaccagcctggaaaggcttttgcccagtgagaggagctctcattc

SEQ ID NO: 363058 - DNA, 122 bp, Homo sapiens
ggcaggcagatgcccgaggtagagatgagcaaaccaggctcagcgatcctgggtgccctgcggggggctgtgcccaggtccctggacgtcctggtcagcggaacttcctcctctgggcagtg

SEQ ID NO: 363059 - DNA, 122 bp, Homo sapiens
ggcggatggggcccgcggggtgcggcgccctggcggagtgggaggcggggcttctgtgcccggtgtccccaccccgcccggacccccagctcgggccgcccctgggtctctcccgggtcacc

SEQ ID NO: 363060 - DNA, 122 bp, Homo sapiens
aacttaatgtctttccccagtccatctttgaaagagaagtggttctaccacctggatgtgcggatataaatccccttgcaaataataaatggattaataataacaaggtatgaagttctttt

SEQ ID NO: 363061 - DNA, 122 bp, Homo sapiens
cggcgccaccggaagttccggcaagtgggccctgaggctggccccagcttccgggttggtcgcgcgccttcctgcggctaagatggcgacggagcatcccgagcctcccaaagcagaattgc

SEQ ID NO: 363062 - DNA, 122 bp, Homo sapiens
tcagtgaactaggaatgatagcagtgtctccctagtcttagggccgttgagcggattacacgagataaggtcagcaggtgtttagcacagtgaagcatttgctacgtgatgacatttattat

SEQ ID NO: 363063 - DNA, 122 bp, Homo sapiens
gacacagcacggatttgcgacctccccaagctgacataaatgcacttctcctggactgcccgggccccaaacctgacctagccttgggggtgccaaccgggacccctggaccaccatctact

SEQ ID NO: 363064 - DNA, 122 bp, Homo sapiens
tcctagacccttgggatgagtcggctcctgacccctcacatggtagatagaagaggatagcgctatagaaatgaaggttttttggctcatgagaaacctgggaatgaaatgtcatcctctcc

SEQ ID NO: 363065 - DNA, 122 bp, Homo sapiens
ggcccggacatccgccccgcgcgcggcgtgctatagaccgcgcccacgcacgcacgctcgcgtgcccgcccctgccccacctcgagccgcggccttcggctcctgcagccgctgtcttttct

SEQ ID NO: 363066 - DNA, 122 bp, Homo sapiens
tcggccctattatgtaaaagcaaagtgtttctggttatccttgcaaattattatttttcacgttctaaaagacaaaacaggctcagcgcagtggctcacgcctaaaatcccagcactttggg

SEQ ID NO: 363067 - DNA, 122 bp, Homo sapiens
gtggattcccaagaggtatttgtggcgtgaatggagcaaaggtgatgtttcacttcatcacgtccagcactgtcccaaggttaaatgggcgcgtgaggacagttttctccggtcctggcggg

SEQ ID NO: 363068 - DNA, 122 bp, Homo sapiens
tggggccactccaacataccagctggtgtaaattttggaaaaatgccctgatactctgggcggtgctgcattggccaaggggaggagtttaggaggcaggagaaagatggtcattaggaagc

SEQ ID NO: 363069 - DNA, 122 bp, Homo sapiens
gggcctgactccgattccgggaattcttggtggactgctaagaactgctcccataactcacgtaaacatcccacatagccacttaatctgccctctcagcacatgcgtgcgcaggcacacac

SEQ ID NO: 363070 - DNA, 122 bp, Homo sapiens
tgccaaatctgattcctcctgatgggtgtttgttgcttgctcctttgtcccaagcacaggcggtctttggtgctgtgctttgaacattccgcctttcaggttatgtacacccattgtccatc

SEQ ID NO: 363071 - DNA, 122 bp, Homo sapiens
gcatgcagccccgggagcacgcagctccacgcagcctctccgcatgctccccagcgcctgcggcctcctcttaacaacttttgccaggaccatacatacctgcccgtgggctgagtggattg

SEQ ID NO: 363072 - DNA, 122 bp, Homo sapiens
tctcctgggatcataagacccaaggacttttaagcagcaaggttaggcagcaactggtcccgagtcaggaaacagagctgcaagcccagagagaggcagaaggcagcctgaggtcacaaaac

SEQ ID NO: 363073 - DNA, 122 bp, Homo sapiens
ccccgggcccgggggcgggtccaatccccagccccgcccttgactccgctccttccgtgccgcttcactccccgaggaaaagatttggtggccaagtcagcggatccaacccgcgaccacca

SEQ ID NO: 363074 - DNA, 122 bp, Homo sapiens
gctgcatgatattgcttcgagtttgtttcggtgtgagcaatctgagtcgccggaccctctcgagtctgactttcactctgacaatcggtccgtggctttacgaatctgaatcggagtcccct

SEQ ID NO: 363075 - DNA, 122 bp, Homo sapiens
ccgccgtgcggtcctttcctccgcagtgagccgatttgctctgccagcagctgtcggtgccgcgctcgacaccgagtcctagctaggcgctcacagaatacgcgctccctccctcccccttc

SEQ ID NO: 363076 - DNA, 122 bp, Homo sapiens
aaatgcgtgatgcttttgatgtttcaacagaatattgtttctaagattatgtatcttgcacgtttggcacttgagggggtgctcatcttttgattccgctattgaggtagaggcgggacggg

SEQ ID NO: 363077 - DNA, 122 bp, Homo sapiens
tgtgcgcaactaagtggacgacacaaggccggggggaatgcctgcaggcgaaagcccagacgggccaccacacttacagccctctgcatcgtcgcctgcaacgagtgcagacggcgcacaga

SEQ ID NO: 363078 - DNA, 122 bp, Homo sapiens
ttactacacccttctgtaaaccctttgctgcactcacactgcccagctccctgccccctgcgatgctggatgccgtgtgctgcctgcctgcctctgtgccctggtgcccccgccttccccgg

SEQ ID NO: 363079 - DNA, 122 bp, Homo sapiens
ggttgtgtgtgggaagatccaggatggctggagtgcagaacagagaagagaaagaggagacgggatggagggtcgtcttgccctgtggacgtgccctaaccacagcctccggcctctcctag

SEQ ID NO: 363080 - DNA, 122 bp, Homo sapiens
tttcgcgggactttttttttgcatactgtgaggcaacaaatggaaagaataggcctatggcggagggatcactcgcttattctctgtgtactttaacctaatgggggtcgcccgggagtcgg

SEQ ID NO: 363081 - DNA, 122 bp, Homo sapiens
ccaactccagactggaaaagggtgaaaccattatatgttctgctaatgctggcctgtggtcgaggcccttggcctgccatgctttgtaagctcaggagcccacaggagtcagaaggtcagag

SEQ ID NO: 363082 - DNA, 122 bp, Homo sapiens
ggcctggtgggaggtgattggatcgcaggggcctggtgggaggtgattggatcgcaggggcggtcactcatgaagggtttagcaccatccccctagcgctgttcttgggatagagttctcct

SEQ ID NO: 363083 - DNA, 122 bp, Homo sapiens
atagggctgtgtccaccccacctgggtgcagctccagctcttttcactcccttccagatccgcggaaagcacccctgacacgcatatatttgtggatgggatacctggattgagagcgaact

SEQ ID NO: 363084 - DNA, 122 bp, Homo sapiens
cccgccttgctgcagctacagtctgaattaggctccaccgcagtatctggccctagggttcgtgctactggtggcatggacagagatgggggctgccacagctgctatggggctgagcagcc

SEQ ID NO: 363085 - DNA, 122 bp, Homo sapiens
gaaggaatagaaaatcttagcaaagaaatgaaagatataaaaaagaaaaagatgaaatcacgtaactgaaatatataacaacagttttttaaactctgactgcatggggtgaacagtaaagg

SEQ ID NO: 363086 - DNA, 122 bp, Homo sapiens
gaagttttctccactgcccctccaatcaccgccaaaaatggaagttgctctcgtaacttacgtaaggcaagcagccaataggagcaaaccttggaaactagctcccccaatagcagcagttc

SEQ ID NO: 363087 - DNA, 122 bp, Homo sapiens
cacacatacagagcgcttatagcagtgcttggcacgtactgagtatgaagtatttactctcgtcatcctcgtaactctcgtcaccatattctatctaacgcctgcagctcctggtctcagga

SEQ ID NO: 363088 - DNA, 122 bp, Homo sapiens
tggaagaagatgaactcctcagcctcgttggagtagcagagccacttgaagcggcagatgcggtctgtgtgcgtgcggcccgtgcacaccatgtgtgtgccgccctccatcaggatctgcag

SEQ ID NO: 363089 - DNA, 122 bp, Homo sapiens
tctgagcctgtcgctttccggctgcccgactttaactcacaccgaagcctggcgggagaacggatttctcaaggctcggaagtgtctgagcgtctgctcggttccccagtaactacccgagt

SEQ ID NO: 363090 - DNA, 122 bp, Homo sapiens
aaggagcatattccaacgtcagaataataaacttttacagaactgtattgctctgcagcgcgcggggggactcggcccagcgaagagcgagcgccctacaggcctcggcggaggagggcacg

SEQ ID NO: 363091 - DNA, 122 bp, Homo sapiens
tgagcgggtggcaggcggggtgcgcgcccggctggggcagtgcgcgcttgcggctgccgccgttgaacatggccttgacgtcctcccaggcgaagaccagctcgtcctggggactcttgtcg

SEQ ID NO: 363092 - DNA, 122 bp, Homo sapiens
ctcgagctgaaggggagttggaaaagagagaaagggtgaaaaagaaagggcgggggagaacgggtgattgtaaagaacaagcaggtcctcgtagcccagaggaagagtgagactccaggcct

SEQ ID NO: 363093 - DNA, 122 bp, Homo sapiens
gctgaccagcagtagatcctccagaagggcccttcatctgtcatcctattcacccatcaacgtgcaccctgcaggttacacctcattcagaagggcttcagtcatccccaactaatttctcc

SEQ ID NO: 363094 - DNA, 122 bp, Homo sapiens
catagccgcacctgctaaatgcagttacacagcaatactgacttccgtgtgatgctagaacgtggtacagtgtattaggctgctgtggtcagagttgtagcatcgttagcactaagtaattc

SEQ ID NO: 363095 - DNA, 122 bp, Homo sapiens
ctgccattagccgccgccattttgtcctcctgctgccgggcctgcttgcccctccccctccggtacctctactccgggacccgcacctccggcagttcattcaggatccgtagtctgcccct

SEQ ID NO: 363096 - DNA, 122 bp, Homo sapiens
ctgcgcctgctcccgctgctcccggcccggccaggagtagggagggcactgcccgagccgcggccccggccctaccaggcctggagccaccaaagccacgagagaggtgggcgccgtcggcc

SEQ ID NO: 363097 - DNA, 122 bp, Homo sapiens
acagagtggttgtccaactctgtaaacttaagtcactttaagtttatgacggaggggcttcgtgaaacttcattgaccttccaaggtgaaaattggtcagttttcagttataaaggacatta

SEQ ID NO: 363098 - DNA, 122 bp, Homo sapiens
ctacattattttccaggaaaagtatatatattagaatagcaactgagactactatgtaaccgttttcacaggaaaaatgcaccttgataattgggatggtgtagataggtcttcaagtcctt

SEQ ID NO: 363099 - DNA, 122 bp, Homo sapiens
ctgtatgttgtccgtaaccagaggtgccaggagtgaaggacccccccactagagggcaggcggcccgaatgaatgcctgatgtgcccagaaacactcaaccgtctgggaatatttttctcaa

SEQ ID NO: 363100 - DNA, 122 bp, Homo sapiens
ccgggctacgggagaagccgagcgcagcagccgcccacagcctcgcctcgccccgcccggcgccagaccagctccgactccgctcgctgccgcgctgagccgcgctcttatagaggccggcg

SEQ ID NO: 363101 - DNA, 122 bp, Homo sapiens
aaaatgcattgacaaccactcctttaggattccttccccaggagctcccagtcccaggagcgaccaggaatacagttagccctcccttataggacagtggagagacggttcagaaggccacg

SEQ ID NO: 363102 - DNA, 122 bp, Homo sapiens
tgatgtcaaaacgcctcgcgggggcagcccaggggcacggccgctccgggggtcccctttcgtctggagaaacacagaggcccaccatcacctggccgcgccgtgcaggcctctgcgcggac

SEQ ID NO: 363103 - DNA, 122 bp, Homo sapiens
ggcttgaatcacccagtaatttgagacagaatagaaaatgttatctatgtgtgctttgtacgctgcttgagttttctggatcaaaagcaactctacacttcagttgcatagaggactcaatt

SEQ ID NO: 363104 - DNA, 122 bp, Homo sapiens
ccgtaaatgactgaaaataaagctgggcaacatctcagccagtgatgttctaaaacaaaacggcagacccactacagcagcaagggttaaccaaagtgaagcttcagccttcagggagccgg

SEQ ID NO: 363105 - DNA, 122 bp, Homo sapiens
cggccgcggtggaggccgccatgtctgcagcagtcgacctctggacacctgtccccggcacggacgctagaaatcggctctgagagctcaccgaaaccacaaagctttcagaaaacaaacag

SEQ ID NO: 363106 - DNA, 122 bp, Homo sapiens
ccagggctgtgagggctccggagggcagggcctcagcagtggcggggatgggccaggcatcgccagcccacgctgagcctcccggtggcgccgccccgcccatcctcccccccgccccgcgc

SEQ ID NO: 363107 - DNA, 122 bp, Homo sapiens
agccgcggtcactgagcctgtgccttgggcctgcgggcggtgtttgttgttgtgactgggcggctaggtgagacggagcgcacgggcagagtgcgcatttggggcgactggttcttggggga

SEQ ID NO: 363108 - DNA, 122 bp, Homo sapiens
aaatttaggacctccctgggttctccaagtatgtttctgttacatcacttttcacactaccgtgaaaattagttgaaaagtgcccattcctagcaataccaactcagtaatagtacttatta

SEQ ID NO: 363109 - DNA, 122 bp, Homo sapiens
tgcctgtgttcccagctactccagaggctgaagcgagaggatcccttgagcccaggagttcgaagcttcagattgtgctaccttactccagcctggggaatagaatgaggccttgtctctta

SEQ ID NO: 363110 - DNA, 122 bp, Homo sapiens
ggaccgttagtggggggtgggctatagtagcgcagggctcgggcatctccatggtactggcgttgagcatccagggagaagcagcccagttccgaagggcgccggtagaaaggaaagggccc

SEQ ID NO: 363111 - DNA, 122 bp, Homo sapiens
gtgcagaggaagagcagagctcctgccaaagctgaacgcagttagccctacccaagtgcgcgctggctcggcatatgcgctccagagccggcaggacagcccggccctgctcaccccgagga

SEQ ID NO: 363112 - DNA, 122 bp, Homo sapiens
ttcataggctatcccatcaccctttatgtgagtatggacttttaaatcttttacacttaacgtgcaggatgtttcctgttctggagaatctcattgtccctggcttttgctttccctggtag

SEQ ID NO: 363113 - DNA, 122 bp, Homo sapiens
ggggagggaacgagggcggggctctcggaaagtcccaggaacaggctgatcctgcgctggcgagaagctcagccatttaggggaaagcgaaatcgaaagcggccgcctgctcactagataac

SEQ ID NO: 363114 - DNA, 122 bp, Homo sapiens
tgcccgccggcttagcttttttgcaacattttctggaaaggcccccaaaatcggaaagcgcggagctgggcacctcaaggcccaagtctcccccaaaaaactttttccaaagttggctttgc

SEQ ID NO: 363115 - DNA, 122 bp, Homo sapiens
acccgccctccagggttcaccatgctgggctggcgcagagacccatccaggcggtaggagcggggacaggcgcggggtcgtggagggccccgggctgttcctgatcctcgaactctctcctc

SEQ ID NO: 363116 - DNA, 122 bp, Homo sapiens
actatggccccgggctcattgaaagactcctccccacaaaagtttagggctgatactaaacgaagctatggagccatgcccacacaaatactccccctttacccgaattgtggggcctggac

SEQ ID NO: 363117 - DNA, 122 bp, Homo sapiens
aataaataaaatcagccgggcgtggtgacgcctgcctgtaatccaagctgctcagaaggccgaagcaggagaatagcctgagcctgggaggcggaagtggcagtgagccgagatcgcgccac

SEQ ID NO: 363118 - DNA, 122 bp, Homo sapiens
cggcacctcccaacgccccctccccgcaatccccccgcagcgtccccgcgggctctgaggcgctcagccgcactgcactgtgggaacgagaagcaattgtggtacttttgatacaggagtgt

SEQ ID NO: 363119 - DNA, 122 bp, Homo sapiens
gaggcgctgagagtctgtgcggaggtccgtggacagactgctttgctcgttgttgctcttcggaggcggcgatccccgaaggcgagctgaaatacggctgcaggctacaatttgcagccgac

SEQ ID NO: 363120 - DNA, 122 bp, Homo sapiens
cactgtggagcgcctactgtgtgctggaggccaggctggtgaagggcagcaggagggacccggagaaggggtggctcacatgcaacttggaaaatcagaaatagaacaagggccggagcaca

SEQ ID NO: 363121 - DNA, 122 bp, Homo sapiens
tgcagcgtggtactgttggctctcaaccgtacggcagatgtcgagaccgcgttgaggccgcgtcgctgaaaccttgtgcccttggaacggccccttcccgtgcttcccccagcgccagaccc

SEQ ID NO: 363122 - DNA, 122 bp, Homo sapiens
tacacatacaagcatccctgtcccagtgaaaatgcccactaaatcacctcgatcaaaatgcgtaagtgtcaagtacgcataaatgcagctcaaaacactttgctcaacctcacccccacagg

SEQ ID NO: 363123 - DNA, 122 bp, Homo sapiens
cccccagcaacaataaaactatctagcacttactgaatgcttgaaacattccagctattgcgctaagaattttgcacatattatccacttttaaaacaaccatatgaggttggcactattat

SEQ ID NO: 363124 - DNA, 122 bp, Homo sapiens
gatgggaccactcctgtccagaggctgctcccagcccagcccacattcctgggctctggccgggctatggcttcttgtttgcaacagggctgttcccagagctcccagttggtagccggaag

SEQ ID NO: 363125 - DNA, 122 bp, Homo sapiens
gcgcctgtgaccaccaccccaacaaaccatccagtgacaaaccatccagtggaggtttgtcgggcaccagccagcgtagcagggtcgggaaaggccacctgtcccactcctacgatacgcta

SEQ ID NO: 363126 - DNA, 122 bp, Homo sapiens
gagtggcccttttctctgccctctcgtccccaggcttggagaaatggatgatgggctaaacggctgggtagatgggccctgcttccggggcataggaaaatcttcagcatgggctcttccac

SEQ ID NO: 363127 - DNA, 122 bp, Homo sapiens
ttcccagaacttccgtctctacccgtcacctgctcccaatcaaaggagcttaatagacggcgacgttttcgactgcccagccaccaggcaggctgaaagtgcatggagggcatcatccacct

SEQ ID NO: 363128 - DNA, 122 bp, Homo sapiens
atgggaataaaatgggaataaaaatatctacgtaataggttgtttttctctgtgcagagtcggttgcacagtacggtctcactaagtagatttattattacttgtttttccactgaacttac

SEQ ID NO: 363129 - DNA, 122 bp, Homo sapiens
aggatctgaaaggggccataccaaaatgaacccgaaatctaaagatagaaacatttcattcgcaaacttgagtaacagatctgaaagtcaaactaaacaacctgagttactgacacttcaga

SEQ ID NO: 363130 - DNA, 122 bp, Homo sapiens
actggtctctccctaatggaacttcagtggtagaagacaatgaattgaaaactcagatcacgattagggtcttgaagctattttatttttgaattctaaatcccaagttagaagggttatga

SEQ ID NO: 363131 - DNA, 122 bp, Homo sapiens
taataagcatgtcctccttacaagaggcagccagaaggtgtggtctggccacttacctagcgctctctcagcacaggtcccaggcagtgctcaagtccaaagtcagaagcgcccctcacagt

SEQ ID NO: 363132 - DNA, 122 bp, Homo sapiens
atgagttagaagaaatgaacacaagttttttcctgcataaaattaaaaccaggccaagcacgacggctcacgcctgtaatcccagcatttggggaagccgagaagggcagattacctgcggt

SEQ ID NO: 363133 - DNA, 122 bp, Homo sapiens
ttttaaacagtagttttgaggcggcgagactggggaatccccggttgcgtcattagtaggcgtggaggggcgggactcgtgaagctgcgctggggccgggctctgagaggaccggcgcagcc

SEQ ID NO: 363134 - DNA, 122 bp, Homo sapiens
gcggtcacctgtgaggaatgcgcggggagggcgccggtgactcacgttattcgagccggccgaccctgacctcagaccccagaatagccgagtcccgcccccagcctctgacccgaggcccc

SEQ ID NO: 363135 - DNA, 122 bp, Homo sapiens
ccggtgtgcgtgcgcctcgcgcttttctctttcggtttttggggaagttgttacctgggccggacgcacggagcgctgaagccggataatggggcttggatggcgctctgggtctcgggtgg

SEQ ID NO: 363136 - DNA, 122 bp, Homo sapiens
tcatgcggaggcgtagcgaggattcagggacagtaagctctgttctcgccgagcagggggcgggctcgcgagatcagctgcttctggccgggcgggggcgtggactcagcgttctgggtggc

SEQ ID NO: 363137 - DNA, 122 bp, Homo sapiens
caaacctgctccgggttctttggggattgctcccactctcttggaacctctctgggcagccgctgccaatcgcgcacacttcagggtgtgtgaaaacatctgcttgctgctttctacctgaa

SEQ ID NO: 363138 - DNA, 122 bp, Homo sapiens
gaccccgttgagccggtctcatttgatcttttcttcttctgggtggctgtactaagcggtcgggtttccccgggaatttgatggttcctatagtctgcctgtgtcggaggcttctttggttt

SEQ ID NO: 363139 - DNA, 122 bp, Homo sapiens
cgacttgctaaagccttctccgtgatagctgatcacccttatacagtttgaacgggcttccgggtaccaacgatccattttgcccttgcgccgcgctcccgctgctctgcctttccccaaaa

SEQ ID NO: 363140 - DNA, 122 bp, Homo sapiens
cgggacggagggccgcgggcgcgcggcggccgagcctcctgcggggatgcggttttaacgcgctggggcctccctttatagggtcacatgtgatggggaggaggatacaagcccggaatctg

SEQ ID NO: 363141 - DNA, 122 bp, Homo sapiens
gatgcctaggtttctccctcacccgacgaagaccaaatgctgctgatccgtaagtaacttcgcaaggtaaactgaggggcctggcagcatctgggcctcccttaaaggtcgaaatcaagtgc

SEQ ID NO: 363142 - DNA, 122 bp, Homo sapiens
ctggggtcaaacaggctgctccactggaaagccagcatttcccttggaaataagaagtcacgtgtggggagatgctgcttcgcatccgtctgatgggaatccctctggttcagcacccatcc

SEQ ID NO: 363143 - DNA, 122 bp, Homo sapiens
acgggagttcagtgagacttgccctgaacacaaggacacgctgcgtgagcaggacattgacggacccaagaggccacactttcccttcaaaccagaaagcgcttccatcttagaagaaaaac

SEQ ID NO: 363144 - DNA, 122 bp, Homo sapiens
tttttcttgttattgttactgagacgagaagtcttcttccgaccgaaggttcttctcaatcgaagggttcgtggtctcacggcttcaaggaatgaagccgtggacggcagtggcgagtgtta

SEQ ID NO: 363145 - DNA, 122 bp, Homo sapiens
tgacctgttacctgttactagccttctcttttggtgacctgtagcaaactagaaagcctccgtaacagcaaagcaacattatgctttagttaagtcttagagcaaaaacaccctccttttca

SEQ ID NO: 363146 - DNA, 122 bp, Homo sapiens
cgcggcttcctgacggtcccctccctctccttccccccgaggctcctccctctgcctctccgcctcctccagcagctgatcctcagctgccgccgcgcttccgcgatgcgcggcccttccgc

SEQ ID NO: 363147 - DNA, 122 bp, Homo sapiens
tgactgtcgtagtcctcagagcagggcacctcgatgaatctccctgccacgacctcgccacggcgggccaggacctctgcgaccccgtcgtcggcccccaagctgctccagagcaggagtgc

SEQ ID NO: 363148 - DNA, 122 bp, Homo sapiens
ccaacatttgtagtactgatgcaaagaaagcccaccaaaagagatttcaatcatttctatcgttctataaaaatatttttatgactcccaattttcatttagttagcatattttttcttctt

SEQ ID NO: 363149 - DNA, 122 bp, Homo sapiens
tatgattcggccacaaaaaggaccgcagctttgacatgccggggcgtgggggatgctcagcgacttcatgccaaacacgaaagatcgcgttacgtgagtccacacacggttgcccttggtgc

SEQ ID NO: 363150 - DNA, 122 bp, Homo sapiens
tatacgaaacaaaaaaatgccatcagcgtctatccttcagtaatgaaaaattactctttccgttattgaagagcagtggaaagtaaactagctttagctgacagcttactgtggaggagctt

SEQ ID NO: 363151 - DNA, 122 bp, Homo sapiens
gctgcttgctttgcctactccagtggcttcacctggcagggtgtggctgactagaatgagcgggatagggtagacatctcactgcaagtccaagataccaaaatcaaatcctatttcaattg

SEQ ID NO: 363152 - DNA, 122 bp, Homo sapiens
gcctgggatcagccggctgatcccaggccggccacacttccacccgcggagagaactgggcgcactcctggacccccaccagagcgccatgagggctgcatccctgtgggggagccccagga

SEQ ID NO: 363153 - DNA, 122 bp, Homo sapiens
cgggctcaggcggggagagggtgcggggccgcagcgagctgcgggcggaggtgcgggctccgcggagcccggccaggctcggttccgcgttcctgggcccgcgggtaagctgagtcggcggg

SEQ ID NO: 363154 - DNA, 122 bp, Homo sapiens
cccgacagaagcacacatgcgcacaccgctgtgtgccaaggtcgccaaaagacggaagcacgcatgcgcacaccgcggtccgtggggcaccgggcggaagcgtcctgactgcgcaggcgcag

SEQ ID NO: 363155 - DNA, 122 bp, Homo sapiens
ttaatgacttccaccagggtaaaaaccactgatcactgagttctattttgaaactacggacgtcgagtttcctctttcacccagaattttcagatcttgtttaaaaagttgggtgtggtttc

SEQ ID NO: 363156 - DNA, 122 bp, Homo sapiens
gttaaccagaagacagctattattttgagccaactccaagaaagataagttctcatgccacgaggaaagcagcacaggttggagatcagctcagtaagagtgaagtgattccaccacattcc

SEQ ID NO: 363157 - DNA, 122 bp, Homo sapiens
actccgtgggtgagttttcttctagaagagtccaggtggacagggagtccagttcagggacggagattccgggatgaaaagtgaagggagagggacagggcccatgccgagggtttcttcct

SEQ ID NO: 363158 - DNA, 122 bp, Homo sapiens
ttggggagagcacggtttgtgccctaggacgctggccttactcttaacagatccagtccacgaaagtaaatctaaaaagcgtgttccagcctgccacgctgtcatccctcgtgcacggattt

SEQ ID NO: 363159 - DNA, 122 bp, Homo sapiens
ctccgggcagcaacgcgctcggctcgcacagcagttccgcgccttccagagggcgcgccccgccctcccgtggcccagcccctatcctccagtgacgtgcgagaccagagggctggggctct

SEQ ID NO: 363160 - DNA, 122 bp, Homo sapiens
ggaagtcaaagaggggtcaaatgtcaagaagtcaaagggatccaaggtcactgacctgcccgcagcaatatgacctgatcatccagaggcaaggaggaaaagtgtgggatcctcttcgccca

SEQ ID NO: 363161 - DNA, 122 bp, Homo sapiens
tgcagccgggccaggaggccaaaatctgctgagctcctgcgtatccctggtaccagcacacggcccaagaaagagcggggctgcccatccccagggctgcctgcccgccggcccggggccca

SEQ ID NO: 363162 - DNA, 122 bp, Homo sapiens
gtctctccctctcaataccctgttttcccctcagtttccctttctctacagtgggtgtgtcgtgcctagaacaagttttaagtaattaaataacaaagactcaggataaaagatcctttttg

SEQ ID NO: 363163 - DNA, 122 bp, Homo sapiens
gactgtggctccacagcccagcttcaagcctggccgaccaggggtttggcatgaagaccccggcagggctggggctgtgctggaatccacccggaagtttcctgccccttgggctgcccacc

SEQ ID NO: 363164 - DNA, 122 bp, Homo sapiens
aacagctcagcaatggtgacaggatgggcgccgccaggaacagtcgcacagcagatgctccgtgggggcagcggctcccgttatgcagccctagagcgggcaggggcaccaggcagggcagg

SEQ ID NO: 363165 - DNA, 122 bp, Homo sapiens
ggcgaggcggcggcgctggggcggcggctgctgctgctgtggcggcggcggcggcggcggcggctgtggctgctgcctgctgctcctcgcggcgaaaagcacaaagcacagcgccctccgcc

SEQ ID NO: 363166 - DNA, 122 bp, Homo sapiens
acaagaggtgagaattatattgttgagggagaccagacattctaagaaccacgtgttagtcgtccagcccactttaccagggagaaaaaagaaacaggaactgtctggtggacacatttcca

SEQ ID NO: 363167 - DNA, 122 bp, Homo sapiens
ttaacccagaggggtcaggacagacaattcctcagtgacccaggagctgacacactatggcgcacgtccgaggcttgcagctgcctggctgcctggccctggctgccctgtgtagccttgtg

SEQ ID NO: 363168 - DNA, 122 bp, Homo sapiens
gactcagactccatcggtgggtctgtgtttacacaaggggagggttgacccacagagaagcgggttgctggccctgctagggttcctagagcagcctttgccaatgtttgttcttctgagct

SEQ ID NO: 363169 - DNA, 122 bp, Homo sapiens
gggcaggtgcagccacacctggagacgggccatggcgctgtgtcagggttagggtcaccgcgctcggggccgtcagcatgcacgccatcacgccgctctctgtcctaaccactggcctcccc

SEQ ID NO: 363170 - DNA, 122 bp, Homo sapiens
gagggcggcggggaggaggcggctggggccggggagcggagttgcagctacttctctgcccgcgggagacgcggcgcaccggagtctgcgcgggtgggagcggctccggggcggtcccgcca

SEQ ID NO: 363171 - DNA, 122 bp, Homo sapiens
cggaccgcggcgggctgtgcggatgccaccagggagacgccgcgagcggccacgccgccccgctgaccggtctccacagagaagctgcgaagagcaccccgccaccctcagggtcggcctat

SEQ ID NO: 363172 - DNA, 122 bp, Homo sapiens
tttctccccgcctcggccgacccgcctcccctactgcggcctaagggatcctccccgcctcggcctgccctgcctcccagcctgtggcctaagggattatccctgtctcggcaagccccgcc

SEQ ID NO: 363173 - DNA, 122 bp, Homo sapiens
tgtctttcagtattcagttgtctccgccgtgccagggagagagacggtgccaacccccggcgctcggcttggatgccctgccctggccacgccttccgaggcttccacgggctaaagaggga

SEQ ID NO: 363174 - DNA, 122 bp, Homo sapiens
aaaccccgaggattaggggctgagccatgcctcagttcccaggagaatcacagctggaatcggagggaagaaggggccagggacgggcagctgatcctggctcagatcagcttcaaaaagtc

SEQ ID NO: 363175 - DNA, 122 bp, Homo sapiens
ggcgggaggcgggccaatggaggctcgggggcggggccggcgggcggacgggcgggggtgcggagggggcggcggcggcggcggcgaacaaagaggcggcgggcgcgggcggccgagcggag

SEQ ID NO: 363176 - DNA, 122 bp, Homo sapiens
acgagttggtctcctccagagacacatgatggcaaacataatcactactgcttaatatcccgccccaggcaaagtcaataattgctctgggtagttcgagcaggtggtgtgagcaagccgtg

SEQ ID NO: 363177 - DNA, 122 bp, Homo sapiens
cgcggcgccggcgccggcgccggcctcgggctccatgtccccgttgaacagagcctggcccggctccgcgccgccaccaccgccaccgctcagcgccgccatcttataaccgagagccgggg

SEQ ID NO: 363178 - DNA, 122 bp, Homo sapiens
gaggggacagaatagcccagaggccgggtaactaacatgtgcgggatcaaggaaggcgttcgtgggcagctactattagggctttgaagaatgcatagaggttctcttaggtggtcaaagtg

SEQ ID NO: 363179 - DNA, 122 bp, Homo sapiens
ctttgctcctctcctctcctcggctggccagccagaaccagcccagaactccctcccctccgctcagcaggacccaggaactggtccctactgggcaattattaatcagattcttgacattc

SEQ ID NO: 363180 - DNA, 122 bp, Homo sapiens
accactgccgaatgcacactgaagttgcccttgtcaccactggacttgatgttcagttgccgactcatggtgggaaaggttgagttgacagagctggagaaaagcagtctccaaggggtaga

SEQ ID NO: 363181 - DNA, 122 bp, Homo sapiens
ctcctggtgcgctgttttttaagcccgtcggaaaagtgcagtattaggatggcagtgacccgattttccaggtaccgtctgtcacccctttctttgactaggaaagggaactccctgacccc

SEQ ID NO: 363182 - DNA, 122 bp, Homo sapiens
cctcctgccttcccgctagcatctggcagggactggagtgcttcctggagacccgtaggccggggacaggtcaccaggtgaagcagcgcgcctccggagctgatgctgggtggccgactgcg

SEQ ID NO: 363183 - DNA, 122 bp, Homo sapiens
cagcctccctgacaacacaatggtgacccacgtgagtccaagaagcatccatcttatcagcgccaactgcgccccactcagaccgtgtccatgtcagcgctgacgtgtgccggacctcactg

SEQ ID NO: 363184 - DNA, 122 bp, Homo sapiens
ggacttttacggggtaacgaatgaggggcagctggagggccagacacagggcaggagatgcgtgggggagggcagggccggtgtggacgggaggaaaaatgtgtgtggctgtcacagggact

SEQ ID NO: 363185 - DNA, 122 bp, Homo sapiens
cccgaaaaaaaacctcaaaaccattttcctgggtgaagacatcgttccagttgagaggtgcgggaagcttaggcgtgggggtttagaaagcctgggaacaagttttataaaagttctgtatg

SEQ ID NO: 363186 - DNA, 122 bp, Homo sapiens
gaagttagtggagaaacacacttctcagcacagtctccccccatcccccctcttaaaacacgatgcctcccaggatgctagtggcaccactgccactgcatttcctgttggcagcagtgagc

SEQ ID NO: 363187 - DNA, 122 bp, Homo sapiens
cggtcgcgcatctcctcgcccagtgggctcagcttctcttgcagctcgtgcagcttctggcgcgcgccctcttggagctctgcgcgcagcggctccaccttctggcggtagagctccatctc

SEQ ID NO: 363188 - DNA, 122 bp, Homo sapiens
gtcaagaacatatctttctttttttgcctccacataaccaacccatagctgagtgcctgccgttagtaggaattcaacaaatctttgcagaatgaatgaataaacgattgagtgaagtaacc

SEQ ID NO: 363189 - DNA, 122 bp, Homo sapiens
cgccccacagggatggccgtgttggcggtgaagcctgaggctcagggtccaggcagaaagcgctggttcctccagactgccaagcgcggttgctatttatttcttctccattaaaagcctcg

SEQ ID NO: 363190 - DNA, 122 bp, Homo sapiens
gtttctgtgactgagttccttctgtgtgcactgaggcctccacggccgggctgtgctcctcgctgctcccaggaaacagagtgcttctcccctcccggcctccagggaggctgtgggactct

SEQ ID NO: 363191 - DNA, 122 bp, Homo sapiens
gattacctaacacacagatgtggttggagcttgtgctgagccaagtgtgtatttaggttccgcattagtttaaacccctggccagggtttggagacaggtatggaaattagtcatgttggct

SEQ ID NO: 363192 - DNA, 122 bp, Homo sapiens
aaagtgggtgcttttttaaaaaaagtaagccaaagtaatagagtttttcaggaacagaaacggtcgacaatatcttccgctgcaagagagtaagctggtaaagactaaagtataacgagaag

SEQ ID NO: 363193 - DNA, 122 bp, Homo sapiens
ttcagtaacaatctgaattctttccctaatgactctgaaaatcctccaaatgatgtcacccgtgattttctacatgccaagtccaaaagtttaatctcagatttgtttttctctccctcatc

SEQ ID NO: 363194 - DNA, 122 bp, Homo sapiens
gcatgtatcctgtggggtgtgtgggcctcagggtctcagaatgtggatccgtgctatgcccgtgctcacagttgtctgtatgtctcaaaagcacatagatccccagttatttttctgtattg

SEQ ID NO: 363195 - DNA, 122 bp, Homo sapiens
cttaccgcgtctagactcctgcttggaagccggggcgttctcactgccctcgctgcgccgcgccttcccttaggttcctgtggtgggagtgttggcagtgacttctgctcacgctctccctg

SEQ ID NO: 363196 - DNA, 122 bp, Homo sapiens
ggctgagtgtgttagggagcagaaaaccgaacttgaaggatgttggatgcgtctgggaaccggccattgccacttagtagtatgttgtgggccggcgcgcacacatgaccctaaatctctgc

SEQ ID NO: 363197 - DNA, 122 bp, Homo sapiens
ctggaacacggtgaggcttcaggccacgcatgcttccttcattcaaactggcactcactgcggcacaccggccctttttgagcacctgggtgcaaagacaaaatgaacagtcattgcttttg

SEQ ID NO: 363198 - DNA, 122 bp, Homo sapiens
gatacttgcaggtacggcaggacgccggtagatggcattgcgctccgaaataaagcgcagcgccggcggctccagccacccaggtgaacccgcctctgcccgccaggcgccggcaacacagc

SEQ ID NO: 363199 - DNA, 122 bp, Homo sapiens
cacacagccatgagccaggctgcttgacgggacctgaccccgccaggttcccgtccagtccgcggggtgactccacccacagctggccgcgccaccgctcaggtttcaatttttattggttc

SEQ ID NO: 363200 - DNA, 122 bp, Homo sapiens
gaccgattcgagaagctgggctggctggctggctggcgctgggctgtagtgggcccccagcggaggccgccggaggagcgggcgagccctggccgcagcactccgggaaagggcagttggct

SEQ ID NO: 363201 - DNA, 122 bp, Homo sapiens
ccccctcctcaccgcggcaagctttccagagagtaggggaatctgagaggcagagccaagcgctggcagtgcctgcagctcctctcagcactacccgctgccgcccgccggactgtcgagca

SEQ ID NO: 363202 - DNA, 122 bp, Homo sapiens
gggagggcctccctgatgatgttatcttaaatagcaccacctccaaattactctttctgacgtcaccttgcctatatcctttattgcataagttggtaattatcatgcttatttacttgctt

SEQ ID NO: 363203 - DNA, 122 bp, Homo sapiens
ggcttatcacgatctcaccggctttacttctctgttcatttcctttcctagaattgtcggcgtccaagttcccttttattctgattcttggtcttccgggaggcaggctgcaggatgtttgc

SEQ ID NO: 363204 - DNA, 122 bp, Homo sapiens
ggcggggcggggcgtccgcggggctaggaggggagggaaactgaggctcgagcgggtgctcgcgtcctcgacctctgccggaatggggtctaggacgagattcctcaccctccgagcctcag

SEQ ID NO: 363205 - DNA, 122 bp, Homo sapiens
ctgcccctgcctcccttgctttcctcctctccatgagaaaacccgtcagcaggtggacagcgggcctcagactgccggtcagcagaggctgcaggcaccttgaatatggccctttctcggag

SEQ ID NO: 363206 - DNA, 122 bp, Homo sapiens
tctgaagctccaagatcaccaagtttcttgatggttccaggtttaccaaaggctcttttccgctgaaagtcgtttactttttctgaatgctcctttcttccatcaagtccctgtgacgccta

SEQ ID NO: 363207 - DNA, 122 bp, Homo sapiens
attaaaaataacaactatttacagtatattttttattgaaaaatcagtgctgtgttattacgtgaagaaagaaaatgaaaagcattttaggatttatggctggtttatgattttttcgaact

SEQ ID NO: 363208 - DNA, 122 bp, Homo sapiens
tacgaaggtagccttgcaggccaagttcggggggaggtggggaggctggttccgagtttccgggcatatccgtggagtccttccagaccttcctggggaccttccccggtcaccccggctcc

SEQ ID NO: 363209 - DNA, 122 bp, Homo sapiens
cggctcccactcagctgcgggagaaagctaagcagcaaaattcagaccaggctctgaacccgcagtaaaaagtaataattgtaacaagctgaattttgtatctattaatataattttagctt

SEQ ID NO: 363210 - DNA, 122 bp, Homo sapiens
atcccaacaatgcagtctcagcctcccggtgcggcagcttcccagcctgcaaacggccgccgctctgacacagaggcccccgcagacgtgcagctggatcgccaggctccggcaggcaccgg

SEQ ID NO: 363211 - DNA, 122 bp, Homo sapiens
ggacagagccgagggcatttaccgggagcttcaggaaccgttcgtctctactccaggatccggtaggataacgggactgccgccgccgtccctgccgctgccgccaacgtctatgccgccgt

SEQ ID NO: 363212 - DNA, 122 bp, Homo sapiens
tccggggttggggctgggcaagctggagaggcccggccagcagctgaatgggtcgagactcggagacccggacccgaagagacgctgggcagggagggagcgggatgtgtggctgcagacct

SEQ ID NO: 363213 - DNA, 122 bp, Homo sapiens
gcagtgataaagctgccaagtgagaagccagcaggagatgcccttttaaagttatcatcccgcagggcttgtcacagcccctctctgccttgggcagccccaacagccccccagaccctcag

SEQ ID NO: 363214 - DNA, 122 bp, Homo sapiens
ctggcccctcggaaagacttgaggcgcaagcacaggctgctgccgcgacactcagcgctgcgcaccgcgggcagaaaacgccgcggaccgacttccggttcgctcagcactaccggattccg

SEQ ID NO: 363215 - DNA, 122 bp, Homo sapiens
acagggtctgctgaccaccgcgtggcctgggagtctccggtggcctagggaagtgaagcgcggccctggggaaggcctggagcaacccatccccagaactcccacgagggggcgtcccaacc

SEQ ID NO: 363216 - DNA, 122 bp, Homo sapiens
tacggccggtccttttcctctcagttgtgaagctgggtgtctgggagccagggcccgctgcgctcaacccggcctggttcacggcgaagtccccaggccgcatcctggacgtctcagctgca

SEQ ID NO: 363217 - DNA, 122 bp, Homo sapiens
caacaacaacaaaaaaaaaacaaagaagttcaaccctttcagtttgtatgtgtatgcatgcgtgtctatattggtgcattatattgtagtgattagaaggaatctggcctttagatttaaat

SEQ ID NO: 363218 - DNA, 122 bp, Homo sapiens
ccaaccaacctacctacagtacctcctttcctcactcgcgccttcccttcttctgggcagcgaacacgtttctatcgcgtgagctacctcttccggggttcctgggtgacaagttccggatc

SEQ ID NO: 363219 - DNA, 122 bp, Homo sapiens
tctgcattctaagcagcggggaaagctttcgagttccttgaccttcatcttgacttgagccgaggttagcattaaaaacacaagcccagaggcagccagccatgctctgctgctcctactcc

SEQ ID NO: 363220 - DNA, 122 bp, Homo sapiens
actttcctaagctgctctaactttcctgccccttccccggccaagcccaactccggatctcgctctccaccggatctcacccgccacacccggacaggcggctggaggaggtcggaccctcc

SEQ ID NO: 363221 - DNA, 122 bp, Homo sapiens
catccttgggacatttcagtattctttccctaccaagtagtaatgatcacccttgattcccgggtccgggccggcgctggcatttgacatccaaagacctcctgctttctcagaggtcggct

SEQ ID NO: 363222 - DNA, 122 bp, Homo sapiens
catgctccctgacttcaccaaggtcacgctgcagcccgcaggaatgaaaatccacttctccgcattttcgaggtgacctggaagcggttcaactgctctggcttctcagaagaggaggggac

SEQ ID NO: 363223 - DNA, 122 bp, Homo sapiens
actctgtgcacccacaggattaacaccacatggatgccaccaaggcttatggcttatactcgctaaagcagtggcctgagttgtacctgggccccttttaacctcagctggacctggagcgg

SEQ ID NO: 363224 - DNA, 122 bp, Homo sapiens
tcccaccccagtctcccaagcaactgggactactctactttttttgcagagatagggtttcgccatgttgcccaggctggtctcaaactcctgagctcaagcaattctcctgcctcggcctg

SEQ ID NO: 363225 - DNA, 122 bp, Homo sapiens
ggaacgggaactgggccgacgcgcgccgccgactcacaatcagggccgcgcgccggctgacgtcaccctgtgtcgaccagccccctgagcccggaaagaggcggtcgctcattggctgcgcc

SEQ ID NO: 363226 - DNA, 122 bp, Homo sapiens
cgcgtgcacggcccactaggagggcgttgggaggagagtgcccgagtctggagccgcagccgggaagccgtagacagcaccccgacgccttaggcagaagctcctcaggatcactttaaaag

SEQ ID NO: 363227 - DNA, 122 bp, Homo sapiens
cacggtgtgagttctgcaggttcaccggcacagcgatggtccccgtaagatgctggaccccgtacttgctaaatgacgacccaaggtgagttctgcaggttcgccggcacagcgacggtccc

SEQ ID NO: 363228 - DNA, 122 bp, Homo sapiens
gccacaggaggggctgtgtctcctgcctccttcccaggtatcttactaagggatagaattcgtgttttatttcaacagacaccaggcccctagcggccttgggctctattctgtgggggaat

SEQ ID NO: 363229 - DNA, 122 bp, Homo sapiens
ttttttacgtgtaaatattcgcaaaacgcccaaactggtaactttgggaacacgggttcacgcagaagaagggctgctgtctggggaggactgaaactcgggttcccgaagtcgggctgctc

SEQ ID NO: 363230 - DNA, 122 bp, Homo sapiens
caatcactatcttaaaatagccagcaattctcagctgctgggctggagttcctccaggggcgagcaaagggaatatgaatctgccggtggggcgtgagcgagaagccaccaaaacatgagct

SEQ ID NO: 363231 - DNA, 122 bp, Homo sapiens
ggacaagctggacgttaaagggaagcgggtcgttatgaggtaattctgcacgtttgcccgcgtgctctctgtgctctgtcgcaaacctctttggccggagccgacttgttctctcgtctgct

SEQ ID NO: 363232 - DNA, 122 bp, Homo sapiens
ttctaggttgatctggatgtgtgctagaactgtcctttctccatatgacaagtggaataacgacagaagctgccattctctagctgttaaaggctataccgtgtatgggaaatactacagta

SEQ ID NO: 363233 - DNA, 122 bp, Homo sapiens
ccctctcgccgatcccacttttctgatgggatctcggtagaatttgtcatttgggatcagcggctgttaagcactactaaacaaatggaaagaaatgcatccatccgtatgcatgccccaga

SEQ ID NO: 363234 - DNA, 122 bp, Homo sapiens
tacacggaatttaggggtcgttttcaaagcagcagaaggggagcaatgtttttatgtggtcgtggttcttgaacattaggactgcacgctgttttcaagcatagaatagggacaggggctct

SEQ ID NO: 363235 - DNA, 122 bp, Homo sapiens
accttcctaactctgctttcttcctctatactcagctgcagtctctgatgtgtgcaatcacgtccctcctgctctcattgcctagggaattaaaaccaaactcttactgtgttcttcatcct

SEQ ID NO: 363236 - DNA, 122 bp, Homo sapiens
ccaaaaaagagaggattcctcatcaggtttattactcgttgccattcttgcaatgattaccgcccccgttgctgtggttgggggaggcgagcaaagggcagcggctgcgagcgcccgccccc

SEQ ID NO: 363237 - DNA, 122 bp, Homo sapiens
gagcccctctggccaaggctggacagtgaggctgtaagctgcctcccagcttcatctggacgatcctcgaggggcagaagggctaactcaagcacatggcagcccaactgtccacccaggct

SEQ ID NO: 363238 - DNA, 122 bp, Homo sapiens
ttattcgaaaaacatcctccaccacgtgcccctttgtcgccagagacagcgcctgcagtgcgtgagctgccccctgaactcctggcgcctggttgcctgggcaaccctcttctggggcgcct

SEQ ID NO: 363239 - DNA, 122 bp, Homo sapiens
ctttagcgatcgggagacagccgggcgctgcaaggtaagggctggctgcacggcccggggcgcggggcgtggggcgctgggcgcgggcggcgcgctcgaggaggccagtgtggggcgcgggg

SEQ ID NO: 363240 - DNA, 122 bp, Homo sapiens
cggagagagagctgggagagatggggaaagggatccatcaggactctgcgatggacttggcgtgggtgtgccacactcacccaggtagggaagacagagagacttgagtggggagaagcaag

SEQ ID NO: 363241 - DNA, 122 bp, Homo sapiens
tttacagggttgcgagggggagtgtgggatcgggtgtcgcctagccgtggtcgtactgcccgggtgtgtctgaagccccatctgtcatccctgcctgccttcccggtcacttaaccttcact

SEQ ID NO: 363242 - DNA, 122 bp, Homo sapiens
aaaggaaaagcatggtcgtgctctaatcattacagtctaagggacgacacgtcgagacggcgcgcgcctctgcgtgcgtggagatggcacaaaggccgcgccgcccccggcggcccccgccc

SEQ ID NO: 363243 - DNA, 122 bp, Homo sapiens
agctgtgtgatacattcattgcttttttctcaccgaatttgaaagagcaaagaactggcacgacagcggctgggtctgtcagtggtgttcgcaaacagtgtttggctttctcgattctggcc

SEQ ID NO: 363244 - DNA, 122 bp, Homo sapiens
cccaaattgacagcctgtatgagcacatccaggattaggataaggtacttaagtacctgccggcccactgtgcactgcttgtgagaaaatggattaaaaactattcttacatttgttttgcc

SEQ ID NO: 363245 - DNA, 122 bp, Homo sapiens
tctccaagtttacccaattgaatgtcgtcttgattgagctctgtggcagaggaaaccaaccgtaaaccgaaccaagagcgaagcgcaggggctcttccgtccaataagcggacccgaacggg

SEQ ID NO: 363246 - DNA, 122 bp, Homo sapiens
gtagccgaggcatcgagcgccatccagccaggcaccaagacaccagggccacccccacctcggggcgcccagccgctgttgcccctaccccgctacctgcgccgagcctcctcccacctgct

SEQ ID NO: 363247 - DNA, 122 bp, Homo sapiens
tgatacaggctcaagagatcactggatagcctttcagtggaatattaggtgcaccttctgcgtgggttatctgattctatcagggtctgtccttttcattttctttaatgagctctttcaaa

SEQ ID NO: 363248 - DNA, 122 bp, Homo sapiens
ctccgggagtgctgccgggccgtggcagtcagcctagcccggccagcctggtgtccccagcgtggcttctgcccccacaggcatgcgcatccttgtcacgttgctgctggatacgctgccca

SEQ ID NO: 363249 - DNA, 122 bp, Homo sapiens
tccaaagactttacccaccgaagggaggcgctgaggtggcaggcttggggcagcatgccgcgcctgtggtgcagaacaggaatgatttctagctagggacgcagaaaaagaaggatggggag

SEQ ID NO: 363250 - DNA, 122 bp, Homo sapiens
aggggaggcagcttgcatgcctgtcccccggcacactgtgtggaggtggaaacagagctacgccagcaggcgccaagcacccaactccagagatggaagcctggtggccttcctttcacaga

SEQ ID NO: 363251 - DNA, 122 bp, Homo sapiens
cgtgttctgcgtggtggccgggatggaccgagactgggtagatgccatcctgactgctgacgtttgggacgtgagacatctgggggcatggggcagcccgctgcggccaggtggggtcatgg

SEQ ID NO: 363252 - DNA, 122 bp, Homo sapiens
gactgtgtgtggtttgtaataaaagaagacacaaaaccaggagcaacctaaatgtcttatcggtggggggtctggctatggcaattagtgaatttctcgacaatgcaatactatgcagctac

SEQ ID NO: 363253 - DNA, 122 bp, Homo sapiens
cctgcgcggggacaaacgcggcggccccggtacccagaggcgggagaagacgggcacaaacgttcattgatacaaatgagtaaataaacatgctgggtgagcacggccaccttctcagcgct

SEQ ID NO: 363254 - DNA, 122 bp, Homo sapiens
tacagcccgaaaccctctccaaggggaggcaaacaggccaaagatcaacctgcaagagtccggagggaggaaagttcagcagtccaggctacctcttccaccagcgttccgctttctcaatc

SEQ ID NO: 363255 - DNA, 122 bp, Homo sapiens
cgcttcaaattgcaagcaaggaggccgcgaggcctgacgggatttgtagtcggcgctagacgccggcgcgcacgcgcagccggggccggggcggggcggcggcactgcggtgaaagccgagg

SEQ ID NO: 363256 - DNA, 122 bp, Homo sapiens
taactgaaactgagaaagaaaattccccttcagtgtggaagccataaaatgtaaaacatacgagctgtcagcagccacgtgtcagttggttccatatggaaccaactcgcctgtgtgaaaaa

SEQ ID NO: 363257 - DNA, 122 bp, Homo sapiens
ctcccatcctgctaatatagcccttaaaatctcctgcatcagaaattagcaggagtaccccgagtcatggtgtttctctcctgtgtatacagtcacaatcctctaggatgctcagaaaatac

SEQ ID NO: 363258 - DNA, 122 bp, Homo sapiens
ccacttttcggttacgcccccaaagccagcctccatctgccaggtccctcccctcacctccgggacccgactccccgcacactccgtcccagcggtgctccccacgtttcacggctcctcgc

SEQ ID NO: 363259 - DNA, 122 bp, Homo sapiens
aagggagggcctgtcttcaaatcctcgtgacccccgggactactccagagagggggcacgcgcacctaggaccaccgtagcgcgtcatcagtccttcacctccagcgtccctgactttccgc

SEQ ID NO: 363260 - DNA, 122 bp, Homo sapiens
tccgcaggactcctgttccaccgcaccctggactatggcaccagaggacccagctccccgcgacctggactaaggcaccagaggacccagctccccgcgacctggactatggcaccagagga

SEQ ID NO: 363261 - DNA, 122 bp, Homo sapiens
agtggatgatgtgctgagttagggatgtttatatgccgcaaaggtttggttggtaggcttcgcgctaagattagcctggctttgtactgaaaagggggaaggacacatagtgacacagatcc

SEQ ID NO: 363262 - DNA, 122 bp, Homo sapiens
gggtgggaagctggaggaggagcgttagcagcaactcgcgctgggaagaagccggcgctgcgcacgcgcccggcccgccactgcgcacgcgcccgcggaagtggcggctcccgtgtgcaggt

SEQ ID NO: 363263 - DNA, 122 bp, Homo sapiens
ggcaccagaagcaaacctgttcctgcttccctccgttttccaggtgccttagggtgactgcggtaactgggagctgagcactgatgggcaatggggcaagaactgggccatgtgcctcgggg

SEQ ID NO: 363264 - DNA, 122 bp, Homo sapiens
agacaaatgcctaaaataaaatataatgtggagaaactgtggatttacaagacatgtctgcgatagattaaaagaatttaatgcaaattttgcatgtgtattgattttcccaggacctgatc

SEQ ID NO: 363265 - DNA, 122 bp, Homo sapiens
agggaagggaacgacctggagtctcacagtaaatgtgggtggggcccggtggaaggtgcacggagacccctgtgaggcagtgggggtgtcaggaaagggagcagcagccacgggatgaatgt

SEQ ID NO: 363266 - DNA, 122 bp, Homo sapiens
cttcttccggggcacccagcagctcggtcctagggcgatgttgacagacagacagaggggcggatgcagcctacctcctgggcagtgagctgcggtctgaggcccctgcccagctggaaacc

SEQ ID NO: 363267 - DNA, 122 bp, Homo sapiens
gccgcagaacgggagggacaggaacacggacggagggaccgggacgaggggagggctccacgcagcacagctgctttcctgcggagcgttcaggagactcgggcacctctggaagcgctgcg

SEQ ID NO: 363268 - DNA, 122 bp, Homo sapiens
cacgttggtatactatgaaacttttttcgtaataacaaatataaaaagatcctgcagccccggctgagacgccccgatccacctggtgcctcccctttgtatcaagccggccccacaacgac

SEQ ID NO: 363269 - DNA, 122 bp, Homo sapiens
cgaggggcggagagatttttccaaagggcagtcaagctccgagaagcaacaggagactgccgccgaggaggcgtgcaagcgccggagcggatttgccatcagctgttgcttttcggtttccc

SEQ ID NO: 363270 - DNA, 122 bp, Homo sapiens
gcgagtaaagctcgcaatccgggtggaggcctccacgtcctagcgcagtccagtcccgggcgcagggaggagagctggtcagccaagattccaagacaggtgtccacctcctccaacgaagc

SEQ ID NO: 363271 - DNA, 122 bp, Homo sapiens
ccggtgccatatattatagcagcgccagaaatgtggtggtcgtcgccacgttagggtccgcggggtcctcctgaggcagcctggtgccaacccgcaggccccggctggggctcgtcctggcc

SEQ ID NO: 363272 - DNA, 122 bp, Homo sapiens
atgaagtgggatagtgtggtgtctgagatgcagttataggtatacagacatgactcaaggcgtggattaggaaggccaactttggaggggagggctggctcgctcatttctcttctccctgt

SEQ ID NO: 363273 - DNA, 122 bp, Homo sapiens
aggactgccgggagctggccctccgcggctgctcagactagggctgtgtgtgctggctctcgcctgtttccggtgtctaactggcttgtttctctttatggcttggcttcattccgacctgg

SEQ ID NO: 363274 - DNA, 122 bp, Homo sapiens
aagtttcacccgacgctccaggtcaggggtccccgacctcccgccatttctccacgtagccgcagctcaggacaggaggagagagcctcaaggtgacacctcattttggccagtggatccgg

SEQ ID NO: 363275 - DNA, 122 bp, Homo sapiens
ccccttgagatggctgtggctagcgacacatgatgtgaacacctctcttggattgtggttcggccgcacaaggccccatcagagttctacaggtggagtgtggggcccagaaggggctcagg

SEQ ID NO: 363276 - DNA, 122 bp, Homo sapiens
aatgcactgactgaagaaacagcacacttactgctggcaagactctgaaataatgggtatcgtggcatggtttgggaaagttgcttgccatggaatgtgtggttcaggcaaatcgtttatca

SEQ ID NO: 363277 - DNA, 122 bp, Homo sapiens
tgtgctttctgagtatatactgcacttacctttgtgagcggctgtaggagggtctatcctcgaagctagcattttctggcatttaagtttgtagataatcactgttgtttgagttatttatt

SEQ ID NO: 363278 - DNA, 122 bp, Homo sapiens
tcctcaaaatgtaaacagagttaacatatgactcagcaattccaatcctatgtatatatccgacagaaataaaaacatacatctgccaaaaataaaacttgtgcacaaatcttcataataac

SEQ ID NO: 363279 - DNA, 122 bp, Homo sapiens
tcgacggccctggcgcgcaggagcatgtccgcccctgcgcgactcaggtgcacatggaggcggaaagtgaccgcagccccaagccgtttccctccagcgtccccagacctcctcccactttc

SEQ ID NO: 363280 - DNA, 122 bp, Homo sapiens
ccgttcaacatttcacgagtcttgaacacctgtttcctttgcacccgacttcattaggctcggaggccaagcagaacccacagaaaggcttgccattgtgggaacacccaggctgtcccatt

SEQ ID NO: 363281 - DNA, 122 bp, Homo sapiens
aatagtacatttaattcatacttaattccaatgtgctctagcgcggccctggcgctcccacgcgaacaccagataaatggattacggcaagccaggagacaatgagtgcccactgaagccgg

SEQ ID NO: 363282 - DNA, 122 bp, Homo sapiens
cagagctctgcagaacttggaaatcaagtggctgggcgggacagaggccgatccccgctgcgtcggtgggaggccaccatcctcagaaccgactcttcctccccgcctccacccaccacgag

SEQ ID NO: 363283 - DNA, 122 bp, Homo sapiens
tggggccctgggaattcttcccttcaactcaactttatcttaatggctccctgtacatcacgactgagttttgtctcacaaacagcaattacattaccagttcatccaatcaacaaatactt

SEQ ID NO: 363284 - DNA, 122 bp, Homo sapiens
tttgaaaagtatagtcaagacaaagcaagtatttataattagattttgcttcttctctgacgcttttaagcaataaaatctttttgaacattcttgtttataaactactcagccatgtcaag

SEQ ID NO: 363285 - DNA, 122 bp, Homo sapiens
tccacaaagcctaggacggcccccatgcctcgggtctgtccaccagtaactctgtacgcccggtgtgtccttgtttcagtggtctcggtagcctcctgtgcctcgagtccctgcctgtctcg

SEQ ID NO: 363286 - DNA, 122 bp, Homo sapiens
acaacacatcacgaacaggagtaacacgtcgacctcggggcttctgacgtcatcccctcccgggatgttcaccagggaggttttcagatgagcaaaaagcagaacacagggctcgacacatg

SEQ ID NO: 363287 - DNA, 122 bp, Homo sapiens
agagggacctggagatggaggcctgcctcagaggagtggcagcttaattattcaccaactcgggatgtcagaatgtgatctggggcgtaaccagatccggcagggaaggcatcctgtgccgg

SEQ ID NO: 363288 - DNA, 122 bp, Homo sapiens
gcaacgttagggggtgggccaggagcgccgggactacaggaggagtgaagcccagcccctcggaccccaggctcagggacctgccctgtctatcccgctccaggcaaagggcaccaggtcct

SEQ ID NO: 363289 - DNA, 122 bp, Homo sapiens
agagatctcctccagcatccattagtgggcagggcctgtctctatccctcccatcacgtgcgcctcggaggcagagaagacttccattaaagctccggaagctcctttgcaggtcccgggag

SEQ ID NO: 363290 - DNA, 122 bp, Homo sapiens
actacagacatctttactaattttgtcactctttctagctcttcgctttggtttttgcagcgtccctaattcttgaaaaatcgcttaggttggctgaagggtggtaaagtgaaatgtatgga

SEQ ID NO: 363291 - DNA, 122 bp, Homo sapiens
ctgtaatcccagaattttgggaggccaaggcaggaagatcaacatgaacccaggaccagccgggggaaacatagcaaaaccctgtctctacagaaactacaaaaattggccaagcacggtgg

SEQ ID NO: 363292 - DNA, 122 bp, Homo sapiens
cgccgcacactccagccacctcgggaccccgctcggcagcccttccccgccaggcagcgccgagataaaaaacagaagagaaatcaaaacagaaggagaaagttttctgaaatgaaagaggt

SEQ ID NO: 363293 - DNA, 122 bp, Homo sapiens
gcttactgctgtctagtgcttggggagcctcagcctcatcaatggcctgtgttacgctgccgtggagggtgtccaaatgtgctttccactctaggtcaccaggtacagtagtgcgtgccagg

SEQ ID NO: 363294 - DNA, 122 bp, Homo sapiens
gggacttggtgggctgcagtcctgccaaaagccgggtgacaggtagggagccagagcacccgggtgtccccggctgcccgcgccgcacagagcaagggaccccaggcctccgctcgcccttc

SEQ ID NO: 363295 - DNA, 122 bp, Homo sapiens
agatgctccggagcctgcagggctggcagcctcgggcacgacgccgggcgcaaaggcctgcgttcactgcacatcacgggggcagggtcagcctgagctgtggcacgtctccaacgtgcttg

SEQ ID NO: 363296 - DNA, 122 bp, Homo sapiens
ttgaaatagagttacacattgttctacaattatttgagttaataagcagctcttttcaaacgtgattatgcccttccaagtttaaatacactagactttagtgaaagtaattgacctcatct

SEQ ID NO: 363297 - DNA, 122 bp, Homo sapiens
cagtctcagacagccctgagcccctggcagtgctgttaagccattaccgcagccctgaaccgcctgcccctacatgcttattgtcagaaacaagccctgtttctttaagttgggtttgcgat

SEQ ID NO: 363298 - DNA, 122 bp, Homo sapiens
tcttttacagtcgtaacaggtgtacttattcttgttaggcgttgtgtcataccatgcatccgtaggctaatacaaaggattgtacgaacagcatttactgaaacctcccttagttctcctcc

SEQ ID NO: 363299 - DNA, 122 bp, Homo sapiens
ctcatcttcctcctgggcgtgatcggcaacgtcctggtgctggtgatcctggagcggcaccggcagacacgcagttccacggagaccttcctgttccacctggccgtggccgacctcctgct

SEQ ID NO: 363300 - DNA, 122 bp, Homo sapiens
ttatgtgtgttcctggaaaggacgctctatttccttcgtgtctctacctggtaggtaaatcggccgcagaaaagaccaatgctaactccaccctgcatttgcagagatccgtcgctcacacc

SEQ ID NO: 363301 - DNA, 122 bp, Homo sapiens
agagagggtacagccgctgccgctacctcctccggttagacctcccagcccgttgagccgcgtaccggcgcctcctagtcccagctccccagctcggcactggctctctccgctgcagtggg

SEQ ID NO: 363302 - DNA, 122 bp, Homo sapiens
ggcagggcggccactgagcggtcatcaagggcgcagcgctgagccctggcatggaaacgccgcctccgccacgcccacgtccccaggctcagctgcatgctcattgcacagggtcgctgcac

SEQ ID NO: 363303 - DNA, 122 bp, Homo sapiens
cccgcgcggcttccccgcccatcgcctaatctcaccaatcgctgccctcctcgccccgtccgtcaccaggcgcctcatcccgccgaccactgtgcgcccagtccctgggacgcccagagaac

SEQ ID NO: 363304 - DNA, 122 bp, Homo sapiens
aacacacggaaagatgggggaggggagcgagtggagagagagagacacacggatatagaccgacgagagtcaatgcgagtcaagttaacgctttctccgccccgatgcacaagtacccccct

SEQ ID NO: 363305 - DNA, 122 bp, Homo sapiens
caacctgtgctatgtgaagcaggcaaaattgatcaggctcagcgagaagtcagcatggaacggttagggcccatgcctggaggcaactgcttaaaggcattttgtacctgactagggtgctg

SEQ ID NO: 363306 - DNA, 122 bp, Homo sapiens
aaagtgggagggaccggaggggggggcgggcccggccggcggacagcgggaagggggatccgacggtgacagtttggggaaggatttttgctttgggagagattagtctatctcggggctgg

SEQ ID NO: 363307 - DNA, 122 bp, Homo sapiens
gatgggggtttgattgattctgagggcccgaccttgctggctatgtcctaagtggttgggcgttaagctttaagcctctagggagccatttacttaattgaaataaaaacaactccagcggg

SEQ ID NO: 363308 - DNA, 122 bp, Homo sapiens
ctctttcctggcatccgcctacctcaccggcagtcacgcgaagatatattgatctttctacggcttgctgggcagtgcactgcagtggtcttacaaagataaaagggatgatcaacttgcca

SEQ ID NO: 363309 - DNA, 122 bp, Homo sapiens
ggagaagtcaagcccagggatgtggctcaggctggtccaagctctttggaggagtccaagcgtgcccagcccagagggaggttcagaggcactgaccgtcttctgtttgggaggagaagctc

SEQ ID NO: 363310 - DNA, 122 bp, Homo sapiens
tccaagtttaatcagcaccagacagagatgatcatcaccaagcagggacggtgagtgcggcgcgccggcccttggggcctctgtgcccgcgccggaacaagaacgtctcgtctgtttttctg

SEQ ID NO: 363311 - DNA, 122 bp, Homo sapiens
cattaaatatagtctctcccccaagattacagaggttcatgagatatagcatgaaggaatcgggcaaggaaacaacacttccattcttataaacaccctaaagaaagaaaacaaggatatca

SEQ ID NO: 363312 - DNA, 122 bp, Homo sapiens
ttctgcacgaaaagcgcctcgagcgcctgcagctgctcttcgctgaagatggtgcggtggcgcctcgtgcgccgctgcgaacccgggccgaccgcgcccgggagcgccccggaacctccggc

SEQ ID NO: 363313 - DNA, 122 bp, Homo sapiens
ctgttgcacctgccctggcctcccctccagccctcccgagaagcatgctacccaggattacgcttttgtccccgcttcaccccatgctgtccgagccctgaagagacttcctctgtgtctag

SEQ ID NO: 363314 - DNA, 122 bp, Homo sapiens
gtctagtgtgttggttacactgggaaggaacatctgtctagttataatagtcaagagtaccggtatgataaatttgggtaggtttcagagtgcttgctcacagctagcaaggaggatccaaa

SEQ ID NO: 363315 - DNA, 122 bp, Homo sapiens
tgcagcaagcaactggaggagggcagccaggccctgggtgtaggtagagcactcagcagccggggacccgcacgcctccaggctgtgccctcagtggagtcacccggcccccataccccagt

SEQ ID NO: 363316 - DNA, 122 bp, Homo sapiens
cctgtagtcccagttactcaggcgactgaagtgagagggccacctaagctcaagaagtcacggttgcagtgagctgaaatcacaccattgcactctagcctgggcgatgggaatgagaccct

SEQ ID NO: 363317 - DNA, 122 bp, Homo sapiens
cagcctctccccctctacctctgtctttagaggtgccagaacaagctgtaaaaagataaacgtgaccaagtcacagccctgcttaaaaaccctctatggctcccactgcccctgataaagtc

SEQ ID NO: 363318 - DNA, 122 bp, Homo sapiens
ggcggcgggctcggcgggggccatggagctgctaaagctgaaccggagcgtgcagggaaccggacccgggccgggggcttccctgtgccgcccgggggcgcctctcctcaacagcagcagtg

SEQ ID NO: 363319 - DNA, 122 bp, Homo sapiens
atgtaggtctctcagcttggctttcatccaggctgttaggtgaaattaggcccagaaaatcggattattacatcccaagggaaacaactgataagcagcagatgattgttcatctccttgct

SEQ ID NO: 363320 - DNA, 122 bp, Homo sapiens
aagcgcgataacctcctcatagctgacattgaacttggctgcggcaactttggctcagtgcgccagggcgtgtaccgcatgcgcaagtatggccgcccctgccgtggtgggagcaccgccgc

SEQ ID NO: 363321 - DNA, 122 bp, Homo sapiens
aaatgaaaactatcatcttttatgtgtcatccctggtctagcctgagtttactgtgatgtcgtatttaagccactgaggatgcctggcatttcctctgtatgtcttttataccatttagagt

SEQ ID NO: 363322 - DNA, 122 bp, Homo sapiens
gaccggttataccaacacatttttggaggacaagagcaataacttattcagtccttacagcgtgacagacattgttctaagtgttttacacattgttcactcctttaaacaacctaaaaggt

SEQ ID NO: 363323 - DNA, 122 bp, Homo sapiens
ggaatgctcccaacacggagaattgatcagtgtttgaggtgatggatatcccaattaccccgacttgatcattatatattgtatgcatgaatcaaaatatcacatgtacaccataaatatgt

SEQ ID NO: 363324 - DNA, 122 bp, Homo sapiens
tcactgcctggagccgctggcaatagccagcggatcagagtgtggggcccgccaagaaatcgccctggcccggggagccccctgggcagccccggttcccgcccgcgcctctccctccacaa

SEQ ID NO: 363325 - DNA, 122 bp, Homo sapiens
ttggctttatctgaacagcaccttcacggagtgattccactaaaactctcgacatggtggcggggacaagacctcagggctggccatcactgccatcagtgtggttttctgggtcatcattt

SEQ ID NO: 363326 - DNA, 122 bp, Homo sapiens
gctggggatgtgaccggtagccggggttgcagtggcaggagtagtcaggggggcccggcacgcactctccgtggccacagatgttctggttcagtcggcactcatcagtctctgcgggcatg

SEQ ID NO: 363327 - DNA, 122 bp, Homo sapiens
attggccagtggactcccatgtaccgcccctccaatagccaatggtcttgagacaaagggcgcccgcctttccagcgattctaacacctaccctcttacccgtgctcccctgcgcattgcct

SEQ ID NO: 363328 - DNA, 122 bp, Homo sapiens
ctggggacagcaggatcatcgcacgggcctcttgactctacggcctgcgtgtaaagcctgcgctaagccccagtgtccttcagcggcgtcaattaggcgcacgcgcagtttcctctccggag

SEQ ID NO: 363329 - DNA, 122 bp, Homo sapiens
cggagctgtcccccttgagaaatttctcggcgaaccagcgattgaagcactggtcgtactcgcgcttcatgtccgtgcatgcctcccccacactgttcatggcgacagtggtggcggcggcg

SEQ ID NO: 363330 - DNA, 122 bp, Homo sapiens
tctctcagggacccaagggtagcggggaaagtgcccatgtctcttgatctccacggggcccgctccgagcccgcgcccaccaggaggatggtgtggggcccggcccgctctcacctgcttgc

SEQ ID NO: 363331 - DNA, 122 bp, Homo sapiens
tgaggctctgtggtcccagctataaaatgggaaattcgtatgaagtgttttgaaaaccaccgtgcacaataaaatgtcagtatcattattgtttggggtgagacaaagataattccttttcc

SEQ ID NO: 363332 - DNA, 122 bp, Homo sapiens
gctgggacagggcctcctcgtaccgaggaaccagcggctgcagcagcttgctggagagctcgtgccgctgcaactcaggtgccccagcttcagttagcattcggaggaatctcctctcctgg

SEQ ID NO: 363333 - DNA, 122 bp, Homo sapiens
ggaccctgagacagctcatcctaacctagtcctgtcagaggatcgtaagagcgtcaagttcgtggagacaagactccgggatctccctgacacaccaaggcgtttcaccttctacccttgcg

SEQ ID NO: 363334 - DNA, 122 bp, Homo sapiens
ggagagccacgcaagatgaagtcagagagctggagtaagatgagggcatgtggcggagagcgatacagaaaaccactggatggtttagagcagagtaatgacagatcagacaggcctggttc

SEQ ID NO: 363335 - DNA, 122 bp, Homo sapiens
gagagccgcacttgcgtgggtgaacatcagtgaggcgcactcgcgatggccgctcactaccgagttctgtcagccgaacaaggatgaggatctatcggaatcctctgtctccccatccacag

SEQ ID NO: 363336 - DNA, 122 bp, Homo sapiens
gactgttatcttcccattttagtctccagttccaaacacccacacgtattcatcttccaacggtggcaggacattgtttctgaaagacagactgagctggctttgatcatcctgggtctctt

SEQ ID NO: 363337 - DNA, 122 bp, Homo sapiens
aatttgactttcaagtgcagtctctgaattatttaatatatttcttcctcttgaaattctcgaaatagattttttctgttatcttccctctctaaatgctcatccatttaaatacgcaccac

SEQ ID NO: 363338 - DNA, 122 bp, Homo sapiens
agcggctcaggctccccgcgcagtgctgctagctctcgcctcagtcccgttcccgtttgccgcctccctccaaagaggaacgcattgcctttggtacttcagtgtttaattccgtagcattg

SEQ ID NO: 363339 - DNA, 122 bp, Homo sapiens
cattgcatttataggcatatggccccaaccaggctaagagcaacaactagggctgggggtcgggagtgtggattacttcattctttatcactattttctggttacttatacagtgcctacca

SEQ ID NO: 363340 - DNA, 122 bp, Homo sapiens
ggccggagccgcggtctgggcacatcccagagctcgcgggcaggcaaatgccgtccttggcgtcttcgcccgccgctcgcgcccgccgcgggcggtgccggacctcgcccttccccaccact

SEQ ID NO: 363341 - DNA, 122 bp, Homo sapiens
ggcgagccgctgcgggaagaggtaccggcgctgggggggccggagccgggcctggggcggcgtgagagggaccagtgcaaaaggcgaccccaagagaggggctgaggagggaagtcccagag

SEQ ID NO: 363342 - DNA, 122 bp, Homo sapiens
acctcacctctctgcgcctctgccccgaccctgccgcgttcccagcctcggagggacccccgagttcctgctccagcgccctctaatggccaagacctggggagcgcaggagaaaagcaggt

SEQ ID NO: 363343 - DNA, 122 bp, Homo sapiens
gccgggttcttgtgccgggaggacagggaaggttcgtgctctgcacccggcgcccccctgcggctcccggccccagacagcgtcccttgagggccgggctcgttctccagagcctcccgttc

SEQ ID NO: 363344 - DNA, 122 bp, Homo sapiens
ctgatgtggtgtctagtgggtaaaatgccagaggagaaaataaggccagagagacaagttcgaacccaatagtagcaggcggaaatgccttcctcagcaggcatcagagaacccccagagac

SEQ ID NO: 363345 - DNA, 122 bp, Homo sapiens
tttaagtttgttttgagcattgcttaacatattccttcctctcatagtcttaacattccacggcttgtccctcaattttatacttagagtagaatccagtcgaatcccacaaagcgacaaac

SEQ ID NO: 363346 - DNA, 122 bp, Homo sapiens
gcaccgtccgccgccccaagaaccttcctgctttaccaatggcctgggagttggcaaacacgctaacaaaaaaaaaaaccaaaaaaacaaaaaaaaaaaaacaaaacgggctttcgcctcaa

SEQ ID NO: 363347 - DNA, 122 bp, Homo sapiens
ggggggaataagacatgaaagtgaagacagcaaatatcactttatcaaaccagtcaacaccgcaggggactgctgcttgatatcactgggaaaactctgggagtccatggaagagttaatcc

SEQ ID NO: 363348 - DNA, 122 bp, Homo sapiens
cgaagcctaaggccgcagctccggacaaggcgcccaagcggcggaaagctgcagctggcccggccatagctgtagaacaggacgcaccggaccaacgccgcccaggccacccaagaggccag

SEQ ID NO: 363349 - DNA, 122 bp, Homo sapiens
ggccccgccccctcagaactgagtgacggcagaagccctgggtaacgagccctgcaaagccggactgatcggttctagccacagcttctctctaagggacaactccttccctgagccctggt

SEQ ID NO: 363350 - DNA, 122 bp, Homo sapiens
atgaatgttgtactttcttcaggagaatattaagtatttgttttgaaggcagagaaagagcgtggtatttaatgtttacagttacataactcattgtatgttttgggacagtggactaaact

SEQ ID NO: 363351 - DNA, 122 bp, Homo sapiens
ccgcggacagcgcgagaagaggtcggccacttcggggtcctcgggcagcaccgtgttcaccgtgtcccagctgttgtggcggctgttcatggagccggagtagcaccaccaggccgccccgc

SEQ ID NO: 363352 - DNA, 122 bp, Homo sapiens
ctgtgtgcagggtgctgttgaggacacacagaaacatgaatagcatgatgcagaggcacacgctaaggtggaagagagggcgtggagacttattatgctagacagtgtacggcaggtgctag

SEQ ID NO: 363353 - DNA, 122 bp, Homo sapiens
cctgaattgaaaattggaataataacttaatagaagaagggtgactgtgtctggagtagacgctttattgtcctttagcatgagtcactctctgttggtttatttataactcttctgccatg

SEQ ID NO: 363354 - DNA, 122 bp, Homo sapiens
cacgcctgtaatctcagcactttgggtggccgaggagggcagatctcgaggtcaggagttcgagaccagcctggccaacatggtgaaaccccatctctactaaacatacaaaaattatctgg

SEQ ID NO: 363355 - DNA, 122 bp, Homo sapiens
ggcaagtacagaccctgcacgtccttggacgagagggactggatattgcgacgcctgggccgcagaaaaggactccaccagccaggcctccttcgcccgcccccggttcggggtgtgtgtgt

SEQ ID NO: 363356 - DNA, 122 bp, Homo sapiens
agtattaactcccagtaaataataaccaaccaaccaaccaaacttccctctcccagcccccgaggctagaaaatcttgctgctccgtcttagcattccaagaaagtgcttccaggtatttag

SEQ ID NO: 363357 - DNA, 122 bp, Homo sapiens
aaagttgcttcaatttggtcctcatcatggcttgccattttatttaagacgagaccaggccgggcgcggtggctcacgcctgtaatcccagcactttgggaggccgaggcgggtggatcact

SEQ ID NO: 363358 - DNA, 122 bp, Homo sapiens
ttcctgtccatgttgcctatttaagtcgggtgacactctagaccattgctattctaagtgcgcagctttgttacacctgggagcttgaaagaaatgcaaaatcttgggctccaatccaggcc

SEQ ID NO: 363359 - DNA, 122 bp, Homo sapiens
gaggccgatggctggtacatggcagagctgagatattcactgtgttctggctgtttccaccgtaccatgttgttcccagccctctgttttctttccaccccacttcccatgacttgcttccc

SEQ ID NO: 363360 - DNA, 122 bp, Homo sapiens
attgccatgacaaatagaaaagatgccaaagtcaacattttttcaaggagctataaagcccgtggaggagtcagctgacggcacagtgttcgcggctgcaccgctcggaggctgggtgaccc

SEQ ID NO: 363361 - DNA, 122 bp, Homo sapiens
agggctgcacccccttgctcactgctggcgctagaagcagagcctcttccacacaaaagccgcaagcggctgtcctgggctgggaggcgagggtgcagccaggccccagccccgtccccacc

SEQ ID NO: 363362 - DNA, 122 bp, Homo sapiens
gtgactgaccacgtggtggccacagaagggcagcctcatggagatgaccatctcagtcaccgacttgaggaggcagaggacccaggcagctcccatcagcagcacgcagagccggtggctca

SEQ ID NO: 363363 - DNA, 122 bp, Homo sapiens
ggtggggcgggacggagccgcggcggaggatggggcggggtttcatggggtaagcggggccgaaatagagcctgttatttactctggttcacaggcagcatgtctttggttttctgactact

SEQ ID NO: 363364 - DNA, 122 bp, Homo sapiens
gaattaagcatacaaatcagatgaggcatagcagattacacagtgaagcgcggtgtctcccgagcctaaatgaaatttcaatctaataattccttcctggcccagtcataatttgtttagag

SEQ ID NO: 363365 - DNA, 122 bp, Homo sapiens
agttgttaatcgtgttccatgaaagaaacagtgcacgctgaccctcgacactgaggagcacgattcacttcgacagttagaaccctagcaacttctgcaaccttgagagttcaaggactgca

SEQ ID NO: 363366 - DNA, 122 bp, Homo sapiens
ggccgacactgaggctagtggttcttgaaccacgcgtcggtattagggtgctgtgcagtacgtagctcgaggaaggcacttccacagaaggcagtagcctacctccaccctgtttaccacct

SEQ ID NO: 363367 - DNA, 122 bp, Homo sapiens
aatcagaccaccagttaatcggaacttgaaccagctgtaaacaatatggccttgcagaggcgttccccatggcattcacagtagcaaaaggatccaaatgcccaaaaaaatgacccaaatgc

SEQ ID NO: 363368 - DNA, 122 bp, Homo sapiens
ctctataatgacttagaagctgatgagtctactgaaagtgatagaaacagaaagcactcccgaatatgtataaatatcataaaagacagcatggatttctaaattgctggactctccagcag

SEQ ID NO: 363369 - DNA, 122 bp, Homo sapiens
agggtccacggggagcggcgggcgggtgcgtggggcggcgggctagggtgcggcgctgtccgcggtgctggcggcggggcggcccccgcgggacgggagggcggccaagtgcggccctcgcc

SEQ ID NO: 363370 - DNA, 122 bp, Homo sapiens
tcagaggccccaaagccaaatcctgattgctcagcgggctggaaggcgtggcctcagccccgccccgccccgcctcaccacaaagcggttggttgcggcagggactacaccggtgtatcatg

SEQ ID NO: 363371 - DNA, 122 bp, Homo sapiens
gcaggcccctgacttggagcagagctcggagcagggcccgggacaccatctggacccaaacgctgccggacgtgagccgtaccagtcacgtgggccacatggggttgcatgccctgtcaccc

SEQ ID NO: 363372 - DNA, 122 bp, Homo sapiens
gagggtcagaggagggagatggctccggatccaccctaattgcctctccggagaggaagacggagcgggagcttgactctggctgacccccactgtcccttggggagactacataatgagag

SEQ ID NO: 363373 - DNA, 122 bp, Homo sapiens
cgggacgtaggcctgtgtcccatccaagacactgctcacgtcttagcctgattacctggccgcctcggctcacctgggcacatggtgagccgcggaactggcaggcaccaaacatttattga

SEQ ID NO: 363374 - DNA, 122 bp, Homo sapiens
gatgcactgcccgcctgcccgcggtggctctgaattcctccactttcaagcttcaggagacgtttgagttcagaagtctggagacagcatctctcttgcggtaaactgaaaaagggaaagaa

SEQ ID NO: 363375 - DNA, 122 bp, Homo sapiens
cctggaaaatagtaactttccctggtgctctgcagcccccaggagatttaagatttaccccgattccactgctgatcccctcccaggttcgagcacttggagggctgctgaagttcctgggt

SEQ ID NO: 363376 - DNA, 122 bp, Homo sapiens
ccactgctcagaacagccccaccagtgagaccaccaccctgacctccagtattgccccgccggccacggccacgcctgactcaaactctgtaccggctggccaggccaccccttccaagggg

SEQ ID NO: 363377 - DNA, 122 bp, Homo sapiens
gaggagtagctgaggccgggcggggtgaaggctgggagggacagggaggggagggggtagcggagctgcaagggcagagtctaggagggcccgcaagccaggatcccaagtatcagacacgc

SEQ ID NO: 363378 - DNA, 122 bp, Homo sapiens
atctcagccgctgcggggtcaccaacagagcctggacacaggaggcatctggcaaatacgcgctgcatgaatcaatgactccagtgcccacgcgcaaggggcccctgggctcagaaaacccc

SEQ ID NO: 363379 - DNA, 122 bp, Homo sapiens
ctgtgtactcctctttcgtctttaacctgttcacacctgagggtgccgagggcccgactccgcaaacccagcaccagctgaaggccctgtgctccctggctgcagagggtatgtggacagac

SEQ ID NO: 363380 - DNA, 122 bp, Homo sapiens
atcctcttaataaaatagggccactagagaagtttatggtcattgtattcaaccactttgcggaattaggtagagaaggacttatctcaaaaatatttgcatgggtggcttttgtctaatat

SEQ ID NO: 363381 - DNA, 122 bp, Homo sapiens
ggtgtctaaagaaacagcctacatgaagttaacaaagaatgacagcgcaaaacacactcacgctatgtctgtggaattttggccacacagtggacatgactgtcaactgtctcaggcagccc

SEQ ID NO: 363382 - DNA, 122 bp, Homo sapiens
gcgcacgggaagggctgtgggggcgctggccggctgcgacgtcagacccccgcccctcggcgcctgccggacccagctccattcccagccgcgcctccttcggtgggcagccggccggaact

SEQ ID NO: 363383 - DNA, 122 bp, Homo sapiens
gtgggaacacctcgcccacctgagaaatctgaacttaaagccagttgttcctccccctggcggtagcttttggggctgcaggtgccaaactgcaggtacagggagaaaacactagaacactt

SEQ ID NO: 363384 - DNA, 122 bp, Homo sapiens
tagagcagggagtttggctggtgctgggcctgagccagggggccgggacacccttgtttccggtggtcttcccgttgtgggagcaggtggagggtggagacctaaactttggggtccagctg

SEQ ID NO: 363385 - DNA, 122 bp, Homo sapiens
gcccctccttctctccccctccttttccttcccttccccacccgcaagtggcagccgctgcggccccagttgactagagttctgtgccagtgggatccactgccaagctcccatctcccagt

SEQ ID NO: 363386 - DNA, 122 bp, Homo sapiens
taagtgagttaatggatagacttctcagcacagagcacctaatacagccttcattccattcgtccttgttaccaggtttctgctaagctcccttccagggctgagatctcagaggcttcacc

SEQ ID NO: 363387 - DNA, 122 bp, Homo sapiens
gggggtggggggaagcctgatttaggatggcttagagcccagaatatgctagcttattcccgtattcactcactcattatcatcaagtaggtatttactgtaggtctactctgttccaagca

SEQ ID NO: 363388 - DNA, 122 bp, Homo sapiens
ctttaagggggtcaacacgccccacccccagttccgcagaggcagcgtcccgcgactgggcggtgcccgagaccacagacgccgccagccaatcacgctttcgatcctgccgtgcgagcccg

SEQ ID NO: 363389 - DNA, 122 bp, Homo sapiens
acgtgtagtcagacggcttcttcccgcggttgtcccgggcgtagatgttgccgccaaactcgataagcatctcgatgaggtcaacattcttgaccttggccgcgtggtgaagggcagtctca

SEQ ID NO: 363390 - DNA, 122 bp, Homo sapiens
gcgggggggcggcggggggtcgcggggagcggagctctcgggaaagggcggcgctgggcccgcggctgttttgcagggagggccgcggcggcctcgggagtccctctcccaggcagtttcct

SEQ ID NO: 363391 - DNA, 122 bp, Homo sapiens
ccccagtggggctccttctggaccgtccttggcaaggagggggctgctggggaggagtggcgaccacaggaagactgttagcttctcagaggcagaatttcaacctgcagggggaaaaaagc

SEQ ID NO: 363392 - DNA, 122 bp, Homo sapiens
aaagccagcatcaagcaaatagcagcagctggactcagagttaccagagtggcctataaacgtgtcatgcaaaaaaaaaaaaaaaaagtcatatttgcatgtataagtcaactggcagtata

SEQ ID NO: 363393 - DNA, 122 bp, Homo sapiens
aactgggtttagaaagccaagccaagagatctttgaaggtggcccaagaaggccttgaaacgatttctgtcagctctggaaaccagccgcgccaccccctcacctggcaggtctgtcaccgc

SEQ ID NO: 363394 - DNA, 122 bp, Homo sapiens
actgacagccttaatatcttactttgcaaatatagtttattccttcaataaagccgccagcgcaggggaatgtttaagactcgctctcccccgagagcctcatttgaatttctaaagtcttc

SEQ ID NO: 363395 - DNA, 122 bp, Homo sapiens
ccagcatctgcaggcgggagacaaagtgttgccttggtcccatttctggggcaaaggcgacgctccgcaccctgcacttggcgctctgcgctccgcactccgcaggccatagtctgcactcc

SEQ ID NO: 363396 - DNA, 122 bp, Homo sapiens
aaagatatgaacattttcacatgttctgttttgtgaccaagaccatacatctccaagacacgggctacaaaccacacagcattggaacataatatagtcaattacactcaaacgtatactca

SEQ ID NO: 363397 - DNA, 122 bp, Homo sapiens
gtctttatccatcaaagaaaccctcctcaccttcagaggtcattgagaaacactgattaccgtgggagtgacgcagactgaatacagaaaatgaacatgcacacacagagacacagaagcac

SEQ ID NO: 363398 - DNA, 122 bp, Homo sapiens
ccgcgtattctaacctgggctggtttttgtatttttgcaaaataacaccccacacattctcgtatcagcgtgcagatttttttgcacccagtttggttgtttgcggccataagcttttcttt

SEQ ID NO: 363399 - DNA, 122 bp, Homo sapiens
cagggccaggccgcgtcttcagagcctggcgagggtctcgcgctgctgggaaggcggagacgccggggcgcgcgtgcaccctcgcgcctgcagcgccgcgcacggccgccaggtgccgctgt

SEQ ID NO: 363400 - DNA, 122 bp, Homo sapiens
gacacacaggaccagacgcccacacagcagcaggcactctggcaggcacctttccagagccgggcacacccattgccatgaggacccctgctgcggcacacccctgccggggcacatctgct

SEQ ID NO: 363401 - DNA, 122 bp, Homo sapiens
cagagcagtgggggctgaactcaggacacagtcatttttgctgttaagtctctcctgcggcgctgaggaggcaggctcaaagtaaccaaccagagcagccgcagagggaaaagctaagacag

SEQ ID NO: 363402 - DNA, 122 bp, Homo sapiens
actgatgtcaacttcctgattggtttccaaatggctttgcagtactcattcaacatttaccgagcaatttcagttttcagtttgcagagaactgaactacccgaggcttgttctgtgtttgg

SEQ ID NO: 363403 - DNA, 122 bp, Homo sapiens
gcctgactggcagttcccaagaactcgcccccaacactgattgggtagagctccaaattccgcccccccagggaactgattgacagaagaaggatcttacacggctgagtggagcgagatga

SEQ ID NO: 363404 - DNA, 122 bp, Homo sapiens
cgcgccgaggtctccctcaccctccaggtgtccttcgcacccaacagtgcgtctgaggaacgagctgcagtttgagcgttcccctgagatgtgcgtagcctccgtgtaaatgtccactccca

SEQ ID NO: 363405 - DNA, 122 bp, Homo sapiens
aaaaccagctgaactttccctgccaggtgcggcagggtgggggtgggggaggatgaaaaacgaagtcccccggggcatttacagtttccaatggatcaccttagtatgcgtgttgcaattat

SEQ ID NO: 363406 - DNA, 122 bp, Homo sapiens
cccctatggagctttctcggcgaaggcgggattggttaggagctgacaatcggcagcagacgattgtaaatgaccggaccttttttctattctcctgcccagcccccggcccggcctccgcc

SEQ ID NO: 363407 - DNA, 122 bp, Homo sapiens
tcccgctggctgctatgccaatggcctgatccttgcccacggagaccggtggcgggaagacgactgcacattctgccagtgcgtcaacggtgaacgccactgcgttgcgaccgtctgcggac

SEQ ID NO: 363408 - DNA, 122 bp, Homo sapiens
aggctgaggcatgagaatggtgtgaaccccgcaggcggagcttgcagtgagccgagactgcgcccggcactccaacctgggtgacagaatgagtgtccgtcttggggggtggtggacatcgc

SEQ ID NO: 363409 - DNA, 122 bp, Homo sapiens
caggacccgtccttcctgtaccgaagtctctcctgcctgaaggccctgcacgggcgggtgcgcggggacccggcctctgtgcgggtgctgctgcccctcgcccacttcttcctgagccacgg

SEQ ID NO: 363410 - DNA, 122 bp, Homo sapiens
agggcaaagatggtgacggcagcactggttataagaaaagaaaatgaaaacagccgaaaacggctcaaaacagggacatgacgaaggaagggacactgtatagtgagcaggtttacaagatg

SEQ ID NO: 363411 - DNA, 122 bp, Homo sapiens
ggcccagtccaggactggctccttgaccttggatggtacactttcttttctgggtcttaacgtcctcacctgtaaaatggagagctcggactcattgtgtctcaaggtttttccgccccgaa

SEQ ID NO: 363412 - DNA, 122 bp, Homo sapiens
aggcacggtggccagatccaggaactcataagctcacatcccctgggggttggagccccacgcggcgcaagaaccccgggcgctgagctccggggaacctgggagggaaggaggggcgagcg

SEQ ID NO: 363413 - DNA, 122 bp, Homo sapiens
ttgtggttgcgtgactcagggcaggggtgctggcaaaaatctccggactaaatcacacagcgcctatgtcatgcagccagcctcccagtcatgtgctacagaagggcttcctttgtgtcatg

SEQ ID NO: 363414 - DNA, 122 bp, Homo sapiens
tctggggacagtttatctgccaacctgagtcagaagggaaggtggatgcaaattgcacgtcgtgcaaaagatctcctgcttgatttggtagagaatgcacaccacaggacagaaaacgccct

SEQ ID NO: 363415 - DNA, 122 bp, Homo sapiens
cgggagagggaaatgacagttggaaaggaaacatcagagtgaggggctgggctctaggtgcgtttgtctttagaaactgactgatcctttgttctgtctcaggtgcctctggggcaccacaa

SEQ ID NO: 363416 - DNA, 122 bp, Homo sapiens
gagcggctgccgggaggtgcgctgagcagggtccgcagctaaggtccagcgcgatccgagcgcccaggaccctgcggccgtggaggaggcgtgccctgggaaggagccgctactgggacctg

SEQ ID NO: 363417 - DNA, 122 bp, Homo sapiens
tatgaaatggtaatttctggctgtgtctgaactctgggcaggaataagttccgtgctctccgagaactgcaagtctctctgattcacttggcagcaaaattattctaagcatcctgtcccgt

SEQ ID NO: 363418 - DNA, 122 bp, Homo sapiens
gacccggcgggccgagatcgaaggacactgccggtgcaaggtccttgtgcatccagggggcggtggcagggagcatggggactggggaggccccggggcagcctgggagccattccaaggtg

SEQ ID NO: 363419 - DNA, 122 bp, Homo sapiens
tcggtctatgacgagcagcggggtctgccatgggtcgggggctgctcaggggcctgtggccgctgcacatcgtcctgtggacgcgtatcgccagcacgatcccaccgcacgttcagaagtcg

SEQ ID NO: 363420 - DNA, 122 bp, Homo sapiens
aaagctggaagtgggcacctcgagggcctcagccccacgaacacagtcacccaggaaaagcgaaccgcgccaggccctgtcatcgaccgctgggtccgtcctcccagcgctcgcggccgctc

SEQ ID NO: 363421 - DNA, 122 bp, Homo sapiens
cactgatgcccaccccccccatggacgccagcaccccccacagacacccaccccaccccacggacaccagcaccccccacggacatccacacggacaccagcaccccccacagacacccaca

SEQ ID NO: 363422 - DNA, 122 bp, Homo sapiens
aaacgtaccggggaggggacagaccgtgagcaagtggtccaagtctgcgcagggtgaccccgaaggcccaccggagaggccgaggcttgtgggctactagaactaggcctggtaggtgaagg

SEQ ID NO: 363423 - DNA, 122 bp, Homo sapiens
tattaaggtctcattcacgtactataccatacaattcccgatttaacgtgcgtaataggccgggcgaggtagctcgcgcctgtaatccccgacctttgggaggctgaggcgggcggatctct

SEQ ID NO: 363424 - DNA, 122 bp, Homo sapiens
ctggcactgtctgggccagatcctggggagctggcacctgccgagctggagatgctgtcccggagcctgatggggacactgtcgaagctggcacgggagcgtgacctgggggcccaggtagg

SEQ ID NO: 363425 - DNA, 122 bp, Homo sapiens
ctgtgacgtctggttccatgtggcctgtgttggctgcagcatccaggctgccagggaggccgacttccgatgcccagggtgccgggctggcattcagacctaaggtccactgccaaggcacc

SEQ ID NO: 363426 - DNA, 122 bp, Homo sapiens
acaaactatagaatatgacaagtattagaaaatgctggcccccaggcacagtgtggctaacgtctgtaatcccagcactttgggaggccaaggtgggcagatctcttgagcccagaagtttg

SEQ ID NO: 363427 - DNA, 122 bp, Homo sapiens
gatatccttcactgtggcagttttgattttaagacataatggtcatagtgagtacacagccgttgcttttctgtctcacagctcgacaaggatgagctatgagccaggttagatgtataaaa

SEQ ID NO: 363428 - DNA, 122 bp, Homo sapiens
tcacccgccgccaggcgctctgtccagttcttccccaaggtgataataggcgcccctttacgcagagtgcaaggtgtgccaccgctggcttttcgcccagtcatccgattcagccctgccaa

SEQ ID NO: 363429 - DNA, 122 bp, Homo sapiens
agctagttgcactattgcatgattttagcctgatttcatgggatgcaacagaatgaacatcgtggctcatggctgtcagtagtgaaaaatagctggaaatcagacaaacaactttattgctg

SEQ ID NO: 363430 - DNA, 122 bp, Homo sapiens
cccaggacaccgtgaaggtctgcgaggacccccggtttgtcccctccttcctgagcacagcggcaggcatggaacacagagagaaacatgaacgccgcggagggcatatccccagtggccaa

SEQ ID NO: 363431 - DNA, 122 bp, Homo sapiens
tctctcctccatctatccttcatctacccatttctaggtgatctgcatctgaagatctaacgactgtttcaaacccaacacatccaaaactgagctccaacctcctcccccaaaacctgcca

SEQ ID NO: 363432 - DNA, 122 bp, Homo sapiens
ccccaaaggcaggtcaacattgcatgactcctagggaccagcccattttggcaatattggcgttgggctgttttagaagacatcctgaaagcattgaagaggtgagaagagagaatacatga

SEQ ID NO: 363433 - DNA, 122 bp, Homo sapiens
agactgagacgcagtcaggcgcacgcccgcaagaggcggcgaggtgacaagtttggagtgcgcccccttcagtactgcgcgttctaagacttttggcggagactttcttggcaaaacccatt

SEQ ID NO: 363434 - DNA, 122 bp, Homo sapiens
atcgccaggcgcccgcgaggctcacaggaacggccctgtcacctagtccgctccctcctgcgtcttaccgtcctggacaaagactccaagtcgaaggagacaaagcttgtaacgcaatcacg

SEQ ID NO: 363435 - DNA, 122 bp, Homo sapiens
cgtccaatcacagggcgggggtggcacctggcggtgcctgggggcgtccctggggaccctcgcctcaggcggcacgctgacttcttggggtgctcgccggtatggatcctacagcggatgat

SEQ ID NO: 363436 - DNA, 122 bp, Homo sapiens
caaatcaagccctttgaggatctggcctgctcccttctctaggctcctgtgccacctgatcgctgttatagactgaatgtttgtgtcccttcccattttaaaatgttgaaaccataacctcc

SEQ ID NO: 363437 - DNA, 122 bp, Homo sapiens
ttttttaacttagtctaaggcagtggttctcagctgggggtaattctgcccaccagggcacgcttggcaactactgaagacatttttgactgtcatgatcaacactagattgtgtagttgca

SEQ ID NO: 363438 - DNA, 122 bp, Homo sapiens
cttgcaaatcaactctttcagcgcttcctggaactcaccaccgttttggggaccaagaggcggggctccgcgagcagggtgcctattggcctgagggccggcgggctctgggcgctaattgg

SEQ ID NO: 363439 - DNA, 122 bp, Homo sapiens
aaaccagggccccagaccccaggctgggcctccagtaatcaagggccggaactgagctgacggaggcctgcaccctagttccggtgtgggtggaggggccggccctgatttcgaaactcgcc

SEQ ID NO: 363440 - DNA, 122 bp, Homo sapiens
caggttaaaggatcgagtccagcctcggtttcctcatctgtaaaataagccgagaacatccgcgcctctttctggagaaggctgggaggatgccagagagaaactgcgcgcaggccctggcg

SEQ ID NO: 363441 - DNA, 122 bp, Homo sapiens
gttgctgagagctggggaaatggtttcatgcatcactgtcagtatttggtggaataaggacgtgcacgcacgtgctggctgttgaactgttgcctctccactgcaaaccctcccttccttgc

SEQ ID NO: 363442 - DNA, 122 bp, Homo sapiens
taggtgggaggtgggcctgcatctgaagaatacgctcaaggctggcagggatgcagcccccgcctcgcacgaccctcgcttcccacctgtgaagtgcacggagcagggcttcatttatttaa

SEQ ID NO: 363443 - DNA, 122 bp, Homo sapiens
ggagggtccccagtgaggagcggcaccggggggtccccagtgaggagcgggcctgggggtcgaaagtgtgagggactagagttttctgcccccgccacagcgagcagatctgtttttattac

SEQ ID NO: 363444 - DNA, 122 bp, Homo sapiens
agagataagccaatcccgcagctgcagatgaggagttctgagaagcattgctcaggacagcggtaaatcacttcttggaggtgccctgcacgccggtcctgggagcaggcggcctcccgggg

SEQ ID NO: 363445 - DNA, 122 bp, Homo sapiens
tcaaaataatttggtaacttgatagctcattccttcctttcttgctaactgcctatctctcgctataatctaaagtaataattataataattacatattacatatgtatccaaggatgtaac

SEQ ID NO: 363446 - DNA, 122 bp, Homo sapiens
aaacgccggctcgaagtgtgggagaggaggttgggggcgaccccaggtgggcactgctggcgtccggctgtcaatccacagctcacgtcctcacaggtgcgcgcctagagtcacgcgtccag

SEQ ID NO: 363447 - DNA, 122 bp, Homo sapiens
gcgaggacgcttcacgtggtggcctggggcccaccccgcctaggaaaggcggatcctttacgtctgaccctctagcaacccctgggccggtctgggaaagttccccagctgcacttctggga

SEQ ID NO: 363448 - DNA, 122 bp, Homo sapiens
tagcagaagaaatcctctccagttaattatttctatgtcaattaatcactttagccacctcgccacaacagagtgagttatagcaaacaaatacttcccctcttcaaatccacatcatccgt

SEQ ID NO: 363449 - DNA, 122 bp, Homo sapiens
tccctgcgtaacttccgcttttaggccgagacacgtacaaacgtgatacgtggctgctggcgtcgacccgaggggcagggactaggcattttagcaaccaagggggtgtggctaagcgagag

SEQ ID NO: 363450 - DNA, 122 bp, Homo sapiens
cctcccacccatgccaggagctgaccctttggggcgctggccaggccggagtagagatggcggccacgcagccagaggaaggcggccctgaattaatctgtcactaaagcttggccgtggca

SEQ ID NO: 363451 - DNA, 122 bp, Homo sapiens
ggcccgagtagtaatcgtgctggggagcgctgtagtagcccaggtcagtgacagaagactcgggcagggtaggcgagtccttggagcccgcatggcagctaagggagctggagatgtcggtg

SEQ ID NO: 363452 - DNA, 122 bp, Homo sapiens
ttgacccacgcctctgcgcaggcgccttggcgggctgtggctgcggagttggcgggtcggcgcctgcgcactggagtcccccgcgattttttcctccggggtgggcgaggaggctgtgcggc

SEQ ID NO: 363453 - DNA, 122 bp, Homo sapiens
ggggacttagccggccccggggccaggggtaggatcaggtttccacaggccagacggccccgcacagtcaccaccgtcaccgtcaccatcacccggtgctgggcgggcaccatgtggactcc

SEQ ID NO: 363454 - DNA, 122 bp, Homo sapiens
tgtagatctggtgagaaggtcaggaaacatggatcttaatactcaccccaccactcactccgtatttttggacagtcactttcttttttaaaatgagagagggctaaaatccagcattaaaa

SEQ ID NO: 363455 - DNA, 122 bp, Homo sapiens
acgtggtcccctgcactggaggagaggctcgcgtttcatcctggtgtcatgattcctaaacgtgtcaggagcattccgggagtggccggggagctgggctgtggtggaaagtgggctggacg

SEQ ID NO: 363456 - DNA, 122 bp, Homo sapiens
gccaatgtccctcaatgcgcctgcgagactcccacgccctgggaaggatgcctatcgattcgctctgggctcggcagttctttctgatagcaggcagccatcttgcctggagcctgagaaag

SEQ ID NO: 363457 - DNA, 122 bp, Homo sapiens
tgcctcctgcctcagtgatggtgacgggtctcacagcgcttacctgctgtcctgaaacagcgtggctctgcccccagggagcatcactccaggaggcagcagcacatgttccatttacatat

SEQ ID NO: 363458 - DNA, 122 bp, Homo sapiens
gggataccgctaggagggcaggaggtaaagtccagaggctggcgcgtggtgcggccccgacgccgcgggctgatcctctgtccctgtggggccgccacctacccgcggtgagcctcttctcg

SEQ ID NO: 363459 - DNA, 122 bp, Homo sapiens
gcggcagcagctgctggagcgcggcgcctcggttgcggccactagtgcagggatgtgcctcggcccgtcctcattgaaatgcggcgcttcgcacagcctcactccagcctctctctccagag

SEQ ID NO: 363460 - DNA, 122 bp, Homo sapiens
caggctctgtgggtcttgagtgcccagccttcagactgggatgaactccatcagctctttcggggttccagctggccagttgcagatctggggactgcttcatctccaggggatgtcatgcc

SEQ ID NO: 363461 - DNA, 122 bp, Homo sapiens
gcccaagctctcaacgcggcgtctcctgccgccagccccgccccggcgcgctgacgtcggcgtctcctctccgaggcccgccgcgacctccgccagtgcagaagacaggaccaaatgggagg

SEQ ID NO: 363462 - DNA, 122 bp, Homo sapiens
tatttgcctaataaacacccttcttccattgtcccccacccctgccccgggggtactccacgggaaaacttcactccacagatgccagcagttccctttaaatgggagtaggaggttgtcat

SEQ ID NO: 363463 - DNA, 122 bp, Homo sapiens
ttgtttgtttctgcttttattgtctgtgcttttgtgtcacctccaaaaaaacctgaacaacgtgattaagaaatgggcaaaggatctttgcattagctcattttcacgctgctgataaagac

SEQ ID NO: 363464 - DNA, 122 bp, Homo sapiens
gctggtgcatcattttgaggtagatcacaggtcccggggcaggggtcctgcccctctctccgtcaccatggctcccaacactggttgagcacccaccatgtgtcaccacccaggcctgagaa

SEQ ID NO: 363465 - DNA, 122 bp, Homo sapiens
ctggttcccgagtgaccttcgcctgctgtcccccatacaccggtcccttcccagcccccgcggcctcactctcccggcacccaaatgtgtctgtggtggccgcggcaacaggagagcgtccg

SEQ ID NO: 363466 - DNA, 122 bp, Homo sapiens
gaggctaacaaatccagtttcttagaacaaaacacttaatagggacttatgaacagaagccgtgtgagtatctcagtcagcagtgagaggagatggtggatccctgtgcctttatcccccag

SEQ ID NO: 363467 - DNA, 122 bp, Homo sapiens
gcctgcggggtggagcgtcagcgggggcctcatccccgacccggagcccccaccctcccccgggagcctccatcccaacccaggccttgcctgccacgcctacctgtggtcgtccatgtcct

SEQ ID NO: 363468 - DNA, 122 bp, Homo sapiens
atatacccttctacccctaagctcacggttgatgccaaaatctctttattgtgagttacacggagacaggagcagcgacgcaagctacgtgaagtctactaaatccactgttgccctctcgg

SEQ ID NO: 363469 - DNA, 122 bp, Homo sapiens
aggcctgagccaccgtgcccggccggagtttttctacttaatacctctccatgccaaccccgttgtcatttcccagcggccgcctctataacgggcacttttcagggacaaagaattggtcc

SEQ ID NO: 363470 - DNA, 122 bp, Homo sapiens
cgagaagctcaccatgcataacctcaacaactgcctggcctcctacctggacaaggtgcacgccctggaggcagccaacagcaagctggaggtgaagctccgtgactagtaccagaagcagg

SEQ ID NO: 363471 - DNA, 122 bp, Homo sapiens
aaagcctgcagccctgccagaccactgtatcagtgcagttctcgcacccgccccgccccgcgccccgtcagctccacatcggggagccttgccaagctgaaaaggaaggagacggcagttcg

SEQ ID NO: 363472 - DNA, 122 bp, Homo sapiens
cggcctctcctccgccgccgccttctccgcgaggggcctccggggctgcacgggccgcagcgcctctgcgggctgcgcgctgctatctccctgcagcgctggctccaagcgctctgagcgcc

SEQ ID NO: 363473 - DNA, 122 bp, Homo sapiens
ttgtccctgaagtttgcccttcagctgagacacaaggagtagaggaagaggaaggactaacgcagaggcactcaaggtctcactatgactgtagttgagagtcctctcccttcttccctaac

SEQ ID NO: 363474 - DNA, 122 bp, Homo sapiens
actcctcccaacttcccttcttctactcctgacagtttgtcatacacagctccttcaaaacggggaccagataccacccccaacagagcatatgtcactgaataggttgcattaagaagggc

SEQ ID NO: 363475 - DNA, 122 bp, Homo sapiens
tgaactatttgtataaatggatgtgtcattagcattttctgttgcaccatctcacctctacgtgattcaaattcacataaaatatgactgcattataagggtttttttgtccaacaggcctg

SEQ ID NO: 363476 - DNA, 122 bp, Homo sapiens
tgtgtgtggatacctggcgttctggctgctgactctctgtgttgttgccaacacctccttcgtcttcattctcccctggcctttcaaacccttctctgctgctcagggttgtgagatgtgga

SEQ ID NO: 363477 - DNA, 122 bp, Homo sapiens
gggcaaatgagctggaccagacctgacggggcagtccttgtacttcagagcctgcccctgcggtgggtgggggggcagggaaggacaagagggaagagggcaggtgcaaactcctcatagtt

SEQ ID NO: 363478 - DNA, 122 bp, Homo sapiens
tgcagacctgcactgagcagcacgtttcgggccgtggggtgccaggcgatgatgcccactcgcttggtgtgcccctccagtaccaccaccggctctgtcagcggggaggtcagcccgttctc

SEQ ID NO: 363479 - DNA, 122 bp, Homo sapiens
tgtccctcacagcttgtaaaggtgagagcttggaggacctaatgtgtgttgggtgttgggcggaacagtggacacagctgtgctatggggtttctttgcattggatgtattgagcatgcgat

SEQ ID NO: 363480 - DNA, 122 bp, Homo sapiens
ctgctgcactcttatatgaccatgtcataaattaaaaaattatagcacagagcagttaagcgtcttgtccagtatgacacaaagtgatgggatagggatgacggtaaatgtctttttcattc

SEQ ID NO: 363481 - DNA, 122 bp, Homo sapiens
tacaatatgcagccgcttgtgtctggcctctttcacttaagataatgtcttcagagttcacgcatgttgtagactgtatcagtattccattcctttttatgactgaataattgtccattgta

SEQ ID NO: 363482 - DNA, 122 bp, Homo sapiens
cacggacacccacgtggcccagcactccccttccgggcacaagcccagaggaccaaaagccgaggctccaaggggcgtctttaccccacgttcacagcagcgttatttataataaatgaaaa

SEQ ID NO: 363483 - DNA, 122 bp, Homo sapiens
cccaataacaataaacactcctaggaacatagattgtattctctaaaaaatgcttctggccgggcgctgtggctcacgaggtcaggagttcaagatcagcctggccaatatggtgaaacccc

SEQ ID NO: 363484 - DNA, 122 bp, Homo sapiens
tcccgctctccaggccctggttgcctcctctgagaagggcgtaagtgggccggctggcctcggaggcccctccttccagctgggccccggcaggatgcacaatcagctcattctttagtgaa

SEQ ID NO: 363485 - DNA, 122 bp, Homo sapiens
tagttacattttaaaagctctcccaaagattgtcgagggatatgtgtataatagaaaattcgcataaattttagaagttaaaacatgagagttcaaggagatagtgcatttgtcctgggctt

SEQ ID NO: 363486 - DNA, 122 bp, Homo sapiens
tcccacagcggccggagtttcggactcggagcgcgagaaacgtcgggatagcgcctgcctcgcagagcttccgcttccggcccttcaggctctgtctctgtggagactgggctttgggaggg

SEQ ID NO: 363487 - DNA, 122 bp, Homo sapiens
tgtgaggagacactgatgactgggaaccgggaagctgtgtgtggcggtcagcgggtcagccgtcctggctccaccccagtgtgtaccgtctccgctgggagaccctgtctttctgactgtgc

SEQ ID NO: 363488 - DNA, 122 bp, Homo sapiens
gacagttacgtgttaaaatgggagctttgcttctaaaaccctcctgattcactctgggctcgagagatcctgcaatagtgcagccgggcaccagtcatgtcctcagtctgtttcctgggcat

SEQ ID NO: 363489 - DNA, 122 bp, Homo sapiens
attcatcgttttgtattgtgtattcttgagagtctactaaaatatttttatttaaaagtacgaaaggaagtgctagggtttaccctcaaagtatctcgcggttctaaaggattttacgctct

SEQ ID NO: 363490 - DNA, 122 bp, Homo sapiens
agagcctctggagggagcattgctgtgcgccctttgtgtccgcggtaggggagctccagtcgtcacaccgcaggctggaggttacgcttcgagtcgcttaccgaatttgtgtgcattcacgt

SEQ ID NO: 363491 - DNA, 122 bp, Homo sapiens
aaacagcctattctcaaaagcattacgacataggaagaaggaggagtgccatcagcaaaccgaaacaaacatgggtccactagtgtgcccagggcttcctgccaggccagcccatccagata

SEQ ID NO: 363492 - DNA, 122 bp, Homo sapiens
agcacagcactggaatgaggaggtggccatgtgccacactcactcattaccacctgccaccgtgtctgcctcagcaactgccctggtgcgagggcagaggaagtgaaggagcactggactgg

SEQ ID NO: 363493 - DNA, 122 bp, Homo sapiens
ggcgcaggagaggcggctgggcctgcggagcccgccccgcatcctcgcccagcccctgtccgaggccgccgggcaccccctcaccatcccagtccccgaggctgccccaaccccgtcctgtc

SEQ ID NO: 363494 - DNA, 122 bp, Homo sapiens
aagaatgctactccgaaacggacctgggtgaggcaggataggcagtcaaggaaatgaccacgtcctcaggatgctgcacgcgtggtgactgtacagtcaacacagtaagcctcagcgttcac

SEQ ID NO: 363495 - DNA, 122 bp, Homo sapiens
ccacaggtcaggtggagggtggggcatgggcatcggccaggattgctgtcaccttttctccggagctaccaagatcgttcctgtttctaagcagtcgcaccccagcagcctctctctctcca

SEQ ID NO: 363496 - DNA, 122 bp, Homo sapiens
cccgccgccgccatcgaggagccttggggacgcgaagggccagccctgctgctgctgtcgcgcttttcccaggcccctgacccaagtggggcacttgtgaccggcccggcgctgtacggcct

SEQ ID NO: 363497 - DNA, 122 bp, Homo sapiens
cagggcaccaggggaggatctaccagggggttctggtggaagggcccacccgggaagcggcgcgcggggaggactcgggggcgccgagaggaactgtccgggaaggggcgcgcgggccgcgg

SEQ ID NO: 363498 - DNA, 122 bp, Homo sapiens
ggcacctcggccgaaactcctggggcggcgcggtggagcgtgtggaggtttccgggaagacgcctacggctgcggctccgactgtgcgggctcccgccgcccaggcaagagcgtccaggagc

SEQ ID NO: 363499 - DNA, 122 bp, Homo sapiens
ttgaagatattttacccaagtcccctccctttcaccccaccctaattttccccattctctcggtgacccgtaactgatcaaaagtccccccgcaccgcgctacgctctcgcgattcctctta

SEQ ID NO: 363500 - DNA, 122 bp, Homo sapiens
actaagagttgcaaattagtgtggtaagtacagtgaatgcagcaggcatgggccccttaacgtcttcttgtctgtagtccttgatcagtctgctcattcacccacctatctatcctgtactc

SEQ ID NO: 363501 - DNA, 122 bp, Homo sapiens
gacacggactgggggacacagctgaaaacagtgggaggccagatgctggcatcttccagacgggagcatagccatggtcactctagccgatgtctcctggggctctcaggcggcaaggacca

SEQ ID NO: 363502 - DNA, 122 bp, Homo sapiens
ctacgagctgggcgggcccatgaccctgcagcgccgaggtgagtgagggctttgggccggcggtcccagggcagccccgcgggcccgtgcccagggcgcaggagcagccgggttggcctaag

SEQ ID NO: 363503 - DNA, 122 bp, Homo sapiens
ttagaggggaaaaaatgggcaggagaggaaagaaaaaaggggaggatacggtcaccttctcgcgaagctctgatgagggctccgtaaatccatatgctgccatggaaagaacggggcagacg

SEQ ID NO: 363504 - DNA, 122 bp, Homo sapiens
acagacttggtagagcttgagtagccagttgcatatcagaccatttaggggatttcagatcgttagcagtagtatgtagttagcgtgcagcttacccttctgatgagttctccctccaggca

SEQ ID NO: 363505 - DNA, 122 bp, Homo sapiens
caggtggttcccagagccaggaaggaaccacgtaccacagacagaatttcgcaggtgcgacggccgtcctccagccacacccgcctccgagctgtgctgcccgcttcctccagggcctcaag

SEQ ID NO: 363506 - DNA, 122 bp, Homo sapiens
gttgagggtggggagacagtattaccataggtaaagtccaagtcacttcacttgcttccccgaatcgtttctgaagcaagaactggattagatgatctctaagataccttccagccttgaca

SEQ ID NO: 363507 - DNA, 122 bp, Homo sapiens
tggggacggtgtctgctgcggggtattgtctggcagtgaggctggggatggtgtctgctgcggggtgttgtctggcagtgaagctggggacggtgtccgctgcagtgtgatgtctggcagtg

SEQ ID NO: 363508 - DNA, 122 bp, Homo sapiens
tgttaaaatatgtggtctgaagttccctatcactctcgatttgcccaccagccgggtctgcggtgcccgtgcaaacgctgcagctaggatataggggggaggaggggcgggagaatgacaaa

SEQ ID NO: 363509 - DNA, 122 bp, Homo sapiens
aaggcagccctcaggcgtttggaagtccagggcaggcagacacggccagggctacagcgacgctgtctgcacgctggtgcccagcagccctgctcctcacgcggtggtgtgacccagatgag

SEQ ID NO: 363510 - DNA, 122 bp, Homo sapiens
cagggggtcttggaggacattcatccggttgcatgggagacgtgacccggtgctggcgcacggacacctgcttcctcggaagggctgtccggcactgtcccgtccaaaacggtctgaagaat

SEQ ID NO: 363511 - DNA, 122 bp, Homo sapiens
ccgcgccgctcccccccttctccctactccctgccccccgggccgccaccctgtcctcgccgctctaggaaggcgagcccgctatcccggccaccgcccccagctctgtggtgcccggcggg

SEQ ID NO: 363512 - DNA, 122 bp, Homo sapiens
cattccctccccagctgcacagccacccggctccccaggagttgccagtgatgtcttctgcggacgcttcagactctgttgtccctacacgaatattcacgcattaaccataccattctgtt

SEQ ID NO: 363513 - DNA, 122 bp, Homo sapiens
tgcacacgaatcgtcctagttgtgggtagaccagtaggttctattgccccctctttgcctcgaagctgggtgctttccaggtgctgctggaagctgcagttggcaccttctatcacaggaca

SEQ ID NO: 363514 - DNA, 122 bp, Homo sapiens
ccccgccccttccgtccccggaggcggccagcctcgtgtccgctctaggcttctcccggacgtctctttgtggtggcgttgagctcctctagcccgcgcttgccgtcctctcagtggtagcg

SEQ ID NO: 363515 - DNA, 122 bp, Homo sapiens
gccacagggatcacgagaagtactgaatgtccaggtaattttgtaaactagaaagtcccgcgcagcctgagggcctggaattattgctggcacctaagtggtggctgagttgagggatgcag

SEQ ID NO: 363516 - DNA, 122 bp, Homo sapiens
aaatgtctctctcagttcacaagaccttatcctgggcagtcaacgtccagttagaaataacgtctgaaaattcagtaagagaaaaggaagtcttcttctgtaatactcagtaaataatgttt

SEQ ID NO: 363517 - DNA, 122 bp, Homo sapiens
gagaattccaattagcctttttatttactaacattatcttagagtcgacataaagttaaccgcttcctgcttttaatttagttcattctaatgactatttctctgcatctctacagttcgtt

SEQ ID NO: 363518 - DNA, 122 bp, Homo sapiens
gggggagggggagagggagggggaaggagagggtgagagagacggagagcctgggagggtcgcatcagccctctgtggcccctatgggtcttcctggttgaccatctgtcccctccttgatt

SEQ ID NO: 363519 - DNA, 122 bp, Homo sapiens
tgtgcaaactatcccgggcctctgctgccccctggcggacgccgcgcgggagcccagaaccggagcgctctgagcgaagccgactccatccgacaccgccgcctcccagagggctgccctgg

SEQ ID NO: 363520 - DNA, 122 bp, Homo sapiens
ccctcctttcgaccccgctttccccacccagtcggatggcggcggccgcgctgaggcccccggctcaggtaattgtggcgtcttccgtgccctcaggtcacctcatctttacctaagtccaa

SEQ ID NO: 363521 - DNA, 122 bp, Homo sapiens
tctcctatccccactgaagacacacgcacacgcaggcacacacgctcacacatacacacacgctcccgagacctaagagcagttaaatgtggcagccatgttacaaaattcttctacttcat

SEQ ID NO: 363522 - DNA, 122 bp, Homo sapiens
ccgcgcggcgccgggggcggccccgggactgggggtggtgccctgggagctgtgtggccgcgtgcgcgctccgccggggtcctggaggcctctgggcgcgtgcgcgggcggtcgctacctgc

SEQ ID NO: 363523 - DNA, 122 bp, Homo sapiens
agcaggtgaggaaaaaggaaaccatgtgtactgcagggcccccagaaactccctcctgaccgttccctctgacacagccccctcctctgaacatcctccttcacttgcagagggacagtgga

SEQ ID NO: 363524 - DNA, 122 bp, Homo sapiens
ggggctttttgcaggaaagtcagtctctcctgcccctcacctcacagaaaaccatgaatacgaacttacttctatggtttatgctgaagacaaaaggggtagggttaggctaaaaaggatgg

SEQ ID NO: 363525 - DNA, 122 bp, Homo sapiens
accctgcaggcagaggacattgggagcaagcaccactgcattcaagggcaacttgggcagcgagtaccactcccctctgcttcagccagctccctgccaggctttgtgtgggaggagaggtt

SEQ ID NO: 363526 - DNA, 122 bp, Homo sapiens
gcctctcgcctgccgggacgccagagtccctctcctttcctcgttgctctcttcctggcgcggactactctccgggcagcaaagcagctgtcccggcttaacgcgcaaagttcagaaagcca

SEQ ID NO: 363527 - DNA, 122 bp, Homo sapiens
acatgacgctattaataagtgaaagacgccacacacaaaataatacatatcacctggccacgtggctcatgcctataatcctagcacttcaggaagccaaggcgggtggttcatctgagatc

SEQ ID NO: 363528 - DNA, 122 bp, Homo sapiens
agtcgcccctgtcagggatccgtcagctcggattcctagggctctgaaaaatgcactttccgaccgctaggtggttgcgctccgcatctctcggttgccaggtaaccgcctccccgtctctc

SEQ ID NO: 363529 - DNA, 122 bp, Homo sapiens
cagggcatgtggggtgtgcgctcacaggcgggcggtggccatggcaccggggaccgggagcggcccctcgctcctgtgctggctgtggcaggaaagaggccggtggggacaggaagggcgcc

SEQ ID NO: 363530 - DNA, 122 bp, Homo sapiens
ggcttcgtcggcttcttggtgccttggttcatccctaagggtcctaaccgggggtaagtgcgtgaggcccgccttgggaggaacgggcggtgaggagctagcaggccggggcggggaaaggc

SEQ ID NO: 363531 - DNA, 122 bp, Homo sapiens
cgcctcgggccgggaaagggctcgcccttcacgggcgtcggtgcggtccgcggcgagccgcgggagcacagggcgggctcagcattctggttcaacgtgaggaccagaacctcggcgatcag

SEQ ID NO: 363532 - DNA, 122 bp, Homo sapiens
tttctcagcatctccgccgtttcctcagcatatgccctgatggttaggcttgccatcccacgctcctcagaacacttggacaaagcagactggctgaccgcagggaataaagcagggcaccc

SEQ ID NO: 363533 - DNA, 122 bp, Homo sapiens
gctggggactgaggagcagacacctgttgcacagtgctcattagctgcaggagggcgggacgcctcccagcctgaccaacctgttggatgatgtgggtgctcccgcccctcccccagcagca

SEQ ID NO: 363534 - DNA, 122 bp, Homo sapiens
tgtggactagaaatgtccctgattagaagctgagaacctttggccagggaggtggggcggcggggaggggtcgtcaagccggtccagagcgcgcccacctgcgccacaagggagaagaggtg

SEQ ID NO: 363535 - DNA, 122 bp, Homo sapiens
cctcgcgcgtccccgcttaccgggccgcgcgcccccgggccccccccgcccctcactcggcggccagagcagcaacctgggcccctcccgccgccatcttgcgccgactccctccgccctcc

SEQ ID NO: 363536 - DNA, 122 bp, Homo sapiens
cggcctcctccgggaagcctgccaggacctcctctctgggcctgcaaagacccttcctttcgagccatcactctgggccagaagcagtgagcctcctggcactgtctccttcaatcgcgcag

SEQ ID NO: 363537 - DNA, 122 bp, Homo sapiens
ggagggacgccccgggcaccgcccccgccccgccggcgcccccgctccaatctgggaccccgagccaggcctgtcccaagtcctcccgggcccgccagcccgcggccccttaccttggcctg

SEQ ID NO: 363538 - DNA, 122 bp, Homo sapiens
gaaagggctgaggcagagcaacgctgggtgaaccccgtcttcctgaggccacgtttgcaccgggaagagaacacagtgaaccccctgagcaccaacacgctcccacaccccccacgagcagc

SEQ ID NO: 363539 - DNA, 122 bp, Homo sapiens
gcctacgagaggggtagtgtgggactgagccaatgcgtacggcgtgacgccatcccgctgcgaccggcgctccccggggcaggtggctgcatagtcttggcggaggtgagtctcgtggtgga

SEQ ID NO: 363540 - DNA, 122 bp, Homo sapiens
atgagtcacctcgattctgaaaagccagattttaatgctactgggcgtagtcactgggcgcgttccacctcttcgtttcattgtctggacgaaatccagtttccatgctagtgtcccttccc

SEQ ID NO: 363541 - DNA, 122 bp, Homo sapiens
cttcgggcagtagcccccagtccttccggtgccatcgggggcctgctggagcaatttgcccgtggtgttggactccggagcatcagcagcaatgccttgtgaagaagccagcccatgacatt

SEQ ID NO: 363542 - DNA, 122 bp, Homo sapiens
tcagagatttatcagctttgtaactgccttctacctatctctctcccagccatgagctaacgtgatgtctcatttgtgagataggtggagtgagcattaaaattactcctgttgactgggca

SEQ ID NO: 363543 - DNA, 122 bp, Homo sapiens
gcagtgggacaggttgaagaactcctcttgcttggccacctgcagagggcgacagtgggacgggctgactctccagtcacccccacacctcaccaagcaggaccgggacaagtaacttatca

SEQ ID NO: 363544 - DNA, 122 bp, Homo sapiens
aaacccagcgggtcttaggagagcccggccccccttgtaatgagagaaatcaaaccacagcgcacagcgacttcatgtccaccgttggcttagtgaggccccacgctcagtgcgctgctgtg

SEQ ID NO: 363545 - DNA, 122 bp, Homo sapiens
gccctcagagggggagcctggattcttgaagctcgtggaaactccaggcagggctagccacgctatgggcttccagggctttcctggaaggaacagcgacagtcagggttcggtggaagcta

SEQ ID NO: 363546 - DNA, 122 bp, Homo sapiens
ggaccacaaacacattatgctaagtcaaagaagacagacacacaagattatgtattatgtcgggggtcccctactggtccgtggcctggtaggaaactggctacacagcaggaggtgagggg

SEQ ID NO: 363547 - DNA, 122 bp, Homo sapiens
ctggaataaaaacaccggaaccaggaagagacatcccatcctcccgcagtgtccctctagcgccctctactgacaatgcctagcatcatgcctgctggcaagaggaatgcttcttcagtgtc

SEQ ID NO: 363548 - DNA, 122 bp, Homo sapiens
cctcctctgggggtgggctggaatcacagggtagtgggtggcaggtagcaggaggtgagacgatggggtgccatgacctctcctaacacctgatgctggacaggaaacaggaggcttctggg

SEQ ID NO: 363549 - DNA, 122 bp, Homo sapiens
tcttgagtaagtaggcgtcctccacccacactcagagcaaaaggctcccattttaaatatcgcacggtgacgtcatcctgggacctcgtcaccgcggcggctgctcctcaagttctactttg

SEQ ID NO: 363550 - DNA, 122 bp, Homo sapiens
cgtctgatttcgcagggccaaagcccaggtgagagtcagggtagtgttcagactagcccacgctccggttctgagccgcgacggcggtctccgcacgcaacgaaatcaggcaggaccgaacc

SEQ ID NO: 363551 - DNA, 122 bp, Homo sapiens
taagcgggcggcctccgtgcccatataaggccggcttgggctccacgccggcctcccgcccgcagcccgcctgcctggcagggcctttgcattcctcccgccagctgtctccccgctagggg

SEQ ID NO: 363552 - DNA, 122 bp, Homo sapiens
cgaggggccgtgggaaacgtctgacgcccacttcacggaggagcaaatggaggcccaggccgtcattgtgcacggacacaccataggccgtacagagccgggagtgggaccctcgcagtgta

SEQ ID NO: 363553 - DNA, 122 bp, Homo sapiens
tcagtttgagaatgagctgatcacaaagctggaccaggaggtagaagggggcagaggagacgaacaatacaaggttcttctggaaaaactgtgagtatttcaggaacgaaacctgaagtcag

SEQ ID NO: 363554 - DNA, 122 bp, Homo sapiens
agaaacgcagtgaagcatcccaacgtggctctgtgctcagcatcctcgtgccacaagaagcgcagcagtcctgcgtgggctgctgcaccgtgagccctcccggcaggagccctgcggggtca

SEQ ID NO: 363555 - DNA, 122 bp, Homo sapiens
ctgaccaggctaaagcttccttcattgacgcatgcaatttttttttttttgagatggagtcgcactctgtcaccaagggtatagtgcaatggcgcaatcttggctcactgcaacctctgcct

SEQ ID NO: 363556 - DNA, 122 bp, Homo sapiens
ctgggcgtcgaggagagcaggtgtggctggcacagtaaatgcaaacacaaccagtccaaccgcaaagtggaatcagcctttgcatggagtgatatcctgggacagcctcaagctctgacttt

SEQ ID NO: 363557 - DNA, 122 bp, Homo sapiens
tgtgatgggtggtgcgaagtcatctctcttcactccactatacctagtactcagctcatgcgcagtaaatgagaaaagtgaatgaatgcttgcatgcacgcataaataaataagtgaatgaa

SEQ ID NO: 363558 - DNA, 122 bp, Homo sapiens
gaatctacttctatctgcaggttttttataccttatgttcacctttggttgtatggaagtcgttctcttactgtttaatccaacctccagtgacagaagtagaattaactaaaacacaagtt

SEQ ID NO: 363559 - DNA, 122 bp, Homo sapiens
ttctggcgttaaacatgccctggaggatttccgcacggatatcacgcacctccctgcaaccgtacaaactgcgtgcttactgactggaagctttgtcaacacgcttgacctgctggctcgcc

SEQ ID NO: 363560 - DNA, 122 bp, Homo sapiens
ctccgcaggcggaagtttgctttggaagattttattccagacgctgtcctggtccctggacggttaggaacggttgggtcctgctactgcctccgtggggcagggagcctcgcgagaccagc

SEQ ID NO: 363561 - DNA, 122 bp, Homo sapiens
gagaagagaagcaatcttcagcccggagcctgctgatagatgggcacagcagcgagtaaacggttctccggctgaaggctggctttttatcatcacttgtggatcctcccacgtctcaccct

SEQ ID NO: 363562 - DNA, 122 bp, Homo sapiens
tcctcagagcccagcgcggtgcagggtgcagcatctctccttagcagccctttcttcctccggcagcctgcactggcaggcaggcaggcaccctcacgcccagacgcaccagcccgagcaat

SEQ ID NO: 363563 - DNA, 122 bp, Homo sapiens
accagttgtatatgaatagattagcaattgaatcacggaatacaatgaaacatttgcgtacgatttcaagagaaagattagaccataaagagttcaatggagaaagcagtatctccagcttt

SEQ ID NO: 363564 - DNA, 122 bp, Homo sapiens
cagaaccgtaacctccaggagctgggttgaggaaggcgcggaggacaggaaccccagcgccggcagctaagcctccagacggagcccgcccctccggccggttcctgcctccaattggcccg

SEQ ID NO: 363565 - DNA, 122 bp, Homo sapiens
actccatctcaaaaacaacaacaaccaaaacaaagaaacaaaactattaatgaggccaggcgcagtggctcatgcctgtaatctcggctgagattgggaggctaaggcaggcggatcacctg

SEQ ID NO: 363566 - DNA, 122 bp, Homo sapiens
gagggtctggaggagccaggagggtttctgggagcagagggtcacttagtgggcttctgtcgtggtgtcgctacgggcgcgaaacggacactgaacacagtctgactgtatggaggcaggtg

SEQ ID NO: 363567 - DNA, 122 bp, Homo sapiens
gccacctcctgcccaacttacgtgtcacccacggcccggctattctggccaacgggattccgggaggaagtcccactcggcctccttgctcattgggcccgtccgagcagacgctccctccc

SEQ ID NO: 363568 - DNA, 122 bp, Homo sapiens
ctccccgcgagctccccgggcccgcgcgcgcgccccccactgcccccgccccccgcgcggcgcgtgccccccaccccccgccgcgcgccctcgcacccgcccggctccacgcggcgcgcgcc

SEQ ID NO: 363569 - DNA, 122 bp, Homo sapiens
agagatccaaagatcagagctagagtctttacatatgagagtcaggccccagacacaggacgagagcccaggaaacagtgagaaaggcgtcgaatttggagtcaagagacctggattcaagt

SEQ ID NO: 363570 - DNA, 122 bp, Homo sapiens
ttgtcatgggagacatgtcagaagtagattctttagggcttggtgacttggtgaagtggacggtgaaggaaagggttggtggtgaatccaaggcattgagctgaatcctgaggagatgcagc

SEQ ID NO: 363571 - DNA, 122 bp, Homo sapiens
tcctctcggcgccccggttccggcggcgtcccccacccggtccggttcccggcagccccgcgccccgcccgtccccggcccccgcagcccgcagggccgccccgccaccctccccaccgcgg

SEQ ID NO: 363572 - DNA, 122 bp, Homo sapiens
cagatggaaaagggggtagaccgggcagagcgagaggcggctttggctcgtggggagcggcgacccaacccagcgcgcatcccgcaagccctcccggctgccccggaccttccccctcgcta

SEQ ID NO: 363573 - DNA, 122 bp, Homo sapiens
tttttcatcacccatcatacttctttttgttttgcctgaaactgcctctttcacacttcccggggtgctttcttgctctcgtatcctggaatttggcacattagtggttttccacctttggt

SEQ ID NO: 363574 - DNA, 122 bp, Homo sapiens
tgtcgcctggcaaagcaggcgcttgttagcacccactgaatgcgcttatgtgctcagaaacggtcccattggttgggactaccttccccgatgcccatccgcccagaatcttccttctggga

SEQ ID NO: 363575 - DNA, 122 bp, Homo sapiens
gctggagcccgaaatccccttgatgaatgaaactgcacatcgtaatatacacattcagagcgggctattggctaaatgaaggcaatgcgtgtggaagtctgatttgccaccttcagggcagg

SEQ ID NO: 363576 - DNA, 122 bp, Homo sapiens
ggaatagtctccgggaggagtatttgtcagagagggtcccaaaactctcctcctcctcctcgtcttcttcctgcgtggccgtggagttggagtggctcgggtcagagcccaggctgcccgtg

SEQ ID NO: 363577 - DNA, 122 bp, Homo sapiens
atcgcctgcagaatgccttgcggggattggctgggattgaacgttagactcaggtggcatcgcctgcagaatgccttgaggggattggccgggattgaacgttagactcaggtggcatcgcc

SEQ ID NO: 363578 - DNA, 122 bp, Homo sapiens
ttgctgcacttgtctgttgttacgcatgtctgttgctacacgtgtctgttgttgcgcatgcgccttgctgcccgccttctgtccacacacagctctgcaaggagagtgtcttcattctttcc

SEQ ID NO: 363579 - DNA, 122 bp, Homo sapiens
ataacatgtataatgtttataattttgtacctgataaccatgcaaaggtaggaacttgtgcgtaactgtattctcagccctagcctgacaatgatgatgataatagcatgtataaaatgtgt

SEQ ID NO: 363580 - DNA, 122 bp, Homo sapiens
ggctagaatttgccctgtgccaagttcctggttaggactttattgaaaccattatggggacgttttcagtaacacagtggctggacagtcccatggatgagggccagcaagccccagtcctt

SEQ ID NO: 363581 - DNA, 122 bp, Homo sapiens
gctgcgccatgagagcatcgtagcagaggcatcctcggttccactggaacagacgtttgccgaatcctgagaggcgccgctcccacagcagtgccctgggtgcgtgggtggtgcctgggctg

SEQ ID NO: 363582 - DNA, 122 bp, Homo sapiens
gctagaagggtggactggagctggaccttcaggagctagacctggcagttgtgtggagggcggctgagagttcactgcaatggtgggagagggatgggggtaggaagaagaggtccgggagg

SEQ ID NO: 363583 - DNA, 122 bp, Homo sapiens
gggaggcagcgccggcggagcagcagccgaggggccgagcggcggagcagcggcgcgcggcgcccggcgcggggagcagctggtgttcgctgtaacaaacaacttgccactcaaacgccggt

SEQ ID NO: 363584 - DNA, 122 bp, Homo sapiens
agcacactcctgccagcaccgggacccactgcgaacaaagacagagccggctccccagcacgctcctgctagccctgggacccactgtgagccactgcggggtgtccttcatttaaaaaaag

SEQ ID NO: 363585 - DNA, 122 bp, Homo sapiens
accaaacaacatgttttacttatgaggggaaaaagtttgttaagtgaagaaaccaagattcgtttcttctaagaaaataaacattgtaaccgtgcgccagagagtgggagggaaagtgattc

SEQ ID NO: 363586 - DNA, 122 bp, Homo sapiens
tgtgctggtgtcttctccccaccttagcccaggccggctgcagcggcggggctgcctgggcggagtcaggagacagcaccgcccggcccctccccaggcaccttccctgtgagccagctccc

SEQ ID NO: 363587 - DNA, 122 bp, Homo sapiens
gaagctggggacaatggttatggacccgggcggggccttgtccttggccgcggtgctgaacgttctccacccgaacggcagcatcgacctctggcagctgccccctcctttataaagatata

SEQ ID NO: 363588 - DNA, 122 bp, Homo sapiens
agcatttgtaaagaaaagctagaatcatgaaaagacctaagataagatcaaatgaaattacgtagaagtgtaaaattcttaactgttagtatctgaaaatcatgcattccttgctaggaagg

SEQ ID NO: 363589 - DNA, 122 bp, Homo sapiens
gtcagtcccaggtcagtgctgtggtcagtcccaggtccgtgctgtggtcagtcccaggtccgtgctgtgcttgccccgtgtctgtgctgtgctcagtcctaggtctgtgctgtggttacccc

SEQ ID NO: 363590 - DNA, 122 bp, Homo sapiens
tcaaaggcgggaagcgttgcccaggagaccaccggcctgcaggaagtgttgccctggtgacgtcaccagtgcgcgggagggacaatggggcattgttctggggtcggtgagaccgggagaca

SEQ ID NO: 363591 - DNA, 122 bp, Homo sapiens
cttacttgtagactgcgtcagcttttaagtctcttttccattcataatctcatttaattccgttcgctttctcattcattctttcatttattcaccaaatatttattgagcatctcctatgt

SEQ ID NO: 363592 - DNA, 122 bp, Homo sapiens
tcctcctggctcggctgcccaggtacccctctgtccttgtcgctgtcctccttcccatcccggtccagcccccgcagtgaccgcagccccttttgcagaggagggcgcactgcgcgtgcgcg

SEQ ID NO: 363593 - DNA, 122 bp, Homo sapiens
gtaattcttctgcaaagagatcgaaaaaaaaaaaaagagatagctgacgggactgttgcccggccagaggaaccctcttcacatacagcccaagtcaaaacagtgaatgtaaattactttaa

SEQ ID NO: 363594 - DNA, 122 bp, Homo sapiens
gggaggggaggggatccgaggggaggaggagaagaggaaggcgagcagggcgccggagcccgaggtgtctgcgagaactgttttaaatggttggcttgaaaatgtcactagtgctaagtggc

SEQ ID NO: 363595 - DNA, 122 bp, Homo sapiens
aagccaacagcaggatgtgcgcagtcagtctgccccccctacactggaggaggagccccccggcacaaatctcgcccgtttgggcccacggacatggctggcctcgcaaggaggatccggtt

SEQ ID NO: 363596 - DNA, 122 bp, Homo sapiens
tccagtggctcctctctttggaagagctttttcttccctcgatagcattttacatccaatcggtaacattcaaaagtcacaccaatatttcttcagcattgtgttttactttttgggagaga

SEQ ID NO: 363597 - DNA, 122 bp, Homo sapiens
ggccctcctacctgctaaaccaggttagcagcctacctatgggctgctaacaggggtcagcgagaccaacgctccatgagctaggagtggccctggtacagaggccccttcttccccaaccc

SEQ ID NO: 363598 - DNA, 122 bp, Homo sapiens
ctgctcacggacagcagcaacggcaggttgaaggtgctgacaaccttggtggtgttgaagcgggtcacgggggtgttggcctcctgcctcagaagctcgctgctgtccagccgagaccgccg

SEQ ID NO: 363599 - DNA, 122 bp, Homo sapiens
tatgctttatacagtttcacacattaggcaaaatcaaatataaagttctccactgaaaaccgaaagactcaaaatctattatcttatttatgattaacttgctaaatattttgggtgagtta

SEQ ID NO: 363600 - DNA, 122 bp, Homo sapiens
tttactggagaaaggagaggggatggagtttatagggtcaaacatgaatgagagcactgacgggattggagacatgaactttgctgacagatgagctgggtttgaatcctctaccactagta

SEQ ID NO: 363601 - DNA, 122 bp, Homo sapiens
cgagatgaggctgggtttggggagcctcgggatgacagacccgggtcccgagggtggggccggtgtgggaacctcacagaagccggtgtccctggggaaggggcccggctcggggcagctcc

SEQ ID NO: 363602 - DNA, 122 bp, Homo sapiens
gatgttaaatactaccttttagccaaagattcccaaatgttgtcttttgctcaaacctcccgattcatgcagccaattttagtgaccatttctaagtgagccaacatctcaaatccttgatt

SEQ ID NO: 363603 - DNA, 122 bp, Homo sapiens
cgcccttctggaagcctctcacctgcccccttgctcacatgccattttcttgccccgccccgccccgcccctctgggcttctgtcactgattactctcatggctgttctgtgtctgtggggc

SEQ ID NO: 363604 - DNA, 122 bp, Homo sapiens
agctgtgctgcctgatacaggaaccttgagccacacatggctggcatggtcattgcactgcgtgtggtatgcacagcagatgccaaatgaccggtacaaaagggaatgcaaaaaacccacca

SEQ ID NO: 363605 - DNA, 122 bp, Homo sapiens
agttgcagggggcagggtggagggcagctagtcaaccatcagatcagactgcgggaggggcgagcgtgagcgagcagctgctgggtgctctcagggcaacctcgcggcttccgagtccccgg

SEQ ID NO: 363606 - DNA, 122 bp, Homo sapiens
ggcacaggcaatgcagcagggctacttcagcccagggctcaggaaccacggggtgcagcgcggcctgcagcaaaccagacacatcagaagccaaggtcccactttaacattcagtgacatcg

SEQ ID NO: 363607 - DNA, 122 bp, Homo sapiens
gcagggacctggagaaagcgaggcttggagggcgcctacacggggccccatggcccgctgcgccctctccgccggttggggagagaagctcctggagcggccagatacctgttggctcctga

SEQ ID NO: 363608 - DNA, 122 bp, Homo sapiens
aaaccccaatcacactcaaacaaccataccccacttttctgctccaccgccacatcatcgcgtcttgcccctttaacctaggaattgcacctgtctgggtagtctcacatattccctttcaa

SEQ ID NO: 363609 - DNA, 122 bp, Homo sapiens
actgccagatggcctgaaagtaaataatactgtgcgtgtgggggttgggaggtaggatgacgactaagctctttgctttaaacatatgagtaaagcaaaagccagaaaaagaacattgattt

SEQ ID NO: 363610 - DNA, 122 bp, Homo sapiens
tgaaaatcttcgttcctaaaaaaacatttttaggaactttctgaattcatataagaagtccggagggaataaagaaactacaagcagcaactggaaatgactgcttacattttccttttcat

SEQ ID NO: 363611 - DNA, 122 bp, Homo sapiens
tttaactcctggtcaggtgctcactggtttaataggagcacaggagagccagtttttttgcggggagagatggggagtggacgcgtctccattaccttacattcacatttgttttgttgatt

SEQ ID NO: 363612 - DNA, 122 bp, Homo sapiens
tcactttcagtcattgagaaaagagtgttctcatcagtttctttaaaccattaaatcattcgttcattcaatcagagtttattaagctacaattaaggcccaggaatacaaagacaagaaag

SEQ ID NO: 363613 - DNA, 122 bp, Homo sapiens
ttgcacccttgcccattgttctccttcacccctttccgggtcaccttttctatctatccacgaacctgctgagaacattcactgacagtgtgctggctttggaggcacccgcccaaccctgt

SEQ ID NO: 363614 - DNA, 122 bp, Homo sapiens
actatcaatactcccagtatcaaaactgggaaacctgggttcttcacccagagcctaaaacgaacagcattctttgccttgtgggtgacaatagcaaacatttaccgcctgtgtatatgtgc

SEQ ID NO: 363615 - DNA, 122 bp, Homo sapiens
ttcggtgggtcccacttcatcggggtaggcggcaaggccagcgggctgcagcgtgtgcctcggatgtggcgtctgagggacagcgagtgggttgcccgcaggggccttgcttgcactggctt

SEQ ID NO: 363616 - DNA, 122 bp, Homo sapiens
acaaagcgagaaggagagcccacttccaagttgtttgcagcagaggctgaaaatagacaccggagaggtggtgctggatagaaaccgccagtgtttgtctccgagcttcctgcaatgaaaca

SEQ ID NO: 363617 - DNA, 122 bp, Homo sapiens
atttttttttttaagagacagggctcaatcctgtcctccattgcccaggttagagtgcagcgacacaatcactgctcactgcatcctcaaactctccagctcaggcgatcctcctgcctcag

SEQ ID NO: 363618 - DNA, 122 bp, Homo sapiens
ttcctgctggagtctaacctcggatgtccaggaagctctgcaggggtggcagaacctgttcgtttgttggcttcattatgaccttgtggtgcactaacttttgagggccatatctcagtatc

SEQ ID NO: 363619 - DNA, 122 bp, Homo sapiens
cactccaggcacaggggcggcacctcactactctcacttccacttttgggaccacagcaccgaagcggcacggggaagccaacactccaggtaggccacgcacacacccagaagcccgcgtc

SEQ ID NO: 363620 - DNA, 122 bp, Homo sapiens
gtcaccaccaaagtgatgctccagagtcatcttccacaaaacgacacccttagttctcctcgagggacgcaggaaagtgttcatagccattgcatttccggattagcttaccgccgctcttc

SEQ ID NO: 363621 - DNA, 122 bp, Homo sapiens
ctcaggcctcagtttccccgtctgcagtgcgagagtaggccgctgcgtcggcttgaggcacgcagtcgtgcgaagttgaggtatgggcggggacccagagtcccgggcgggtccctgcatcg

SEQ ID NO: 363622 - DNA, 122 bp, Homo sapiens
gctttatcagggcagtcatcacgcccccagccgtctccagccccagggacaggggagccacgtccagcagcagcaggtcctgtaccttctcagacttgtcccccatcaggatggctgcttgt

SEQ ID NO: 363623 - DNA, 122 bp, Homo sapiens
tccacacgtttgtcacagagggtgctgtgactgaaaagcctaactgattttctaggctgccggagctggatatcaggcaccagggcacaaggacacttgcactggaagctgtggctgggtag

SEQ ID NO: 363624 - DNA, 122 bp, Homo sapiens
ccgcccaggaagccctggggaccccgcccggagcccccaccctaggactcccgggacccccgccctggggaccccaccagcagtccccgctcaggactccctgagaccctgcccgcagcccc

SEQ ID NO: 363625 - DNA, 122 bp, Homo sapiens
gacgagggctggtcaggaggcggagcagccccaagaaggcagcccggggtctcggggactcgtttctagaagatggacgaactgaaaaggaagccgggcttgacccagggggcggaggcggg

SEQ ID NO: 363626 - DNA, 122 bp, Homo sapiens
aacgcacgactcgctcctcacagcacaacttggatcagtctcagacccctaaaggtctctcgcatggggtcgccattcttcctactttgtgctcaaggcgcaggatctggagttctcggttt

SEQ ID NO: 363627 - DNA, 122 bp, Homo sapiens
tgtttcctcacattcagccaggtggctctctgtaaatttctaattctgctccaggagcaacgtcctccagggcaagtcacattaaaggcttgcaactatgtatgtatgtaggctaatttatt

SEQ ID NO: 363628 - DNA, 122 bp, Homo sapiens
tgacttgctctgcgtgagtcctcggtccacgtgggccgttgcgctggttcccagcctgcccgacacactcactgcgacgcctcccttgcctactgcttgctggcttctgtgttctctgcagt

SEQ ID NO: 363629 - DNA, 122 bp, Homo sapiens
cgttgtaagtgcaataaatcactggaaacaagaggcacctctcgcggtggagaacaggaacggctttcgcaagcactatcggaaagaagcagcgacatcaataaagccgcccgtcagagctg

SEQ ID NO: 363630 - DNA, 122 bp, Homo sapiens
tgcactccccgaaataccctccttaatcaaaggatgtctgcgcgcctgagctcagctgaccgcgccgggagcaccagggccgttggattccaccccagcccgccccctccccacgcacacag

SEQ ID NO: 363631 - DNA, 122 bp, Homo sapiens
aaaaaattgctttgtatttttaaaatgaaaaatgtaaaaataaaatcagagaaatcaaatcgtcatgaaaacacacatctgggtgacatttggaaccactggtgccttcagccgatctacaa

SEQ ID NO: 363632 - DNA, 122 bp, Homo sapiens
tgccgcgcgcacccagaaagaagggggagcgggcacctcaagggccttctgacccctccccgcaaaaggcaaaatcaagactacagaaggtgaactttcggttgtaaaagaacgagtgaaca

SEQ ID NO: 363633 - DNA, 122 bp, Homo sapiens
ggaggtgggaccaaggccgaatttagggacccccagcatgagctgcgggtgggtcaaggccgcgaggttggagggcacggggacacagcatagcgaggaaggaacggtagggaccgtggtga

SEQ ID NO: 363634 - DNA, 122 bp, Homo sapiens
gacctttttaactcaccagctccgagttaatttgttgattcgcttaacctggaaactccccgggggcgggtcttgtgctactgaattcccttgcgcgcagcctggggtataataggcgctca

SEQ ID NO: 363635 - DNA, 122 bp, Homo sapiens
acaatgtcccctgggacgatgtcccgggcacggatcctctgcacgcccttgcggtccgagcggatcaccttgcccatctcaggctcatactccttcagggcctcgatggcactctcggcgtt

SEQ ID NO: 363636 - DNA, 122 bp, Homo sapiens
ctgacagctgggtctggcactttgttcccagagtcaagagatgctcaactttgccacagccgcacattgcccctgacttgcaggatccttgggtagcctgtagctcaggagggccacagggt

SEQ ID NO: 363637 - DNA, 122 bp, Homo sapiens
aaagccccagggacagtgggcagaaaatgtcctgggagctaagacctgggacacagagaccgaggacttgacagagaatgggcaagacctcaggaggaccctgactcatatcaaggaccaga

SEQ ID NO: 363638 - DNA, 122 bp, Homo sapiens
taaagtgtagagaggaaaaaaaaatacaccgagaattgtgtatcctgtgaaattatatttcgaaagtgaagaaggaataaagactttcatcagacaaacagaaatttagggaatttgttgcc

SEQ ID NO: 363639 - DNA, 122 bp, Homo sapiens
ttcaaggctggaagaagagccaatgtggagcctctcaactttaaagaatttagtacaggccgggcatagtggctcacacctgtaatccaagcactttcagaggcagaggtgggaggatcgct

SEQ ID NO: 363640 - DNA, 122 bp, Homo sapiens
cacagagcagacgcccacctacacccactactcatcacttgagttatgtttggtagaacccggggtcaatgccaatatctttcacacagatcgttttcaacatcacacaggtttcaggaaaa

SEQ ID NO: 363641 - DNA, 122 bp, Homo sapiens
ggggtagggggcgccgcgctttttctcgcgggcgccgtggttcccgtgcggccttggacgcgagtctccccctgcaggcctggtccctggtcctggtcacccgtgcaactggagcggcgctc

SEQ ID NO: 363642 - DNA, 122 bp, Homo sapiens
cctccctaccttcggggtgggggtggggctgccttggcctctctctgcagggacaggtgtcggccacctctccactcccaaagtctaggggctggaaggccaggcagggacttggctgccct

SEQ ID NO: 363643 - DNA, 122 bp, Homo sapiens
tggagcggggcggggagccggcagcgcagtgagaaccaggctttccacccttaccccttacgcgactgtttcagacagtgtcgtccaactttaagttggccacttactccagcgccgctggg

SEQ ID NO: 363644 - DNA, 122 bp, Homo sapiens
cagagtaatttaacccaggattgctgactttttaagagctgagaaagcatagctatggagcgcaaggccccacccagcagggtctaagtattccgtctgcaaaactggcaggccaccaacgg

SEQ ID NO: 363645 - DNA, 122 bp, Homo sapiens
catcctggacccctgcccaggcacttcaaagagagtggtcaattactgagtggcttaatgcggacaccaaccccccgggtgggaaactccttccccagcctgtgaaggggtaagagggggac

SEQ ID NO: 363646 - DNA, 122 bp, Homo sapiens
aggttatacatagaagagtaacagaaaatgatgatacaaaggtaaataaggcaaaaaccacgagagaccagacttaaaagtttggaggttcagctgtatgccaataaaacagctatggaatt

SEQ ID NO: 363647 - DNA, 122 bp, Homo sapiens
gcgggcatggcgtggaggaggagggaggccgggcggtcacagcatggaggaggagggaggcgctgctggtgttcttattctggcggcagcgcctttcctgccatgtttagtgaatgactttt

SEQ ID NO: 363648 - DNA, 122 bp, Homo sapiens
cactgacagcttctattttcatagacctaaatatgggcttgccacccggataacattacacgcatggcctctcctggtgctccccacacccgggtgaagtccgtgttattattatctccatt

SEQ ID NO: 363649 - DNA, 122 bp, Homo sapiens
tcacagccagagaggatctctgcgtattggtgagtcatgctaaatgcacaccagagcaatcggggagggaacaaggcaggcacgtcctctcctgcatttctgtgtcctctccctgactccaa

SEQ ID NO: 363650 - DNA, 122 bp, Homo sapiens
ctattgcataacaaatcaccgaaaacttaatagctcatgattgagttcatcagccattcacgctgaactcaactgagctattcttgtcacaactggactgcttcatgtatgtatggccagct

SEQ ID NO: 363651 - DNA, 122 bp, Homo sapiens
aggtgtagatgagaaacttactggggttgaagtcctggaacaggcccctggggttcatggcggaggccgccgcttgcctgcccgggcctgctccctcgcgacgctcggcgctcgcgtctccg

SEQ ID NO: 363652 - DNA, 122 bp, Homo sapiens
tgacttttgctctcacctggcagtttgcctaaatgtaagtgtggagactggtggaagacacgtcatcccctgcaatttcttgactgtaaccgaaatcaggaatgctttctttgcgatcgcca

SEQ ID NO: 363653 - DNA, 122 bp, Homo sapiens
ctcgcggctcgccgctctcggcctctgctagtccgcacccctcccaaagcccacagcccgcggcccgccccaccctaccagctgcaaggccccgccccctagctgtcaagaccccgccccca

SEQ ID NO: 363654 - DNA, 122 bp, Homo sapiens
tagatcagggttatgcaatctggcaggaatgctacaaaactcacggggtgtccttctcagcgcatctcatcaggagatccatgatgccactgtgtcccgttactgctgcagttaatgttgat

SEQ ID NO: 363655 - DNA, 122 bp, Homo sapiens
aatttaggtgggcccagtgtcggagaagtccctcaggaggcctcacacaccaccaccacccggctccctgggctcccacctgtcctcttgcgagggatttaaatcgtggctcccccaccccc

SEQ ID NO: 363656 - DNA, 122 bp, Homo sapiens
gtttcccagcgagtcctcttggcagctcccgcagctccccgccgggagcacgagtgggagcgaacccagagcccgcccaggcctcgggcctcggcaactcctcacaggtccacgagatggcg

SEQ ID NO: 363657 - DNA, 122 bp, Homo sapiens
aaggttctaaatatctacatattggcagacaagaaatctgacttagcaaactctcctctccgtcaaacaagcaactcaaagacactcatactaacacctctaggcctcagaatggaagggga

SEQ ID NO: 363658 - DNA, 122 bp, Homo sapiens
ctgatgctggtagtggaatctcaggcactgagtgtggcgagtctcaactggccactcccacggagcctggggaggcttcagcaagagccaagtgagagcagggcagaggccgggcccagcgc

SEQ ID NO: 363659 - DNA, 122 bp, Homo sapiens
tgtgagagtgagggggtgcatgtgtgcaagcatccttcattcctgacaagagaagaccaacgctaatgttggcattcttccatcgctccctgttccctaagccaggctccactgagaacccc

SEQ ID NO: 363660 - DNA, 122 bp, Homo sapiens
gaccacaactgagggctggtggggccggggacctggagccccatggacacacagatggcccggctagccgcctggactgcaggggggcggcagcagcggcggtggcagtgggtgcctgtagt

SEQ ID NO: 363661 - DNA, 122 bp, Homo sapiens
gggctcccctcaaatggccccagctgcagcgtcccccacccgcccccatccgaatcccggcgccggtgttcccgcgcgcctcacccgctcagagcccgcggcctccacttccggcggggcag

SEQ ID NO: 363662 - DNA, 122 bp, Homo sapiens
gattcctggcctaatacattccacttcttggctgcccagacatgcatgcacacatacgcacgcacacacacgttctctttttccatatgtagaacttcttgtgtgtactcccctccccaaat

SEQ ID NO: 363663 - DNA, 122 bp, Homo sapiens
aaagagattttgcagattttttgcttcaccttcatcctaactttgcatggaggtagaagtcggcccgtgccactgtctgtctctctcttgcctcatcgcctgtcctcgcagcccagtccttg

SEQ ID NO: 363664 - DNA, 122 bp, Homo sapiens
gtcatttcttccaaaatacttggggtagaaggagggtgaaaaagagtgtgtgcatgcacgcgtatgtgtgtgtgtgcatatgtgttgaacagaagcatccagggataggaccaaagcttatt

SEQ ID NO: 363665 - DNA, 122 bp, Homo sapiens
ctcgtttcaggtctgacttggcacctgtaggctttcagcctgaccctaacgtgcccccagcgcctggctagaaacctgaccctaaagtgcccccagcgcccggtgggaggctggatgggccc

SEQ ID NO: 363666 - DNA, 122 bp, Homo sapiens
ccatgctcgaggccgggcctgagccccggcaactccacctctcctccctcattcgagacacggactcccagcccccacccccaaagtcctttcggcctggccaagcgctgccccacttcttc

SEQ ID NO: 363667 - DNA, 122 bp, Homo sapiens
taccgttttaaatatggacctagaggccaggtcggaaaggggaaagaagctgcgccttgccgagggtcctgtggccggagcagggcctgactcctgactcccatccagcgccccttctagaa

SEQ ID NO: 363668 - DNA, 122 bp, Homo sapiens
cctgtaactggacagtggcacagagccactgcccacggcacgacccgccctccatctccacgttcaggagcatccctgtaactggacagtggcacagagccaccgctgcacacagcagtaaa

SEQ ID NO: 363669 - DNA, 122 bp, Homo sapiens
agaaacagcactacgaccctcagaactcagggtacctccagctgcaggggccagaactgccgactatcccaattttgacgtttcctattgttgccggaagtgacgttaggctccgactctta

SEQ ID NO: 363670 - DNA, 122 bp, Homo sapiens
ggtccctctgcccaccctgtcagagtgcccccaggctgacttgagtgtgcggagctagctcgaagttgagggaggagtcggtgttggctggacagggagcctttttgttttgatttaggatt

SEQ ID NO: 363671 - DNA, 122 bp, Homo sapiens
tttgccctttaccatttctaatgaagataaagcgtggcttcttgtggcttttttcccccacgaccaaccagaaatgtccaatccatcttcccttaaggaaattaaggctgctttagaaagac

SEQ ID NO: 363672 - DNA, 122 bp, Homo sapiens
aattctcatttgaaataaagaactaagctatgacacatctccctgtggtttctcagcccacgctggagggataaacacataatctctcacattcaagcctcaactgagctgggaggccacat

SEQ ID NO: 363673 - DNA, 122 bp, Homo sapiens
cctgctccttgcccagcgatctgcacggtggagagctgcttacctccgccaggtagaactcgtcgtactgcctcctgaagttttctcctttgtagtagttgctagccgccacgatcacgtcc

SEQ ID NO: 363674 - DNA, 122 bp, Homo sapiens
agagcaccttgtgggcgtggtcgctggaggcagcgcctggcacccccatctggcacagagcgtccctgccctgccccctggggctgcggaggccacctccacgcccatttgccatccctgag

SEQ ID NO: 363675 - DNA, 122 bp, Homo sapiens
gacccgtgggggtgggggccaaaggcaatactcaccggttcgacagtcgccatcttagatcgatctgatcgcacaaccgctccagaagggggggtaagaggaaaaaaatgagattcaaaccg

SEQ ID NO: 363676 - DNA, 122 bp, Homo sapiens
cgatctccctacagggaatctcactacagggaatctcgctacaggaggtctccctacatccggtcttcccgcaacaggtctccctaccgccgctctcactcgaagtctgggtctcgctctcg

SEQ ID NO: 363677 - DNA, 122 bp, Homo sapiens
ttactatcatccccgttttacagacaggagaatagattcagcaagttcacagcagacctgcgttctcaaagccaggtgtctggttctcagtccagcatttcccccaccatgtcacagcctcg

SEQ ID NO: 363678 - DNA, 122 bp, Homo sapiens
actgaagggctggtagggctggaggcggcagcgcgcggcacggggaggtcaaggcaccgacgaaagcgcacagcgagcgcgaaggccccgcggccccatctgcgacgtcccctcacggccgc

SEQ ID NO: 363679 - DNA, 122 bp, Homo sapiens
cgaaggagggggcacccggggcgtcgcagcgcctttcccgccgcctgtccaggcgtccgccgctgggtctgcccccaagggatgtgtggatcctacgccacctctgtgtttttctccagtca

SEQ ID NO: 363680 - DNA, 122 bp, Homo sapiens
ggctgccgtgtggcttcgcccgattagcatggtctccgcgaggacttgggttcgggtttgcggtgttattgccctgttatctgcgtggttggtggtatcgctgtacacagatttgcaccgtg

SEQ ID NO: 363681 - DNA, 122 bp, Homo sapiens
cgcgctcggctcccgcctcctcccggccgttctctgttcttgcacttggccgcgcacggacgcgcatctctcctcgctgccggtggccatgcagaaagctggcttagtctccatcctaggtc

SEQ ID NO: 363682 - DNA, 122 bp, Homo sapiens
gcacaaggtctctatctagggtcccccctgcaaaatcatgactaaagaccactgccaggccggtggctcatgcctgtaatcccagcattttgggaggctgaggtgggtggatcacctgagtt

SEQ ID NO: 363683 - DNA, 122 bp, Homo sapiens
tcccccaacgctacaatcgagcacccccaattaccagctctgtgcaaaagctcccgaaagcggtgcgcacgcgcatactcgaggtgctctggcgccacgcacaaacatacccagacacgcac

SEQ ID NO: 363684 - DNA, 122 bp, Homo sapiens
gggacgagagattcgcgggcccgtaggtgtggagcggggcgcggagggatccgtgggagccgcagtgcggcggcgcgcgggccgggtggggcggggccgagcgaggcggggcgcgcgcggcg

SEQ ID NO: 363685 - DNA, 122 bp, Homo sapiens
caaatgtgcaggatttattttcttgcatgaaagtctcatctgtcatagcactccactccccgagaagagcccagcctcctcttcctgaacaccaatgaggaaaccagaagagcacatggggg

SEQ ID NO: 363686 - DNA, 122 bp, Homo sapiens
ttctctgtttttgtatgtgttagaaagagcaccagagattcatttcctgcttgacagtgacgttcttatgtaaaccttgccaagagaaaccatcagggagatggcagtagcagaactagagg

SEQ ID NO: 363687 - DNA, 122 bp, Homo sapiens
cagcagcctacctagcagtaagttccccagcctgcagtgtccccagagggcaccttccctcggctagtaacttctcagacactctggccttggggatgtcttggatcttctaggtacacagt

SEQ ID NO: 363688 - DNA, 122 bp, Homo sapiens
gagcgcctctgcggcccggtgagatcggggttcacaggctgacccagcgttaggaggtgccgggctgatcacgaccgccagagctgctgaggtcggagccccgaccctgggaacgcagcacg

SEQ ID NO: 363689 - DNA, 122 bp, Homo sapiens
ggagaccgtgaggatccgcaaggagggatttccagtgcgcctgcctttccaggggttcatcgacaggtatcttggttacggtagttcctgagctctacaaatccctgcccaactccccatgg

SEQ ID NO: 363690 - DNA, 122 bp, Homo sapiens
agctggcatttggcagcaagacaatgctgagaacattttctcaactcggctgggaaaacccgggaaagaacacgttgaggaaaagagggtaacactcttccgatctgttgggactatgccag

SEQ ID NO: 363691 - DNA, 122 bp, Homo sapiens
gctgcagggagcggtggggagtgtggcaggctgaagagcacagcctttccagaggggccacgctcccaacccctgccgaatgtccacatgcacagaggctgcctgggtgtggccacgtttcc

SEQ ID NO: 363692 - DNA, 122 bp, Homo sapiens
agagcaaaagggtattcatcaataggatatagatttaagacattccctgactaccccttgcgttgttaggtgatgtcttttagcagaatcatgaagaccttttttctcccttaataaaggag

SEQ ID NO: 363693 - DNA, 122 bp, Homo sapiens
gcacctagagatgggcatttaggttacttgcagtatggcttccagatagggattggttcgcgtattttttcacataagtttaaaatgatctctcacgtctgtctcatcatctgtaggataaa

SEQ ID NO: 363694 - DNA, 122 bp, Homo sapiens
taataagaggcaggagagaggggcaaaggttaaaaaggagaaagaaatagcttcttgtaacgtttgcttctgtggacacagaagccttcaagccttttcacaatgttaagcataaaaggaat

SEQ ID NO: 363695 - DNA, 122 bp, Homo sapiens
ggcgtgggagcagctgctgccacggtggcagcggagatgaaggtgtcagcctgacgcgggcggctcctgagagctcgctggggcgcctcagcgactctcacatctgttcagcatctggctgt

SEQ ID NO: 363696 - DNA, 122 bp, Homo sapiens
ggggaaccagcctgggggacgaggcaggctcgacagaccccccaccctgaaccttgcccgcgcccccacagaacctgggggtggggaagatgtccctgggtcccgggcccactaccccctcg

SEQ ID NO: 363697 - DNA, 122 bp, Homo sapiens
ttagacatgttaaattcaagatgtttcttgaacatccaagtgtgataccatctggagatacgaatctgagcactgatgcatgaagacagcacttaaaaacacaggatcaattttcttaggga

SEQ ID NO: 363698 - DNA, 122 bp, Homo sapiens
cttatgaattgtttagagctgcactgtctgacatggtagccattaaccacgtgtggtcatcgagtgcttgacacgtggccagtagaaattaagatgcgctgtgtatgtaaaatacacaccca

SEQ ID NO: 363699 - DNA, 122 bp, Homo sapiens
tgcaatgtgccctgttagttttgttagaaaatgtacattttattatatccattttcaaatcgtttctggtagtggggttttaaaatgataaatgaggttcaaaattaattccagcctccttt

SEQ ID NO: 363700 - DNA, 122 bp, Homo sapiens
ctgttcctgctgttgtgggcagtcagggctgcctgaggagtcgagggtgatcagaaataacgtgtccccttgggtcttttggtgtgggcttgggagaggcccctgtgatctttgccctgggc

SEQ ID NO: 363701 - DNA, 122 bp, Homo sapiens
gtggcctctctctgggcctcagccttgaagaagagatctcccagggctgcctggctgtgccgtgtgataactccacctcctcagtgtaaggcaatcccagaaggcttcctgtaggaggaggg

SEQ ID NO: 363702 - DNA, 122 bp, Homo sapiens
cggcgcagtgcagcgcctgagctactagggagtctggtccggctgctgctactccgccgccgccttctcacagccacaacaacactgcagcagcggccacacagagcgcgctcccgacgccg

SEQ ID NO: 363703 - DNA, 122 bp, Homo sapiens
ttacatttccaaatgtttgtgatctctgacgtggatgacggtgaccagggccagctcctacgcgggcgtgggcgagtgctgtggccagatgtgtgcgtttgaggcaggccaccctggctgct

SEQ ID NO: 363704 - DNA, 122 bp, Homo sapiens
cagatcccacacctgcccagggagagctaggcgcggagccgcaaggggtgtgtgggtgaacgagcgcagggaccggcaacagccatacataccggctgctgcagtggggctggcagctccag

SEQ ID NO: 363705 - DNA, 122 bp, Homo sapiens
ccgatctgggtgcgaggcaggtgcggggccatgaatgggaccgcaaacccgctgctggaccgcgaggaacattgcctgaggctcggggagagcttcgagaagcggccgcgggcctccttcca

SEQ ID NO: 363706 - DNA, 122 bp, Homo sapiens
tgagcccagcaccccacagctccaaagaactccacggtctctgaaaccaggctgcaagggcgaaaggggaaaggctggcagagacatcctgggcagggcccctcccactacctcattttcca

SEQ ID NO: 363707 - DNA, 122 bp, Homo sapiens
actggtctggaaattccagggcctgactcttgatcttactgtgtaaacacatgatccgctcgtccatgaatgggcactgcaaagaggccagggacagagtggcagtcaatggcggccacatc

SEQ ID NO: 363708 - DNA, 122 bp, Homo sapiens
gtgctgtcgcaggacgccgccgtgtcgggcgacgagggctggtgggcaggccaggtgcagcggcgcctcggcatcttccccgccaactacgtggctccctgccgcccggccgccagccccgc

SEQ ID NO: 363709 - DNA, 122 bp, Homo sapiens
caagggtgggcttcaggcctcgggagagttggggagggcccaccttgctctcctggttgccgtaggccaggagctgcaggcagtcggtggtgatggccaggaacttggggttgttcttgttg

SEQ ID NO: 363710 - DNA, 122 bp, Homo sapiens
tggggtaagaaaagcagggcacttccacagaaggggaagacactgcatggtccctgagctcggtctattagagaagctactggtcactcaaaagtcagcctcatttccaggccatttattgc

SEQ ID NO: 363711 - DNA, 122 bp, Homo sapiens
ccgtgttcgcatcacctcccacctgtccactgccaacctcctgagatggcctaaagcacccgagtgcttttaatttgcgtctagggttgtttcctcattatcctgatttgcttaatttcctc

SEQ ID NO: 363712 - DNA, 122 bp, Homo sapiens
atgtctgcaaacgggcatggagcgtgcggggctcagcctgagaatgtgtgcaaacgggcacggagcgtgcagggttcagcagcagggctcctctgggaaccccagtcccaccatggggggtg

SEQ ID NO: 363713 - DNA, 122 bp, Homo sapiens
cctgaggtggttcaagtgcatgttcaagtctgggacataggctctagatcagataaggtccgagaaacagtggttctcaactctggttgtgcaccatcaacacacaccccaggtcatttata

SEQ ID NO: 363714 - DNA, 122 bp, Homo sapiens
aaaaaaaaaaaaagtgtaggttagcaaaagtgcctacagttcaaatgcttccatgctaaacgttgtatttcttccggtctcatttgtgatgagagtcataagattttgagaaatacaaaaac

SEQ ID NO: 363715 - DNA, 122 bp, Homo sapiens
tccgctactccgcactggaagtggccccggggcgtcggcacgggaaactccgcgggtctgcgcgccgggcccaagatggctccggttcaatttcgctttcgtttcctcggaaagccttcccc

SEQ ID NO: 363716 - DNA, 122 bp, Homo sapiens
cgggcgctggcttggaaaggcactgtgtgtggttgtggcattcattgtcaaaacccagcacggtgccaagtctgtcttaaaaaggtatctgtgctcacactttcaagcaaaacgagaacagg

SEQ ID NO: 363717 - DNA, 122 bp, Homo sapiens
atttgtaacattatctgtgctagggagtcagtctttcctacttacctggaactggcaaaacgtggctgcatggtagggttgactcttaatctcccggggcgggagcagagcgcagaatcctc

SEQ ID NO: 363718 - DNA, 122 bp, Homo sapiens
atcgttagccagtgaagaccccggagctggccatggagcgagcacctccgcatccaggctcggcagtgaggaggatgggccccagcagatgagcttctcccacaggcagcacgcagggtaga

SEQ ID NO: 363719 - DNA, 122 bp, Homo sapiens
agcagaagcctctttctcagcctcctcagctagacaggggaattataataggaggtgtggcgtgcacacctctccagtaggggagggtctgataagtcaggtctctcccaggcttgggaaag

SEQ ID NO: 363720 - DNA, 122 bp, Homo sapiens
gcatgtaagctttcagtgttgtacaagaaaagataatgcttcatgtggaacagtcacttacgctattctgtgaaagtgcctaacctgaagagaatgtatcagattgttggctttatagaaat

SEQ ID NO: 363721 - DNA, 122 bp, Homo sapiens
tgcagagacactcaagcaccctagtcccccattcccaccccagacgtcctttgagccccacgcacaacaaagaactccaactcccatgaggcctttgcgcgaacagccgcgcagaaaccgga

SEQ ID NO: 363722 - DNA, 122 bp, Homo sapiens
ttttccaccttgggtgttatcccagaaatcaacacatgcagactctcatggctcctaagacgtgactcacccactcagtgctaaacactctcgtgacccttgcactgcactcccattccggg

SEQ ID NO: 363723 - DNA, 122 bp, Homo sapiens
aaaaagggatgctggcccataaaccaccaatctgttggccacaaagacttgaaataacaacgttttgtgtcctccattgtgaaaaaaaaaaaaagacggaagttaaaggggtgaaggcaact

SEQ ID NO: 363724 - DNA, 122 bp, Homo sapiens
ttgctggggttgtgtttagaaaccgatgagtttgtgaggcctccgggaggctcccgagggcgcggggactacgtttcccaggaggcctcgcgcggacgcccgggcggggctgtgcgaggggt

SEQ ID NO: 363725 - DNA, 122 bp, Homo sapiens
actgctgttcacatctaagaggggtgacgcgctgtcattcccacgttacagacaaggaggcggaggctcaggatgaggagcatttttagggatgcacatcctacagcctgtctgaggtgcct

SEQ ID NO: 363726 - DNA, 122 bp, Homo sapiens
cctagactaagactatggctgtgggattgaaatagcgttgaaggagctgactttgactcccggagatgaaggagaaagaggaaatcagaagggaccaaggatggtgaagttcttaagagaaa

SEQ ID NO: 363727 - DNA, 122 bp, Homo sapiens
agtgctcaaggcatttgtattttgacagcccatggtagcatcagataaattgccttttaacggggaacgtattgacatgtagtggtccttccacatgctctagtttcccttgtgcagccata

SEQ ID NO: 363728 - DNA, 122 bp, Homo sapiens
accttgtgttccacccacctcggcctcccaaagtgctgggattacaggcgtgagccaccgcgcccggcgaccactggtggttctatgctgctggggtgaaaagtctgaaggaaagaactaac

SEQ ID NO: 363729 - DNA, 122 bp, Homo sapiens
ttggtggctatttgaacccaggtccaactttgatagaccctaaaatttgtctttctcctgcggagaaatgacctgcagttcagcacacatttattgaacatatctctgtcacaaaatcccag

SEQ ID NO: 363730 - DNA, 122 bp, Homo sapiens
cctgcaccgaccgcgaggaggcccgggttccccccacagccggttccgaccaggcgcctccggcacactcaccagtggttgtcttctgtggtgtcccaacatcttcccaagggaccttccag

SEQ ID NO: 363731 - DNA, 122 bp, Homo sapiens
cggggcgaagcggggcggggccgagcagggcggggcgggggcttgaggtgattcccaagccgcggggcggctccggtggtgcggggaaaccgaaagtgggcggcggccgcggcggggcccct

SEQ ID NO: 363732 - DNA, 122 bp, Homo sapiens
gacaaaccacgcggccagtggcaggtgaaaacaggcttgggtccactcgggagaaccaatcggtcgtgagttcacctcagtcacttccactcacacatccggtacggcgctgctaggattcc

SEQ ID NO: 363733 - DNA, 122 bp, Homo sapiens
tttgggcctctcatcactgtgacctcacacccctgttgagtgtgtcgtaaacagaggagccgttcttcaagccccctgccctgagtgcacccctctcattcttttgttattattagcaaatt

SEQ ID NO: 363734 - DNA, 122 bp, Homo sapiens
ccaggagatttaagtcccctccacaacctttctgaacagcactttatttcaaaatttaaacgttaaaagaggctgggagtggtggcgcacacctctaatccagcaagtttggaagatcaagg

SEQ ID NO: 363735 - DNA, 122 bp, Homo sapiens
ctgaatgtctttgatatatctaggactcctttagacagctttgccttcccaccaaagatccggtgccagagtgggatcagttctctcagctctggtcccatcctggcttcatgtcatccttt

SEQ ID NO: 363736 - DNA, 122 bp, Homo sapiens
agcacttacctgtgccttccagaaattctccattcatccccttattcctactcaatatgccgagggtaggaaagccaagaattactgctgaggcccaagagccagagtgggcagcaggtgac

SEQ ID NO: 363737 - DNA, 122 bp, Homo sapiens
actgcgatgaaaggccataaggatgctcacacccgaatctaaaaagccctttgtgtgggccgcagccaagcatactttggcaagaaatttctgtggctctaacctcctttgaaaactggaga

SEQ ID NO: 363738 - DNA, 122 bp, Homo sapiens
tcctgatttaattaattggtgagggggaagatcaagggaccctggctatgccaagaaactcggactgcagcagtgtgtggatcctgaatgagaaaggtgcgaatcagacagaagctcgcagc

SEQ ID NO: 363739 - DNA, 122 bp, Homo sapiens
cagacactaggtatttgccagcagccagggtcagtgctgggccatggaagggaagcggcccgcttctttctcatggcaccttgaagacgcgccagcgtgaaaggcctctcaccgcgcatgac

SEQ ID NO: 363740 - DNA, 122 bp, Homo sapiens
cggagcccagcagcggcttcaggtctttggaaggcttgggcttggcaggtgagaagttgtcgggcaggaaggtgtacatagctgcggctgcgatggcctcggggttctgacgctatgcgtag

SEQ ID NO: 363741 - DNA, 122 bp, Homo sapiens
tcttttctacattcatacgttgctttgaattggcaagcagtttttatttggaccctcaaacgctaaaaccttggtctctacttcgcgtcccaactgtgcttatgagtctagtcatttttgtt

SEQ ID NO: 363742 - DNA, 122 bp, Homo sapiens
ccgagacatggcgaccaacggcagcaaggtggccgacgggcagatctccaccgaggtcagcgaggcccctgtggccaatgacaagcccaaaaccttggtggtcaaggtgcagaagaaggcgg

SEQ ID NO: 363743 - DNA, 122 bp, Homo sapiens
gcccagcgttcgcatcagcatccttctttgccctgaccttgggagtgccgcggatgcctgcgtccgaagcagagcggggcttcaggtcgccactggttttggacaaggaagaggaggaggag

SEQ ID NO: 363744 - DNA, 122 bp, Homo sapiens
ttggacctagtggggtcttgactgcgtggaagggccttggggtctaccccggagctttagcgatgtgtcagtcttaggcatagaatgaacattgaatgaatgaatgaaattatagcatactg

SEQ ID NO: 363745 - DNA, 122 bp, Homo sapiens
ttctggaggatagacccagcctctgaaagcaaattaatagaacaggcttttaggaaacgacggcctaggggcgtgccctgctttagaacccctctgggaccgctctcttctaggtaaggaaa

SEQ ID NO: 363746 - DNA, 122 bp, Homo sapiens
taactgattgcagtactaaaaagttatttttgtagaaatccagtataactgttatagaagcgactgtagatagaaggagagaccattctgtttccagatttggggagcactttgctgcactt

SEQ ID NO: 363747 - DNA, 122 bp, Homo sapiens
ctcggcgggcggagggcgcatgggagcctcttggccctggacctgcccctgcaatccttccgcgggatctcttggaccctctccagggtcctggctctgagacgttgctagaggacaaatcc

SEQ ID NO: 363748 - DNA, 122 bp, Homo sapiens
cctggcacgctggggctggtctccgaacggcccgccggactaaccttgaccctgagcgaacggccttgaactttgaaacaaatgctcccatggccagatgtcgcctctccggctcctgccag

SEQ ID NO: 363749 - DNA, 122 bp, Homo sapiens
atcattgctgaaatacatatttttttcaagtacaccatcacctaattcacatacagcatacgcacacatctggaaaatctgcattttcttcattggttgtatttaataaattgcctaaagta

SEQ ID NO: 363750 - DNA, 122 bp, Homo sapiens
aaggttgcctataaagcgggactgcacgccggtttttgtccgagggctgtcgagtccgagcgccgccatggctctgctgtccgagggcctggacgaggtgcccgccgcctgcctgtcgccgt

SEQ ID NO: 363751 - DNA, 122 bp, Homo sapiens
cctcatggttgggttaaactggaatcctgtggaatgggctggttggtgttgcttgaattgcgttaaatgaggtaacaggaattgtgttaggcttctctgattgcacaattcaacacctctgc

SEQ ID NO: 363752 - DNA, 122 bp, Homo sapiens
tctctgcacagctgctcccgcggccccgtttctgcgtcttcccggaccccgctctttcttcgctacccctcgaggtgccccggcccgcgcgccacattgttctggatctcgggctgggcgcc

SEQ ID NO: 363753 - DNA, 122 bp, Homo sapiens
aagtagcgggggctgcagccgaccgccctgctccggccccagtgtggtgggcgagggtggcgcatgggaggccgagcctgaatccttgcctgtgtctgacgggaccactactaaaaacctaa

SEQ ID NO: 363754 - DNA, 122 bp, Homo sapiens
aaaaaggtaaagaccaacacaaaaacctcagacttcctatacaagttaagcagaggaacccggaaaatgtctgaagaaaacgattaccaattttttttgttttttttgttttttggtgaccg

SEQ ID NO: 363755 - DNA, 122 bp, Homo sapiens
tctgtgacctggcactcgggtcttgtttcttgccagttgggtctagtggccttgttgattcgtcttggctgctgctgcaaactcggctgcggccctcagcgctgtgtggcttccaagttctc

SEQ ID NO: 363756 - DNA, 122 bp, Homo sapiens
tcttaagtacccatgtaagtggaatcatagtatttgtctttttgtaactagcttatttgacgtagcataatgtcctcaagggtcaaccatcttgcagcatgtcagaattttcttccttttta

SEQ ID NO: 363757 - DNA, 122 bp, Homo sapiens
aactcaccgactcctgccctggaccctcctgcgccactgaaccccctgacctgggagcctcggaacctagggctcaggaggtgggtgaggaacggactccacagtttctttcctgactcctc

SEQ ID NO: 363758 - DNA, 122 bp, Homo sapiens
cgccagggcaccggcagggcaggcagctgcgcgcggctggtacgtacctggtggagcgggcgcgtgagtgggtgtccctatgcgaggagggaggagtgggacttgggaagtcgggggagact

SEQ ID NO: 363759 - DNA, 122 bp, Homo sapiens
agggcagctgggagaacagccagtgggaatccgagctgctgcttggtgatccggcagggacgcggatggctgtgtgaactctcccaggcttcacactcggatgcatccggaacaggagaccg

SEQ ID NO: 363760 - DNA, 122 bp, Homo sapiens
agccaacgcctcttctgattggctctgacgtgcgtggtgcgtgaaaacgtcacgagacgccggcgttactataagagcgcagccgtggcgcttgcgcgcctctttctcagtgaccgggtggt

SEQ ID NO: 363761 - DNA, 122 bp, Homo sapiens
accgcacaattccccaggctgaggacgggtcaggtcaagaagagacttgcaggctgggtgcggtggctcacgcctgtaatcccagcactttaggaggctgaggcgagcagatcacttgacgt

SEQ ID NO: 363762 - DNA, 122 bp, Homo sapiens
cagctcagggtttcccaccaacctgtctgcaatcattcaccagccagatgcagcaagggacgtttgttttacccttttcattcggagctgtcactgtgcgacctctgccaccccctcatctc

SEQ ID NO: 363763 - DNA, 122 bp, Homo sapiens
ctagtcaccctttttgagtcttgttttctcagattatgaaataggaaaaatttccttcctcgtgagataagcacgtgccattagctattaaggacacgcacataaatgagctgcatgtgaat

SEQ ID NO: 363764 - DNA, 122 bp, Homo sapiens
ctgtccccaccctaggctgccccctctgcactcgccaagtgtgtcctggctgaggtgccacggcaggtggtggagtactacgccagccagggcatcagccctggggctcccaggccctgcac

SEQ ID NO: 363765 - DNA, 122 bp, Homo sapiens
ccgccacccggggagcatgaggccggggcaggggacccgggtagggtgggggccgaccggcggggtctgctgggccaatgcgccgccgtcggtcagtgagtccggattcgtgccggcaactg

SEQ ID NO: 363766 - DNA, 122 bp, Homo sapiens
ttgaacttagtgtgcgcacgaattcatagactgcttgcaatacctcttagtgccacaaggcgccgctagtgacctcgttgagtcttcccacagcctggaggcgggcttccgcagcagtagca

SEQ ID NO: 363767 - DNA, 122 bp, Homo sapiens
taaattcaaaggaacacagacagtccttttcttcattatgaggccactcaactcgcctcccgatctccaatggaataacagatataccttcttaacaaaaaaatgcctgagcaccaaggtgt

SEQ ID NO: 363768 - DNA, 122 bp, Homo sapiens
cgccctcctcggcgggctaagagttaacagctgcacctgttgaggtatacctccagtcgccggcacctgtacctgtagccaatcagcgccagcgctgctgggaacctacctgtcagcaaaat

SEQ ID NO: 363769 - DNA, 122 bp, Homo sapiens
cccagccccaccttcacgaatccagaattccgttcccccattcctgtcgggaatggagtgcgcggtccaggcctccggactgcagctgcaagttccccagcaatgggagcggcctgggccgg

SEQ ID NO: 363770 - DNA, 122 bp, Homo sapiens
cttgggatttcgacgtgtgcaaaggggacattgtgtttaacatctatcactccaagaggtcgccacaaccacccaaaaaggactccctgggagcccacagcatcacctctccgggtgggaac

SEQ ID NO: 363771 - DNA, 122 bp, Homo sapiens
cacgatgggatgaacctggagctttattatcaatagatgagaatcctcatcttcctgccccgctttcctctcccatcctcatcccccacactgggatagatgcttgtttgtaaaaactcacc

SEQ ID NO: 363772 - DNA, 122 bp, Homo sapiens
ggccagagcgggcctggccacaggcaggggacagcgactgcttgggcctgggcaggtgagcgcagcgcaggccagggcccggcgtgtccgcggtgagcgcgggcggccagcagagggcgcca

SEQ ID NO: 363773 - DNA, 122 bp, Homo sapiens
aacatggagcataaagggatgaaggagagaaatggagggggagttgcctcatgggtttgccgcctattgttgtgcctgtacaccaatgttgggtctttgaggaaggaaggagcacaaatgag

SEQ ID NO: 363774 - DNA, 122 bp, Homo sapiens
gaaacccgcgggtctagagacttaagaagcacctgctttaaataaaagggagaaggagatcggtttgcattgatagggttctgggtacactacagcaaggagtctgagcaagaaaagcagtt

SEQ ID NO: 363775 - DNA, 122 bp, Homo sapiens
cagctgtaaataggtaaatagaaggtgattgtggcgtggcgatgtaccgatacccgcctgcgacgccgtggtggctggttccctgtctcttcagtagagagtctagaccccacccagtcttc

SEQ ID NO: 363776 - DNA, 122 bp, Homo sapiens
aagggaccggttcttcagcccgccagggcgtcttaagcgagtcttcagacggattgagcgcgtctctctgggcgaatctgtccaggatccgtgtttagggtgccgagcaggggcacgtgctt

SEQ ID NO: 363777 - DNA, 122 bp, Homo sapiens
gggctctggcgggggcgtgtcaggaggcgtgtccggggcgtgtcggaggcggggccaaggcgggggtaagcctcgcccctcggccgtgcgagaggccgagcttgctgcattgcagccgccgc

SEQ ID NO: 363778 - DNA, 122 bp, Homo sapiens
ctggcctgcttcactgattttgttcttgggaagttttagagtttatctcaatattaacctcgtggctccagatgaactctaccttggctggtccttggagcttatctcaccctcattgctgt

SEQ ID NO: 363779 - DNA, 122 bp, Homo sapiens
cgccggcggccatcaagggctagaagcgcgacggcggtagcagctaggcttggcccccggcgtggagcagacgcggacccctccttcctggcggcggcggcgcgggctcagagcccggcaac

SEQ ID NO: 363780 - DNA, 122 bp, Homo sapiens
ggcgagggctgcgggagcaagtacggagccgggggtgtgggggacgattgccgctgcagccgccgccccactcacctccggtgtgtctgcagcccggacactaagggagatggatgaatggg

SEQ ID NO: 363781 - DNA, 122 bp, Homo sapiens
tttaaaatgttctttgtattagtgataccactctgcggctatttaacttcgaacccctagcggtccgtggacaggcttcagcaggtccaccacacacacctccacctcccactccccacgca

SEQ ID NO: 363782 - DNA, 122 bp, Homo sapiens
gacaagcaggctgggcgggcagggggcgggaggggcggcccagggacctccccacaatcccgcctccaatggggtcccccacctgaccccgggccccctcgcgcgccctctaccggcacccc

SEQ ID NO: 363783 - DNA, 122 bp, Homo sapiens
tccagcagaggctgctgggcccgggctgggcagccaagggttaagtgggcggggctcccacgggaggggcggtcccagcggcggccccgtcccgccttcccctcgccttcctcaccttcctc

SEQ ID NO: 363784 - DNA, 122 bp, Homo sapiens
gccaagcgcacgcacctagaccgcggaggcaaccgggcctgccttggaaacccaaggacccggagcctcagtttcctcatatgtagaaaagggcaagaaaaccatgttttggccgggcgcgg

SEQ ID NO: 363785 - DNA, 122 bp, Homo sapiens
cgtgacctccaaggccactggcctggagttccactggctgctggtcccccatctgtggggcgccccggcggctgaggcgtggaccaggcagtgcatgtcgaggagtagcacccacagctgcg

SEQ ID NO: 363786 - DNA, 122 bp, Homo sapiens
ctgtggggttagaggctgagcaacgcctcttactttgcttcctgggtgagagcagacaggcgtgccacttagcagaagcaagcagagagagagtggtaagactcaccagcttccccattttt

SEQ ID NO: 363787 - DNA, 122 bp, Homo sapiens
ggaacagcggcacctccgcgatggtggcggagccgcggcggagctgctgcaccgacccgccgcccactccccgctcgggcccggcccacctcgcagtatcgcgcccctccattggtacagcg

SEQ ID NO: 363788 - DNA, 122 bp, Homo sapiens
ctccccttttgggccctgcttctggccctggtggacattgaagccatgctgaggggcatgcggcatgaggggcatgaaggactgctcttcagactgggagttccaggaaaccccggaggtga

SEQ ID NO: 363789 - DNA, 122 bp, Homo sapiens
gaaactgaagggagaaggtctggcccccagggtggggctctcctttccctcccccagccccgccgtcagcactggccctctgtgaggttcgatacttgaacgccccctgccctgtgccttgg

SEQ ID NO: 363790 - DNA, 122 bp, Homo sapiens
gcgggaccacagtgcggggaggcaccgactctgtcattctgtcaacgcaccgcacagtcacgaacatcagcattgacatgaaatggacggttagggagctgcaaaggactcatgctcctcta

SEQ ID NO: 363791 - DNA, 122 bp, Homo sapiens
gtggggagtcttactctccatcagcccccaaggccagggataaagttgtggtggtagacccggcacctgtgcaggtgaccacctgtatactccttggcttgctgaaggattcaaggggactg

SEQ ID NO: 363792 - DNA, 122 bp, Homo sapiens
cgccgcgcttaccaggtggcacttggacaggtggcgcgaacccgccgtcgttgccgccgccgccactgacacagctcagcggtaaaacctgtcccggggccctgtctcaggcccctttcctc

SEQ ID NO: 363793 - DNA, 122 bp, Homo sapiens
tgagcctgtaatttttgtgcatcttgaggtaaaccctgctgaactctttacctaacacaacgatgcttgatccacaccacattcagaatgcacaggggataggctggtcccttaacattgtg

SEQ ID NO: 363794 - DNA, 122 bp, Homo sapiens
aaagtctttcatgttagcacagattttaggcatctcgtgttcgggaggttggatctgagacgtgttttgagttggtcatagtgaaggacgcgaggtgtcaattctagtgagagcaatttcca

SEQ ID NO: 363795 - DNA, 122 bp, Homo sapiens
aggaaaataaaagggcaggtgacttttatcccacaagtccctgccctgtgcccgtcactgcgctgggcgcaaggcctgtgtcatcctgtcacatccccccgaaaggagaggagggcctgggg

SEQ ID NO: 363796 - DNA, 122 bp, Homo sapiens
gcacgtgggcttcttgtggcacgttcctggaggccgaacccttctggctttggaaggagtcgtcagagacccccgccatgcgggaggctggggaggaaggggctcgaaacctccatcatcgc

SEQ ID NO: 363797 - DNA, 122 bp, Homo sapiens
ctccactcaagcggatctggtctctgtcctggaccccgggattccttcctgactgggacccgctgacactcttgctcttctgcattgcgctttccacccagcacccagggaactccacacct

SEQ ID NO: 363798 - DNA, 122 bp, Homo sapiens
gttggggtcaagggcacatgtgcatgactggatgcagcaaaagtcacagctaatgcaccccgatggtgatccagatgtgatgtgaggctcagtgggtacttagagatttttcacagccaagt

SEQ ID NO: 363799 - DNA, 122 bp, Homo sapiens
ccccccactgggatgccagccaccaggagtctaatcctgatgctgtgtggcctgggcacacgttttccccattctgggcctgtttcctcagctgaaaaatcgcatcctagacccatttgctt

SEQ ID NO: 363800 - DNA, 122 bp, Homo sapiens
ataaaataaagcaggtttttctcctctaccttgactcgtgtctaagtgccagaaatgggacggggagggggcattgtgggactggaagatcgcgcgcgttggacctgtggcttgttgcgctc

SEQ ID NO: 363801 - DNA, 122 bp, Homo sapiens
tgcccgatgggggagctgggcatgagcctgagggtgtgggggaccctcctgcctctggagcgcgcccgatccctcccgtcttggaactcccggggcttttgtggagcgcggcgcggtggtgg

SEQ ID NO: 363802 - DNA, 122 bp, Homo sapiens
ccatgaacttcctcccgtgttgcttctataatatgcgtggggtcgccatgaacttcctcccgtattgtttccataatatgcgtggggtcgccatgaacttcctcccgtgttgcttccataat

SEQ ID NO: 363803 - DNA, 122 bp, Homo sapiens
gttgtgtgggaaacagccagctttgtcccagatttcttgcccgcgtttctgccggactctcgtcctgtctggtttcttgcaccctgtatggatggcagtgtgtgcatccggaagcgcagctc

SEQ ID NO: 363804 - DNA, 122 bp, Homo sapiens
gcacacacacgtgttgtcatggtggtggtataatgtagggggttacacactgctgcgtagcggtcataggccattgaggacaagaggtaattttccacagtggcaaagactgcacaaaagaa

SEQ ID NO: 363805 - DNA, 122 bp, Homo sapiens
atttccatctctcgtgatgtgtgtgtacagagagtatcacatttagcttaacttttgatgcgatagagatagtttctgctatctgggagatgtttgaggacagcacactcctgggcacacag

SEQ ID NO: 363806 - DNA, 122 bp, Homo sapiens
tcccctcttcctcttggagcctgcaatcagtaaattcgccaaaagaaagaacgaaagatccgcctaaacctgccggcgtgcccccacccccggtctacagaggcggaggtggctgcggcggt

SEQ ID NO: 363807 - DNA, 122 bp, Homo sapiens
ctagggaagaatcctcccttgcctcttcttctgtcttctagtagcaatggcaatccttggcgttccttggcttgcagatgtatcactttaatctctgcccccctcttcacatggcctcatcc

SEQ ID NO: 363808 - DNA, 122 bp, Homo sapiens
ggagcctggaggccggccaaccccagcctcacatcccaggccagcctccgcctccaacaccggccgtctgtccttcgtggccccagccctggctctggcttccggctccccttccccctgtg

SEQ ID NO: 363809 - DNA, 122 bp, Homo sapiens
aggatagtagcaaaaaaacccaaaatggttttaagattgacccaacaaacacattcccaccgttaaatttgtcttcaagtatcttccctatcacacacactaaatatgctttcagctcttta

SEQ ID NO: 363810 - DNA, 122 bp, Homo sapiens
ttaaacggaagaagggacctgacccaaggacctaggcaaagacccactgcttctgaagcccgagatgggttgcacatacagccgatggtacttggtggaaagggtggaaactctcctaggcc

SEQ ID NO: 363811 - DNA, 122 bp, Homo sapiens
cagcttctctcggtgtcgctcgcacaactttgcatcctgctgctcccgggtcacctctcccggctgcctgcccttgtccaccttcagccgctcaatgttctccaccaggctggccagttgcc

SEQ ID NO: 363812 - DNA, 122 bp, Homo sapiens
ctggccaactgaggggactttgggcggcctcttccaccttcccaggctgggaggcaagtgcggtcggagggtcacgccgggggctgggcgttgctgctaggagttccctccaccgaaagtgt

SEQ ID NO: 363813 - DNA, 122 bp, Homo sapiens
aatgcttccgtttacataggtgagttctctcccgtatccaacgaaatcctcagtgcggtccgaatctccacttgcagattctacacaaagtgtgtttggaaactgctccatccaaaggaatg

SEQ ID NO: 363814 - DNA, 122 bp, Homo sapiens
gcgagggtcgcctttcagcctttacctctacccactgaaatggagtaggtcggtgagcgccgatctgctggagaatctcattatcccatcggcgctctgcctgctcctggcctccaagcctc

SEQ ID NO: 363815 - DNA, 122 bp, Homo sapiens
tgggcgcatgagctgcgctgacaataaagtgcccaagtggagcagggaggtggcttctaccgctccggctggtaatttccaaacacagagggaagagcatggtggagcaaaacagcttggaa

SEQ ID NO: 363816 - DNA, 122 bp, Homo sapiens
catgggtgccgacgggcacacagcctccctcttcccacagtcacccactggcctggatggcgagcagctggtcgtgctgaccacgagcccctcccagccacaccgccgcatgagccttagcc

SEQ ID NO: 363817 - DNA, 122 bp, Homo sapiens
atcaccttggcccatcccccctcattttcataaggaaaactgaagccagagagattaaatcgcttcccaagatgacagtgagttagtgggaaggtcaggatttgaactcaggccatggccgt

SEQ ID NO: 363818 - DNA, 122 bp, Homo sapiens
aggaccccgcgggggtcctgacagcctcccgggcccagggtggggattgtgatggcccctcgggagctgggttgagccggcggctcctgagctaatcaatgggctgcagccggcggaagggg

SEQ ID NO: 363819 - DNA, 122 bp, Homo sapiens
ttcaaggtggataactgctggtcttctcttaaatgaaatatcaacattgccacattctaccgaccatacattcattcacttgttgattccttttaacaaaaatgtattgatggccaactctg

SEQ ID NO: 363820 - DNA, 122 bp, Homo sapiens
gtgctcatcgacaatggactggataaagaaaatgtggtacatttgcaccatggaatactacgaagccataaaaagaatgaatggaatcatgtccttcacagcaacgtgactgcaactggagg

SEQ ID NO: 363821 - DNA, 122 bp, Homo sapiens
cagcattagggctgagctagttctgtggcctcgggtgggacgttcaatctctctgggcctcgccattctctttctttttattgctttttgtttgtttgtttaagacggagtctctctgtcgc

SEQ ID NO: 363822 - DNA, 122 bp, Homo sapiens
cctgcggggcaagatctgtaagcgggggctgggctgaggggacgccctggcggcgctgggcgcgaggctgagggggcggcgggttcgcggcggtggcggcgccgagctgcgctgggatcgcg

SEQ ID NO: 363823 - DNA, 122 bp, Homo sapiens
ccaaccagaaggcgcttacggagctgagcgcccgccaggcgcgagcccgggagcctgcgccgtgaccccgcagccccgcagtcttagccccgcgccccagctgctccgcggaggaggcagga

SEQ ID NO: 363824 - DNA, 122 bp, Homo sapiens
tcacatggccatgacttatttctctacatatagattttattggctgggtgcggtggctcacgtctgtaatcccagcactttgggaggctgaggtgggtggatcacctgaggtcaggaatcga

SEQ ID NO: 363825 - DNA, 122 bp, Homo sapiens
ctcgcacgcatccccgctgtgggcggcccctcgctgcgcctcagcctctccctggccccacgggcctccacactcctcacatacagaatgggctgtgggtcctcagcccgtccggaccctcc

SEQ ID NO: 363826 - DNA, 122 bp, Homo sapiens
accgacatcggcccttaagttctgcccgggtggagagggaggacaaaaaaaaatgcgatccgtagtcaaggagacgtagcctgcactcctgattggcgcagaactctagcctggtctcctcc

SEQ ID NO: 363827 - DNA, 122 bp, Homo sapiens
cactggtctgaggactccgggggcaggacggggctgaggacaccttggccctgtgaaagccgagtgtcacagttccgcttgctccacggcggcgcgactccacgctgtatgcgtggtacgag

SEQ ID NO: 363828 - DNA, 122 bp, Homo sapiens
aggagagaagagcgcggcgccttagtgccgccctgcgtcgtggtcgggaagccgagcaagcggtgtggacgccccaggagcagggggatccaggcctaaactcatgggttccgaatgggcaa

SEQ ID NO: 363829 - DNA, 122 bp, Homo sapiens
aattcggaagagtcagttgaagtcacaaggacccaatatctgccctctttcagtgaatgccggcaaatctgttattccattggcaaaatcgtattgctgctctcctgttaatctcctattta

SEQ ID NO: 363830 - DNA, 122 bp, Homo sapiens
tacctgcaacgcggagccttacctggactccggggctcacctggggcgcgggggtgggggcgggcgccgggggagggggcagtcctcgcgggctgggcaggggcgcggggcgacacgcagcc

SEQ ID NO: 363831 - DNA, 122 bp, Homo sapiens
cccggcggcggcagctccaagtccatcatgatgagctgtggaccgtgtgttggggctccccgacggcggccctgttccggctgccgaggcgcggcgcggacagggcggctctggtggcggcg

SEQ ID NO: 363832 - DNA, 122 bp, Homo sapiens
caagaatcttttaattccaattaaatgctatcaaagaaaagccacttttcctactgcaaccgcctttccccccaattatcttgttttgttgtaatattttcctatgagacacatgggccttt

SEQ ID NO: 363833 - DNA, 122 bp, Homo sapiens
cgcgttggacgacgggctctgagggccaagttcttgtcacgaatttagtttgtttcagagcggcaggactcgtagctagagaacgaggacccacgacgcgtacgcgttacagtcctgtttcc

SEQ ID NO: 363834 - DNA, 122 bp, Homo sapiens
tacagacacacacctttatccatctcgtttatttgccaatagctgtaattttggatatagcggacatcccttcttcagttaagttgccactaaagaagggtcagggagacaacttcagaatt

SEQ ID NO: 363835 - DNA, 122 bp, Homo sapiens
aacctaaagcgtgatttgtattgtactccaccaaagtgcacctgggatgcctttgtaggtcgcagctgaagccgctgatcctgcagtttcccatgagctgagcaagtgctaacggccggcct

SEQ ID NO: 363836 - DNA, 122 bp, Homo sapiens
ttgcacacacgtgtgtgtgtattatcctcatctctgaaccgtgcaatacctcgctcatagcgaccaccgaagattcctaccagctgtccccattgagtgcgcactgtgtggtgggtgtttta

SEQ ID NO: 363837 - DNA, 122 bp, Homo sapiens
gctgaagtcttcctcagtgacttctctgaaaagcgagcgttccacgttgcccggcacccacgactctgagactgttttcttaaggatcatctaagtgcaatctagtgatggcgcccacgcct

SEQ ID NO: 363838 - DNA, 122 bp, Homo sapiens
ctggggctctggggaggagctcaccgtgggggcggtgggggcggtgggagccgtgggggccggggcggtggaggggggggtggctgggggagcggggaggcgggaggagcagggggggcggg

SEQ ID NO: 363839 - DNA, 122 bp, Homo sapiens
ctatttttgtgcataaaattatgttttcactacaatcatggcaatattttttgtcaacagcggttcacctagtgaatgttgatactttgggtttgagtgaaaatgaattgtagcattttctt

SEQ ID NO: 363840 - DNA, 122 bp, Homo sapiens
cgcccagttcttgctcccgcttcccattctcccaagccggcgtgggaccctctagtccgccgcccttcttgtttgtagctctgttcattgtctggtgggactttgctaagacttttggggta

SEQ ID NO: 363841 - DNA, 122 bp, Homo sapiens
tctggggcggggcagggacccgggcccctcgcgcacccgcggagccgggaaagcgatccccgaaggccccagtctctcctggcgcctggagaacccaatcaggctgtgtttttggctttggt

SEQ ID NO: 363842 - DNA, 122 bp, Homo sapiens
tggtggtggtggtggtggtggtggtggtggcccgggccgcagggccatgaaactacaggccgtgatggagacgctgttgcagcggcagcagcgggcgcgccaggagctggaggcccggcagc

SEQ ID NO: 363843 - DNA, 122 bp, Homo sapiens
cccctcacctactcacaccctcagacctgggctgggaaccagggaggacctagctagagtcgagaggactgggtttgagtctgaactcagcacctgacttgtcatgtcacctagtccttagc

SEQ ID NO: 363844 - DNA, 122 bp, Homo sapiens
gctgcagagacaaaatgagatgaagcttcaaatctgctcttaattgcaattccctcttcccgcagggccttcgaggcacttcacttcgaagtgaaggggtaagactccggaacgttcggtct

SEQ ID NO: 363845 - DNA, 122 bp, Homo sapiens
ttctccccaaccaccgtttatcattcttattcaccgtctccggaatgtccattcagtttccgctcctgagagacttagtgactgaggccaggcaaagatttcaccttggggagggggaacgt

SEQ ID NO: 363846 - DNA, 122 bp, Homo sapiens
attggtgcataaaataaggaagcatcacacaattcacagtgccttccaagaagtggaatacggtatatacaacaggacgatggcagtcccagtcgcaggattaacactgaaagaaattttaa

SEQ ID NO: 363847 - DNA, 122 bp, Homo sapiens
ggggtcacatctggccggggacgggtgcagagccgcggccaggtgtggcaaagtagttggcgccccctgtggcatccgcgacggctgggggggttcagcctgggattggcgggccccgggtg

SEQ ID NO: 363848 - DNA, 122 bp, Homo sapiens
gccggcccgcggccgtggcagcccgtgagggcagcacggagtttgactggggtgatgagacgtcgagggacagtgaggccagcagtgtggcggctcgtggagactcacggccacgcctggtg

SEQ ID NO: 363849 - DNA, 122 bp, Homo sapiens
caggtgggctacacttaggggttcaaatgctgcattaccgcgctcgggtgagcgactgcccggcctgcaactcaagggactcccaggccaagtggctccgaactcgcgagctgtcggaacag

SEQ ID NO: 363850 - DNA, 122 bp, Homo sapiens
gttcccggccccctgccggaccgggtgtctggagtgctgatcttgggccaaagcttctgccgctctcccagacactgcgggccggggcgtcaggcaggccttggccttctctcccggagccc

SEQ ID NO: 363851 - DNA, 122 bp, Homo sapiens
gtaaaccttagctttcccctttccaacagaggtttccagctgttgatgcctggatggacccggctgcagggaggaggaggaaactctctgtccctcccttcttctgcaagtccccaccctcc

SEQ ID NO: 363852 - DNA, 122 bp, Homo sapiens
agtcagcaggccccatgggtcccggcacctgacttcagtgtgccaggccgtctgtcgccccggcttgcacacacagatacagtcctcactccaggtgcagcccctccacctcccttctctcc

SEQ ID NO: 363853 - DNA, 122 bp, Homo sapiens
acagaaaggcagtgactggctcctgtcccattcccgcgcgcctggggcgggtagaggggccgtgaccccagtggccaccactgggcatgcgtgaacactactcggacaggaaccacaggggc

SEQ ID NO: 363854 - DNA, 122 bp, Homo sapiens
gaaaagtgaatgcaaattaaggtttatggaactcccctcccactgggaccacctatgccacgacagcagcatgtcttctacagacctacagaatctctaagtctccccagtgttctaaatct

SEQ ID NO: 363855 - DNA, 122 bp, Homo sapiens
gggctgcgacccgcagcgacctgtggacccgcccgctctccgcccgggggctcggacctccgcctctctgggtgcccggacctcaacccctccgggtgtccagcagccccggggctcggagt

SEQ ID NO: 363856 - DNA, 122 bp, Homo sapiens
cccatctgtgcccgacaagggcccacagaggcctgggaggggagctaagggctggggttccggtggcatttgggatgttcaagacagtctgtgcacagcctccctgggagggtctgcagtca

SEQ ID NO: 363857 - DNA, 122 bp, Homo sapiens
cagtgtttgcaattactcagggagagtctgtacagtgaaaagagaattgatggaagcttgcgaaccaacagtccttaaacagctggcagagaaaaggcagccctggaggaaaccaacagaca

SEQ ID NO: 363858 - DNA, 122 bp, Homo sapiens
ttattttttggcacaataatctacagttgtcccctgtccaaccaagggagttttaagccacgaccgagctgccaggcggcagacctgagcccggggagcccgcgccgaccactcggggacac

SEQ ID NO: 363859 - DNA, 122 bp, Homo sapiens
cagctggagcaccgccctccccccgctccagagtctgcgtcacgtgaggaggtggtgtcacgtgacctgtctgtaccctagcgcggggcttctgtacgctgctaggaagccgaattacaaaa

SEQ ID NO: 363860 - DNA, 122 bp, Homo sapiens
ggtctgatgagtaacccctccccccaggttccagaggaagaagcctccacatctgtctgccgggtacatgatattcaatttctagatcattattggagattatctgtgactttttaaaactc

SEQ ID NO: 363861 - DNA, 122 bp, Homo sapiens
cagatgaacctccgtttgatttcacagccttcagcacaggcaactgttactgagtctgcacgaacttagataatgaggtgcagggttatttgcatttaaattgcaatccagcacacgtgtga

SEQ ID NO: 363862 - DNA, 122 bp, Homo sapiens
ctgattttctcgtaaggacgggctgaaagaggaggggagacagaaggagacactccggcccgaggaccaccactgccactagtaacgccccctacacactctagaagtgctcaggcgaatga

SEQ ID NO: 363863 - DNA, 122 bp, Homo sapiens
aaggtgattccgccatttcccagccattaccagcggagagagctgagtcttcctgaacagcgcctttaagctggtttgtcccaggttggtggagcgggactcagcggtttctgtcccttggg

SEQ ID NO: 363864 - DNA, 122 bp, Homo sapiens
ccttctcgttggggcaagtaacaaaggctgcagagaccgagcccggaacgtagccagagccggaatccgaggccggcgagggctgggtcggagggcttccagaggccatggtcagcaagact

SEQ ID NO: 363865 - DNA, 122 bp, Homo sapiens
tccgcacccggagggacttgccgctagcgccgctccttcagcctccccaggcgctcccttcgcttcccggtgtttcaggctcttcccaccgcctgtttgctctgggcgcagcgctggctgcc

SEQ ID NO: 363866 - DNA, 122 bp, Homo sapiens
gaagcactaggcgtctgacctgccatcatccttgttatgatgtcataatcatattctgtccgtgtttattgcagttctctggtttgtctggagtgtttgcaagtcagtcatcatagtggcag

SEQ ID NO: 363867 - DNA, 122 bp, Homo sapiens
gaagccctgcgcacccagcacagctgggagctgatcgaagcgcttggggccgtcagggggcgcgggcgtccctggtggggccagttgtacgctgcggcggtcggcggagatgagcaggcggc

SEQ ID NO: 363868 - DNA, 122 bp, Homo sapiens
cgcagagcccttgggaaaccatcccgctagccaattcagcgtgagggggccgggcaaggtcgtagggagtttgaagtccatcttctgtgtaaagacggcaaatctgaggttctaagaggggc

SEQ ID NO: 363869 - DNA, 122 bp, Homo sapiens
ccttcccggagcgcgtgctcggctcgggaagcgcccgcggccgccgcatccccgagcgggcgcgtggcgccacctctttccggggcgcccaccttccccgggaatccccccgcccgacggtc

SEQ ID NO: 363870 - DNA, 122 bp, Homo sapiens
gcctccgctcctcccacttcttgctgaggtcaaaggcctgcgtcagttgcactgtagcctcggcagtgaaccgggaggtactaccaggtaaggaaggtgcggtagccccagccgtgggtgag

SEQ ID NO: 363871 - DNA, 122 bp, Homo sapiens
aggagagacccataaaatacctaagacgaaagttactaggatagccaggggcttgtcttccgggtggcgccgaggccaggaaactgtcctctctaacctatttccccagaggagtctaaatt

SEQ ID NO: 363872 - DNA, 122 bp, Homo sapiens
acctagtcagttctgagatgcacggtggctcaaacgcacttagcatggtgacttgccactcgcactggcccaggtctggcaccgcgctacaatttcttctgtagcccgttctgagattctgt

SEQ ID NO: 363873 - DNA, 122 bp, Homo sapiens
agccatggcctatggtggcccatggggacggacaggcagcactggctccagctgcctctgcggcaatgtggacaaacgttggggtctttgtccctttggggttggtctctttttttctctgt

SEQ ID NO: 363874 - DNA, 122 bp, Homo sapiens
cactgacttaattttttcctaagcccatgggcttaggggccagaaaagcaccaggtactgcgttagcagtgtccctcaggccagatgcagtggctcgtgcctgtaatcccagcactttggga

SEQ ID NO: 363875 - DNA, 122 bp, Homo sapiens
ttgtatctaaatgtcacattgttcacttgtcagtcttgcctccgtcactgtgagcatgtgcgtgtgtgcgtgtgtgtgcatgcgtgtgctgacagcccgtatctgtgtcatgtgtattgccg

SEQ ID NO: 363876 - DNA, 122 bp, Homo sapiens
tgcaccgcccagtggttggtgtagacggggcgcggcgggggcggagcaggcggcaggcagcgccagcagcagcagccagcgccagggacgcggcgcgagcggccggaacccgggcccgccgg

SEQ ID NO: 363877 - DNA, 122 bp, Homo sapiens
cgcctgatgtgtatgtgtcacatggattgcgtgacgtgtatgcgagtgtcacatggatcgcgtgatgtgtatgcgagtgtcacatggatcgcgtgatgtgtatgcgagtgtcacatggatcg

SEQ ID NO: 363878 - DNA, 122 bp, Homo sapiens
gccgccactgcggggaggttgggccgaggcggcaggcgggcgggctggggcactggtgcccggcctgctcttccggagctgcagcccctcaatttggctgaggcggtggcggccgccgtgag

SEQ ID NO: 363879 - DNA, 122 bp, Homo sapiens
ccccgcgcgggctagtcccctgtggaggggtgtcgctcctcaacttggggaccaggtgcacggagcaccggggctctcggagtcagcgggcgtcgcttctccgcgccgagtgagccgaggga

SEQ ID NO: 363880 - DNA, 122 bp, Homo sapiens
cagcttcccctggaaggggcgtcccaggggacctccgccaggccaggggaacccggcctccgggcctgggtgaacgtgccttccagaccatcctggcaggccgctgctccctagaggcctaa

SEQ ID NO: 363881 - DNA, 122 bp, Homo sapiens
tggctgtttttgaaaggagggtgtctgtgcaaatatcacacccagaattttctcaagttgcgccttgcatcaagagtcccaaagtcctccccagccacccaaactcgtttttctcacttttg

SEQ ID NO: 363882 - DNA, 122 bp, Homo sapiens
ttggctctgtttcattagtaatctgagagccacatgaaacaattgagttgtgagaaaaaccgtctctaagacttacaatgtatgactaagaattgctgtgccttgtgaaagattaggactaa

SEQ ID NO: 363883 - DNA, 122 bp, Homo sapiens
accggtgcccgcaggggagccgcagaaagcaggcggcggggcgggcggctgcggcggggacgcagccgccttggaccccgctgctgggaccccctcggcgccgggcccccgcacccctggca

SEQ ID NO: 363884 - DNA, 122 bp, Homo sapiens
cgggaaggacctgcgccgtgctctggccgccttgaattgtgggagatgtagtctcttttgcgcgcctctttgccgtatcccagttaagagcgaggttttcaaactactattcccaggaagac

SEQ ID NO: 363885 - DNA, 122 bp, Homo sapiens
cagaagggagtgtgtgaacaaagcggaaactggagtacaggagcgctgaagtcagctggccgctctggtgcctgcaggaatgaactccattcacttggaccgctgtgttccacccctcacgg

SEQ ID NO: 363886 - DNA, 122 bp, Homo sapiens
tgtgtgcgtgtgtgagcctgcaggctctctgaggaggcggagatggtgcatgtggaatgccgctctcctgtcttcagcggcttggcccccgccacgcgggccttcagaatggaaagtcagat

SEQ ID NO: 363887 - DNA, 122 bp, Homo sapiens
acccgactcatcccaaccaacctgaggtatgaaaaccaggaaagagagctagcaccggagcgttggtggtatagtggtaagcatagctgccttccaagcagttgacccgggttcgattcccg

SEQ ID NO: 363888 - DNA, 122 bp, Homo sapiens
ggcggagagagaggaaagcaaagatgcgggaagaaagagtccttgcagccccaagttgggcgagctcctcccagctacttataccacagggttttgggagcagagccctttcattaaacttt

SEQ ID NO: 363889 - DNA, 122 bp, Homo sapiens
cttgggctgggctgcgcgcgggatctgaggaggctccgcggctgtccctgctcgttcacccgggcctgttgctgcaactgctgccggttaaccagcggctctcggaaaagtggggagggagc

SEQ ID NO: 363890 - DNA, 122 bp, Homo sapiens
gcaaaggtgaatggatccatgtataacctgccatacctccaggaaagaatgggaaagtctcggaagtggggaaggagacaaggatcaaagcctttgcaaagtcagatgatgctcattgattt

SEQ ID NO: 363891 - DNA, 122 bp, Homo sapiens
acaccaagtttattcccaaatcacggcctttacatctgctattccctatgcctggaacaccgttcccccaaatttcacttggagattaacccatctgatgtaatcagccacctatgccctca

SEQ ID NO: 363892 - DNA, 122 bp, Homo sapiens
ggagaagatggggagagccaccagtggccctgtgagtctgactctgagcggaggagagggcggggcaggggtgagaaacccttcaagccaggaggaccaccacaacttcaggtgggtacagt

SEQ ID NO: 363893 - DNA, 122 bp, Homo sapiens
ggtgcgctgtgcgacgcggaaagcgccgtagagcacgcagaacacgattggctgagctcccggaagtgacgtacctcaaccgcccgacagtggaagtcccacctgcgcccgacggcggaagt

SEQ ID NO: 363894 - DNA, 122 bp, Homo sapiens
tccgtgtgtagcttgtcctctggacgcggggccacccccacaccccgaggtgaccccaggcgtaacctacccgtccccggccttggtgcctgcagatagttttgcttgtttcgagcttttgt

SEQ ID NO: 363895 - DNA, 122 bp, Homo sapiens
ataatatagtggactttcaataaacacttaccaaatggacaaatgaaccccttgtcaccccgatctcactagttccttccctgaaacccgacacatctgagtccttttctcctttactaacc

SEQ ID NO: 363896 - DNA, 122 bp, Homo sapiens
tggcataggctggggaggaaaagagagctaagcgatcattttctaaagtggaaaattcagcgataatacctaaaactaaacactccacaggcagcaatttaagtgtagtattagagatatgg

SEQ ID NO: 363897 - DNA, 122 bp, Homo sapiens
agataccggaggcctctgctgtggctgcccactggctgggcccaggccttgaagcggtggcgaacgtctcttccctaccctacctcggtgactgatggcggcggcggcctctcccagtccgg

SEQ ID NO: 363898 - DNA, 122 bp, Homo sapiens
ccgccgccgccgcagtccttagcttcccggggacaggaaaccttcaagaccgagctgccacggccgcctccccgcccgccccccattctacgcgcctgcccacaccctcctcccctccttcc

SEQ ID NO: 363899 - DNA, 122 bp, Homo sapiens
actgacccatatctgtggcatatacctagccttctttcctattataatgaataagctttccgtattcctagcaaaatccaagtcctccacttgagtcctaaaccccattccttctgaagcaa

SEQ ID NO: 363900 - DNA, 122 bp, Homo sapiens
ttgggaggccaaggcgggtggatcgcttggaagtcaggagttcgagttgagcctggccaacgtgatgaaaccccgtctctactaaaaatacaaaaattagccggcgtggtagcacatgcctg

SEQ ID NO: 363901 - DNA, 122 bp, Homo sapiens
aaaaagaacaaaatagtaggggagaaatattcaggcatcctaaaaaatattcagtggaaacgtaaaaacattaaagactgattaaacatcgcagcatgacacagatttagcaactgagcata

SEQ ID NO: 363902 - DNA, 122 bp, Homo sapiens
agtcgtgattgttccctgttgcgggacattctgcgcctgaatgagcgggggctgctgtgtcgacgcggatttgccatatggttgcgcggagccaggaagaatgggcccctgtgtgtgcgacc

SEQ ID NO: 363903 - DNA, 122 bp, Homo sapiens
gaaaccccaattgagatcgtacggtcatagggtgcccatagtgccgtgtctgggaaaccccgattgagatcgtgcggtcatagggtgcccatagcaccgtgtctgggagaccccgattgaga

SEQ ID NO: 363904 - DNA, 122 bp, Homo sapiens
ctaactccagcattaagcgctcgccgcctcggtcctgaggagggcagtgacgggtacggccgctcactcccagctcggcgctaacacggttaacctccagctcttacagctgccgtcgctcc

SEQ ID NO: 363905 - DNA, 122 bp, Homo sapiens
aacttctgctccgaatgaatcatacgaatacaaagtggtcaaatcgtctttccgaccactcgctcctttgtaaaccaaaccgaggcttccatgaggttgcgggtgatgcagatgctttgaaa

SEQ ID NO: 363906 - DNA, 122 bp, Homo sapiens
actatatttaaaaagtccgattggaacttttatactgtgatcttgttcattaataaaggtcggcattgtgtttatgtcaacttcaatcagaaaggagctaagaggatcagttttgcctacag

SEQ ID NO: 363907 - DNA, 122 bp, Homo sapiens
cggcctgcagtgctctctggggcacacggcagccccacgacgcctttgggtttcttcgagcgctactcgcacgcaccagcgcccacacagctgcaacgccaaacgcccgccagcaccttagg

SEQ ID NO: 363908 - DNA, 122 bp, Homo sapiens
gagactagcctgaccaacacggtgaaaccccgtctctactaaacacaaaaaatcaccgggcgtggtgacgcccgactgtaatcccagctactggggagactgaggcaggagaagcgcttgaa

SEQ ID NO: 363909 - DNA, 122 bp, Homo sapiens
ctgtgcatctgaaggggcgcccatcctgtctcaccaaggcgctctgggagcgtgtggtgccggccgtgctgcccgacccagtacccctcctcgtctcacttctcccccgggaaactggggtt

SEQ ID NO: 363910 - DNA, 122 bp, Homo sapiens
tctcaaaaaaataaaataaaaggaggcaaaagatttgaacagtcacttcacaaaagaagacgtccaaattgccagtgagagttggcaaggatgtggataactttttttttgagacagagtct

SEQ ID NO: 363911 - DNA, 122 bp, Homo sapiens
ggcgggctgatcacttgagctcaggtgttcgagaccagcctggccaacatggtgagcctgcgtcacctggcttctggcacacagctcggccactgtgtccctcctgcctccctggcaggtcc

SEQ ID NO: 363912 - DNA, 122 bp, Homo sapiens
aggccaagccggatcctcaggtttggccagggggcggctggggccggcgtgccggcggggcgccggcggggccgcgggggtttgcggcgctggctgggattcgcgctccgagccagtcgccg

SEQ ID NO: 363913 - DNA, 122 bp, Homo sapiens
cacatacaacagaagggacgcctctacaccctcaccagctgcctacactcattcacctgccgctggctggttttggcacttgttttccaaaccagtcaaagaactcacagccccaggactag

SEQ ID NO: 363914 - DNA, 122 bp, Homo sapiens
gcaactgcctccgtgtccttcacaaggctgtttacgtcccgaggcggcagacagaggcagcgttttccaccctttcagagcactccctgagggacgatgcccatggcttgagcggctcccaa

SEQ ID NO: 363915 - DNA, 122 bp, Homo sapiens
catgcttttgtacggcaggatcgcaaagcacgccgggaccggttggtttggttttgaagacgtggatggcgggaattctcgcttctggcctgggtgagctagaagggagaaggtaggggaaa

SEQ ID NO: 363916 - DNA, 122 bp, Homo sapiens
aaaagtgggctgcttctgccagacccagggaataactgttaaggatccctcattctgacccgaggtcagaactaaattattagaagcccctcttgaacaggaataggagtcattgaaatgaa

SEQ ID NO: 363917 - DNA, 122 bp, Homo sapiens
cctcccagacataacttaggctccgtctcgagctcctccagcgccgccgccccgggcgcgcgccaaccgggaaggccactcgctgcaaaaaacgttcgaattacccgccctgcgggaaagga

SEQ ID NO: 363918 - DNA, 122 bp, Homo sapiens
catagaggggttcggtgctgggtgggcagacaccaccaaacaatggggatgccaggagcccggtacggcggcaggagcagtaccctgggctcggggggatgtagaagccccattccacccct

SEQ ID NO: 363919 - DNA, 122 bp, Homo sapiens
ccagctcccctcacccccggtttctcggtttgatgggacggaaggcttcccggcaagaggcgggagaccccacccctggtccggacggcaggcagcagggacaccctcacctgccaaaacct

SEQ ID NO: 363920 - DNA, 122 bp, Homo sapiens
gtctctcctctccagagactttctgtgccaccagagcagggacagtccacctgctcttcccgaaagctgggtgcccacctcccagtgaaggtcttggtgactacttcaggtctgtttattgt

SEQ ID NO: 363921 - DNA, 122 bp, Homo sapiens
ggagtcttgaggcctgctgagggcgtgagctggcatgaggcgaagagagggccatggcaccgactccgagatgggtcaaggacccgtacgggagtcgcaatcctcagaccctcccgcgctcc

SEQ ID NO: 363922 - DNA, 122 bp, Homo sapiens
ggaaacccgtcaccccctcgccgggggaaaaaggagggactgagcatgagccccggactccgagtgggattctcccaggatcctcccgcggccctgaacatccaggagacccgggagactgg

SEQ ID NO: 363923 - DNA, 122 bp, Homo sapiens
tgagtcagggaggtggcgatggctccatggggcccctccccaggacatgaacagccagggcgaccatccctcaaggagcgggggctgcccgggagggagcgtctgagctggcaggcggggca

SEQ ID NO: 363924 - DNA, 122 bp, Homo sapiens
tgcatgtgctcttgggggacgtcagtgccacgtttggtcacacgggctgcagctaggactcgcctctgtctgtctttgccggtgtcgccggaagctgcgtcgggatgccggagcccccgggc

SEQ ID NO: 363925 - DNA, 122 bp, Homo sapiens
acccagcgttccgaggcgcagcctaacatagtgaaccgacgaaggtccaatggaaaaagacggccatgggcatagaccaatgacaaagtggcaggggcgggcccaagggctgggtcaggttg

SEQ ID NO: 363926 - DNA, 122 bp, Homo sapiens
agcaattctcctgcctcagcctcccaagtagctgggattacaggcgtgtgccaccatgtccggctaatttttgtatttatggtagagaaagggtttcaacatgttggccaggctggtctcga

SEQ ID NO: 363927 - DNA, 122 bp, Homo sapiens
gcccagccacttcctctagccttccccccacttcttcgaggacttcgccccctgcctacccgaggccttgtgccaagaagtacctccctcagcctgcaccgtggtctatctactggagaccc

SEQ ID NO: 363928 - DNA, 122 bp, Homo sapiens
aaccagaggtcagcgcccccgaccccgccaccgccgcgggtccctttaagggagagtgggcggggtcctgcctttaactccgcccacggctaaggagatgcacggcctacgagaggggtagt

SEQ ID NO: 363929 - DNA, 122 bp, Homo sapiens
gtcggagtgggccaggccgggggtcgggacagggctggggccagaccgggcggctgggggcgggagggaggccgcttcaacggccccaacacctcccgcctcccgcctcccgcctccccggc

SEQ ID NO: 363930 - DNA, 122 bp, Homo sapiens
gtgtacacaagagtgtaaaagcacacgtaaacggaacactctggtgggaagtaggcaggccgtcccctgcactcccacaccggcctgaagtgctggcattgctaggaacccaggctgctcta

SEQ ID NO: 363931 - DNA, 122 bp, Homo sapiens
agtgcagccacaggccaacacttccttggctgaccagacgacggaaaatgtgtctggctgcgttcaggtgtttttccaagtttgaaaccctggaaagtttttcctctcagaacaaaagcttc

SEQ ID NO: 363932 - DNA, 122 bp, Homo sapiens
cccgaccccccagtcccaacctttctcccagtgccactaagtaagttattcccggagaaacgcctggaaagcaggaaagagccgaagctcggggagcagttttgtctgctggttgtaggggt

SEQ ID NO: 363933 - DNA, 122 bp, Homo sapiens
ccattccgaggctctcagatcccaggatgaaaatgctgctgcctgagttggaattgtcctcgtggtgcaaatagcagacttaacaacattcatgttaattacttttcctgagtgtcattcta

SEQ ID NO: 363934 - DNA, 122 bp, Homo sapiens
ggctgcatctgagaactgctgggagctgtggatttgctggggaatcagcccagctgtccccgggaggttggtgggggcggaggagggacacagaggagtgtccctccatgtaggcaatgaca

SEQ ID NO: 363935 - DNA, 122 bp, Homo sapiens
ggtggtctgggtggagttggttatgctgcgggggctgctgctgtttagcagtttgggggccgtcggctcgtgccgggcacgagccccctttccagacgcgagcttcgccgctgtcgctgggg

SEQ ID NO: 363936 - DNA, 122 bp, Homo sapiens
tccatctggacacagccgggctcagtctcttcccaaataccacgccccgccggtcgccgccgaagcccacctgcctggaggaaatcacccgtgagcgcatttgctcgccgtggggtctgcaa

SEQ ID NO: 363937 - DNA, 122 bp, Homo sapiens
aatgtggagagcggctctccactgtttctcagatcgagcaccaactcatcaatgtctccacgccctacattcaggagtttcattacgtcatatgtgttcccaactgaatggaaagttccttg

SEQ ID NO: 363938 - DNA, 122 bp, Homo sapiens
gattacaggcgtgaaccaccgcgcccagcctattctttctttagaatagatcagtggtggcgtattcatacaatggactattccgcagtgatgaaaatgaattatagatatttgcaaaaata

SEQ ID NO: 363939 - DNA, 122 bp, Homo sapiens
acaaggctggacatcatgtgtttaccacacaagccgcgggaggtgcacagatgcatggggcgaggagctggtgggcagtctgtgggtggtaaagggccagctgggggtgtggaaggaagggc

SEQ ID NO: 363940 - DNA, 122 bp, Homo sapiens
ggactcttccagcaatttgaccttgtgtctaggtttcaagttgcaaaacttaacagcgtacgaattcaagaacgaagtaacatgtcacctgtaaaatacccaggatagtgtaatttgtgatg

SEQ ID NO: 363941 - DNA, 122 bp, Homo sapiens
cataaataatggtattttatattaggaataaacctaacattaatggagacactgagaagccgagataactgaattataaggcatagccagggaagtagtgcgagatagaattatgatcttgt

SEQ ID NO: 363942 - DNA, 122 bp, Homo sapiens
ctgtctcctcccggagggagcgcttacggggtggggtggacctagggctgtcgcgcctgccgtgtggtcctggagaatgaggcttaccaaaggctcaagacagcgtccccatggagtgacat

SEQ ID NO: 363943 - DNA, 122 bp, Homo sapiens
ttcccactggttcccagacagcccctgggctcgtggggattgtgtgactggagctgtcaacgaggaaccgtgatgctttccctctgggttctggagccacgtggcactgtgggccgtcactg

SEQ ID NO: 363944 - DNA, 122 bp, Homo sapiens
gcttcccttgaaaggcactgtgctgtgaacctgcggcttatttacagacgtgtccaaatccgttctctggtcctgcgtgcagtggccacgcccttcatagtctgaacgtgggtgactgtgta

SEQ ID NO: 363945 - DNA, 122 bp, Homo sapiens
cgcggggacagcctcccaagccacagccctgcgcgcccgacctccgactcacaagggacgcgccagagctctggtcccattgagacagttcagctgaaggctgcgggccttcccgagctccg

SEQ ID NO: 363946 - DNA, 122 bp, Homo sapiens
gcaaatttcattgtatgtacactatacctttaaaaagctgttagggaaaataaaaggtgtcgctgcagatactgaagtgccctagatcaggggtctccaacccccgggctgaggaccagtac

SEQ ID NO: 363947 - DNA, 122 bp, Homo sapiens
ccccactcaacagcgtgtctccgagcccgctgatgctactgcacccgccgccgcagctgtcgcctttcctgcagccccacggccagcaggtgccctactacctggagaacgagcccagcggc

SEQ ID NO: 363948 - DNA, 122 bp, Homo sapiens
tagatgggctcattttgtatgatgcacagatgatagatttggtagattcagcctgtcagtcgctcaggttctgccccagaggtcaatgtagctgaggcaggtccttcagaaacaatgtaaat

SEQ ID NO: 363949 - DNA, 122 bp, Homo sapiens
gcgccccctaccggcggccgcgggcggcgcggggacggccccgccgcgcccgaacccggccggacccaggacccgcacgtgtccctgcccacccgggagggagctcctgcctctatccccgc

SEQ ID NO: 363950 - DNA, 122 bp, Homo sapiens
ccactccgccccctgctagtccctacgcgttcccgcctctcctcccgctctgtcttctcgcgttagaaaaccgttagtggcccaactgccctgccatgcgccttcggcgatttctctgagaa

SEQ ID NO: 363951 - DNA, 122 bp, Homo sapiens
cgccgaatgaagggaggaggtagacggggccaggagaaaggagaaaccgccccggcggggcgaagagcgcggctctcgagctgtagtctgcaggagacacacctccctccctcacgcccctc

SEQ ID NO: 363952 - DNA, 122 bp, Homo sapiens
ggagattggctgctcaggtctgacactcggggccacgggagagaaacttttaaaagacttcgccgccggggctgcctcggagtgtcccgcgcgctctcgctcgctctcggccaccctcgccg

SEQ ID NO: 363953 - DNA, 122 bp, Homo sapiens
agagagtaactagaattaaacgtgccatcatcctgttgagtttcttgatttcttctttctcgttctttcctccgtaatgcatttctatctggttcatagacactgcatcaggaaaaagaaga

SEQ ID NO: 363954 - DNA, 122 bp, Homo sapiens
cccatgagtaaatgctgaatttttgcacttgtaaagttttctacttagaaacaactaaaacgttcatcaactgatgaataaaatatagtccatcctggctgggtgcggtggctcacgcctgt

SEQ ID NO: 363955 - DNA, 122 bp, Homo sapiens
ccaaatcccaaaggaagtcttatacaatttcctttgcccttggaagtttctagtgttcttcgctagtgtaacagtggtttgtttttgtttttgttttccaaataagtattgaacatgtacat

SEQ ID NO: 363956 - DNA, 122 bp, Homo sapiens
tttttcagagctgccggctttgctaaacatggctgctcttttaccccacgtccaccaccacgctgtgctgaaggcgcatccatcgaccttcctcagagacgaggaaagagccaatgaaagat

SEQ ID NO: 363957 - DNA, 122 bp, Homo sapiens
ggtatgcgtttctgaaattaacggccttggaggaaattgactttcaccgcatcaccacgacggactgggcccacattgtctgtctgtcgtggggagatgtcacagggtacccatccctctcc

SEQ ID NO: 363958 - DNA, 122 bp, Homo sapiens
gagaggccccccaggtggcaagtttgcaccctgttgcttcctgcaaggagcttttgtttacgttttcagcttggacagtctggctgtctggccaagagtgacaacgtgacttaccatcagag

SEQ ID NO: 363959 - DNA, 122 bp, Homo sapiens
actctgatgctccttcccttggtttctgggctcccttgaactcccctagctccgtgctcacggccatctcagggtctcccctgcttgcagctgcacttggtacagcctgtgccagcccctga

SEQ ID NO: 363960 - DNA, 122 bp, Homo sapiens
gcctcctccccaacacctgtcttccaagaagatctcgtcgagggtggccctggccgctgccgtcacccacaggcacatttttagacacgccaggaccccattcgccagggtcggctgacgga

SEQ ID NO: 363961 - DNA, 122 bp, Homo sapiens
gatgctcactggctcctccctgacctcccccccgggcaggcgagccctggcttctcctcacggtgcttcctggctgcagaccacaaccctccgctggtcgctggttggggacgggccctcct

SEQ ID NO: 363962 - DNA, 122 bp, Homo sapiens
attgccattctggctggcctcgtcgttggccaaggagaaatgatggggaaggagctcggtcgcctgctcccagctgctcagtcccaactttctgcccgcatgcggcccgtcctacccttgct

SEQ ID NO: 363963 - DNA, 122 bp, Homo sapiens
cagacccccgccacgcagatctgtcactccggaacaaggcgcaactctccaagagggggacgcatcctcgggatcagcgcgtccaccagcgagcggcgggcgcccgggcccctttctctccc

SEQ ID NO: 363964 - DNA, 122 bp, Homo sapiens
tggagcgaaaccccaaacccggggccctgcttgcaaactcagcatattctgtctctactccgcctttttcagaggagaaaagacctggcccacgcctcccagaggctttacctggtgaagag

SEQ ID NO: 363965 - DNA, 122 bp, Homo sapiens
gagcccaccgagagtggatctgtgggaagccactgtggcaccttgctgagtctgttcacccgtgcagctagctggtggcagccctggcagatcccggcacacagtcaggctccacgccttac

SEQ ID NO: 363966 - DNA, 122 bp, Homo sapiens
ccaaaagcgaaacatggtgcttgtgagcaactctcccccaccccacagaaaatcaggggccgctcagccacgcgaggtgggcgccactccagggcccttcctgggggatggcagaggaaggc

SEQ ID NO: 363967 - DNA, 122 bp, Homo sapiens
tggcgagcagaaattcagctgggagttgtcagtgaaacgaaactaacattgagtatggaccgtgtaccaagccctttctaagtgctttaccttcatcacctcatttaatcctcccaacaact

SEQ ID NO: 363968 - DNA, 122 bp, Homo sapiens
cgggcccgggccgtacttggcgctcggtgatccagaagcgcacgttgggctcaatgaaggcggggacggcgtctctgcgtcctaggagccgcccaggttgcgtttcctcctcctgttccagg

SEQ ID NO: 363969 - DNA, 122 bp, Homo sapiens
ggtagctttttcttttttattttgagatctcactctgttgcccaggctatagtctaatggcgtggtaacagctcactgcagcctcaatctcctgggcttaagcaattccttccacctcagcc

SEQ ID NO: 363970 - DNA, 122 bp, Homo sapiens
cctgcccctcaaccccggcagggcgcaggtgtccaacccagccgggaccccctccctcctcgaacccaggtgttccggctcccagaccccaattgagctgggggcgcccacccgccggggga

SEQ ID NO: 363971 - DNA, 122 bp, Homo sapiens
tttcaagtcttctcaaactcacacctcagttgctcagagaggagaaatgcagcgaggactcgccttcctggccagtctctgaaaacgcgaaaccttcctgagctgtccatttgttttagggg

SEQ ID NO: 363972 - DNA, 122 bp, Homo sapiens
aaggggaggggccattccgtgtctccagcctgctgggcagcagcgacaggtggagctgtccgccgcgtccccccacactgctcctcctctcagctgggtcctttctgcccaacccaagcccc

SEQ ID NO: 363973 - DNA, 122 bp, Homo sapiens
gagctggtgagagggcgaggcggggacgggatagggcgcggggacccagggcacagtccccgggacccgaccgcccggatgaggcattgtctgcgcacccgcaggattccgcttttaatgcc

SEQ ID NO: 363974 - DNA, 122 bp, Homo sapiens
cttagatcatagcgatgctctcgggggcacagttgaggtgggtggaggtgctgctgctcccggaggacttgcaggcccggccaggggtaggctgcagtgcagccaccagtgtgtctgaggag

SEQ ID NO: 363975 - DNA, 122 bp, Homo sapiens
cgtctcgcgaggaccctccccccgggtcccccagctctgccgcggccgcgcccagatggccgtcggatcccccctcaaggtccccctgtcggctccgccctcggtcgcccaggccccgcccc

SEQ ID NO: 363976 - DNA, 122 bp, Homo sapiens
cctgcttgatggcctcttctgatgcagcctgtcctggagggctgagggctgctgggcccccgctggctttatagtctcagagcccatctcccctacctctcaacccctgccgcctggcccat

SEQ ID NO: 363977 - DNA, 122 bp, Homo sapiens
gagcagcttcatttcggctgtttctctctccagcctctccccaccggtcactgttagcctcgagtttgaccctcaacatccccagaggatgcctcctaggactcgaacctcatttagtgtct

SEQ ID NO: 363978 - DNA, 122 bp, Homo sapiens
cagatactcaaaagaagacagagaagctggccatggggaggggggaggggggaggggggacgggggagcatgcaggggacttccaccacccaccagttgggagaagcagacaaacacaaatc

SEQ ID NO: 363979 - DNA, 122 bp, Homo sapiens
gcagagttagagtgatatagtccaaatgctctgtttgagtcgcgggccctttgtctcacacgggcgagtccggggaattctgggaagtggagtccacacgctctgtggaggctcgagcactt

SEQ ID NO: 363980 - DNA, 122 bp, Homo sapiens
gaggacgccggagtgcgcactagccctccgtggaagacgggagcagaggacatcggagtgcgcactagcagtccatggaagtcaggagcagagaatgcctggagggcgcactagccctccat

SEQ ID NO: 363981 - DNA, 122 bp, Homo sapiens
gtctcagcctgcactcggactgcgggtgtttggggggcctctgtttgcagcatggacacccgagtttcaggataagagcgtcaggcccagaagaagcagcacctgcaactcttctgcagaaa

SEQ ID NO: 363982 - DNA, 122 bp, Homo sapiens
ctgcagaggggcggagccccccagatccgaggcgggaggcggcccgggggcgggaccagccggctccagcggcccgctccgctcccaccatgcccttataaggagcgcccggcgttagggct

SEQ ID NO: 363983 - DNA, 122 bp, Homo sapiens
tagtcagcatcagagaagtatttcatctagggcaggggcaggggtctccaaaccccaagccgtgaaccaatacaagtccatggcctgttagaaaccaggctgcacagcaggaggtgagtggc

SEQ ID NO: 363984 - DNA, 122 bp, Homo sapiens
gctaggccctcgcccccacctgccactggagaccgctccgccatccccacctcaccgccgcgcagcagagctggaagggtcctgccgatgggaccctgccaggcccagtgccactgcccccc

SEQ ID NO: 363985 - DNA, 122 bp, Homo sapiens
cgggcgcagctccaaccgactggcccgttttgccgacggcacccgcgcctgcgtgcgctacggcatcaacccggagcagattcagggcgaggccctgtcttactatctggcgcgcctgctgg

SEQ ID NO: 363986 - DNA, 122 bp, Homo sapiens
cacggtacctgctggacgaatatgcgtcaaaaaagtaagctgacattcgctgatgagacgcgcagagctttgattatgggggtctgacatttaaaggcttttccagttccgtcagccctgga

SEQ ID NO: 363987 - DNA, 122 bp, Homo sapiens
ccccaaggtttccccagggacgtctggcccctagtggccccaggtcacccagtgcagctgcgcctggaggggaccaggaggaaaggctgccttaagcagccaaaggaaaagcctgaggctgc

SEQ ID NO: 363988 - DNA, 122 bp, Homo sapiens
aaaaagaaattcttggcctttttaaaggcttacaactttaaggggaccacgtgaaagggtcgtgataaatcgagcaagcgcggggaacgtgactgggggctacattcatcagctaactgaac

SEQ ID NO: 363989 - DNA, 122 bp, Homo sapiens
ttggacggctgctgctacgcagtgaagcgcatccccatcaacccggccagccggcagttccgcaggatcaagggcgaagtgacactgctgtcacggctgcaccatgagaacattgtgcgcta

SEQ ID NO: 363990 - DNA, 122 bp, Homo sapiens
tagtataattgagaggattatgttaaatattttaatattttgattttaatcaaaatattgcggcctttaaaagctgtaagactttgggtgaatgaaagtaaataagtaaatggaaatttttg

SEQ ID NO: 363991 - DNA, 122 bp, Homo sapiens
ctagcaactgattgctcctggagctgcctccccatgggggtttctgtgagggtccggctgcgccaccctcttcctcctgtccaccctccagaagcaccctcatggagcgccttgtcttctcc

SEQ ID NO: 363992 - DNA, 122 bp, Homo sapiens
ttctttgactcggaaagggaactccctgcccccttgcgcttcccaggtgaggcaatgcctcgccctgcttgggctcgcacacagtgcacgcaccaactggcctacgcccactgtctggcact

SEQ ID NO: 363993 - DNA, 122 bp, Homo sapiens
caagttccccaattcggctcccattttcccaaacttcgggtgtgcaatccccctcccacgcgctctcgtgttccgcagtttctccatgcgtttattcatgtattctttcattcctttgtcag

SEQ ID NO: 363994 - DNA, 122 bp, Homo sapiens
aagcgggttccggggaggcggaagcgggtcccggggaggcggaatcgggttccggggaggcggaagcgggtcctggggaggcagaagcgggtcttggggaggcggaagtgggttccggggag

SEQ ID NO: 363995 - DNA, 122 bp, Homo sapiens
tcccaggatgggcagctgggtgctgggtttattcacacttccctaagggactactagattcgtcacaatgatgttggtattgccttcctccccattgaactttttgactctcacggatgagg

SEQ ID NO: 363996 - DNA, 122 bp, Homo sapiens
cttagtgctgagcagggtttcagagctcacccccaggagggtgcagacctcagccaaggtcgcagagcagaggagacccgtgggctgggattccacctgtgcccaccctggcagcatcccac

SEQ ID NO: 363997 - DNA, 122 bp, Homo sapiens
ctggcgaactcgcccaaaccgcgggccgccccctgccccccgctgggctgtaacctgaaccgcccgcccccggagcccgcctgggccctgccagtgcccgcacctgcccaagccggaccccc

SEQ ID NO: 363998 - DNA, 122 bp, Homo sapiens
tcttgttgccgaaaacgattacgctgagccagatggacaaggcatgtttcacggtgctggcgacgctgcggaggcaaggggaggcagcaggggcgctcagggctatggtctcctcagcccgt

SEQ ID NO: 363999 - DNA, 122 bp, Homo sapiens
aagtggcaggagaagcgaaaagctgggaaatttcccgggccaatggggaagcagtggagccggcagggaattactgccgggtaggagttcgcagaggagcaccttacttttggagtaggagg

SEQ ID NO: 364000 - DNA, 122 bp, Homo sapiens
tcactcgggtccgctccacaccgtcgccactgctgtggtagccggttggccgaggggccacgataactggttgcccgcagtaggagcagaattcggtatgtaccgccgccaggaagatggag

SEQ ID NO: 364001 - DNA, 122 bp, Homo sapiens
tgtggtagacgtcgatgatagagttcaaggctttctccagctcggtcaacatgatgcccacggacttgccccacctgaaaaacagaaccttctggggaatcccatggcagggaatttgcatc

SEQ ID NO: 364002 - DNA, 122 bp, Homo sapiens
gatgtgaccccttaaaggtcttcgttgttacaaggtaaggtgcttgtttccccggggccacggagttgttgtttataggtccccattaagcactgtgagaggggtgacgtgaggggagaagc

SEQ ID NO: 364003 - DNA, 122 bp, Homo sapiens
cgccgctaccaagtaccacacaggcgccaccatgacgagggcctcagtgcagaaccactgcgtccaccctgaggccgggatctcataggccccgcccctatttcccaatctagactccgccc

SEQ ID NO: 364004 - DNA, 122 bp, Homo sapiens
attgcggagggtcaggaggggggagcgaggatccggggcctggcaccctgggtggggcaccgtccccagggagggttgggcaggcgcccccagcctccagccatcccgcccgctgtgggcgc

SEQ ID NO: 364005 - DNA, 122 bp, Homo sapiens
ttttgcccttctgctccacgggaggtttctgtcctccctgagctcgccttaggacacctgcgttaccgtttgacaggtgtacagccccagtcaaactccccacctggcactgtccccggaaa

SEQ ID NO: 364006 - DNA, 122 bp, Homo sapiens
cgtgtgctgcggcgagtgcttcctgtgtctcctccggtacttcagcaagaggaccaccagcgtgatgatgatgacgatgaagatgatgcatcctgaagcaatccctgcaaataaggccactt

SEQ ID NO: 364007 - DNA, 122 bp, Homo sapiens
aaagccttttgtctgcagctgtacttttcaactggacatgaaccatgtacttttatggcacgtagatattcacatcaaatttctgatttgcagaccgattttatttttagttaacaaataag

SEQ ID NO: 364008 - DNA, 122 bp, Homo sapiens
tgcgcgtggagtggcgcgctgctcaccttccctctgcaaagtgcatgcccctagttaaatcgcagttttactctgggtctcttgtgggacgccccaactctgggttgtccttcggttccccc

SEQ ID NO: 364009 - DNA, 122 bp, Homo sapiens
tggggactgccaggcagctggagcacacagaggcaacggccgcatttaacccagggctggcgggtggggaggggaagtgcaggctgcaacccctcccactggcagggagggatccccccttc

SEQ ID NO: 364010 - DNA, 122 bp, Homo sapiens
aagtgctgagtccagtggcctgatttcacttgctttattttttgctgagtactgaccttccgtcagggtttagggccaacttgtgtaggtagggtgtggggaggtccgcacctcgaggagcc

SEQ ID NO: 364011 - DNA, 122 bp, Homo sapiens
tggctccaaattcaggttctcagacccagtgccgctggtaggctgcttctggggctccagcgggcctcaaggatctgccctttcttagacacacttgggggagattttgaggccagtcctgg

SEQ ID NO: 364012 - DNA, 122 bp, Homo sapiens
cagggcccgccccgcgtccctgatctggccgctcggcgtccgcggctgtcgccctagtcccgccttctcgccaaagctgaccaatcaaacgcctaggccttagctcgagaaccaattgcaac

SEQ ID NO: 364013 - DNA, 122 bp, Homo sapiens
gtttgcggcgggcgggcgggcgcggagcctccaagatgccgttccacccggtgacggcggcgttgatgtaccggggcatctacaccgtgcccaacctgctgtcggagcagcgcccggtggac

SEQ ID NO: 364014 - DNA, 122 bp, Homo sapiens
cccatgatccagcacatgggagtacctaggtcaccgtgcagccggggtctcagcagaggccggagtctgccctgagtcaccagaggctgtgggttttggggatatgcaccagagacccccac

SEQ ID NO: 364015 - DNA, 122 bp, Homo sapiens
gaaggctggaaattaaatgagacataactttgtcctcaaggagttcaaacaagaaacagccgagtgttacacgaagtaggcacggacgaaggagggatggcaactctgcctcagccccatgc

SEQ ID NO: 364016 - DNA, 122 bp, Homo sapiens
tctctcgtgttttctgggttgtggatctcgttgagaaagtaatgacagaaatttaagaggcgcagggctttgctccagggaccccaaagcctgcacaagccctgggatgaggacttggtcga

SEQ ID NO: 364017 - DNA, 122 bp, Homo sapiens
cacagccatcagatcacaagtcgagaaggccctaacgtccacagccatcagatggcaagtcgagaaggccctaatgtccgcggccatcagatcgcacgtggagaaggccctaaggtgaccac

SEQ ID NO: 364018 - DNA, 122 bp, Homo sapiens
gtgtaggaaaaacatatttgagcaatctttcaaatcacaacaaattaatcctaactgatacgattaccgtaactgggaggttcaggtttaggggagctataaaaacaccaatggtaacaaat

SEQ ID NO: 364019 - DNA, 122 bp, Homo sapiens
cagagaggctgcggcagggttcctgtggcgtgggtcgggcagcacaggccttggtgtgtgcgagtgccaaggagggcaccgccttcaggatggaggctgtgcaggagggggcggccggggtg

SEQ ID NO: 364020 - DNA, 122 bp, Homo sapiens
ccatagccaaatccactgttgactccaaacctgttgctggccctgccaccaaagccacttcggcagctgctgccacacccattgatggagacccgcttggcaccccccaggttgtagaggct

SEQ ID NO: 364021 - DNA, 122 bp, Homo sapiens
tatcgaggcaaccgaaggaaacccagggccccagaaacagcgaggagaccctcacccagccgggatacagccaccgtgaaagccatctcactcagcgagaaaccgagcaaagggcgcattcc

SEQ ID NO: 364022 - DNA, 122 bp, Homo sapiens
gccaactttaataagtatagccaccgcctgggtgtagactcctgcaaaataattcacttccggtttccagatctcgcgagagagggaccgggaaggtcaaacctaattctgggatcccaggg

SEQ ID NO: 364023 - DNA, 122 bp, Homo sapiens
tgggctggcctcgctcttatcctcccagcttcaggtgccctgtggagcacacgtctgtggcgtaggccccgcaggctgcggtgttttgttgccgcagcctgagtgaagagaacgccttcccg

SEQ ID NO: 364024 - DNA, 122 bp, Homo sapiens
ccacccgggacattccccgcgccgggaaccccactgggggctgggcggccggctcaggggcggggcgcagtagaagggcctccgacggttggccatcatccttgtcactcaaaagtccccgc

SEQ ID NO: 364025 - DNA, 122 bp, Homo sapiens
agggccctcggccaatcagcaggcactccgggttttcaagttgagttcaaacaggaccaccggaggccaatcagagtgcgcggccccgccccgaacgcccggccgtgaccaaccacgaggcc

SEQ ID NO: 364026 - DNA, 122 bp, Homo sapiens
caacgaaaagggtgaggcacagaacccgggaattcctgaccgaaagagaaaaaagggcgccgagaaacagggttattatgggatggctaagggggctccctaggaaaaattacaggatcttc

SEQ ID NO: 364027 - DNA, 122 bp, Homo sapiens
tctccgacaccgccatgacggccgcctggcgactcccttccccgcaggcagagggtcagccgctgctgggctgccccagaccgtcccacacaatcgcacacccccaacccggcctcaaacaa

SEQ ID NO: 364028 - DNA, 122 bp, Homo sapiens
tgttgttttcaatatccagcggggaagacaatagtactatttttgatagtctgattcatccgctccacctttccggaactctgaggccgggaggcggcatgcagtttccctgtgatccccaa

SEQ ID NO: 364029 - DNA, 122 bp, Homo sapiens
gccgtggcttgcgaggactgcagctgcagggacgagaaggtggcgccgctggctccttgacgcgctcccgggcctcaggtatcagcccccgctctgggtgcgccccgccttttgccgttgtc

SEQ ID NO: 364030 - DNA, 122 bp, Homo sapiens
cggtcggcgcgcgcggcatcacgggagttgtagtcctgtaagcgcgcggagcccgtcgggcgcctatggaactcgacccgcaggccaaaggggctccgttgcaaggaagaagtgcggggtcc

SEQ ID NO: 364031 - DNA, 122 bp, Homo sapiens
ggattctggtaaacaccgcggatttgcagcgggcagcctagagtgaacccagctgctccgcgacgcaggcgctttgggagggtcctggactcctttgacttgtggagcactggagacacctg

SEQ ID NO: 364032 - DNA, 122 bp, Homo sapiens
tcacgccagaagcaggcttccctcccatcttaaataaaaacagtgctggctggtcatgagcgcttctcgcttctcacacacttgttcctctgatgtgactttttctcccctgagaacttagt

SEQ ID NO: 364033 - DNA, 122 bp, Homo sapiens
atcctcggaaacaacacagagcgttatcgtgccgacattgggaagcactgcccggaggatcggaggatagaaggacgtctgcagggagcagccacggctttcatggcgctcgttcacaaggg

SEQ ID NO: 364034 - DNA, 122 bp, Homo sapiens
agagagagaggcaggaaaagttttttcagaggaaaatgcagggtttgtccttcaccctgacgtcagatcttgctttaataaaaccccccaagggctgcggaagaggcatatctggtgctcct

SEQ ID NO: 364035 - DNA, 122 bp, Homo sapiens
atgggcgcgcagctgtgacgtcacggcgtcgttggtaaggggctggcggccggggagctgcgtagctcccggccccgcggccatgcccaagcggagctgccccttcgcggacgtggccccgc

SEQ ID NO: 364036 - DNA, 122 bp, Homo sapiens
aaggaatgtactgctgacaaattctcttcagctgcacagttcatttcctatttgctactgcgttctccagggatagtgaaatgtctgactgtagcaggcaaaatattgaaggaatagaagtg

SEQ ID NO: 364037 - DNA, 122 bp, Homo sapiens
tagctgctggcagggccttcaccccctttctcccgaggcaacctttcccagaggcagcagcggccagggccctctgatgccgagcagggacagtggcatttctagacgatgagggtggggcg

SEQ ID NO: 364038 - DNA, 122 bp, Homo sapiens
cggaggtgtgttccggggagcgcacctaccaggagctgctggtcaaccagaaccccatcgcgcagctcctggcttctcgccgcctcaagcggaagctctacaaatgcattaagaaagcggtg

SEQ ID NO: 364039 - DNA, 122 bp, Homo sapiens
cacacacccatgtcctttgtctgagccgcaggtcccctgggatttggggagacgtcaatacgttgaattttgatatcccttttataaatcatttaaaaatgtcttctcagcgtgttccatat

SEQ ID NO: 364040 - DNA, 122 bp, Homo sapiens
ggtctgcgatctgttccgccccgcgcctcccgccgccgcgtttgaacccgaggaacggcgcgggcgggtctcagccgtgtttggaccaatcagcgtctccgctcctatgatagacatgggcg

SEQ ID NO: 364041 - DNA, 122 bp, Homo sapiens
agtgcccacctcatctttgggaagttgatagaaaggggtgggggcagagcctttccttagcgttgggggttccttaatgggaacccaggccaagaggaataatatgagatttcagggcaggc

SEQ ID NO: 364042 - DNA, 122 bp, Homo sapiens
actgctaggaaggtctctaaggccatctggctctgagcctgcgattccaatgcttgttagcggatttgtttgtccagctgttggtgtctcttcttcctggctttgccgctcagccctgggct

SEQ ID NO: 364043 - DNA, 122 bp, Homo sapiens
tgcctgcccgcccaacacctacaggtttgagggctggcgctgtgtggaccgtgacttctgcgccaacatcctcagcgccgagagcagcgactccgaggggtttgtgatccacgacggcgagt

SEQ ID NO: 364044 - DNA, 122 bp, Homo sapiens
ggaggctgaatcctggggtctggtcgatgtggtccaccaggcggccgggggtggctaccacgatgtcagccaagcagcggtacccatcagctctacagaccagagagcagctcgagagaagg

SEQ ID NO: 364045 - DNA, 122 bp, Homo sapiens
tggggtgtgccaattctatggtcctactggaggctggccaatgttgactgaagacaagaacgcccaaccttgcaatagaaaccctgctgtgctgttttcctggatggtctccacaagccccg

SEQ ID NO: 364046 - DNA, 122 bp, Homo sapiens
gatcccgtccaacggtggtggtggggggacatgaaatgcaatcagtcacttaatcttgtgcgggaaggaggggaaaggaaccacgaaaaagagaatcagcgaactaacaatccagtccaaag

SEQ ID NO: 364047 - DNA, 122 bp, Homo sapiens
agcccaggagttcatgcctgagcaacatagcaagaccctggctctctataaaacagaaaacgcaaactttaatattatcaacaatcaatatattataagagattgcaatttctaagtttcta

SEQ ID NO: 364048 - DNA, 122 bp, Homo sapiens
cgtgagtgtcgcctgcaggattcgcgccatggggcggggtcttgtgtggggcagggctggcggatgttggcatttcttgtgttttgcatacagaacatgaggcgtgttgactgcggtttctc

SEQ ID NO: 364049 - DNA, 122 bp, Homo sapiens
tcactgcctggggccggcggcacccgcaggccagccggccgctccaagtgcggggcctgccgagccggcgcccacccagaactcgtgctggcccataagcaccacgtgcagccccggttcca

SEQ ID NO: 364050 - DNA, 122 bp, Homo sapiens
ctgtggggttggggagggggcggtccagcaacctgagttttaacaaactccaggggattccgaagcatgttgaagtttgagaaccgctgcctatccagggctgatggatagtcatcttcaag

SEQ ID NO: 364051 - DNA, 122 bp, Homo sapiens
gggtcagggccattgtaaaggcgctcgccgccgcccgcgagtccaggcgctcctcccaggcgggctagggatcacctcatcagcccgccgcacccacacctcggagagagtggggtgcccga

SEQ ID NO: 364052 - DNA, 122 bp, Homo sapiens
ggttcctctctagaccttcctggtgccccatccaacctggtcatttccaacatcagccctcgctccgccacccttcagttccggccaggctatgacgggaaaacgtccatctccaggtggat

SEQ ID NO: 364053 - DNA, 122 bp, Homo sapiens
aacacaaactcttgagctaaggcacggccaattgggccggggtagagaggaggggtgttgcggggagttttaaccaataaagagtagagaccggtggagactgtagaacctcttccaataag

SEQ ID NO: 364054 - DNA, 122 bp, Homo sapiens
ggggctgtcagtggagggcgagtgctggttctcaggggaggcgacgcccttcggggccaacgggcctcgagccgaggcagcagtgggaacgactcatcctttttccagccctggggcgtggc

SEQ ID NO: 364055 - DNA, 122 bp, Homo sapiens
acgtgacccactgcgcacacctgcagggcgcgcccactccggcactcaaccggctgggcgcgccagatccccagtgccgcagccaagggccacgtttccagcccaaggccagcaggaccggg

SEQ ID NO: 364056 - DNA, 122 bp, Homo sapiens
ggcgccaaaggatatcgtatgttcaggtccaaacgctcggggctggtgcggcgactttggcgaagtcgtgtggtccccgaccgggaggaaggcggcagcggcggcggcggtggcggcgacga

SEQ ID NO: 364057 - DNA, 122 bp, Homo sapiens
atcgggcgcgcggcgtccttaagagctccctgaaaccccgcccccttcctgctctgggggcgtggtatggggcaaggaccccgccactgagcttgctattggctaagagagcagggttggcc

SEQ ID NO: 364058 - DNA, 122 bp, Homo sapiens
caaagaagttctggtgctttaagtgttcctcgctcggctcagagactcggcttcgagccgcgactcaagacagcacctgggggtatttgttttgcctaagcctgctgcacttccacggccat

SEQ ID NO: 364059 - DNA, 122 bp, Homo sapiens
aaaaataatggcagctaaccagagctgtggcatacagctatgcagactgtgcactgtacacgacagggggtgacacagcatggcagccctgtggctaacactgagtaccctatcacatgcca

SEQ ID NO: 364060 - DNA, 122 bp, Homo sapiens
gctcctctggctgggcccacccgcagtggtatccttctgggggcccttaggggagcctgccgggggtgcagatcctgccgggggtgcagagcctgctgggggtgcagatgatttctgggtcc

SEQ ID NO: 364061 - DNA, 122 bp, Homo sapiens
agctggtggtggctccagcaggtgtgacgttgaaagaggcaaaagagatcctaagtgtagcgagaaagggaagctgcctatcgtcaatgatcgcgattaactggtggccatcatcacccact

SEQ ID NO: 364062 - DNA, 122 bp, Homo sapiens
aaagaaaacggccttacggagaacctaaagccagatcgccaagtggtgcggccggggccgcgtcgtagcggaggcggcgcgggggcgcgggccgggccgggccgggcgggcgcgggggcctg

SEQ ID NO: 364063 - DNA, 122 bp, Homo sapiens
ttcaaagtccagtccaagcctgtttcttcatgcccaatgtaaaccacaaacttggatccacgtctgtacatttagactctgcttccacccggacttaccaatcccacaccctcctgacttga

SEQ ID NO: 364064 - DNA, 122 bp, Homo sapiens
gagaagcgtgcagcaggccgggctgcatgaagccccgagagccacacagccaagaggaggcgaggcgagcctggcgcttcaggcgctgcccggggcttggctgtggggctcccaggcctcag

SEQ ID NO: 364065 - DNA, 122 bp, Homo sapiens
agaaccactgggcaacagggtgggcaaggccatcaccatggcgagcactgagggttatttcgtgctaacttgtgaacctggggcaaagcatccccatgtagcccagtgaatgtgatttggta

SEQ ID NO: 364066 - DNA, 122 bp, Homo sapiens
ctgcctgcctgcctggcgccatgcaagagaaggtgccaggggacgcggagcgacgagaggcgcgcggtcccggacagctccgtctctggcgttggcgctgcagccgtgacggaggactacgg

SEQ ID NO: 364067 - DNA, 122 bp, Homo sapiens
cttccgagaggacttaatattactattactccataacaaagagggcgccacagaaagtcacgccacgccgcccttgctggcagcccttcgggccgtgggcaggatgcccggatgtcacgtac

SEQ ID NO: 364068 - DNA, 122 bp, Homo sapiens
ggcctcaagggctcccagggcaaacctaattccccccaaaacgtgaagtcggggaagctgcggctacacattccacaaagtgctggcacttacacccacaacccggaaggctgtggaccgat

SEQ ID NO: 364069 - DNA, 122 bp, Homo sapiens
catccagggaagccggctgcatctcaaccttccagaagtagactcttttccaccccaccccgccaaggtgtagcctctgtagcctcctttgattgcaagtaatgcagtctccctttctatcc

SEQ ID NO: 364070 - DNA, 122 bp, Homo sapiens
ttgtccgtaaccttgtggagaagaccccggcgctggtgaacggtgagcgcgatgtgagaccgccgaggcgggcacacgggcggcagggaggcctgcgatggcctgagaggaagaagcgggct

SEQ ID NO: 364071 - DNA, 122 bp, Homo sapiens
ctggataaagggaagcttagatttattgagcgcctactgtgtgccaggcagtgtgcaaggcgctttacatacattatcgcattaaatcctcacaacaaccctgcgaggtaggtgtttataaa

SEQ ID NO: 364072 - DNA, 122 bp, Homo sapiens
ccgcctcccttctcttaagagcccacaggttggacctccaggttcttccctgggtgctcccggaaggacgctgcttcgggctcctcccgggggaactccattctaggcgcccggctcccggc

SEQ ID NO: 364073 - DNA, 122 bp, Homo sapiens
ttacctttcagccacaacaactcaacagtgttgagtgcctttcattcaaatacatataagcgagatagtcctgtttctgcatgacaaatggtagcaaaatctcagttttcttcttgctcttt

SEQ ID NO: 364074 - DNA, 122 bp, Homo sapiens
cccgcggcctccgcctccaggagctcccgccttaggcgtagagatgcaaggctgaccaatcgttgtcactcttgctcccacgccataccatcagctcttcccattggtcaatagctgacgtc

SEQ ID NO: 364075 - DNA, 122 bp, Homo sapiens
ctcttttgttctggaacgggccgagccccaggaagtggagctgcggagctgaggcctcaccgtgtcttggcccaccctgctcagctgataggaaggtgtgtcacctctttcctaatcgggga

SEQ ID NO: 364076 - DNA, 122 bp, Homo sapiens
cgatcggtagcgagagtggagagcagaccagagagccctaagcagccccaccgcctccgccggcctatttaccatcacaacccaggaggagccgcagctgccgcagcccggccccagtcacc

SEQ ID NO: 364077 - DNA, 122 bp, Homo sapiens
aaaggagagggaaaaactggttaaaaaccccacctttcatcttcagagttgcttaagtcacgagttcagccagagaatgtttgcttggaactgacactggagtgttcaactagacagactta

SEQ ID NO: 364078 - DNA, 122 bp, Homo sapiens
gggggggaggtgcggtgaccacgtgacctccgctgagctttcgccagtgcctgcggccctcggcggcctagtacacacgcacctgagtgagtggcaccagaggaccctctccatgtttaggg

SEQ ID NO: 364079 - DNA, 122 bp, Homo sapiens
attcgttttctcgcagaaggcagagaaggccgtggaataacagggccgggttctcactggcgggactgttcacctctgcaatctgccccttagtgcctcggctgattcttggtctttggaga

SEQ ID NO: 364080 - DNA, 122 bp, Homo sapiens
ttactatgtaccaggcacagggctaagagctttacatgaaataatcatttaaccctcattcgatcatttaatatctaataaggtagctagatatagacaaggaaatgtgttagtaacttgcc

SEQ ID NO: 364081 - DNA, 122 bp, Homo sapiens
agagcacagcatcgtcgggaccagactcgtctcaggccagttgcagccttctcagccaaacgccgaccaaggtacagcttcagtttgctactgggttgtgcattcagctgaatttcatgggg

SEQ ID NO: 364082 - DNA, 122 bp, Homo sapiens
acggcagggctgagttggggcgtcgatctccttggcaatgagggcccgggaagtggctctcgggcgggagttgagaacgcagggagttgcctagcaacagcgtcctaggctgaggatgggcc

SEQ ID NO: 364083 - DNA, 122 bp, Homo sapiens
aacttaagagttcacagggattagtgtatgtgaaaccatcagggaaagcttcagacaatacgtggaagagatggaagcagagctgagtttcagtctaatggaaagcctggaaaactggagaa

SEQ ID NO: 364084 - DNA, 122 bp, Homo sapiens
gacagggttaatgatagtgaagctggtgggctgacaaatgtgggcaatctttaaatggctcgttgaaaggttggctgctgaaatggtaggcaaagtgattcatttgctaaaaaggaaaataa

SEQ ID NO: 364085 - DNA, 122 bp, Homo sapiens
atgtagacaagtatttttctggggagagggtctggagcttacataaggcttaaagaggaacgtaaccccagatgaggttaagcatcttcaaattagcttctctgagcttcaatttctttggc

SEQ ID NO: 364086 - DNA, 122 bp, Homo sapiens
gaaggtgcacgaggaagatgaagctgggatcgagcagggcagggcctgggagaggaagcgcgggactcctgcctggcgtccacgagctgcccatgggcatccctgccccctgggggaccagt

SEQ ID NO: 364087 - DNA, 122 bp, Homo sapiens
tgggggagggcagggccggacggagtggatcgggggcggcctgagcaccaaccaccttgccgggtgtcctcagccaccgtctggaaatcggcaacaggcattgcactccggttgggggtccc

SEQ ID NO: 364088 - DNA, 122 bp, Homo sapiens
ggaagagttttcgcctctccccagctctgaaagcgccgcgctgtctcgtcaactgggtgccggaccccgactggcctagaaaggtctttcaggcagcggtgccctaagccgagtgaaagacc

SEQ ID NO: 364089 - DNA, 122 bp, Homo sapiens
cttggggcattctctcgaggctgctgggtgtcctggcaggcacgtcctgtggggtcagcacgccggctgcagcgcagggtgggcctgagatcgggtgccgggccccccatctccacctgtct

SEQ ID NO: 364090 - DNA, 122 bp, Homo sapiens
ggtgcccccgccaggcattgcaggcttagtcgtggctactgttctcctgtgccgctgcatcgctctctcccgggaaagaacaggtcgtgtctcctcctagcagtgcgcgccccgcctgtgtt

SEQ ID NO: 364091 - DNA, 122 bp, Homo sapiens
aagagccgggccctgggctggggaagagggacagcatttgcggaggagcgtggaggagcacgtcctctcagggtagagctgggggcctttctccaggtcctgaaacagccgatgctcctagc

SEQ ID NO: 364092 - DNA, 122 bp, Homo sapiens
ggttgcaatgagcagagatcgcgccatcgcactccagcctggggaacaagagcgagacttcgtctcaaaaagaaaaaagaaaaaaaagtattttgaagctggtactccagtctttatggcta

SEQ ID NO: 364093 - DNA, 122 bp, Homo sapiens
ttcatctcactagggagtgccagacagtgggcgcaggtcagcgggtgcgcgcaccttgcgcgagccgaagcagggtgaggcattgcctcactcgggaagcacaaggggtcagggagttccct

SEQ ID NO: 364094 - DNA, 122 bp, Homo sapiens
caacatcgccaactgctccacaaacatgccgggcaacatcatcccgtgggtggacaataacgtcgatgtgttcggaggggcctccaagtggcccgtggagacgtgtgaggagcgtctccttg

SEQ ID NO: 364095 - DNA, 122 bp, Homo sapiens
caccctcagagcacagggtgctgccaagagcccagcggagtgcagctcgagcgccgaggtcgccaacgttccacacactgttgacgcaggacacaagttcgtcacagtggtcctccgccggc

SEQ ID NO: 364096 - DNA, 122 bp, Homo sapiens
gtagtaaatcataacaccaacttccagttctctatgtcaaaagctttctttgttctttctcgcctttgctccagaggtccctcttgcatgaaatctcttccaaactccactttcctgaactc

SEQ ID NO: 364097 - DNA, 122 bp, Homo sapiens
cctgtagtcctaggacatggctcaagagcttacatgcatgcagggccggtagtcctaggacgtggctcaggagctttcacgtgtagggccggtagtcctaggacgtggctcaggagcttaca

SEQ ID NO: 364098 - DNA, 122 bp, Homo sapiens
ccgcctcaggcccagctcctgcctgtgggcggcctctctccagacccggctctcgcctcccggcatcctctccaggcccagagctgtttccagttgctagaccatttttgtgcctgcctcgt

SEQ ID NO: 364099 - DNA, 122 bp, Homo sapiens
ggcaaggcctcccagcggcctcagtttccacagcgcacctcctgcttgggctacagacgacgctgcaaattgcagaacactctttgcagggaggagagtgtggatggagtgggagagagctc

SEQ ID NO: 364100 - DNA, 122 bp, Homo sapiens
ttgcttgtaatcttctctgggaaagaaggaacagaaagaaggatctgtgaaactgatcaacgtcttcttagtttggtgagaacttatatgtttcctttgtaaaaaggatgcagtctcacctg

SEQ ID NO: 364101 - DNA, 122 bp, Homo sapiens
cagagccacggtacaacctgcacagacactgacttcagagtgctccaggctctgtcgaaacggctactgcacccccacgggaaagtgctgctgcagtccaggctgggagggggacttctgca

SEQ ID NO: 364102 - DNA, 122 bp, Homo sapiens
tatggacttcccggaccagagaaggggggctcccgagccccgcccccggccgccccgaaccgccccgcccgtctcgaatcgcccagcccacaaagtgagccccgcccccgccacccaatttg

SEQ ID NO: 364103 - DNA, 122 bp, Homo sapiens
cttggacttccgcctcccggcctccggaaggcagtgcgcacgcgctcgctgcgactccggcgcggttgacttccgctcccactgtgctctgcgagccgaatcatggatcacactggtaagga

SEQ ID NO: 364104 - DNA, 122 bp, Homo sapiens
atgcgaactgcagctgctctcgccgccagtccgtataaaataaagttcttggagcagttgcggaggcttctgcaatggggtctggaatacggcccccctcctgcggccaatcgtggcattac

SEQ ID NO: 364105 - DNA, 122 bp, Homo sapiens
aaactgaaggctgcttcctcggtggagagtgtctcagggtgaggtggtgggactgttcgccgcttcccattttacaagctccttgtccacagccgtctgcgccagcccctcacaaaaccggt

SEQ ID NO: 364106 - DNA, 122 bp, Homo sapiens
ggatactgttagcagacctactgctataaactttcttcctttggcttccatgacacttaacgcctctgcttttttctcccccgcttctgggtgttgtttctcaccctcctttgacagttaat

SEQ ID NO: 364107 - DNA, 122 bp, Homo sapiens
tctgccttgggagagaaagagccgccaagcctggcgactattcatgtcctcagagttttccggtgggagggaggcggaagacggggtaaatctcgcacaggctttcgggcaaggtagttctg

SEQ ID NO: 364108 - DNA, 122 bp, Homo sapiens
gtccagcaggctggcccctgcccccctccaaacggctcgcagctggacagctggagacagcgttgcgtttggcaagggaagttctgggagatgatgacagtaagtgtctgaccgggacagca

SEQ ID NO: 364109 - DNA, 122 bp, Homo sapiens
ccggggagggagccagtatcgggtcctaacgcagggaagcgctccgctttctgagagggacgcgccagcggagggacagccagggcccggcctctcctgctcctgccccgccccgcccccgg

SEQ ID NO: 364110 - DNA, 122 bp, Homo sapiens
gcacagaacgacctcgccccgcccgctgggtccccaagcccgccctgcacagccgggcctcggtcacctcggtccccaattcggcgccccggctctgaatccccgcccccgcctcctgctcc

SEQ ID NO: 364111 - DNA, 122 bp, Homo sapiens
ccattggccgaggctcctagctcctctctccgcgagcaagacaggctgcgattcgccgagcgcggcgcaagtcaactgcgcttcgcgccgcagtcagcaaccaatcacaagcctccgaagaa

SEQ ID NO: 364112 - DNA, 122 bp, Homo sapiens
gtaaggttgcttctggggcttttggaaattggcaacaggtgacgtggcggatgacccgttcgcggcaaaaatggcatcgctcagaaaagaggcaataaaacgggtatttcactctcaaatgc

SEQ ID NO: 364113 - DNA, 122 bp, Homo sapiens
gcatgaaaataagagggagtccggggctccaggcgtgtagatgagaggttggacagcagccggtattgcttcaagagccaccgtcgccagccctgctcccatgctgggtccgtcccttcctg

SEQ ID NO: 364114 - DNA, 122 bp, Homo sapiens
cttgctcggcccttctgggtccacttggtagccgagggtccgagctgacctcatgctttccgcactgtcgggcagcgttgtcatcagcggtactctccgcctgggaaccctcccgcgtctct

SEQ ID NO: 364115 - DNA, 122 bp, Homo sapiens
atctcatctgtaaatgagataatgccctcttgcaaagttgatgtgagtaataaatgaagccgccagagcaatgtttgacatacagttaacttggatgaattgagtgatgctgctgttcccta

SEQ ID NO: 364116 - DNA, 122 bp, Homo sapiens
tgcgagagagccgataagcatgtacctccagaacaacctcagtcccaacatgccaggctacgaatccggtcattgcataggttttccatgaatcaggaagattcagtcctggtaaatccatt

SEQ ID NO: 364117 - DNA, 122 bp, Homo sapiens
cccttcctttcactaggagtccgggattcggagagggcgcgggaggcaggcacacgggcccgaccccactccagcgctcaccggggacgcgggcgggcggcgacgggacgcggcgggggcgc

SEQ ID NO: 364118 - DNA, 122 bp, Homo sapiens
tgtaccaatcctaggaggctatttctcagaaccccatgcttcttatcaagatggttcccacgctgtcttccctttccctcatcactgcctcctccaggtcaaagaatatccccagggcaagt

SEQ ID NO: 364119 - DNA, 122 bp, Homo sapiens
ctacagcggcaagagttcttgacacttgccggctgccaagcctgtttcctcccggtctaacgttctgtggttgtctgaatctccagctgcccctcaaaaccttcaatcagattagcgccgtg

SEQ ID NO: 364120 - DNA, 122 bp, Homo sapiens
caagcggaggagccggaaggacaccccgcgaggcttcggggcgcgcttttagggaggcgccgcctccagctttgtgccagaaagtgggggttgcggctcaggcttgaatccaagaaaggctc

SEQ ID NO: 364121 - DNA, 122 bp, Homo sapiens
agcgaacgaaaaacaggtttttagggggcttatactcacaaaattgtcttttttctcccacgaggcattccctgttgaccatcatctcgcctcggttgtcaccgctcaggccttagtgtttg

SEQ ID NO: 364122 - DNA, 122 bp, Homo sapiens
cctgctggcggtcgtggtgctgctcgcgctgccggtggcctggggtgaaacgctggggggcgtggggaggcgcccgggctgacgaggcacccagggccccgcagagaactcgcgtgccgcgc

SEQ ID NO: 364123 - DNA, 122 bp, Homo sapiens
tctcggtcggacgctggttaggtgtccctctctctgcctggccacctcaaggtggggattcggtacccaaccctacctggcaggaaacctggttatccatgtccctctccgaccctcccccg

SEQ ID NO: 364124 - DNA, 122 bp, Homo sapiens
ttgggcagagtccgggttcctctccggcgcccggcccgtctccctatctccttgggagtgcgcagcctacacgcaccagtttctctttagaagaaggacggggagggatttgggagggggct

SEQ ID NO: 364125 - DNA, 122 bp, Homo sapiens
tgtttccccgtgatcccagactcctcgcccgctgtgggacggaactacagggcaaaccggcgccatcacctgtctccacgctccctgaaggctgctcgtctctcctaaggtctttggccaca

SEQ ID NO: 364126 - DNA, 122 bp, Homo sapiens
gggtgggtgcggttgcggtgtctctaggaaatgattcccccaggaacgcgaagtaggactcgttttagggggacacccacccccctcagctttaccggtcctcttcactactttgcccagat

SEQ ID NO: 364127 - DNA, 122 bp, Homo sapiens
tcctcagcccttgggtggtcaatgggaactgggtgccctggagcagggggcggcccttgacggggaggctggggccgcgcaggagcccactggggccggcggggagtggttgaggagggaag

SEQ ID NO: 364128 - DNA, 122 bp, Homo sapiens
agcagacgggggagggagaggcttttacgcaatcctccaaggagcctcgggtttcaatgccgggtgggccgggggcggtcggcctgggcttcccccggagcgcccgggagagccagattcca

SEQ ID NO: 364129 - DNA, 122 bp, Homo sapiens
tgcaggaattttccgcgagagacacaggcaccttgctccaaagccggaagatttacagcacgcctcggatagatcaaagggcttctcggatgggagaagtctccaggggaggctcccagcat

SEQ ID NO: 364130 - DNA, 122 bp, Homo sapiens
atccttagagaaagttttgacagtgtgacgccagtgtcgcctctaaccacgtacaaaacgcgccatgcattgggtagctattacagtgcacatttttgtgcaggaagctaccccaccagcgc

SEQ ID NO: 364131 - DNA, 122 bp, Homo sapiens
cgaccccggaagctccctggggacctcaccgcctcttttccaccctacctggcggctccgcggctcaaccacttgccaaactaggaggattaagtcggtctcgtccgagcccaggtcccgtc

SEQ ID NO: 364132 - DNA, 122 bp, Homo sapiens
tacgtgtcatggaagcggtaccctgcgagcatgaagcagctgcagcagcgctccctcatgcgaaggcacaggaaaaagaaaagacagtccctaaagcaaatgactcccagcacccaggaatt

SEQ ID NO: 364133 - DNA, 122 bp, Homo sapiens
ggaggaggggaaaaaactactttttgtctcttccttcccaacccctttggcttcggccagcggactgtgaaaatatcacactacgtgaggcaggcgccgcctccccataaaaaacccagaag

SEQ ID NO: 364134 - DNA, 122 bp, Homo sapiens
gtggggtccccggctttcctttctcccagagcagctggaggagagcctcagtttctccaccgcacaccctggcctgagggtagcagccgacccagtcgggggagtgggcctcctgcgccctc

SEQ ID NO: 364135 - DNA, 122 bp, Homo sapiens
taatttttcatctagtgtacatatatgcatttaaaacaaaaattctttggtctccttatgcgtatatgcactgcggcttgtacacgtacaagctacttggtgggattatgtgaactggagtt

SEQ ID NO: 364136 - DNA, 122 bp, Homo sapiens
agccagaagctcccgtcccgctgaccgcgagccttcctcagcaccgtcccgtttgcccagcgcctcctccaacaggaggccctcaggagccctccctggagtggggacaaaaaggcggggac

SEQ ID NO: 364137 - DNA, 122 bp, Homo sapiens
ccagtctggagggtgaggggcgtctctgcccggccgccatcccgtccgggaggtggggaacgcctcttcccggccgccgtcccatctgggaggtggagagcgtctctgcccggctgcccgtc

SEQ ID NO: 364138 - DNA, 122 bp, Homo sapiens
cagcaagtgaacaggaattgtctgggtttatagagaaaggcctgtagcatctgactcctgcgtgcttggtgacagggtcagtagcacagagctgggcacagagaagtcactcacacagacgg

SEQ ID NO: 364139 - DNA, 122 bp, Homo sapiens
cccatgggcggtcactgctgcccaagcagtccctggagccgcactgaggggctgcagaggcggtcatccctgcgtacaggtatcctcctgcactatcaccttgcaaagtgtaaattccacca

SEQ ID NO: 364140 - DNA, 122 bp, Homo sapiens
gcgcagcctcgatcccacagggtccaggtgcagaggcaccgggatgcacgcaacacctttcgacgcagagctggggaaggggccaataggaatggatgctccgacagacgaagccacgtggg

SEQ ID NO: 364141 - DNA, 122 bp, Homo sapiens
cgcctgcgcgcaccgctggagggtgcattgacaccgccctggtcgcctagcctaggagaacgccgtcccggggacacctgccgtgaggtcctaccagaaagcaaatcagggtgaggaagagg

SEQ ID NO: 364142 - DNA, 122 bp, Homo sapiens
gctggagcactcaccagcgggcagggagggcggcagggcacggcggtggcggtgggtcggcgaccggcgggccgaagactggaagcccgggccgctgaggctccgcagccccctccgcgccg

SEQ ID NO: 364143 - DNA, 122 bp, Homo sapiens
ctacaaatgctcgttatccatttaccactagaagagtggcagttctgaaaatccagaccccggcccctctccagggtggggacgcccaaacaggccttcacctaagcggagccgcggcccag

SEQ ID NO: 364144 - DNA, 122 bp, Homo sapiens
gctcccagaacaaggatccagaagattggcatctggggcctgggatttaggtttctaaatcgtgggccatggggcagccttatctctgcaaaagcattgagggtagaagtcaatgatttggg

SEQ ID NO: 364145 - DNA, 122 bp, Homo sapiens
gcagcgccggcatccaaacaaaagacaggagcagagaggcctgagagcaggaggcgaattcgatctctcctcacaaacagcccaggaaattacacccggggaagccttcgcttagatcctca

SEQ ID NO: 364146 - DNA, 122 bp, Homo sapiens
ctcccaaaatgttgggattacagatgtgagccactgcggcccactatacttctgaaacaacggtacaaatgcttttctttgagacaattgccctttggtgtgcagcagaagtgtttgatttc

SEQ ID NO: 364147 - DNA, 122 bp, Homo sapiens
cacaggaccattgaacaatatggccctggcatgggcagcacccccagccaagataagactcggatccgtttatgagagcttcccaggtattacccatgtaatcctcacaacatctacgtgag

SEQ ID NO: 364148 - DNA, 122 bp, Homo sapiens
catttaatacatgagacacgcagctgaggttcagagaacttaggtgactcgccagtcacacggcaggtaatgggactcctgggcttgagaagaggcctctccaaggcctacgctggggctct

SEQ ID NO: 364149 - DNA, 122 bp, Homo sapiens
agctgagccaagaccagacctctgtgttctgagaccagaacggcactctccctctgaagccgtgtcatatatgcccttgatcctgtctctgtcacactcaagacattcctctcctattcctc

SEQ ID NO: 364150 - DNA, 122 bp, Homo sapiens
aggacttctacggcaggagcgcttgcacagaaccatccaaaagtcttcagaatcttccctcgaggaagtggccggctctgggctcggaagagacacatctggcgggagctaaagctccctag

SEQ ID NO: 364151 - DNA, 122 bp, Homo sapiens
cgggccgagcgaactgctttgcctttggccacgttgagcgcgccgaggcagccgggggcgcggggctccaggacccgtctgctcctggtgcccccagctcctcagggtccggccgggtcacc

SEQ ID NO: 364152 - DNA, 122 bp, Homo sapiens
cccggggacgcggtagcctctatcctcttgcaaatctccaaatctccgcgagccgggatgcgctcccgcaggccgtgcgggttgctgcgaggctgccgcgggaggtcagctgccccgggcat

SEQ ID NO: 364153 - DNA, 122 bp, Homo sapiens
tcatcaggggttcctgatcttactttggggacccctccttcccccactccaatgattgtccgacctgagagtcatcgaagtgtgtggattcaggaggtttgtggtcaccatttagtgatcag

SEQ ID NO: 364154 - DNA, 122 bp, Homo sapiens
ctcctttgctatagctgcctttgggctggcctatccgagctagtcctgtgtgtgcgtatgcgtagacatgcaaccctgtgttaatatgtgctcaattcaacagttgtataaacacatgtggg

SEQ ID NO: 364155 - DNA, 122 bp, Homo sapiens
gggctgtcgtcggggatgggtgggtctaggggcacaaccaccagggaccaggagctgttccgaggacaggagatggggccatgggaccaggcgacagggcctctgggtcctgaccttctctc

SEQ ID NO: 364156 - DNA, 122 bp, Homo sapiens
aagctgaggtctccccagcatagccgggtcaggggcagggtgacagggcctcccgacacacgcagcatccaagcagactgagcagagcctgcagagcgggcagcaggatgggacctctcccg

SEQ ID NO: 364157 - DNA, 122 bp, Homo sapiens
cttctctcgggctgccggtggcttgtacaaggctggaaacctgtccgctaccagactcctcgaccccgcagggccacagcgcggccagccccctgcttcttcccgggggctgcggcccctgg

SEQ ID NO: 364158 - DNA, 122 bp, Homo sapiens
gctagaggcgcctgcgatctgcagactccgtgtctgcccaccgcctacgcatggttggggcgcttgcctcccagctgggcacccctggcacatgctgatccagcagggaggacagaaagccc

SEQ ID NO: 364159 - DNA, 122 bp, Homo sapiens
tgaaaagcagcgtttccaggaagtctgaggcttcactttttccttgtgaaatttgtacctcgcaacactcttcacctccactccctccctgagtctcctgctggctggctcttggtttctcg

SEQ ID NO: 364160 - DNA, 122 bp, Homo sapiens
cccgcaatgcccttctagggcacatgctcttatcatccccattgttcagagaggtagagacgcttgcctaaggctgcacagcaaatcaaggtggaaatggaacccaagacccaaaatcaggt

SEQ ID NO: 364161 - DNA, 122 bp, Homo sapiens
caggatagggacttggggttttcttctgtatctgcactgtccagccagtatggtaactgccggccacacatgtggctgttgaacacttgaaaggtgactagtccaattgagatgtgttgtaa

SEQ ID NO: 364162 - DNA, 122 bp, Homo sapiens
gaacagaccaagatgtgtacagcactatgagcattaaaaaaccttccagaatcaataatccgtggcaacatatctctgtaaaaacaaacactgtaacttctaaataaatgtttagtcttccc

SEQ ID NO: 364163 - DNA, 122 bp, Homo sapiens
gatttatgtccttccgtaagtatccctggataactgtcttcttcccacccataggtacaccgactctgcgcccctaagtcaagggtctggcttccctctcctctacagggcaaaccagttct

SEQ ID NO: 364164 - DNA, 122 bp, Homo sapiens
ttttggtcccaaactttaagatgaggggtacttaacctgtataagaatttgtgatttgcacgtctctgttgctggagtcaaggcaatttgtagtgaaggactgagccttatcatacttgtac

SEQ ID NO: 364165 - DNA, 122 bp, Homo sapiens
ggattgacaccacgtggaagtgcctagggattattaaaccagcctgtgccaagtacttgccgacatcagtaacactgaaagaatcagaagaatagcaaaatgtacgtagtgcttaccatatg

SEQ ID NO: 364166 - DNA, 122 bp, Homo sapiens
ccgaggtcgccttctttgcgcactttggttattgatcctgctgaaccggccggagcgcagcggctgcgcttctctgggaaagaacggagtggggaggtgagtaggctaggggaacggtggag

SEQ ID NO: 364167 - DNA, 122 bp, Homo sapiens
agggatcctcttaggggcatcccaagccccccaacctctacctcccatgtctcggctgcccgctaagggggaagggcaggaggctcaccccattactcaccgtttcctctcggcctcccgag

SEQ ID NO: 364168 - DNA, 122 bp, Homo sapiens
gacccccccactgcccatcgcacctgcttgctatctctcgtcggtcaccccctacaagaccggaaaacaggtctaaaaaagccagagcgttccgcgctcaattacaatgacgctaaaatgca

SEQ ID NO: 364169 - DNA, 122 bp, Homo sapiens
ctctgggtggacagggccatctgagacactccagctggccttggatgctgtgatacaatccggtctatgtcaggacatctaatcacacccctgctccaatctcagcttccacccctggatct

SEQ ID NO: 364170 - DNA, 122 bp, Homo sapiens
tttaaacataagccagatcacgctgctgcgctgctcagaaccgtccgtggactcctacctcgtgcaatagccactgggcactagtggcctggcgattacctctctgacatcatcttctactt

SEQ ID NO: 364171 - DNA, 122 bp, Homo sapiens
tcttctgtctcccagaaaggcacaaacggctaaactaacaacgagattaagtggtacatacgtcacatttcagccaacctttacttcctctagagcattctccctcccaactgtatctcctt

SEQ ID NO: 364172 - DNA, 122 bp, Homo sapiens
tttcttctcctcccctgcgctgcaggtcactccgtgctgtcagcagtcactgctgagctgcgtggggtgctggtcagggtgaaaagtttaacaatctctggcattttccacttgctctggcc

SEQ ID NO: 364173 - DNA, 122 bp, Homo sapiens
gggagggcgaggcagcttgaaatagaccttgaccaggtcatagataaaccactgcagggccgtgagggtgccgatcatggggatgtgcgcaaagaggccgatgcgcgcaacgacgcccttcc

SEQ ID NO: 364174 - DNA, 122 bp, Homo sapiens
ttgaacaggatgggggtggggtgaacagacactgcccaaaaaatgagacgtgctaagtagcgcattctgtcctttgttaatccaggtgtgcatctactatggtagcaaaactgaggtcagag

SEQ ID NO: 364175 - DNA, 122 bp, Homo sapiens
aaaatatttttcctcagctataatcctgtgcttatccaaggacctcactgccatttgttacgggttgaaccccccgcccccgcctcccaaattcatgttgaagccctaacccctcatatttc

SEQ ID NO: 364176 - DNA, 122 bp, Homo sapiens
tgttgtggtcgggttctgaggtggtctggtctttctgaggtacagcgtagttttgtcctccgcgaagtccctcaggctcagagcacagccgtgtaattgtctgcgtctctcccgcgctcaat

SEQ ID NO: 364177 - DNA, 122 bp, Homo sapiens
ggcagaggcccccaggcagcccttggtgggccagaactcaaccaggagccacactgggggcggagggcaggctgtctgcttcccattttgcagacgagggctagtgtcaaagcctagctttg

SEQ ID NO: 364178 - DNA, 122 bp, Homo sapiens
cgcgatgctagaaggggtgtggggtaggagccctggaggctctagcaggagcagaaccgacgcggtatcctgggttgcggccgggtcccaaacctcagttcctcccctccccccacgtaacg

SEQ ID NO: 364179 - DNA, 122 bp, Homo sapiens
gagtgccggcaagggagcgcccgcagtcctgcggtacagggctggcgcagcctctgagtgcgtgtgtgaactctgccaggaagctgtgagagccagcccaggattcagtgaccctgtttccc

SEQ ID NO: 364180 - DNA, 122 bp, Homo sapiens
tctgccctggaggagagcccagagccagggtccagggtccagggagaagcagaggctgtccgatgagctcgtgagagaagcccagaggttgtcatagatgttcagctcccacccccagccct

SEQ ID NO: 364181 - DNA, 122 bp, Homo sapiens
tgcgtaccctgaatgtatgcgatgtccccaacagtgacctgctgtgtacacacagtgccacgccatggccgggatgcggacgcggtgccatcccccaccccactccctcctcagctctaccc

SEQ ID NO: 364182 - DNA, 122 bp, Homo sapiens
atcacagggggttgtgaaccacccctgcgatatttggagcaattttatcgtctcccctcacgattattaagaacgatatcgtaggagtggggggtgtacaccccctttcatatttgatatca

SEQ ID NO: 364183 - DNA, 122 bp, Homo sapiens
tggggccaggccagagtgggctgccctccagagctccttttatgacgtcagctcccggggcggggcatacccccgcccccagctcctcaccaggcaaacctgggcatatgggcctgcccctg

SEQ ID NO: 364184 - DNA, 122 bp, Homo sapiens
gggagacgctggaatctgaggtcaggcccaagctgctgctagatgagctcaaggctgaaccgtccagctaatctacagtctaatcattatagtctcttcaaagtgatattctctgggcattt

SEQ ID NO: 364185 - DNA, 122 bp, Homo sapiens
ggccagcgcaaggatctccgagttgcgagtgtgctgaggctgggactgtcactcattctccgatcagcgcgtgaacgcagctcggctgccgctggcaggaaacaattctgcaaaaataatca

SEQ ID NO: 364186 - DNA, 122 bp, Homo sapiens
gtgaaatagcagtactacattaatttcctcatcggtttcattcaaatatgacctgttacccgtagcatatgaatgctttttccttgttgcctccctttggcattactattacttagatagga

SEQ ID NO: 364187 - DNA, 122 bp, Homo sapiens
acacacacacacacacacacacacacaaaaaccaactgtctagtgtgtggctgtaaaatacgccatggaggcggagggacggtggctaacactttcgcccgccccgtgcacgcgatcgctgg

SEQ ID NO: 364188 - DNA, 122 bp, Homo sapiens
agccgcgttagtattctagagccagggcaccgtgttgcaggagccaggggcacggagcctcgcagcagataaaacatgcagacggcagaccagatgtgcatgcaggcagaccgcgtgggcca

SEQ ID NO: 364189 - DNA, 122 bp, Homo sapiens
gtaaagtggctgcctaggctggggcagcactgggtgctgaagtcctttggtagatcaccccggggctcgtgactcagttctaggctgcctcaaggatgagcctttgttgcctttgttggaag

SEQ ID NO: 364190 - DNA, 122 bp, Homo sapiens
catattttaaaatttgaaacaagattatcgatggtaaattgctaacacctctgagaaaagcggggggaattttgcctcagatataactggtggtgactgctgggtaataatttttattatac

SEQ ID NO: 364191 - DNA, 122 bp, Homo sapiens
agaagatctgatggatttggttgggcccacagaaaggcagtgtggaaatcatcacaatctcgggaagcaggataaggaaaccgaagaggcaggaacctgcagagagttgagcacagagccgg

SEQ ID NO: 364192 - DNA, 122 bp, Homo sapiens
ggctggtggaccccaggcacctgacttaaactagtattgtaacagcttcagggacaaagccgagcgtgcgtggagtcggccttggccacttcacacaattcaggttggcagattcctcttta

SEQ ID NO: 364193 - DNA, 122 bp, Homo sapiens
cgcagacacggatgcccccacgacttggggcgcagcggctggaggaggtgccctgtggaacgggggatgatagacgcagggacagcagccaggctgaggagggcccgggtgcctgtggaact

SEQ ID NO: 364194 - DNA, 122 bp, Homo sapiens
agtaactgtggaagctccccaatgactagtatcttttgatttcaaattgtatttttaaatcgttttccattttaaccaatatcataattttagataaactatgtttatttaatgttgagctt

SEQ ID NO: 364195 - DNA, 122 bp, Homo sapiens
tctctaactctcttttaatagaaacccagtctcccctcttgcctccctgatagtgaacagcgacgctatctcccgcgggccagtctcggctgtggtcgtagcactacgcaatgtctgcaaac

SEQ ID NO: 364196 - DNA, 122 bp, Homo sapiens
tccctgctggatcgaaacctgtggttatgagcccagcatctgtgttcacgaaggctgctgcgcagccgctcttgcctctgggtttggtatcggggtgatgctggctggattgcataagtggg

SEQ ID NO: 364197 - DNA, 122 bp, Homo sapiens
ttctcacccctcccaagttttcctcccgacgggaccctcagctccacctccctgccccgccgccctcccaagcagctccgatcgccgacttcattccaggtcccggccccctccccagctcc

SEQ ID NO: 364198 - DNA, 122 bp, Homo sapiens
tctaggatactgctacattttaggagattagaaatcagtggaattggcacagtctttgtccgttgagtgggttttcatgggtgttcattgtacatctttaaaatgagtgaatgactacatac

SEQ ID NO: 364199 - DNA, 122 bp, Homo sapiens
ccccccgcaggccctagcgggcagacacactgaagtcgctagacatttgaggaacacatccggggaagaagacacaggtggctggtcatggagagcccgctgggggaagagcacacagacag

SEQ ID NO: 364200 - DNA, 122 bp, Homo sapiens
aagtcagaattcatgctgtggggccttagtatctgcaatttttcaagaactctacaattccgatagtcaccctggtttggaaatgactggccaattttaatttaagctaaatgtaatccatt

SEQ ID NO: 364201 - DNA, 122 bp, Homo sapiens
cacacgacactcaatttgcagcatgtgcccaatacacaacagccagtgtgtcagcagggacgctgcccccagcagtggcttccctgcccacgggggctcttccagggcaggagcatctgatg

SEQ ID NO: 364202 - DNA, 122 bp, Homo sapiens
agcccacaggcctagcactgggtgggctcctgctagggtagttgggtgtctgatgagtgacggggtctgccccattgggccctggatggtgaccggcaggaggatggaaggcacagtccaca

SEQ ID NO: 364203 - DNA, 122 bp, Homo sapiens
tcccggagggccagacagaaactcaaagaaccggcctcaggggatctgagcaaattccaccgtcgtcaattcctggtgctccgtgaaagatgctctttccctcggggcttcggagccggagc

SEQ ID NO: 364204 - DNA, 122 bp, Homo sapiens
caaagtgcctggtaagtggtctggtattgatcagcaatgatcagtaagtactgggaagtgcgttttcagggcctgagacttgcaagctagtgacagaccgctccagcttccagtggacccgg

SEQ ID NO: 364205 - DNA, 122 bp, Homo sapiens
cagggcagagggagccaggccagcagctccaggcccgggtggaggaagtgctgcctgacacgtgtgtctgctccctgcggcacgtccacagcacctgccagcccactttgggtgaccctcct

SEQ ID NO: 364206 - DNA, 122 bp, Homo sapiens
gtttcctccccactgccttagcaactcctagagggcagagatttcatctgctctgcccaccgctatatagccagccactagaacaggccggaagcgcagaaagagctaagtaagtatgtgtt

SEQ ID NO: 364207 - DNA, 122 bp, Homo sapiens
ggtgagacggccaggacccagcagcatttctgcctttccatcttaacctgtgtcttgatacgcttcttaggttctaacccttaaggtttctcaactgattgttcagctccctcaatcctaag

SEQ ID NO: 364208 - DNA, 122 bp, Homo sapiens
agagggcagggccaagctctgtctcctcacgataatcatccccatagccataggtgtaatcgtagggcccttcaggggggtctgtgccaccctccccatattcctctgcctggaacctgtcg

SEQ ID NO: 364209 - DNA, 122 bp, Homo sapiens
tcccaaacaaggccttttgattctaccccttaaggatctctcaaattaattattttcattcgcagtgccatactggtctgggccttcattgtatgttccctgaattatcatacagctgctca

SEQ ID NO: 364210 - DNA, 122 bp, Homo sapiens
gtcactgggaactcccccacagctgtgtgcacacgggtgagtcttcaggggacaccaaaacgaccatcacaccgcgtttgctgtgctgtgagatgctcactgggagccccccacagctgtgc

SEQ ID NO: 364211 - DNA, 122 bp, Homo sapiens
gcacacttaaggactttccaaatgttggctgtttctaacttggcgctgagcgcctttggccgcctttccgatgatgccctcgggacgcgttggcaggaggaatccctgggcgcaaggcgcgg

SEQ ID NO: 364212 - DNA, 122 bp, Homo sapiens
gtggcgcgccaagtaggaggcggtacctgaggaccacgcctgcgcgcggggttacgcaagcgcgcagcctttgcgcacgcgcacgaacgcacggccgcgcagcatctgtcttgctggaagct

SEQ ID NO: 364213 - DNA, 122 bp, Homo sapiens
ttcaccatctttccctcaatctccaggagccaatgcgagactttggctccgattaagcgacggcccgagactcggggtgcgcgaggaggatcgacagagtggtgaggggacctaggagggcg

SEQ ID NO: 364214 - DNA, 122 bp, Homo sapiens
ggcgccctcttccgaatgtcctgcggccccagcctctcctcacgctcgcgcagtctccgccgcagtctcagctgcagctgcaggactgagccgtgcacccggaggagacccccggaggaggc

SEQ ID NO: 364215 - DNA, 122 bp, Homo sapiens
cctctgaggatggtactatgcaattgctccacagggaattgaaggccctcaagaagccttcgatcatcatcacccaccaggcctaggcctaggagccttgaagggaggcattaccccatggg

SEQ ID NO: 364216 - DNA, 122 bp, Homo sapiens
cactgcagcctccccacagccctgcgaccgctcccacacatgagatcctcaccctcctgccggcaccaggctcagcacgcttcgtgaagtcactcgcttcaccctttataagataagtagag

SEQ ID NO: 364217 - DNA, 122 bp, Homo sapiens
atgttcccggccaggcacgtttgcctccgtccccgccgggttttcccttggtggctgttgcgggtagcagctccgtggagttctgcatgatcagtctgcaggactgcagtgccaccccaccg

SEQ ID NO: 364218 - DNA, 122 bp, Homo sapiens
attactcattctctcactgactcacacagagcaacttcccgtcctgaaaagttcatttatcgtaagtaccctgtaaagatgtaccattttttatcttttataccatgttttactgtacgttt

SEQ ID NO: 364219 - DNA, 122 bp, Homo sapiens
ccaataataaaggctgacacgtccaaagctctaagactgtgctcctcactttgctaagcacgttcgacacttgcttcatttatttatttttatttggcaggtgagaagtaggcatcataatt

SEQ ID NO: 364220 - DNA, 122 bp, Homo sapiens
agaaaatccagcttagcaaggttagggccttaatcatattctggaatctctgtatggcctcgcagtttgcagagtgcttcaccttctaaatgaagcctggagcgccatttcagactgaatca

SEQ ID NO: 364221 - DNA, 122 bp, Homo sapiens
atggggaagtgtgctattttcctggagcacatgctgcgtgcagcctgccaaggttcatgacgtccactgctgcccactcctgctgttgttgctgatattgaatggcaaggccagaaggcatg

SEQ ID NO: 364222 - DNA, 122 bp, Homo sapiens
gtaaccgcgagaacaaagcagggtacccaacggggtgtggcgggacacctgggcgcacgccgccagcgcccgggagagcgaaggcggggagagaggaaccacgctgaggcgtggcaggatgg

SEQ ID NO: 364223 - DNA, 122 bp, Homo sapiens
cctccagtcacggccgacccgggtctgcaactggtgcacaagcctcctgaagcgaggctgcgcgcgtcctgcacggtcccgccccaaaggcacgcagacacgccccctttcctggtcattcc

SEQ ID NO: 364224 - DNA, 122 bp, Homo sapiens
caacttgcctttgttcccggacacttggggtgttgtttactttctcctgcggccagcggccgaccgggcgctgctggctacccggggaggggctgagggctgcggcaccgacaccccggggg

SEQ ID NO: 364225 - DNA, 122 bp, Homo sapiens
ccaccctggctttgcatctgcccttcgttcagcctggaagcccttccctcttgcctctctcgtgggaaagaaggaacctattcacccttcagctgcagcttaaatatcagaccaagacgatc

SEQ ID NO: 364226 - DNA, 122 bp, Homo sapiens
cttcaaaaccagtctgcagaatttcctcatttacatcggaaaaatgaatatcccttaaggcggagctccgcctaggtacatttggtgcggaacttgccccaagcagcaagtcgtggggaaat

SEQ ID NO: 364227 - DNA, 122 bp, Homo sapiens
aagccatctttaatacttaaggtccacgcttctcatacagtactagcatttaatggatctcgaagacaaggaaaatgaagttaatgccctggatggtaaaccctactttcatttacatactg

SEQ ID NO: 364228 - DNA, 122 bp, Homo sapiens
aacagtcgcccttccccacccgcctgctcggcttggcggggagcgggatgtcgctgggggcgatgccaggcgggccgcctctgatagcctctaggctctggcgcgcttccccgcccctcccg

SEQ ID NO: 364229 - DNA, 122 bp, Homo sapiens
ttgcagttctctttttggagaggtccttctctctacagccatatgctggtagataatgcacggtagctgatcagtgctagaaaatacaggagatccagagcatattactcccttgaacgtat

SEQ ID NO: 364230 - DNA, 122 bp, Homo sapiens
gactagtccttgcaacttcttggcgtgataatcgggaaaagttggcccgtgccaggtttccgacagggatcaaacaggtaatggcctcgcatcttcgctgttgctgctgctctgggcgcggc

SEQ ID NO: 364231 - DNA, 122 bp, Homo sapiens
tgaatgaggcagagcaccctctgaggcttaggaactcgtggggttcagtagggctctcctcggccagccctgtgcactgcccttgtctacactgctgctggtggtggtgaactagacagtgg

SEQ ID NO: 364232 - DNA, 122 bp, Homo sapiens
ctgggccgggatgtgagtgctgctgtgctgtctccaaagcccacactctttcctctgtgccgctccataaatgctacttgttcccctctgtctctgtgggaggacgttgccattcaggaggg

SEQ ID NO: 364233 - DNA, 122 bp, Homo sapiens
ttttggcactgaagcatttaaggcctcttgtggttattcagccgttttgtgtgtgtacaacgtgtttctagcagacactgagctcctgggaggcggggcgtgtggctggcatgtttttgcag

SEQ ID NO: 364234 - DNA, 122 bp, Homo sapiens
gccgccccttgctccacggcgcccagtcccatcgaccgcccaagggctgaggagtgctagcgcatggcacagcactggcaggcagctccacctgtgaccccgctgtgggatccactgggtga

SEQ ID NO: 364235 - DNA, 122 bp, Homo sapiens
ttttcacgttagaatttgctcagatttgaataaacgcagagcgaaactagagagcgttcgcgcaggttctagctaccttggtcagaaggaggggctgatgcaactttcctcccagtttctga

SEQ ID NO: 364236 - DNA, 122 bp, Homo sapiens
cgtttgtagctgtcaagtcgtagccccgctgcgcccacaggaagtgacccacccgcctgccgggtagtggcctttctgtgagccaggaccatcttaaggaaaaaaacaaaaaaagagcaaaa

SEQ ID NO: 364237 - DNA, 122 bp, Homo sapiens
actgttcctgctccctcgccaccaaaacttctcctccagtcccctcccctgcaggaccatcgcccgcagcctctgcacctgttttcttgtgtttaagggtggggtttgcccccctccccacg

SEQ ID NO: 364238 - DNA, 122 bp, Homo sapiens
tgtattcctggaaataccttggaaggttaacatgtccttccatagcctgacctccataagcggcgtgaccctggacaagtcttaacgtctctgagcctcatctgaaaagtaaggtcaacatt

SEQ ID NO: 364239 - DNA, 122 bp, Homo sapiens
ttgctgccttttgaggggcattcgggaggcaggatctgtaggaactggtgaccggtgagacgcagcacctggtgatgaaggggcggtgtgtggcctgggcggtggcagtggtggccgttcag

SEQ ID NO: 364240 - DNA, 122 bp, Homo sapiens
gaatcggctgccgccccgcaccaccaacgtctgcccgcacaacgccagtcccacagagcccgccatgtacccgcccgcctcaccgccatacacatgtgccagcccagagcctcttcctgtcc

SEQ ID NO: 364241 - DNA, 122 bp, Homo sapiens
ggtggagtgtacgggggccggggtgtgggtgacgtctgaccgggcgctgtggggagcaggcggagtgtgcgggggccggggtgtgggtgacgtctgaccgggtgctgcggggagcaggtgga

SEQ ID NO: 364242 - DNA, 122 bp, Homo sapiens
cagattgagccctacattgtgctgcacctggtcatacggagttgaatcagacctggttcccgcctcccccaaggctcatggtccttggaggacccgttgcagggtgaggtcaagagagttct

SEQ ID NO: 364243 - DNA, 122 bp, Homo sapiens
gtagggacatgtgtgttggcttgaagctgtgccttcagttctgccccaggaattcataaacgcaaatatctatgtcctttccctgtcttgtacttaagaataaggatttctggccaaaagat

SEQ ID NO: 364244 - DNA, 122 bp, Homo sapiens
ggctggcttgtgtgctccgcctgccgggaagcgctttccccctcgtggaccctacaaagacgcctctctgcaggctcccctcatgctgcgggcacacaatgcgtcctttcacccggggtggg

SEQ ID NO: 364245 - DNA, 122 bp, Homo sapiens
acagtcacaaggaagcgaccctgtattgtgcctgacctctggacaggtatataaagagcccgggctcagggggctccacacctgcacctccctctcacctgctcctctacctgctccaccct

SEQ ID NO: 364246 - DNA, 122 bp, Homo sapiens
tcaggggccccctgtgccccggattcctgccgggctgagtgggcggtgccggagggagggcgccccctggcggttcggcgcgggccggcgacggcctcggcttctttttttttttttttgag

SEQ ID NO: 364247 - DNA, 122 bp, Homo sapiens
atctgtgacgcttacgcagtgctgggaataatacagtttccaaccagccagactggaaaacgtcataactcatggggtactcggaaggatcttgccttaataatggggaaaaattagtccta

SEQ ID NO: 364248 - DNA, 122 bp, Homo sapiens
tcttctattatacaagctctagctagggaatggggatcgggaggaggacgggggaccccccgcagaccattgccctcctcaggcacatctcccagcagtctggagggttcgctcttgaattc

SEQ ID NO: 364249 - DNA, 122 bp, Homo sapiens
accctcacgcccagcagctccgagaacagccccagtggagacggaaatccctgcgggggccgccagctgccagcctgccacctgcctcccccacccgccccgggcctcggcggccacggacg

SEQ ID NO: 364250 - DNA, 122 bp, Homo sapiens
agtctgccataaggattcaatggagaaggaaggggtctcaggttacgtggatatttcttccggccatgctgggcgagctgactctccatgtcactattaactgccaccaacagtgacaagcc

SEQ ID NO: 364251 - DNA, 122 bp, Homo sapiens
gagggacacacccagctctgtaaggggccggggcgcgggcccagtacaggtctgcgcgcccgcagtctccgaacgctcacaggaccaggccccgcccgccaccccgcgccagcccccgcccg

SEQ ID NO: 364252 - DNA, 122 bp, Homo sapiens
aaacaaccaggagcactattcccggccgggtgggtccagcagccgcgggcttcgccccgccgggactcgcggccgcgcctcctctgtaccacagctcccaaggtccccccacggacacaccc

SEQ ID NO: 364253 - DNA, 122 bp, Homo sapiens
gttgctagagactggagtgagtcaggtggtggccagaagaggtggcgtcctgcacagtggcgttcgtgagggtttgggggtcgttgtgcctgggattaacctctcgatgatgaatttcttcc

SEQ ID NO: 364254 - DNA, 122 bp, Homo sapiens
agcctgtcttctcagcaacccacactagccttactgcttcccttgctgctctgctgaggacggagaagcccttggtgtgccatcacagcctcagagctcgacctttcctgcatccctaagcc

SEQ ID NO: 364255 - DNA, 122 bp, Homo sapiens
cacacctcacggacctcggtagggggaaaaaaaccacccatgctcctggacttccccttccgccggcacttgtgcgtcacttccgggaagagcgcatctcgccaaccagaattgaggagggt

SEQ ID NO: 364256 - DNA, 122 bp, Homo sapiens
tagccggcgtgtccctgagtccgcgcccggcgctctgagagggtggccgtggttaattcccggtagtgaccgccatagcgccacgtggccactgcttgacaaaggaaacttttttcaacctc

SEQ ID NO: 364257 - DNA, 122 bp, Homo sapiens
cccttttatccaagcctcgaaaacatatgcatacccaaatatatggagtgccaggaagggcgaaaccacgaggggagtctccgcgagggcatgttgcccccacgccccttggcaggaggggg

SEQ ID NO: 364258 - DNA, 122 bp, Homo sapiens
acccactcccctccccacccaggggtgcaggtcttagctgcggcacccccacccgggctccgggacctcgcctgttcaaaggcaggggcccagcagaaacctcagtctctcctggactcttc

SEQ ID NO: 364259 - DNA, 122 bp, Homo sapiens
ggcccctccctgcgccggaatgtgggcttccaggtgcggttggaaagtaagcccccatcccgaggcggggccctgctcttctgcactgtgggtatcctgctgcgtaagctgcagagcaaccc

SEQ ID NO: 364260 - DNA, 122 bp, Homo sapiens
aatagccggcacgcgcagctactaggtttgcaatcccatttcctgtttctgctcctggaccgagggggcggggccgggtgcctccgaggggcggggctggtgcaactccaaaatggctgccg

SEQ ID NO: 364261 - DNA, 122 bp, Homo sapiens
ctttagatgagaacttaacctgcttacagcagttttactctaattttaacagcacattctcggttctgttttgtaggctacaaatgcaataactccctatcttctctgtgtgtacatgttca

SEQ ID NO: 364262 - DNA, 122 bp, Homo sapiens
cgagtattcttcttcccttggcctcgctctctgcccagccccgggctccttttctccacacgtggctgtcaagcgccttctgtatgccccacactcctgggagcttgggctacatcgatgaa

SEQ ID NO: 364263 - DNA, 122 bp, Homo sapiens
gctgggtcagatgtcctaactacttactcctacagggccctgtgtcttgcccaccagagccgtggggcactgggctgccagccctgaatcctgtgagtgagggcccagtgtctgctggggaa

SEQ ID NO: 364264 - DNA, 122 bp, Homo sapiens
ccctccagcccactgtgtgtctctggaagcggcacctttccccggggcgggggagccccgcgccttcagggggtgggcgcagttcagagaccccaaatttgagaggcccccttctctgcgtc

SEQ ID NO: 364265 - DNA, 122 bp, Homo sapiens
gacaccagaggggaaaagcctcacagagcaggaacaccccccgccgccaggtgctgggtgcgccggctcggtcactagcctgccgcttccccttcttccccggtggtcagagcagccccgga

SEQ ID NO: 364266 - DNA, 122 bp, Homo sapiens
taaggtgaccgtcagggaagatgctgccatggccgcagcctcggccggaaacggaaacgacgcgaaccgcgtgcgtaacgcacgggcccggcggggaacaccggtccgctgtaacaccggcc

SEQ ID NO: 364267 - DNA, 122 bp, Homo sapiens
tccttctctccctccctccctccctctcccccttctttcatttctatttggttaacccctcggggagactgaaatgctttgaccattactcacctgtctgcagactctgatcttacaattgg

SEQ ID NO: 364268 - DNA, 122 bp, Homo sapiens
gggcttgaccgggactggcccctcaccgcggaaggcgtggccggaatgctcggcccactccgtctttggcttgtgggctctgcctcgtgcaccgcgtgctgcagcccacagccggccgccgc

SEQ ID NO: 364269 - DNA, 122 bp, Homo sapiens
tgtgaaacaaactaatttatcctgacagcaggaaagatttctgggcctaaggctctgtctcgttgacccaggtcatgctattcaggtggtccatctcttggttccaagcaagactgctgctg

SEQ ID NO: 364270 - DNA, 122 bp, Homo sapiens
ccatgaatatgaatctgggttactgcttatgaaaatgacaactactcttacattttctgtcgttcatcaagggctgaggcagctccgctttacaggcagcaggatttctttgtgcttgaaag

SEQ ID NO: 364271 - DNA, 122 bp, Homo sapiens
gacctcgtgatcctcccgcctcagcctcccaaagtgctgggattacaggtgtgagccacccggccattgcagtcactttctagagagctaaactttggtgaaagtctggatttaggaagact

SEQ ID NO: 364272 - DNA, 122 bp, Homo sapiens
gggggatcaaatatcagagaggcaaggggatcttctggatgacagtccatggagatcccacgacagatggacagcaggccggccgtgcacccaggccaggccaggccagagcagggacgatg

SEQ ID NO: 364273 - DNA, 122 bp, Homo sapiens
ccaggaaggagggaagctcagggtcaagtggacgctacaggccttgcctgcgggatcccacgacagctcccgcggcccccaggcctcaccttgaacccgataccgcccttcttacagcacag

SEQ ID NO: 364274 - DNA, 122 bp, Homo sapiens
actcctctcgtttccttattcctggaatgcgctcacatgcggccacgtagggacctgggacgctcagccctttctgcgcccttgccctctccggggcggcatctggcaaggagggcggccca

SEQ ID NO: 364275 - DNA, 122 bp, Homo sapiens
ctccccgagcccggcctcgcccccgactcctccccaatcccgcggcaaagcttcgcggaccggcctccacactgacggtctcccaacctggtcctcagctccggcggaacgggcccgctcgg

SEQ ID NO: 364276 - DNA, 122 bp, Homo sapiens
acttggtgcggggagggttgacggggcaaccccaggggagcttaattttcatttcactatcgtgggtaacgatgggcaatttaaaaagtagagtattaaaatgttaaaaataaactttaaaa

SEQ ID NO: 364277 - DNA, 122 bp, Homo sapiens
gtccaatacttcctgagcctgccccttgacagtgagccctttcctggcagtatgcaggggcgattctagtaaccaggctgggttctgagaagctggggcagggcagtacagggacactgttg

SEQ ID NO: 364278 - DNA, 122 bp, Homo sapiens
gctttcccctctctccatgcttcccactccccctactgaccccctcactccttcgtcccccgcctgcccacagggacacccccatggatagggagagggctgtgtcctagctcctgccagag

SEQ ID NO: 364279 - DNA, 122 bp, Homo sapiens
ccaacccctctatgtagaaactaaatgtcatctcctctcatcttctcaaggacatcactacggtaatttttttcctatttcaagaaattttccctcattcctaaatcattcttcctataaat

SEQ ID NO: 364280 - DNA, 122 bp, Homo sapiens
ccctgtctgtgtcccttagacgacctcgtggagaagacgccgtgtgcatggaactcctcccgtgtctgcgaatgtcgacccggcatgttctgttccacgtctgccgtcaactcctgtgcccg

SEQ ID NO: 364281 - DNA, 122 bp, Homo sapiens
cacctctgtaaaagcatgtgccgcctggtgctgcctggcgagggcgctgtggtacagcctcgggtcattttgagggcgcagttttgttgcgcacagggcagcagcccctgctttatcagctg

SEQ ID NO: 364282 - DNA, 122 bp, Homo sapiens
cgaaggcatattcagaatggcaaggaaggggggccagccgtgagacagcaggggaaggctcgctgctgggttccaaagatgcttggcagaaaaaattccaggctggaaaagcaagcgagaga

SEQ ID NO: 364283 - DNA, 122 bp, Homo sapiens
caggcaataaacaaacgtgtatcatatgtcaggggtgataagtgctaggaagaaaatcaacgcagagtaagggaaggcctttattatgaaatgtcatttaggtaaaacctggcacacggggc

SEQ ID NO: 364284 - DNA, 122 bp, Homo sapiens
ttcatggtttacatgccttccattttgtactaacagtgtacaaagctttggagttgtttccgtcgcacagccccctggtcttctgacagcctcaccacagtgtcccagtcccttctgtccac

SEQ ID NO: 364285 - DNA, 122 bp, Homo sapiens
atgtgatctttcaactttcaagtgtattttgtattttgcgttgtaagcagtggataataacgttagtagcctgtggtcgtttagaaaggcctttatgcacattatttcattattaccctgtg

SEQ ID NO: 364286 - DNA, 122 bp, Homo sapiens
cggggagcgggcagggagcagcgggcaggcctcgaggggcctgggccagagtgggcctcacggcgcgccttgcacgcgaacccacggccgccggctgcccctcccccggcccccggcccgct

SEQ ID NO: 364287 - DNA, 122 bp, Homo sapiens
agcagctgtggagcacttgtaaactctgaaaccctttacaaagctcaaggatgttgattacgcttgctgccatcccagacctcgcactgttctttaataccaacaattcaaactttacagca

SEQ ID NO: 364288 - DNA, 122 bp, Homo sapiens
cggcgccggctggaggagcaacgtcttaaagccgagcaacgccgtgcagccctggaggaacggcagcggcagaagctcgagaaaaacaaggtgcgggatgggtctccgtgaatccatgtaca

SEQ ID NO: 364289 - DNA, 122 bp, Homo sapiens
atcgccgatccgcacaaagccagagggatgcgcagctcctggagccgagaacccgtagggcgcacacgcttccccgcactcgcttagagccacacaccccacgtaatttcattaacgtttaa

SEQ ID NO: 364290 - DNA, 122 bp, Homo sapiens
ccttctgccgctcacctgatgttaaaaatgtggtgcttagtgaagcaggactcccacccccgagtcagagaaccaggattggaatcacagctctgccactgattggcaagtgactccaggta

SEQ ID NO: 364291 - DNA, 122 bp, Homo sapiens
tttggaccgggtcgagggtctggatggggtcacgggtctggacggggtcgcaggtctggacggggtcgcaggtctggatggggtcgcacagctttggaccgggtcgcgggtctggacggggt

SEQ ID NO: 364292 - DNA, 122 bp, Homo sapiens
tcctttccagtgctgtggtcctctccaatgtctctgcgacatggggcacagaatttttcccgaagtcccaatagatattgggccatctacctagacattccacacagctcttcctctcttga

SEQ ID NO: 364293 - DNA, 122 bp, Homo sapiens
gttgccgcccgtccggcccgagagctgggaaccctctagagcagcgggacgagccaggatcgcaaaatgcagtgcttgcccgttgagtcatcagctcacccggctgggcctgggccgggccg

SEQ ID NO: 364294 - DNA, 122 bp, Homo sapiens
atggaacgggtttatcttctcctcttctttacccagccattgtccacacttcccccgacccgatgggtggtcgaggcttgtagaactgatcttaagacagggaaatcccttgcgtctccatt

SEQ ID NO: 364295 - DNA, 122 bp, Homo sapiens
ctttttcttcaggtatcgggctttggtgcatttcacaaaggctcgaatcacggttctgaccgccaacctgtagcagcgatttttccttccccggaagtgctgggacagaaaacgagaaacca

SEQ ID NO: 364296 - DNA, 122 bp, Homo sapiens
acgattctgagaaataatcctgacaccccctcactggattaaaccagttccccttgtcctcggagaccctaaaagctaagaaaaagttcactgagatactggccatgcagaatggaagatgg

SEQ ID NO: 364297 - DNA, 122 bp, Homo sapiens
tgcattgcggtcgtgaaggtcatgtcggggatgacttgcatgaggctgggtggcaggggccgggaactgcacatacctagtgcatgtcagagtttaccttgtcctggaagatgtacaggttg

SEQ ID NO: 364298 - DNA, 122 bp, Homo sapiens
ctttgtgagtaccttgtggtgctcctttcttttttttattgagatggattctcgcactgtcgcctgggctggagtgcagtggcacaatctcggctcactgcaacttctgcctcctgggtcca

SEQ ID NO: 364299 - DNA, 122 bp, Homo sapiens
gcctcctcgtcctcaatggggcagcaagtgcggcttggacctcggtggcctgacagctgccgctcgcgcccgccgctgccgccgcgcagcgtctcgagcccgcgcccgcgcccgccagggga

SEQ ID NO: 364300 - DNA, 122 bp, Homo sapiens
ctttttcccgcccagactccgcgtcttctgaaagagggcgtggtccgcaggaagttctcacgttacggaaagtaaagtgtttccggctccggtgtcatggccggctcctaccctgaaggtgc

SEQ ID NO: 364301 - DNA, 122 bp, Homo sapiens
tttatctgtgaaactgctagtaaaacataaacctgaaaggcattactcccagctctaaggcgacatcgctgtcattaaagaaaacctgtgcctgagttggctgagtaccttcttgcagagtc

SEQ ID NO: 364302 - DNA, 122 bp, Homo sapiens
tgtgtaggcacccagaggtggtatcgcccatgcaacatctgggacccactgataccaaagcgttattgctacttatcttgaattcagattcaattgggcatcccatattttatctggcaacc

SEQ ID NO: 364303 - DNA, 122 bp, Homo sapiens
ttcagctgagccagggggcctaggggctcctccggcggctagctctgcactgcaggagcgcgggcgcggcgccccagccagcgcgcagggcccgggccccgccgggggcgcttcctcgccgc

SEQ ID NO: 364304 - DNA, 122 bp, Homo sapiens
ggcatggagacattaaagtgacagtgctactcaatgggcacttgatgcaggatgagttggcgaagcagatttcttcacactggagtcattcacatcatgccatctcttcgcattcaagcagc

SEQ ID NO: 364305 - DNA, 122 bp, Homo sapiens
ccattatcctgtgttctggagcagatcctacacatccaaaatggtcctgaataaaatgtgcgttatacattaggctgtgaggtgggggatggggagagtccaggacacatccccacatcatt

SEQ ID NO: 364306 - DNA, 122 bp, Homo sapiens
agctactttgctgactggctccccaacaacttaaaaactgccgtctgtgacatcccaccccgggagctaaaaatgtcagtcaccttcattgggaataatacggccatccaggaactcttcaa

SEQ ID NO: 364307 - DNA, 122 bp, Homo sapiens
aggctgtgcccacaccagacccccccatttgggttttatcatgctcagggtggctggccccgccttcaggagtggagaggtttagagtccagctcaagcaaggcagagaagtctcggtgggg

SEQ ID NO: 364308 - DNA, 122 bp, Homo sapiens
gcatgctcgcggctggaagccccagtttgcgtggcccttcgggttattccgctcaagagccgccgcgtcgccccatctcggcgcgaatctgaaagcgctttcgggggagaagatgttggggg

SEQ ID NO: 364309 - DNA, 122 bp, Homo sapiens
cacccgcgaccacccgaacctggaaaacaggagtcccaagctgggcgctgaatcctgcgacgcgaacccatcacgcgcagccgggacacccacattcctatgcgcagcggaggaatcgagcc

SEQ ID NO: 364310 - DNA, 122 bp, Homo sapiens
accggttgctgggaggccggcagctgaggttccttgggaaggaagtcacgtggctgcggccgcgcttccctccgagcccccgcctcttctcctgctccccgagccccgccctgctgagctgc

SEQ ID NO: 364311 - DNA, 122 bp, Homo sapiens
acgcagctgggagtcccggggcacagccgggctctctccaggctccccatccagcagctgcgcacccccccaaacacacgccgggctccccgcacccggaagctgcccacaaccggcaggac

SEQ ID NO: 364312 - DNA, 122 bp, Homo sapiens
gaagcggcagccgcccactccccaggggagactcggaggccgcgctggaactttgagccccgcccacgcactacatctcccaacagcgcctgcggcggcgcggctctgtacgcaatacaact

SEQ ID NO: 364313 - DNA, 122 bp, Homo sapiens
tgcacagcagcgtggtcatgtgctgctcctcctccgattccatggcttgggcctcctggccgccccggccagcgcacggcgaagctacgggtcccgggcctggcgggccgcgcggcgcaccc

SEQ ID NO: 364314 - DNA, 122 bp, Homo sapiens
cgcgcggctcagctgcctccgtaggccatggagccgagcagatccgggtcttcgggtggccgcaatgtcccaagtggacgacacccacctagtcccgaggacaaccgacaaagtccttaatg

SEQ ID NO: 364315 - DNA, 122 bp, Homo sapiens
gccttcagccctcagtacccacttctgccaacactgcccctgctgtgccccagtgactcccgtgtttgcaagtgtgtccgtactccaagccctaagcagcacaggaggtgagctgtggggag

SEQ ID NO: 364316 - DNA, 122 bp, Homo sapiens
gccccgcgcccccaccccttgccccaggctggggccagctcaccatggagtgcagagtttcgggggcccccttcacggccgcgatgtagcagaggtcggtggagcccagcttctcatacgag

SEQ ID NO: 364317 - DNA, 122 bp, Homo sapiens
ggagatgagaagagacaccttgggggtcaggcaagccctgggaaagcgtccggagttgggcggctgtaggctggaggcataacttggatttggagaaagagtgccctccgtgtaggggactg

SEQ ID NO: 364318 - DNA, 122 bp, Homo sapiens
ggcaggcggtcaggaaggagtcccagaaagccccgggagtcaggcggggtttctgcttgacggagcccggtgtttcccctataaaagctgatgcttggtcttaggggctggggctccatttg

SEQ ID NO: 364319 - DNA, 122 bp, Homo sapiens
gttttaacgacaaatgacagcagcatgaatctgccgctttaccccacagcagggcgcgtgcgtgaaacaaaaaattactcaaaaggatcgcctgcagaaaaacccacagccaccaccactta

SEQ ID NO: 364320 - DNA, 122 bp, Homo sapiens
cttgagagccatgatttgtgcctgtttggatttgacccaagcgcctagaatagcgcctgacgaaaagtagatgctcaaccaacagttaggggctgaataaatctagagaccagaacctctta

SEQ ID NO: 364321 - DNA, 122 bp, Homo sapiens
gtgccgcgctgcgagccgactgtgcgcgctccgagagtcgcccgaacaatgcgagcggggcgctgagcgcgcccggcctatgggcgttacgtcactgttctgccttataaggcgctccgcgt

SEQ ID NO: 364322 - DNA, 122 bp, Homo sapiens
agaacatcacacacacacaaaaatccaattacttacaatgatttttttgagacggaatctcgctctgtcgcccaggctggagtgcagtggcgcaatctcggctcactgcagcctccgccact

SEQ ID NO: 364323 - DNA, 122 bp, Homo sapiens
gacagggaggggagaagggcgcagcgacacgggcctgagaggcgagtggtcagtgcagttcggaagggagcgtggggtcttgagggacgggaaagaggggtacataggcttagtgatagagc

SEQ ID NO: 364324 - DNA, 122 bp, Homo sapiens
gcaagtggggctggccgctatctcgctgcacccggccgcgtcccgggctccgtgcgccctcgccccagctggtttggagttcaaccctcggctccgccgccggctccttgcgccttcggagt

SEQ ID NO: 364325 - DNA, 122 bp, Homo sapiens
gcggcgccgctccaggcagctggctgcatgcgagacccggcggggagaggttctcccggccgcgctagcgactgggcagggaattgagctcccaatccttttctcctgctttctgctccagc

SEQ ID NO: 364326 - DNA, 122 bp, Homo sapiens
gcatgccagggatgaggcagatgtggggccccccaaccgggagaaggtgcctggggttaccgcttcacggaggactccttgccagggggtccccagggtcctactgccggggtctggctcag

SEQ ID NO: 364327 - DNA, 122 bp, Homo sapiens
gggtgatgagggttgtgctatgctggctacctggtggtaattgccaaggagagagcagcacgtagatcctccctgtcatcaggcagagctcttcagtgaggtgggctcagggagggctctgt

SEQ ID NO: 364328 - DNA, 122 bp, Homo sapiens
taatcttttcctttctctttaaaaaaacataccacatgaaaacatttgttctgaggaaaacgtgacacatatatagaaaataacatgttctttgtaaagtgattaagcaaaagttcattgtg

SEQ ID NO: 364329 - DNA, 122 bp, Homo sapiens
ccccgcaagcgtgggtgaacagtcctccctggctactgtgggacgctgggcaggcgacttcgcctctctaggcctcggttttcctgcttgtcaaatggggctgatgccggcgtgggcttctt

SEQ ID NO: 364330 - DNA, 122 bp, Homo sapiens
gtccgggccaagcccatggccccgagtccaagtccggatgccaggtccgggccgagcccacggccctactggctactactgggaggggctgcttttgctttttggtgaccagatcttggaca

SEQ ID NO: 364331 - DNA, 122 bp, Homo sapiens
cggcgtgtccccgggccctctgatggttcccttacccttagggtggaccaaattgtgggtcgggggcccggggacaggaaggcccgggagaagggcgacaaggggccctccgacgcggaggt

SEQ ID NO: 364332 - DNA, 122 bp, Homo sapiens
acaataggaaagtctgatgccaacgttggctactctcttcattactgggttctattgactcgcctttaaccgctgagcttccactgggagttatgtgcctgtttctgacttcttcactatat

SEQ ID NO: 364333 - DNA, 122 bp, Homo sapiens
accggcccaatggcggcgcgcgggtgggcgttgctaggcgatagggtgatgggcgggcggcggggcggtcccggatgcctcgcgggccgcggcgcaagtgcgggcgttgaccccggccgcgg

SEQ ID NO: 364334 - DNA, 122 bp, Homo sapiens
gccgtggggaaatgggagggtgtgggccgagcagcgccggaggcaggtaccgaccatcgccgggtttcccagagggcagtggtacctgtgcccacatgtgcggccttttttgtaaaggaacc

SEQ ID NO: 364335 - DNA, 122 bp, Homo sapiens
ggccctggctgctaattaagcctcccaccctgtccccttcaccaactcctgtcctaatggcgatggggtaggagtagtcagaggagccaaatctcccagatcaacagagaactccagctggg

SEQ ID NO: 364336 - DNA, 122 bp, Homo sapiens
agggaaatcataacacgattagcagcttccggccagtctcacgggcgttagcctactcctcgctcctacacaaacacggcagggctcccaggccctgacattgtcctccacggccgggtgtc

SEQ ID NO: 364337 - DNA, 122 bp, Homo sapiens
atgagtgccctgtgcatgctgtcaggggtccggagcggttgtcttttatttatgtactgtcgcacttagccaagtgcgtggtgcttaataagaagcccagtaatatttgttgaatgagagtg

SEQ ID NO: 364338 - DNA, 122 bp, Homo sapiens
aggtacagttggacttactctttgatcccttttgtgcaaatgatccaagcactactttctcgggaaatttttatcctgtttcctgctttctgtttctgagcaaacctcagtacagctccaag

SEQ ID NO: 364339 - DNA, 122 bp, Homo sapiens
tgggcaacacggtgaaacctcatctctacaaaaactacaaaaatcagccaggcttcgtggcgcgagcctgtagctcgctacttttgaggctgaggtcggaggatcgcttgatcccgggaggt

SEQ ID NO: 364340 - DNA, 122 bp, Homo sapiens
ctccgcaatagaaaacgctcggagaacacgatctcccgcccagctcttttcaactccccgcggaagtgctcacaccggaacccctctgtgtccgcactttgccattggccgaggcttccgcc

SEQ ID NO: 364341 - DNA, 122 bp, Homo sapiens
agcgaggaccaggagggcgtgattgccaacatggtggccgtggctctgaagaggacgggccggacgaggcaggcagctgagagctactaccgcgccctgcgggtggctcgggacctgggcca

SEQ ID NO: 364342 - DNA, 122 bp, Homo sapiens
cgtgcagccacttcagtgaggcaatgtgtgctctcttctactatccactatcgcctccaccgccctcaatgagcagaagcaacgtgaccttagtttcaagggcaactacaaaagcaagttaa

SEQ ID NO: 364343 - DNA, 122 bp, Homo sapiens
gcccagaccctgtgcccatggagcccagtgtggttgaggtcatctgcgagcgcggctaggcgcagccgctgccatgcaccggtctgtccctgcaccccatggcacccaggatctggtctcgg

SEQ ID NO: 364344 - DNA, 122 bp, Homo sapiens
tcgccctgcacgcacttgtgagctaagctaatatgattcaatgcagaacacaacacaggtcgaggagtgaatcattctgccagggacgtgcaagtgacacagctggagggcgtgtgaagcat

SEQ ID NO: 364345 - DNA, 122 bp, Homo sapiens
gtcctcatcctcatcaccgttgctggcaatgtggtcgtctgtctggccgtgggcttgaaccgccggctccgcaacctgaccaattgtttcatcgtgtccttggctatcactgacctgctcct

SEQ ID NO: 364346 - DNA, 122 bp, Homo sapiens
gcatgtctccactcaccaccatgttgtcctgctcgtattcagttgccacgacctcaagctcgtgggaggcctgcacagccggccggccttggcggaggagatgctgcagaagagaaaagcgc

SEQ ID NO: 364347 - DNA, 122 bp, Homo sapiens
ctgcactgcgcggccgcagcggcaccatgattgtgtttgccgtgctcctgtcgttggtggcgggtgtttgagggaacgagtttagttcttggtctgttattttcagaaatggaaattggcct

SEQ ID NO: 364348 - DNA, 122 bp, Homo sapiens
ccgcggaaaggggagaagtgtgggctcctccgagtcgggggcggactgggacagcacagtcggctgagcgcagcgcccccgccctgcccgccacgcggcgaagacgcctgagcgttcgcgcc

SEQ ID NO: 364349 - DNA, 122 bp, Homo sapiens
tgagggcacttggcctttgcttgtatctgctcaggaagtcagacagtctgcagccagtggcgtgtgcagccaccccttctgttctctgaccctggaggcttgtggtccatttgttttaaagg

SEQ ID NO: 364350 - DNA, 122 bp, Homo sapiens
aaggtgaagacaaaacagcgacagtatctggggagtacaggccagcgccgctcctttttccggaaatgcctgggtcaaggaggcaaaaggggttttggggaaactgtttgttttaaaggggg

SEQ ID NO: 364351 - DNA, 122 bp, Homo sapiens
ttggagcagtggaactaagggcaaagcaaacaaacaaacagaggggctggtttactgcttcggaggcagcagctcttccacgttccagcactaacttaaaaagagcacggactaggcgaggc

SEQ ID NO: 364352 - DNA, 122 bp, Homo sapiens
tacaataatattaacagtttgttcattttcctttaatattttttggcttccatgaacactcgtagattgaacattctgcaagtaagaattataatagtacctctgtcaccttgctgaattca

SEQ ID NO: 364353 - DNA, 122 bp, Homo sapiens
tcttgggcagcagcactgcctgaatgttaggcaggactccgccctgggcaatggtcacgccgcccaaaagcttattgagttcctcatcattgcggatcgctagctgcaggtggcggggaata

SEQ ID NO: 364354 - DNA, 122 bp, Homo sapiens
accaccaaagcgttctgaccggacagtgtcactggagaaggcggcgcgacatgtccagggcgcagatctgggctctggtgtctggtgtcggagggtttggagctctcgttgctgctaccacg

SEQ ID NO: 364355 - DNA, 122 bp, Homo sapiens
ctaatttttgtattttaagtagagacagtgtttcaccatgttggccataatggtctcgaacgcctgacctcatgatccacccacctcagcctcccaaaatgttgggattacaggcgtgagcc

SEQ ID NO: 364356 - DNA, 122 bp, Homo sapiens
gaggcgggagtgggtgggccctgcaggtcacgtggtgcggggtggggcctgggcgagtcacgtggggacggtgcgcgctcagtgcggctgcgccggccggtagctgcagctggagcagtggc

SEQ ID NO: 364357 - DNA, 122 bp, Homo sapiens
gcccagctccaccaagtgcacttgaagccggaatgcaagacatccgatggtatacttactcgaacccgtccttttcacaacagccgcgggatccgctttctttggctgactgctcagagtct

SEQ ID NO: 364358 - DNA, 122 bp, Homo sapiens
atttctaggactaacataaagataccacaaggtaaatctaaggagtggaaggggtgatggcggctgcagaaaaaacaggttgagaatacttaaaacagattccaataagtgtgtttcagcag

SEQ ID NO: 364359 - DNA, 122 bp, Homo sapiens
gggacccgagccccgcagcacgaagcggagggagctgacccgggcctggggggcggtgaccgcgccccagccggccgttgggtggatcccgaggtccaggggggaggttcgggaaggtgacc

SEQ ID NO: 364360 - DNA, 122 bp, Homo sapiens
ctcttatttgtttggcaagtcgctcatggaaaccattagtgtccatcagtcatcagaaggcggggtggggtggccatcctgggagaagtccccaagcttgagctggcggtgggggtgggagc

SEQ ID NO: 364361 - DNA, 122 bp, Homo sapiens
aaattttggttgttatgaataaagctgctataaacatccatgtgcaagtttttgtgtggacgtaggttttcaccttatttgggtaaataccaaggactgagattgttggatcatgtggtaag

SEQ ID NO: 364362 - DNA, 122 bp, Homo sapiens
ctggggtcacagagatctgggtttgaattccagctcattcagttataagctaggagactacgcaggccttttagcctccctaggtcaagataatttccaccttacaaagtcatcaaaaatat

SEQ ID NO: 364363 - DNA, 122 bp, Homo sapiens
agcaccgagggaaggagcaggaacccaggcagaggcgcccaggcacacgcagaggagccgcgcaggaggccagaggctgagccctgaggggcggggacaggccgcttccctgcgtgcagttt

SEQ ID NO: 364364 - DNA, 122 bp, Homo sapiens
cgtggtggagaggcggggcaatagttggagatgattggttctgagaattggctgtgaaagcggcattgctgaccagtgagagagacctaatgaggagcaggccggggcaaccaatgaaatcg

SEQ ID NO: 364365 - DNA, 122 bp, Homo sapiens
accacctcattccccctccacctccgcccctccctgctccccccccgcccccccacctcccgccatcagtgggggctcttgctgctgttcggctctatggcctttgatagaacccggcgggt

SEQ ID NO: 364366 - DNA, 122 bp, Homo sapiens
aaggtgctggagattgctgagtttctgcgcccctttcctccccgcccgccctcgggcctccgcagggaactgattacaatggtttggaccgcagaccttctgggccatttggcggcccagct

SEQ ID NO: 364367 - DNA, 122 bp, Homo sapiens
agccagcagcctcacctcctaataccatcgtctcccagctgccccgcctcctaataccatcgtctcccggcagccccgcctcctaataccatcgtctcccggcagccccgcctcctaatacc

SEQ ID NO: 364368 - DNA, 122 bp, Homo sapiens
tactgagagacggcccaagcctgccactgagccagctgcagaaatgtggccccgtgaccacgtatatccatggctttagaaatctggttgactccattggcttagtggtgggaatgtgggcc

SEQ ID NO: 364369 - DNA, 122 bp, Homo sapiens
gaagaatgtaaccttctcgtgagccaaagccgaggaacgggaagcttggcagggaactggcgctcacctccagaagccagatcgtcgggtggtgggaaagagcgtgttttattgatttgttc

SEQ ID NO: 364370 - DNA, 122 bp, Homo sapiens
gcgggcaggagcctcgggagccgccgccgccgccgccgccgcccggccgggccccgccgccgcccgcgcgcccccgggcccccgacacacatgagattcttcaggctcactttcaagtgctt

SEQ ID NO: 364371 - DNA, 122 bp, Homo sapiens
ctaaggttgtggtagaagcagggggactagcaggggctggggggaaagcaggttaaggcacgtggaaggaacagtcgtgactggacagaacccaacaggactggacaaaatctttcaagctc

SEQ ID NO: 364372 - DNA, 122 bp, Homo sapiens
aaaaaaaaaaaaagaaaccactgtaagtacagacaccgtagcaaccacacggaggccccccgccccgccccccgcgtgttccagtgggaagcagagcctcggaaggcgtgcacacggggggt

SEQ ID NO: 364373 - DNA, 122 bp, Homo sapiens
ggccggctgcgggagggagcggcgggggcgctggagccggcgcgggaagccgggggcgggcgctcgacggaagcgggcgggggtcctaggcaccccacgacacccggcgtccggtcctgagg

SEQ ID NO: 364374 - DNA, 122 bp, Homo sapiens
ggccccgagctcccgggaggcgctccggccaacttcgggccggtggggaccgggcctgggcgcggggctctgaaggtgtggaaggaaagtttgggactccgttattcttccacagcgtcctt

SEQ ID NO: 364375 - DNA, 122 bp, Homo sapiens
accggaggagaggaaggaaagagaataggacattaagcaggaaacatggccgctggattccgcggcgaccaggtctctacccgcccggcgtagcttaccctgtacgaccaccgactgggtca

SEQ ID NO: 364376 - DNA, 122 bp, Homo sapiens
tcccgtgtccatgccggcagaacgccaccataaagctacacctttttttttaaagagatgcgactgagaaatatgccagatcagagtaatgctccaatgctttccgtttctctggagaaagg

SEQ ID NO: 364377 - DNA, 122 bp, Homo sapiens
cttgcaatcaattttttctgctttaggaagcaatgccactttgtcatgagcatcgctcatcgctagtggtttctgggcagctggtgcacctccttactactgagaagcctttggaactgtga

SEQ ID NO: 364378 - DNA, 122 bp, Homo sapiens
cattttctcacctggataaagcccataagctgggtctcaggctgggctcagcaaaggactcgccttgcaaccgacaggccattcccacccccacacacaacctcccctgttttcacattcac

SEQ ID NO: 364379 - DNA, 122 bp, Homo sapiens
gctgtcatgttaggcagactgtcttctctgtagctactctctctctctcagaaagctcatcgattcttatgacattaactttcatttttatttttattatccttaaaaatataggtcaaagc

SEQ ID NO: 364380 - DNA, 122 bp, Homo sapiens
cccaggggctccgggcgggggtggcttccagccctctgagccctggccacaggtgggcggcggcctggagggggaccgaggagcagagcacccccacccgcccagccccgggcaggcccggc

SEQ ID NO: 364381 - DNA, 122 bp, Homo sapiens
tttttttttttttgacatggagtctcactctgtcacgagacgagtgcagtggtgtgatgtcggctcactcaacctctgcttcctgggttcaagtgattctcccgcctcagcctcccgagtag

SEQ ID NO: 364382 - DNA, 122 bp, Homo sapiens
tttcaagtgaaattaaggttgcaaaggtggcgggagcaaaaagccgcagcagcaaaaatccgcggcggcaggggcaaaaatccgcggcggcgggagcaaaaagccgcggcgggcaaaaagcc

SEQ ID NO: 364383 - DNA, 122 bp, Homo sapiens
cttcttgcgttggtggcggaagcacccggagtatttacaatacaccattttgcttccatccgagtccatatgttcgctggtcaggttaaaactgaggctgcatggcacatttttcactgtaa

SEQ ID NO: 364384 - DNA, 122 bp, Homo sapiens
ctttattgcgggggtctggaacctaacctgcaatatctctgcgttatgcccttatagcgccgggagtgggtgccttccgccggctgtacagagcgccggcaggtggcgcccagcggcgagct

SEQ ID NO: 364385 - DNA, 122 bp, Homo sapiens
acacagcgggttcagtggcagagctgggactgaacacaagtcggcctttagcactctccacgaccctaggtcaatcccgcactacaggggtcgcctataggggctggaacctagaggaatcc

SEQ ID NO: 364386 - DNA, 122 bp, Homo sapiens
gatgtgttcatgtgtctgtgtgtatgtctgtgtgtgcctgtgtgtgcatgtctatgtgtgcgtgtgtccgtctacaggaatttgcgtgtgtgtaacatgtccatgatgtgtgcatgtgtctg

SEQ ID NO: 364387 - DNA, 122 bp, Homo sapiens
gaaattgtgcaagcctttcctgtcctcgatcccgcccctctcctaagccccgccccgacgcgttcttcccagagccccgcccaccccccaggtcccgcccctgatcctggccccgccttgtt

SEQ ID NO: 364388 - DNA, 122 bp, Homo sapiens
ccatgggaccaggtgctgcggagcagggggcagcgcccgtgagggaggctcgggcgcgggcggagggctcagacatggcaggctgcaggtcccgagccctggcccgcggggaggcggctgag

SEQ ID NO: 364389 - DNA, 122 bp, Homo sapiens
tggcgtcgggccgggtgtctttccatccgcaggtatccgtcggcggggtgcccggcccgacgtgactacccgacaaagaatgcaaagagccaccccgtgaatcattctccgcgcctgggtca

SEQ ID NO: 364390 - DNA, 122 bp, Homo sapiens
gctcccttgatgcactgcagctggaggcaacggctcccttccaggctgtgggagtgatcccggagttcggcaccacagcccgttaaacaagggcatttcatgggaaacggagagggagcaga

SEQ ID NO: 364391 - DNA, 122 bp, Homo sapiens
atttaacggtctggaggcccaaggcagcttcctcttgggtaactggctgctaggaaggtgcgggccgggccagtgcccctgccaggcttgggagaggaggggccaagcctccaggcccggaa

SEQ ID NO: 364392 - DNA, 122 bp, Homo sapiens
gtcatcccaggaaaactaagcagaggcttgctcaagaactcctgaggtcttggtggggttcggagattgggggaagaggagatggacaaaggctcccaagaggaagtagtactgggtctgca

SEQ ID NO: 364393 - DNA, 122 bp, Homo sapiens
catagctcctctcagccataaaagattcagtaggatctttattgcttttttagcatacaacggtaagaacaccataatgctcagtatatagtagtggttatttattaaatagaaaagtgcaa

SEQ ID NO: 364394 - DNA, 122 bp, Homo sapiens
aggctgcgcgttcgcttctgctagagggcggggccggaggtttcgattagttgtctctgccgctggggaaggtaaagcggcgacggcgtcctcaggagctgtggggtcccctgctagaagtg

SEQ ID NO: 364395 - DNA, 122 bp, Homo sapiens
aggtgtccttgaggttggtgaagagccgctctgtcccaccccgcagaatgtccaggaagccgccatacggctggtcgtactccgccagcgccaggcctgcagggagacacagtctcagcagg

SEQ ID NO: 364396 - DNA, 122 bp, Homo sapiens
tttaaccccaaattcatgctttattttgatcctccacctgactcttgtctagttttgtgacgtatatcacttgttctcatgttttctaaatccgcaattcagacctattccaaaatgcgttt

SEQ ID NO: 364397 - DNA, 122 bp, Homo sapiens
tgcagcacctgctaatgatctgtcagtgacgctgtgaccaaggctcatcaccctgcgggccgtgggccccagagggcggcacagcttctataggagcacagggcccagggaggtgccctcat

SEQ ID NO: 364398 - DNA, 122 bp, Homo sapiens
ggggatgaaggggaacagaagggacggcgtgtactcctatccctttatcacgtattccttcgtcctgagacgcctgcctttattctataccctctttctcatcatcccctgcctggggctgt

SEQ ID NO: 364399 - DNA, 122 bp, Homo sapiens
taacagaggatggttccagagtcattctgctgaatgaggccacaactgaagtgagatgtgcggcctgttcagccgctagcaggccaagaactgagtcccagctctcgggccatcggacctca

SEQ ID NO: 364400 - DNA, 122 bp, Homo sapiens
agaacaggcacatgcgtctggttgctgttttgttttatataacaaattgcttagggtccgcgaggtggaaggcagcctagagctgagctgcccggagggaggggctgcgggtagggggcagt

SEQ ID NO: 364401 - DNA, 122 bp, Homo sapiens
aggaggcagcagctaagcaacacatatcttatcagtgtccctattgtaacaggaaaagagcggagctggccctgtctgcctttctgaaacaaaagaagactttactggagtcatttctactc

SEQ ID NO: 364402 - DNA, 122 bp, Homo sapiens
gccgcagttaccctgacccggagggctttggaatctgaagctctggtgggtctactctcccgaccaagtctgcccttttcctgagatccataaatgaaagaaaggattaatataactatcgg

SEQ ID NO: 364403 - DNA, 122 bp, Homo sapiens
ccgcattatgaccctggtagatcccaacgggcaaggcaccgtcaccttccaatccttcatcgacttcatgactagagagacggctgacaccgacactgccgagcaggtcatcgcctccttcc

SEQ ID NO: 364404 - DNA, 122 bp, Homo sapiens
ccgaggtcgtgatctgtcccgagggggtcacggtgactggaaaggcagaagcacatttcacgcggccaggcagtggcgcccacggcacacaggtcccgtgccacccacgggcgccaatcctt

SEQ ID NO: 364405 - DNA, 122 bp, Homo sapiens
tctgcgcctccagccaatcggggtgcccgtccttaatacaaccagccagtcagtgcccggcgcgcgacaccagcagccagtcaggaagccctgcgttcatgcttccagccattgtcggagtg

SEQ ID NO: 364406 - DNA, 122 bp, Homo sapiens
cagatttccgaccctcggcctccccactcgccggcccccaggcctggtccccgctcccggcgggcggcaggctgcttttaccgtccggtcgaaactcaaactccaggaactcgtggccgaac

SEQ ID NO: 364407 - DNA, 122 bp, Homo sapiens
gatttatggattcaacaggtgtggggcggaaggccttttcctgccgagggtgcggcccagcgccaccccgctcagtctcagcgggacacctccacagccagtaggaagggcagttcaaaatt

SEQ ID NO: 364408 - DNA, 122 bp, Homo sapiens
tgcttgtatttgtacttctctattcagaaacaactaacaatatagagtttttcatcttttcggaaccattagagtttgttcttttttttttttttttttttttttttttttttttgtgagac

SEQ ID NO: 364409 - DNA, 122 bp, Homo sapiens
tctcctttgactcacctgagagaggcgtttgcagccaatgaagctggctgctcagacggtcgacattgaatttgggtgggggttgggatcctgtctgaagtacagactgttcttgctctaaa

SEQ ID NO: 364410 - DNA, 122 bp, Homo sapiens
tcctggtggcttttagctgagtaggagcgccacgatattcagtacacatttagaagcgagcgcttcagcaatttccttgtggtagagaggaatgcagctctgctccaagtagtttaacctag

SEQ ID NO: 364411 - DNA, 122 bp, Homo sapiens
atggttgctgcattctggtttctgttattctatcattgggtatagttcctcggtagaaaacgggccttatccccacaggaagcagtgggtttgttattggagaaacagattggggcagaaaa

SEQ ID NO: 364412 - DNA, 122 bp, Homo sapiens
agctggaaacataatctgtgtgaagactcctggttttatccatgctacatatacaggaaacgttcacatttacttttattgttaaggtgaccgcaaaattgtcactgcaagctttgctttaa

SEQ ID NO: 364413 - DNA, 122 bp, Homo sapiens
gcagaccccaagctgagaccctctgaagggccggtttgcatgggaaagattgctggaacacggggatgccaatggtgctacaagctttgtcttcttggccggcttcaggatgggatcaggtg

SEQ ID NO: 364414 - DNA, 122 bp, Homo sapiens
attttgtaaaacagaactgccattctttcgtgccctgtgtgcatttgagttgtgtgtccccgtggagggaatgccgacccccggaccaccatgagagtcctcctgcacccgggcgtccctct

SEQ ID NO: 364415 - DNA, 122 bp, Homo sapiens
cccggtgggggaggaagaggacattttttgttgtttattttcctccctccctcactccctcgcactcttttcctctttctttcctcctctcttactcctcctccttcgtctccctccctcct

SEQ ID NO: 364416 - DNA, 122 bp, Homo sapiens
gtctccacgaaggcgtcgcagtgggaaccgggagggggcacattaagagcaattagcctgcgcacacttggcagcgataccttaataaataatagtctgaaagtcatgtaaataaatattag

SEQ ID NO: 364417 - DNA, 122 bp, Homo sapiens
agtaagcacagctcggctgggagttgtgcctgtgtgtctcaccccatcgccatcatgggccgtgaaatgtcctaatcaacaagtaagaggaactgcagagtcctgctgggcagctgtggcaa

SEQ ID NO: 364418 - DNA, 122 bp, Homo sapiens
agatgcctcactttgtgattactgaggcaacaaaacccgactggctctggtccaattctgcgtagatcactgggaccgcagaaatattttcggcctctaaattgttggtctttggccaaggc

SEQ ID NO: 364419 - DNA, 122 bp, Homo sapiens
gcaccccgccccacgcccgtccttccggagtctacacatcggcgacctcccgtgtctaggcgcacacatttcccgccccgcggagactcccacgccccgggccctctctgccgcaggcgcca

SEQ ID NO: 364420 - DNA, 122 bp, Homo sapiens
agggggcagtgggcggaggcgggggctgggaggaggtgccgcgaggggtggagcgcgcagcggagcctgctctcggagttttgacagtaccggagctgaaattgtcagcggcggcaagcgca

SEQ ID NO: 364421 - DNA, 122 bp, Homo sapiens
acacttcctgtcaggctcaactcaaggcctgaattcccagagagggtccctcccgaagggcggaggggccccagtaggggagggagtgcaaacggccatgttacaaggagcaggactgtggc

SEQ ID NO: 364422 - DNA, 122 bp, Homo sapiens
agcttccgaggtggcaagggctttggggagcagcgggaggcctgggggtgccgagtgttccggaaatattgctggttcttctggggcagtcctggcccgctgggcagagcagaacacggcct

SEQ ID NO: 364423 - DNA, 122 bp, Homo sapiens
gcagggaggggcccaggctgtgggcggcttcgggcggtccaggcaccgggtcggccaccacggctgtggggccctgcaggctctggccacacacgtggtgatgcttctcccagtcccgatgc

SEQ ID NO: 364424 - DNA, 122 bp, Homo sapiens
cagagcctgggatttgaggcctgacctatctctccctgactgtgtgactgtgagccatcacgtacccaccccgagcctcagtttcctcatctgtaaaaggaggtttccactatttccttcaa

SEQ ID NO: 364425 - DNA, 122 bp, Homo sapiens
ggtggaagggatcctggaggccgtccatcacgcccttccactttacgaagaccagcttatcgggacaatcagtggaacccaaggcagtcagaagttcctaaaccagaagatggagagccgcc

SEQ ID NO: 364426 - DNA, 122 bp, Homo sapiens
ccagaccagaaaaaggaaaaagcactggaaaacagcatcgaagtcaccggaaagcagcatcgaagccaccggcgccagcctcatacctgcgcttcccgctcccctcctcggcgcctagtgat

SEQ ID NO: 364427 - DNA, 122 bp, Homo sapiens
cagtcatgatttacttctgatgaagagccagcaggacctgaggacagaccagctgcaagccgtgggaaggaagaagcagcactgtaacatgtccataatggccccaacgcccaagctggaag

SEQ ID NO: 364428 - DNA, 122 bp, Homo sapiens
gggatgggaagccgcggagggaagggccgtctttggttacctggagagcgggagcagctgcggatcccttatgaagtgcccggatgaagctccagcgctcacgcgctttccgcattgagtgc

SEQ ID NO: 364429 - DNA, 122 bp, Homo sapiens
tatgcacttgggatctcacctatttctaggccaaccatacttcctactttcatactgaaacgatgtaaaggaatttgattgttctttcttgtggaaaaagatacaaactgtgtcagtgaagc

SEQ ID NO: 364430 - DNA, 122 bp, Homo sapiens
gtttcccccttctctttggctgccaggaagctcagagccaaattagtggctcccttcgagcgaatgcccaggacttcaacgcatgcactttgtgttgacctcatccctggcttcaccttggt

SEQ ID NO: 364431 - DNA, 122 bp, Homo sapiens
agaggccgcgcctgctgctgagcagatgcagtagccgaaactgcgcggaggcacagaggccggggagagcgttctgggtccgagggtccaggtaggggttgagccaccatctgaccgcaagc

SEQ ID NO: 364432 - DNA, 122 bp, Homo sapiens
gtcctcatagaaatcactgtttcagctgcacattaggcagggatttttcctctggcagcccgccggctgccccagcctcaaccacgtcattccctccgtgggagagggcagaaattccagcc

SEQ ID NO: 364433 - DNA, 122 bp, Homo sapiens
gaggagtggggcaggctcggcgccggtaggaagagtcagaggggtgaccagagagcccaacgcctggtgctcaagactttctccgaggtatgaacaagaaccaggcgtctgggccctttccg

SEQ ID NO: 364434 - DNA, 122 bp, Homo sapiens
ggacggaagggaaggctgctgcccggactgccgccgtggacggaagggaaggctgctgcgcggactgccgccgtggacggaagggaaggctgtacagagccttatcaccaatgggaaggaaa

SEQ ID NO: 364435 - DNA, 122 bp, Homo sapiens
ctgggaaggatgcgctccgatgccgctacaggggttccgcgcgtttcaccgcgggaagcccgggcattggagatctgtgctcagttctctaggtgttggaaagttgcctcaggctgctttca

SEQ ID NO: 364436 - DNA, 122 bp, Homo sapiens
ctgctctgcgccggaagaccctattttcaggttctcttccctccattcctaccccttccccggtaccataaaatcccgggatatgagctggaagaggcatcacctgatcccggagacctttg

SEQ ID NO: 364437 - DNA, 122 bp, Homo sapiens
acccagctcctattgaagatggagttgttcaggttcacatgcttctgacatttgaacctgcgcccaggccggatgaggctggagaaacacaacaatgttgactgttcccactatttatttat

SEQ ID NO: 364438 - DNA, 122 bp, Homo sapiens
gcacttccggagctgtggggacgactcttctggaggaagcagcgcgggcttgaccggcgtcggcccgccgcctccgctgccgcttcgccccaatccggtccctctggcccggcctgacccgg

SEQ ID NO: 364439 - DNA, 122 bp, Homo sapiens
ttcatctcactagggagtgccagacagtgggggcaggtcactgggtgcatgcaccgtgcgcgagccgaagcagggcgaggcattgcctcacttgggaagcgcaaggggtcagggagttccct

SEQ ID NO: 364440 - DNA, 122 bp, Homo sapiens
ctgggaagcttcaccagttcatttacagatcactttgcctttaagcaattttcctcaatccgccagcttcccagactccctttcgttcccgacatcacttgcagtttctaagagcatcatat

SEQ ID NO: 364441 - DNA, 122 bp, Homo sapiens
gagttgggtggggaaggggctcggccacgtagcagcctcaaggccctgagtgggagtgatcgcagcggatgaggattccatgaagaattcttgcaagcgctgtgtgattttcaggtgctctt

SEQ ID NO: 364442 - DNA, 122 bp, Homo sapiens
cctgctgaccctggtctggcatcacgctggcgcccaccaccgtgaggggaggaagggctgcgccactcttggaaaggcaggtccccttatgtgggaggtggggaaatgaccccctccacagc

SEQ ID NO: 364443 - DNA, 122 bp, Homo sapiens
gtttcatgtactttattataatactaatgagcagttatatatcaggagctaactgcacgccggattagcttgttagcatgatatgaaatggcagagcaaacagtccaggcccctcgctccct

SEQ ID NO: 364444 - DNA, 122 bp, Homo sapiens
acacactagcacacacagacacaaacctgcctgcctgagcacacatgaagacacacaccgcgtagccatacaaaagaacaaaattatgtgctttgcagcaacatggatgcggctggtggcca

SEQ ID NO: 364445 - DNA, 122 bp, Homo sapiens
atgtgagacaacacgtgtaaggttcctagcacagaacccttcggaatgatggcctaaaagcggtctgttgactgtcttcctcaccccccaatcctcccccctctttttttttccattttggc

SEQ ID NO: 364446 - DNA, 122 bp, Homo sapiens
ccttggaggcagcggctgaaacggaacgtgccttggcggccccacgggctaaacggatcccggggcgctgcagtccagacccaagcacagcccctggggagagcatcccctggccggctgca

SEQ ID NO: 364447 - DNA, 122 bp, Homo sapiens
ccctctgccttgctttggcccctgggagcactttggtggtggggcgggtgtaattccacccggtgactctggtttcccaggctggagagaccaggctcccaccccttcctcttccctccctt

SEQ ID NO: 364448 - DNA, 122 bp, Homo sapiens
gcccgggcgcatttctctgcctcgacggcgcgccggttgcgggctacctcctccgtcgtccgctcccgggccagccgcagctgctggcatcggcctgccacgccctccagctcttcagccag

SEQ ID NO: 364449 - DNA, 122 bp, Homo sapiens
aaaaaacaaaaaacaggttaagaaaattacttgggtgggcagacttaggaacgctctactcggtaaaagcgttatacaaagtcataggagaaaaatatgggacaattcatgattatacttaa

SEQ ID NO: 364450 - DNA, 122 bp, Homo sapiens
gtttagctgaccatctctaggctcagtaggtgcagagacctgttattccaggaaatgccacgagggggagccttcatttggatgcctggggtcagaaaggaagccaatttcaagtataaggc

SEQ ID NO: 364451 - DNA, 122 bp, Homo sapiens
gtgagtagaggtgagagcagtcatgttcctgccagagcatctaacggtcagcacaggaggcgccagaggtccttcaggcactgcaaacagccaatgttgagactgtggctgctttcaggtac

SEQ ID NO: 364452 - DNA, 122 bp, Homo sapiens
tcccgcgctccccgcccccgcccccgccccagcccgggcccgcgccccccgcccgctactcgggcccacgccccctgtcccagcaaagggccgcgcccccgccccgcccccccggagcccgc

SEQ ID NO: 364453 - DNA, 122 bp, Homo sapiens
accgctacttgcgtgtgccggtgcctggcccaatcagcgtcttgcgcctcttctcgctcccgggcctggtggaaacagactcagggccattttggctacacctgggagcagggcaccctggc

SEQ ID NO: 364454 - DNA, 122 bp, Homo sapiens
gatgtgaaaattccgaatgactctgaggcgctgggtccagccttgctgggcctcacaccccgtgcctctgcccttaggtttccgttcagccgcccggagctgctgaaggaatgggtgctgaa

SEQ ID NO: 364455 - DNA, 122 bp, Homo sapiens
tcttaaaaacaattaagcataatcaacatctttagatcagaaattccactccactattaccgtataaatagtgttccatgtaccaaaatttaaataacaatatatttgttaaacgccactga

SEQ ID NO: 364456 - DNA, 122 bp, Homo sapiens
aaactgaggaaaaggcagaaaactgtggcaactgcagggggtcacgagattggcaagccacgaagatggcacgcaccaagcaccccaaacagtgatgggaacacaatacccggccgagacca

SEQ ID NO: 364457 - DNA, 122 bp, Homo sapiens
aaggcgtaaagttgagcttgggcaggtacaacggtccccagggactggcatcccccagcccgggctgcccgcgggagggtagcgagctgtgccaagggctccgccattaccgccagcgcaca

SEQ ID NO: 364458 - DNA, 122 bp, Homo sapiens
aagtaacaagacatttgtgagataatcagaaactgaagctccgactagttatttgatacccggtaagtaccaaaaactagataagaacaggtttttctgactcctagggttaagcttgtccc

SEQ ID NO: 364459 - DNA, 122 bp, Homo sapiens
acgtccaggctgtggccaccagccaactgcaaactgaaaccataacgagatcccgcaacacgcccaagatgaaaatcacgggcgacaggactccgatgcatcccggctgagaaggcaagggg

SEQ ID NO: 364460 - DNA, 122 bp, Homo sapiens
tcccaatttgagaaaaacatgttaaagcattccttagtggtctcatcgtgagactatatccggattggaaggactttgtgatattaggcaaatatttgcctctatgaaagaagtgttccaaa

SEQ ID NO: 364461 - DNA, 122 bp, Homo sapiens
tctctagcgtctcccactgtccgactgttttgtgattgggacttcctctaggaaaacctgcgggccctgttttgtgtttcgagcgggagagcagacactcagctcaaatagaggcctttctc

SEQ ID NO: 364462 - DNA, 122 bp, Homo sapiens
ccgtccagacgaactaactccacattcaaccaggttgtgctgaagaggttgtttatgagtcgcaccaaccggccacctctgtccgtttcccggatgatccggaagatgaagcttcctggctg

SEQ ID NO: 364463 - DNA, 122 bp, Homo sapiens
cggagattacggcggcgccacccgggacatccagggccccgaggccctgggcggtccccacgcgagatcgcaaaccatgacaataggcagtcacccgaggtcaaataaaaacggagtgggtc

SEQ ID NO: 364464 - DNA, 122 bp, Homo sapiens
tggctggatggccgtggacgggggcggggggtaggcacccggggtcgcttcgtggatttccgtaaacagagccgaagcttcgtcttcggaatcgaggaggagagcgcgtccccggggtttac

SEQ ID NO: 364465 - DNA, 122 bp, Homo sapiens
cctcgcccgccgagctgagcgcaggtaaccgaggcagagcggagctgggcctcgcaggcgcggcgtgggagcgtggcgaagtttctcggcgcataactcttgcgccccactcgggagtgggg

SEQ ID NO: 364466 - DNA, 122 bp, Homo sapiens
ggaactcgcgctggcccacgagcgcctctctctctacacctccgctcaagcagagggagccgactccggcctgggccagcccagagagggtctcccacagtgcagctgtgggctgaagggct

SEQ ID NO: 364467 - DNA, 122 bp, Homo sapiens
cagaatagctcctattagaccagcctttctgaagataaaaagtaaaaaccctggacaaaacgcaaagaacaagtaactaaaaacactggacagagactcaaggcaggcagattctggaggag

SEQ ID NO: 364468 - DNA, 122 bp, Homo sapiens
attcaatccagtctctttctctaagtcagtgttgctgtgttggtcttgacctcagcagctcgacacggtttgagagctgaagagggtgctgttctgccggcctcctcagctgagctctgggt

SEQ ID NO: 364469 - DNA, 122 bp, Homo sapiens
cacgtctgtaaatatcacaagaccctgcaagtccctcacttattatctcttcaaatctgacgactttcaaccgttcgggccccacgactctctccccggactaggatctactctatggtagt

SEQ ID NO: 364470 - DNA, 122 bp, Homo sapiens
tcagaaatgactctataagatgtggcattattagccgggagggtttggtggcatggggcccgtcagaaccagggagatgggaagattcttatcaatggagagctcaagagacaagttctgga

SEQ ID NO: 364471 - DNA, 122 bp, Homo sapiens
gacccaggtggccgagggtcgggcgggagcccggaggtcaaacaagtgtttgtgaggggccggagattgacggggtagagcccagaagggacgctttctccgggaggaggccttgggagagc

SEQ ID NO: 364472 - DNA, 122 bp, Homo sapiens
tttataaattcaagggcagccattctgctttatttacattttgatcatcccatataagcacgcctaatgttgtgcaaattttagacactcaataattatatgtcgaatggataatacagctt

SEQ ID NO: 364473 - DNA, 122 bp, Homo sapiens
tcttttgcacagtcccttaacatggagaagcaaaataaaataacctgaccagtcatctctcggtgatttagtgtggaggggtgagtgtgagggtatgtggctctgttctcaagggcacatgc

SEQ ID NO: 364474 - DNA, 122 bp, Homo sapiens
gggtttgatcttgagatcttccaagccagaggctgtcaacaagatcctggttagacagcacgaaaatgtcctacattggccaccagggggagggaatgagcactgggacgggtccactggga

SEQ ID NO: 364475 - DNA, 122 bp, Homo sapiens
ttcattatgaattatcttatgattagaaaggattgaggagcatttaaagaccgcgacattcgtcaccttcgtaagacattcccctggtatgagttctcttatgtttaagaatgctgtagtat

SEQ ID NO: 364476 - DNA, 122 bp, Homo sapiens
gaatcagagaccgtggggccgggggaccgtggggccgtggggaccatggggccgtggggccgttgagctgtggggcggtgagaccgtggggctgtgagccgtggggccgggagaccgtgggg

SEQ ID NO: 364477 - DNA, 122 bp, Homo sapiens
agatgtctcccaggtcttgagggggttgtatgcacggccatatctttgtcaccggttgcccggtgcgcatcaggacccatgtgctctcaggaagcccgcaggagtgataccagccgcggaga

SEQ ID NO: 364478 - DNA, 122 bp, Homo sapiens
gtccccagtaagcacttgctcagggctgcaggatgatccctgagagtgtgtcatctcgggcgcttggtggtttcccaacaagattctggggaatgggcggcgggcttggtggagggcggtgg

SEQ ID NO: 364479 - DNA, 122 bp, Homo sapiens
gaagagacaggataaaatacaggcaggtcctcggccgagacccggggtggttcacagacccgggcggttcctgcctttgatgtcaggcattaattattagaaggtagttttactggcgatca

SEQ ID NO: 364480 - DNA, 122 bp, Homo sapiens
tcggcctcaggaagagggaagaacggggacgactttgtggcagcaaagccacctcccttccgtgttttccgcagcccaaagcgatagaaccgcatggcttccgcagtctgggggagtgcccc

SEQ ID NO: 364481 - DNA, 122 bp, Homo sapiens
ggcctgggggaaggggtgtgagacccgcccttccccatgggctgggcatctaagaagggacgtatcagaagggggctttggagggggcagtctacagagggagcaccaagtcacagaagtgt

SEQ ID NO: 364482 - DNA, 122 bp, Homo sapiens
tcaccactggaggagccctcagtctccccatctgtaaaatggtcactggaaatcctaggccgctgctctcaggccctcaggcccctacggggtggggattggggaaaaggaggaaagcgggg

SEQ ID NO: 364483 - DNA, 122 bp, Homo sapiens
ctagcaaagggctagccgtcaccctgaacagccccctcccgcccccctgaatccattctacgccttcctgacagccacagcgcccacaacgctaagaccaggacgctaacccttccggcccg

SEQ ID NO: 364484 - DNA, 122 bp, Homo sapiens
gataaatctgaatccctccattttatttgggtggaaccatgaccaaaaatggtaggaagacgaaaggccagaaagagactttgccagagagttcacggagttttcttaccccgcatgctgac

SEQ ID NO: 364485 - DNA, 122 bp, Homo sapiens
aatgcaggctttggaggttgctgactggggtagcactggtacacagtttataaatagtcccgctgcagaagacaggagaaaggtctgttgtgtgaagacagtagcacttaccaaaacaacag

SEQ ID NO: 364486 - DNA, 122 bp, Homo sapiens
agtacccaatgtttagctcccacttctaagtgagaacatgcggtattggttttttgttcccgtattaattcacttagaataatgacctccagctgcatccaggttgctgcaaaggacatgat

SEQ ID NO: 364487 - DNA, 122 bp, Homo sapiens
ctgttacaatctaaacattcccacatcgcataaagggttatattacacccgagtcactcccggcccatgtttgcacagaaaagctcacggcaggtcccccctcctgacgaagtgacttatta

SEQ ID NO: 364488 - DNA, 122 bp, Homo sapiens
actgcaccaaatattgtcaaacggaaaattaaaccaacaacttcattccgactcaaaggacgagaaaaggcttcagcatgtaccatcttgaatgttaaccttaaaaaaacaaacagaaatgt

SEQ ID NO: 364489 - DNA, 122 bp, Homo sapiens
ctcaggtgggagtagaaatactcatttaggacctcagtggcctgtttgctgaagttacggcgctttcgtctacagaggagggagaagagcagtgaggaggatgttgatgtcctggcagggct

SEQ ID NO: 364490 - DNA, 122 bp, Homo sapiens
gctcgccgggtgcagccacctgccgccgcccgcctgtgggtcaagttacgtaaagccgggcggcagttccctggcctccgccctcgagttgtttatattttgggggaaaggagagggtcatg

SEQ ID NO: 364491 - DNA, 122 bp, Homo sapiens
gggcagccccaaccacaaagacaaattaccatgagaaacataaatcgggaaatcgccgctcgcgtccctgcttccagctgccgcacccctctccaccctcccagccgggagtgcggggccct

SEQ ID NO: 364492 - DNA, 122 bp, Homo sapiens
cctcctggccatttaccttcagggtcaccaggccccagggccacctttctttccattccgcgccaccagacgccaatgtccggcccctttggcttctctcacaaggggctgtgtggcacctc

SEQ ID NO: 364493 - DNA, 122 bp, Homo sapiens
tggagttgttttaaggggcggaaagtttaataggcaagaaagaagaaagaaagaagaaaacggctcccccgtacagagggagcggggctccaaacggacaaaccccgtgtgcgcggaaagta

SEQ ID NO: 364494 - DNA, 122 bp, Homo sapiens
gagccgggctggggaggggggtgggcaggaggtagaggcggtcctgacacgggcagactgcgatgaaaccccagtttgttgggatcttgctcagctccctgctaggggctgccttgggtaag

SEQ ID NO: 364495 - DNA, 122 bp, Homo sapiens
acaccaaacggccgtgcatcagttcacattgcatttttctgtcaaacagcaaacttacctcggatttgggaatgtggttgtgtggacgcctgttgcgtgcagccgtgagcgtgagtctcata

SEQ ID NO: 364496 - DNA, 122 bp, Homo sapiens
ccccaaccctgggccgggcaggtgcaattcctcaggcggcctacagagggcgatgtgcgccgccactgggccgcgcccctccggcgcgcgcttcctgtgaggtcaggtgggaggaaaccgcc

SEQ ID NO: 364497 - DNA, 122 bp, Homo sapiens
tttcgtagccctagagcttccaacgtacagtgcggaaaagcaacataacacactaagaaccgtgcggaaaaggagagaaaaccagaccgcaggggcatttcacagctaaccacagcggtccg

SEQ ID NO: 364498 - DNA, 122 bp, Homo sapiens
cgcctcctgcctcatttcctcctctctaatggagaaggaggccgctgactcgcagagtggcgctgcagggttgggggagccctaccctaggacatctccaagcaccctgcactgctgtcacc

SEQ ID NO: 364499 - DNA, 122 bp, Homo sapiens
atggcaggcacatcattctgtttcaaaagaagtgtcgctgggctctgcctcaatgccttccggcaggtggccaggaccagcagaccacttgctcgtcactaggctctgtttgttttctttgt

SEQ ID NO: 364500 - DNA, 122 bp, Homo sapiens
ggagtgcaatgaccttcccgcctagcttttccctagccctacgcttgggtctgggaggagcgggaccgacctccttcagagcccagcccgctcagtgacttaaagcggtccagccacggacc

SEQ ID NO: 364501 - DNA, 122 bp, Homo sapiens
ggtgatgcgcccgccttagcctcccaaagtgttgggataacaggcgtgaaccacagtgcccggccgaagaacgctttttaaaacgtgttctctaatgggtccgggagtccgccgcggtctcg

SEQ ID NO: 364502 - DNA, 122 bp, Homo sapiens
aagattttgccatgttacccaggctggtctcttactcatgggcccaagtgattccttcctcgttagcctctcaagatgttggaattacaggcgtgagccaccacgcctgggcaaatctcatt

SEQ ID NO: 364503 - DNA, 122 bp, Homo sapiens
cagcgcagcagcgggttgaagggctcctcaagcgcgtccagagccattggactctgaggccgagaaggcgccgagagcgagtgagggctgctagcacgttgtcacctcccacttctaggttg

SEQ ID NO: 364504 - DNA, 122 bp, Homo sapiens
acctgtttgtaaattacccaaccaaaacataactttttattgaactgggttgaatcagagcgggtgagctggctggaaacttttttccccagtacggctgcactctgaagtctagagaatcc

SEQ ID NO: 364505 - DNA, 122 bp, Homo sapiens
gtggccagtctaagtgttcaaccatcacattcacctcttgcttaagctcctccaggaacacgctacatttcagcctttgacttgaaaatcgtccagagctcttcaccctttctttgtcaatc

SEQ ID NO: 364506 - DNA, 122 bp, Homo sapiens
cggggcccagagagggaggtcacctgtctcaggtggtgcagcaagcctggcttctgacgccgtgggtctccaggcccagcctctgtccctccctcttgttgcctcgtcctgagccacgcatt

SEQ ID NO: 364507 - DNA, 122 bp, Homo sapiens
cagacaatggcatccgccgccgcgcagggggcgccaagagtcctcggccgccaccgcccccggcccctcccgaaagcgccccgcaaaacttgaggcgattcccgaaccacaggtgccgcgag

SEQ ID NO: 364508 - DNA, 122 bp, Homo sapiens
aagagtgggcttagtgaatgggtggtcagaatgcatttacgtttttcattgaagccttgccgctatttccctgctgccttggatgatccaggaaactaagtgtttgaacagtgagctcactc

SEQ ID NO: 364509 - DNA, 122 bp, Homo sapiens
cgagcctccagcagctcccggaactgctccagagtgacagactcttcgccgcggcccagccgctcttccagccagcgaaacaacgcgccgcgatgcctcgacaccagcgactcgcagggggg

SEQ ID NO: 364510 - DNA, 122 bp, Homo sapiens
gccgccttcgaacagctcagtttcaatacagggtcgaggcttcccattttaaaacaacgccgacggaaggccttcgccattttagtaaaggccctttgctgttaaaactaaccctccgcccc

SEQ ID NO: 364511 - DNA, 122 bp, Homo sapiens
cttcccgccaagaaagagccaggctgacctgggggtgcgctcgcctccgccctgccattgcgaggttgagccacccgtaccgtgttccaagggtcagcccggagctcctcgccctcactcgc

SEQ ID NO: 364512 - DNA, 122 bp, Homo sapiens
catccattttgtccagaatttaagaagttttttccatggggaaacagatggtagagggagcgtaatggactattaataacatggacttcggagcaagacagcttgggtttgaatcttggctc

SEQ ID NO: 364513 - DNA, 122 bp, Homo sapiens
cacgctgcactcgccatgcattcaatggtgccccatctcttgttctctaggaagcattcccgctacctgtgtgatgcagttggttccacctattcccagagactccaccctggccctccttg

SEQ ID NO: 364514 - DNA, 122 bp, Homo sapiens
tgggtttggtgggccccgcacttggagcagccagccctgcccctggccaggcggggcgcccgctccaatccgacagactcacaggaacccatggaggcgggggaaggctcaggcatggcggg

SEQ ID NO: 364515 - DNA, 122 bp, Homo sapiens
ctagttctccaaagcccccatttctttccattattccagataccactagactaggcatggcgaaacaaaagctgggggagagagagagggagagagagagagagaggtggtggaagggaaaa

SEQ ID NO: 364516 - DNA, 122 bp, Homo sapiens
tttgcagatggactacagcggccccccgagcggcgcccggcggcggaactgctacgaaggcgcctactacaacgaggcgcccagcggtgggtattccgggcctctccctgctcgctcctcct

SEQ ID NO: 364517 - DNA, 122 bp, Homo sapiens
cggaccaccgccccaggcaggttgggacgcgcgccacatccacacgcacacgcagccacacgctcgtacacactcacacacgccccgccacgtgtagtcaccccgggccaggggctcggcgg

SEQ ID NO: 364518 - DNA, 122 bp, Homo sapiens
gtgcgcctgcatcttgcggatgatctcctcctcgttctcggggactgtggcgttctcccgcgggaacagcagcgggtggttgatgatggccgtcaccaccaccagacacacgcggaagagcc

SEQ ID NO: 364519 - DNA, 122 bp, Homo sapiens
ttcaagcagcgcccacagcggaggagcaacctggaccccaggtgccccggccgcgggctgcggctcaggataggaaaggatctccctctcgataaaagaagtagacaggccgggcgcggcgg

SEQ ID NO: 364520 - DNA, 122 bp, Homo sapiens
gaccgcaagctggatgatgtaagcagacacagacagaggtctctgcccttggtgagtaaccgtggagaaagtggtgagaaaggaatgtattggatatcatctgtcctcttcttctcaactat

SEQ ID NO: 364521 - DNA, 122 bp, Homo sapiens
ctaatgttagtgcaaggccaccctgagcaaggctgactcctgggcaggccagggcaccagcgtctgggaggcctccagaaatagctcagggcctggtgtggctctggaggtggcccagctgg

SEQ ID NO: 364522 - DNA, 122 bp, Homo sapiens
agccggcagactgcgaaaagtagctggagccggagcagggacagaacctgttgctgcagacgggcttggtggattctggttcctgccgccgacagggctcgccgggagaggtaacagcatgg

SEQ ID NO: 364523 - DNA, 122 bp, Homo sapiens
aggaggcgagggcagggggcggccatgggggtgctggactcacatgagcttgttgcagaccgggggctggaaggagccccggttctccttcacccaggccctcactcccaggcggcgctcca

SEQ ID NO: 364524 - DNA, 122 bp, Homo sapiens
gttgcccaagtcctccaccgaggtccgcggaggtctgcagcgggggtggggggatggggacgaggaaaagtagttttgtttgcttaagcacatcctgtggcagcctatagctgcccgggagt

SEQ ID NO: 364525 - DNA, 122 bp, Homo sapiens
gatgttgggactaatatcatcctcccacccgctggatattaaaaaccgtttcactaggggcgtgcactcacacttcgatattggtattaataccatcctctccctctttggatattcggtgc

SEQ ID NO: 364526 - DNA, 122 bp, Homo sapiens
ttatgctgtagtttgtgtgtaaagaagtgacttaaatcctcctttcagacagcttccttacgcatataggaaacctctgtttcattaggagatgaatatgatatttcattttagttgttctt

SEQ ID NO: 364527 - DNA, 122 bp, Homo sapiens
gtgccgaggtctgctgggtcccaggctgaaggatgcatcgtttaactttttttgtctacacgggtcttgcgcatcatgtgctactgattttaatgtgaaaatccctacgtcagcgggtctgg

SEQ ID NO: 364528 - DNA, 122 bp, Homo sapiens
gaaaatgtttcagtgtggattctgtattaaccattgccttcggctgggcgtggtggctcacgcctgtaatcccagcactttgggaggctgaggtgggcggatcatgaggtaggagatcgaga

SEQ ID NO: 364529 - DNA, 122 bp, Homo sapiens
gctatgtttgtcctcagacctgaaggaaatagcatcctggatggggcaatgggctccggtcgtctcacggttctcccaggcttcagtttagcagtgtcgagcatgggggttgtccagaggtc

SEQ ID NO: 364530 - DNA, 122 bp, Homo sapiens
ggccttctggaggaggagtgtcacaccttggagagggagatcctcatcctgcaggtgagccgcagccctgggccctcccccgagcctcactgctgagcgtagactctcacctgggtgagacc

SEQ ID NO: 364531 - DNA, 122 bp, Homo sapiens
actttgaggctctgagaggtgaagcgacttgtccgagtgaccttttccggagctgggtgccgtgctgtaggacgctgggtcgtcctggcctctgcgcattgcttctccttcatctcccagcg

SEQ ID NO: 364532 - DNA, 122 bp, Homo sapiens
ggggctgagtggagccgagattccatggagatcaatgaggctgacttccgctggcagcggcgagtgctgtcctcagaacacacgccgtgggagtcagggaacgagaggagccttgacatcag

SEQ ID NO: 364533 - DNA, 122 bp, Homo sapiens
cctacgccatctcgctgaaatgaaattcggatgtagacacccttgcgcttcaggactctacgctcttgcagcagctcctctgcccaatggggggcggcagcatctcagtaactcactcgaaa

SEQ ID NO: 364534 - DNA, 122 bp, Homo sapiens
aaaacagcccttgccctcgagaagtttgctaccttcctagagagacaggacatatgcctgcgaatgtttgtacatccagaaaaatgtcagcaagctgaaggggtttgagaaacacttgcatg

SEQ ID NO: 364535 - DNA, 122 bp, Homo sapiens
agctggcacagcacaggcatactgtaggtcttcaataactatatgctgaattaattaatacgtaatctagtcttcagagagtcccacttctaccaaaccagcagaatgtctcttgcctaatt

SEQ ID NO: 364536 - DNA, 122 bp, Homo sapiens
ctgaacccgcgagctggaagccgagaccagctggtcgctgccgggcccgctagtagcccacggagaagccgcccacagccggacaccagagccttgagggccgccatcttcaaaaacctacc

SEQ ID NO: 364537 - DNA, 122 bp, Homo sapiens
cacgcgctctctcttttcccctcttgctgaaatttcagcagcatgatttttttaagcctccgttttttccatccccctacaagcagccccctagtggacagaaaagaaaagcatcctaaatc

SEQ ID NO: 364538 - DNA, 122 bp, Homo sapiens
ccggggggacccgtcctctgtcaagatggtccagagcgacttcatgcagggggccatggccgccagcaacggcggccatatgctgagccacgcgcaccagtgggtcacagccctgccccacg

SEQ ID NO: 364539 - DNA, 122 bp, Homo sapiens
gaacaaaggaatagtctgcctggaatccctgcaggtcagtgtaaagctggagctgtcccgcggcgcccagaaggactgggatgactgaggtccttgccttaacttgggccctttaccgactc

SEQ ID NO: 364540 - DNA, 122 bp, Homo sapiens
tggttagaaaaataggatctccaccagtatcctcacgggcaccttcccatccgaccttggcgcctgtgccctggcctctgacctcgcatccaggtcccatcatccccggccccgaagccccc

SEQ ID NO: 364541 - DNA, 122 bp, Homo sapiens
tcctcagacctgttactcagcaattggcatttaccatacaaactgatgactcattaataacgacatatcattcagtgtcagaaatcaattcgggataacatttcactacattagtttagtga

SEQ ID NO: 364542 - DNA, 122 bp, Homo sapiens
cagagaagaaaaatgatttttctgggcgcagccccggggtcctggcgcaacgtgcaggctcgcggcgtccaccccggacactggcggcgcccgcccggcagaccggtaactctgacaggtgg

SEQ ID NO: 364543 - DNA, 122 bp, Homo sapiens
cttataacaagaccaccttgtgaacaagccccagctgacctgctggaggatgagaagccacggggaggagagcgaaggcaccccggctaatagcccatcagccatcaaccatgtgagcgagg

SEQ ID NO: 364544 - DNA, 122 bp, Homo sapiens
atactggtcaggtctcctggagaaggctgcactggagctggctaggcaaacagctcaacacggggaaggacttttctttgatcagaggccagggcaggtattaaggaagagattcctgtgat

SEQ ID NO: 364545 - DNA, 122 bp, Homo sapiens
ggtccactgcatactggcaagcactcaggttggaggccgggttctgcacgctggcgtagccgaagctggagtgctgctttgctttcagtctcaggctggccaggctcgagttacacgtgtcc

SEQ ID NO: 364546 - DNA, 122 bp, Homo sapiens
cgcctaccgaatagtctactctcgcgagagtcagaaaaaagtcaagctttttattaacaccgcccccagccctattagttaccaagcaacagtgccaccaggctcctcggcgctgggaaact

SEQ ID NO: 364547 - DNA, 122 bp, Homo sapiens
ccaaagaggtcaaagtggagaagaaaggagagccactgggtcccaggggccaggactccccgctgcttcagcgtccccagcacttgatggaccaagggcaaatgcggcattccttcagcgca

SEQ ID NO: 364548 - DNA, 122 bp, Homo sapiens
tgccccgcggctgcagtcacaaccgtcaagcctttgagaaactctttcaaaaactgcaaccgctcgggagccgccgagggacggcgcccaggcacccaggctccgcgtttccttcgggagag

SEQ ID NO: 364549 - DNA, 122 bp, Homo sapiens
gcttggctggggcgaggcgctgccaacccctgccgccagggggctccaagctccacggcacgatctgctcagggtggcccttcttccacgatccaagccctaagaacaagaggctgggcctg

SEQ ID NO: 364550 - DNA, 122 bp, Homo sapiens
tcgtcacgaaaaaggttttggggggactaataagcacttcctgaatgcacatttgctccacgcccctgctgtagggagagggtctgcagacacttcaacaaatagaatcctaggaccttacc

SEQ ID NO: 364551 - DNA, 122 bp, Homo sapiens
cgcaggtggctctccttggcagcgaggcaaggcgcaaacccgctggcttgggaagcctgacgtgacccccgcccgccaagcctggcaggaagcgacgccggggttctccgcaagaagaaggc

SEQ ID NO: 364552 - DNA, 122 bp, Homo sapiens
gccgggctggcccggcgctctctggggttgttccctcgggcggtgcatggggcccacaggcgtcggggcttgagggaagaggggccggggcctgaagggcggggaccacaacgaggcgcggg

SEQ ID NO: 364553 - DNA, 122 bp, Homo sapiens
ttgtctctctgctcccgcccccaaaggcgctacccattggccgctgggttcctctgttctcgctctaattggcctcgttaccgaaaagctccaaccaatgacctctccgtgtctgtctccct

SEQ ID NO: 364554 - DNA, 122 bp, Homo sapiens
aattgggtagtttgtgatgccctttttgtgtctgcggcctgggactgagggctcaagtagcgaatgggtctttgctgccagatcctcaggcagaggtctctggagaaaccctctctgtggga

SEQ ID NO: 364555 - DNA, 122 bp, Homo sapiens
cggcaaagtgagtgcatagttcccactcagcacctggacccactgacacgtggatccatgcggcccacacgggggctctcagccgggcgacggtgccctgcaggggacatttgatgactgct

SEQ ID NO: 364556 - DNA, 122 bp, Homo sapiens
agacgggccccgctgcgcccgcgccagacatggcccctccccggccggccgcgctctgcccggacccccgccccctgctcggtgctggccccgggcccctcgccccgcactcgcccgggcgc

SEQ ID NO: 364557 - DNA, 122 bp, Homo sapiens
tgtcacccttcgacccaacctctgactcataagaatgatacacaccctgacccctccccacgctgaggaaggtgagtccctggggctgacctgagcctgaccctggaccccctccctctctc

SEQ ID NO: 364558 - DNA, 122 bp, Homo sapiens
cggggttccccctgcctcgtggactctgctctccagagcctgggaccctggcaggtgcttcggatgaaggagccgggaggagccgactgcctttccttcccgccgggatccgcgaaaacgtg

SEQ ID NO: 364559 - DNA, 122 bp, Homo sapiens
cactaggctggggtaaggaactgacagaataaacaaggcctgcagacaggcttctgtggccggtctgcaaacacaggcttctgtgttttgaaatagtcagaatttgaacgtccctaggctgg

SEQ ID NO: 364560 - DNA, 122 bp, Homo sapiens
agtaacaatcttgcaaaaggaatctactgtaaggacctcagtttagaagtgtgagcatttcgttaatcaggtaaaacttaaccacaatgtggcacatttagtgatagcctcaccagatcctg

SEQ ID NO: 364561 - DNA, 122 bp, Homo sapiens
attcacttcaattttgacctctgtcccatagtgaagaacatttaaagtaatactactggtcgaatatgaatgactttttaggaactactttttgtctaacctgaaaaagttccacatttgga

SEQ ID NO: 364562 - DNA, 122 bp, Homo sapiens
cattacacccccagatttacaccaaaccccattttcttttggacggagctcgccgcagcacgtgaccgcccacatgaccgcctccgccaatctcagcagtcctcacaggtggtctcgctccg

SEQ ID NO: 364563 - DNA, 122 bp, Homo sapiens
gctggatgtttgagtgtgaagaaataccggcccaagtactgcggttcctgcgtggacggccgatgctgcacgccccagctgaccaggactgtgaagatgcggttccgctgcgaagatgggga

SEQ ID NO: 364564 - DNA, 122 bp, Homo sapiens
tattacaaaaagcaaaaagaacaaagctaccacaaagctaccacagaacggaagagaacacgaacaagttggcactgctagcccaccaccccacccccgcccgcagcctgcttttattctct

SEQ ID NO: 364565 - DNA, 122 bp, Homo sapiens
taattacctgagtgtttctgagagtggggacaattctgtaactgcgtaccaaaaagctagcgatgctcccctcacattcgctttctcctcttataaaatggaatcatattatacacactgct

SEQ ID NO: 364566 - DNA, 122 bp, Homo sapiens
gtgaggggtcgcggagcgccagcccgcgctgtctctcctccgggagcaggcgcctgcccgcgctccaggcctgccagccgcctcccttggccccggcataggggttgtgtgaggtgatagag

SEQ ID NO: 364567 - DNA, 122 bp, Homo sapiens
tcttcattccatggtactcggagtcctgggaaccactcatcactgtcgggtgcaggtggacgtcccctcacggtaaggtcagagtgctcccgcccagcgcgtggctccgcggcgccctgtgt

SEQ ID NO: 364568 - DNA, 122 bp, Homo sapiens
taccttcctgctgttcccaattctctctggcgttaccttcctgctgttctgccgttcacgcgtgtttatatgtgtttgcatgtgtttacatgtgtttgcatgtgcctgtgtctgcatatgcg

SEQ ID NO: 364569 - DNA, 122 bp, Homo sapiens
aagcgaacctgtgcagtgtttgctgggcttccaaaacgcggagcttagtcgaccccccagcgaaccggacggcgctttggtcccctcacacctaacggtactcagagcctggtgcgggagct

SEQ ID NO: 364570 - DNA, 122 bp, Homo sapiens
ctgacacccaagctcccccagagccaccatgagtgacggcctactgctctcagccgagtgcgtgctatgtgtcaggcactttgccaagagctccgtgcctgttttatttactcaacttgtcc

SEQ ID NO: 364571 - DNA, 122 bp, Homo sapiens
ttgccccatgtgcccttccctgtggacttgagtgtgtctgtgggtaagggcggcagtgcacgtgttcatccatggccggaggccgcggatggtgttgcagccgccaagagggtgaagctgct

SEQ ID NO: 364572 - DNA, 122 bp, Homo sapiens
agatggcggcgccgaacaaggaaggaccctgtctccggggcaaccgggaagccgacccggcgcctgattgctaaagccctctcagagctgctcgggatatccttctgttcgtagtgcgagtg

SEQ ID NO: 364573 - DNA, 122 bp, Homo sapiens
ccccggagttattgctggtcaggcggccacctgggaagactacattttccagatcccctacgacaaggtctggtcatgagactaagttccagccaatggaatgtgatagaaagcaatgacca

SEQ ID NO: 364574 - DNA, 122 bp, Homo sapiens
tttcccctccaagggcggccccgggacttctcaggaactgcgtttcacctggacgtggggcggggagccggcgcgcagagggcggcctccgggcccacccctaggccgagccggccccaggc

SEQ ID NO: 364575 - DNA, 122 bp, Homo sapiens
aggagggatagagcaaccgcagttgggggtgatgctgctgaacacccggtgctctcagcccgtgccaccccacctcccccatcagacagctgtacagagaagcttggggaggtatctgcact

SEQ ID NO: 364576 - DNA, 122 bp, Homo sapiens
tggccagaccccaagatgattggcgaagtgaaagttgcccagttccaaaatggccaccaccgcactttcctggcgtcggagcgactacgtagtgacagaaggaccatcagcaggtgggtgct

SEQ ID NO: 364577 - DNA, 122 bp, Homo sapiens
gttccattcctcaggcacctagcaaggcctgcagccagcaggaagtagtcagaatgaagtcgacaccctgataccccgtagaaatggaatggacattgacagtgggaagtttgtaatctata

SEQ ID NO: 364578 - DNA, 122 bp, Homo sapiens
tgaccctgcaattcgctgatttccccggccacttgaaccgcccctgccaggttaaagaggcgggagacacaccccctcggaagcccggagctacccagcgtttaggactgcaggcttcgcgc

SEQ ID NO: 364579 - DNA, 122 bp, Homo sapiens
caggtcactaactcccttcctccccaagcctccttctccacacccacccccaacgctccacgacccccaagagggagtaccagacccttcaccttgccacaccctgcaaagccaaaatcctg

SEQ ID NO: 364580 - DNA, 122 bp, Homo sapiens
ggattttagaaggcaatagtgtagaatttagagctagaaaggatcttacacatgaaaatacgaaaagtagactttgtaggtttatctaagatttttatttagtgacagagctagaactagga

SEQ ID NO: 364581 - DNA, 122 bp, Homo sapiens
cataaatgaaagaaaagtgaacggcaagtaaagcagcgttcagaaggaagcacggggggccgagctcgctccgaaacgcatgcaggtggaggcactaaaggtcgattaaaccaggtagagac

SEQ ID NO: 364582 - DNA, 122 bp, Homo sapiens
ttacagggcttggactggagggcggggggcaagtaggggacggtaggactcaaactattccgagattggctagggactctacctttcgctaagggatagggctttccgcccgggggtcacct

SEQ ID NO: 364583 - DNA, 122 bp, Homo sapiens
atttcagccaatgcatgcttttctttcccaaatacaaaggcacatggaagtggtcagatccgctctcgccacgattagaaccatgagactgactactcaaaggaacaactgcttgggaagag

SEQ ID NO: 364584 - DNA, 122 bp, Homo sapiens
tatggtcaaggacgaccccaggagagacttaacctggggactgcagctgtcagcctgcagcggctcatcagacacgggcaccctgtggtccccatctcgctcagtgttacaaaagccccaat

SEQ ID NO: 364585 - DNA, 122 bp, Homo sapiens
ctggtcatgcggccagttcagtgtggggagctcattgagccatgcacacaggcgtgtctgcgtgtgttcccagggctgcccgctgaggcccctttgtaccctctcagtcatgtccttcaggc

SEQ ID NO: 364586 - DNA, 122 bp, Homo sapiens
tcagcaaatggcattagcagctgtcatcagaagctgtgagggacccacagattttggaaacgacctggacacactattgggaaggagatgtggacggcctgtctcctcctgcagggcccacc

SEQ ID NO: 364587 - DNA, 122 bp, Homo sapiens
ggcagaattccctccacaagtgtttgctggatcggtgaagaatagcaagctaccctcgatcgggcagcctcagcaccatctgcccccaccagccagtggctagaactggaacatggcaatga

SEQ ID NO: 364588 - DNA, 122 bp, Homo sapiens
gtgactgcggggcaggccgggggcagctgtctgtctggctctttttgacagcccccagtgcgaaaggctgccagcatgtcatcagtgagccccatccagatccccagtcgcctcccgctgct

SEQ ID NO: 364589 - DNA, 122 bp, Homo sapiens
ccgccaccccctgccccacactgcaagctgcaaacgcggtactttcgggctcgcctttgacgttaggaaactagcctgagcctatgcagggaaaaaaaatcgaaaaggtcaatttgttaagt

SEQ ID NO: 364590 - DNA, 122 bp, Homo sapiens
gacacccgcgatcatgttcatttccacttcgtctttcgttaaaagcttttcctgtggagccgagtccagtctctctccccactgcaacacccggggcaggggtcccaccgccttggccctcc

SEQ ID NO: 364591 - DNA, 122 bp, Homo sapiens
ttgaatgcaaaggtttttacaggaaaccaataagggctggggatctcatttgcataggtacgaatttctggtagctctaccttgttcttctaatgcacatgtgggcccttagcttgagttac

SEQ ID NO: 364592 - DNA, 122 bp, Homo sapiens
ctagtgcagtgcctggagatgaccaccaaacggaaaatcatcggccgtctggtgccatgccgatgtttccgaggtgaagaagaaatcatctcagttttagattactcccactgcagtcttca

SEQ ID NO: 364593 - DNA, 122 bp, Homo sapiens
ttttctggggtgtagtagacagtgtcctcctgagctttagacagtgcctgatggtctggccgtccagaggtgaacttgttctcaggaaggcaggggctgtgtctaggcagcctaagtgttgg

SEQ ID NO: 364594 - DNA, 122 bp, Homo sapiens
cagtttaacagattctgcctccgggaaccaactgccgggagattctgattggctcagccgcgtgcccacgtgaccgaccaaaaccggccaccagggtctcccaactgcctgtcaaacgcaca

SEQ ID NO: 364595 - DNA, 122 bp, Homo sapiens
caaaaaaagcagttatttaaacattctgcctgcccttttcgatgtcctaattgtggccagcgttttgaaactgaaaatctagtggttgaacatatgtctagctgcttagatcaagatatgtt

SEQ ID NO: 364596 - DNA, 122 bp, Homo sapiens
tccccagcctcttatgctgacagatatgcagcccactaatctggagccttatagcactttcggtttcttccaggagatgttcctcagatgttgtgttgctcagaatgtgttctttgaaatgt

SEQ ID NO: 364597 - DNA, 122 bp, Homo sapiens
cacctgccacgctgaacccaccgtaacacctgccacactgaacccaacatacgcctgccacgctgaaccgaccataacacctgccgcgctgaacccaacatacgcctgccatgctgaaccca

SEQ ID NO: 364598 - DNA, 122 bp, Homo sapiens
gagcccgactggcttgaggcttagacaggtgaccccgcgaagcgggtgggcaggcgcggccgaggggcgggaggcgggcagcctccgtgattggccggcggagggggcggtgtagcgacccg

SEQ ID NO: 364599 - DNA, 122 bp, Homo sapiens
caaacttgacgaagaggactgtcaaaaggcgttagaaacttcggaaactggcaacagttacggcatttttgctctgcgaagaatacgcccagaaggttcagaaagaagtcgggagtggggat

SEQ ID NO: 364600 - DNA, 122 bp, Homo sapiens
tcggacgcaggctggctgggcagggacactcggccggcggggctggcggtggtggtcactcgttcctccggctcgcggggatgggccgagggcgtgcagggcccgcagctccagaggctgag

SEQ ID NO: 364601 - DNA, 122 bp, Homo sapiens
agacactccagccacccttcaccagcacctgtcctcccggtgaatgccctgggacatacccgcagctccactgaacagatccgggctcatctgaacactgaggctcgggagaaggacaaacc

SEQ ID NO: 364602 - DNA, 122 bp, Homo sapiens
gccgccacattttatgctgccacgtttcatgccgccacgtttcatgccgccatctcatgccgctgtgtctcaggccacatttcatgccgtgtttcatgccaccgtgtttcatgctgccacgt

SEQ ID NO: 364603 - DNA, 122 bp, Homo sapiens
gcctcaagccatcctcccgcctcggcctcccaaagtgctaggattacaggcgtgagctcccgcgcccggctgatgccagcgttttaactctacaacaaactgaaactcaaacgagaggaagt

SEQ ID NO: 364604 - DNA, 122 bp, Homo sapiens
tccaaatgacttccgtgccagtgggaaaattttccggttccactcattggaagtggacaccgtgaaacaggtaagtcggtctgtctgtttcccgcgttatgtgggttccagcaagagcccaa

SEQ ID NO: 364605 - DNA, 122 bp, Homo sapiens
cccgtgattccttctgaggattagctctgacttccccactattggcggtcaaagtggccccgactcgggatgacaattgacggggatcaagggattgcccattctgtgcctgtaagaaccga

SEQ ID NO: 364606 - DNA, 122 bp, Homo sapiens
tgctctctctacttcggagcgaacagcaggacaatccacacttccgtagcctcctggggtcggccgccgagccagcccggggcccgccgccccagcacccgttgcagggcaggtaatgagac

SEQ ID NO: 364607 - DNA, 122 bp, Homo sapiens
ccgcagaccgcacgcccgttccctccgcagaccccacgcccgttccctccgcagaccccacgcccgttccctccgaagaccccacgcccgttccctccgaagaccccacgcccgttccctcc

SEQ ID NO: 364608 - DNA, 122 bp, Homo sapiens
tcagagctccagatctctatccaggggccctctgcagccaccggggatggggctgagggccggttcccacccctgtgcagctgctgcagtacagaccgcctggcttggcaacagccacaggg

SEQ ID NO: 364609 - DNA, 122 bp, Homo sapiens
tgtgtctacagacagcctagctagcatccctgtgccaagagatcctcctccgaacaaaaacgagacaaaacagaaaaacacgtcgtcacaaccctacttccaaagctagagatccgggcgtg

SEQ ID NO: 364610 - DNA, 122 bp, Homo sapiens
agcagaagcagggaccctcttcctggagcccaagagaagcttccagactcaccaatttggcgggcacggggcaaacttgtagccggaagcgaggcgcagctggggcagcccgggccgggtcc

SEQ ID NO: 364611 - DNA, 122 bp, Homo sapiens
ggtggttaccatgtagctcagtggccccccgggtgctgaggagctgcagctgagtgtgtacggtggctttgcagttatagtcgtcccctcttatccagtttccccttctgtgttcagttgga

SEQ ID NO: 364612 - DNA, 122 bp, Homo sapiens
atccgggatctggcgccgcttttgcgtcaggcttctgcctgagctcggttagggcctcaccgacctgcttccacccctcagggaggcctcagtgattcggccacagcctcagcctccgtcgc

SEQ ID NO: 364613 - DNA, 122 bp, Homo sapiens
acggttttctcattccaagccaagcctggagtagtagacttgagagtcctctcagtggatcgggcctttgagcaggtccgtggtaaaacgccacctcagttcccgagaagagcagcagaaga

SEQ ID NO: 364614 - DNA, 122 bp, Homo sapiens
gcctcggactcccgcctttcctcccccgggcaggatgccctcgcgcaggtgggaagggggcgcaccgcgttctctgcgtagccggagctcccttcgcccgcccgcctgccccgcgccgccac

SEQ ID NO: 364615 - DNA, 122 bp, Homo sapiens
agtgtgtccgcgtcttcagggccctgtagccccgcggccccacacccgcctccaccgccccggttccagccccaccaaggcccttggggagccccgagtccccaggcccacctctccccgcg

SEQ ID NO: 364616 - DNA, 122 bp, Homo sapiens
gccctcagcacgcgccggcggtggcgaggctgcagactggggtccgggccgcccgcggggcgtccgcgcaggctccgcagcagtggcacgaggtaccctgcagccacctcgcgcgccgcctc

SEQ ID NO: 364617 - DNA, 122 bp, Homo sapiens
ggtccggaaagagcactgtctctggagtccacggacagaaagcgcaagctcgctgggggccggtgggcaacttaggtcacctttgtaagcctcggctttctcatccctaacaacacgtctga

SEQ ID NO: 364618 - DNA, 122 bp, Homo sapiens
tgccttggactcagtctccaaacctcctttttatgtgaactattttctaagtaagaccttcgatcttatgtctttaaatatcttctttttgtcgatggctctcaaatttatatgtctagtcc

SEQ ID NO: 364619 - DNA, 122 bp, Homo sapiens
cacacacagccggctggaagtccagagaagcagaacacaccgaaaggcaccaacagatgccgacaggctatcgacgacgccacgatgacgtgaaatttggcacagcgcggtcggagtccagc

SEQ ID NO: 364620 - DNA, 122 bp, Homo sapiens
gccggccccagcatgtgccgtagccccccagggtcgctggaggtcaaagaggagaggcagcgtgcggcacagtgccagcttctaaggaaacagacacacacgcagtcaccattcattagaca

SEQ ID NO: 364621 - DNA, 122 bp, Homo sapiens
aggctacagacagtgactaccagagagcaaaagctaacacccaatacaagacacagccgccgccccgttctccacgctggggccacagaggccctgtgcaattcctcattcaatccctgctg

SEQ ID NO: 364622 - DNA, 122 bp, Homo sapiens
gaagttggacatgcatctatgtgtgggatggggtcctggccttggcaacaagggggtgtacgtgtgggtgtgagtgacagcagactcagagtccaggcccagggcctctggggactgtcacc

SEQ ID NO: 364623 - DNA, 122 bp, Homo sapiens
cgcctccctctgcttggctgtcccaagatgtctctctccactgcctaggaaccctgaggccgcggccaagttctgagcgtgtgactgtgtgtgctgggccccaggcccctttgtcgccgcgg

SEQ ID NO: 364624 - DNA, 122 bp, Homo sapiens
ccccgccagctgggggccagattgggtgacactcccctcgacgcagcctccggagcggcgcgcactctccagaggccagcaggactgcgctctctaccgcagaacctgctccagctaggtgt

SEQ ID NO: 364625 - DNA, 122 bp, Homo sapiens
ttctgatcctatgctttgggaaacactgctgtcagcccagaagagtcagcgggttctgaacgctcgtgcggtgtgaaggccgtagagacacaaactcctacgtagcgcggcctgggggagag

SEQ ID NO: 364626 - DNA, 122 bp, Homo sapiens
tatcttacgtaaataaagggggctttgctctcctaattgtgcccactgttctgtgcagcgcggaccggcgcatgcagcgagcggggctgcgagggcgctgctgtggccaggcgtctggcatg

SEQ ID NO: 364627 - DNA, 122 bp, Homo sapiens
tgtttacatgagtgtcagacggagcaggctccaggggaacacggaaatggcattaaataacgctgaatcacacagtaagaaagttccccttcccttctcctccgtgcctgctgattactcat

SEQ ID NO: 364628 - DNA, 122 bp, Homo sapiens
gtgagtgaaagccggggctaatttccaatgcccctttattcttccttctcaccatcttgccggtccccgaggagccgtctggcgtcggcatggaacggagaggccggtcctaggcgaagtcc

SEQ ID NO: 364629 - DNA, 122 bp, Homo sapiens
tcggcctgtgcgtcgatgacctcccagcagcgctgggtcaggtcgggctcctcaaacagccggctctgggacagcaggacgcaggcgttcttggctttcagacttgtccccagaaagttgac

SEQ ID NO: 364630 - DNA, 122 bp, Homo sapiens
acgcgcgggacctcatgcccagcctggcccggttaaccaggccagctgtatggtaatgggcggcgcggccactctgcttaactcggccgagttaaggccggcccggcgcccctctcccgcca

SEQ ID NO: 364631 - DNA, 122 bp, Homo sapiens
aattcccttcccactttactccctaaaacagccctctgggaaccacattcgcgagcttgccgtgggatcacgcacgccgtgactacaaaatgtaaagcaatagaacacacagaacacactgg

SEQ ID NO: 364632 - DNA, 122 bp, Homo sapiens
accttcccctctggcccagccaccactgcctctcagcttcaacaggtgacaggctgctttcgtgacttgatattggtgtcatagcatttggcctacattaaaagccacaatttcatggggaa

SEQ ID NO: 364633 - DNA, 122 bp, Homo sapiens
ttcccaattcttgtctttttactttggtgaactagagaatcactgtctgcttcaactaaacgtgcatcattatatctctaatcttggtttttcctcatgccaggagaacttaagggccagtc

SEQ ID NO: 364634 - DNA, 122 bp, Homo sapiens
ctgaggcccagtgaagttggataccttggccagggtcatgtgtcagaggggctaggattccggtcctcagactctcagttcactgcacacactctcccagctgcccagggccctagctggtc

SEQ ID NO: 364635 - DNA, 122 bp, Homo sapiens
caagaacgaagccgtggaccctcgcgatttgagtgttacagttcttaaaggtagtgtgtccggagtttgttccttctgattttcggatgtgttcagagttccttccttctggtgggtttgtg

SEQ ID NO: 364636 - DNA, 122 bp, Homo sapiens
ctaatgggcaggtccggtccgccctctaggagaggtgctgtccggtgaggcataaaatcccgggattctggctggaggcagctcctgagactgctggcatgaaggggagccgtgccctcctg

SEQ ID NO: 364637 - DNA, 122 bp, Homo sapiens
ggtgctgcagctgcagcagccatggtggcgcgaaggggacaggtctgcaggcccaccccacgtgcttctcgttgcagacggtggagcatggcttcccgcaccagcccagcgccctcggctac

SEQ ID NO: 364638 - DNA, 122 bp, Homo sapiens
ctaagtactttgagaacaaggcagagttaaatgagagaggctgactgaagtgagagtgaccggaatgagctattttaggtcagtaaaggcttttgcgaagatgacaattgaggagataactg

SEQ ID NO: 364639 - DNA, 122 bp, Homo sapiens
cgctgtgcagtcactctggctgcttaaggcgagagccgtactggagaggaaacctggaaccgggagcactcgtttgcaggctcttcttactgcttctcacctgagccccgtgaaatctctgg

SEQ ID NO: 364640 - DNA, 122 bp, Homo sapiens
gggagcacccaggctgggcgagtcgcagtggaagccttggccaaaggtgccatcggaaggcgtggacgggttcatggagtagggtcctatgaagtcacaggggtctcgctctcccacgccga

SEQ ID NO: 364641 - DNA, 122 bp, Homo sapiens
tccctccggctgccccaggattgcgcacttgtctctgcggaacaataacatcgacgaccgcggggcgcaactcctgggccaggcgctgtccacgctgcacagctgcaaccggaccctcgtct

SEQ ID NO: 364642 - DNA, 122 bp, Homo sapiens
acttaatttttgacacacctctaataacatcacttttctgttttggaagatcaaagccatcggccagacagagttgaatgcaagcaatccagaagaagtgttacagctggcagcgcagagaa

SEQ ID NO: 364643 - DNA, 122 bp, Homo sapiens
gcccctggaggtgccacagtgctcccagctcccccagaggctgagttcaaacattctaaacggattcttgataacaagccgccggctcgctggaagacactgagcagttacataacagcaca

SEQ ID NO: 364644 - DNA, 122 bp, Homo sapiens
cgaggttgctgttggtctgagtcacaggtgaagccccatttgtttttccattcagccacccgctggccctaatcacaaatgtctttgtactcacagtcatcttatgcagggtttgtacttcg

SEQ ID NO: 364645 - DNA, 122 bp, Homo sapiens
gccattttcccccttgatatctctctccataaatcggtggcgcggcggaggcggcagagtcgggcgggaagcgcggggccggccggggcgcccgccgctcgccgccgcctccgcgcgcccgg

SEQ ID NO: 364646 - DNA, 122 bp, Homo sapiens
cacagattccactaacaggcagcatcgccatccgaccctggcacccggtctccagggacgcgccgtgcacttgggaaaggaggaggacgtactacagagaaggacaccctcacctgcccggt

SEQ ID NO: 364647 - DNA, 122 bp, Homo sapiens
aggtcgggagagccaatcggaacgggtgcggagggtgggtctgtcacgtgacgggaggggcggggcaccggccgggggcgcgtgtgcggggcggggcccggcggtgagagggtgcggcgcct

SEQ ID NO: 364648 - DNA, 122 bp, Homo sapiens
tgctgagattacagacgtgagccaccgtgcctggccctttttttttttttttttttggagcgtcactttgttgcccaggctggactatagtgacacgatcatagctcactacagcttcaaac

SEQ ID NO: 364649 - DNA, 122 bp, Homo sapiens
ccctcggcgcggtagctctggtgcacgcagtccaggatgccgcggtagcgcggggcgccccgcagtccgtccgcctgcagccgcgacttgaccacgtccacaggataggtagagagccagga

SEQ ID NO: 364650 - DNA, 122 bp, Homo sapiens
cacttggtcctggggagtggcgactgtattgtctgtctgcagcatccctatcagcgctaccgttgttccacgcacacagggagtaagtactgggagtcccagccaccgccgcggaaaatctg

SEQ ID NO: 364651 - DNA, 122 bp, Homo sapiens
cctatccatccttctggccctgcctccacacctctcacactgcagacaggcgtccccagacgcaatgagctccccgcctcgcagggacacccgacagctctccacagcctgcaaggcaaagc

SEQ ID NO: 364652 - DNA, 122 bp, Homo sapiens
aatcagtgtggatctactctcaatgctcccagtgagtacatggttgttccgtggcaggaacgttgcatttgtgttctcactgaagtcccatataggtgtcattttcactgatgatgtggcag

SEQ ID NO: 364653 - DNA, 122 bp, Homo sapiens
aggggcaccagccttgagtaaacggatgcccacagtgtctgggtgctcccagggcagggccgcagggcctcagggccatacccgcctcgcaggtggggcgggcgccctggatgcgctccccg

SEQ ID NO: 364654 - DNA, 122 bp, Homo sapiens
agaaacagtgaagatggccggcatgctgagcaagagggggcttacctagctcctgccagtcgtggccaggcagaaattgtggtccaccttttggtggatcccaaggctttcaagaaaagtca

SEQ ID NO: 364655 - DNA, 122 bp, Homo sapiens
taaagttatactgtcagtcattgtgatgtttgcctagaggcaaattaaattaggtatcttcggtgcaattctgaaggagacattcattcagcatcgagatctgctcttgatgtgttaaatgg

SEQ ID NO: 364656 - DNA, 122 bp, Homo sapiens
gagcgcagcccaggaggcgctcttccacccagacatctgcttcagcagccagctgcagagcgcaccgctgctcatcgtggacaagggccccgtggagctaccagaggagttcgcggtccagg

SEQ ID NO: 364657 - DNA, 122 bp, Homo sapiens
tcataattcggcaatcccactactaaggatctgcccgagagacatgggttctgggggccccgagcagcacacacaaggatgcttgcagcagtggtacccctaaatgccaagacggaaaccgc

SEQ ID NO: 364658 - DNA, 122 bp, Homo sapiens
ccccattgagttcctccctacctcctggatgtgcccgaagagccagtgggagggagggcacgggaactgctggagggctttgagcagccactgcctgtgcaggtagagctgaactgccttga

SEQ ID NO: 364659 - DNA, 122 bp, Homo sapiens
tctcctagaaagacaaaataaatcactccctctgccctcatgtactttacaccacgtgtccgcagtttgtcacgtcaaatcatggcagggtctggttccaagacgcacacacacattcgggg

SEQ ID NO: 364660 - DNA, 122 bp, Homo sapiens
gggggtttggtgggaagaggagcacaattggaggtatctacagtgtcttagtttccccaccgggagggtaagtgagaggtctccttggctgctgtttcaatggaaagaaagggaaaactttc

SEQ ID NO: 364661 - DNA, 122 bp, Homo sapiens
aaggagttccatgtttcaaaatatatttccagcttttacaaatagaaaagtgaatcttttcggtgtttaacaggtttaatgtactttagaggaggtaagtagaccaaccaggacctgctcca

SEQ ID NO: 364662 - DNA, 122 bp, Homo sapiens
ttcctaaagctgggggcgggactggggtaggcggtagtcaaggccctttggtgaagcaagcgattgtctccagcgttgtcagcttcgctcctccataagacagttgctaatttccacctctg

SEQ ID NO: 364663 - DNA, 122 bp, Homo sapiens
aagctctctgcgcgcagcgccgcggggcttggccttctccagtcctcgggagtcagccaccgtctctggcttgttataggattcccacctcgtggtgggcaatgatatatacatattcaaca

SEQ ID NO: 364664 - DNA, 122 bp, Homo sapiens
ggcctaaaggatggtgagaaatgaactcctggttgccgaccagacttccccttctcatcccgacgacgcgggacatagggtagacggtcccaatgccgacgtaagttccacagttcattcct

SEQ ID NO: 364665 - DNA, 122 bp, Homo sapiens
gggcagagggaaggtggctacacacgtcccggcttgtcgctcaccacctgttaacagccacgcacaaagcaacccgcacggtctgaagtggcccgattgttacatgttgtattatatatagt

SEQ ID NO: 364666 - DNA, 122 bp, Homo sapiens
catgacctcatctgtacagtgagggagctagacaaggcctctccagtactgattttatgacgggtccaagtgaaatgattaactggacgccctctggttattgtgtagtgccgaggccatga

SEQ ID NO: 364667 - DNA, 122 bp, Homo sapiens
cagcagtcatcaatgttgaggtatgtgtagcccatgtcccgccatccatcctgtgccatccggtcagccatctccatgaagagctgttcactagtgaggggcagagggatggggtagctcag

SEQ ID NO: 364668 - DNA, 122 bp, Homo sapiens
gcaagtgttggatgtctgcgtgtgtgtgtggctttgtgtatgtgtgtacgtgtgtgtgtgcgcgcctgtaagtggagtcggcttaaagaaatgcggctaactcactacagatttttccccca

SEQ ID NO: 364669 - DNA, 122 bp, Homo sapiens
acagaaagggaaattgcctttcccgttaaggtcagactggtccgaagtaaaggactggtgcgccttagcaaccgcctctgctgaagccctaacgctggagctctttcgccctcgcagaataa

SEQ ID NO: 364670 - DNA, 122 bp, Homo sapiens
ctcctcttcctcgcttgccaaatcctgtcacttttccaacagaaatgtctctcccttcaccgtttccttcctactcccacctcaggccccatacccacgttgccagacttgcatcagcctcc

SEQ ID NO: 364671 - DNA, 122 bp, Homo sapiens
gctggtgcccgtcttcctcctaaggggccaggccacatccaagtgggcctctgtcgggggcggggcggtaggtccgaaagaaaccgcagacactacgatgcactcctcaagctgtcttttgt

SEQ ID NO: 364672 - DNA, 122 bp, Homo sapiens
tcagatgtggatgtaaccccactgcggtggagcctgtcagggacacaggagccaacaaagcgagaacccggcggccagggtagggacagctcgacctgcaggagggtcaggccacattggat

SEQ ID NO: 364673 - DNA, 122 bp, Homo sapiens
gctggcagccctgccgcttggctgtctttgtttctccgctgtgtgggcgcgtctcgagcacgtggcagctgagagcgcgggccgaagcgcaagcgacctgggttcagtgtctaccgccgcct

SEQ ID NO: 364674 - DNA, 122 bp, Homo sapiens
ttctttgcctggccgctggccctgcacgcacccccttcctcgcgcctctgccgcccttgccgtttctgtcctcagtgtcctgctggggcttaccccgagtcccgcccaaggtgcagacggcg

SEQ ID NO: 364675 - DNA, 122 bp, Homo sapiens
agtgccaccctctccctgacccagtttgccatcctctaggaaggggcacgggggaatagccgctgccagcgccttccctgaaataacctggaagggctccactctgggccccaggcggctgc

SEQ ID NO: 364676 - DNA, 122 bp, Homo sapiens
gagttggtttcaagcaaagagggggccaatttacaaagaggcacaggatcttctagggctcggggatgctgatgtggctgataagaaaggatgacaggagttcacctccagggaggcagtgc

SEQ ID NO: 364677 - DNA, 122 bp, Homo sapiens
tctcaccccgggcgcctccccgctccagcctcctcccggaagcctggtgcgctctggccccgccgaccagcgacagtctctccacgcgctgccgcctagcaaaggcgcatctttaggtcggt

SEQ ID NO: 364678 - DNA, 122 bp, Homo sapiens
caggtgtggatctgtccttacaatggggctttctccaccatcccagacccaggaggcccccgtgggtcctatgagctgacctggctggcacgtggcatctggctaccacaggacactcagct

SEQ ID NO: 364679 - DNA, 122 bp, Homo sapiens
actcacaggctgacttggttattcacagagaagtaaatgttttgcttacccagaagatgacgattctaggcttgggtggtgctgtgatcccactccaggagggcgctccaccgattctctcc

SEQ ID NO: 364680 - DNA, 122 bp, Homo sapiens
gttctgattgcactgcagtgaatctgccctaaaccaaacgtcagaaagaaaagcggcagacgtttcatcacaacacagagacagacaggagcccgccctgctttaatgcgcatgcgggggag

SEQ ID NO: 364681 - DNA, 122 bp, Homo sapiens
gtgagaaggcgtgggttaactctttaagtctggctcctgactcagtcctttaggcttgcccgtgggcactcccttggattcaagactgggcgtgatgctttttgccctgtgaccacaaggta

SEQ ID NO: 364682 - DNA, 122 bp, Homo sapiens
tgatcttgttaggttttggtatcaagttacatactgggttcacaatatgacttagctctgcgtccccacccaaacttcatctcaaattataaaccccaaatccccacgtgttaggggaggga

SEQ ID NO: 364683 - DNA, 122 bp, Homo sapiens
ctctgcctgggggccccagcggcgctgctttcaccagcctggcccggaggccctcgcccccgagggcacttgggcaactgtctgcccctggcatgagcaagcgaccaagacctcctcaaatg

SEQ ID NO: 364684 - DNA, 122 bp, Homo sapiens
acgctgcttgcggttcaacaccggcctgcgctgatcagctttttcttcagctcggttcggcgccagttgatttttccccccgggatcccccacagttgctcggcgacgccaatatgcggtcc

SEQ ID NO: 364685 - DNA, 122 bp, Homo sapiens
ctacacactggtaatgcaacagaatgcccaagagtgacctcataaagcaaggattcccttcgtggccccttctctgctgcctctcagaatccagacgctaaggaaaatccctaagcagagat

SEQ ID NO: 364686 - DNA, 122 bp, Homo sapiens
atgcccacctcctcaaacgagacagcttggggtttcgttacaggcaccaaaaagaaaccccggtccagctggagacgcaccgagcagaagcctcaactcccctcgcccaggcgtgcagccca

SEQ ID NO: 364687 - DNA, 122 bp, Homo sapiens
actaacagctctataaaacttgcttccagaggcaccactcagcccccaggtcagcttttccggacactgttattcatctggctagaaaggctttcagctgtgactattgccaaaggccctcc

SEQ ID NO: 364688 - DNA, 122 bp, Homo sapiens
agatgcagaaactgaggcccgggaccacacacctgacaccaagtggactaggattcaggccgttgaccatattctttcaacttcaggagcaacagcacctggaggacccaaatttgctgtca

SEQ ID NO: 364689 - DNA, 122 bp, Homo sapiens
ccgggaagccgggacggcctgcctgcgctcaacaccaagatcctgtacccaagtgagtggcggccagcaggagggactggtgggggccctagcacaacactggtcccgtcaaactgaaagag

SEQ ID NO: 364690 - DNA, 122 bp, Homo sapiens
cacttggtctaatccagagatggcaaaggccaggtgtttgtgctgaggccaaccccttcccgcccagggcacaccgggctgctccatcctgcatcctttcctgcagagcccaggctcagagt

SEQ ID NO: 364691 - DNA, 122 bp, Homo sapiens
cgtggagaacctcttctaccccacgaccctggatgtgctgcaccagattttctccaagttcggcacagtgaagaccatcacattcatcaaggacaaccagttccaggccctgctgcagtaca

SEQ ID NO: 364692 - DNA, 122 bp, Homo sapiens
ccctttgtgcatccactgtatggtttttacatttattttctggtgcctttcacagatcagcgtacggcacagttgctgtatctcccactagggtaagctttgaggccagggccatgccatac

SEQ ID NO: 364693 - DNA, 122 bp, Homo sapiens
ctttagccatccatcccaaaattaagcacgctgggagctggagtcacagcagtgataaaacgaacaatgattctggttcctactgactgacaggagaggtttaagggtctctcactctccgg

SEQ ID NO: 364694 - DNA, 122 bp, Homo sapiens
cacgtgaccggttctcaccaaccccgcccctccccaagagagcccgggccggaaggtggccgcaatgccagcttggacccctcacccgtgagcagccggctgtccgccggacccctgtcccg

SEQ ID NO: 364695 - DNA, 122 bp, Homo sapiens
agatagatctgaagacagcagaagcttgtctgggcctagcttccttgaattcttcttccccgaattgctatgtcttggtaattttgaaatatgagttagaaaccatctacttacctaactga

SEQ ID NO: 364696 - DNA, 122 bp, Homo sapiens
acacatgggggagaacgccgggtgcgcgcacaggggaaagaacgccagctgaacgcacatcgagcatggagtcccaaagtgattatgacctaagcagccagccagggctttaccctgatatg

SEQ ID NO: 364697 - DNA, 122 bp, Homo sapiens
agaaggagagcagataagcagatagcttcaatccacacacggaagcttctggggctttctcggaaactgcagcaactagaacagtgcctggcatacggtacgcattcaaccaatgaatttgt

SEQ ID NO: 364698 - DNA, 122 bp, Homo sapiens
ccgcggcccgggcttcccaccccttccctcgccgcccgggcccgccctggccagttgcagcggcctggccacctcaggagcacgctgtctcttcccgacgtgcagcccggggcccggccctg

SEQ ID NO: 364699 - DNA, 122 bp, Homo sapiens
ggacgatgcttgagtgcaagatggcagcaggccgggagaggcccagaagagaactcaccacgccgtgggggtgagtagcgggagggacagcagcatgtgcatcccccaaaggcctccagttt

SEQ ID NO: 364700 - DNA, 122 bp, Homo sapiens
tcgggccagagagcatgaccgcctgagctccgcctcctgtcagatcccagacagcatgaccgcctgagctccgcctcctgtcagatcccagagagcatgaccgcctgagctccgcctcctgt

SEQ ID NO: 364701 - DNA, 122 bp, Homo sapiens
gcttcgtgctccaggagcgcgtggtgtgcaacgagcgcttctccgaggacggttaccgcacggtggtgcagggcaccaagaaggagggctgcaccatcctcttcatgatgctctacttcttc

SEQ ID NO: 364702 - DNA, 122 bp, Homo sapiens
cattactttcaatatcacagaagctggacacgcccccactgatattgtttctaattgcaacgtgggagaggaggatatgacacgcgatatccgagggagtggaaacacccctgtgatactct

SEQ ID NO: 364703 - DNA, 122 bp, Homo sapiens
gagccaccgccttcaagagcagtctgatagaaacacacagagcttacggaatttcccagccgccaggcaaggaggaatgtagtccgaagtcatgatttgcccatcttgaagctcaatcattt

SEQ ID NO: 364704 - DNA, 122 bp, Homo sapiens
ggaagcacagttcatctccatttctcagcccctgatgaaagtggtggtggctacccaatccggaaacgatggaattgacaaggggaaaactcgccgagggaaatcatatcttctacagactc

SEQ ID NO: 364705 - DNA, 122 bp, Homo sapiens
gctggcaggcagctctctgttcccgaggttgcagcagctgctttctgtcctctctttacccgttcccccccgccccacccccgccagcggattctcctgcggaacctcaaacttcagaggca

SEQ ID NO: 364706 - DNA, 122 bp, Homo sapiens
gaggaggaagtgctagcggacccaccccaaggtgcacagttagagaaggagcctctgcggcggccggagccccccacggacatccccttgaggcccccccagccacacccccaagagtcccg

SEQ ID NO: 364707 - DNA, 122 bp, Homo sapiens
cctgctcgcccgcggccggcagtgagggcggcagcggctcgtagcggtcgcagccgccgccgccacagccgccttgaggcggggcccctccaccatcggccacctccggctccagcaggtgg

SEQ ID NO: 364708 - DNA, 122 bp, Homo sapiens
ggcggcggtggacctgagcctggagctgcgggcggaggtggggagagggaaggtgggccacgcccctggcctgccccacgactcgggtgatttcccacctctgcgggtccctggccctgccg

SEQ ID NO: 364709 - DNA, 122 bp, Homo sapiens
cccgcctccgcctgggcacggggcagggacccgcgcgaggcggtgccggggaggtcctcacgtactcaaaaacaagcagaaaaggcatccagggccccttcccgaactccccacgggctgcc

SEQ ID NO: 364710 - DNA, 122 bp, Homo sapiens
ccagagtatttttgctggaaggaggtatttatttgagcagggttctggaagacgagccgccgaagggtacctccggctttccgtttcaagtcccacgctggtggaggttgctcggtacccgc

SEQ ID NO: 364711 - DNA, 122 bp, Homo sapiens
tctaacctatccattggatagtggggcggcagctctcctctctgattggtttagtatacccgcccgtcatcgctctttaccgccccttttcctaaacccggtattcgcccccgcccggacct

SEQ ID NO: 364712 - DNA, 122 bp, Homo sapiens
cctggggcggagcctcccctcaccaggtgggcaggaagtgagtccagatgttgaccgtctcgttggtcatctggaaggagctgaggacacagtccaaagccgagctggtggggcggcggtag

SEQ ID NO: 364713 - DNA, 122 bp, Homo sapiens
aaacttctcatttgttaggtggcaggtaggtaggttttgaacttggtagtgatattcagacgaggagcaagattccactggcagttctgtgatgctaagtaaatgatgtgatcatatccgtg

SEQ ID NO: 364714 - DNA, 122 bp, Homo sapiens
tcggatctcgcgccaacgctgggggcggggctacgtcgcgaccgccccgggcgccagccccgccccggcaaggccctggcccccttcgctgtgccccgcccacgcactaactttcgcggccg

SEQ ID NO: 364715 - DNA, 122 bp, Homo sapiens
gatgtctctggatagtggaatgcggaggatgcagggcacgccggtggagagctgcccagccgtgccagcaaggccccggcatccctcccacctgccgttagcaccgggagctgctctgctgg

SEQ ID NO: 364716 - DNA, 122 bp, Homo sapiens
atttatcaccaccagcagctgtgaaattttccccacgtcgattggcacggctcagattcccgctcctccggtcctttattgcttttttccccttcccctcctgaaccagagtggtgatccac

SEQ ID NO: 364717 - DNA, 122 bp, Homo sapiens
ttccatgaaaccggtcccttgtgccaaaaggttgggggccgctgtcctagatggcctttgcgacgggctcttctcacacgtgctgcctcccgctgtccactcacgaattccccaggccagcg

SEQ ID NO: 364718 - DNA, 122 bp, Homo sapiens
tcaaaggccttctcttccagctccaactccaggagctatacaaggtgcagaatcgaaaagcgtcatctgtcttcagacagcttcagtaaatatatttctccttaacaacctttcacctaagc

SEQ ID NO: 364719 - DNA, 122 bp, Homo sapiens
ccccccccaccaagagagaacggaatttgcccaaggtccccctgaaagagcctaagaaaacgtgaggctctaaggttaaaatcctacctgacaccctttcctttccccaactagtcctgtga

SEQ ID NO: 364720 - DNA, 122 bp, Homo sapiens
cttcccatacgcgcacacacaccctcttgaaaagaaagaaagtggatctgtttgcagaggcgctatcacgtttcatcaggccacctgagactgcttttgaaagcgtgtactgtgaaattcat

SEQ ID NO: 364721 - DNA, 122 bp, Homo sapiens
acccggacagcccgggaggagggcggagaggagtccgacctccgcaggcagccgcgtccccgccccgcgctgcctacgacttagggcccccggcccatcccctgccgctgcagggcgctcac

SEQ ID NO: 364722 - DNA, 122 bp, Homo sapiens
gctgctctagacttgtcaggaaccgtgctagcctctgggtcctagtgcccccctgcttcacgtgggccagaaactaagggctgggcatacgccacagaccctcagcactcaactcttgaata

SEQ ID NO: 364723 - DNA, 122 bp, Homo sapiens
cggttgtggctcaggggtcagctcctgctagtgccaggacactactgggaggctgggacccgaccaaagcccatggtgtctctggcctgaggaccaggtgtcttgggaccataaggccaggc

SEQ ID NO: 364724 - DNA, 122 bp, Homo sapiens
ggcgcctgtgacctcccgtcccctcccgcggctcccgcggcctccgacctcctgccggggcgcctcaagggcccctgccccacatcagagggtcttgcggtttcctggtttggttcaacatc

SEQ ID NO: 364725 - DNA, 122 bp, Homo sapiens
acctaaatcaatcaactgttacacttcccttagtgctaggacatattcatataactcccacgtattaaatgaaaatacatccatctaaaaataaaacaacacgattgctgctacaccaagaa

SEQ ID NO: 364726 - DNA, 122 bp, Homo sapiens
aagccacggtattcagctacaacacaccggaggggcatgcattacctgctctgggacttgcggtgaccacgcatgtccttcttgggtctccgggtgactggcggggctggggtggagggcaa

SEQ ID NO: 364727 - DNA, 122 bp, Homo sapiens
tggtgcgcctattggaaccgactcctcagcctcctcccccgtccccacctcggggactggcggaccgtgcgccccgcaggcttaacactccccccgacaccctcgctccgagaaggggtgtt

SEQ ID NO: 364728 - DNA, 122 bp, Homo sapiens
ttttaaaaagttttcttccttttctgtgggcatagtatgcagaatagactcagcattctacgtggttactttaacagaatggaactttgaaaacatttttttttttttttttttttgagacg

SEQ ID NO: 364729 - DNA, 122 bp, Homo sapiens
gcctaggggccggggaccggggccggggcagcgcggcggccgctcgggggccccgcgccgcggcacttactgatctcgtacggcatcctcgcccacttgttaccgcgccgcgctcgccgaga

SEQ ID NO: 364730 - DNA, 122 bp, Homo sapiens
gacagagagctagctttccattggtgcagagatgagggcagatcctgcccttccccacctcgagtttagccagttagtggtctaattaaccacagatgtcctctcccatcacagcagagtat

SEQ ID NO: 364731 - DNA, 122 bp, Homo sapiens
ttttcttagcatttttctttttcccccatccaacaggctgtgtggttccggtgctggtgccgtggaagtggcaatggcagaagccctgaataaatataagctcagtgtaaagggcaaggcac

SEQ ID NO: 364732 - DNA, 122 bp, Homo sapiens
gcacatgattcggaattcaaaactccagcgccagtctctccctcaaaccaaaagatcagccgtcgacgctcaaaggcagggaccgatggttgggtagcgcagcgctacaggttgggcgctgc

SEQ ID NO: 364733 - DNA, 122 bp, Homo sapiens
cttcccctggaggcctggggtaaagacgaaatgagagctgagttcacgtgaagtgccccacgtggtggcagtttcctctcttttcctgtgcagctaggtcaccacccacttctctttgtacc

SEQ ID NO: 364734 - DNA, 122 bp, Homo sapiens
ttttttaattaaacagtcttgggcttgggtaaggacaggttgaagtttcaccggtcattgcgccaatggaatccagtaattttcagggtctaacagaatgaggggagagtggccagaactcg

SEQ ID NO: 364735 - DNA, 122 bp, Homo sapiens
agggactgttttaggcaatcatttgctaggaatggctatcaagtgaaggtcttgctgatccgtcctaaaaaacaaaggacaaaaacctatgagtagcagacaaaagcatttattaaataata

SEQ ID NO: 364736 - DNA, 122 bp, Homo sapiens
gctcttggtctatatgggaaggccatggactacaattcccacaagtccgtgcgacctctccgttctgcgcagcttcgcggtatgaggaagagggtcctgtcaggcgcactcttgttgcatca

SEQ ID NO: 364737 - DNA, 122 bp, Homo sapiens
cttggagacggtccgagggggccctaaggtcgagacttttagggtcctgcagtggattatcgtaggcagcctttttcctgataccagaccagctctgcctgtaccattttcctctgtttaag

SEQ ID NO: 364738 - DNA, 122 bp, Homo sapiens
gaagagggtcgcggtgtccgtgcagggattcaccgagagtccagaccccagaggggcaagcggtcagcaccacagtctcgccccgcagcgctgaccgcagggtctatggaacccattggccc

SEQ ID NO: 364739 - DNA, 122 bp, Homo sapiens
gtcccttcgtgacctccgtgtgcccgagggaagagaggccgtgactagctctttctccgccgtgagctcgcttggtcagcaaactaagtactgggtaaactctcctcccgaaactactgacc

SEQ ID NO: 364740 - DNA, 122 bp, Homo sapiens
cggcgccgcttcctcagcggagggcagaagctccaagagggcggccggcctagcaaacaccgtaactacccccgcaggccggatccggcggcgacaggctcggccgcgcaggaaagaggggc

SEQ ID NO: 364741 - DNA, 122 bp, Homo sapiens
ccacctgctgacggcgcaggacgagaacggagacacgtaggcaacagagggcctggcggacgaggcgcggggtgggggcaggaaagggaccggcacggaggcgggctctgcagttttcggac

SEQ ID NO: 364742 - DNA, 122 bp, Homo sapiens
gagtatgaggctcctgctctgatttcctccttgcctttctggctgaggttctgagggcaccgagacagagggttaaatgaaccagtgggggcaggtccctccaaccaccagcactgactcct

SEQ ID NO: 364743 - DNA, 122 bp, Homo sapiens
aaatgccagcgtgactgattgctaggtgggtccctccaagtgcgcgggaaggaaccggcacgaccgcacaatgctccttcctacagagacgcggcgtcgtgccagagccggagatttgagtc

SEQ ID NO: 364744 - DNA, 122 bp, Homo sapiens
tgcttctattttttaaaaaattatttctcagtggcatgggggaggggagatcaaaggtgacggatgggtatctctatgttggtgtcaagtatgccttcatgtctgtcgtttcttcagcagtt

SEQ ID NO: 364745 - DNA, 122 bp, Homo sapiens
ggaggagagcgagtgccggggctgggggccggagccggggggaggggagcggggagcaagcgcagagggacaaaaatcaaccggaattgaaaactactcaacggccgcagaacggggtcgat

SEQ ID NO: 364746 - DNA, 122 bp, Homo sapiens
gaaactcgagccagcgaggctgggggcgggcggacggctcgcagaggaatttgcagtttccgggaggttgaggaagcgacccgagcacagccccagcagacgcagccctagcgcccggcttt

SEQ ID NO: 364747 - DNA, 122 bp, Homo sapiens
gtaaacatcgaattcctgggagggaggcttcgggttgctaggagaccagcagcaacaacgcggtggttcataggcgagcctgcatagaaagtgcttgcaggaccgccagggacccggccagt

SEQ ID NO: 364748 - DNA, 122 bp, Homo sapiens
ggaaaagggtttactttgagtcttttcccggtgcgggtccgaggccgaggcaggtggcgccggcgggtccgggctggcgtggtgaggtgcgaggttcttcgcaggggtgcgggcgatggtgg

SEQ ID NO: 364749 - DNA, 122 bp, Homo sapiens
cagttatatttaattacgccggcgcctgacactgatgtaatcacgttccctccgtattgacgttagtgcatgctcagttgctaattttgaaggcgggtccgcccggtatctagaaattgccg

SEQ ID NO: 364750 - DNA, 122 bp, Homo sapiens
ggacatggcagcatttctgagaaatagagaggcacagcaggaagaggctcagctggcctacgcccagctctgagagtgacagcgtgtttacaagagctattagggaccactgctcctccgtg

SEQ ID NO: 364751 - DNA, 122 bp, Homo sapiens
atgtaggaggttttctttctgttcaggtagcagtgggtttgatggaacagctctggaagccgtaggacatttgggcaattgagcagtgaaaaaggaacagttaattctgtagcatccagcat

SEQ ID NO: 364752 - DNA, 122 bp, Homo sapiens
ctgatgtggatgacttcctgcccggtttggcaggagctgggtcccttcctgtgcagcttccgagcagttccaaacacaaccaggcatcttctgctccttcccactccctttctttcaagcag

SEQ ID NO: 364753 - DNA, 122 bp, Homo sapiens
ggctccttagaaactggcgggacctcggcctcgtcggggaagactgaaagctgcccccatcggtccagggtgaaaggaattgggaccccatgagcgcagaactggaccacgcgcgagctagg

SEQ ID NO: 364754 - DNA, 122 bp, Homo sapiens
cagcccggggctgcacggccagcgcaggatggtggctgcggactccaacgtgggcccctccgcccctatgctgggaggatgccagttaggctttggggcgccctccagcctgaacaaaaata

SEQ ID NO: 364755 - DNA, 122 bp, Homo sapiens
gtttataccctagttagtgttttgcctcacctaataggctgggagactgaagactcagcccgggtggggctgcagaaaaatgattggccccagtccccttgtttgtcccttctacaggcatg

SEQ ID NO: 364756 - DNA, 122 bp, Homo sapiens
ctggcgccagggatgggtgggggctcacacgcggggaacgcgactgctccgccccggccccgcgcacctcctcatcttgagcagctgccgcaggaagtgaaaggaaacaaacactgcgtggc

SEQ ID NO: 364757 - DNA, 122 bp, Homo sapiens
gtctcttattcatgagagagagacagtgtgtgtgtgtgtgtgtgtgtgtgtgtgtgcatgcgtgcgcaggtaagtagcatccaaacttgcttgcttgaatgctttccaatgacatcttgtgt

SEQ ID NO: 364758 - DNA, 122 bp, Homo sapiens
ccggatctcaggtacgcagacagccccctccccatcggccgccccccactgccctggactcggggctttatttatgcctgggggaataagcatgcaaagggcgcttttgctcatttttcaca

SEQ ID NO: 364759 - DNA, 122 bp, Homo sapiens
tcctgatggggcccctgtcctctggggcgtggccaggcttggtgtttcatcacagcagcccgaacggagacaggaaggcaccaagaggcattgctcagcaatgaacaaaaacctgcaggtca

SEQ ID NO: 364760 - DNA, 122 bp, Homo sapiens
cgtgggagaatcacttgggcccaggagttcgagaccagcctgggcaacaaagtgagaccccgtctctacaaaaagttgaaaaattagtcaggagtggtggcgaacatctgtgatcccagtta

SEQ ID NO: 364761 - DNA, 122 bp, Homo sapiens
ggttggggacgaggagggggcgctcctcgggcagggatggctcctcaggtgctttctgggcgcggagcggcggaggtgggagagcagcttgggaaaaggagcgcccggaaaagggcagcgct

SEQ ID NO: 364762 - DNA, 122 bp, Homo sapiens
atacagttgcctccaaaggtagaaatgatcttgaaatcccaaacttctatcctgtcacttcgggtcagtccagtcaagccctgcctcatttcacttttgttttttttgctgccgatattccc

SEQ ID NO: 364763 - DNA, 122 bp, Homo sapiens
accttgctgaaatgcagctgaacataattctgtaggtacagcgcacatggtaaaaggcagcgcgcatggtaaaaggcagcgcgcatggtaaaaggcagcgcgcatggtaaaaggcagcgcgc

SEQ ID NO: 364764 - DNA, 122 bp, Homo sapiens
gacctttgtagtcttagggcaaaaactaaggtcctgtgtcttcaacttgtaggatggtcacggaatattacaacttgcatgcacgttgaatgaagccctcaaatgctacaaagagtgccaaa

SEQ ID NO: 364765 - DNA, 122 bp, Homo sapiens
gaacttcgacatgccctttatcttcgcggaggttaatgccgaccgcatcacctggctgtacgacaacaccactggcaaacagtggaagaattccgtgaacagtcacaccattggcaggtaca

SEQ ID NO: 364766 - DNA, 122 bp, Homo sapiens
cccgcctcccctcgccccgcctcctccgccccgcaccccgcgccccgccccgccttcccgcgccccgcacccctccccgcgcgccgccattggctccccgcggcctggctcggtccgattgg

SEQ ID NO: 364767 - DNA, 122 bp, Homo sapiens
taacgtggatggagtggcgcgtttcagggtggggctatgacaatgcactgcatgtgcagccgccatcaccgcgccccctccaccggctccgcagtctcctgcccggctttcccttctccacc

SEQ ID NO: 364768 - DNA, 122 bp, Homo sapiens
cgtcacctgcgctgctgcagcacatgaagctggccctgacctcagagagattctaaacctcggccccggggcgcagaggcccaggaagtgcctgtacttggctgaccggtggtagtgagaca

SEQ ID NO: 364769 - DNA, 122 bp, Homo sapiens
gttaggatcctaggccttcatctcccagccattgttcctttaaaacaaacagtagcataacgattagcatttctacacttaatcacattcagttctggtggctccagcctgcagtttctatg

SEQ ID NO: 364770 - DNA, 122 bp, Homo sapiens
tggtgagaagatgtcaggattgaagcgaatgtcgaaggcggtgctgctgatggagccgaccgccttgcacgcgttgcggatcacctcccggctccgagggtctgctgtggagacatggctcc

SEQ ID NO: 364771 - DNA, 122 bp, Homo sapiens
gccgcgggggaggggcgggcgacctgaaggcctggactccatggcctctgccagggatgccgggtccatgggccatcaatgatgcaggaaaagaggctctgtcacctctggccccgcctgga

SEQ ID NO: 364772 - DNA, 122 bp, Homo sapiens
gctccgcgcgagcgccgtggcaacgcgagcgggcgcccccaggaggccgcggagctgcggcgtgggacgcttgggtgaggctcaagccaaaaccaaacccaaaccatttctcctcctcccca

SEQ ID NO: 364773 - DNA, 122 bp, Homo sapiens
gcggcccttcaccgtcgcgggaaaagccaagttggtggcaggaggagcccaccaccaaggcgatctcactgcggaaaaactcgaccctccgccttcacgtctagggcggcaggtggtagagc

SEQ ID NO: 364774 - DNA, 122 bp, Homo sapiens
tggggctggacatgcactttcttagggggctttgtgttgctggtggtgttcctggctacacggcgcgtggcagtaactgccagacacctgagccgactggtagtaggggcagccgtgtggcg

SEQ ID NO: 364775 - DNA, 122 bp, Homo sapiens
cactcactcgctccggaaagccagttcccatcacgctgagcactgcaaagcaactgccaccgcagggtagaaaatgatgtgggttccactcagcgagaggacctaccatatcgaaaacacgt

SEQ ID NO: 364776 - DNA, 122 bp, Homo sapiens
gggaaacatggagtaaaaagccgtggcgcagtccgagttcggtacactgtaaccaggacccgaagctttattttcggtcatccacacgagttgggggagggtcctaggctttacttggggaa

SEQ ID NO: 364777 - DNA, 122 bp, Homo sapiens
tattatagaagaaagaacattcatgggggaacgcaactgtatgaacaaaagggtgagaggcggcaactgtcaggtatgattgaggatgaggaggtttatttggccggagttcagtaggagac

SEQ ID NO: 364778 - DNA, 122 bp, Homo sapiens
ctgtttccctcctcttcctttctctcctttgcaaaaagacttcctctttagtgcaggttccgttggaatacacccagggcagcccacccatgcgttctcagcccatagccctatttccacct

SEQ ID NO: 364779 - DNA, 122 bp, Homo sapiens
aaacatttattttctttgcaaaaggcaagttttagtggtggagtcaatttatttctgaaacgatctcatttacctgaatgaggagctcatatttattttcagggtaagtggtggggttgtat

SEQ ID NO: 364780 - DNA, 122 bp, Homo sapiens
tcctttcctgttctgagtcacacgtgtgtgggggctctccctgtggtgcagctggtacagcggcccctggagttgaggatccaagcaggctgaggtctgggtttgccggagggccctcggtg

SEQ ID NO: 364781 - DNA, 122 bp, Homo sapiens
atttggctatccctttcaccctggcatttcatcaaccagagggagaaaaaaataagacatcgtaaagtgagagaagccccttattggtcttccgactctcacgtccatttagacacaattgg

SEQ ID NO: 364782 - DNA, 122 bp, Homo sapiens
caccgtggcttctgctcccatcgcactgttgaatgtttctttctgagaaacaggatttgtcggcctttttcttcagcctctcagctccctcagcctttgtgggtaagtggcatagacctgct

SEQ ID NO: 364783 - DNA, 122 bp, Homo sapiens
ataagaaaaccctggggtgagtatggagagctagctctccccagcagtttgaaaagcctccgggtcactgagtgccaggccagctccaccattctctgggttgatgagtatgtcttgtgaag

SEQ ID NO: 364784 - DNA, 122 bp, Homo sapiens
gaaaattcaatatccaaatgacagacagtggaaattagctgtgattttccctgctctgtgcgaagagctggcatttcctcatttatccattcatccaacaaatatttattgagcaactaata

SEQ ID NO: 364785 - DNA, 122 bp, Homo sapiens
tgtttctattttctttttgggcagccatactctctaagacctaaaagctgaatactcgcccggttactacctgataattctcatcgcttatgtttccaaaaccaaactggttatttccctct

SEQ ID NO: 364786 - DNA, 122 bp, Homo sapiens
cacactagagtcttacttcactgagaatcttaattgcgtcctcctcctgtgttctgtgcacggccacatctgtctgcatagagttgtaaagcagtgtctggctttgtccccagctctttgtt

SEQ ID NO: 364787 - DNA, 122 bp, Homo sapiens
gttgggattacaggcgggagccgccgcgcccggcctcagacgtttttctctaggtaaagccgcgggatgaaccagcccctgtggaaatttagaagtaacgacgtccgtcaatttctgtatga

SEQ ID NO: 364788 - DNA, 122 bp, Homo sapiens
tttaatgagtgcccctgtgggtctcagtttaagcctgcagggagaggcccaggcctctctcgggtccctggacttccggctcatgcgcccttcgctcagagagctctgttgccttggaaaca

SEQ ID NO: 364789 - DNA, 122 bp, Homo sapiens
gaggcaggtggatcacaaggtcaggagatcgacaccatcctggtcaacatggtgaaaccccgtctctactaaaatacaaagaattaggcgggtgtagtggcagcacctgtagtcccagctac

SEQ ID NO: 364790 - DNA, 122 bp, Homo sapiens
gcccgagccccatgtctcccccagggtgcccgattaggaagtacgagaggcgactcggatcgccggggcctgtcctgtgggggctccatcgcccgcacaggagctgtgcgcccaccttgatc

SEQ ID NO: 364791 - DNA, 122 bp, Homo sapiens
ccgcccccgcccccacccaccgctcactttctatctcagacaggctccgctgagccttctcggtgtcctcccgctgcctcctgagctcgtccagttctgcccgcaggaattcacagtcgtcg

SEQ ID NO: 364792 - DNA, 122 bp, Homo sapiens
gagatctgcgagaagggtgaactgagataatggatgagaaagcatgttgaaaaccacagccggggcttttctctaaggttatcgagtacgtggttctcagggatccaagaacagtgatggac

SEQ ID NO: 364793 - DNA, 122 bp, Homo sapiens
gagaaaggtaagtagtgactgaggcaggacaggagcccaggctgtccggctccagggtcccggtcttgacggccactctaccccactctaccagtcgccccagtatggctgtcttcctcctg

SEQ ID NO: 364794 - DNA, 122 bp, Homo sapiens
ttgtgctttttaacccctctgagaacatctgctaatcctgccttatacaaagaggacaaacgtgagatctgattctggctgagaaatggggtgtgggaaaattggagtcagtgacccattat

SEQ ID NO: 364795 - DNA, 122 bp, Homo sapiens
gctttaagaatgattattcttaaggaggaaacacaaacagcagtgaccatttttcacagacgtgctcagccatcaggaaagcttaataaatccctatttagtatgcatttatgcagtgatta

SEQ ID NO: 364796 - DNA, 122 bp, Homo sapiens
caattgcgccgggcactagggcgcaaacccggatcctgcgcgctggcttctgttacctcccggcttcgacttcggctgctgcacactcgtcaaagtaatgaatggagagagaaaagaagagg

SEQ ID NO: 364797 - DNA, 122 bp, Homo sapiens
gggcgcgatgaggtcactgaggaatacatggagttggccaagagccgggggccgtggcgccggccacctaagaagcgccatgaggacctggtgccacctgcgggctcgcccgaactctcgcc

SEQ ID NO: 364798 - DNA, 122 bp, Homo sapiens
agcctcctaacacgggcagtaacgccctggatagggcctccaacccaccccaccacgccacgccacaggcagtacggcctgggatggcgaacttttcccaccaccattttaccattctggct

SEQ ID NO: 364799 - DNA, 122 bp, Homo sapiens
cagcgccaccgcggaagcagctattggcggaggccaggggccgcgactgctcacttccggcgcgggcctagacgatttctccccctcccccgccctccgccttcccaccccccgcccttcca

SEQ ID NO: 364800 - DNA, 122 bp, Homo sapiens
cactgagctgaagtctagctctgctttgtgcaagcctggggttgacgttcatgcagaatgcgcctcttccatcactccttattccaccttcaagccgcctctgtagtcatttgcctttctac

SEQ ID NO: 364801 - DNA, 122 bp, Homo sapiens
tttctggcacctctcaaatcagtccctgtgggtggccaccccctctcccatggaatggctcgccgggaacgggttaacacctcaaacacctaaacacagcgttcagctctgtccagacactc

SEQ ID NO: 364802 - DNA, 122 bp, Homo sapiens
attccggggcccctcatttccaaatgggagcaggactcaaagaacagcgctgggctctgacgccaagtccatccccaggcagctggaaactcccgggtcgcagagcagccctgctgtcggct

SEQ ID NO: 364803 - DNA, 122 bp, Homo sapiens
aattaccttctttcatttgcaaatgttactgggggacacaccggctcccagtagggtttccgccaaggctccgcgaaacgccactagagggcgccgctagcgaatcccacagcgcgccccgc

SEQ ID NO: 364804 - DNA, 122 bp, Homo sapiens
attacatttcagtccctcaattgctggcctcaatgctttggaaatcagccaaactgagcacgaagagagaaagggctgcagcttgcaatttcagaatttcccctagaatgtgctcttaaaaa

SEQ ID NO: 364805 - DNA, 122 bp, Homo sapiens
caataaaaagttttaaattagttatttaacatacagtctatgaggccttcaggaacctcacgcgatagaaacattttgtttgaacatctgttcgttgtttcgtggttccgatgttattaata

SEQ ID NO: 364806 - DNA, 122 bp, Homo sapiens
cgcctcccccgctgcaagtggacacaaggatctgggagcttctcctcccccggcaatcaccgcttccttggatcaaattcccccaatggggtcccacgagctttaccgagctccagccaccg

SEQ ID NO: 364807 - DNA, 122 bp, Homo sapiens
caaagagaggaagcaacccaaatgtccattagctgataaatggataaatgaaatatggtacgtccgaagaatggaatatcattcacccatgaaaaagaacgaagtccagcaccaaaacgtgc

SEQ ID NO: 364808 - DNA, 122 bp, Homo sapiens
cgaaggggggaaaatggctccggctccagcgtcgcctcttaaagggcctgaaacaccggccgggaaatcccaccgcacaggccccgcccccccacggacagcccataataacctcaaccaac

SEQ ID NO: 364809 - DNA, 122 bp, Homo sapiens
gtccaggctgaaatgaggtggcttgctgaatgctcagagctccttgagcacacaacctagcgtctgtcgatttcacctcctggagaaaccttccctgactgctccgccagactcctcaccct

SEQ ID NO: 364810 - DNA, 122 bp, Homo sapiens
aggcaggaagggtgaggtgagaggagaagaggcccaggaccagattctagtcaccaacagcgtttaaggggcaggtaaggaaaacaaaaccatcagcaaagactgagaatgaaagcccagag

SEQ ID NO: 364811 - DNA, 122 bp, Homo sapiens
agccgactgcgctccagaactattcccattgggccagagaatgagtgacgcactaggccccgccccggcccggtgggttactcctttcatgcccggcccccatccctagccccgccccggcg

SEQ ID NO: 364812 - DNA, 122 bp, Homo sapiens
ggcccgagtgccctgcagtaacccaagacgaccactttccccggccatctggagcgctcccggctgccctgcctgtgtctcatcactggctgaagagacagctctgctagaaatcaagccac

SEQ ID NO: 364813 - DNA, 122 bp, Homo sapiens
atcttttatagccttgaactacctgctacaagatttttttctgtcctaagaatggaggtccggtctgcttcctaacattaatcccttccacacggcacagccttgttttctctagatcagag

SEQ ID NO: 364814 - DNA, 122 bp, Homo sapiens
gaattctataaaggtttaagtgaaacaaaggagggaaatagcagagcaaagagatgctttcgtagacgtggaaagaagaatgttacacatgacccttgaataacatggctttgagctgcaca

SEQ ID NO: 364815 - DNA, 122 bp, Homo sapiens
gttttgggactactactctccttaacacatgcccaccctgtattttaagaacagaagtttcgagttcttagtatgcaggtctgttagtgatcagcaacaggattgcatcatcaggaaaattc

SEQ ID NO: 364816 - DNA, 122 bp, Homo sapiens
ctgcttcccggcgcgtcctgtgctgggaaccccacgttgcctctaagatggctgccgtatcgccgcacatcccagttccacaccagaaaaagacgcctttggtcctcatctccctctcctcg

SEQ ID NO: 364817 - DNA, 122 bp, Homo sapiens
cccaggaggaaagggccctgtgatcccagggagaactcacacaaagacccagtcctccggcgcaaagagctgtggtgctgaccctctgcgcctgcacacatctgggggtggcggggctcatg

SEQ ID NO: 364818 - DNA, 122 bp, Homo sapiens
aagggcagaaagccgcgcccccaatccctgctccgtccgggtaggtcccctccccccgcgcgtccagtcttcccagttccagctaaggctctgccagtccggagagcccctatctctcccat

SEQ ID NO: 364819 - DNA, 122 bp, Homo sapiens
gtctcggggcagcttccggctggacagggtcgggaagtaatcctgcttcccatccacagccgtgccgatgaagagcttgccatcctcaccctcagagcgcacaatcaccccgtacatggtgc

SEQ ID NO: 364820 - DNA, 122 bp, Homo sapiens
aggaggaaaggggccctctgaagttggccacctcagggtatatgaagcacgtgcttgtcacgtggagaaaaaatgtgctgggctaacctctgagactccctagagaatccagagtttgtgtc

SEQ ID NO: 364821 - DNA, 122 bp, Homo sapiens
atctaaatttaaactatagaatcaacattttctttaaaaattgttccagttttcaagaggcgtaggtggatcctgtgaattatgtgataatgcacacgcttttcctacatcctgcttatgtc

SEQ ID NO: 364822 - DNA, 122 bp, Homo sapiens
cccgtccctctgcacacccccattcatctctgtcaggtttttctcatccttaagttctctcgtccccctccccactcgggcgtcccccgctgggctccccgcctcagtttccttcccttcct

SEQ ID NO: 364823 - DNA, 122 bp, Homo sapiens
gggctggccctgggctggggccggtgcgtcttagctaagtgcccagcgctccggtgggggcggtaggggcggagccgcgctctccagggcctaaggacagtgacgtggcccctgcctcccac

SEQ ID NO: 364824 - DNA, 122 bp, Homo sapiens
tctccttaaagtacacacacatgtggccagctactcctatgtgtgtgcacacacctatgtcgggcttgctcctgcccctccaatgcaccagcctacctactgggatcccctgtatgtgtatt

SEQ ID NO: 364825 - DNA, 122 bp, Homo sapiens
acactgcatgcccgtgacagtggtggcacccgcgtgctggcgtgacagcggtgacacctgcgtgccagtgtgcacagcacaggcagagagcacctgtgtgttaacaggcagtaacaggggtt

SEQ ID NO: 364826 - DNA, 122 bp, Homo sapiens
aagagccgaagggccgaaaagccgaagcggacacccgcgcgcggtgattggccggttggccggaagaactctgtctctgattggcaggagagtcacgaaccggtcagccccgggtcaggggc

SEQ ID NO: 364827 - DNA, 122 bp, Homo sapiens
cattctcttcggatgtgcgtgttttgtttttctggagtatggctggccaagtggcacggccgcaagtgcctgtgcacgccgcggctcctgttctgtttgtggcagtttagcggggaggacct

SEQ ID NO: 364828 - DNA, 122 bp, Homo sapiens
ttggtgagagtcagccttcaggccactagggttttctcagggagccaaccgattactcaccgggagggatggttcctccaggagggtcacttcttgggaatctgaccctaggagcacacatt

SEQ ID NO: 364829 - DNA, 122 bp, Homo sapiens
accggtactcttggtatacgaagatccatgcaaaattccccatcctgcagcagtgagtcccggatcaccgaacatttctggcccccaagtgtcagcccattcacaaaaaaacttgacctgtc

SEQ ID NO: 364830 - DNA, 122 bp, Homo sapiens
ccgggcacggctttacccagaatgcctctggagggccggctccccgcgccccggccctgccgcccaacgctcccggccctggggccctgactgcccgcacgctgacctgaaggtcccactgt

SEQ ID NO: 364831 - DNA, 122 bp, Homo sapiens
ctgcttggtgctgtgtgaagcgcaccagggcagagcccgctgggggctcacaagtgggagcggtaattgcgattggctgtgggaaaggacaggtttgcaacagagacacgaattagaacatt

SEQ ID NO: 364832 - DNA, 122 bp, Homo sapiens
tgatttttattcccgtatgcctgaacttagaatcaaatacctgacgagatacagtcccttcgagatccatccagacacagcactgtcagcacttggtttttgcactgatttagttttctgaa

SEQ ID NO: 364833 - DNA, 122 bp, Homo sapiens
gcattggtctccaccgacaggttggcgggcaagatgggcatggcagagccttgggccagtcgcaaccctgtgctgcggtggatctgtatggccggccggatggccaccaccttcagcgtggc

SEQ ID NO: 364834 - DNA, 122 bp, Homo sapiens
cccggacaaaccactaaaaacgatgcggctgtcgtggtggtgggtcatttggttttgggtcgcgtgacctcagtgagtgtgtccccatggggaagccgagagtgctgacgtccccctggatg

SEQ ID NO: 364835 - DNA, 122 bp, Homo sapiens
aatcagcaggatgtgggtggggccagacaagggaataaaagcaggctgccgagccagcagcggcaacccgctggggtcaccttctactctgtggaaggtatgttctttctgtctttgcggta

SEQ ID NO: 364836 - DNA, 122 bp, Homo sapiens
cagatcattagccggggagcagcaggttaaaagatctattttctttcttgttgagatggccgggagggcagagcagaagagctaaaaattagacccattgttacagggatattaggacatat

SEQ ID NO: 364837 - DNA, 122 bp, Homo sapiens
ttcgtgggttgctattttcttcagatcaaggttgccttcttgttaacccgagactgcagccgcagaaaattagattccccccactcagggattaaccacatagaacagttagggaatgtgga

SEQ ID NO: 364838 - DNA, 122 bp, Homo sapiens
cccgacaacccgttcgtgggcgaccccgcggcgcagcccgaggtctacgccctgggcgtgcgcaacatgtggcgctgctccttcgaccgtggcgacccctcctcgggcactggccgcgggcg

SEQ ID NO: 364839 - DNA, 122 bp, Homo sapiens
gctaagggctacgttgaagtggcttatctgcactcctagttccagagacagtagttatctcgggccccaacatcgcgaggtctagggaaaaatgctaccactcctcccccctacttccgctg

SEQ ID NO: 364840 - DNA, 122 bp, Homo sapiens
gctggtgccccgacctcctgggccctcgctggaagctctgctcatttactccccgtgttacggttgtgcagcatttcctggatccacagtcaggtcaggcaattctggggcgagcaggcgtc

SEQ ID NO: 364841 - DNA, 122 bp, Homo sapiens
ttgtttgttttgcagatgaatctgacaaacctacctcagttaccccagaactcctatgaccggctttaagctctggtcagggaaacagaggcaaaagcagcctgagaattactgaggaagac

SEQ ID NO: 364842 - DNA, 122 bp, Homo sapiens
ggactctcagaagcgaagagagaactgaaagttagagcaatgcttttcagcctacctatgcgatccagggctactggcccaggataatggagctagaaattggaagctgggttttcaagccc

SEQ ID NO: 364843 - DNA, 122 bp, Homo sapiens
tgtttggaattcagggaaggaagaaagtacgtgcgcccccatttaaccctcgggacctggcgaaatcctgctacgtgggtagtgaacattgtatcggggactgaaggaaatgcttgtaaaga

SEQ ID NO: 364844 - DNA, 122 bp, Homo sapiens
cagagcttgacacataacagatgcttagcaaatacttggcgaattaaagaatgtattggccgggcacggtggctcacgcttgtaatcccagcactttgggaggcagaggcgggcggatcacg

SEQ ID NO: 364845 - DNA, 122 bp, Homo sapiens
gtcctcatggagagaaagcatggtcgtcagccttgagtcctcacagacagaaagcgtgatcgtcagcctcaagtcctcatggacagaaagcgcggtcgtcagcctcgagtcctcatggacag

SEQ ID NO: 364846 - DNA, 122 bp, Homo sapiens
cgctcacgggcacggcagtgcagaaggcacagaggaagcatttgccgtcgagtagcgtgacggccacccagacgacaggcgcgatgagggcgcgctgggccatggagcagaacatgtagcgc

SEQ ID NO: 364847 - DNA, 122 bp, Homo sapiens
gaactggaagaggcctttgcaatcaagcactctccctaattatacatttaagagattaaacgggtccgacttcggaaaaacaggttccagaataaaactggaggagaggggaagggaggggg

SEQ ID NO: 364848 - DNA, 122 bp, Homo sapiens
gcctcttacctaatgtttcgttctggccttgccccatctcttcctgaggctgggttgttacgatggtgaattattcaagatgtcttgcagcctgacgccatctctgggcagtgctcctgcat

SEQ ID NO: 364849 - DNA, 122 bp, Homo sapiens
caccgtgggcaggctgtactaccttcttaggttccttcgtttctttcttggctgcctgtccgggtctctttgtttcgggagcgggtgagagagacagaggtggctgcgtgggacccgagtcg

SEQ ID NO: 364850 - DNA, 122 bp, Homo sapiens
aagcggagagagaagcagctgtgtaatccgctggatgcggaccagggcgctccccattcccgtcgggagcccgccgattggctgggtgtgggcgcacgtgaccgacatgtggctgtattggt

SEQ ID NO: 364851 - DNA, 122 bp, Homo sapiens
ctccgccccggcgcgaacctgggagggctgcagacagtctaaaggctgtggtgacctcagcgctgcgtccctccagcaaccggcgagtgctggggcacaggccatacccccctaagctcggc

SEQ ID NO: 364852 - DNA, 122 bp, Homo sapiens
tcacggaggccggctttctcggccagagagccaggcttgaccgagtgcacgaagctccctcgcgcgttgccccccagcagggtgagctgggaggtgaggctgtcgccattcagcgtcgtgtg

SEQ ID NO: 364853 - DNA, 122 bp, Homo sapiens
tggggtggcaggggcatgcaaagatgccagcagtactctctaaggctgatctataccaaacgcagagtagagtcagagtgatgacacaggattacttgagaaaggttcagactgaggtgtgg

SEQ ID NO: 364854 - DNA, 122 bp, Homo sapiens
tggccgccgccaatttttttcctccgggggagggtgctggaggcctccgggcggggccggcggcccgggcggccggtgtggcgtgtagctctcggccccagtggatgccgccgggtggcggc

SEQ ID NO: 364855 - DNA, 122 bp, Homo sapiens
cggtggcgcgcacagtgggggaggcgcctgcagcccccggccggtccctctgcgaccacacggagcccaagcactcgtagagcctcaccttggagaagagctcctgggccaggggaggggtg

SEQ ID NO: 364856 - DNA, 122 bp, Homo sapiens
agaaatggatgcaaatgtaccctatgaggaagtgttgtgcgagtggacgatgatgtcacccgtctactctcagctcctttttcaaattcggtgaggcgtttgtggacgagcacaccatgcaa

SEQ ID NO: 364857 - DNA, 122 bp, Homo sapiens
cctgggccttttccatatgacttctgcccaaactcagctgcttttggtaacctttagaagcgctttggggtttgtaggtaaaatctatataaatttgttgaaaatggtgtttgacagttttt

SEQ ID NO: 364858 - DNA, 122 bp, Homo sapiens
agaggcccaccctgctttctgggggcttggccaagttatagagcggaggccagggagagacgagatacatgtgcaaagctccaagaaagacaagcagatgaaacgcaggggaattttcctag

SEQ ID NO: 364859 - DNA, 122 bp, Homo sapiens
ctgctgcactgattaatcctccctgcctggaatttccagctgtcctgatctgcttcacttcgatgtgttccccaatgggtctaagtctccttcatgataaccttccagtttacggctgtatt

SEQ ID NO: 364860 - DNA, 122 bp, Homo sapiens
aaaaatttcttcaacattttaaactgttattccaacaccagattctcatcggaatactaacgttgcaattaaattaaagattaggtttataccccacataactgtcatccatttctcagtgt

SEQ ID NO: 364861 - DNA, 122 bp, Homo sapiens
ggagcgcttcccggagcgggagcaggcgctcgctggctggagctcccccactgtgtctgacgcctcattccctggatgttcagggttccggtgctcagcaagaacctgtccggacacgctgg

SEQ ID NO: 364862 - DNA, 122 bp, Homo sapiens
ctaggaactattttctatcccttggcaattagccatctgtatagtatttttaacttcctacgtgttattaactgtaagactgtttgaattgtcaggtctttgtggtgagctgaattctgcat

SEQ ID NO: 364863 - DNA, 122 bp, Homo sapiens
gtcacttcaggcgccggagccttgcataagcgggcgggtcggctctgggctctgatttctcgcccgacgaacccaggcgctcgggctcagcccggcgggaggcggatccctgagagggacac

SEQ ID NO: 364864 - DNA, 122 bp, Homo sapiens
aatgattggttttccgctgagagaaaatagccagtcaaaggaaggcgctggcagtctgcccgccccccccccccccgccagccaatgagctcaaggcttgtggccctcctccagccttggta

SEQ ID NO: 364865 - DNA, 122 bp, Homo sapiens
aacccagagaatgttttgtttcctcataccttacattgtgaaatacaaaattagctaatgcgctccccttctccctcctgtgaactcccctccttgctgcttctagtagctacccagtctgc

SEQ ID NO: 364866 - DNA, 122 bp, Homo sapiens
gcgggtgtgggataggcgaactcgggcgccttcccagtgcctcggccttttaaagagaaccggggtaaaggaaaacttggatccccatccagaaattccccgggagcaggtggtgggaaagc

SEQ ID NO: 364867 - DNA, 122 bp, Homo sapiens
acctcggggcccgcagagggaggcgccttccctccatcatccccactgagcaccagcctccgcagccactaaaacctgcggaactcactccatgccccttgttggctttcttcacataaagt

SEQ ID NO: 364868 - DNA, 122 bp, Homo sapiens
gcccccgcccacctggccctggtggtccacgtagtagaaatactcgcgggtccgcggctccggactctggccctgcgtgtaggaaacgcccccatccccgctgcaggcccgggctccccgcg

SEQ ID NO: 364869 - DNA, 122 bp, Homo sapiens
atgccccctacacatttcaagccgactaatcacaggggaagaaacacggcttgttttaaccgctttctacgggcttcttatgccttcagtctgcgcgttcctgcagagtcacctctgaaggg

SEQ ID NO: 364870 - DNA, 122 bp, Homo sapiens
tccttcacccccatcttcttctgtcctcataccaaccctgtatggagaggccacttttgtcgatatttacaaatgagaaaactaaagctggtagggggtctgctcaaggtctcacacctgga

SEQ ID NO: 364871 - DNA, 122 bp, Homo sapiens
ctagtacatagagaagaacagtgaaatagcttttgaagtcctacagaccttggttcaaatcgtagattcaccacttactagcttacttactagcttctctaatttgtaaaacatatcgttag

SEQ ID NO: 364872 - DNA, 122 bp, Homo sapiens
ccagttcccccggtgctgaaatcacgcccgaccgaaggactcacgctgcccagccaatggcgctggaaaatttccgcaatcgctgcgttttgtggttgtccatccttttcctttcctcccct

SEQ ID NO: 364873 - DNA, 122 bp, Homo sapiens
tccctgtcccgcggcccgcaggcccagccctcaagcgcccagcctccgcggcctttgtggcgtcacagccagcctgaagaatggttgccttggagacgtaaacccaagagccctgctcctgg

SEQ ID NO: 364874 - DNA, 122 bp, Homo sapiens
ctgggattacaggcatgagccaccttgcccagccaatattctatttcaaaaaggaatattcggaaaccaaagaaaagagaactcttggaaactaaaaatatgaaattaaaaatataaaaatt

SEQ ID NO: 364875 - DNA, 122 bp, Homo sapiens
ggtcagaatttgtgggggccccatagatgtgggtgcctggcggggtcctggtgcggacagcggtctcgggtttgcgcactgcgcacagtatcctcatcacgacacgatggaagctgcggagc

SEQ ID NO: 364876 - DNA, 122 bp, Homo sapiens
caaacaacttttaatacgtctgtttctccctgggcatgtactttagtcagagggacttcccgttttcccaccttctcttttcatttctgtttaatcatattggaaagtactttggctcgaga

SEQ ID NO: 364877 - DNA, 122 bp, Homo sapiens
cagcaagaggtgaagctaggttcaaaatcagacaatttgcccatcagagctccagagtggcgtataccttccccaagtggactgtcatggaaatttctgtggtttctctctattggatgaag

SEQ ID NO: 364878 - DNA, 122 bp, Homo sapiens
gaaggcgcgggaggggagccgccttggaggaagacagccctcgctagacaccaaccctggcggcacccgggtcttggacttccagcctccagggccgtctaaatgcatgttgtttcagccac

SEQ ID NO: 364879 - DNA, 122 bp, Homo sapiens
cgtgcccccaattcggggacattccccccacaacgtcagtgcgcccgtaagcagtccagacgagccgggcaactccccagggtagatccatttgcgggaacactcccctagccaatacactt

SEQ ID NO: 364880 - DNA, 122 bp, Homo sapiens
ttgcagatggactggaattagtaatttagccagggtctcttccaaactcactgcaaaattcgccagcgtctcattcttcacacacggggcaccacacgagaatcaccccctccccagaattt

SEQ ID NO: 364881 - DNA, 122 bp, Homo sapiens
tctccttcctgcagctggtgaggggtcgacgggcgccctggctgggactgcgggcagggccgccttggctgctgcaggaacacaaccctgctctcctccccaccacagggcctggccaaggg

SEQ ID NO: 364882 - DNA, 122 bp, Homo sapiens
gtaaaggtttacggttgccacaggtcagtcctgacgaaaaccgcaagctgcgccaaatctcgcgcagcggggcgggagggcgggtggggaatgtaaggtatcgcgagatgacaggattttcc

SEQ ID NO: 364883 - DNA, 122 bp, Homo sapiens
agggaagatacaaaaatagaggtatagtgggttctggctcatgaaaattccaatgtgtcacggtactccccaacatgggcagctccacagttcccacactgggactatgctcctggctgggg

SEQ ID NO: 364884 - DNA, 122 bp, Homo sapiens
ctgtctctcccgcgcactcctcagcccagtaccagctccaaatgcaggtcgtgccatctccgcccagtgcagccgtcagagtcccggtctccgctccccaggctgctgtcccctgtcttggc

SEQ ID NO: 364885 - DNA, 122 bp, Homo sapiens
gtcagaggcgtgattgggcgccgcacataacatgccggtagctcacagcgacaggaatagcgcgccgcctcggcctcccgggcgcgccccgccccgtgccctgactgctggccgcgaaccga

SEQ ID NO: 364886 - DNA, 122 bp, Homo sapiens
ttcaataactcttggtggtctaagtcatttccccactgtgtgatttaattgacataatgccgttcaaggtcacagagcaaaacctaaaacatctagcaagcacataaaaattcaagtcaaat

SEQ ID NO: 364887 - DNA, 122 bp, Homo sapiens
tcgtcagctctgtatggagttcttctaatgtagcttcctcctcctccacctcttcctcgccggggtctcactctcagcacgagcaccatttccatggcagcaagcatcactcagtgcctatt

SEQ ID NO: 364888 - DNA, 122 bp, Homo sapiens
cacatcctcctgtcgcgtgtgccggagcctctctgctgtggggaggagggtcctctccatcgagtccttcggagcgctgcagggtgagttcttgaacccacacacgtgcatcctcatgcaca

SEQ ID NO: 364889 - DNA, 122 bp, Homo sapiens
ccatgccaggtgagaccccctggcgttggaggtcttgtctccctgtccgtggaccgggctcgcatccttcccaccccactgccttctgccaggccagcggagacataggccctgacgtcctc

SEQ ID NO: 364890 - DNA, 122 bp, Homo sapiens
ccacaaagtttctcattttgcctcaaaaagagatctcaaatgtctttttatacatggctccgtggtctaaaccttcatcagtccttgtctggacttgtggagtagcttttataactgggctt

SEQ ID NO: 364891 - DNA, 122 bp, Homo sapiens
tctcagaagggaatctcctctcctcccggcctcttcgcctgggcgggggccgcaggctgccgcggaagcctcttcccgatgctcttcgctcaggagagcccggcccaggagagggactacaa

SEQ ID NO: 364892 - DNA, 122 bp, Homo sapiens
tcacttacttgtccagttcatccacgggggtgcctgagccccccaagccacagtagcagccgtagttgttgtattccaagaaggggtcactccccgggatcacgcacttgatcattttgcgg

SEQ ID NO: 364893 - DNA, 122 bp, Homo sapiens
gcggccccaagtcagcggcggagacggcgcccaccccgctccaacgtggagcaggagcaacggcgtggcccgtggagccccgcccctcacaggcaaccacagagaagccggactgggccacg

SEQ ID NO: 364894 - DNA, 122 bp, Homo sapiens
ttgtagttcccataattcccatgttgtgggagggagccagtgggagatcattgaatcatacgggcggttaaccccatactgttctcctggtggtgagtaagtctcacaagatctgatggttt

SEQ ID NO: 364895 - DNA, 122 bp, Homo sapiens
agttctgtcagcaccagaccaaatctctctgtgtatggaaaaactttttaatccttccagcgtcacttaagatcatattaatatttccacttcactaataaagtgtgtttgggggaaaaaag

SEQ ID NO: 364896 - DNA, 122 bp, Homo sapiens
aggtaagagtggaagagctgccgtgcgtcctggagagtgataatgtgacggaagcctgggcgaagccctcggagagcagtggctggacaggggctcctgggtggggcttggacagcactgat

SEQ ID NO: 364897 - DNA, 122 bp, Homo sapiens
ggctgtgtaaagaagtcccgattccgaaagctccgacgggaacatttacagatgcaacaacgtgctgtctgggttggcttcaacattacaagagaggggagcacgtgggggcacgggagaaa

SEQ ID NO: 364898 - DNA, 122 bp, Homo sapiens
atggcttatcacaaggaaaatactgatgtcaggccatgaaacagattcttgtcagccttccggaaactcctcttttgcccctcccttcaattaaaagttagtttctttcttgcttgcttgct

SEQ ID NO: 364899 - DNA, 122 bp, Homo sapiens
gggacagagtgagacaccgtctcaaaaaaaaaaaaaagaaaatagaaaaacatatgatgccggggcgtctcggcctcaatacctgcatgagcacagtcatgtccaggccagggctgctggtc

SEQ ID NO: 364900 - DNA, 122 bp, Homo sapiens
aagtgaaacatatcactttaccatctggaccatgtctattagaatttaataggaaaaaagcgcaattaactagaagctggtaagagtaatgatcttttgccccatacaaagtggacattgtg

SEQ ID NO: 364901 - DNA, 122 bp, Homo sapiens
tattttcaatcacacagtcatgcctcctcaacctcagaggtggcctggtgattaattagacgggggaagaggggaagatcaaaaatgcttgataagaagggataaatacgggctgggaaaga

SEQ ID NO: 364902 - DNA, 122 bp, Homo sapiens
cacttctttttatcaagtttgcttttctgcccaaataaggaatagtgtggttttgtctaacgatgtgaaatcaccaataaacactggctagattggtttcaggagcgtgatgcgtggtttgt

SEQ ID NO: 364903 - DNA, 122 bp, Homo sapiens
ggtttgggagcttttaaggtgaagaggcccgggctgatcccacaggccagtataaagcgccgtgaccctcaggtgatgcgccagggccggctgccgtcggggacagggctttccatagccat

SEQ ID NO: 364904 - DNA, 122 bp, Homo sapiens
cacgctgcctgcatgtcccagaaatgttatctcctctttttcggagatgtcacccacaaccgtccgaagagatacccaaattgtacgccactgctcagatggtttatctgaccccgcagctg

SEQ ID NO: 364905 - DNA, 122 bp, Homo sapiens
gcatctgcttgggattaaaacaatctacagagagattagaataaatctatccatacaaaacgaagtcaagtgggtgctactatcagagatttaaggttgttagaaagagtgttagtaagaat

SEQ ID NO: 364906 - DNA, 122 bp, Homo sapiens
ggggcggggaaggggctctcacccaccgccctcctgccggcacgggtggcttcctgcgcgcggtctcagaaggcctggccactttgcattataggtaagtgttgacctagtgatggctagaa

SEQ ID NO: 364907 - DNA, 122 bp, Homo sapiens
gcgccctccctgaccaagaaccccaacatgccgcggttaagcggtgggcgacacggtctgcgaggacagactcacaagacgctgaaggccagagtgggccagagagctcgccactcactgac

SEQ ID NO: 364908 - DNA, 122 bp, Homo sapiens
gcggttagatttgaatacttcactgaggcgagccgggcgttgtgagcggactgctagaggcggctgtctgtttccgctctaaggaaactcagagcgtgtggaccccaaacaagtctgcgcaa

SEQ ID NO: 364909 - DNA, 122 bp, Homo sapiens
gtccttgcggccatcccttcctgtcttctatgccacttccgcattcttttgttcagtagacgttgacacagaaatgaccacccctcaaaccaacactctgccccaaattaccctccaggctg

SEQ ID NO: 364910 - DNA, 122 bp, Homo sapiens
gaagaagcgtcatacggaccggattgttttcgctggcccagtgtccccggagcttgtgtgcgatacagagagcacctcggaagctgaggcagctggtacttgacagagaggatggcgctgtc

SEQ ID NO: 364911 - DNA, 122 bp, Homo sapiens
cccctgcctgccagtggcaagattcagggcttgcgttttggaagcttctccctgtgtggtcgggccatcacagccacatttcacaatttctttttaactctttctgtgcccctccctcctcc

SEQ ID NO: 364912 - DNA, 122 bp, Homo sapiens
cagcaaccgggcccccaaaacacgcgcctggcgccgggggagaacccgacggacaggccccgacctctgagcgcaagtccacagccaagggccggggcaacagcgtcctgccttccaaaccc

SEQ ID NO: 364913 - DNA, 122 bp, Homo sapiens
aatatgcaaagtgaaataggatcatactgtgtaaataggggagtcaccacttacaaatggcggttaagtcccaaagctggtgaagaggcacaaatcatgtatagtccacatcattccctaaa

SEQ ID NO: 364914 - DNA, 122 bp, Homo sapiens
agcaccgcgcgccccggccaacgcgtcccggcggagcggcgacccggagtctgcagagcgcgccgcggcggcgtccgacgtcagcacagccaatcacagtgcagcaccctcgtcatgtgatt

SEQ ID NO: 364915 - DNA, 122 bp, Homo sapiens
ccacaccgcggccccgcgcccgggatccgctgctcacctggctccccgttcttctccgcgcgctgctaagagacacttccaacttcggttttccgccgggcgctcagacacgagttgctgcg

SEQ ID NO: 364916 - DNA, 122 bp, Homo sapiens
cctggagcgggtttgggttgcagtttccttgtgccggggatcctgtcccctactcgccagcgccaggctcctcccccccggcgcggatgacactagaacctccttaagttgcgtcgcgccac

SEQ ID NO: 364917 - DNA, 122 bp, Homo sapiens
ctcatctcgaaggcctgcgacaggcaggtgtccaggttgaggtagtgacggatcatgcgccgggctccatggcgctgccagtccaggaccccatagttgatcttgtcagccacacagatagg

SEQ ID NO: 364918 - DNA, 122 bp, Homo sapiens
tgcctataaagagaaagagacgctgctcagcagacgcctggagggagcgtcgagggtcagcgcctgccaagagcggaagagatggaactagccctgcgggttgtttggttgttactttggac

SEQ ID NO: 364919 - DNA, 122 bp, Homo sapiens
taaacttattattttttctcaagtccaaattctgatatggacactaagactgtgatgctacgtttttatgaaatgggcataatttgaggaaattggctatctctacagtatttcctaaggta

SEQ ID NO: 364920 - DNA, 122 bp, Homo sapiens
aaatcaggggcttgggcattattaggctccctttgatcgcgccctgggatgggaagccttcgggcaaagccctgggggcaggacgcgtttttttttttttttttttttttttttaatcgatc

SEQ ID NO: 364921 - DNA, 122 bp, Homo sapiens
cgccggggccggtgaggctctgggggctttgcccccgccgggcagctggtagagaagagacgtgtttcacctccctgatggtctggaccagtctggaagagatggagacgctgtggccaagt

SEQ ID NO: 364922 - DNA, 122 bp, Homo sapiens
tagcgtgtctttggtgtgggtgtgccgtgtccatcataaggaagagctgtgtctgtggtgcgggtgcaccatgtccatcataagggtgagccatgtttgtggcgtgggtgtggcatgtccac

SEQ ID NO: 364923 - DNA, 122 bp, Homo sapiens
ccgccgccaacttcggctccctccctccgtcgcaaagccctcgagcccgcccggccgccacgcttcagcaaaaggtcgtgcgcagcggcccacactgaagactctccatctgctcccacacc

SEQ ID NO: 364924 - DNA, 122 bp, Homo sapiens
ctccctctggctttctctgttttcctccagactttgcccttcgaaacaaacactgaacagcgccgtacatggtgtttcctgggtaatgtcattggctgtgagcttggtttattaatcgtggc

SEQ ID NO: 364925 - DNA, 122 bp, Homo sapiens
gcggggggcggggctgcagggcgtggacggtctccgtcagtgccggctcctgcggattaccgcctcggaaccgtcatttcttgcctgtaataaggggaagataatcgtccctacgtaatcgt

SEQ ID NO: 364926 - DNA, 122 bp, Homo sapiens
gccggctccccagcgccccctgcggccgggaggaggacggcagccaggaaagatgaagagcgcgtgcagtccccgaagggtacaccctagggttcccccccacgcgaagtttctctccgcaa

SEQ ID NO: 364927 - DNA, 122 bp, Homo sapiens
atgtgcccagggcccagaaagcactgagtcacacttgcttcggtttaaaagaaaggcatgcgccagtgcacacaaagctatgcaaacctaggtaagaaaggtataaataaaaggggtacttt

SEQ ID NO: 364928 - DNA, 122 bp, Homo sapiens
gccagtctctgttccgaagatgcccggaaccacgtttctgaaaactaaattcctgttgcacgtagagactctccagatgggtccagttagggggggaaggaaggaagaaagagaagcaaagg

SEQ ID NO: 364929 - DNA, 122 bp, Homo sapiens
gtcacatggttgacctagattttccctaaagtctcttctaattctagagtatctgatgtacgtagtacagccatgtagatggtttgattttgcatttttccattttatgttatgaggttata

SEQ ID NO: 364930 - DNA, 122 bp, Homo sapiens
cttacgtgaccccggcctcgtcgtggtcgtctggaaaatgggcctcggcgtgatgctcgccggaccctggcaccacgagggaaatctcaagtagaaccccagctttggcactcgggacgggt

SEQ ID NO: 364931 - DNA, 122 bp, Homo sapiens
atctgtccatataccacacttaaaaattccactttgcaaatccatccttaacctctgactcgggttgtgcttgccgccagccaaaagttcccaactgatgacaacggcaccgacaccttggg

SEQ ID NO: 364932 - DNA, 122 bp, Homo sapiens
aactgggaggtttctaggcctgattgtctctcagtcctggcccaaggctctttcagttatcgaggagtcagccctgaatcttgagtattcactgccatttggcctcttggaaactttaggag

SEQ ID NO: 364933 - DNA, 122 bp, Homo sapiens
cctgggtgaaatgtgctcagggctccctctcctgggctggggggctccctcaggagatcccggatggtctgaagcacaaggtttactgagccccagtggagggtgcagccctgaagaagaaa

SEQ ID NO: 364934 - DNA, 122 bp, Homo sapiens
gcggaatggaaaccggttcgacaggtaacaaataggtgggttgtcaccgttatttcccaacgcatgcgccgtcgctccccgggccaccccaagctaattagatcagatcaccgccccccacc

SEQ ID NO: 364935 - DNA, 122 bp, Homo sapiens
taaggaagctgtgatgagaagcctctgaggaaacttcagcagaggagaaacatgatcagacgcacgttttagaatgatcactctggccatggtgcagaaaatggattcaggggcagggacaa

SEQ ID NO: 364936 - DNA, 122 bp, Homo sapiens
tcggaaggtgctgagcgtcctcaccgtcatgtggttgccctggtgttcgatctccttgtccggcttcagcagcagcgcgatcttccgcacagccaagctgatgtctgtgggggctgcctgtt

SEQ ID NO: 364937 - DNA, 122 bp, Homo sapiens
gcttgtatgactcagaatccagaaaatattgtagaagtctcaaatgcttgttgatacacacgcttacacaaaattgtaaatgttttaatttccttcaagtttcctactgcctcttcagtccg

SEQ ID NO: 364938 - DNA, 122 bp, Homo sapiens
gagcagctgctgcgccctccctcggcccgccgctcggagacgccccgccccgccccaccccgcccccgcgcccacgtgactagcataggcccgcccccgctccgccccccgccacagactcc

SEQ ID NO: 364939 - DNA, 122 bp, Homo sapiens
tcgagtcccgcctcctgactctggcctctagtccctgagtcccgggcgggctgcattcgtcggggaaacctctcctcgaccaggggcacctctactcgaccaggggcgacggcgtactttgg

SEQ ID NO: 364940 - DNA, 122 bp, Homo sapiens
acttagccgttctccacccgcgggcgggcactcgcctctaggccccaccacccagagtcccggaagccaatccccacagccctggagcactgccccgccccttcaagagggaaaacaatatg

SEQ ID NO: 364941 - DNA, 122 bp, Homo sapiens
ggggccccagggggcttgggaggggctgagggtcccatggccaagaagcatgctggcgagcgcgataagaagctggcggccaagaaaaagacggacaagaagcgggcgctacggcggctgta

SEQ ID NO: 364942 - DNA, 122 bp, Homo sapiens
actgtgctacagttttatttcctgctggcttctcagttctctaagccttgaggatccacgcgccttagaccattattacctcctcccccatatgcagtaagttcctgactcttctgatcttt

SEQ ID NO: 364943 - DNA, 122 bp, Homo sapiens
gcaccagggtcaaaggccaagggttctgatcactgttaacacagggaatggtatggaccccggagccctctgctctgcccagaacgccaagaagacatcctggactctctctatgctctcaa

SEQ ID NO: 364944 - DNA, 122 bp, Homo sapiens
actattgcccggctaagatgagtctcttaactgaccatattttccttttcattttggctgcggggaagctcagttatatgtgattagtgccacagacagcccaagaaatgctcagcccattc

SEQ ID NO: 364945 - DNA, 122 bp, Homo sapiens
gccctgtgctgcaggcaagataatttggctaatgaactcgttaaagggcccctggtgacccgccccggcttcccctcggcccatctgggaaattccattgaaaggctggagaaggttcctca

SEQ ID NO: 364946 - DNA, 122 bp, Homo sapiens
aaaggagggacagagttgctgcagctgctgtcttaagaagtcctaaagttcctctagcctcgaggactcgtgttgggaaagtcactcctgcagaagccactggcggatctagagtacaggca

SEQ ID NO: 364947 - DNA, 122 bp, Homo sapiens
agagatgccatcagcttggcttcctccatcagagctgccttactaggcattcgggttcaccgacatgtcccatacttccttctctgaatagcccagcatggcctgacctccacattctgctt

SEQ ID NO: 364948 - DNA, 122 bp, Homo sapiens
gttacatacaataaaatatgcccttttgaatgtgtagtcctatgagttttgacaagcactcgtggttatgtaatgatcactactaccatgatcaagatatagaatatttttatcacctctca

SEQ ID NO: 364949 - DNA, 122 bp, Homo sapiens
attagtttctaacacaaccttaaagtactttgagtgtactctgagactttctggttagtgcgtttaacttcctctctttaacaacattggtatcaccttgatgggctaagctaccacaactg

SEQ ID NO: 364950 - DNA, 122 bp, Homo sapiens
cgaagttacgggatcaaactgctgtaggagctgccaaacgcttctctccatttctggccgcggggccgcggaccgccctttaagtagcccgttttatccctggcagaggtggagccttaggc

SEQ ID NO: 364951 - DNA, 122 bp, Homo sapiens
aagcaaccaaatattatgcaggcattcagacacttgattctaaggtttggaaagatggaacggggagacttgtgaattgtcagtacatagatgcccaatatgccatgggagcatatgatacc

SEQ ID NO: 364952 - DNA, 122 bp, Homo sapiens
tacacaatatgggattaaatatcagaagaaatggttaaaagtggttacctctacagagtacggatcaggaattgggatgaatgaactaagggaaaattctagtaggatgataatgacttttt

SEQ ID NO: 364953 - DNA, 122 bp, Homo sapiens
cgtttagctcccgccacgacttccggcggactgggtttaatttaaacattttccaggctacggaacagctcctaagggaagattaagttgagataaacagagaagcaaggccgaggagcctg

SEQ ID NO: 364954 - DNA, 122 bp, Homo sapiens
cttctataagtcttgtgctaaacaaacccacgtctgtctcctttccaaatcacactgtgtcggtgaccctgagaaacatgggcatccgaggctcacattgcaggatctccctttaaaaggca

SEQ ID NO: 364955 - DNA, 122 bp, Homo sapiens
tcacagcctcggactcctccgattaggatgtacagttggactagggaaaaaaaaagaaagcgaagtgcgccaactgcaatacagagctggaaaagaccggcaccatcttatccacttagcac

SEQ ID NO: 364956 - DNA, 122 bp, Homo sapiens
ccgcctgctgcagctgggccacaaaggcggcggcgtggtgaaggtgctgggccaggggcccggagccgccgccgcccgggagcccgctgaaccgccccccgaggccggcccccggctggcgc

SEQ ID NO: 364957 - DNA, 122 bp, Homo sapiens
gtcgccggggcggacgcgcagtccatggggcgcggtgggccggggagttgccccaggggccgcgggagttgctgagaggagacagggttgggctttctcctcgcccagaccccaccccaccc

SEQ ID NO: 364958 - DNA, 122 bp, Homo sapiens
ttaaatggcctgtgatagcagcagtccttacactcataaataccaagcgggactcctaggcgactagtgaaaatgcatggggccagagggagttttctgggggcactcttagttgccgtggg

SEQ ID NO: 364959 - DNA, 122 bp, Homo sapiens
actcagttcctttaattaaaatgtgttggaaaagccatctctgggtggagaagagaagttcgttgattatagtgatggtactataagagaaaaactgaagcaggaaaacagtgagcagcgcc

SEQ ID NO: 364960 - DNA, 122 bp, Homo sapiens
gaacttggccgggtggcgttaccaccggagggtccagtataggcaggactgaggtgtacccggcctgctgtgagccccggcgtagtgcagaactcggggcctcgtttcccaagaacacacac

SEQ ID NO: 364961 - DNA, 122 bp, Homo sapiens
cccgccggccccgcgccgctgcccggaggctggcgtcttcccgtcactccgggacccgcccgctgtgtcccctgggcaactgtctccagggagatcgggccccgcccccggcagcgacaccc

SEQ ID NO: 364962 - DNA, 122 bp, Homo sapiens
agccagagtgggaggaaagctggagccaccggagccgggcctctgccggcctctccctgccggcttcgctgctcagcacacgagatcatgttgtgattacaaaagactcctctgggctccca

SEQ ID NO: 364963 - DNA, 122 bp, Homo sapiens
gtaagcctgagaaaggggctgcttcggtctccagccacaactctgtgaagccaagccacgcgctgtcttccagagagggaatagaagtttccatcctgtgcacccagtggttgagcaagaag

SEQ ID NO: 364964 - DNA, 122 bp, Homo sapiens
tcccccaacccaccgaggtgggtggggaccagccagtggcgccctgctagcctgcgtcagcgccagtgcctggcccccgagtccctaccccaggctggtaggaccttctccctttcctggcc

SEQ ID NO: 364965 - DNA, 122 bp, Homo sapiens
agtctaccctagagggaggatgggcagttttcctgcgggggaggcgcttgggcctgtccccgcttgaggaggagcgttcctggcagggcggagtccccggagtgacgcagaggaggtgaaac

SEQ ID NO: 364966 - DNA, 122 bp, Homo sapiens
aaatccaaaaggcatgctctgtgaggttctaagagaaaaggacttaaattgcccagggagcggagcagcctttaaataaatctgaagtgctcttgtaattgaggtacagctcctgcttttca

SEQ ID NO: 364967 - DNA, 122 bp, Homo sapiens
gcaggggcccgggggccggggcctggaggacaggcgaggcagcggcgagtgcggggccggcggtcggggagggcggtgccatggggtcgcggagggcccccagccggggctggggcgcgggt

SEQ ID NO: 364968 - DNA, 122 bp, Homo sapiens
cagatctacttcctagaaagtgccatttaacaaaacccaggcaggatgttaatactgaggcggaattacaggttgccaaagcatttcctgtgagaggattgacaggggatcattttgttatg

SEQ ID NO: 364969 - DNA, 122 bp, Homo sapiens
cttctcctggaactggaggaatccgggtttgacctggggcttggcgttctctagagaagtcgttgccaagggcgaggcgggcaggtgaggcactgacgctgggatctgaggcatctggggta

SEQ ID NO: 364970 - DNA, 122 bp, Homo sapiens
ggatgtcatcaaagccccatgaagaaactctggggctgagtggtgctgagtgcgctgattcgggtgcctgatgctatacagttcgcagaattctgccttgtgccagaattgctggggatcag

SEQ ID NO: 364971 - DNA, 122 bp, Homo sapiens
cccactaggctcacagagaagaggaacagcaaggcctagctccaggccaggacagtgggacgttcccacaacagtctgtcccccaggctgcccttcatgcacccagcatgcactgcgctttc

SEQ ID NO: 364972 - DNA, 122 bp, Homo sapiens
ccattttccacccctctgcatcgcttcctctcgcgttaaagagacagaggcagcaaggtccgccgaggctccgagcacctcacagcccggatacaaaccgcctacccgccctcccgcctggt

SEQ ID NO: 364973 - DNA, 122 bp, Homo sapiens
caaccttgagccactgcacccagccaagctacacctttaaaaatgtgactaacttatacccgaaaggaataattatttctattttatttgccttgttttttgagttgcttcaggcggatcat

SEQ ID NO: 364974 - DNA, 122 bp, Homo sapiens
tcccaagatggtagcaccatgcttggcacacagtgctgtgcacttaaaggcttgtgaatacgcagagccctttctggggtggaaatatccagggggtgaggcagccactgttcctctggctt

SEQ ID NO: 364975 - DNA, 122 bp, Homo sapiens
ttaaaggaatgatttgttggctatctagaatcttgagtttccgaatgcccctttccctgacgaccaggatttattggatttttagttgaaaaaaattctttgccgttaagcctcaaagctcc

SEQ ID NO: 364976 - DNA, 122 bp, Homo sapiens
gctgcccgagcggagctgctcagccgcggtaacgggtcggggcctcatcgtgcaggggagcgagcggaggggcggggcggggcgcgggcgggctgaggagccgccgggctcgggctccgcgc

SEQ ID NO: 364977 - DNA, 122 bp, Homo sapiens
ttcaaaaatttggacaaaatactaaagttatctctcagacatgtgaaatgttcacgttatcgcgttgtgaagacaactccgtaacaggctgtgctttcagccttgtggttgaacgctccgag

SEQ ID NO: 364978 - DNA, 122 bp, Homo sapiens
cgcgcccggctttccggcgcactccagggggcgtggctcgggtccacccgggctgcgagccggcagcacaggccaataggcaattagcgcgcgccaggctgccttccccgcgccggacccgg

SEQ ID NO: 364979 - DNA, 122 bp, Homo sapiens
tcgcgcgcgccgggtgctgcccagcaacgaaaggccatgcggggttcgtccctcagatgccggtgaccttgattgaagtcacctgccttctctagcttccagtcctttaaaacgagggtttg

SEQ ID NO: 364980 - DNA, 122 bp, Homo sapiens
ttcccgcctcgcgccatttgcggccttcgccggggtggaatccctgtctgcctgggcccgcgccagcacgtttctgaaggatgtgacttgggtctcttacaacccgtttagtacctgtgccc

SEQ ID NO: 364981 - DNA, 122 bp, Homo sapiens
gggatacaacccacccagtaaaccttgggataataggggagggtcagtgtgtctcagggccggcacgggaggtacttctactttaatactgcaaagtgttacataaggccagaggatttgga

SEQ ID NO: 364982 - DNA, 122 bp, Homo sapiens
ctcccgcttcgccgctggggatcggctcggctcctggccactccagcctgggaaccggctcgctgagctccgggatgaggtgctttaaaagggggtcctgttttttgcttctttgtcagggt

SEQ ID NO: 364983 - DNA, 122 bp, Homo sapiens
agcagcatttcacacactcccctgggcttcctacccttagattcaggaatgggtcagaggcgctccaaagggacctcaggtagactttggcaatgtccttaagcaggtggcataggcagcag

SEQ ID NO: 364984 - DNA, 122 bp, Homo sapiens
cgaggtggagcgcgacaacctggccgaggacatcatgcgcctccgggagaagtaaggctgcgcccatgcaagtagctgggcctcgggagggggctggagggagaggggaacgcccccccggc

SEQ ID NO: 364985 - DNA, 122 bp, Homo sapiens
agggtagagctcaaggtaagtctccgaaactagccctctggttggagatccagagacctgcgacccccgcgggcctgaccgggacactctcattctagccccagagctcgtctctcccctcg

SEQ ID NO: 364986 - DNA, 122 bp, Homo sapiens
cctatgagaggaaggacaacacggtagggctggggcctcacctgggagagggggacggcacggtagggctggagcctctgctccctgtgcactgagaacacgcgtctctgcacgtcatgctg

SEQ ID NO: 364987 - DNA, 122 bp, Homo sapiens
atggtttgaggtccactgtgaaccaatctggacttttttttacagtcatatccatcaaaacgaccagtggccatcagcccgctgcggccatcgatcgggtggcccctgcccccgtgcaggcc

SEQ ID NO: 364988 - DNA, 122 bp, Homo sapiens
tgcctacaaagaataaaatgaggaggataataatgtcatcaggggactcaaactgtagcacgtacccattaaagaattattgtgtggatttttaaaaccaggccattttttcccactacttc

SEQ ID NO: 364989 - DNA, 122 bp, Homo sapiens
tccacccctccggctcgcccgccccctcactcacccggtcaggtgggcgtttcctgtgggcgtctccaactccgcaggtgctggacggaagtcagggttctaatcctctgcgcgctctgcga

SEQ ID NO: 364990 - DNA, 122 bp, Homo sapiens
aggggccttattttgcaggcctgcccagtggaccctggaagattaggacccctttgaacgcgctcaactttattggttccccgccgggcgaaccaggtgggaggaagttcctaccccggcgc

SEQ ID NO: 364991 - DNA, 122 bp, Homo sapiens
tttgtaccactcgagaagaagcgaccagggacggcggccattttagagcgctccactcggcggcggcagcggctcaactcaccttcaccgagaactcagcagctgccaccgcagctgcctcc

SEQ ID NO: 364992 - DNA, 122 bp, Homo sapiens
tccgtagggacgtatgagtattaaatttactggtagttacagatttttcttgtaaacagacgcaagggcagagggtacaaatgagaatggatgctaaggcatcacttctataaatccagagc

SEQ ID NO: 364993 - DNA, 122 bp, Homo sapiens
taatcatgagaatccaccagacagacccaaattgagggggattctacaaaatacacgacccgcactcttctaaggtgtcaaggtcatgaaaaacaagactggaaaaccaacacagactggag

SEQ ID NO: 364994 - DNA, 122 bp, Homo sapiens
atccaaaatgcaggaggcagcgtgatgatacaacgtgttaatggttcattagcagtatctcgtgctctgggggactatgattacaagtgtgttgatggcaagggcccaacagaacaacttgt

SEQ ID NO: 364995 - DNA, 122 bp, Homo sapiens
tcactgccgggggcccggcggcgctggtgaccgctccgagtgcggggcccgccaagcccacgcccacctggaactcgcgctggcccacaagcgccgtgtgcagccccagttcccgcccgcac

SEQ ID NO: 364996 - DNA, 122 bp, Homo sapiens
gtggattgtaacattaaaaaaaaaacaaaatagaatggaaagtatcagagtactactagccgtgggaagtttctctgtgaagcttgtttctatatgtgtatttttatgagagtgtagtgact

SEQ ID NO: 364997 - DNA, 122 bp, Homo sapiens
ctgggcagggtccagccgtggggggtgactggccattctcaggaggaagcgccgagtcaccgggctaaccgccaccttccattgtaatgaaggtcacaaataatgtgaatcaggaaacctct

SEQ ID NO: 364998 - DNA, 122 bp, Homo sapiens
atatgtccccatgcctgcaggttgtgcagccccacattcctcagccacagcaggccaggacgctgccaggccagcaaagcttccgaatccccctctaccatctcctgctccaccctgtctgg

SEQ ID NO: 364999 - DNA, 122 bp, Homo sapiens
ttgcccccgatgacaggcgtggaccctgagccgaagctgcagggccccccggccgtgacgcgggactgatactccttgaggcacactttgaagtatgtgtcacactcgtcgcgggtgcactt

SEQ ID NO: 365000 - DNA, 122 bp, Homo sapiens
gggggctggttccgccgctgtatcgggggcagggaccccggtggcggggcccacaggccgcgaccttttcgccgaagggctgctggagttcctgcgacccgctgtgcagcagctcgactctc

SEQ ID NO: 365001 - DNA, 122 bp, Homo sapiens
acaattctaaaggtaatcagagtggatcctctccaagccagaacacagaaagccccactgcgagccttgttgtcacccagtcagccccaggcagggttggcaagctgcagcctaaggcacat

SEQ ID NO: 365002 - DNA, 122 bp, Homo sapiens
gggggctgacatgggccatgttgatgcagagcaacaggtccagcgactgtggcaggatcccgccccagtgctcccagccccacgtcacgtccaggtgtagcggggccttcacgttggtcagg

SEQ ID NO: 365003 - DNA, 122 bp, Homo sapiens
acccaacagaggagccacacatgctttccgacttcgccgcacgctgagatgtcagtcgaacgtccgttacctgactcgcctccagtgacaaggcttccagctgtccttcgagtcgcattttc

SEQ ID NO: 365004 - DNA, 122 bp, Homo sapiens
agaggccgaagaaaatgacaatagtgcaatgctatgctattcaaggaagagggtgcttatcgcaaaacgggatgagtgatcagggttgtcatatcctcaaacaggttggaaaggggattctg

SEQ ID NO: 365005 - DNA, 122 bp, Homo sapiens
atccccgtccctgtaagaaacctggacaccagcatgattttaaacacttctacacctctccgtcctatttttccatgctccacgctcgaaggaaaaccgccacccaagaaacacacggagct

SEQ ID NO: 365006 - DNA, 122 bp, Homo sapiens
ccccgctcaccccgatgccgtagtcccagccgtggcccttgggctcgtgaggctgcacgccggtgcgatgacacactgtcccccggctcaggctgtggctgccctgcactttgttggcgatc

SEQ ID NO: 365007 - DNA, 122 bp, Homo sapiens
caccggtctgcaaacaaattcaggctgcattacaattaatgccagtggaactccttctaacgacttccagcttgctaattttttacgctaataataaaaaaaggcattgctatgcaagaacg

SEQ ID NO: 365008 - DNA, 122 bp, Homo sapiens
cgacagagatgtggaagaacacggtggggttgaccatggctggtaatacagagctcccgacggcagcatctgcaaagcactcagtgaatgtttatggaataaagtggagtcctgttccctca

SEQ ID NO: 365009 - DNA, 122 bp, Homo sapiens
acctctcagaaccttagtttcctcatttgcaaaacaggaataataacagtactcacttcacggggtgcccaaacttaagtgcaataatgtacataaagtgtttaccaaatacaaaatgctca

SEQ ID NO: 365010 - DNA, 122 bp, Homo sapiens
ccaggagagcctgccctcagactgcaggaccagaacccctgcctccatctttccaagcaccggggcgaaaaaccacaaaggaaaggaagaaaatttatatatatataatataaaatcacttg

SEQ ID NO: 365011 - DNA, 122 bp, Homo sapiens
tcaaaaaacaaacacaaaaaacctgcctcaaagtaccaggaggccagagcctgtcactctcgcctcattcagtgctgtgtatggttgcaacttctgtcactcaaggcctgaggcgggagact

SEQ ID NO: 365012 - DNA, 122 bp, Homo sapiens
tctccccattcacagggtgtggggaggaggacttgagctgcggatgtgacgcttctgacacgttgcaggcacacggcacgtgcttgttcctcgccatgtcccctcacacctgtgctgccatc

SEQ ID NO: 365013 - DNA, 122 bp, Homo sapiens
gctggccgagggcgggaagggggcaggcagggaagcggcccgcccttcgtcctgccccttcgccctactctgtcacctccgctggaaggagtggaacccagacttgctggtctgatccatgc

SEQ ID NO: 365014 - DNA, 122 bp, Homo sapiens
cactcagtttagctgtcacttgcagctgtcttaggaagtgcggctctcctctctgcctcccgctcgctcctgctcactccaggtcctctctccctctccctgtgtctctgcctctcgcttta

SEQ ID NO: 365015 - DNA, 122 bp, Homo sapiens
gcttctatgtcctgtacacaatcttcatgaaaggtaaaaacgaaactacaatagaaattccggaatcagctcttgggcagggtcaaagagttagcataaataagatcatttgcaggttctgc

SEQ ID NO: 365016 - DNA, 122 bp, Homo sapiens
gggctggggagctggaccaagggaagcccaggccgcggaggtgaccactagggggcggcgcggagccggggccgaggcctgtcgccgaggctgagtttggccccctgccccaaattggttcc

SEQ ID NO: 365017 - DNA, 122 bp, Homo sapiens
tttatataaggtgataatcttataacaaataaactactcttatttcttttgtttgctacccgtctcgctccactagatcataaattccatggagccatagttttatcttttgtttacctctg

SEQ ID NO: 365018 - DNA, 122 bp, Homo sapiens
cgagggcggagcagtgttctccttggcacagacccgggcgggccaggggcaccgcgagggcggagctgcgttctgctcagcacagaccagggggacaacgtgaaggcagagcagcgttctcc

SEQ ID NO: 365019 - DNA, 122 bp, Homo sapiens
ctctttaacatttcaccgaaactgtaagaagatattccagattcaactcaacagtgcccccggagccatcttaatactgcctacaactcattgtgcaaatgaaatacccacccctgctttgt

SEQ ID NO: 365020 - DNA, 122 bp, Homo sapiens
aacaagctccgaagaaacggattggagcctgtgacctaccacagggtaggaaacccagcccgaggtgggagttggggaggactgagtgaggggacctctggatgcctctcagtggcaccagg

SEQ ID NO: 365021 - DNA, 122 bp, Homo sapiens
gcagaagggagggcgcaggcgtatttccagcctgctggggccaggtggaaggcgacatcccggcctcagggggaggcacggggagggcgcgagagagggctgccaggatcgtgcttcccctc

SEQ ID NO: 365022 - DNA, 122 bp, Homo sapiens
agtttcccagggcctccgccacgtgaccccagtgtttgtctcccgcccagagcccgcgcccgcagccacagggtggggcaaggtatcaaagaccccacccagctgagctaggagtgagggat

SEQ ID NO: 365023 - DNA, 122 bp, Homo sapiens
ggtggaactcagctccgggaaggctgtggacctggaccctggggctccccgctgcctgggcgcctctagcccggcgatgagtggttctgcggggaccgacggccccatttccttcttgcctc

SEQ ID NO: 365024 - DNA, 122 bp, Homo sapiens
gggatgtgaggagcccctccgcccggctgcctcatctgggatgtgaggagcgcctctgcccggcagccccgtctgggaggtgaggagcagctctacccggccaccaccccgcctgggaagtg

SEQ ID NO: 365025 - DNA, 122 bp, Homo sapiens
ttcccagcctccagaaccacaagccaaataaatttcttcttttgataaatcacgcagtcacgggtattctgttatagtaatacaaaacagactaagacagcccatatgctttcattttccaa

SEQ ID NO: 365026 - DNA, 122 bp, Homo sapiens
ccaaagctagggattggctccacagagtcctgcttcccttgaaagggctgtgtctggcaccggtggtccctgagtggggtggagcaggagtcacccatgagctagaaacccttctgctgcca

SEQ ID NO: 365027 - DNA, 122 bp, Homo sapiens
aggagcccctcaaacttccctgccctcttcaaatagtcctggctttctggactgaattaacgtatttcttaaatgtatttgattaatgtctcatgcctccctaaagtgtgtaaaatcaagct

SEQ ID NO: 365028 - DNA, 122 bp, Homo sapiens
ccgggtgtgggctccttcgcaggcgctgcccaccccccacctcctgcagccactcatggccggctctgggccctggatccccggaaggcacacacattgaggaagaggctgtgtctcctctc

SEQ ID NO: 365029 - DNA, 122 bp, Homo sapiens
tggcaagcactaagtgaaatcatcctaatggggttttctgatcccaagcagcctgcaaatcggattttattctattttttgcctctaagtgagctcgccatcattccaggaggcatctcagt

SEQ ID NO: 365030 - DNA, 122 bp, Homo sapiens
atgatctcccgcggcttctcctgactcttgcggctggcgctggcgctgggcatcgggacacggaactgggcagtggacaccaccctccctcgcaggcttccgtaaggcaggccaaaggggct

SEQ ID NO: 365031 - DNA, 122 bp, Homo sapiens
agagcgcgccgccgagcgccgccgcgccctcttcagctctccaaagcttccacatcggcccgagctggaggtgcgaactccacagcagccctgagacccaggcactccctccagccctgcca

SEQ ID NO: 365032 - DNA, 122 bp, Homo sapiens
agaggaggtgctgccgccacagtagcagggaccggagtctcgagccgcggcctcccggaccgtgctgcccaggccagctcagggacagccgggagtacgaaagccccaccctctggggcacc

SEQ ID NO: 365033 - DNA, 122 bp, Homo sapiens
tctgctttgcagcctcactggccaggaaggtggacacctcatacctcagtctcccaattacgccctcctcctccccctcctcctccctcttttctctcctcctcctcccctttctctcctcc

SEQ ID NO: 365034 - DNA, 122 bp, Homo sapiens
ggaggctgaggcaggagaacggcgtgaacctgggaggcggagcctgcagtgagccaagatcgccaccacactccagcctgggcgacagagcgagactccgcctccaaaaaaaaaaaaaaaga

SEQ ID NO: 365035 - DNA, 122 bp, Homo sapiens
tgcggccaaggaagatgctggccgagaatttgctctgggcttggtgatgggaggactcgtcgagtgtgatttccacgcgtggcgggtcccatgccccccgcgggagaagagcaagcagagcc

SEQ ID NO: 365036 - DNA, 122 bp, Homo sapiens
gttttagtctgcgttagttttactgccttttacactgctttatccccacctcactggcctcgtcgccgcctcctctttgaaacggtacctcctgtcgcctcggattttccttgtctccccga

SEQ ID NO: 365037 - DNA, 122 bp, Homo sapiens
agccgggccagtagctttgctaggctggccttcccgtggaggcgttttccagccccagcgcggggagacatgcctgaatttgggagcgatgtgactctcagcctcccacttcacccggggac

SEQ ID NO: 365038 - DNA, 122 bp, Homo sapiens
tggtcccgccagcccacctcctgtatccctgccacggcccctgcgtcccgggtccgggtccgggtcctcagctctgtggccgctcccactagctgattttgacagtggggggtgggagaggg

SEQ ID NO: 365039 - DNA, 122 bp, Homo sapiens
ccagagggccagcatcctcgcctgacacctatttttagatgctgagacaggcggcttcctcggggccaggggccctgtgagtggagcttccgcttcctggcctaggagagaattcctgctcc

SEQ ID NO: 365040 - DNA, 122 bp, Homo sapiens
ccagcggccctctaaccggctgcctttgtgctccacagaggatggcctgggacgtagaggcggggagccggaggggtccctgcctgtgcgcatgcggcgacggctccctcagctgcccagtg

SEQ ID NO: 365041 - DNA, 122 bp, Homo sapiens
tccgagggcgggctgcgagttggagaccctgcaggcccgcgcctgcacagccctcagccccgcccgcttgtccagctgcctcgcaattggctgcaccctctgggtccgagcccccgggaggg

SEQ ID NO: 365042 - DNA, 122 bp, Homo sapiens
ctaaaccgactcctgtattaaaataatacactattattgtgaagtattatctgacaacaccgttttttgaccttggatttctttagggcaggagccatgtcctacttatgactgtttctatg

SEQ ID NO: 365043 - DNA, 122 bp, Homo sapiens
ataaaatacccctttccattaattcccttttggaaaaatcacaaacagaaacaaatgatacgctgtctcaatgtgggttactcaaagtatgcccatcttctagcagctgttagcagcacgtg

SEQ ID NO: 365044 - DNA, 122 bp, Homo sapiens
tggagaaaggggctgggccaagccgggatggagggttggtcacgcaggcgcggggggccgcgtcgagaaccccacgcgggagcttctggagtctccagccaccgcttctcacttcactggag

SEQ ID NO: 365045 - DNA, 122 bp, Homo sapiens
atgcagctaatcagctagcagtgtttcttcatttcccaaccgtgctatgaacagttaacccggataaacagacgggaattctatctttgaggagttaagaccttggtcgatactgatttgaa

SEQ ID NO: 365046 - DNA, 122 bp, Homo sapiens
cccgtgacaaggaggcggccagggctccgggaagtcgccggacaactcagcacagacgcccggagcagcagatgctccctacaggagcaggcagaggtgccacacgcccaccacagcctcac

SEQ ID NO: 365047 - DNA, 122 bp, Homo sapiens
tgacgctgagtagggaactccgggatggggctccacggtggactctcggggacaggcacccggggccaccctacaaagcctcgccctccaggccacagtccagagccttcggcctgcgcagg

SEQ ID NO: 365048 - DNA, 122 bp, Homo sapiens
ttaccacctcccttcttacagtctatttcctcaacaactattgttttgggaagtagccatcgctcattccagatctcttttggaagcccttcagggatccgtagctaagggaggaaggtcat

SEQ ID NO: 365049 - DNA, 122 bp, Homo sapiens
cccgcgccgcccgtgacagcaccccataaataaacctggacttatctaagcgctggctggcgcgccaggacggttcccggccctgcgccatcccacctcccaaaacgcaggcgaccctttct

SEQ ID NO: 365050 - DNA, 122 bp, Homo sapiens
ctcagatgatccacccacctcggcctcccaaagtgctgaaattacaggcatgagccaccacgcccagccaggtgaatggctgttgagtgagtaagtggatggatgatgtaggaggtgagtga

SEQ ID NO: 365051 - DNA, 122 bp, Homo sapiens
ggggaaagacacctccaggacaacagtgatttgcctcagcggggcaaaggccaggcctgacggaagagcccagccttcgccgagggccgcagggagccagagactcgagcctgcggttccag

SEQ ID NO: 365052 - DNA, 122 bp, Homo sapiens
gcgattcctggacgcacactgcagggtagtggtcagggccggagccgccccggactcctgcggccacctccaccttgaaagctcgcccggctcggcttggcctaacagccagtccccaacct

SEQ ID NO: 365053 - DNA, 122 bp, Homo sapiens
atctgaaatcatggtctgttgtccaccgggggcctgggaaacagccacccccttctgctccggggccagcggcctgtcctcgggttcactgctatttctgccaaaggggagaggtaattata

SEQ ID NO: 365054 - DNA, 122 bp, Homo sapiens
tcacctgaagtcctcgcatcaccctccaccctcacgcccttgggttttaaaaagccactgcgttcgtgggtcactgcagggcgcctccgcaatgtctttagcagatacaagagcatccctcc

SEQ ID NO: 365055 - DNA, 122 bp, Homo sapiens
tcccttgggggctgagctgcctgtcagtgctgggggcggcgggcactgctctcctgtgcgcgggcctgctgctcagcctggcccagcacctctggaccctccgctggatgctgagccgggac

SEQ ID NO: 365056 - DNA, 122 bp, Homo sapiens
ccacatccacagcctaacaacgtggtgcaatcgccctttgcgacgccgcagaccaacagacggatgctgccctgctgcagtttcacagcacaccgggtctttccgcttcagctggacagagg

SEQ ID NO: 365057 - DNA, 122 bp, Homo sapiens
ccaggctcttgtccatcccagagtgcagaagatcctgtaccagctctgtctgttcttacccgtcaccttctaggacccacctgtctcctgcagcagcagcagcagcagcagcagcagctctg

SEQ ID NO: 365058 - DNA, 122 bp, Homo sapiens
cctgaccctggctcaggtgcccttcctcgtcccgttgccccgggccctgagccccgcccccgccacgcccctgaggcttccaagctccacccggtgcccgaggctcctgagccccgcccacg

SEQ ID NO: 365059 - DNA, 122 bp, Homo sapiens
ctcttccgagggatgcaacccacgccaccctagggagaaagggaagcaggggacagtgctcgggagggggccccatagcaggggaagccagccttaatctcagaaattcaattgcttagccc

SEQ ID NO: 365060 - DNA, 122 bp, Homo sapiens
atggccggaagttcgagcgcgcgagagaccgaagggccagccgaggatacaaaaacaaaccgtggagcctaccctcttattaaaaatattttggatgctgaaataaagaagtttaccttcat

SEQ ID NO: 365061 - DNA, 122 bp, Homo sapiens
aaagtaagctgactgataatctgggagaaatagccaagggggttggggcttcctcatacacggatatgttggagaagtagaccattgggacagcaatcactggagctctaccctgccccacc

SEQ ID NO: 365062 - DNA, 122 bp, Homo sapiens
atgcaaatgcttctgtaatgcccagtatttttgtaatgttgccctatcctccatgcctcccgagtgtaccctttttccttccctcaccctcctcctctgggactcctcagacctccccatat

SEQ ID NO: 365063 - DNA, 122 bp, Homo sapiens
gctgctgaggtcgttcagggctattagaatggtgcctccgccacacttaatccattctgccgaattcaagaatatttatttccctgaaatgaactcacaagttgccctagaggaaaacttgg

SEQ ID NO: 365064 - DNA, 122 bp, Homo sapiens
agggtattgagtgtgtcggaaaacactttccagctcctccacctgcaacagcgtgaacttcgtgcgccgagttcgtggctgcatgttctcgggctgcggaccctccatggccgcctgggccg

SEQ ID NO: 365065 - DNA, 122 bp, Homo sapiens
tgaaactggaagaaatcctgtcctggcacaagtgcctgtaacaagcagacttgcctgggccgcccagccactacaaccctgactcctgggtcttgtctccctccctcctgggggaaataaac

SEQ ID NO: 365066 - DNA, 122 bp, Homo sapiens
gcaagactgcttcctttgcggcttcagaccctgttcgctcctaggttcctgtggtccacgcgccgtctccacacccacttcctatacttgagttgatggttagaaccttgtcgtcaccctgc

SEQ ID NO: 365067 - DNA, 122 bp, Homo sapiens
agcgcctgtccggcaacgtcagcggcagcttcaccctcatgcgcgacgagcgcgggctcccggccatgaacaacctctacagtccctacaaggagatgcccggcatgagccagagcctgtcc

SEQ ID NO: 365068 - DNA, 122 bp, Homo sapiens
cctcatcaccacggtctacttctatgaattgcaggagaacctggagaagctccttcaagacgtgagtgcacgcggaggccgggctgatctcaggctcagcaccgccagattgtgcccaatgc

SEQ ID NO: 365069 - DNA, 122 bp, Homo sapiens
gtacgcgtacccctggcgtcctctgccccatttccctaaataccaacctcaggtgccctccgcccacctcccggaagctgccaggtctgggcagaaaaccaaaacaacccttgggcctttgt

SEQ ID NO: 365070 - DNA, 122 bp, Homo sapiens
aaccaatcctctcaaaccctgccactgcttatcaattaaatttatgtcatattataaatccgttgttgtcatttcttttttttttttttttttgagatagagtctcactctttttgcccagg

SEQ ID NO: 365071 - DNA, 122 bp, Homo sapiens
gaaggaacacaaaaaagggtcccaacagaacctgtcaactgacactagcgtatgtccctccggccttctcaatccctccccttcaaaccaaacaaaaacggcaaacaggaaacgctcttctt

SEQ ID NO: 365072 - DNA, 122 bp, Homo sapiens
caacagaagagagttgacatttaactcatatagtgcagagaatagaagatgaccccagcccgctgccaagggttatatattctgacaaggctaagtacttttggacaagccccagtttaacc

SEQ ID NO: 365073 - DNA, 122 bp, Homo sapiens
ccgcgctcctggagccccaggtgaggcgcaggtgagggcccgcggtggggagctttggcccggcccggggcggccgctgccctccgagaatggccgcggcccggccggcctggagactgcgg

SEQ ID NO: 365074 - DNA, 122 bp, Homo sapiens
ctgcgcagctggaagtggccctgctgttccgatttccttgacttcctcagcaccttaccacgcacaagggaaggaaaggcagagagagaggtttggtgttgaccccagaggcgaccctgatg

SEQ ID NO: 365075 - DNA, 122 bp, Homo sapiens
tttccattttagtaaccaatttcacctccttctttctagccttagaaggatatcccttctcgagtttaagataatgtttctacttattttctctatcctatgctataagctattccaaatct

SEQ ID NO: 365076 - DNA, 122 bp, Homo sapiens
gggatgtctgagggtagaccaggcaggagacatgtaaggtgtatgcctaggatggaatgacgctcacaggggagaaatgcaactgttactgcttagaataaatgggggtagccctcgcacat

SEQ ID NO: 365077 - DNA, 122 bp, Homo sapiens
gcaggccacagggcgatggagcctgcggcagtcacccgggactctccgagaggcagcagacgggaacccagcaccccgccggccgcaaggagacaaaggccccgccagatccccaaggccgc

SEQ ID NO: 365078 - DNA, 122 bp, Homo sapiens
gtggatggaaagcgccatgtgttcagagcagcttctggcttcctggcagccgtaggtgtgcgttagcatggtgcagggtctagtgctgtccttctggagctgaagagaacctggctgtcgct

SEQ ID NO: 365079 - DNA, 122 bp, Homo sapiens
catgcccgccccacctagctgtggtctctgcctgcccggggccttgcccgtgctcaccctcgcgcaggcctcagaggtatccagccagtacttgtgcaacttcacgatgttcgggtggtcca

SEQ ID NO: 365080 - DNA, 122 bp, Homo sapiens
ctgaagctcttgccgcacaggctgcagatgaaggagacctcatgcttgcccgcgtgcacgcgctgatggatcaccaagctgatgtgcaggcggaagctcttcttgcactcggggcacgtgta

SEQ ID NO: 365081 - DNA, 122 bp, Homo sapiens
ggcaaggtggtaaagttttcttaccatctcaacctcctgtccacatttagcttctttcctcgcaccatctctagcccaggtttacctggtagcctggttatgttaacaccggtggccccagt

SEQ ID NO: 365082 - DNA, 122 bp, Homo sapiens
tcgtccagcagaattacctgaagtaccggcccggcccctacgtggagcagctggtgttcccgggccagccgcgaaattacgaacatgcaaatcatggagttcctggccaggcaggccttccg

SEQ ID NO: 365083 - DNA, 122 bp, Homo sapiens
tcagggtcatttccaaaggaaatgttccaaagaccaggggccagcctgcgtcggggggaccggggttcccatggagccccagaggaggacaatcaccaggtgaccttgccagggtttgcccc

SEQ ID NO: 365084 - DNA, 122 bp, Homo sapiens
aattttagataccacgttagtaaaatatcagattgagctgctaaatttctcccacccctacgtcattttgtgttttctgagcatcctagaggattgtgactgtatgcacaggacagaaacac

SEQ ID NO: 365085 - DNA, 122 bp, Homo sapiens
gttgggagtcctgtccggcctgacttaggccgagcgcggcgtgcgcgtgcccccagtccccgcggcggtctcccgcctggcccacgcccaccatgcgcatccacccctgtggcggccgggcc

SEQ ID NO: 365086 - DNA, 122 bp, Homo sapiens
aatagacaattaataacttcacctggggcagaacgtgctaaaggccacaagaggtgccagcgaggcactgtggaattcagaggaaggagggaccatgcctgatagggtttagtagaatgttg

SEQ ID NO: 365087 - DNA, 122 bp, Homo sapiens
cgtcgaactccccttcccagtctggagccacccattccaggcggggcgggaggctgatcacgtgaccagcgagcggtctcaccctcctcatatgccagtaccacctcctccagtcccagagg

SEQ ID NO: 365088 - DNA, 122 bp, Homo sapiens
ggtatagtctttctcacggctgctggggtaataaaacacatgcttttaatccggattatccgcggtgacatggggcctccgctactgcccgtataagttaaagaaaggcctgttctctcaaa

SEQ ID NO: 365089 - DNA, 122 bp, Homo sapiens
ccctgccttcaagcaggtagcagactctcagggcttggccatagatgggaagagtcctcccgtccccacccttcagcacgaagcttccctcccgccttctccgctcctcgacgagatgagga

SEQ ID NO: 365090 - DNA, 122 bp, Homo sapiens
ttttcccctacatgcattatctcattatggatgaggcacctgggaagtttaggggagctgcgaaggcacacctgctcaaatgagcctggggaagtgccgagggacagggagctgagacaggc

SEQ ID NO: 365091 - DNA, 122 bp, Homo sapiens
gtcttagaacctcattttctaaggttccctgttcccccaccattgccccagcccctatcccggcaagagcaggcaacctgagcttggggtaccgtgcatgctcttgtttctttgagggccct

SEQ ID NO: 365092 - DNA, 122 bp, Homo sapiens
caagcgattctcctgcctcagcctcgtgagtagctgggattacaggcatgcgccaccatgcgcagctaattttgtatttttcatagagacagaatttctccatgttggtcaggctggtcttg

SEQ ID NO: 365093 - DNA, 122 bp, Homo sapiens
agggctccttgagcaaatcctgccagaacatcactgggatggtgcttgtggtctgatacgcgagacagtcccgtgtagaaggccatcatgatcaaggtgaactgcaggaggggccggagcag

SEQ ID NO: 365094 - DNA, 122 bp, Homo sapiens
aattccaggactggcacttgccagcgtggagactcgacaaaatacggaggtttctgcgaccgtcctggcacgagggggaggcggaaacacgtgcggtgcagggctgtcctcgggatggagag

SEQ ID NO: 365095 - DNA, 122 bp, Homo sapiens
ctcagctccccgggctgcctgggctcagcatgctgcacccccgtgctggctgggctgttccgcctctcctggagggggtccgtcttccatgcccctcatcatccacccggctactctttctc

SEQ ID NO: 365096 - DNA, 122 bp, Homo sapiens
cagcagtagccagggcttggacttatcgatgacaggctggtcctgaggatacagctgtcccgtgactgactgtcttaactgagcattttctcaactcgactctcatttcttccctgctggta

SEQ ID NO: 365097 - DNA, 122 bp, Homo sapiens
gcaggcagccagaggaaaacagaaatagttaaatcagaattgccggatggcgagaaggtgcgaagatcctccatgggatatctccagagtcctgctctgtgttgttctaaataactaaataa

SEQ ID NO: 365098 - DNA, 122 bp, Homo sapiens
ttagtaaattaatcacaaaaatacaggcatgaattgagaaaaggaagaccaatcctggatcgatgatgactactggtggcgtatgagtcatagacaatgaatacgtgtctggaactctgagg

SEQ ID NO: 365099 - DNA, 122 bp, Homo sapiens
cctggatgacagccaatgtttggtaatcctgaaaataacagctctcctccatctgcaccacgcatctgcctagccatggaataaaatctctctcgtgtagcagatggcaggtgaccagagga

SEQ ID NO: 365100 - DNA, 122 bp, Homo sapiens
tggaaaggagcttaggctgaggtgcaagtgccccggagcctgcttgcagcagcctctgatcgcacgccgtcctgcacgtcacaccgggacggcgtccccgagagggccgtagacgcgaggcc

SEQ ID NO: 365101 - DNA, 122 bp, Homo sapiens
acctccaagtcagggcaccacaacacgccaccgggagagatgctgagaaaaacccaagaccgctcgggaaatgcaggaaggccgggttgtgaggggttgttgcaatgaaataaatacattcc

SEQ ID NO: 365102 - DNA, 122 bp, Homo sapiens
ggacaatacagtgagaccccgtctctacaaaagataaaatattagccaggggtggctgcgcgcatctgtagtcccagctagtactgtggctgaggcaggaggagcacttgagcctgcactga

SEQ ID NO: 365103 - DNA, 122 bp, Homo sapiens
agggagtttatagggactccacggcgcggtggctcgcctgggctgagaggctgactaacgcgctgacacggcggcacggggctttacaggccacgggccctgccggcgagactgggagggag

SEQ ID NO: 365104 - DNA, 122 bp, Homo sapiens
aagtggtcacttccacacacgtattttctcatttaagtgtcatggaatgagaacattttacgagctaggacctattattctctactgtaggacacaggtcatattattcttttatcacagag

SEQ ID NO: 365105 - DNA, 122 bp, Homo sapiens
ctgggcttttgctgttctcccctgaggatgaatatgctgcctgcctaccctgctaccccccgcatttggcaaggttgcacatgtcttagggatggaaaaccagtagccaacactaaaccagg

SEQ ID NO: 365106 - DNA, 122 bp, Homo sapiens
tgcatacgtctcttagggtgcctcttcccctccgtcccggttccactcctgggcactaaacgagctgcacaatatgtcctagtaatgactgctttttgaagaaatgtttgaaaagtgctgca

SEQ ID NO: 365107 - DNA, 122 bp, Homo sapiens
gcaccacatagcaattattgaaacaattctcacaggagcagtatcatgctgggctgattgcggtctttggaaccagaaagacttggatttgagtcatgactctaccctttgctagctgcatg

SEQ ID NO: 365108 - DNA, 122 bp, Homo sapiens
tgtatatatatatatatatatatatatatatagattgatgtctcatgtctccttaaaatgcgtaaaaccaagctgtgcccttaccaccttgggcacattgttgtcaggacttcctgaggctg

SEQ ID NO: 365109 - DNA, 122 bp, Homo sapiens
gctgcctacccagggcgggcccagtgccagcttccgggagcttggatcctggatcaggcacgggcctaggacctagaaacggaatcatgagaaataaaacaagaaagtatcgttacgcccaa

SEQ ID NO: 365110 - DNA, 122 bp, Homo sapiens
ggcggcggcgcgggagctggggttggtgtttggcggcgccagagcagcggatcccggtctcgccgcagcagcagcgcgggtgtcgtgcaccgcctgaagacgccgtacctttctacccccca

SEQ ID NO: 365111 - DNA, 122 bp, Homo sapiens
tgagctggtaagacctgtgtcttggggaggggtgggaaagggagggtctgctagttctcccggtgcccgcagttcctccgggaagccaggaagaaccagagctggttcccaggcacccggca

SEQ ID NO: 365112 - DNA, 122 bp, Homo sapiens
ccaaatagcttcattgtcacctaattacctcttaaaaagccctattgccaaatatagtcacgttctgagtttctgggggttagggctttaacatatgaattaagagagccacaattcagttc

SEQ ID NO: 365113 - DNA, 122 bp, Homo sapiens
aggaaaacctctggatgctctcaaggatccctcgaccttccgtcactgtggggagggaatcgcagtgcaggcgttagtaatgctaaggtcctgttaccagcatttcagacatctgcgtgccc

SEQ ID NO: 365114 - DNA, 122 bp, Homo sapiens
cacgaccctggccccccatccagcatcccccctggccaatccaatatggcccccggcccccgggaggctgtcagtgtgttccagccctccgcgtgcacccctcaccctgacccaagccctcg

SEQ ID NO: 365115 - DNA, 122 bp, Homo sapiens
agcagggaagttttggtgcagttttgagcgtccgtgtataaggagtggctccgtagtcaccgcccccttgaggatgggaatagaaagggctgtcaggtcagcttgaaaggagagaggggaat

SEQ ID NO: 365116 - DNA, 122 bp, Homo sapiens
aaaggaatggtgccaagagcctggcgactccagctctgtggcaggcctgcctggttcttgcgctgctcagggcctgggtcaggtgggggtcgggctggggcagaccccgccggggaacctgg

SEQ ID NO: 365117 - DNA, 122 bp, Homo sapiens
cggctctgcggaggccctgccggattctctgggcgaacaagcgtaactgcgtgacttgcccgctggggttctcgtctccttcctggtttccaccaccctcttcccttagagaagcctcctgg

SEQ ID NO: 365118 - DNA, 122 bp, Homo sapiens
gcccagacagtgtgtgtgcttaattgctatgttctgctgcggctgataaatagatattctcgttccactttattcgtctaaggtgtggttactgaagataagttctcccagtctgacaagat

SEQ ID NO: 365119 - DNA, 122 bp, Homo sapiens
tcagactggacagggtcacgtaggaacgctcgcaggccgcgcacacatacagcacgtggccgcccaccaccttcaccacgtgctcggggccccctcggaagcccactggtggaggcagggct

SEQ ID NO: 365120 - DNA, 122 bp, Homo sapiens
gaccctgcggcgcgggtaagaggcggcgggagcgcgcggcccgggagtgtggctgcagtgcgccgggacaccagggctccgcgctccgcactcaagaggctcccgcgtcccaacccctcgcg

SEQ ID NO: 365121 - DNA, 122 bp, Homo sapiens
caggctggagtgcagtggtacaatcatagattactgcagccaaaaactcttggcttcaagcgatcctcctgcctgggcctctgaagtactgggattacaggtgtgagccactgtgcccagcc

SEQ ID NO: 365122 - DNA, 122 bp, Homo sapiens
cagcggctgagaaggtcccttcggtgaaggcgagttccgggacaacagagagggccgcaccgtttccgagtctctcggaggctcagttctcagcgcaccattccccacagctctccttttta

SEQ ID NO: 365123 - DNA, 122 bp, Homo sapiens
gagagtggggaggcgtcagcgcctggccagggctgccccagtcctttggtgcccggtgagcgcagccagcaggagctgagcagcgggggagatgaatcacctcctgccttggcgaggcggca

SEQ ID NO: 365124 - DNA, 122 bp, Homo sapiens
gtgttctggtcgtgggcagttcagttgcactgaaagaaatctctccagtacggagaagcacgaaccagcctgcttcccagaacaaaagtggttaataagagtttaggttcattcttttactt

SEQ ID NO: 365125 - DNA, 122 bp, Homo sapiens
tggcatattaactagtaaaatgctgggtggcggttgacttggaagcagcgtccgggatagcgcgtgctccaggaatactctgaaagctgatgccgttaggggtgcatggttgactcctgggc

SEQ ID NO: 365126 - DNA, 122 bp, Homo sapiens
caaggccgcctcgcctccctggctatttagtgatgagtcagatgatacctcccagcgcttcgccctcgccccctgacatcctccctatccctgctttaggggcttttcctctcttactgtgc

SEQ ID NO: 365127 - DNA, 122 bp, Homo sapiens
caacgtggtgaaaccctgtctttactaaaaatacaaaaattagccaggcatggtggcgcacgctagtattcctagctacgtggaaggctgaggcaggagaattacttgaacccgggaggcag

SEQ ID NO: 365128 - DNA, 122 bp, Homo sapiens
ctgcctcgtgactctacccaggcctccctgtggagtgtggcacaggcttggccagttctccgagtgcagccaagaggctcataggttttgggcacatgtctgcgacctcacttttccagtca

SEQ ID NO: 365129 - DNA, 122 bp, Homo sapiens
aaacgactagtttacttgaacgaggcctggaagcggcagctgcaacccaagcaggactgacgcccgacagactccaccctaacagtctcaagcccctttccattcagtttattttgcagcag

SEQ ID NO: 365130 - DNA, 122 bp, Homo sapiens
atctcggcgacctctgccagggagcttcatttattggttccccttggagctggacttggtcgtaggccgtccacgggcaggggctccggccgcaactgcagcgggggtttctgcatccaatc

SEQ ID NO: 365131 - DNA, 122 bp, Homo sapiens
cccgtagtttgtctgtggttgctccggaacctctctgtgcgctgccattttgtcagtgaccggctgtttgtttctgcctttccttcagatgttgccttgttaccctggcactgttgatcctt

SEQ ID NO: 365132 - DNA, 122 bp, Homo sapiens
cggggagatggggccgggggcggggggacaaccgagaggctcctccgggagcatgcgatccggaaccctcactctaaaaagaatattttaagaaggaaagagaggccccccgcagccttccc

SEQ ID NO: 365133 - DNA, 122 bp, Homo sapiens
cgcccagcccagccctgatatgtccaccgaatctcccaggatttcagaatggaaggggctcgtccacctcctcgtcctccatcaccggggagacggtggccatggtgcactccccgcccccg

SEQ ID NO: 365134 - DNA, 122 bp, Homo sapiens
aacgtctttaaatgctaagtaaaagccctagcaagtaaaagccctgaggcactagggtgtcggttaggggtcacaggcggagaggtggggcgcctgggggtttcggtagggagccacccaca

SEQ ID NO: 365135 - DNA, 122 bp, Homo sapiens
cgttaattgggagccttggtaattaaggggaatgtgcaccaaaagcatgaatggctgtgtcgtgggcgcaggagccagctccagttgtagttgtcattttcagctagagccaggtggggagc

SEQ ID NO: 365136 - DNA, 122 bp, Homo sapiens
cagaaagaacaggtattgctccacccgagtaaacgctgactcaactctgcagggctggcgcgctctttcctcacctcacccctcctgccaggcacaactgagatccagaaataagaggatta

SEQ ID NO: 365137 - DNA, 122 bp, Homo sapiens
cgcgcagccgtgatcctcgtttgggggcgagcgaagaattgacaagaggtctcggcatcccgaccccgcccgccttacctgtagcaccattcctttcgcggatcgtggggcttgatggttgt

SEQ ID NO: 365138 - DNA, 122 bp, Homo sapiens
cctggcgcctagagtggcctgcgggccattcagcccatgggagccaggatgagttgaattcgcttcacaaagcaatggggcagtttcaacaacccagcgcggccgcggccgagggggctgtg

SEQ ID NO: 365139 - DNA, 122 bp, Homo sapiens
ggcaacgatcaaagccgccacaagggtttgttagctggccctctccaagtcccccgggggcgtcctaattgctcgtcccacagcctcccgctcacaggctgtccgacctcgccggcgctcag

SEQ ID NO: 365140 - DNA, 122 bp, Homo sapiens
gccgccgccgccgccgccgccgccgccaccgcccgcgcgcctccccccgcggagcgagtgcgggtcaccgggtcactgggtcattgtctccgcgcccgaaccccgagcaccccgtggaatcc

SEQ ID NO: 365141 - DNA, 122 bp, Homo sapiens
cttataaattcagttacctcctgaactccggccgatggccactccggcccgggagtgccccgcgccgacccgctggccttggccgtctcagccttcattatcgccacggccttggcgccccc

SEQ ID NO: 365142 - DNA, 122 bp, Homo sapiens
gagaggactgcgcaaggggctggtccggctgagccgctgctacgcggggctgtccgggggcgccgtggccttcctgcgcagcactctgtgcgcccagccctggtaaggcgcgcccctctcct

SEQ ID NO: 365143 - DNA, 122 bp, Homo sapiens
tgggcaagctagagtgagtcccagccccgctgtgctgcccgagggtagaggagcgtcaggcgtgcttcctgtctgtctgcagcagcccggctggcccaaagagactctagggacccaagctc

SEQ ID NO: 365144 - DNA, 122 bp, Homo sapiens
ttctcacgatgtggtgtcgtgaggagccggccatcagttggaagtgtcaagacaaactctcggagcgcctgggaggcctgtactccaggctaggtctggtggacactccggccactgtgctt

SEQ ID NO: 365145 - DNA, 122 bp, Homo sapiens
tcggaggcggggccgggaaggtcgggtttggttcctacacagcagaggtgaacattggagcgcctgctgttcactggatgatttgatgaatcaaacctaagagacttaagagaaaagctaac

SEQ ID NO: 365146 - DNA, 122 bp, Homo sapiens
gggtccggccaagtagcccaactggtgaacgtgtctatatttgtaacactcattcagtgccggggcccctggtcggagtaaagggctaaactttactttttcaggcccgctgaagtttcgtg

SEQ ID NO: 365147 - DNA, 122 bp, Homo sapiens
ccagagtggcagaatcaggaccagatcccaggccttccagaattctttgcctcccctctgcgctttgtggcaatgcatgagcccttccacagtggcttccagagacagggctcagctttaga

SEQ ID NO: 365148 - DNA, 122 bp, Homo sapiens
gggtttggaattctagatcgtatttgaagtgttggtgccacacacaccttaacacctgcacgctggcaacaaaaccgtccgctctgcagcacagctggggtcacctgacctttctcctgtcc

SEQ ID NO: 365149 - DNA, 122 bp, Homo sapiens
aaaaccagttcctaccgtttatgaaacgccgctcgcagcctgcccctgtgcccttcacgccgtactttgtcccgtcttctcagtgaccctgcaggtcagtgtgggtgatggtcacagacatg

SEQ ID NO: 365150 - DNA, 122 bp, Homo sapiens
ttaggatagaagggggtgggggagctcctttacacagccagcaaggagcaactggcagcacgggtaacgaagagcagccgtctaagtttgcttttgccacatcccagctactattgtaatct

SEQ ID NO: 365151 - DNA, 122 bp, Homo sapiens
aaaagaggaagaggctgtgttcctgagccacccggccaggaagggcctggctgggccggacgccccacccttgccaacaggcaggcccgccccgtctccgcctcgccgccaacaaggaggac

SEQ ID NO: 365152 - DNA, 122 bp, Homo sapiens
ccaccaaaccgaacaaagactacagcacccaggatacactgcgcagtctgggggcggggccggagttcaagcctcggaggaagtaaatgcaaatctaagcgagcgctgtggggcggtgagta

SEQ ID NO: 365153 - DNA, 122 bp, Homo sapiens
tcgactgtgaagcgggccgggacctgccaggccagaccaaaccggacctcgggggcgatgcggctgctgcccctgctgcggactgtcctctgggccgcgttcctcggctcccctctgcgcgg

SEQ ID NO: 365154 - DNA, 122 bp, Homo sapiens
tgcccaagaggtggggttcagagagcaagcagggagcagcagaagcagctcagcaggggccgcccaagggagcatggagtgagcagattctttgtgccttccggtggcctttcccaggttcc

SEQ ID NO: 365155 - DNA, 122 bp, Homo sapiens
cgtggtgagcaaggagggctcccctccctgtccatggaggggcagtgctgacgcgatgtccggtatggttcttaagaccacctggctctccccacagcaacagcggcgggagcgggagcagc

SEQ ID NO: 365156 - DNA, 122 bp, Homo sapiens
gacagtgaagtaacccctccttgggtgggtgggcttcagggaaagagagggagggcctaacggggacagaggttgttgctacctttccatccggccacctgccacgccacctggtgcctttg

SEQ ID NO: 365157 - DNA, 122 bp, Homo sapiens
gacacacaattcattctcttttctttagtgcctgaaaataaaaatccgctaccttttgtacggaaggtcagtatctgcggaggccagcattttagacagactacttgttccttcatttgaat

SEQ ID NO: 365158 - DNA, 122 bp, Homo sapiens
gggatagctgcgaggcagctggaccaatcctgaacgaaagacatcagtgatcgcaagaggcgctaaaacttctgccgaaacccgggatcgaaccagggacctttagatcttcagtctaacgc

SEQ ID NO: 365159 - DNA, 122 bp, Homo sapiens
atttcaaaatgtgccagaatcccatgataataagacagaagaaactgggtttacccccagcgggtaggatttaggttagacaccaggaagaactccttggcaacatttatgaacatatgaga

SEQ ID NO: 365160 - DNA, 122 bp, Homo sapiens
ttcttgtcctttaaggaagcatgagcacaggaagagtttacttcatactaggaaagggaccgaggctgttaatccccaggtgtgggaggcactcaggtcctgcttggtgaagtggagcagcc

SEQ ID NO: 365161 - DNA, 122 bp, Homo sapiens
agtggaagggggatccattaatattttcacctggacaagaggcaaacaccagaatgtccccgatgaaggggatatataatggaccttcttgatgtgaaacctgccagatgggctggaaagtc

SEQ ID NO: 365162 - DNA, 122 bp, Homo sapiens
agggtatttcctcccgtcagaaaaagcgccccagtctggtctgggttggtttttatttcacgttgttgcaagtaggcgaagtcccttctgtctcctcccttggggtaagtggaaaggagtcc

SEQ ID NO: 365163 - DNA, 122 bp, Homo sapiens
tcccggttgcatgttttgtttaatgtagttttcattaagactggcctccttgctactggacggtggtgaaagtcctgactcactgctaggtctcctctgacactgtcacagagtgagggaga

SEQ ID NO: 365164 - DNA, 122 bp, Homo sapiens
gggcagggcggctcacgggctgccctcaccttgctgcagtcacggcggccatccaggcagcggcagctgttgcagtcttccacccaggagcttccgtgtgggaacggagtgccccgggacca

SEQ ID NO: 365165 - DNA, 122 bp, Homo sapiens
ttgggggaaatgaggggcccaagagaaggtcagagctatcttgccagcttgggcaacatacgtcttagttatggccccactgtatagacacacatcattgaacaacagggataagttctgag

SEQ ID NO: 365166 - DNA, 122 bp, Homo sapiens
taagatagcagtgataccatggagggcttactgtgtgccaggcgcatgctaaacacttcccgtatgtttaatcctcactgcaactctaggaggtaggtactattctttctcattttttaatt

SEQ ID NO: 365167 - DNA, 122 bp, Homo sapiens
tgtggggactggggtgagtgctcttggccagagggtgggtggcagacccttcgtgcagcccgttggcctgggctctgtacccgagctccaagcctgccaggatggtgggggatgacccatgg

SEQ ID NO: 365168 - DNA, 122 bp, Homo sapiens
gaaggaaagaggatggcagagcctcgagccgttgccagggactggttgcgtgtcccagaacgtgccaaaagcctgcctcgtgagcacggcaagagctctgccagggcagtcccagctggccc

SEQ ID NO: 365169 - DNA, 122 bp, Homo sapiens
ttcagtgtgaaacagatttcagtgtgaaacagatgaccactggtgtgagaacgagaacaccgtaggacctatcgcttttttatcttccgcactctgaattgtgacccattttctagaccttc

SEQ ID NO: 365170 - DNA, 122 bp, Homo sapiens
actggatcacgaaggagtcaaactcgccctcggggaccgtccagcgcaggagcaaggagtcggaggtcctgtctgtcaccgtcagctcacccaggcgtggtgggcctgaggacttcccaggc

SEQ ID NO: 365171 - DNA, 122 bp, Homo sapiens
cgggaagagcactgcgtccccctaggacactgacatgcctgccctgtatgtgcactgcagcgggttaggggccccaaaacaggtaagcaggaaaagccgcctttcctttcccctgacccagg

SEQ ID NO: 365172 - DNA, 122 bp, Homo sapiens
gcaatggagtcaaggatggtgatatccagccccgtgccaccacttccccacttgaatccacggtggctgctattcatctatcgcgaagttaccgccaagcccagcaccacgttttctcattc

SEQ ID NO: 365173 - DNA, 122 bp, Homo sapiens
tgtgaggcccgggcagccaatggcacctgcttctgccactggccggcgacttcccaaaggcggttaaagaaactctgtgccaggctttgggcatccagcactgatgggcacaatggagggat

SEQ ID NO: 365174 - DNA, 122 bp, Homo sapiens
cccagccggtggcttccacaggcaccacagtcatctagggagttcactgcgcaaagagttcgattcccagcctcacccttggagatgcagggtgtgagttcatgatgcagctgaggaccagc

SEQ ID NO: 365175 - DNA, 122 bp, Homo sapiens
gagtctgaggggctgcgtgaggggctggggcccagggagtccgaggggtctctgtgagggcgctggggtgtccgagcgagcagggaactctggaaggggacaggagccgggggagctgcagg

SEQ ID NO: 365176 - DNA, 122 bp, Homo sapiens
gcgagctcagtgttgcccttgcaatggggaaaacacctgctttccgggtcctcgtcctcccgggagcgcggaccctgaacagcccccgtccgacctccccggctcatcacccccttccagaa

SEQ ID NO: 365177 - DNA, 122 bp, Homo sapiens
gccttgtccccccctccatccccccagtttcctctctgtggtgaacgtggttggggttcacgtctcaccccccatgcagaccccagcagatcctgagggcagcgtgtggaccatgtccgaag

SEQ ID NO: 365178 - DNA, 122 bp, Homo sapiens
tgtccagtgttggcactaagttccagtgcaaagtcctacaatcactgtgttcttcctccacgtgcacagattccatctccgcaccatgtagccactgccaggggatgcaggaagggtggtgt

SEQ ID NO: 365179 - DNA, 122 bp, Homo sapiens
ggttcctgcccagggcacggttccttcaggccggggatcccggggaggggttcttcccctcggccagggtcatcgttttgcgatctctcctgggagtctgggtttggagtctggtcttagcc

SEQ ID NO: 365180 - DNA, 122 bp, Homo sapiens
caaaagcagagcgcacaaattccagaagaaattaccaacggcgggactatttcagtgctccgagaagtatcaccagtaaccaatcagcaaaaagctctagctcacgtggtgtatattcagcc

SEQ ID NO: 365181 - DNA, 122 bp, Homo sapiens
ttggcttctccactgagacgcctctactgtaggccaagaaagttgatcctgaaagctcaccgcagaaagcagcaaactaaacctccttcctgcctgggcccagagccacccagggcccagca

SEQ ID NO: 365182 - DNA, 122 bp, Homo sapiens
gggcagcaggactaatccctggaacagctcggggaggattatcccagccactgtcagcagcggtgcagccggctcattcccagataggggaggccagagccaggggcctgccgcaagttgga

SEQ ID NO: 365183 - DNA, 122 bp, Homo sapiens
ttctgttacgacgcttggggcactcacatacactcacacatctgcgcaaatacacttacacgacacacactcattctctcccacacaccaacgctccctctgtccgcacacactcattcgca

SEQ ID NO: 365184 - DNA, 122 bp, Homo sapiens
atcagtcaccaatccatattaattttttttctcaaaaatatattttagtctttctttccccgcttatcagggtcaacaccctattctaggcccagctcatcttaatcttggacaactgcaaa

SEQ ID NO: 365185 - DNA, 122 bp, Homo sapiens
gctctccagcaggggcaggttgaggcatgggagcagcgtcactgggaagtacagtttcttcgggatgaacagctaaagtttatttcaaagctctggaggcgggggcggggcaaggctggttt

SEQ ID NO: 365186 - DNA, 122 bp, Homo sapiens
agggggacctgcagaggaccttccgacaggtctgtgtctgttctctcagctgtctagcaccgcagcgctggggggcgcgtgggagtgaggcggtacctgtgagcgcgcgggagagcggaaaa

SEQ ID NO: 365187 - DNA, 122 bp, Homo sapiens
tcttccttttctattggtcactgcttgtacatggtaatggattgacccaggctccactgtcgtgtttttatgaatcctcggtaaaatatatgcactagtagatccaaatttaacccctccaa

SEQ ID NO: 365188 - DNA, 122 bp, Homo sapiens
gtgtccctccggcgccctctactgagaaagcttaatattgtgctggctgcgaaggagaaccgcttaattcaatacagatcagttaagaggatggatttacggttgagaggcaatacattgat

SEQ ID NO: 365189 - DNA, 122 bp, Homo sapiens
ggccacctgcacccagcacaggcgcgctcacgggccctgctggctttttctaccttatgccgggaggaagtgaactgaactgagccgacgcacacatcagtactcggctctctgcacgctca

SEQ ID NO: 365190 - DNA, 122 bp, Homo sapiens
tgatggtcatctagtccaagcatccagagtccactgatagtgttgatgtctacctacactcggacacagcataggaagaaatgccaagggccagtgagctttgcagaatcctgtgagtcaca

SEQ ID NO: 365191 - DNA, 122 bp, Homo sapiens
ggctgggacatcccggcgcaggatgcggtgactggcctggcctctcctccgggcccccagcgcgcagggccctgagctccgaaggctcccacagctctggcgcccctcggcagttggggtgg

SEQ ID NO: 365192 - DNA, 122 bp, Homo sapiens
gcccatgagaaaggggccgccttcactggccatcttatgcccggatgctcagccgcatcacgtccggcccagggcctgtgaaaagagggcccagccacgctgaaaacacggattagcccttg

SEQ ID NO: 365193 - DNA, 122 bp, Homo sapiens
ggctttttacccgacttggcaatgactatggaatgcctacgctgtgaaatggagaaattacgtggaataaagggtcaaccagggagtgtgctttatcacactggaggtatcaatatagagca

SEQ ID NO: 365194 - DNA, 122 bp, Homo sapiens
ttgtccgcgcgtctttggggtaaaacaccaggactgggggtccagaagggacacgcagaccgcctctctccagtcccaggggtgtctccaatccggaaaccaaaacttcgttcccttcccac

SEQ ID NO: 365195 - DNA, 122 bp, Homo sapiens
ccaatcgcttcgatgactaccagggcagcctgctggcgggccagtgtgaggaggcggtggcgcccttggtcaccgccaccatcgagcgcatcctccaggagcttcccccactcgggggcggc

SEQ ID NO: 365196 - DNA, 122 bp, Homo sapiens
ctgcatacactgagactgagacaaatatatgaccatggcaaaaaatagaaatttgcatgtcgaaggccaccacccatgcagccatccattgttctccatggttatctacaattacagaggaa

SEQ ID NO: 365197 - DNA, 122 bp, Homo sapiens
ggagcggccgcccgcctacaacctggaggccggccagggcgactacgcgtgaggcccgcacggctacggcgccatccccgccgcgcccccgcagccgccctactcctacctcgtcacacgga

SEQ ID NO: 365198 - DNA, 122 bp, Homo sapiens
cagcgcaggcgccaccgtggtcccacgaaactgggtctcttcacagacagacccacagttcgcgagcatggctcagcgctgccccgcttctcccagcgccccttcccgacctttgaacgcct

SEQ ID NO: 365199 - DNA, 122 bp, Homo sapiens
tatacacgcaaaagaaccggtgtgtggcctctgagcccacggtggatacgcaggactgggcggaacggaatccctactctcggggtctccaccctccgggaaggacttgtcacttctgcatc

SEQ ID NO: 365200 - DNA, 122 bp, Homo sapiens
ccgtgcccacgcctggcaatggggtaatcaatggggtgatgctcagtgttacccaacaggcgtggggcagggctgcacctcccaattcccatgcctacccttgtctcactgccaggacctat

SEQ ID NO: 365201 - DNA, 122 bp, Homo sapiens
ctggatgagtgagacaagggcagttcaggaggtcacccaataactgaggtcgcagcaacacgaaggagccagggagcaggggcggccttcccttctccactccaggcggctccagcgtgcac

SEQ ID NO: 365202 - DNA, 122 bp, Homo sapiens
tgtgatcggccctaactgcactggcaatcttttccgtttttttgttttctgttttccattcgcatgccccttagcgtacctggggctccggctcctttacaaatgaaacccaaagtgctccg

SEQ ID NO: 365203 - DNA, 122 bp, Homo sapiens
acagaaaaaatacacagtgttgtggcatcaggggcctaaactaagtataaaagatcttttcgaaaaggtgatgagatccaaagaatttcaacttaagcttcctgtgagagctgctttttgaa

SEQ ID NO: 365204 - DNA, 122 bp, Homo sapiens
gcagcactcagagccaggctccactcactcaggagctcccaggcaggtgctggggcctggcgcggcacagcggctgtccgtgtgtccccagacaggcaaggcaggacaggggtcctggaaag

SEQ ID NO: 365205 - DNA, 122 bp, Homo sapiens
tcccaagatggccgtcgggaaagcacatccgggaaccctgccgtggttgtccagggctgacgcagcgtcaatgtggggcggggcctcctctctgaggaggaaccaccccccacctctctgct

SEQ ID NO: 365206 - DNA, 122 bp, Homo sapiens
tcttgctccttttcccaggccggcgcgctgcttgctgggaaatttagtttgggttcagatcgctaggggccggccaaagtgcgtaaaaactaccttcccatcaaccactgtggcaccggcgg

SEQ ID NO: 365207 - DNA, 122 bp, Homo sapiens
aacctctctgtgcattagtttttttcctctataaaatggagataagaaatcccacctcatcggattgtttggaagattaaacaagtgtgcaaacacttagcacagtgcctggttaatattca

SEQ ID NO: 365208 - DNA, 122 bp, Homo sapiens
aaaagggtgtggctgccttgggcccatccaggcctgagatcctgagggtggggtagcccccgccctggcagggctggaagtcggtcttcggacagagcccgtcctgcccagaagcccaggcg

SEQ ID NO: 365209 - DNA, 122 bp, Homo sapiens
ggagttgagtgcggcggcaggcacaaagaactggtgcaggtggccgtgcagccaggaggccggcatggagtaggcggcataggggaaggcgcagcctgcggtgaggtgggggcgtgcagctg

SEQ ID NO: 365210 - DNA, 122 bp, Homo sapiens
tggctctactttcaaatcctacctagaatctgacggcttctcactcccctccactgctgccgctgaggtgtgaattcctggcccaagtctgcctgcatcagttccacagccccaacccttcc

SEQ ID NO: 365211 - DNA, 122 bp, Homo sapiens
ccccacgatggcaaagacgacgggcaagaacgattgggcgtggcgcgcaggagtggtccccgcgaagacagcgtcagagggaagggaacacatcccagccacagccaggcaggagggagaag

SEQ ID NO: 365212 - DNA, 122 bp, Homo sapiens
tctctgtcgcttggggtccagcgaaggctgggcagtaaccaatggacgactgtggcccaacggggatccctcggatgcagccaatgccctcgttgcgctctccgcccccgccctcgcctgcc

SEQ ID NO: 365213 - DNA, 122 bp, Homo sapiens
agtatggattttttattttatagtttaaatataaagtcaatttttggtccccttcaaaggcgtttatagctaaaagtcaaggaatctcgtgagctcatcattttcttagcatgccccactcc

SEQ ID NO: 365214 - DNA, 122 bp, Homo sapiens
ggcgctgaatgatgtcatgggatctgcagttcagcgagatgaaagggataaagcagaacccgctggcactaggaaaagcttccaacacacagtccacaacacagcttgggaaccaaaaaagc

SEQ ID NO: 365215 - DNA, 122 bp, Homo sapiens
cctcctcccagctgggctgactccagtcccagccccagtctccaccaactgagcagcgtacgcagggttgtgtctggcttccagcatctaccaccccttcagagcaacttccaacatgggac

SEQ ID NO: 365216 - DNA, 122 bp, Homo sapiens
caatgtctttagtttaacagttaagttcttgaaaagctacgttggggagccacaactttgcgcgagtgtcttggttgagcgcagcgcccattcattgcccgcgagcgtccatccatctgtcc

SEQ ID NO: 365217 - DNA, 122 bp, Homo sapiens
cgcccgcagagccggtcctggaccgagcgaggaggaggggctaataacagaggcggagggcggttgctaggaaacagcgtcttcgggaggaagtgacttccccaccgccgggtctctcgggt

SEQ ID NO: 365218 - DNA, 122 bp, Homo sapiens
ccgtggcgggactggcaggctgggaggggggcgcccccgctcggctcccgggccgtgacgcggccgctgccctccgcccctggcttccaccctgtttgcatggccacaagctcagcggtgga

SEQ ID NO: 365219 - DNA, 122 bp, Homo sapiens
gcctgcaatgtgcggagcacagcgcggccccttccagccggagctcgcgagccgcggtggcggctggtggccaccccagggaaataaagccgttgctgctgcagcaaaatggctcaaagtcc

SEQ ID NO: 365220 - DNA, 122 bp, Homo sapiens
acacctgtaaccctaacctttgggaggccaaggtggatggatcacctgagctcagaagttcgataccagcctaggcaacatggcaaaaccccgtctttacgaaaaaaggaaaaacaaaaaaa

SEQ ID NO: 365221 - DNA, 122 bp, Homo sapiens
gcggcatctgaggagaaagcgtccgaggggcgtggagccagggtcctgcggtgcctgctccgggaatactgcgagtcggctggagctccccagccgctccggagaactgggggagccgggtc

SEQ ID NO: 365222 - DNA, 122 bp, Homo sapiens
tactgactcctcctggacactaggggtggcgggtggctttaggcgtctctagtcttcgagcgtttgaatacgttttagcccacaataatggggtaaaccttgaaggccaacaattctgatgg

SEQ ID NO: 365223 - DNA, 122 bp, Homo sapiens
ttttcttacttctctctttaccctgtttctttatcaagtgcagtggtggctgctaccgttcgccaagcgtgcctgtcttctctctcggattggctaaagcactgacagctcggatagcgatt

SEQ ID NO: 365224 - DNA, 122 bp, Homo sapiens
accttaacataaatatcctcctgttttcacccatgctggtctctctagtcctctgcatcccgccacaaaagcatcagttggtccagcccttcagcgggagacccccacaatcctctgtgcaa

SEQ ID NO: 365225 - DNA, 122 bp, Homo sapiens
gcgggtgacagccggcgccacccctgcccccatccctgtgaaaaagaggcgactgcgcggcgaggggtccccgtacccctaatcccgcgtggtggcttgcctcggtcctctccttccctggc

SEQ ID NO: 365226 - DNA, 122 bp, Homo sapiens
aaaaaggggtgttattgcccaaatgagcgctcagaacttttttaatggccccaaagatcccggagcccggacgccgggctcttgagaacccgcaagacgaccgccaaggcgcacgcacagct

SEQ ID NO: 365227 - DNA, 122 bp, Homo sapiens
agtgatccacccgcctcagcctcccaaagtgctgggattacaggtgtgagccactgtgcccggccacatctgtacttttaagggtacagctttacagtacataggaatttgagaaccacttc

SEQ ID NO: 365228 - DNA, 122 bp, Homo sapiens
cacctgttctcttaagccaaggaagtgtgtgtatgtgagagatccatttgattcatgtagcgtgtcaatctgaaaaggataagataggttacttcatcagcctggtgtcctggaatgatttt

SEQ ID NO: 365229 - DNA, 122 bp, Homo sapiens
aggctcgataaagatcctcagcttcaattcgtgacaaatccagctctcagccatagtaaacgatcatttcctttccattttctagaaggggacccctcccctcagtaccaggaaaatccttc

SEQ ID NO: 365230 - DNA, 122 bp, Homo sapiens
cccgcaaagtgaacgagcttcgggcctttgtgaaaacgtgtaagcaggatccgagcgttccgcacgccgagaaaatgcatttcctaagggagagggtggagagcatggcgggtaaagtacca

SEQ ID NO: 365231 - DNA, 122 bp, Homo sapiens
agctgccagctcaccacagtgcggcactgagcaccagagagttcctgtcccagattcctccggtcaagtcacatgagatgctctcttcagtccggggcttggttgaacggactcaccaggaa

SEQ ID NO: 365232 - DNA, 122 bp, Homo sapiens
taaatgatacagatatgatagctaggtcagtccacggggatctgtggacttctgaagagtcgtgatccgtgtgacttctgaagagatgagggggcatgggaggctttagcggagcttccgct

SEQ ID NO: 365233 - DNA, 122 bp, Homo sapiens
gtggtctatgatgttggaattagactcaggctccaaactctactgggttcaaatacaggacgatgaatcctctgagtagctcccctttctcccaacacacacaagcccctctccagtccacc

SEQ ID NO: 365234 - DNA, 122 bp, Homo sapiens
aagatggaataattatagcaagcagggctagaaagcacatagtccctatatcacaccactcgctggaacaagcgatggcacttacctcagtgctggaacattcagaaagaactcatagagaa

SEQ ID NO: 365235 - DNA, 122 bp, Homo sapiens
tgaaagcaaagcaagtaagtttctccgaatccctagtcaactggaggtagagacggactgcgcaggttaactacagctcccagcatgcctgaggggcgggctcagcggctgcgcagactggc

SEQ ID NO: 365236 - DNA, 122 bp, Homo sapiens
ggtcccagatataatggcttgacatgctgcagtgagagtgtgattccgtcgccctgctcccgtgccagcctcagccttcctctgaatcaatgaagcactaaaactccacacaactggaactg

SEQ ID NO: 365237 - DNA, 122 bp, Homo sapiens
gtgccactctgggcatcagcagctcccggggctggcagggctaggccagaccattggccccggtggggcagctggagtagactcagatggaactgattaatttatccgggtccctggcagga

SEQ ID NO: 365238 - DNA, 122 bp, Homo sapiens
gttccatgctgggtgggtcccaagcaggggaaggtctcagctgttgtctagtgtgtaccccgggccagacccagtgctacccatgctgagatggaaagaagcccagtgcccccagagaggtc

SEQ ID NO: 365239 - DNA, 122 bp, Homo sapiens
tacacgtgtgggaaggggaagggtccattcacacagagacatgtgcacacacacggggcccgtagactttccttaccaccccaccctctgctcaagaaaagtccagcctaggagacaatgtg

SEQ ID NO: 365240 - DNA, 122 bp, Homo sapiens
aggaacaggaagatttataaacacttcttaagtaaaatttcaattgaatatatataaacacgtatcaggagttcgagaccagtttccgcaacatggtgaaaccccgtctgtactaaaaatac

SEQ ID NO: 365241 - DNA, 122 bp, Homo sapiens
aacagcggactccggagtctccgggcatctattctggctgtgaatttcaggagcctcaagcggtcatttctcttcaacgtagcttcctattttaagggatcttggagaggggggcagcattg

SEQ ID NO: 365242 - DNA, 122 bp, Homo sapiens
aacaaaaacaatgcagtagaaaccaccttgaaaccacacctaagcagttgcaggtcactgcgcatagaaaacgattcaaaaatccttaaatactcgtggaagtacctcgaataaagtgccaa

SEQ ID NO: 365243 - DNA, 122 bp, Homo sapiens
ggagatggagtttgagtttgaccggctgagggccttccaggctatgcaggtgagtgagtccggctctcgaggagggctctgaagccatgcagggtgccgttggggtgcccccaccactccta

SEQ ID NO: 365244 - DNA, 122 bp, Homo sapiens
ctgcccctcaaatcacaggcctgattgtccccaggcgcgcgctccgggttggggctaccccgcccccttatgtgctgagaaggtggtgtggagtgaggcctttgtttcattctggtcacctg

SEQ ID NO: 365245 - DNA, 122 bp, Homo sapiens
tatccgcactgcgcttgcgctgcagaccggctcagaccggtcccctccgcccggctcccccgccttctttggggctagcctattaagcttctttaggtagggggaaatagaacaggagacgc

SEQ ID NO: 365246 - DNA, 122 bp, Homo sapiens
tgcgcaggagacccgtcctctcccgagatcttcgccccgcgcgggagatccggcctctcccgagatcttcaccccaggaaggagacccgtcctctcgcaagatcttcaccccacgtaggaga

SEQ ID NO: 365247 - DNA, 122 bp, Homo sapiens
gttcctgtctctttcaagacgccatgaccccaaagtgggatttgaccaccagcgtcttgccgcctggagatgaacaactcttttgagcagtgtaatatgaagagcataaggaaatcttccct

SEQ ID NO: 365248 - DNA, 122 bp, Homo sapiens
tggccagtcttctcctgcctggaccaatcatcgatacaatctgagacgtgttccatagtgcgaagggccctgcggaatcacccaggaccccgtttcaggaagcgctgagccgccaaatgcga

SEQ ID NO: 365249 - DNA, 122 bp, Homo sapiens
actagaaatcatggctgagaattaattgttactggataaacaagaatggtttggcccccccggggaatgtggtggctcttgaatccagcaaacaatagatcagagcagaactctgtgtcctg

SEQ ID NO: 365250 - DNA, 122 bp, Homo sapiens
caatctcttgaccttgtgatctgcccgtctcagcctcccaaagtgctgggactacaggcacgagacaccgcgcctggctgaaagtcatatattttcatatgattatgtgctgttttcttgca

SEQ ID NO: 365251 - DNA, 122 bp, Homo sapiens
agatgtgattgccatttatgtagacagagtgtctgcctccccgaagccaatcagagctgccggctctgcattatttactgagcagcatccctccaccctcccaccacctcctgcccccactc

SEQ ID NO: 365252 - DNA, 122 bp, Homo sapiens
gaggaccagaatattctgtattattgtttcataaagaactggatcagtgatagatttttacgttgcacatgaataactcccagtcagggtgctgatctatcactctccattgtttctataag

SEQ ID NO: 365253 - DNA, 122 bp, Homo sapiens
acggcgtgaagacaggtacctagtgtgcacacctttaccccatctttctgagggaggacccgccagagagggtgggggcttgaggaactcagcgagcaggtagagtctggggagcctggggg

SEQ ID NO: 365254 - DNA, 122 bp, Homo sapiens
caaccccagccctgccctgctatgattcacacttagcccgggagcccttcagaccaccagcgccagtcctccctgctgaccctgtgggaccctgtctcccccagggcacccacagcattggc

SEQ ID NO: 365255 - DNA, 122 bp, Homo sapiens
caagatctgataccaccaagagcacctgtccctcccctgaccagtgcctcttcccgcacgcgttcaagaaggcccgtggcccggacacacctgagttcaccatcctgggctgttacccatct

SEQ ID NO: 365256 - DNA, 122 bp, Homo sapiens
tcttaatttctaaaaagcctacaggcacggatataaattctcagctctcgtggctgtggccgccctatgcactcttcccagtggtggacacaaacgttaatgtacttgttattatttaagga

SEQ ID NO: 365257 - DNA, 122 bp, Homo sapiens
tccgcgctcggtccgcggtggcggcggcggccggttatggtcccaggggcggggcggccgcgtcagctccaggtcccgccccgcgtggtccgagccaggccccgcccccagcccgccccgtg

SEQ ID NO: 365258 - DNA, 122 bp, Homo sapiens
aagtgtgtttgctccctcttgcccatgtccaggttctatgaatttgaatgctgtgtgtgtcgcgggggccctgagaaagtccggagactacagcttcgctggtgagctggattgggcatgac

SEQ ID NO: 365259 - DNA, 122 bp, Homo sapiens
accaagttgcgcccagtcctcaatgggccccttcgctggggtgccagtgcagattctgcgcgtaaccgtccacctagcccaggcccagcctagttcagggcccccaaccccactcccgcgcc

SEQ ID NO: 365260 - DNA, 122 bp, Homo sapiens
aatgagctgagattgcaccactgcataccagccgggggaacagagcaagactctgtcttacgaaaagaaaaaaaaaaaaaaaaaaggacatataaacaaattgaagaataatttccaacaag

SEQ ID NO: 365261 - DNA, 122 bp, Homo sapiens
tgctcttgggacgcccttggctgcagctttgtctgctctgattgcggtgagggcacgttccggggtgagcagcactcacaggcccttccccttccctcctctccttcaggagggagattgag

SEQ ID NO: 365262 - DNA, 122 bp, Homo sapiens
gttggaagtctgcgatcatgttggtttttggtgaggcctcttttcctgccttggaggcagcggccttctcactgtgacctcacatgacctcttctttgcacataaagaaagccatggctcca

SEQ ID NO: 365263 - DNA, 122 bp, Homo sapiens
ttgttaggttcctgagagctccagagagattgttcccactccaggcttcctggaccttggcgctggcgcaaaacggtgggacggtccgcgcccgaagctccgccgggcctcctctggccgct

SEQ ID NO: 365264 - DNA, 122 bp, Homo sapiens
gcagctctgtcagtcaagtggactctaggaagggattggcccctagagatccgcttgctgcgctgttccaactgattggggcactggccgctgcatctccaaactcgtctcttgtccttgac

SEQ ID NO: 365265 - DNA, 122 bp, Homo sapiens
tttgtttttgtttttttaattagagtgcagtggaagtcagtttagatggttttcagtgtccgtatagaacaaatggtagccaacctgttttcctaggaattgttcgtgttcggtacttaata

SEQ ID NO: 365266 - DNA, 122 bp, Homo sapiens
gtcagggtcctcagtccaaaaaggagtgaactctcagaagggaaagtgcgtaaggaacggcgatcgtttccaggtgttgattgggtacaatgcggaactcattgcagtgtttaagaccctgc

SEQ ID NO: 365267 - DNA, 122 bp, Homo sapiens
aggcccgagagccctagcgcccagctccttttcccacgtttgggaaggcgcagaataggtcgatgtagagcaaggagtgagtctcaggtctcagtcctttggcttgctcttagggtagcagg

SEQ ID NO: 365268 - DNA, 122 bp, Homo sapiens
tgagtgggagcgccggacccattgaacagatgaaaagactgaggccggccacaagagagccgaagaaagttgagcctggtagtcacaaagaaacacgcacagggccatagatacagcaacag

SEQ ID NO: 365269 - DNA, 122 bp, Homo sapiens
gtctcaggtgaccgtgactcctgaagcttttcagcgcaggtgtagccggcttggcgtcgccgcagtgaggtttggagccgctttggattgctgagtcactttcttcagccacttagggaaac

SEQ ID NO: 365270 - DNA, 122 bp, Homo sapiens
cctaagtccgaggacgcaggcggagggcgcggggctcccgggcgcccaggagggcggtgccgccggggtgcgctccaggcttggctgcaaaccccccaagaattagaaagcgggggcggctg

SEQ ID NO: 365271 - DNA, 122 bp, Homo sapiens
caagctcaccgggcgggatccgaatgacgtgaggtaagggcctaacgggaactcggaactcggagctcggagaggcagccctcaggtcggggtgaattgggggcggggagggcggccagcct

SEQ ID NO: 365272 - DNA, 122 bp, Homo sapiens
gtcgggcgacgagaactgcgcctacttcgaggtgtcggccaagaagaacaccaacgtggacgagatgttctacgtgctcttcagcatggccaagctgccacacgagatgagccccgccctgc

SEQ ID NO: 365273 - DNA, 122 bp, Homo sapiens
gctgagatggagtgagagcaacttttatttgcaaggctgcctgtagtattttcagcattccgtagcctccttcccatgtctctcatatgttgtagtttactgcatttcatttcatggccaaa

SEQ ID NO: 365274 - DNA, 122 bp, Homo sapiens
ccgtttctcagtcgtgttccccaaagtccaccctgtggtgaatcagtcaggaatctagttcggtgaatcccgaaacatccacatccgacctctaagatcggagtccgcacactacacatcgc

SEQ ID NO: 365275 - DNA, 122 bp, Homo sapiens
ctcctggcccctcaggaatcaggaccctctcgggcacaccaggttcagtcctgcaaccttcgttcctagcccgagctcgccccaccttccaaccaggccccgaatggccccccatcccacct

SEQ ID NO: 365276 - DNA, 122 bp, Homo sapiens
cacatccacccgtcgcaaaggcatcagccttctcccctttctcactttcaacagccccttcgttcacctacgtgtggacctgtggccaaagctgcagtattcgggagagaaaaggaatcgaa

SEQ ID NO: 365277 - DNA, 122 bp, Homo sapiens
ccccgctcgcccagtggcctccggccccgaggttacaccatctccgactcggccccatcacgcaggggcaagagagtagagagggacgccttaaagagcagagccacagcctccaatgcaga

SEQ ID NO: 365278 - DNA, 122 bp, Homo sapiens
agtgggagaatcgcttgagcccaggagttcgagaccagcctaggcaacatagggagaccccgtctctaaaaataatagaaaaaattagccaggcatgggggcgtgcacctgtggcccagcta

SEQ ID NO: 365279 - DNA, 122 bp, Homo sapiens
acaaagaagaccggaaccctcgcaactcgttttgacgttttctggtcggcggtaaaagctcggttcccggccctcccggaagttgttgcacagttgtttccgggaagcgggactccaaatgg

SEQ ID NO: 365280 - DNA, 122 bp, Homo sapiens
ctttacctttgagtctttggctccttccaaaagatcactgagaacctgtatatattcagtcgcacctttaaggatatcaactttgctgggcttcctgctttggggaagaaatggcacaagtg

SEQ ID NO: 365281 - DNA, 122 bp, Homo sapiens
gggtgatggagcctcagcctcaaaggggacagcttcacacagttcacatttcaaatgtgtcgctcacattccaacatccctttacagtttacagagcacattcacgttctctcatttaatcc

SEQ ID NO: 365282 - DNA, 122 bp, Homo sapiens
tttttaaataaccaaacccagacaggattccttccttcccgggatgttaaggcatgttgacgtggagcttaggcgggagggggaggctggaacctcgggtcaggaaactcaggagtttgtct

SEQ ID NO: 365283 - DNA, 122 bp, Homo sapiens
ctaattcctccctaagacctatcctcttactggggaagactcaccagccatggctcctcacgttggcacttgcaatgtgtgttacacttgcaatgacaggcaaggtagctctatccttttag

SEQ ID NO: 365284 - DNA, 122 bp, Homo sapiens
gcgcttcccgggacagaaagctgcagggccaggggacggcgcaggcagaggtgctgaggacggtcaggggcagcgaggaacgccacaggaggccgacgcgggacgtacgtggagcggtgttc

SEQ ID NO: 365285 - DNA, 122 bp, Homo sapiens
tttctccagaaaacaaaactctaagtgctccttggcccgtcttacgattctcagttgatgcgtaagaaatacaaataaattttaatattggattgcacaaaatacaatttggaaagtaatat

SEQ ID NO: 365286 - DNA, 122 bp, Homo sapiens
gctcaaacattccagagaaaacaagatctacatagcaggctggatgcggtggctcacgcccgtaatctcagcactttgggaggccaaggcaggtggatcatttgaggtcaggagttcaagac

SEQ ID NO: 365287 - DNA, 122 bp, Homo sapiens
tccccagtgcccctcaccatggacttgcgcggagttgggacgggcctcggcagcagcaagcggctggctgccgggccctgggggagcgcgggcgcgcgcgcggggatggcgaggtaggatgg

SEQ ID NO: 365288 - DNA, 122 bp, Homo sapiens
ctttcttcgagcccttcttgggcgcgggagcggacttcgctggttccggcatgttgaaggcgaactacgagcctgagacgagcagcagatcgagaaaacgggaagtaatgggagcaaggtac

SEQ ID NO: 365289 - DNA, 122 bp, Homo sapiens
tgtccaaagaggtcggccaatgggggccattctgagttcagaaaccgctggcttggagcccgatggacccagccaggcccagctctgctgttgaccagttatgtgctctgggactcaggtta

SEQ ID NO: 365290 - DNA, 122 bp, Homo sapiens
tgactgttgagcgcacgttagaaggcgccacgctagcgcattcccctgcggtatttgaaacgactcctgttacatttgttggaggaatgagtcagcaaccctgagagcctgtgactctcgca

SEQ ID NO: 365291 - DNA, 122 bp, Homo sapiens
agaggggtccgcgtgttgcccgccgagctcacacgcagccgttgcgtggagaggggtccgcgtgttgtcctccgagctcacacgcagccgttgctcgtcagcgctgccgcctggctgcacac

SEQ ID NO: 365292 - DNA, 122 bp, Homo sapiens
cacccggcaacagaaacccaagtcaaaagccaggaatccctccttactatcttccctccacgcaaaaagaaaccacttgccccctttgatctagtccctgcagaactgggtccccacttggg

SEQ ID NO: 365293 - DNA, 122 bp, Homo sapiens
ctgcagacctgttcagggtacagcatggccttgggagtcagacaggcttggattcaaacccggcctcagctctatgcttgctctccaaccttgttgggtgacttaatctctctgaatctatc

SEQ ID NO: 365294 - DNA, 122 bp, Homo sapiens
ctgaggctggaccttaactagtgaactgcaaactcactcaattatgcagtctgcttggtgcgatggaagtgaaaatgtcctagagagttgggtgctagtatgcattttgatagtctcctagc

SEQ ID NO: 365295 - DNA, 122 bp, Homo sapiens
tccgacagccgcttatcaaacatttagcgggcgggggccgcgcgcccgagacaaatgttccggatgctttattgctctctgcgctggtgtttactgaaagtcaggctcggatcaggtttccg

SEQ ID NO: 365296 - DNA, 122 bp, Homo sapiens
acggacactcgaaactctcccccactgttagacctcagcagccagcagcccgccgcccggcgctgcagctccctgcccgcaggagccacgtctcgcgcgactccccccacctctcgcgacac

SEQ ID NO: 365297 - DNA, 122 bp, Homo sapiens
aattaatatgaaagttgagcaggtagtcaaagcaaggcttcagaagaaagtacagactggcgtaggagtaaggtgtttatctcttttggtgttttattctgtaatcttcaaaggctcttgga

SEQ ID NO: 365298 - DNA, 122 bp, Homo sapiens
aaaagttcatatgttgaagtcctaacccccagcacttcagaatatgtccatgtttggtggcggggcctttagaggttattaggaaaaataaggtctcatggataggccctaatccaatatgc

SEQ ID NO: 365299 - DNA, 122 bp, Homo sapiens
catattggagttggcttcgaaagaccaagctccctgagtacaccagggaaggtaccgatgcgggatgggcctcaaggggagcctagggtcttaaccaaaggaatgtgtggtgagcagctcat

SEQ ID NO: 365300 - DNA, 122 bp, Homo sapiens
gctgcagttccggagctggatgctggccgcgctcacgctgctcgtggtcttcctcatcttcgcagacatctcagagatcgaagaagaaatcgggtaaatagctgctcccaggcccgtgccac

SEQ ID NO: 365301 - DNA, 122 bp, Homo sapiens
atggaaaggcaggagtgcggccaacggccaatgaggactggtcttaagcggaccacagggcggggtttccctcgagaggcgaacgccgggtaaaagatcgggagcggaagtgggcgagtcag

SEQ ID NO: 365302 - DNA, 122 bp, Homo sapiens
aaacagccaaataaaatccaataactattattagccaggcttctaattactgttctgaggcggaaaatgagggcaggtaaggcatttgtagcaatcagaatagagaatgctagttcatcttt

SEQ ID NO: 365303 - DNA, 122 bp, Homo sapiens
gcggcctcctccagagggcggctcttcctccgcagaacccgggaccggaagttccctcggcgccccaggctcagcaggcgactcctcggcgccatcgctgtcgctggaatcagccgcgcgct

SEQ ID NO: 365304 - DNA, 122 bp, Homo sapiens
gtcgcaggggctggggggtgcgcgggggcgaggctgggtggggggcagggagccgcagagcgccaaggccatgctgaatgcccgttctagagaattcaggggccccatcccgggtttctggg

SEQ ID NO: 365305 - DNA, 122 bp, Homo sapiens
atctcggctttcagccaaggcaccttccttgtgtcgccagcttgttgggagcctttaggacgtctctgctgacggtcccaaaggaacccggaactgaccccccagagcccaagtcagacgcc

SEQ ID NO: 365306 - DNA, 122 bp, Homo sapiens
tcctcctctgattatttattctgagtttacactgcatgctggggtgcccacagctcccctcgtccccagacttacttccctaaatactgaaaacatgtacgaagtgttaaacatttttcaag

SEQ ID NO: 365307 - DNA, 122 bp, Homo sapiens
cctgggccagcaggatggggggttcgactgggccaacaggcagagggttggtgttctaggcggggtgaagaggaggaggggggctgtccaaggggcatagcagtcggagcccagcacccaac

SEQ ID NO: 365308 - DNA, 122 bp, Homo sapiens
tcgcgctgcttactttcttgcttttctttcacaggaggcttgtgtcacttttacaaccagcgaagtcacgtgtaggttccgtgtccaggaagagaaccccaccgcctccttctggatggcag

SEQ ID NO: 365309 - DNA, 122 bp, Homo sapiens
ggcttgcgtttgctcttctagaatgggcaacacctcgttcgataaaatagagaaaagggccgaggaaagcagaaaccagaacagaaagctgattggtcttttcacagttaaaggtttaagca

SEQ ID NO: 365310 - DNA, 122 bp, Homo sapiens
acccgcccccgaggccactgcacagcggcggggctctcgaccaccgtgctctttgttgggcggggcaaccgcagatgggccagcactggggcaaagcccaccaccaggcagccctgggagcc

SEQ ID NO: 365311 - DNA, 122 bp, Homo sapiens
agaagccagggtctgagctaaaagcagatggaagcagaccacaggagaacagaccaaggccggctggctgctggctcttcccaggttgccataccctgacacacaatggcaagaagtctgag

SEQ ID NO: 365312 - DNA, 122 bp, Homo sapiens
cagctcctgtgcctgccagtcggtgcccctcccgctccagccatgctctccgccctcgcccggcctgccagcgctgctctccgccgcagcttcagcacctcggcccaggtaggccagacgag

SEQ ID NO: 365313 - DNA, 122 bp, Homo sapiens
aaagcttaattacaaacttttccttgaattacattaggttagaaaacatgcagccaggcacggtggctcatgcctgtaatcccaacactttggaaggctgaggtaggcagatcacttgagct

SEQ ID NO: 365314 - DNA, 122 bp, Homo sapiens
agagacgccgagggcgcctgcgcagtgcggtcaccctttttcttcttaccgccaccaacccgggtacaccatagagagcgtaaaccgagaccagagaggcggctgcctctctatggtaacgc

SEQ ID NO: 365315 - DNA, 122 bp, Homo sapiens
aagtgagagggcacccgacacagggttgtgaatgttagttattgttatgaatggcaatagcgatcatttgagaaacctaaaatgctggctgtgtgctaggcatttcaccccattagatgaga

SEQ ID NO: 365316 - DNA, 122 bp, Homo sapiens
gcagcctgggggtgctccccgtgaggaggaaaaggtgtgtccgctgccacccagtgtgagcgggtgacaccacccggttaggaaatcccagctcccaagagggtataaatccctgctttact

SEQ ID NO: 365317 - DNA, 122 bp, Homo sapiens
ttcacaagactttgcatggccttcatcacttctgtgctcttctgcagggaaccagccactcgcaagaccgctgaaagagaatgtgtacagtcaggattgttcaacaggatggaatagagaga

SEQ ID NO: 365318 - DNA, 122 bp, Homo sapiens
gtcggccagggcggagcgcagcaggaacaggggtgcccagagcgccacgaagctgtgcggcgccgcagctcgcagtgagcgcacgtgcatcgcgccggctctacgcgctacccgggctccgg

SEQ ID NO: 365319 - DNA, 122 bp, Homo sapiens
gggaggcagcttgtccccaaggccggtgtcttctgaccttggtgtcccccgtgcatgggccggccctgcctcacgccgcgccccacaggcacggtgctggatgacatcacgcactctggctg

SEQ ID NO: 365320 - DNA, 122 bp, Homo sapiens
ctctaactcttctgtgcctcagtttccttgtcagtgaaatggagagcataacagtacctacgttataggaatattaggttagatgagatgtacccgtaaaacacttggaacagtgcctgaca

SEQ ID NO: 365321 - DNA, 122 bp, Homo sapiens
ccccggcacaagcagccaatgaacacgcggctgcgcccggcctcgcgcctccattggctgcgccccgccacccgctgccccgcaggttcccaagccgggtttaaaggggtagggcgcgggcc

SEQ ID NO: 365322 - DNA, 122 bp, Homo sapiens
caggctcagaacccaggtttcctggctcctcagctgatcccttctctcctccccatgccccggaacctcaggctttgcctaatgaactgaagttctggggctagagctgtccttttgtgact

SEQ ID NO: 365323 - DNA, 122 bp, Homo sapiens
gtgattacgagagacacccctgcagttacctgatggcacaggatggtctgttgcaccagtcgagcgtagccgtccagccggaccccggagttactccggctcctcatggcgacacgttacta

SEQ ID NO: 365324 - DNA, 122 bp, Homo sapiens
agaagttaaattattgatagtggaaattgcatggcggaggtaatactcgcaccccatcagcgagaagctccatttgatctcggcagaggcagggagatttcatgctagttcgccggggggag

SEQ ID NO: 365325 - DNA, 122 bp, Homo sapiens
aaatgtcttctcccatatacagagaccctcataccatttggggacattgccccaaaaggacgggctttggcgtgaaagaacatttctaccccggctgtttgtgtgctgtcatcccaggtcag

SEQ ID NO: 365326 - DNA, 122 bp, Homo sapiens
cccattccaagtcctggctctactctgattttcggcctcaggaatgttggtttgctctcacgcacgcttagcctgtggaaatcattaggtgttctcagggtctgtcacaagagaagctaagt

SEQ ID NO: 365327 - DNA, 122 bp, Homo sapiens
ttagctcacgggcagcggaagccgggccgccgccgctcggagccgggtttctggccgctgcgagcctttgcaaacctcggcgcccgccttgcccgcctaccccacctcgcagacccgaaatg

SEQ ID NO: 365328 - DNA, 122 bp, Homo sapiens
tcagtctctctcaggctctgtcccctgatgtcctcttggtctcagtctggccccgggccccgctgagggctaaacgtctctgctcatcgctgccagcagccgcccaagtgccgggcccggtc

SEQ ID NO: 365329 - DNA, 122 bp, Homo sapiens
tttggcacctctggatctctagaataaaacttggtccccaagttcttgtgggcccaccctcggcagtcagccctacggcggggcgggagcggccccaccctagctccaggcgatactcacaa

SEQ ID NO: 365330 - DNA, 122 bp, Homo sapiens
acaggaatgaaaatagagaaactctcacaaagactgaaacccagcttcccattggcttaccgtttgactgtgttacaggaaaggggtcttgatccagaccacaagagaaggttcttggatct

SEQ ID NO: 365331 - DNA, 122 bp, Homo sapiens
cacccggccaagagcccacatggccccggggcattcatctcactgggcaggggcagcctccgacctcatcccagctcagtaggtgctcgcggtgccctcctaaacgccagccatgagcttga

SEQ ID NO: 365332 - DNA, 122 bp, Homo sapiens
gcttcactgtgttactccagctctcccaagggggcgtctgggggctgctcgggaggaagacggtggtcttgctcacaaatggatggtgtatggcaagactcctgatgactctatggagttag

SEQ ID NO: 365333 - DNA, 122 bp, Homo sapiens
ttacggatgttgctgtatcccctgacctggcctacaaggacagaacagccctgggggccacgtcccctcccggtctcatctgccgcttgctcaccttggctgtccatgcacccgtagctgtg

SEQ ID NO: 365334 - DNA, 122 bp, Homo sapiens
ttagtggtgtttcctgaaactggttctttaaagggaaggggaatttcccttacataagcccgcagcgactttctccacagggtggggcatcctgtgttctggagtctgggcgctgggcggga

SEQ ID NO: 365335 - DNA, 122 bp, Homo sapiens
cccagtcctgcagatgccccaaggaaaccccactcgcctcaaggtcggtggaggcgggggcggggagggtgtctggaagtggatgcctgcctcacctcctccctagaggacactggcacctt

SEQ ID NO: 365336 - DNA, 122 bp, Homo sapiens
acttatcgtatcatcttatttaatcatcacgacaaccttatgaggtaaaatactttttaccgttttacaaatgacgaaacagatttagaggttaaaacgttggcacaagttcacatagttaa

SEQ ID NO: 365337 - DNA, 122 bp, Homo sapiens
ggtgtttctcttcattcaagtgtgaaaggcacagcagtcccgagtcttaggggcacccaccgcagccacatcaccgcgctgggacagatgcagtccgcagcgttcccagtattttgtcccag

SEQ ID NO: 365338 - DNA, 122 bp, Homo sapiens
cgctggggtccctgttccagaagtccccgcgaacccattgggactcagattctccccagacgccgaggatggggtcatggcgtcccgaaccctcctcctgctgctcttgggggccctggccc

SEQ ID NO: 365339 - DNA, 122 bp, Homo sapiens
gtcggcgtctgagaagagtcgcaggcgcctggtccagtcccggaagcaggtctccttctacggcgtctccgaggctcgcagcgcggtccacggtcgactaccgggtcagggcaaagggaggg

SEQ ID NO: 365340 - DNA, 122 bp, Homo sapiens
taatgccctctcaaatgctcttccctgcttcccgcatctactcaggtgtgtgagggagcccgcggaacccgctctgcccagccggcgcgccctcgaccgccctcggagttccgcggctccgc

SEQ ID NO: 365341 - DNA, 122 bp, Homo sapiens
aacaggtgtacgcacaaacatttgcacagccggcactgcctatggcagggtcctgacacccgggtggcctcacccacagctctggcagaagcagagacccggggccagtccacagattcaca

SEQ ID NO: 365342 - DNA, 122 bp, Homo sapiens
ccccacaccttaaacctcatggtattagtgggcaatttaaaagataaagacacagggaagcgggactaattgggaaaacctgcagacatttgttttaatgcgtaatctgctaaataactacg

SEQ ID NO: 365343 - DNA, 122 bp, Homo sapiens
ggggcgcaatcctgtgctggagacacagtcacatgtcgggagctagtcacccgctgggggcgctgcctcgagcctcatggctgcccctgcttccgtcatgggcccactcgggccctctgccc

SEQ ID NO: 365344 - DNA, 122 bp, Homo sapiens
gaaaggaggaggggggcgactgcccagctgatgtcagattttcaaatgagcagggtcccccgcagccagtacagactccactgcaggggccgtcataggcccagaccacgccatttgagagg

SEQ ID NO: 365345 - DNA, 122 bp, Homo sapiens
gcagctctggaatcccaggctgcagagttgagatcgaagaggtgcgtctggccatcttagcgttcattcaaccaaatctcctcactccatcaaaaccacgccactccccacctgcccagctc

SEQ ID NO: 365346 - DNA, 122 bp, Homo sapiens
ctgactgcaaatgatccacccgcctcggcctcccaaagtgctgggattacaggtgtgagccgctgcacccggccatgttctatatgtttaagcactgtgaattcctcttgaatgtctcactt

SEQ ID NO: 365347 - DNA, 122 bp, Homo sapiens
cctgacctcaagtgacccaccttggcctcccaaagttttgggattacaagtgtgggccaccgcggccagcctatgatccattttgaatgaattttttatatggtgcaaggtgtcaatccacc

SEQ ID NO: 365348 - DNA, 122 bp, Homo sapiens
ggtgatcacttcctgattcgtcgcctccattacttcattcactcccccctttcccccagccgccccagtgactgtgaggtggacactgtacccccagcacagactgctacaggggagtcacc

SEQ ID NO: 365349 - DNA, 122 bp, Homo sapiens
tgatcaaaaccacagcaggaaccacaataaggaacaagactcaggttaaagcaaacacagcgacagctcctgcgccgcatctcctggttccagtggcggcactgaactcgcggcaatttgtc

SEQ ID NO: 365350 - DNA, 122 bp, Homo sapiens
gaagtggcaggcacactcgactttatagaagtacatcatgatttctgcccgactttttgccgtttcatttctctaaaaacatttttatatagtactgatctttcttctaccatttgctttag

SEQ ID NO: 365351 - DNA, 122 bp, Homo sapiens
agatgaaagccagcagcagggtctaagcgcagcctccccaaaatacccggcggagcctgtcgacagctttcaggaattacaggggacagggaaaaaggttgaatgccacccttgggatgtat

SEQ ID NO: 365352 - DNA, 122 bp, Homo sapiens
aagaaatagaggcttgaagggtcctgcagggtagtcgtgacaaggtatgggaggatgaggcgaggaaccacactgcaaacccgagttgtcttattaaatgcagataaagtctgttagaataa

SEQ ID NO: 365353 - DNA, 122 bp, Homo sapiens
gtgtgggcgcgggggttcggggggctacagtagcttccttactgaggaggcttcttggggcgcggcaaggcacctgtctttggagaatgagtcgctcttcagcgactcaggttcccagctct

SEQ ID NO: 365354 - DNA, 122 bp, Homo sapiens
caccctcaatgtcccccccgccgtcccactcccacacgcccgcagagcgtctaccgtgggcggatgcctcctgcttacagtcctgagctagggtcccaagcgggtggcctcccaacactgtg

SEQ ID NO: 365355 - DNA, 122 bp, Homo sapiens
aaatgaagttgatcataaatgccaggctgtataaatcaaccatgaaatcctttaagctaccgagaaaacccacaatggaaactaagtcctataagttagcctgtggaaatctccatgtttat

SEQ ID NO: 365356 - DNA, 122 bp, Homo sapiens
ccacatccgggtttagagttatttgtttcttatcagtctcccccatctgcataagagctccggaccccaggagccctgcatcagccaactcctgtcctcagtctgtggcctggcgctgaggt

SEQ ID NO: 365357 - DNA, 122 bp, Homo sapiens
ctgggctggagatgctccagctgaaggtgttcttgctggagatgcattctgaaagcagatcgaagagtatcccacaggctgctcccctgccaacccaccccagctgtcagctgtgctgcact

SEQ ID NO: 365358 - DNA, 122 bp, Homo sapiens
cagctgggcagaaggggcgcagaggcttggggccaagcggagtttgccctgcgggtcctgcgcaaggccccagtgccccggctaaacctttgccgcaggatcccggagccggcgtccttcaa

SEQ ID NO: 365359 - DNA, 122 bp, Homo sapiens
acaagctctccaagacaccccacttacagtccccacagtgccccttgggtaggacggccccgctggaggtgtctactcaaagcagagctagagagctgcaaagtatgaagtctgtctgtgaa

SEQ ID NO: 365360 - DNA, 122 bp, Homo sapiens
gagtgcacagcctgtggcccacagaggacggggtctgcgctctgaggagggttcccggcccgcatcggtcaaggcagagatgaggaggaggccatgaggctggcgtggtgtggccacagccc

SEQ ID NO: 365361 - DNA, 122 bp, Homo sapiens
gaggcgagggtggtaaggcaggaagtgggcagaggctttgtgatgagttaaccggctgggcgttaccctatggagcgggagagccatggtgcatccaggcagccagaagcatcctccggcgc

SEQ ID NO: 365362 - DNA, 122 bp, Homo sapiens
taagagctctgtcaagacaggaaatccacagtcctgacttctagcagtccttggactgcccggaaagagacttttaggcataccctgcgatatgtttcttggaatcactggggttaaactat

SEQ ID NO: 365363 - DNA, 122 bp, Homo sapiens
acacgcaccatttacgccgtatctcatcaccatggcgagctgcttcttggtcctgccgtccgcccccagctgaagcatccccaggaccgacgcaatcccatggggagagatcacgatgttgt

SEQ ID NO: 365364 - DNA, 122 bp, Homo sapiens
tttgctgttgctgttgtttgtttgttttccctgccattccccaaaatgttagtatccctccggcttctgttccaagcttgtttctacacattctttctgggcaaccgtccatcctcgtgatt

SEQ ID NO: 365365 - DNA, 122 bp, Homo sapiens
ggggcgcgcgccgctctttaggaaggagcagctttgtttcccaccagccctgcactgtggcgagcgggccggggctgccgggcgacgcccggtcgccgtcgccgccagtgatccatagcgtg

SEQ ID NO: 365366 - DNA, 122 bp, Homo sapiens
ataatgcagtctggaaaacccagttcacaaaaggtgtgcagcctgtggggatggggggaacgggacatccctttagcctccagactacccatcccgtagggagaggaacatccaaagaagac

SEQ ID NO: 365367 - DNA, 122 bp, Homo sapiens
aactctttgggaatcagtggtggaatctgaactggaattgacaaatttctgtaaggtagacgtggacaagtgtgagaattagaacccccaggaggacccagtcatagagaagcagccgtaca

SEQ ID NO: 365368 - DNA, 122 bp, Homo sapiens
ctcgccgccgtgagagcagcctgagtgagccagcactcaccaaggaaagggctgcaggttcgcttgagagtgaggatcagccgaattcctcacgctgctcactgagacttcccctcactgag

SEQ ID NO: 365369 - DNA, 122 bp, Homo sapiens
caataagaatcatgtacattctattctctctgaagcctgctacctggaagctccatcctccgactccagttgtcccacctttctggaccaaaccaacgtatttcttaaatgtacttgattga

SEQ ID NO: 365370 - DNA, 122 bp, Homo sapiens
tagatggcgagtttgggcctctgcagaagggctgtcaggaggagcttttgatcacggatgcgctgagtcagatgaaatgtggaggctgcaggggaagtgtctgtgccccgtgcctgcaggag

SEQ ID NO: 365371 - DNA, 122 bp, Homo sapiens
acttacctgagcgcagccaatcagcacctagaggttgggctactttcggccaaaggagaacggggacttgtgggggacgctccctgcgcaccaatgaatgtgcatggagatggagaggcggg

SEQ ID NO: 365372 - DNA, 122 bp, Homo sapiens
gtgagggaaaacgcgggaagagggtcttgcagattccaaacttaggaagggtcgcggctccgcgcacgtgctctcggggtcaccttccccgcgcctgtgagggtgccaggagttcgtctcca

SEQ ID NO: 365373 - DNA, 122 bp, Homo sapiens
cgagccctgccagcccctcctccgcaggctgcctccactggctcctctcctgcttctgcccgcctgtccctctgggctgctcgggcgccaccactactgtccccatcccgccccgccagctg

SEQ ID NO: 365374 - DNA, 122 bp, Homo sapiens
cttcgcaaagcggcacagacagggagaccgcatcaaacacaaacgtgaaagcttagaacacggaatgtttaactgctaccttcgccctggcagcaattcttcctttaactgacaattaaaat

SEQ ID NO: 365375 - DNA, 122 bp, Homo sapiens
ttcatataagagggggctggctggttgcatatgtaggatgtcccatctcccagcccacttcgtcatgacagacaccagaaacaccactctgcttcactgaagaacaataaaatctgcgtgtc

SEQ ID NO: 365376 - DNA, 122 bp, Homo sapiens
cccggtcccccatgagggtgagggctataggcgcatctggcccaagataggggagtcgtccggaccccacttctgtaggaggggaaactgaggccaagggggcaaagcccccgtgttcgcgg

SEQ ID NO: 365377 - DNA, 122 bp, Homo sapiens
gtgcctgggtgctgcgggggagcaggaacagaggcggggagaggtaggggctggaggaaacggacacgctgtctctggtcccaggcagaagactgacagccagaggacaggggggacaggga

SEQ ID NO: 365378 - DNA, 122 bp, Homo sapiens
ctggcaatcagtaacctccatttctaaaattttatcatttcaaaaatgtctaacaaatggcgttatatagtattcatgatttttatctgctaagtccaaatttatttttctaaaaaaaacaa

SEQ ID NO: 365379 - DNA, 122 bp, Homo sapiens
ccagcactgggctccaaggcaacgtcttgaggctacttctctctcctttccctaagcagacgctgcctctctttgtgcccggcggcctggggttgggggagggatgggacggcagcgccgtg

SEQ ID NO: 365380 - DNA, 122 bp, Homo sapiens
tagtcatcaaaaagacactagattattaggtaatttttttaaagatctatcttaagtaaacggggaggcttctttgtacagaaaagtagagttcagaagccgtgatccctgggatccgaaaa

SEQ ID NO: 365381 - DNA, 122 bp, Homo sapiens
ggcggccagaggtcgggacactccgctgaaaatggccaggaggcttggcggggtgggcagcggtgagtggggtcagcttcgtggggttctccaacttaggggtgcaggcccccagcccaccc

SEQ ID NO: 365382 - DNA, 122 bp, Homo sapiens
cctttgctgccccagtgctgcagccactctggccttttgatcctcaaacacactcggtcacgtgttaaactgccaatctgcccgggtgaccaaccaggttaaacccctcaatggctttctgg

SEQ ID NO: 365383 - DNA, 122 bp, Homo sapiens
ctgagccaaagtattttaagatgaatccaagaaagcgacccacatagccctccccacccacggagtgcgccaagacgcacccaggctccatcacagggccgagagcagcgccactctggtcg

SEQ ID NO: 365384 - DNA, 122 bp, Homo sapiens
tagtgtccttataagatccagcacctccactctctctaggggcacgcactggtgaaaggtcgggggagcacacagggaaaggtgccatttgcaagccgggaagagggccctcaccagaatcc

SEQ ID NO: 365385 - DNA, 122 bp, Homo sapiens
accgcggggaggggcggcgcggactccgcgtggtgctgaaggggacagcgccagatttgtcgcactgcgcaggcgcagaggcgcgaacaaagaggggagggggacgaggcgcgcggccggag

SEQ ID NO: 365386 - DNA, 122 bp, Homo sapiens
gtacgcgggtggcgacgggcgtgcgagcggcgctctcccgctcaggctcgtgctccggtccggggactcccactgcgactctgactccgacccccgtcgtttggtctcctgctccctggcgt

SEQ ID NO: 365387 - DNA, 122 bp, Homo sapiens
tgctctggtgtccacctgagaagttccacgcagaccaacaatccactgccttcccagagacgccttgtgtgagaaaggcagagactggagggctcccgagcacccttgggtccgaagaaaaa

SEQ ID NO: 365388 - DNA, 122 bp, Homo sapiens
attcggggaggctttttacgagcaagtctcgggggaattaatttcatcagtgcagcagggcgtgagcaagctgccgatgagctggaaggtgcagtgtgcccattagaaggcgtgaattttcc

SEQ ID NO: 365389 - DNA, 122 bp, Homo sapiens
gctggagactcccccaacccctccagcccctgagcggtggtactgtctaggagcgcgccgcggcccctgggcctcgctgtctgtcctaaatcattccggtgaacctctccggctgcgtagct

SEQ ID NO: 365390 - DNA, 122 bp, Homo sapiens
agggagccacccgagaggagttgggggtgggggcttcgatagcatttggggaggcggctgcgcaacgggtgctgaaaggacagctcctacctgacccacggcacccaaaaggcacctctgca

SEQ ID NO: 365391 - DNA, 122 bp, Homo sapiens
tgcctcctggggtctgcagcagttctagctctcactgtcagcatttgcagcttttgtgttcgtggacgtgtgtcgggttaagaaaacaaagtgacaatgtgtgtttattttgattcttgtca

SEQ ID NO: 365392 - DNA, 122 bp, Homo sapiens
ggaggtcattcggcgggtctgggactaggcgctcactagaggtgacggtgggggcagctccgcggtcccccagactcagactctccagcccagtcgtgcccatcgagcagggtccggctgca

SEQ ID NO: 365393 - DNA, 122 bp, Homo sapiens
aacccaagccagcccagaacgcatactatgtgtgcaccagagcccaggacaggttcccctcgagcgatgtacaggtcctcgggtcccgtcttcgtactcagccgcgagcctcgagccgcgag

SEQ ID NO: 365394 - DNA, 122 bp, Homo sapiens
cctgggtctgcgctcaataggcgctcagtaagtgttgttgaatgcgtctgaagaagcaatcgcatttccatcggcatccctggctctgcttccccggctttctgccctcctccaccaccctc

SEQ ID NO: 365395 - DNA, 122 bp, Homo sapiens
caaaaatgtgtggatctacttgagaatagcttggtggccacaggttctcaatacgcaggccgctttatcagtgtgtttagaattaaatagaaattggtaagatagcagatatttctatagaa

SEQ ID NO: 365396 - DNA, 122 bp, Homo sapiens
ccccgcctaacaaggtgcctgtagtcagttttgttttaagacaaggacactaaagccggccgagggacccacccaaggccacacagggaggcggcctcaggatcatgggcagctccgtctgg

SEQ ID NO: 365397 - DNA, 122 bp, Homo sapiens
tgtggctatcctggcagtgtctggctggcagaccccacccaggcagttctcattcctctccgacctccagctacttcagcttgaatttctggaggttatagatccaagtatccgaaataagg

SEQ ID NO: 365398 - DNA, 122 bp, Homo sapiens
tggccatggagcacagtggcagggctgtccagcttggacaagccacagttggccgatcctcgactcttacgcactgctctgtacaaagaaatatgtagatacataaattaaaatgaagctgt

SEQ ID NO: 365399 - DNA, 122 bp, Homo sapiens
tcgacggtggccgatagtggtcctactgtcgtgggactgctctgcgcgctcccggtggggcgcgcctgcgcattatgctggtctccatggcggggcctcggagccaagacgaggttgagtag

SEQ ID NO: 365400 - DNA, 122 bp, Homo sapiens
cccttggtcttcgcggctgtggaggcgcaggccgggcgtcgaggggcccgcgcgggtcggcgccattctgagtgaaccctgaggcttcctgagtgaaccccgaaccacccgggaagggcgga

SEQ ID NO: 365401 - DNA, 122 bp, Homo sapiens
tgtggctctcgtctgcagtctgacccctgggcgtgtcagtcactaccttcttcattaacgcgatcacagagccgatggtccgacccttgctagtggcaggctctgtgttgagagctttgatg

SEQ ID NO: 365402 - DNA, 122 bp, Homo sapiens
ttttaaaattagcaagagaaaaatgtctagtcacttataaaggaaattccatcagactaacggcagactttccagcagaaacgttataggtcagaagaggatggacggcattttcaaagggc

SEQ ID NO: 365403 - DNA, 122 bp, Homo sapiens
tatatttttttaatcaccatcaaaagaataaagcccctgaatcgctatctgggttgccgccggaccgagactcgcgcggcgtgcgctgcccccgcgggtttcgttttcggcacctacagctc

SEQ ID NO: 365404 - DNA, 122 bp, Homo sapiens
gggagagctcccctgcccgtcaatcaggaacgggtggcacaggcccccagggggaagagccgtccctccctgcgcgtgacgtcctgggtacccagggctgacagcctctaaacgctgtcact

SEQ ID NO: 365405 - DNA, 122 bp, Homo sapiens
ctgccgcacatttcacatatggttacccatatgcagcggggggcggggatgggggtgtggcgcggggattgtccctctgtcttgccggaatgcaaaaaggtagagagacccttcctggtctt

SEQ ID NO: 365406 - DNA, 122 bp, Homo sapiens
cgcggcctctccgtccaacgtgctcgttgccggcatctccagcgcccggccgtgccccgacggcctgacctggatcacttcctggccgcctccctgtccggcggctcccctcggtccggctc

SEQ ID NO: 365407 - DNA, 122 bp, Homo sapiens
ataaaccaggattggaggcggtgcgtgtcccaggagagagggccagcgcggtgcgcgcctcgccaggcatgctgggaggagtagtctcctagccacttccggccgttggtcacaggttgccg

SEQ ID NO: 365408 - DNA, 122 bp, Homo sapiens
ttactcctggcccggctcccctcccatgcaccaggcggcgccgagtggttctggctcctgcgggtcccggtgacaaagcccgagccccagagccccaggactgcctctgcctccaccggaat

SEQ ID NO: 365409 - DNA, 122 bp, Homo sapiens
gctcacactccctgtgtctctgtcccgtggcacacgcggctcctgccgccccgtcccgcccgtcatcccacctggtgtcagtcggcttcccatctccagctgtcatcagcgtcccccgcttg

SEQ ID NO: 365410 - DNA, 122 bp, Homo sapiens
gggcccccagaggtcggaaggacagcctagaactccagaaccagctcctctcctggtagccgcacccccagctagagttcctctggccctgcccctgccctcccgccccgcaaattccaact

SEQ ID NO: 365411 - DNA, 122 bp, Homo sapiens
tcacttccccgccggagcaggggtcgtcgggaaggtctcctgcggcctcactcctccgcacgctccggcccagccccctcggctgaggcagcggcagcgcctactcaggccccggagccacc

SEQ ID NO: 365412 - DNA, 122 bp, Homo sapiens
ccttagcatttgccacaactttctcccagatagtccactccgttctccctgcttctcacccgaatagcatacgaaattcatgaaccactgactttgggaggctaaatgtcctccatcacagc

SEQ ID NO: 365413 - DNA, 122 bp, Homo sapiens
ttccgatgcccagggtgccgggctggcattcagacctaaggtccactgccaaggcaccatcggacacacctgcccatgagtagacacagcagcgagcaaataggtctgataaatacccccct

SEQ ID NO: 365414 - DNA, 122 bp, Homo sapiens
cttccctagctgcagctaactcgggtcgggaaaatgcgacagcgactgcccactcgaggtcgtcatggcgacagccagtgaacgtgttcctctcctcgggcaggcccccgagtgtagaggag

SEQ ID NO: 365415 - DNA, 122 bp, Homo sapiens
gaggtggggctgtgtgagaccagaccagcctctcagcaagacgcaagggcctcccccagccggcatcaggccttgctaaagggtgaggagtctctagtttcggcccctcaccaacctcctct

SEQ ID NO: 365416 - DNA, 122 bp, Homo sapiens
accttcagacattatggtgtgtttggccatgtcatttgtcataggtgtaaaaaccacaaccgagagcccgaagctgctgggatgagcacctgccgcggaactgcattctcgcgctccttcct

SEQ ID NO: 365417 - DNA, 122 bp, Homo sapiens
gcaggcggcggacttgcagtcccagcggcctcggccggtccgcgctgccggtgtgagccccgaaggaaagcaccccaagctggctgaccccgcgcacccccggccacacccgcccatcctgg

SEQ ID NO: 365418 - DNA, 122 bp, Homo sapiens
tttgtgttgagaatttttgactttttcattctgttagtctcactttaatgagatcctgagcgggggaaaagatgaatcaagtttccagcccactgtgtttaactgggagtcccacagggctt

SEQ ID NO: 365419 - DNA, 122 bp, Homo sapiens
gcgtgcagacgccggcccgagagggctgcgaggggcaacttcttagagtggcccatcggtcggtctagggaggggagggtcagcgtggcaaggtgtgtgtcgggggcagagggaaggaggga

SEQ ID NO: 365420 - DNA, 122 bp, Homo sapiens
cgagctctctcattggctgcggtggtggactcaatcaatctcgcctgcgttgtagtgtcgcgggattggctgtcgctggttccagcctttttctactcccctcccccagggggcagtttctc

SEQ ID NO: 365421 - DNA, 122 bp, Homo sapiens
gcttcttgtgacataaaggataaccacagagtttgacaatagaatgttcattcactacatcgttgtagtgagcaggtgtaatgaacttccccttttagaagcatcttcttgtttcaaagtac

SEQ ID NO: 365422 - DNA, 122 bp, Homo sapiens
gaatttaaagaaacatagcagtaatagtgcatgaaagggggtgtggggtcgctggccaaacgtggcatgttggtgcctcacgttgggaggatgaaaggatgattcctgcagagggacatgct

SEQ ID NO: 365423 - DNA, 122 bp, Homo sapiens
tagccctgttcttatctgaatacatgatacagtagttattttttggagtgtaaatcctgtcggtatatattgagcacatatattgtgttgaagattactagaaggaaaagtcatcaaaaagc

SEQ ID NO: 365424 - DNA, 122 bp, Homo sapiens
caaacagccacgggtcagccgaggaccagtccacggcatagacgctgtcctcgtgctcctcgtaggtggcgatcacgttgtcctgcaggggctccttgctcctgcaatgcaacagaggcaga

SEQ ID NO: 365425 - DNA, 122 bp, Homo sapiens
ctcgaggaaaccaccggggtggcattgccagggctgcccgcagctccggggaacgtcctgcgggctccaagcctcccgcccagcgcgaccggaccctgccccactccgcccggcgcgggccc

SEQ ID NO: 365426 - DNA, 122 bp, Homo sapiens
tcaaattcttttttttctgtttttaagacaaggtctcgctctgttgtctagactggagtgcggtagcacgcacaatcatggctcattgcggccttgacttctcaggctcaggccatcctccc

SEQ ID NO: 365427 - DNA, 122 bp, Homo sapiens
atttgaataagaaaaagggacaatgcatgtagaaagctcaagatgctcaactttgaggaacggaaacagatgggaatatgttataggaaatcataaaactgagggagttgttttttgcttga

SEQ ID NO: 365428 - DNA, 122 bp, Homo sapiens
ctggagtgctgagaagtgtatgtttcactccttttggaaaaggcattagctccgtgaagccgagggtagcaccagtcctgtttactttccagctctagagaaatcagaagtagctgtagcat

SEQ ID NO: 365429 - DNA, 122 bp, Homo sapiens
tgggcgccgaaaggaagcagctggcacacagcctcagcctcacggaaactcaggtgactgcggcccgggcgcgaggaacccatctaggcgtgcgccccctccccaaagctggctcccaagca

SEQ ID NO: 365430 - DNA, 122 bp, Homo sapiens
ctggccctcgggttcatgcaacggcataactggaaccgacggttacggaccaagggtatgcgagagcgggtcttcccatacaggaagtagaagatgttttgtttggggtcctcgtcgtcctc

SEQ ID NO: 365431 - DNA, 122 bp, Homo sapiens
agaaaggagggagggaaggagggtccttgggggaatatttgcgggtcaaatcgatatccccgtttggccacgagaatggcgatttcaaagcagattagattactttgtggcatttcaaataa

SEQ ID NO: 365432 - DNA, 122 bp, Homo sapiens
atcctgtcgcccctctgtccgcccgggacgcctagccccacccactgttcccgccccttccgtgttttggtgcgcacgggttccgccagacacagctaccattggctgtcagtcggatccga

SEQ ID NO: 365433 - DNA, 122 bp, Homo sapiens
tcttccatctaaacgtctctggcttatgtaattgttcctcccgtgacatagtttgtatatcgtacagcatttcccctcagtttgcctcttgtaaaatacaagacccagacctgaactaagat

SEQ ID NO: 365434 - DNA, 122 bp, Homo sapiens
gcattcctgggtggggagggggcgggggctgcaagaggacggaggcgcgcggactcacagcgggggatctgtgtccagcctggtctcccagggagaggaggagccccctaggtcgcacagcg

SEQ ID NO: 365435 - DNA, 122 bp, Homo sapiens
ggccagaggcgtacggtagaaatttgaagatgggcatctgaacacgggggacgggttttgcgaaatcagtgcatttggtgtgtagcctcggaatgaaagctgttatcagtgtaaatcaagaa

SEQ ID NO: 365436 - DNA, 122 bp, Homo sapiens
gatgatattaatactaggaaccacccccagggctattgcgggggttacaggaggaagcagcgcaggactcagggggctagggcgactcgaaatcctcaggtacagacaccagcttctttata

SEQ ID NO: 365437 - DNA, 122 bp, Homo sapiens
agctcagggaaattagacattagaataggcttagtatgtggtatcagagaacccacttcccggctgtgttctttgggaagactcagaggagactcccttcataaagcacaaagacccactgg

SEQ ID NO: 365438 - DNA, 122 bp, Homo sapiens
agcaagatacctttgcaaggtcattcacgttaccctccccgctttgtgagtgtgtgcttacgcgcgcgcgcgtgtgtgcctgtgcgtttggttaagtgaccaaactacttagaggcctgagg

SEQ ID NO: 365439 - DNA, 122 bp, Homo sapiens
gctttccttggcagagcccagccctgtgttgtaggtggttggactgttgggtcccgctgacgtcatctggtgggttccttccaggtccccgcggagccccccacgcttgtgtgaggcttcac

SEQ ID NO: 365440 - DNA, 122 bp, Homo sapiens
ggtgggcgcctgtagtcccagctactcgggaggcaggagaatggcgtgaacccgggaggccgagcttgcagtgagccgagatcgcatcactgcaacctgggcgacaaagcaaggctctgtca

SEQ ID NO: 365441 - DNA, 122 bp, Homo sapiens
ggcctctgcctgagtcggcgtttcccagtccctcaccagccaggtctgcggtgagctgcacggtttctgcagatgctctttggcaaacttgggggttctcggcttctcctggtttgccgagt

SEQ ID NO: 365442 - DNA, 122 bp, Homo sapiens
taataatactaactttctgttgaggtataacgtgcataaaatggcccagatcaggccgggcgcggtggctcacgcctgttatcccagcactttgcggggccgaggcgggcggatcgtgaggt

SEQ ID NO: 365443 - DNA, 122 bp, Homo sapiens
tggccttgttggggaaggtggactttccctggtggtcaacatcgcacctaccaatcaaatcgtaatttcgtcgttcgaggcccgtccctcttccggacgcaattaccaatgagaaatgccct

SEQ ID NO: 365444 - DNA, 122 bp, Homo sapiens
gctcggtacagagagggagtttccttaggctgtgactcccggaggtagtgtcccagcttccgtgggaccagaaaagcgtctttccgtgtctcagcatcaagcccctacccccaccaagagac

SEQ ID NO: 365445 - DNA, 122 bp, Homo sapiens
aacaggttgtgaaaggcagccgaccacggcgtagcaggtcactgccaagggaagcagaagcggaaaccctcgcctctggcttaggctgcggagcgggaacccgattctctgagtcatgtttc

SEQ ID NO: 365446 - DNA, 122 bp, Homo sapiens
cttcctttggcattggccgtagcagtgtccctgctcccgctgtttctgtgccggtcctcccgtacacaggggttcacggagcaagtctgtgttgaggtggcttctgaatagcttcctaggaa

SEQ ID NO: 365447 - DNA, 122 bp, Homo sapiens
tggcccaggtggccggaacgccccttggagcaccgacgccatcggctccgggaaatgcagcgagcacagagcccagtcccttggtctgaccgggggcgctgcttttgttcagaaagcggtgg

SEQ ID NO: 365448 - DNA, 122 bp, Homo sapiens
tgttaatttcatcaacatgttcatttctttcagctccatgttcatgcatgtcttttaacccggaaacaagaagactgtccataggtctagacaatggtacaatctcagtaagtacacataaa

SEQ ID NO: 365449 - DNA, 122 bp, Homo sapiens
ctcaagtgatctgcccacctcagactcccaaagtgctaggattacaggtgtgagccaccacgcctggccatgtatctgatttctgccttaagttttcacatttgctttggtctcttcttcct

SEQ ID NO: 365450 - DNA, 122 bp, Homo sapiens
cttgaagtcgcggctgtgctgcggggtgtactccagggtccagagggcccgcaccaggtgcgccagctgctcagtgacctcgccctggccctgcgcgccgcggcccgcaggctgctccgggt

SEQ ID NO: 365451 - DNA, 122 bp, Homo sapiens
aggagtctgtatataaaaattctcatttttcacaccatctacaagtgactcagccggcaccgcaggtgctacatactgtcctttgggaacatctatgtgctccatgaactccttagggtctt

SEQ ID NO: 365452 - DNA, 122 bp, Homo sapiens
gcggggtggggagcgaggtcaccacggggttgcttggtgacttctccggactggactccccggtgagcagcccctggcaccgaggccgcctcggcctggtccttcgcgacgctctctcttct

SEQ ID NO: 365453 - DNA, 122 bp, Homo sapiens
gggttgtgtgctttcacatagcagtactgtacaaggaaaaccccgtcggatctgttattgcgggatacttgtgaaatatacataggattctttcttatggctgcatcccggatctggaaatt

SEQ ID NO: 365454 - DNA, 122 bp, Homo sapiens
agtgcatgcgctgctagaagaccacccaaacaaaacatgcttatgagtaacacctcttcccgcccatttatgaataatcatgtaagcctcctgtaagggaggtttcccatgccagttggggc

SEQ ID NO: 365455 - DNA, 122 bp, Homo sapiens
tttgcctttaattgcactgaaaatatccagcaccgctgatatcaagggcccaggtcccggcggaaatgaactcccagacttgggcgcccaggtttccgtgcgcgaccccagcccctccggct

SEQ ID NO: 365456 - DNA, 122 bp, Homo sapiens
atctgggacctcccccttctctctcttgtttctgttcttgccgtgtgatgtgattgctcccgcttcatcttctgccgtgattaaaagctccctgatgcctccccagaagcccagcagatgct

SEQ ID NO: 365457 - DNA, 122 bp, Homo sapiens
tcgccaggcgtcctcattagcctccgaggcgccgagacgcgagaggtgtgattggcactacgtcaggcggtatccggggacgcccaaagagggcgttcatcactgaaacttggcggccgcgc

SEQ ID NO: 365458 - DNA, 122 bp, Homo sapiens
ccctcctagcgtgcgcggagggggcttggggtggaaaggggggggaaccccgaaacaggccgccttttgacaggcgcctgacaggtatgggtgcctttggagatctttttaggaaattgggt

SEQ ID NO: 365459 - DNA, 122 bp, Homo sapiens
caatgctctcattgaaggggtgccttgtgctctgggggtcagtggtgcttgcagcccaggcggctgggctggcatcctggtgccggacatgagggcctttgccgttaggagactctgcagag

SEQ ID NO: 365460 - DNA, 122 bp, Homo sapiens
ctagcggaaatgcacggaggccaacccctccccctgcccccgcgaggagcggggcggactcggcagccgccactccccaggctcacaggaagaaactgggacgctgcggacgcggaactggc

SEQ ID NO: 365461 - DNA, 122 bp, Homo sapiens
gcaaaagagggcctacttcctccggcccccacccccatcccagcaaccccactccggccgcgcaccagcaggggaaatcgccaccaacgtccccgcttctcatttcagcccgaaattgccct

SEQ ID NO: 365462 - DNA, 122 bp, Homo sapiens
ggtaatctacccgcctgggcctcccaaagtgctgggattataggcgtgagccaccgtgcccggcccaggcattttgaaatacttcagaatgtgtttcaggctgacatcactgaaactcagaa

SEQ ID NO: 365463 - DNA, 122 bp, Homo sapiens
gtatgcttcatcttccaccggcagggggcagacctgagccacgggaggctgctgcagcgccggctcagaaattttgcagtcaactccaagtgtggtcctcccacccgcgggagcagcggcag

SEQ ID NO: 365464 - DNA, 122 bp, Homo sapiens
acttcgcgaagaaaaagcctcaaactgcagaacacacccggcaagctgttcttatcgttccgaggccattgcagagccagatacggttacacagcccttctgaagcaaagatacactaagtc

SEQ ID NO: 365465 - DNA, 122 bp, Homo sapiens
gaacagacaggctactcccactggcagccaggcaagaggctggagaaccacatctgccatcgtcacagagctcttctatgtccccagctgcaggagagtcacactgggctctgtacaccgtc

SEQ ID NO: 365466 - DNA, 122 bp, Homo sapiens
cagagacatctcctgaggcagtctgggctcctctcccagcttcccagaggcgcggtgcagcgtgactgggggctcaccatcttcagcttgtgctgctgcaagatctcatcgaggttctgcct

SEQ ID NO: 365467 - DNA, 122 bp, Homo sapiens
tcccccttcccagcccccatcttcccctttaccaatcagtgaatgtgggagggcacctgacgctctcagagagcattccagtctccaaactcagaactaagagagtggctgaatgtttcaca

SEQ ID NO: 365468 - DNA, 122 bp, Homo sapiens
gcccggcggagaccggcctcgctcggccacttccggcaagggcggagccggccagtggtgcgcgagcgcagataactcccctggagaggcgggatgttcaactccacccctggtccttgggc

SEQ ID NO: 365469 - DNA, 122 bp, Homo sapiens
ctggctcactggggtcctggcagaagccctctgctctccacagcccctagcacagccccacgtccacagcagcgctacatccagggatgagcagggagaatctgagaccgaaacctctgggg

SEQ ID NO: 365470 - DNA, 122 bp, Homo sapiens
cgcagcccagctgacgacagaccacagcggcatccggcagcccccagtcgtcgtcacacacggtgccccacaggccactgtgcaggatctccactcggccctgacacaggttcgcgccccct

SEQ ID NO: 365471 - DNA, 122 bp, Homo sapiens
gagcctgcggaagagccagaagccgccttgcctttaacgaggggtatcctggcgagcatgcgcagaccgtccgcgcacgtcgtcgcccgctgagagcaagcgcaacgggcgttttcgtttgt

SEQ ID NO: 365472 - DNA, 122 bp, Homo sapiens
acctgccgttctgttccgcgttgccacagaaaaataccatagactgtagcttataaatgacggaaattcagttctcattgttccggatgctgagaagtatgagatcaaggcaccggcagatg

SEQ ID NO: 365473 - DNA, 122 bp, Homo sapiens
aggcaggcgagcaggcagggccgcctttgatgtgggctgggcgcacccaggcgagctgagcgcccgtccggccgcgccccgaggggggagcccccaggccccgcatcctcattgtgccggct

SEQ ID NO: 365474 - DNA, 122 bp, Homo sapiens
gtctccctggtgcgctgtatcctctcaaaaagttttaaatgtttgtatacaaacatctgtcgaacatcaaatattctttcttcatctaagttacagaaacgcagagagatgtacgatcatga

SEQ ID NO: 365475 - DNA, 122 bp, Homo sapiens
ccccatcgcactggtgatgggagggggtggtgctttcaaatcaagccttgaagaagtatccggcttccagagcccaaaaccctcaacagaggagctgcttcaacaacttctgcatactgcca

SEQ ID NO: 365476 - DNA, 122 bp, Homo sapiens
ttcacaaacatgtcttgcctgcaccctaggcaaacgtggaaaggcgcagctctggtacaccggaaagcatggtggatggggaggtaggagccccgtgccgggacatgtcttttctctttctt

SEQ ID NO: 365477 - DNA, 122 bp, Homo sapiens
gccccgcaccaagatggcagctgggggaggccgcttgtctcgggctgcacagccaagaaccgcggaggggaagaaggcaggggagggcgggaggccattcgcaggtcactcgggttagatcc

SEQ ID NO: 365478 - DNA, 122 bp, Homo sapiens
attttgagtataataaatttgaactgtgccaatgctgggagaaaaaatttaaaagaagaacggagcgaacagtagcttcctgctccgctgactagaaacagtaggacgacactctcccgact

SEQ ID NO: 365479 - DNA, 122 bp, Homo sapiens
ccactgccccactcacaaagagcctcagcttcttctcggggggcgacttcctcagccagccgctgtacagcacgtggccacttctcgtgcttccgccggcggggccacttccgggccacgaa

SEQ ID NO: 365480 - DNA, 122 bp, Homo sapiens
acctgtgtattctggaagggaaacaaatgtcgtggccgaggtcccccgaacaggcaaaagcgcccatcatccgcgcatgtgctggtcccagaggatgctggggttccctgttttgtgcccac

SEQ ID NO: 365481 - DNA, 122 bp, Homo sapiens
ttgtgcctgctgattggctccttgtggaggggcgtggtctctaccttataatagggagggcgtcttatcctctcagccgcggctgagcctctttgtctgagcgcgctcggcttttttttttt

SEQ ID NO: 365482 - DNA, 122 bp, Homo sapiens
gattttccgcttgagtttccaggtagtttctcacctgttttcaagcagggttggggcagccgtttcttcaacagcgccagccgtaaaacacaaagatggaggccaacctcccacacccgggc

SEQ ID NO: 365483 - DNA, 122 bp, Homo sapiens
gcccgcagttttttcgcccccgtcacttccgggtgcgacaatctcttctgtccggccagccgctggagtcgttaggtgccgccttgcttctgacgagccacacgtttgcttcttccctgtgt

SEQ ID NO: 365484 - DNA, 122 bp, Homo sapiens
tttgttaaaactgtctccaaagttttcactgaaacattttgaatcacatcaatactgtgacgtgtactgtgaatagaagagacggccaggttttggccagcactgaaagttgacacgggggg

SEQ ID NO: 365485 - DNA, 122 bp, Homo sapiens
ggcaccacgacaaggcattaatgtggattcacttgcacagctgctctcataaaagctacacgattcagaggtaaccctaactatccgcaatcccaaccaaagtcatgttcatgccgctgtcc

SEQ ID NO: 365486 - DNA, 122 bp, Homo sapiens
ccgagctttcaaacagaagaaacctgaagctaatgaagatctcaaacagagccacaattccgagggccccttttccgccacaagcacccactgtccatctgcacgtgtaatcacagagactt

SEQ ID NO: 365487 - DNA, 122 bp, Homo sapiens
gaggccggtgagcgtgcggggggcggggccggggggcgagggcagccaaggggtcccaggcgggccggctctgtctgaccgcgcggcggccccacctaggtcctgggaccaggacaggaaat

SEQ ID NO: 365488 - DNA, 122 bp, Homo sapiens
gggcagcaggactggacttcacgtttgcccactcttctgctggtctcgtggaaggcagctcgctggaccttatgacaggcaccacatatcctggggggaggcaagagttcaccattagtcca

SEQ ID NO: 365489 - DNA, 122 bp, Homo sapiens
gagaggtacacccagcgaggccacactagtccatctgaccccaaaggccatgttcctgagcgccgcgctcaccatcccgcctctgatcttttctccctcggcccggcgtctcccgagaggca

SEQ ID NO: 365490 - DNA, 122 bp, Homo sapiens
taaacaacgcggtctccatgacaacaagtgacgcgttgccagggcaaagagggctggttccgccactgagcagcctggccaaaggcttagcgcaggcgcaaattctgcggaccccagagcca

SEQ ID NO: 365491 - DNA, 122 bp, Homo sapiens
tgcatgcttttctttcccaaatacaaaggcacatggaagtggtcagatccgctctcgccacgattagaaccatgagactgactactcaaaggaacaactgcttgggaagaggcatctgcagg

SEQ ID NO: 365492 - DNA, 122 bp, Homo sapiens
ggtacagaccatgtacagaccacggcgaggggtgttaggggcttctcgggataaaggcagcgagtggctgcgcattccctccccgactctttcagaggtaagccttctgtggagcagaccct

SEQ ID NO: 365493 - DNA, 122 bp, Homo sapiens
cgaatccttttctgttttccggccctccccatcctgggctgcggctccacacttccccagcgtggcctgcatttctattgggcagctggcgctccggaagtgtccgcactctttattatcga

SEQ ID NO: 365494 - DNA, 122 bp, Homo sapiens
tcagaaaccagctgccttcattccttcactcatgcattcactcattaaggagtttctactcggaacgtcagcacctactataagcctggtccttgcccgtacgatgggaggtaggggttgat

SEQ ID NO: 365495 - DNA, 122 bp, Homo sapiens
gctgtgctgccgagactgcggagagcatgttcaggaagggatttccgggctactgcgaggcggaaaatttgagactataagctcctcaacagctgtgtcctctgtattgtttgggtcgctgc

SEQ ID NO: 365496 - DNA, 122 bp, Homo sapiens
ccgcgccggcccgcccgccgcccaggaccggcccgcgccccgcaggccgcccgccgcccgcgccgccatgggagtggagggctgcaccaagtgcatcaagtacctgctcttcgtcttcaatt

SEQ ID NO: 365497 - DNA, 122 bp, Homo sapiens
cccacataccagtgcacaaacgccctcttggcatacatcaggtcgaacttgtggtccaggcgggcccaggcctcggcgatggcggtcgtgttgctcagcatgcacacggcacgctgcacctt

SEQ ID NO: 365498 - DNA, 122 bp, Homo sapiens
gcctaagtaatctcagccagtgggggcccgggtttaactcagagcattgaaaacgaaccccgggggtggaggcgcattagcactttagctcttgcagggagatggatagaagtctttggaaa

SEQ ID NO: 365499 - DNA, 122 bp, Homo sapiens
ccagcggtggtcccataagactacaaagcagctgaaaattcccgttgcctagtgaggttgcggcgtgtaatgtcacagtgcaacacgttatcactcgtttgtggtgatgctggtgtgaacac

SEQ ID NO: 365500 - DNA, 122 bp, Homo sapiens
cgcgccgatgatgtcagctccggccaatcgcaggcggcgacacacagcggccccgcctggcgtgaccgagactctccatcacggcccgcaccattggctcaattcgaactctgctcgttctg

SEQ ID NO: 365501 - DNA, 122 bp, Homo sapiens
gtattgaaagttgcaaaaattcttcttacaaaaaactaaaaccaaatgcatcacctaagtcgtgtgaaatcatgtggtagctcatggctgtgagcggggcggggcggggctttcggaggagc

SEQ ID NO: 365502 - DNA, 122 bp, Homo sapiens
tcccctaccctggccaaactttctgcagaggagaagggccctggccctggaaggaggccccgccccccgccccaggccctggcacttaccccggaggaagtacttgaacgtctccttcatca

SEQ ID NO: 365503 - DNA, 122 bp, Homo sapiens
tgaggagctgctgcggcagctggagcagcggttgcaggagtcctgctccgtgtgcctggccgggctagatggcttccgccggcagcagcaggaggacagggagcggctgcgagcgatggaga

SEQ ID NO: 365504 - DNA, 122 bp, Homo sapiens
aaagccgtggtccaggtcctcctcgatgctggcatggacagcaactaccaggtagcagggcgggtgggggctcctccaatctcaagagactcagtcattttgcagaaggcacaaggaccatg

SEQ ID NO: 365505 - DNA, 122 bp, Homo sapiens
aagatggtttataagcttctataccacactgagtagctgggccttcattctgaaggctcccgtgtatacatggcaaatagatttgtatgctttttctcctactaagcaatctgcctcatgtt

SEQ ID NO: 365506 - DNA, 122 bp, Homo sapiens
tgagatagatctcaagcttcagaggatcgaccccctccgggagtggcctggccaggaggtcggccagcgggtaaatggttttacagagcttggctaagacgtcttccacgagggtgatctga

SEQ ID NO: 365507 - DNA, 122 bp, Homo sapiens
atcatgacagataccgcaggaacggacagcaggttgtgggaggctagtgatgatgtccgccggggacaggtttctatgcatcgtgcagctggacgtaggaatctgagctcagtggtgaggca

SEQ ID NO: 365508 - DNA, 122 bp, Homo sapiens
aaacaccgaattccaatagaggaacattctataaaatacctaactagtattcctcaataacgtctaggtcatcaaaaacaaggaaaatctgaggaattgtcacagccaagaggagcctaagg

SEQ ID NO: 365509 - DNA, 122 bp, Homo sapiens
tcaaggtctgctgaaggaatgggtggcactcacacagcatcaggatcaccttctgcagctcgccctgcttcacggacaggtacaactgccgagggtggaaacggagcttcttccgcctgcca

SEQ ID NO: 365510 - DNA, 122 bp, Homo sapiens
ctgcatgggggtgggtgttaccgtgccactgccctatgtctttgtgtgtttgtgtatgtgcgtaagtctctctcttatttctctctctctcctttctcgctctttcgctctgtgcccgtctg

SEQ ID NO: 365511 - DNA, 122 bp, Homo sapiens
agatgcgtaagacatgacgtgtgcctgcagagtttctcatcagggaggccatgttagcgacgtgtctcccaaagcccactgggtcaccccattaaagcaaaaaccatgcactgatcatgccc

SEQ ID NO: 365512 - DNA, 122 bp, Homo sapiens
gtcttattcgcctcttgtgacacagctatgatgtgacgtcctgcattttactgatgtggacgctgaggtccaaagacaagcagcctcccagggacacacggagctggagtcccccgagtctc

SEQ ID NO: 365513 - DNA, 122 bp, Homo sapiens
tgcaacctcctggccgttgcgcagcagccggaacgtcagaggatgtttagaatccaaacccgggatcacctcgcagccacggagcggaatagacacaatatgggtcttcaggtcggtcctgt

SEQ ID NO: 365514 - DNA, 122 bp, Homo sapiens
ggcctggctagacttgggcaatggcatgaccctgtgggtattgcccccaccgcctttctgcgagggcctgcaaaacggggcccttgtccacgtgtgtgggtcagtgctgtagccaggaggaa

SEQ ID NO: 365515 - DNA, 122 bp, Homo sapiens
gggagaatggatgcaagcccccggcaggccaccatacaaaaccccaagtcaaaggtcaagcgtcgcacttgtctttcgagtcgcctgctgggcccgcgtccaagtgtactttcctttctttt

SEQ ID NO: 365516 - DNA, 122 bp, Homo sapiens
ccctattcaccagttagctctctttgaggtgacaatggatatgaaagggttaataagattcgaaagaacgtactattgctttagcaaaccactgtgtttcctaggcaacataatgcctgtat

SEQ ID NO: 365517 - DNA, 122 bp, Homo sapiens
ctccagtgtctgtgatccctgaccttggattgaccaggaaagtgacctccaaaaatcctccggcattttcagtttctagatcaaaagggctgcgggttccaacctaccaagggcagcaaagg

SEQ ID NO: 365518 - DNA, 122 bp, Homo sapiens
ttttctcccggcaggaaaccttgcttacttctgagggctgcagctccgcagtgtggaagccgataagaaatctgtgctggccctgccaggatctctaaggaaaagggcccaaaacacatgac

SEQ ID NO: 365519 - DNA, 122 bp, Homo sapiens
cctgggaggaacctgagcctgaagggtctaggagcccgccgtgtctgctctcaagtgccccgcgttcccttggcctgatccccgatcccgtgcaccctgcacccagtaggccctccggggcc

SEQ ID NO: 365520 - DNA, 122 bp, Homo sapiens
ttcaaattccagctctgccacttggaaccctgagtaagtaatgtaatctctctgtgcctccgtaaacgtgaggcacaggaacatctacctcaccaaccactgttaagactgaatcaaagggc

SEQ ID NO: 365521 - DNA, 122 bp, Homo sapiens
ctgcaggcgatggagccggtatggggagacgccctgctggagaagtggccgggtcccggccgtgcgtgggccggccctgcgccacctgggtgacctcagacacctgggccttggacggcccg

SEQ ID NO: 365522 - DNA, 122 bp, Homo sapiens
cagccttatacatgtaatttactttacataagctaactagttctctgaaaaatctcttcacgtgggaatccaatgaggaagctgggctcagagagattaccttcccagcctaaggtcctaca

SEQ ID NO: 365523 - DNA, 122 bp, Homo sapiens
cggaagactgccggtttccttgtcgcaagaaatctgttaggaacaaaaagggaccactctcgtcagtctctcaatttcagcttgatcttcaaatactctggactgcggagtggcggcattca

SEQ ID NO: 365524 - DNA, 122 bp, Homo sapiens
taaagagagggagggggctagggacactgagtagagtcattgagcctcaggttgctaggacgaaaatactgaaccaaccatttcccagtaaaggaggagtgggagcagggtcataggaatgg

SEQ ID NO: 365525 - DNA, 122 bp, Homo sapiens
gttgtcatgccctgggctacatcttacatgggtctgtgtgtgctgtgtacaaagaggggacgctcatgtgaggaatgcttttccatggattacattgaattgaattggttggcagttgtcat

SEQ ID NO: 365526 - DNA, 122 bp, Homo sapiens
gctggtgtggggatgtggagcgccctcaccctgtgaaggcatcccttcccgtcactgtgtcggtccctgtggttttcgctgcccgtgtcccctgtgctgctgctccttgctgctggcctctg

SEQ ID NO: 365527 - DNA, 122 bp, Homo sapiens
agatgagtggtcaattgcgaggaaaccacataaagggtttaagagacaacggttgcccgtcgacagagggaagatgagtggtcaactgcgaggaaaccacgtaaagggtgtaagagacaacg

SEQ ID NO: 365528 - DNA, 122 bp, Homo sapiens
gactgaagaatgggaataaacacgaataaataacaaagcgaggccgcgcacgccgggatgcgcctggctgcagccggcgaggctattgtctccccgccctgaagccagccccggcgtctttc

SEQ ID NO: 365529 - DNA, 122 bp, Homo sapiens
agccagagcagtcagcagcaatgacagaagcagcagcacctgcaaggcatgaagtggtctcgcactgttacaggaaggggtggtatcaagtctgaggctcatggtggagaaggctgagctag

SEQ ID NO: 365530 - DNA, 122 bp, Homo sapiens
tgaactcctgaccccaggtgatccatctgccttggcctcccaaagtgctgggagtacaggcgtgagctaccatgcctggccgatgtgcagactaatttagtttaaaataagtaggctgagaa

SEQ ID NO: 365531 - DNA, 122 bp, Homo sapiens
aggggaatggaccctggagggaggcaaggtggtggagtggaaagagcgggctggggtgcacgccacctgtgatgtcccagggagtcagcagaggttaatggctaacggcatctaacaagcgg

SEQ ID NO: 365532 - DNA, 122 bp, Homo sapiens
caccgctgtctccacagtgaaccgacactcggggctctgggctgggatgcgggaaagtcgcggaggttttcctcgccccacccactgcggcttggggaaggaggaggaggaggggtgggcca

SEQ ID NO: 365533 - DNA, 122 bp, Homo sapiens
gtggcgctgaactactgtttctcagcaaggtggtccgggccttctgccgtcagccagccacgccccactcccagtggtcctcttccgacatgaaagatgccaggaacaggaaaagcaaaaca

SEQ ID NO: 365534 - DNA, 122 bp, Homo sapiens
ccagccacccgctgcgtttgcgccagcctcccagactagcctggggtgctgaaatgggggcgggcccgagccacgggttggggcggggtctgatgcgcgccccgccccgcaacgccccgccc

SEQ ID NO: 365535 - DNA, 122 bp, Homo sapiens
tgaacccaccgtaacacctgccacgctgaacccaacatatgcctgccacgctgaacccaccgtaacacctgccacgctgaacccaacatacgcctgccaagctgaacccaccgtaacacctg

SEQ ID NO: 365536 - DNA, 122 bp, Homo sapiens
cgtgatctgcctgccttggcctcccaaagtgctaggattatagccatgagccactgtgcccggaccatggagattcttagataaacagccatgggcacaaagtaggaattcaatacaaattt

SEQ ID NO: 365537 - DNA, 122 bp, Homo sapiens
gcaccgaccgcacgggcttcaccttcaaatacaggtgcggctcctgcggggccgggggctcgagttccagtgtggccgctcacacgcctctaccagcctgctagagtcctggacagtcaggg

SEQ ID NO: 365538 - DNA, 122 bp, Homo sapiens
gccggcgccgtggacagcgggacgaagcggggaatgcaggggcgcagcgcgggcagggcgcgcctcagagccatggcgggacggcggtacccgcccgggccgcttaagtgtgcgctgttggt

SEQ ID NO: 365539 - DNA, 122 bp, Homo sapiens
ttctgttttcccttcctcccttccctatgtacgctcagagcctcagacagaccgtctgggcgcctcattcgcgtttccgcaagatcacatagatgacaccgctgagaagggccagggggaag

SEQ ID NO: 365540 - DNA, 122 bp, Homo sapiens
cagggaggcgaaggtttgctgtcagcgcgtcagcagagaccccagcccacaggaaaggctcggagggggtgggcagcctgcctgacaagccccattcagtgaccagctgacccccaatacat

SEQ ID NO: 365541 - DNA, 122 bp, Homo sapiens
ggtcttcgggtagagacctggaggcgcttggttcttgggggtcctctaggattccagcttcgtagctgatgtgcatgaggttctcgtccatgttccacgggttcttgggagtgactgggatg

SEQ ID NO: 365542 - DNA, 122 bp, Homo sapiens
ccagaaataagagggagctgggattagaagtcgtgaccttaagacgtgtggccagagaggcgtcaccttctgatcccggtttgtttgcttgcgtttctcagggacctgatgcccagaaccct

SEQ ID NO: 365543 - DNA, 122 bp, Homo sapiens
aatcgaacccgggcctcccgcgtggcaggcgagaattctaccactgaaccaccaatgcctcgcgtacaaaagaagccttgtcgtctctaggaaggctttgtcgtctttcaggaatccaacta

SEQ ID NO: 365544 - DNA, 122 bp, Homo sapiens
gccacacactggctcacaatggctcacactgggcacacaccaggacacactggctcacaccgggcacacactgggcacacactggcttacagccacccacccgagggacaggctggtgccag

SEQ ID NO: 365545 - DNA, 122 bp, Homo sapiens
acagaggaaagggtcccattcttggagattgtgtctgagctcttgggccagggcagggtccggggagcaatggcatcctccctagtcatcaaagaaataacaagaggtcagaagtgggtggg

SEQ ID NO: 365546 - DNA, 122 bp, Homo sapiens
caaacaccagggcccaaaagcaggctctagataggttccaggtgctcaatttctatttcacgtttggagtgagccagtggaattgtgaagttgtggcattttgattcggttgccaagagtta

SEQ ID NO: 365547 - DNA, 122 bp, Homo sapiens
gggagatggtgaaggggcccgcgagcaggcgctttgtctggctgtctgcagagtgaggttcgcgccgcggcggcgggcgcccgtgcggtgcaggatgccggggcgccaggatggccgggggc

SEQ ID NO: 365548 - DNA, 122 bp, Homo sapiens
tgctatttctcaatatcatagttagtactaggatactatttactacatccaataagcactcgaacatttgtgacatgagctactgaaaactataacacagtacagtataggataattataga

SEQ ID NO: 365549 - DNA, 122 bp, Homo sapiens
ccaagaacccatggctggcacgggacgccaccgccagagtttgggttcacagtgggttcacggggttcagacgtcagcctgctccgctgctgactcaggactcggtggtggcttttgcacac

SEQ ID NO: 365550 - DNA, 122 bp, Homo sapiens
ggggctccccaccatgctggcggcctggggcctggacagagccaactggggaaagtgcctcgcaacagaccaacctggtgagggaggcggggggagcacatggcgcaacccaccctcctacc

SEQ ID NO: 365551 - DNA, 122 bp, Homo sapiens
ggttaggattttatatttgccctcattttgatatgcaaaagccctcaaaacatttagtaacgcatttgttatttaaccccttttatatcctagttgagcaggaaacctccttgcagagtcat

SEQ ID NO: 365552 - DNA, 122 bp, Homo sapiens
ttctcaaactcctgggctcaagtgatctgcatgccttggtctccaaaagtgctgggattacggtgtgagtgaccaagcctggcccagattaatttatttaatccttataataaccctgtgag

SEQ ID NO: 365553 - DNA, 122 bp, Homo sapiens
caaagccgcatcctcccggagcagaaccgctccccgccggctgtccgcaacctccgccagcgtcggtccctgggcaggtgtgggtgagactgctcgttcgtttctttaaatttcgatgccat

SEQ ID NO: 365554 - DNA, 122 bp, Homo sapiens
tgcagtacacccaggcgggccatacgagaggctgctgcgagtcagttttgaccacgggcccgccgttggctgagcccataagtaggatagccgggttgccgtgctccgggtatttggtgccc

SEQ ID NO: 365555 - DNA, 122 bp, Homo sapiens
cagggttgtgtgcagaggaaaatgcaaattcttaccttgtcagggtctctgacctgatggcgacccgtggtggagtcttcacagagacagataccactgcaagggcagacccagactgtgca

SEQ ID NO: 365556 - DNA, 122 bp, Homo sapiens
ttacaggtgtgagcttccacacccggcctcctctcattttgagcttatgtaaatgcctaccggcccccagtagggctggggcagggttgactttccagtgctgtctgggatggctgggagca

SEQ ID NO: 365557 - DNA, 122 bp, Homo sapiens
ggcgagggctggaaagccgcacccacccccgcacccacccctgcacttgtgtagtcctcacgtgtcctctacatcctgggccagagggagaggccccttcagcagcggctctcccaacaaag

SEQ ID NO: 365558 - DNA, 122 bp, Homo sapiens
agaagctacccagttaggagtgggtcaactacaggctgtgctcaggtgggtgtgggcatccggtcagctgcctggccggttcagctcttaaggaaggaagctgggattggggtgggtagtgg

SEQ ID NO: 365559 - DNA, 122 bp, Homo sapiens
ggatgcggtggaggctgcccggggtgggtcagcatggggttgtccctgtgagcacagctccgggagacccgtactcagaatcctccagctctctcgcctgaggcggaaatgtgacttgggaa

SEQ ID NO: 365560 - DNA, 122 bp, Homo sapiens
gttcctccttatacttgcggaggatgggaaagggtgtttggtgttgctaagcaaagacggcgacttggacagtgggagcctatggtgacatcttgattaggccttggggatagaggtagagc

SEQ ID NO: 365561 - DNA, 122 bp, Homo sapiens
gcctacgcagcctcggggtagcgtgtggcctccacccggccggtccgcttcgctggcagccgcaacttcccgtctgcacccagctaggtcccgcggctacccgagaggcaagcgggagactc

SEQ ID NO: 365562 - DNA, 122 bp, Homo sapiens
acattattagagactagattgttctgtccccaaaaccctatatgcctcactgtggaacagcgcaagatgcaccctaataatatttacttctctgaaccccagtttcttggattattatgtct

SEQ ID NO: 365563 - DNA, 122 bp, Homo sapiens
gggtccaagactactaatttcctaattatctgtcccagctggctctggaagaggggaggacgaataactgactgtacaacacgggcgttttggttgggatggaatttcccctgcttttaaag

SEQ ID NO: 365564 - DNA, 122 bp, Homo sapiens
ggggagctcctggcgccagtccaggcagcctgggctgtggcgagacggtcgtcctggtagcggtgggagggaagagccaagcccagccaagcccagccaagcccagccaagggggccacgcg

SEQ ID NO: 365565 - DNA, 122 bp, Homo sapiens
ccgagaaccctgaatccattccgcgcacacccggccgcgtgacccctgccgaccggctggcgcgccacccattccccgcggcccgcggattagtcagcagttgttctagtccgggtcccttc

SEQ ID NO: 365566 - DNA, 122 bp, Homo sapiens
gcttgcgcgagctccgcccacaaagacttgtggtcactagtgcgctggtgcgtcacagggcgcggaagggcaatgccaggagttctggggtgggtctcatactgtggaggaggccgtgtagc

SEQ ID NO: 365567 - DNA, 122 bp, Homo sapiens
tgaggagagtgtgagaggctggaggagagagggaagagaagcaggactaggaatcaggctcggggcagcagcttatatatggagagcatgggctgggcccagtcctggaaggtgagcttgca

SEQ ID NO: 365568 - DNA, 122 bp, Homo sapiens
agcctcactgcctgtgggggtggggagagctccctagagatagggagaaagacagtccctcgagaattttgccagctatgttggctccagcccagctgagccctgactatgccagagtcctg

SEQ ID NO: 365569 - DNA, 122 bp, Homo sapiens
ctgagtgggagggtgggggcctgggaggggcgctctggggcagccggatcgttctccctccgcagccagtggtggtgattactggcgaatcttgaacccgggtgagtaccgcgtgacagccc

SEQ ID NO: 365570 - DNA, 122 bp, Homo sapiens
gctgcgaagggaggatctcgggcagctcagcgcgctgccgctccggcgcgaggccggggtcgagcgcttcagtagctcatggctctgtagagtgcgcatggccaagcaaaggaaagcatgct

SEQ ID NO: 365571 - DNA, 122 bp, Homo sapiens
taaagggacagtgtcccatcaaacttcgtagaagccttccccagaggagtaaactcagtgcgcgatcttaagcgcgcatctgtggaaacaattaagtgagtaaacattcgcattttgcaaaa

SEQ ID NO: 365572 - DNA, 122 bp, Homo sapiens
gaatttgcctgatttatatactggagcctgtgttgtaagacagaaacagctatatttagccgggatccccagtccaggaagttgtttgaggtgcatcataggaaattatgaatggaagaaag

SEQ ID NO: 365573 - DNA, 122 bp, Homo sapiens
cagaggccacgcccaccgcaggcccgaaaacaccagcctgcactggcgcgccggattgtgcgcaggctccacctgccacgcacgcacgccttgccccgccccttccggaggctcgccgtacg

SEQ ID NO: 365574 - DNA, 122 bp, Homo sapiens
cagaacactagatattttttctctccactctgaagagagtgataccaagaagagtgggaacgttttcaggcacaagctctttctcagatgggaacacagaccccttgaacaatgatgaacca

SEQ ID NO: 365575 - DNA, 122 bp, Homo sapiens
tctctgatttgtggcagttacctacatttttacttacaattttagataaataaatgccggcgtgttcacaggcaggaaaacactgcattggtagataagggccattccatgctgggcttgac

SEQ ID NO: 365576 - DNA, 122 bp, Homo sapiens
ccctgtaagcgtggcccggcgacgttgtgctctgatggggagcgtgtgcagggcacaggccgggcagccagcacttcgccgcccaggaaataccagccggtcaacttgggttagtgcagata

SEQ ID NO: 365577 - DNA, 122 bp, Homo sapiens
catgggtaagggctttcagcggcctcctattccccgcagatgccagcctgcctggtggaacgcggcgctgctcctgcaggagtggacggcgttccatcttcgccaccacacccgctgctccg

SEQ ID NO: 365578 - DNA, 122 bp, Homo sapiens
ttcagtgtcaatgtgaccaccaaaaaaattccaaataaagcagccccaaatcttacttaccggcagcagaatataaattcattttggtagagtacagaatgttctgtattaggaaagtattt

SEQ ID NO: 365579 - DNA, 122 bp, Homo sapiens
cttgaagggatggataccccaccctccatgatgtgattagttcacactgcatgcctgtatcgaaacatctcatgcaccccataaatatatatgcctattatatactcacaaaaatgtttgaa

SEQ ID NO: 365580 - DNA, 122 bp, Homo sapiens
atacggaagagaaataaaacctctcatatctttttgacaggaggtagttctgcaacttggcgcaaggcatccgccaaagttaagctcctacctctcacagaaatggacaggggactgctacc

SEQ ID NO: 365581 - DNA, 122 bp, Homo sapiens
tgcttaaatgcaaaccaaaggcactcaaatgatgcaacccaagagtgtggaagaggctggcggatgggctgtcacgtctggctgatctgatgtcagagcagatcatgtggtgctctgtgggc

SEQ ID NO: 365582 - DNA, 122 bp, Homo sapiens
cccacccacactgacaagggcttccccgcccctcatgtgaggagcagctttgggaactcgcgcctggtcagtgctgtgggaatgtgtgcccagttccttgagacccagtaggcatctggatt

SEQ ID NO: 365583 - DNA, 122 bp, Homo sapiens
catgggacactccccaagatgctcctttttcatttccctcaagcccagagtaaaccccttcgacctccttgggtttcgtgacaggccattccagtttaatttcacttcagatcttgaaatgt

SEQ ID NO: 365584 - DNA, 122 bp, Homo sapiens
cgcgggcccatccccgggttgcggacttcggggtccgcgtgggagtgccgcggcctttggcgcccaggcagctactcccgttcccgctccagcgccggcttttccagccctcctgcccacgt

SEQ ID NO: 365585 - DNA, 122 bp, Homo sapiens
cactcccccacagaaagcggctgtattgcaaaggccgctccggcagcgcacggccaagcgcggtgtcgcgacccgcagggctgcggctcgccatgaaatccctcaagtctcccctcagggaa

SEQ ID NO: 365586 - DNA, 122 bp, Homo sapiens
tagttgcactaatggttacacagtgcagtggctcttgggagttgcccttctctgcctggccgtggtgggttgtggtggggaaaggggctcagggcaggaccacggcataagtgggaaacatc

SEQ ID NO: 365587 - DNA, 122 bp, Homo sapiens
ctaagacatgctaatattaaagtcatcttatctgttttaaaagcccccaggtactcagagcggaacacctagtaaaccttatttacatcatcttgcttgaattatgtctcctatagggttct

SEQ ID NO: 365588 - DNA, 122 bp, Homo sapiens
gcagggtgcgtccgctgcttatagagacgtgaagcccaccatggccattctgttggcgtgcgtttgtcaccagctgtgttcccgtatagaaacgtttctcgtctttggggggcttcttcctc

SEQ ID NO: 365589 - DNA, 122 bp, Homo sapiens
gctgctcacctcctgctgtgtggcctggttcctaacaggccagggagcagaactggtctgcggccctgggagttggggacccctggtctaaattatatgagtctatgaagttttagactggt

SEQ ID NO: 365590 - DNA, 122 bp, Homo sapiens
ccccagactcgagggcctccacgtggcccccgacgtaggtctcagagtccagcacgtgtccgtcgtccgtcagcttattgaactcctgctcttgcttgttggggaagatgatgttggcgtgg

SEQ ID NO: 365591 - DNA, 122 bp, Homo sapiens
tgaggcaactggagaaatattccaaatgaacttaactgttcaatttgtgcatgagaccaacgtttgaatgtagagctacttgaaggccacagagatcactttcaagtcagactggaagacat

SEQ ID NO: 365592 - DNA, 122 bp, Homo sapiens
tcccctcaacacgaccggaggcgccgcggtcgcctccgcctccggccaccgttcgaggagcgaaccccgctcgaggcctcacagccgccgccttaagcccagctcggctcacctcctccatc

SEQ ID NO: 365593 - DNA, 122 bp, Homo sapiens
tttcagagtgcgtcatcatgggcaagcctcactgttcccagccacaccccacccaccacgcggtctgtccccggcacactggctgagtgcacaggcacacacttccaaaccgtcggaatgta

SEQ ID NO: 365594 - DNA, 122 bp, Homo sapiens
accggatgacagagcagcacttcccccatcccatccagagtttctcccctgagagcatgccggaacccctcaatggccctatcaatatactgggtgagggccggcttgcgctggagaaggcc

SEQ ID NO: 365595 - DNA, 122 bp, Homo sapiens
gggggcaggggtggctgggccgggtcggggctctgggaggcgggagcaggtgagcggccccgagcggctttacgattgtctgccaggcgggctcctgaagtgtgggcatttaacactcgtca

SEQ ID NO: 365596 - DNA, 122 bp, Homo sapiens
agtaggaaaggaaataaacagaggctcggaccggcacagggggacggccagacgggatgtcggaagccaagggacgcagaggccggcgggtggcggcgatggagaggacagatccggctccc

SEQ ID NO: 365597 - DNA, 122 bp, Homo sapiens
atgtttgtggaggatagatggaaaaaaaattaggaaggcctgcatacaaacacaaataaacgagtagacataacaaaagtgatgtctaaataagaataccaacagcacagggataaaaagaa

SEQ ID NO: 365598 - DNA, 122 bp, Homo sapiens
gctttacagtaaccttgtgggaaactgggactgtgagtgatcaagtcttttgtccaaggtcgcaaaatagttgatgacagaactaagacctgaagcttctgattccagacccagcgttcttc

SEQ ID NO: 365599 - DNA, 122 bp, Homo sapiens
accaggtctctcagctgaccagcgagctcaagttcatcaagaatggtatgtggctcccggcgccgccctcgctccctcccacctcccagccctgtcctgagccccccggcaagggctctgcc

SEQ ID NO: 365600 - DNA, 122 bp, Homo sapiens
aggcttgtccagattgcgccgcattcccgctcatcgcacactgccgtttctaacattttccgtggctttctagatgacctgttgttcatgcacttcacttagtgccctcttggacttttggg

SEQ ID NO: 365601 - DNA, 122 bp, Homo sapiens
gggggcggtctgacagccccacctgccaggacgcggtggtgtcaggaccctgagatgggccgtttctgtggccagggatctctcaaaacctgctgcgggcagtgacttcattccagccctcc

SEQ ID NO: 365602 - DNA, 122 bp, Homo sapiens
atcagcaggattctaaaagtagccaattgcggtgaggattgaaaaaaggtcagtctgatacgacagaaacggaacatggaggggacagtaaggaaataaaagctagccaccccagccagcag

SEQ ID NO: 365603 - DNA, 122 bp, Homo sapiens
aaagatctatcttaagtaaacggggaggcttctttgtacagaaaagtagagttcagaagccgtgatccctgggatccgaaaagacaaaaaaccagaatcagctgaaggaagtactgaggaat

SEQ ID NO: 365604 - DNA, 122 bp, Homo sapiens
tctacttcttggtcttgtctcttatcgctatttccttccctgtgttcctcatgcctctaacgtgaagagcaacttcactgcagccccagcctctccagtgtctagacagcaccctggtaaac

SEQ ID NO: 365605 - DNA, 122 bp, Homo sapiens
cgggcggctccacaagccgggggtctacacccgcgtggccaactatgtggactggatcaacgaccggatacggcctcccaggcggcttgtggctccctcctgaccctccagcgggacaccct

SEQ ID NO: 365606 - DNA, 122 bp, Homo sapiens
gtcacagcctgggcgcgccgccggctctgcgcagggcctcacgggactggtagttcgaggcggtcccgcgatgctttccctgccgaggtgaggggagcgactacaactcccagagggtatgg

SEQ ID NO: 365607 - DNA, 122 bp, Homo sapiens
ctaagaactttttgggggtgatagaaatgtaaaattcctagtggatttactacactgttgcgattgcaatacttacatggtgcaagactaactttctgaatgattatgacaaatgaaagcgt

SEQ ID NO: 365608 - DNA, 122 bp, Homo sapiens
cagtgatacatcctagtgatggcagcaaccgcccgtctggagccgcggttgggaagacgtcgtctgcagcaagggaggcgtggtggggctgtgcctctgtggagctggtgaggccgggaaca

SEQ ID NO: 365609 - DNA, 122 bp, Homo sapiens
cccacggccccgggccctggaggtctatctgctgggtggtcatggcgcggctgtggcgggcgacgacccgcggggacagacgggcaggacgcgcggaacagcttgcagggcacccccggcgg

SEQ ID NO: 365610 - DNA, 122 bp, Homo sapiens
cacacctttcagcagtggagcgtggaggccactcctaaacccaggcttcatggccacctgcgctctgtggaggcctggggttctcttacccagaaacatcttcatctccctctgcagcggga

SEQ ID NO: 365611 - DNA, 122 bp, Homo sapiens
catcccagaaactgggggtgacaccgctttattcatttattcaccagctggtcttcaagacgtttggacaggacctgttaaaattgtggcaatttttgcttcttgaaaacagctaatttaga

SEQ ID NO: 365612 - DNA, 122 bp, Homo sapiens
agggcattgtcagggacaagggcaggaggaactgggagatggtctccccaagtctttcctcgcaacaagcagcagcctcctccatgggctccacttagctcccctgcaggccccacacctgg

SEQ ID NO: 365613 - DNA, 122 bp, Homo sapiens
gttttatttcacaaacatttctattctactgtgagagtggaaataccaggtaacagcaaccgtcacaggaggaaattgccctgcgaaattgtcacacattcaaaacatttctcacaagaatc

SEQ ID NO: 365614 - DNA, 122 bp, Homo sapiens
tctgctacgccacccacgcccaccttggcggagggcggggccccacggctctcaaacttgcgcgccaaagacggagccacctggcgtactggtggaaagcgcagacttcagagccacacccg

SEQ ID NO: 365615 - DNA, 122 bp, Homo sapiens
ggttgggcacacccatgtgtgggctctgccctggccttaaccgagagagggaaatgttgacggggaagaaagccctgcccaccaggcagccccacccacctgggctagccccactcacaagc

SEQ ID NO: 365616 - DNA, 122 bp, Homo sapiens
ccaggctgacttggacatggcaagaggggtcccaggctcttgtgggcaaagcaggggaggcgccaatgtggaggaacagagtctcctggctggctgctgctctctggagcgggtggagtcag

SEQ ID NO: 365617 - DNA, 122 bp, Homo sapiens
tcgggctctgcttcagtcccgcccgcctctccttaactgtcggcctgtttccagtattggcgttttcaaaaactctgatgtaacaatcagtagtcctgggtatctggattcactttgggggt

SEQ ID NO: 365618 - DNA, 122 bp, Homo sapiens
gtctccgtggaggcgggtgcgtggccagggtgaggaacagggtctccgtggaggtgggcgcgtggccagggtggggaacggggtctccgtggaggcgggtgcgtggccagggtgaggagtgg

SEQ ID NO: 365619 - DNA, 122 bp, Homo sapiens
attcccaggggagagcaggggtcctggtactgccctggttttcacacatggcaatgtggccgtgggcacgggcttcccgggcctcagtttcccaagtggggcgccgggcctgcgaaggttgc

SEQ ID NO: 365620 - DNA, 122 bp, Homo sapiens
cggctccctcccttagggggggcgcgcggccggtcggggggcgtgggcggcggtgtgagccgggctaggtgcgggaggggcccgggcggctgcggggagggtcgcagggcggcgggccaagc

SEQ ID NO: 365621 - DNA, 122 bp, Homo sapiens
tccccacaggtactgaatatgtatcctggcacaaatcatcagcacaacacaggaacttcccggcagaggtgaacaggtcagtttctgaacagcagcatccgctcggagcacttctgccccac

SEQ ID NO: 365622 - DNA, 122 bp, Homo sapiens
ccactgcctcctactacttctggtcactactacctttgctcacagtttattaaggaggagcggagaagaagaggggcggagaaggggcggggagaatcacctttccttttttacaattggtc

SEQ ID NO: 365623 - DNA, 122 bp, Homo sapiens
gcggtgcggccttggcaggtgcggcccgcgggaggggtgggcaaggcccgggcagttgcccgaggtttctggtgtgggccacggggcaattttacccgataaaccaaattctgggaatatgt

SEQ ID NO: 365624 - DNA, 122 bp, Homo sapiens
tcgtgcgccaacgtccgcaggtcaccgcccggccacaggggacactcgtgcttccacgtccgcagcacaaaggccttgctcaggggaagcacatgggcaggacgctacacaaattaagctgt

SEQ ID NO: 365625 - DNA, 122 bp, Homo sapiens
tggggcctgaggccccgcagctgctgccttgtgcctgctgattggctccttgtggaggggcgtggtctctaccttataatagggagggcgtcttatcctctcagccgcggctgagcctcttt

SEQ ID NO: 365626 - DNA, 122 bp, Homo sapiens
ctgggtggggcattacaaagagaggccacaggaaaacctttgagagtttggagcctgctgcgtgagagagataaaagtagaaacagcaaattggctgcaatacgaatggcaggtgcatttgt

SEQ ID NO: 365627 - DNA, 122 bp, Homo sapiens
gggtgtggtgggaagggacattcctgcaggcctccgctgtggaggaccccgggtaggtggcgcagggcgcggctggcggaaggcgggccaagctagtacagcgtctcgcgggcgtgggtgcg

SEQ ID NO: 365628 - DNA, 122 bp, Homo sapiens
tgatttaatgggcctttgtgggactcaccaaccaagcataaaatggacccacctgcagcccggagccacccaatcaatcaaagggagacagaaaaccgaaaatgctgcatacgagtaaaata

SEQ ID NO: 365629 - DNA, 122 bp, Homo sapiens
aatggaaccacaagggtcttcaaatgtggaagagggaggcaggacagagtctgagtccagcgacacgggatgagaaagacttgaccagccattgctagccttgaagatgaaaggggacccag

SEQ ID NO: 365630 - DNA, 122 bp, Homo sapiens
atcgggtcactcccacctgaatactgcgcttttccgacgggcttaaaaaacggcgcaccacgagattatatcccgcacgtggctcggagggtcctatgcccaaggagtcttgctgattccta

SEQ ID NO: 365631 - DNA, 122 bp, Homo sapiens
cggcggccccggcccgcgccaggatgctgcgcccgggactccctccccggggcggggcggcgcggggcccgccccccatcacaccccttccggccgccctccgcgccccggggcgcaccgcc

SEQ ID NO: 365632 - DNA, 122 bp, Homo sapiens
acctcaggtgatccacctgccttggcttcccaaagtgctgggattacaggtgtgagccaccgcgcccggctgagaatacctgtatttctaggcaatggatgctgtagtatttagagctccat

SEQ ID NO: 365633 - DNA, 122 bp, Homo sapiens
tcattgctcccctgagttgcggctaggaaggcagtgctaagtatgccagaaccgacatgccgggggtggggggaaatgggctcaactttggggtagcggcagaattcctaagaaattgcccc

SEQ ID NO: 365634 - DNA, 122 bp, Homo sapiens
cagatgcagagaaattctgcaaagctcattcggaaaacatttcacaacaacggaatgacacgaccaagctgcacacgatctttagttcttaatacaaagatcggaaagaaaataaatcagaa

SEQ ID NO: 365635 - DNA, 122 bp, Homo sapiens
ggggggccgagagaaccgggggcgctgcggcccttccccggcgtagggtggccgcccgcacggagtcccgccgcctcccgggcagcctctcctgccggaaaggccccgccccgtcgtcccct

SEQ ID NO: 365636 - DNA, 122 bp, Homo sapiens
ccttcactctctaagacacacatagatctttcatttcctggtaaataagctgcctcacaccgttcaatattaaatgtggttttctttgtgagttcttgctgttctcatggttgcccctttct

SEQ ID NO: 365637 - DNA, 122 bp, Homo sapiens
cccataccctctgctgccctgtaggccctttgctagttgctcaagtgttgaaagcccctgcgttgaagtaatctgccgggacttgaaacttggctttggcactgattgtctgacgtgcctaa

SEQ ID NO: 365638 - DNA, 122 bp, Homo sapiens
ggacctccgaacctgcagggggcgatgaaagtaggcttgcgctccgcttgtagctgcttccgggtcagaggtcagacggtctagcgctgcgtgggccatggtgcagctccgaccgcgagcgt

SEQ ID NO: 365639 - DNA, 122 bp, Homo sapiens
caatgggtttgccaccagaacacaggtatcgtgaaaactacccctacctataagccagaacgagaaaggaaaagactcatatcaacactgtgatcatcggacacgtagattcgggcaagtcc

SEQ ID NO: 365640 - DNA, 122 bp, Homo sapiens
taatttttcaaaaggtggatttagacagctaaagaggtctccagaaataagctaacagggcgacgaccctccttaggacccagcagtactccaggatgaactaagtaaatctctgtaatata

SEQ ID NO: 365641 - DNA, 122 bp, Homo sapiens
gttaggcacctgagcagaacctttaggcagctgagcagaaccgttaggcaacagcgcatgcgcaactcagcagacctgggagacacgcgaggcaggaaaccgccctggctgcgcttcgccca

SEQ ID NO: 365642 - DNA, 122 bp, Homo sapiens
cgcctgctatggcagcgcttgagaaatgactgggggagtccagcgaggtcggggacgcagcggtctccgggctccagaaacctccttagccttttgtggtaactttggtccggcggcggggg

SEQ ID NO: 365643 - DNA, 122 bp, Homo sapiens
ggacagcgcgggtgaagcagcatcatccaaaagctgtgtaacagttcacagagtggactgcgtggtttgtaatgttaagcctggcattggatttctgtgttgtgccacagtggtcaatatca

SEQ ID NO: 365644 - DNA, 122 bp, Homo sapiens
tctgtgagccgcgcccatcacctctctgggactgcttggtggggtgagaggagcccgactcgctgctgaggcctcacaggccgttccctgctgccgcggctgccatctcctcctgcgcctct

SEQ ID NO: 365645 - DNA, 122 bp, Homo sapiens
aaaaaatcagtcagtggatgtcttcagtgcattcccttttcatagtccaaagggaatttacgttttaactgtgggatgcactgtcatagctgcttaggcagagtggttagtatcagaagggg

SEQ ID NO: 365646 - DNA, 122 bp, Homo sapiens
aagggtcccggggcccgggtaccgccagagccgggcctgcaagcgcgcccttcggtcccacggtccgccactccacgtggtcaagatcaacagtttgttgagctcatcagtgacaccttgaa

SEQ ID NO: 365647 - DNA, 122 bp, Homo sapiens
gcagagcagatagtatctatacagacgcccatcatgatgagcaaaatagaagagatctatcgtaagagagaccaccatagatagaattcttatggaaattcaaagaacagtaggagtctttc

SEQ ID NO: 365648 - DNA, 122 bp, Homo sapiens
caaaaaccgcgatgacttctgcaccaacctaacccggtaaccacgggtgtgtgaatgtggcgatgggcaagttccgagagctaggagagcatctagcttcctgggaagttccgagtggtagg

SEQ ID NO: 365649 - DNA, 122 bp, Homo sapiens
gctgtgtgaagccattggtgccgatcctcacgagtcactgagatcagagacacaagtgcacgtccaccaccgtggactaactcacatctcagagacacaagcgcacatctatgcccgtgcgc

SEQ ID NO: 365650 - DNA, 122 bp, Homo sapiens
aattcacttaaacaaacagaggcccgtggtgctctgagtcatccactcaaacaaacaaggcgatgttgaaactttgaacccacagagatccatgctctgaggagctaagggacacacaggtt

SEQ ID NO: 365651 - DNA, 122 bp, Homo sapiens
gatgccgcgctctcacaggcctccgcctaccgcgcagcgggctgccactgccgcagcagccgagcccaagtctgagggcgttgtggctatgactttcaagatttttctcctttttgcagggc

SEQ ID NO: 365652 - DNA, 122 bp, Homo sapiens
gagtggtgcctcattaccgctgaatgggggtggaactacagactctcaaatggtttccagcgttactatgaggagaggggatttataaccagtcagcaggaatggatgtcctggcttgttac

SEQ ID NO: 365653 - DNA, 122 bp, Homo sapiens
agaaaatttatcttgcgaaggtcaaggacacacgattatgacagcctcaggaggtcctgacgacatgtacctaagatagtcagagcacagggtggttttatacattttagggagatataaga

SEQ ID NO: 365654 - DNA, 122 bp, Homo sapiens
gctcccagcactggaccccagagaaccatggctatgctcctgcggattaagctctcgacacgcacactgttccctgggtgccagagagctttgggaggccttggaaagtccaggatgtaaag

SEQ ID NO: 365655 - DNA, 122 bp, Homo sapiens
ggcacagtcctgcctgcctgagcaagtcactgcttcccacttgttcactgtctcagtttccggaggggaggctgctgattcaatgaccacaaacttgatagcttaaaacaacagcagtctat

SEQ ID NO: 365656 - DNA, 122 bp, Homo sapiens
acaagcaggggcagtgtcagaaaggtctgtgctctgacactccatgtgcaaggcaagctgcggtccctgtgggtgtcagggagtaggtggttctcaggctactggagtaaggttccaatagg

SEQ ID NO: 365657 - DNA, 122 bp, Homo sapiens
cccagcgaggggataaggacaaccttcccctgggggacagcagaactgccacgcctcaggcgcgatcttccctccaccacctggcacagtctggtggggatgcactcctgtcagccaggatg

SEQ ID NO: 365658 - DNA, 122 bp, Homo sapiens
ttacgtttgatcttcctcctcaccccatgggatgtgacttcctccccctgcccagctcaccggtcttagtgttagagatctggtagacctggggcctcactgtggcctttgaggctgccaac

SEQ ID NO: 365659 - DNA, 122 bp, Homo sapiens
ggatgggggtctggagtagccggcagaggctattgcgggaccccgggcgcgtgggtagagcggggtgccccactggccccccaggggcacgcagctattgttatttcccccctcccccgcag

SEQ ID NO: 365660 - DNA, 122 bp, Homo sapiens
ggtcttcggtccccatactcggcgtcttccacgattttgagcagaggacaagctttggcacgaatcagaaattaggttgaagaactgggcggggcggagtgggggtgggggtcagacgttta

SEQ ID NO: 365661 - DNA, 122 bp, Homo sapiens
gtcacatgtgtggttcccattatgtttattttggacagggctgccctacagcgtgagatgcgctggtttggataatgatcaagaacaggcattggcagacgacagccactgggtcaaatctg

SEQ ID NO: 365662 - DNA, 122 bp, Homo sapiens
gaccccaaattaccacacagtccagtcattgagaagtgagactgccttggtaggtttgatcgcttcctgatcctgttctgcctagttctgtgtcccatgaggaaaggagatatttgctttcc

SEQ ID NO: 365663 - DNA, 122 bp, Homo sapiens
tttcgaggcagcgaacctcagcagttccggctttgctgttagctcttttgtctttgttcccgggactcaggggctgtgttgctgctggcttcctggggatggcaaggatgcaggggtggggg

SEQ ID NO: 365664 - DNA, 122 bp, Homo sapiens
ggcctgcaatacaataagataaggtttctatttgtacactttaaaagattgtctttaaaacggacttctaacaaaagtgcagatctcagatttctcagagataagacataagagccaagggc

SEQ ID NO: 365665 - DNA, 122 bp, Homo sapiens
gtccttttgttatggcaaaggtggatcccggtgctttgagattggacgactggggtgaggcgggcagctaatgcgcaggcgtgtattctcgagtcaggattggcgggcgagcggctgggacg

SEQ ID NO: 365666 - DNA, 122 bp, Homo sapiens
aaagaaggcggaagcgcgctgcgacgggtgcccgcggcgtacaaaccccgtcgccgggaacgtgagcgacgacggctgcagactggccttggcatcctcagctctctttaatttcgcgggcc

SEQ ID NO: 365667 - DNA, 122 bp, Homo sapiens
cacggcctgctcgcactgcacatctagggcactagtagcctcatccaggatgaggacccgcgggtctcgtacaagggcccgggcaatggccagacgttgtttctgtcccgcagccagctggc

SEQ ID NO: 365668 - DNA, 122 bp, Homo sapiens
agtgaggccctgtcttaaaaaaaacaaacaaacccgaaaaacaaaaaacttgaggtttcccggctgcctatccggtgctaggctctagctgggtactgttcatacagggcacataatttaat

SEQ ID NO: 365669 - DNA, 122 bp, Homo sapiens
aaagccattaaaaatagatttcttttctgctgtttctgtatgtactgggtaaacccctctcgcccccgtcccgttgtcagtggaactgcccccagcccctcacccctgctttgcccactcaa

SEQ ID NO: 365670 - DNA, 122 bp, Homo sapiens
gtcagctgcccgtcgccttcgcgcacccggagcagagagctgttgaattgcttcatcaggcggaagcttgtgtcacccgatactttcatatgcaggtcctcggccagggtcccgatgaccgt

SEQ ID NO: 365671 - DNA, 122 bp, Homo sapiens
aattatctcacttcaatagataaaggagtagggcaagcccaggtggcactggtgagtaaccgcctccattacatggtccgttcctgacgtgtacaccagcctctcagagaaaactccatccc

SEQ ID NO: 365672 - DNA, 122 bp, Homo sapiens
caacattgctgacagagtttgttctcacaggatttttacatcaacctgactgtaaaataccgctcttcctggcattcttggtaatatatctcatcaccatcatggggaatcttggtctaatt

SEQ ID NO: 365673 - DNA, 122 bp, Homo sapiens
tcagtccagaagccccaccacccccgccccccgcgcccctctctgcgcctgcgcgcagcacggtcagccagtcaaccgctgcagagcccgcctccccgacagaggaccaatcgagaggccgg

SEQ ID NO: 365674 - DNA, 122 bp, Homo sapiens
cttgggagaaaaaaggttggcacatcacttgggacctgtcactccatctatcctaggaaacgaagttttctctaaaaagttttgatttactttgttattatccttttctatttaagaatttg

SEQ ID NO: 365675 - DNA, 122 bp, Homo sapiens
ctgaacgtcccatgccggcgcccccaccttcccggcctgcacaacttaccttgcgctcggcggccctcggtcccgcccccgactgccattggcccagaggttcctttgttagcgagagcgcg

SEQ ID NO: 365676 - DNA, 122 bp, Homo sapiens
gacaatatcacaggggggctctacacacccggcgctattaagaagaatattgtcctctcccgtcctgcttattaggaaaaatatcacagagtgggtgtacacctcctgcgatatggggggta

SEQ ID NO: 365677 - DNA, 122 bp, Homo sapiens
gataaggaggggctggaagctctgccaaagcagtgacatggatgggcaagtcagagcttgcgggaaacctggggagccaggtacatctggctgctggagtgggatgatgagaaagctggtag

SEQ ID NO: 365678 - DNA, 122 bp, Homo sapiens
gagcactgaggagtggtaggggaccctgggggcactgagcgggggtggccaggtgggctccgggtagggtatctgtggctctctgtcctctgggaagctcggtctataggccagggcaaagt

SEQ ID NO: 365679 - DNA, 122 bp, Homo sapiens
ggctgggggtggttgggaaattggtggctgtggaggatatggtgggtttttactcctacgcggatagtctaaaataacttgtctttgataatgcctttgattaacacactttttcttttctt

SEQ ID NO: 365680 - DNA, 122 bp, Homo sapiens
acacagggccccaggctcagaaaggccccatacttgagtttttgttgctgttgttgttgtcgttttgggacagagtctcactctgtcacccaggctggagtgcaatggctcaatctccgctc

SEQ ID NO: 365681 - DNA, 122 bp, Homo sapiens
gaggggaaagtggggaccagagatgggggatgacataatcctcacgtgatcaggagctgacgtgaaccgaagtccttatattcccgggcttctttctcctctgggtaccagctccttactgc

SEQ ID NO: 365682 - DNA, 122 bp, Homo sapiens
ttccatgtgatccacgcataggtgatgtccacctgacctgctctgtcctgcagggccttccgtgtcagtcctgtggtacgcccactccagccccacccttggccaagcatgtccaacacgta

SEQ ID NO: 365683 - DNA, 122 bp, Homo sapiens
gggggagcagtccagggtcgggctgaggctggaggcgctcggactccgcttttccactgccgcgggctcggcggccgcaggggcgtcggggttctggtcccggcggtgcccctgtccctctg

SEQ ID NO: 365684 - DNA, 122 bp, Homo sapiens
tttcgtttcagttcctcttttcttgaaagttgcgtcttccattcttctgtcttgaggtcgcgtctgttctcccgcctccgttttctccgctcttcattggccaccgatgacctttactttga

SEQ ID NO: 365685 - DNA, 122 bp, Homo sapiens
atctgggtttttctcatctctcttcttcactgtctgtgtccctgttgcgattcgagctcccgcagggcaggagtgtctgctcgttgtccctgctctttctctggtgcgaggacggtacccgg

SEQ ID NO: 365686 - DNA, 122 bp, Homo sapiens
ccccgccccgcgcgcttcccagcacgcacacctaccgcccccgcatccctaccctgtacgcgcagccacagcactcgcccgcgtccgcattccacaccctaccccgcgcgcacgtccatgcc

SEQ ID NO: 365687 - DNA, 122 bp, Homo sapiens
ttacccacatcatttatggtattttgttgttactgttgtaggctggatttgtacttggtccgggactagaaggggagaaacagccttatctgttaatccgttgcagtggcagaagagctgta

SEQ ID NO: 365688 - DNA, 122 bp, Homo sapiens
tcaaaccagctaagggttggtggttaaactctggactcagacagacctggggtggaattccggcttctctacctaccagcttgggcaagttatttacattcttctaaattcccccctttttt

SEQ ID NO: 365689 - DNA, 122 bp, Homo sapiens
gaggctctgacgccagccaggtacccaatggcaagaggatgaggacggcgttcactagcacgcaactcctggagctggagagagaattctcttccaacatgtacctgtctcgactccggagg

SEQ ID NO: 365690 - DNA, 122 bp, Homo sapiens
aaccagcaagcgaaaagacagacttttaaaaatcatatcggggccgggcgcggtggctcacgcctgtaatcccagcactttgggaggccgaggcgggtggatcatgaggtcaggagatcgag

SEQ ID NO: 365691 - DNA, 122 bp, Homo sapiens
tccccatacgctcagcgcgagacagccttccagaagggcccgaagacaatgccagcaaatcgcgtcccggagcagagatccctcggccgtcctggctggactgggctcagcctttgcaaaaa

SEQ ID NO: 365692 - DNA, 122 bp, Homo sapiens
atgcccgaacacggagtccagatgaggcttgctgtgctcactccatcccttcatgctgctcggggagaacacaggagctgcccttctgatcccagcatctcccacgtacttctgagtcatgc

SEQ ID NO: 365693 - DNA, 122 bp, Homo sapiens
tgtaggcagcaggtgaggccagggcagctcaccttcatgcagggccacgagcagggctagcgcaacggagcaccaggtggtaggcacggagaccatagcggcggtggagcgcgcaggctgga

SEQ ID NO: 365694 - DNA, 122 bp, Homo sapiens
atcgccgtctccaagtacctgctcatgaataaacaccaaccccatttatcaggtacttagcgctcattgtgaaggggaaattggcccttttctgaaattgtctatccacaacccatctgcgc

SEQ ID NO: 365695 - DNA, 122 bp, Homo sapiens
gattcacccagtggacatactgtaggttctatggcacatgagggccccaggccctggtttcggcactgggcagctctgctgttaaatgagtggagtcataattttatctcctttcctcagag

SEQ ID NO: 365696 - DNA, 122 bp, Homo sapiens
agcatcagaaaatgcacgattgaggattgaaaacgagggtgaaggaggaccagggaagcgcgaggagagaggcaaaataagggactgccaggaaagcaggaaaggcaactcagttgaaaggg

SEQ ID NO: 365697 - DNA, 122 bp, Homo sapiens
gcatgatggtctcaggattccaaaaagcagcaagttagggaaagctctaatgcacaagcacgttgtaagactccactcacatcatatttactaatgtctcattggccaaagcaagccacgtg

SEQ ID NO: 365698 - DNA, 122 bp, Homo sapiens
atgcggtgaggtacgctgggaagggcatgtcccgcggaaagagcagggtggacgatggaccgtctggaaaacaggctgccaggggacagaatcaacacagatttccaagtcacaaaaacacg

SEQ ID NO: 365699 - DNA, 122 bp, Homo sapiens
tgcctccggcagttgctcacaggtggaaaccgtgtgtgcatcgctgtgtgtgtgtgcatgcgcgcacgcgcgcatggaggcaactgtgcatgccggcctgtgcacgtgtgtgcaagtacacg

SEQ ID NO: 365700 - DNA, 122 bp, Homo sapiens
ctgtcaacagtactattttagatccttatcaggtcatacctagactctacagtgccttttcggtagccctgaatccttcttatatcttgtatacatcactgtctttggtcataccacccttt

SEQ ID NO: 365701 - DNA, 122 bp, Homo sapiens
gccccattcttttatgctgcagttttcaacatgctctgtatacgttaggtcatgggctctcgcacctgagcacgcaccaaaatcacctggaggctttgtgaaaacagagtgccagaggtgct

SEQ ID NO: 365702 - DNA, 122 bp, Homo sapiens
tgtgtgtctgtggcccctgaaaggcagtcgcacgcatgaaggttaaactccactttgcctcggtgctaagtgtttttggaactgcccattgtccaactgggccttcccagggacaaaagcat

SEQ ID NO: 365703 - DNA, 122 bp, Homo sapiens
ttcctctgttggacaccttcatcttccccacaggctccaggtgggcactgtctggatcaacgcccacggcctcagagacccttcggtgcccacaggcggctgcaaggagagtgggtgttcct

SEQ ID NO: 365704 - DNA, 122 bp, Homo sapiens
aggtgctctaggaccctgggttagagctagtctggggcctggacggggttggcgctcatccgcgtgagtgagccacttgcacagtgggccggcaagtggggctggaaggcgcgtctgtctcc

SEQ ID NO: 365705 - DNA, 122 bp, Homo sapiens
cccctcaccttggccaggatgtagtgctggtaggctgccaaaggcagcgtgacagcaccccgtaaggccacggtggagagcagaatgctgccccaccagggcaggcccgtggcggcgtgcac

SEQ ID NO: 365706 - DNA, 122 bp, Homo sapiens
tctgcatatgagtgtgcacacacgcatgggtgtgtttacacgtctgtttgcgtaatttaccgggtttgcatgtgcatcaagacatgtatgtgtgtgctaatgtgtggacaagagcgcgaggg

SEQ ID NO: 365707 - DNA, 122 bp, Homo sapiens
ctgaaagggggtcgagagtaaatgggatggagggggacaagtcctttgctctaggaaagacggataaaaagcagcctgaaaggggctagcgaagaggaaaggcctgtgacttgattacaaga

SEQ ID NO: 365708 - DNA, 122 bp, Homo sapiens
acctgggagaacgtcctgtcttccccagcatggtcaatgggctgcctgaccactatcacacgggcctggccttcagcagctcttccgaggtgggggtatttttacgcttcctactccaatca

SEQ ID NO: 365709 - DNA, 122 bp, Homo sapiens
cctgcccctcccccagcccctggctctcaccatactaccttccgtttctagggcttggagcgctcctgggacctcaggtaagcgtcggccttagcacgcgcttatttcacctggcgttatat

SEQ ID NO: 365710 - DNA, 122 bp, Homo sapiens
gtgccagctccacaggctccacccccgccccccaaggccctgtacccaggtgctctgggccggcccccacccatgcccccaatgaactttgatccccgatggatgatgattcctccttatgt

SEQ ID NO: 365711 - DNA, 122 bp, Homo sapiens
ggcccgccccgcccagccggggttctcgccgccgtcattcccctcccgccccctcactcccgtcctctcggggctcctcccacgaccctcccaatggcgcctccggagcccccatcccttat

SEQ ID NO: 365712 - DNA, 122 bp, Homo sapiens
cccctttctccctccacggctgccgtggtaggtggctccacgctggccgaatggagacagcgccggcatttctacgcgcatcaagagcaatcatcatcatctgaacttagggatgcactggt

SEQ ID NO: 365713 - DNA, 122 bp, Homo sapiens
tggaagtttagcaattatttgctacaccttttcccacttaccactgaaaagtattcttcccgggtctgcttcatatgatcaggtttgagaaattagctgattatctcatttcgttgctgagg

SEQ ID NO: 365714 - DNA, 122 bp, Homo sapiens
agaggacggggcagacagacctaggtcagggccagggctggggccgggcatggcccagggcggtccttgggcagctggtggcttgggggtgggcaggacactcacgggcggccagccaggtc

SEQ ID NO: 365715 - DNA, 122 bp, Homo sapiens
gttggtctgtcaagggcctggtcttttgtgggtgatgctgacacttggggtctcagtccccgtgggtccgggggtctcagggtcaggttctcaaactccctgtctgatagaggtcctggcct

SEQ ID NO: 365716 - DNA, 122 bp, Homo sapiens
tgctaggcttggcaggtatttgttccctgctccttcacgctctcagtgccgtggccacgtcgctgggtacgccccaccaggcaagagacattttccgtcttgttctctgccacgtccccaga

SEQ ID NO: 365717 - DNA, 122 bp, Homo sapiens
cctaatgttttgtgttcttttttccctgcagatgctgtacccctcaaggatttaaactaacgaaaaatcaataaataaatgtggatttgtgctcttgtatttttaagtggattaaaaaactt

SEQ ID NO: 365718 - DNA, 122 bp, Homo sapiens
ggcctgcacactgcatgtgtggtcacgcactgggagtcctggtcacagtgtggcccacctcgcggatgcttccagtgcacctgtggagcagggacagtacccatggcagggctggacggcct

SEQ ID NO: 365719 - DNA, 122 bp, Homo sapiens
ctgggcggagacgggagccacgccgggtacgctgccggtcgctcaagagcagcacggccccgccccgccccgcccacgcccttggggccacgcccactcccggaagcagtcctcaggtagcg

SEQ ID NO: 365720 - DNA, 122 bp, Homo sapiens
aagctcctctctcaaatgataagcctaattgttttaagcaggaggatttcaagttccccacgcctcagatcagcatgcagctcacaggctttgttaagcttgtgtgacagaataatctcctt

SEQ ID NO: 365721 - DNA, 122 bp, Homo sapiens
ggaacagtgggtgggccttgaaagcgaactcaggagatggggcgttgtgtataggcaagtcgctaaccgggagccccgcgcctcattccgactggatcagggggccccgcctgtccacggtc

SEQ ID NO: 365722 - DNA, 122 bp, Homo sapiens
caccctgggcaggtcattcatcatccttgtcccctgatttctgtagagacctgctccaagcgcttacctgacggttgccatgttgtacctgccctggcaattgttggctcctcctcagccaa

SEQ ID NO: 365723 - DNA, 122 bp, Homo sapiens
caggaggtcgaggctgcagtgagctatgattgcatcactgcactccagcctgggtgacaacgcaagactctgtctctaatacataaatgtggtagccagacttccagatggcccccaatgat

SEQ ID NO: 365724 - DNA, 122 bp, Homo sapiens
ttttgtgcagcagatctttgtagagccccgagtctttgtgcacggtgtggtacacatgaccgtcgctcctggtgtggccgtcgaagccgaaggtgccgttggagatgggcgatttcacagag

SEQ ID NO: 365725 - DNA, 122 bp, Homo sapiens
aggacgagaaagaaaagatcaggcttttcctacaacggcagacatccagcttccatcggtcgtaatggctcaggcctttgagagtgctagagcgtcctagaaaagcagtcctttaattagtt

SEQ ID NO: 365726 - DNA, 122 bp, Homo sapiens
agaaggcgctgagctccagccacgaggagaatctgaggcgcacacgatggtgtgaggcggcgcgggaggggcctgggtcagagctttgtacaaaacagtgtttgcggaatgacaacagccac

SEQ ID NO: 365727 - DNA, 122 bp, Homo sapiens
ctggcccgccatcatccatttttaatggcttttatcaaatacctataagaactatctgatcgccacactaaaatataattcaggaaagcttatttggcacttaatcccagtgcctagaatag

SEQ ID NO: 365728 - DNA, 122 bp, Homo sapiens
cgcagctgtgtttccacctcatctccagcttgagtggcagccagcggcgccacctgcacacgagccccctccattcgagaagcacagactatgagtgtggccacgcgtcccatgacgtgaac

SEQ ID NO: 365729 - DNA, 122 bp, Homo sapiens
tactgccttggatgtgaacgatttgggagggacaagtctgtgcagtggcctaaagtgaggcgtgagtttgtgcctagcttgtctgtgaaattgggtttgttttttctgcttttactacacat

SEQ ID NO: 365730 - DNA, 122 bp, Homo sapiens
gtcctaggctgctgttccctcaccactgtacacagctagtataaaatcagacagacaggccgggcgcggtggctcacgcctgtaatcccaacactttgggaggctgaggctggcagatcacc

SEQ ID NO: 365731 - DNA, 122 bp, Homo sapiens
ccagcctgggatctttgcctcatgtccttgggctcctgccctggctggcccgtcccccaccgccatgaggtgtcagattgtgtttccggctgcctcttcccgttgaccccctcctcccccaa

SEQ ID NO: 365732 - DNA, 122 bp, Homo sapiens
ccaagacattgtccttgaaggaggtgagagtagggggaggaggtgagagtagggggtgggcgggagggggctgtcatcaggagccctgaacccctcaccacctacctgatgggcacaggcat

SEQ ID NO: 365733 - DNA, 122 bp, Homo sapiens
atgaagcagctgctgacccagctctagttttcgggaagtcagatgaccttttccctcccgcggctctctacctctcgccgcccctagggaggacaccatgggcccactgatggttctttttt

SEQ ID NO: 365734 - DNA, 122 bp, Homo sapiens
acaattactgtttaaatattaattttaagaatggtgaaaaataaaggaagtgcttcttagcggaacacttagaatttaacagattctattgatcacccgctatgcatcaggctctattctag

SEQ ID NO: 365735 - DNA, 122 bp, Homo sapiens
tcaggccgtccatctctactgacttcgcccttcccggccttgcacctccctcaggttccccgtcctggtcctcaaagacctgtgggtctacccccacgctctgcagacgtccctggccaacc

SEQ ID NO: 365736 - DNA, 122 bp, Homo sapiens
tgttccacgtggccatagcgtttgcgtcacaatgacctggcggacaggtgggagccacagcgtacaccccagggttccctctgtgctgtgcgtagtgcctactgcttgcttccaggttaaat

SEQ ID NO: 365737 - DNA, 122 bp, Homo sapiens
cacctgcggtgtcccagatggagatgttgtaggagcgccactgcttcaggtagaaggcgccgcccaccgtgctgaccgtgtccgggaagcgccgctccatataccgctgcagcagcgacgtc

SEQ ID NO: 365738 - DNA, 122 bp, Homo sapiens
ataccaccaggccgccacttcgcggaccgcctcaccggcgccattgcagccgactaactgcgtcatcagaagaccacgacggacgcccacaaaatacgtcaccaagccgaagcaatcaatcg

SEQ ID NO: 365739 - DNA, 122 bp, Homo sapiens
acggccagaccccaactttgatgccctgatctctaagatctatcctagccgggaggaatacgaggcccatcaagaccgagtgcttatccgcctgagccgcctgcacaaccagcaggcattga

SEQ ID NO: 365740 - DNA, 122 bp, Homo sapiens
gggagtcggaatctctctcacaaggagtcgagtcggaggagactcgagtcctctggaaaccgctgagctgctcgggtgccttttctttttgtcctggaaggaatctatcagtacaggaaatg

SEQ ID NO: 365741 - DNA, 122 bp, Homo sapiens
ccctgccgcgggggcccacgtgggaagcggccgagagccccgggccaggctctaagggagcgcaggaggatgccgtccccagccggccgtcccgtagactctccgcgcgtacccgcgtcctg

SEQ ID NO: 365742 - DNA, 122 bp, Homo sapiens
gtgcacaagtttccaaagtggacaaatggcattgtctcaacagcactcccgtttcctgggcgtgtttctgcaagcctgggtggtatcacaaacacaaaggcagaggtgacaaagaccattaa

SEQ ID NO: 365743 - DNA, 122 bp, Homo sapiens
cccagcaggctgccttccaggtgccaggaagaacttttcattcattgttaagccacttttcgcttctgttgaaattttaaaaaacctagggagcagctgctggtgaaaaggttgtttggggc

SEQ ID NO: 365744 - DNA, 122 bp, Homo sapiens
aataattttttcgatattgtattgttgtctcagaaacctccagcctctctcattgatggacggtaggaggggcacatggagtggaccaggagtgggcaggagtggggtgggggcgtgctttt

SEQ ID NO: 365745 - DNA, 122 bp, Homo sapiens
acgaggtccctccttcatcctcgcggggactttgtcaccggctcagtgtgtagacctcaccgtcccactcgaatctgtggggctccgacagtgtgggccccgcgaggacccccatcctcctt

SEQ ID NO: 365746 - DNA, 122 bp, Homo sapiens
cccacctcagcaggtacctgcgccgtctgccacgcacacacctgtggatgatgtgctggccgcgcaggtagtccagagccagtgccatctcgcagatgtacagcctcaccgtgtcctcggag

SEQ ID NO: 365747 - DNA, 122 bp, Homo sapiens
ccggcagccccgcagttcccgctgtcagccgcagtcccgggccggggtgagtccccgggacgccgcagttgcgcacacgcccaccgtctcaggcacagggtcactgggacgatcccgggggc

SEQ ID NO: 365748 - DNA, 122 bp, Homo sapiens
ttcccaaggactctccagagacaacacttagggaacacagattccccaggtcaagtcttacgcagggagaggacaggaggatggtagaaggcatatgatacatactccaccctttcctgaga

SEQ ID NO: 365749 - DNA, 122 bp, Homo sapiens
gcggcactgggacccagttaccggggccccgccccctcgcccgggatttgcgcctgaccacgccccctcgctcggggccgcctcacttctcgctgctaccgctctcaaggccctcctgcccc

SEQ ID NO: 365750 - DNA, 122 bp, Homo sapiens
cattatgtgtgtggggggtggagcagccagcagcagtcctctccctcccctgcttcttgtcgctgctcctggggactgtcaggctccaggaccttcttccttcatggaaaggctccttagct

SEQ ID NO: 365751 - DNA, 122 bp, Homo sapiens
cttatggactctgtctggctgacttttctctaatgtttacagttcgtgtagtgtgatagccgagctcattttccgtgtgaagaaaaagaaaaggtggataatggaccgcctccccctccctg

SEQ ID NO: 365752 - DNA, 122 bp, Homo sapiens
gtgactgcggccacgcctgaaaggcgactctcctgtgagtgggccagaaggcgaacatggcggagcggggaggctggcgggaggcgggaggcgggaggcgggaggcagtggcgctggcctgc

SEQ ID NO: 365753 - DNA, 122 bp, Homo sapiens
ctcttctctctttgtaatagaacagtgtagacatttatgaagcttttcctagcttttcaacgtcaacacaattaaagcacaatgcatctgaattgccagccccccaacccagtgcagaacaa

SEQ ID NO: 365754 - DNA, 122 bp, Homo sapiens
aggcaggcatagaaatatattataaacattttcctgagaaaatgatgttccagccaggcacggtggctcaaagtgctgtaatcccagcactttgggaggcttaggcaggtggatcacctgag

SEQ ID NO: 365755 - DNA, 122 bp, Homo sapiens
caccgcacactaaccaccccaacgcctggggggccagcccggcaccgaacccgtctatcacgtcaagcggccaacccctcaacgtgtactcgcagcctggcttcaccgtgagcggcatgctg

SEQ ID NO: 365756 - DNA, 122 bp, Homo sapiens
aaaagtttgtagacagaagaaagctggccagtgactctggaaagagtccaggacagggggcgtttaggagatgagaggctttacaaggagtaagtccacagagtattgccatagggtgtatg

SEQ ID NO: 365757 - DNA, 122 bp, Homo sapiens
gcatgagtaaaagtgtgaggagacaaagcagaggaaggcaagtgctgaaagttatgatcgcgtgcagtgatggccattaagatgatcttcgtacaggaattcatacaggaatttttttaaag

SEQ ID NO: 365758 - DNA, 122 bp, Homo sapiens
tgtgtttgtgggtgagtatgtgcatgtgttgtgtatgcagggggtggggaggggcgagagcggtcaaataggaagtgccttggtatttatgttgaagtgcacactggtttaaattacccact

SEQ ID NO: 365759 - DNA, 122 bp, Homo sapiens
gcagggcttgggacctgcaacctgccatgcccgagaattcgcggtgggctcctgcgccgccggagcctccccgacgattgccgccccctgcttcacggcttcccgtcccatccaccgcccaa

SEQ ID NO: 365760 - DNA, 122 bp, Homo sapiens
atccacagattttgcaaaccccctcatcctgcctggctctagtgggccgggctccacaagcgcagcagccgacccccctcctgaggactgtgtgaccaccattgtctccatgggcttctccc

SEQ ID NO: 365761 - DNA, 122 bp, Homo sapiens
gcaggacgtagagcctggcagggaggccacgttccagtttccgtttctgactcccggccccgacaaaccatcccggggcagggcagtgtctaggaattctaggacttgggacaagaatgcgc

SEQ ID NO: 365762 - DNA, 122 bp, Homo sapiens
caaggcagcaatctgagcccaggacgtgacccgtgtcggtctccgcgctgggtgcccttccggagccggcactggaaggttagcgcctctgaaatcagataaaggacgtcaagccacagctg

SEQ ID NO: 365763 - DNA, 122 bp, Homo sapiens
gctgtgtgtgattcaggtttggtgcatgacacctttcctcttcatggagctgacctaaggcggaatataagggagatgggaggggcagcttgggaaatcaacacctcccaccctcacgacgg

SEQ ID NO: 365764 - DNA, 122 bp, Homo sapiens
ttgtacaatcacggaggagacagctgaaatgttcccttcggggcatttataaaccgaggtcgcttcctgttttcaggaggaaatgctcctggagctggggagggctgtgctgccgggcgggc

SEQ ID NO: 365765 - DNA, 122 bp, Homo sapiens
atagtgagccacgtggcagtcagacggcaacaggtttggccccactttctcagaaagcctcggcttggttttgccgcttaatttttaacttcattttcaagttctcactgttagagtatctc

SEQ ID NO: 365766 - DNA, 122 bp, Homo sapiens
tcacttttccctttaatgaaaatcctcagatctaagtgaaagtaactcaaagactagctgcggagtttcttattggaggcggaggggggcttttggtaattcgagcaaatgtgtttttcagt

SEQ ID NO: 365767 - DNA, 122 bp, Homo sapiens
ggcatgattgattgaaggttggccacatgattgaactcagtcttcagctctcctctgtcccgaggttgggctaatattaactggctcaaagccccatccctgtaatcacatggttggtcttt

SEQ ID NO: 365768 - DNA, 122 bp, Homo sapiens
gggcagcaggagttccaggctgcagtgagctaagaatgcgccactggactccagtatgggcgacagcgtgagaccctgtctcaaacaaaaacaaaagcccgttactccaccaagaaggcgct

SEQ ID NO: 365769 - DNA, 122 bp, Homo sapiens
ctctcgccgcgtccagaacggaacgctgggcttggggtgcggggcggggactccaactcgcgcgctacgctactcgtgtctcctgctcggatagtgactgtagaggtaagggtgggagggtg

SEQ ID NO: 365770 - DNA, 122 bp, Homo sapiens
cacctcgcagccacctgatgttttctggtggtggggaaccctctcgggccccactctgcacgtgtgactgagagggacacctgacaggattgaacgtgtgccagaagatcatcaaacgagat

SEQ ID NO: 365771 - DNA, 122 bp, Homo sapiens
ggtgagcttattaataaatccatgtttatagtgaggtttcaatcagttgtgcgtaagaaacgtttgttcagccttgcatgcagtcagtattcagttcctgtctcaactccctttcctctgcc

SEQ ID NO: 365772 - DNA, 122 bp, Homo sapiens
atctgtgtgtctaaaccctaaaatctgtagaatgtgcatgaaaaaatctaccaccctaagcgtaaggagagctagtacagatgaggatgtcgtggcagaaattagtacaaaaaacattacaa

SEQ ID NO: 365773 - DNA, 122 bp, Homo sapiens
gacattcccgacagtgccccctttggaatacttctttgcccgggacaatgacttacctaacgacttctccccgcagagcacagaatccagtgccgaggctacatgtggaagggaacgaggca

SEQ ID NO: 365774 - DNA, 122 bp, Homo sapiens
tcgtaaaagctagggcggggtgggcaaaggcaccggcacagctgtattttagtagagcttcgccagggccgtaagtgatggtgactttgggttcaagggttttcccaaatcaggttggccag

SEQ ID NO: 365775 - DNA, 122 bp, Homo sapiens
ccagtccccaaactccaccccagaccaattaaatcataatctctaggaaggaggtccaagcgtctgtatgtctttaaaagctccccgagtgattctaatgggctgccagggttgggagtcat

SEQ ID NO: 365776 - DNA, 122 bp, Homo sapiens
tcctatctgggctgcaatcagcacagtgaggagaggagcgacagagcacatgattatgaccggggcttgctgctgagctgcaggggttcagagtactgctacctgtgcaatggcagcttccc

SEQ ID NO: 365777 - DNA, 122 bp, Homo sapiens
ggccttggcttttccatacattgtgtgacccttgccctatgaccctttggctgaccttaccggaagccatgacgacagcagccttttgccattagacgcagggtgatggtgaggattccaag

SEQ ID NO: 365778 - DNA, 122 bp, Homo sapiens
ctgctcctctgcatgttcagtctaggtcccaacgacaaaaactaagggccactgggccaacgccgccggatgtgttgttgagcacatgccacgtgcgttcgtttctactggagcctgaatgt

SEQ ID NO: 365779 - DNA, 122 bp, Homo sapiens
aaggtgccctctccagccgcactgctcctgcgcaggttgggtgaacgctcggcccagcgtcgaggtgccagcctggagttctgggggtcaaattcctcatcgggaatgacctcctcgcagcg

SEQ ID NO: 365780 - DNA, 122 bp, Homo sapiens
aaaaataaaaaagcatctccaacaatgttgcacttgacccaagtgtacaaacttattggtcgctgcaatggaaactcccagtgcactctccacggcctggcagccgccgctgatgggtggag

SEQ ID NO: 365781 - DNA, 122 bp, Homo sapiens
tccacagtcccaacctgagaagaggctgcttaagccatcctctctcgcacagcaaacaggcgacagcgtgagaagcctaactgggcatcacggggaaccaagggcaggcaggaacctcttcc

SEQ ID NO: 365782 - DNA, 122 bp, Homo sapiens
cacccctgctcaggcggcgcgcccccactgccggcctccaggcgcctctcccgagcgcctcgctgtggccaccactccgcaggtgctgagcaaaaggtattcttcctgaatacctgagagtc

SEQ ID NO: 365783 - DNA, 122 bp, Homo sapiens
gggatgtaaccctgtcccttgcatgtgaaaagccaaggcttcggagactcagctcccctccgcccctacctgtcgcctggtcaggccccagaggcccccttccccagctcctgtatgcgctg

SEQ ID NO: 365784 - DNA, 122 bp, Homo sapiens
gcggggagacaggagatgcaccgcgggtgccggggttcggggagcacccgaggaccgcggcgaaaggagaggggtttccgagcccaccttgctcgccagctctctgctccggtcgatccgcg

SEQ ID NO: 365785 - DNA, 122 bp, Homo sapiens
tatgtaagggatccgacgaagtaaaataggcacctgtcactccgtgcaaacaactctttacgaaataattacaggtttgcaaatgatcaagggtgtagaaatccacagatgaagcacagttc

SEQ ID NO: 365786 - DNA, 122 bp, Homo sapiens
gccagaatggcgggctgaggggagaaatgcccgcatgttacaactctgcaggtgtacacacgtggacaccatatgtacccatgaattccgcctttggaagtgaacttgattgcagcctattt

SEQ ID NO: 365787 - DNA, 122 bp, Homo sapiens
tttaccatctaacaatatttctgtaaccctgagcctctagagctgcctcaggtgcactaacgctgtgactaggctgccctgggacaagctaagaggttctgcgggggagggtctgggcccct

SEQ ID NO: 365788 - DNA, 122 bp, Homo sapiens
gatgtttctagatcagctgtgtccacaggggcactggcctcctcgtcacagtcccttccccgggcccgtcactggtgctgggcaccacacttaggcctggccgtcctctgcccaggagaaaa

SEQ ID NO: 365789 - DNA, 122 bp, Homo sapiens
tgcacgaggccttggccaagagcctggccacggcgagcagccaagaacccatggctggcacgggacgccaccgccagagtttgggttcacagtgggttcacggggttcagacgtcagcctgc

SEQ ID NO: 365790 - DNA, 122 bp, Homo sapiens
ccttgatggactcgggtgttaattaacgcgctaatttgagcttcaggagcgggaggcggccggtagcaccgcgagccgcgaggggccagtgacctctagtggacatgaggagatatgcagcg

SEQ ID NO: 365791 - DNA, 122 bp, Homo sapiens
gagggcgcctggttgggcgcccaccatgcccaagggtaggctatgcaactaccaggtctgcggcagtgcctggcatcaggaccagcctcctttgttggctgtgagctggttggtggccctag

SEQ ID NO: 365792 - DNA, 122 bp, Homo sapiens
cagtacgcggacccgcagccccagctcccgaggtggacaattttgctccagagcgagcggcgacaggtagggctacaaacagagggaatgcggagggctggccaaaaaatgaaaaaaataaa

SEQ ID NO: 365793 - DNA, 122 bp, Homo sapiens
gccttggtatcaggtgcctaacccagcaccgggccactggggaaggtggcctcagccacacggggccacgttggcccctctgccagcctcgcaggcgctaagtcaacatcggggttcctgga

SEQ ID NO: 365794 - DNA, 122 bp, Homo sapiens
ccaccttcaggcggggcttgccgctggggtcctcactgtcactctcagccaggctctggtcgggccagccggccggaacgtggttggccacagcgtcccctgaggcacgagagcggtgctca

SEQ ID NO: 365795 - DNA, 122 bp, Homo sapiens
tggcgctcgtcggggaggctcaggcatggtaggctgcaggtcccgagccttgccccacggcggagcaggtaaggcctagcgagacatagagcacagcagctgctggcccaggtgctaagccc

SEQ ID NO: 365796 - DNA, 122 bp, Homo sapiens
aaaacaagggtgacacctagtgggaacatgagtaactacagaagcaggccgtccaggccccgggaagccccggccctgcggcctctttgttcatcttcccaatcattcagactctgtcccag

SEQ ID NO: 365797 - DNA, 122 bp, Homo sapiens
tcccttgcaccagctctccggtgataaaagttctgctttccaggctctaagcggtggccccgggagattcagtctgccctgagtccggcttctcccgctcgcggcgcgggttcaagctccag

SEQ ID NO: 365798 - DNA, 122 bp, Homo sapiens
gggccccgcagggtttttagggttggggtggattggaaattgttcattgcctttcagttccgggacataaagcgcgctggaaggacactgagtcaccaaccaccgccatgggccggaagcca

SEQ ID NO: 365799 - DNA, 122 bp, Homo sapiens
agagagaagtgagcgagggagggccgggaagctttcggcggaggcggtgagctcgggggacggggcagccagctggtggccactaacatagcgccatctgctgggtgccccggccagtataa

SEQ ID NO: 365800 - DNA, 122 bp, Homo sapiens
tgccgtagagcctgggccgcgggcgagtggagcagcaggtcacccagacaaagaggaccacgccagccgtccaggcgacgcgggccagcaccaggaaccaggtgacgctggccacgtggtag

SEQ ID NO: 365801 - DNA, 122 bp, Homo sapiens
tctccccgttaaaagggcacttgggctgaaggatcgctttgagatctgaggaacccgcagcgctttgagggacctgaagctgtttttcttcgttttcctttgggttcagtttgaacgggagg

SEQ ID NO: 365802 - DNA, 122 bp, Homo sapiens
ttcacagagtgatggatgttgcctggtaaaatttcccaacaggtgtccccaaggggatggcgttgatccccttagtctctttctggcatacaaagtatctggtgtacttgcttgtatttgtg

SEQ ID NO: 365803 - DNA, 122 bp, Homo sapiens
gcctggccgcgggccgtgaacaaagcggtgtgcaggggacccaggttcacagcgcaggtgcgcggctccccggcggctctgccgtcctagctcacgcggtcccggggcagctgctttgcgcc

SEQ ID NO: 365804 - DNA, 122 bp, Homo sapiens
gggagccgggctggggctggtgctggtgctccctgcgccgcccccgggctgcgtcacctgcgccccagccaatgaagtccccgggtcgcgatcagcccccactccagttgtgcgccaggtgt

SEQ ID NO: 365805 - DNA, 122 bp, Homo sapiens
tctttcctgttagaaaatacctgaaatctcttccgaatgctgtgcagactccagcctgtacgggtattacaaactgaacccccactgccctccgactggctgcacactgagttagcatctgc

SEQ ID NO: 365806 - DNA, 122 bp, Homo sapiens
gaccccaaggcttgtcttttgtttgggctgggggtgggggacgccagcgcggcgggtgtgcgcccgagtgtcctcggcggcggcgcgcctcgtgtaagcctgcgcaggacgcgcggaacgcg

SEQ ID NO: 365807 - DNA, 122 bp, Homo sapiens
aatagttgtcacttaggcccttttccatggattagtgtttctcaatcatgcatgtgtatccgagtcacctattatggcttgttaaaacagactgctggtgtgtggcagggtacggtgtctcc

SEQ ID NO: 365808 - DNA, 122 bp, Homo sapiens
ggcctgaatcctcttctattccttcctgccgtccattcccgaccccaccttgtccgccggcgcccaatctgggacccaccctcccaccaccgggactactattggctggagagacccaccca

SEQ ID NO: 365809 - DNA, 122 bp, Homo sapiens
gtgggccccatgagtgtgccagtctgatatggtgagataagcctgggacagatgtgctgccgcattcgtgactagaaaagagtccccaggaatttctggctcctgccttcagattgtgaact

SEQ ID NO: 365810 - DNA, 122 bp, Homo sapiens
ctcggcaggagctcgggtcagggccctgaggttgagttcaagtgatttctgcacaggactcgcccttcgggacgggcactgatcgggaactctccggtccagcgaacccaacgctagacttg

SEQ ID NO: 365811 - DNA, 122 bp, Homo sapiens
ctctggaagggtaaggggccatcttccgggttcaccgccgcatccccacccccggcacagcgcctcctggcgactaacatcggtgacttagtgaaaggactaagaaagacccgaggcgaggc

SEQ ID NO: 365812 - DNA, 122 bp, Homo sapiens
ttcgtctttacagaaagcggcatctaaagtgcccttattggggcctggtgcggtggctcacgcctgtaatcccagcactttgggaggccgaggcgggctgataacttgaggtcaggagttcg

SEQ ID NO: 365813 - DNA, 122 bp, Homo sapiens
cgggcgcctgggcggtagagacccggcctgccgaagcgggtggagggagaaggctcaatccgaatcgctggggccccactctggatcaccttcagccgccatcttgtttcttcccgttcaat

SEQ ID NO: 365814 - DNA, 122 bp, Homo sapiens
acagaggagagactgagagcctgttctttgtggctgacccactgaatctggcattgttgccggttgaggcatagaaaaatcgtaggtccaagtctctttgatacaggggacgcatcccagca

SEQ ID NO: 365815 - DNA, 122 bp, Homo sapiens
agaatagagaggagcttttgacaaatcttggacatttatccaggcgtcagtgtctaatggcgattgggccagagatctgtctatgagtgtgtgtgcatgttaatagatacacttagttcaaa

SEQ ID NO: 365816 - DNA, 122 bp, Homo sapiens
aagccctcattttcttgcacatgggcttaaagctgtcctgtcagattctccagctccttccgcaggtgttcagcctctgcttgtagctgctgctccacctcggagggccctgctgggggctc

SEQ ID NO: 365817 - DNA, 122 bp, Homo sapiens
aatatagaatttttttattgagagatggggggagggaatgcaaagtgaaagcgacgggggcgggggggaggtaattttaaggattcccttgaccatcgtaacccgcttgcccttttcctctg

SEQ ID NO: 365818 - DNA, 122 bp, Homo sapiens
atagagccaaaaactatacaaagtaagggaggaatgaaattctatttcagattggaagatcgggtccatgctcataaaacatattagcattgttggccgggcgcggtggctcatgcctgtaa

SEQ ID NO: 365819 - DNA, 122 bp, Homo sapiens
accttgtgatccacctgcctcggcctcccaaagtgttgggattacaggcgtaagccaccacgcctggccattagtagacttctgtatctctatgtgcaagttattttgcctaaacttactgt

SEQ ID NO: 365820 - DNA, 122 bp, Homo sapiens
ccacgtggcagagatgcagaaatgcattcccagggtttggatgaagattctggatgacaccgacagctcgagatggtctctgcagaattctattatcttccttgaagcccaaggagagcatc

SEQ ID NO: 365821 - DNA, 122 bp, Homo sapiens
aggtgcttgtgtttgtcagacaaatacagccaggcctgccaccccttaggctccaaagtccggaggtgcagaaagccaggaccaagagacaggcagctcaccagggtggacaaatcgccaga

SEQ ID NO: 365822 - DNA, 122 bp, Homo sapiens
cacaatggtaatatgttaaccttaaaagaaccacagaattaacatccctggacacttagtcgtccctcaaattatgaaacccactaaaacgcttgaactactttaaagataatattaacagc

SEQ ID NO: 365823 - DNA, 122 bp, Homo sapiens
ccggccgcgccagcgctgcgcccactctgctctcccaaacccagggcgtcatcggctccacgcctgtcccctttcagagccagagacgagccccaagaaatcaggaaataacttcacttgcc

SEQ ID NO: 365824 - DNA, 122 bp, Homo sapiens
tggcctccagctgtaccacagacagggatggacccaccgtggggctggggagggcgctggcggcgaagcgtgccagcaggcccagcccactctcctccaggcccggtgacagggcccgctcc

SEQ ID NO: 365825 - DNA, 122 bp, Homo sapiens
cacagccccaccaccacggagcctgctggtgagcaggactggctgagaaaaccgagactccgaaagcttgcccaacttgctgaagttatgcagcaaggacatggcagagctgggaagcccat

SEQ ID NO: 365826 - DNA, 122 bp, Homo sapiens
ttaaaaaaaaaaacatactttagcttctattgttctacaactagcactagattgcaggcacggatcagtgtgagaaatcaaaatgagcctgctaaaaatcttccttgatggatatttaagtc

SEQ ID NO: 365827 - DNA, 122 bp, Homo sapiens
ccaggagggagctgttcaagggcccggcagacccaggtgctggagtagtaggggcaatgacggtggcaggaaagtcatcagagatagggcctgaggttaaaaagcagtaacacccctagagc

SEQ ID NO: 365828 - DNA, 122 bp, Homo sapiens
agcagctgaacggtgcttcctaaagcgaggaaggggtgtgcaaaatgatttccccctaagcggagacgaagagctggattacagcccccgccccagaaagcccctaagccctccatcccgag

SEQ ID NO: 365829 - DNA, 122 bp, Homo sapiens
agcccctccccaccctctgggaaaagccagtcgccacacacaggcacacgcaggccccggcgccgcgccctaaggagagcagcacccacagccaattgccatggcaaccccggggttcgttc

SEQ ID NO: 365830 - DNA, 122 bp, Homo sapiens
cggatacccctctgggtgtccaggagcggaaggaaggatgcatgcgactgactgcggacgcgttgagagccaggggaggcatgtttacccacagcatctcatgtcaaggctcgccgcgacgc

SEQ ID NO: 365831 - DNA, 122 bp, Homo sapiens
ttattaccacctctctcctctcttccaaaaacctcccaaaaagggcggtggggcggggggcggggcagggagagggagagaaatccagcagacatctagctctgcctttctttcccagccac

SEQ ID NO: 365832 - DNA, 122 bp, Homo sapiens
tggacacagttaatgatgttggtgaggagataagactgagatcactcagaaagctttccacgtttcaggattgcttgtctcagactgggtggagtaggggcatctttgccgcagatggcggg

SEQ ID NO: 365833 - DNA, 122 bp, Homo sapiens
gtctataaatgctctgaaattgtatttttctgtggaaagcataactttcatctgcttgttcgtgctcaaaaaagatcatgaatgaatgattgcatgattttatgccattgtgcttatactaa

SEQ ID NO: 365834 - DNA, 122 bp, Homo sapiens
ctccaagcacagtcttcattatgatctgtgagctgatttacggtcttcttggcaattttacgactgatatctaggtgcatttgctaagaggacagcaatttagaatgatgtttctgtagctt

SEQ ID NO: 365835 - DNA, 122 bp, Homo sapiens
tgcactgcagatgttcgccatgaaaccagtgctcttctattctgaggagttagctcagcccgttagtgtctttgtcttacccatttggatatggtagaattgagcaagaccagagattcaac

SEQ ID NO: 365836 - DNA, 122 bp, Homo sapiens
cttgaccaaataaataaaggccgagagttacgcatgagaaccaacatgggttgtgcttctcggattcaggccaaagttctctgcgccggtgggtggagcttcgttgcacgaaatgaacaccc

SEQ ID NO: 365837 - DNA, 122 bp, Homo sapiens
ctgaaaagagcctcctgtgagcacagggctcgcagtaagtgggggtgacggtggtcgcgccggcagcgccgccttgggcctgcgggaggcgcccgagaggcaggggcgaccacggcggctgc

SEQ ID NO: 365838 - DNA, 122 bp, Homo sapiens
ggcacatgcaggtcaggcttccagagtgcagggcaaggcggaggaggggagagtggatcccgagggacaatagataataaatggctcaaccatcaggtcagtcatgggcacctccatgaaaa

SEQ ID NO: 365839 - DNA, 122 bp, Homo sapiens
ccgtcacacaagaagtcaggcgtctttaggagtggccccgactcccccaaatcccggccacgctctagctcagcgcccctgctcagccccccagcccagcgccccagcctagcgtcccagcc

SEQ ID NO: 365840 - DNA, 122 bp, Homo sapiens
caggacccaagtgcacagcaggcagccctctggggagcagatgggtaggaagacatgtggcggtggggcacagcccctccacagcagcaggtcatacgcctgcctgggccacttctgcccaa

SEQ ID NO: 365841 - DNA, 122 bp, Homo sapiens
tcccttcgcagctgctccacccgggccttggccaggcacaggtaggcctgcaggtggggccgggtcaccgccagccgcagcaggcacagcaccaccagcaaccagaggcgcccagagtcgaa

SEQ ID NO: 365842 - DNA, 122 bp, Homo sapiens
gcatgagccactacacctggctagtctctattattttcaaagacagcagtaggccaggcacggtggcacgcgcctgtaatcccagtactttgggaggctgaggcaggatcacttgagcccag

SEQ ID NO: 365843 - DNA, 122 bp, Homo sapiens
ggctggggtgtccgggtccggggcgccggggggtccggggtgccctgccggaccggcgggcgctcccgggctcgctcaccctgcgtagtctgccaactgagtcccccgatgaacatcttgct

SEQ ID NO: 365844 - DNA, 122 bp, Homo sapiens
tctcctgctcgaaaagagccagcctgctgagcttgctgccagggcccgtcgcactgcctgcgctgtttcccgtcgcactgcctgctctgtgtttcccgttgcacagcctgtgatgtgtgttt

SEQ ID NO: 365845 - DNA, 122 bp, Homo sapiens
ggcgagggagagtcctgggctgcccctgagccccggggccacgggaagaacttgcagcgacgtcatccctgccccggacacagtcccgggcccagggaggacctggaacattcccttcctcc

SEQ ID NO: 365846 - DNA, 122 bp, Homo sapiens
agcagaacccttccgagtctgtgagacacatcaatccaggcccaggagtccagactgtgacggggcacgtgccctctcagccggccggagcgcagccctgaacgctcggctgcctgcggccc

SEQ ID NO: 365847 - DNA, 122 bp, Homo sapiens
gagttcgaatgagacccccatctctacaaaaaataaacaaaattagctgcggtggtgtttcgtgcctgtggtcacagctgctcatgaggctgaattgggaggatcacttgagcccaggaatt

SEQ ID NO: 365848 - DNA, 122 bp, Homo sapiens
aaaaaaggagtcagcaaagggtggtaggattatcattagttcttataggtttgggatagacggtggagttcggagcaattttttgcaggcaggaagtggatcttacaaagtacattctcaag

SEQ ID NO: 365849 - DNA, 122 bp, Homo sapiens
gcagctgattgttttcagcaagaacctgcaaatgcgcggggaaaaacacgagccattgcacggggctggagacgctaaagttataaacaagcaaaaaacaaataaggaaatcaattatccta

SEQ ID NO: 365850 - DNA, 122 bp, Homo sapiens
tctgaagggtcggctattgactgagacatcctctgtcgggttgccccccgtgttatatttcgccatgagggactttacatctgcctttccatcctacaaacatagggaacaaaaaatagctg

SEQ ID NO: 365851 - DNA, 122 bp, Homo sapiens
ctgtttctgtcccttccccggggccctggggcacacaggggtgggatcgggggtccaggccgggaagggctgctcaggctccgggcacgcactcctgggggcggcctgtgcacatccctttt

SEQ ID NO: 365852 - DNA, 122 bp, Homo sapiens
gtggcgttgctgccggtgcactcgtagtctgttttcctttctttgaggctgatcatttcccgaggtgaagctggggcacttgctacataaagaaatcaaaagggggattttctgcatctcat

SEQ ID NO: 365853 - DNA, 122 bp, Homo sapiens
aaacccaggttaatgcaaaaacctcagtgcctttcctagccattagttcacaggcacccccgcctccattccagggttccagtcctcatctctacccggaaccccactccctgtcccggtgc

SEQ ID NO: 365854 - DNA, 122 bp, Homo sapiens
gcagcttaattcattcttatgcagctttgactcttagaaaattctattagaggcttggcgcggtggctcacgcctataatcccagcactttgggaggccgtggcgggtggaccacgaggtca

SEQ ID NO: 365855 - DNA, 122 bp, Homo sapiens
gaggtaagatgaaaaggatggggaggagggaacttgttgggatctgtatctaagggtacccgaccccttggtctcattccactgttccacaggggttggtgacagtgtgtgggagacagggg

SEQ ID NO: 365856 - DNA, 122 bp, Homo sapiens
tgatttatattgtagttaaggcgactggctgcctcatttgcctgggactgaaggcattcccgcatgtagaactttcagtgctaaaaccagaaaagtcctgagcaaaccacgcaatgtttgag

SEQ ID NO: 365857 - DNA, 122 bp, Homo sapiens
aagggctacctctgacccctggagctagctcagcccgtggatggggtgccccagcaatgccgggagctgtcactccaggaagcaacctcaaccgaggcacagggaggtggtggacaaatact

SEQ ID NO: 365858 - DNA, 122 bp, Homo sapiens
tttgaggactaagcctttctaaaataacattgtaataaaccatttttactgagattgcaacgttttgcactgataaacatgagaatctggaggaaagacaattgttttcttgtttaaaatat

SEQ ID NO: 365859 - DNA, 122 bp, Homo sapiens
gagatggtgaaggggcccgcgagcaggcgctttgtctggctgtctgcagagtgaggttcgcgccgcggcggcgggcgcccgtgcggtgcaggatgccggggcgccaggatggccgggggcgc

SEQ ID NO: 365860 - DNA, 122 bp, Homo sapiens
tcgtcactgctgaagcagcatggtgcctgcagcagcaggggctagtgtccaccttggggccgtgctggagacggcaggcctgggactgccttgctggccccagggcacctgggcagagctcc

SEQ ID NO: 365861 - DNA, 122 bp, Homo sapiens
cgtgagtacagtgttacccttaaattcacatatgcgcactgaaccagtcacctcatttttcggtaaacgaaaccacctaaagattaggtggtttcttggtgcaacatcgggtttgagactgc

SEQ ID NO: 365862 - DNA, 122 bp, Homo sapiens
cttatgaactcaaggaataccaaatggaggaagaaataccccatgacagatggtgagtgccgcagctgtgaatgaggaaagcactcccacaacagagaggatggcaggactagctttgcctg

SEQ ID NO: 365863 - DNA, 122 bp, Homo sapiens
tactcgaggaggctgaggcatgagaatcgtttgagcccaggaagtcgaggctgcgatgagcggcgatagcgccactcactccagcctgagcgacagtgagactgtctcaaaaaaaaaaaaaa

SEQ ID NO: 365864 - DNA, 122 bp, Homo sapiens
ataaataaatagggccagactgcactttcttaacagcaacaaaagcccaaagaagcggcacgtgttaggtggttctacgggtaagatggggaaaagaatctcgcttgcctgagcccagaatt

SEQ ID NO: 365865 - DNA, 122 bp, Homo sapiens
attctatgtgtgaacagctagtctgtatcttcacctatgcatatttaaaaatcaaccttacgaaggctcttggccaccataatccttcctaccctgtagcaagagcccagcctcagactatg

SEQ ID NO: 365866 - DNA, 122 bp, Homo sapiens
tgagcagcccttagccccagcccagcagcctgcaagaagccctcccaatccccggcgccacgcccccagccgcggcgccgcgccccaaaggcaccacccccgtccctcttttgcgggcctgc

SEQ ID NO: 365867 - DNA, 122 bp, Homo sapiens
tgtacatcgatgtaatatccttttaggggtcttggaagggagggtaaagctgagatcctgcgtgacaatggcaggtcctgcattatctgtttattatgatagttggtactatagtaattaca

SEQ ID NO: 365868 - DNA, 122 bp, Homo sapiens
gccagcagcatcccgcctcgcccacttcccagtagacacagggacagcggcttccactcccgggacctctggacatcctccatcccggtttggcgggaaactgacccaggagaaagtgtttg

SEQ ID NO: 365869 - DNA, 122 bp, Homo sapiens
tcactgtccccaggacaataattgaagttggggcggagcgcagggggccggggaggagggcggggagggccgtcttctttgcattccaatctccgggatcatgctttttgcaaatagagatt

SEQ ID NO: 365870 - DNA, 122 bp, Homo sapiens
cgcgcagctgctgcacccccaacgccgcccgcgcgggcctgcagcccgtctccccccgaccgcctccccgcggggcccccaaccccggcccccacccccggctctccccgcccccgccccat

SEQ ID NO: 365871 - DNA, 122 bp, Homo sapiens
gggcgcgcggcagtggcctcgagccctgggtcttctccttcctgaatttgcaaagccaggcgaaggccctcgtgctctcccagagagctgcgctccacccgcgggcctgcctgcgcgtgggg

SEQ ID NO: 365872 - DNA, 122 bp, Homo sapiens
acaagaagtcatgtggattccatccatgaacgtgaactttttattgtggtttgtccgttccgagcgctccgcagaacagtcctccctgtaagagcctaaccattgccagggaaacctgccct

SEQ ID NO: 365873 - DNA, 122 bp, Homo sapiens
tggtaaagatgcgctgcactttagcaattttgccaaaatggttctccagaatggtcctgtcgttgaggtagtcagggatgttcttgcactggatggctgtgacttcagagggagacaagccc

SEQ ID NO: 365874 - DNA, 122 bp, Homo sapiens
cgacctcctgagctcaagcgatcctccctcctcagcctcctaagtagctgggattacaggcgcacctgaaaagttaagcaggccaaagcatttgtgtaaatggcccgagcacacattttaag

SEQ ID NO: 365875 - DNA, 122 bp, Homo sapiens
cactgtccaatccgggcagggggcgaggccgggggaccgggcgggcctggggagcaggcacgtgtggagggcggacccgccgggggtcgaggcctgcctctccgagagctcctggcgcggcc

SEQ ID NO: 365876 - DNA, 122 bp, Homo sapiens
tccatggaaagcctttacctgtcttgttcaccactggattcccagtgctgcatctggtgccgtgccacagcatctgacacaaagccagtgctcaataaacatcttaaattaattaacagaat

SEQ ID NO: 365877 - DNA, 122 bp, Homo sapiens
gccggtttcgcgtttggtcggccagggagctgccttcccaccagccggtcgaggaaacaacgggtcgggcttccggggagagggcccacacagtctcctcgccggcaccggcctcctccatt

SEQ ID NO: 365878 - DNA, 122 bp, Homo sapiens
gcgtcgggaggcggggggaggggcggtgaggaccccagtggggtgggggcggggtggagccgagaagagccgggagagtggggaccctctggccactccagaaagacctactggatctcctc

SEQ ID NO: 365879 - DNA, 122 bp, Homo sapiens
aattaaaaattacaaatattaaactcaaagggtttttacaaatgtttttggacacaggtacggaacaggatctgttggcaatgcagcaggtgtgtggtttacaatcaagaggccttggcaga

SEQ ID NO: 365880 - DNA, 122 bp, Homo sapiens
ccctgcggacgcagtctgctgcgggggtttcttggcaaattagccaacacatcagggtctcgagtatgcaaataatggaagactgacatggaagtagtctatgttgtaaccatccttgcgac

SEQ ID NO: 365881 - DNA, 122 bp, Homo sapiens
caacgccccaggtttcaccccggcttgacagacgcaattgaggccatccttgagtccctccgcccccaagtccagtaatgccagcgatggacagaccttctacccaatagcacgcccctttt

SEQ ID NO: 365882 - DNA, 122 bp, Homo sapiens
tcgcgggctggagagcgagggagccgcgggcgagggatcgcaggatgagcgatcggggcccgggcagccggcagcggacgcgccccccgagcccaccggcccgcgccccgcgccccccacgg

SEQ ID NO: 365883 - DNA, 122 bp, Homo sapiens
gggcacctcacggaccgggaggcgctggaggtccggaggctccgcacacagggtggattgcggctcgatgaagcggacacgggtgcccgtggcattggcccagcggatgacacagtcacagc

SEQ ID NO: 365884 - DNA, 122 bp, Homo sapiens
cacctgtgtctgaggcgttattgacgcgttaggagaaaagacactttaggagaagctgcacgtggaaaaatggcaagtgttcacttcaaacgtatattccacagtcagtgagaacagggcag

SEQ ID NO: 365885 - DNA, 122 bp, Homo sapiens
ggaatactgaggattgctgccaaccatccgaagctgggagaggagatggaacaactccctcggagcctccaagaggaaccaaccccactgatgctttgatttgggatttccggcctgaactg

SEQ ID NO: 365886 - DNA, 122 bp, Homo sapiens
aggtccccctgccatgtgcacgctgtgtggtgggagcagcaggggtgagcaccctgggaacgcagatctgtgcagtggctgattgtccccgtgggataaattcctccaaggatgtgcactgt

SEQ ID NO: 365887 - DNA, 122 bp, Homo sapiens
aatttcaaaggctccaccacggtctctcttaaaatgtgagctactcatttgtacttaaaacgtaagtcgatttcataagaaattatttgcctacacattcagtaatctagctacagcatgaa

SEQ ID NO: 365888 - DNA, 122 bp, Homo sapiens
agaaaagagtacgtgtgactttgaacagtccttttaaaatgtgaatgtgcaaacattcaacgcggtctcgttaaagtgtagatttcaattcagtagatgtggggtggggcagagattctcca

SEQ ID NO: 365889 - DNA, 122 bp, Homo sapiens
cagccgggagaaagttatatgtaaaattagggcgaagaaatggatctgggcagaagaccgcgggcaaaggaaagactaagaaatagcattcgtgaactcagtttatgcaaaaatgtcttaca

SEQ ID NO: 365890 - DNA, 122 bp, Homo sapiens
caggaatattttcattggttaaaccaacaccataggtctttttagctcttaagcatattacgattcttgcctttttatggcatttttgttgttgtttgcacccaatgtaataagcttttgag

SEQ ID NO: 365891 - DNA, 122 bp, Homo sapiens
acccgggctgggtgggggaccagtgccagcactgccagggcaggttcaagtaagtgccttcgccggaccccgaacctccagccctgcctcgctcccgtcgcggccttccccgcccccctcgc

SEQ ID NO: 365892 - DNA, 122 bp, Homo sapiens
gagggagagctgtcggtgggggcgaaacactcccaacttaccctctggcggagaattgcgcgggcccgggcgggagagagggagggccggcgagagggcgggacggtctcgtttctctaagt

SEQ ID NO: 365893 - DNA, 122 bp, Homo sapiens
cagtgcactttgctaaaaaatatctgtagaaggtacacattcatctgcaagattgccttacggtcccgtctgcagcagtgatcactaatgaatatgcaatacattttttaaggttcagtagt

SEQ ID NO: 365894 - DNA, 122 bp, Homo sapiens
tacaagccatggtatagaggcttccttatttacctcccttatccttcagctggagctctgcgagccagaggcagcgctggcgttggagagtgatggcggcatggcggtgcggcggcggctgc

SEQ ID NO: 365895 - DNA, 122 bp, Homo sapiens
tgacagcaggaaggaaggggaggagtggttccagaattccttgtggtatgagaggcatgacgtgccacacaacacgtctcctaatgctgggtgactgtgaaaaagcctctaactattttatt

SEQ ID NO: 365896 - DNA, 122 bp, Homo sapiens
gcgtgtttatgattttgtgagtaaatcatctccccctcagcaaattatgaactatttcaccgacgggtgtacaacctctgccgtattgggagcaatatcatcctcaaccccgctggatgtta

SEQ ID NO: 365897 - DNA, 122 bp, Homo sapiens
ggggaggacattagatcaaggtgctttggccacgccgaggcctcctccgcccccgaccgccgttcccacgctccctgtcccatggcgaaggtcgccggtgcccggtattcacctacggcatt

SEQ ID NO: 365898 - DNA, 122 bp, Homo sapiens
ggccacccccactgagaatgtctgctcagaagggtatgagtggaaggcaatgtctgttcccggcagggcttcgggggcagtttctggcttacagaggctgaagaaatttcctggaataatac

SEQ ID NO: 365899 - DNA, 122 bp, Homo sapiens
gtaggaaggaagtgcacacagggtcctctagtaggcgaccaggttttttacctctacctgcgtgacctcaggtaggtactctgctctctgggtggtgggcaacagggaggctcctaagtaag

SEQ ID NO: 365900 - DNA, 122 bp, Homo sapiens
cggcggccgcggccgaggtcgaggtaagagcgcggcgttggtggtttgcattttccgcagcgctcgcgaccgcccgctcggccccggcctcgcctcggagccccgcgagggctgcgcgctcg

SEQ ID NO: 365901 - DNA, 122 bp, Homo sapiens
tgacacctgtgattttccattgtcctcaaaagactccctggcagagaaaggggaggaacccgagtaatctgctgggccgcatccatcccacattactgtctaatgctggttcttagcgacac

SEQ ID NO: 365902 - DNA, 122 bp, Homo sapiens
ggggtggggtgcagtcctggatcagggccggagctgtcacttcttcctcttcttgttgtccgggggcgcctcgttcttcttgcccagaatctttagaaggctcttggacatgtagtagggcc

SEQ ID NO: 365903 - DNA, 122 bp, Homo sapiens
cgtgttccgggcggtgccggcagcaccgccccctccctggccctgcccctagccccgccccgattcaccgctcaggcccaagcccagccccttgggctcgctgccttatgcagtcaccaagg

SEQ ID NO: 365904 - DNA, 122 bp, Homo sapiens
aacgttaccccctgctgaccttgtttcttttcacgaagagccagtacttataagctcccgcggccacgactcagacagcccgggaccatatacgctaattcttctctcttcaaacctccgga

SEQ ID NO: 365905 - DNA, 122 bp, Homo sapiens
acagtttgatgggaaatgggaggggacttctgcatgagagagaggtgaggatttgacatccgtgagaggtaaagtttcattttggtgaagtgaaccttgtgaacatttcaatatacctctct

SEQ ID NO: 365906 - DNA, 122 bp, Homo sapiens
tctgtctcctcacaggtccgaggaggcaaacaaagccttctctgcagctgtgcagatgcacgatgtgctggtgaaagcctgggccatgtggggcgactacctggagaacatctttgtgaagg

SEQ ID NO: 365907 - DNA, 122 bp, Homo sapiens
aataaagaaagcagaagtaatacaatcagagaaaatagcataaataaaaaataaactaaccgagataaatcttggggacctgcagcttgtctgctggtgttttcaaaccaagaggtaatttt

SEQ ID NO: 365908 - DNA, 122 bp, Homo sapiens
ttaaaaacgtaacatggcacatgttggtgctctattaatcgagcctcgggggcccaataacgtgagcatgggctgctgcgtggaagtttgagaccctgttgctgaatcctcgggcctgacgg

SEQ ID NO: 365909 - DNA, 122 bp, Homo sapiens
agttacttcccgtttagcctgcattcctgcaaaatacatgggaggggaagcatcttgtggcgggcactgtcaataatgtttagacgacgactggtgtctctgagcctcgattccacgagact

SEQ ID NO: 365910 - DNA, 122 bp, Homo sapiens
agctgcccatgcgactgctgtccccgcccattcggggagaggggcggggcctgcctactccgggagaggggaggaccggcttttgctttaaaatgttaaactttaaaaaatatatgtgttta

SEQ ID NO: 365911 - DNA, 122 bp, Homo sapiens
gactgggtggccttgtctttctggggaggagggaatgtacattcagggagtagccttttgcggaaaaattctctagggctacagacagtcatgtgtgacttctctctgctgtgaaaactccc

SEQ ID NO: 365912 - DNA, 122 bp, Homo sapiens
tcaactgcacaacccctactacgccccaattcagcaagaagcagttagagcagtcgtcggcgaacctccccaacagcacttgggttttcctgatgagagggcggactgagagacaggactag

SEQ ID NO: 365913 - DNA, 122 bp, Homo sapiens
ctttgtattatgctattcaggaggttgacaaacagccttttcgggaatgggactcgaactcgtaagccacgtctgttcctccatttcccgcctcagctggatgacggagagggatctccggg

SEQ ID NO: 365914 - DNA, 122 bp, Homo sapiens
gagccgccaagccagtgtcaccgggccatagtgagcggccaagccttggtctgccagagccggccgcaccagaaggatttctgggtccccagtcctggaggagcacacggtttacaccaggc

SEQ ID NO: 365915 - DNA, 122 bp, Homo sapiens
gaaaagaccacgtgtggagtgctgcttccaacttccttgcaaattagcacagcgttttaccgagtaccaccgggagagctgtcatcaaggacaacttatcactttgttttgaccagggaaaa

SEQ ID NO: 365916 - DNA, 122 bp, Homo sapiens
tcaccagagcccagggaggttgaggctgcagtgaactgtgattgcaccactgcactccagcggggcaatgggagtgagaatctgtctcaaaagtaataattatatatatatatatttatata

SEQ ID NO: 365917 - DNA, 122 bp, Homo sapiens
ggagccaatcagagcccaagtcgagggctgcgctttgcgagcgccagccaatcggtgcggcggcgggcccatcctgatttgcatgtccgacgacccctcaaccaatggtaatgtgactggcg

SEQ ID NO: 365918 - DNA, 122 bp, Homo sapiens
cagaagatcaacttgggctgaggtcccctgtctcccaccctgcccctctccacccccactcgcctttctcctggaagaggtcacagcgcccagaatgccacagccttgagtggggcgagtgt

SEQ ID NO: 365919 - DNA, 122 bp, Homo sapiens
caggccgagggcacctgctcctctgtctgccctcctggaaccacgcgtcgggtcacaggccgctgggcagaggtctccgtgggcccccagccaccctaccctgtccgacctggggctacctg

SEQ ID NO: 365920 - DNA, 122 bp, Homo sapiens
ccttgtgggtgtgaggaggctcctggcgcgggtgcgaggacatcgggggaaggcgtctgccgcctcgtggggacttggagcgtggggtgcatttccatgtagacactgtaggtggcgccgga

SEQ ID NO: 365921 - DNA, 122 bp, Homo sapiens
aatgagctcatggaaatgtactgctggaactttcaatttctgtaaacacctcctagtcttcggaagggagcagttagagggcagccttcctgccaaggcaactatttggagttctggaagaa

SEQ ID NO: 365922 - DNA, 122 bp, Homo sapiens
ggaacaatagaaaacacagagagcgtaggaagaggaacagagaaggagaaaaacagcagacgcttcagaggacccaggggaagccttacaaatggctccaccagagcagaaggaatctcaaa

SEQ ID NO: 365923 - DNA, 122 bp, Homo sapiens
tttcagtgataaaaacttcttataagttcagacacctcaaacaatatcctttgtgttcaacgcttagaacctggtatgggaaaaaggggaagttataaagatttcagatgaaatcctgactt

SEQ ID NO: 365924 - DNA, 122 bp, Homo sapiens
tcctctggccaggacctacgagcagggggacgccagtacaaattactggagccagccgtccggaaggcgcctatgcacacgtgttgtacagcaatgcgaacttgccctggttggggagaagt

SEQ ID NO: 365925 - DNA, 122 bp, Homo sapiens
cctctggagtgtcctgaaaaccctcccttgtgggagtctctgggctgcctgttggtgggacgatttctcaggagcacgacttccggcctgaaaaggaagtctcctcctttttctcccaaacc

SEQ ID NO: 365926 - DNA, 122 bp, Homo sapiens
cgtgctctcttcccagcgccgcttccgcatctcccacttgaagagcagggaagcactcgtcgcatctcgccagggccacgacgatttgctcaccgtgaaaggactgattgactgtgtgaata

SEQ ID NO: 365927 - DNA, 122 bp, Homo sapiens
aaagccaaacaggagcggtaagtcttcaggggcagccaactttaacagttcttccctccccggtccccagacaaaaataaaaaccattattaagcctttataccgttcttcaaatttatcac

SEQ ID NO: 365928 - DNA, 122 bp, Homo sapiens
ttagtagtggggccactttgacaactgggcattcaattcctagtttaggtctttctaccacgttatacctgaggtgaagctaagtatctggtttatacttttatatctctaaaggagaaaaa

SEQ ID NO: 365929 - DNA, 122 bp, Homo sapiens
cttacacaggccccaaggacggctcacgctccagccacatgaggacacgtgaggaggcaccgtcgatgagccaggaggggactcgccagacaccagacgtcaaccctgccagggcggtgacc

SEQ ID NO: 365930 - DNA, 122 bp, Homo sapiens
gtataacaactgcacctatgggagaggcacttgggttgctaaaagagtaatgagggtaatcgcttggagatcaaggtaaaatgcagattctatttcagtagatttgaggtggagcccagaat

SEQ ID NO: 365931 - DNA, 122 bp, Homo sapiens
actataaacagcccgtggtgctgagagaggacaactgccgaaggcgccggaggatgaagccgcgcagtgctgcggccagcctgtcctccatggagctcatccccatcgagttcgtgctgccc

SEQ ID NO: 365932 - DNA, 122 bp, Homo sapiens
gacaatttattttcctgcagcagcggcagcagggacggttgctgcaggttcggggtcggccggcctgcgcgtgggcttgcgaggacgctgttcgtcccctgcgctggggtgtccgacagcga

SEQ ID NO: 365933 - DNA, 122 bp, Homo sapiens
tcactcagtaggagcaagctcggagtgggcgggttcgagttaactcagtaggagcaagctcggaaaaggcaaagctctgacatttgctttgcttagacagcgagatcttgtcgccccagacc

SEQ ID NO: 365934 - DNA, 122 bp, Homo sapiens
tcctgggggaaggagagtaagagtgcggaggacgtgtgcaagaagctcccctcgggatggcgcccacgcacactccgaggcacaagaaactccccctcgggatggcgcccacgcacgctccg

SEQ ID NO: 365935 - DNA, 122 bp, Homo sapiens
accccggcccttgctcctgcgacattgtggggtcagccgaggaatcaaccctcattctgccgcgctgcacccccgcttccgggttccgcgactgcgcgcatgcgctgcagggccctgcgcgg

SEQ ID NO: 365936 - DNA, 122 bp, Homo sapiens
ggctcttaatgctttttttttttttttttttttttttttataacatgaagttgtcagggacgctcctatgagaactgtttggaattgctgcacttctctggctaggagggaagtgagtaaat

SEQ ID NO: 365937 - DNA, 122 bp, Homo sapiens
atcacctgggaggggaccaacggggagttcaaaatgacggaccccgatgaggtggccaggcgctggggcgagcggaaaagcaagcccaacatgaattacgacaagctgagccgggccctccg

SEQ ID NO: 365938 - DNA, 122 bp, Homo sapiens
atggtttgtcaacccccgggttaagggaagggagggaagttaacccagtcttgcgaaggacggaaagggcctggtgactccagtggcagagtggaaggaggaacacaactttgagaggcctt

SEQ ID NO: 365939 - DNA, 122 bp, Homo sapiens
cagagcagaaatggtgactcgcggccacacccggggctcttagtcttggaggcctgtccccgccccatctgctgctgcccacagggaaccctcctagagccgtcacggggcataaggcccag

SEQ ID NO: 365940 - DNA, 122 bp, Homo sapiens
tagcgactgagcgcgtgcagtgggcgtgcttttctccagggagcgtcgcaaaggaggcgccggagtagggggacgcaattacacagtgaaacttggtgttcccggctagtcattcaaatcga

SEQ ID NO: 365941 - DNA, 122 bp, Homo sapiens
cccactaggccagcccgagcgcgtctgccacgccctgctgcattccgcggcgagagcgcgcgataggattggctctcaaggccccgccccaacaggtcgccgctcagggtgacccggaagca

SEQ ID NO: 365942 - DNA, 122 bp, Homo sapiens
ggcctttgggagcccccgggtcttgctgggctgtgggagaggtagctgtggtctctataccgtcggcgggataagtcattctcttaatcagttttcttgcttctcgatggtggtcccagggt

SEQ ID NO: 365943 - DNA, 122 bp, Homo sapiens
gttttcaaacactctttttgtagtacttccaagtgcatacttaaagtgctttgaagcctacgggagacaatgaaatatcttcatgtaaaaactagacaggatcattctcagaaaccacgttg

SEQ ID NO: 365944 - DNA, 122 bp, Homo sapiens
cctgtgagtcagactgtcattggccttcatctctgtcgtattccttttctcacttaagcccgcaacagccttagccctttctggcatttccttttctcagccgtcactcccccctttccctt

SEQ ID NO: 365945 - DNA, 122 bp, Homo sapiens
cgtggccgcggagcccaagcagtcaggctccttccgctacttgcagggcatgctagaggccggcgagggcggtaagacgcctgccacctgtccccatctgccttcccactccctgcagtgcc

SEQ ID NO: 365946 - DNA, 122 bp, Homo sapiens
atacagtgtaagtactcagcaaatgatagttattttcacggtaactaaaattgaaacttacgggagaggcctagtctacagataaaggttggaataattagttctgaaatctttcaccacct

SEQ ID NO: 365947 - DNA, 122 bp, Homo sapiens
ctgaagcatgcttctttatcctctgcacttcgcaggtagtgttggtgtaaaaggcaaacccgtgtcatgagggatggtcatcatcttgtgtgatccttggagatggcaggaagccctggaca

SEQ ID NO: 365948 - DNA, 122 bp, Homo sapiens
atttatttgaacactcagcagtctcctgtagctgctacactctatgtgcgcaatcgagttcgggaagccatcagagtttccaaaatacctgatgcaaaaagtccacttccggtttttgcata

SEQ ID NO: 365949 - DNA, 122 bp, Homo sapiens
ccaggagacatgtacaagaatgtttatagcagcaccattcataatagaaatcactgacaacggcccaaataccaagagtaaaatggattttaaaaactatagtatattacacatgaatacta

SEQ ID NO: 365950 - DNA, 122 bp, Homo sapiens
aattaaaatccactggcctttctttgccattgactgaagaacacaggcccctcagaggcccgtctgcaatgttaatctaagcacatgggcgatgtgggacatactcatgactaatcctcctc

SEQ ID NO: 365951 - DNA, 122 bp, Homo sapiens
gcatgagccactgcaccgtgcctggcctggaatgctaatcttttgagaagagatgaccctcggttgctgtgaaaagtgacatactagtttccacaggaggaaatggggaggatgttgggggg

SEQ ID NO: 365952 - DNA, 122 bp, Homo sapiens
atgtcattttagaaacaatgaaattaatcagagctgtactttgtaggaggcaaagagagtcgtgggagtatttcagctagtgacttgaaaatacatttttctggcaaatttttctttttata

SEQ ID NO: 365953 - DNA, 122 bp, Homo sapiens
tggcgggcggcggggcggggctggggccgggttgggggcgcggcaccagcaccagctgcccgcgccctcccctgcccgcagaggtgagcttcctcaattgctcgctggacaacggcggctgc

SEQ ID NO: 365954 - DNA, 122 bp, Homo sapiens
gtaggagcccaggagttgaatgaacgtttctttgctcacctgccgctcctctccgtcccccggccttcctctgggccgccccccatctgtgctttcaaagagggcccctagagctcgagggg

SEQ ID NO: 365955 - DNA, 122 bp, Homo sapiens
cctgagagttttctaagcaggaaatttacatgaggaagacaacaatcagtgagataaacacgatattctccacaggcagtagagctacattctgaaatatttccatttactttggagtctgt

SEQ ID NO: 365956 - DNA, 122 bp, Homo sapiens
ctcaacctgagcccggtgggatgtgtggtccgcaggtggggttcttcttgctactgcaagcgtatttggccgtgaaagcgaaatgtgcacgggtaggaaatggcctcagagcaaggcccaca

SEQ ID NO: 365957 - DNA, 122 bp, Homo sapiens
gcgcccgccgcggcgcccgcagccgctcgggccattgttccgcggctgccagggctggagcgggctgcccctgggcttctgcgcctccgtcgttcctctctgaagacctggcctccgcctcg

SEQ ID NO: 365958 - DNA, 122 bp, Homo sapiens
cctggagggcgacttttttgggaatcggacccaaggaggatgccttccctgaagccctgccggggtgatggtggtccaggcaggaaagttccttctgctcaatgcagggcagcacccagctg

SEQ ID NO: 365959 - DNA, 122 bp, Homo sapiens
tcctgatcagtagcggaagggatgccctggggagggagggctgagctcccagggcagagacgcacactcgggacttctaggtgctgcgaggatgaggtcagttacacctgcaggtacatggg

SEQ ID NO: 365960 - DNA, 122 bp, Homo sapiens
ggtattgttaatttgacaagaaccagagtgaaggactttaaatgtcatggtaagaaatttcgatttttatagtaagttgctgttaaaggtatttctggaagcttttattgttaaaataatat

SEQ ID NO: 365961 - DNA, 122 bp, Homo sapiens
gctccctgcccagcccagccagcaagcctggagaagcacttgctagagctaaggaagcctcggagctggacgggtgccccccacccctcatcataacctgaagaacatggaggcccgggagg

SEQ ID NO: 365962 - DNA, 122 bp, Homo sapiens
cccacccacagggctgttgatgctagctgggggagggcactggcccatcgtggcagaggacgtggtcatctgggaccactgcttgtatagctcacttatgtcctctggtcctgttcaggctc

SEQ ID NO: 365963 - DNA, 122 bp, Homo sapiens
gagggcggatggctgtagttttctggaggtggagaaagaagtgggacattttggaggtgtcgatcaacggcttaaaaaaccactctgacagaaaacgtttgtaaaacccgacattcgttgta

SEQ ID NO: 365964 - DNA, 122 bp, Homo sapiens
ttcacataactgattaatttgcggtttcctgtttagccatccattgaaatgactcaagtccgtgataggaaataagctcaacatttttagtttcatgttgtggagtaacaaagatatcacaa

SEQ ID NO: 365965 - DNA, 122 bp, Homo sapiens
gcctcgggctccgcacacccttgggtgattacccggcccccacctccctccaagcgacctcggctccaggaaaaggctttaatctgctattaagcgttttccaaagtttctttccaaaggag

SEQ ID NO: 365966 - DNA, 122 bp, Homo sapiens
ttttcagggattagttctgacttcatgattaatcagcactttctggtttccttagggtgacgtcatctctgctcagagataaaacaggctcctttttgagggttgcgggcagcctgggggcc

SEQ ID NO: 365967 - DNA, 122 bp, Homo sapiens
cgacctgcctttcagccctgaggccctggtggaccgcaaggaattctgggccgtgtgccgcgtgcccgggcccctgcacagcggcgacatcctgggcctggtggtcaacgccgacggcgagc

SEQ ID NO: 365968 - DNA, 122 bp, Homo sapiens
ggcagccgcgcattctggaagaagttggttcttgtctcgaatacttttcctcccgtgccccgccccttgaatcagaggcggctgtctcgtgcggctagagcagggccagtagagttcggggc

SEQ ID NO: 365969 - DNA, 122 bp, Homo sapiens
caggcaacgtcgtctcagacaggatacgagactgctagggaacctgggctgcccctgattcgaactcctctctttgggaggctggtagagccaccccgaatccccgaaacgtctacttccca

SEQ ID NO: 365970 - DNA, 122 bp, Homo sapiens
gggatataatctcctggtgcaccatttcctaagcccgtcggaaaagcgcagtattcgggtcggaatggcccgattttccaggtgccatctgtcacccttttccttgacctggaaagggaact

SEQ ID NO: 365971 - DNA, 122 bp, Homo sapiens
gttttaaatattttgccagatttcttgtatttattccacatcattatgcctataatgtgccgctttgtgattgggcatttgcctacttttctttcataattagtgatatatgcgatgtaaaa

SEQ ID NO: 365972 - DNA, 122 bp, Homo sapiens
ctgctgggcggtgccttatctccccaccccctaccttctacgaagtccttcccccaccagcgcccatctttgtggtcccatcactagctgtgccctgtctcgccctcatagaccccctctag

SEQ ID NO: 365973 - DNA, 122 bp, Homo sapiens
acctgtgctccttgacagccgcagacacggcggctcagatcacccagctcaagtgggaggcggcccggggggcggaggttcatcctcacagggataggcacctattagatgtggtgtggttt

SEQ ID NO: 365974 - DNA, 122 bp, Homo sapiens
cagaccttcgcagtgagtgttacagctcttaaaggtggcgcggtcggagttcgttcctcccgcaggattcgtggtctcgctgacttctggagtgaagccgcagaccttcgcggtgagtgtta

SEQ ID NO: 365975 - DNA, 122 bp, Homo sapiens
gaagacccactgggcaccatgagcgtttcctccctaagcattaacggcagcgtagacccccgtccagccgtccctgaagtgtccggcatctccttcgagggaggctgtagggtcctctcgtg

SEQ ID NO: 365976 - DNA, 122 bp, Homo sapiens
gacccctttcaccctggtccctcgggtagcgcctccactatctcagccctaagggacccccgaaggtagcagctccaatcccagtacaggaaggaaaaggggaagtgggatgatagggggtt

SEQ ID NO: 365977 - DNA, 122 bp, Homo sapiens
acagctacaatgaggatggtcactgcgaccaccaacagcattgcctgaccagccacagagcggccctcagggccgaggtggccgccagccactgccagcaccatgcctcctcccaggagcag

SEQ ID NO: 365978 - DNA, 122 bp, Homo sapiens
taattaagtatacagagaaaaacatgaaagtcttttctgttacaaattccctctgtccaacgattcaggtccagttcccttggcttggtaggctctgcctgttccacatctatgcattcccc

SEQ ID NO: 365979 - DNA, 122 bp, Homo sapiens
ggcattaatcttcacttgttaagagatagtctgtcagcctttaccaggctctcccactcccgacgtgcaaggccctcccccagcgcgcggccacccccaagctggtcctcgcaaaggcgcgc

SEQ ID NO: 365980 - DNA, 122 bp, Homo sapiens
acaaagtgctatgaagtttgaggctaccaggatggggcgccaagccaaggttcctccggacgcgcgaggctggtgctccaggcgggctggcgggaagagggggcaggaagggggccggggcg

SEQ ID NO: 365981 - DNA, 122 bp, Homo sapiens
ccacccgtccataacatttcacctcctctgggaatctaccatgattaatgccatgaacaacgtaaatcttctgcagaacccccaggcttttcttctttttcaggactctatcaccagtcata

SEQ ID NO: 365982 - DNA, 122 bp, Homo sapiens
gatatctgcacccctctgcggttggcaccttctggtctctctctgcggagccccagcctgcgagccacttctacaagtatatccctttggagttgtcagaagtggaggcagctgcccagtcg

SEQ ID NO: 365983 - DNA, 122 bp, Homo sapiens
cccaaattccagtggagaaggagtcaattctgtctcatcctccattaagagaggcctgtccgtggattctgcccaggaagtgaaacgctttaggacggccaccggagccatcagtgcagtaa

SEQ ID NO: 365984 - DNA, 122 bp, Homo sapiens
gggccacccgggaagggacggcagcgcggtccctctaggctggcagggcgaaggtgggaacggagaaccacgttcaacgtatgtacaagcggacgcttggaaagaagttagacctggctcaa

SEQ ID NO: 365985 - DNA, 122 bp, Homo sapiens
caggtcgcccgaggcccctcccccacctcctctccagtccagggtccgaggacgggtctccggccatccccgcctcaggggtcagcacagaagctccagccagagcctggtccctgccctct

SEQ ID NO: 365986 - DNA, 122 bp, Homo sapiens
ctatgagaaaagtaagagctctgggtccaaatgtttaaaacatggctcttctgtgaaccacggcaaatctaaactggattatgccttatgctggagtcagaacttacttggtcccttgttct

SEQ ID NO: 365987 - DNA, 122 bp, Homo sapiens
ctgcggtgggcggcgtgtctgtggcgcacccctctctcctgcacacacggctcttgttcgcgtgcgtacccatgagtgtgcttccctatatatttctgcatgtatacatgcgtacatatttc

SEQ ID NO: 365988 - DNA, 122 bp, Homo sapiens
tttaagcagactttcttcaaaaaagataaatggccaatgaacacatgaaaagatgctcaacgggatagtcaccaaggcaatgcaaatcaaaaccatgagacaccggctcgggcaacatagtg

SEQ ID NO: 365989 - DNA, 122 bp, Homo sapiens
ccgctgcttcgggcagcagaccaacctggaccggcacctcaagaagcacgagcacgagaacgcaccaggtgggccacgcggggtggggcagcccccagagcacccacacgggcaggccccac

SEQ ID NO: 365990 - DNA, 122 bp, Homo sapiens
catggtcggtcctggctagcatcgagtgtttgcctgtgccgggcgccgttctgaaccattcgctctctgcacgtcgcttgtgtccctttcgtctctgcccggagtgaccaggcctgggtgtc

SEQ ID NO: 365991 - DNA, 122 bp, Homo sapiens
gacagtagttggaggtctggctggggaccttgttaacacggtcatgcagctgaggaccaccgcatgggccccttggcagggatcacaggagtcacagccagaccacggggcccacagagccc

SEQ ID NO: 365992 - DNA, 122 bp, Homo sapiens
tgggttcgctcccaacccaagggctggctggaaaggagctgtcctcctcctcgcctcactcgaggacggcgatagcaagtcaccctgcccaaccaggaccgacccccgcgtgggatacgggg

SEQ ID NO: 365993 - DNA, 122 bp, Homo sapiens
agggatatcagttttatctgtgtgtgtttttgttattctcttttataaagatttgggatacgtggcctataaaaagaaaaaaaaatcaagataaagcctaaaaagtaggcattttggctcct

SEQ ID NO: 365994 - DNA, 122 bp, Homo sapiens
cggggagacgcgctggaaaggggctggaattagcactgtcctgccgaaggcgcacctggccgctcgccctcaggaagaacttaattatggatggcgttgggtctccgcttagaacgggcggg

SEQ ID NO: 365995 - DNA, 122 bp, Homo sapiens
ttttgccagagaactccagaaaccagtcaggctctcagtcagccttgtggccctgtcaaccgcctcatttttaacccagtcctctgtgtagtttcagaccagacctgaatagtctcctatgc

SEQ ID NO: 365996 - DNA, 122 bp, Homo sapiens
actcatcgaacgcagccaatgggtgatacgacggcagcgcggcgggaggttcgattgacccggtcttggcgggtcggtgagtcttggcggctgttaacgcgcgctttgggaacaggaaggtt

SEQ ID NO: 365997 - DNA, 122 bp, Homo sapiens
ccctgttctcgcctgccaccctccacatgtgacccggggcctggggcttgcctctgtgggcgcctcagtgcgagtttgcgtatgtcgtgcgtgcttgcgcgcgacgccccttcgcctgcgct

SEQ ID NO: 365998 - DNA, 122 bp, Homo sapiens
atctcaaaaaaaaaaaaaaaagagatacagaagcctgcaacaaacagcagccactggacacgtctaaggtgatgtaaacatggaaatgtataataatggtaagagattataactcattaaat

SEQ ID NO: 365999 - DNA, 122 bp, Homo sapiens
cggggacagcgggaactggagttcagcatggctgtgggcaacctcatctctgagcttgtgcggagcatgggctgggcccggaacctcagcgaacagggcatgtcacctccccggccaacccg

SEQ ID NO: 366000 - DNA, 122 bp, Homo sapiens
tatcttctaatgcaatcctctcattccgcagatgcattaactgaggcccagagaggtgaccggattgtccagtcatatgttgaatctgtagcaggatcaagtccagactgtgtcctccccac

SEQ ID NO: 366001 - DNA, 122 bp, Homo sapiens
ttcaggcccctcggacacacagcaattacagatgcacagacacacccagcatttcacactcgcaccacctcagtgaccacagccacacaaacactcccagtgacacagacacaaattcacca

SEQ ID NO: 366002 - DNA, 122 bp, Homo sapiens
cggggaggcccacctcgggactgggatcccactggccgaccccctcgtggaagccgcggccggccacactcacctcggggaagcagtccttggcgaagacatggagcagcgcagtttttcca

SEQ ID NO: 366003 - DNA, 122 bp, Homo sapiens
cctccctaggaattcatcttgtagatagcacacagacacataagggcatacttactgcatcgttgtaaaagctaatatcctaaatgttcagcattaggggcttgagtaaatatatattgtta

SEQ ID NO: 366004 - DNA, 122 bp, Homo sapiens
ctcccagttctgcctgttgtaggtgttggaacccagagaggtcgccatcttgagagcgtccggaggtagctgtagcttccgaattgggagagaggaccgccacaatcccgtcaagccccgag

SEQ ID NO: 366005 - DNA, 122 bp, Homo sapiens
ggccagcgctgatagggagttatgggggtgcagaggcagagttgagcagggctaggcagccggtgggtctgctaccagcaaggcacagcccacttctcaggctgcgcatgtgggagggtttg

SEQ ID NO: 366006 - DNA, 122 bp, Homo sapiens
tagcccaggacagtacgttctcatgcacgccgtagacgggttcatagaaacggcaacacacgtcataggttcttggaaatggcaggcttgggtgaaatggcagttaatgaaaccagttccac

SEQ ID NO: 366007 - DNA, 122 bp, Homo sapiens
acagagtggggcaaggccagaggtgaaataccactactctgattgtttattcactgaccccgtgaggtggccccaaggggctcttgcttctggcgccaagtgcccggccacatgcacatgcc

SEQ ID NO: 366008 - DNA, 122 bp, Homo sapiens
cagaaagaaggtgtgtctcggcagggtgtggccggctcccgggacgctagacaggagccacggggccccttcctggggaggaaggtgcagccatgcaaagtgagtccaggggacggcgaggg

SEQ ID NO: 366009 - DNA, 122 bp, Homo sapiens
atgggggtggggtatcacttgcagctggaaggcaggttcattttaaggtctcgcgggcttcggaggcccctccctcactgagaaaccggcttttgtcgttcttctgaagccagagctagtct

SEQ ID NO: 366010 - DNA, 122 bp, Homo sapiens
gggtatcccctggatgggggggcatctctagggcgccgccccgctggcgtgagctggggacgttgcgggcacacgacggggcgggtgcgggatcttggggaggggggctcccgagatagtgg

SEQ ID NO: 366011 - DNA, 122 bp, Homo sapiens
tgcaactcaggggcaggcgcctggcagccatcggtcagcaccgtgtggagctacatgggacgcccagaagaccgcctctgcctcctctagtggggctcagctcccaaaccaagcctggcctc

SEQ ID NO: 366012 - DNA, 122 bp, Homo sapiens
agtctaatggtaattagggagagatgaatttatttgtaggagttttccccaaattcaaagcgtcttagtgacctttgataacttcctggaaaaagtaggaagcatggagagaaattccaggt

SEQ ID NO: 366013 - DNA, 122 bp, Homo sapiens
ttggcccagctgtgctgtgagtgggcagctgggctggcccctcctctggtgctgccaacccgctgccaggcagaggggaggcccagaggagagggaagctgggcaaaggggatggaaggcgt

SEQ ID NO: 366014 - DNA, 122 bp, Homo sapiens
ggtaggggaatctgctgcaggtggcgattgtgcccgcccaagcgagggatttctgtctagcgtgcgcgcccacagtggccagcccctccgctccagggggctccctctcttggtctcagagg

SEQ ID NO: 366015 - DNA, 122 bp, Homo sapiens
taaatagtaagagggctttgcaccaaggtctagagctggggtagggaggggaccctagaacgaccaagcaacaagagaaggccatggcaagaggggctttcctttgactagtcattctcatc

SEQ ID NO: 366016 - DNA, 122 bp, Homo sapiens
taacacaatctgactgggagccttataagaagcggaaatttaggcacatggagaaatcaacgagggatgtgagcccacagagaaaagaccatgtaaggccacagagagaaggtgactatctg

SEQ ID NO: 366017 - DNA, 122 bp, Homo sapiens
tttagcagcctcatcttgctagaatatggaagataatgtcacagggtgtgaaccgagggtcgcagtacagaaaagatcctaggaaaaatcggggaggaatatcaaccccgctccacccctgg

SEQ ID NO: 366018 - DNA, 122 bp, Homo sapiens
cgataaatcaaaaaggagcgcctggctaaatgaggcttaatttaaattcgtatctggagccggtagaagagcctcattgtgccttccagtagcatccacaacagcaaggcctaggccagttt

SEQ ID NO: 366019 - DNA, 122 bp, Homo sapiens
ccctctacccgcagcccagctactgagtttacaatcccctgggctttgggctccaaggtgcgggttcctgccccagtagtggctcggtggacgccccaacttgccgcgcaggcgcgctcggg

SEQ ID NO: 366020 - DNA, 122 bp, Homo sapiens
ctgcttggagagcagctccgctgtgccagccgccgccaggagactggtattcaacctccccgccccccgccacggttaaagtttgctccacattcgcagctcccaccccacccccatctccg

SEQ ID NO: 366021 - DNA, 122 bp, Homo sapiens
gttatgcttttcattaaatggaatagacccagtctggctcctaagcaaatcagccaatgacgttttaggtttctgaatctgtggagttccctctctaacttaaacatagagatagccacctg

SEQ ID NO: 366022 - DNA, 122 bp, Homo sapiens
ttacttgtgttactaaactttacttctttgaatacaactcgttgttgaggtttggccacacggggccctgagcatataagtgggttcccctaggggaagcatggagggtggtagggtaatgg

SEQ ID NO: 366023 - DNA, 122 bp, Homo sapiens
atgacagatgcatttccagcaaatgagaggtggtgacaaattacatcacctcaaaagccccgacttatgccagcatcctctcccttccctctctgccacagggcttacttccaagtggcctt

SEQ ID NO: 366024 - DNA, 122 bp, Homo sapiens
tttattgttttgagacggagtcttgctctgtccccaggctgccgtgcagtggcacaatctcggttcactgcaacctccacctcccaggtttaaacaattctcattcctgagcctccccagta

SEQ ID NO: 366025 - DNA, 122 bp, Homo sapiens
atttcccagaggtcttcgcctaagagggaaacaaggcctggagtgaacccgccgcgggctcgtgtggccagggccgctcttcagccaaccactcctcatggccaggcaggcccttgcctacg

SEQ ID NO: 366026 - DNA, 122 bp, Homo sapiens
ggagttgctgcaatttctgattttccattcaataaaatatacaaatcctaatattttggccggcaaggtgactcacacctgtaatctcagcactttaggaggccgaggtgggcggatcacca

SEQ ID NO: 366027 - DNA, 122 bp, Homo sapiens
taagcccctcactgcccagggccagtggcgccgctggccagccgctccgagtgcgaggcccgcagaacctgtgcccacccgcccacccagaattcgcgctggcccgcgagccccgagcgcag

SEQ ID NO: 366028 - DNA, 122 bp, Homo sapiens
agtcgcagagccgccagagtgagtcaggcacctccactgggattacagatcccagagcctcgaggagctggaagacatgtccccttctttcctctgcaccccagcccgcagccagcccccca

SEQ ID NO: 366029 - DNA, 122 bp, Homo sapiens
gatctcttgaaagattttaagcaggaggtgggtgtggtctgatttgttttttaaacaaatcgctttgacagcattgtaaaaaatagttgtgagaaggatgaaattgatccagttgctaaagc

SEQ ID NO: 366030 - DNA, 122 bp, Homo sapiens
tggaaaggtaagcaggcgaaaggagttccttggggtgcttagccagaaatctcgctttcacgcacttcggtgtgcgggttgtgtgtgtgactatgtacgcgcgcgcgacttctcagtgcaat

SEQ ID NO: 366031 - DNA, 122 bp, Homo sapiens
tggaatcgccaaatacggtctccacatagttgttcttgactatcccatgtcagagtagagcgggatgactcaattttgtctagagtttaggctgagccactaatagaatccaacacaggcaa

SEQ ID NO: 366032 - DNA, 122 bp, Homo sapiens
ttattctccacaaagttaacagaatgatggatctcaaatgcaaacactgaatctctaccacgcagcaataccttagtacctggtattcacgcattaactacttgttgaagtgaattggttta

SEQ ID NO: 366033 - DNA, 122 bp, Homo sapiens
cgggcgactgagaggggcggggcctggcggctgggaggggcggggcggatgcggggacagcggcctggctaactcctgccaggcagtgcccttcccggagcgtgccctcgccgctggtgagt

SEQ ID NO: 366034 - DNA, 122 bp, Homo sapiens
tataggctgtctgtgtaaccctcacaccaacatcccaacaggtgtgcaggacaaaaacaccgtctgccgtcatgaaggtgtggctccggaaggacaaggctttttaagacaaggacaaggac

SEQ ID NO: 366035 - DNA, 122 bp, Homo sapiens
tgggcttgtctagccctaggagttccaacaagtaagctgggcatgctcagtgggcagggtcgttttttttttttgggtggcggggggttgcaagtgggaagcctgctgttcagctgccgggg

SEQ ID NO: 366036 - DNA, 122 bp, Homo sapiens
gcccacgcggcctccccacgcccagctcccgccggccccgcctcgcgtcgtccttcgccccgcccccgttgccgccccccccgcccgcacactgcccacctggcgttgtcttcaccccgctt

SEQ ID NO: 366037 - DNA, 122 bp, Homo sapiens
agagaaggggaaggcagagacctcctcagcactccccactcctcctcggcccctttctgacgctgcccgccccacagcccccaagctggccgtgaggacaccgctgaaggcggtgcaggcgg

SEQ ID NO: 366038 - DNA, 122 bp, Homo sapiens
ccaagccactcaggcagaggtcagtgagctctggaggtggccttgaggagcagagagtggcgagtggggaaaacccaagaaagtgcagctacgtccaccccgccggactaaaccccactcgc

SEQ ID NO: 366039 - DNA, 122 bp, Homo sapiens
cccaatactgcatctgtgaggctccttttggcacaaacctgaatgaacagcgggaaacgccgtctcccctggcgtctgagatctggggtcccctccccacctggtctcctcgctcccgcccc

SEQ ID NO: 366040 - DNA, 122 bp, Homo sapiens
ctgtatatcctttattgttgtttttttttaaatgctgttctgcccattatttttctcatacggctgatacaacttgggcttttcttattgtcctacatttgtatacatagtaccatctggtt

SEQ ID NO: 366041 - DNA, 122 bp, Homo sapiens
gttgggaagagggagaggggagctgtccagagactctgggatgccccctggccttcccaccgcctctctccagcctgtctccttggagccctctcaggggtggaagactctggggagacgca

SEQ ID NO: 366042 - DNA, 122 bp, Homo sapiens
acagttcaagtttgccctcaccagctaaacctgttctttctataggcagtgttagctgcccgttcttcttgctttgaaacatttttcccctctgcctaacatgtggtgagtgctcaataagc

SEQ ID NO: 366043 - DNA, 122 bp, Homo sapiens
cgcggaccaatgaggcggccttcctgcgtcgtggcggacgcgcattgtccaatcagaagccgctactcccagctgaggggcaggggagaagctacgggtcctaccttggaacaaaacacctc

SEQ ID NO: 366044 - DNA, 122 bp, Homo sapiens
attttttcaataccccattaagtctgattgacagttaaagttgttgggaggcttcactaccgttcctctgagtggctgctgcggcctcccctccccctgcgccgtcgcggggagcgcgcata

SEQ ID NO: 366045 - DNA, 122 bp, Homo sapiens
cctctgccaggtcagctccaggcttgggtggcagtcctgacacggctggggcgcaggggccgggacgtgggcgggaatgagagggaacctgcctgggaaggctggggaggagcgtccaggcc

SEQ ID NO: 366046 - DNA, 122 bp, Homo sapiens
gcgatggctcgggtgcgggcgaggagctgggagggcggctctcgacgcaggtgtcagatccgctcggcagtgctcggcgcgctggcccggcccccagctcctccggccgccgccccccgccc

SEQ ID NO: 366047 - DNA, 122 bp, Homo sapiens
cgttggccacgtagatgcgcgcctcggtgatgatggtgctcgtgtcggcgatgagccggtcgatggtcttgcccaggcgctcggcctccgagcggatgtccttcatctgctgccgatcggag

SEQ ID NO: 366048 - DNA, 122 bp, Homo sapiens
ccagcctaagtctgaggttccagggctggtcgcaggccgtccttgcagccctcgccagagcgttgtctgcacctccgacactaggtggcgccataggaacatcctcgcggcccgaggcgcgg

SEQ ID NO: 366049 - DNA, 122 bp, Homo sapiens
acgtctataattcttgccatttctgttttcctatgccattgtttagaatttcccacgagacgcacttctttctagacaaaacatcttttacgtgcagagcaaaatatcaatattttccaggt

SEQ ID NO: 366050 - DNA, 122 bp, Homo sapiens
cttaagagctgtaacactcacggtgaaggtctgcagcttcactcctgaagcccgcgagaccgcgaacccaccagaaggaagaaactccgaacacatccgaacatcagaaagaacaaactcca

SEQ ID NO: 366051 - DNA, 122 bp, Homo sapiens
ggtgcgtgatgggttctgagtcccggcgccgtggcctgtgtggaaagtcgggttctgcaccgcgtacgctgggtgcggttgcaggtggacagcagcttcccttgccacgtgcaggcgccgag

SEQ ID NO: 366052 - DNA, 122 bp, Homo sapiens
ggtggccttgttcctaggatcctgagaaaacatttgattcataggaaccacaagttacatcggatgaatccttaagcattcccaaaggacattcattcccacctggctctcatcgcatccct

SEQ ID NO: 366053 - DNA, 122 bp, Homo sapiens
atatttcatttattgactcatttaccacctgtttaccgagcacctatgtgcctctaagcacgggggagtgcagcagtaaagaaaaaaacacaggaaaatttctgctctcctaaaatttacat

SEQ ID NO: 366054 - DNA, 122 bp, Homo sapiens
aacaaatgtgtaagctgtatgctaacacatacagtttaactggacaatcgcttactgaatcgtgtagtaagattgcagatggtatttagggaaggaaaagatcaacagataagtttgcctga

SEQ ID NO: 366055 - DNA, 122 bp, Homo sapiens
gatacatgttgttcaaacaaaaagagtatttggatataatgattatttaaaaattgttgtcggacattctggaataaagcaactgacactcaactgtgctgtcttgtggatttaaggggaag

SEQ ID NO: 366056 - DNA, 122 bp, Homo sapiens
gtctcacaaattaaaacaccatcctttctcatatcagcatgccaaccctttggtaccctccgacttgccctaccagggcctccctccggcctccgaacctctgcctctttcaagtgtttaag

SEQ ID NO: 366057 - DNA, 122 bp, Homo sapiens
tcctgggctgggatgatgtcttttagtctatttccatcttttcctcaagggccttatgttcgtataggtctcttaaaactcaacccaagaagctaaactgtggactggggtttcagaagcca

SEQ ID NO: 366058 - DNA, 122 bp, Homo sapiens
aagactccaggaagaaatgtctagtccctttgcacctcccagaagctgcagcagcacctgcggagcagacacagacgcagacgcagacgcgactttctctcaagtcaagaccacatcagacc

SEQ ID NO: 366059 - DNA, 122 bp, Homo sapiens
cccaggctggagtgcagtggcgcgatctcggctcactgcaaactccgcctcccgggttcacgccattcggctgcctcaccctccacagtagctgggactacaagcgcccgccaccacgcccg

SEQ ID NO: 366060 - DNA, 122 bp, Homo sapiens
ccattggagaaacacagtcatcaggaatgtaatggtgggagagggaaagctcatcaccctcgttctcacgctaacagaaaggcattttccccaggagccaagccaacgttatcacggaaata

SEQ ID NO: 366061 - DNA, 122 bp, Homo sapiens
cggctgttcttgcagttcaagtatcccgcgactattgaaatggaccaatgaaagcgctcgcggccttgacgtcattcaaggcgacagggtcgcaggcgagtgaagggtaaaccaaaggaaac

SEQ ID NO: 366062 - DNA, 122 bp, Homo sapiens
agacgcggcgctgcggcgggaacggcgcacgctgtaggttgcggagggtggtcgtgactccgcagtggcttcgggggtggcgggagggaagaagggcttgtaaactaagttgctcttacttt

SEQ ID NO: 366063 - DNA, 122 bp, Homo sapiens
caagatgaatgccgaacccttagcctaggccaggaggggaacccttcacacaccgggggccgcagctccagctcagcccccaacacccatcaatgcacacaggctatttgacccccttgaca

SEQ ID NO: 366064 - DNA, 122 bp, Homo sapiens
tttacctgaaagcgcctcaatggccttgagggcccagatctcgtctgggcagtccacgaacgcgtagccaatcttcaccaggaagggtcccgacacggggatcttggcgtccttcaagatac

SEQ ID NO: 366065 - DNA, 122 bp, Homo sapiens
cagcgccgaaaacttgcaaatcatttgctgtacagatgtttaggggtcgcctactacgtgcggggcgctgtggacacatagggggcggggggtgggtgagggggacacagcagcccctgaat

SEQ ID NO: 366066 - DNA, 122 bp, Homo sapiens
ccgtctcctgtgaggaggggcggcagtgcagagaccttggggcactggaaattagtaaggcggtgggttgaattcttctcgatgctaagcagtgcccttcagcagaaaacctcctgataggt

SEQ ID NO: 366067 - DNA, 122 bp, Homo sapiens
cacccacagcggccacggcccacggcgggagtgctgcacctcctccacgaacagcagccacggcccatggcaggagtgctgcacctccacccacagcggccacagcccacggcgggagtgct

SEQ ID NO: 366068 - DNA, 122 bp, Homo sapiens
ccttcccttctgagtaactcccctgcaacctcagtaagttctgatagtaaggcgaattctcgcgatatttcccactctggcggtcagggggaggtagtaggaaggctgggtgtcggtcacgc

SEQ ID NO: 366069 - DNA, 122 bp, Homo sapiens
cagtctcaggtgatgacagctctattgttcacttgctcaggcccaagccttggagtttctcgttctctctctctctctctctctctctctctctctctctctctctctctctctctcacaca

SEQ ID NO: 366070 - DNA, 122 bp, Homo sapiens
ctctggccccggcgttgcagaggaggcggcacctgagcctccagccccgccccgtctgcccgcgcagggccttctggggcttgtagtcctaaaacgactaggtctccccgcaatgcccgaga

SEQ ID NO: 366071 - DNA, 122 bp, Homo sapiens
tgagctcctcgggctggagtctgaatgggcgccctatggctgggcgctgcggccgagctgcgcctgggaaggagcccagacaagattccctttcagcccgggtgggccgccgcccccgcaca

SEQ ID NO: 366072 - DNA, 122 bp, Homo sapiens
ccacgccgggctcggggtgggggctcggggcctattacgggatggaagctccgggtgtcgcgggggcgggaggaattaagggagggagagaggcgcgcgggtgaaaggcgcattgatgcagc

SEQ ID NO: 366073 - DNA, 122 bp, Homo sapiens
gtagcagataaaacgattgaggcctctatcgatgctgtgattgcacgagcctgtgctgagcgagagccagatcctttcgaattttcttctggatcggaatctgaaggagacatttttactag

SEQ ID NO: 366074 - DNA, 122 bp, Homo sapiens
ttctcgccctctgtagccccccacggcctggaaacatggaaggagaaagtccagcacaggcgtaaaacctagactcgccaggcccttccaccgtccgccgccccagcgccaaccaatcatgg

SEQ ID NO: 366075 - DNA, 122 bp, Homo sapiens
caccaccgcctgcattgcgtcggacctgaccatttccaatgtgaaattcccggggaaggtcgcgagccgctaggggccgttcgtgggcggggcggcgggccacaggggaagtagagttagcg

SEQ ID NO: 366076 - DNA, 122 bp, Homo sapiens
ttagctggggccaaatcacaggtgtcctcacacaaaaggttaaggcaggactgccacattcggcccatgggaagaacccagatgtggccaagacttgggaagctgctgccacagggcagact

SEQ ID NO: 366077 - DNA, 122 bp, Homo sapiens
aaattcttgcagatagtacacagagattttaaagagccacagagtctccatatgatgtgacgaaatgccactgtgtgcctgggaggttgagtgtaggggcaagattattactgagttagggg

SEQ ID NO: 366078 - DNA, 122 bp, Homo sapiens
gacgaggctctgtggggcgctgggcacagctgaggctcagggctgggagacgaggaaccccgcgtgacagtactggtcgttgagcctggaagcaggtcaggggctgcggcgggagagggcac

SEQ ID NO: 366079 - DNA, 122 bp, Homo sapiens
cttctccctaagagatgcggggaaatggtggggcctgagagtgcaaacactgcagaaatgcgaaaaatgtagtgttaacggaagagtttaggtcctgcctcactgtccgggaaacgcgtgcc

SEQ ID NO: 366080 - DNA, 122 bp, Homo sapiens
tcttaattctttttctgcagaacaaccagtagatttccgtagattactggagagaataatcgcaatattcccaggatgtatgcagcctgggctgcccactggtttaactttttcttctcaat

SEQ ID NO: 366081 - DNA, 122 bp, Homo sapiens
tcctcagttcccagacggggtcacggccgggcagaggagctcttcatatctcagacggggcggcggggcagaggtgctccccacatcccagacgatgggcggctgggcagagacgctcctca

SEQ ID NO: 366082 - DNA, 122 bp, Homo sapiens
agcgccggcggccgcagcgcgagtgagctgggtgtgcgaggccgccgccgcccactgctgcgcggcccagcagctcccgccccactccgtcccaggatcagcgccgaccctcgcccccacct

SEQ ID NO: 366083 - DNA, 122 bp, Homo sapiens
ggcgcggcccctctcccaccccttaccgctgggggcagctcccagggcgggtcactgccgcgctgccgctcgcagatcagacaggtccggatgcccttgcaaccgcattcccgaaggacttc

SEQ ID NO: 366084 - DNA, 122 bp, Homo sapiens
gagaactgattgcaaaaccagaagccagcagaaacaaaacaattcataaaattacagaggcggtattcggaagttctaaatacttttttttccatctcagaaatgcttggtatcctaataat

SEQ ID NO: 366085 - DNA, 122 bp, Homo sapiens
ttccaaaccgagagaatttggtttgacacctctcacccatcatatcctagccccgacaggcgatgactcttcccctttgtctccgccaacaccctaaacactgggcaggagccaagggctga

SEQ ID NO: 366086 - DNA, 122 bp, Homo sapiens
ctggaccagtcacagggaccaggttaaaaggtcagtctcactgggtcatctggagtcacacgaccttccttatggccagagagcaggaacccatagtgaccggtccttaccttaaccaggag

SEQ ID NO: 366087 - DNA, 122 bp, Homo sapiens
ccgtatcgattaagaaggggacgggcttacattccactgtgagagttacccaaagctcggcgtccgtgatggtctagggggcttccgaggcgatcgggcagtgtcagtcttcagccgctaag

SEQ ID NO: 366088 - DNA, 122 bp, Homo sapiens
gttcggccaagtggtcagcgaggaacaccaggacatccgtggggtcagcagggggatcgccggggagggccaggggcttaggaaggtcgggggcctgggggtccacccgggaccggagattg

SEQ ID NO: 366089 - DNA, 122 bp, Homo sapiens
tgtgaaatatcccagcccagacgcgtgcacacggggcgggtgtgaaatatcccagccgcacgcacacagggcgggtgtgaaatatcccagctgcacgcacacagagtggggtgtgaaatatc

SEQ ID NO: 366090 - DNA, 122 bp, Homo sapiens
ctttcacaggctggtgttgagtgtctgtggcttttctgtgcacacagtgcaagctgtcaccggatctatcattttgaggtctggaggatggtggccgtcttctcacagctccactaggcagt

SEQ ID NO: 366091 - DNA, 122 bp, Homo sapiens
ggaggagtgggttctgcccgcagcagagtgcagcggggagaccttcccagtctcagagctcgcctcggccccgcccccagccctgccccccgacggagacgcggcggtgactccctccgtgg

SEQ ID NO: 366092 - DNA, 122 bp, Homo sapiens
gcaaccaggtcgcacagtggcagacggggggctggggtggccgtgaggtccctgggcccccgccaccctcgttcccgggcccggcagggacatatctccccggggctcccacagtcatgcag

SEQ ID NO: 366093 - DNA, 122 bp, Homo sapiens
gttctgagtctgagttccctgggaagtcccagtttgaaatacgctctccagcaccagatacgcccggtgttttctttggtttttctgattctttttgggggattgcgggagtcagggttaga

SEQ ID NO: 366094 - DNA, 122 bp, Homo sapiens
gcagaaaactatgcattttcttagtggcaattacacaccccgcacattatgcatttaaagcgttgtttgttgttttgtcgcttccatcagaatacaatccagtagggcaaggagtgtgtggg

SEQ ID NO: 366095 - DNA, 122 bp, Homo sapiens
gacagctacagctagggctaccttaatctctagtggagcacaaagaatgcaacctcaagccgggggcaggtttcaactccccttgcatatccaggctgaatattccccgttctacacaactt

SEQ ID NO: 366096 - DNA, 122 bp, Homo sapiens
gaatgtaacattttgtctcttttctacttctaacatggaataccccactttgagttgtctcgccttaccatactgaaccaatgtacatcttacacgtattgactgatgtctcatatctccct

SEQ ID NO: 366097 - DNA, 122 bp, Homo sapiens
ctttggttggctagttggttatgatgttttttcccctactcagctctaaaaaaacatcctcggcaaggtgaggtggctcacgcctgtaatcccagcactttgggaggccgaagcgggcggat

SEQ ID NO: 366098 - DNA, 122 bp, Homo sapiens
acccaggcccatgactactccttgccacagggagccctgcacacagatgtgctaagctctcgctgccagccagagggaggagggtctgagccagtcagaaggagatgggccccagagagtaa

SEQ ID NO: 366099 - DNA, 122 bp, Homo sapiens
agggtctatacctgaagagctgacgcctccttcagatgcgcgttccgtgggtcgaatccacgccagtctgtgacaaaaagtgctcttgcaaagaccaaaatgttaaaaggatattggaaagc

SEQ ID NO: 366100 - DNA, 122 bp, Homo sapiens
ctggcctctcccggctcctcctcctcgctccccaaggcctttcccaccgcgtcattgtctcggtttatctgcagatacgtctacctagcagtcagcccagcagcgtaagtggtgaccagtgt

SEQ ID NO: 366101 - DNA, 122 bp, Homo sapiens
ggttcaagcaattctcgtgagtcagcctcccaagtagctgggattacaggcacccaccaccgcaccccgctaattttttgtattttagtggaaacggggtttcgccatgttggccaggctgg

SEQ ID NO: 366102 - DNA, 122 bp, Homo sapiens
ccacccgaaacgactggtagtaacattttgacgaaaccgaatctctgttttactaagcagcgacgccgcagaacaagcagctgatgcaatcgttcaggtggaggcggctaggacggccgccc

SEQ ID NO: 366103 - DNA, 122 bp, Homo sapiens
tcatgaaatgaattaggtagcttttccaatttttctattatttgaaacaagtttatgacacggggattatccatttattgaaagtttggttaaagtcatctctaaaggtatctgggtctggt

SEQ ID NO: 366104 - DNA, 122 bp, Homo sapiens
gggctccgccctttccgcggaaagccagctgcgcagccggtgggagcatcccggaggggacgtttctgtccttctggcacacacgtgggtttcatgattgaagtccttgagacagaagggac

SEQ ID NO: 366105 - DNA, 122 bp, Homo sapiens
cacaccctccaggagtgcctgggggtcctcgatgccctcggggacacacttcttgttctccgggagggattccagtttctccaccagagctttcaggcccttcagttcaaactcagtgagat

SEQ ID NO: 366106 - DNA, 122 bp, Homo sapiens
gaggccttgttctgacagtcaccaggctctgtggcccagagtcctaactgcgttgtccttcggcaggttctgaattgtgtcctccctgaggaggctgaggccgctgcctccttggtgggggg

SEQ ID NO: 366107 - DNA, 122 bp, Homo sapiens
agacagctcacagttggatctggatcaggcagtattggctggaacctgtgaacactgccccgagacagatatcttatcatgcagaccctggctggaattgctgctgttgagaaaactcattt

SEQ ID NO: 366108 - DNA, 122 bp, Homo sapiens
aaattcctagagagcattagagagcatgcttcattgcacacattcatgttattctgatcacgttattctgatcacattattctgatcacaagttattctgatcacatgttattctgatcaca

SEQ ID NO: 366109 - DNA, 122 bp, Homo sapiens
cgcctagccgtggggcacggtgggctcctgggagctctgagctctgggctttctccagttcgcactctgcttgtctcggcagctccgtccccaccgcagaggtgtgaaggggcgcaaagcca

SEQ ID NO: 366110 - DNA, 122 bp, Homo sapiens
ccctgggcagggcatagctggccgccatgctgaacaatctgcttctcaaagagttctgcccgggctcgtccaatgccagtgcgcacaacatgggcccgaagggagctcagccactctgtgga

SEQ ID NO: 366111 - DNA, 122 bp, Homo sapiens
tgagttgtcaggtgtggggtgcccttgagaagaaaatggcgcggcgggatttggggaccgcgaggagcagggtcctctgatacagtctttagttcggtagttgacattcccgcccgggatct

SEQ ID NO: 366112 - DNA, 122 bp, Homo sapiens
agaggaccccccgacccaccccgcgaggcagaaggcgggggcgggacagcgaggtcaggccgggttccgcaccccatgccttcccaacgcaccacccgcaggcgaggaagaggagagacaag

SEQ ID NO: 366113 - DNA, 122 bp, Homo sapiens
cctgggccccccgagatgctgtgcctgcaggacacctgaggggacagagcaggagctggccggttcccacaacccagagggcccaggcgtgtgggagagggcacctgggcctctgggaacac

SEQ ID NO: 366114 - DNA, 122 bp, Homo sapiens
tgagcccgggaggtcggggctgcagtaagccgtgttcgcaccatggcactctagcctggacgacagaaaaagaaaaaagaaataaaggtataaaagaaaaaaaagaaaagtaaacagcttct

SEQ ID NO: 366115 - DNA, 122 bp, Homo sapiens
ttctttcttaaaggtcacaaaatctaattagaaccattgctaactgtatattctcgttgtcggtaagccttaaataataaaaatcagaccaaatgagactaagcaagggagatggaaaatcg

SEQ ID NO: 366116 - DNA, 122 bp, Homo sapiens
gggacctgcaggtcaggccaagcagagtggctccggctatgcccccgagcctgcaggctacgccacggtctggcggctgaagagctcgagggtgagcgagctgaggaaggcagggatgctgt

SEQ ID NO: 366117 - DNA, 122 bp, Homo sapiens
gctaggagcttgatggggtcagttcccacgcccggttcagggtcagaacaaccaccatcccgtcctctcccagagcagagccggctcctttagcctccagttctccagagcttttgcctggg

SEQ ID NO: 366118 - DNA, 122 bp, Homo sapiens
gggctctggcggggtcgcaggggcgtggtctgcgggcgtgggggcgggacctcggggcctcgggggcggggcctgagggcgcgcgcacgcgtccggcgcgccccctcccggccgccatgttg

SEQ ID NO: 366119 - DNA, 122 bp, Homo sapiens
ggatggtgctttcaaactcttgactcagttagatataatacagacacctatatgtttcttcgcagctctgtcaatcagtgttaagttggtagaaaataaatgtcagcctttgtacaggaaaa

SEQ ID NO: 366120 - DNA, 122 bp, Homo sapiens
tggaccagctgactccgggctccaatcagctagagcgtgatgtaagtgtttagcagctgccgggctctgaattagcgtgctgaagtagaggtagtacagcatggctagactgttgtgagagg

SEQ ID NO: 366121 - DNA, 122 bp, Homo sapiens
gcggaggggaccagccaccggttgggcagaagcagccggcgtcggcctgggattggaccacgtcacggggccagcgcgctccactccttcctccccagcgccggccccggggcgaccgcggg

SEQ ID NO: 366122 - DNA, 122 bp, Homo sapiens
ctccaatgctggaaaaagaggaaaaaaagttaaaataaaataacattattataagaaccacgaaggggacatacgaaaagctcaaacaaaaaaatcataaaaagcacctgactttggaactg

SEQ ID NO: 366123 - DNA, 122 bp, Homo sapiens
cacgcccgctcgcgcaggcgtgttagcaggttgggcaccggtgggcgggaggaggagacacgagtatggagcttgcgcagtatctacccaacctgcggctggcccgtgccaaagaggaaagt

SEQ ID NO: 366124 - DNA, 122 bp, Homo sapiens
attaggagaatgactaaaggtaattgctcattaaaaatcattaaactgacacagcaggctcggcacacgcagccccttcaacaccgctttttcctccactgtggctggatggcccaggcacc

SEQ ID NO: 366125 - DNA, 122 bp, Homo sapiens
aagtaggagctggtgctgaagtgaaggctcaaggactcctgttcaggctgttagagaatgcggacccctgcatcctatactttgatttgctaagtatggaaaccccagtaagataaagacta

SEQ ID NO: 366126 - DNA, 122 bp, Homo sapiens
aaatgtcctttaggcaaatgttaggagggaaaaatgtattcttgcaattcaaaaccgactcgaatcctgccagaaagctttatgtttgcggactttatcgttcctcgcctgtccgtttttta

SEQ ID NO: 366127 - DNA, 122 bp, Homo sapiens
cactggggtctcctccacacccttctctctggtcccatcccttctgctgccaagccccagcgttcctccggctcggcctggtcagcttgagcctcattttgttcgcgtgcccctgggctggg

SEQ ID NO: 366128 - DNA, 122 bp, Homo sapiens
tctgcaaagaagaggtccggtatcccggcgggagaagcaaagtgccactgggtgctggaacgtggaggagagggctcgcaggaggaagggtggggcttgggaaggaaaaaggcgcggctcgg

SEQ ID NO: 366129 - DNA, 122 bp, Homo sapiens
gggcgcatgcgcaagatgggccccgcccccacccaccccttccggctccgcccgccgcgtcgccccaaagaagcacctgccagtctctttaaaaggtttattgatcatatacaaaataaaga

SEQ ID NO: 366130 - DNA, 122 bp, Homo sapiens
gatgttgagaaaatgagaggattagaaagcatatgaactcctatggaaattacggcatagcgatgcaaaggaaggcatttttaatgatttgagtaaatgagagagtgaccttgattctgttc

SEQ ID NO: 366131 - DNA, 122 bp, Homo sapiens
agaatcgcggcagccccgggggcggggcttccagggggcggggtcatacgggggcggggccgagggaccaagcggccgctcctggccggagggcggccgggtcggtgacgtcaccgcatgac

SEQ ID NO: 366132 - DNA, 122 bp, Homo sapiens
tgctgaaggggatccacttcatcgttaaagctgaaagggttaaatgcccacggagaccgccggagtgaaggtctgcagttgaacaagataaaggaacaagaacaaaacgactcaaaactgtt

SEQ ID NO: 366133 - DNA, 122 bp, Homo sapiens
tgttcctccctcttctcggcctctttctccttccatgaccggaacgcactgttctgactacggaggaagatgcccttgacggtctctgaggcactctttttaatttcacacacttctgtgtg

SEQ ID NO: 366134 - DNA, 122 bp, Homo sapiens
gctgattttaaagggaaaatctccctgcctaaaagcctctaagaaaccatttttaatcttcgcagtgggggcgggggatgtacagactcctttgagaagctaatgaaaagttatcatcgcct

SEQ ID NO: 366135 - DNA, 122 bp, Homo sapiens
aaaaaaatgagcaccaatgagcaggatgcgctcctctctaatctgcctgatgcttgatcccgcagccagctctggctggtttcctaccacctgtccccggggccagcgcacccatgtccagt

SEQ ID NO: 366136 - DNA, 122 bp, Homo sapiens
gttcaagcgttcatcctgccgcagcctccccagcagatgggattaggagttaaagatgtgcggtgagtcccgcgtccccccatgctccgggggtgtgagtcgcgcatccccccgtcgggggg

SEQ ID NO: 366137 - DNA, 122 bp, Homo sapiens
ggcccccatttgctcagctgctacagccctgaaggctgggggttgctgggagggaaggggcgcaccggataatctgggtacttggtcctcagctgcctcctgggtcactgaggacaagctag

SEQ ID NO: 366138 - DNA, 122 bp, Homo sapiens
ctcagccatgagaagggggatgctctgagccgcgcggccacaccaccaacccggaggacacggtgctgcgagaaaaagccaggtacagaggccacggctctacgagtccatttctgtgcagt

SEQ ID NO: 366139 - DNA, 122 bp, Homo sapiens
agccctccttccttactggccatgctgggaaacacaggtcatggcttgggaatgtggccccgggttgcggggtgaggtgataggaagagggagaaggacatgtgacccctgctcaacagccc

SEQ ID NO: 366140 - DNA, 122 bp, Homo sapiens
agcctagaggtgtgtagttggggggcctcatccaagtcaccaggggttgtttcttgatcacgctccccggggtttgggcctggcagccccttgtccccgtccctgtcaggcactgtcagagc

SEQ ID NO: 366141 - DNA, 122 bp, Homo sapiens
caggaagcctccggtggtggctgttacatttgtactcctaatgctatcaataacccaagtcgtcaatgaggggatggacaggagacagtctataatcctcctgcttcacatttgtactccta

SEQ ID NO: 366142 - DNA, 122 bp, Homo sapiens
aaaatactcgttatttttaccatctaaccttgtgagttagagcgactgaagaggaaaggccgtagcgtctgagctgctctgtgaagaatgaaccggttttcaccaggcaggccaggagtggg

SEQ ID NO: 366143 - DNA, 122 bp, Homo sapiens
ggctgtgttgctggtagttgtgcatctgaatgtcttctaccttaatggaggactgctgtccggacaggggcatttggtacaagcaaggtggcttgacgtcgtagcctgtgctgtagttgtcc

SEQ ID NO: 366144 - DNA, 122 bp, Homo sapiens
tcctcccccgcccccaagcaccagcgcacagcatccccctctgtctttgttgtggttctccgttgcttcgggccacgccgttcagccaagcaacccggacctgagagtgcacagccaggact

SEQ ID NO: 366145 - DNA, 122 bp, Homo sapiens
agttgtcaaacagcaagtctgatggtgagaccagaaatctccctgtcgaaggtcttttctcgatcgaagggttcgtggtctcacgggcttcaaggaatgaagccgtggaccgcagcggcgag

SEQ ID NO: 366146 - DNA, 122 bp, Homo sapiens
ctccagggaaggagcatccctgggagctgcggctctaggcgctggcacaagactggggggcggtgcttctctgagggcacactcctcagcctttgcagctgacttatgtcagcaagctgctg

SEQ ID NO: 366147 - DNA, 122 bp, Homo sapiens
cctgcgcggattgatcggcggcaggcctccaatagagcctgctaggcggattggctgctacgcggctgggccctgtttccggtacctaggcgggcagccatggtgaccggcgagcggcatgc

SEQ ID NO: 366148 - DNA, 122 bp, Homo sapiens
gagcgacttcaaaaagcgggccccaagccctcatccctaagtatggcccacagccgggtacgaccccccatgcggagccaggcctctgaagaggagagccccgtcagtcctttggggaggcc

SEQ ID NO: 366149 - DNA, 122 bp, Homo sapiens
aggtgtttttccttctccttgctgtgatttcccctccttcttccctcatgccagcctggtcgacactttctgcagaaattctgcagatggcaattctggggacctttcctctgcaccaaaca

SEQ ID NO: 366150 - DNA, 122 bp, Homo sapiens
ctcacgggccaaaccctccctcggcctgtccttcaagcctcagcagctctgcggagtgagcgttatcatccccattctacagataactagtttgaggctcagggtaagtgcaaacgtgctgc

SEQ ID NO: 366151 - DNA, 122 bp, Homo sapiens
ccaagttacaaaagaaggctctttaatcccttctttggcccttaaaagcggcagcagggccgggcgccgtggctcccgcctgtaatcccagcactttgggaggcaggggaagaccgatcacg

SEQ ID NO: 366152 - DNA, 122 bp, Homo sapiens
gtaagtcctattggcttggcgatagatgcgtttaacctgtggcaggccaggtttcactatcgcaggcctccatcacaactgcttcagcactgagtggttaaattaaatattaaaagctgagg

SEQ ID NO: 366153 - DNA, 122 bp, Homo sapiens
tggtgggcggggaaggggggttgggcacagcgattggtgggcggggggccgggcctgggccggcggggagcggattggtcggaaagtaggttagtggtgcgacatttagggaaggcagaaag

SEQ ID NO: 366154 - DNA, 122 bp, Homo sapiens
agcagaacaggtggagcgggtggaaaggacagcggcgagagcgcgtgtggtcaggggtctcggaggcagcctgatttccttatgaaaacagagctctggtaaatgccagttatggggagggc

SEQ ID NO: 366155 - DNA, 122 bp, Homo sapiens
gcccctgacccggggcctcttcggagggagctgagggccgcgttccttctgaaagcgggacgcgggaggggtggaggctgcggggagccggggtcgcacacgaataaataacgaatgaacgt

SEQ ID NO: 366156 - DNA, 122 bp, Homo sapiens
tccactcattccagtctggtgtttgtcctaaagtatgactctgggcaggtcatttctcttcgtgaaataagctatctccccaagcaagaacactacaactttctatgtctattccccttttt

SEQ ID NO: 366157 - DNA, 122 bp, Homo sapiens
gaagcgggctggccatggggaggctgcggggacgcggggctgcagagagcggcagtggcacggagcgcgcggctggaagcgaaagcaggcggtgtggccaagccccggcgcacggcccatag

SEQ ID NO: 366158 - DNA, 122 bp, Homo sapiens
gaatgtgacattgagatgtgctgcccctgaagcactccacgtctcagtggcttcagatatcgattttgctcacaaaccggggacttggcagggccagcttgtctctgcggcagctgggagtt

SEQ ID NO: 366159 - DNA, 122 bp, Homo sapiens
taaagattactagaagcaaaacaaaaaactgtgtaaaagatcggttactgtaggcagcaccgcatgacagtctaacccctttaattgccctggtcaaaaacacctggagcttttgagaactt

SEQ ID NO: 366160 - DNA, 122 bp, Homo sapiens
cccttaccaggccgcacacagcttccgccctcaggaagccagggacagcgccaggcgggacgctttgcgcagctgcaggcctcccccgccgcattcggccttcaagcccgcacatgctccct

SEQ ID NO: 366161 - DNA, 122 bp, Homo sapiens
agcatagtcagtcagggacaaagtgtgagtgtcaagcgtgggacagtcaccccttctggccgacagcggttcaggtttaatgccataaggccggctggagggcaagcccgcgaaggagagcg

SEQ ID NO: 366162 - DNA, 122 bp, Homo sapiens
tcggtctggaccaggcacaaggccaggccttggtttgttcatctcaaggtggggataaggcgtaggtgagccttcgtatgaggtcccagcacacagcaggtgctcagcatcctttggctgca

SEQ ID NO: 366163 - DNA, 122 bp, Homo sapiens
catgaaggtggacgataagaaagtgtgggacccacgccggggaggggcaagtacagcccccgcaaggccgcccattaaatcaggattgggggaaacggtgacagtcttttcagcaagatgag

SEQ ID NO: 366164 - DNA, 122 bp, Homo sapiens
ggcataaatttgtccctgagatccctttttatcaccaagctgtaagaacaagcagaagtccggcttggagaggccaggctctagtcagagccagagctaattaaacaatgctgctggcactt

SEQ ID NO: 366165 - DNA, 122 bp, Homo sapiens
cctggcggacttaggtttccctcacccacacaccaggcagaaacacgctgcagaggctgacgccgtgccctaggccggcccgcgggggtcccggggccacacttcctccgcaatgcagggag

SEQ ID NO: 366166 - DNA, 122 bp, Homo sapiens
gagtgggtggtggccgttggaattcaaaagtggcgggtgtggcgcggggctggtagcggccggagccgtgcgagttctctaccctgcttcgcgagcgggcgagagaacgcgagtcccaggat

SEQ ID NO: 366167 - DNA, 122 bp, Homo sapiens
agcatgttggtttcctggttaagcacgggacttggcaggggtggactttagtgggctgggcgcatgtgctgagtagtggtgtgggaccctcaggcacctactagggtttgcacttaccctac

SEQ ID NO: 366168 - DNA, 122 bp, Homo sapiens
tcaggcgtgttctgacccaaagctgcctgaagcgctgctcggtgtgcacttgaaaatcagcgaaatgctgagcgttgcttcttccctctctccagggctttgatgagaaaacgtgctgcttt

SEQ ID NO: 366169 - DNA, 122 bp, Homo sapiens
gactttctcttaaaaacattagataaaataaaagattcaccggatggattctgatgaaaacgaaaacaaagtaaaatgactggcttagcagattctttgaaatgtagcagcccagggatgta

SEQ ID NO: 366170 - DNA, 122 bp, Homo sapiens
cgtcaagatttgtagcagtaataactgcaggtcacttgtatgtaatggatgtgaggtagccgaagtttggttcagtaagcagggaatacagtcgttccatcagagctggtctgcacactcac

SEQ ID NO: 366171 - DNA, 122 bp, Homo sapiens
agatctggaccaagccccaccgactccgatagacttgggagagcgaggggatccgcggtccgccccccttaaccacagtctgaggaagcttcagaagtgggtcctggccgtcccaggcgatg

SEQ ID NO: 366172 - DNA, 122 bp, Homo sapiens
cgctgcttttatgagctgtaacactcaccgcgaagatctgcagcttcactcctgagccagcgagaccacgagcccaccgggaggaacgaacactccagacgcactaccttaagagctgtaac

SEQ ID NO: 366173 - DNA, 122 bp, Homo sapiens
ttattttccatttctcctttcgttgttggcgaatatcaatgaagtgtgagcagcatcaaccgcaggagtaccaactgggaatcaccctgaccgagccttgcttcctttgagcaccgggagat

SEQ ID NO: 366174 - DNA, 122 bp, Homo sapiens
ggctagactagtagatgcttgaattttatgatgagatgtctgacctcatttgattgacaacgatgaggaggtgtctgacattatttgattgacaatggggagtctaattgttcattaaacag

SEQ ID NO: 366175 - DNA, 122 bp, Homo sapiens
cgcagacagacactcgacacccagtttctccatggacggcatgcatttacatgcataatacggcggatgtgcccgctctgactgcagctcatttcctaagtcgcaagaaacgctggtatttt

SEQ ID NO: 366176 - DNA, 122 bp, Homo sapiens
gacatctggaagtgtgtagacccatagagctaaagcgatatatctttgggggatcccaaacgtttcccagggtccaactgtgttcgcctccttccgtgctgcgtggccacatggatggtgga

SEQ ID NO: 366177 - DNA, 122 bp, Homo sapiens
aaggacctttgcctttgagtggggtgactgggctccaagccgatctagcacacagtaggccgaaggcacaggggccccacccagtctccttcctggcccaggccctgggggattcaggtccc

SEQ ID NO: 366178 - DNA, 122 bp, Homo sapiens
gcacccactacaaaacggacgagcggagggttagacctttgccaggtagcgctcaaaatccgctaagactactcccaccgaaactcggtagcgcagttgtctttccgcagctgcttcagcca

SEQ ID NO: 366179 - DNA, 122 bp, Homo sapiens
agggctcccggggagccaggagcagccaggaaagcctttgtccacttctataacaggtcccggctcttctccatgctgggaccttcaagtcggctgctccaaccacctggaatgcttcttcc

SEQ ID NO: 366180 - DNA, 122 bp, Homo sapiens
attcccgggtgtgtgtctgtgtctgtctgtgtctcgcagcggcgcgcggccccggacaagcgctggggattcccgtttgaggcgtcactactgtcactgccatcaccccacggagccacttc

SEQ ID NO: 366181 - DNA, 122 bp, Homo sapiens
cggcgcggcggccgggaacctgtccctgtcgctggtggataaggatttggattcgttcagcgagggcagcctgggctcccacttcgagttccccgactactgcacgccggagctgagcgaga

SEQ ID NO: 366182 - DNA, 122 bp, Homo sapiens
gtatcctgcgggcgaccatgggccgaacggccgggactccaagcttacctcggacacgaacgccgcgccagtctccaagccaagtacgccatcgccatcccttgggcggctctagggctgcg

SEQ ID NO: 366183 - DNA, 122 bp, Homo sapiens
agtgtcaggcgtggggagagcattcacctgggtctgtggggccgtggcccggtggccaggcgagctcttctccagcacgttcagccgggcctccagcttggagatggcctgctgcagctcct

SEQ ID NO: 366184 - DNA, 122 bp, Homo sapiens
agaacccgcagcgccggcctggcagggcagctcggaggtgggtgggccgcgccgccagcccgcttgcagggtccccattggccgcctgccggccgccctccgcccaaaaggcggcaaggagc

SEQ ID NO: 366185 - DNA, 122 bp, Homo sapiens
cctctcctcaccaaacgccaatttcactttctatttttgagcttcacttttgctgagccacgccctccctgtccccgggccacccagcctccccatcttccgggtttgggtgcagcaacgcg

SEQ ID NO: 366186 - DNA, 122 bp, Homo sapiens
acccagctcggagcccggcggccgcctctgcggctgccagcccgtgcggcgtctccaatccgcgccaaggcgcccccacacgcccgctcctcacccctgcgtggagatgcccttgaccttgt

SEQ ID NO: 366187 - DNA, 122 bp, Homo sapiens
acagctcccaaagaggcccggctcaagccccaggcctcgcgtccctaggcttcttgagttcggaaaaaggtcctacaccggcttcggtcataagaagcaaaagcctaggaagcccttggatt

SEQ ID NO: 366188 - DNA, 122 bp, Homo sapiens
gggctctgcggttcctggcgcctccaagcttctagcgccaccacgttcccctcatccagacgcgggtgctcacagtggaagccgtgtgcagtacatctggtccagccgcagccttgcatgga

SEQ ID NO: 366189 - DNA, 122 bp, Homo sapiens
ggtctccgtagtcgttaagcaaagaggaagaggaagcgcttcttcattaggccacaggaccgggccttagaacttttgggttttatccattaaaggtcctttggcaatagaagaaaaaccca

SEQ ID NO: 366190 - DNA, 122 bp, Homo sapiens
cagagggcccactgagctgtttaacacttgagccgtcctcggacggcaaaactaaaagagcgcactgtaacgcacaccctctggggctttaggggtcatgggtatccccagactggatcctg

SEQ ID NO: 366191 - DNA, 122 bp, Homo sapiens
ggcagccatggaagggacaggtggggagctggggggacaggggaactggggtccggaggacgccccaggcctcttggccagggcctccctgatcatgctcccgtggccactacccctggcct

SEQ ID NO: 366192 - DNA, 122 bp, Homo sapiens
caacttgtagagatgcatcaatcagtttgaaatgggaaaagaggaaaaaaaaaaagcgcacgagcgagtggcacctccccgatgactacatcagaaaaccttcccgatcctcccgcagctgc

SEQ ID NO: 366193 - DNA, 122 bp, Homo sapiens
gaggtacagacacaaaaaggcaccgatgtaaaagcacaaaggcaggcccagttacactcccgtcaacaaaccacggaacctaaattcagacttggtggagcccaaaacctcgcagcctcagg

SEQ ID NO: 366194 - DNA, 122 bp, Homo sapiens
ggcggggcctgggcgggggcgaggccgactccacccttttgcagtcctcgcagcctcccgcgacctcaggactgggctgtactcgccccttctcggccgccgtagtttttttttttttttaa

SEQ ID NO: 366195 - DNA, 122 bp, Homo sapiens
ccctttcctggctctggttacggccttgcgagttgaacaaacttgctgcaggcggattggcggctgggagctctcgggctggggcgttgtatttattaatttatattccgcggcgccccgcg

SEQ ID NO: 366196 - DNA, 122 bp, Homo sapiens
aacaacacagaccaaacaaccctaacttttaagtttcagacgctaaccctctaccctcgccggctggcataagaaacgtgtacatgaggtccagttttaatggtcttccacagagcagaggc

SEQ ID NO: 366197 - DNA, 122 bp, Homo sapiens
tgcagtacatctgagaagcatttttattgcaaaatgtgtgtttacatgtatacagacacacgtgtgaacaggtgatggctctgaacagtgtagttgaagtgctgttttctcatggttgggct

SEQ ID NO: 366198 - DNA, 122 bp, Homo sapiens
tcaaaggaaagttgtctcctgagatggccaagaccccatttaagcacagagcagcgggagcggggaggctccctccacaccacccgcccccgaagaatgtgtcagcacagctggaggggcgg

SEQ ID NO: 366199 - DNA, 122 bp, Homo sapiens
ccgaagccgggctcccgggttccgcttccacagggccgccccctctcctccgagatccaacgcctcgcccctcggtaagaggcccaggactcagcccacggccccgccccccacttggctag

SEQ ID NO: 366200 - DNA, 122 bp, Homo sapiens
agttggagggtcctttggagacggacacgtggcttctcaatgaaagctgctccgggctcgcgtggccgccttcgccctgcacacacttctcctcccaaatacttgaaaatagacagagaaaa

SEQ ID NO: 366201 - DNA, 122 bp, Homo sapiens
cgggaatctgcgcatgctcggcgggaatctgcgcatgctcggagagaatctgcgcatgctcggccggaatctgcgcgagctcggcgggaatctgcgcaagctcggcgggaatctgcgcatgc

SEQ ID NO: 366202 - DNA, 122 bp, Homo sapiens
ccccttccacctcggggacaccccctcatcctgccttggtgcaggaggtctgaccaagggcgggggcctggtgagagtaactccacatgaatgaacataaaggatggtgcaaagaaaaagaa

SEQ ID NO: 366203 - DNA, 122 bp, Homo sapiens
gactgcaaggcttttcccattcctggtgcttccagaaggacccttcctctttgtctaccccgcccctgggagtgaagtgacatgctcgattggtaaatttgggaggaattgctgggcatctc

SEQ ID NO: 366204 - DNA, 122 bp, Homo sapiens
ggcgggcttcccggctgtcaccctctgcaatatcaaccgcttccggcattcggcactcagcgatgccgacatcttccacctggccaatctgacagggctgccccccaaagaccgggatgggc

SEQ ID NO: 366205 - DNA, 122 bp, Homo sapiens
tatctagcccctcgtggcagcagtgacggaaggacagaacttgtttaggcatcgtttcctcgctccctccttaatctccactcggcttttcccatcccctgggcctagtttcaggggagcca

SEQ ID NO: 366206 - DNA, 122 bp, Homo sapiens
gggcggcctggatctcctggtgctttgtatatggatgcgacgcacacgcatgcctacgggcgacctgtgccacactcacgcacatccatattgcatgatccttgcacactcacgcatgcccg

SEQ ID NO: 366207 - DNA, 122 bp, Homo sapiens
gtgtgagcttagatcatggataattttcaaagaaaccacttgtatcacacagtccctattcgagaacccaaaatgcttctgcactaaatatttgaacccctatgtatttaatggttatctag

SEQ ID NO: 366208 - DNA, 122 bp, Homo sapiens
tatcagaaataaaagggcaaatgaatccacccatgggcacgccgcagtgaacaggagggtcgctgctggaaccagcagtcaggttccacgcatgaagttctccactttaacactaacgaaac

SEQ ID NO: 366209 - DNA, 122 bp, Homo sapiens
ttgccgaactccgtcccgcctgtgggctgtgggccgttagcaaagctgctagcatgaaatcgtcgagcaccgcttgcgaaacgccaaatcctcgagagcgaggccggaggctgccaaacccg

SEQ ID NO: 366210 - DNA, 122 bp, Homo sapiens
ccacctccgggagaaatttgtccagagaccggcagcactgcttccgcaggcgaacaacgccgcttgctcttcaaagtcctttctgaggccagatcagaaggtcccactccttttaagcccct

SEQ ID NO: 366211 - DNA, 122 bp, Homo sapiens
cccaaagtactgggattataggtgtgagccactgtgcccggcctccctctgcagattctacgtgggctctaagcagcctctaaattgcctgaacacctaaggcttatttgctagttgacatc

SEQ ID NO: 366212 - DNA, 122 bp, Homo sapiens
gcaccagcgttctttcatttactcaaccaagggtgagggcagttccctcaatagctgccccgctcggaccctggcattgtccctgcgtgacgatgtcctggtcgcctgtgagctcccgggcg

SEQ ID NO: 366213 - DNA, 122 bp, Homo sapiens
gcccacgtgaggaaccaacaaaagctggcaaggacaccccaggataacacccaaacacgtcgactcgtgcgaaaggcctcatgcacgatcctttcttgctgtggcaaaaccgttaagtttct

SEQ ID NO: 366214 - DNA, 122 bp, Homo sapiens
ccacccgctcccaaggagtccccgttctccatcaagaacctgctcaacggagaccaccaccggccgccccctaagcctcagccgcccccacggacgctcttcgcgccagcctcggctgccgc

SEQ ID NO: 366215 - DNA, 122 bp, Homo sapiens
cgtaaaactgaaacatccagcctcacaaatgtccacatttctctctcatctgtgaaggcccgttgagactgctcagttggtgtctcctctgtccacaggacatggccgtagccgtgtgtgga

SEQ ID NO: 366216 - DNA, 122 bp, Homo sapiens
ccctgggcccttcctgccagtgcagtgccaggtcgccctgatcagggctcccgttggggccgccgtggcttcctgttcttttcggcttcctcctggctcagctgactgtctcgagttctcgg

SEQ ID NO: 366217 - DNA, 122 bp, Homo sapiens
ggggcccctctcggcccccgcccctgcgtcccggtgcaggctgcgggtccagctgactaccgtgtccaggtgcgcgtctgctgccctttccaaagaatccccttgcgacgttttcttttttc

SEQ ID NO: 366218 - DNA, 122 bp, Homo sapiens
aaaaactagacgttgcccagctaccagcccccgtctggtttccataggaacgcgcaattccgttgcgtagccctctgcgccggtagttgttctgtctcagttccggttttcccttccaagcg

SEQ ID NO: 366219 - DNA, 122 bp, Homo sapiens
gaaaaagcactggcttgtcaaacagagcggcacccgccgagggggcctgagctgcagaaacgcccgcctgagcggcccctgaacggaaatgaacttccccttggatgcaggtcttgctcccc

SEQ ID NO: 366220 - DNA, 122 bp, Homo sapiens
cttggaaggggctatagactgtataagttgcatgactgccatgtctaggattcctaataccgtgcactgggagccatctctgggatcttcactagaaccaggtgtacttgccaatcatatct

SEQ ID NO: 366221 - DNA, 122 bp, Homo sapiens
tctgtcatgtaaatgagatgggctgaggttcaaacccaggttctgtctatctagcacaatcgtgtgagggcctaagtctgtatgggtgtgtttattgctgctcttgatacatgaagacagag

SEQ ID NO: 366222 - DNA, 122 bp, Homo sapiens
tggcactgaccgtctatgatcagcgaagccctctgggtgggtttcttcccagacttgatgcggttctcattgattgcattttcaatctcctgcagtttcttcagtgcattcagatacgaggt

SEQ ID NO: 366223 - DNA, 122 bp, Homo sapiens
gaaagaacactggagtccagctgctgggattcaaatccagctccactactgcccgggactcgcgccccgttaactgagcggcagggcaccagcccgccggctgtggcgctcgagaagcctgc

SEQ ID NO: 366224 - DNA, 122 bp, Homo sapiens
ggaacccctgcgtcttctctctccacccctggatggggaaattcggcggatttctttctgcggtcttctagccgcagcgggcttgggcctccttagaaacggtctagcctcctcactcctcc

SEQ ID NO: 366225 - DNA, 122 bp, Homo sapiens
ccgggatccctggagacgttgcagctggacgtaagggactcaaaatccgtggccgctgcccgggaacgcgtgactgagggccgcgtggacgtgctgggtgagcctcctggaagcatatgggc

SEQ ID NO: 366226 - DNA, 122 bp, Homo sapiens
gtgccaactgtggaagggctgtgtgcaggccccacagttgcaggggctgttccgggccagcgcttcccagtcatccaatctcctttgtccctcggttgttctgtgactttgagcagctttca

SEQ ID NO: 366227 - DNA, 122 bp, Homo sapiens
accgttgagccattggtgtcaagtattttaattctctttaaaatttaaaacctgcaagcgcgggagctcagggacctggccaggaaggcctgagcttccgggtcatcttagcacgccccctc

SEQ ID NO: 366228 - DNA, 122 bp, Homo sapiens
ctccgagcgctttcggagataaaaataaaagccatgcacctgggggggttgtcatctttgcggtagaaattcctcccatgttgcaggtctggccctggctgggctcggctgcagggccttca

SEQ ID NO: 366229 - DNA, 122 bp, Homo sapiens
tcagccactcggccgccgtccgcacctcggctgctggcccggctgggcaccgggcatctgcgaagctagccctgcctggcactgggcatctccaggcaacgactgtccccggccctgcccag

SEQ ID NO: 366230 - DNA, 122 bp, Homo sapiens
ccccactgtgaggatgaccgcccagtgctgggggagacgaaccgtattttgtggggaacacgtcctcatccgtcaccagcttctgcacggagctcatgacgaagtcaacgtactgtggggcc

SEQ ID NO: 366231 - DNA, 122 bp, Homo sapiens
aatctcccctcgggctcgacggatgtgcgccccagatgtgctgacacatgtccgatgcctcgctgccttggaggtctccccgctcgcgtgtctcttctcttcgcaccagcggcggaaaccgc

SEQ ID NO: 366232 - DNA, 122 bp, Homo sapiens
atttggcagggaactgacgggcaaggtaagcccaaccaggagggtgtccttgagcgaccccgcaggcgtgcccaggacccctgcgcaaaccgtttcacttctcaatcttgagtttgaactcc

SEQ ID NO: 366233 - DNA, 122 bp, Homo sapiens
ggtcggctgaagcagcggggagccggaccccacccgccacccgccacccgccacccccggcgcctgccaaactggttgctgcctccccggcagccgcggcgcgtccacctgcgcagccaccg

SEQ ID NO: 366234 - DNA, 122 bp, Homo sapiens
cctggtgggcggttttcccagagcagggagcaaacaggactgagttggcgccagcttcctcggatgtagatattgctggctggatgaccagccacagccagctagcttgagtccaaggcctc

SEQ ID NO: 366235 - DNA, 122 bp, Homo sapiens
ttaaaccgtgaaagagaacaaaatgacttcttcaaatcgtgcttgtttgttggtctgaggcgccttttacatgtatttcagggttttttgctgtattcctggtttgcaccgggagagctatg

SEQ ID NO: 366236 - DNA, 122 bp, Homo sapiens
ctaggttgtggatgagtcttggcctagggttcagggccctccggccgcgggaggatctcccgccaagcttgttgcttttccaagttagtgcctggcgtgtgtgtgggctgcataggggcacc

SEQ ID NO: 366237 - DNA, 122 bp, Homo sapiens
taaggatggcctgtctctaccctgagaacttatagaatagatggggtgacctgatagctacgcaaagtagtagcctgtgccaaccacccagtgaaaagacagacaaggccttctcttcagac

SEQ ID NO: 366238 - DNA, 122 bp, Homo sapiens
ttagacactcccagtttcagaaagaaaagcaatgtttctctttgaggacatggccttaaacgactctatcgttgctgacctgaagctggtcaagtctatgttatcagggccaagcacagcgg

SEQ ID NO: 366239 - DNA, 122 bp, Homo sapiens
gatccaagtgagtggagttcactcctgctggcactgaagcagctggctagttccagcacccgtgcactccagttcctgcctcatttgctcacgggctccctccctcaaggaattgagagctg

SEQ ID NO: 366240 - DNA, 122 bp, Homo sapiens
ggcaggaggcatgggcgggacagtgttctgtgcccccttctagagcctaaatttgttgcccgagttcctccgggaagcgctccgggtagattctgggggccgggagctgagatccctgggcg

SEQ ID NO: 366241 - DNA, 122 bp, Homo sapiens
cctctctattgcagagctcttctctatggttttccctcccggaccgtgaaggcgggagggcgtggccagcacgccttttccgctagtcgccccgctctatcccatagtctcgctgccctgag

SEQ ID NO: 366242 - DNA, 122 bp, Homo sapiens
cctcagcatgggtgttggtgctgggaattgagggtgagtaatttatatggtccctgtcctcgtggagccacacacctctcttgccaaggccaggaacagacagaaaaccttgttacttgttt

SEQ ID NO: 366243 - DNA, 122 bp, Homo sapiens
tctcctttatcccttgctgcctgtaatctctgagaacagagaaacacgatctcagactggcgttgccttccgctaatcagagcctaattcctttatcacagagctcagagatggagatttcc

SEQ ID NO: 366244 - DNA, 122 bp, Homo sapiens
ctaaccagctgttggggaaagacagcagctagagacctagtcaatcacggtaaagagccacggggcagtaagtttcatttcaagagaggttcaggaatggcttggtcaagagattcaatctc

SEQ ID NO: 366245 - DNA, 122 bp, Homo sapiens
aacgtgaggcaacccgtgcagaagcggagcagcgggaaaccctgacctcgagagagcagtcggcgccgcggcccccagagccatggccggcggctgctgtgagggctcccgggcggcaggag

SEQ ID NO: 366246 - DNA, 122 bp, Homo sapiens
gtccccagttcggccatgggagccggcctggtgactggagtggtgaccaaggccgggacccgctgctcagcgtcggccccctggggcggtggagccctgccggccgggggctcgagcctggg

SEQ ID NO: 366247 - DNA, 122 bp, Homo sapiens
ggagctgcgccctgggtggcaagacatggcaagccaggcagctgggacctagagaaggctcggccgcgccgcaggatcccaggctgtgggcctgaatggtgaccacgcggagtcggagtcag

SEQ ID NO: 366248 - DNA, 122 bp, Homo sapiens
ggcctccggcctctagggagcgggagtgaccctcggtttctggcctccgaggggcgggagcgatcctcagccatgtccctagcctctggcttccggctgatttttaaatttttggtagaggc

SEQ ID NO: 366249 - DNA, 122 bp, Homo sapiens
cggcgtccacgctgggctggtgtctggttcacagtgccgcctactggagttgacatatttcgcagcacccacaggccagtagctccagcgtgagacagcaagggttaagaggctagtttgct

SEQ ID NO: 366250 - DNA, 122 bp, Homo sapiens
gaggtctcttcttccaagggcttctatttcctctcccgcaaaacagaaagcttctcctcccgaggtacttgagcatcccctccaagcgcagcccgtattcctctcgcctgcccaggcggcca

SEQ ID NO: 366251 - DNA, 122 bp, Homo sapiens
gaagcagcttctgcagaaactccgcttctttatgtcggactgtcttaacaatgaactcatcgtcgctggacacatagaacagggaaccactagctccagagctacagagttcaatcagcggc

SEQ ID NO: 366252 - DNA, 122 bp, Homo sapiens
tgagtctggcagatgaattctgtgctccccagcccggcaaacctccctgggacacggggacgtcacagctcctcttctcggtgctgttgaaaagagtgtatgcggagctccagggatggcgg

SEQ ID NO: 366253 - DNA, 122 bp, Homo sapiens
ctgcggggtgcgggccgggctgcaccgcgacaaaggcggcccagcggcggcatcggaggacgcacgctgccccctggtggccaggccgctccccgcaaacgcgagctcctttgttttgcggt

SEQ ID NO: 366254 - DNA, 122 bp, Homo sapiens
tttgccagcacggacagagccctgcaaaacaaggtgggcccacccagagaggggttcagccggatcctgggctgctgtcatttctgtttctagggccttctctccttggcccgactggacct

SEQ ID NO: 366255 - DNA, 122 bp, Homo sapiens
atccacgcgggaaggcgggactggggctgagagaggccgcagctgcccggtccaggcctgcggctcctctgtcattataattagggtccattgtgctcccagagtttcttgatttgggtgag

SEQ ID NO: 366256 - DNA, 122 bp, Homo sapiens
caggaccctgatgggctgagggagctcctagaagactgttgggatgcagacccagaagcacggctgacagctgagtgtgtacagcagcgcctggctgccttggcccatcctcaagagagcca

SEQ ID NO: 366257 - DNA, 122 bp, Homo sapiens
aaacatcaaggtactccaaaggaggcccagcactaccatctaggtggggagaaaacacaccggccataatgaacacacgtttaggctgaagaataatcttcaaatgatactactacttacac

SEQ ID NO: 366258 - DNA, 122 bp, Homo sapiens
ttagccatatgaccaatgtagaaacaagctaaggttaactcctcatctaatgaataggcccgataaaaaagttggttgaccacaacatgaataaataaataaccataagcttggaaatgcta

SEQ ID NO: 366259 - DNA, 122 bp, Homo sapiens
catctgtcatctgtcttgttcactacttgtccacctaccaggatcctaaacggaaccctacgtagggaagaggcagtggctgtaaaggctggatttgggtctggaagccgcccagctttacg

SEQ ID NO: 366260 - DNA, 122 bp, Homo sapiens
gccggggccttctgacggtctgaggtcttgcttgggccagtcacctcctgtcacggtccgcggaggggggaaggataagagggcgaggagctcatcgctcgccacccccgtgggcttcttgg

SEQ ID NO: 366261 - DNA, 122 bp, Homo sapiens
cactctgatttcgcctcctttcctctaggacttgggaatgagttgtcctattcagatgcacgagttttccagcatcttcattgtaaacttttttttttaaagcatttagttcagaaactaaa

SEQ ID NO: 366262 - DNA, 122 bp, Homo sapiens
cccgctgcgatcccacaggtggggtgaacagcgcccctgctgtcccacggggcgtcttcgcgggtgatgcccacactctcagcctgaagagcaggacctgtccgcgggtggggcccaccccc

SEQ ID NO: 366263 - DNA, 122 bp, Homo sapiens
atctcttctgtttgccccctccaaaaaacaccctaccctctcctccctgccctgtgtccccgagtatagacctcatgcacaggtttcctggctctccagcttccagatgggtctgcccagca

SEQ ID NO: 366264 - DNA, 122 bp, Homo sapiens
catctctggggtcccaggtgagatgcgggtcgagggagccaggccacggttctccagactcgcgtggaggccacgagcgtcttctggaggagcgggcactgcgcggaccggcagactctggg

SEQ ID NO: 366265 - DNA, 122 bp, Homo sapiens
agttggcctcagccaatgggcggacgggccgcgggcccggccccctccttccctccggcgcggcccaatagaaatttactacaatgttgtggcgaactgagggggaggggcgcgggccggcg

SEQ ID NO: 366266 - DNA, 122 bp, Homo sapiens
tggcctcatcacagtgtcccagtgtccgctcacctggcctcatcatagtgccccagtgtgcgctcacctagcctcatagtgtctcagtgtgcactcacccggcctcgtcatagtgccgcagt

SEQ ID NO: 366267 - DNA, 122 bp, Homo sapiens
acccctctcaggaacacacacacacacgggctcttactgagtgaaggagtctatcaccaccgagagttaagaacaaggcagaagaatcgtgtagagcgagactatgaacgcacagggctgct

SEQ ID NO: 366268 - DNA, 122 bp, Homo sapiens
tgtccgggcgcagccgaggctggaggatcccttcaggccaagagcaacctagcaatatggcgcgaccggatctctgtagtcctacctcaacccccagctacttgaaccccaaggttgaaggc

SEQ ID NO: 366269 - DNA, 122 bp, Homo sapiens
agagagagtacaagagggcgtgaaaccgttaagaggtaaatgggtcaggtccgcgcagtccgcccggaggattcaacccggtggcggatctttcccgccccccgttcctcccgacccctcca

SEQ ID NO: 366270 - DNA, 122 bp, Homo sapiens
agacacagcccccagcttggcggactccagctgcttcgtccttttgctgctctgataatgcgcactgatgcccatttctttcctaaagggcctcatctattttatccaggacgtgtaaaata

SEQ ID NO: 366271 - DNA, 122 bp, Homo sapiens
agaattcgcagattggctatgtctgcctttcctcatggttcaggacacagcgcgtctgcacgaataactcacctaactcacaatcctcctccacccaacgtatcaccagatcctcggctgag

SEQ ID NO: 366272 - DNA, 122 bp, Homo sapiens
gaaagactcaaaattgtgttggagctactggtgcacctttgtaagacctgcactaacgaccgcgccactgggaagggcacttctttatgaagtcgccgtattcccagggagactggtcaacc

SEQ ID NO: 366273 - DNA, 122 bp, Homo sapiens
ggatgccacagtgtataggaaactttcttgagtttttttcacatataaggaggcatttctcgaagtcacttgggatggcttaacatagctcatccctgccagctgacttgtggcctctttcc

SEQ ID NO: 366274 - DNA, 122 bp, Homo sapiens
cctcgctctggtctaaaggccctggacagtgcagagcgggtccacagccattggtggccccggctggtgcctcacggccacttggctctccaacccgagggtggaggtgtcagcggtggcgg

SEQ ID NO: 366275 - DNA, 122 bp, Homo sapiens
tgtgagtccagaacatctcctgaatataaagaagcagggtttgttactgtctattgcaaccgggagcctgtagtcatcacctcaaagttgcgagtgctccatgcagtcccaatgctcttcac

SEQ ID NO: 366276 - DNA, 122 bp, Homo sapiens
aaagcattttaactggtaggaacaatgaaatgccgctaacaagatgctgttattttctcacgtaagaaaatatgcatagtatctggagcacttagacggcccttgatcagtggtggtatcag

SEQ ID NO: 366277 - DNA, 122 bp, Homo sapiens
gccgctggactgcaccggttctcctctttggaacacttcctcagcatagcctcctaatagcgaggttaatttttgcgtgtttttaaacggcgggggcgggcggacagttgactccagcagca

SEQ ID NO: 366278 - DNA, 122 bp, Homo sapiens
caggctactgctaaggcctgagagtttttgcagaaatggggcagagggacaccctttgggcgtggcttcctggtgatgggaagggtcttgtgttttaatgccaataaatgtgccagctgggc

SEQ ID NO: 366279 - DNA, 122 bp, Homo sapiens
caccttccccatggctggctgggcgcacggcggggctgagcgggtggggcggcagcgcggcggggctatatagcaggagggctgctgtgttggcaagaaccgcacaaaaggggcccccggag

SEQ ID NO: 366280 - DNA, 122 bp, Homo sapiens
aatttgccttgcgaaacatttgcccctagggatagtgtttccacagtaaatactacaggccgcccagttaaatatggatttcagatcaacaagggctaatcttttagtgtgagtattcccgt

SEQ ID NO: 366281 - DNA, 122 bp, Homo sapiens
tctacatgatgaattggggagaggggagtggctaagtcgctgggaccaagaatggggggacggggaagcagtactgtctgtgagcagccattcagttcgaagagctgaaaatgcatttatgt

SEQ ID NO: 366282 - DNA, 122 bp, Homo sapiens
catatatatatggttgagagctaaagctcgcctctagggtgtaacgtgtggcaaaatcctcgctctctgtttgcaatcttggtcctcatgtcaccaggatgaggaaggcagggcacacgagg

SEQ ID NO: 366283 - DNA, 122 bp, Homo sapiens
tctccttacctggaatcccgtatagagaagcggctacacagatggatatcctctcttcaccgaggctcctggaatggtggcatcagccccccaggcagcccactgtggctccttgcaccagc

SEQ ID NO: 366284 - DNA, 122 bp, Homo sapiens
ctgagggagaggaatcctcctgggttccagatcctgtaccagagagtgactctgaggttccgccctgctctctgacacaattaagggataaaatctctgaaggagtgacgggaagacgatcc

SEQ ID NO: 366285 - DNA, 122 bp, Homo sapiens
gaggccccagtggggagcccggcgctcctaaggccgtttgggagtccccagttttccactcgctgacacgttgcttctcttatcccaccaccgccgccccgggcaaaggcactgccttgtct

SEQ ID NO: 366286 - DNA, 122 bp, Homo sapiens
ccaaatcagctaggccatggccttgccttgcttctcatgagtgtgcttgacagtcatcaccgtcactctatcttcatttctggttcttaccgtgttagcttagttcattcaagctactatca

SEQ ID NO: 366287 - DNA, 122 bp, Homo sapiens
ccccgcctctccctggcagcccggagcccccgcctgcgccgccgctgcccggagacctgccgcccccacccccgccaccgccaccacctccgggcactgacgggccggtgcctccgccgccg

SEQ ID NO: 366288 - DNA, 122 bp, Homo sapiens
ctgaggggacagtgggatggggcggacatgggggcctgaggctcacagtcaggccggatccgggtgaggttgtagtcggcccgcagggagcgcacggctcgcgtgatgcttagcgccagctc

SEQ ID NO: 366289 - DNA, 122 bp, Homo sapiens
atttattgaattcatttcatgtgctagtgagtgtcctagacactggagatacaaggtgaacgtaacaaaaatgttcattgaacttgcattctggatcttctgtaaaggtgacacagacaatg

SEQ ID NO: 366290 - DNA, 122 bp, Homo sapiens
ctcacgctgactggttggggctgtaaacggtgggagtggttggctcgggaaggaaagccccgccagatttaaaaatacttagtcgggagactgggggttggtctcctggcttggcgacggcg

SEQ ID NO: 366291 - DNA, 122 bp, Homo sapiens
gtctgcaccgtgcccgccccgactgatgatgaggaacattgcgacggtctgcaccgtggccgccccttctcactgatgctgaggagcactacgaccgtctgcaccgtggccgccccttctca

SEQ ID NO: 366292 - DNA, 122 bp, Homo sapiens
ccgcggagcaggacggccacccacgccggggcccctggggctccacccaggacgcacacccggagagacccaatgactgcgtttcgcacctgggcgcaagctggttactgggcacgcgctga

SEQ ID NO: 366293 - DNA, 122 bp, Homo sapiens
gctgcgggcaccaggttgcggggactgcagggaccgtcggtcagccaggggtcccagagccgggcccgagcgtgcgcgcgcgtcccgctgcccgcaatcatggcagccggcgccttggagcg

SEQ ID NO: 366294 - DNA, 122 bp, Homo sapiens
gcggggtctgggagggagggtgtctggggccagggcgaggggccccgggaggggtccttccgcacggatttcagaaagagggaaaccccgacccagagcggtgactggaatctacgcccggg

SEQ ID NO: 366295 - DNA, 122 bp, Homo sapiens
accatgtgaccagctgccaaagaggcgcgcggaaactgggagggcggggcgaacgccggacgttctgggcacgtgaccgccacccatgcgctgaggggcggacaggaggtgcttcgactggg

SEQ ID NO: 366296 - DNA, 122 bp, Homo sapiens
ccgtgggcccgggtgtgggggctgcagaagacggagggttgcagggcgttcgtttactgccgtctgcctcagccatgaagtcccataaattgggtggctttacccaacagaaatgcaccctc

SEQ ID NO: 366297 - DNA, 122 bp, Homo sapiens
tgcccaacagacaagaggccaaatatcagtggaactgacatgacccaggctagcaagcagcggatgtgattgcttccacaggtagcagctgtaggtatgcacagtgcaacatgctgtgattc

SEQ ID NO: 366298 - DNA, 122 bp, Homo sapiens
ctctggatcgctggcagtgaatgttctgcccaagtcggccttctcctgcctggcagttcacgcccagcctacttctctctgacgcgctcctccctcggtgccgcccgtgatgtgtgttagta

SEQ ID NO: 366299 - DNA, 122 bp, Homo sapiens
cgctgagggcagtaacttgcaactctgtgtctgtgggaatttcgggagggagggcgtgggcggcaggaaaacggcccagaacagacctagtgcccctcagttattcaccagaggggcactga

SEQ ID NO: 366300 - DNA, 122 bp, Homo sapiens
ggggttcactcggttgcctggccggtgcctggtgatgctgagtggtgcccaggcggctcacgctgggcctgtgtgtccctctccgtgtggagccacagcgccacatcccgggcattgcagcg

SEQ ID NO: 366301 - DNA, 122 bp, Homo sapiens
tctggagtcaccgagagaatgtctgcctctggcagcggcctctgagctgcctgtgggcctcgtgccgccgcgctgcgtggggccggcatctcagcgggcgcgagtgcagtctcgccccacgc

SEQ ID NO: 366302 - DNA, 122 bp, Homo sapiens
atggaggaaggaagccgtcaatcccctacctcctttctctcaccgcagtaatgaagtatgcgctgcactttctcattaggaagcatttctctttccatccccacatttgcatcttccaagca

SEQ ID NO: 366303 - DNA, 122 bp, Homo sapiens
ttccctttcgtcgtctcctttgcgacccctgccccttctccagatttcgatttagggggtcgcaaggctttgagaagcgttacgttttacctgttacctgcacaagtgcagcccctgcttgt

SEQ ID NO: 366304 - DNA, 122 bp, Homo sapiens
cccgcaaacagggtgctgcctcctggcggccaagcgccaccaaagcgggtgatccagatgcgctgtggctttgcgggcggtgtgggtcaccagagaaagaggaccaggcggagaaggcttaa

SEQ ID NO: 366305 - DNA, 122 bp, Homo sapiens
agtcagaagaaaactccaatatcttacacttttccccttggaagctctgcctttctgtggcgcactgttgcttgtttccttccaaagcctgcctctcctatctaccttcctcacagtttaag

SEQ ID NO: 366306 - DNA, 122 bp, Homo sapiens
gactggggtcggcgtttagttcagcgcagcgactcggggacctggagctgacgcctagtacgtatgaggaagaacggggtgggtggctgcctgagtctggaggcgacgcctcggttgtgcag

SEQ ID NO: 366307 - DNA, 122 bp, Homo sapiens
gccttggtcatagtccaggaagacacccaccttgtcaagcttgtcccggacgttaagccgcgtccagggctccgtgcaggcgctgtactggttgccatcgtgcatcacgatgcagtagaagc

SEQ ID NO: 366308 - DNA, 122 bp, Homo sapiens
cgaggggcgggtgccaacggcgtgtgggcggggcctagggagtgagcggggcgcatctcccgctaggagttcctagtaaagtggcgggagccgcagctatggagccgcaggaggagagagaa

SEQ ID NO: 366309 - DNA, 122 bp, Homo sapiens
gcacacgaactacacgatggaggtacggcagccagacaggcgtgtgccgctcacttctcacggggaccatgccacctcctcagggtgctttcttcatgcacttgtctttctttgttcctgtt

SEQ ID NO: 366310 - DNA, 122 bp, Homo sapiens
ctggtcccagcaaggttgggcacaggtttgctgcttaagcgtggcgctcagatcggggaccgggtggagggagttggtgggggctttcctttgatttttcaaaaacccttggacagaattcc

SEQ ID NO: 366311 - DNA, 122 bp, Homo sapiens
tcatgtgtgtaaaatagagtgaaatagtcaataaagttaatttactgttacagtgagatccggaaagcaagcaactatgaatctgaatagtttctggaagcatccgatttatatcttttcct

SEQ ID NO: 366312 - DNA, 122 bp, Homo sapiens
gggcactgcagcgtgaagagttctctcacccattgctctgtcctcctgcgcctggatcctcgagaaacggactgttcttagaagctgaaagtccagccggatttacagacatccaagtaaga

SEQ ID NO: 366313 - DNA, 122 bp, Homo sapiens
agtcaaaagggggggcgggaggacccctactgggggccttctcttgctctagaccagagacgccaggcgggaggggtcttgaagctgcgtttaccaaaaattaggaaaatgtccatcattca

SEQ ID NO: 366314 - DNA, 122 bp, Homo sapiens
ccagcggcaccagagagagaaacatgagcaacaagcaccttcttcaactgtttccccctccgtcagagcccctcctccagcttacatactaaccaccccaccctaccgtgcaaatgggaggg

SEQ ID NO: 366315 - DNA, 122 bp, Homo sapiens
ctccaacctgggcaacaagaacgaaactcggtttccaaaaaaaaaggtctgtcacagtaacgacagtcatgcgtgacatcactcgagaaaggaataaacccacgttttggcttaatctctac

SEQ ID NO: 366316 - DNA, 122 bp, Homo sapiens
gtcccacgcagccttagtttatccgccttgtgtgatttccctttgacttcctagaacctgcgtgatttgcctgactccctctggagacactgtgttgcctttgggcaaggctcttttaacgg

SEQ ID NO: 366317 - DNA, 122 bp, Homo sapiens
cagctccctgccgctcagggcatggggtcaagggtcaggggtcaggggtcgggttgaggccgtccggcacgtagccggctgctctggctttgctcctgccagggtccacgaagctgccagac

SEQ ID NO: 366318 - DNA, 122 bp, Homo sapiens
aaatagtctaagaaatcacagaaaagacttctggcaactgtatatttctgaacagagggacgtgagaccattttgtagcttgcattttggcatttgctatttgttaccatatgtgtgctgaa

SEQ ID NO: 366319 - DNA, 122 bp, Homo sapiens
agcacattcagaccctcagccttccccagaggggcacatccgtgcttactttttgttttccgtggatgctatggtttgaacgttcctccttcaaaatttatgttgaaacttgaccccatcat

SEQ ID NO: 366320 - DNA, 122 bp, Homo sapiens
aaccctttacatggagagtaattttaaatagctacaatttttgagcttgtccgttgataccgagctcagcaaaagaaaaagcagtgattacaggcctgaccactactcaatgattagaatat

SEQ ID NO: 366321 - DNA, 122 bp, Homo sapiens
aagagaacattgtgtgtgtatgtgtgtgtgtgtgtgtgtgtgtgtgtgtgtgtgtgtgcacgtgcacgcacgtatgtgttgggggctgtgtagcttctcctaacttcaccatgcagaagtca

SEQ ID NO: 366322 - DNA, 122 bp, Homo sapiens
ccctggcgccccccggtggctgccccacgtccggagaacaaggccggcgatgttccagggcgccccccggtggctaccctcagccactgcggctccccgagactcccagtagtcacattccg

SEQ ID NO: 366323 - DNA, 122 bp, Homo sapiens
gtaattctcgaggaccacattgattaacgcccgcccagggctagccacaaattagagccccgtcctgaaagaagcagtgctatgtcttgtaaggcatgcttccaaaggagcttgcattgcac

SEQ ID NO: 366324 - DNA, 122 bp, Homo sapiens
tgtcttcaacgccgagttccgcaacgtcttccgcaaggccctgcgtgcctgctgctgagccgggcacccccggacgccccccggcctgatggccaggcctcagggaccaaggagatggggag

SEQ ID NO: 366325 - DNA, 122 bp, Homo sapiens
tgctcttttggacgctggaatgctggtgcattgttgccggatgctggaatggtgcacgcacgctctgttggacgctggaatgctggtgcattgttgccggatgctggaatggtgcacgcatg

SEQ ID NO: 366326 - DNA, 122 bp, Homo sapiens
ggtggcattgagacaaggggaggcttagggcggaggacctgtcaggcagtccttgggatccgaggggcttgggaatctctcagatttatgtctattctaaaagagggggtgagaaaatatga

SEQ ID NO: 366327 - DNA, 122 bp, Homo sapiens
tcctttttctcaatgagaggagcctaatgggattcttattatcagactcataaatcaaaccgttaggccgtcacgtctggcacgtggacaacacccccatcccccgcggcaaacggagaggg

SEQ ID NO: 366328 - DNA, 122 bp, Homo sapiens
gggcgatctcatttgtttcccggtatccccgagaggtgggtactgtgattgctctaactccgtcagagcgcaggcttatagaaggcactgtctccgagctgcgcccctctccccgccattct

SEQ ID NO: 366329 - DNA, 122 bp, Homo sapiens
gagcagcagctgcaggtaaccgcaggctgtgggagcttgtggggagtccaggctagggctcggggtatagggtccaccttcaaagaacacgtgctatcaggcaggccagtggatcgagagca

SEQ ID NO: 366330 - DNA, 122 bp, Homo sapiens
gggcggcggctctgggagaagtgacctgaggagtctgcagatcccagcccgggacggaggcgccgcgagaggagctactaagccctccaagccgccctttccctcttgcctccccagcccag

SEQ ID NO: 366331 - DNA, 122 bp, Homo sapiens
accacccccgccggcagcaccacgtccccgtcccggtgtcttcgccggctccctcgctcccgttcgctcttcaccgccttcattctgtgattttggctgggcgaaagaaaacagatcagttg

SEQ ID NO: 366332 - DNA, 122 bp, Homo sapiens
tagggtctctaatctccaaaacacctgttgcccctgcttgggggcttgtgaggtccctgtcgggcgcccctcttggcagccactaggatgcgctcactccccaaaaatgcagcagccccgcc

SEQ ID NO: 366333 - DNA, 122 bp, Homo sapiens
gatgtgagccgggctgagtcccgcgccgggtgcgcggatgtgtgctgggctgagtgtggccggccacttgtttgcgttgtttgtggacatacaaataggctgttgttgaactgggttcgtgg

SEQ ID NO: 366334 - DNA, 122 bp, Homo sapiens
attatcatttgtagcaaaaataactagaattgagtcctatgcattaattcattaggtatccgtaacattccagatttatagggttgttagggtcttagagttcaggccaaattgggataagt

SEQ ID NO: 366335 - DNA, 122 bp, Homo sapiens
cggtgaggatgggggaagctggcccctcccacagcgctggtgggtgtaagacggtgcagccgccctggaaaacgggctggcatggagctaccgtgggaccctggaaacccactccccggtat

SEQ ID NO: 366336 - DNA, 122 bp, Homo sapiens
tcgcaccctggccagcctgctgagtccggtggttttgccaggtgccgcccatggaggttccgtagaaggaacgtgctcaccaacttgcgcaaccgcctcgaccaaacctgttcccaaaccga

SEQ ID NO: 366337 - DNA, 122 bp, Homo sapiens
tctgcctcttacagtgagaggtgacagcgtactggcagccctgcagcccttgctcgctctcggcgcctcctcggccttggcgcccactttggccgcacttgaggagcccttcagcccgccgc

SEQ ID NO: 366338 - DNA, 122 bp, Homo sapiens
ttgtgcggcgatgggatgcggccgtgggcggtggagtccaggcggagtccgctctccacacgcgagggcgcctcctcctcaccgctcgccggcttcaaagctcgcgcctcaggcgacggcag

SEQ ID NO: 366339 - DNA, 122 bp, Homo sapiens
tgaccttcagaacttctcttggtgtggaaccattacgcccagggttcactcccctctcatcgtccggccttctcccttcatcttgatctgggaagaatgaaatgaactcagctacactctct

SEQ ID NO: 366340 - DNA, 122 bp, Homo sapiens
acaagcaggaataaaaggccaccagagtcacagagacgaagctgcggcgttaccgaggtgcgaatcactgtgattcctaggtgcgaatcatcaccagcaatcacttctctcaggactccttg

SEQ ID NO: 366341 - DNA, 122 bp, Homo sapiens
atcttggctcactgcaacctccacttcctgggttctagcaagtctcctgtctcagcctcccgtgtagcagggactacaggtacatgcccccacacccagctaattttttgtattttagtaaa

SEQ ID NO: 366342 - DNA, 122 bp, Homo sapiens
caagaattgcgtttggacaatcagtggcgaagcccctgagttcagggccctggtctcctgcggggttccccttcgctcctaaaaagcgccagtccaggacagctcggagctgcgcgtcggac

SEQ ID NO: 366343 - DNA, 122 bp, Homo sapiens
ttctagaaactcccagagccgacgccggtgcaaggagccgctccgatacagctacaaccccgaccagttccacaacatggacctcaggggcggcccccacgatggcgtcaccattccccgct

SEQ ID NO: 366344 - DNA, 122 bp, Homo sapiens
aagagaatgtattgggggcactctgagccctaagacattgccccgggatgcctggcatcacggagtgtgcccagccaccttgggaaggggagggccgggccctgtggctggcgggaaaaagc

SEQ ID NO: 366345 - DNA, 122 bp, Homo sapiens
gctgtggttgtgggccttgtggcctacatagccttcaagaggtaagagagggcacggtggcgacagagaggggagatgtttgccctcaaggaagactttgctgtgaccttgacctgaaaaca

SEQ ID NO: 366346 - DNA, 122 bp, Homo sapiens
cgatttcatgaattacctgaggcttattgcccgactccccgcactagcttggaagctccacgagggcagggagtttcatctgttcaccgatggatccccagtccctaacccaaaagccccag

SEQ ID NO: 366347 - DNA, 122 bp, Homo sapiens
gcgccccggagtggatcgcgctggaggcgtgcgccgggcgagaagccgcggccgcgggagcgcagtatggggaagaaccgcgagatgcgcctgactcacatctgctgctgctgcctccttta

SEQ ID NO: 366348 - DNA, 122 bp, Homo sapiens
gtactatccaaagaggctgtacatccagcaagtcactagttagtgaataggaattcttggcgtgtaatgccatttcttgtagctgaaggaagacatgtgataagtgattaacctgttctgtg

SEQ ID NO: 366349 - DNA, 122 bp, Homo sapiens
acactcactcctgctcaatagtcagctgccgtccatgatccagaggaaagagatgaaagacgggggatgtgtacaaacacacgtgcctctaagtgtctttgtgtttggccgacagtgtgctg

SEQ ID NO: 366350 - DNA, 122 bp, Homo sapiens
ttcccaggcaagggcttggggggaatgagccgggagagccgggtcccgagcctacagagccgggagcagctgagccgccggcgcctcggccgccgccgccgcctcctcctcctccgccgccg

SEQ ID NO: 366351 - DNA, 122 bp, Homo sapiens
aaagcgcgtttttgctcagggacgctgcgcaagaggactacctcttctctgtgagcttagcgaggcaacagatccctgcatgcccgaattgagcagtgaaatcacaactttagttttgatgc

SEQ ID NO: 366352 - DNA, 122 bp, Homo sapiens
aagtccgaacagaaagaggagacttaagggagggcgagccctgactttgtttcgtttttccgaggcgacattcggtgcagctttctgggtccccaaggctgaccctgctgcaccatgaacca

SEQ ID NO: 366353 - DNA, 122 bp, Homo sapiens
ctcttcaagagtggctatggaaacagaccagatctctttgctgtctctgaggccatgcctcgtcattctcttctcaacttcactcctgctggcttcccaagttcactaggagcatcctcttt

SEQ ID NO: 366354 - DNA, 122 bp, Homo sapiens
gtgggcccagccttgaggcgctttgggagcctagggtgctgagagttcatgaacacttaccgagttttgctgggtgctgatctcagcactttgtgtaggctgactctagacatcctgtgtcc

SEQ ID NO: 366355 - DNA, 122 bp, Homo sapiens
ggcaccattctgctcagtcaaaaccaaaaccctttcaaggatctgtgagccacagggtgccgcccattctcctctgacctcacgtcctgccacccacccccttgctttctctgctgcagcca

SEQ ID NO: 366356 - DNA, 122 bp, Homo sapiens
ccgcagtcgtccccgctgtagcccgtgtcgcaaatgcattcgccgtcctcgcagcgcccgcggccccggcagtccctcggacatgtccgcgtgctgcagtcctcgcctgtgtacccgggcca

SEQ ID NO: 366357 - DNA, 122 bp, Homo sapiens
aaacttagtgattggagctgtcaccattgaaaatttctaaactttgcaagacagcagtgacgtttcaaatgacactctcagagagttgataatgggctaaaatagatctccctccaggtgga

SEQ ID NO: 366358 - DNA, 122 bp, Homo sapiens
aggcgaaaggtacagctaggaaggaggaaggagctgagacatatacagacaccggagcagcgtcaagcggagtcaaccccgagaaggatggcttgaaaagctgtttggaaaagcagaggacc

SEQ ID NO: 366359 - DNA, 122 bp, Homo sapiens
gcagtgattcaggaagatgaattatctgcaacacgcagaagttcagtcctctggcatgtacgaatcctggtgtggtttttgcacaacattctgcctgggatgcgtagggagaagctgtgata

SEQ ID NO: 366360 - DNA, 122 bp, Homo sapiens
gctgctgagctgggccattcatctggcctgggtggagggaagctgaacagggtccctctgcgacctggaggccccaggccctaccctgagcccttggtgctcttggagccctgagctgctcc

SEQ ID NO: 366361 - DNA, 122 bp, Homo sapiens
ggctgtcccactaaagacggaggacgagggatgtctgcagtcagacacatttcggaaacacgtgacccccaggtctttaatgtgccccgcgcccaacactctgctaggaggtgcagatactc

SEQ ID NO: 366362 - DNA, 122 bp, Homo sapiens
attgggctcatgaccacctagaatagaagctacacttcccaacctttcttgagttatgtacggctatatggctaagttctgcccaatgggatgtaaacagaagtatgaacaaaatatcagac

SEQ ID NO: 366363 - DNA, 122 bp, Homo sapiens
tttttctatggctcatcatatgcaggccatcacagacagggccctatcctatggtttgcccgagtttatttggtttttcatttacattgtggtcttttctcttagatactccaagtttgcat

SEQ ID NO: 366364 - DNA, 122 bp, Homo sapiens
atctccatggctaccctaagtggctctctagtgtttcggatacagtagatactggggaatcggctaaaagtaccctggaaatcggctgaaagtaccctggaaatagggaaatctcttatatt

SEQ ID NO: 366365 - DNA, 122 bp, Homo sapiens
acctcacgatctgcctgcctcggcctcccacagtgctaggattacaggcatgagccactgcgccaggccatatgttatttttgtataattaataggttgtaactaatcttggtatcattatc

SEQ ID NO: 366366 - DNA, 122 bp, Homo sapiens
aggagagcctttattgtataatctctagttaatgagcctctctctgggcctcaaaccgggcgagttattatccgtgtctgcaagtctggagaagaggctaagaagcaaacctcctgggtgtc

SEQ ID NO: 366367 - DNA, 122 bp, Homo sapiens
tgggagtcagcctagacctgccatgcgcagttaccccggcagcttcggatgtgcagcacccgtcagaggtgtggagacagggtgtaaatagcacccaaccctctagctgccaggaggccgag

SEQ ID NO: 366368 - DNA, 122 bp, Homo sapiens
ccttgtgccccacgtagtaacgcagataaaagtcactctccatggctcccaaaagacaaccgagcctgaacttccaagagcaagccgcactgccgccgtctgcgcccgacactgacgtttgc

SEQ ID NO: 366369 - DNA, 122 bp, Homo sapiens
cagtgagccggtgtgatccctccctgatagaaagcaccaggctcctgctcctcctaggaccgcccctcccccaccagcccccggcaagccgcctcctcggcttccggaactggatcacagga

SEQ ID NO: 366370 - DNA, 122 bp, Homo sapiens
cccaagtgcagccggcagggacggcgcctcacactgacctgggacgcgctgtcgagttggcggcggcgctttcaaacctctctccggcactgcccgaccctctgtgcggccctagggcgccg

SEQ ID NO: 366371 - DNA, 122 bp, Homo sapiens
tccgcttcaaccaggagcaggagtcagaggtgttgaacaggcgctcgtcgacgagcgggtcgttggagactacgtcatccaaggacatccgccagatgtctcaacagcaagacttgctcagt

SEQ ID NO: 366372 - DNA, 122 bp, Homo sapiens
cctcctgttctgaggtctgcttttcagggaacaggcgctttgctgccgccgcccctgcttcggttctcactggagcagcgacatcaaggccagcccatttttaaagcaacagttcacaattt

SEQ ID NO: 366373 - DNA, 122 bp, Homo sapiens
cgtgaccaaataaggactttgttccccgacggctgcggaagctgtggaacttggtgcgtgcgtgtgggggaggacgcagcaggaggactcgctagagagctgctcctcaaaactcctagtac

SEQ ID NO: 366374 - DNA, 122 bp, Homo sapiens
attcggtccatccaactcccagacctcacgtcaaccggctgcaccccactttccagcctgcgccccagatctgcagccttcgcccctagatacacccgcctggtgatgaggcgctcctcgcg

SEQ ID NO: 366375 - DNA, 122 bp, Homo sapiens
gaacaccatgacctctgcacgctcaacctctccaggaattcttttggagccactgtgacgcggcaccagcctcactgcacatctttgttctttttggtgttttctaaactgagttccttttt

SEQ ID NO: 366376 - DNA, 122 bp, Homo sapiens
cttaggaggttcatgatgaaggatgcggcccacagtcgtgtgagcagaggacggcactcgcgagctccctggggctcctcagacccggtcaccgaacagcagagacgtgctctttcacattc

SEQ ID NO: 366377 - DNA, 122 bp, Homo sapiens
gctcctggcgctgctggcttctgggcggtttttgtcttttgatttcaagagttaggagctcgagaaccgtttggcaatatgtacgacgcggatgagggtaggtgaacgctcaaaacacacgc

SEQ ID NO: 366378 - DNA, 122 bp, Homo sapiens
cttcggaataagacagtaaatgttcttcatcacttcaccaatggcagatttttagatggccggtctaattttctccattttgctatatgaattatttgggcttcatcacttcaattggagga

SEQ ID NO: 366379 - DNA, 122 bp, Homo sapiens
tgtttgttaatttgttaatttgtttaggatatttttctcctttatccttgatgttctgaacgttcataacaaactgtcctttaagtatttttcattcattatgctaagcactcggtggcccc

SEQ ID NO: 366380 - DNA, 122 bp, Homo sapiens
actccccgagtttgtggctggcatttgggccacgccgggctgggcggtcacagcgaggggcgcgcagtttggggtcacacagctccgcttctaggccccaaccaccgttaaaaggggaagcc

SEQ ID NO: 366381 - DNA, 122 bp, Homo sapiens
acacaagccgggatgatccacaccagaaggtaaacaccattcaggtaactgaagattaaacgtagtgagctctgaatagccaaagcttaaacgtgaaagtactacagcccaatattagtaaa

SEQ ID NO: 366382 - DNA, 122 bp, Homo sapiens
actcagggtggggcaacttcctatttcgagtctaaagtaatcttggtctcttccggccgccgtaaaggggttgggtttagtgttctcccgccaatttaagcctgtggcatggaacctaaaga

SEQ ID NO: 366383 - DNA, 122 bp, Homo sapiens
aaatttgacctgatttaaaaggtctgccaaggctcgccctggctgctgcactgggaatggcgagtcatgaggatgtcccagagttcagcgtgtgcacgatcccatgtactcggaaggcacat

SEQ ID NO: 366384 - DNA, 122 bp, Homo sapiens
ttggcgggatcctcccctctgcagacccggggaacctgcccacgtgtgttcacgtgcccccgccacacgcctggttcacctcgagacctgcatcaacttaccggtgcagccagcacgtctgg

SEQ ID NO: 366385 - DNA, 122 bp, Homo sapiens
aaaaaaaaaaaaaaaactttcagcacttaatgccccatcacagcagcacagtatgcgtgtcgtgctaacatctggaaatacttagtggtattacaaacagttaaggagttcacccagataat

SEQ ID NO: 366386 - DNA, 122 bp, Homo sapiens
gcctcacagccagcccagagaagtggaatctgcactgaaactctgggtggctggagccggcggactgggcatgctcagaagccagggctggctttggtctcaagtaggaagctttggcactc

SEQ ID NO: 366387 - DNA, 122 bp, Homo sapiens
gtaagaatgctttcgcattagcatcaggtccgaggttactcattagaaactgggcaaagccggaaggcggccactttgcagcaaagaagccctagaccttgggagtcaatcaggccagccca

SEQ ID NO: 366388 - DNA, 122 bp, Homo sapiens
ctgctgtaggccagggagaatggggcacaggaagcaccctcaggcctggcacccagtggccgcctcggttccgagatcgggagcccgcgctggagccgggttggaaaccccgtgcccttctc

SEQ ID NO: 366389 - DNA, 122 bp, Homo sapiens
tgggggggaagagtaaaaatgttctattttgggcttatcacctgggactttcgaccatggcgagtctgcagagaagatttaggaatgattctataggaagccagagtgtgataatctttaga

SEQ ID NO: 366390 - DNA, 122 bp, Homo sapiens
tctcccggcattctccactcctgtctctgtgtgtttaaaaaccggtgtgggaagtgtgcacgcctgtgacgtcagactccagaccatgtatttcctgactcccatcttggtagccattctct

SEQ ID NO: 366391 - DNA, 122 bp, Homo sapiens
ttcacttgccacaatagggaagctggcagggctctggccaggatccagcacctccctcctcgccagggaagctgccgagcaaatcgctctgggctagatagacttccaagccaggtgctttc

SEQ ID NO: 366392 - DNA, 122 bp, Homo sapiens
ctcgcagagccataagtaatttcgaaagtagtcatgattacaatcattatcataaacaaccgaagtcctaattaacttcataaagggcagcatcctgcgatgattcaggaatgctctctctt

SEQ ID NO: 366393 - DNA, 122 bp, Homo sapiens
cattgtcttccgggggagccggggatctcaggggaggggaggggagacccgccccatagacggtagtgcaggcttgcccaccacctcatttgcatttcaaaggcaaacttctgcgggacttc

SEQ ID NO: 366394 - DNA, 122 bp, Homo sapiens
tagctgggattacaggcactcaccaccaagcccagctaatctttgtattttcagtacagacggggcttcaccacgttggccaggctggtctcgaacttctgacctcgtgatccacctgcctc

SEQ ID NO: 366395 - DNA, 122 bp, Homo sapiens
ctgcttccacttccttcagccactttttcagcagtggtcgcagcttccacatgttggcgacgcttagctgctgggcctcgaagcggcagatggtcgtctggctaagcaccttcccaaacaga

SEQ ID NO: 366396 - DNA, 122 bp, Homo sapiens
ttttttcgtatttgccaatcggagacaataaactgttatcttcgccctggagtatttattcgcctttctcagattaccaggaggatcagccttttaggggtaatcgaccatttctccttctt

SEQ ID NO: 366397 - DNA, 122 bp, Homo sapiens
cccgcccaaagtgaatgagtcagagtggctgacggcctggaggcaaaccttctcctgtcacgggcatggcctccaataccattcagggccactttgagtttgaggctctgtgcccacaattc

SEQ ID NO: 366398 - DNA, 122 bp, Homo sapiens
caaacacaagtcctctaacttcagtctattataccacaatgccagccaaaaattcttacccgggaataaacagaactcaaaaaatattcaaaatgctaactttactctatggtggttatgga

SEQ ID NO: 366399 - DNA, 122 bp, Homo sapiens
tgtgccgctgatcatttccacggtctgttatgtgtctatcattcgatgtcttagctcttccgcagttgccaaccgcagcaagaagtcccgggctttgttcctgtcagctgctgttttctgca

SEQ ID NO: 366400 - DNA, 122 bp, Homo sapiens
ggttcctagcatacccaatcacaaatgtgtttggcatcaccaccattgctaaggcacagacgtaattacacacatcttgttcgaagtgaccctttactccgatggccttaggcttaggcaag

SEQ ID NO: 366401 - DNA, 122 bp, Homo sapiens
ggaaatgcaagttggggctgcctcggggttgtgccatctgtgctctacctggaaggtcagcgcccagctgcacaggcaagtgaagactagaatcctgtcttaagcactgacccagccaccta

SEQ ID NO: 366402 - DNA, 122 bp, Homo sapiens
gcttggcctcaaactctctgacaacatcgctgtgtccagtgagccagtgacccgtgaccacggatcagcagctgtggcaggaggacgtcacgctgcgtcacagcaaacagctgctttcatcc

SEQ ID NO: 366403 - DNA, 122 bp, Homo sapiens
tgaaaatgaaggaatgccttcgaatcaaggaaagatagacaatgaagaacagccaccgcacgagggaaagccagaagtagcttgtattctggaagacaagaagttagaaaacgagggaaaca

SEQ ID NO: 366404 - DNA, 122 bp, Homo sapiens
acctgtagcattttggaaaagggctggagcccactcttgtgtggccgttcatcagtgagtcggtctatcttgcacctctctgatggtcagtagatggttatgttttctcccctaacatggat

SEQ ID NO: 366405 - DNA, 122 bp, Homo sapiens
tcgctggcgggtgttctgtggcatcccagggggtggagggacggagcagcttcgggggcacgtcctcctatatcctgtagaggacactgactccgcaccccaccctcgaggccggaaatcgg

SEQ ID NO: 366406 - DNA, 122 bp, Homo sapiens
ggcagaggctgcaatctcggcaccccgggaggccaaggcaggcggctgggaggtggaggccgcagtgagccgagaccacgccactgcactccagcctgggcaccaccgagcaccaagtgaac

SEQ ID NO: 366407 - DNA, 122 bp, Homo sapiens
gccctcatccctactcttcaaaatagctggaaaccagaggcagatgcgcagggcttcagacgttcctcactcgaagtacagtcttgttaaatggggctttaaaatatccatttgctgattag

SEQ ID NO: 366408 - DNA, 122 bp, Homo sapiens
ttcctattttgcttttccttgaaaggctaaatcgtgtgctttcttgccctctcccaaacacgttgcactgatattcattattgcaccaataattttaactttcttaatactaagtatggaag

SEQ ID NO: 366409 - DNA, 122 bp, Homo sapiens
acttccctagtttggctttaatatttacagcctccttgtcggtctacacgcctgaatgcccgaaggaagcaaaacatttattgcctttccctccctggtgtgcaggagctatttcatccaat

SEQ ID NO: 366410 - DNA, 122 bp, Homo sapiens
atcccagggcaccggctcgccgccgccgtgctcaactttcaaagctcgctcccgcgcgcgcgccgagtcgttcctgtggaccaatcacaacgtacagaatttcccactggccaaccaccgcg

SEQ ID NO: 366411 - DNA, 122 bp, Homo sapiens
tggttcaatggatgacctttgtgcgacactgttataccttatcagcctcgccagggcccccgcgccgcccaatcccagcaactctggttctcctgtgaccccaagccttccagatccctggg

SEQ ID NO: 366412 - DNA, 122 bp, Homo sapiens
gaacaggtaccgaccctggccaggggctctactgttcccgcaattctgctagagttgcctcgcctcccagctctgtccggggaaaccctccctgtgctatggatgcaggcgtttcctgttgg

SEQ ID NO: 366413 - DNA, 122 bp, Homo sapiens
cccgccatgcctgagcctcctcccgctccgtgggctcctgcgcggcccgagcctccccgacgagcaccgccccctgctccacgccgcccagtcccatcggccacccaagggctgaggagtgc

SEQ ID NO: 366414 - DNA, 122 bp, Homo sapiens
ccagagccttggaaaatccatctgtgctgagcctgggctgggctgcttcactggggcctccgggggcaggatcagccctggaaagggcacttttaaaccacgtgtgcagatgcccaccaagg

SEQ ID NO: 366415 - DNA, 122 bp, Homo sapiens
tcctacataatgtcagacttataggtaccagaggttagctcttcaatgtatctttctgggcggacacaattcaacttattaatatagtgaatgtactcagagataccagaactgtttgaggg

SEQ ID NO: 366416 - DNA, 122 bp, Homo sapiens
agagaagcaggaaggagggagaggaaagagaagagggagatggactggcctcagccaccccggagtacagggatgtcatcacaccagccctccagcggctgaaagagccagtgagaggcagg

SEQ ID NO: 366417 - DNA, 122 bp, Homo sapiens
ggcaaggccaggaagggatacagggttctagagaaccagggcctcaccgccagctccggccgctaagcaaacattccctccaggagtccgagaagccggtgtgcgaggggaggaaccagcct

SEQ ID NO: 366418 - DNA, 122 bp, Homo sapiens
gcgcgagtgcctccgccccgcggccgacagccccagcccgaacggcttcccggagcccaacgcagccaccacctccttcgccgcttcacaaaatggccgtcggcccgctcagcggctccgcg

SEQ ID NO: 366419 - DNA, 122 bp, Homo sapiens
taaaatacatttcatgattggagggcagctctgaaccaaagcctggttatttcttaaatacggtagtcccccgctttaaccgtggtttggcatggtctgaaaatattatttggaaaatcctg

SEQ ID NO: 366420 - DNA, 122 bp, Homo sapiens
ctttaacccccagtcccttccaggaagagccttactctgggtgagagaagggaccaagggcggggtctctccctgagctgagcacggtcatctcatccgccgaagcagtgggtggtggggtg

SEQ ID NO: 366421 - DNA, 122 bp, Homo sapiens
ggggagagggtggtatcacccccagtatctcagaagttgtacatcccccgtgatattgttcgtcatatccagggaggcgcaggatgacattccattgaatttcgcgacaggcgtacacgcac

SEQ ID NO: 366422 - DNA, 122 bp, Homo sapiens
agagggcctcggctgtgtgaggactagaggcggccgaggcccgggccggttcccccgaggcggcgacggagacggctcccggcacttccccgcgccatcttaactgagcccaagcgctgagg

SEQ ID NO: 366423 - DNA, 122 bp, Homo sapiens
aggggaacttgaggagggcccagcagaggcgggggcgaatgcagcctgagccaaccagcccgctcacgccagggtaccactgatcacagaccttccagaagccacaggaggctgcctagtgt

SEQ ID NO: 366424 - DNA, 122 bp, Homo sapiens
cacctcctcttccccatatccctgactccagaacagtcacgtgaacctcgtgggtttgagcgttcagaactcccttagaagctccccttgtcagcggggtaattatggaactggcagctacc

SEQ ID NO: 366425 - DNA, 122 bp, Homo sapiens
ctgcgttccacccttcgcgggaggtgaatgggtgctggagccagggccagtgctttgaggcgccagcaggagcaaactccatgcaggccccacggcaccatctgggagggtacctgccaccc

SEQ ID NO: 366426 - DNA, 122 bp, Homo sapiens
ggcggccagggctgctcggccagctctcgttccagctgcttgaagcgcttcttggaggcccgcttgggccggaggcggcgcaggcaggcggggaggcactggtctagcacgctctgcaaagg

SEQ ID NO: 366427 - DNA, 122 bp, Homo sapiens
tgaaggccggcgtgagcctcaggccaggggccaagaaggatgttagagttagcggctccgcgtgctttcatttttctttgcatcccctcagcccttcccatcacagtgtgcaccatcagtcc

SEQ ID NO: 366428 - DNA, 122 bp, Homo sapiens
tccttttttctgaacaatctacctacatttcagctacagggctggctttacccagtccggcgggagggaggagagggctggtctgtgacttcagtgctgaggtttgatcaaggcaaagggaa

SEQ ID NO: 366429 - DNA, 122 bp, Homo sapiens
ggcctatcgatgtttgaaatctgcttctcagttctgcgtttgtgattttacaatgacttccgcattcattagcatcccattaatgggccagtgtatgggaacagttgtactatgaagggagg

SEQ ID NO: 366430 - DNA, 122 bp, Homo sapiens
gcttggtttcccaatccgagaccggaaggaaccgggtagacatgagcacaagactctcatcgacttttggggaaaacaaaaacaccgataaaaatccaggcggtgaaacgagcagcaacagc

SEQ ID NO: 366431 - DNA, 122 bp, Homo sapiens
ttggttcctgcaggtgggttcgtggtctcgctgacttcaaaagggagccactgaccttcacggtgagtgttgctgctcttaaagatggtgtggacccaaagagtgagcaacagcaaggttta

SEQ ID NO: 366432 - DNA, 122 bp, Homo sapiens
aagatgtagcagaggctgcctgtcgtggctcttgtccacagagttgagtgatttctctcacgtgcctatggaggagagaacacacatagttggattgatccatacataattgggcgtttgca

SEQ ID NO: 366433 - DNA, 122 bp, Homo sapiens
atttttttcccctttcttcctaataagcctgcgtggaacgcagagcctgcgcaatagccccggtgaagttgtcgatgccctgaactctggtttttttactgccaggcgtggcaggagtctgt

SEQ ID NO: 366434 - DNA, 122 bp, Homo sapiens
ggaaggccccagggccctttcatccgcgccgcgcctcgctcccgcccccgtgactcgaggcgcagcgtgcgtggtgatcccggcccatggggacttccccgcttgctcctcgccaagatggc

SEQ ID NO: 366435 - DNA, 122 bp, Homo sapiens
ggcagcttctcctgggtcagcgacagccggtacccagccagcctgccacggccgctgccacggatacagagcctgtttacctatgacgtcactaccttcctgactccggaagcacttacagc

SEQ ID NO: 366436 - DNA, 122 bp, Homo sapiens
tcaccacttggtggcagtgttgctccccgcatcttgattgcccttgtttctttccaatcccggaaaagtgtgcttgtttttttttttttccctgcgtgtttttgtttttgatcttgctataa

SEQ ID NO: 366437 - DNA, 122 bp, Homo sapiens
agtatgcagccttttcagattggcttctttgactagcaacatgcgtttcaggctcccccacgtctttttatggcttcatagctcatttcttgttattgctgaaaaacattccattgtatgag

SEQ ID NO: 366438 - DNA, 122 bp, Homo sapiens
accatttagctataacccccgaccctaacttcagcgctaagctttatctcatgatctactcggggatttcttacagggtatccttacactaaccaaaactccgatcagagccttaatcctct

SEQ ID NO: 366439 - DNA, 122 bp, Homo sapiens
aaggcagctcagacacacgcgtgccccggcgccctcccggaacgtgccccggcccggtggcgtggcaggagctcggcatcttcccgtggctccgtcagcagccaaaaggagaagcgtccatc

SEQ ID NO: 366440 - DNA, 122 bp, Homo sapiens
cgggcgcgggccctgttgggtctttgggacgcgggtcccgctggggccggggatgctgctcgctgtgagcgcgggtcccgtccgccgctggccccgggcgggcgcacgggggtctaaccttg

SEQ ID NO: 366441 - DNA, 122 bp, Homo sapiens
tagcctccagggacaacccggaaaccacatttcccagcgtgccgagcgcctctgcgcaggcgcaaagagtttccctcgttgccatgggaacctcgccccttctagagtcctggccgcttgac

SEQ ID NO: 366442 - DNA, 122 bp, Homo sapiens
catgaagagtaggagaccggcattttcccgggcctaagaaggtgactgcctgcagggagacgcaggggtggtgggttagggagagaaaggggagccaaatcagacagggccttgtaggccat

SEQ ID NO: 366443 - DNA, 122 bp, Homo sapiens
acagtgaggaaggctgggcggcttagcccagaatgcacctggaatccattaaagtggactcgtggagacaaatgctgggctgtcagaaaacccagcctctaattcccctggctttttctcat

SEQ ID NO: 366444 - DNA, 122 bp, Homo sapiens
tttgcagctctttcctagctcttttcccctgcagaagtttccaaagagactacggggctccgggagagcaggcgcttttaaatagccggcccctggctgccagccagtttgtagctgcaatt

SEQ ID NO: 366445 - DNA, 122 bp, Homo sapiens
ccccaccacccccccggagtacttaagggagttggcggcgctgctgcattcattgcgccgcggcacggcctagcgagtggttcttctgcgctactgctgcgcgaatcggcgaccccagtgcc

SEQ ID NO: 366446 - DNA, 122 bp, Homo sapiens
atggctgcggaagaagaagacgaggtggagtgggtagtggagagcatcgcggggttcctgcgaggcccagactggtccatccccatcttggactttgtggaacagaaatgtgaaggtaaaaa

SEQ ID NO: 366447 - DNA, 122 bp, Homo sapiens
aaggaaagcggagggtttgctggttccgggggggagtaaatcagtcgctttataattccacgatgtttgcatcattttggcttctgagaggctgcgttttgaggagacaccagaagcctggg

SEQ ID NO: 366448 - DNA, 122 bp, Homo sapiens
gtggtggcacttctgtagtctcagctactcaggaggcagaggtggcagaatcacttgaatcgagaaggttgaggctacagtgagacatgatcacaccactgcactccagcctgggtgacaga

SEQ ID NO: 366449 - DNA, 122 bp, Homo sapiens
catcgccttgtgcccatgaggggacccaggcaggcggaccccagagcctgcgtgcttcatcgccttgtgcccatgaggggacccaggcaggcggaccccagagcccgcgtgcttcatcgcct

SEQ ID NO: 366450 - DNA, 122 bp, Homo sapiens
tgggctttcctgcatctgatgcttaggacatggactgaccatgctactggctgtgagtcacgccattggcttctctggctctccagctcgaagtcagtctaactgaaacttcaccactgtga

SEQ ID NO: 366451 - DNA, 122 bp, Homo sapiens
gcccacagctgctgagtcaaaccccagcaggctccacccttcctgctcccagctgcattccgctaaaaaaaggcctgccagcagcctacgcaatggaacgcggggtctaagcacacagacgg

SEQ ID NO: 366452 - DNA, 122 bp, Homo sapiens
cttcttgtttttaggattccctttgcttcttcctttgaattctctaaaataggcagctaacggattatatacttcagggtttggctttgtgctaaatgtggttttgtgttttgctgtatttc

SEQ ID NO: 366453 - DNA, 122 bp, Homo sapiens
tacctccccttcccgggctaaacgctggggtcggtctggcagctattccgggaatctgagcgcggattctgacaaaggagacgtcttccaccgaccacatcacatggagctccaaagcacga

SEQ ID NO: 366454 - DNA, 122 bp, Homo sapiens
gcgaggcggccaatcgctgaacggcgattcgagggcccaccctaagcgacgcctccgacgcggaggaaaaacgcgattcggcccgccctcattccgagaagcagcacccagaccacgccctc

SEQ ID NO: 366455 - DNA, 122 bp, Homo sapiens
gaaagaatccacacaggggtcgggaagtcaagcggcatcaacaccaggctttgtcaatagcgccattagacccagttatcttccccagcaagcgtgagaactgggagggagttccaggttcc

SEQ ID NO: 366456 - DNA, 122 bp, Homo sapiens
gtctagctgcagctccagttccatctgctaccagcccctctctacttaagactggcactacggaggtgaaaagagaggcacagctttgtgctgccctctgctggtttcttggacactgtgct

SEQ ID NO: 366457 - DNA, 122 bp, Homo sapiens
actaagagcctcccttttggacccttcattcctgagccacacaggcactggtcagtgcttcgtgggtccagcgcacaccaccctcaactgtgctccgtgttgctaggccccaagggtggggg

SEQ ID NO: 366458 - DNA, 122 bp, Homo sapiens
ttcctactaggaagggaagagaacgactgggcctcaggccaccggctgtgaaggttgcaacggattaggggagagaatctcggcgctgaggcagtcagaacaccattcttacccgcttaaga

SEQ ID NO: 366459 - DNA, 122 bp, Homo sapiens
gaggtgaggatgtcaggagagaggcagcgccgccgggggaagatgggagggagaccaatgcgcagtgacagtgatcctggggacacgtgaggaataacgcagcagtgatgcagcttcacggc

SEQ ID NO: 366460 - DNA, 122 bp, Homo sapiens
ccttgtgacgtcacacgcgggtttttaaggccgaaccctaggcaggctctgcagaggcagcggttggaggcgcggtgggtgtctgcgggggtctcgcggggcggctgcggtgtttcaccggg

SEQ ID NO: 366461 - DNA, 122 bp, Homo sapiens
cggagcgggaagtggataaagaggaccccaagtcacaggaggcactctgagagcaccaagcgcccggggaggccatccgcaggtgggcgcggggcctggattccacagaggggcggagtccc

SEQ ID NO: 366462 - DNA, 122 bp, Homo sapiens
tgtcgcggggaaggggcagatttcggggtctaggcttggaggggcaacgatctgggacaccgggggccagacggggagtgtggggaccccggacgagtccactttgtgtcaggcctcacggg

SEQ ID NO: 366463 - DNA, 122 bp, Homo sapiens
tcagccctgctctgctgactgcgatcctcccaggagactggcagctcccaaaccaactcccgtgcccacgcctggcaatggggtaatcaatggggtgatgctcagtgttacccaacaggcgt

SEQ ID NO: 366464 - DNA, 122 bp, Homo sapiens
taagcttcatggatctgattctcaatggaacaactgattgaaagcaggcgagattcgatccgaatgaccctcaagatatggaagggtaaaaaacatacgtaaaatgcaaggagtagcagaat

SEQ ID NO: 366465 - DNA, 122 bp, Homo sapiens
aactacccccggagggaggagccagtccgaacccaaggcgccaccgccgcagaagcggagcgaggcagcattcgcctccatggcccactcgccggtggctgtccaagtgcctgggatgcagg

SEQ ID NO: 366466 - DNA, 122 bp, Homo sapiens
cgacagaccccacacgtgctgagcgctgccttcccaggacgccttttctttctctctgggcgggcctcaccctgccccgcctcttgctccggcccgaggcctcatctgtcggggcacccgag

SEQ ID NO: 366467 - DNA, 122 bp, Homo sapiens
ttcttaggccttaaaggggtccccgtgtctctccagtctagagcctaagttcaaacgaggcgtataggcgaggacagcaggaaggctccaagtcaaacaaacggatggtacgaatttcgcct

SEQ ID NO: 366468 - DNA, 122 bp, Homo sapiens
ggagggggcgccgggctccggctgcaaagctgtccgcagccggctgcccgcgcgcggtcccgcagggtctgggaaaggctttgtttttagattcagttgctgttgcgaggggcgggggttaa

SEQ ID NO: 366469 - DNA, 122 bp, Homo sapiens
gggggcagaggggatcctaagtgtggccagtgaccaaggacctaagcaaggccagccaggcgcggtgatctgtgcctctggggcggggccaggggcctgtgcatgggcacaggctcacacca

SEQ ID NO: 366470 - DNA, 122 bp, Homo sapiens
gaagtcctggctcttggaagccacactaaaggctgcgtccttccagggcgcaactctgggcgcaaatgttacactctcctcccctcacccggtgggggtggagtggggagaaagggccttct

SEQ ID NO: 366471 - DNA, 122 bp, Homo sapiens
accggttccttctttatcaaacctctcccatccgcagcgggaggctgggacggcaggtagcgtcctccttgtggggctcacatcgaggatggtgactacgaaactgaggtcactgtgtggcc

SEQ ID NO: 366472 - DNA, 122 bp, Homo sapiens
gccctcggatgcacatagctgtgtccttgccctaaggtaacgttaaattgagttgtgttgcggccttgcatgcatttggaatttagtgttttctgcaggagaaagaatgagcctgggaagac

SEQ ID NO: 366473 - DNA, 122 bp, Homo sapiens
ctccacttaaccctctctccaaaagtcacaggatctcaggaagcaggagctcctgctgtgcggcaagaagaaagggaacaaagacttgtaatatggcaacgggaatggaaagagcaatcgga

SEQ ID NO: 366474 - DNA, 122 bp, Homo sapiens
tgcctgcgaccgttctcactgagcatgtgcagacggcggtgcgcatgctctgttgcggtccgcttcggtttctgttgcgggacccggggtgtctcctagcgcaaccggaactagccttctgg

SEQ ID NO: 366475 - DNA, 122 bp, Homo sapiens
agaaagaattatgatgaccgaatcctgtagaattctgctgaggtttacttttactttatgcgagggctaattaagctggatttataaataggttatttatttttgtcttgtaaatagaatta

SEQ ID NO: 366476 - DNA, 122 bp, Homo sapiens
gccggaaacagccacggcaacggatccactcatgatgggtctgaggatgtggccctgcctcggggctggacgagtgtgattcacccgcttccgccggcctgcaacaggtctcctttcacaga

SEQ ID NO: 366477 - DNA, 122 bp, Homo sapiens
attgaaatggagcctaacgcctttcacgaagagctgtcagaacgtatagggaacgccagtcggccaaagagaaagagcagccgcgttgaccttcagaaagctactgacccaatgcagtagac

SEQ ID NO: 366478 - DNA, 122 bp, Homo sapiens
gagcagactggtggctcccaggagttaaggaagggttcatggcagaagcaaggtaggcttcgctgaaacgggcaccgacacagggctcctctgagtgatgacggaaacctctggcatggcgg

SEQ ID NO: 366479 - DNA, 122 bp, Homo sapiens
aaggggcgttaacagggccaccactccggggctccgccactccccagccgttccctcctccggagaccttgcctgccaagagctctgccccctgccccgttcagggttggggctcggtggga

SEQ ID NO: 366480 - DNA, 122 bp, Homo sapiens
tttctgagtggctgtaagccatagttccagcatgtgtacatggggaataataacagtactcgcctcatggagttgtaaggaataattgaattcatgcaggaaagacatttggttcagtgcct

SEQ ID NO: 366481 - DNA, 122 bp, Homo sapiens
gcactccttaaacggcaggcacttcctgctagaggaggccagctctgaacagacagaaatcgggtggaaagctagcaggaggcgttgctcaagttcaaaacaatctgtgcgtgtccaggcac

SEQ ID NO: 366482 - DNA, 122 bp, Homo sapiens
cccttcagccggtacctacttgaggtcccggttgaccgaatgtaagttgtcctggaagtgcgcaataaaggccttctcccggccctccagcgtctccttgttccgcatcccatccttcaggc

SEQ ID NO: 366483 - DNA, 122 bp, Homo sapiens
gttaaattaaatgaaacgagaataaaatcccaaaagaggtgaacactgcacaagcgcgcacgcctgcgccgagcgcccgtggcccagcaagatggcgaggccgcgccttccccacccaggcg

SEQ ID NO: 366484 - DNA, 122 bp, Homo sapiens
ggacggatggcgagcctgggaagccccgggtgtcctggtggagaggttccctgccgggggcggggcgctggagagcttccccggcgcggagagcttcccgggcgcggagagcgcagagaact

SEQ ID NO: 366485 - DNA, 122 bp, Homo sapiens
aggcagggcctggctggggcatggcacctgtacccctgcctccaggtccccatcacagctcgtcccagtttactgggaccttgtgctgtgtacctacaatgaggtgcacacattctctgggc

SEQ ID NO: 366486 - DNA, 122 bp, Homo sapiens
caggccccagagcagcccaggccatgaccctgccgagcacggtgtgtgatctttgctggccgcccacgcggagcacggcccgggccccttctgcctgtgctgccaactatgcgcagcattcg

SEQ ID NO: 366487 - DNA, 122 bp, Homo sapiens
gttcggccacccgtggtccaaacgtgctaaatgaagcgttctagacgtaaacaattcacacgttttccaccgcgcggtgccgagtagtgaggtggaacccagcaacctccccccgcgccagc

SEQ ID NO: 366488 - DNA, 122 bp, Homo sapiens
tcgggagtcaggtcccatgctgtgtccccctctttgttccgcagctcagggttggccccacgtgacaggaataacctgaagaggggacaggatgcccaatgcagggtctgaggctgcaagaa

SEQ ID NO: 366489 - DNA, 122 bp, Homo sapiens
ctgggagaggagggcaatctgacccaattgtgtggttttttggcttgcaagaaatcttctcgcctaggctgcaaggactgctacatagaattacaaaaagttattgctacaaagcacttaaa

SEQ ID NO: 366490 - DNA, 122 bp, Homo sapiens
tggagaatagaaaactccgatttggctcaaacaggaaagatgcaatcgcccaggcctgctcgtaacggcagagctagctgcccccgcaccccgcccagacgggatggcccctgggtgcggtg

SEQ ID NO: 366491 - DNA, 122 bp, Homo sapiens
cttgggagagaggaggccctgtcaactggcacatgggaaggtcaggaggcaggcgaaggccgctgggctctgggccctactgtcctcagtgaaatagctgctgaggatattttctgagtgtc

SEQ ID NO: 366492 - DNA, 122 bp, Homo sapiens
cacgtcctgtgggacggtgagttccgcaacgcctgcgctcaccaggagtaggagtcattacgtgagcccttcgcggccccagcgtcgccaggagagcttccagcctctctagaatcactact

SEQ ID NO: 366493 - DNA, 122 bp, Homo sapiens
ctggagttgttcgttcctcccggtgggctcgtggtctcgctggcttcaggagtgaagctgcgggccttcgcggtgagtgttacagctcataaaagcagcgtggccccaaagagtgagcagta

SEQ ID NO: 366494 - DNA, 122 bp, Homo sapiens
tataccttccattgagttggcagctcattcttaagaagatattcatcccggcacaggtatcggacctgaagttaatctcagtgtatccccctcttcctctacaatgcagtttttaactctaa

SEQ ID NO: 366495 - DNA, 122 bp, Homo sapiens
ctctgtttcactctattaaatcttgcaactgcactcttctggcccgtgtttgttagggctcgagctgagcttttgctcgccatccaccactgctgttttgccgccgtcgcagacccaccgct

SEQ ID NO: 366496 - DNA, 122 bp, Homo sapiens
gagtttccaggtgaatgctcccaatttcccttcacaactgtacctgtttgccttggaatgcgtctgcttcatctgtggaaacgtagcctgtgaggacggagctctgcactccaagctcctgg

SEQ ID NO: 366497 - DNA, 122 bp, Homo sapiens
gctttcataaaaccatgcaaaaatctgctatagaatgtccctacgcctcaattctggcttcgagcctggcagtgggggagggcaagtatatgcttccacaaaaggacaaaagactccaccat

SEQ ID NO: 366498 - DNA, 122 bp, Homo sapiens
accggcactccatctgacaaaagccacagtgctcacagaagaggcaagtcagtctgctcgcgtagcgtcctttgaaaaatcccagtgtacaaacatgtgccacgtcaccacacaaaaccaaa

SEQ ID NO: 366499 - DNA, 122 bp, Homo sapiens
gtactgagttaaaaagggaaacagctcccgatggagtgttctaggtgccaagaaacaagccgctctgggtgataattgtgccggaagaatggcttaggtgagggaccctgtcaagaacacct

SEQ ID NO: 366500 - DNA, 122 bp, Homo sapiens
tcgcggtgtctctcaaaggtccccctctacaggggcttcgtgaggcccgggcccacagggcgctcggtcccggaagtgacgtctcccagaggggccggaagtggcagtggagggagggaaga

SEQ ID NO: 366501 - DNA, 122 bp, Homo sapiens
aaaccccagagcatctggagggtggcctataataccgatgctgagaacccaaaatgcctgcgtttcagccaacaaggatgccctcgccaaagcagctgtgcacagcagtgccaaaaaccctg

SEQ ID NO: 366502 - DNA, 122 bp, Homo sapiens
taccaagttatgccaacaagtggagtttttaagaataaagcacagagcgttggatgggttcgtcacttactttccatgggctatggctgcttctgagaaaagtattagtcgcatggtggatg

SEQ ID NO: 366503 - DNA, 122 bp, Homo sapiens
tctgtcaaagactgaggggactcaagaggctgaccagtatgctgatgagaaaaccaaagacgtaccatttttcgaaggacttgaggggtctatagacacaggcataacagtcagtcgggaaa

SEQ ID NO: 366504 - DNA, 122 bp, Homo sapiens
ttcctggtctttgttatcaagcaaacgtcatgattatacgctcctccattcagcacctcgcgtccggacagcaacctcacttgttttcagcgtgccttaaagcgtgcgctgggctggaaaca

SEQ ID NO: 366505 - DNA, 122 bp, Homo sapiens
catcatcggattccaattcctgggaaacctcttcggaggagctgttgctgtggatccgcccgtcgctcttcatactgtggaaagtcttcctgaaggcctccatcatggcgtgggccagtttc

SEQ ID NO: 366506 - DNA, 122 bp, Homo sapiens
tcagtctgccctgctcaggaggatggatcagcaaggctagagcctgcatctgcacactcacgggcagccttacagggttcttaggaaagctgaggcaatagcagtcacagctaggcttctcc

SEQ ID NO: 366507 - DNA, 122 bp, Homo sapiens
cccaccccctgcccaccctgggcttcccctaccccaaaacgccctccccacgcccctgcccgcccccatccccatgttggggaacaaagcaataaattacaaggcccccgcagccctcttag

SEQ ID NO: 366508 - DNA, 122 bp, Homo sapiens
ttgcggggcttgggaaggggctccccgatgacccgggcgggaaattggggcggccgcctacgtgagagttctccagtcacctctaaaatgcgggacacaggctatccatgtccccacaaccc

SEQ ID NO: 366509 - DNA, 122 bp, Homo sapiens
aggaaacaaggcagggtcagaggctacaaagagaaggaggggtccgattggatgggggttcgggggctgctggtgaaggaacattgagcagaaacctgaataagtcacgccgctatggggcg

SEQ ID NO: 366510 - DNA, 122 bp, Homo sapiens
gatgagtgggactgagcctcctctggagcgtcagctccaggaaaatgctggaggtggagccgattaccaacggggtcacagttgcacccgcaatgtcttcagaagaaatagtccccttcctc

SEQ ID NO: 366511 - DNA, 122 bp, Homo sapiens
agcacttgctatgtgaataagataatgcatataaagtacttaataatatattgctatgaccgtaattattattaaattgtgctaggccctagagatatgtggtgacccagccaggcctggtc

SEQ ID NO: 366512 - DNA, 122 bp, Homo sapiens
acctcgtcaccccccccccccacacacacacacacacacacacatacaagcccaccatcgcgcaagaaactcgaccccgtctacctcggttcagtggaaggcattcatttgcacaacgctgt

SEQ ID NO: 366513 - DNA, 122 bp, Homo sapiens
tctttaaacaagcggcacagcaaacagatgcactgtgtgattgatgacagggaacatctgcggccaagcagcggctgcaccagaggctcccagcttcctgggctagcagggccctctggagg

SEQ ID NO: 366514 - DNA, 122 bp, Homo sapiens
gtctggggtagcaggcaccggggtagcaggtccagggtagcaggcgccgggtagcaggtccggggtagcgggctccggggtcggcactgcagggtgtttagcagcattctctgcctctgatc

SEQ ID NO: 366515 - DNA, 122 bp, Homo sapiens
cccccaccctgcacacaggtgcacacacacggcgcgcatatcagaggcggacgaagaagccgccagaatttagccagtcttccttcttcatcttccctcctcctagtaaaacacacacacac

SEQ ID NO: 366516 - DNA, 122 bp, Homo sapiens
tatattcattcaaattagtttatcatttacctgcaaactttttctttggttctgcaagtccgtgactcaattcttcactactctccccacgaaaaagtccgtaagtgatgaaaatgctccca

SEQ ID NO: 366517 - DNA, 122 bp, Homo sapiens
tgcgccaggaggagagaacacctgctgccccgtttcttttgtatatccggctatttggttcggggaaatccagaagtcaaagtgtcaccggtggagggtcttgactgcaagttgtccaagtt

SEQ ID NO: 366518 - DNA, 122 bp, Homo sapiens
aaccctgcgcagagcatgccggggaggatggaggatccgtgcacgtccggggctgagcagcgctccagggagaggaacggtacctgcgcctcctgcaggaagctggcatattcctccgcccc

SEQ ID NO: 366519 - DNA, 122 bp, Homo sapiens
gggtccaactctcggattccaatagaagtcacgtggatagagtcggattcagccttgatacgaacttgagatctttcccgcattgtcctcagaaagctggatgaggaacatgaggccgtggc

SEQ ID NO: 366520 - DNA, 122 bp, Homo sapiens
ccctcagagacgatttgagtggctttgcctcagttcaccctagggtggttgcagccagcacgacttgcacaggagggaggctcactggaggaacggggcagcctcgggcatgacgcgtgatg

SEQ ID NO: 366521 - DNA, 122 bp, Homo sapiens
aggggtagggaaggaaggctgtctcattctgctctggtccaaagtcagtgtttacgcgtgcgcgcgccggtctggccaggggtagggcgccttctaaaatctacttctgagcgatttgctca

SEQ ID NO: 366522 - DNA, 122 bp, Homo sapiens
tggcaggagaattcctgaatgtccacacacaagatgacatctgtcagagcgttttccattcgcagggtttccaggccattctgaagaattaaggagagtcccgcgtcgtcaaatttgacctt

SEQ ID NO: 366523 - DNA, 122 bp, Homo sapiens
ggatgataaatattgccttgtgggtaaccaccattacccgccggatactaagttttgcctcgtggataaccactgttacccggtggataataagtattgcctcggtaaccacagttacccta

SEQ ID NO: 366524 - DNA, 122 bp, Homo sapiens
ggtatttgccaggcccaatgctttaaccttaagctgatactttgctttagatgtcagtctcgttaccagcagccttttgacccaactacggcgctctatattttagtagaggattttcaccc

SEQ ID NO: 366525 - DNA, 122 bp, Homo sapiens
agggtatgtgtttggggcagtgattttgtttttctgggcaccttagtaacactgcggccacgcttccccaactaaaggtaaaagtccatagcaacaatcctccctttctctctgcacccggg

SEQ ID NO: 366526 - DNA, 122 bp, Homo sapiens
ggatggtttctaaagccacaaacagggcgaggccccggggagagggcaggcctggagtcccgcgaggatccgtggttagaggcgccctcccacaccgcccacaggtctgcaaggtttgcacg

SEQ ID NO: 366527 - DNA, 122 bp, Homo sapiens
cggccgggcggccggcgaggggggcgccgcggcgggtggatgagagttggccccgatatccgctcagggtaagcggcgcgcgcggacacccacctaccccgacctggttgccccgcgaccac

SEQ ID NO: 366528 - DNA, 122 bp, Homo sapiens
gggacagacagttccacgtggctggggaggcctcacaatcctggtgaaaggcgaaaggcacgtcttacgtggcagcagacaaaacagaatgagagtcaagcgagaggagtttccgcttttaa

SEQ ID NO: 366529 - DNA, 122 bp, Homo sapiens
atgtgcttctgtgacacttcatcaggggaagtggctggccctctgagcaactgctggaggcgttgggaagatgggaatcaaatgcagcctctgtaggtgggtgtggaacagaacagcagtgt

SEQ ID NO: 366530 - DNA, 122 bp, Homo sapiens
ggtcatgggcttctagctctttgggttcttcaggcaactgtgggaaggaacgaggcccagcggggaaggaccttttatgcagaacagtctttccccggccgtcctcagcgagaggccctgtt

SEQ ID NO: 366531 - DNA, 122 bp, Homo sapiens
agaggtgcgggtgtgaggagcccagagccaaagagttcatgaaagcagggctctcacactcggacgtgcatgagatagcctgggatctggttttgctcttttttactctctgggatgctcag

SEQ ID NO: 366532 - DNA, 122 bp, Homo sapiens
tattagaatggtgatgctgggaaggactttggcaatcaaccaacctaactgcttgaaagccggggagctactcacgtccaggcaccaagtaacttgcacaaatctttaaagttaatttcgtg

SEQ ID NO: 366533 - DNA, 122 bp, Homo sapiens
tctggaggaatccaaaggcctcttccagagcaaagctaaaaatggtggagaagggagaagcggaatttgctgtcttccatgatttggttccaaatacacaagccttgttctggttcttttta

SEQ ID NO: 366534 - DNA, 122 bp, Homo sapiens
taaaaaagcaaatcatgcctgatgtcaaagaaatatctatgagttcatcataaacataaacgaatgaaagaaagaattaattagtcagggccatctgggtggtaacagaatatttatggcct

SEQ ID NO: 366535 - DNA, 122 bp, Homo sapiens
acaccgcctccgtatctggacacgagtgacgactcctgctcttttctccttcctcggccccgttagaaataagcccagttccaatttcagagccaaatagctccaaaaagcattgtgggtat

SEQ ID NO: 366536 - DNA, 122 bp, Homo sapiens
gcaaagttcaagcaggcagagtactgaccccttctgtctaatgtcattcagatcaagagccgagtggagataaaggacattattatgtagattttttgttttattttggtttggtttttttg

SEQ ID NO: 366537 - DNA, 122 bp, Homo sapiens
cactctctctccctctctctctctctctgaaatacaagccaactcagctgagcacagtgacgttgggttgcctcgatgctcacaaagtactgaaatcgcctatccaactagctcccactgca

SEQ ID NO: 366538 - DNA, 122 bp, Homo sapiens
gggacaagagtgaaacttcgtctcaaaaaaaaaaaaaagaaaagaaaagggctgtgaggccgggcgcggtggctcctggcagtaatcccaggcacatcatgcctgtaatgcagcactcaggc

SEQ ID NO: 366539 - DNA, 122 bp, Homo sapiens
tctgactcttttccgagtctttttctagagatgtccatcacagtgtttgcccgttcacgccgctagtcttttgcaagggaaaccgccccattggagcagctatgggtgagctgtcccttttt

SEQ ID NO: 366540 - DNA, 122 bp, Homo sapiens
agaaaagatctagcacaagttaagagagattctgtgaatcttgaaaaagcttcagaggcccggtctttgaggtgaggacacagttaatctatatggaaagaaacctaagacttttagtccac

SEQ ID NO: 366541 - DNA, 122 bp, Homo sapiens
ccttcttttggttttacttattcccttaaatatttacttgtttgtcatttcaaggaagtccgtcacagcaggctcctcttcttctgccgtgtccacatctgtcctgatccctctttctctcc

SEQ ID NO: 366542 - DNA, 122 bp, Homo sapiens
aaaaaggtagtgacttaggtgagaatgctgtgagtatgagtggtattagtggtgagaagtcgttaggccaggatgtatttcataggactggccaagagaactgcagctaaattggagtgtag

SEQ ID NO: 366543 - DNA, 122 bp, Homo sapiens
gagacacggacctgtggccgcacagcggatcatcgatggctgaagagtcccacttcctgtcgttcagaagcgtttgctgaccacctcctgggtgccaggcttgctgggcactggggactcag

SEQ ID NO: 366544 - DNA, 122 bp, Homo sapiens
ccgttccacacaccccgatatagcagggacccccgatggatcctgtcggcgcggcccccacgctcctgcaggacccccgtccccagagtggacccccaacaggaccccacaccgccttaacc

SEQ ID NO: 366545 - DNA, 122 bp, Homo sapiens
ggaacagccaggcatcagcgactgcctcctcctaggaagaacccatgagcgtggcagctccgtgcccggggcgacagcccagtttccgggcagctgcgcttgtggctgggcagatggcgtgg

SEQ ID NO: 366546 - DNA, 122 bp, Homo sapiens
tagcactggcacatgtggagaatgtggtggtgagctccctctcagctgccgtttcctggccggcattagcgttgccacccaaagccttcccaagcgtggctgaccctgacctggggcattca

SEQ ID NO: 366547 - DNA, 122 bp, Homo sapiens
cccctccctgtcacccaccttcagctccagccctgactctcgggcgccttgccacccttacgctccccgccccgccccggtccctcgggcgcccccactcgccgcctctacctccctacctg

SEQ ID NO: 366548 - DNA, 122 bp, Homo sapiens
cagcagcaccagcagtggcgatggcagcagcggggtcgtttccaggggacttgttctttccggttgcacctctaggctctgcggagtttaacgacgaagctcagcctgggcaccttctctgg

SEQ ID NO: 366549 - DNA, 122 bp, Homo sapiens
gaaggggcattggtggcgcttggcagcaggtgtgacagacctcctccggggcgcctgatccgcggcgggggcggggcctgcccctagggcccctccagagaacccaccagaggctgctggtg

SEQ ID NO: 366550 - DNA, 122 bp, Homo sapiens
gccagtgcggaggctgcgggcgcccgctcaggagtgcagattttagagaatgcaagtcagcgtttcaagtgtagaagtgcgggatcatttctatagacaagagttcagggaagtgtactaga

SEQ ID NO: 366551 - DNA, 122 bp, Homo sapiens
tgtttccagaaagaagcatcaacctacaagccaagaggagaacgagatcctattgagaggcggcagatccccggacgaacgccccctgcagcccgcaacaaaggcactagggaggaagcgtg

SEQ ID NO: 366552 - DNA, 122 bp, Homo sapiens
tgagtataaattatgctgctggttaaaaccgcttgctcatgagaacaggacacccaggcgcgatcgtacacacgctaggatgcattcctggagcagacgcaattctctagcccgagtgggga

SEQ ID NO: 366553 - DNA, 122 bp, Homo sapiens
gcaaccgccggcacttcccagtgccatttggtgccaggtgctgccatctctggggggtggcgacgaggtgatgtggggaacggcctggaacccagagtttgcacaccccggggcttggagtg

SEQ ID NO: 366554 - DNA, 122 bp, Homo sapiens
taagtattcattatcgagcgagacaactacgatctctgcattcactgtagttacctagcacgtgaagatattgaacggacaatattgagaaaaataccatgatatgggaagtgcattggagc

SEQ ID NO: 366555 - DNA, 122 bp, Homo sapiens
ttgatagcccaacataattgaaatggtggctatgcatcgttccaccctagttactcttaacggcatgttttgagtcaccaaacgtgcgtcctgctcagccttgcccaggcaactgtgaacga

SEQ ID NO: 366556 - DNA, 122 bp, Homo sapiens
gaagtaagtaatatagttttatcgtgtttcagaattcaaagtcctatcaaacacactcctcgtaagtgaaaatgctacaaccagttttatcaaatagctgcattaaaaaaaaagccaaatat

SEQ ID NO: 366557 - DNA, 122 bp, Homo sapiens
ctgcttggagtccgaacgcatgttcactctgccttgaagcaacagctactctctaagcttcgtctccgtccaactcttcgtgtcagggacttttccctgacttcttatatatcccctctgcc

SEQ ID NO: 366558 - DNA, 122 bp, Homo sapiens
cccatcacccttgctgtgtttttgtagcacctatagccataactggcacctgggggcctgcgttgctggcagtttcccttacatttctttggagtcttttcaactgctgtggttttacttag

SEQ ID NO: 366559 - DNA, 122 bp, Homo sapiens
cggctgcacactggctcccttcctctcccctcccaccctcctgcctgcgggggctggaggcggaggcagccaaccccattataaaaagccacagatctctggcggcggcaaggggacagcac

SEQ ID NO: 366560 - DNA, 122 bp, Homo sapiens
ccctgccccgccctccacagccacccctggagccggagggtcccaccgggtcacacatcccgggctgtggactcccgatcccaggttctttcggggtgggtgggggagagtggttgagaaca

SEQ ID NO: 366561 - DNA, 122 bp, Homo sapiens
cttcattattgcattagcaatctttggatcaagaccataatcctggtttacttcagcggccgctcgcttcaagatgccaaaagctttaataactggggtctaaaattaatcagaaaaatatt

SEQ ID NO: 366562 - DNA, 122 bp, Homo sapiens
ttcttccaccagccttatgcatctaagtgtagctcctctggagatggagagctctttcatcgtagaactgaaggagtttctcacatttgtgaagatactttgagagaacctgggtaaagaag

SEQ ID NO: 366563 - DNA, 122 bp, Homo sapiens
cactcgcagccccgcggccggagtcgctgtgggtgagcggtcgtcgagcttcacagaggccgggctctgtgccagggccccgacagggcaggaagcagatagagtcccacaagcacaagccc

SEQ ID NO: 366564 - DNA, 122 bp, Homo sapiens
cctgcctgattctcctgcctcagcctgcctagtgcctgcgattgcaggcgcgcaccgccacgcctgactggttttcatatttttttggtggagacggggttttgcagtgttggccgggctgg

SEQ ID NO: 366565 - DNA, 122 bp, Homo sapiens
cggtgtactatcctcgccagcagctgttacccgccccggcgtactgtcctcgccagcagccgtgcactctgcacgtttgccccctggttcccattggagctctgcccttcccgccccggccc

SEQ ID NO: 366566 - DNA, 122 bp, Homo sapiens
catccacggctccgagtcctttgaggtcttgctcgggactacgtttcccagaaggctaggcgataattgacagctctatcagcctatggacagagaaaaattctagccatggaaactgaaaa

SEQ ID NO: 366567 - DNA, 122 bp, Homo sapiens
acctctatgtatcttttgattgtcttttctcatttctttgatatttttctactttttggtcgaatgaatagttttagattgtgtcaaagacagtttgaacattatattatcagcctctaagt

SEQ ID NO: 366568 - DNA, 122 bp, Homo sapiens
attccgacgggagagtcctggctgtattccgaggctccagtgcgcatgcggagtcgatcccgcgcaggcgggcggggacggcagccgggtcttgtgggcggagcctgactaagtgccgcccc

SEQ ID NO: 366569 - DNA, 122 bp, Homo sapiens
gaaaacgtcaaagcctgacaggtgtgacaaataatgggcccctaggcaggctggggctggcgcgtgcctgtgcgcgtgcgcggggcgcggggtttttaacaccgcgcagccttcccggcggc

SEQ ID NO: 366570 - DNA, 122 bp, Homo sapiens
ttgcagtactcacaggcagtgactttcgtggagcgccctctagtggtatatatatacaaacggaaggatttagagaaaatacagatcggctttagctggctgagatttattttcaaagcatg

SEQ ID NO: 366571 - DNA, 122 bp, Homo sapiens
tgggccgtgttcagatgcgtattgtgaaaggctgcccttccatttggcctgacatctgcccgtgcttctcttcctctctagtatccgagaaatagctcagtctcaccgggacatggagcagg

SEQ ID NO: 366572 - DNA, 122 bp, Homo sapiens
gtcagccgccgttgaggcctgctcaaaaggcggcttcagctcctttcttgggaaacctaacgcttttctgttccaggtccaacacaacgcctcacaaaacgatcacgagattgaaaggctga

SEQ ID NO: 366573 - DNA, 122 bp, Homo sapiens
aagccccgtcccaccctcagccccgccccttcgccgcggccaccgctgagtttccgggcgcgcgctcctaccccgagctctttgcgccacgactcccacaggccccgccctgccctcagccc

SEQ ID NO: 366574 - DNA, 122 bp, Homo sapiens
caggactgagccccagaggagcccagctgtgcccctcatttggagatgcagaggggtctgcgggggccaggctggctcccagggtgcgggtgcctctgagtgtggctctccctttctgtcct

SEQ ID NO: 366575 - DNA, 122 bp, Homo sapiens
agagtgtgaagtgaggaagtgctgtttgctggtggtgtacagcagcctcccctggcagttcgctacgtgtaggggcgggtttgccttcagagcaggaagaggtaattacgatggcccagagt

SEQ ID NO: 366576 - DNA, 122 bp, Homo sapiens
aaagtatctgggcagaacgctaggagagatccaaatttccattgtcttgcaagcaaagcacgtattaaatatgatctgcagccattaaaaagacacattctgtaaatgagagagccttattt

SEQ ID NO: 366577 - DNA, 122 bp, Homo sapiens
cagatcaatagtaggtgcccatgaaatactaactgactgattgattgacagctcagaacccgctttggtgggaaaacaatattcaacgttatttttagccattggataaactagccagcatg

SEQ ID NO: 366578 - DNA, 122 bp, Homo sapiens
gtgagggctcagtcctggttgagagcactggtataaagccttgaaaatgcacatagaggccgggcgtggtggctcatcccagcactttgggaggctgaggcgggtggatcacttgaggtcag

SEQ ID NO: 366579 - DNA, 122 bp, Homo sapiens
gacagaggaagacgttgcttctccaagaacacaacttacactcgggcactcacggacagtcgtgattgcaaaacgggaagtgatctgaagagtcgcaacagatctgaacgactaaactccgc

SEQ ID NO: 366580 - DNA, 122 bp, Homo sapiens
gcgcctgagtggtggcttttcaccgggtgtggctcgtctgagctcttgaactgaagccagcggacaccacccgtcggcgcctgctttcctggggcgtgggctcctccccctgtgcagaccgc

SEQ ID NO: 366581 - DNA, 122 bp, Homo sapiens
ggcggaagttttgtcatctacagctttcaagtcctccattgctaagtctacaacagcctgcggttttgacagacattgctacagagacaggagccaactttcccagaagggagagaaagcag

SEQ ID NO: 366582 - DNA, 122 bp, Homo sapiens
ttgtttgtgttttgctattataaacagtgcagcaaatgcatgtgtttgcatattttctggcgttcatatacaagagtttctgtaagtctaaattgttttactgtcggtttcatatcttatgt

SEQ ID NO: 366583 - DNA, 122 bp, Homo sapiens
aatctatggcaccgatcagggatttctcttccagggaagctattgtgtcaggtaaagaggcggccatacatcagccggctctgcccctcaaatagataatcaatttccctgaaagcatcaat

SEQ ID NO: 366584 - DNA, 122 bp, Homo sapiens
ctcatagacatagagggacaacaatagacactggggactggtagatggtgggggagcaagcgttgaaaaactattggctaccattgtcactatctgggtgatgggatcatccataccccaaa

SEQ ID NO: 366585 - DNA, 122 bp, Homo sapiens
atggaaaattaaaagaaaagcaacaatccaatcttttttctaaaaattatgctggggtctcgactaaaactgaatttgaattggaaaattctggtgttggttggagttccatcttgcaaggg

SEQ ID NO: 366586 - DNA, 122 bp, Homo sapiens
gaaagatactttattgctgagcatgaatttgtgagaaaaatttgaaattgggaaaatggccgtataggagaatgatgctggtaatataacttgtccttatcaagcaaagtggttatcaataa

SEQ ID NO: 366587 - DNA, 122 bp, Homo sapiens
taattgtggatagctttcctaacaacaaccattaaattactgtaacttatggcttattctcggtgcttatgtaagcagagggcctgctgcccaaggagaacttggtgcataatttttccagg

SEQ ID NO: 366588 - DNA, 122 bp, Homo sapiens
caagcctgcccccaggatgacacaaacatgaaccctgacttgggcttgcggtcgcaggcccgtgggaggcagcagtggctgcaccgagatccccggacctcaccccgtcgcagctcagggag

SEQ ID NO: 366589 - DNA, 122 bp, Homo sapiens
ggaacaaggatatgataggccttaagggtgggggatacctctgggctcgaaatcggcgggcggtgcaaaactcgaggtccagttctcggagcccatagagccaaaaaagcctcagcttgtcc

SEQ ID NO: 366590 - DNA, 122 bp, Homo sapiens
cagtcaagcccagcaggtgcctgccggctgtgccgctgagtgcggggcttgcggagcccgcgcctacccggaaccgcgccggtggccacccgtaagccccagctcccacccgcgcgtctccc

SEQ ID NO: 366591 - DNA, 122 bp, Homo sapiens
tgtctgtgcacccaggtctccccgtctgcccatcacaccgccagctcagtgccacccagacgctcccaggccacccatgtgtgccctgacccctcggtgcaccaggacagctgcctccaagg

SEQ ID NO: 366592 - DNA, 122 bp, Homo sapiens
ccaccctgtttgggaaagccagattcagaggtcacctggaactgttcttggattccacctcggcccgctgtgatcccttagaaatgtgcttagactgattcccactgtctccagtaccaagc

SEQ ID NO: 366593 - DNA, 122 bp, Homo sapiens
ctttcctagggaatatcattgtctatgggaatacaattgatacttacaccaccgtggagacgctcttaaaccttggcgtgagcggcagccgcatccacctcgtgcagcccccgcccgcctcc

SEQ ID NO: 366594 - DNA, 122 bp, Homo sapiens
cggtgaggggccgaacggaaggaggtcagggctggtttccccccacccgccgaagggaggcgtctggcagcctcactgacaccttatcctgtcccgggagcgaacctgaacccgcgggagcc

SEQ ID NO: 366595 - DNA, 122 bp, Homo sapiens
ccacccggaacctgatggaggcagcgaattcctcagagcagaggacactgcggagaggctcgaatccacttcccacattgtgcgggaccgagcgcgcagggcgctctcgcgtggcctcctta

SEQ ID NO: 366596 - DNA, 122 bp, Homo sapiens
acagacaaagaaactgaggcaccaagggtttatgctaccaagatcacacgggtgggtaaccgtcagtgctgcctgatttcacagcgtctgctattaatacagcacagcagacctggtagccc

SEQ ID NO: 366597 - DNA, 122 bp, Homo sapiens
caggtggaacagcctgggagggtgcagggccaggtatggttagaaatggtctgcctccctcgacaaagagctacatacatccaagctgcaaacagtcccctaaaccctgtgcagctggcaaa

SEQ ID NO: 366598 - DNA, 122 bp, Homo sapiens
cctggcccctctggatgaaccagcaagggcggagggggacaccggagagcgagacggcctcgctaaagaaggccccctggcctttcaggatgaggggctcagtcagcccagtgatggggact

SEQ ID NO: 366599 - DNA, 122 bp, Homo sapiens
acaggcgtgagccactgcaccctgtgagcttgcactcttgactgcctattgggcctgccccgatctcctgactaggttcccttcctccagggaactctgccctgttcctctggaccaatgtt

SEQ ID NO: 366600 - DNA, 122 bp, Homo sapiens
tttcgcctggagccgcaagtgactcagcgcggggcgtgtgcaggcagcgcccggccggggcggggcttttgcactcgtcccggctctttctagctataaacactgcttgccgcgctgcactc

SEQ ID NO: 366601 - DNA, 122 bp, Homo sapiens
gaaacacttgagtgagctgacaagtaatgagcagagtggaataaggacatgaatgctctgcggtgtccccgacatctggggcggaaaaggtaaaagacagtacccccttctgccacatatga

SEQ ID NO: 366602 - DNA, 122 bp, Homo sapiens
tgcgctccgaggacccctcaggtgagccgggcccttcagtgggaggggcagggtgggccccgggagggttgagcctgtcagcccccagccccacctgtgctctgggagtgtcagccagctgg

SEQ ID NO: 366603 - DNA, 122 bp, Homo sapiens
gctcatttcctttttctgaagggaaatgccattgacatcacaccactggattttcagtgacgcaagatgagaactcgtgagcccttcgcaggcaagaagggtgcacgtgtgggctgggcaca

SEQ ID NO: 366604 - DNA, 122 bp, Homo sapiens
cacatgccactcgtcttggggctgagaccaggagtttgcaccgattcagagggaagtcgacggcatctgtggcagcgcacatgtacacaccgtgtgtggtggtgcagctgcctctgcccggg

SEQ ID NO: 366605 - DNA, 122 bp, Homo sapiens
tggcccgtgccctgcgaacccccagcaccatgctcccggctgcgtggcccagcagggcaccgacgagattcaatggcacttcggcctcccactcgacctggccgcacccagcggcccagtta

SEQ ID NO: 366606 - DNA, 122 bp, Homo sapiens
tgccacagtgagtttgggtcaaaggcacacatggaggcagtcttggccaaagtcacaatgcggtgaatttcgctgtgcgccaaggaggttcctggccccaggagtgcgaagcgcctgcgcag

SEQ ID NO: 366607 - DNA, 122 bp, Homo sapiens
ggaaagagagagcgtcacggccctagttcgcctgcaccctgtctcggacccaagcccaaacgggaggtggtacctgggctcggaccaatcgccctctcgtgagtcaccaggggctggccgcg

SEQ ID NO: 366608 - DNA, 122 bp, Homo sapiens
cccactgggcaagcaccgccagggccggcctgagcgcaggagagggggaggaggacctcccggttggggcttcttgggggtccaacttatggacactcaggcactcagggaagccaacggcc

SEQ ID NO: 366609 - DNA, 122 bp, Homo sapiens
ctcggtttcccaggctggttggtacgcgcaggcaggtttcttgtctggtcctccaagggccgcgcccttgccgagtccctcagcgcccgcgcctgaggacttggtcctgcccctccggcggg

SEQ ID NO: 366610 - DNA, 122 bp, Homo sapiens
ctgtcaaaagaccaagaacgacgtgaactctcagcaccttggggcaccgtgctgatgacacgcgcgctgaaatggaagttcagacatcacacatttcaaggaaaagtagacgccaagccccc

SEQ ID NO: 366611 - DNA, 122 bp, Homo sapiens
ggagaaaaaaaggatcgtctcagcatcaggctgacctgggtttcagtctagctttggctgcgtgccttggatagtaaattttcctccttgaaccttggcttcttcctccagggagaaaaacc

SEQ ID NO: 366612 - DNA, 122 bp, Homo sapiens
tccgggcgccgcggccgttcccacactccgcggccaatggccgggcgggccgcacaaaggcgccggcccattagcgcacgctaaattgcctgtgaattggcgcgggcacaatgggcgctccc

SEQ ID NO: 366613 - DNA, 122 bp, Homo sapiens
tgaaaaattgaaaatctacctcttcaccctctttgaattgtagtttgcattaaaaagattcgcatatttgaattttcaaaacttggtatgtgtgtattttgtaagtttggaattggataaaa

SEQ ID NO: 366614 - DNA, 122 bp, Homo sapiens
ttagatttcatctgccttctgtgggaaggacctgcttgtctcgagtgaagaatagcgctccggcaaatcctcaaggcagcgctggaaaaatcgcacgtgcagatcccgcaagaaatccagcc

SEQ ID NO: 366615 - DNA, 122 bp, Homo sapiens
tcatatgagatgatttgggcgggggggagttcaggaaaccaggccttgctctggagtagacgccgacaggaagcaagggcaagtctatgattgtttatcttaataaatctcatctggaagga

SEQ ID NO: 366616 - DNA, 122 bp, Homo sapiens
cagggacgcgggctgtgcttccaaggggagccagggggttgggtgcttttgtgaaatgcccgagtgttgttttcgacatgaaaggaccgaattcctagaatcagaccctgctggggctggaa

SEQ ID NO: 366617 - DNA, 122 bp, Homo sapiens
cccacagccgctcgcccgcccagcgcggaacaacttcggggcccgcccccttcctccgcccgcccccggccgcccgtaaccgcccccggccgcagcccccgcccagcccccgcccagcccgc

SEQ ID NO: 366618 - DNA, 122 bp, Homo sapiens
tgcagacgttaactccctgctggctccaactgttccctggatcccactccatccgctatccgccatctgccacccaccctgctagacctgtgggccccctggcgcccccaggcagccccagc

SEQ ID NO: 366619 - DNA, 122 bp, Homo sapiens
catgaggtggtgtacttcagtgctgcccatgcccttcgtgagcatttaaatgctgctccgcgaattgccctccatactgcactcaacaatccttactattatctcaaggtaagatgaacatt

SEQ ID NO: 366620 - DNA, 122 bp, Homo sapiens
ggcgagaaggcgacgggaggctggggtttctggacggtctttgggcaggacttgaggagccgctgtttctcttgcctaatgtcgtcgattactagcaggcgcaacagcacatggtatatgga

SEQ ID NO: 366621 - DNA, 122 bp, Homo sapiens
atcatgtctaccgtgcacctaacagtggctgctggggaaggaagggaggtgggcctggcccgggagctgtgcaggccgcagctgagctaatgcttcctccaccacagataagcaacgttagg

SEQ ID NO: 366622 - DNA, 122 bp, Homo sapiens
tctccctcttctccgccctcctttccctctcgccccttccccccttccccgtctttcctgcgatttcaggccgcattttagatatcccctgcaaagtgtgtggcgaccgcagctcggggaag

SEQ ID NO: 366623 - DNA, 122 bp, Homo sapiens
aaaaaacaaaacacactctctggtgcacgcctccaagatgacaaagaaaagagggaacaacggttgtaccaaaaaagggctgcagccacgtgcagcctattctcagcacaaactgtaaccaa

SEQ ID NO: 366624 - DNA, 122 bp, Homo sapiens
cttgaaccctcccaggacccccgctcagccccttcccgcccccaaccgactcttcccgaacgtcccttaccaaccgcgagagccccctactgcgctttggccacaccccctacgcctcgctc

SEQ ID NO: 366625 - DNA, 122 bp, Homo sapiens
ctccagggctccctcagacaagtcgagccggctgctggaccagctcaagtccacaccattcgcctggcatgggggagaactcacgtctcgcaccccctccacaagtttaactgctttccaca

SEQ ID NO: 366626 - DNA, 122 bp, Homo sapiens
tcgcagctcgtagaggcgaggaaaggagggcgtttccagaagttggggcttcaggtgacgcgtggggaaacttggattcttgctgtccttgaagagctgggacaacttaggccagaattcct

SEQ ID NO: 366627 - DNA, 122 bp, Homo sapiens
gggagatgggcgttaactaggtcgccaacagaggatggccagccccaccccagaggacagcgcacccacggcccagctcgtcacaccgccgaggccgtgtgccctgtgagtgctgccctgag

SEQ ID NO: 366628 - DNA, 122 bp, Homo sapiens
gctcctccaccctttgtctataggattaaccgtctaagattcttagcaaggcattaagagcgctcttgagatctagcccctgcctccatcctccatctcgtttccccagggatgggacggaa

SEQ ID NO: 366629 - DNA, 122 bp, Homo sapiens
gctggagcgcgtggaggagccggtgcttcagaaccagatccgggagcacgtcattgccatcgaagatgtctttgtgaacagctaggaatggacgctgagtcgatctgtcccggagctcaaag

SEQ ID NO: 366630 - DNA, 122 bp, Homo sapiens
attcaggtaaagaccgaactcgggtccggctgcctccctggggcactggaccccgggtcgcgtcccctttgttagtgctcgtatgtcttggcctggggagcattttggaggcagtgctaggg

SEQ ID NO: 366631 - DNA, 122 bp, Homo sapiens
acacagacggcctggactcttccctgccctgggcggcctggtgggtgcgccggctcggctcgcccttttaccacagaagcagccccacagtttggggagaggagcaggccagaccgggacac

SEQ ID NO: 366632 - DNA, 122 bp, Homo sapiens
gattcctggtctgtgaagagtcggtggtgccagcaggaaccgggctgggcctcgtgcgtccgtggggtctgcgcttggtctttctgtgcttggatttgcatatttattgcattgctggtaga

SEQ ID NO: 366633 - DNA, 122 bp, Homo sapiens
cagcacctgcacacacgaagtccggacccacgcagcctccatcccgcgtgtcttgctctccgcgatggcaatgccgagagtgccctctactgtccgactccagcactgcaacagcttcaagt

SEQ ID NO: 366634 - DNA, 122 bp, Homo sapiens
ggggaggggaacaggaaaggcctggcggaggcagataaggcggcagagcacggggcgaggcgttgctaggagaagttgctagggcggggctcgagggaccggctataaaaggctggcgctgg

SEQ ID NO: 366635 - DNA, 122 bp, Homo sapiens
gtcgctccgggtcctcagaagaaccccactcccaccccaccatcctcgtctcccgggccgcgccccgcttgtacctgcaaccaacacctaatcctaagacaccggccacatctccgcggggc

SEQ ID NO: 366636 - DNA, 122 bp, Homo sapiens
agcaggatgagtcagggggctgcggagtaaccccttctccatatgctcagaatgcgctagcgcgcctgccgtggggagtggagggggccagggggctggatgcggaacaggcctcgggccca

SEQ ID NO: 366637 - DNA, 122 bp, Homo sapiens
gagacccctccttgtggcccagcagcttctcctcctgggtctcctgcagccgtccctggacgctgggggcccttctgagcaaccccacccccagcttgctggaaggatgagctggggatgcc

SEQ ID NO: 366638 - DNA, 122 bp, Homo sapiens
gagctctatgatctggaggagactccagtgagctggaaggatgacactgagagaacaaatcgattggtcctccttggtaagtctgaaaggattcacagttttaaaacaaagtgaaaaatata

SEQ ID NO: 366639 - DNA, 122 bp, Homo sapiens
gaagaccacacccttcctcattccaaccataggcccggccaacccctttgggttgtgcttcgcctttttcctttccacattattctctccttgaaaacctccaataattaagtcaattaagt

SEQ ID NO: 366640 - DNA, 122 bp, Homo sapiens
gtgcaggagtgcatcaagcccaggcaattagaaagatgagacagagagagagccaggaagcgatccaatagcactagaaaggcagagaaggagcagcatgtctccacagcttgaagccccag

SEQ ID NO: 366641 - DNA, 122 bp, Homo sapiens
ggcgtgggctagagaaggcaggattttctgctgctgacggtccctctctatccccacagtcggcctccaccctctctgccgtgggcggctttctccccgcctgcgcctacccggcctccaac

SEQ ID NO: 366642 - DNA, 122 bp, Homo sapiens
catgcgtgggcgtggagggggaggaggtttgcagtcattccagccgggtcagatccagaccgagaggacaggtcagctggtggcatggtcttaggaacccacagaaagaggatccttgctcc

SEQ ID NO: 366643 - DNA, 122 bp, Homo sapiens
agggtccgtgcccacctggctgctggaccccatgcggctcgaggaggagcacaccgcccccggtgtcaccttggcactcctgcccatgctgaatcaggtggcccggctgctggctgcaggga

SEQ ID NO: 366644 - DNA, 122 bp, Homo sapiens
tagaaataagggacgtctgcaacttggccacagactgcaaggagccggagtgcagagtggcgggctggggtcgtgaagtggggggaagcggtgagagcagtccggaaagcaggcaagacgag

SEQ ID NO: 366645 - DNA, 122 bp, Homo sapiens
cggggctgccggccagtccatccggtggtctgtgccggttagcgtagccgcccgccggcccggctgctcagcagcgggcaggcctgagcacccgctacactgcagcccatctggcccaggca

SEQ ID NO: 366646 - DNA, 122 bp, Homo sapiens
aggtgaatgcagatgtgtcctcagcccaacaagcatgcagcttgggactttcacttacctcggagagaaagtaaaaccacgagtggtcaaagacaggaggtgggattcgagaattggtgtca

SEQ ID NO: 366647 - DNA, 122 bp, Homo sapiens
ctctgactaatgctatttctggctgtggagctcgatgctgtcgatgtgtgactatctccacgtctgccggcctagtggctccacgtctgaagagttgctgcatgtcagctatttgccccagg

SEQ ID NO: 366648 - DNA, 122 bp, Homo sapiens
tgcctagcaaccgggtggccggagcattgctttcgcgcagcgcttgggaggatccgcggccgccacctgctcgcccacaaactctagtgtccttgcatccaggcctgcccgcgccgcgcaag

SEQ ID NO: 366649 - DNA, 122 bp, Homo sapiens
ctgagcgctcactagcggctcctcgcagcctctaggatcgccttagtgctgattgcaacgcgcggtccctccagccaggacccaccggcccttgagggtccctcttggctcccggggtggct

SEQ ID NO: 366650 - DNA, 122 bp, Homo sapiens
ccgtcgtggctgtggcggtacatgtaggatgcctgcttcatggagcgctgtagcaggtgccggcggtaggccctctggatcttgatggcgcacacctcctcgtgcttcctcttgagggtggt

SEQ ID NO: 366651 - DNA, 122 bp, Homo sapiens
tcacactctatctcgtggtggcagtggccgctgtctcctgcgtcttcctggcttttgtcacggtgctgctagcactcaagctgagacgctggcacaagtcacgcctgcttcacgctgaaggc

SEQ ID NO: 366652 - DNA, 122 bp, Homo sapiens
ccggcccgtgcgcccgccgccgccgcccaggaacaatgcgggccaatgtctccgggcgggcgagccggctatgcaaatgcccaacggcctgtgagaatccccttcgccgccgcctgggcttc

SEQ ID NO: 366653 - DNA, 122 bp, Homo sapiens
ctgttctctgcatttgatccatttcatgtaactgaaatgaacgttttcttacattatgctcgttcagtattttgctctaaaggaatgaagatagtgttgttaaggtgcagatactgggctgc

SEQ ID NO: 366654 - DNA, 122 bp, Homo sapiens
cactgaggaggcctggagaccagaaggggtagtgcttgcccagggtcatgcctatctggtcggaggtagaaccccagtctctggtctttccttcctcaccaaccagagctgcctcccaattc

SEQ ID NO: 366655 - DNA, 122 bp, Homo sapiens
tccaaagatctgacctttgcctatcttttaaaagaatcaagtaaaataacaggctttttccgggcatggtggctaacacatgtaatcccagcactttgggaggctgaggcgagtggattacc

SEQ ID NO: 366656 - DNA, 122 bp, Homo sapiens
aaacacggagttgtcagtgatattaacaagggacctaagaaactctccaaatcaggagcccgaggcccagggacagaacaagcttaaagggtaaagtgggcaccaaaaccaaagtcctactc

SEQ ID NO: 366657 - DNA, 122 bp, Homo sapiens
ttcaggaagaggcataagtggggtaccatggctggatcagagaaagtcttgtaaagaagacgatgcctaagttaagatttgaaagatcagttgaattaagcagtggtaagtctgggagaggc

SEQ ID NO: 366658 - DNA, 122 bp, Homo sapiens
acccaagcatctggcggaggggccgaggctcgctggaagaaaagggagtcgaccttgacccggcctggagataaaggaacttttacccacttggggccttatccgccccatctgttaaatgg

SEQ ID NO: 366659 - DNA, 122 bp, Homo sapiens
caaaaaacacagatggaggcctccctccgaggatgcctggcattctcctctttctgtgggcggcagcgaccccctgcggctccagcctccactacgggatctgcgggaagacacggggaaga

SEQ ID NO: 366660 - DNA, 122 bp, Homo sapiens
accttatgttattattaagtacatttgatcaggtctaaattgataattgatacaagatcccgatagtacaaaaagggaatgcagttataaggagacaacaaaagtcagagtagactggacat

SEQ ID NO: 366661 - DNA, 122 bp, Homo sapiens
aggtgccaccgtactgggggtcaccgtcttaccgggggtcactgtcttacctggagtcaccgtcttaccgggggacttgagaggtgggtggagctgaccactttccgggaggaaaggagtct

SEQ ID NO: 366662 - DNA, 122 bp, Homo sapiens
agcaggagcgttatttagcacagaaataagattataaaaaggctgaggtctttttaaagtcgtttggtcagctatcgtggttgtaaccagtctcctctggactggttacaaaaggaactttt

SEQ ID NO: 366663 - DNA, 122 bp, Homo sapiens
ggcgcagatgagaagacagcatctctgtgtcaggtaagaagacaggcacataaatagccgcgccccccgcagtgatggaaacaccccccgcagtcacggagacacttcaggtctgcactgtc

SEQ ID NO: 366664 - DNA, 122 bp, Homo sapiens
tcccatcagcagctcagggatggggctggctctggggcctcctctcccaggctcagctgccgctgggacccactcccctgagcgcctctcccctaagtaatgttattcatagcaaaaactag

SEQ ID NO: 366665 - DNA, 122 bp, Homo sapiens
ccgggacaggggtgtcagggggagggggactcggaggcccggcgtgggcttgctgaaccccgcttcctagacctgctggaactgatgatgctgcagaacgcgcagatgcaccagctgctgct

SEQ ID NO: 366666 - DNA, 122 bp, Homo sapiens
gaaaagtcctccctggaggtagcagagtcaaaggaggtgatgacttagtgttctgttctccggaagctcaggtttctggggttcctattaacagggtgttaatgagcagagcttcctaaggg

SEQ ID NO: 366667 - DNA, 122 bp, Homo sapiens
tctctacttgttcttggatagagaactctgaacctgcacctgaggctgtcttttcagattcgtggatatgagtaagaatgccatctactgagcacctgcactttaatttaaatcttaaattt

SEQ ID NO: 366668 - DNA, 122 bp, Homo sapiens
ctaaggacacggctcgtgctgggcttagggctcgtcctagtgaccttaccttgactcgatcgcatctgcagagaccctgtgtccatgtgaggtcaccattgtaggcacggagggtttggact

SEQ ID NO: 366669 - DNA, 122 bp, Homo sapiens
gaattgggttccaatttcccaggagcacggaaagcgttgccaggaaagcggagttgctggcgatttatgtcggtttttctgacataacgaagatttccctttgtttttttggaaccgactgg

SEQ ID NO: 366670 - DNA, 122 bp, Homo sapiens
aaatcggaaatggtgacttcctctgtctctataaccttgtagttggaaaccttggcccgacggtgatggactgcacgacttgctggactcccaagtccgaagttcctgcggcagcgcttgct

SEQ ID NO: 366671 - DNA, 122 bp, Homo sapiens
acctcgtgatctgcccgcctcagcctcccaaagtgctgggattacagacatgagccaccgcgcctggtctactttggatataggccagttttagaaggtccttgaatcaagtatccacttgg

SEQ ID NO: 366672 - DNA, 122 bp, Homo sapiens
ttacgacaagaacatcatccacaagacgtcggggaagcgctacgtgtaccgcttcgtgtgcgacctccagaacttgctggggttcacgcccgaggaactgcacgccatcctgggcgtccagc

SEQ ID NO: 366673 - DNA, 122 bp, Homo sapiens
gcctcagaagtgtctgaggtctgcagggctgttcactcaattctaaatggctccagatagcggtgcttttagagttcttccaccctcccaccctgtcatttgtcacttctctgctagtgtta

SEQ ID NO: 366674 - DNA, 122 bp, Homo sapiens
tgtcttcacaatttcatctccccatgtcgccatttcttaaaacatttcttttctccttttcgttttcccaattgccctgtccgcctctatcttctctgtccccctccatctaggtctctgtc

SEQ ID NO: 366675 - DNA, 122 bp, Homo sapiens
ccaggttcccacttgtctttattgctcttggggccaatcaccgacccggccaccaggtggcgcctgtttatcatcttccgcacctgcgccctgggctcactcgctggggctgccggaggacg

SEQ ID NO: 366676 - DNA, 122 bp, Homo sapiens
caggtaaatgcatcaatatgaattcatcaaaatgtctttgttcagtacctctctgcatgccgcactattcactgcaatattaataaaggtagagagaagtggtcccaaacctaaagaaactt

SEQ ID NO: 366677 - DNA, 122 bp, Homo sapiens
tgttctcctcctccacgctggagacggagcattaccctcaccccggcggcggcggctcctcgggctcctccggttccctcattcagcgcagccgctcggctgagagcagccctgtgcgggcg

SEQ ID NO: 366678 - DNA, 122 bp, Homo sapiens
cggtaggtcaagtcctttctcggggtcctgctatgaagggaaccctgggaagggctgacacgggctttcctggttgtcgagggggcggagagagcaggccgacaggacagtgaggctcgccc

SEQ ID NO: 366679 - DNA, 122 bp, Homo sapiens
agagccgggtgtccagcgtcagtagtaacttggagctgacaagctgcaggctcaaacgctcggcgcacacctgacccagacacaccccccgcccctcgtcctccacgcaggagcaactccac

SEQ ID NO: 366680 - DNA, 122 bp, Homo sapiens
ctaggcgagcgcaagtgggccatggctggcgggaggcgggattacagccagctctttggccgcggccccggtcggctctcgcgagcgcgagcctctgttgtgcgttggtctccccgggcaac

SEQ ID NO: 366681 - DNA, 122 bp, Homo sapiens
cccagaactccctagggcggccccgggtgctctgtaaatccccgcctttggagcagggtgcggtgtctcttgaggaaggcccacacaagcgaaaacggggccccaggatggcgtgggtaggc

SEQ ID NO: 366682 - DNA, 122 bp, Homo sapiens
gggtcccacggggacctcagccgcattttctttctgcaggcctccctgcacactctggggcgttcgcagctctggagcccgcggggcagtgcgtccggccccgccctgggcctcattatcta

SEQ ID NO: 366683 - DNA, 122 bp, Homo sapiens
tccccacagctaaagacatggaacaataatgaacaccattcctgtgctttaaaaagtgcccggtcgccatgacaaccccttccattctcgggctaattagtgtggtgtggttgtaggatttg

SEQ ID NO: 366684 - DNA, 122 bp, Homo sapiens
ctgcactgcagcctgggtgatagaccctgtctcaaaataaaaagaaaaaaatttggacttcgcatatgtgactcatgttatgtttctattgaacaggactggactgggccccatgcatttct

SEQ ID NO: 366685 - DNA, 122 bp, Homo sapiens
gaggacacggcaaatgcgctgccgggattaccggctgaggtgagggcatgcgttggggaccgaggggaaggggccgggtgcgagatggggaaccagggctgcgggatcactgctgccgccct

SEQ ID NO: 366686 - DNA, 122 bp, Homo sapiens
cagatggcagatggcctgcccgaacacagaaggtgtgggagctgacgccaaagggcctcccggtgctctcacaattggaaaacaaacattttgtttctgtggtgtacattccagccagcaca

SEQ ID NO: 366687 - DNA, 122 bp, Homo sapiens
ctcacccagcgaaggccggagaagcggttgggccctggcacacagggctggctcagtgtgcggacagaggagaccactctgctcctggggccagaggccattcaatagcctgccttcgtccg

SEQ ID NO: 366688 - DNA, 122 bp, Homo sapiens
tggcggccggtgggcggagtcgatctctggccgtaaatacggcgccacatggcactggctcgcgagggcgggggcgggcgggctggccgggcgcaggcgcgctgagggcgggcgcccctcgg

SEQ ID NO: 366689 - DNA, 122 bp, Homo sapiens
agtgtgcagtagcttagggaaaaaaaaaatgtcgcccgggcaggaatgacaaatgcagcgcgataggctcgcaggcctcagggatctgtttgacttccacacacccccatgcacacgctccc

SEQ ID NO: 366690 - DNA, 122 bp, Homo sapiens
ccattgtgtgactagtttgacaagtaagataccacaagtctgtctgtcactaagagcaaacgtacacacgtgggaaaaatccctgcctcctccactcacccatgtctccgttcctgtccttc

SEQ ID NO: 366691 - DNA, 122 bp, Homo sapiens
cccagatcccagaccccagcccagagggaggcccggtgagggagtggaaaggagattccacgacacaaatgcttatgcggaaacagcctccaggccgggctgcggggctccaaagcagggtc

SEQ ID NO: 366692 - DNA, 122 bp, Homo sapiens
ggttgctgtgagccgagatggcaccattgcactccagcctgggcaacaagagcgaaactccgtcccccgaacaaaaaattcaaatgggaaagagaggcagatggcagagaacaggggagggg

SEQ ID NO: 366693 - DNA, 122 bp, Homo sapiens
gcggccagggccggggccaccaggtgggccgggggcgcggtgggagcggatagtctgggccgacgggagaagagaggcgggcgcgggaggcgggcgctggctcggggggcgcgtgagagaag

SEQ ID NO: 366694 - DNA, 122 bp, Homo sapiens
cgctggccctaatcacaaatgtctttgtactcacagtcatcttatgcagggtttgtacttcggcttctctcactgtgctggagattaaaatgtgagatgaggagtaacacacttgccagtga

SEQ ID NO: 366695 - DNA, 122 bp, Homo sapiens
tgttgagtatttaacgtgaatcgatgtaaacctgtgtttggtgcttagacagggggcccccgggtagagtggaaccccttaagctaagcgaacaggagcctaacaaagcaaatttttccgtc

SEQ ID NO: 366696 - DNA, 122 bp, Homo sapiens
cttccaggaggagcagctgcggcggcgggagcaggagctggcagaacgtgagatggacatcgtggaacgggagctgcacctgctcatgtgccagctgagccaggagaagccccgggtccgca

SEQ ID NO: 366697 - DNA, 122 bp, Homo sapiens
cccacggcgtctccttcgccatggaggccccccacccattccactccggggttgcggccacgcaccataagagcaccttcaggtctgagctctttaggggtgggagtaggcagttcgtgagt

SEQ ID NO: 366698 - DNA, 122 bp, Homo sapiens
agaggcggggcagaggcggcacttacggggcctgcgtgcgtgtggtgaactccttgaactcgctgtcatggatggtgaagtagggacggaagtcgcagcagaacctgaggggctgcaggcag

SEQ ID NO: 366699 - DNA, 122 bp, Homo sapiens
tgacggtgtcccttctgagtgctcctacctagagttaagggatacctgagggtaagcaaccgagtgacgaaacaaagaaggcggggcctgaggacagaacgccaaggttaggggaatggagc

SEQ ID NO: 366700 - DNA, 122 bp, Homo sapiens
gggaccacgaccgaagtccaggcgagctgagaacgcgccggggctctttgcccgaggccgcgccaatcctcactgtctaagggtggctcttgcgagtggaagttgaagggaacctctaaaca

SEQ ID NO: 366701 - DNA, 122 bp, Homo sapiens
cggagcggcagctcccacagaagcctggagaggcccagagcagagatttccacacagcctcgaaggaaccagccctggccacgcctgcatctcagactccagcctctagaaccaagagagga

SEQ ID NO: 366702 - DNA, 122 bp, Homo sapiens
ccctgcccctgaacctcgcacccctcctgcctcgttcaggaagctccgcacctatccggccgccaccctcagcacagccacggcagccgactcggcgttcctactgccccggaagtgctcct

SEQ ID NO: 366703 - DNA, 122 bp, Homo sapiens
gggcacgaacctgggaaccagagggtggaggccatgctggggactgatgtagggcgggaccgactggaagcggcatccagaggcccagtgagcctcggtctcagctcctgaaggggttgcat

SEQ ID NO: 366704 - DNA, 122 bp, Homo sapiens
gtgggctctggaaacgcagcccagacctttgcaatgctaggaggatgagggcggagacctcgcggtccccaacaccagactcccgcagccaccgcgcccggtcccgccctccccactgcccc

SEQ ID NO: 366705 - DNA, 122 bp, Homo sapiens
gcatttagaaacagcagccaagccctcgcttcaccttgcctgctctctggggagttggctcgaacccccaccccatcccaattcccaagaaacccagatgtccgcaatccgcgccccacccc

SEQ ID NO: 366706 - DNA, 122 bp, Homo sapiens
taggcagcctcaccccgctccaggagggcgtcggccgccagccgagccgcctcgctgtgccgcagcaccagcggtgagctctcccgccaccacggcagcttcagctcttccacccggccccg

SEQ ID NO: 366707 - DNA, 122 bp, Homo sapiens
gttctgggctgtggaattggagcagttcaggcctggaaggtgcccagagactgtgtattgcgaattagcagcttgaggaccaaatgtagctctttcacaggttttgtttggcctgcagagtg

SEQ ID NO: 366708 - DNA, 122 bp, Homo sapiens
gtaaaacataaagcctggatttgaacacaattagtttgcctccagagccagtgtgtaagtcgctatacaatactgacagctgactgcatgtgagtcatctcagctcctccaaagtgtggcca

SEQ ID NO: 366709 - DNA, 122 bp, Homo sapiens
gtgcggagccgggggcggaataactggttgcgcggcgctttgaccgtaggcgctggagcgcgtgcgttgcgtgcgcgcgcggaggcggctgcgtcggggcgcgagaaggtgcagttccccgg

SEQ ID NO: 366710 - DNA, 122 bp, Homo sapiens
ctttagaagttgtttaacaaaatgttaaatgagatgacattcagcaggcagcaaaatgctcgactgcctaatgcaacccaaaagagctggcctagtggcagtgtttgatataatgctttgta

SEQ ID NO: 366711 - DNA, 122 bp, Homo sapiens
atgggctggtgctacgtgggggtagtgcacaggttgcgccaggcccagcggcgccctcagcggcagaaggcagtcagggtggccatcctggtgacaagcatcttcttcctctgctggtcacc

SEQ ID NO: 366712 - DNA, 122 bp, Homo sapiens
acttgggacttataactctattacttcatgcaagtgtacacgcttggatgtacatacacacgcacacacacacacactcccttctctccacttaaagaaactttccccattggccctccttt

SEQ ID NO: 366713 - DNA, 122 bp, Homo sapiens
aaacagaatgagcaaaattcaaaaactaaagcagcgtttttcctgcaagtgggcgcactgcgtatcccctgcgggaaagaccacgctggctgctgaccaaactccactggcatcttcctcca

SEQ ID NO: 366714 - DNA, 122 bp, Homo sapiens
gatctggttggagcttacgcagccccgagccccctctgtcccagcatctcccctcacttacgtctctccctgggtccccagctttgcctgcagcaccctgaggagagactcaaagtcagttc

SEQ ID NO: 366715 - DNA, 122 bp, Homo sapiens
cctgccctcaagatggttggaaggataagaggacgcaccctgggtcagcagaatgtctggcgttgcctgctcagtaagtgctggctggtaggaatatatttcagaattgtgttattactgag

SEQ ID NO: 366716 - DNA, 122 bp, Homo sapiens
gttggggactacacagactcctccagaaactaattcaagtacactcattccccggggacacgagtgtaattcaaatgtgtacaaagaggcaatccggggacctcccagcatgacgttggcat

SEQ ID NO: 366717 - DNA, 122 bp, Homo sapiens
tgatttccgcggtgttgcgtggaagggaaggcatggtgtggtgtgccttactgtggcttccgagtcagacccccactggctgtgggcttccacctgcatcaggcatcaaaggctgtggatgg

SEQ ID NO: 366718 - DNA, 122 bp, Homo sapiens
gtggatcttgaaagaaatataactatcatattcttatggcacacgtagttatttttctttcgtcaagtataatattactgaataacttaggtaactagggcagtgattctcaaactaggctc

SEQ ID NO: 366719 - DNA, 122 bp, Homo sapiens
ctacatcctggtgccgcagaggcctcggaaaagcttcaagtagagctggagaccaggatccgtggcttggaggaggctctccggcagcgggagcgggaggcagctgcggagctggaggcggc

SEQ ID NO: 366720 - DNA, 122 bp, Homo sapiens
gacctctgcgggtttggctccagctgcagaaagagcgccaaagaaatctcaactccagcccggctaggctgggagtgggtgcgggagaaacagatggggggcacctatttagatctgatctt

SEQ ID NO: 366721 - DNA, 122 bp, Homo sapiens
tggcagcagataggaatcgaagggcactcattcgcttggctctctgtcccgcccactacccggaagtgtggcccgggtccagaaccaagagcgcatgctcaccttgtagctcagccaatcaa

SEQ ID NO: 366722 - DNA, 122 bp, Homo sapiens
gtcccacctggacccacagggaaggcagtgcataaaagcctcctgtgtttgaggctgagccgctgagaggctgagtggagttcactcacatggattgaggcccagttcctgggagaagagat

SEQ ID NO: 366723 - DNA, 122 bp, Homo sapiens
ctgagaggaaacagcaatgccaggaggctcctgcaggcatcggtgagctgctggtagctccgggacaggaagagaacctcgtgctccatgagggtggcacagaccaaagacagtacgttggt

SEQ ID NO: 366724 - DNA, 122 bp, Homo sapiens
acagcagctcctagggctgctacacatagctgacagcaggcagctgagcactcgactctccggagcagccccaaccccagtcccacgggcccacctggtgtgcgtcctctgcccgccagtgc

SEQ ID NO: 366725 - DNA, 122 bp, Homo sapiens
agaggcaagtataggaagaatgaacccagtcatccctatgcagtggtgatggcttggacccgtgcgatagtagttggagtgttaagaagtggtcagtttccagttacatttgaagttaaagc

SEQ ID NO: 366726 - DNA, 122 bp, Homo sapiens
ggggtcccgatttatctgctaaaacctcctctagccaccaccgaataaagcaaccccttgcgacccaaccacaagagcactgcctggaagcaactccaagggacatccagtcacattaaaac

SEQ ID NO: 366727 - DNA, 122 bp, Homo sapiens
aggcggaggcggggctctggcgagttctccttccaccttcccccacccttctctgccaaccgctgtttcagcccctagctggattccagccattgctgcagctgctccacagcccttttcag

SEQ ID NO: 366728 - DNA, 122 bp, Homo sapiens
ttaaaggaaatctaatgtgaagaattccaggagaactggataagcctgactatgggtgggcgtgactgaattacttcccgggctggctaaggaaggcctcccccgaagtgcatcggaagcct

SEQ ID NO: 366729 - DNA, 122 bp, Homo sapiens
atatgttgcattttgctgtggatcagtaaaaacttacctttggagtggccctgtccatgtcggcagttggtaaccacatttctatatactaaggatgtctggggcaaagagatctgcccctg

SEQ ID NO: 366730 - DNA, 122 bp, Homo sapiens
ctagtcgattgtctactggaaatggggctgacttcacatacctgcccggaaggtgatcgccgtcataaatggggtgggtgagtaggtgggtggaggtgtaagtactgcgtggggtgggatgt

SEQ ID NO: 366731 - DNA, 122 bp, Homo sapiens
gaacagtgtctgacacagagtaagcatgctataaatgttacgcatgattgtcctgaatgtcggtattgaaggacatgtcagctcttatagagcagaaattgatttcatgtgaagttgtgacc

SEQ ID NO: 366732 - DNA, 122 bp, Homo sapiens
gtgtactgaggcagctccaacctcaccgtgtagtttgttcccttctcaaagcacaccggccgaggaaggacgacatatctgcccccaaacaaaaaagaaagacaacaacgaaagtcaacctt

SEQ ID NO: 366733 - DNA, 122 bp, Homo sapiens
ggactctggaattctacacagctcaaccaagactttgcttgaatgtttacattttctgctcgctgtcctacatatcacaatatagtgttcacgttttgttaaaactttggggtgtcaggagt

SEQ ID NO: 366734 - DNA, 122 bp, Homo sapiens
ttgttcataaaaggagtcaggcagctctgccgggtccctggctcagcactgtggaaacagcgacggggggaagacgttacagccccgagatactgccggcttgattttggctccattctctt

SEQ ID NO: 366735 - DNA, 122 bp, Homo sapiens
gcagaaaaacactccctgaggatatggtttcccaagccctcttcttgcaatcaacacttccgaagagtcctctgtgtggaattgctgcttggaaaaaaaaatgatgctttttcttggaaggt

SEQ ID NO: 366736 - DNA, 122 bp, Homo sapiens
ggacaggcaagggggtgcgagaaagtcactccggccgccgggacagtctgagcaagtcgtcgccgcagtgacccgaacccaaggacacgataggaaggggggctggaacggcgtccctactc

SEQ ID NO: 366737 - DNA, 122 bp, Homo sapiens
aaaggacatgaactcattctttttcattggtgcatagtattccatggtgtactgtggtcacgtcttaggtcacctgtgatgacattcggcccgtcaggatagttcaggagagtttccccatg

SEQ ID NO: 366738 - DNA, 122 bp, Homo sapiens
tgcacaagatggcgctcttaagctttaaaaagagtcgggggctcagtgcagtgaatgcgccgctccaccccgagggttcctcctggagaggctgcagagcaggcgggaagaggcaggaaagt

SEQ ID NO: 366739 - DNA, 122 bp, Homo sapiens
ggaggttctcaggccaaggctattggggtttgctcaattgttcctgaatgctcttacacacgtacacacacagagcagcacacacacacacacacacatgcctcagcaagtcccagagaggg

SEQ ID NO: 366740 - DNA, 122 bp, Homo sapiens
gcgggtgggcgccgtcgcctcactaaccgggcgcctccgggaagtccgggcggggtccgccgctcacacataggattagcgtcctctaaactccatccctgggaaaagccgccgcacttctc

SEQ ID NO: 366741 - DNA, 122 bp, Homo sapiens
ttccaaattggatgaggcccaggaatctgctttttatttttttatttttttgagcctccgcgcctggcagaatctgcgttttaataggatctcaggtagttctgatggacactcaagttttg

SEQ ID NO: 366742 - DNA, 122 bp, Homo sapiens
ccgagcggcccagggcggccggaagtttgcggggcggggcggacgcgggtggccaaggcccgtttccggcggcgtcgcgcgtttgcgagcctcgggtggtcctcagggagggtgagtcggcg

SEQ ID NO: 366743 - DNA, 122 bp, Homo sapiens
atgctaacttcaaatagtgacctctttaaataaacattgctaaaaggagttgttcaaagacgattgtgtggtctaaataaagctgggtttagtcaaccttgtgaagcagttgcagtttatct

SEQ ID NO: 366744 - DNA, 122 bp, Homo sapiens
tttctctgtcttccctgcctcaacaagcccaggctgtccaggtgatggggctgacgtcttcgtccatgaggccccggggtaggggtgaggggggcaggggcggggaggaatctgctgacgtg

SEQ ID NO: 366745 - DNA, 122 bp, Homo sapiens
attgtgtgaacatcatagagtgtacttacacaagtaagtgtactacgcacctaggctattcggtatcgcctattcctcccaggctaaaaacctgtacagtatgttattgtactgaatactgt

SEQ ID NO: 366746 - DNA, 122 bp, Homo sapiens
agaggggtgggagaaggcagggctggaggccgagggcacagaggctctggagagggaacacgccatgtctggagttccaaattctggatttctggggtctgaacacaacagctaggagagcc

SEQ ID NO: 366747 - DNA, 122 bp, Homo sapiens
tctgggaggggggagggcctcccaggccagctcaggctcactgtcctttgaactggtacccgataaacagaggctccaagacgctggcagccttgttcttccaaggcaagggagttatttgg

SEQ ID NO: 366748 - DNA, 122 bp, Homo sapiens
ctgcgagaattcctgcctgagatactgtctttttgtgactgtaagtgcagagagagcccacgcaaaccgcaggacaccagagccgccgccctgcccctccaagctgctggcactcgggctca

SEQ ID NO: 366749 - DNA, 122 bp, Homo sapiens
ggttattttagggcataaatgcctatggtattgtatgtcagtttgggaagtttgccttcacgccttcaagtgtacagggagatagttactccttcaatgtgtgaaatgattctgtagtgccc

SEQ ID NO: 366750 - DNA, 122 bp, Homo sapiens
agctgtcactcagatgtggggggcgggacctagtatttcatccaatcagaggtgctggggcgtggcactgcccacagttcatccggaaatggagggggtcgctttcctcaccttcctcgctg

SEQ ID NO: 366751 - DNA, 122 bp, Homo sapiens
cgtcgaagtcgcgcatgagcgcgcggaagaagacgctcacggctttggggaagccgtaggcgaagccggtgaccacaaagcaggcgcccagcaccacccagccccagccgccgtctgggggg

SEQ ID NO: 366752 - DNA, 122 bp, Homo sapiens
tgtgtctgcagtgtttcgggaaatgacttgccttagcacgaacgctgctctgttctgcagcgacgctgcctgcccgggagcggtgccgctccatttctggttaactcttccttcccgggcct

SEQ ID NO: 366753 - DNA, 122 bp, Homo sapiens
cttttgcattttgtactccagtcatcttcttgggttgagggctgtctgttacacagaaggcgatgggaaaatgtgtcatggaaaagtagtagtctctagaggctgcttaggaactgcgtgta

SEQ ID NO: 366754 - DNA, 122 bp, Homo sapiens
ccagtgaggcagtggggtgacggcgacaccaaaacccacagtggatgagtatcttttctacgggcacgtggcctgcaaggagcagagggaggatgagaacccagatctttcgaatgccagcc

SEQ ID NO: 366755 - DNA, 122 bp, Homo sapiens
aaagttgctcatgagaaacaaaaatgcaagcccagggctgcacagcggtaaccaccaaaacggcccacagatgccgcagcccgtggagtggggagcgagcgagcacgcctcactcggaacgg

SEQ ID NO: 366756 - DNA, 122 bp, Homo sapiens
aaatatttgaacctgcccaagttaatcatgaagctgcgatctttatctaagggagacgtgcgagcgcctgggctcctttcctccccgatacagtagcgaaatccagttggcttctcaatgag

SEQ ID NO: 366757 - DNA, 122 bp, Homo sapiens
tgtccctccatgctccggggctcagtgcaaaccccctgggccactgtgggcctctgggaccgcacaggtcagctgtgaaatccccgccacgtggagagccctgttattctgcaaggctctgc

SEQ ID NO: 366758 - DNA, 122 bp, Homo sapiens
ctaaacggaaacattgaaccggccacctgaaggtctagaagttttagactgtggaatcagcgctgtggaaggcccggctacccgggttaccgtgagctgatcatttgttttcctctggactt

SEQ ID NO: 366759 - DNA, 122 bp, Homo sapiens
actatcctggttcataagggacagaccagctgatgaaatcagtttgcattagtctgtcagcgctgaaaccaagtttaaataacttacttaaaaaaaccactccagatttaagtatttaatag

SEQ ID NO: 366760 - DNA, 122 bp, Homo sapiens
acccctttcggcccagaaacccaattggttcccccagaaaataggtagaagtcagactcacgttaaaaaaagttttatttagggagctccagggaatgcggtgggaaaggagaggtgcagtg

SEQ ID NO: 366761 - DNA, 122 bp, Homo sapiens
cgtgaggggaaaagtgacggcgtgtcgcagcgggaggtgtgtggtgcaggcccacaaatacggacgcgtggcggaacccacacctagggcgctggctccgccccgcaagccgctcgccgtga

SEQ ID NO: 366762 - DNA, 122 bp, Homo sapiens
acactcgcgctgtatggaagccctttgctgccatctccgcctggccgtggcatctgtgagcgtggcagagaggggctgggctggcacggctctcccgcccttcctccctccgcctctcactt

SEQ ID NO: 366763 - DNA, 122 bp, Homo sapiens
ctgcaggatttttaatgagctgaaatcaagaagagccccatctcagaagtaagcgagagccgcgcgcagggaagaactagtctgacaaaacagaaggaggtggtgctctcgggggactgggc

SEQ ID NO: 366764 - DNA, 122 bp, Homo sapiens
cgagctcggtggtgacgcgcggccctcacgtgacccagagctgcagagcgacgcagccttcggtgcagtcgtcactcgcgtctggctaccagctccccgctgccctgagctcggcgggctgg

SEQ ID NO: 366765 - DNA, 122 bp, Homo sapiens
ctgcctttgagtgtggagaattgcaagtgatttgtaggtgtggttgtgactgcctggagtcgtgttagctgctgtctgaggttgtgaatgacaagtggggcctgtaggttggtggttctctg

SEQ ID NO: 366766 - DNA, 122 bp, Homo sapiens
gtgagcatgttcaggtgtctgttggcctaaaacaagtctgtcatccgtctgtgtcctcctcgtccctccagcagcatgaaagccgggcttcccctgccgcctcttctttaccacgcactgct

SEQ ID NO: 366767 - DNA, 122 bp, Homo sapiens
tcctcccgcagcttccctctcccgccaaccttcttgtccctgtcttctctttctttcccgcgtttattcagcagagattaatgtgataacctgttatgtgctgggaactgttgggctcctgg

SEQ ID NO: 366768 - DNA, 122 bp, Homo sapiens
ctgacttcaatggccctcacctggcagctgcctccggtgtagccagtggggcagaggcagcggggaccctgagggctgtcctggcaggttgccctattcctacaggggctgaacaagacaga

SEQ ID NO: 366769 - DNA, 122 bp, Homo sapiens
cctgtccccttccgccctatcccgcagccgcccagccaagcaacattgttccagaccacccgggccccgaagagcggcccccaagtgctcggcccacccccaagcactcagtctctggctca

SEQ ID NO: 366770 - DNA, 122 bp, Homo sapiens
tacagtgaactgtcagttaaacatcatcttttcccagacatttctgcgtgtgtgtgtgcgcgcgcgtgcgtgtgtgtccccagctaggctgggactttgttagagcaagacaggaactgagc

SEQ ID NO: 366771 - DNA, 122 bp, Homo sapiens
gcctttcctgagctggcattggcaacgcacactcttgcccggctaacctttccaggtgggcggcgcactggcttcactgctctccaggtggccgctgcagctgcccgagagcgcaggcgcag

SEQ ID NO: 366772 - DNA, 122 bp, Homo sapiens
ctggagggcaggcagctctggtcaggacttccagtgatgaccgcagggggttccagctaccggggctggtgatgggagccactctgtgcaagcgcatacacactctctcacactcacacact

SEQ ID NO: 366773 - DNA, 122 bp, Homo sapiens
gtaggcttgcttgcaatgttgtgggctctttttacagacaatgtagatacacagcgtatgcgagtttgcttttgattggacgtaagaagcaagatcaaagagatataccaaaggactcagag

SEQ ID NO: 366774 - DNA, 122 bp, Homo sapiens
agtgatggtgacggccggatactggagacgccaggctcctctcgctgcagaccaggcgcccggatcctgcagtctggccctggctctgccgctccccagcccgtgagcttgggccagttacc

SEQ ID NO: 366775 - DNA, 122 bp, Homo sapiens
ccgcacgaccacgcacccgcggctgtcggatggatccaggcgctcttggtgggaagggggcggagcctgcctggcccggagcccggggccacgcccccacgctttgcatatgcgaatccggg

SEQ ID NO: 366776 - DNA, 122 bp, Homo sapiens
tggtttgtctctgcctatagccaagtcacattttgcagtgcgactattctgtaaactacgcgcttgtttgtaaattgtaccagatgctcagccactaactcagccttatactttcatcaggt

SEQ ID NO: 366777 - DNA, 122 bp, Homo sapiens
gctctgattgggatttcagggctttggccttcatcctaatctgaaggggccggcacttgccgttgctctgtgggaggaaggggcagtgggctgaacctgaggctcctcagtaaagtgctgtt

SEQ ID NO: 366778 - DNA, 122 bp, Homo sapiens
cggcagcaaggtttacaatcctaaaccatgcaggcttccggcgtaatctctcctgtacttcgccaccactacagcctcaccgctggacagctcggccgcacacacacaccacacacaccaca

SEQ ID NO: 366779 - DNA, 122 bp, Homo sapiens
ccgggcagggcggggtccacacccacagactgtaacctggacccaggtggggtccacacccgcggactgtaacctggacctgggcagggcagggtccacacccgcggactgtaacctggacc

SEQ ID NO: 366780 - DNA, 122 bp, Homo sapiens
gaaggagtgtgtaggtgcagcagagtattacctgaaatggcaacagattgttaccattatcggtccggaaagcgttatcctccatccaggacttggaagtgagaggggccgcgcgagggaac

SEQ ID NO: 366781 - DNA, 122 bp, Homo sapiens
ctaggtcttcagggaagtgatgttgctcgggtctctcctccccttgctctggaaatctggcgtccgtcttaccttttagtgtccaagaacaactttttcaaaaagttcatatattagcttga

SEQ ID NO: 366782 - DNA, 122 bp, Homo sapiens
gggagggggccaagtgccagagttgaagggcggcgaggggtggggctggacgtcccccctcgcctctcacccttttcaccctcacaggactcccctggcacctgacatctcccacgctccac

SEQ ID NO: 366783 - DNA, 122 bp, Homo sapiens
aaggaataatgagacataagagtgtctatctcaacacctttcatgtctcagggacatcttcgggataaatcctggtttggagataagtgcagtgttatgtctactgcagaagggtgtttatt

SEQ ID NO: 366784 - DNA, 122 bp, Homo sapiens
atctgcaaagagccacagggccacgtggacagaccacatctgcaaagggccacagggccacgtggacagacccagcactgagaggcccgctcagcggggcgtggctcaaacacggcccgtcc

SEQ ID NO: 366785 - DNA, 122 bp, Homo sapiens
ctgcagctgaggcaggctcctggctccctccaggcccgcaagtgaggcaggctccgcaggcgccgtccagggagagccagagccccagctgtgtgccgactccgagtgctccagggttctag

SEQ ID NO: 366786 - DNA, 122 bp, Homo sapiens
ccgttatggacagctctgtgcaaactcctgtcagaggcagcctcatcaaagtactaaaggcgaggcggaaccacagcttcaccctgagcttcacatgtccacatatgccaggagcttgtgtg

SEQ ID NO: 366787 - DNA, 122 bp, Homo sapiens
ttgacagtaagatgctttgtgcagccagatgttaattccacttgcccttacgcttgcttacgctacaccgtaagcggggctgacccttatggagctgggcttttcttcgcccggagactctt

SEQ ID NO: 366788 - DNA, 122 bp, Homo sapiens
tggtggtgaaggaaagaagacaacgtggttagtttccagggagtaaagatggaagaacagcgtcatcagtactggatctctttaggcagtttggagaagcaggtagggttgctgaagaacag

SEQ ID NO: 366789 - DNA, 122 bp, Homo sapiens
tctgttggggcatcacaacagttccccaaggaagaccctcggggacccggatgggggatgcgaccttgtcctgcctctctcccccacccttatggccaggcttggggtgcctggtgcaggtg

SEQ ID NO: 366790 - DNA, 122 bp, Homo sapiens
ctgagtcacggaggcgccccagccgctctcccacccccatccgcacccccatccccaggccgccctgtccctggggtccacccccgccgcctcgccagccacccggttccaccgtccccggc

SEQ ID NO: 366791 - DNA, 122 bp, Homo sapiens
cagcactggacgcaggaaagcgagaagccggctggggcgtaaagactgctctgggacccacgggagtccctcgccccgcttagaacagccagcaatgactagggccgtccccagaccagact

SEQ ID NO: 366792 - DNA, 122 bp, Homo sapiens
gcatatttataattctgcccttcatacccagcaggttacttgcaggctctttaattcgaacgatcttttgtgtaaatgtaaactacctttccattgctaacaacaccattgaccccatgtca

SEQ ID NO: 366793 - DNA, 122 bp, Homo sapiens
gtaccaagggaagaagtggcaatttcccaccctgcaggggagcacggcggctggtggtaacgcagggagcacggcggctggccgtaacgcagggagcactacagctggcggtaatgcaggga

SEQ ID NO: 366794 - DNA, 122 bp, Homo sapiens
ggaaagtgcgaattagaccaagggtccgagcttcttcttccaatcgtggggctccatatccgccacgggttgtaggtctgtcccaagtcgtcagctggactggaggtggagggagcgtgagg

SEQ ID NO: 366795 - DNA, 122 bp, Homo sapiens
attgtgtctcagagcgttctcacccttgggactccagctagggcagctgcttgtggaacacgactcctttctgagttgttgggctccaggcctgggcatcctcgcagcccacagcgttctgt

SEQ ID NO: 366796 - DNA, 122 bp, Homo sapiens
ctgtgttaagaaaactaagaagtcattcatctgcacatttcccgaaatcccccagaagcccgtattagactgaatggtgtccttattgcaaactctccactttagccaaggtgcaaagtcct

SEQ ID NO: 366797 - DNA, 122 bp, Homo sapiens
gcggtggttgctgtattttgacttggtgagtcctgggaaccgaccctcgggcctgggctccgatttctgggccagaaacaaagtctgactttcggagaacataaaggctcaaagaggcagag

SEQ ID NO: 366798 - DNA, 122 bp, Homo sapiens
atgatataatacagaatgagaaaagttgctgatagatttatttgtataaaaaaacagaaccgcgctaatgtgtttatgtatgtgcccagaaacaaaggcctgaaaggatagacaggaagtag

SEQ ID NO: 366799 - DNA, 122 bp, Homo sapiens
gtcctcgctggagctgtgcccatccactgcggggcagatgcggtgagcacccggcccctgcgcagggacggccccagggcaggcaccggcactcaccattgtcctggatgatctgtctgagg

SEQ ID NO: 366800 - DNA, 122 bp, Homo sapiens
gcaagtgagctggtcacataggcacattccagctacctaaccagcctcagccctcaaaatcgtcagctccaccaaaaccgagtgctaggcaaaaatctgattattttgttaaacaacgctga

SEQ ID NO: 366801 - DNA, 122 bp, Homo sapiens
ggaccggggacaatcaggagggcgcagagcgggctggggcggtgcagggggcggggctgccgcggcattgcggatcggcgggcactagggcagcgcggagctccggcggtgggcggggcgtg

SEQ ID NO: 366802 - DNA, 122 bp, Homo sapiens
cagtctggctcaagcgcctcgcttcttccctgggggaccgcgtggggaggcgggaataatcgcatgtgctgagttcctactaagtgccttgcacttccctggtagtttctcttgaattattt

SEQ ID NO: 366803 - DNA, 122 bp, Homo sapiens
tcgcggggcacagcagccagcatctctttcatgttctcctacatcttgctcaccatgtgccgcaacctcatcaccttcctgcgagaaaccttcctcaaccgctacgtgcccttcgacgccgc

SEQ ID NO: 366804 - DNA, 122 bp, Homo sapiens
aaactgtaagccagaaaacctggccaggcctccgcgacggcgagaaacggtcttgaaggtcggtcggtcgccgtaatgcggtccggatcgtgcacgtgctgtttcgccactgccctccggct

SEQ ID NO: 366805 - DNA, 122 bp, Homo sapiens
ctgtgccaggggggacgaatgccccacacggatgactcggagcttgatttcggcggggagcgcggtctcggacacgcccagagcccgagaggacggttctgtccccgccctgccgcacacac

SEQ ID NO: 366806 - DNA, 122 bp, Homo sapiens
caccgcttcaggtctgggcagcctgagtccctaagcctggaaggctaaagtaccctcgggcgccccgcccactccagtccggcagcccctcgcagggtgccaaactttcccccatcccactc

SEQ ID NO: 366807 - DNA, 122 bp, Homo sapiens
tcctggggaaaatttcagcagctggggccatgtaatttaaaacctctgaaaagtgtgctgcggtccgtgcacagcattagtataacgtgagggctgaatgcagcccattctctggagaactt

SEQ ID NO: 366808 - DNA, 122 bp, Homo sapiens
cgcccccgtgcgatgtgtatcgtaatagcaagggaaggagagggggatgatattactccccgcatcgtggcagagtctatcacagatcaggatactatccaccccctgggatatggggagta

SEQ ID NO: 366809 - DNA, 122 bp, Homo sapiens
gagccacgggattcggcgcctgaatgtgcctagacggaccccaacacactagccctgccacgcacacccagcaacacacagacaaccacccagggagacctggtctctcccatgctaaacta

SEQ ID NO: 366810 - DNA, 122 bp, Homo sapiens
taaacctatcagtctcttacaccatagtataaattattttccttgcatttgacagaacaccgtgctaagatcaactacaggctttgggaatttaaataaaggaagaggaaagagatagaatg

SEQ ID NO: 366811 - DNA, 122 bp, Homo sapiens
gccaagcgtgagaacgctgcgaacttcccggaggccaaaagttgagggggctgagcggagcgtgattggggaggggcgggcctgggagaccttgggcgcctcctctgaaagcctcttggtag

SEQ ID NO: 366812 - DNA, 122 bp, Homo sapiens
tcggcacttgtgtctcaatgaccaatcaaatttcgccttacattgcatcgctgggataaacggagctggacgactcagtctcttggtctgtggctgctgcggttacctggatgggcgagcac

SEQ ID NO: 366813 - DNA, 122 bp, Homo sapiens
gacctcttgagtgatttgtgtgctttccggcaaatgatggagacgcgtaaaccggcggaacggctggccttgccatactcgctgcgcaccgcgcccctgggcgttccggggaccctgcccgg

SEQ ID NO: 366814 - DNA, 122 bp, Homo sapiens
ggcaagtgggcgtccgccgagcctttgatgcactctccaaagtcacagagcaaaacaacacgctgaacaaacaccaccaccctgaaaagtcaccagcccatgggcctctccctggctccagc

SEQ ID NO: 366815 - DNA, 122 bp, Homo sapiens
aggctgggatctggagatctgggctttatttgccgttctacttcagcaacaaaaattcgccgctttggggaagacatgacctttctctggggttgaaccagaagacttcccaggactcttcc

SEQ ID NO: 366816 - DNA, 122 bp, Homo sapiens
ggaggagccagcggccctgtgccaagggagcacgagttggggcgtgtggggatgggaggccgggtcgaaggccgcctttcagtgcagggaaggacctgataccacagtccagcagcagaggg

SEQ ID NO: 366817 - DNA, 122 bp, Homo sapiens
gtccacaaagtccttgaacaggatctattccccctcacctaacagttaattatttcttagcggggaggagcagctgatcctctttccagtgaccccatatccttgttcaaggaagccagtta

SEQ ID NO: 366818 - DNA, 122 bp, Homo sapiens
gcccaaacgtgagcactgaccgtgagccaggcactgtcctaagcactttgcaggtaaatacgtgtaatcctcacagcaacactgggagaaatacccgtctcacagctgaagaaacgaagacg

SEQ ID NO: 366819 - DNA, 122 bp, Homo sapiens
agtcccaagccctcgtgaagcattggagaaagtgccgccccgaggttcaggtccacacagcgctgtgaggctgaaggggcgcgctagaagttcctttcacaggacgccacctcacctgaaac

SEQ ID NO: 366820 - DNA, 122 bp, Homo sapiens
atacatttcctagaggccaaggcccattggttttacatttcttacctaaggcaacccagacgtggctttttctttcacagggccgtggggggagcaccacttccccggccaaaaaaattgtt

SEQ ID NO: 366821 - DNA, 122 bp, Homo sapiens
gcggagaacctggagctcgcaaaagctcgcagttgagggccatcgcggagggaagtctttcggaaatgcgaattctcattccaacatctgcagcgcttagaattcgcggacagaagcgcaca

SEQ ID NO: 366822 - DNA, 122 bp, Homo sapiens
atgccctggcatctgggttgggagctagattccaggctgtggattctgagctgagctcagcgatggccagtggttacttcaactgtggcctgcgctcccactgcgctccctgactgtgtgag

SEQ ID NO: 366823 - DNA, 122 bp, Homo sapiens
atgctttgcgcccagccccatggccttgtatgggctgagccgccccaggggctgggctcacgcccccccaccaagctgataccctgaccaagtgctgagttgggctggcggtggggacagct

SEQ ID NO: 366824 - DNA, 122 bp, Homo sapiens
agacatgtcaccaaccatcacagctgctgagtgattgcacggttagtcagtaggtgccaacgccctgctagaagagctgtctgcagattccaaagccgggcgttcagggactcccgggaagg

SEQ ID NO: 366825 - DNA, 122 bp, Homo sapiens
cggggccgcgagcctcagcaaggcggccgccggctcggcggcggggggcttccagcgcttcgccggccagaaccagcacccgtcgggggccaccccgaccctcaatcagctgctcacctcgc

SEQ ID NO: 366826 - DNA, 122 bp, Homo sapiens
gtgagaccagcagagaaactacccagtcaacccacagaatcataagaaacaagctgctgtcgttttaagccatgaaatttagaggtgacctgttatgcagcaataggtaactgacacaatta

SEQ ID NO: 366827 - DNA, 122 bp, Homo sapiens
gggggcgggtgcggaaagactaaaagcgctgggaagccgttcgggagtacccgctgctttcggggagctgggttctctggtgtctttttggtaccagagccctcactgtacgggccaagctg

SEQ ID NO: 366828 - DNA, 122 bp, Homo sapiens
ttgtcaatctttggcgtggaggaagcagcaccaggtagactacattcttgctacctgggccgttccacaggtccttcagaattactacacgggaggctggcatcatcacgacaaagatgggt

SEQ ID NO: 366829 - DNA, 122 bp, Homo sapiens
ctcgcccccaggctcccactccttgaagtatttccacacttccgtgtcccggcccggccgcggggagccccgcttcatctctgtgggctacgtggacgacacccagttcgtgcgcttcgaca

SEQ ID NO: 366830 - DNA, 122 bp, Homo sapiens
gaactgcacaactcacgcagtaatgtagcttcacatacagcttgggaagcacacaggcatcgaagacgctagcttcagaaatgtccctgactgctgcggcctccactatgtttcgaatgacg

SEQ ID NO: 366831 - DNA, 122 bp, Homo sapiens
gtgtggatgacgcagtacctatatcccaacgtgcacggaaacctaataccgtgtggatgacgcagtacctatatcccaacatgcacggaaacctgataccgtgtggatgacgcagtacctat

SEQ ID NO: 366832 - DNA, 122 bp, Homo sapiens
atctgaccccagtacacctacatccagcgcagcctggcccctctgacccctgcacacacacgtgcagcccagaccagcccctctgacccctgcacacacacgtgcagcctagaccagcccct

SEQ ID NO: 366833 - DNA, 122 bp, Homo sapiens
cggcgcaacaggtactcgcccggagcgcagaacgaggtcttgatgtgcagcgatagggcccgcaggcagcccctgctcgctgccccgaacaacggcagctgcaggatctcccgattcaggtg

SEQ ID NO: 366834 - DNA, 122 bp, Homo sapiens
ccagattgcctgggtgcaaatcccagttctctctcttcctaacgtgggacccggggcaatcgctctccactgctgtaaaatgaggataaaaactttgacggtaaatatgaatgtggctgatt

SEQ ID NO: 366835 - DNA, 122 bp, Homo sapiens
cgcccaggaggaccatgttgcgcggcaagtcccggctcaacgtggagtggctgggctactcgccaggcctgctcctcgagcacaggcccctcctggcagggcgcacgccgcggagccaccgc

SEQ ID NO: 366836 - DNA, 122 bp, Homo sapiens
gatatggaattcattctatcattcaataaaatgaatgctgactctgtgctggctgcttttcgaggccttgtgaatattctctgtttggcgattattgtaatggccttttgccatcatgacct

SEQ ID NO: 366837 - DNA, 122 bp, Homo sapiens
tgggatggaagatttgggccgtgtggtgcctcagggaagttctggttacagagaaaatggcgagtctctcagagaagaagcaagaccaagtctggccctgtccttggtcatctcaaagccat

SEQ ID NO: 366838 - DNA, 122 bp, Homo sapiens
ggaagagcaaaggtacagttgtataggaatggtcagccatgagacacacccttgactccacgtgtcctcattcctgccactaaagaataaaaatcccagtcagttacaacggcagcaatcga

SEQ ID NO: 366839 - DNA, 122 bp, Homo sapiens
aacggcggtggcaccctgcgaaggatgcttagagaaacactctttcacatcccattcctgcgacttccgcgtggcgtggagggagaggagctcaaagcaagtcgccaaagcagcagcgaggc

SEQ ID NO: 366840 - DNA, 122 bp, Homo sapiens
ggccccggccaggagagccatgagcctttctatcacctactgaccttacttaccttcctccgtgaccctgcagagccggaggagctgcggcccagctgaccgcccgtgcctgcacggtccaa

SEQ ID NO: 366841 - DNA, 122 bp, Homo sapiens
gaacacaggcttctgtctggacttcagaatcaagaatcctatgggctgaaaggaattttacgcaggtgggaaatcttaaacaaaagctcaatccagtctctaaataaacttatctcttagag

SEQ ID NO: 366842 - DNA, 122 bp, Homo sapiens
taaatattaattatttccaataactgaatttattttctctgtgttcttgttttgttttaccgggatttggtacaaatagtattgagctaaaatcaatacaatctctggaggtcaactactgg

SEQ ID NO: 366843 - DNA, 122 bp, Homo sapiens
agatacacagtaaaccagaaaataataataacaaaagacacctggctgggcgcagtggctcgcacctctaatcccggcactttgggaggccgaggtgggtggatcatttgaggtcaggagtt

SEQ ID NO: 366844 - DNA, 122 bp, Homo sapiens
ctttatatttgtccctcttcctgttcaaataacttgtgcgcctatatagggcctggcccgcggtggaatggacgcggctgcagctggaatcgcatcactccctcctcccctcccccagcact

SEQ ID NO: 366845 - DNA, 122 bp, Homo sapiens
tgctggcttagccacctctgcagggtgtggacaccagcatgaagagcagaagtcaagtctcgctttatctggctgtgttcctggtcagtttgcattctcaacctcagagtgagggggtatga

SEQ ID NO: 366846 - DNA, 122 bp, Homo sapiens
aggaagagtgtcccaggggggaagcagtacagcatggagggtgcccctgctgcgcccttccggccctcggtgagtggtgcctaccagatgtggctcagttgggccccctcccctccagcccc

SEQ ID NO: 366847 - DNA, 122 bp, Homo sapiens
aacaccagctttacctgttgtcttccatctcaccctttcccttagtttagcccctattggcgtctccagtggagtagtgagaagcagcagcatgtctgaggattagctcacagccttagaaa

SEQ ID NO: 366848 - DNA, 122 bp, Homo sapiens
catttacttccggaatttaaagccggcttccggaagccgggacgatgtccgcatgacaaccgacgttggagtttggaggtgagagtgattgacgaggagtgggttaagtgaccagaagtcag

SEQ ID NO: 366849 - DNA, 122 bp, Homo sapiens
agaggattctgcaggaaccccccggttcctgcgccgggcggtgctctgtcccgcacaccgcgctctcgggacacttctctaactttggggacacgtgggcactgcctctggcagggccttca

SEQ ID NO: 366850 - DNA, 122 bp, Homo sapiens
tcctgataagatgttatcgatgacaatgcgtgcctgaaacttcattagcaattttaatctcgccctggtcctgtggtcctgtgatctcgccctgcctccattggccttgtgatattctatta

SEQ ID NO: 366851 - DNA, 122 bp, Homo sapiens
ttctattggctctgacttggatgaaaatagatctaagttgattacaagtctcatttcactcgctgtgattctatccctttctggactgcagtttattgatttcatatgccaccttctgtttg

SEQ ID NO: 366852 - DNA, 122 bp, Homo sapiens
gaatctaaattttacgtgaatcttcagtgttttatgtttggctcctaggagtggggagcacgtgcacgaccaagcttaagacttctagccagtctctgaatgtgctttattgctcccagctt

SEQ ID NO: 366853 - DNA, 122 bp, Homo sapiens
cagtctggaaggtttctgaaggcgggtgtgcggtcgactagatgagtcctaaagccacgtcggagccactgggaaacaggattcagggtgacctgaggagtcggcttgggaaaggcacaggc

SEQ ID NO: 366854 - DNA, 122 bp, Homo sapiens
ggtgggccacaggagaggggctggggctgggggcccgtgggcaagggcaagagcagcaggcgtttcccagagcagaagggagctgcatccccttttataacgcccagagactcttctaagta

SEQ ID NO: 366855 - DNA, 122 bp, Homo sapiens
cggctcagcaggggcctcttgggcagtaaggcccttctactgcctctggcaggtggaaaacgagtccaacgtgctgcaggacggctctctcatcgacctgtgtggggccacactgctgtggc

SEQ ID NO: 366856 - DNA, 122 bp, Homo sapiens
tggtctggaaggcctagcttttgtgttggggatggctcaccctgagtcatttctgccatccggccttcctctgttggcaaaagtcccagcccaaggactttggtgggacttgaacttcccac

SEQ ID NO: 366857 - DNA, 122 bp, Homo sapiens
acatgggaactggaacccagagcatgggcaaggcaagagcagcttctcgggagccaatcacgcctcctctcctgccaacgttccctccagaagcagataggggaacagcctgaacacgcctc

SEQ ID NO: 366858 - DNA, 122 bp, Homo sapiens
gtgaagatctgtatttgcagctctttcttgaggcccgtgtgaccacgaacccaccgagagcgaaggaacaactccaggtgtgccctcttaagagatttaacactcattgcgaagatctgcag

SEQ ID NO: 366859 - DNA, 122 bp, Homo sapiens
ggaatcaattttcggggaactcagcagccaaaccatccacctttgggcgggaagcaggatcgctgtaggcccgggggctccttgtctcccgtttggaaaatccgaagtctcctcgcggtggg

SEQ ID NO: 366860 - DNA, 122 bp, Homo sapiens
cgtccttgtcttcccacttgatgtagggctcatatcgggtatcaaggagcagctgatacacgtaatcccacagcaggcggcagtctgcaatttagcacagggagtgcaggcagcgcagcttt

SEQ ID NO: 366861 - DNA, 122 bp, Homo sapiens
ttacattcatgtcaattaaatacaaaaataaaagtcaaatgtccttccgtccccggtttgcgggacttgttctcaggtggaattcccagccgcccagcgcgaggccagcgagctggggcctt

SEQ ID NO: 366862 - DNA, 122 bp, Homo sapiens
agaggtgacgattctaccagggagttgactgataggagtgtgtgcagggcaggaaaggttcggaggcacccgactaccaccactcggaaagccgctagtccagatcgactagggagaggctt

SEQ ID NO: 366863 - DNA, 122 bp, Homo sapiens
acttcgatcgtgatgtgtttctgtgtcgcttgaagtctagcttgcctttcctaacgctctcggcccgggtcagagactccatgtgagagaagacggccacagggaatgtgcttggatttggg

SEQ ID NO: 366864 - DNA, 122 bp, Homo sapiens
gccagctcagcagccggttacatctcgcccggcaacccataggcagcgtccgctcatgcgcgctcctggaagacccagcagccccgccatgagttccgattggctccgcgtgagtggcggtc

SEQ ID NO: 366865 - DNA, 122 bp, Homo sapiens
tgactggccgagagtccctgtagggaggtgtatggccggagtgagggccttgcagacctgcggcggctgcgctaccagagcacccgcttctgagtcattctttgggctcaccctgctgcccg

SEQ ID NO: 366866 - DNA, 122 bp, Homo sapiens
gtggaggacgtctttcgccctcagggcagcccggatgacagctaatgcgcctgggcaaggcgttctcaactgcgattcccggccttaaatgtcctctcaacttttaaaagttatttattcaa

SEQ ID NO: 366867 - DNA, 122 bp, Homo sapiens
cccgccccccacacctgatcctggttcccattgggcgaatctggatgctgtatacacagccgacacacgcacattaggctggggcgtcttcgcgcctgcgcagctgcgctgtcaggcggctg

SEQ ID NO: 366868 - DNA, 122 bp, Homo sapiens
ccccacgccgggctcggggtgggggctcggggcctattacgggatggaagctccgggtgtcgcgggggcgggaggaattaagggagggagagaggcgcgcgggtgaaaggcgcattgatgca

SEQ ID NO: 366869 - DNA, 122 bp, Homo sapiens
ctcgcccccgggtcccactcaccgaggccgcagacctcgcggcgcaggctaagacggccgcgctcctccgctatggcacgcagcatgtgctgcagcgagcgctcctcggcctcggcgccgcc

SEQ ID NO: 366870 - DNA, 122 bp, Homo sapiens
cgcactccggctgcgacagatgccctcgttccctgctacacctgcactaaataactaacacgccctgtctcggcacaccgcgcagctgccagctccacgcccgaacctacccatattaagag

SEQ ID NO: 366871 - DNA, 122 bp, Homo sapiens
cgcccgcgggcggatggctccgggtctctgctgctgaggatgtggctgccgggcggaggtcgtccactcccctgggcctttctccgcgagccctcccacgccgcccgctcctctcccggggc

SEQ ID NO: 366872 - DNA, 122 bp, Homo sapiens
acgtggacagagagcaagcttggggaagaggtgtcttcctccaggtcgtggtctccagctcgtcccctgaggctgtggcttgagccacagaggaatacactcaaccttacagctggaaggac

SEQ ID NO: 366873 - DNA, 122 bp, Homo sapiens
ctcgatcccttgacctcgtgatctgcccgcctcagcctcccaaagtgctgggattacaggcgtgagccaccacacccagccgaccttggtgttctttaaagtggaaggtggaggaaagatta

SEQ ID NO: 366874 - DNA, 122 bp, Homo sapiens
ggacaatcaagaagttttctgccatcccgtgacggaccagagcctgatagtggaacttctcgagctgcaggcccacgtacggggcgaagcggctgcgcggtgagggaatggcccccggctgg

SEQ ID NO: 366875 - DNA, 122 bp, Homo sapiens
agttcacacagaatgcaaatttagttaattggattccagagtctgtgtttgcaggcaccacgctcttctgcagagattgcaagctggtagcctataagccttcagtgtgcctgatccccaca

SEQ ID NO: 366876 - DNA, 122 bp, Homo sapiens
ggcggccggcgggctgcgcgggcagccaagggaggcccaggaggggcatggacctggggccgcgcgaggacggctgcaggagatccgcggacaccctccggcccaaagggcctcccctgctg

SEQ ID NO: 366877 - DNA, 122 bp, Homo sapiens
catccccccagcccagctctgactccctcccttcctgcagagtccgagcgagagcgagaccgggatatggcagacaccccctgtgagctcgccaagcgggaccccaagggcgtgggtgtgcg

SEQ ID NO: 366878 - DNA, 122 bp, Homo sapiens
gccttagtgaggagcctgggatagccagctacctttgatgtggccaccctggcccagccacgcctcctcactcctcagagctgcaaagggctgtctgcacctgcccctgagtctctccccgc

SEQ ID NO: 366879 - DNA, 122 bp, Homo sapiens
ggtgtgtgcggggccggatcggggaggatggctgcaccattgcaggggtgtgtgtggggccggatcggggaggatggctgcaccattgcaggcgtgtgtgcggggcttgctgactctcgtgc

SEQ ID NO: 366880 - DNA, 122 bp, Homo sapiens
tgagaggcattgtggagaatgcatgaaaacatggcagtgatgttggcagggagatggcaacgaggttctctgcaccaactgtctcctgcagctgggaaaagacacacagcctggctgccaac

SEQ ID NO: 366881 - DNA, 122 bp, Homo sapiens
tccttggccccctccgctttctccgcgccggcccgcctcgcttatgcctcggcgctgagccgctctcccgattgcccgccgacatgagctgcaacggaggctcccacccgcggatcaacact

SEQ ID NO: 366882 - DNA, 122 bp, Homo sapiens
tagtattcgcctaacattacgggccactgaattaacctgcaccgggtctcccagttctaccgagagtggaggtcttcctggaggaggtggggtccggaactcaggcacaccctttggccccg

SEQ ID NO: 366883 - DNA, 122 bp, Homo sapiens
gcctcagtttccacacctgtgagatgggtctgaggtggaatcgccaaccagctgaggatgcgcagccacagaccaccttccagaaatctccaaaaggctttccaaaacaggaaaacaaggaa

SEQ ID NO: 366884 - DNA, 122 bp, Homo sapiens
gtttgggctggaggtcgccatggggcgaggcagcggcaccttcgagcgtctcctaggtaacgcgtccccacccgacggctcggccttggtcagcccgcagcctccgcccggcgctgagtcag

SEQ ID NO: 366885 - DNA, 122 bp, Homo sapiens
tgtcggatgcgctgggccctccccggcagggggggatcagagccctcctcatccagctcccgcatcagggcttccgccttctgcaccgtcagctctcgggcccggccctgcagcccctccag

SEQ ID NO: 366886 - DNA, 122 bp, Homo sapiens
aactaggtgactgataacacttaaaacagtgttcactgttggagaggtctaaaattcacacgaaattagggtgaactgctctagcctgcttgaggcataagggatccttaagcctgcctggg

SEQ ID NO: 366887 - DNA, 122 bp, Homo sapiens
tccggagtttgttccttttgatgttcggacctgtttggagtttcttccttctggtggcttcgtggtctcactagcttcaggtgtgaagctgcagaccttcgcgttgagtgttacagctctta

SEQ ID NO: 366888 - DNA, 122 bp, Homo sapiens
ccaggcctagaggggcgggatgggcctggcgctgcccagtggggcctgtggctggaaccccgggctaggcctttggggaagcgggaccctcactctcagccccagccaagaagggcaaggtc

SEQ ID NO: 366889 - DNA, 122 bp, Homo sapiens
tcccgcccggcctggaggcgaaacgcagggcacagagtggccgtaccgtgcacagagctgcgacaggaggccacctctggcctcgggagcgcagacctggctcctgattcattctgcagaag

SEQ ID NO: 366890 - DNA, 122 bp, Homo sapiens
catacctattactttgctccaaggttaaggttagttatgtgtgtatggtgggggagtcagcgtatataaaagatgaccatgtaagttgagtttggtattagtaggtgaatgtaatgttatag

SEQ ID NO: 366891 - DNA, 122 bp, Homo sapiens
ggaacttcggagctgtcgcccgggttaccgggaggcggagccgccgagctcgctgtggcccggatgttcggtgcagctgccagatccgctgatctagtgcttctcgaaaaaaaccttcaggc

SEQ ID NO: 366892 - DNA, 122 bp, Homo sapiens
cattagaacagccttcaccatgtgggtttacatggacagcacggtcagcagacagtgagacgggcgcttgtccactcgtctgacaccgtggggccataggaggcagcgactgagaaggtcag

SEQ ID NO: 366893 - DNA, 122 bp, Homo sapiens
cttactctgcctgtgtttctcttaggaattgctccttggccctcctttctctcttatcagcgtgtagctagatgcattctgacaaggtaactgtggagtgagcttcttaaggggtgttttgg

SEQ ID NO: 366894 - DNA, 122 bp, Homo sapiens
ggagggattcctagcagtgaaatacatcccggacatggaggacttcaggatgaattttcacgagccccagacacatctgccttgggaacttcttctccataaaaagaactaaaaattatatc

SEQ ID NO: 366895 - DNA, 122 bp, Homo sapiens
gccgcctggctcgatgctagccggggtgggacgcaggagagcctcccagcgtagtaaagccggggattttcagccagctgaacctgtaatgtttctggcatgattttattcttcaagtggaa

SEQ ID NO: 366896 - DNA, 122 bp, Homo sapiens
tgttgaaaggaggcctgggttgtcctgtgggtgactgttggtggaatctttcgcggaaagcgttttggaagaatggcgcgacgagcgagcagaggggaaggtggtgaccctgagcgctcggc

SEQ ID NO: 366897 - DNA, 122 bp, Homo sapiens
cccccagagccggctaggggcatggacttcacctcctggtcctctcttcctcaggtatggcgttgacggtggatgtggccgggccagcgccctggggcttccgtatcacagggggcagggat

SEQ ID NO: 366898 - DNA, 122 bp, Homo sapiens
ttgggggcaggggtccagggctcagaaacatttttggaatcacagtgagtttctgatttgcgggaagttgctctaaagcactggctgaggactttgcctgaggacctggctggtgaggaaga

SEQ ID NO: 366899 - DNA, 122 bp, Homo sapiens
tgcattgtggggcggagactgtctttgcgagggaggttcgaatgcggagctcgctgcccgcggcgccgcgctgcgctgctcccgccgcggctggctgaggcgggcccggctccgcccgcgcc

SEQ ID NO: 366900 - DNA, 122 bp, Homo sapiens
agaacaaaaatagttggtttttgcctccctccatggggccactttagatgcagggttctgcggagggcgaggcccctggatcctggccgccacctcgcagcccctccctcatcctccgattc

SEQ ID NO: 366901 - DNA, 122 bp, Homo sapiens
tatcaccagaccctcagctgatagaaattggaagttagctcactgcaaccttggcattgtcggtactgctgtgccgatgtaaccatccgtacacagaaaagagccatcctataaaatcccca

SEQ ID NO: 366902 - DNA, 122 bp, Homo sapiens
ccgggcccgggagggggcgggccgggccggggttccagagcccatcgggagtcctgaggtcgccgtaggggagggaaggggaaggctagaggccacgcggggcggggactgggggggctggg

SEQ ID NO: 366903 - DNA, 122 bp, Homo sapiens
ggccacgtgcctgcaggtggtgggcttcgtcacgagcttcgtgggctggatcggggtcatcgtgaccacctccaccaatgactgggtggtgacctgcggctacaccatccccacctgccgca

SEQ ID NO: 366904 - DNA, 122 bp, Homo sapiens
tgggcctgagagggtcagccccacagagggagtgacgccaagcctaggcttacctctccccgaaggctcaggatggccaacagaaacatgggcttgaggctggcattttccagcctacactg

SEQ ID NO: 366905 - DNA, 122 bp, Homo sapiens
aaggctggtctcaaactcctgacctcaggtgagccgcccgcctcggcctcccaaagccaccgcatcttggtccctgccattcccttagcctggggtgccggctcatcttttccctctaggat

SEQ ID NO: 366906 - DNA, 122 bp, Homo sapiens
acacggtgcgcacacccactgacctgcgcccgctgtctggcacttcctagtgagatgaaccgggtacctcagatggaaatggagaaatcaccgtcttctgcgtcgctcacgctgggagctgt

SEQ ID NO: 366907 - DNA, 122 bp, Homo sapiens
ggcggtgggcaagacgtgcctactcatgagctatgccaacgacgccttcccggaggagtacgtgcccaccgtcttcgaccactacgcaggtaagcctcggaactgctgactaaggggccgct

SEQ ID NO: 366908 - DNA, 122 bp, Homo sapiens
tctggagtctgtcctttctgatattcagatgtgttcggagtttcttctttctggtgggctcgtggtctcgctggctcaggagtgaagctgcagaccttcgcggtgagtgttacagctcttaa

SEQ ID NO: 366909 - DNA, 122 bp, Homo sapiens
ttgcccacttggacattctgacattttgcagggttctaatactaatcttggtccccagcccgaggtaaaacaaaaggctgaaggtgcttaggagagaaagtagacttaatccgcccactcaa

SEQ ID NO: 366910 - DNA, 122 bp, Homo sapiens
aggcaacaacagccaaaaccacaaggaagccattgacacaagtcttgggttactcacctccgtgcaattcggggccacaccaatgcacagcctgagcaaggctgcggatcccagaacaagcc

SEQ ID NO: 366911 - DNA, 122 bp, Homo sapiens
ttaactgctgaaataagagcctctattcccattagataaatctgtccttctctgagcactcgtggatgagctatatatctgttctcatcctgcagagaggtaccaactactgtgacaggtgg

SEQ ID NO: 366912 - DNA, 122 bp, Homo sapiens
gtcgccatcagcagtttcaggaacccagtgtggatacctttccttctggaaagaatctcccgtctcttagcccgtctgagcctgtctcttcctgtctctgtctctctctctttctctgtcct

SEQ ID NO: 366913 - DNA, 122 bp, Homo sapiens
gttgttgacaaagatgtagagaaactttaatttcacccatttctgtaaagaacctaaaatcgtgcaaccactttgcaaaatcaacagtttctcaaaaacttaaatacagctaccagtggtaa

SEQ ID NO: 366914 - DNA, 122 bp, Homo sapiens
ttgcacaacacctgtgcacacgatcacagcatcatgtgtgcccatgtctgcaagcacacacgcacccccccaagcacaggccggcatgcctgggaactgtggggtagacccaggccaagggg

SEQ ID NO: 366915 - DNA, 122 bp, Homo sapiens
tcttctgaatactggcagcaacagcatcttttcttaagcagtacccattatgaaaaaatccggagactccatcctttgtagttccttttgttaagcttcttccataatgctggttttgtata

SEQ ID NO: 366916 - DNA, 122 bp, Homo sapiens
gccgttatccactgttatcaggaccaggtagtctcgcccaactgggacagagcggtcgcccgaggaccggatctgcgcggcgcagtggcctaaaaaggaggccgagccagtccctagctccg

SEQ ID NO: 366917 - DNA, 122 bp, Homo sapiens
catcgagcactcgcagccgccgcctcgggctccagggcccagctcccttccacatcccgccgctcagacagcctctcccggggatccccaagggtgctccgggtggtgccagccgggatggc

SEQ ID NO: 366918 - DNA, 122 bp, Homo sapiens
ggcattactcgaaatggcatttcacacctctgagcattatacagtaattctaaagtcatacgttgtaccaaattctctgggcaaacacagagatacagtatgaatggaaagaatccaagttg

SEQ ID NO: 366919 - DNA, 122 bp, Homo sapiens
gaaaaaacaaaaacatggcggtgaagggcagaacccatcaggctcataccttgctctgcccgacttagagcccacgctccttcaaccaccaccctgccgctctctttggtttctggtgcctc

SEQ ID NO: 366920 - DNA, 122 bp, Homo sapiens
agcgggatgcggccctaccgcggcctcacacttctcgccggcttcccgagttctcgggggcggggcttgtgtttttacttccggatcccacagctatgacaccggaagccggaagcgtggta

SEQ ID NO: 366921 - DNA, 122 bp, Homo sapiens
cttggaggaagcgggcgctgacacactgtgggcgacaggaagggccgggagctctgtggccgttggcaaggccaggaacccgggtagtcgagctgaaactgtgatctgaggcgcgaggcctc

SEQ ID NO: 366922 - DNA, 122 bp, Homo sapiens
aaagagttcttatttcattttagagtatggtacatagtgcaacttcacaatgtagaggttcgacacacattcaatgcgtgtttttctgtgcaagttcttagtggtctaaatcctagttgaag

SEQ ID NO: 366923 - DNA, 122 bp, Homo sapiens
catttccatgtgagaaggccctggggggtgtcaaaatgcagaaacgtgactgatgggcagcggggcacccataaacttcccatagccaggtgcaggcatacctgcaaatgtaacgcccaact

SEQ ID NO: 366924 - DNA, 122 bp, Homo sapiens
tctgcagtccccagaggagagcgagtgaccagacgctgcgcggggccaagttctccaagccgcgctgaggctcctcgcgccctggcaagtgacagcctcgcccctcccagcggagacaactc

SEQ ID NO: 366925 - DNA, 122 bp, Homo sapiens
taatgtgtgagacaatgagtaggtgcttagtaaatgtcagtgctgtgcctattttccctccgcccacttgccacctcttttctaataataagaccaagtttatttaccctgataagcacgtc

SEQ ID NO: 366926 - DNA, 122 bp, Homo sapiens
ttagcaggttccctttagcccggtggagctgggagatactcgcagagccaggcggctgtccgtggagcattggtgcagccgtgccttgctgccccggaggtttggctgccgcagtcctctcc

SEQ ID NO: 366927 - DNA, 122 bp, Homo sapiens
cgcctgcgggagtctaattgcccggtcgatgcgcaggaaatttggctcccgcaggcgtttcgcgagtagcttgggaggcgtgggaattttggcccaggcaggaggacctgtgaattctggga

SEQ ID NO: 366928 - DNA, 122 bp, Homo sapiens
tccagacctgagcccaggtgtgattccaaggcccctgtactggggccagacagggagactcgctctcagggacttcccaaccagcaccatcttctccctgcggggatggcgagggagcgcgg

SEQ ID NO: 366929 - DNA, 122 bp, Homo sapiens
cccacccagtcccagcctgtctcaccttgccccgtcctgtctgccatccagaggccagcccgcccccttggcccccaacactctgcagaaatgggcctgcctgggccctgcctgtctgcggg

SEQ ID NO: 366930 - DNA, 122 bp, Homo sapiens
tccggcgcctaacgttgggaggtggggcgaggggccggcacttcctgtgactgggagtctcggttctggctgagtgtggggcagggtggatcagctgtggagttcacctgtgagcccctagg

SEQ ID NO: 366931 - DNA, 122 bp, Homo sapiens
gagccccaatgagaaaggctcctccacaggcttccaactaagagtaaggcaaaatctctccgtgaccttccagactctccatgagccagcccctccgttatttcttggaactcatctaccat

SEQ ID NO: 366932 - DNA, 122 bp, Homo sapiens
aattattgctccaggcggccaccaggtgtgcaggcacgaggagcgtggtcagcagcaagacgctcttcatgtttcccagctgcctccggctcggctctccagtcgtggtctttgctggtggg

SEQ ID NO: 366933 - DNA, 122 bp, Homo sapiens
ctgtgcccctcttctgggcaccctcctgtgggagaggcccgttccgaggcaaggggtactcgtggcggccgagggcgttgcgtcccggtgtgctggcttcccggggcaaagtggccaggtcc

SEQ ID NO: 366934 - DNA, 122 bp, Homo sapiens
cgccgctcccggggaggggagagagccaggaacctcccgctgcggtccagggttgccacgcggaccccagaggttcctgaatcgcactgagctccccggaaaggaaaggacgttcccagagt

SEQ ID NO: 366935 - DNA, 122 bp, Homo sapiens
ggtgaagccaatgctgctgttccaggaaccaccctttgagaagcacgggtctataccacacgcacagaagaggaaacgaaacgaggcaaaggaaaccagtccctttactcgcgcccaggcag

SEQ ID NO: 366936 - DNA, 122 bp, Homo sapiens
tttctcctccctcgggctccgaggtaggggctccagaaggtcctgggcaatcccgagccccggcggggcttgttttgcccgtgcacgatagctctggccagcagcttcctttcccagtttgt

SEQ ID NO: 366937 - DNA, 122 bp, Homo sapiens
gcctctggaattctcttcacccattggtggagactcctgcggggtcaaatacagaatttacgcacccttggcttccttggagcctagcggctctccccgcgtccaagatggcggcagaagca

SEQ ID NO: 366938 - DNA, 122 bp, Homo sapiens
ggctcccgcgtgtcacatagatacgctggctcccgcctgtcacgtagatacgctggctcccgcctgtcacgtagatatgctggctcccacctgccgcgtagctacgctgcctcccgcctgtg

SEQ ID NO: 366939 - DNA, 122 bp, Homo sapiens
ttctcttctgttgcttggtagctgccccctcctggctgtccacttgtggggctggatactcgggtctccctgcctggggcccgagacggccctccgattccgtgccccccagctaagtgccc

SEQ ID NO: 366940 - DNA, 122 bp, Homo sapiens
caaactggtaggagggcatctgcacaggggccgcccagcgtgggcagtcggagcccggaacggggagggaaaacatccacaagttggggagtaggcacaggcctcagagcctggcagggcag

SEQ ID NO: 366941 - DNA, 122 bp, Homo sapiens
tataaatgataagaacccctcccccaaccattcctttccaggcggtatatgtaaatgacccgtgtcagataccttcgtttcaccagatgatgctgtgccctctatgcccagcttatctagtc

SEQ ID NO: 366942 - DNA, 122 bp, Homo sapiens
tcccgatgagcacacacagcgaacaaaccccactttccctgtaaacgttcagacattccacgaacctgatgaacacacacagcgaacaaactcccgtgtgtttaaatgccgcggtctcctcc

SEQ ID NO: 366943 - DNA, 122 bp, Homo sapiens
ttctcagaggctaagatcattttggacagcatggggtccaccggcagctctgccatctttcgaccagactaaggagaagagagagagagttgagcccagtcctccctcaggtttcccgctac

SEQ ID NO: 366944 - DNA, 122 bp, Homo sapiens
tgctgttcccagttggggctatcgaccacccagggtaggcgccaaggggtggctaaggaccgcctacgtcctcacggcgctgaaccctattctgggtgcactggaggaatgagagggaggcc

SEQ ID NO: 366945 - DNA, 122 bp, Homo sapiens
cttcactaaaaatacaaaaaaaattaggcgtggtcgcaggctcctgtaataccagctactcgggaggctgagggaagagaatcgcttgaacctgggaggcggaggttgcagtgaaccgagat

SEQ ID NO: 366946 - DNA, 122 bp, Homo sapiens
ttctcttacatgctatttgaaaacttcctatcagcaaagagtcccccctataaaccccgacgaacctgtgctaaagtggcaaaactggggcccaagtcctgagtctgccaccgtccagcaat

SEQ ID NO: 366947 - DNA, 122 bp, Homo sapiens
attacaggcatgagccactgcacctggcctgcctctaccttcccagccctgacagtttcacggtggcctgcaccctactcaaggctctgtgtgacagcaggacccaggcaagctgggggagc

SEQ ID NO: 366948 - DNA, 122 bp, Homo sapiens
gaatcgggtggagcagagagcagctgctgcagggcagacagccggacccccaaatctgcacgtaccagcagtcagccgccccacgcagggaccggcttacccctcgctccccgccctcactc

SEQ ID NO: 366949 - DNA, 122 bp, Homo sapiens
ggaagctacgtctaaatgccatctgaaaggaggctcaggggaccctcccatcaggaccatcggctgcccaaccctgactccaggctggacactggagatgatgcagaccatgactggacaga

SEQ ID NO: 366950 - DNA, 122 bp, Homo sapiens
ccaattagttgcctacctagaaagttatttcctccacttgagctcatcaccccttcttagcgctcctttggattactgtaatttctttttctttgacctcacctttcgtctgatggattagt

SEQ ID NO: 366951 - DNA, 122 bp, Homo sapiens
cgccccgtgcacggtttccaccaagactccctgacgaccacagccagcaagctcagcttccgtggaaatgagcagatggtcgtgtgtctggcctgtgggtcagtctctcccctaaagcctgg

SEQ ID NO: 366952 - DNA, 122 bp, Homo sapiens
ttggcattgagggaaagttccctcgatccccccttccaccggcacatgcctggacaccaccgtttgtttcacggtggccctgtatgcctccggtgacacacgttcacaccatccgctgtggg

SEQ ID NO: 366953 - DNA, 122 bp, Homo sapiens
gcaatcagaactctgaccccacagtggcggcacctgtgccttataaggcggagcaccccacgctgttcccacagatgatccaaaaggcacaggaaaatctctgttgtccgcagagacgtcag

SEQ ID NO: 366954 - DNA, 122 bp, Homo sapiens
gcgggctgagcgtcaggcgctggccctgcgcgaaggccgggtggttgaggatggcctccacgatgcgcacatagcccttgctgatggccagcagcagcgcgtcccccacccgtgccaggttc

SEQ ID NO: 366955 - DNA, 122 bp, Homo sapiens
taccacgcaggttgaaaggccagtggggcataattaacgagccctcagggtccacgctcccgccctcggagctcagaaccgacgggaggtgcaggaggccgggcatttctacagccctggtt

SEQ ID NO: 366956 - DNA, 122 bp, Homo sapiens
ggtgaccgccttcctgggcgagtgggggcccttccagcgcctcatcttcttcctgctcagcgccagcatcatccccaatggcttcaccggcctgtcctccgtgttcctgatagcgaccccgg

SEQ ID NO: 366957 - DNA, 122 bp, Homo sapiens
ccctgcgctacacaggcccccagccgcggtcttccctggacttgctgtgcctgtgccctgcgctacttttgcctgatggtggcttcacccttccagaggctcagactaaaggcaaatctctg

SEQ ID NO: 366958 - DNA, 122 bp, Homo sapiens
cctgtaagtcagcagccgggagcgcctagcgcgctgcgagagcacagatggctggggaggcgcgcggattccaggcctctcagcttccccagagcgcaaacagcggccggctggcgcctccc

SEQ ID NO: 366959 - DNA, 122 bp, Homo sapiens
ttcaaggtgcagccacggaagtggcggctgcagaagtcaccaggaatgaatcagtcaattcgatgaggttctcagatgggggaaggggctggaggggaggcgggggcagcagagacctgcct

SEQ ID NO: 366960 - DNA, 122 bp, Homo sapiens
cgcctgcgtactagggaccacccggctttgtgggcggagtccatgagagggttggagccccgctcgtggccccgcccacccaagcctaggccggccttcgtggacacgcatttccggcgacg

SEQ ID NO: 366961 - DNA, 122 bp, Homo sapiens
attcccagtctccagcatgagccaagggaaactattccttatgcctcacagacaacctcacggaactcagccaactagctcagccaggggttgcacattgtaaaaactcccaactgaaattc

SEQ ID NO: 366962 - DNA, 122 bp, Homo sapiens
actcagtgcctggtgcatggtgcatgatcctatttggcagcatcatgagatgaaatggggcgcttgcctcgaaaaagatatttgaggttcttgttgtccatcctgtttgtgaccttgctcaa

SEQ ID NO: 366963 - DNA, 122 bp, Homo sapiens
aatccatcaaggggagggggggctgcctgatgaaacccactttgctcgcccagtgcggagcgtgcctgaggcagagcagccccagtttgggtggggtctgcccccgaccccaggccagggcc

SEQ ID NO: 366964 - DNA, 122 bp, Homo sapiens
aaatggctgttattagcatttgctggctgggatcacttttacacatgaaattgcttaatgcgtgagtcatctgaactcatgactgcactgaatcatttcatgtgttcaagcaaacctgcaat

SEQ ID NO: 366965 - DNA, 122 bp, Homo sapiens
tgctgtaggtactatggctcctgaagttgctttccctgcagtaactggagtcctcctcgtcgtcttccagctcctccgggtaagggtaatcgaagtcatcgtcgtcctcctccatctcatcc

SEQ ID NO: 366966 - DNA, 122 bp, Homo sapiens
agtgcctggcacacagtaaacagcaagtgaatgacaagcagttggcagtggccggagctccgtcgctggggcgtggagagggccgccccggcccgcagttcccgccctgacactgggataac

SEQ ID NO: 366967 - DNA, 122 bp, Homo sapiens
aaatacatttgctagcttctggcttgaatgcctgggctgactggaggggccatgtagtgccggggagaagtggagagcagttccaacattgctgggggacagtagtgctgcctcgggatcta

SEQ ID NO: 366968 - DNA, 122 bp, Homo sapiens
aagcctttacttactatatacatgcatatggacgtgagggacacacaggaacttttcgtgcgtcgctccttggcaactgttgggagagagaggtttcagcgcctagacgggttctctcttga

SEQ ID NO: 366969 - DNA, 122 bp, Homo sapiens
cgttccctccgctccggtctgattcgcaaatccccaaactggcacaaaccgggaaacttgcggccggccgttcttctccccgagttggagacagccctctcctcttccctcccccgcctctg

SEQ ID NO: 366970 - DNA, 122 bp, Homo sapiens
ggattgcagcgggccgcgccgagccaagagcgcctgcttcagctcttcccacaagatggccgggccaagatggaagcaggtatttaataatttcacaaatgaccatagaattatatttgtaa

SEQ ID NO: 366971 - DNA, 122 bp, Homo sapiens
agggctcttcggccctccctgtcctagccaacccgcctgcatttgagtgtctgtcaggcccggagcttgtagttgtggggaccaggcgtgcaacatccactgtgggtaccattgcaggcccg

SEQ ID NO: 366972 - DNA, 122 bp, Homo sapiens
gaatatataaggaattcaaacaattgaatagcaaaaaaaaaaaaaaaaaaaaaattaagtcgataaaaaaatgggtgaaagtttctgaataggcatttatcaatagaaaacatataaagaac

SEQ ID NO: 366973 - DNA, 122 bp, Homo sapiens
tgaattttgtaccacacgtagtattacttattaattaaaaaataatctgaactagccaggcgtggtggcacatacctagtctcagttacttggaaggctgaggcaggaggatcacttgagcc

SEQ ID NO: 366974 - DNA, 122 bp, Homo sapiens
aggcagctctagaaatgtaaagaattaatattacaccaggtgaatttgcagacctttcttcgagcagtctatcatgtaacttcccagaaaagtcctgtaaggtaggtcattgttatcctttc

SEQ ID NO: 366975 - DNA, 122 bp, Homo sapiens
caggaggagccctgaagcaaaaaggttgctgcggggagccacgttccctctggttcacctcgaagcccaggagctccggtccctggaccaaggagtgaacagacctgaggaagaggtaagag

SEQ ID NO: 366976 - DNA, 122 bp, Homo sapiens
cgtgatccacccgacaacagcaaaacagatcattttacaatgactaaatatcagaacttacggcttttaaaagttaaaataagaagacgataaaaatcctcctttcttccacaggccgggac

SEQ ID NO: 366977 - DNA, 122 bp, Homo sapiens
attttgttcatggagttttaaatttgctagttaatgtccaaatcctcagccttggggaatcgggaggtgctggggcccctgcccttgagtctgcacaacccagacccccctctatgcccagg

SEQ ID NO: 366978 - DNA, 122 bp, Homo sapiens
gccgggagtcgctgccgagtgggcgctcagttttcgggtcgtcatggctggctacgaatacgtgagcccggagcagctggctggctttgataagtacaaggtaccgcgggccggcggatgcc

SEQ ID NO: 366979 - DNA, 122 bp, Homo sapiens
agctcccacctcagtcccgaaactggagcccaagccctctgtccctggccgcaccagagccggcctccctgtgtgctgccagccacgcagcagcttggagaggacccgtccttaaacacttc

SEQ ID NO: 366980 - DNA, 122 bp, Homo sapiens
taattggttagatgagataagctagtgaagcgctttcttccgagagggatttcgattggtcggtcagagaggttacctggaaatccaacaccgcccaacacccctcccgctccccagtccgg

SEQ ID NO: 366981 - DNA, 122 bp, Homo sapiens
ctcaaactcctgactttgtgatccacctgcctcggactcccaaagtgctgggataacaggcgtgaaccaccacgcccggccaaatccgttcttattcaaaatgacagagccaacctaagcta

SEQ ID NO: 366982 - DNA, 122 bp, Homo sapiens
cagagggaggcggcactggtctcgacgtggggcggccagcgatgaagccggtgagtcggacgtgctggggtttggaggagcgaggcggcagggacgcaagcggtcccggggacccgatcctg

SEQ ID NO: 366983 - DNA, 122 bp, Homo sapiens
acagcggggcaggacccactcccaggtttgggacctccactggggcctcaaccttgctcccgccacgtcttggcagcccccgagcccccagctgaaggcacaaccaggactcatggggccgc

SEQ ID NO: 366984 - DNA, 122 bp, Homo sapiens
gcgaggacttcctcttgaacccccgcatccctaccaagtgcctcagcatctgccactcaacgccattctctgtttgttcctgtgggtcagctggcccatgggctctaggtgctggggccctg

SEQ ID NO: 366985 - DNA, 122 bp, Homo sapiens
gtcagcacaaacagattttatttcttgcaagcaaagattcctgaacaacaacttcagagccgttaacaatgaggtcctgatcacaagctatggtataggacgtgagaaatttgtccctagcc

SEQ ID NO: 366986 - DNA, 122 bp, Homo sapiens
ctgccgttccccccgccccctccccgcgcgagacgctccacaaccgggcgcagggacccgcgccagaagcaggggggaccgcgagactctttccgcctatggtcccatccttgccccccgcc

SEQ ID NO: 366987 - DNA, 122 bp, Homo sapiens
taatctccattgttcaaacccagtaggaagttatccagcattgagcctggagagtcagcccgcagcagtcagcctcctgagtgcagagcagaggaagacctggaatggatatgctataggag

SEQ ID NO: 366988 - DNA, 122 bp, Homo sapiens
cgcccggctgccgcctctggggcggggcggggcgtggcgtggcggggcaggccggaggtgcgggacccacctcctgcccctgcctcctggacgcgctctcgggagccgattttccccttccc

SEQ ID NO: 366989 - DNA, 122 bp, Homo sapiens
gggttccccgcgtgagcgacctctggccctcacggcgggcgacgaagtgcggcgcgtgtgcgtcctcataggtcaccggcttgtccccctggcctcggcggactcgggccgccggttcttgt

SEQ ID NO: 366990 - DNA, 122 bp, Homo sapiens
ctagaaagaaaacattttcctcgagctgcatgcgaatatcgcccaaagtgcagctccccgcggaggccccgtgcacccttccaactgtgatgcgacagagatgggggaaaatgagttaaagt

SEQ ID NO: 366991 - DNA, 122 bp, Homo sapiens
gcccgagaaggtggtgaagcagtgggaccatagtgaggatgagaaagagacagatgaggacgatgaggcttttggggaagctctgcagagcccagcaagcggaaagcagagtgtggaagcag

SEQ ID NO: 366992 - DNA, 122 bp, Homo sapiens
cctccagtgctggggctgggggcggccgtgcaaggcagggcccgcgggcagtggggaaagcgggccagggggcgggagtggtctggctgccaggccctgggggtctaggggtgcagggagcg

SEQ ID NO: 366993 - DNA, 122 bp, Homo sapiens
ggcagtggcccaaggccccagaggcaggtaccacaggaactacatccatcctctgatcctcggactgccagtccagtgctgttcagcacacagagggggtctctaatcaagggcttggcaat

SEQ ID NO: 366994 - DNA, 122 bp, Homo sapiens
aggtggctggctcagcagggaaggagtgtatgaggagactgtgtaaaatgtgtcttgtcgcgttgttggtaagccgctaagcaaatgtctttaacattaatttgaaattaggtcttgacaaa

SEQ ID NO: 366995 - DNA, 122 bp, Homo sapiens
aaacctactggcaaattcatggccccctactgtcaagtttacttacctaagtggtcatgacgtcacacagtcaagtatcaggttcatccttcattatgagacaagagaagagctgtttcaga

SEQ ID NO: 366996 - DNA, 122 bp, Homo sapiens
caggcacacagcagacacgaatggcatgtagggtttgtcgctgacaggatagttgtgggccgccaccatgtggggatatcagctcagctgggatgggcctgtcaccctcacgcaggatccct

SEQ ID NO: 366997 - DNA, 122 bp, Homo sapiens
gctcttggcgcgcagcgtggggtgtgcagcggcggctcctgggtgaactttgtccctgggcgtgtggttttggagcgtgccggggtgacattcagcctctacattcatttttatgataattc

SEQ ID NO: 366998 - DNA, 122 bp, Homo sapiens
ccatcagcccagcagagcagggtgagctgggcgggcgggcggcaggattagctcaggagacgtgagtcaccccatccccagcagccccgagaggccctgcggcctggcagttagagtgcaca

SEQ ID NO: 366999 - DNA, 122 bp, Homo sapiens
acagccagctcaaagcaggcaagaaccggaaggggcggggacgttccccgtgagccttcgcggtgctggctgctcatctgcatacggaagttcggcacattatgaattatttattttcctcg

SEQ ID NO: 367000 - DNA, 122 bp, Homo sapiens
ccgcctgaggcgggcgggcggtatagagcgggcggcaggaggcaagcagcgaaaccttcccggccgccgctcccgtcccgacggcggcttccccaaggcggcaggactcggcgcgccatgga

SEQ ID NO: 367001 - DNA, 122 bp, Homo sapiens
cgacgggacatctagagatcctggagccttgggaaaatggcccgaggtcggcggctgacgcgttactatggatactccatagcttggagggccagtcgggccacaccctttggacgtcaccc

SEQ ID NO: 367002 - DNA, 122 bp, Homo sapiens
aggttgcagtgagctgagatcatgccactgcactccagcctgagagacagagtgagactccgtctcaaaaaaatagaaaaagagaaagaaatatgaatggattgaagaatattcttggagtg

SEQ ID NO: 367003 - DNA, 122 bp, Homo sapiens
ccaggtgtccacgcttagcagctttctcaccgccgccaaaccttgcctgggcactgggaccgtgggtggccgcctgtccctagctgtggctgagccaagattgcacttgtgagaaggcctga

SEQ ID NO: 367004 - DNA, 122 bp, Homo sapiens
tagaaataaatcacttgcattgtgaagtccaacagtaaaactctagattacatagtcctacgtgtaagttcagatttccctgggtgccatagcagagtttttatattgggcatagggcaggg

SEQ ID NO: 367005 - DNA, 122 bp, Homo sapiens
gcagctcttttgagactgcacattctgatagaacattcctcatttggtcccatctcagctcgggtcactaactcatctcaattctcttctcacttgccctgtggtgccccagagagggtagg

SEQ ID NO: 367006 - DNA, 122 bp, Homo sapiens
gcccacctggaccccgcaccactcgcagcgcacgccggccagcacgtcagaggagccgcacgtcttcctgcagacctcgcagcgcgctcccgagggcaggttcccctcccgccagtggtggt

SEQ ID NO: 367007 - DNA, 122 bp, Homo sapiens
gctcctaaggagaaacggaaccgcaggcaccgtccctctcccgctgcagcctgaggaacgcgttccgaggaacccctagccacaagtcaggaccgcgtacaagatggcggcgcgtcacgtgg

SEQ ID NO: 367008 - DNA, 122 bp, Homo sapiens
acagtgctctgtcagggctgtaggggggcacgggacagtaagggaggaggctgaactgcgcgattttacctggcttctccagaagggtaaggcggccagttggacccggtccttgtgttcgg

SEQ ID NO: 367009 - DNA, 122 bp, Homo sapiens
tgctggtgagacagccccgggggatttataactcgccttctcactgctttggtggtttgccgcctgtagtgggggccggttgccagggaggcgtattcacttccatggtggctcatgtccac

SEQ ID NO: 367010 - DNA, 122 bp, Homo sapiens
gagcagggtggagcctccgcatgagaacgggaaccggagcctggagactccccagccggccgccagcctccctgacaacacaatggtgacccacgtgagtccaagaagcatccatcttatca

SEQ ID NO: 367011 - DNA, 122 bp, Homo sapiens
gacacagtgttgtgagccctgggaaggcagggcctgtgtccagcactttatcaacactggcgcatgcaccctatgaggcgaagggatttgtattgttcccttacagcgtgggacactgaggt

SEQ ID NO: 367012 - DNA, 122 bp, Homo sapiens
gcagtgctgagtatccactggatttctgctctcagctcactcctcatgaggaattgttttcgataataccagtgtagccctgcagctatgagtttttctctgagtgagggtaaacatcaaac

SEQ ID NO: 367013 - DNA, 122 bp, Homo sapiens
cagttcccagctgaccttttaaaattttctttgggagtcctgatgtcaggccgcactcagcgtgttcagacgggtagggagtactcagtctgtgtgagtcatcccctacaattccatctggc

SEQ ID NO: 367014 - DNA, 122 bp, Homo sapiens
ttatttttttgaaacctctctttttacaagctgtgcaaatcttgaccccttggtgtcaggcgatgaaccttgttctgttttgttgctgttacctttaggaactgaactatccagccatcttc

SEQ ID NO: 367015 - DNA, 122 bp, Homo sapiens
acacacacatacacacaactgtgtaattagcctctgcaggaaaggcgcacaaacaggatgcgttcgagctgaccccgggatgagccatccctgtaaatattaggaaaaagaacctccccgcc

SEQ ID NO: 367016 - DNA, 122 bp, Homo sapiens
atcctgtaaagagcccatctgataaaagggacacagagccctttagggagtccagtctcacggcacacacgacccacagaggagttcctaatctttgagacagcgtctcgttctgtccatga

SEQ ID NO: 367017 - DNA, 122 bp, Homo sapiens
cacagaaagccagcaccaactgggattatctgccagccactcatctccagcagcctggtccgcagtgcacaactaggccccagccacaaccagccctgtgcaggagagtccaagggtctagg

SEQ ID NO: 367018 - DNA, 122 bp, Homo sapiens
ccaggactacagtcccttatgcaccttgggatctgcggctagcccctgcgtaaagagggacgcgtagtcttttccctgccccgccctgccggggcgcccgcctccgaggccgccctcgcttc

SEQ ID NO: 367019 - DNA, 122 bp, Homo sapiens
cggggcagtgctatcctcctcccaaccacccccactctgctcccgactttccagcccacccgggatcccttttgaggacacccagcatctttgagggaagggagacggctcccaggctgagg

SEQ ID NO: 367020 - DNA, 122 bp, Homo sapiens
cgagagggcccggtccagcagcctctggggcccagtgcgcagggcactgcgggccgattgcgccccggggccaggaggcgccgagaaagcaaaagcaaaagccggcggcgggtggaggtcaa

SEQ ID NO: 367021 - DNA, 122 bp, Homo sapiens
cctggttctcagtggatgaaaggccaacgctaggccacgccctctccctggctcaggctgcgctccccgccttctttgctaagccacgcccctctcggagttcctccaggatcccggcgtcc

SEQ ID NO: 367022 - DNA, 122 bp, Homo sapiens
ctcacacaatgaagctaaggagcactggcgtcagatctgtaagtttatttgctcaatgtacgacagctacataatgactcacattcatgatattccatcactgaggaaactgctaaagatgg

SEQ ID NO: 367023 - DNA, 122 bp, Homo sapiens
tgcttgcagatgggccgccacaaagcttgtagccaaggctgtgtgtgtgctcgagtgcgacgctccctctggcctcggctgcagctgtgctgtttctcagctgtgactgtggccggctcacc

SEQ ID NO: 367024 - DNA, 122 bp, Homo sapiens
tgggagaggtctgcgtccctgcagcgagcacgccaggtgatctctggcacacacttgccgcgggctgtctctcggaaggtagtcagcggccctggcttcccacctgggtcccaccactgcag

SEQ ID NO: 367025 - DNA, 122 bp, Homo sapiens
aaaaaacacatttcacagcagattaggaaaacagacgtggcaagaggtgggccgacagtgcgggaggcggttccttcccaccgtgggcttcccgtctgactttacagcaaggccgcttccac

SEQ ID NO: 367026 - DNA, 122 bp, Homo sapiens
cgcccccagcggaactcctctgggcgttcagacgtcgctcctcttctctctttgtcatgtcgttctgccgtttatctgcttgtctcctcatctccttgcctgctcatcggctctggagcctg

SEQ ID NO: 367027 - DNA, 122 bp, Homo sapiens
ggccttcattagcttcggaagcctagtggccccgcccttcgggggcatcctctatgagttcgccggcaagcgcgtgcccttcttggtgctagctgccgtgtcgctctttgacgcgctgttgc

SEQ ID NO: 367028 - DNA, 122 bp, Homo sapiens
cacccacctccacaatgcgggactccagctgctccacggactccggctcgcggttctgcgcggtggcgctcatcatctgcctcttcatcaggctgtacttgtgcagggcccgctggtgcttg

SEQ ID NO: 367029 - DNA, 122 bp, Homo sapiens
gctctgcgagggcttcgtactcagctcgcatattgttcagcagaaccgtgaggtctaccccgggggccgcgttcatctccacgttcacgttgcctccagccgcgcactgaagagctttcatt

SEQ ID NO: 367030 - DNA, 122 bp, Homo sapiens
cgcacttccgtcaccggcgcgggaagatgacgcacgtctgggcggagtcctgatgagggccggggcctagggaggggcggtgtcgtagggcggagcccggagctcggcccctgacgagcccg

SEQ ID NO: 367031 - DNA, 122 bp, Homo sapiens
ccggcggggtgtcgggaagggtggtgacgcaacatagagactccgcccccttccttggagcgccgcgactcgggctgagggagctcgggccaatcagagggacggccccagaatggcatggt

SEQ ID NO: 367032 - DNA, 122 bp, Homo sapiens
tttggagggcttggctcatttatttggccgtgtctcatgccgagccttgccccaaatgttcggggatcctcgtcgacctgtgcaaaaataagaacagtgtgggtgcaaccacaggagccttc

SEQ ID NO: 367033 - DNA, 122 bp, Homo sapiens
cagctgctgtgtgaatttggtagggatgcagcatgaattctgtctattctcctgtgcacacgtgcatccacctgtgtgcagctgtagctagttactactgtggttactttcaatgaaaaacc

SEQ ID NO: 367034 - DNA, 122 bp, Homo sapiens
tggcgccttcgggcggcctcggaaactcttggtgcctggacctggagcctggacagggaccgggcggggcgagaccggccgtcgggggcgcggcccgtctgggggcggggcctgtcctctct

SEQ ID NO: 367035 - DNA, 122 bp, Homo sapiens
gctaaatgagtacctgtcctgctggcctgcacgccaagggaggacaggcccttttgttcccgggggcactgcacggggcaaacccaggaaaaatgtcagaacacaggaaggccgtctttccc

SEQ ID NO: 367036 - DNA, 122 bp, Homo sapiens
ccatctgctccaccagggcatcgccaggaggttgatgtaggggggcctctggcgagggtacggaccagatggagggctgccagtctcggctgtcagggagcttcgtctcagtgcccagtggt

SEQ ID NO: 367037 - DNA, 122 bp, Homo sapiens
ctggcggggccttggttaacgttgatgactggcggggccttggttgacggtgatgactggcggggccttggttgacggtgatgactggcggggccttggttgacggtgatgactggcggggc

SEQ ID NO: 367038 - DNA, 122 bp, Homo sapiens
ggacttcattccaatgaagcagttctccacgatgtcaatacggcccacgcagtgctttcccgtgacttcattcaggtacatgaagagcgccaaggaggtctggtgggtggtgccatccttga

SEQ ID NO: 367039 - DNA, 122 bp, Homo sapiens
gaaaactgaggtccagagaggggaagggaggtgctcaaagtcccaagctagtcagtgcctcggttggggcgagaatccacgctttcggacctccatccccaagacatgccgttatttcaggc

SEQ ID NO: 367040 - DNA, 122 bp, Homo sapiens
aagaccgaaagagacccagagagatacagcttgagaggagaaataattaaagggggagggcgaccaggaggagaaaaaggtctgggaggaaagagagataaagagaatcggagggcagggaa

SEQ ID NO: 367041 - DNA, 122 bp, Homo sapiens
cagccccaacgaccagatgctgtgggtgcttgacagcaggtggaacgtgcacgtgcggaccgggatcaccgaggagatgcctgtggggaccgcctgggagcatgtgccaggtaggagcctgc

SEQ ID NO: 367042 - DNA, 122 bp, Homo sapiens
agaaagactcagccggcacaaggcaaaggttcagcgggttgagggttcaaggacacggaacgggtgcctgggtggaaagcggtcaccaggtgtgagtgtcaccgtggggccagtgcccagtt

SEQ ID NO: 367043 - DNA, 122 bp, Homo sapiens
atccagcgggcttcccgcccacagccttgaggtcgtctgcggggtcctggttgtagttcccgcataagccacagagagaggccgcgtacgccgccggcacgcgcaggcgcacgaagctgtcc

SEQ ID NO: 367044 - DNA, 122 bp, Homo sapiens
tgtaatcccagctacattacaggcatgcattgggctgtagaatcgctcaaacccaggaggcgaaggttgcagtgagccaagatcacaccactgcactccatccagcctggctcactgcaatc

SEQ ID NO: 367045 - DNA, 122 bp, Homo sapiens
cttgctacaactggtctccgcagttacgctgaaagctctggcacgtgtgaaactggcaaacgtgaaaacaacccaccttggcgggaagcagagtcacctaaaccgcctgctgtgcacaccgg

SEQ ID NO: 367046 - DNA, 122 bp, Homo sapiens
gcgtcttgggctagggcggctggggcaatgaccccctgcggcgcaggcgtggggttgcggcgagagggcgagcctagaggctttaagggggaagagagggtgatggcctggcaggtactttg

SEQ ID NO: 367047 - DNA, 122 bp, Homo sapiens
ctgtgcccaggtcccaatggcctcaggtcagcctgtctcaggagggtggtggtgtccatccggtcacttcagtcaccttgaggaggatttatgttgcccggagaagcacctgcttcgctgga

SEQ ID NO: 367048 - DNA, 122 bp, Homo sapiens
tgcattgcagcagcatctgtggtgtcatgctaatagccaggcactgatggcctgtgtgttcggtgccactccaggtgctgggcctgtcccagggcagcgtcagcgacatgctgtcccgaccg

SEQ ID NO: 367049 - DNA, 122 bp, Homo sapiens
tgcgaaaagtaaaaagtaaggctccctcagcttctttagaccaagcgatgccgagtcttccgcgcgcccagagccggggagcgcaggccacagccaccccacgcggtggcctctcgggcgct

SEQ ID NO: 367050 - DNA, 122 bp, Homo sapiens
aatggtgaatgagggtggtgactcaccaccccatgggactccaaggttttggtgacagctcgcctgagccccagggggtgccgagattgcggcgaggagagccgcagcacaaggcaaatcca

SEQ ID NO: 367051 - DNA, 122 bp, Homo sapiens
ctgagtccattctttgggtttggacgggtgcgtttgtttctcatagtgcaggtctggagccggactgagatggggagtagagggaccccttgaaacttcagggtggatgaatatgaagtttc

SEQ ID NO: 367052 - DNA, 122 bp, Homo sapiens
atatgcctggctagctcctccacaaatgcgtgtggaggagctagccaggcatatgcagagcgtcacttacagccgaacacagcactactgcttgcatgtttaatgagaattgagcagtctgg

SEQ ID NO: 367053 - DNA, 122 bp, Homo sapiens
gatggaagtacccatatacctcctgaagctgatgagatgtctctgagccttggcgttgcacgcagtcctgttgaagactgagtttagataactccaacactagtcttcatttctcacagctc

SEQ ID NO: 367054 - DNA, 122 bp, Homo sapiens
ggcaatgccaacctcctttcgggattgaaagctctaaatccaaggtgctaagttgatgggcggtctttgctctcacccctcgatttcgggcgcgtgtcttgaaagacaggagagaaaaaaga

SEQ ID NO: 367055 - DNA, 122 bp, Homo sapiens
catgcgccgccaccaacttggggctgtcagtggagggcgagtgctggttctcaggggaggcgacgcccttcggggccaacgggcctcgagccgaggcagcagtgggaacgactcatcctttt

SEQ ID NO: 367056 - DNA, 122 bp, Homo sapiens
tgccttttattaagccaggtaagggctctgcagacttcataactgtccacagttcagcttcgccctttttttccccctttgcagcttgtaaaatgaacacactccttcagcagctgtggcgt

SEQ ID NO: 367057 - DNA, 122 bp, Homo sapiens
gccccggccctcagacctgcccagtcctctcctgggcccagaaaggctgctgggcggaggcggcatcactccactccacaccccaggaaacaacacggggggctgcggctggcttcagtttc

SEQ ID NO: 367058 - DNA, 122 bp, Homo sapiens
cagagggaaggaggtcggcagtgtgaggagctgctatggtgctgagtttcctggtagagccggccgagctgaggcggtcgcggccatgaaggtgaggggccggtggagccggacagaccctc

SEQ ID NO: 367059 - DNA, 122 bp, Homo sapiens
gaaagagtaacggtaggaggtccgaacagaacgctcagaacctccgggcgactaggcttccgggtgtcggtttcgttggctcccgagagggaggaggaagcgcttcttctggggccgctcta

SEQ ID NO: 367060 - DNA, 122 bp, Homo sapiens
gggtggggctaagggtggctcagcaccggcctgcaggcatccctcagcacggatatcctgcgtgctctggacggcatgctgacggtggtgggaggcagacaggtttgtaggcgcgaaggggt

SEQ ID NO: 367061 - DNA, 122 bp, Homo sapiens
tgagaatttctctttgaaaagagcacttcatgggacccttgggagctgtcaaactctgcccgggggcagaagattaactgctctgtggaccagcagggagaagcctagtaaatcagaagccc

SEQ ID NO: 367062 - DNA, 122 bp, Homo sapiens
gggtttgcatcgtttttcaatataactggaagctgttttatcactttgtattttgagaaccgctccctttcccgcacacgcattgctgcctcctctcgggcttggttaatgagtctgtgcgc

SEQ ID NO: 367063 - DNA, 122 bp, Homo sapiens
atccacactcctacttacagcccctcttttgttttattgaagcagtctttccctcctattcgcacagtctcctctccctagaaacacacacaagattctcccgagctgagacagggtcaggt

SEQ ID NO: 367064 - DNA, 122 bp, Homo sapiens
actcctccttcccataacagcctgaattagattttcagatttactttggaatctccttggcggaaaggaaggatcgattcagttggttggggagcctggaattttatttttcattttacaat

SEQ ID NO: 367065 - DNA, 122 bp, Homo sapiens
ttaactcagttcctcctgcactatctgattctccccaaccttgtctcgcagaaaccacagcgcagcctgaaaacacgccccgtctagattcaacacctcatttagaaattcaatttctcgtt

SEQ ID NO: 367066 - DNA, 122 bp, Homo sapiens
gggcagtcagtcacaaacagtaattccacagatgacagcagcaaagccaccagtgctccccggaaccacagaaacggagccagacagagggcagatgtctaatcgatgcaggtagggttccc

SEQ ID NO: 367067 - DNA, 122 bp, Homo sapiens
ctctgactacctgaaaaggaaccggctaaaacttcctgtgcaattggactccttcctgggcgtgtgggtaccagaagcaatacattctgccaagtagagcatcaaagtactcactgaacttc

SEQ ID NO: 367068 - DNA, 122 bp, Homo sapiens
cagcgatttcttggctccggcaagttaagtgctctgacccctcccttatctaactcaccccgcacaccatccacatggcaggggacgcagccagaaatggagcggactgcatcttttccttg

SEQ ID NO: 367069 - DNA, 122 bp, Homo sapiens
cacatgcaggggtggagcccaacggtctcttctgggaagcccttctctcgcctctccctgcggggtcccaacacccacagcaccgcccccagactctgacagtctccagcctgcccgaccgt

SEQ ID NO: 367070 - DNA, 122 bp, Homo sapiens
cgcgactcccgcgtgtgcgcacacgcagatgcgcccatatgcacacggacgggcgcgctgcggggaccagggctgctcactgcggggcgtgtgtttaactccaatattttaaattataaaag

SEQ ID NO: 367071 - DNA, 122 bp, Homo sapiens
gcgcagaataacaatatccccaaaactaccctgaacgaggagtttaaactcggagtgagacgtgctcatggctgccttgcctttgctaacaatgtgaactacaaactcttctcttgcccggt

SEQ ID NO: 367072 - DNA, 122 bp, Homo sapiens
ggcttccctgatgcttcctgataacaacttggcaaggtgctgcaatgtaattaagttgctcgtgctcagggtttgtcttaatatccatctagactggagtgagtccttgtagcagtcttgct

SEQ ID NO: 367073 - DNA, 122 bp, Homo sapiens
tgctcctgggaggcagcgctgcaaatttttaatgcttgggtctttacagctcagtgtcagcggatacggcaaagcccttctgaaaaacaaacatcgggcaatgattgtgcaacacagctgct

SEQ ID NO: 367074 - DNA, 122 bp, Homo sapiens
gtggtttctgggccagtctctttgtctggtcatgacctggttggtggccctagcttgtgccgagtggtcccggagtggcccagggggttgtgtgtggggagccagcgtgggcagcggaggtg

SEQ ID NO: 367075 - DNA, 122 bp, Homo sapiens
tgctggtttatttttgaaggctggtacttctcttcgatctaagttttaggaacctgtgctcgtcgacggctgccaatactttttattttcaaggctgacgctcgccagagtttcacaagctg

SEQ ID NO: 367076 - DNA, 122 bp, Homo sapiens
tgagagctccatcttaaaggtgctttgaggaacccggggtggagggtgtgcccactcttgcggggggcatgaggcttttctctctgagcctgacctgaggcctgggtttcctctcagcctgt

SEQ ID NO: 367077 - DNA, 122 bp, Homo sapiens
agcttgcactctgagcttggaaaagccacaggcactcaacttcaaccatgagggaagccacgcaccctgcaaagccacaggagtggagctgcccacggcctcgagggcccaccccttgcacc

SEQ ID NO: 367078 - DNA, 122 bp, Homo sapiens
gaagggtggcggcgtcactgatgcgcagctcaggcagcagccatggggaggttgaatccccggggcatctgcctctccctatgtgtgtgggtcctgggagtgaggcagtgtggcgtggggct

SEQ ID NO: 367079 - DNA, 122 bp, Homo sapiens
gggcagcatttatggtggtggcctgtttgctgttggggagggacttgcagcagactttctcgtagggctgggctccttatgcgtgagttgcacgcctgagtgcctctatgggttttgtggct

SEQ ID NO: 367080 - DNA, 122 bp, Homo sapiens
tcccatctctgcagccttaacttggggttgagtttgtgatgctgagttagaacttggacccgtggttagcacgtgaccccattagctcccattatcacattaacacaaattagtttatcaga

SEQ ID NO: 367081 - DNA, 122 bp, Homo sapiens
tcacagacgcacacgcatgtacacgtgcaggcttggaaatctgctttacctgacgcactccgcctgccgaaggcccctcacatctcccatttcctctgccatcatcccagactgcaaagctg

SEQ ID NO: 367082 - DNA, 122 bp, Homo sapiens
tggaaaccccctgggggactgagatgtacgtcaaccatggtgtccccagaggagaagggccgtcaaccagggtgtccccagaggagaagggccgtcaaccacagtgtccccagaggagaagg

SEQ ID NO: 367083 - DNA, 122 bp, Homo sapiens
actgcaggatgctggtgtgtcgccgggcacatgaaagtccctgagtcaggggagagcgctcgccggggactgcgggcgggagccggcgactgagaaccgcttgccccgctctctggcgtgag

SEQ ID NO: 367084 - DNA, 122 bp, Homo sapiens
tgaccttgtgatccacccacctcgacctcccaaagtgctgggattacaggcgtgagccaccgcgcccggctgtgagcattcttattgcttaaagacagtgcccgcgaactcgtatcctctcc

SEQ ID NO: 367085 - DNA, 122 bp, Homo sapiens
atcgcgcaagaaactcgaccccgtctacctcggttcagtggaaggcattcatttgcacaacgctgtgcgcatgcccggaagccttaagtgtttcagcctccgacaggggcgtaattaaaggg

SEQ ID NO: 367086 - DNA, 122 bp, Homo sapiens
ttcctgagtctgtaagagccacacatactccctacctcacacttagcatgatgactggcacgtaccaggaattcagtaaatgaaaatcactttatttacccaagctcctgttgagtgtccca

SEQ ID NO: 367087 - DNA, 122 bp, Homo sapiens
aacaggaccctctctgggaagccgcgacagcggctgagctcggggtttgggggcgcaggtcgggctagaaccaccccccttctctccgcgtccgggcatcgtcccagcggcccctcctctgt

SEQ ID NO: 367088 - DNA, 122 bp, Homo sapiens
ccgcgtggatgccgctgcattcggagtcgttttgccacttggtcccagcgccaggcttctcggtcgggagttgacctcagcctttctgtgacccagttcctggcacccagcaggcgctcggt

SEQ ID NO: 367089 - DNA, 122 bp, Homo sapiens
tgggtagggggggtggtgttgagacagctgtcattttcagttagggcaaaagccaacttccggtcaccatcttgagtgacgacagaggcggagctccaactgacatgttcattaagggcagg

SEQ ID NO: 367090 - DNA, 122 bp, Homo sapiens
cgcaatacgtggagtttctcactttgtggagccgcctggaggcgccaagatgaagcccatcggggaagtggggcggggccaacccggcaggccccgccccttcgcggcgcttcctagttcgg

SEQ ID NO: 367091 - DNA, 122 bp, Homo sapiens
ccttcgctgttcaaagcagagtggcggccacgttcgggggcactggggcgaggggtcgggcgtcggacggggccctgggtctgtaccgtttcgggctcgccggaggggctgcaggcagggcg

SEQ ID NO: 367092 - DNA, 122 bp, Homo sapiens
atggggggctggaccatgatggagggagtcggttgggctggacctcgaaatgcctctgctcgctttcctctgcgcttatgccgccatgtacgagtatgcgctgtttccaggtggtttgttat

SEQ ID NO: 367093 - DNA, 122 bp, Homo sapiens
gtctattgccttctcctgtctgtgctctcctggaactttagcgatgtctctaacacctatcgtactacacatagaatttatttatatgtctgtctgtccagctagtctgtgaattctagcac

SEQ ID NO: 367094 - DNA, 122 bp, Homo sapiens
ttgttacaagaaaaacaatcaatgtagagcttaagcagttcgtgaactgctgaatttaggcgtaggaaacttggtgaaagtgattgtcactgttatcccaggaatgctgttcaaatctaaat

SEQ ID NO: 367095 - DNA, 122 bp, Homo sapiens
gtcttggttgaacattaggtacagaatattcaggttgagttgggaagataactgagttgccgtcccttgttctatgcagatttccttagaggtaccacttgggaaataatggcatgggattt

SEQ ID NO: 367096 - DNA, 122 bp, Homo sapiens
ccctacgccgtctcgcatgcgcttatactcttcgctccggccgccgcggccccgcccctgcgcactgggatccctctagcctgccgcgcctctcgctggtcatctgcgcccctccgacctcg

SEQ ID NO: 367097 - DNA, 122 bp, Homo sapiens
tactgaagagcaatagagacgttggtgcttattcccaagaactgatcaagatatagcatacggcaacaacaacaaaaaagccgaccatctgagcccttctttacatctctggtcctgtgtcg

SEQ ID NO: 367098 - DNA, 122 bp, Homo sapiens
tgtctgtgtttaaccttgatttcagtcatgtctggtcgtggcaaacaaggaggcaaggcccgcgccaaggccaagtcgcgctcgtcccgcgctggcctccagttcccggtagggcgagtgca

SEQ ID NO: 367099 - DNA, 122 bp, Homo sapiens
accgatgcatctcttcttgcttgcttaatttgccaccacttaggcctttcttgcagaattcgccatatactccttaagggccgcggaatcggagcgaccttggtgactggcaaactctcggc

SEQ ID NO: 367100 - DNA, 122 bp, Homo sapiens
ggcctcccaaagtactgggattataggcgtgagtcgccgcgcccagccacatcttctttacgtagctattacactgttaagcaaatggtagacactcaatacatatttgtcacaggtgaatt

SEQ ID NO: 367101 - DNA, 122 bp, Homo sapiens
atcaggactatacactctttccttagatcttaacatagttcatatcattcagtcacaggtcgtttgttacctactcagagatgctgtttctctaactacccgcatctcacactcctcaaact

SEQ ID NO: 367102 - DNA, 122 bp, Homo sapiens
aaacttctttgcagcatgacagctgcctgccctacactgagtctacttgaccttcaattgcgtctccgcagagaggtaggagagggacactgccccattctggacttgacataagtacccca

SEQ ID NO: 367103 - DNA, 122 bp, Homo sapiens
acagagggaccctgggcgctggctccagaggcgggcccagagggtgtgaggtcaggctggcggcggcgtcgtcggctgcgaccggggccggcgtcgcgcgtccctgcatcctcgcatccgtc

SEQ ID NO: 367104 - DNA, 122 bp, Homo sapiens
ctccatctggctaagaaccgcccctcgctgaagactgcaagtcctgccgcttgtctagaccggtgatgtgcaatcaatgctctgatgtggccagtgctgcaggtgcaaaatacacaccggat

SEQ ID NO: 367105 - DNA, 122 bp, Homo sapiens
ccgccctttccgagtggccgcggctgcggcaggccctagcagccgccgccgcgccgagagcggttctcagttcccgttgtctttcccgccgcgcagcgcttccgcctacagcctccgccccc

SEQ ID NO: 367106 - DNA, 122 bp, Homo sapiens
attaagctcattctttgaaccaagccatatttgaatgcatctgtcagccctcctccagctcgcctcgcagcggggtgggacagcgctaacgggagtgggagaggcagcgcagcctggcagac

SEQ ID NO: 367107 - DNA, 122 bp, Homo sapiens
tgaatacagttcacagttgcctggatgaatgatgaatgagatgctggggtggccacgtgacggctgtttgctcacggtcaagtccacagtttagctcttagcttcagttgggaattaatttt

SEQ ID NO: 367108 - DNA, 122 bp, Homo sapiens
cgggagtttctctttccagatgacaacgcagtcaccaaaatcaaggagcattcgcgtggacgtgtgactgccacgtaagcgtccgctgcatgcaggtttgccagtgtcccaggaatgtcctt

SEQ ID NO: 367109 - DNA, 122 bp, Homo sapiens
ccctaaataagcctacactattataggcagtttgtagctttctaatactttattaaactgcgttattttattgtcaccttactaggctgtaaatgttgttagggcagaaatcatgttttggt

SEQ ID NO: 367110 - DNA, 122 bp, Homo sapiens
cggttcctccataagcccagctcttctccttaaataactcgctacaggtggcgctttgatcggtcaccgtggggacacaggggatggctcttgttagcggctgagcccagagggccaggtct

SEQ ID NO: 367111 - DNA, 122 bp, Homo sapiens
ggcctaataataattgtagctgtatttggttttcaccaagtgaacttaacccatttatgccggaggttgcaatttttaaaatttttgcaatcagagcttggtgatgaccttgagcagtagaa

SEQ ID NO: 367112 - DNA, 122 bp, Homo sapiens
aggtggggaagggttaacccgccgagggctgatggcccaagctctgtcctgagacggagccgtcgcttcccactaatagaaaccagagctctcctgcagtggccgcggcgctgccgccactc

SEQ ID NO: 367113 - DNA, 122 bp, Homo sapiens
gccgccgctatcagtgtttccagtagaccctaacggaggtgtcgccatgactctctttctcgctctttctttctcaggagtacttcttgcaagcagagctgacaagcaacgtcttaaaaaca

SEQ ID NO: 367114 - DNA, 122 bp, Homo sapiens
gtcgccgatcccgaggccgggacgccgggaggcagccgcccgaccctcccggcccccacccggccccgccgccacctcattgggctaaaaataagaacttccgtaaaagaagcgaaagaaaa

SEQ ID NO: 367115 - DNA, 122 bp, Homo sapiens
aaacaagaaaataaagcacttcgccgaggctgacttgggtcacagagggccaaacggtcccgggaaaatgggtgggctcttcacaccttctcatagaagtcttggaggtgggtgtttaatga

SEQ ID NO: 367116 - DNA, 122 bp, Homo sapiens
tggatttttgaactatacttagtattcagaactcaaagtactctctgttctcattgcttgcgaatgtattacaaagtgaaccctttctcccagtaaggggcagagggtttttgaagaaccct

SEQ ID NO: 367117 - DNA, 122 bp, Homo sapiens
attctcactcactgtaggaagagcccggagattttcctgtgtgcacaaagtgtggtgcaccggggaacgggtggttcttgagtttagagctttgttggtagtgacctgcccacttgtgttgg

SEQ ID NO: 367118 - DNA, 122 bp, Homo sapiens
agtgcactgagcgacctgctttttaaataaagaggtgcccgctcctaccccgcaaaacagcgaacgaggagaacatggaagcgctctgtcctaaacgtcaggatgggagaaagttgtaacat

SEQ ID NO: 367119 - DNA, 122 bp, Homo sapiens
aggagccagcgcgtgtgttgaagtttcttggcccgctcacccggccggcggggaatcctgcgtggctatgaggttttccgaggcccggtcgcccgcctggtctgcgtttattttgggttaaa

SEQ ID NO: 367120 - DNA, 122 bp, Homo sapiens
tgtaggaattctttagccctttctaaatttctctgtggaggcacagtttacacagtaatgcgcttagtgttgaggtgatgggttttgataaatgtgtgtgtgtgcctggaacccagacgcat

SEQ ID NO: 367121 - DNA, 122 bp, Homo sapiens
aggaaaacaaagcgatatccatattttccaaacaaggaagcccccagacacatttatgaacgatatggaaatattggaaagaactcaaatggactcctagatacaaaaggctgttctgccca

SEQ ID NO: 367122 - DNA, 122 bp, Homo sapiens
gggggcggggaggggcggggcggccgacgggggcgggctgcgggcggttggttggagcgtcgcgcagtcgggaggtccgggaaagtttctttggaggtgaaaacagccgcggaactccgggc

SEQ ID NO: 367123 - DNA, 122 bp, Homo sapiens
ctgctcgcacttagccacgcgcttggggttattctttacactcaggactgaaacttcgcccgcgagaccgcggggcgcggaggagggccgaaacccaaggtccaggtccagggcccgccccc

SEQ ID NO: 367124 - DNA, 122 bp, Homo sapiens
gttgagatccaagtcgtcggtgtctcgggagctcccctggtacacagggtgcccggtgcccgactggagccatttaaaaatggcagaaacagctgcaggccaacacacacacgctggaaaac

SEQ ID NO: 367125 - DNA, 122 bp, Homo sapiens
aactcaggttctgccccaccccgccccaattcacgtcctgctccgccccgacgtaggccccgccctggcccccgggccccgcccccgtctgacgcaggccccgccccctctccgccccgccc

SEQ ID NO: 367126 - DNA, 122 bp, Homo sapiens
ccctgcctactacgggcagtcgacaggtggggccggccccacctcctggcagcgctcgcccgctccgttcaatccccggtagccccccaaataaattgcacgctggggagcgcaaacaggag

SEQ ID NO: 367127 - DNA, 122 bp, Homo sapiens
gcgtctcggcgcatcctcctcagcccaggccccgtgcgtaaggagcgctccgtgtcagcgcgcttgctagaccccattgatttttagagacgggttttactatgttgcccagtgtggtctcc

SEQ ID NO: 367128 - DNA, 122 bp, Homo sapiens
gggagttgcattgtgggaagggcgcagcatgaggatggccgcgggagtggcaggtccgagcgcagcccggagagccgcgggcagcgcctgggactacgggcagcgttggagcggagggctgg

SEQ ID NO: 367129 - DNA, 122 bp, Homo sapiens
cactcccagtcttccagtggtggacctgagacccaaagttcaatataaataacaaagcagcggcaaatccaataagcgactttgctcttagctgcccagacaagaagctgcaagacgacttc

SEQ ID NO: 367130 - DNA, 122 bp, Homo sapiens
gtatggccaaaagcactttaatgctgctgacattgttgtttttatgttcatttgctggagcgcaagacgtgctgacacagtgagttttctctgatgtatttaaggtgatgtatttgcttgag

SEQ ID NO: 367131 - DNA, 122 bp, Homo sapiens
tctcaaaaacaaaaaagactattccaactggcccactatcctcaatggatacctcaatggcgagtttgtggggggctgtgacattcttatgcatatgtactagaatgggtacctggtgaaag

SEQ ID NO: 367132 - DNA, 122 bp, Homo sapiens
agctgatttaacagtaacacaatctgtattccccagagaataattttaatgttcaagattcgtaaaacttataactgaggcttagtgtgtggaaaggagagaagcactgtgttttaactgtg

SEQ ID NO: 367133 - DNA, 122 bp, Homo sapiens
ccgccacgctgcaggccttgaagctgccgctgcttcctaggaggccggcgggaggcgagacggcggcgcaggccaggtcgttcagggactgcgcgggccgcacgggcgccgcgggccgcagg

SEQ ID NO: 367134 - DNA, 122 bp, Homo sapiens
cccggggcgcgagcctgtggccggagaggtgtgtctccaggagtgtgtttgcgtggtggtcgcgggcgtgtgcgcctccggtgggtttattttggtgggacgtgtggtttgtgtgtgttggg

SEQ ID NO: 367135 - DNA, 122 bp, Homo sapiens
cctcagttcccaggtgccatgaggaagcctcgtcggaagtcccggcagaatgccgagggccggcgttccccgtccccctacagtctcaagtgctcacccacccgggagaccctgacatatgc

SEQ ID NO: 367136 - DNA, 122 bp, Homo sapiens
aagccggatccccataaactacgctctagctcctcccactgccgttgtgggtaacgcggacgtggaagaacctcgtctgcggaggaaaaggtagatgttaaatggtaactacgcgcgaggtt

SEQ ID NO: 367137 - DNA, 122 bp, Homo sapiens
cggcccgggcgccccgcagacctcggcgaggtagatgttaagctcggagagtgcccctcccgcaggcgccgtggcgagatcactctgaatatgtaacatatttgtaacgtgcgccgaggtgt

SEQ ID NO: 367138 - DNA, 122 bp, Homo sapiens
cttgtacctggagcctgtgggtctgtctgtcctgctacaaacctggaagaaaatatccttcggtcgtcccgccaccctggaagtcggccgtgggccactggtgcagaagcagcgtctttcct

SEQ ID NO: 367139 - DNA, 122 bp, Homo sapiens
ggcccctcccaatttcccgctcccgcccccggctcagggcgagtgggggtggggcgggcccgggcaggattgtgatgggaacttgccgctcctcagataaggagggtctctcctgtcccacc

SEQ ID NO: 367140 - DNA, 122 bp, Homo sapiens
aatggtcacacacattaagctatgttttcaaaatggtcacacacatttcataatagacaacgcaaatggaattgaagccattaactttaaattactaaatgtcatgttaatgaaattccata

SEQ ID NO: 367141 - DNA, 122 bp, Homo sapiens
ggccgcgcggctgcggagagactgaggctgcaccaggcggcgcgcggtgaggggcgggagcgtcgctggcgccgcagtctgcgcggccggcagcgaatcagcgcggcgcggccccggagccg

SEQ ID NO: 367142 - DNA, 122 bp, Homo sapiens
taacagcaatagcgctatgacgggaggtcacactctcctcagtaaatctctgttccctctcgttcctcagaccctcagtgcttccttcggtcactctgcaaggagtttggctgaagttgaat

SEQ ID NO: 367143 - DNA, 122 bp, Homo sapiens
ccaaatgccaagcaacgttcaggatccacacttggggctttctttctgttttttaaacgccggtagcaggctgcgtgtgcatgacacgtgtacttgtgtgtgcttgtgcgagcagtgcgtgt

SEQ ID NO: 367144 - DNA, 122 bp, Homo sapiens
ggaaggccggccagtgtgcacccggttcgggcccctgcgcccgggctggcaagatggccacgcccccagcagagacggcgcctctaggacaccatcggggaccgaggtacccgagcggtccg

SEQ ID NO: 367145 - DNA, 122 bp, Homo sapiens
tatgcagctacgtgttgtaattgttgatttgattttctatctcctcctgtgagttcttcgcgagtataatccatgcctccatctttgcgtctccactttatcaaagaggctggctcatagtt

SEQ ID NO: 367146 - DNA, 122 bp, Homo sapiens
cccaactttccagctcatctccagcctgtgcttctccccgactcaactcattttcaaccacgtgctaggcctccacccttggatgtcgaagagccatctccagttccacccagttcatcttc

SEQ ID NO: 367147 - DNA, 122 bp, Homo sapiens
cgaccgggccgggtgtgcgcgcgctcggggcggcgctgacacgccagccccccatcgcctcggtcccctccggaaactgcttctgaagctgaaactttgggcgcctaccagcgcgggcggga

SEQ ID NO: 367148 - DNA, 122 bp, Homo sapiens
cctgaaaatcacgtgttgagcgtgtgattgaatgcttccttgagctctaggaacataggccgccctccgccatggcttcttccttccattctggtttctgcctcctggcttcctgcctttca

SEQ ID NO: 367149 - DNA, 122 bp, Homo sapiens
aagcctcgggaaacttacaatcacgcagaaggcaaacgcaaagcgaacacgtctacaaggcggcaggagcgagagacagaactgggaagcgccggacttttaaaccatgagatctcgtgaga

SEQ ID NO: 367150 - DNA, 122 bp, Homo sapiens
ctctaattccttagatttctgccagattgggagccttcattagtgttttgtttctgtgttcgtgagacagaaaggcagacaatggtttttttcccctttccacaaatgctaacttgaagtct

SEQ ID NO: 367151 - DNA, 122 bp, Homo sapiens
agcagcacccacagagacgggtgtgggaggagggagggcagcggtgctttcgatctgcagcgtcaagtgtggggccttgcaacccagcagaggaaatctcccaaggagaagtcaggctctgc

SEQ ID NO: 367152 - DNA, 122 bp, Homo sapiens
aagtccccgcgaacccattgggactcagattctccccagacgccgaggatggggtcatggcgtcccgaaccctcctcctgctgctcttgggggccctggccctgaccgagacctgggcgggt

SEQ ID NO: 367153 - DNA, 122 bp, Homo sapiens
cttcggcgttcctccccggttctctgcctggattgggctcccgtgggttgctgaggccctcgcggaggcctaggaagcccggcagcgcgggcggcagcagcgggttggggagcaaggccggc

SEQ ID NO: 367154 - DNA, 122 bp, Homo sapiens
gagtagaagggagcctaagaggcggaggtcccttttgctgccagtgggctcagaaggggccgaatgcttacggaccctccaggggagggccggtggccaccgtgctggtgccgctgagaacg

SEQ ID NO: 367155 - DNA, 122 bp, Homo sapiens
agaaaacaaacgcttccaagagcttttctaagttaaaagatggctcaccaatggcgaaggcggtgtccctgtcgattgtggccgcttccttagggtcaaataacaaagaagcaacttcatct

SEQ ID NO: 367156 - DNA, 122 bp, Homo sapiens
cctgtgctacacactaggcgtggaagcatttggactggcattgtgtccagaattggttcccgcccgtggcttcctggtctcaccgacttcaagaatgaggccgcagacgttcccagcgagtg

SEQ ID NO: 367157 - DNA, 122 bp, Homo sapiens
aggcacgcagatggcagaggggctggggcggggacgctcgcctggcgtgggccacagtcacgacccaatcgtagcccccactgtgtctcttcatagttgcatccttggaaaccggcggggct

SEQ ID NO: 367158 - DNA, 122 bp, Homo sapiens
cagggaaggcctgaggtatgtagcctgcgtatcctccatacatggcggccgcggctgccgcgttcttctgtagtgtggcgatcgtggctgtagctggagcagcaaatggcacgtaactggcc

SEQ ID NO: 367159 - DNA, 122 bp, Homo sapiens
ccccacccctcgggtcccacgcgcgccaccccgtgcgtcacagaatggggcgggatgttccgctggccacgccccttaaataacactctgtgaagccgtggtcttcttgcgcgggatagggc

SEQ ID NO: 367160 - DNA, 122 bp, Homo sapiens
aacaaaggcaccagaggctttcttcccttgaacaccaatcttccaacctagattagcagccgagcgagaggtggcgtctgaacagcctagattagaggccgagcgagaggcggcgtctgaac

SEQ ID NO: 367161 - DNA, 122 bp, Homo sapiens
ccctttctcctcctcgtcgcccgaaaacgtggaggattccggcctggactctccgtcccacgcggcacctggcccctccccagattcctgggtcccccgcccaggcaccccgcagagcccgc

SEQ ID NO: 367162 - DNA, 122 bp, Homo sapiens
atcagaccaactattttcctagaggtatcttctatgcctccgcctcgacagcagcaggcacgcagggctcagggcacctctccttatcctttcccctcccagctcaggtgcctgggtgtgcc

SEQ ID NO: 367163 - DNA, 122 bp, Homo sapiens
ttggctcgggcaacgaggcccccggacggccccgcccacccgcgcccactccctcgcccacgcctctccccaacgccttgctgggttcacctctccaggcagggaaagttgcttctagactc

SEQ ID NO: 367164 - DNA, 122 bp, Homo sapiens
attctgtctgctctgggttaattttggaggccaggaaaaaaatgtccatgattcatgatacgaagaatgagcttgtgctgctgaaaatgaaaaagtaagctagcatttcgtcatcctgcact

SEQ ID NO: 367165 - DNA, 122 bp, Homo sapiens
gaacctggaagacagcagggggcagcaccgggccgctgcagaaggttctgcacctggaggcgctggcccttccttccacagggatcctgcatctcagtacctggcaatctgctcctcctcca

SEQ ID NO: 367166 - DNA, 122 bp, Homo sapiens
gcttttactgagttgcggtttgcgctctcttcagcctggcattttgggcgctgtgtgcttcgcgggcagccgcacatcgtggtttctcaggggtgccgggaggccgtccatcggaggacaca

SEQ ID NO: 367167 - DNA, 122 bp, Homo sapiens
ttaaaatgtaaatacgagcttccagaacaaatgctacaacacaaaacagaaacacatgtgcggccgcgcggcaagcgagcgcgcggcggggcgggaggcgcggggcgcggggcgcgcgcgcc

SEQ ID NO: 367168 - DNA, 122 bp, Homo sapiens
gttcgaagtggctcaaggccaagggagttgtcgccggcgaggtcgccgagggctgatcttcggttaacagcttgggttctggtgagcctttccatatcgaatgctacgttatcagtacatgg

SEQ ID NO: 367169 - DNA, 122 bp, Homo sapiens
tgcgctcagcactcgcagggccgccctccagggcctcccctccgctaggctgggcacctgcgccagcagcccacgcaccagagcatgcacctggtggggaagggggcagacttcagcagtca

SEQ ID NO: 367170 - DNA, 122 bp, Homo sapiens
cccctctgccctccccttcttcccttctcccctcgccctccctttttccctcccctactgcgttacctcagtctttaaagacccgcaggcaggagaattccatccgcccccagctcttagaa

SEQ ID NO: 367171 - DNA, 122 bp, Homo sapiens
tcacccacacggccgcagtactaaggaccaactgcgcgtgcgaccgcgacctctttagcccgccctcctgtgcctgcttcctattggctggtagtagttcccgcctaggtgattgggccaac

SEQ ID NO: 367172 - DNA, 122 bp, Homo sapiens
cttatctatacatttggatatcacttaacctcatggaattgtgaggacaaaataatgcagcgtaagttcaaggcacctggtaggtgcgaattactcaacaactgggggcattaatttctgag

SEQ ID NO: 367173 - DNA, 122 bp, Homo sapiens
ggcacttgctgtgctccaggaggaaatgtgtggcccgggcaggtgctctgatcggcgctccggtcggtcttgtgggaaatctgtttttaactgtagtctccctgtcacccagccggcggagc

SEQ ID NO: 367174 - DNA, 122 bp, Homo sapiens
ccgcgtagataaaccctacagcctgctgcatgaaccgagctcagcgtcctccctgtggctcggtgtccactctgtgctcatctggtggggctcaccaccctcacatgcggaacgcgtccctg

SEQ ID NO: 367175 - DNA, 122 bp, Homo sapiens
attctaacaccaactggagttgctgtgtatgcatatatttgggattcagtacctggaaggcgaggagaactctgtcatctgagcagggcttctggttgtctctatggtgtggtatgattttc

SEQ ID NO: 367176 - DNA, 122 bp, Homo sapiens
gctcttggttcggtggggctttggacagttttctcctcacccccattaccatgagtctcccgttctgtgcctctcaccaaatcaatcactttttctgtgaggcacccaccatgctgaggctg

SEQ ID NO: 367177 - DNA, 122 bp, Homo sapiens
ggagaccctaactcctggaacccggcttgagggggatccctgctgtccagctgcggtccccgcagtgaccaggcgaggcgctggcatcctggcactatctccaggcgtccaggctgaacgcg

SEQ ID NO: 367178 - DNA, 122 bp, Homo sapiens
aggaccctccgagccaggtgccggatataatctcgtggtgcgccgtttttttaagcccgccggaaaagcgcagtattcgggtgggagtgacccgattttccaggtgccgtccgtcacccctt

SEQ ID NO: 367179 - DNA, 122 bp, Homo sapiens
aggagcccaggaacttccacacagacagaccggacagcaggaggacctgggggagggaggcggacacatgtgccccacatccagaagcacatccagcccttactgtggtggcaggagggccg

SEQ ID NO: 367180 - DNA, 122 bp, Homo sapiens
actttcttgaggtgtggcccaccccccaggtcttttcctcatattttggaagttcagagccggttcagggagatgccacttcttccttcagtgctgtgggtattttctgaaagccttccatc

SEQ ID NO: 367181 - DNA, 122 bp, Homo sapiens
accccatcagaatattaccacatgtgtcaatcacacaccttgtggtgaaagcgagctgaacgcactgatacatgaagacatttctgactcctccctgaccttcagcctgctgggagagagac

SEQ ID NO: 367182 - DNA, 122 bp, Homo sapiens
ggcaaagcccggagccttgggaacgtgaagcgccatggccagcctgcaggaagcagttcacgcgaccgctcggaagaccgcggaggaagcgaggagcacgcacagccttctgggaaagcagc

SEQ ID NO: 367183 - DNA, 122 bp, Homo sapiens
gaagtaggggcgaacctccccaaagcgggcgtggaaggtgtacaggtggcagtggcgctccgcgtcatagaaagacagctcgccctcctcacactccagctccacacgcaggcggcgtggga

SEQ ID NO: 367184 - DNA, 122 bp, Homo sapiens
tgattcttgacgctccacggctccacgggatctctgacacgaatctcagatccaccccaccgaaccctaaaaatggctgtgggagcactcccaggggccatccagaggatgggcctacagaa

SEQ ID NO: 367185 - DNA, 122 bp, Homo sapiens
cagcagcctggaatgagacccccagaggagggaaccccagccgaccggaggcttggggggcgctgctggaccggggacctcggagcagcccagccacaggcgcagcctttgtcggaggccca

SEQ ID NO: 367186 - DNA, 122 bp, Homo sapiens
tctcaaatgggcaagagtaactcttcagcaccatggagaggtccgggcagcgtgttacaacgtgggactgtgaccagggcaagcactctgacagtgtaagttttacaaatgtctaccatcta

SEQ ID NO: 367187 - DNA, 122 bp, Homo sapiens
ggagtaactttcccagagttactcaggccgtgggacctggacatgaatctagatctaatacgcttgcatcttctacctactacaccatgctgttttttgagaagcgtgctctgctcctagcc

SEQ ID NO: 367188 - DNA, 122 bp, Homo sapiens
tcattgtggtcatcctaactggcgcttaaaagatgctcttgaatttgtattgatagcctgcggaggcaggtatttttgaacagacctttgtgatatattgccaatgctagaatggggtaagg

SEQ ID NO: 367189 - DNA, 122 bp, Homo sapiens
tctgcccagtgatcatctgggcaggacatggggacgagtgtccaggctgaagtcagggcccggccagcagagggccattttgtattgagctccacagctggtcacattctgtggaatgtgca

SEQ ID NO: 367190 - DNA, 122 bp, Homo sapiens
ataacagaagggggcttcagcacattaatcgtgggtgggatccggcagtccaagcccccccgccttttctagacctccccactagcgtgagatacaggatgagagcttatttctggctgtct

SEQ ID NO: 367191 - DNA, 122 bp, Homo sapiens
cgcctgtaatcccagcactctgggaggccaagactggcgggtcaccagaggtcaggagttcgagactagcctggccaacacggtaaaactccatctctactaaaaatacaaaaattagctgg

SEQ ID NO: 367192 - DNA, 122 bp, Homo sapiens
tgtgtcagtctccaaaatagaccgcttctggggagtttgtcaactttatttcaaaaccggcgaggatgtacactgacgaacccgtgttaaagactatcgcctttacgcaagccattcattct

SEQ ID NO: 367193 - DNA, 122 bp, Homo sapiens
cctgacacgctgcaggattacttcgggcagagcaaggccgtgggccaggataccctgctgcgctcgctcctggagaccaacgaaatcccctcgcttatcctgtgggggccgccgggctgcgg

SEQ ID NO: 367194 - DNA, 122 bp, Homo sapiens
gggtgaggaagcggggctgacatcaagtctccccattggtcattcggggtaccacgtggtcggaagcagcctcccacaagcggctctgactccgccctccgcttcggagcggctcacctggc

SEQ ID NO: 367195 - DNA, 122 bp, Homo sapiens
ctcttcattaaagcaaataatttggttgcctgaaagtctaaaatacctgggtcatccaaacggaaatcaaaaggctgagatatgtgtggcatttgttatttgaattcctacacctttctgtg

SEQ ID NO: 367196 - DNA, 122 bp, Homo sapiens
tttgtgagcttcctgctttaccacagcatggccatctcacagacgggtttttgaggctttcgttgagaatgtgaggtaggggaatacttgctgacaaaagctttaagtgtccttctgcattg

SEQ ID NO: 367197 - DNA, 122 bp, Homo sapiens
gagagctgcctctagcgtaatcgtcgatttcgggagcggcccggctagggctgggagggccggatgaggttaaattcggccttgttggctgattggcatttcttgagctgggtgctaatctc

SEQ ID NO: 367198 - DNA, 122 bp, Homo sapiens
aggaggaggctgtggcgccggcgacagctacggcagcggcagccaccgcggcggctgcggcggcggcatctccgcctccactcccgcccgggactgccccccactgtctccccgcccctccc

SEQ ID NO: 367199 - DNA, 122 bp, Homo sapiens
gtgtaccagacctccagaaaggagagatgctggaggaacatgtacataggggagtgcagtcgcaggccctggctcaccacggtgatgatgacaacattccctataatggtcaggcagtagat

SEQ ID NO: 367200 - DNA, 122 bp, Homo sapiens
tcagtgtccccggaggccaggggaggtgcagcggcgccgcggtttcccccaccccctccccggacacggcaaactcttccccggcaggagccttccacttggccgcgcctggatgtaaacag

SEQ ID NO: 367201 - DNA, 122 bp, Homo sapiens
ctcaggtaatccacctgcctcagccttccaaactgctgggattacaggcatgagccactgcgcctagcctcaagtggtcctcttaagtcagcctaaactgtggtctatcctggaggatgctt

SEQ ID NO: 367202 - DNA, 122 bp, Homo sapiens
gcttgtagaagggccaggcgtaggcggcgtgcttcttggcaaacatctccttgaggatgccgctgcagcacttgagctgctccgagaccttgctgctcttctctggtgctgggtgctgctga

SEQ ID NO: 367203 - DNA, 122 bp, Homo sapiens
accatggggggccggtggagtctgtgcggggcggggatgggggtgcctttgaggctttcccggtaggttaccccttgcctccagaggcctctccctggagccaggcagccaaaagacccttg

SEQ ID NO: 367204 - DNA, 122 bp, Homo sapiens
ttgccctctccgcagccctctcgcccaggccggatgggggtggcagcagcagggcaggtgcggccccgggctcagtgcccgatgctgccgcggccgccccggatttgtggctgcgactcctt

SEQ ID NO: 367205 - DNA, 122 bp, Homo sapiens
aaccttcccctcctctcaacttcgagccctttgttcgccccggaacgggtggggtggggacggagactgtaaggacgggaccctcaccgacaattccgccaaaggggacctgaacggggggc

SEQ ID NO: 367206 - DNA, 122 bp, Homo sapiens
gttaattagttttgcatgcatgtctgagaaggtgccaggggagatgtgtttgcctttccccgggagggggccctgtttgtggctggccagtaggctggggtcttggagctgatatgggctgg

SEQ ID NO: 367207 - DNA, 122 bp, Homo sapiens
gccaagtgggcagggcaggcgaccttcgtgggggtccacgtgcgccggggggactatgtccgtgtcatgccgcgcgtatggaagggggtgctggccgaccggctacctgcagcgggccctgg

SEQ ID NO: 367208 - DNA, 122 bp, Homo sapiens
agccgaccggggcgtgcggagggatgtggcccggaatattggtagggggggcccgggtggcgtcatgcaggtaccccgcgctggggcctcgcctcgccgctcactttccagcgcagcggccg

SEQ ID NO: 367209 - DNA, 122 bp, Homo sapiens
cccatgccagtgggcagtgggtgcagacactcacagcacaggcacctgctgcgatgcacgcggcgcccacggaaacccgaggctgccagccgccgccctggagaccccagagacagcggcag

SEQ ID NO: 367210 - DNA, 122 bp, Homo sapiens
ccccaagctccagaacttctggtcttagcctactggagcctgccaccaaattaaacaccgcgaaggctttgaatccctgcaaagacggagcctggaagaaagggagggaggaaaagggagga

SEQ ID NO: 367211 - DNA, 122 bp, Homo sapiens
tgagcgggcgcccaggctgccagccggccggtgcccaggacagatgcttgctgggaccctcgctgggacccgggccttgcgagtcagagctgcacgtgctcggggggcccgtgcctgcccct

SEQ ID NO: 367212 - DNA, 122 bp, Homo sapiens
aacttgtgtgcctttcttccgccccggtgggagccggcgctgcgcgaagggctctcccggcggctcatgctgccggccctgcgcctgcccagcctcgggtgagccgcctccggagagacggg

SEQ ID NO: 367213 - DNA, 122 bp, Homo sapiens
gcgccagttcacctccagacctgccttaaaagcagcttgcccgccttctctcctcccctccgggcgggccctgcacgtggccctgacagcagtaggccccacccctgctggatccagtgagc

SEQ ID NO: 367214 - DNA, 122 bp, Homo sapiens
ttcagggcactgggctggttcaggagggtggtctcagggtgggtagggaagctggcctgtcgtagcaactcactcagacctgtcttcattaaagaccttagagaaggagaaagggcttgaag

SEQ ID NO: 367215 - DNA, 122 bp, Homo sapiens
taccctttgccccctctgcctgggccggttggggtgggcatctgctagaaagacaactttcgctgtggttggaggtatttcgcttagaggataccattgtgcataaagaaactggcccgctt

SEQ ID NO: 367216 - DNA, 122 bp, Homo sapiens
cttgccacgagtctgaggtgggaagaaagggtcgcagctcctggcacatggcagaattagcgaagcgtgccatgtggaggtctgaggtctgcaggttctgagtagacagtgaaacccactgc

SEQ ID NO: 367217 - DNA, 122 bp, Homo sapiens
cctacagccctcggacccagcaacaaccggatcctgtgcaggtcttccctgagtccaacgcgattctcctggataacgtcaaccagctgagcgattctgagcctgcgcgaagctcctcggcg

SEQ ID NO: 367218 - DNA, 122 bp, Homo sapiens
aattttcccctcctgtcctcctcctcctggcctcccgttttgattaattctgttctattgcgttcctttccaggggaggcctcagagccacttcaggctccagttcatgaaacagatcctca

SEQ ID NO: 367219 - DNA, 122 bp, Homo sapiens
agtgattctcctgcctcagcctcccaagtagctgggattgcaggtgcccgccaccacccccgactaatttttgtatttttggttgagactgggtttcatcacattggccaggctggtctcga

SEQ ID NO: 367220 - DNA, 122 bp, Homo sapiens
gggtcaggtcctcggccccctgcatccacttcacgtatggcatgggcgagcccacggccacgcaggtgatgttcacgttgccccctggcatgatctcgtggctcatgggcaggatggagaag

SEQ ID NO: 367221 - DNA, 122 bp, Homo sapiens
atggggatataggtcattttcttctcagaattatggcagactcagatacctgtaataatacgggaactaaaaaggacattcgcatgtctgagtgctgataactgttgacttgatggtaagca

SEQ ID NO: 367222 - DNA, 122 bp, Homo sapiens
tgggcaattccagtaataagacaatcatcacatgggtgctttcagcaaataacccaaggacggaaataggagctgcattttcactaatgcatgagagctacaagagagccgaactctacatg

SEQ ID NO: 367223 - DNA, 122 bp, Homo sapiens
aaagaaataaggcgaggaaaaatatccgaggcatcattttggggagttaggcctcagaagcgaccttagagtttggtaatatttgagtgtgaaaagctttacagcagtgcttctcttcactg

SEQ ID NO: 367224 - DNA, 122 bp, Homo sapiens
agcgcctcctgcagccgctgcgccagatccaccttgaggccgcgcgagtccaggccccgccgctgcagctccgaccgcagctcggtcactttcagccgcttcacctccatcgccgccgccgc

SEQ ID NO: 367225 - DNA, 122 bp, Homo sapiens
gtgcatatccacatatgtatttgaaagttagtgcacactcaagtcagccctcggagcctgcgtcccctcatggatacaccatgagtgtgtgaatgtacaaactgcctgcaccttggacattc

SEQ ID NO: 367226 - DNA, 122 bp, Homo sapiens
tccaactttccggggctcatggggttgtggggctggtgggcggagtcctgtgctcattggcgtttggctgtgggttctggtctcagcgccgtccacagggccagcctcgcggagccgcccgc

SEQ ID NO: 367227 - DNA, 122 bp, Homo sapiens
cctaacctaggatcatgagtcagcatatggacaacacagaacaaggcctggtgtggggaacgatattgtaagtcttggtcatctcacttgtttcccttacagcatcattctattctgttctc

SEQ ID NO: 367228 - DNA, 122 bp, Homo sapiens
ggcggtaaggacacagcgcacaactctgcattatacctgcgagttaaaaagccaagggttcgctcactcaaccttgaatgcgcgtcagaatcacctgggggaggttttacaaaatacccgtg

SEQ ID NO: 367229 - DNA, 122 bp, Homo sapiens
gactcagcgggctgggagccgggaggccgtggtgggagaagccagagctgggggtcccctcgcttccccgcagaccaccctagtgccgctgttccggaactcgcgcctggtccagttccact

SEQ ID NO: 367230 - DNA, 122 bp, Homo sapiens
gccttcctttttttgttgtaacaagatcacacatccccattgccactactcagatagtgccgggtgtcctaggatcttggcgtcgctcttgtcctctggaacaggcatgggaatgaggatgc

SEQ ID NO: 367231 - DNA, 122 bp, Homo sapiens
atcggaggtcggacgcctgcaagacagaggcaagtgctcagccttgcaccactgcggccccgtggctacaacccactccacgccacccactgtgcacgggccaacgagggccgaccgccggg

SEQ ID NO: 367232 - DNA, 122 bp, Homo sapiens
gaactcttgacacattattccctccaaacccatacaataagagacttgaacaaacttcagcgcagtttctaacagcttaaagtcatatactcaagattaccttagtccccttttaaatgctt

SEQ ID NO: 367233 - DNA, 122 bp, Homo sapiens
aatgacagtttaatttgttctttcattaattgggagcgctccgggctgatgtgaaatgagcgcatttggaaggcatgaggaatatgtactgagtgattggagcatgagtaataataattgct

SEQ ID NO: 367234 - DNA, 122 bp, Homo sapiens
agacttctaaataacttctaaattaaatttgtctaactgtttcaagactatcagtgctaccgttggattgtttaaaaacccaattcaaaggaatttaataacagtcagggtcctcatgatct

SEQ ID NO: 367235 - DNA, 122 bp, Homo sapiens
tccagtgacaaaccatctgggaaattccatctgtctctgcttggaaactgaggtggcagtcgcccactgtgagcaattttctattaacttcttggataagatcagtcagatttatactgaat

SEQ ID NO: 367236 - DNA, 122 bp, Homo sapiens
tttaaacctttttcttgatcttaaagatcgtgtagattggggttggggagggatgaagggcgagtgaatctaaggataatgaaataatcagtgactgaaaccattttcccatcatcctttgt

SEQ ID NO: 367237 - DNA, 122 bp, Homo sapiens
tgtagggtgtctggaaggcaggtgcggcctgccacttctaatgcaagctgagaacaaacacggcatactgagcccaaatcggccttctgctgctagagacagaggtagaatttatgttttgc

SEQ ID NO: 367238 - DNA, 122 bp, Homo sapiens
ctcccatcttcacacttcacctcaggcaaaggccttagatctgtaataagccccaaacgacgggaaagtagacctgtggccactttctcctgtgttgtagctaaagcactgaagatcccaaa

SEQ ID NO: 367239 - DNA, 122 bp, Homo sapiens
tatccttggtttcacttcccactcaccaggccacaaggggagcagcaagggaaatcgggccgggccctcccgcccatcccagccaccgcccgactcttggctcagctcaactttccccaaga

SEQ ID NO: 367240 - DNA, 122 bp, Homo sapiens
agaacggggcggggggtgagtgagagagagagagatagtgtctatgtatgtgtctatcctcgatgcttgcaatccatggttctcagcagaactatgccattctccatgttagggtcagccag

SEQ ID NO: 367241 - DNA, 122 bp, Homo sapiens
aaaccatgaggacatcatgctgctgcaaagagtgtgagccctactcccaccttagtccaacgctgaaggcacatgctaatttactttaaaatggtttagttttagtgtgatttgttgcatta

SEQ ID NO: 367242 - DNA, 122 bp, Homo sapiens
gaccgagctcagcagggacagcgggtgtggcccctgccctcgcccaggcgccctgcacagcgctcgctctgaagatctgtgggggttccctcgagcccgactggctgaagtggggaccagag

SEQ ID NO: 367243 - DNA, 122 bp, Homo sapiens
aatccttctgtggccagcgattggcgggcgtgtctgggctctagccaatccggaaaggggcgggctggttaagcgtcaggttccttggatcgaccggtcagcccagtaactgactacttttc

SEQ ID NO: 367244 - DNA, 122 bp, Homo sapiens
tcactagcctttacctaaactttcctgcttaattatcaaaacaacacctgaatatccatacgatggagtaattatgtcacacaaaacaacaagagtaaattttaaacgctttctaagtgaag

SEQ ID NO: 367245 - DNA, 122 bp, Homo sapiens
ggcttgtaggaaggtggacatgggctcccggagacaagacaagtgatatgttgaactgttcggtggctggaatcaactgctcctggagtgacctaaggccagtgtttatcagaacttagcca

SEQ ID NO: 367246 - DNA, 122 bp, Homo sapiens
ttaacaaaaactgggccgggcatggtggctcacgcctataatcccagcactttgggaggccgacgtgggtggctcacctgaggacaggagttcgagaccagtctgcccaacatggtaaaacc

SEQ ID NO: 367247 - DNA, 122 bp, Homo sapiens
gtctttaaacatagccaacatatccaatcattgctgtgcattttggatgagggtggattgcggggctgcattcaaagccatcctgggccacatgcagcctatggagcgtgggttggatgagc

SEQ ID NO: 367248 - DNA, 122 bp, Homo sapiens
gggagagagacgaatacccacaggcccagtacttcgttggttggtggcttcctccagtcccgcccatactgggagaataccaagaccccaccctacaacttcctgggcctggacttcctgcc

SEQ ID NO: 367249 - DNA, 122 bp, Homo sapiens
cgcctactacagttcccaggaggccccggggcggggtgtgtgtgagccgagcttgcgcaccgctagctcccaggacgtcggcgcagggggcgtgacccccccaaaggggtcctgggccaagg

SEQ ID NO: 367250 - DNA, 122 bp, Homo sapiens
tccggatgtataaagcgcggccccctgcggggagtggtggtgagtccgagggtgccacagcggccctgcccctgcccctgcccctgccctgagtgggcgccgcgctacgggggaggggttaa

SEQ ID NO: 367251 - DNA, 122 bp, Homo sapiens
gcagcgtgtagcgcctgggccctttcgggccgcacgcgcctgcgcagcccctgccgggggcgtcttcctcagtgcctgatggtctggacccctgggtctctagtggacatgggagctggcct

SEQ ID NO: 367252 - DNA, 122 bp, Homo sapiens
ataaagggcacctatgcctctgaggaggtcatctgggatgtgctgagtggaataggggtgcgtgctgggagggagcactttgcctttggggagcccagggagctcctcactaaagtttgggt

SEQ ID NO: 367253 - DNA, 122 bp, Homo sapiens
tagcgctgatgccctaagttttggtgacactctcagtgagagccgtttgggctaaactcccgcactaggtccaacaaaccaaaccagaatggccttactcataccgacactgcagcatcgac

SEQ ID NO: 367254 - DNA, 122 bp, Homo sapiens
acaaaagttaaaagcgccactctttctattctttgctgtctggcaatctcttaatggtggcgtctagcaaactgcaaatcaagctccagccggagtccgcagggcagggagcgccgggtgcg

SEQ ID NO: 367255 - DNA, 122 bp, Homo sapiens
ccacagacctgagtcttgactccggataaatcaccccagactgtttttctgtctgtgacacgggaacggcagcttctgcctcgcgaggtggagagagaatgagaagcgccgtgtgtggcgcg

SEQ ID NO: 367256 - DNA, 122 bp, Homo sapiens
gcctgggcggagccatgttgggaatcgcaggctgaagtgcgcctgcgcggagcccaagaacggaccgacggccattttgagcgtggctgggaagagaagtgtattcggatgctgcaagggac

SEQ ID NO: 367257 - DNA, 122 bp, Homo sapiens
atttgttggtgaatccaaatgggttggaaggtagcattaaatcctggggcaccacttgctcgatggagaaaggcccgtagctggcattgaggacaggcagcctcctggatttgtaaatcaga

SEQ ID NO: 367258 - DNA, 122 bp, Homo sapiens
gccgggcgcggcagtgtaagggtcgcagatcatgcggcaggtgcccatcatctcatagtgcgcggcgcctcggggcgccgcctgcagcagcagcggcacggcgatgagcagcccgagcgcca

SEQ ID NO: 367259 - DNA, 122 bp, Homo sapiens
acaaagccccttgtggcagatgtatcttcagaaaatggcaggacgatcattctggcttcacgcattcctcccatcaaagggaggagtctattatctttctcttcaacccggaggaaactttc

SEQ ID NO: 367260 - DNA, 122 bp, Homo sapiens
cctccagtcctctactcactgctgactcacccatgtccttttcagacatgggcctccctccgtgtggcctctgctgtggtggacctgcctggtcacaggacatccagggccagaagctctga

SEQ ID NO: 367261 - DNA, 122 bp, Homo sapiens
taagtagcagagctgacagccgaacccggtaacttattgtagagccccggatcttgcctacgatggggtctgtttctctgaggaagcaaacttcctcggaacccacaggcctgcagagctgg

SEQ ID NO: 367262 - DNA, 122 bp, Homo sapiens
gggcagggcgaccaggacgccggaatcccgagggaggaggagtggagatcttacctggggcgccctcttcggctcccgcggctgccctccgcccggcagcagctcctcctcctgctcgctgg

SEQ ID NO: 367263 - DNA, 122 bp, Homo sapiens
acgattcgctttttcccagcatcccggatgccttctggtgggcagtggttacaatgaccacggtaggttacggggacatgtaccccatgactgtggggggaaagatcgtgggctcgctgtgt

SEQ ID NO: 367264 - DNA, 122 bp, Homo sapiens
ctgacccttgatttggggattgatacattggtacggttctaggccttgcattacttcttccgatttttcccttggggtgggctgtcggcatgctcagtggcctgccggcacttgggaggggt

SEQ ID NO: 367265 - DNA, 122 bp, Homo sapiens
ctgcaggtttagttgcctgggggaagtcccacaatccctggcttaataaacacagcattacgctatagttttgactctatagaattctaaatgttcttttgaaaatcatacaagcggttctt

SEQ ID NO: 367266 - DNA, 122 bp, Homo sapiens
ttcacccgtgcagacctcatcttcaccgtggacttcgaaattgctacaaaggaggatcctcgcagcttctacgagcggggtgtcgcagtcttgtgcacagagtaaacttttctagctgcccc

SEQ ID NO: 367267 - DNA, 122 bp, Homo sapiens
accacacaccccggtcttcctgtcttggaaccgttcgcagcactctattgcatgtaataccgccggcggcactctacacgacttggagccgcctgcgctaccgtatgcagcactctccacgg

SEQ ID NO: 367268 - DNA, 122 bp, Homo sapiens
accccgtggacctccacgtggtaggtggtgccgggcctgaggtcgggcaggctgacggtgcgcgtggtgcccggcacagtcagctcaccgccggggccctctgcaggcggctgaggccgcca

SEQ ID NO: 367269 - DNA, 122 bp, Homo sapiens
caggcagtgtggctgcagcacacgcagtgggaagggaggctcagaaagacccctaaggagcgggtattcaatctagcctcagaagatgaaattcagtaggcgagaagtgttggaaccaaaat

SEQ ID NO: 367270 - DNA, 122 bp, Homo sapiens
gcattctgataatctgcctggggaataactgttgatggataaaatacagtcagctcatctcgccagtgaataatgtgctttctggttctaccacgtgaaaatgaactgctcagatcctcttc

SEQ ID NO: 367271 - DNA, 122 bp, Homo sapiens
tcggcctgtttccctctccaagcacgagtctgtccaacgaccacccctgtatgaccctcccgtcaccatgaccccagcccgtgctgcccaccctgtccctgagccacccctacgcgtgcccc

SEQ ID NO: 367272 - DNA, 122 bp, Homo sapiens
tctctgtaaattgtcttttctgtgtttctctagccgtttcctctccctcgccggcctcggcggagattccaggccctatagaaaccaggacgtcccttagcgccaccgcctcacatgccagt

SEQ ID NO: 367273 - DNA, 122 bp, Homo sapiens
aggcacaatgaatccaacagcatcctcttcttcggcagattttcttctccttaagatgatcgttgccatggcattgctgcttttagcaaaaaacaactaccagtgttactcatatgattatg

SEQ ID NO: 367274 - DNA, 122 bp, Homo sapiens
tggacctgaactgtttggtagagccacccggcccttccttcctcattgttgtttggtatgcgcacagttcctgtgggactgggccgtgagttttccattggaaagaagttcagtggtcccat

SEQ ID NO: 367275 - DNA, 122 bp, Homo sapiens
ttacgtgcagccacaccacgcggcctggagctcagacacggtggaatttctacaagatgccgggcaggttctctcacactatgttgagctcctccgggatagggcctgtctctcatctcttt

SEQ ID NO: 367276 - DNA, 122 bp, Homo sapiens
aatggcctggaatattgaaaacatgatgatttggacatagaagacactggttctatttgccgctggcctgctgtgtttctttgtttcatttttgctgtttgtacaaagacaggattgaagtg

SEQ ID NO: 367277 - DNA, 122 bp, Homo sapiens
cctccgctgacagctcagcagcgtgcgcttccgctggattcaggccaggaccagcgaagccgcaccttacacccaccgaggaggaaacaagcctggccacccgaggctaccccgctaggccg

SEQ ID NO: 367278 - DNA, 122 bp, Homo sapiens
gaaccagggtcccaaggagtcagggtctggcaccccaccttccgtgtagccacacgcctgcgtcagggcctggcagtgtgtcagcagcgcagtcctcgtcaccgtcacacccagcacactgc

SEQ ID NO: 367279 - DNA, 122 bp, Homo sapiens
atgctccgctgtcagggcagccatcttgccgaagtcacatgaccgtggcacccagggaagcgaggtcacgtggctgtcgctgttgtcgcggggcctgccgggggctgtagtccttcagagtg

SEQ ID NO: 367280 - DNA, 122 bp, Homo sapiens
cgccatgcgcctctcctcctccccacctcgtggcccgcagcagctctccagctttggctccgtggactggctctcccagagcagctgctcagggccgacccacacccccaggcctgccgact

SEQ ID NO: 367281 - DNA, 122 bp, Homo sapiens
ctcaggaaactttccttactgagtcaacaggacccggacgggcctcgggaagaacagaatcggggtttgtgcaggtgtggacatgtgcatccttaaaccttctaaaatcttctttcaatggt

SEQ ID NO: 367282 - DNA, 122 bp, Homo sapiens
tggggctcaaatcagatctccctgtgtgtaactttgggtagctgactaactcggagcctccgtttccccatctggaagggggaacactcccggcggcgcccacacagccaggtggtggagag

SEQ ID NO: 367283 - DNA, 122 bp, Homo sapiens
aaaacaaacctgtgaattttaaggcctccgcctaaatccccatgggcgctgctccgtacacgccgcaccctaccctaccctcccttgcgctcccttcggagctcggacgcagaggccctgta

SEQ ID NO: 367284 - DNA, 122 bp, Homo sapiens
gcaggtgcggcggagcgccggcaggtgcagtgggcgtgagccggcgcagcggggagcccgcggggtgctttccaagccgcacgggaattgatgcttctgtctgcttctctagagattggctg

SEQ ID NO: 367285 - DNA, 122 bp, Homo sapiens
gcttgtccgtcccgcctggcccccatcaacaaggccgggaccagcggccggtggaacgagcgagagcagccctagtcccacaggtgagccgcccccacaagcagccaagccgcgagccgtcc

SEQ ID NO: 367286 - DNA, 122 bp, Homo sapiens
tgtgcctgagccctttgtgcccagcccgcgcgccccgcccccaccgcccccccttccctccgtccaccccctcagcagccagctggaacccgaggaacccgagtccgccccgccaagttttc

SEQ ID NO: 367287 - DNA, 122 bp, Homo sapiens
tgggaagggtcgtggccgctgacgccccgcccccggcgctcaggtgcgcggcgtcgcgtccggcccgccgctgcagcctgccctgcgccagccgtcctctgccccgctcccgccgcagacca

SEQ ID NO: 367288 - DNA, 122 bp, Homo sapiens
tgtttttgcctccccctaagctggaggtagttggcttaaagtggaagaatcccgaggaggcggggacctggtaaggcccccatcattcagctgccctctcacacctgaagagccacttctct

SEQ ID NO: 367289 - DNA, 122 bp, Homo sapiens
cttcttgcttccagttctctatcgtgtcttcttccttcctcacccaccaagctcccctcgcgcagatgctcacccgtggcgtgtcctcagccaaaccgggcagaaaaagctcagagcttcgc

SEQ ID NO: 367290 - DNA, 122 bp, Homo sapiens
agggaagggatcttctccattgagttcacttttgtatcccattgcctaggtcagtatgagcgtaaagtaggagctcaataaatattgaataagtgaatgaatgaaactaacaggatgaatgg

SEQ ID NO: 367291 - DNA, 122 bp, Homo sapiens
tgccctataattgaccttcgtgactacctggcttcacccccaactgcgaaagcacacctccgccctgccactgccacccggggccttatttcacaggaaacaaaaccgaaggcagggtttgg

SEQ ID NO: 367292 - DNA, 122 bp, Homo sapiens
aagggtcaggggcctcccgggctggccggtcccattagcagggcggggcgagctgcagggcgaggaccgtggctccactccccgcccgagactctcaagcccaggaccccgggccctgaccc

SEQ ID NO: 367293 - DNA, 122 bp, Homo sapiens
agccgcggtcatcgctgccaccggctctgtgggtaaggggcatggctagggcctgagggccggggaccccgcggaggctgccgcctcttacagagagaggcaagggacaacagggaggggtc

SEQ ID NO: 367294 - DNA, 122 bp, Homo sapiens
ggctcactttgcaaaggcacttcgagtgcgcgggtgaactccacgcttcccggggaaccccggcttcctggcaagccgagaccctcgctcgggtcctcccgtgcagatctcacccttgtaaa

SEQ ID NO: 367295 - DNA, 122 bp, Homo sapiens
gtcctatttcatttccttgtggtttcagatcttgcatctgccacctgcctgcagggttcccggggtctcaagcctgcttgaacttatctgtcttagtttgcatgggaggtgagaaggcaacc

SEQ ID NO: 367296 - DNA, 122 bp, Homo sapiens
aaaatcctgcaggcagcggccccattatcacccattcccagcggggggctgacgcacgcacgcccccaaaggtcctgcaaacaccccctgcatgggggccatcctggcccgggccctccccg

SEQ ID NO: 367297 - DNA, 122 bp, Homo sapiens
gctgcacttaaatctgccttagccattctgtgacccggattagaatatcagagaaacaagcgagccaccaccaaaaaggtttaatgattaacacccatcatttgggttaatacttccataaa

SEQ ID NO: 367298 - DNA, 122 bp, Homo sapiens
ccggggcggtcaccaggaggacctcggctccgcccccgagaggggtccgcctcttggccccgcccctaggagggggctccgcctcttggccccgcccccagaagggctccgcctcctggccc

SEQ ID NO: 367299 - DNA, 122 bp, Homo sapiens
gtgacgtggtggtgggtgcctgtagacccagacactcgggaggctgacgcaggagaatggcgtgaacccaggaggcggagcttgcagtgagctgagatcgcgccactgcactccagcctggg

SEQ ID NO: 367300 - DNA, 122 bp, Homo sapiens
cctcttaacatcatgaaaccctgcttatggcccattagaacttagactgtggtcagtgcgcgcgcgcgcgcgcgcacaaacacacacacacacacacacacacacacacacacacatatatt

SEQ ID NO: 367301 - DNA, 122 bp, Homo sapiens
ggaggaggcggtgctaatctcagggaccggagacacctgcagcggccgcgagcccggcagcggcgacatcctcgagtccaggtactgcagagcgctggcccctgcctctgccgccgtgacca

SEQ ID NO: 367302 - DNA, 122 bp, Homo sapiens
catcccaccccccgacaggccccagtgtgtaatgttcccctccctgtgtccacgtgttctcgttgctcaagtcaatgggaggaagatttaaaggagactttcactttgcatacattctatgt

SEQ ID NO: 367303 - DNA, 122 bp, Homo sapiens
ggtcatgtgtctcatgtatgaagccactcccatcccagaggctaagctgccccctgtgtacgtgaggaaggagcggaagcgacacaaaacagacccctcaggtgcgcatcccgagggcgtca

SEQ ID NO: 367304 - DNA, 122 bp, Homo sapiens
tttcctaaatcactcggaattggcttccagcgccggcgccccgggtgggctcccggagcgcgcgggcctgtgacccggaggtcagagatgcctccgtcctgtttgatgtcttgccctggggg

SEQ ID NO: 367305 - DNA, 122 bp, Homo sapiens
aatggcacccgcagcggctctggtaggaactgatggccctcgaggcttcagaacagccaccggccccctcaagccccgccccccagtgggcggagaaggcgttacaagccaagggtgcctgt

SEQ ID NO: 367306 - DNA, 122 bp, Homo sapiens
cctccccgatacagtagcgaaatccagttggcttctcaatgaggagccggcagtgagcggcggtggcccggacgcactgccgggcggggcgtggggcggagggacgagccgagccgagccaa

SEQ ID NO: 367307 - DNA, 122 bp, Homo sapiens
ctctgaaacggcgctgagcgggttatttatcggagccagcgctgctccagaaggtcaggacggtggtgtaaataacctcttctcgccatttccccgtccctccagagcctgctcccctcccc

SEQ ID NO: 367308 - DNA, 122 bp, Homo sapiens
aaaagtcaacattcgattggttaaaagatactattcagaaagaatcaatcataaatgaaacggcaggcaaaaaggaacagaggttctcattctgggttgtgtttcatacaggactagcagtc

SEQ ID NO: 367309 - DNA, 122 bp, Homo sapiens
ccttcatacaatggataagtgtcttggcaacgttgatggggaaaattgttggagagagcgcggagaggtcatctttaaggaagatgaagggatatctaggttttttttcggttttgtttaaa

SEQ ID NO: 367310 - DNA, 122 bp, Homo sapiens
cccggccaggcaggacagcgggaccgtccgccgccgccattggcccgcgccgccggcccccgccaccacccattggccgccgcgctgcaccattgttacgtcactggccggcgggcggggcg

SEQ ID NO: 367311 - DNA, 122 bp, Homo sapiens
aaacgtcacgaggggaaagcccagccggcacctgcgcagggtaaggaagtggatcacctccgcatgacaggtgctctctgtgtgacttacatcacttggctcatatcccggccatcattagg

SEQ ID NO: 367312 - DNA, 122 bp, Homo sapiens
ctctttctagaagagaatgctgtgggtggacaatatacagataaggttagagaggggaagcggggactaactcattcaggaccttttacgtgatagtcaggaagatggctgtagttctaagt

SEQ ID NO: 367313 - DNA, 122 bp, Homo sapiens
agaggaattcctcctgtccttctctgcgcaactttgcagatgtggaagagactctgtggccgggtgcagtgcagactctggcctccaagcccacccactctgcagcctcttcccatgtgggt

SEQ ID NO: 367314 - DNA, 122 bp, Homo sapiens
ctgcaacgtgcaggcgccaggtccaagcccggactcccctcttcacccacctgccaaagccgcaaattccgcagctggtgtccttcaacgaatgtaaccacctctcggcccggccggaagaa

SEQ ID NO: 367315 - DNA, 122 bp, Homo sapiens
cattatgaaaatccccttgctagccaaaggactaaatattcatgatgttataaatattcacgttgtaaaacatcatgtggctatatatgtgaactttaaaaaacaaaacaaaacaaaaaaaa

SEQ ID NO: 367316 - DNA, 122 bp, Homo sapiens
caacagccccgccctgcacatcggcagcgtcagcgccacagacagagactcgggcaccaacgcccaggtcacctactcgctgctgccgccccaagacccgcacctgcccctcgcctccctgg

SEQ ID NO: 367317 - DNA, 122 bp, Homo sapiens
gtttttgtggaatgtgctttgggaaatacgctcatgagtgagtcagctgcaagaaaccatcgagctgtccctgatttcctgtgagttccttgggctgggtcctggtcctggacagtatggat

SEQ ID NO: 367318 - DNA, 122 bp, Homo sapiens
tggtgttccagacctgcgacatcaacgccttcctctcagaggtaggtccattccggagctcgaggcagggagagggcaccccttgctggcacctcagagtccggccacccctgggcccctgg

SEQ ID NO: 367319 - DNA, 122 bp, Homo sapiens
attacggaagaaccaggagtttggcgtgaccatggtgagagaagacggtccaagaagggacgttatcaggccactttttgggtggagaaggaggtagtcagaccgtggccaaatttccttca

SEQ ID NO: 367320 - DNA, 122 bp, Homo sapiens
ccagcactttgggaggccgaggtggacggaacccttgagttcaggagttcgagaccagctcgggtgacatggcgaaaccccgtctctacaaataaatacaaaaattagccgggcgtggtggt

SEQ ID NO: 367321 - DNA, 122 bp, Homo sapiens
gcgaggtgtttcaatagaggacggagaacgggggcggggaggggaggcgggggcaggaagcgatacaccaaatctcgagactgtaactctgtagcttatgctttgacgagagaaaaaagggc

SEQ ID NO: 367322 - DNA, 122 bp, Homo sapiens
caggccgggccgggggcgccctgccctcctcccggagagcgcagagcgcactcatttttccgggctctgctaattgacgtttggccgctgcgtggttcaaaagaaaaggccgaactcaagtc

SEQ ID NO: 367323 - DNA, 122 bp, Homo sapiens
ctggggtgtccatttccagagatgatagaactgaaacgccccccaacttccccacagctgcgcgttcccctgtgttcctagcgcgcagagttgcagcgaacctacctggtgcagctcattag

SEQ ID NO: 367324 - DNA, 122 bp, Homo sapiens
caaatatgagaaggcttctcattcaggtccatgcttgcctactcctctgtccactgctttcgtgaagacaagatgaagttcacagtgagtagatttttccttttgaatttaccaccaaatga

SEQ ID NO: 367325 - DNA, 122 bp, Homo sapiens
tcatcccccaaatggtggcgtcacttgactgtgcttctggtttgggcagctggtaaaacgcgtacaggtgtctcgggctctaatggtattgcattctcaaaacgggcgcgcgcctccacatc

SEQ ID NO: 367326 - DNA, 122 bp, Homo sapiens
ggccgcccggggcctgcctggggctccttcctcgccgcccggcggcagctcttgagctcccggcccgctcctttagccccgcaggctccctggccgtgaccctgtccccggcctccgtgtga

SEQ ID NO: 367327 - DNA, 122 bp, Homo sapiens
tgtctctgtgaggttttgcctggtggaattttccttaaaataactgcacccggagattgtcggatacgggatggggaaggggaagacctgaaaacggggtcctgcggggcttgtgaatgact

SEQ ID NO: 367328 - DNA, 122 bp, Homo sapiens
ttgcctcagtttctgagaggatcctggccacagatgctaagttccttaaatctggtctagcgataagagtgagggcaggagaaagtggcactgatacaagtggctgaggtcagggaactatc

SEQ ID NO: 367329 - DNA, 122 bp, Homo sapiens
ctcgcccgcagaaggccccgcgtgcggccacagtgggctgaaccttcaccgtccccatgccgcctgacggagggcagcccctccagggctgttccttgaccccaaatgagcaacattagcac

SEQ ID NO: 367330 - DNA, 122 bp, Homo sapiens
ttgtctctgccaccgggaccttgcgtggttgccatttccagccctcacctgcttcctactcgtctgtcaagacccagctgttacagctgctgtgacactgttctagaagcttccttcctcgt

SEQ ID NO: 367331 - DNA, 122 bp, Homo sapiens
caggaagcgcccattcccacatatcccacggctgccgctggagcacaggtttgttgggtccgggaaccctcagagggacggccacccagctgaagaccctggcttcacaggccgttagcaac

SEQ ID NO: 367332 - DNA, 122 bp, Homo sapiens
gcgcaagggcaggccaggccgggagggcggatggcggtggggacggcggtggcctcgggccgggcgggcgcccagatatagcggctcagggccaatcggcggcggggcgggcgggcgggggc

SEQ ID NO: 367333 - DNA, 122 bp, Homo sapiens
ggaagtacaagatggaaaagatgaggctcacaaatttgcgtagggtcacgacgagcgtgacggtgagggaggcgcattctgtggtgaggataaacacaccccggatgcacacgtacctggag

SEQ ID NO: 367334 - DNA, 122 bp, Homo sapiens
acggtcgggagcagccgccgtggcccgggctcgcgaggcaggctcccgcccgcaccctcccgtgcgaggtccccgccctgcgctcccagctcttcgaacctctacccgagcttctctcacgt

SEQ ID NO: 367335 - DNA, 122 bp, Homo sapiens
tggataatgccacaaaagggttaacattagcaagctagggatggaggcgctgtgcaccatcgtcatgtatttttccatcttaagcagcataccactcctaagtaaaaagaatcattttgctg

SEQ ID NO: 367336 - DNA, 122 bp, Homo sapiens
ttcttgtgcatctgtccacctgttccccagtattgccctcaattcctgagagccctggagcggtttcctaccattcccttcttttagctgcttgttttaagtcctttttatgtgacattccc

SEQ ID NO: 367337 - DNA, 122 bp, Homo sapiens
gcaaaccccgcagaaaccagcggcgccaccagaaggttccgtctgtggagaagggcggcccgcaagccggacgagagcgcccccaaacggaaccttgagcccaaggaccccggaggcatcgt

SEQ ID NO: 367338 - DNA, 122 bp, Homo sapiens
cagctaggactgggagctgtcccctcccacgtctttgccctgactcgctttcccttgctgcgcagtgaggctcactgcaactgataaacaacagttaccgctcatcgggcggcgacttccag

SEQ ID NO: 367339 - DNA, 122 bp, Homo sapiens
ttgctcctgttcctccttttctctagctggcaggcctcttctcctgcacagtggtcctgtcggtgctgctgtggctggggcccttcttttactatctgcccaaggtaatgagcagaggaggc

SEQ ID NO: 367340 - DNA, 122 bp, Homo sapiens
cggagcctctgccttggagattctcagtgctgcggatcatgtccctaaggggcagcctctcgcgtctcctccagacgcgagtgcattccatcctgaagaaatccgtccactccgtggctgtg

SEQ ID NO: 367341 - DNA, 122 bp, Homo sapiens
ctccctggcctgtgtctgcacactgtccatgtattccatcttcctcatcagaggagcccgcgtggcccactgcgggatactcaccttgccaaccgctgtgggccagggtcgtgttaacaccc

SEQ ID NO: 367342 - DNA, 122 bp, Homo sapiens
atgcttcttggatccctcttcagtttgcaaaattctatagagtgagccaggctccccagtcgatctcctcacccactcctattttccaggaaccttctgttctaaccacacaggtttcagag

SEQ ID NO: 367343 - DNA, 122 bp, Homo sapiens
ccttggggtagatcattggcagaggccacagggagaatattctgtgatctggagtctatgcgtggcgtgacagcagccgtagcggagggggtgtgtgcggcttcttgagtttgccgccggaa

SEQ ID NO: 367344 - DNA, 122 bp, Homo sapiens
tcaagctgaggggcagctccagtggctgaaccgccgggccaatgccctcctggccaatggcgtggagctgagagataaccagctggtggtgccatcagagggcctgtacctcatctactccc

SEQ ID NO: 367345 - DNA, 122 bp, Homo sapiens
gtacttaagcttgtaaatgccagcaaggaaaaaaaaaacaacaacataaaacatgggacgcgcaacttagtgtagacgcaagaaccagtcagaaataatcgcaagctaggccccatacttac

SEQ ID NO: 367346 - DNA, 122 bp, Homo sapiens
gggaagagagaaaagccaataaacagcatgttaatgagtaggtcccacctggggctcagtcgcactggtgtccctctgagagtatgggcaccacacactttggcattgccccagcaaggcaa

SEQ ID NO: 367347 - DNA, 122 bp, Homo sapiens
agctgcagaagtagcccgggcacagtggcccgcactgtaatccgagcgctatgggaggcccggtcaggaggatcgcttgagcctagcagtacgagaccagcctgggcaacatagtgaggccc

SEQ ID NO: 367348 - DNA, 122 bp, Homo sapiens
gataacggaaaacagccccagccccatcaggagcgagcttgggggcgggctttaatctcccggcccactgtttggctatctgcaggggctggcctccaatgattggtcgctgccgcgagggc

SEQ ID NO: 367349 - DNA, 122 bp, Homo sapiens
taggttttaacaataaagataaagttaccttctcttttttccagatttcctgtgtaacatcggaattaaactgttgcaacattcagcacatttttatccagataaatattgaaaacatattt

SEQ ID NO: 367350 - DNA, 122 bp, Homo sapiens
ataggaaaaaagagaggctgtctgaggcaatccagaggatacaacagccaagcttgtgggcgacagcagcagcaactgtcagttatgagagtgaacaggtgtccagcccaggctagccttct

SEQ ID NO: 367351 - DNA, 122 bp, Homo sapiens
ttatagcaagactgttagccctcaaacttgactctactgatctgaccatttccctctcatcgccagacaactgacgatttccctggttttagtctgcgtctctgctttaaagttattgtgat

SEQ ID NO: 367352 - DNA, 122 bp, Homo sapiens
tttgaaattgcctgcagcactaacagaaaaccagaacaccatctctttctccagctcccacgactgctccaaagtagagccaacaagtcctacaagacgcacaagcgggtggccactaggga

SEQ ID NO: 367353 - DNA, 122 bp, Homo sapiens
gacagatgaaacagaatagggcccagaaacaggcccacacatatgtggtcaactaattaacgacaaaagtgcccctgcagttaagaggagaaaggatggtctttttagttcctggtgctggg

SEQ ID NO: 367354 - DNA, 122 bp, Homo sapiens
ccggcgtccctgcagccgtggggggaaactggggacgcccggaggaagacgctgacccggcgagcacctgagcgcccacctgtggctcatcccggagaccgccccctcccccgcgacccggg

SEQ ID NO: 367355 - DNA, 122 bp, Homo sapiens
agaatcaggcagggaggttgcagtgagccgagatggcggcattacagtccagcctcctctcggcatcagagggagaccgtggagagagagggagagggagagggagaccatggggagaggga

SEQ ID NO: 367356 - DNA, 122 bp, Homo sapiens
gggaacaggaaaaggaggcctgactggcaaaaggggacttgttatgtaaatgaagcctcacggtctcacagaaaaccgtaagaagtgccaataagagacatttccatggaaatagaagaaaa

SEQ ID NO: 367357 - DNA, 122 bp, Homo sapiens
gtggcgtgtgtgtgagtgagacttttttactgcgtcccgtcccgccagccctatcggcctcgtcactggccttggtcactttgtatttctgtcttggttggaaataccatcagccttccttg

SEQ ID NO: 367358 - DNA, 122 bp, Homo sapiens
aacgatgcaggcgccctccggaagccataatacatcatctggtctttgtattatgccacacgataattaatcacaattaatatcattttgcctatggaagttgctggaaacaaggaccttca

SEQ ID NO: 367359 - DNA, 122 bp, Homo sapiens
tgaagcacaactaacagaaaataatatcgtgaaagaggtgagggactgggatttgtggggcgaggagggacctgtactagccatggttctgatcacatatgtcccatccctccatcaggaac

SEQ ID NO: 367360 - DNA, 122 bp, Homo sapiens
ggggggctggcggggagggaggggggtggctgtgaggggagggtagagaggggttgagttcgtagactcccacacacttcgcgctcgggtccctgcctctcagcagcgccgccgcctcccag

SEQ ID NO: 367361 - DNA, 122 bp, Homo sapiens
cgcctgcccgtgaacatttgtgtctttgcagaggtgcactgtcaaagtatggactgctctcgagatttcagtgtggggagggaagctgggagcccttcctcctgtccaggtaaaggcgcatc

SEQ ID NO: 367362 - DNA, 122 bp, Homo sapiens
gagaggctgtgggtccccgcaggccaggaaggctggaggcagaggagggcgcgactcccgcgtgttatcaaaggaagtcataaaggattgttgggggacgcaccgttttctcagcccaagct

SEQ ID NO: 367363 - DNA, 122 bp, Homo sapiens
ccacagcgtcctggcacccgggaggccctgtcactgctcacactggagcgtcctggcacccgggaggccctgccactgtgcacaccggacactgcgctggacattctctgtgctcagcctcg

SEQ ID NO: 367364 - DNA, 122 bp, Homo sapiens
cttttcaactcggtctttacttagtcttgtggtggctctcagttttctttggcagcagcacggcctggatgttgggcaggacgccaccctgtgcgatggtgactttgcccagaagcttgttg

SEQ ID NO: 367365 - DNA, 122 bp, Homo sapiens
ccccgccacggccggggacgctgcctcgatgcgcggggctccctccgccatggccggggacgctgccttgatgcgtggggcttgggttcttcaggtctcttgatgtttttcctcttagaacc

SEQ ID NO: 367366 - DNA, 122 bp, Homo sapiens
ttaccacaataaaataaaataaaattattttaaaaaccccaaaccaaaaaatccataattcggaggaattctggccctttaaaagccagaggctggttaagagagaaaggcgggtcctggag

SEQ ID NO: 367367 - DNA, 122 bp, Homo sapiens
ctggaaaatcaatattacaacttcacacttaaggtattttgcagcaacgtaaactgccgccgctgctgatggaagcccgttcctagcccattgtagcggaggcgccaagccatgacacgggc

SEQ ID NO: 367368 - DNA, 122 bp, Homo sapiens
tccagtctgggcgacacagtgagactccatttccaaaaaaaaaaaaaaaatgataataaacggataagtggatttctacttacagagactatctactgttacttagactatccaaaataatt

SEQ ID NO: 367369 - DNA, 122 bp, Homo sapiens
tgcagaacaaaccgccgcacggaattaggggccgccgtccgcgcctgccaggcttggaagcggactcgcccccagggccaccgccctaggaaacctcccgtcggaagcctcccaagcaagcc

SEQ ID NO: 367370 - DNA, 122 bp, Homo sapiens
gtctttctgggactccttgcgcagctgtttgcctgccgcgttggagttggtctgggccgccgcctgagctgcgctcttggccccagggcccccaacgccacccctgccggcttcttttttct

SEQ ID NO: 367371 - DNA, 122 bp, Homo sapiens
ggtggcaggagcggctgggggagcagcaatggctcggtgggtctcccgtgccccgcgtcccggaagcagccgactgagctgcccccactgtccggcagctgggctgacctcatgggatccgc

SEQ ID NO: 367372 - DNA, 122 bp, Homo sapiens
cattgcatgcattcccacgcgctcgccagaaaacgcactcacacatccccacccccaccccgagctgtcacacccacaaatcacccagagtcagatactcatgcgcccacatcacaccgggg

SEQ ID NO: 367373 - DNA, 122 bp, Homo sapiens
tggcgtcacacaggggcgggagccatgcgttgtgctgtgatgtgacagccaggtgacagccgagggaccagacgctttcagctccatgacaatcttacggcgccaccgccacctgtggggtg

SEQ ID NO: 367374 - DNA, 122 bp, Homo sapiens
cttcctttaactgtctgcagtgcatggaccgggagcatgcttaggcatgaagggcatcagcggagagtcagagaaagctgaatgaatctgagcattagatcatgaatgtgtcagtgttgatt

SEQ ID NO: 367375 - DNA, 122 bp, Homo sapiens
cccttgttcctctttgcctttattgatcatgccaaactccccccatggctggactgttggcgcctgccattagtggtcaggggcaggaaggaggggcagagagcatggcacggatcttggat

SEQ ID NO: 367376 - DNA, 122 bp, Homo sapiens
tgatgatgtacttcaagtggaaggggtcagcactgttcatgtcctgcagcatcttgaagccggtggctaaggttggcaagaaggcatgtgtaagcaggctgtgggtagctcacattgtggca

SEQ ID NO: 367377 - DNA, 122 bp, Homo sapiens
ggcgggggccggagcgatgaatgggcacggccgggccaatccaagcgcagcatttgcagccgcgagagagggagccaatcggatccccggggcggtggcggtggcgggggcggggacggaac

SEQ ID NO: 367378 - DNA, 122 bp, Homo sapiens
gatagtgatgcgcgggccgctgcggagacccggagcccgccgcggatcacgggaatttcgcgcctattttttgttggctgggtgttctcgccagtgattgggtcccggcaaggcgtgccggt

SEQ ID NO: 367379 - DNA, 122 bp, Homo sapiens
gcgacctccaccgcagattctcatctcctcgctaccgtaagagagatgtaaagaatcagacgggttacgcgctcaggcaccctcatgaagcagaggacctgggcttaaaactcattcagtat

SEQ ID NO: 367380 - DNA, 122 bp, Homo sapiens
tccccttggtgctccttcagcattcgtgctgtctgcttctcactgggtcctggtgggggtcgggatcccttctcctggggtgattgatggcctgagcttggggtactacctggggtagtaga

SEQ ID NO: 367381 - DNA, 122 bp, Homo sapiens
cccaactagtgcaggggagactgcaaaggtcttaaatgaccttaaatgctaattggaaatcgacctcctcttacagaaagtaattggcctcggatactgcaaaagaggtgtcgattttcaaa

SEQ ID NO: 367382 - DNA, 122 bp, Homo sapiens
cagcagcgcagccgcccagacgcgaggggacgacacaggtgagaggccgctggggcagctcgcttctcccgcctcccgactgccccctaccccgcccgcccgctcacttcctcgacgcccgg

SEQ ID NO: 367383 - DNA, 122 bp, Homo sapiens
ccacagactctggagtgggacttatgaagccaaacccgccttccggttcgctgctcagcccggcggcttccacatctgaactgcttccgcgccctgcatcccaacactgggagcctcccggc

SEQ ID NO: 367384 - DNA, 122 bp, Homo sapiens
ccgccccgtccgcgcacccggagggccccggcggcgccgccttcggagtattgtttccttcgcccttgtttttggagggggagcgaagactgagtttgagacttgtttcctttcatttcctt

SEQ ID NO: 367385 - DNA, 122 bp, Homo sapiens
aaagttttgttttggttcaaggaaaggcgccctgttgaccaaaggcttctcagtctcctccgggtggccagcggccaagtttcctccagcccagcgagtccagactatagtccgttcgagat

SEQ ID NO: 367386 - DNA, 122 bp, Homo sapiens
gcacgatcgcaatatggatgaaccacagcctttgttcccgtctgcacaaggcttctcccccgtctttgtgtctccggagccttgcacgtggtaggtgctcggcattcgttgactggatcaag

SEQ ID NO: 367387 - DNA, 122 bp, Homo sapiens
gtgaatcctatgaggtgggaggcagcgcaggggccagtgcaacacagaacacacacggcccgtccccgaggacgaggaaagaggtagcgtagggccagtgcaacacagaacacgcacggccc

SEQ ID NO: 367388 - DNA, 122 bp, Homo sapiens
tacctgggctccgcataatcaatcttttcttgtcagtggtacatgagccaccattgaaagcgaggcagcctccgctcctcccgcggtggccggggccgcaggggcgcctgggctcaggcttg

SEQ ID NO: 367389 - DNA, 122 bp, Homo sapiens
agctactggcgaagctagagcgggggctgagggccggggccgtgggctccagccgaaaatcggggggcaacgactgaggtagaggcaaggcccgggtgggcggcggccccgcgggaaaagag

SEQ ID NO: 367390 - DNA, 122 bp, Homo sapiens
aggagagcctgtgctgggtgccaagatggagacagcggctaccttgctacggcgggacatcgtatttgcggccagcctctacacccagtgaatgccccatgtaaaaacatgatgataaaaca

SEQ ID NO: 367391 - DNA, 122 bp, Homo sapiens
ttcccagcgcctgccgcccccagccctggcatggccccgccgccgcctgggccctccccccgcattagctcttaagctgtgcaaatagacatcggagggagccctgtttaaagtatttagac

SEQ ID NO: 367392 - DNA, 122 bp, Homo sapiens
tagtatggtgtttctaatggaaagctccttcacatctcatgtcactgagaccctgtattgcggggagacagggagggtgaaggtcatcaccatctgaacctcacagaggaagacattcctgt

SEQ ID NO: 367393 - DNA, 122 bp, Homo sapiens
ttggtcaactgctagtctagatgtcactgtgaaggtattcttggatgtaattcacatttccgatcaactgactttaggaagattaccctccataatgtgggtgggctttatccaatcagtta

SEQ ID NO: 367394 - DNA, 122 bp, Homo sapiens
gaactccggtattcggcactatccgtaacgcacaaaaaatgcacatgtgtgctgcatacacggtctttcctgtgcagcacttcccgtatgcattgcacacaagtcatccagcataacacttc

SEQ ID NO: 367395 - DNA, 122 bp, Homo sapiens
ctagactcccagaggcgaggacgagaagcttttcaatgcaaaagcctctttctaaaacaccgtgttttaggcagcataatgcaaacaaacttttccaaaattacttccactgcgcatttgat

SEQ ID NO: 367396 - DNA, 122 bp, Homo sapiens
gtggacaccagacacctaagcaagtttcttggaagggaggctttggcaaccctcgcaattcgcattcacaggagacatgccctattttccacaacaggcagcctcgccaccagccccaggag

SEQ ID NO: 367397 - DNA, 122 bp, Homo sapiens
tcctgccaacaaacagcaaggaaactggaacctgagtcctaaaactgcaaggaaccgaatcgtgccaacaaccacaagaagcttggagaatgatccccaacctcagatgagattgcaggcct

SEQ ID NO: 367398 - DNA, 122 bp, Homo sapiens
cggtgaggaccctgcacccagagtcgggggtccaggctgttgctggaacaggaggcagctcggtgtccacggttccgcagggggccgctgtctgcttggatctttcatcaggtcccaggcag

SEQ ID NO: 367399 - DNA, 122 bp, Homo sapiens
ctggaagcgtctcctgtggcagggcgggcagagggagaagggtgcgcctgcagatttcttcgccccactggtgttctccccacctacatggctgaggaggtgtgcgctctcgttcggtttag

SEQ ID NO: 367400 - DNA, 122 bp, Homo sapiens
gtaagactatcatccactttccactgtgctatttatttctgtttatgtgtgtgtgagcagcgatgctacaaccagcagtgaagatggtcaatatctctggatattattatgccctatttcca

SEQ ID NO: 367401 - DNA, 122 bp, Homo sapiens
actcctggccaatcagtgtcctaccaccatcctactcctggccaatcagtgtcctaccaccgtcctactcctggccaatcagtgcagttttgggtccagcagacgttgcctcctaaatcatt

SEQ ID NO: 367402 - DNA, 122 bp, Homo sapiens
gtcaccctctccccttcgggatactaggaacaatatcacagaagaggtgtacactccctgcgatattgggagtaatagcatacgcttcttccgtgaatattaggagcaatatcaccgggtgg

SEQ ID NO: 367403 - DNA, 122 bp, Homo sapiens
cccatgggtcagagccccctgcagctgctgaaggggacagcgggagcggctgtcacctggcgggggctgggaggctgggggtccccgagctcttccccgacctgctctggatgctggagccc

SEQ ID NO: 367404 - DNA, 122 bp, Homo sapiens
agtagcctagagggcgaagcgcacccctcttcccagcagccttgtcagcctccctcattgcgactgcttaaatgctgagcgttctctgggggccgcccacacacgcacagcctaaatgcatg

SEQ ID NO: 367405 - DNA, 122 bp, Homo sapiens
ccggttctgtatctccgtggccgagacgctttctgctcgaggcccaggggagtccgggagcgaaagcctcttttgatgaatgagcatttgggcagtatctgcccatcagcccccactgccga

SEQ ID NO: 367406 - DNA, 122 bp, Homo sapiens
gaagtttctgtgttctctcagctgtgttaaacgctggcagaagttgcctctcggaccctccgcagggctatgacaggctggagaagtgggggctcgggagggagctcaaacagcctgcagac

SEQ ID NO: 367407 - DNA, 122 bp, Homo sapiens
tatgcaatgacatgacagccattccgtggccagggacaccactgcccaagctggagaccacgaggattcagggactgaagccagcatgggaattcctggtttgagatcagagtcctgagtac

SEQ ID NO: 367408 - DNA, 122 bp, Homo sapiens
gcgacgggggaggggaggaggcaggggagcggggaagccaggaggaagcggagggaaaaccgctgcttagcccccgaaaaccagtgtgacccacggtggggaggccatggcgcagcaaggag

SEQ ID NO: 367409 - DNA, 122 bp, Homo sapiens
acttgtgcgtgctgtgtgcgggacaggaggtgggagcacacgaaagcccaatttccttcccgggagggggcatgtgcatggtagcttcagcccacgcaagcctgggttcctgcatggctctc

SEQ ID NO: 367410 - DNA, 122 bp, Homo sapiens
ccagggaaggcgggaggaggtgcccagaaactgctcgtcctgccagtcgcacctggccgacgactctctggccactggtttggtctgggggatacgatttcccattcaactgaattagaccc

SEQ ID NO: 367411 - DNA, 122 bp, Homo sapiens
cccagattctcgtcctgcagcaaatactcgtggccgctagtcaggtcggagcctcctgggcgtttggactatggggcccttcccttctctctgataaggcccccgttttctgttcagcctgg

SEQ ID NO: 367412 - DNA, 122 bp, Homo sapiens
cgctggcttcgagcactatgacctcttcttcatagatggcagcacacccagtgacaacatcgtgcgaaggttcctgaacatctgtgagaacaccgaaggggccatcgccgttcactgcaaag

SEQ ID NO: 367413 - DNA, 122 bp, Homo sapiens
aatcaacaagttacagtcatgttggggacttcttctctctccaagcttaaatttctattacgtaagccttacttttaaccaagaaagttagtgacatggtatcactgtctgggatgctcacc

SEQ ID NO: 367414 - DNA, 122 bp, Homo sapiens
agaggccaggcctgcaagggcacgggctgcggaggcagcatccatcctccaggaggtgcacgaccggccaccctgcgagcgagctctctctggtctctgtccctctccgcctgctacaggat

SEQ ID NO: 367415 - DNA, 122 bp, Homo sapiens
aaagacgagtacggtggccaggttggtccttccatagccggaagtggccttcctgagaggcgtggctgcggcactcttgccggatagggtggcccggcggggctaggaaagcgtgaaatctc

SEQ ID NO: 367416 - DNA, 122 bp, Homo sapiens
cgttcccgcccgcgtcctatttttgccgggcgcgagaggtggggccgctattggccgacacgcgcgttgggggcggggcctatgtgtaaaaccggaaagggagggagaagggtgggatccgc

SEQ ID NO: 367417 - DNA, 122 bp, Homo sapiens
ctagagggcgctctggggcggggtagccctgtgtggggagggtagccccctgtgaccccccgaagagccccaattttaccttcccctccgcctgtggtacgcgcatgggccgggtgcccagg

SEQ ID NO: 367418 - DNA, 122 bp, Homo sapiens
ataccaagtagatagaaagaaattaacttccctatgcaattcaattcaggttcacccggccggactttaagagggtaagtcaagccctcccaaggggttttgaaaaagccgaactaccaggt

SEQ ID NO: 367419 - DNA, 122 bp, Homo sapiens
tggcccgaggctcagcccggatctgcagttgccaggtcagtgcggggcccggagtggattcgcggggcggggcggggcactgcccgcgcccggagctcagcagcagctgcccaggggcgggg

SEQ ID NO: 367420 - DNA, 122 bp, Homo sapiens
tgctggcgctgctgttggcgacactgctggcggcgatgttggcgctgctgactcaggtggcgctggtggtgcaggtggcggaggcggctcgggccccgagcgtctcggccaagccggggccg

SEQ ID NO: 367421 - DNA, 122 bp, Homo sapiens
tgttcttgctgagtctgaagaatcccttcaagagccagtaatgagaggagctgaagcttgcgttgattacagactgtatcagaatgtcaacgacaagggcagcacgtgggaagcggcgcatt

SEQ ID NO: 367422 - DNA, 122 bp, Homo sapiens
actgttcgtacaaaattaaaagacgtaaatcccgcagtctatcttgtttatgaatatatacgtatataatagttgaaaagggtcggtggaaatgctgaacaccaaattcccagggatgctcc

SEQ ID NO: 367423 - DNA, 122 bp, Homo sapiens
agcactcttgtattccctggggctgccctccccaggaggggcttcctggcgaagcagaaccgcgctgcctcagaaactgccgggctgggtgtttctgcgggagtgttgggagtgttggctgc

SEQ ID NO: 367424 - DNA, 122 bp, Homo sapiens
gcctcccaccagtcagactccagctcaaatgctaccttcacaaacagcccttaactgacccgctggagaaagccattctcctacttactctctccatagccttgtttcatttcctcattgga

SEQ ID NO: 367425 - DNA, 122 bp, Homo sapiens
ccaaaagaatacacaaaagacaattccaaatgctactgtgaggccccacctaccttccagcggccatatctgtcagccaggaggccaaagaggatactgaaaaccatgtagccaaaaaacac

SEQ ID NO: 367426 - DNA, 122 bp, Homo sapiens
gaggaggtttctggagacagaggactatacaaccagcactcaccatctcagcaatgttgacgtcaatagcatctatcatctgctgggtgcttttgggttgggaagtggttcctgttggtgtt

SEQ ID NO: 367427 - DNA, 122 bp, Homo sapiens
ggggggctccctgcccccagtcaagcggcggcggatgaactggatcgacgccccggatgacgtgttctacatggccacagaggagaccaggtggggccttcccagggcaggcgggagggctc

SEQ ID NO: 367428 - DNA, 122 bp, Homo sapiens
acctccagcaggtgcagctgttgggggcggcccccggccccactaggccatctccacccccgcgccccatcgaccctcccaggtctcctgataggaaagaagcccctatggcccccacacag

SEQ ID NO: 367429 - DNA, 122 bp, Homo sapiens
aggggtggggggtggaggcggctcctgcgatcgaaggggacttgagactcaccggccgcacgccatgagggccctgtgggtgctgggcctctgctgcgtcctgctgaccttcggtgagtgat

SEQ ID NO: 367430 - DNA, 122 bp, Homo sapiens
gccatatcaagataaagaagtttcactaccacagaaaatgttgtgctgctttattccagtcgataaccactggtcaaatttgtctggaatcatatagattttatgcttttgtgtctgaccta

SEQ ID NO: 367431 - DNA, 122 bp, Homo sapiens
ggctgggctggggcctcctggactacgtttgccgactttggggtaccaggaggggaaagacggtgttttaagtccaacacttgcttgtcacagggagaacggtgttacaggttctaaggctg

SEQ ID NO: 367432 - DNA, 122 bp, Homo sapiens
aaaagagaaggggaggctgctctgcccccaccccgcttctccgtcagtgggctgcagggccgggggtaaggggtctaactcctactgcttcccaaccctccgcgtcagacagcacccccttc

SEQ ID NO: 367433 - DNA, 122 bp, Homo sapiens
ccgggccctatgtgtcatgcagtacccatttgcagaaacatcttctgtcaccaagagtttcggagacagtttttgtagagttccaggcctcagtttctctctctgttgcagggaaataatca

SEQ ID NO: 367434 - DNA, 122 bp, Homo sapiens
ttctcagtgtgtatgatggactgagggtcaggtgagccactggtgagcctgtatagctcccgctgctgggctgcagagttgggcgtaggggactgctccagccacaaggcccgtggtggcat

SEQ ID NO: 367435 - DNA, 122 bp, Homo sapiens
ccagaagcggctcccaactcttcgccgggagcacgttggaggctggatttcggagagactcgggattggggtctattgccggcccctcctggatccggcttgattttcatattttaagaaga

SEQ ID NO: 367436 - DNA, 122 bp, Homo sapiens
catggttacagggcaggtatgtaacagcatgagcacggaaaccctggtatgtaatgccaacgcacacaaggacggcagcataggcaatctccatacctatgtgtggacaatgtaaaaatacc

SEQ ID NO: 367437 - DNA, 122 bp, Homo sapiens
tggggacgggggaagagacagagagagagaaagtgctgagattataagcatgagccaccacgcccagccagcatggctgatctctcattgaagtcctttctagtgtgtacacgttggagccc

SEQ ID NO: 367438 - DNA, 122 bp, Homo sapiens
gcccctcgcgccccgccgcagccccggccaaccgagcgccatgaaccagatagagcccggcgtgcagtacaactacgtgtacgacgaggatgagtacatgatccaggaggaggagtgggacc

SEQ ID NO: 367439 - DNA, 122 bp, Homo sapiens
acattcttattgatttgttttctctgggcaggaactcttgttatctgtatcctcagagcccggcacagtctgtggcacacagtaggcagtccacaaatattcattaaaagaatagataacaa

SEQ ID NO: 367440 - DNA, 122 bp, Homo sapiens
tcctgagagaaaaaactgtctctgtgtcagcattaaaccaccatagtgctggcatttctgcggaaattgcccttccccttcccacctctgcgcgggacaacttccatactcacaattgtctt

SEQ ID NO: 367441 - DNA, 122 bp, Homo sapiens
accacagcgacatctggcgttctggaggcttttctgccccagaagggctttgcttcaaaccgacttaaccatttatttccacagagatgctctacaatcacttgtgagttcataaacttctt

SEQ ID NO: 367442 - DNA, 122 bp, Homo sapiens
cagcctgctccttcccaaatcaagcatgcagtgtcgcccaggtaaggagagagcctccagcgccacctgctggagatgcagtagcagcgccctccaggggaccctgcatccccagagtgtct

SEQ ID NO: 367443 - DNA, 122 bp, Homo sapiens
ggaggacggggccgggcaggggccggggccgccagcccccgctgccgcagacggagggtgcggagcgccagagccgcgactaccaagacatctgaaacgctcacccgggggcgggggcggag

SEQ ID NO: 367444 - DNA, 122 bp, Homo sapiens
aaagaggaggaggagcgcattgctaacgtgcgcagcccttacccaagccaggctcccgcgcgtgcatccaccgcgatctcaggccccggcgtttgtggcagctctcggttaccatgggaacc

SEQ ID NO: 367445 - DNA, 122 bp, Homo sapiens
gatgtctggggcctctaggactttttcctttaagttccccttgtcccctgcctagcttcacgatccctccacagtccaaggcagaggaccacaaagagatgtcacagagagcacctgggttg

SEQ ID NO: 367446 - DNA, 122 bp, Homo sapiens
agttgttcaggggccaagagctcccggaccgggaaatagctgggaaataactcgtggtgtcgcccggcggccggccaaagtttagggggagaaaggagggggagagagacttgagctgggca

SEQ ID NO: 367447 - DNA, 122 bp, Homo sapiens
ctcggactatttgttcagccaatcagagcagccagccaccgggaagtgcctcggagactccgccccagaccagcgctgccgcttgccagccccccagttgaccccatagagcatgcgccgta

SEQ ID NO: 367448 - DNA, 122 bp, Homo sapiens
taagcttttttttttctgctagttttcattatcggttagttgatttccttcctttgaggtcgagagtttaaagcagtccattgaagttccctattttgcagtgtggttttaatcaaagtatt

SEQ ID NO: 367449 - DNA, 122 bp, Homo sapiens
gcctatgaccgctatgtggctatttgtaaccctctgctgtacatggtggtggtgtctcggcggctctgcctcctgctggtctccctcacatacctctatggcttttctacagctattgtggt

SEQ ID NO: 367450 - DNA, 122 bp, Homo sapiens
gggctaaaggagtgccctgaacaccagccgggcactgggcctgctatccgtggctatccacgggctaaaggagtggcctgaccaccaaagacaggagaaagtgcctgacccaagaataacca

SEQ ID NO: 367451 - DNA, 122 bp, Homo sapiens
cccagcactggagaggggccggcgggcgcaccccctgcatcccctgggccggcctcttctcgccagtcccaccgacatcgtcctgactccctgcacgacgctgctcagaggacatacgggcc

SEQ ID NO: 367452 - DNA, 122 bp, Homo sapiens
cggcactggagtccaaggcgtgcgtgtcacattttattccccggcagccgctcgggtgcgcgcgctacgcgctcccacactcacgctggcgcccgctagagctgggaccctggccggggtcc

SEQ ID NO: 367453 - DNA, 122 bp, Homo sapiens
tctgagcacccaggctaagctggcctgtgccttcaggaaacggaccatcggctcccaccccgctttaccccacccacgatggagcacgaagcaactctgacccgcaggagtgtgcgtgcagg

SEQ ID NO: 367454 - DNA, 122 bp, Homo sapiens
agaaaaaggccttcttccccccctccacctcccctgcgtggtccttgggtgctctgtgaacggtgaccccaccctcacagggaccctgactcctgaggggtcaccactcatatcctgtgaga

SEQ ID NO: 367455 - DNA, 122 bp, Homo sapiens
tgtttctataatatgcgtggagtcgccatgaacttcctcccgtgttgcttctataataagcgtggggtcgccatgaacttcctcccgtattgcttccataatatgcgtggggtcgccatgaa

SEQ ID NO: 367456 - DNA, 122 bp, Homo sapiens
cgcggggcagcgcagcgggaggaagcgagaggtgctgccctccccccggagttggaagcgcgttacccgggtccaaaatgcccaagaagaagccgacgcccatccagctgaacccggccccc

SEQ ID NO: 367457 - DNA, 122 bp, Homo sapiens
ccgacaggtgggaccggggcctaaggtgtggggggctgcttgcggggagaggccactgtccggtgtgtccctgactcctcgcttcctgacagactcctgagtggccaggagcaggcctggcg

SEQ ID NO: 367458 - DNA, 122 bp, Homo sapiens
catgcacacacccacacgcccacactcagggtctgccccctcggcctgcgtgaacctccgcggagcctgcctggatctcccaaagtatccagtcctggcaccaagcaagtctggaaaagtgc

SEQ ID NO: 367459 - DNA, 122 bp, Homo sapiens
ttagcttccataacatattgataatcatcagatgaggtagaagaggttggatcagactaacgagtcaaggaaaaggagagggacaaaattgaaaaatcagaactaaagacactgacaccaaa

SEQ ID NO: 367460 - DNA, 122 bp, Homo sapiens
gtcgtgctcggggcttcactcccgcgcgtgaggcgagcgggcaagttggctgagggcgtgcggcagaggctgcttccctcggcgacgcgacccctcagcaactcaagctatgaactgaagct

SEQ ID NO: 367461 - DNA, 122 bp, Homo sapiens
ccggtgcatctggcccgtgtcctgctcagagtagatggctacggtgcggatgcccagctccgtgcaggcccggaacacacggatggcaatctcacctagagggcaaagaaacaagaagttag

SEQ ID NO: 367462 - DNA, 122 bp, Homo sapiens
ccaccactaacaactaacccagccctgcctgcctgacccctcaccagcctgcctctgtcccgaaggcctactactggagggagagcagcttgctgaagaacctgtgggtgtctcagaagaga

SEQ ID NO: 367463 - DNA, 122 bp, Homo sapiens
ggaacaaacagaggattaaaagagaatgtcagtttgttgtcctcagtgactatgaacaaacgcatttgtttctttggggatgatgcactggacaggacagaagggagagacgtaaaatggaa

SEQ ID NO: 367464 - DNA, 122 bp, Homo sapiens
gccaagaagagtggaactcattttggctatttgcagacatggacatggttgcagggttcacgatcctttcagtaggatgttgtgagaatttcttatttaaagtttaaaaaggatttttattc

SEQ ID NO: 367465 - DNA, 122 bp, Homo sapiens
gtcccgctcgaagctaggtgaggaactgaactgccccgggctgagtgctgtggaaggggccgaggaggcgctgccgccggagcaagtgggcgttcatctaacctggggtctggctcgggggc

SEQ ID NO: 367466 - DNA, 122 bp, Homo sapiens
ttattgaatgaataaatcagtagctaaatgatataaaggctttcaatgtatcaacccagtcgctcattcttaatctctttgctccttttcttcacccttagtttccttctccctcttaatga

SEQ ID NO: 367467 - DNA, 122 bp, Homo sapiens
gttgctagaacaggaacccaggctgtctgctttagggcctgtgctcctaaccacactacccgtaaccacaacactgcactgagcacctctcagtgcttggtgacactggctccaagatgtgg

SEQ ID NO: 367468 - DNA, 122 bp, Homo sapiens
cctcattcccttatgattccctagctgctggttccagagtcttctgggcttacagtctcccggccctcggggagttccgaccccttctttccaatcatcccctttacccgcctgccctcagc

SEQ ID NO: 367469 - DNA, 122 bp, Homo sapiens
aagatttttcaagggaaacttgtaaggaattagtgccgccttgttccccaatttgctgttcgtctgacctccagactcactggcgtcaggaattatcttgtgaccagagggaaaaaaaatta

SEQ ID NO: 367470 - DNA, 122 bp, Homo sapiens
agctccaccatgtctgctcaccctctttaactccttccacagccaccagggtcacaagaacgagagacaccatgaggaccaagaagctgctggaccccatgttgccaggcaggtgcttggct

SEQ ID NO: 367471 - DNA, 122 bp, Homo sapiens
cttctgtatcctctgacccaccctcctacgggagggaacgtctccgctggggaagacgaccgtgtgggctcatctccagccactgtggtgactattgtcgtccccttcactccggatgctct

SEQ ID NO: 367472 - DNA, 122 bp, Homo sapiens
ttcaccccttggcagcgggcggctgccttgaggggcgggctgtgcctggcgcgactctggcgccgccgcctgggggcatccggctgtgagccccgtggatggggcgcctggagaccgcgtct

SEQ ID NO: 367473 - DNA, 122 bp, Homo sapiens
ggagaattgcttgaaccctggaggcagaggttgcagtgagctgagatggcgccactgcaccgagatcacgccactgcgctccagcctgggctacaatgctaaattccatctcaaaaaaaaaa

SEQ ID NO: 367474 - DNA, 122 bp, Homo sapiens
ccagggttgctgcttatcattctacaatccacagggcagctttccaaagaatttgctggccgcaaataccaacaggtctgagattaagaaaccctgttctagatgaatatacaccaaacttt

SEQ ID NO: 367475 - DNA, 122 bp, Homo sapiens
cataagagcggagcgagacggtgagttcagggttctccttggagaggaacgaaaaagcgtcggggttttcaggtgacctgcacatgggaagaaaaaccagttagcatcctgcgtcctctact

SEQ ID NO: 367476 - DNA, 122 bp, Homo sapiens
tgccttatgactctgaccctttcatgtcatttctgtggctgtgagcgcagtggagggcagcgcccctcggccccgtttcggtcttcccctggcccctcccttccagccgctccgttctctct

SEQ ID NO: 367477 - DNA, 122 bp, Homo sapiens
tttgcctggaaaattaagtatatgttagttttgaacgtttgaactgaacaattctcttttcggctaggctttattgatttgcaatgtgctgtgtaattaagaggcctctctacaaagtactg

SEQ ID NO: 367478 - DNA, 122 bp, Homo sapiens
ggctctcagggggatgaggtggcctcaggtgagagatcctgattggccaccccagagccccggtggaaggtgcagcagagagaaggtcctttggatccgataagcagaaggattttaaacac

SEQ ID NO: 367479 - DNA, 122 bp, Homo sapiens
gggaaaatttcagcagctggggccatgtaatttaaaacctctgaaaagtgtgctgcggtccgtgcacagcattagtataacgtgagggctgaatgcagcccattctctggagaacttcctca

SEQ ID NO: 367480 - DNA, 122 bp, Homo sapiens
agcgtctcgcttccacttctccagggggcgctgcaaagattttggtcgccaaagatatcacggtgcgcgcgtctggaagcatttccgctctggagcattttcgttccgccgggtgccagcgt

SEQ ID NO: 367481 - DNA, 122 bp, Homo sapiens
atgcagggggaggtctggtctaccattcataatgctgtgcaattgttacagccatgtccccgttcctcagtttccctagctgtctagaaagtcaaacagactacaaatgccttccagccacg

SEQ ID NO: 367482 - DNA, 122 bp, Homo sapiens
caacgggccgccgccggccgccgcagccgcagcggtggccgggccgtgcgcgccggtgcacgtcgctcattagtaagcaggcacattcctgcctccagcgctcccgcgcggccccctccccc

SEQ ID NO: 367483 - DNA, 122 bp, Homo sapiens
tggccctacatctctgagaagtgacggcacactgggttggcataagatatcctaaaatcacgctggaaccttgggcaaggaagaatgtgagcaagagtagagagagtgcctggatttcatgt

SEQ ID NO: 367484 - DNA, 122 bp, Homo sapiens
cgttgcccctccctcatggggagccccttcctcctggaaagacagcaggtactgtagcctcgcctgctggccaggggcgccggctcagaggacctgccctgacctgcacgtgctgaccagac

SEQ ID NO: 367485 - DNA, 122 bp, Homo sapiens
cagtgatgctgttccccgggggaacggagcccagccctgaagctcagccgcaggaacaaacgccctggctcctgcgtgccatttctgccctctgctgctgcagtggcctgaggtcttcggat

SEQ ID NO: 367486 - DNA, 122 bp, Homo sapiens
ggccgagcgcattctgggctggcctagggcgcgcttcttgggccgcctccctgcgcgtcccggccccgtcacttcagaaggcgctcgacccccagtctgcaccacccagtccactcccacat

SEQ ID NO: 367487 - DNA, 122 bp, Homo sapiens
gtggaaaagggaggatgggaagggccccgatccccagcccctggctcaggtaggtgccatcgcctcccagggccgttgtccagattcaccgcggtgcatgtgaaagcccgggcaaacagatg

SEQ ID NO: 367488 - DNA, 122 bp, Homo sapiens
ccagcaccaattcctcctaccacccaagcccaggtcctgaggatgcagcttcatacaccacggcttgtgtgaagactctggggacttttgacatagttgttcggtggcaggcaggctaagca

SEQ ID NO: 367489 - DNA, 122 bp, Homo sapiens
gacgggttaattatccgcaccttagaactccgtgggcctttggtgcagaatgggttaagccggatgatcttggagctgggggtggggataggggataggggataggggttgaggaaagagag

SEQ ID NO: 367490 - DNA, 122 bp, Homo sapiens
gggaagggaaggtcaggacccaagttccataaggtgccccaagatctctcattatccccacgctacctccttgcccctctcccccactgccattcttttctgttctcttctccttgtatgtt

SEQ ID NO: 367491 - DNA, 122 bp, Homo sapiens
ggcagctggagtaacaaaagtaatgaggcgaggtcggaacaggatctgctggctccggctcggtttcctcgcacaggtctctccagctggatcctcgacgctagggaggaaggggcgcggga

SEQ ID NO: 367492 - DNA, 122 bp, Homo sapiens
cagaaaactggggctcaaggttgttaaatcattaagtcgaagtcccagaggtgggaagggcgggatccaaacacaagtgtgtgactccagcgctggggtaggagcaccttgaaggtgaagga

SEQ ID NO: 367493 - DNA, 122 bp, Homo sapiens
cgcggctgctgcggctggtgcgcgtagcacggaagctggaccgctactctgagtatggggcggctgtgctcttcttgctcatgtgcaccttcgcgctcatagcgcactggctggcctgcatc

SEQ ID NO: 367494 - DNA, 122 bp, Homo sapiens
catgggaaacgaggcctcatcagatctcacctgtgggcgtgtgtctgaaacgaagccagtcgatgtgtggcgccgccactggggaggaaccgtcttggccttgcttcgtcctgacctcagca

SEQ ID NO: 367495 - DNA, 122 bp, Homo sapiens
cagggaagaagagggggagcaatgaaaatacaccacgcttgtggcaaattcaccgtccatcgctgggtccgtttgctctcggatccacttcctcatagctgttgggtgcctattgtcctaga

SEQ ID NO: 367496 - DNA, 122 bp, Homo sapiens
ccccctcccgcgggacccgttctctcggtgcgcagatcacggggccgcacctacgcgttccgggatctctgtgatcctgacaacagccccgtgaggctgatcctgcaagagttacatgtctg

SEQ ID NO: 367497 - DNA, 122 bp, Homo sapiens
cacgtgggtgacacgtgaccaacacttaaccaatgcctgacatgtgacaaacacgtgatacgtgactgacacttgactgacacgtgattaacatgattgaaacgtgaccaatacgtttgaca

SEQ ID NO: 367498 - DNA, 122 bp, Homo sapiens
ctttcttagcaaccatcgcccgctcccgcccccgctccctcggccgcggccgcgcacgcgcgcccctcccggcgcccggccccgcccaccccgtcacccgtaacaaccacaagtgccgtcgc

SEQ ID NO: 367499 - DNA, 122 bp, Homo sapiens
ctccagaagcagtggcctgcaggagcagtattagaagaaacttcattgtaaacttctaaacggatcaattcagtttactgtgttcctttctagcctaagttcctgaactgttcctctttata

SEQ ID NO: 367500 - DNA, 122 bp, Homo sapiens
aagtcacagagctaagtaagcagtggagctgggatgtgtccatcccctgcagagtctgagcgcccacctgttatgcagaagtagtagtctggctgagatccctgggctttcttcacctcagt

SEQ ID NO: 367501 - DNA, 122 bp, Homo sapiens
tgcgtggactggctgctaatggagagctccctggggttgtcctggctctggggagagagacggagcctttagtacagctatctgctggctctaaaccttctacgcctttgggccgagcactg

SEQ ID NO: 367502 - DNA, 122 bp, Homo sapiens
gacatttatgaaaagcattgtataatacccacttccccatttgtgagctctgtgagctttcggggtgtggtgactgtttctgccccatttaccgttgatctgccagtacctagcacagtgtc

SEQ ID NO: 367503 - DNA, 122 bp, Homo sapiens
ggctttgaaaacgattcacattctgccctttaacttcaatgccttccctccggactgcgccggagcagacgattcaatggactccttttgtatccagtttattgctcagaatccctagggtc

SEQ ID NO: 367504 - DNA, 122 bp, Homo sapiens
ctgagtgtgatgattcctagtccacagctccagtccggacccctcccccgggcactgcaccgccctgcctccgcagagcctccacccgcatcctacaggtctcccagagccgcgtcatccac

SEQ ID NO: 367505 - DNA, 122 bp, Homo sapiens
gttgccttaggttgcacagcagatgacgcctctcaagatggaccctaggttgtctgactccgtctcacagctttgccccatttatcatgaagatgaacgctggtaacactgctacctacgag

SEQ ID NO: 367506 - DNA, 122 bp, Homo sapiens
tcttcaaattgtctttgatgcttttagtacaccttgcacttttttcttgctatctagacacgaagtactgagaaacagaaactggtataaataggtcttcagtgatgtggtattaaggtgtt

SEQ ID NO: 367507 - DNA, 122 bp, Homo sapiens
ttctctggtttgccttccatctcctcaccctgaggtgctcaagaaacgtatgtagggtcccggtccgctcaaagcgcacaaacctccgaggcagcagcctctaaatagagaggccagggagt

SEQ ID NO: 367508 - DNA, 122 bp, Homo sapiens
ggaaccgtgcgaaccaggagggacccggcggaggggctgccaggagggtcccctccacagcgcatatggtgtgcagctgctggaacgggaacctcagcacaccagggtagccgcggatgaaa

SEQ ID NO: 367509 - DNA, 122 bp, Homo sapiens
ggggcgacttctccctttcggccctggggttgaagatcctgtgtggggcagctgcgccttcgggacagccccagccgcggagcgcccagaccagggcagccggagtcgggtcatacgccgca

SEQ ID NO: 367510 - DNA, 122 bp, Homo sapiens
agaaagggtatggtcctcaggcctaaaaacagaaaccaatttgtttagagaatgcagctccggtggcagccggctgctctgagccggcgtcccagcaacctgggagagttcacgacccccat

SEQ ID NO: 367511 - DNA, 122 bp, Homo sapiens
gctgaaggaggaggcagatgggcaggccgagggcaaggagcctccacacatggtggagggcgggggaggctctgcctggtgccagcgctgggcaggaggtgctgcatgttaagatcacagct

SEQ ID NO: 367512 - DNA, 122 bp, Homo sapiens
gctcggggagtggccttcggcggagacgagcctccgattggcgcggaggtgacaaaggggcgtggcagataaggccccgcccctcccaccccccaccacccccccggagtacttaagggagt

SEQ ID NO: 367513 - DNA, 122 bp, Homo sapiens
ggtagtgggcaagagactaatctcattccaggaaaacgggcccctagattttgtgttctccgtgtttcttttccagggaggcattttgatgacccccactggcccttccaggagcctctgtc

SEQ ID NO: 367514 - DNA, 122 bp, Homo sapiens
gatgtgttagaagtgtggcttgtacagactacaatgtttgatctagaacttatgctggttcgtggtctttcctgggtttgatactcagtgactagtcactgggctcttcagggcatttcgta

SEQ ID NO: 367515 - DNA, 122 bp, Homo sapiens
cgccgccgccgctccacagacgtcacatgatgtttggtcacgtgggctccattcatgaagcggcgacgcggccggccggcgcttaaaggggaaggcgcggcggcgggagggcaaactgcgca

SEQ ID NO: 367516 - DNA, 122 bp, Homo sapiens
cgctggaggatgcggtgaccattccctgtggacacaccttctgccggctctgcctccccgcgctctcccagatgggggcccaatcctcgggcaagatcctgctctgcccgctctgccaagag

SEQ ID NO: 367517 - DNA, 122 bp, Homo sapiens
gggaacgcttcctccaccagccgaaggcggggcctctgagggcactcccgccacacagcgcgaattgagcctcggggcttcctgggaattgtagttttagtcacggacacatcttttttatt

SEQ ID NO: 367518 - DNA, 122 bp, Homo sapiens
tttccgactcgcgcgctgaacccaccactacccctcggcccacgcccctggcagttttcacggcataagcccggcaagagcatcattttggttgtcctggggggttttgggggttagctcct

SEQ ID NO: 367519 - DNA, 122 bp, Homo sapiens
ctggggacagagctgaagcccaggttcagatggcggccatggaaggcggagagccgtcagcgaggcagcgccggggctgcgggagcttgcgggagggaagcgcccgtgagccgcagagacgc

SEQ ID NO: 367520 - DNA, 122 bp, Homo sapiens
actcacccaggagctggaatggggggcagtgactgccgttggcgtctcagggacgctggccggggccctttcagagtccctctcccggtagattttgtagagccgggggcctaggacgcagc

SEQ ID NO: 367521 - DNA, 122 bp, Homo sapiens
gcgccgcggccgccagcgctacgtggagaaggatggccggtgcaacgtgcagcagggcaacgtgcgcgagacataccgctacctgacggacctgttcaccacgctggtggacctgcagtggc

SEQ ID NO: 367522 - DNA, 122 bp, Homo sapiens
gggtggggggaggaccctgaaaataatgttcctttgtgggggtggggtcggggtgggggtcgggggaaacaaaaccaaatcaactgtccttagcccaggccacggtgccagcaaagaagctg

SEQ ID NO: 367523 - DNA, 122 bp, Homo sapiens
gagccactgtgcccggccaagatctaactcacgcttacttttcattaaaatatttcttgtcgcttttagctattgtcagaatccaataaacagcttacgcattcattttggtaaagcaaatt

SEQ ID NO: 367524 - DNA, 122 bp, Homo sapiens
gcaaaaagctggatggagtgatcctgggtccctgacaaggggcccccacagaggcgcacgcgagggggtcctcaccgtgatgttgcagtggatgcggacaggatccccaggcaccgaccccc

SEQ ID NO: 367525 - DNA, 122 bp, Homo sapiens
gaggccttctcaaacatcacatctaaagaaaccccacactgggccgggcgcaatggctcacgcctataatcccagcactttgggaggccaaggcgggtggatcatgaggtcgggagttcaag

SEQ ID NO: 367526 - DNA, 122 bp, Homo sapiens
gggtaagagaggagtgaaatgttgtttgggattttgcctattaacaattctcctgccattcgctcttgagagcagacctcagagctaacatcaacactgctctccagctctgcccccccgca

SEQ ID NO: 367527 - DNA, 122 bp, Homo sapiens
tcaagatgagatttgggtggggacacagccaaaccatacatatatacatatatacacacacgcacacacacacagagtctatatatacatacacacacacacataaggactgtgtagatatg

SEQ ID NO: 367528 - DNA, 122 bp, Homo sapiens
tggggtgaactagaatccgtggaagtgctcagtctctcccgtgtttgactgactcccggccgcatacccagtccctgacacacgggggcgcacaacaaatatttcccgaaagatccaggagc

SEQ ID NO: 367529 - DNA, 122 bp, Homo sapiens
ccagaacccgctcttcacagaggctgagcaccaggacatgcacagctacatcgcggccttcggggccgtcacgggcctctgcacgctcttcaccctggtcagccgcgggagggcaggcccgg

SEQ ID NO: 367530 - DNA, 122 bp, Homo sapiens
tcggcgggggagtgagtggggccgaccggccttgcggccctgccacctttcggggcgactcggtttctccactgacacccccgggcgcgaggtctggtccatcccggagtgggagctaggca

SEQ ID NO: 367531 - DNA, 122 bp, Homo sapiens
gtcaccgcctcatacgccggaagtggaactgcgcgcgccagggaggttgtcgggaggggccggcgaataaaacgagcggcgaaagaaccgaaaaaaggctcgacgctaccgtgtatgaggaa

SEQ ID NO: 367532 - DNA, 122 bp, Homo sapiens
tcatccggcagccgcacctgctcagctgtgctcatgaagctgcccaggctggggggaggccggtcagcacctttcaggtctcagcctccgcctcccagcccgggcagctggacccccactca

SEQ ID NO: 367533 - DNA, 122 bp, Homo sapiens
gtccagtcagctgtggcaggggcttgagagcaggctgtctgaggaggggtctgggtgaggcggggctgctctgcacgagggccctcttggtcctgagtccccaggtctctccatccaatgtg

SEQ ID NO: 367534 - DNA, 122 bp, Homo sapiens
ggcgtggcgcggccctagcgcattgtaagcagttgggggtcatttcctcgaggccctactcgctagccagcgcccccggggccagccctggctgctgctgggagccgggtcgtaaggggcag

SEQ ID NO: 367535 - DNA, 122 bp, Homo sapiens
ccagaaaacagggcagagctcatcggtggcctcatctgccagccccagcagtaaggccaccggctcattcttcatggggcagcagcatctggctttctggctccagacaccgcctgctgggc

SEQ ID NO: 367536 - DNA, 122 bp, Homo sapiens
gcagcggctccagccagggtcgtcggggcggggtgggtgctcaggggcggcctttgtgttcggattagaagctggtgattgtcacattaagacctctaagctgctgcaatctgagaagatgt

SEQ ID NO: 367537 - DNA, 122 bp, Homo sapiens
ctgagcaccaactctgagtcagatgttataatctgaaaaatctctcatagtccctgccaacgtggacatcccatgcagagataaccataaacctcaacaaatgtaggctatttaagctgaag

SEQ ID NO: 367538 - DNA, 122 bp, Homo sapiens
gcggcggtgtggccggcggcgcgtaatgtatgctgcagcggctcggagccccacgtaggccggcgctgctgcccccgtctgctgacctctgcatgatcccggactctatgaattattgatga

SEQ ID NO: 367539 - DNA, 122 bp, Homo sapiens
ttctgaactttcatgacctcctagcatccctctcattaatggtgcttcatggacatttcacgcagtgtaattacgcattataaagagtttggaaaggagcaacacaaaatcttgtataacct

SEQ ID NO: 367540 - DNA, 122 bp, Homo sapiens
tagtgttactatcatcacacattacttttatttcatcgaatatttcaccttccggtcctgcgtgggccgagaggattgccgtacgcatgtctgtacgtatgcatgtaactcacagccccttc

SEQ ID NO: 367541 - DNA, 122 bp, Homo sapiens
ggcacgcactctagtgcctcctcactgggcatcaggcccgccccactccactcaccccaacgtgctccagaggagaaatcactgtcaggctccagccatgtgtttctgaatatgctgtgtct

SEQ ID NO: 367542 - DNA, 122 bp, Homo sapiens
cggaaactcttggtgcctggacctggagcctggacagggaccgggcggggcgagaccggccgtcgggggcgcggcccgtctgggggcggggcctgtcctctctcgccccgccccgtcggacg

SEQ ID NO: 367543 - DNA, 122 bp, Homo sapiens
gccaccccaccagccacacctggcagccgaggctggcccccacagcccgtccccaccctgcggcttgagggggtcgagtccagtgagaaactcaacagcagcttcccatccatccactgcgg

SEQ ID NO: 367544 - DNA, 122 bp, Homo sapiens
tgagtctctaagaagcctggtagtctgaaccgcaggaacttcagaacacatgtcctccaccgcctcccgttcagaggcccagagtgggagaggtgtatgtcccatgtcctaggccaccaggg

SEQ ID NO: 367545 - DNA, 122 bp, Homo sapiens
acaaaacgccacttgcaacactggaagaagcggaaaaccccacccactctggaacaacagcgatcagccccgaatatagggtccccttgccgccccgtagcctcctagtcccgcccctctcc

SEQ ID NO: 367546 - DNA, 122 bp, Homo sapiens
ttgcaccccgccacgtccacacaaataacaataacattaattcagggcactggtgcggggcgtccacattagacagcttggaatgtgctctggctttggagctgggagctaatgaacccgaa

SEQ ID NO: 367547 - DNA, 122 bp, Homo sapiens
actgggatgtgggcaggtgcagggtggctgcgggcagctgggccggtgcgggtggcttcccgtgcggcagcctggcgacgctctgggacctagggggtggggggtttgggatgaatctgagg

SEQ ID NO: 367548 - DNA, 122 bp, Homo sapiens
aaacagtgggatcatctgtgaaacagtggaatcaccccaagaacaaactgtcagacagaccgtcctgtcgtggcatgacttgaacataaccgtcccacgtggggacgcattccgcaccggtt

SEQ ID NO: 367549 - DNA, 122 bp, Homo sapiens
cagggttactcatactatttgtattcttaactgcacattccaggatctatctcctacctacgtaatcaaattcttggagtttcaactgtttatatgcatttaagcattctcttcagaaaaaa

SEQ ID NO: 367550 - DNA, 122 bp, Homo sapiens
ttccatagtggatatagcctggatacctgattttcttggccctttgcatacaggaactatcgatattaagactactttccagagaagcctaaagagcttcatatctccacagttcacatgga

SEQ ID NO: 367551 - DNA, 122 bp, Homo sapiens
cctccttggccgggcgctgggcgggaggcgggagcgagcgtgctagccaagcatgtgggccgcgctgaggcttgacgaggccggcgtcccttttcctgaggcacgtgcgccgccgccgccat

SEQ ID NO: 367552 - DNA, 122 bp, Homo sapiens
tcaagccgcccgagttctctggggcccctctgggccaggctgcgtccacttgggagaggccgaggacctggcgccaagaggcggcggtgtctgcgctaggggccgagcgggtgcgctgtgtc

SEQ ID NO: 367553 - DNA, 122 bp, Homo sapiens
ctccgaagatgagtagaggaagcaaaagagcccaagggcaccctgctgcgccaccacacacgtcacccacacacacagagaagatgtgctcatctagtgtacgtgaaacacctgagtcccct

SEQ ID NO: 367554 - DNA, 122 bp, Homo sapiens
cgcggctgctcatacctttaatcccagcactttcggaggttgaggcgggaagatctgttgcgtccagctcaaggccagcctggacaacatagaccacccctgtctctacaaaaaaataaaaa

SEQ ID NO: 367555 - DNA, 122 bp, Homo sapiens
agtggcacttgcacgccgcggaccgcagggatccccaagccctgcacccagattcttccccgccacggagagacaatcatgacaattatcattacaatgattatgaaaactggcatgaaaac

SEQ ID NO: 367556 - DNA, 122 bp, Homo sapiens
gctctcagggcaggactgggtgggcaagcgtggactgcatctgtcctgcatggggtcctgcgtctggctcgcccggtgccgtgctgtggggcccacgccaacggctgacctcatggtcctcc

SEQ ID NO: 367557 - DNA, 122 bp, Homo sapiens
tccggtcaccagcctcgaaggccctcggggactcaggccgggggccggtccaggaaggagcgagtcccaccagtcgcagggcgctccgatccgcagcggcacctccacccacggctccggga

SEQ ID NO: 367558 - DNA, 122 bp, Homo sapiens
cctgaaacctatgccaagggccacagggccttagacagagtcagcaggctccatcttgagcgagtgctgtaggcgtgtgtcgggaacagaaggattccttggcgacttctgccacaccctgg

SEQ ID NO: 367559 - DNA, 122 bp, Homo sapiens
gcgcgggccccgagtccttgctcgcctccggccccgccccgccgcccagcgctgacagcgcgcatccccgcccggccccgccattggtggaccgcagttgctagggcagctgcgcgctttca

SEQ ID NO: 367560 - DNA, 122 bp, Homo sapiens
agcggccggagcaccagagctctgggtggaagcggtagggctcggggggtgtgaagggcacgaaaaggtggcacagcagtggcctgtccacctgccagttctcgtacatgctgtccacgcca

SEQ ID NO: 367561 - DNA, 122 bp, Homo sapiens
gggcagctccaggctaaggagtcaacacgcagctcgagcccttggcccttgaacatggagcgctttacagacctggagctgagtcaaggcacgtttcccaagattttggggctcccctctca

SEQ ID NO: 367562 - DNA, 122 bp, Homo sapiens
acaactcaagccaaggagagagaggatgccaggtggcgctgttacgtccttctcgtgccacgaaccccagccacccttagactgagctggcgtttacacagcgacgggctcttaaaatcaaa

SEQ ID NO: 367563 - DNA, 122 bp, Homo sapiens
atacctacagtatatgcaggctgcaccaaaccaggaaaaaaaaacagtggtcaaactcagcgtgataagaaggcaggcccaggggacccctagaaattgaaagggaagaatagtggaggcca

SEQ ID NO: 367564 - DNA, 122 bp, Homo sapiens
agaaagagagagagaaagacagcgcagctccagcctgcctgtatccagggttgaggtgggcgtgagagacacacgcaggcagggctgcagttccgggcaggccttgggggctcaagatgcgg

SEQ ID NO: 367565 - DNA, 122 bp, Homo sapiens
gtgcactcaccgctgtgaaggcaaatgcggtactgtgagtgctgaatgcaccgccatggtcgcgggaaagcccaggcacagacactagctcaaaagccaagggtaggcctggggttcacatg

SEQ ID NO: 367566 - DNA, 122 bp, Homo sapiens
ggattgggcgatgaacccggagatctgaaactgccctcacacatgtgcttctcttggccccgcagcctggccggggtctccaggagcgtgacactggtgatcgcatacatcatgaccgtcac

SEQ ID NO: 367567 - DNA, 122 bp, Homo sapiens
ctgtgtgcatccagtcccgcttcatcctctgtaggagcctcagggcagtcatggacacctcgtggttcttctccccgaattccagcaggtgcgcaaagcgtggaatatacaggcacgggtct

SEQ ID NO: 367568 - DNA, 122 bp, Homo sapiens
ccagcccctgtccccggccgccgccctgggcagcggcagcgccgccgcggtgcccaagatcgagagccccgacagcagcagcagcagcctgtccagcgggagcagccccccgggcagcctgc

SEQ ID NO: 367569 - DNA, 122 bp, Homo sapiens
ctgcctttctcccattctccgtagttatcagcgtttcgctgtctagttttctctgtctctcgggctcgctctctctctctttctctctctctgtcctgcccgggctctctcgcggccgcccc

SEQ ID NO: 367570 - DNA, 122 bp, Homo sapiens
ctatgctaaccccacagaagcaacgttagacacaaagctggtgacagcggtggtagcgatcgcggctgttggcatcttacccctttctctgctgttccctgtgaggtgcaagcgagcgtttg

SEQ ID NO: 367571 - DNA, 122 bp, Homo sapiens
tatgtcatttaatagatcatgctttgggtgtcaagtctaagaattctttggctagtcctacgtcccaaagaatatgttctccagttttgttttgtttttttaagttttatagttttactttc

SEQ ID NO: 367572 - DNA, 122 bp, Homo sapiens
tgagagcagtccggaaagcaggcaagacgagctagaccccaggccgggaaaccacaccggcgggagaccccgcactcggactcccgctcctctgagcagaagagcagtagggcaggcccaca

SEQ ID NO: 367573 - DNA, 122 bp, Homo sapiens
ttaaattaacaaaatgcagggcttgtaaatgaatgtggtcatgaggttggaacggaatcccgattcaacacacctggggctcagctctcaaagggcattgtaggggttggccaatctggcgg

SEQ ID NO: 367574 - DNA, 122 bp, Homo sapiens
ccgccaggccgggaagcctcggctcgccgcccacccgccagctcgccaggtgccgccccacggcccccaacccggggtcccgaggctcccagcaaagcccgccctggacctctgccctgccg

SEQ ID NO: 367575 - DNA, 122 bp, Homo sapiens
tcagaatccacgtcagcattcaggtgctctctggctacaagtttccttagctcttgcaggcgctgctcattgaagatttctcttaacacaggtaatgctaccagtctcatctggcacctttt

SEQ ID NO: 367576 - DNA, 122 bp, Homo sapiens
cggaaagggaactccctgaccccttgcgcttcccaagtgaggcaatgcctcgccctgcttcggctggcacagggtgcgcgcacccacttacctgcgcccactgtctggcattccctagtgag

SEQ ID NO: 367577 - DNA, 122 bp, Homo sapiens
ggctcttcactctcccggccgcatcactcggcacctaattccgccaggctcccagaggggcggttgcagctacagcctagcacgccgcgtagccaataagaagccagaattccccctattct

SEQ ID NO: 367578 - DNA, 122 bp, Homo sapiens
tcacgccagcgacagtggaaagccctcccctcgcagcgcgctccgccactagccgcaccccgccgagctctgacctccgaagagggtccctgtggcgatcccgccccttcgtctgatgtttg

SEQ ID NO: 367579 - DNA, 122 bp, Homo sapiens
tgcgctggccgctcttggcgtacggtctctgtttacctttccacctccctctctcaggcgcggggctaattaatggcgtggtattatttggctaggcaagattattattttttccactttta

SEQ ID NO: 367580 - DNA, 122 bp, Homo sapiens
atgaagttgagcgggtctgctgcgcttccgggaagtggtcatgtgatacccaggcgcctgcgctctctttctagggactttcctgagtgggagggatttcgccggaacaaaaatgcctcagt

SEQ ID NO: 367581 - DNA, 122 bp, Homo sapiens
ggttttgcagaatccccaaggcccgaatctacgagagcctgagctcggagccacgcacagcgggtacctgtgcaataaccacgcagcactcgctctccatgaaccgcttcctcatggtgtgc

SEQ ID NO: 367582 - DNA, 122 bp, Homo sapiens
cgcgcggaaccctcaccaggcagatgctggcgcatccaccaggcgccggcgccgccacgccggtagccccgaccgcaggagctctcaacgcgaggttcttcttagttgctctccctcaggca

SEQ ID NO: 367583 - DNA, 122 bp, Homo sapiens
ttctctgtccataagaaaacagaccaagctcctttgacaagctacagatgctcagctccccgtggaaggggttgaggggccaagaagggtgggtcctggggccctgacaaggcttcctggct

SEQ ID NO: 367584 - DNA, 122 bp, Homo sapiens
gctagaaagtgggagactttcatttaaaatggaaattggggcgaggggttggcggctgggcgaagggagcattcaaaagcggagaatgtcactttacccgagaaattcactacgatgggcca

SEQ ID NO: 367585 - DNA, 122 bp, Homo sapiens
gacccccaacagaggttgcgagcagagccagggatcacagagttttatctgccctcggtacgctgatttccaaaacccagcctcatattctatactccaaagcgcactgccaggtgggccaa

SEQ ID NO: 367586 - DNA, 122 bp, Homo sapiens
ctttctgcctggaggcctgcttccctcctgggaaatcgtggagactgggcatggagcccgcggttctttctgcctcccctccagcccccactcccacccctacacacacacataccacattc

SEQ ID NO: 367587 - DNA, 122 bp, Homo sapiens
cctggggtgtaagtactgcttgtgggagagccccacaggaaatccagagtattgcgcatgcgtgctgtccagaaggcgcttgaactcggcggcttccgtagcgggagggcgaaagatggcgg

SEQ ID NO: 367588 - DNA, 122 bp, Homo sapiens
tgtggaacgcccagcccgcctgcgccccctttatacgcgcgggccccacccccgtgcgcgcgggcccggccgcgattagcataatgtagtattttcagtttcaacaacaccacggcgattgg

SEQ ID NO: 367589 - DNA, 122 bp, Homo sapiens
aaatactatcaaactgctctacaaatttttgtctggcttcctgggaatataatttactttcgaaaacgaagtaggtctatttgacaagcttcctctaaaagcacagactcagctgttactca

SEQ ID NO: 367590 - DNA, 122 bp, Homo sapiens
ccagtgcatctggcagctggtaccaccaggactgctcactctgtgcgaccttggacaagtcgctcgccctcttcgaccacagaccttctcctttgggaagtgggggaggccagacaaggctg

SEQ ID NO: 367591 - DNA, 122 bp, Homo sapiens
atgctcagggctcctcacgctcgccccagtccctggcagaagggaagctgccctaagtctcgctggctgcggcagtcctcctggctgctgagtgactcatcagcctcagcagagcctactgt

SEQ ID NO: 367592 - DNA, 122 bp, Homo sapiens
gtcccctccactgcaccacgagccgctgaagagcaagtgcatgctcagccccgggcatggcgtctgtgcatctgggagctctgcacacggtgctgaatgaatgagcacagaaccaggtggag

SEQ ID NO: 367593 - DNA, 122 bp, Homo sapiens
ggcatgcaagcaaggtgcccgcggagccgggctcggcagggtcgaaggatccgagtggagcggagacgggtgctcctgcctcccttcctggaaaggaacctggtgtttgaaaatgggtaccc

SEQ ID NO: 367594 - DNA, 122 bp, Homo sapiens
gatgaggctgcctgtgagcgtgtccgaggcggtcctgtgatgttaaaggtacacgtggtccggacaaaaggcgccaaagtcggaacgatttccatttagcggacggagtcttgggacatctt

SEQ ID NO: 367595 - DNA, 122 bp, Homo sapiens
atatcagagatcttccatcagagggatatgaatatgtctcttaaaaccttcggccgggcgcggtggctcatgcctgtaatcccagtactttgggagaccgagatgggcggatcacgaggtca

SEQ ID NO: 367596 - DNA, 122 bp, Homo sapiens
ctcattgctcaaggcccccgtacaaaatggcggcgaggcctgaggaaccaaccatagagacgcccgccggccgcggacagagcgtaggcctctgagcgctggccccgccccgcgccggcctg

SEQ ID NO: 367597 - DNA, 122 bp, Homo sapiens
ggtacgttggccgatgacagccgagcggaacggtggcctagtgccgggacagggaccgagcgtgccccataggcggccgggctggaggacgcggcggcagagcagacgagccctggcgcgca

SEQ ID NO: 367598 - DNA, 122 bp, Homo sapiens
ccgccccatatccatgattgacgctggcgaggacgaggagtccgccccttgccccgcctccgtcattcccagcccaaaaaacaaaggactgcattacccagtggcctcctcggtctcgacac

SEQ ID NO: 367599 - DNA, 122 bp, Homo sapiens
tgctgtgggcagatctgggctttcttcgtggacatcttctacccacagtcctccaggtgccggtgtagggcatctgttcccttggcacacccgactgccgtggggtgtcccagcagaaggtc

SEQ ID NO: 367600 - DNA, 122 bp, Homo sapiens
ctggactcgaggctgccagcccggtgccttgcccacagaaagcgctggcactgccctgagcgctccagctgcctgggggcctctgctcatcagtagggcccatccttggcccgttcccacac

SEQ ID NO: 367601 - DNA, 122 bp, Homo sapiens
ccctaatccagtgtcctctctgaaagagttattctagagtcgaatcgctaggttagaaagcgtggagagaagagctttggaattagaacatgaagcttcccgcactgctggcagcatttacg

SEQ ID NO: 367602 - DNA, 122 bp, Homo sapiens
aaggctccggttcctgccctcacagggtcccagaagcaagggcagtgaggacctggcccacgtccctggcacgggctgtctgattctccttcgctgtggcgggaagatggccggatttgaag

SEQ ID NO: 367603 - DNA, 122 bp, Homo sapiens
caaggaactaaggtctccgtggacagtgtggtccgtggaagaaaccaagttctgagaaagcgatgccggccaggaggggagaggggagtgggaagcgagtgtgccccgaaacccgtgataag

SEQ ID NO: 367604 - DNA, 122 bp, Homo sapiens
ggcaggtcagcgctcagctcgggcgagctcagtccaagatgctgggaggtaaccagggggcgataccgagtaggcaggtgggtttcagaagatggtgtgggggtctagggggaactctcagg

SEQ ID NO: 367605 - DNA, 122 bp, Homo sapiens
actcttaagattctggcagggaagaatggagttgccgtcagttgagatgaggaaggctgccggtagagcgggtagaggtgaaaagatcagctgtttcagttttggacatgttgagtttgaga

SEQ ID NO: 367606 - DNA, 122 bp, Homo sapiens
ccctacatttgtgataaagccaagtgctgagatggctccgggtgatgctgggtacctgtgcgatgtcagtctccctcgtgggtacagggcttggtacgctgtctgatatctcagtgacattg

SEQ ID NO: 367607 - DNA, 122 bp, Homo sapiens
cgttctgtggaacggaacttccttatcctatcgtttccacacggaaagattttaattcaccggaatcgactggcgttaaagggcacagtgaaaaggaagttggtatcaacgtgatctcgact

SEQ ID NO: 367608 - DNA, 122 bp, Homo sapiens
taaatttcagggcagagcagctacaccttctgtcaattatattctctgtagttgggagtccgtgaggcacattctcatggctgccaaaggaggggaaaacaaacaatattctacaatacata

SEQ ID NO: 367609 - DNA, 122 bp, Homo sapiens
tagcaatcagggagactccgtgggcgtaggaccctgcgagccaggtgccggatataatctcgtggtgcgctgttttttaagccggtcggaaaagcgcagtattcgggtgggagtgacccgat

SEQ ID NO: 367610 - DNA, 122 bp, Homo sapiens
gcatctcccccatcttccagccaggcagccagttttctgcaacgtggggcccacggtcagcgtcccccacagccctgccagcccttctccccgggggtccgccctgcacccccttcccagga

SEQ ID NO: 367611 - DNA, 122 bp, Homo sapiens
ggttaccttatgttaaaaaaccaagtctaggttttctccctagcagtcctttagaagggacgggtggtcctcggctctattctctctcactatccaacctcaacctcagtagggtcttcagg

SEQ ID NO: 367612 - DNA, 122 bp, Homo sapiens
acagaggcaggcaggcctccccgagctgtggtggggtccacccagttcgagcttcctagccgctttgtttacctactcaagcctcggaaatggcaggcgcccctcccccagcctcgctgctg

SEQ ID NO: 367613 - DNA, 122 bp, Homo sapiens
aggtatttgttccactcactgtggaataagcacctattgtgtgacagccaccgagaggcacggcacctggcacacacgaggcgtattagcgccctcggctgccccaccacagactgcatggc

SEQ ID NO: 367614 - DNA, 122 bp, Homo sapiens
agacaagaaaaaaaccctgtgttctgccaatgcttctccgtccaaaaacttcacagaaaccgccatagataagagccatcattcaaagcaaaattcttccattttagggtgcaatgctgtgt

SEQ ID NO: 367615 - DNA, 122 bp, Homo sapiens
ttcccaggccctggaggactggtccaccttaactgggcagcccttggggcaggcgctggccggtgcctcagcccaggcctctgtgctctgcatgcactgccagcctgccatcaggcctctat

SEQ ID NO: 367616 - DNA, 122 bp, Homo sapiens
gaagaaactgcgagaatcttgagagagagagcttggaggagagggctgcatttccttacccggaaactgcaagagaatcttcaccacaggagagagctagaaggagagggccgtgtttcctt

SEQ ID NO: 367617 - DNA, 122 bp, Homo sapiens
tgtttgccagagcaggcttagatctgggcactgtgaagtaagcgacccaccctgggggggcgccactgtaattgtcctcggaccactgggcgtgccacctctgtgggacatcccttaggtga

SEQ ID NO: 367618 - DNA, 122 bp, Homo sapiens
tggataggaagatcaatagcaaggaatggcaaagggagaaagagaaggggctatgtaggacgtaagtgggtgttagggcctggttcatcaattccatcactcactcactttcctttcctctc

SEQ ID NO: 367619 - DNA, 122 bp, Homo sapiens
agttcctcgtcacgtgacgtgacaggcttggtcacgtgacataccagctccttccattcccgtgtgcggggggagggggaccaacaaaccggaggccctcgctcttccaatactcacgccct

SEQ ID NO: 367620 - DNA, 122 bp, Homo sapiens
gaaaaaaacttcccaaaccctgggcaactgaggttctgatgtggagctctggatggaaagcgtgctgaagtcttgttaaactagcaagcttttgtttggaggtccaccgccgaaggcgcaca

SEQ ID NO: 367621 - DNA, 122 bp, Homo sapiens
acagatgacagcaattagtgctaaggcggtcgttagcaaaggctgctcattggaatcacccgtgaaatttttcaacctgacctactaccacagaccaattaaaccaaaatctctaggagtgg

SEQ ID NO: 367622 - DNA, 122 bp, Homo sapiens
cccaccgcctccctaccacctccctccaggggcagctttttgaaacacaccctgaagtaccggccgtcagcctctccgaagtcatcactgtcactatcagtaaagtccccactcggtttcca

SEQ ID NO: 367623 - DNA, 122 bp, Homo sapiens
aactgaaaactgacactggcaccttccctcgccgatgccagcgcagaagttgacaaaccccgccctggagagctgaactaccctgcccacgccagatggggcaccggtgtgcgtgtccatcg

SEQ ID NO: 367624 - DNA, 122 bp, Homo sapiens
cccatcccctcaactgtggcccggtgcacgccttctatagacagttacttcaaaacagcccgaaaagatgaactaatttctccaggcttccggatgtcgggagacaatacagcctcaccctg

SEQ ID NO: 367625 - DNA, 122 bp, Homo sapiens
agggcgcctcccagcccgtctccccgctccagtttagaacctaattcccaattcccggaccgggcccagccctgggctcttactgtccgcttttgctgggacctgttccacaaatgggcgtc

SEQ ID NO: 367626 - DNA, 122 bp, Homo sapiens
tgcgggacagggaactttacatcagagctcttgacaggcagttagaggctgctcactttgcgccgccgcctggctctttggggcgcaaggtacagcttcctgcccacccctgaaagagagat

SEQ ID NO: 367627 - DNA, 122 bp, Homo sapiens
gagagagagagagagccacggagaggaaaagcagatgcaggggtggggagcgcagctcggcggaggctgcgtgtgccccgtggcttttaccaggcctgctctgcctggctcgatgtctgctt

SEQ ID NO: 367628 - DNA, 122 bp, Homo sapiens
aatggcgaagcttccctcaacctaacgtttcagggttaggactcctagagcccattaggacgagactctaggtggcccatgctgcatgattttgacagcagggaagcactttgggatgagca

SEQ ID NO: 367629 - DNA, 122 bp, Homo sapiens
ggattatctccccctgtggtaatggagatgcctagaacttcagagcactggggcagtccacgaatttctccaagaagtcagaataagcagcttcaggaggtgccatctgcacacctctctgt

SEQ ID NO: 367630 - DNA, 122 bp, Homo sapiens
ataggagattgggttgggaagtttttcccttgagtctctgctattttaatgtttaatttgcgctgtcgaggcgagtgtgtgtgttgcatctggacgccagggtttgcccaatctttgagtgt

SEQ ID NO: 367631 - DNA, 122 bp, Homo sapiens
tgcctggatgatacggtgggctggtgtgtgacaaaaagcatttgctaggcacaattaagccggctgaaaactgcagaaggggcaactaacctaattaacaaagcagcattagtctgagggct

SEQ ID NO: 367632 - DNA, 122 bp, Homo sapiens
gcgggccgcggccactgcaggtgccccctcctcccacatcagctctgccggggtagggagcggtaacctggcggctcccacggactctccctggcccgacacctctcccgggcttgcctccc

SEQ ID NO: 367633 - DNA, 122 bp, Homo sapiens
actcagtcacatccagaaaaaggcagactaagaatcagaagccatgtgattgatgtctgacgtgagtctgtctcaggtagattccgggtgtcagtgtggtttataatccttgaatattgttt

SEQ ID NO: 367634 - DNA, 122 bp, Homo sapiens
tacaatgggaaaacagaaatgactattagcgacaatattttgtgctagcgaagattgcatcgacacacagtgcaaaatgggagaggggagaggaagtaagaagacaacttggggtatttaaa

SEQ ID NO: 367635 - DNA, 122 bp, Homo sapiens
ggtgtgtgggcaggtaggggcatgagctgaagtagagacaggtctgtggcctacaacagacgcagataacggaattggctagaggaaaagctttaaaactttggtctttgcttctttcactg

SEQ ID NO: 367636 - DNA, 122 bp, Homo sapiens
ccccacggccgaaagggaagggggctggcgaaggggaagacaggcttccgggcgccgcggcgccgagccctcggctgccccaactcctcaggctgcccggcaagttgcgccgggtccccggg

SEQ ID NO: 367637 - DNA, 122 bp, Homo sapiens
ttaattagacacaagctttttatttggttgggggaactaatggagaaagggagacactagcggcatttgtaacttgttaagactaattgaaaatcttaggaccaaagctttctgtgaagaga

SEQ ID NO: 367638 - DNA, 122 bp, Homo sapiens
tccctcctcacctacctgctcctctcagctcctgaagtggccgcaactcagactcaggttcgggcaccctctcggctgcctaggctcctgctctggagcggtacttttttttttttcctgag

SEQ ID NO: 367639 - DNA, 122 bp, Homo sapiens
agttccttaaactccaagctttagtttcagttttataatgtgggtagtccatttttacctcggcctcattgaaagaattaattagacactcagagtgcaggcttgatacaggcctcttccag

SEQ ID NO: 367640 - DNA, 122 bp, Homo sapiens
acgatctgcatcctggtgatagtaacctctcttttctggctgttgaagtgcattcctgtgcggatgtggaaagagagaaagcaagatacagccagggctaggacaggaatgtgagtatttcc

SEQ ID NO: 367641 - DNA, 122 bp, Homo sapiens
agtgagttgaacagctgggaaggaggaggaagatggagagattgcatctccaaccatttccgccttctttgaactccaacagcatttgtaggtggaactataccattttaacaattatagac

SEQ ID NO: 367642 - DNA, 122 bp, Homo sapiens
caggtgggagccgtggccactgacctgagcctccgcaggacccggattgccctcagggcccgcaggctcttgaagaccttgaggatccggaagaggctttggtggtagatggcgaaggagtg

SEQ ID NO: 367643 - DNA, 122 bp, Homo sapiens
ggaatgctccagctcacacttggaatgaaacttgcccccaaataaactcccatgacctcccgggtctgatcagaccagttcccctgctgctctgcaagcactctgggtttccttggctccac

SEQ ID NO: 367644 - DNA, 122 bp, Homo sapiens
actgtggcatacagcttccagggttccagagtctggataaatatgtggggagaacaggcacgtcaggggaaaatgctctgtgccccaggagccaaggatctgggggctgaggattgggcagc

SEQ ID NO: 367645 - DNA, 122 bp, Homo sapiens
gaggtttgtgtccgggctcacactgacctcccctcactgtgtgtctagtacagtaatacacggccgtgtcctcggttttcaggctgttcatttgcagatacgccgtgttctttgaatcatct

SEQ ID NO: 367646 - DNA, 122 bp, Homo sapiens
gactatctttggcgtttaggagggccctccagggaccaggcgtaggggcatcagtcaccccgccctcacaccccaacctgcagccacacttggttcaatcccactgtctagcccgtctgact

SEQ ID NO: 367647 - DNA, 122 bp, Homo sapiens
agccgggtgactgcagagcgggccgggtcacctgtcgtggcagctgcatggaaatcccggcgcttctgctgtctggagtctgtgctgtttcctctggcaaatcacggagattctgttccgag

SEQ ID NO: 367648 - DNA, 122 bp, Homo sapiens
gatcttctcatacatcttctcaaagcgggattccagcatgacattgcactcgccttcactcgtctcccacacgtcctgcaggttattgatgcctgaggagtagcaaggcaggtctccagcag

SEQ ID NO: 367649 - DNA, 122 bp, Homo sapiens
gggaccagggctcccccgagccacccagctcagggatgttcctgcgcagggcgaggtagacggttccatttggagctgggaggacagagtgccgtgggctccagatgtcatctctctgcagc

SEQ ID NO: 367650 - DNA, 122 bp, Homo sapiens
ctgcggtgctagcctctcactcgttcctgagcagccccaccttggaagaacggatgaaatcgttcagtccattcacctgcaccgttgcctgcggtgctagcctctctctggttcctgagcag

SEQ ID NO: 367651 - DNA, 122 bp, Homo sapiens
tttataacaatacattctcaactctggctacatagtcaagttttcaaaaatcctgatggccgggccctacctaagcccaatgacatcagagtgtctgggggcatgtcccggggaatcaatct

SEQ ID NO: 367652 - DNA, 122 bp, Homo sapiens
agcagtagagggagcgcaagactttccttttccgtaaaatgaggcagagcgtggtgagcccgagggaaatcacatgatgtgtgagggacgcatcggccggtttcaacggcactgttctcgaa

SEQ ID NO: 367653 - DNA, 122 bp, Homo sapiens
gtctggaggggtgcgaaggtcgaggccagggattaaagaattcgtccagggccgcccaagcgaatatgtcaggctcagggacccagcggaatgccagcccgcacccccgcaccccctcctcc

SEQ ID NO: 367654 - DNA, 122 bp, Homo sapiens
ccactcgcccgcgctgagttaacccagaggcgggtgcgggtgtcggagcccgcgccgggacgcaccggccgcaccggccgcaccagcctccccagcaccgcggaccccagggccgccgcccg

SEQ ID NO: 367655 - DNA, 122 bp, Homo sapiens
cctgggagcaggtgtctcctcatccctcaaggttagtacatgcatatgcatccccaagatcggcctgggtaagagggtggtcagagccttgtagtcttgacacagccagcaagacatgtatg

SEQ ID NO: 367656 - DNA, 122 bp, Homo sapiens
atggagatggccaaagcctccgtggaaagcagtgtggtggctcttcatggacaggagcgtcgccctgggacccccaactccgctcccacgttcgtggacaggagcctcgccctgggaccccc

SEQ ID NO: 367657 - DNA, 122 bp, Homo sapiens
ttgttaccattggccttaggtgggtcctaagtgcttcccagctagcctggtacattctctcgtccactttttctgccactctcctgaacaactgtttcttaccttcttattcctcaaacctc

SEQ ID NO: 367658 - DNA, 122 bp, Homo sapiens
aaggggtgtggggaggtggccagcgcttgccaatcagaggaggccagggctgtcccctagcgggcggtgaccaatcgccggggccggccagagcgcgcttccttagtaggtggatggtggtc

SEQ ID NO: 367659 - DNA, 122 bp, Homo sapiens
aggcctggcctccgccgcccgggcccccgcagcctgtcgctggaccccgcgccggcccagcgcaccgccctcaggccccgagccccgccctggcctccgcctcggcctcgcctccagccccg

SEQ ID NO: 367660 - DNA, 122 bp, Homo sapiens
ccactctgggggccaggacaagaactgaccattgggattcccacactttcctgagcctcgcggggaagttagcgatgcctttttctgggtaagttcagtcttataatccctgactcctgccc

SEQ ID NO: 367661 - DNA, 122 bp, Homo sapiens
gggtggaggccccagctccgggcacaccctgtggggtctgcagaggccaaggcactagcacgtgtctctaggaacctggaggagaatgcagatgaccctgcagtgaggtgggatagaggcag

SEQ ID NO: 367662 - DNA, 122 bp, Homo sapiens
accaaagtaattttggcaatcacacgtggaagcaggagggctgtcaccagcctcagtccccgaatggctacgtggaacagaggctgcctccctacctgtgactgctatctgagagagaaatc

SEQ ID NO: 367663 - DNA, 122 bp, Homo sapiens
ctcggccacttcagaaagcgcgccgcagccgaccgcaacctacgcggcggcaggagccggcggtggtgcctacaggctttaaacctgtgcaacttcccgctggagcgtggacgcggctccca

SEQ ID NO: 367664 - DNA, 122 bp, Homo sapiens
tcccaaagtgctgggattaaaagcatgagccaccgtgtccaacttccctcctttgtctttcgttggccccttttttccttgccttgctttcccccccaccccccgcagtacctaggccttat

SEQ ID NO: 367665 - DNA, 122 bp, Homo sapiens
gtggatgaccagagccaggccctctgcaggttttcccctctgcagagttggaatcaatcacggaaggtgactggccaaaacatctcctctgcaacctgggggctgggctgctttccccagtt

SEQ ID NO: 367666 - DNA, 122 bp, Homo sapiens
gggaacggcgcgcaggaaggcaggcagaggcttgcagctagtaagtcgacaccgggaatgcggcggggagaaagggcgctgaagccgcgagcaagagcttatataggccgcccctcgcggcc

SEQ ID NO: 367667 - DNA, 122 bp, Homo sapiens
gttctttccggaattcagagagttgctgtcgccgctgggggtgggactgtctgcggtgtccgcggcgggcgtccagcctgggaggcgctggttcaacctgtggctcctcccagggtcagccg

SEQ ID NO: 367668 - DNA, 122 bp, Homo sapiens
cccagggccactgagattattcaaataagcctgtcctagacctgcctacccggccttgcccgttcctcccctctcccctcctgcccccagtccctccctttccctacttgtgaccatcccgg

SEQ ID NO: 367669 - DNA, 122 bp, Homo sapiens
atctgccacccacacgaagacaaaacacaatggttatgcttcctcctcaacttcccaccccgtctgcaaaaggggaagaaatggacgctcacccacagccagtcacaaggacggggcctgcg

SEQ ID NO: 367670 - DNA, 122 bp, Homo sapiens
cagaagtaccttgattggccacataggacccaagaatgtgatgtgcctactcttctgctccgctagctaggcagatagggtacttgattggcagcaccaccaaaatcacatggttggaatgg

SEQ ID NO: 367671 - DNA, 122 bp, Homo sapiens
gccaggggcccacgcactttcccataagacgctggcccgcagcgcgttgtcctgcagcagcgtcggccactggtttgccaggatgctcttgacgcccaccaggctcagcaggatggccgcct

SEQ ID NO: 367672 - DNA, 122 bp, Homo sapiens
acggtggctgcgcctccacgtgtgaatttgcaggagcctcagagcctgatgttacatatccgcctgctggctgtggaagtgggcgtgtctgtgcacatggctgggtgtacctgtctcagatc

SEQ ID NO: 367673 - DNA, 122 bp, Homo sapiens
tgttcatattttgaaaatgaagatgaaatttaaaaggtaaacataaaagactgaccacaccgctcactaggatggctttaataaaaacacagacaatgccaagtgccaatgaggatatggag

SEQ ID NO: 367674 - DNA, 122 bp, Homo sapiens
agcgcaggcgggattggaaattccacagggtgtaaagctcagttgcttcagtcttttctacgtttctttcattgtcgtgggggttcgagtgagttgagaagtttgaaaagttgtctcgggcg

SEQ ID NO: 367675 - DNA, 122 bp, Homo sapiens
tggcagctagagggtcaaggaaatccatggaaaagtcagatgcccctggggcagagatcccgagcccaggctgagaaaattacctttatatcttagaggcaactggagtctaagtcattgat

SEQ ID NO: 367676 - DNA, 122 bp, Homo sapiens
accaaagggcaccagaacaaagggttgcttgcagtgtagctcaccatgatgtatgcattgcggtttaggaacttgataaatttttccagacaccagaggcagcacttgaaacagcacatgat

SEQ ID NO: 367677 - DNA, 122 bp, Homo sapiens
cattctgaaatcacagcgcctactcagcagaaaatcgggctgcccactgtgattgccagtcgcagaccagggcttatagtctctcgatgcggacctgtttgaaaacatcaaaaaagtgggcg

SEQ ID NO: 367678 - DNA, 122 bp, Homo sapiens
cgtggcctcaaggagccagtcctgcccggatggggctcgccggatcggtttcggttttcacgcactcccatttctgtggccgctgtgcattcgcggtactgtgccctggccgccaccaggac

SEQ ID NO: 367679 - DNA, 122 bp, Homo sapiens
gggtatgaggtggctggagaagtgttcatggagagtgtctctctcctgcccccaaggccacggaatcttctattccttctttgtacccaaagggcaaagtggaggccagggtctctttgcta

SEQ ID NO: 367680 - DNA, 122 bp, Homo sapiens
tgcgcgcggggaggcaggcgccgggcgaggttgtctgggccctggtccgagggctgttcccgaccccgcctcggcccccaccctcagccggccgacttgcggagaggccggcgtccagtccc

SEQ ID NO: 367681 - DNA, 122 bp, Homo sapiens
ctagatcactaatattttcacttaattaaggctagtactttttttcctgagtagagattccgtttgttttcaagaactcaagaatatgctgctgctctttatgttgctctggaggcatgaat

SEQ ID NO: 367682 - DNA, 122 bp, Homo sapiens
ccagcccaaaacatattaactcagggcctgccactttgtaataactgctgatatttttttcgcacttcctatggccaagtatcatgataagcattttgcaagtattattttatttagtcctt

SEQ ID NO: 367683 - DNA, 122 bp, Homo sapiens
ctccgcctgccagctgattggcccctgggccaggggcggggcactcgcggcggaggcaagcggcggcgcgcggacggttggtccagttctccggcctggcggcaggcaagtctagctcggcg

SEQ ID NO: 367684 - DNA, 122 bp, Homo sapiens
taggggatagggctctgctccttgaccagggctcaggctggcccagaaggcttggggtcacgtctggattgtgcccccgggctgcctttgccgtgttgactgtccacagagcccaaacaccc

SEQ ID NO: 367685 - DNA, 122 bp, Homo sapiens
ggtgtctctgtctcccctcctgtcacgcacactcacgcgcacacacacccctcaccagggcgcatccccctggagactgctctccctagcggggtcagaccggccttccggggacgctgggg

SEQ ID NO: 367686 - DNA, 122 bp, Homo sapiens
ccgggggacccgcaggtgcaccaggcagccgcggagagaacaccagtgcaaacggagggacgaggacgcgcgcgctccgtgctcctttcactttgctatccaaggctccagtgccaggcttt

SEQ ID NO: 367687 - DNA, 122 bp, Homo sapiens
cagaaaggcacagtctacaacgtgggggacgctagctaggaaacaggcgtccgtgaaacccgcatctgattctccgaatggcctttgtcgcctccctggaccctcacctccgcccatgcgcg

SEQ ID NO: 367688 - DNA, 122 bp, Homo sapiens
ctccatgtgtctcccagggtctagactgggttctccttgaaggctgctcctgagcctaggcgtttttgtagctaaaccattatcatctaccaatcagaaagtggtagcactgttctgggggc

SEQ ID NO: 367689 - DNA, 122 bp, Homo sapiens
tccgccagaagtcgaagccaatccgcttttgggctatttccgcccgcgtttcttctactccgaagtgcgcctcttagtggtcagaagagaacaagacagagacttcctaataatttcatcac

SEQ ID NO: 367690 - DNA, 122 bp, Homo sapiens
tgcaggtctgaacacacagacgccttcacagagctaccgtgtgccaagcactatgcttctcggatcacgggattaacacgcaccagataaggaacgatgcaccaatcaggacgtgcagagaa

SEQ ID NO: 367691 - DNA, 122 bp, Homo sapiens
gtccggggcaaaggctcatatgagtgccattcacttaacagctctttcaaattccccagtcgatgagaagagcgaatttttcagactggcaatacgtaaggtagccactaccagcacctcaa

SEQ ID NO: 367692 - DNA, 122 bp, Homo sapiens
caggggcaagtaattggggaaagatacctgaaaaaaaggtataagaacaaatgagtggggcggtgaagggtagagaagactgctctttccaggacaagaggagcagggtacagaggcctgga

SEQ ID NO: 367693 - DNA, 122 bp, Homo sapiens
tcctaccgcttccgcgacactgcagtctctgtcgccaccaccaactgtagcgcggcgaggcgagtcgcagtgccgcaggctccagcctccaggctgcagcaggtggcttcccttctcccgat

SEQ ID NO: 367694 - DNA, 122 bp, Homo sapiens
tcatgatccactggaaacagacccgttcccctagcgtggcagtggctgctccgctgaactcgtgccaagttcccgctggcgtccgggcagcagggcgggagcggcggctggcacggagactc

SEQ ID NO: 367695 - DNA, 122 bp, Homo sapiens
cccacctcttactacgcacaggtctcactttagagaatgttcacgttatttcgtaaaaggcgaatctcctgactttatcacccttactctgtcaaaagaccaagaacgacgtgaactctcag

SEQ ID NO: 367696 - DNA, 122 bp, Homo sapiens
cacgccactgctatgacacaaatcctcataatgcaggcatacggctgggaggcagggtctcggtggaaccagactccctgagtaagcacagcacaaaatgtttctgacacactgatgacaac

SEQ ID NO: 367697 - DNA, 122 bp, Homo sapiens
gaagcccaggctcactccatggctgcccctctccccagcctgctggcgttgggcttcctccgctcctggtttcttagttctggagcacagactccgtgctctggagcaagagttcttcactg

SEQ ID NO: 367698 - DNA, 122 bp, Homo sapiens
ctctgtcttcttgtacataccagatccaccctccacttgctaggtatgggcatattcttccgccctttaaacctatgcctccaataaatcatcagctccaaaatctcctctgcagatgttta

SEQ ID NO: 367699 - DNA, 122 bp, Homo sapiens
tattttgttacggaaaaagcgaatcctcaaggggggtggggtggcgggcgggcaggctggcgggggagacttgaaaccgttccggtgctccgattggctctcttggagaaaaggggcgtggc

SEQ ID NO: 367700 - DNA, 122 bp, Homo sapiens
taggaaggaattcatggcctgtggataccttagctctgagtcctgccacctaggatcccacggttctacgcgaggaagagggcggggagcgcggaccgggtgtgggaggccgaggtgacagc

SEQ ID NO: 367701 - DNA, 122 bp, Homo sapiens
aggagcaggtgcaccgctctcctcaccgccctgctgggaatggctgttcaggcctcctggcgtcttcaaattgaacccgagaaggatcagagctgcagccgcgcaatcacagtctcgccgta

SEQ ID NO: 367702 - DNA, 122 bp, Homo sapiens
ggtttcaccgtgttgcccaggctggtcgcaaactcaggagctcaggcaatatgccctcctcggcctcccaaagtgctggcattacaggcgtgagccaccgcgcccggccttttttttttttt

SEQ ID NO: 367703 - DNA, 122 bp, Homo sapiens
ccaaaaggaaagtctgtgaaggagcatattctaaaccctgcagaggcatgccagctgggacgctgaccacaagacatctttgccccgtcagtagaagcagagactgtgctgggatgggaata

SEQ ID NO: 367704 - DNA, 122 bp, Homo sapiens
tcccgggatgtagagacgctctctgaccacgctcagcgcctgccctggcaattctgcaagcggccaagccagtggaaacttgtttgcagggcgaggccgcagtaacctggggccccattttc

SEQ ID NO: 367705 - DNA, 122 bp, Homo sapiens
tcagttccaactgaggtttggaggagtcagacaaaccctcgcgaactctagcggaagctgcgggcgttctggagctggacggcggcgacggcagcgcgacagtgtcactgtgctgcaagtca

SEQ ID NO: 367706 - DNA, 122 bp, Homo sapiens
gccgatgaggtaatgcggctctgccattggtctgagggggcgggccccaacagcccgaggcggggtccccgggggcccagcgctatatcactcggccgcccaggcagcggcgcagagcgggc

SEQ ID NO: 367707 - DNA, 122 bp, Homo sapiens
taggagattggccgctttagggaagggggcggagtcccgcccgccccaacagccacctttcgtctccattcacaaaattccggcccttcttggtcacgtggttgggggcgtggaggggtaga

SEQ ID NO: 367708 - DNA, 122 bp, Homo sapiens
aagggcttttaccagtgctcctaacagaccagaccatgtgaatttgttggataccaagcccgtggtgatttgcagccaacatcctttcagctcaactgtctgtttctaatccattacccttc

SEQ ID NO: 367709 - DNA, 122 bp, Homo sapiens
ataatttgcttgagttttttaaaaaaatgatttttatatctctggagttggtttttgaaacgtggtatttcagttaaggtcaggactagtaaatgctgatggtataaggtaactcagttatc

SEQ ID NO: 367710 - DNA, 122 bp, Homo sapiens
ctgtccacatgtgtccacattcactggaacccggggcacagccgaccccggccagatgagcggagggagggttcctcccgacctcctctcagagacacgcacctccactgcggccacccacc

SEQ ID NO: 367711 - DNA, 122 bp, Homo sapiens
catcatgaaatataccccaaaacaacattgtagataagagcccagaggcggggaggcctccggggccactcttacacataaacaatcatagtgtagccaggatcccaacgagctccaattcc

SEQ ID NO: 367712 - DNA, 122 bp, Homo sapiens
ccagcggtcccagccgacacccacgtccttccctcttctcctcctccctccccggctgcccgtcctgtgcccatttatcatgcccatggtagtgccccgaatggtggtcccaggtgtccacc

SEQ ID NO: 367713 - DNA, 122 bp, Homo sapiens
ccccagagcccggaagcctctggaggctgagacctcgccccccttgcgtgatagggcctacggagccacatgaccaaggcactgtcgcctccgcacgtgtgagagtgcagggccccaagatg

SEQ ID NO: 367714 - DNA, 122 bp, Homo sapiens
tgtcccctaaggccgcggcctcccgcagcctctcctgctgctccttctgctctaggagggcgttcatcttcccacagccccaggcccccgcccaggcccgcctgccccgccccgcccggggc

SEQ ID NO: 367715 - DNA, 122 bp, Homo sapiens
attaagtgaggtcccctgcttggcttggggacagatctggaggggcaggcgggcatggagcgtgtgccagaggtcccctgccaggaggaggcagctgggaggaagggaggctggcctcccgt

SEQ ID NO: 367716 - DNA, 122 bp, Homo sapiens
gctgtttgcagttcttcccagcgcaggatccaggccagcatgggtgttaaaaatcatttccggaagagccggtctgcagagaaattaatacttgccctgagcttggaaatcaacaatcccag

SEQ ID NO: 367717 - DNA, 122 bp, Homo sapiens
gtggagagtgcaagagcatcagggcagcatggcagagaaggagggaagaggcgccttctccgccgaactgcgggggaagatgatctgccccgactccaccttctcacgccagctccccatcc

SEQ ID NO: 367718 - DNA, 122 bp, Homo sapiens
caaagagctctttttggtaaatattaagcaatttactattttatatcaatttgcttttatcgtagttgatgctgatgtaacagttataggttctggtcctggaggatatgttgctgctatta

SEQ ID NO: 367719 - DNA, 122 bp, Homo sapiens
tcgctgctgtgtccagctctctctctcgctcattccttcctcgccatctggggatctccccggctccgtgtcccctgcattgccccgcgccccaatcaccggccaaagcgcccgcggagcag

SEQ ID NO: 367720 - DNA, 122 bp, Homo sapiens
cgcgcccggccgcaaggatttgttttaacagttttgcagagtatcacagatattagaatgcgctccacgtgtttgtaggtcctggtccctgctccatccatagcacctagaacagagtctgg

SEQ ID NO: 367721 - DNA, 122 bp, Homo sapiens
gcacacaggccggctctggggctctgcgctcctcggattacgcatgctcagtgcaatcttcggttgcctggactagcgctccggtttttctgtgctgaacctcaggggacgccgacacacgt

SEQ ID NO: 367722 - DNA, 122 bp, Homo sapiens
gcgcctctcctagcagatgacttgagagctactgctgcttggctccttttcaggtggtgccgggtacttataggagcatcggcgcattccatcctcacagcagtcctgaaaggtagaatttt

SEQ ID NO: 367723 - DNA, 122 bp, Homo sapiens
tgaacacagtgagactggtgcctccccgctaagaagctcagagtttagagggaaagggaacgctagttgtctccacctgccagatgggggacaaaccacctaacaacagcaggtgctgcata

SEQ ID NO: 367724 - DNA, 122 bp, Homo sapiens
ctaattgcccagagagtctgttccgtgggtttagcaactgccctttttatctgctgtgggcgaaccccggccactgcggcgtcctcgacaggagcgaggctcttccaaatcgtcctcatcaa

SEQ ID NO: 367725 - DNA, 122 bp, Homo sapiens
tgccagggccaagaatccagaggtgctgtcatatttctccttgccagcgtggatctcctccgagccccgccctccctcctcacctgctcctggggaaactacaccaaggccgccgctctggc

SEQ ID NO: 367726 - DNA, 122 bp, Homo sapiens
atataatacattactaactgtagcctttgtgctatacattagctctctagatttattcatcgtacataactacaagtttaaaccctttgaagatattgaatatatatatatgtattaaatag

SEQ ID NO: 367727 - DNA, 122 bp, Homo sapiens
gggtccgggcgcactcacgctttgatgaagtgctgtgcctcctcgcggctcaggaaggcgcgtggtccccgagtcacagtcctcaccaagctcaactcctgctgacagtcactcagggccac

SEQ ID NO: 367728 - DNA, 122 bp, Homo sapiens
tctaatgccatggctgatctgacaagagatggagctcaggcagtaatgctcactacccaccgctaacctgctgtgtggcccggttccctgttacaggccacacactggtaccagtcctcagc

SEQ ID NO: 367729 - DNA, 122 bp, Homo sapiens
taggtggaacagggtaaggtggataaagtaaactacttttgtttcatttccctggtacctcgacatcacacaacaggtatttatggtcccgttacaggctgcgctagctgctttcatctcta

SEQ ID NO: 367730 - DNA, 122 bp, Homo sapiens
gcgactcctcgttccttcctagcccctgccggattctcagtacaacgggaaccccgagtccgtgggctacaggattaagtactggcgctcagacctccagtcctcagcagtggcccaagtcg

SEQ ID NO: 367731 - DNA, 122 bp, Homo sapiens
gaggctgcggctgctcttccctgggggtccggctccaggaggctgcggtgaccgttgggccggagcaggccagtgccgggcacgtcctgcccatgacagccctgctgccagccgtgggcact

SEQ ID NO: 367732 - DNA, 122 bp, Homo sapiens
agtgtccctaattcaaaaatccaaaatgttccaaaatccgaaactctgtgagggccaccacgctgccacaggtggacagttcccctcccgaccttgcgggcgcaaactttgtttcatgcaca

SEQ ID NO: 367733 - DNA, 122 bp, Homo sapiens
ttaagtacctcctagctgaaaatttccacagattgaagagatctgacttgcccaaggtcacgactactctccagggaaaggccatatccagtgaatgatcaataaaggaatttaaaagccta

SEQ ID NO: 367734 - DNA, 122 bp, Homo sapiens
tcgacatcatgcccaaccctgagctggccgagcagttcgtggagcggaacccagtggacacgggcatccagtgctcgatcagcatgtcggaacacgaggtgggtccctgccccaagggccct

SEQ ID NO: 367735 - DNA, 122 bp, Homo sapiens
gcaagcctatgagatagcactattatcatccccattatacaaatgagaaaatgcagatagcgaggtctaaatgttagtccacatatatgtggctaataagttaggcaatcaggatttgagca

SEQ ID NO: 367736 - DNA, 122 bp, Homo sapiens
ccgtcggaccccacccgctccccgtccccgcttcccgtcggaccccagggcaggtgggaacgaagaagtgagttgggtccccgctgtgggccctcgccctctcaagccgggccgtctccagg

SEQ ID NO: 367737 - DNA, 122 bp, Homo sapiens
tgtttccaatgcacacgtctgatgtagcccagctgcaaagtaaagcaaaggtcccctcgacgcctggagagaagagtttacagttcacacacagcacgactcctgtttacagagttttctgg

SEQ ID NO: 367738 - DNA, 122 bp, Homo sapiens
ctggcagggctttggttaacggtgatgactggcggggccttggttaacgttgatgactggcggggccttggttgacggtgatgactggcggggccttggttgacggtgatgactggcggggc

SEQ ID NO: 367739 - DNA, 122 bp, Homo sapiens
tacatttatccatggaagtgatcgaatatagcagccctgtggagcgcacgttcccaatcacggttgtgtgttttcagtgtgaaatatgagttggcgaggaagatcgacctatcggcctagac

SEQ ID NO: 367740 - DNA, 122 bp, Homo sapiens
gttggggaggcttaggtccacccgatgtctctgaggcagcccctaagggcccaagcccagcgtgtcacaaagcccagctcagaccagcagtggaagcaattgttgggtaatcaccaagcggg

SEQ ID NO: 367741 - DNA, 122 bp, Homo sapiens
cgggcgtggggggtagggcgagtcatatgatccgctcggcttcctgggtctggctgctgccgcccgccggtgtccgcccgtgtcgcgccggggcaccaaggagccgttggagggtccgggcg

SEQ ID NO: 367742 - DNA, 122 bp, Homo sapiens
tttcactggtcctccatcagggaccacacatattgagaatattagcatatacctcagggtcgtttaatgaagattaaacaagataacatgaagtgctttagtgcatgcttataaaataataa

SEQ ID NO: 367743 - DNA, 122 bp, Homo sapiens
ggcgtgcagggtgggtcacagcatctaggagctcagtgcagcttgggactttgggacatacgctccacctctctgagcctcagtctccttgtccatcatataaggaaatcactgattccagc

SEQ ID NO: 367744 - DNA, 122 bp, Homo sapiens
gtttgtccctgacgcagccccaccggttgcgcagtccctccccgcccccgctctcccctccgcagcctgcagcccgagacttctgtaaaggactggggccccgcaactggcctctcctgccc

SEQ ID NO: 367745 - DNA, 122 bp, Homo sapiens
ggcgaggcggggtctgaggactccagctgccagggagggctgtccacggtggattttaagcgttccctcgaaccctctttctttggtttgatgagtttgactaaggctttggctccaatcca

SEQ ID NO: 367746 - DNA, 122 bp, Homo sapiens
ctcttcccggcgcctgattggctagtggtctccactaaggtcagggctgtgtcacacacacgggcgcacgtggacctgggtgctggtgctgggctgaagagccccagacaccgcccagccaa

SEQ ID NO: 367747 - DNA, 122 bp, Homo sapiens
gggggcctcgtgaagatagcgcagggtctggagtgatgtggccacacgctgaggagcacccgcagccatcaggagctggaagaggcaggaaggatcctccctggagcttttagaggaagcgc

SEQ ID NO: 367748 - DNA, 122 bp, Homo sapiens
gtgctccaggccatctccactcacaaagggctgactctggcagctctcaagaaggagctccgaaacgccggctacgaagtgcgcaggaagagcggccgccacgaagcgcccagggggcaggc

SEQ ID NO: 367749 - DNA, 122 bp, Homo sapiens
ggagccgcctcgtcaccagaagatcgctccagctggcgtggtgtccgtccccctgtcctccgggaactttccagtctctggtgagcctggccacagacgccctcgtgaggcagcactggcca

SEQ ID NO: 367750 - DNA, 122 bp, Homo sapiens
gtattcttgccttgttcctggatttaatgggaataccaggtatatcatgatgttggttttcgtttgagacagatattctttgtcatattaagttgtcagattttatttgctaacagtttgtt

SEQ ID NO: 367751 - DNA, 122 bp, Homo sapiens
cctggagactcaagaatcgacagtgccccagtcctccagagctcagaccttggctatgaacgtcacaaatttctggaaggaagatgccatgaagaccaagacacactatcgcgctatgcagg

SEQ ID NO: 367752 - DNA, 122 bp, Homo sapiens
ccgactgcttcggctagcacccgttggctcaccggcccgccgggcccgcccccggagccccgccccggcccgcccctcggagttgtaactccacgtccgaaggcagtttccaaggtggaagc

SEQ ID NO: 367753 - DNA, 122 bp, Homo sapiens
ggatgaatgggcaatggagccagcccaggaccgggagctggtcctctctaacagcgaccccgcccgctttagctgagcgacccggggcaggttacatagtgtctctaacttaagccacgtgt

SEQ ID NO: 367754 - DNA, 122 bp, Homo sapiens
gcagagacccagctccagtgattcagagtgaaacggcgctgaggactgacgatgtggggccgggtcctcttcccccgagcctgaggggctgcagctggggatagggggcccatgccttctga

SEQ ID NO: 367755 - DNA, 122 bp, Homo sapiens
gacaagctcctgcccactcctttggaaactccacacctgggccggagaaagactcgaattcgaaaactaagtttcagtcgcacctgcctccggcgtcgcttcagcctccgaggggtctgcgg

SEQ ID NO: 367756 - DNA, 122 bp, Homo sapiens
cgcacacaccccctttggggctggctgcaaacctgcatgactcacgcccaaagaatgccgcggaaagcaaggggagctttctggaagccgggaggtgggggccggtgcagcaccgggctggg

SEQ ID NO: 367757 - DNA, 122 bp, Homo sapiens
gttggttgggctaggtgcctgaggcttggctaggcggcataagaggagttggctgggcggcgtaagcggcctccaggctactccaggtctgctcccaagctgacttggtgggcttggacctg

SEQ ID NO: 367758 - DNA, 122 bp, Homo sapiens
ggcccctctcccctctccggaaccgcgtccccagacctgacactcggggcaagtgcgcctcggaggacacaccagcctgcccggagcctgggtttgagcccgcagctcacgagtgtgtgacc

SEQ ID NO: 367759 - DNA, 122 bp, Homo sapiens
tcaggaaacacttgggcaaattcaacaagtgttaattatagaaaagaacaataaaaacaacgtaacaagaaaaagcgagagtaaactatggaacaatatggaagtgagggggaataatccaa

SEQ ID NO: 367760 - DNA, 122 bp, Homo sapiens
ggtttggagccctgctccgggggtgaattctgtggcagaagagagacagaggcaggatgccgcctccgcgaccactgtgagaatcagggagctcagcccccagcggtcagccccggcccgag

SEQ ID NO: 367761 - DNA, 122 bp, Homo sapiens
gggacacagcctccgagctcgagcgtgacgggaagttggggcaatttgttagttatccgccgccaccaagacgcggcacggcgcctggaccggaggggccccgcgcgggcgcgaactttggg

SEQ ID NO: 367762 - DNA, 122 bp, Homo sapiens
tttcaaattacttacttcacacaaatttactgaggaacaatagggtggaccctgcatattcgaagacaagatcgtctgtgttccagttcaaaagaagaagctagacacataaactgaagatt

SEQ ID NO: 367763 - DNA, 122 bp, Homo sapiens
ccccacttgctctctcacttgtcctcgatccggggtgccagagttagccgggcctgaagccgtcgtcttcttaagaggagttcataatgggccgggagtacaccccctggtagtaggaggta

SEQ ID NO: 367764 - DNA, 122 bp, Homo sapiens
cagactggctcacctgcttgatgaatgcaccagcccactctcccatccggggaggcctgtcgggcataatgatgtggaacatacttgttttctattcagctacgaaagcagggtattatcaa

SEQ ID NO: 367765 - DNA, 122 bp, Homo sapiens
cgcggctcccgcccccagctccttggcagaggcgccggaggaaggggcgccgcgaagggccgtcatcttgttggaaaagaatgcagaaatgcccccctaaggctgaatgagcaccacttcca

SEQ ID NO: 367766 - DNA, 122 bp, Homo sapiens
cgggctgggggtgatgccgggctgtgcgtgatgccgggctgtgcgtgatgccaggctgtgcgtgatgccggtttgtttgtaggtctttagttttttctttcttttgtgtttaatggggaagc

SEQ ID NO: 367767 - DNA, 122 bp, Homo sapiens
tgccttccatccttgcagctgggttgcacagcagtactgcccaaatgagatgcccctgcccgggctggtgccaacattcagaccacatggaaggaaaagtgttctgtttattggtctggctt

SEQ ID NO: 367768 - DNA, 122 bp, Homo sapiens
ccccccacccccagccttcttcgccttctcctcggctgtggagccctggtggggggtctgcgcccggtcaccatgacgacgccggcgaatgcccagaatgccagcaaaacgtgggaactgag

SEQ ID NO: 367769 - DNA, 122 bp, Homo sapiens
cgccgcggcggggtgggtgcaagatgccgctgccggttcaggtgtttaacttgcaggtaacgagccgaggccgccccgggcctccgcgcccccgcgccccccgccactggggccgggctgag

SEQ ID NO: 367770 - DNA, 122 bp, Homo sapiens
agcaccggcagtagtagctgctgcagcggcggcgacaggtggggacgcatggtgcccgcacgttccccgagggcgccccgacgtccgcctgcccgtgccctctgcccgctcgggagctcagc

SEQ ID NO: 367771 - DNA, 122 bp, Homo sapiens
tcatttctgtttttgagtaccctctcaaccagctctttgtcctacttataatggttctgacgatgagtgcaaataactctattcttccgctagtttcattaaaatcatcttaatactaaacc

SEQ ID NO: 367772 - DNA, 122 bp, Homo sapiens
ccaggactccggaacctcctaggcttgagtgctttccttcctcaggagtccccaagaaaacgcaaacccctccctcgagcagccgcaccgcaggccatcagcagcatctgctgccgttctca

SEQ ID NO: 367773 - DNA, 122 bp, Homo sapiens
ccttttgaagcgagatccatgatgattgacaattgtagcaaacgcacttccaggaatagccgtgtctgcgttggcgtcttaccatccaccataggggctggtgatgtgacgaacatccagga

SEQ ID NO: 367774 - DNA, 122 bp, Homo sapiens
acacccactgtctccccagcaggtcgacaatctggctgcgaggactccagggaccagccacggggattctgggccaggcccaccctgtcagagcagcacctctccaggtggcctcccagcag

SEQ ID NO: 367775 - DNA, 122 bp, Homo sapiens
cttcttattatttttttggagatggagtcacactctgccgctcaggctggagtgtagtggcgcaatctcggctcactgcaacctccgcctccagggctcaagcaattctcctgcctcagcct

SEQ ID NO: 367776 - DNA, 122 bp, Homo sapiens
agaacaaaaatagaacaatcagcctttaccttcaacaattgaaaccaaggatgcagatgtcgcaggtgactggtgtgaagccaggagccttgttacagaggcctgggtgaggtgagccagca

SEQ ID NO: 367777 - DNA, 122 bp, Homo sapiens
ggggtgggcgggggtggggacatggggtaggggggcggctggtggatggggaactaatagcgtttagacaagagacagaagtgagtcctgagcacaatgtagcataagcgcgtcaggatggc

SEQ ID NO: 367778 - DNA, 122 bp, Homo sapiens
gaagcaggcaggttagcagagcgcaggaccaggcagtaaagtctcctagctgcgctacctcgctacctcggggtgtccacattactcagcccctcggagccatgggggtggggagggcaggg

SEQ ID NO: 367779 - DNA, 122 bp, Homo sapiens
ggtccaggtgcactgacttctccagctggtgtcagcaggcacacgtctttctcttcctctcgattgcatcacttaggcaatcatttctagacaagatgggccactcatgtattccctctcct

SEQ ID NO: 367780 - DNA, 122 bp, Homo sapiens
gcgctccccttcctcctttttgtgagctccctccatacatgatctgcagaaagttcccatcgcgggcgtttccgcacacccctccgcaaggacaactgggcaaactcccgtttccctggctg

SEQ ID NO: 367781 - DNA, 122 bp, Homo sapiens
acagcccgcggaaagaaaaagtgacttagccaaagtctctccaggcatttggggcagagtcgggactagcatagtagtatcctgactctcgcaggagggctcgctccactgtagttattaat

SEQ ID NO: 367782 - DNA, 122 bp, Homo sapiens
ttgtaagggagaaactacaggcgcttggaagcctgctggctctcagggctcccaggctggcggcagtgtgaggaaggactgaaggtatgtgggctaaacacaacaaaagccactgccttact

SEQ ID NO: 367783 - DNA, 122 bp, Homo sapiens
ctgaggctgctttctaacacggtggtaactgccagctgaggtgactccccagaaacatgacggtttctcaggccggaaacgcagccttccacagacgcacggatgcgtcacggcgtggcccc

SEQ ID NO: 367784 - DNA, 122 bp, Homo sapiens
ctgcgggccgaagggctgctctccggccagcctgggcgccggggacagcagccggcgcggcgtcctacctggtgaagttcgtcctgccctcggcgtggacccaggccccggtcgccgcccgg

SEQ ID NO: 367785 - DNA, 122 bp, Homo sapiens
aatctagccctactgctggattctactgcagcatcctactgctgcagcccactttcatcacgtgacacctctgcccccaacagtaaccccaggccctctgactggaggaggtccgagtatgg

SEQ ID NO: 367786 - DNA, 122 bp, Homo sapiens
ctaagcccctcctttcgagaaactctggggccgcccctggaagtggcggggcgaagggaccggaggagggaccggaggagcgaggcgcgcggcgcagcgatggagccggtcagcacgggcgc

SEQ ID NO: 367787 - DNA, 122 bp, Homo sapiens
ctttaaatcaatgcgggcaaacagctctgccacacaccacgtgggtgttctggcagctggcgatgcacggcccagaatgtgtacttggaagccgggaacggggcctgggccttggtctctgt

SEQ ID NO: 367788 - DNA, 122 bp, Homo sapiens
tctctgcccacaacaaaccttgccttctgcccttaaggaaaatggcgcctggcatagatgcgcttccggccacggagccaaacagaacagaggaggcaagaggccggaagtgaccgcccttt

SEQ ID NO: 367789 - DNA, 122 bp, Homo sapiens
gctttggtgagaaggtagccgagaccccccccccaccccagagcccaatccacggggacccgcttatgagctcactgttttacgtgttgaaagtcaggtgtgtctgggaaggagcaagcagc

SEQ ID NO: 367790 - DNA, 122 bp, Homo sapiens
gtcaggagcagctgcaaaaagggactgcgactgccgtgctccatggagatgcagtcagcccggggtccctcctcaagggagcactatgctgcccggaggcaggttgggggactgtggctttt

SEQ ID NO: 367791 - DNA, 122 bp, Homo sapiens
tgaaataaattggctaattgaagcaattatttgggaattcaatcccaaacacctcaccatcggggagcaatgaggataatttggagtttttgccaaagtaggttaactaatgactttctttg

SEQ ID NO: 367792 - DNA, 122 bp, Homo sapiens
tacaaagaagggccaccgaagattgcctgagcaagtcagagaagaaactcaaacacattacgtttgagataagccttgaagaatgagtcagaaacggaagacaggtgatgatttcacccaga

SEQ ID NO: 367793 - DNA, 122 bp, Homo sapiens
tactgtgaggacccagagggacataagtgcagacagtgctgactctcccaggagtttactcgtgagtaggggtggcagagaagccatgtgtgtaaaaatgcaaggtagaaagggctttgtct

SEQ ID NO: 367794 - DNA, 122 bp, Homo sapiens
gtgggcgtgcttgcgggtccaggagggcccctctcccgcgaccgccgaccacgatgagagcgtgaagaccctctcgaaaggaagggctctgctctacacactggtgtctcctgcggaagggc

SEQ ID NO: 367795 - DNA, 122 bp, Homo sapiens
cagcccctacccagaggggccagcaagggctgtgaactcaggctggcatatcctgcctcccggcactctcaaccccatccctgggagatgtcaattccgggggcactcagttctgactagag

SEQ ID NO: 367796 - DNA, 122 bp, Homo sapiens
taggaatcataggagaagggacatggtggctactgcaaggggttttttgtttagggagaacgcactgtggaactcaaattccgggtatgcactcaacttcggcaaaggcacctcgctgttgg

SEQ ID NO: 367797 - DNA, 122 bp, Homo sapiens
tgctccccgggtgggcttcggtgtgtaccaaatgacgccctttcattgagtgcggggaagcgctttgaaaccttgtagagccccaattgcacccgtccgaggaaaacgctcgggtgaccctt

SEQ ID NO: 367798 - DNA, 122 bp, Homo sapiens
cgcaccagggccgtcaggttggggatgtccttgaggttgcacatgcccaggttgaggtagcgcaggttgaccagcccctcgaaggccgcctccgagatgtattccagccgcttgagctcgcc

SEQ ID NO: 367799 - DNA, 122 bp, Homo sapiens
cgcctcccgtgaaatttctctattaaatttaagttttttttttccaggatcctggtgatgcggcccaacaggaagcaaagcacaggtatgggctggaaacgtgaactttttgaagggtggtt

SEQ ID NO: 367800 - DNA, 122 bp, Homo sapiens
cacctgcgcagcccagattctaacaggtgtgtagtggaatctcattccgggtttcatttgcgtttcctaatgactactgatattgaacatctctatatttgcttatttgccatccttatctc

SEQ ID NO: 367801 - DNA, 122 bp, Homo sapiens
catgagcctgtgcgtgtgctactccgccagcatcgggggcatcgccacgctgactggcaccgcacccaacctggtgctgcaaggccagatcaactcgtgagtgacaaggggtgggccacctt

SEQ ID NO: 367802 - DNA, 122 bp, Homo sapiens
taactagcttgccaagggcactcggctattaagcaatggagctgggaggagctaggaacccggttctaaccactgtaatacccgtccacggtggaagaaagactgggcccagcgcccaaggc

SEQ ID NO: 367803 - DNA, 122 bp, Homo sapiens
gtgctggggggtgggggctagtggggcagaggataagcaggctggaagagccgactcctacggctgcgatccaagaggtgcctgcaacagttgccccccgacttctgtcgcccccatggagg

SEQ ID NO: 367804 - DNA, 122 bp, Homo sapiens
gaaccccaagagtgcgccgacagacaacacgaggtggtgtggagcaacacgctgttttaacgagtgcctgggtgcagacgggctgaggtctaaaatggcatcagccccaagtgaggacaggg

SEQ ID NO: 367805 - DNA, 122 bp, Homo sapiens
tccttggccaccatggcggctgccgggcctgccctttgggatgtcaccgctgaccctaggcgactacaaaactcccaggcaaaagggggccccagctccacgatgccgggcggcggcggcga

SEQ ID NO: 367806 - DNA, 122 bp, Homo sapiens
gattcggccgtctgtgacccccttcaactgacccacagttgtcttcctggaaggagcagccggcgctcccttccctctctctagagcatcctttggcacgcatgtgcttttttttttttttt

SEQ ID NO: 367807 - DNA, 122 bp, Homo sapiens
cctccgccccaccactttcatcctaaacctactgccacttaggtgcatgcaagttagaatcgtgggctgctttcacagtctacagaagtcctagagcccggactttcatctggagatgtcag

SEQ ID NO: 367808 - DNA, 122 bp, Homo sapiens
gggaaagaaaatatgccatttctagcgcttcagccacacaaagaaagcggcggaatgatccgctctcggcgaccgcaagtcccggctcgcccggcgcctgcgcggcagcgggggtgggagct

SEQ ID NO: 367809 - DNA, 122 bp, Homo sapiens
gtccctctgaggcccagatggtcagggaagccctttcccgcctcacaaagaggatcgctgcgtgtctttttcttttaaaatggaataaaaaaaaaaagccattgctcacaaaggacctggat

SEQ ID NO: 367810 - DNA, 122 bp, Homo sapiens
ggtaacaatttggcgaccacaaagggacctgaacccgcaaccatgaagggatctccaaagcggtaatattggaccacttttgcttgctactctggcctatcccttagaattggaggaaaata

SEQ ID NO: 367811 - DNA, 122 bp, Homo sapiens
tattattagtaaagggccgaaccgtcctgtcattggtggaggcagtgcttgactgtgcatcgatccaggaatccgatcttttctctcaaccacagagctaacgtgctcagaagtggccttta

SEQ ID NO: 367812 - DNA, 122 bp, Homo sapiens
cggggcctgtgttgggggccgggcgcgccgagctcacctggtagttgtctagctgctcttcggtgaagatggtctgcttgttccccatggtggccgccgcgccgccgctcgcccgcccgggc

SEQ ID NO: 367813 - DNA, 122 bp, Homo sapiens
cgttgggattttggttgtttgttggcctggcccgactgtccctgtctctgagggcagagtcgggtcccatcccgggacacgcctggggttagccaccgacctgcagcctcccggccgagggt

SEQ ID NO: 367814 - DNA, 122 bp, Homo sapiens
tcacgttcgggactccccaccccccttctctgggactctcattaaccgcttctcctgcctcgtccgcggcataaataacccagataaatcagccgccgtccgccccccgcccctcggcccct

SEQ ID NO: 367815 - DNA, 122 bp, Homo sapiens
caatgagtgaccagagattcctgtagttcagcctcctgctgttcctgggttagggagagacggcacaaactaaactcattgaattagaacagcacttgtccatctcaaagaggataaattat

SEQ ID NO: 367816 - DNA, 122 bp, Homo sapiens
tggcctctatataagccctaagttctaaccgctcctctgagttactcatcactgaatttccgttgcaggtgattcatgagtttccaggaaaggggtgggtgatttccagaatgagggttcct

SEQ ID NO: 367817 - DNA, 122 bp, Homo sapiens
cgggccccgcccctatgggcaaggaccaatggtctctctctgggcggggctgctgttggacggcctgggccaatccgaggcgccggaggccaatcagttggcggagcggcgcgtgcgcgggc

SEQ ID NO: 367818 - DNA, 122 bp, Homo sapiens
agcgcaggcctcaggtggtcccggccacagctcctggccagctcagcggcagcctccgcccggggtcctccaggcgggcaggccctgcttctgaattcagcatcgactccctcctagaggtg

SEQ ID NO: 367819 - DNA, 122 bp, Homo sapiens
tcctattcactcatggagtaaattcattacctacctcagcaggcagtggagggggttaggcgggatgatggacagaaagtactgcacaccaggcctggtgtttggtagatgcctttcttcaa

SEQ ID NO: 367820 - DNA, 122 bp, Homo sapiens
ggaccggcgcaggtctccatggtccgcagaccgagctgtcagtccggcggcggctcaagccgcgccagcctagcaccgctgagcaatgcccccagaccccagagccagcggggggcggagtc

SEQ ID NO: 367821 - DNA, 122 bp, Homo sapiens
gctgcgggcttacaacaggttagccatcccagtcggaaaggtctagggatgaggcaggggcggagacgggggagtactgaggtgagagaaggagaacttgattggtggtaacagaggaagca

SEQ ID NO: 367822 - DNA, 122 bp, Homo sapiens
gcacaaagcctgttgttgacctaatggcagagccagatcgggttaaatcaatggcaaaagcgccatgggggaagttagacgtgaaggtcttcgacctcctttccccaagcggcgtccaagct

SEQ ID NO: 367823 - DNA, 122 bp, Homo sapiens
taatctgtctggcgcatggatggccctcttgaactgcagggagcacatggcagagagaaacgtcttgggctggctggcttgtgcttggaaagtgaaagcaagctgttattttcgccttccca

SEQ ID NO: 367824 - DNA, 122 bp, Homo sapiens
aggaaaggtcttgagggaagagacaaaaccgtctgggttacggaagccagcaacaacattcgggacccctgggaggaatgactgagcccaccatttcaggagcttgtgtctgacaggaaaag

SEQ ID NO: 367825 - DNA, 122 bp, Homo sapiens
agggtaatatttctctttaattccccaagaacctcaatatcatctgtcttctggaggttccggtttcttctgacatctgtgctaatgtccacgaagatgccaaccgtacttagcataaagaa

SEQ ID NO: 367826 - DNA, 122 bp, Homo sapiens
ggctccttgaatgaggcgattgtatttcagcccattgttttgtgtggacacttattaacccggctgaatttacagcaggggattgcactcaatatctattgattagcagtcagtagtgcagt

SEQ ID NO: 367827 - DNA, 122 bp, Homo sapiens
gatttccccaaacgtgggaaactcgattgcataatttgtggtagtgggggactgcgttcgcgctttcctctggtgcttttgtggtgcgaatagtaggtgagccgtaagtgtttttgtaattc

SEQ ID NO: 367828 - DNA, 122 bp, Homo sapiens
tttattaacaagttttagaacaagaaccaaaggaagtgaagtacgcttgggagaggacgacgtgggtgatgttgagagctcccagtgccccatcctacccttgacttggggtttcatacatt

SEQ ID NO: 367829 - DNA, 122 bp, Homo sapiens
gaggctctcaggccaggacaacggtgtgacctgccccttctctgcaatgcctgccacatgcggcgtccaacaaacgtctgatgagagaatgaatgagaccaggcactctctgtcctgttcct

SEQ ID NO: 367830 - DNA, 122 bp, Homo sapiens
gggggtcattccctggcaccggcagtctagtgcgcctcatgtgtagtaccgtgggaggatcggctcccaaccctccagcaggaagatggaatcaccccagcccccggcacaagcaggttggg

SEQ ID NO: 367831 - DNA, 122 bp, Homo sapiens
caaggtctctctctctcagcaccctcgccggccggcgtctgacgcgggtgccagggtctccgggcacctttcagtgtccattccctcagccagccaggactccgcaacccagcagttgccgc

SEQ ID NO: 367832 - DNA, 122 bp, Homo sapiens
cttcactggccacgctgctcctggtcccggagacccaacaatctgcatttgctgccgtcacgttcaggcgactccccaggcgcggctactggctacttctctacattttccaagggtagtag

SEQ ID NO: 367833 - DNA, 122 bp, Homo sapiens
ggtagtgccagacaaatggcttaacaaacccacataggaaaacaataggcttctggcaaacgatccagttaactcaccctttgagcgcatccgctcccgatctccattcttccccagcagtg

SEQ ID NO: 367834 - DNA, 122 bp, Homo sapiens
attacagaattagagtccagatttacaccaaaaaggaccccctttttcctctccggaccacgtgaccccgcccacgtgacgtcccctccgccaatggccgggccgtctccccacggctcccg

SEQ ID NO: 367835 - DNA, 122 bp, Homo sapiens
atggtctgatttggatttaaatattgtaattttaaaaacacacatacacagtgaagtgtccgtatggaaaatattataccacaattaagaccactgatgagttaatttgtgccaatagatca

SEQ ID NO: 367836 - DNA, 122 bp, Homo sapiens
ggtgtgcagacagacaatgcaaagtatctcataagccacatcctgccttagagcgtgaaccgtaagaaggggaactgccccatcaggctgcttgggtatctcgagagctagaaatcaccaga

SEQ ID NO: 367837 - DNA, 122 bp, Homo sapiens
aatgtggttcgctgtggcccagaggcgcgagggccggcggagtttcttcagaggaactaccgccctgggaggaagcgtctgtttagtttcaacacagacgactgggcttgggagcctacgag

SEQ ID NO: 367838 - DNA, 122 bp, Homo sapiens
ggagcaagacaggcacaatgacagacctggtgtctctctgcaatagtaaaccccgaggaacggaaaaataggagaaaataacccagcaccagacacagcagcccacgttaattgggagcctt

SEQ ID NO: 367839 - DNA, 122 bp, Homo sapiens
aagagctctccggggcgctgcctttatagccagtagggatctcgcgagagtcggaacggacgggggtgccggaggaggagagagaggagggggatgtggcccgagccccgcccggcgcgccc

SEQ ID NO: 367840 - DNA, 122 bp, Homo sapiens
ggacgtctgaacggaagttcgacccatcggcgacccgacggcgagaccccgccccatccccgactgcctgaaccgcgccaggagacggaccgcaagtccagcgtacccacagacgactcagg

SEQ ID NO: 367841 - DNA, 122 bp, Homo sapiens
tctagttcttctcttttgttcctgtggactcaagttaccgtctgtagccatttctttagccgaatacagctttgttgccacctacctcctttttattgttattggcaagtatattgcacttc

SEQ ID NO: 367842 - DNA, 122 bp, Homo sapiens
gtaaactcaggctcccagaactgaagatggtggctggtggcacacttccggctgctcctccgtcacctgtgaactctacaagtgacgtctttttatttcaaagaagtttatttcccacttgt

SEQ ID NO: 367843 - DNA, 122 bp, Homo sapiens
gcccgccaatgacgccgatgacagtgacagcgtcggccgagtgcttcccctgctccgggtcggccaggcaccgggtcctccttcagcactcgcagcacgcactgaagaagacgctacggaac

SEQ ID NO: 367844 - DNA, 122 bp, Homo sapiens
cttggacctcctgggcaggcccctgtctctgcctcctgtctggctgtttttccaggctaccggttgttgtccctacttatccagcagggatcctcattaggggacactggcctaccagctct

SEQ ID NO: 367845 - DNA, 122 bp, Homo sapiens
ggtagaactccatggggagagggaaatgtccagctgaactttttaacaatttggatggggcgagacgcctcctggtcagaactcaggggagggcgcaaatctggtgtgcagactccacaggt

SEQ ID NO: 367846 - DNA, 122 bp, Homo sapiens
cccgccggccgcagcttcccgggaggtcgccgcagcgcagccggtgactgcttggtcgcccgcaactgccactcccccgggattgagactcctttagggagggctgaggaggtgcgagaaga

SEQ ID NO: 367847 - DNA, 122 bp, Homo sapiens
agcaagctcccagttcgcacaggtcagaacgtgaaggatgcctttgcagggcggtgcttacggcccagggcacctggcttcacgcactaatgatcagagagccgcgtgcctccgtgcaaaac

SEQ ID NO: 367848 - DNA, 122 bp, Homo sapiens
cgagcagatggccagccacagcgcagtgctggaggccggcaaaaacctctacacgttctgcgtgagctatgtggattccatccagcaaatgaggaacaagtttgccttccgagaggccatca

SEQ ID NO: 367849 - DNA, 122 bp, Homo sapiens
cgcagccagcacagaacggttggatttaaactaaaaatacccgcccgcccgcagctgtcacgccggggcccccgcccccgcgccgggcgcgcctccccaggtcccccagactttcggcgccc

SEQ ID NO: 367850 - DNA, 122 bp, Homo sapiens
aaccaccccgctccccacgcacggagcctcgcagtggctcgagctgagaatcaaagcggccgatccagggcctggtgactccaccagacaggaaatacagaggcttctagcaatctgctctg

SEQ ID NO: 367851 - DNA, 122 bp, Homo sapiens
ccttgacgcgtttttggaatcagtaccattcccttgcgggtggggggacagcccccacctcgggaactgcagcctcaattctggatctagaagggcctctggcagcttctccaactctctca

SEQ ID NO: 367852 - DNA, 122 bp, Homo sapiens
ggcgctgtcactgccctgctaccgtgggaagttaccttaggactcgctgctgaaccgtcccgtcatcctctgtgtcctctgtttttggcaagtcttggtcttctgagttcagaattgatttg

SEQ ID NO: 367853 - DNA, 122 bp, Homo sapiens
ggctgggccggaacaaccgcgtgggtagtcaggtaaaggatgaggaaggagaagcgacaacggatgagagacacaggcccacgctagtcgctgactgtgctgccattctccccgcacccctc

SEQ ID NO: 367854 - DNA, 122 bp, Homo sapiens
cttggaaaatggcagcttctttccttccttctctgagcctcagtttccccatctataagccgggtttgacaagcggctggtgccccagctcctcccagccactccaggtccgcagctcggag

SEQ ID NO: 367855 - DNA, 122 bp, Homo sapiens
tgtttgttttgttaacaaagcaaatacccttgtggtttgattcttccattcctttgttgacgcatatcaaaatcagatggaaatgttctcataaaaacttcaaggacaaatgaaaaacgaga

SEQ ID NO: 367856 - DNA, 122 bp, Homo sapiens
gccaactggagctgatattcgggaagctaagcctgaggctgctctggagggccggagaagcgagcggccaggcttggcacccgccaaatgtgccttgccaaaatgaagaggaaggaaggcga

SEQ ID NO: 367857 - DNA, 122 bp, Homo sapiens
ttacaaaaatgaagtcaaaccaggtctgggttcacagaaatctcttcagaactgaccgcacgtttttgcaaatttattttactcatatcttatttagctttttaaatgtacaattctgcaaa

SEQ ID NO: 367858 - DNA, 122 bp, Homo sapiens
aggggccgggcggggtcgtcaaccttgggcccggggtccccctcaccctgcatccggggtcgccccaccttgggcccagggtcgccctcaccctggatccggggtccccctcaccctggatt

SEQ ID NO: 367859 - DNA, 122 bp, Homo sapiens
cgcaagcccctggttcatagggttcttggttcagagggctcctcacacggcaggatgggccgcaggtgtgccagtcgggcccatgaggaggtatctgagctggggcagccccatcccccaag

SEQ ID NO: 367860 - DNA, 122 bp, Homo sapiens
cagtggacgtgggagggggcaggagggccgggggaggccgcgaagggcctgctcgcaaaccgttatagtccttcagcacctccctcggccggtggccctcctagcctgcctccccgccgggc

SEQ ID NO: 367861 - DNA, 122 bp, Homo sapiens
caccggtgccttgcgcgcttctccgctctgggggccgaaggacgcagggctttgacgtcccgagccctgcgccccaccccgtgcgcttttacgtcacctttcaccggttcaacacccgctcc

SEQ ID NO: 367862 - DNA, 122 bp, Homo sapiens
caccgcccctgggcagccagtccgtcgggcctcggacaagcagccaatgggaggcgtcaacgtcatcgcggggcgccgcggcgccgggcggggagcggcggacggtctaggcggggctggag

SEQ ID NO: 367863 - DNA, 122 bp, Homo sapiens
ttcccgcccctgccctgcccttcagggaagccgggagtggcggctgggcagtggccttcccgcgtgcccacatccaggcggagtggagcggcgctcacgggcagggccaggcgtccagtggt

SEQ ID NO: 367864 - DNA, 122 bp, Homo sapiens
atcgcaaggccagccaatggcgggtgggagcgggcctgggtggggctccaggagaggtcacggggagacggccacctagagcattgggcggggcagagccctgagggccgctggccaattgg

SEQ ID NO: 367865 - DNA, 122 bp, Homo sapiens
tggtggaaacagaagtcccactcctgcaaacttcagcggcgattggctgaacggaaggggcgtggagagcgcgcgccaaagcacaggaggcggggccggtggaaggggcggggctgagggcg

SEQ ID NO: 367866 - DNA, 122 bp, Homo sapiens
ctgcctggcgggcctcattctctctgcagtgggagaaatgtgcagtcaaccctgagcgaacgtctaaacctccaaacacaccacgactttcaaagcctcattttctatcccgagcagcctcg

SEQ ID NO: 367867 - DNA, 122 bp, Homo sapiens
gccattaagtgtgcgcaaatccctgcaacccagcagggtgctcgagagcgactctggaaacgccacggcccccgcctgcttatctgcctgtcaataaagggcgcgttcgggctgcgcgggag

SEQ ID NO: 367868 - DNA, 122 bp, Homo sapiens
ggtactgctgaagacactcctatagtgtgtgatcataaatttaaccagtcaacacaattgcgattgttttatccaggttcatttcatgcttaagtgcagggaaaggtcacgcagagagttgg

SEQ ID NO: 367869 - DNA, 122 bp, Homo sapiens
agatggcatcctcttccaatataaagctgtttcatccacgttaaaaaatctattgttggccgggcacgttggctcacgcctgtaatcccaggactttgggaggccgaggcaggcggatcaca

SEQ ID NO: 367870 - DNA, 122 bp, Homo sapiens
aaacaaccagagaccgccgaggtgcgggctgtgagagagggagcgtggagcctccgaggccgaggactcgtcccagtttggacagatagaagatgtgagcgctctccctctccctctccctc

SEQ ID NO: 367871 - DNA, 122 bp, Homo sapiens
cagcgctgctctgttttcccgttcaaatggttccagcgttggcctcgggagcgcttttcacgagccccgtgtcctcgcggcgagccccgtcgttgtggtgtgtgtttgtgcatctcctcgct

SEQ ID NO: 367872 - DNA, 122 bp, Homo sapiens
gtgaacttggaactcagaccagggtcttagaactgggaatccccaagcatagctctcctgcggggcaaggactgagagctactgggaatggagtgcaggtagataaatgacagctgcaagaa

SEQ ID NO: 367873 - DNA, 122 bp, Homo sapiens
cagcgggcagggctcagcgggtggggctgcacgggtctcgtcagtggtcgtttctgtggccgccgtgactggcaggccagctggggcctggacggccggcgtctccttctccaggtaatcag

SEQ ID NO: 367874 - DNA, 122 bp, Homo sapiens
ccaatcccagcttcatctgcaaaatgcacacggggacatccacatcagggctgagtgtgacgattctgtgagtttattcttgtggtaggctcagcttgacatggtgtttttggctaatattg

SEQ ID NO: 367875 - DNA, 122 bp, Homo sapiens
ggcccactgtagctgccgtcccctctgcctggaagaacccttgtatggctgttcttggcacgcagctcacagcccagaagtcagctccgcagataggttttccccaaccatgtgatctgctt

SEQ ID NO: 367876 - DNA, 122 bp, Homo sapiens
cgccgccagcccagcgcagaaaagggcgcctcggtgccgtccagcgtccgcacgcgcgcgcggctccgcagctggcacagcagctgtgccctgctcagcccggcctcccgcttcccgcggaa

SEQ ID NO: 367877 - DNA, 122 bp, Homo sapiens
ctaagtttttacaggtaagaaatatatgtcactcaaatgtgtgtgacaggttaagtattccggagaactatggatgattttaagaaaacgtgaggcagaaacaaaggccctatattctgatc

SEQ ID NO: 367878 - DNA, 122 bp, Homo sapiens
tttttttttttttttttttgccttagtgccttgactgagcatccaggcagggctcggcggcgcctgcgcgctggagcctccttgagctccagccgcgtcctcccctgtcgcagcggcaccgt

SEQ ID NO: 367879 - DNA, 122 bp, Homo sapiens
cctggggcccgggattggacgccccttcccactgctgttgtcccccaagcctgatgggatcgcacgagtgggcgggggagggacttatgattcttgccaagctgacagtgccccctcccccg

SEQ ID NO: 367880 - DNA, 122 bp, Homo sapiens
caagtcacggtttccgcggcgcggcgcgggcctgggagctgtcggagtgaaccccacgggcggttctgactcagctctcagggtaggggacagagagagaaagtaaggtccgtccacggcga

SEQ ID NO: 367881 - DNA, 122 bp, Homo sapiens
ctcgggtcggcagggccctcttgcatgtggttgtacagggctgaaatccagcctgctctccgctggccaagccctctgctctgctgtgggggctacctgtgccctgctgcaacccatccaga

SEQ ID NO: 367882 - DNA, 122 bp, Homo sapiens
ggtggcagaggccagtcttctcagtggaaacaggctcatgcacttccacgcagggagggccgacggtcaagggtggaggaaaagccacaatttttcggtgaacccatggatcagcatgatgg

SEQ ID NO: 367883 - DNA, 122 bp, Homo sapiens
cgagacaacgcggaaaaaaccgccccgcacgccggaggataacgagagctgccgggctgacgttacctccacccactgggccgcgacgtccccatcggctgggcgaatttgcagccgggcgt

SEQ ID NO: 367884 - DNA, 122 bp, Homo sapiens
gcctgaattttctaccatttttcatgtacaccatcaaagctggattctgtgcgattcttacgaaataattgaggtctgagatgagaaactagagtttgttggcaggcctgaaagcagatcaa

SEQ ID NO: 367885 - DNA, 122 bp, Homo sapiens
gcccgccggacccgtcggtctgtgtctctctcctgcccctctagctgcttgcgggtcttccgactgtctcctgaggctcaggtctaacccccgccacctcgcccgctgagtccacctctccc

SEQ ID NO: 367886 - DNA, 122 bp, Homo sapiens
gaagaacgcctcaagtgagcatgcgcacagctccaatagacaccgggcctgcagaccgcacgcctcaagtgagcatgcgcacaactccaataaacaccgggcctgcagaccgcacgcctcaa

SEQ ID NO: 367887 - DNA, 122 bp, Homo sapiens
taggctgtcagaacagtgcgggctagaggcgcacacgtttcatctaggcttcgggcggggcgcagcaggtgggtgaggctgcggtggtggctgctgcccagggtgggaggctcaggggaggc

SEQ ID NO: 367888 - DNA, 122 bp, Homo sapiens
ttttggaagggattgccttttttttcctctgcggcggcggaaatgacagtgtggtgctgccgtggtgtcatggtgctgcccctggactgaggggcgaaaactcttaagtttagctcgggagg

SEQ ID NO: 367889 - DNA, 122 bp, Homo sapiens
agctaggtaaagataaaataccccttaggaacagtatcagctagaacccacattattcaacgagaatgtttgcctgctatattaaccagcaccacgtgggaaattcaagcactgtatagaac

SEQ ID NO: 367890 - DNA, 122 bp, Homo sapiens
gtgctttacgtggcacggcaggttggcacgctacgcagatgcccttttcgttaacatttccgcttgccagttgctccgggttttaatcctgggctggatgcagaagtgatgccacctcgaag

SEQ ID NO: 367891 - DNA, 122 bp, Homo sapiens
cccaggtcaaattccagggcctccaccgtccctcctgcctgcaactgaggcctcctaccccgtaggcctctcctgtaagaatgtgtaatgagaagctggcctggtaggggaaggggctgggg

SEQ ID NO: 367892 - DNA, 122 bp, Homo sapiens
taaggactccacttttgtgtcctgaatgttctccttccaggcagcctgtccacatttcagcgtgcatcctctcattggattagccttgagtgtactgtgttcattcctttctcactaccctt

SEQ ID NO: 367893 - DNA, 122 bp, Homo sapiens
gccaacgtggaagtgtttctgcacgtgtgtgtgttttcatttgtgcttcccacacaaaagcgaggccccacaggtggagaggagggcgtgtgtgcgcgcctgtagagcggggctcgggctgc

SEQ ID NO: 367894 - DNA, 122 bp, Homo sapiens
catgagccctcccgggacaggagacccaactggtaatgacattctctgacctgcccgcagcgtggcttgtaaggtggacctcaaggggcatcagctggccagttaggcactgtgctggttaa

SEQ ID NO: 367895 - DNA, 122 bp, Homo sapiens
tattgataggctgcacggagagaggcactgaagcatgagatgccaccttggactatcagccggagccaagctccagatgaaggcagccgtgtgactgcatgtgtactgcagcacgtgaagca

SEQ ID NO: 367896 - DNA, 122 bp, Homo sapiens
gcagtggcaccctctgtttcccggggagctgtcctgtcagtggcgtggactcgggactggcgtcacatgctttggggaggtggccattggaaacaagcaagtactgggcttccgcgcgctct

SEQ ID NO: 367897 - DNA, 122 bp, Homo sapiens
attcccaaatccggtccactgtggggcttggtcattccctgggtagattttaactcagcccggatgatcctatagttcttgcctctgttgctgtcccagtacgtctgtccattgcactcgta

SEQ ID NO: 367898 - DNA, 122 bp, Homo sapiens
cccaaccaccaaacagctctgacgccctcacacccccacacaaagctcaaatcaagcttgcgctcatactcacagccccagttctgcccacagatccagtagccacaagtgatagtctagca

SEQ ID NO: 367899 - DNA, 122 bp, Homo sapiens
aaagaggaataagaataggggtctcaccgtgtgctaaatagggcatgtctcttttcatctcgaaacagcctgatgagctatcattatgcccacttcgtagaggagaaactgaggcccagcgt

SEQ ID NO: 367900 - DNA, 122 bp, Homo sapiens
ctgagccaggcccctcctgcaggcgctccggcttcccacagtcaccactgtggctgtacccgctggctatgactggagagacatcgtcagctacgtcatagaccacttcgacattgagatca

SEQ ID NO: 367901 - DNA, 122 bp, Homo sapiens
aggcctctgcgggccaggatgaaaggcacgtgggccgctggggctcccagtggcagggcccgagggacagaaacattaattcaaacaacgtgtatcctgcccctcagctccttcaggtctcc

SEQ ID NO: 367902 - DNA, 122 bp, Homo sapiens
ttctttgataagtctttcatatgtcttctgcaaaacagttttttgctcactgttctggtccgtttgaaaaatgtatattgttgatcaattaccaaaatcacatctagtcctgacacatattc

SEQ ID NO: 367903 - DNA, 122 bp, Homo sapiens
cccattcccctctccaggttaaaaagttcctcttcaccctgatgttagtttgaaaagtttcggccataaccatatttagttatatttagggagaggggagtggtgggtcaaaggcttaaaaa

SEQ ID NO: 367904 - DNA, 122 bp, Homo sapiens
cagcagacagcagggcaggctagaggggctgccccactgtgtgatccattcctgtgtggccgggcttcagggcagcagtgatgaggaactcctctagccccgggtcccctccctccctcccc

SEQ ID NO: 367905 - DNA, 122 bp, Homo sapiens
gtatgaagaccaagttttggaagacagtgagataccacatgccgcccagaaggtgtcggccgtttcctccggtccagctgctgcagcacacaccttgctaccgcaccgcaggtgagcgggtg

SEQ ID NO: 367906 - DNA, 122 bp, Homo sapiens
gctgagtgggcaggaggccaggcatgaatctttctgatggtctgagaggcacagtgaccacgtttggtgagcctgccctaaacagaggaaagatgttctgtgtcacacctactccaacaaca

SEQ ID NO: 367907 - DNA, 122 bp, Homo sapiens
tctcaagggaaaaaacaaaacaaaacaaaacagggaacgtgggaaggaagcgttccctgacgatactggttatagcgggtctgaagctgggctgtggaattggagatctcgggaaaacaaca

SEQ ID NO: 367908 - DNA, 122 bp, Homo sapiens
gggggtgcagcgtctacactgggcccgggaaccgtgggggtgcagcgtctacactgggtccgggaaccgtgtgggtgcagcgtctacactgggtccgggaaccgtgtgggggtgcagcgtct

SEQ ID NO: 367909 - DNA, 122 bp, Homo sapiens
aggataagaagaaccgagataatatttggccagagctacgtgtagcacagggagccagggcggcagctgcacctgcgagcagcgcaggcggcaggcgcggcctccgggcgtggtggtgggcg

SEQ ID NO: 367910 - DNA, 122 bp, Homo sapiens
aaggttgaacttccagatgcctcctttcttcccacacccccactgcatcctctgtttctacggtgagatttgcatggcactttacagtttccaaagcatttcctcacatattatcttcttca

SEQ ID NO: 367911 - DNA, 122 bp, Homo sapiens
ctgtctctgccgggctgggactccgcgagtcactcacctgtaggggaggtccgaggcccgcgcgggcgcaggggcggcgcctgtctcctcccagagcatggctcagctgggcgcttgcagtg

SEQ ID NO: 367912 - DNA, 122 bp, Homo sapiens
gaaggtcgccggtgcccggtattcacctacggcattcgcggctgcagccttcagcacccgcgccattttggaaagcaacccgccacgtcaagactagccacggaggttgagagacgcgcggc

SEQ ID NO: 367913 - DNA, 122 bp, Homo sapiens
cagaagagaaggcacccaatgcaaaatcaaatgtcagcgaacgaggggtcctttaacaggcggcccacacggcccctcctggcgccgagacccagcccctccgggccaccccggccaggtac

SEQ ID NO: 367914 - DNA, 122 bp, Homo sapiens
tggtcttggaagcctccaggggagaggtgacccattcattcattcattcgttcgttcgttcgttcaacaaatacttgtgaagcgcttgccatgtgcagtggcaccgagctctagtgatatga

SEQ ID NO: 367915 - DNA, 122 bp, Homo sapiens
ccagtggctgggcgggatgagtctctgagggccactgtggagcgccccgccatggccccccgcaccctctggagctgctacctctgctgcctgctgacggcagctgcaggggccgccagcta

SEQ ID NO: 367916 - DNA, 122 bp, Homo sapiens
tttcagttctgagtgcctaaaggcccctgaggtcgagttaagggtcagttgctctccttccggaactactttttctctgtttaactctagttgcaagcatgcaactccacattccaggcact

SEQ ID NO: 367917 - DNA, 122 bp, Homo sapiens
aaccatgacggataaagttcatctcatcagtcaggaaaattcatgccctcacacaccacccgtctgagtctacagtcagaaaacaaaacgtgctcatttctcctttaccgctattaacaacc

SEQ ID NO: 367918 - DNA, 122 bp, Homo sapiens
tcaatgaacacggacagctcggcctcacagaaacatccagaacagacaaacctacagagacggtgggctggaggtgggcacaagctagggcggagaaagagggcacagctgctaaaaggcac

SEQ ID NO: 367919 - DNA, 122 bp, Homo sapiens
cttcccttggtcctgccacacgtggactggtgcatgcacatctgggctgatttccaagatcgtcttcacctcatcctgggcatccctctggctctctcttatgctggctctcctattgcctg

SEQ ID NO: 367920 - DNA, 122 bp, Homo sapiens
gctccttcgcaggaccggtagggggcgcgcgcggttgagtccagcaattgcgaggacctccgcaggcgcagcccagcactgacgcctctccgggccgtggctcctctttcccaggccgaaag

SEQ ID NO: 367921 - DNA, 122 bp, Homo sapiens
acacagcctcttgtcagcactgtttggtacctgcatctaaaaatgagatcacagtccttccgctccgcaaaccctgacagagacagaatacagagtgggcttgtagacttgaagtataaaac

SEQ ID NO: 367922 - DNA, 122 bp, Homo sapiens
ttgggggtggtgagagcccaggggatggggctgcgctacttggaggcgcctcttctcccgcgacccggttcatttctctggttttgccctaagagccacctgctcagatttgcattcctagg

SEQ ID NO: 367923 - DNA, 122 bp, Homo sapiens
ggcacctggggctattcttcattctgagcagtcctggctactgcagttgcccctgctgagcgattcaggtcccttcctctctgagtcaatatggatccacaggtccccttttgttagactgt

SEQ ID NO: 367924 - DNA, 122 bp, Homo sapiens
gctgcgtagagtggcagccgtggagggacagtttgttttgagcaccaagtgggacacacccggaagtggcgcggtacaggagcagcactgccggcgggggcgggtgccagggacttggaggt

SEQ ID NO: 367925 - DNA, 122 bp, Homo sapiens
agcttcaccgcagctcccaccacgcggcgcttcagtacggctggatcctccgcaggcgagcggaaggcccccaggaggagcaggctggtggcactctcctgacctcacgctgccaaggtgcg

SEQ ID NO: 367926 - DNA, 122 bp, Homo sapiens
tttaaaataaaaaaacaagtcaatgaatgactgaaagaaccagtaagttttccagcaatccgagacaatagatagagtggggtttaatgtcttgttcacagacaaggagactgggatccagg

SEQ ID NO: 367927 - DNA, 122 bp, Homo sapiens
tacaacaactttatttcccccgttttgcagcccctcttatttttgtgtcgaggttggggtcggtactgaccgtcctgccagcagctctgaattttgaaaatacagatatcaccttcggggaa

SEQ ID NO: 367928 - DNA, 122 bp, Homo sapiens
gcacgctgcgtacagttctgtcactgactcttacacacagccctggagacgggagagtgccgggagcattctatgcaagtgtcctggcctttgcgggcgtctccacagcacaaacacgagtc

SEQ ID NO: 367929 - DNA, 122 bp, Homo sapiens
gcagtgacacaatcagcaaacctagtgaaggatgagtctatgtaaaggcaaccatgtttgcgggcagagaatatcaactttatacgtacctaaatgactgctgtgtgcacagcagccaagcc

SEQ ID NO: 367930 - DNA, 122 bp, Homo sapiens
ggcgcgctcgcctgtcccctccccaccccggccgccgggcagcgggaacagattccagcgcgcacttacccgcagctccttcaagcgctccgggagcaaagacgcagaggcggggagggctg

SEQ ID NO: 367931 - DNA, 122 bp, Homo sapiens
cgcctcctcagccagccatgctggagcatctgagctcgctgcccacgcagatggtgagggcgcaacccggggacctctgcacgccgttcttgtgcctggcagcttcgaagcccatgttggag

SEQ ID NO: 367932 - DNA, 122 bp, Homo sapiens
ccacccttaagcgcgagatgtaacgtcagcgcgcgcctgcgcccgtctcctagaagcggccgacggtagggtgggtgctcaccctggtttcctggttacagcgtctctattccggacgccag

SEQ ID NO: 367933 - DNA, 122 bp, Homo sapiens
actgagcttcctcccctccagtgctgaaatgggaaggcgttcaaattcccagcctcccatcgggactccacttcctgctcactaatgtgtaagagccttgcaaagggcggaggaggctggga

SEQ ID NO: 367934 - DNA, 122 bp, Homo sapiens
tgcacgatgcccggctccagggcccagctcctggatctcaggttgaagaggggccaggggcggctctgccaagcaggccatgtggcagggagtcccccaccttccgctccagggagcctcgc

SEQ ID NO: 367935 - DNA, 122 bp, Homo sapiens
gggcgtgtgtgggcgtcggccttaatgtaaccctggtctgcgtagaagtgtgtgttgtttcgcctgcttcccctgtacccaggtcggcggctatagagattgtggacggcgccatgggtttg

SEQ ID NO: 367936 - DNA, 122 bp, Homo sapiens
cggctctgaagaggaaatctcaggccctagatgctacaggtcattgttagcaaccccagccgctcccaggaaaccagccagcagcagcggagggcagggctgggcgggcacagggtcccgac

SEQ ID NO: 367937 - DNA, 122 bp, Homo sapiens
tcttttctagttcctcttagagccagtgaaggcttgtcagtacaagaaggtttgggttagcgtattcagaatcataggaaattaaaaccagaatggctagcagctagagtttgcatagctga

SEQ ID NO: 367938 - DNA, 122 bp, Homo sapiens
tcatcatctcggtggaggagctgctgctgcggcgcatggcggcatcggggtcgcggatgacgatggtgtgaaggggactggcgggctccgagctgacggggcctggcgggttcttcaggggc

SEQ ID NO: 367939 - DNA, 122 bp, Homo sapiens
gaatctctggtgtctccggacttcacgagatctaagacatcaacagaagagcacccaagccgccaccatgcgttacctcacgtcaccccacgggctggcaactcggctgtgtcatcagggac

SEQ ID NO: 367940 - DNA, 122 bp, Homo sapiens
atttccctgcggtttgcccacactccctgtgggcaggaggagttagagtttgccatcatgcggatagaagccctgaagctggccaggcagattgctttggcttcccgcagccaccaggatgc

SEQ ID NO: 367941 - DNA, 122 bp, Homo sapiens
ttttcaatgttaagggaactgagagagagagtttcctgagagaacaggaaggcagagagacgaatgagaagtgagaaattggtcctggccatgttattgttcctctagtccagtttaactgg

SEQ ID NO: 367942 - DNA, 122 bp, Homo sapiens
cacgcacggaatcctgagcccccggagcctcggggccgaggccggcccgggacggtgctccgagtagctctccactgctggggagccggccctgtttttgtttgaacgttttgtaacgatta

SEQ ID NO: 367943 - DNA, 122 bp, Homo sapiens
cagccggtggccgcgattttccgggccactccttccccccttacactcccctcccgcccgcgaccttcgacctccatcctggacccacggggtactggcccggggacaaggaggagacgtta

SEQ ID NO: 367944 - DNA, 122 bp, Homo sapiens
tgctgaagtcatgctacctcaaagtttaccaagctaaattggagtgtgccccttctaagtcggaacaacctacttaaataatactttcttacatatctgtcaactctctccaaacccctcct

SEQ ID NO: 367945 - DNA, 122 bp, Homo sapiens
cccaggagccagagccccagcgcttcctctgcctcccattccttctctgagcgccgcccccgcctccccacttgcgggacgctgagtctcctaatttacagcgatttcccacagccacttct

SEQ ID NO: 367946 - DNA, 122 bp, Homo sapiens
atggaagaaattgcaattttaaaatcagggaccactcatcagcccccagacagaagggcccggggctgcctggagagagggtgaggcagtggcgggcagccccggggcaatatttcttggca

SEQ ID NO: 367947 - DNA, 122 bp, Homo sapiens
attaggcgcggccctggcactgtgcatgcatgcatgagtagtagcttgttttcaccgcttcgcattagggcactttgccttgccaggccggagccagatcgcaggcggggagtgcgcgacgc

SEQ ID NO: 367948 - DNA, 122 bp, Homo sapiens
gcaacggaaaaagccttaggaatgatctagacgatcatcatctgagattgtgggctcctccgaagttaccacacaagtcccagatcagaaactgaggcgggggcttgctcagtgtcgcgtgg

SEQ ID NO: 367949 - DNA, 122 bp, Homo sapiens
cttccattgctgccttggctgggcagccttagaacaggtccccttgtcccctgtccgagccgagctgcaggataaactgagttcactctgggcagagcccacagtgcacttgtcagcctgac

SEQ ID NO: 367950 - DNA, 122 bp, Homo sapiens
tgagggagaacgcgccctgtccctcccacctcctccggactcggcccctggaggggctgacgctggaagacctgacatcgtcgcttctgatgttcatggcttttgacccatgttcaggtttg

SEQ ID NO: 367951 - DNA, 122 bp, Homo sapiens
gggaggaaagagaagcagggcctggaagggcggatcatttacaaaaaaatcgggtctctccgcctccgaggagctggtggggagaaagactacgagtcccacagtgccttgcgcgtgaagcc

SEQ ID NO: 367952 - DNA, 122 bp, Homo sapiens
gtttcggggacggttggcagcagagggtgctgccctgctctccgcgggtgagaggtgactcgaggagaccgcaggagccccttggaggtgaagccacaggtggcatcccggaatcggcagga

SEQ ID NO: 367953 - DNA, 122 bp, Homo sapiens
ctcagggccgccccagtctccctctgccgggcttggagcagggctagactaggggtggagcgggaccaccgctcccctccccctctccccctggcgcggagccccggcgcagctgggagtct

SEQ ID NO: 367954 - DNA, 122 bp, Homo sapiens
tggggagtgcctctgccctgccgccccgtctgggatgtgaggagcgcctctccccggccgcgaccccgtctgggaggtgaggagcctctctgcccagccgccccgtctgggaagtgaggaga

SEQ ID NO: 367955 - DNA, 122 bp, Homo sapiens
gcccctttttgcagagcacgaagaggatgatgtccaacaccagtccaattccagccacggcgagggaagccagcttgtcgctggagaagaccacagcacacatgaccaccacgtagcagtca

SEQ ID NO: 367956 - DNA, 122 bp, Homo sapiens
gaacttctccttgacgtggcccttgaaggacttcccagtgcggcagtagtaggtggggcccgccacagtccgtacgcgcaggaactggggagggaggggagtcagatctctcccacgggtcc

SEQ ID NO: 367957 - DNA, 122 bp, Homo sapiens
cgggatcccaccgccacagacaggagggaggtaccgcagcgacccgcctaggatgccggacggccctcggcaccaccgagacccgcctcatgagccccaggtcccgccatcaggaccccgag

SEQ ID NO: 367958 - DNA, 122 bp, Homo sapiens
accagcagcatggccaggaagccactgccatgagcacgctctccaccacaatgaggtttccgctccgcgggagcgtccgcagaaccgtcttgttgaagccgctgaggatcccgtggctgttg

SEQ ID NO: 367959 - DNA, 122 bp, Homo sapiens
ggaagaggaggaggaggaggaagagaggaacgaggcggacaacttcgacttggtcgcggccgcccgtcgctaccccataagaggctttcgcatggagtttctggacatggtccactcccttc

SEQ ID NO: 367960 - DNA, 122 bp, Homo sapiens
ttgttctgatgcacaagttaatggttccctggtgaagggacctgaaagactggagaaaaacgcactgcttcctcaacagtaggggcaatgccaagtccagggttagagcacattcagcggtg

SEQ ID NO: 367961 - DNA, 122 bp, Homo sapiens
ttctctgaatttacaaccctggagacaattttggtttattttgctgccctgaaagaggcccgaggcagtttgttatcttaacccctatgcatagtgacaccaagcagaattccagacatttc

SEQ ID NO: 367962 - DNA, 122 bp, Homo sapiens
agttctggacacagtcactgccatgtcccaggtcttgctgtgtgtggtcactatcactcccgtggcagtcaggtgctcagctttataaatagctcacacttcttgtctctccactgttgata

SEQ ID NO: 367963 - DNA, 122 bp, Homo sapiens
gtgtgggggcctgcagacgctgctccggaacagccaccaggtgttccaaggtacggagtccgcctctcccccgccgttctttccttctttttcccccttttttcagttaaataatgttttat

SEQ ID NO: 367964 - DNA, 122 bp, Homo sapiens
tttcccaaattactgtcaaaatagaaaaagggcttgtttattttaatcatgagacaaaaacgggcttgttcactggcagcatattattaatacatcctacaaatctgtccaatagctttgtt

SEQ ID NO: 367965 - DNA, 122 bp, Homo sapiens
tgttctgcacccgaggactgctattttttgccttcctggcaggtctggacatagagttcacgggccttcgttctaacctgtctgggccccagcagatcaggtaaaactaaagctgtgtcccc

SEQ ID NO: 367966 - DNA, 122 bp, Homo sapiens
cttcttgtaggaccgaattctaggcccgggcttggggtcccgtggcgtggggtcccgtggcgtgggtgtttggcacccagccaggcccagggtgctacaccagtctccacccctgagctcct

SEQ ID NO: 367967 - DNA, 122 bp, Homo sapiens
gaggatgaaaatgagcatgaacacgcacatacctcttctcttctgtgacaggagtcttgccggcttacatttcagtagtgctgggccttttgctgtctcttacttcaagtgctgttagggct

SEQ ID NO: 367968 - DNA, 122 bp, Homo sapiens
ggcctaccagatcccagggtgcacctgctgcctcagtgttgtgtatgctgtggctcaaatcgttatgccaccggccctgtgagggaggtgctagcattatcccatgttacagatgaggaaac

SEQ ID NO: 367969 - DNA, 122 bp, Homo sapiens
aaaggcaacttcaaagacaaaatgctttagctgacatctgaagaagatgggttgttgaagcggggaaccacttgtacaaaggcccttatcagtaagcatctggagcattcaaggaattaaaa

SEQ ID NO: 367970 - DNA, 122 bp, Homo sapiens
cggaaagcccggccaccagctgcctcgacctcgtccactcctgaagtcggtttggttcttcgcacccctacacccagccctttggtttggaaagccagtataaggcgtgcaagcttaaattt

SEQ ID NO: 367971 - DNA, 122 bp, Homo sapiens
agtatctacttccccctgaaactctggtcaggaacatatctaggacccccttcctcctggcgggtgggtttataaccaatcaaagtgtggaaccttcattggaacctgctatacacatagag

SEQ ID NO: 367972 - DNA, 122 bp, Homo sapiens
aatcaggcctttaactcagtaattgtcagaacctgggatttgactcccagcttaggtgagcgaagctgtttgattccagtggcagttacatagaaagcagagactcagagtatcttggaacc

SEQ ID NO: 367973 - DNA, 122 bp, Homo sapiens
tgcccaggctggagtgcagtagcgtgatctcccctcactgcaatctctgcctcccagtagcgtgatctcccctcactgcaatctctgcctcccgggttcacaccattctcctgcttcagcct

SEQ ID NO: 367974 - DNA, 122 bp, Homo sapiens
gcaatatgatgggtgtctttacaaaaagagattaggataaagatgagtacagagagaacacggtatgaagacacagggggaaggaagccatctacaagccaaggagaggcctcagaataaac

SEQ ID NO: 367975 - DNA, 122 bp, Homo sapiens
gtagtgctagcacgagaaacttggaggacgcgctgacaagccgggctgcagtctccgggtcgccccgccccgccctttccctgccgccgtgcgtgcctcgggggggcggggtctggcacgtc

SEQ ID NO: 367976 - DNA, 122 bp, Homo sapiens
cagattcacctgtgggccctggaaggcggtgctcagagcctgcaattggtgaggtcagcccgtgaggtcacaatgttgccagggcccagggggcagagcagacggagtgtgggccatcgtcc

SEQ ID NO: 367977 - DNA, 122 bp, Homo sapiens
tccatctgagcttggacactgctctcattacccacttgtcacacagccacctgtgggtaccgtcagggcacatatgagatgatcgttcctgtgcttaaggctatgggttcccccaaagagaa

SEQ ID NO: 367978 - DNA, 122 bp, Homo sapiens
cacaacagtgttcagataaatacacgtaaatgaagcctatttctggccacctcacttctgcgattctctcttccactctacgctggtgtcccaggtcatctcagcactttgagttttttcta

SEQ ID NO: 367979 - DNA, 122 bp, Homo sapiens
tgaccatcgcgcagggcggtgtcctgcccaacatccaggccgtattgctgcctaagaagacggagagccaccataaggccaagggcaagtgaaatgattactagtcaaatccgtcagtgatc

SEQ ID NO: 367980 - DNA, 122 bp, Homo sapiens
atatttaaaacattttcataatgactcagaagttggacggcaggggaaacacgcagctcccgctcctgggagcccattccgcttacgtcacctcttgccgagcccgtagaggttccgggact

SEQ ID NO: 367981 - DNA, 122 bp, Homo sapiens
ttactgtttacctacaaacattgtgccaagccctgtgctggacactggggtttccaggaacgtgttacaatccctgacctcactgtaaagccagtggacaatgttaaggagctagcacggaa

SEQ ID NO: 367982 - DNA, 122 bp, Homo sapiens
ttgccctacaacttaaagaaggttccggctttttctagtcaatttcttcttctcccacagcgttcccagcatagccctcttttggggactcccatgaagcagaattgggagaagaggagaat

SEQ ID NO: 367983 - DNA, 122 bp, Homo sapiens
gacggtttgatggatgagtttcccaagagacaatgcaatctgtgacatcacagttctggccgcaccccccaccccaggcccctgtcctgcctctcctctccagaaaaaaaaattgcctctgc

SEQ ID NO: 367984 - DNA, 122 bp, Homo sapiens
ttatatttatgggagatgtccccctgcagcaaaaaatgtgttagtgcccatgcaaacatgcgtggcttgtcaaggatcacatgcacagacagttcacacttactcctaaacccggcatggcc

SEQ ID NO: 367985 - DNA, 122 bp, Homo sapiens
caggcccgcccactgcccctgttgggttcctgagtcgtgctgcgtcgacaacggtagtgacgcgtattgcctggaggatggcggacgccggcattcgccgcgtggttcccagcgacctgtat

SEQ ID NO: 367986 - DNA, 122 bp, Homo sapiens
ccatttctcctgagcacggcaggccagtcgtatgtggagggggggcatgcaagtctgactcgcccttacatcagtagcagcggctgatgggtgaggaaacgagcacgttttctcttagggaa

SEQ ID NO: 367987 - DNA, 122 bp, Homo sapiens
gttcttataagaagaggagatttggtcacagacatggttgcatgcagaataaagacttttcgaggacacactgagaaggcagccatctgcaaaacaaggaaagagtcctcagcagaaaccag

SEQ ID NO: 367988 - DNA, 122 bp, Homo sapiens
caacgtgccgaggtccagcagcctgcaagacagagcagacaggttagctaaaggtgccaacgtccagggcaagcgtgcaggccccaagccccgcgcgccctgcccccagcggcgacgccagg

SEQ ID NO: 367989 - DNA, 122 bp, Homo sapiens
ctccggtccctcgtccgcgtccctgccgcccggccccgctcggttcgccagcaccgggcccggctagctccgcggcgcgctctccccgccgacctcccgccagccccccaccggcgctccgc

SEQ ID NO: 367990 - DNA, 122 bp, Homo sapiens
gcagggggcgtggcccacatgagccagaacctatagggagggaggttggggcgccagccccgcccccccaacgtgacgcaaatctcccggacagaggcttaggagcccgggccccagtccct

SEQ ID NO: 367991 - DNA, 122 bp, Homo sapiens
agcaagactctcgcagtcccctcggctgggccccaaaactcgagtccgcgaggcaagaagcgccaaagttggccacccagaggccgcataactcgtccgggtactaggaccagcatcgccat

SEQ ID NO: 367992 - DNA, 122 bp, Homo sapiens
tcacagcaggcctgacagagacctgggcgcaagttcccagaaataaagaaaaatgcactgcgcactgcttggagaattgaaggccttgcatttatttacctcaggccctaaccctatccgag

SEQ ID NO: 367993 - DNA, 122 bp, Homo sapiens
gtgactgctagtgtatcagaaatcacaccgagtctaaagtcgtaagtcccatttgccttacgaggaccagctgggtgctgtgagtaggtggatagttaaggaaactgtagatctgctgaaag

SEQ ID NO: 367994 - DNA, 122 bp, Homo sapiens
aacagggtgatggtggaggatgttctggctaagaaggcgcagaacccgttagaaagaaaccgccggtacccgcagccggaagcgagtggattctgagccggcccggttctctggtgcggaac

SEQ ID NO: 367995 - DNA, 122 bp, Homo sapiens
actaattaaaagacaagtccaaattaaaagcaataggaagcagctgcaatttctaaagcacgctatataattttaggtgaaaagagtgaaacctgtggtgctttactgccagcactgtaatc

SEQ ID NO: 367996 - DNA, 122 bp, Homo sapiens
tacaaaagatctttgtaaattgtgatgctctctctgtaaaaggtggttattgttacaatacgaatgctgtaacctgagtttccctaagcatcttcaaactgtggaagccttaatgacattgg

SEQ ID NO: 367997 - DNA, 122 bp, Homo sapiens
ggcggtggcactgccctacaagaagtacgggctggaggtgtaccagtctggcatcaactacgtggtggacatccccgagctgggtgtcctcgtctcctacaatggcctgtccttctccgtca

SEQ ID NO: 367998 - DNA, 122 bp, Homo sapiens
cactggggcactccattctcacagggtcgatggacacttgaacaacctcctccaacacagcggccaagagctaggaaacagttctgcacaacatgctacggggacacatagagggtccagaa

SEQ ID NO: 367999 - DNA, 122 bp, Homo sapiens
cattaaaccctgatgcaacaaacagattaatttcctctaacatctttactaatatagaaacgaagaacacgaactagtgtctctaagccactataatagttgcacatacaacatgagtgtgg

SEQ ID NO: 368000 - DNA, 122 bp, Homo sapiens
agaacagctgaggaccagtgagccctctgctttccatgtcccattctttcccaggctgtgcgaccacaggcagagagaagagaggatcagttgtctcgggagcacaaataccccacagagtt

SEQ ID NO: 368001 - DNA, 122 bp, Homo sapiens
gataggaaacactgccggccgccaggcgtgtgtctttgctggtttttcctgacatgctagcggagttttagaaatcagaaacagaaatagagaaggcacctgtgagagagcctcgcagggtc

SEQ ID NO: 368002 - DNA, 122 bp, Homo sapiens
ataattgcttttcaactttggatgtggtaaagacattcctgcagggttctaagcacaaaccgcttttggcttagctagacacgatccagagcacttgcgtccaccacttgccctcagtggct

SEQ ID NO: 368003 - DNA, 122 bp, Homo sapiens
ctgggcgcggagctccggcgcccgtccgggagaccctggagagggtggagggtggcccggcgcccggataggagaaaaggattgctccgctggcttggatgatgtttagggaggcaggctag

SEQ ID NO: 368004 - DNA, 122 bp, Homo sapiens
ataaaatgtgaaatctaataggcccacactgtgccttcatagagtggggaggacagataccggacaaacaattacaaagaagtttgaggagtataatgagggaagtacagagttctgtggaa

SEQ ID NO: 368005 - DNA, 122 bp, Homo sapiens
cgctccgctctcgtcaattttctgtttaatgtcaccgggccccactgtgggagtaggaagcgcgtcacccgggccataaatttgcggtgatggcgcctccggccgcctccccagacggaggg

SEQ ID NO: 368006 - DNA, 122 bp, Homo sapiens
aacccatgagcaaacacactcgagtctctcactgtgtaaattctactgtgctgagagctgcggtgaatacaaaagaaaacaactcaattcctcaagtgtgtgccgatggcccccgtgtggtt

SEQ ID NO: 368007 - DNA, 122 bp, Homo sapiens
cttgcacaattcttccggtaacatgccaacatatgggcagtctgattaactagaatttcccggatgaccttcaaaggctggtggagaactgctttaaaagctacatcacaaaacaatgaaaa

SEQ ID NO: 368008 - DNA, 122 bp, Homo sapiens
agtattaggatatagtacttaccatctttgtttcattcttgtctgtgtaatttcataatacgtgttgtgtttccaaaaagccctatcagagacctgcattgttagcacttctttcagctact

SEQ ID NO: 368009 - DNA, 122 bp, Homo sapiens
gtcttgctgggcgtgccaagaacacattgccctgaccactcttttctgggccatttctcacgcctgtgcttgcagtgggcacccttgccggggagacagcctccctgtgggacaaagaccac

SEQ ID NO: 368010 - DNA, 122 bp, Homo sapiens
ttgcgcccctcgggttgggggcgcgggagagcccccctctattacgagggaaatcaatgccgcattaatgcaaggtttccaggcaaggagaggggatcgcttcataaaagatgcattgttcc

SEQ ID NO: 368011 - DNA, 122 bp, Homo sapiens
gctgtacctggaagccaggaatattgaaaatggcgtctcccgctcttttccttgtcaccacgtttaccagtgtcatggcagcctccaggtaccacatgtacagggatcatggccgcctccaa

SEQ ID NO: 368012 - DNA, 122 bp, Homo sapiens
gaggagactgaggtctgtaggcagaaggaacttgccaaggtccacagcgaggtggatgcccgctgggcccagggcagccccggatccagggccttcactgtacctctgctcacccgtggcgc

SEQ ID NO: 368013 - DNA, 122 bp, Homo sapiens
tcagagtttgactagagaaaacaaactacccgaatggcaaggcctcagaccctttgtttccgaggcagctatggccaccatggccagacaaggcaagtttctttacatttaggatttggagc

SEQ ID NO: 368014 - DNA, 122 bp, Homo sapiens
ggggggacacgagtttatttaaaaactcgtgtccggggagtttatttaaaactcggaagccggcggccgcgagccggttgtttatgtaaacccggaaacgccccggggggcgggggcggggc

SEQ ID NO: 368015 - DNA, 122 bp, Homo sapiens
gccccatcccccactcctccagctcctctcctcccaagtccctgccgtcacagccaagctcgcgctccaaggcagctctgccatcatctgatgcagactcgtcagctgttgccatggagacc

SEQ ID NO: 368016 - DNA, 122 bp, Homo sapiens
tggccagtagtcttgatcgacaagctcaggcctctgaactaagcagccgctgtttatgcacgtacagccaatggaaaggcaggagtgcggccaacggccaatgaggactggtcttaagcgga

SEQ ID NO: 368017 - DNA, 122 bp, Homo sapiens
tgcgggccagctggagttccgggtgggcgtggtcttggcgggccccgcactgggagcggccggccggccggcccgccctgccggacccgggcaatgagcggcttagcacacgggccaccggc

SEQ ID NO: 368018 - DNA, 122 bp, Homo sapiens
gctaagagaccggagccatgacacagggaaattgcggcagggtggcggtcggggcccgcccggctcggcggagtcggggggcgcccccgcccccgccccccgccccaccccctcctccggcg

SEQ ID NO: 368019 - DNA, 122 bp, Homo sapiens
catggcagcagggaagtaagagctgggccagaagagaggtggggacattgtgaactgaatcgaggtattaggaatggaaaatgccaggggtctattcatctgatccagtgaacatttttcct

SEQ ID NO: 368020 - DNA, 122 bp, Homo sapiens
tgcccactcacaagggacaactgtgagaatttcttcctaactctgcactcagtgaccttgcgttggtagccatgagctacttcatgagccctcatgttgaaattggccatagtgggagtatt

SEQ ID NO: 368021 - DNA, 122 bp, Homo sapiens
ctcgttcccccttttcttttacgctctgatgtccgaaagttgccgccagcatcaaatggacggtgtttcttcctcttctgggtacctagagcgcttgggaatgcatttttacttctggtgtc

SEQ ID NO: 368022 - DNA, 122 bp, Homo sapiens
cttagtagggaaggtggtggcgttcttgtccttgcagctcagagttcagtgtctggagagcgcagagagaaagagccccaagtctcgaggaagcgtacccctcgccagatctcttggtgcac

SEQ ID NO: 368023 - DNA, 122 bp, Homo sapiens
atgagcttggtgtttggattcagttcagctggggcttgagttctactttgaactcagccacgtaccaggtattgcttagcctttctgtgcctcattttcctcattaataaaataaagatgac

SEQ ID NO: 368024 - DNA, 122 bp, Homo sapiens
cagccctcccggagagcatcacaggacttcagaacctgaatgctgccagcactccacatccggcccttgcctccacacccccaaatcagtcccacattccagcctccctaactcctcgcaat

SEQ ID NO: 368025 - DNA, 122 bp, Homo sapiens
tcacctgcctgggtggtcacctgcctgggtggtcaggctgtctcacctcaggagggcccccggaccagctgaagggctgattctgtctgcttgtggggcctaggtcccctggggctgtagcc

SEQ ID NO: 368026 - DNA, 122 bp, Homo sapiens
ctgcaggctcccctcatgctgcgggcacacaatgcgtcctttcacccggggtgggtctggcggaggcggcccctccccggggtgccccccgctgggcccctgaccccacactccgctgctgt

SEQ ID NO: 368027 - DNA, 122 bp, Homo sapiens
gggctgaatgtttcccaagtgtttgaaactggtatttgggttttccacgttggacaagtgcggctcggcggccagcggagcgcgccccttcccgctgcccgctccgctcctctcttctaccc

SEQ ID NO: 368028 - DNA, 122 bp, Homo sapiens
tcgggggtggtgttaagcaggttattaagttccacgaacattccgagctcctgggactagcgctctggaggagaacccggagtgctgcagagacgacggaggctggagagcaaaacacaccc

SEQ ID NO: 368029 - DNA, 122 bp, Homo sapiens
caggacacctccgcccatccacattcggcctggcaccgatcctgcggaatctctccccaacgcacggtttctacactggaacgattgaaactaagggggtgcgccaactcccccaccttcgc

SEQ ID NO: 368030 - DNA, 122 bp, Homo sapiens
catgggagttgtagtactcctgctgctcactttgaggggaggtgggaactaaaacagaggcggtggaagaagttgcacaaggctagagagatcactgctggagggaaaagcatgatgggctc

SEQ ID NO: 368031 - DNA, 122 bp, Homo sapiens
gaagggaggactaagagaatttcacttgatgacccttgcctctttgtgtctgggatgagccgcgcggagcgcacccttatccacccagagtgctgtgcctttaaggtccactgggggcgtga

SEQ ID NO: 368032 - DNA, 122 bp, Homo sapiens
cagcaaaggtcgtgcctacttctctgagaccacaccacttccatgacagcattcagcgcgcggggttccctccaaagcggaaccgaatcattctcaccagtatccaggtaacacctgcagtg

SEQ ID NO: 368033 - DNA, 122 bp, Homo sapiens
tagtagtttggttttatgtatgttcatgtaaatgggattgtctagggtgtcttgttctgccgtttgctttttcgcttagtgaatagccctggagctctcccagaggtggtggggtgggtctt

SEQ ID NO: 368034 - DNA, 122 bp, Homo sapiens
ccttctccggtgttatctaggatgtttgcattacaagcaggccgctttacctcctttgttcgttgtcacaggtgaaaagccatacaagtgtacctgggaaggctgcgactggaggttcgcgc

SEQ ID NO: 368035 - DNA, 122 bp, Homo sapiens
atttagtgtggcaatgccccaagggtcctgttctccctgggtgtcctgcacctggtgcaacgtcggcctggcatctagtgagccatctaaaggaacgatgatgagtgaatgatttgcctacc

SEQ ID NO: 368036 - DNA, 122 bp, Homo sapiens
gcccgcaccgtcccgccccggccccacgccctcgccccgcgccctgctctccgcacgccccggtccctccccgcgcgggcactcacatttttcgctgccgctcgaactccgctttcttctcc

SEQ ID NO: 368037 - DNA, 122 bp, Homo sapiens
gagtaaatggaaaatagggtttcattccagcacacttaggctattggtaggtgttcaatacgtatttactaaactggaaagagaatcaacttccagggggtatccaagggttgggttagcat

SEQ ID NO: 368038 - DNA, 122 bp, Homo sapiens
tctggggcacacctccaccctgatgcgatccatcggtgacctcctttgtgctttgcaaaccgagacaataggttctgctccagaatcgtccacacaagggcaggaagggtgcttttcctgag

SEQ ID NO: 368039 - DNA, 122 bp, Homo sapiens
ggcccccccggcgccgggagccccgcgcagccccgcgcgcgcccgcccagccgccgccgccgccgcctcctcccgcgcgagcctcccgcgggcagggactatatttcctccggcgcgcgcgc

SEQ ID NO: 368040 - DNA, 122 bp, Homo sapiens
gctgcgcaggccctgcctaatgacggggcgtgggggctgccggcagatgaaagccaccgccgccttcccgcgcacctgcttacctcggcatggacgcccattgtccaagcccctgccaccta

SEQ ID NO: 368041 - DNA, 122 bp, Homo sapiens
caattagaaacgacacaacatcgtttatctcccttgaaaatttccccaagactgtatgtgcggctttgttcttcccttgattttaacttttcattcatgtttctgacttagaatgatcgagg

SEQ ID NO: 368042 - DNA, 122 bp, Homo sapiens
gccggcctcacgctttttaacaccaacttcaaacgacttgggctggtgtcccagccaggccgcgcacccgcacagcacagcacagcggcccccgtccccctcgccccgccgcaccctgccgc

SEQ ID NO: 368043 - DNA, 122 bp, Homo sapiens
cttcttaggtgagtgtaagcgactgccttccccactttaggtgaaccccaggacttggagcgtctgtgggtgctcctctaatggggacaactcctcccttccgactccatcgcagagaaccc

SEQ ID NO: 368044 - DNA, 122 bp, Homo sapiens
tagtgaaaccgcgtggactccgtgcacctttcctagtgaaacccgcttccagtgagactccgtgggtggcatcccggccacccacgccctggcatgtcctcctgcctctgcaccccagccaa

SEQ ID NO: 368045 - DNA, 122 bp, Homo sapiens
gatggcgctctgatctctacgctccctgttccttcagggactccatagtattttttttcacgcgtcgtcgctactacagcagacgcctgcgttctcattatttgctgtacagatctccggtg

SEQ ID NO: 368046 - DNA, 122 bp, Homo sapiens
aaccaacttttcgtcagacaagctgcacatttgggcaggaaacaaagttcttaaggcaaacgggtgaatataaagcccattactttccttctataagtcgttcttagggttaaaaaataatc

SEQ ID NO: 368047 - DNA, 122 bp, Homo sapiens
ttggcttctggccaggccactagcacccatccgaaaaccatcctcatgattgcatcctgccgtcagcttccctactgacctggctgctgagtctgcttgtgagcagctctcggttcaaggct

SEQ ID NO: 368048 - DNA, 122 bp, Homo sapiens
ggctcaccccgcctcttccgtgctgcggcacagcgccgctggttgggcctccttgggaaacgtgctgaggcctggcaaggttgataacccgcaccttgccaagtgcttctcacagctcatcg

SEQ ID NO: 368049 - DNA, 122 bp, Homo sapiens
tgctttattgggagtaatatcctctcccttcctggatattaggaacaatatcacactgtgcgtgtacgcttgtcgcgaaattcagtggaatgtcatcctgcgcctccctggatatgacgaac

SEQ ID NO: 368050 - DNA, 122 bp, Homo sapiens
gcatggagggtgctgaggactccgagtagaccaggggattccctcctgcagcagaaccagcgggtgtatgagggtggggtcagagggacgacaggtcagcgcgtggggaggggcgggggcgt

SEQ ID NO: 368051 - DNA, 122 bp, Homo sapiens
ctgggtgtcttcagatgaagggcgacgaaatcctgagggcaatgagcctccgtgcgcacgcgcgctggtgacacctcctccctctcccagggaagcgcggccaggggaggggcgtttcttgc

SEQ ID NO: 368052 - DNA, 122 bp, Homo sapiens
aaaaactggatgagcccttacctgaacctagctttacatatatgtgatggcagatttcctcgcattttctgattatttacagacttctgaaaagctggtgaagtgttcttcatatcagtagt

SEQ ID NO: 368053 - DNA, 122 bp, Homo sapiens
tcttttctttctttctttcttttttctttctcggagcacaccgggtggacccaggcttggcggccatgaaagttcttttttctttcttccttcctttctttctttctttctttctttccttc

SEQ ID NO: 368054 - DNA, 122 bp, Homo sapiens
cttcctcgcacttgcatattcatgacccgctggggcggggcccaacgcgcagggcggagccggaggggatttcgatccctgaaaagaagcctcagaatttcacaaggcgtggccccaggagt

SEQ ID NO: 368055 - DNA, 122 bp, Homo sapiens
aagaatacgggagcagcgcgaggaatgctgggatactggaggtcggcccagcgcttcctgcggggttagcgctttttccgagttgtagaggtgatttttttttttttttttttttggtctct

SEQ ID NO: 368056 - DNA, 122 bp, Homo sapiens
acggcgtccggggacgcaggaagtaaactaagttgtttctatggcaacgcacagctttggcggatttagctggctaccattttgccttcccttgttcccaagtagtacattttgcagcctac

SEQ ID NO: 368057 - DNA, 122 bp, Homo sapiens
cgtttaatggggatagagtttcagttttgcaagatcagaaagttctggagattggctgcacgtgagccactgtgcccggtcaagagatgttaattttgaggggcctggtggctcatgcctgt

SEQ ID NO: 368058 - DNA, 122 bp, Homo sapiens
caggaggcttcctgcatgcttggaaaaggtttctgagccgtggccaatttatctaagaagcgggcgggagcagaggcacggtgggctgtgcagaccagtcaggcgccccttccataccagcg

SEQ ID NO: 368059 - DNA, 122 bp, Homo sapiens
atgtacagcatagatcagaggtccccaacccctggtcccatgtcctgttaggaaacctgccgcacagtagaaggtgaggggtgggccagccagcgtgaccacctgagctccgcctcctgtca

SEQ ID NO: 368060 - DNA, 122 bp, Homo sapiens
gggaagaggcagggagcaggaaaacgggggagagacagcaaaacacagacgcgggtgagccgtcgtaatttcgcaggaatccagtgctggaaacttcgctcgggagaccacccacccaccct

SEQ ID NO: 368061 - DNA, 122 bp, Homo sapiens
catctcaaactcctctaccaggttttccgccagcatctcggctgggtcttctaggggcagcggcccccgccgccgtcccgcctcagccgctgccccgggctcttccccggcccctccgccct

SEQ ID NO: 368062 - DNA, 122 bp, Homo sapiens
aggtggggcctcagctcccaatgccctccttcctttcctctctcccgccctctacacgaacgagcatgagcacgtctgcacaaaggtcccaaactcccgcagtcctctctttactttcagtt

SEQ ID NO: 368063 - DNA, 122 bp, Homo sapiens
tcaagtctgcaaggccctgagagctgaacgactgtcacatggaatatccaaggacatcaacgctggtctgtcccccagccagccctctttttgctcccataatcgtcctgccactctccatc

SEQ ID NO: 368064 - DNA, 122 bp, Homo sapiens
ccgcaggccccgcagcccctgcagccccggaagaaacgggttcgtcggacgacacagcttcgtcggacgacaggagccccagacattacctgggggatgctgaagaagacaactcaggaggc

SEQ ID NO: 368065 - DNA, 122 bp, Homo sapiens
tagtaagttaaaggcagcaactaatttgaaacatgtctctaagacagataatgttaccttcgtcttgacattctcttctttcaggtgtataaaacctctgaaggggggagaggaaaagccgc

SEQ ID NO: 368066 - DNA, 122 bp, Homo sapiens
gcagcctcctccgcctgcggctcctgtccacgccgcggccacgtgagcgccagattctggcgcacagaccactgccagtcctttgctgctttgcgcagcctgtcctccccgccaggagcacc

SEQ ID NO: 368067 - DNA, 122 bp, Homo sapiens
tttcaaagtgtaaaacatttacaaggaaatgtacaaatgtattaggaacatttccccggtcggtcattagcgcgcgctctccccgcgcccagggtgcccccgtgcccagggtgcccccgccc

SEQ ID NO: 368068 - DNA, 122 bp, Homo sapiens
ccatggcaaacacacccctctgctctaagtacaggggtcaaaactgtctctacaaagctccgataccaacactcctggtccatgaccttctgaacatagaaaggccttattgggtagctacc

SEQ ID NO: 368069 - DNA, 122 bp, Homo sapiens
tactctggttatcgtggcgacggcaggtctggattgccagacaggtttttctttttacctcgaggctttctctgaagggagtcggagcatttaaaaggcggcctcaaggtggattgagtcgg

SEQ ID NO: 368070 - DNA, 122 bp, Homo sapiens
cgcagggaaaggtgctcaatgccacgaatcattagggcaatgccaatcaaaatcacggcgcgacaggattccacacccgttagggtggccaccgtcaacaaacccaaacaatgcagaacaca

SEQ ID NO: 368071 - DNA, 122 bp, Homo sapiens
tttagagcctggcgcgcatttccatagctcctctgacgccaggacaatcagacccgtctccggagggctcctgcctctggatgtctaaatgttcttgccttaaacccggtgtgacgctccac

SEQ ID NO: 368072 - DNA, 122 bp, Homo sapiens
gccttcttataggctcgcagcacttccagtcgcgcgcgaggcctcctgggaagtgaagtccggagaccaggggtggccggctcccagcgcgccaagctgctaaccccctaactcccgttcct

SEQ ID NO: 368073 - DNA, 122 bp, Homo sapiens
agcaaatgtcatggctggctcgctcaagcatccagggaaccgaagctaagcgcatcctgacgggcttttaaaatgacattgattaggacaagctgttcccaaccccagtaagagttaatctg

SEQ ID NO: 368074 - DNA, 122 bp, Homo sapiens
atgaaagatttgacataggtttcatcgctttcacacaagtacttttctatttttttactacgtaactcaaatggagtaccataaaggataaacactctgtcttctttttctccatttgcagt

SEQ ID NO: 368075 - DNA, 122 bp, Homo sapiens
aatagcgcactcggtacggcagcatctctggcctccagccggggttaaccctgacctgaacgccctgtttagctcccagcatttcatgattccgcttccctgctccgtaaaaccgaagaaaa

SEQ ID NO: 368076 - DNA, 122 bp, Homo sapiens
aactgctgcaaaaaattcattgtatcggggttagactgcaaatacttctacccctcaaaacgaatctgcaaattatttcccagatgctgagtaaagaggtgaggaggttccaaactccaaat

SEQ ID NO: 368077 - DNA, 122 bp, Homo sapiens
gaggttcagtgaggggcctgggagaattgctgagaatgggatagtccgaaaggcgcggctcgcagcctgtggagtgtgaggggacctggggagcccagtgtgcaccccgtagagtttggatg

SEQ ID NO: 368078 - DNA, 122 bp, Homo sapiens
gcgacgcgagagaactgctgggatgcgtggccctggtatgggcgcacccagcgtccggggcgcaggttctctcagcccagcttctcctcccactcactcgctcggatctcctccctccttca

SEQ ID NO: 368079 - DNA, 122 bp, Homo sapiens
cccaacaccacagtgccataccctgtctgaggcactaatcaagcgactgcctgtttgctccgtggttaaagcacttcctgcagctaatcttcctagataggctctcagctttaataacctat

SEQ ID NO: 368080 - DNA, 122 bp, Homo sapiens
ccatcaaaagcttctcctctcggagctcaaggacacatcaaatgatgtcacaccacttcacgcccttctcccagcagccccgcttcagtgcctgggaagctgcacaaaataagattctgtta

SEQ ID NO: 368081 - DNA, 122 bp, Homo sapiens
tcaccatcaaactatgaaatcctactgaaaccatccctgtgcttctcgtgcacaggtactcgttgatctaaatgttgcatttattgtgttcttgcttttttccccctttttttgtgtgtgtt

SEQ ID NO: 368082 - DNA, 122 bp, Homo sapiens
tgatttgcacatcaactgctcaactgtggattgttttttacttttccttttaaaccggttcgtatatatttttcttcgctgttacgaatttacagcagcatttgtacatgtaaaattaaagg

SEQ ID NO: 368083 - DNA, 122 bp, Homo sapiens
ggtttcagctcctgtactccagcgttccgaggcccacgtcttgcgtcacgtgtcccgcaacgcaggagcgctttctctggccagcggagaagcgaggagaaagactccaaatcagtcaggga

SEQ ID NO: 368084 - DNA, 122 bp, Homo sapiens
gcggcctgcgggtcagtgtctgtggggattggctaagcctcgtaaaccgcagccatggggcggggcttgcaggcccggaggctggacctgagacggaagtgggggaagctggctcagatgat

SEQ ID NO: 368085 - DNA, 122 bp, Homo sapiens
gctctttttgccgggctcgcctcctttcaggagccacagtcagaggagccgcttcctgtccgagggtccaggtgctgcaggaccctggctcccaggcccagctcccctagagccggcctcgc

SEQ ID NO: 368086 - DNA, 122 bp, Homo sapiens
gaggttacttgctgtgtctgtaactgcagggtcgggagggatgcatgcacagtcacagggcgggcagttgagctccttcacacaggggttctcagagcaactgtcagggcagaatcctgggt

SEQ ID NO: 368087 - DNA, 122 bp, Homo sapiens
ccctttctgagtcaaagaaaggggtgacggacgcacctggaaaatcgggtcactcccacccgaatactgcgctcttccaacaggcttaaaaaacggcgcgccacaagattatatcccgcacc

SEQ ID NO: 368088 - DNA, 122 bp, Homo sapiens
gcgcgaaagtcttggattactgtgctttgcgcaaattggacgccacgcctgaagggcccgcggaatcaatcgcttgccttctgtggggtcctggcatcagcgtgaccaggacatgctattat

SEQ ID NO: 368089 - DNA, 122 bp, Homo sapiens
cccggaggagtccggagtccggctgaaagcaaaggttctcgaggctaactgtagcccccgcgctggtaacccgacacccctttcccagcgccgcacgcggggccgggagcgggcgcgccagg

SEQ ID NO: 368090 - DNA, 122 bp, Homo sapiens
gaaaaaggccaagatggaaaaaagaggaagacaccaccatcatcgtcaacatgagcagaacgatcagcctccttgcctttgcccatgctgcgcccctgcctgtgatgccccttcacctcccc

SEQ ID NO: 368091 - DNA, 122 bp, Homo sapiens
agatcacaattactccctggaaatatgtttacagcagcaattcccaactgaagggacagccgaaaatgtttgcagacattgtcacaacccaggggaaattgctactggcatctactggccag

SEQ ID NO: 368092 - DNA, 122 bp, Homo sapiens
agcatgagaaagcatgcggccagcagatggcgacagaggcctttgtgagccactggctgccgggttctcaagtgctggaaggtggctcttcacagctattgtataagtgatttatgtatttg

SEQ ID NO: 368093 - DNA, 122 bp, Homo sapiens
ccagcctgtggccaaagttgtgaatatgcaaaaactgtcaccagtctccactcgctttcccgttcccttcctagtccccttctttttctagccccaatctttttctccctgttcctcctccc

SEQ ID NO: 368094 - DNA, 122 bp, Homo sapiens
gcctgtctggtggtgctttgctcccacaggctcttgctcggagctgtgagatgctggtgccgttctcaggggtctcctctgtgctgtggctggggagccatggccacaggcatcctgaagcc

SEQ ID NO: 368095 - DNA, 122 bp, Homo sapiens
aaatgaggaaggagtccatgaaggggctttggggaacctgtaacatcctcctcaggctcccggggacgcccctggaaagcaggcagaatcgagggcgctggggcccccgcgaggggagcggg

SEQ ID NO: 368096 - DNA, 122 bp, Homo sapiens
gagaggcggaaaaaggccttcccaggcgcgagaagatgacgtcacagtagcccggccgggcgccgaggttgccttagggctctctgcccagtaacaggcatcgaacggtgcagactgaagac

SEQ ID NO: 368097 - DNA, 122 bp, Homo sapiens
ctgggaggggctgcatgctgtgtgctcaggtcacactggaaggcatcagctgggtccccgcgcttgctctcggacctctgcaggcctcctgggaaggtgactcagatccaacttctaggact

SEQ ID NO: 368098 - DNA, 122 bp, Homo sapiens
cagcggccaaagcctaagatgtgaagaaactcacctgaggccactaaattggaaagtggccgcgcggagatgcaggtgaggcccatgccttccaggctccaaagcccaggcccttctcagac

SEQ ID NO: 368099 - DNA, 122 bp, Homo sapiens
gggtcatctagtcataagggaaaatccttcgggctgtgaccgaagcaacaaaggcaaaaacgcggacgttggttatgaagggtgtggtctccctggtggagtacgtcggtgggttgggatgg

SEQ ID NO: 368100 - DNA, 122 bp, Homo sapiens
cgggccgccctggagttgtggaaagttgtggacgcggtgctggtggccggcagtgaggagcggactgcggtgcacccgttgctgctttcccggactgtccctgccaataaaacaaactggaa

SEQ ID NO: 368101 - DNA, 122 bp, Homo sapiens
ccccagggtcgggatgaagtctggggtcgcgggcgcgggctgcgtggggtttcagttactcgtggagtttcagttactcgtggacaaagcgccgcgcgctagcatagcggcccgggcggagt

SEQ ID NO: 368102 - DNA, 122 bp, Homo sapiens
ccgcactgctgcagcccgggcgaggctgcgccccattggccaactgcaatgaggtcattgcgggggcgggggccggcggcggcgcaggggcggggctttacggacgcaagcacgtcgaagcg

SEQ ID NO: 368103 - DNA, 122 bp, Homo sapiens
ctgggcgtgatgggtactttactgggtaagaggagacgggtgccccccacccactcctcccggccgcgcggacctctcccgctcagacctgcatctgcattcctttgagtttaccacggact

SEQ ID NO: 368104 - DNA, 122 bp, Homo sapiens
gtatgtctgcaagtgaaagggcagaggaaagtcaggctgatatgtgaaaaaacaaaaggacggaagagtctatctgcctttattatagaacccctgagaagattgcagcactgggttttttt

SEQ ID NO: 368105 - DNA, 122 bp, Homo sapiens
tcataatcttattgaaatcctatatcttcccattgacttttatcgtttcaagccagttaccggagttgtcagtaccaacgcgcggacgccgcgcaaggccggggcgggggacttcccttggt

SEQ ID NO: 368106 - DNA, 122 bp, Homo sapiens
tcctcaacctcccaggacctatctggctccagccctctccacctccccagtcttctcccccgcctcagccccatccgtgtcatacctgccggggactggttgacagctttaacaaggtgggt

SEQ ID NO: 368107 - DNA, 122 bp, Homo sapiens
gggcacgagccagctgcccctccgcggccgggagcccaaccctggggaagagagcagccacgccccattcctccaccgtgactcgaaccttcagctgctggagcccctggccaccggggccc

SEQ ID NO: 368108 - DNA, 122 bp, Homo sapiens
ccgctccctccagtgaggtgccaaatgtgggccacactctgggccccagcgggggccttccgggcagtggcgcagagccattggaggtgcccgggccctggggcaggggcggggcgggagca

SEQ ID NO: 368109 - DNA, 122 bp, Homo sapiens
ggtcttgctgcgcgactcttccatctcacgctgccggacctgtctcttccccgccgtccacgctggggacggttttagtgatttccccgggttctgtgccctaaatcctgccacacttcagc

SEQ ID NO: 368110 - DNA, 122 bp, Homo sapiens
caagcttgtgtggcctttggcgccatcctgccccctgctgggggcgacctccaccgcagacgaccttctgagccctggtttccttgcctgtaaaatggagtagcgcctgccaaggacggctg

SEQ ID NO: 368111 - DNA, 122 bp, Homo sapiens
tcacccatgtactgaagagtgccacagatagtgtaggcttgagctccctggggcacgtggcgggacagaccaaagtctgtcagtttcagatggcctatgaaagaaggtaaggcaactgcacc

SEQ ID NO: 368112 - DNA, 122 bp, Homo sapiens
caccccaggcataaacagaaatggatgtgcgaatgagtcacgcacgcaagggaaggtctgcgatgtcctgagtccaagggctggagtcagtccctgccctggtgctgctgctacacttagct

SEQ ID NO: 368113 - DNA, 122 bp, Homo sapiens
gcaagacctggaaacgaactggccagtcccagctgagtttcagcctcactgaggggccctcggcccgtgggctctgcgaggggagcctgcccgtcacgggggcagctgtgggcatgcggact

SEQ ID NO: 368114 - DNA, 122 bp, Homo sapiens
catatttggccttatatgggcagccgcgtcacggacggcactcattcacataaaacgctgcgcggccggcggaatccccggcttctagggcggcgagcggccgggctggctatcgagcgagc

SEQ ID NO: 368115 - DNA, 122 bp, Homo sapiens
ctcaaaccccccaccgcgcgcgcctttcccatgcacacctccacccgccccgggcccggccggtcctgaccccagagagcagctccagctcgcaggaagcccaacgggggtgtaggccttgt

SEQ ID NO: 368116 - DNA, 122 bp, Homo sapiens
gaataccgagcacgatagctggaccaggcggcatctgccgagacaatgggagcggggagccggacagggggcggggcccgaggcggggccccgccaataatggctcggagccggcttcaggg

SEQ ID NO: 368117 - DNA, 122 bp, Homo sapiens
aagaatccttccagaatattgacaaaatgcccttgtgcttatacacatgctcaagagaagcgctgcacattagtcaaacttcataatatggtatcaaattaaaatctaaagtaaactacaga

SEQ ID NO: 368118 - DNA, 122 bp, Homo sapiens
tacaagtttctccatctgtaaaatgaggatgtttctgtcatccttggtatcatttagatccgtttagtatctgtcaatcagtgcagttctgcttgtgtgtttacatattgggttttcaagtt

SEQ ID NO: 368119 - DNA, 122 bp, Homo sapiens
ggctgggcctcgagcttttctgcacgtgagctcggtggtccagcagagtcttctggctcccgggaaagcagcgtggcgccgccccagcccccagtccccagactagggattgggacgtcagt

SEQ ID NO: 368120 - DNA, 122 bp, Homo sapiens
ttcccctacaaaggaagaggagaccggagacgggacgtttgctttgttggccgaactcttcggctgctggggatttccttcaaacgccattaacttctcacactcagcagccactcgggagt

SEQ ID NO: 368121 - DNA, 122 bp, Homo sapiens
atccgggatagtaaggtctgtatatccctgatcatgtgctgagccatcaccagccgtacccggggctcactctacaatgagagaaggtttatcagggtaggttacagatgaagccatgagtt

SEQ ID NO: 368122 - DNA, 122 bp, Homo sapiens
acactaacacatgctaacacacaatgcacaccccctcctgtctgtgtgtccgtgttcacacgctcacacacgtcatccacactccctcctctcagtacgtctgtgctcataccctcacacac

SEQ ID NO: 368123 - DNA, 122 bp, Homo sapiens
gtgtgggttcgcctgctcgggacgggtcgtatacgtgggatcctgtaacacgtggccttccgggtccggcctcttccacacagcgtgtccgcaaggttcatccgtgtggtggcgtgtgtcag

SEQ ID NO: 368124 - DNA, 122 bp, Homo sapiens
gactaatagcgtcagcatcacctgggtgggggcctgttcgaagtgcagaatttcaggtcccgccccagacctactgaactagaatctggtgcttcttacatcctgtgcacattaaagtttga

SEQ ID NO: 368125 - DNA, 122 bp, Homo sapiens
ctgtgtgtgcacccgtgtgtgttcacagatcattactgtgtgtgcgcccgtgtgtgttcacggatcattactgtgtgtgcgcccgtgtgtgttcacagaccagtactgtgtgtgcatatgtg

SEQ ID NO: 368126 - DNA, 122 bp, Homo sapiens
ttcaaatgatccacctgcttcggcctcccaaagtgctgagattacaggcgtgagccactgcgcccagcctgggtgattctttacagtaacacagagtctatcaggggcacaacaggggcagg

SEQ ID NO: 368127 - DNA, 122 bp, Homo sapiens
agactcattctcaatttgagtcaccacagggtaattatgtggaggtgaaacagtgtgggccgtgtcctccaagagaatgcaggttgcaaatcccagcctaactatacaccatccttggccaa

SEQ ID NO: 368128 - DNA, 122 bp, Homo sapiens
ctcgctccctgctccaaactgaccatgaacaacgacagccccaaaataatatccataacacgcccggccgagagccacgccatcccgcaagaaaaggacttttcaagcttacctgcgtgggt

SEQ ID NO: 368129 - DNA, 122 bp, Homo sapiens
tgcagtagctagaaggcttcaggtaactccaaagccaacactgggtgaggcaacacacgccgcctcaggactcagcatttctttcaggctgcgttttcgtggcagacctacccagattgatg

SEQ ID NO: 368130 - DNA, 122 bp, Homo sapiens
gggacaggcagtggctccattgacccggatgagctgcgcactgtgctgcagtcgtgtctgcgcgagagcgccatctcgctgcctgacgagaagctggaccagctgacgctggcgctcttcga

SEQ ID NO: 368131 - DNA, 122 bp, Homo sapiens
agattctggaaaaacagactttctcccttttcctttcccctctggagcagctgggaaaggcgtctctcggagcttccgccattcagaaagtgtttccccgcccctgacggccccagcttgat

SEQ ID NO: 368132 - DNA, 122 bp, Homo sapiens
tgttttgatattggacaatgcccctggccacccagaacctcatgagttcagcactgaaggcgtcgaagtgataaatgcttgctcccagagaagcatctctaattcagcctctaggtcagggg

SEQ ID NO: 368133 - DNA, 122 bp, Homo sapiens
ggtgccccagtcctgggccccagctaggagaggctgaaggaggacagtggacgattctcacgctttggaaaagtgtcagccctcctgcatgggaggcctccccgagtctcttactgagagct

SEQ ID NO: 368134 - DNA, 122 bp, Homo sapiens
cagccagggttaatcatttccacgaagccttgaccccacctgccttggccgctctgctcccgcctcccactgcccctcaggccagctcaggagccatggggcgctgggcctgggtccccagc

SEQ ID NO: 368135 - DNA, 122 bp, Homo sapiens
cttgctgcaaatacagactgtgcactcctgtgtggcacctcactagggtggggagtcaggcgtcaagggcctgggctggactccgtccacgataaaagagcagacttttggcagggggtggt

SEQ ID NO: 368136 - DNA, 122 bp, Homo sapiens
tacgaggctgtgaggttggaggcgcttctccctgcctgttaagctgctcctatcacatcacgacaggatggacattatttttctcttttgaattaaatctttacaacagttcgaatgctgta

SEQ ID NO: 368137 - DNA, 122 bp, Homo sapiens
cggggattctccagaaacacaggcgtgcctgggtgtgcgctcaacttcccgggcgagggacgtttctgcacttgccctcggcttctgaactttgtactttgcgagtgtactttgtactttgg

SEQ ID NO: 368138 - DNA, 122 bp, Homo sapiens
gagctttaaatcatgtatttcatgtggtgagaaacgtggcatgcgcgaacagacaccacgcgagacggaggagaaaggtggcatgcgtgaacagacactacacgagacagggaggagaaacg

SEQ ID NO: 368139 - DNA, 122 bp, Homo sapiens
gttcctgtcaagcagtgaatcactaagggcaagcctcgttctggagacatgtgcatcccacgggggaattagaccttaacccaaaggaatgtggctgtgatggcggaatttcaggcagctcg

SEQ ID NO: 368140 - DNA, 122 bp, Homo sapiens
ttctccaaggagactttccatgaggcgcctcctgccatctgtgggcggcgttgggaactgcggccaccgctgcttgggaatcaggacgtcccagctcccaaccggcggtcattcattccctc

SEQ ID NO: 368141 - DNA, 122 bp, Homo sapiens
gcggattcgttggtgtaatctcttttcggcttaaagagccagaagcgacaccacagactccggcgggtcacatgactccagtctagctcgcattgcggctcccgcccgggcgagttctcgcc

SEQ ID NO: 368142 - DNA, 122 bp, Homo sapiens
gccggtgcccgaaattgggctcctgcacacagtggcccgctacaagttctacctggctttcgagaactcgcagcacctggattatatcaccgagaagctctggcgcaacgcgttgctcgctg

SEQ ID NO: 368143 - DNA, 122 bp, Homo sapiens
gcgaggcccgcgggccagctctgcgtctgtcttcctggcagaggcccaggcacacagcagcgtcccggcgctgcctcctgtctttcctactgtgaaacctattactccatcacgttctaatc

SEQ ID NO: 368144 - DNA, 122 bp, Homo sapiens
gaagttctcaggactcagaggctgggatcatggtagatggaaccctccttttactcctctcggaggccctggcccttacccagacctgggcgggtgagtgcggggtcgggatggaaacggcc

SEQ ID NO: 368145 - DNA, 122 bp, Homo sapiens
gcagctggccaccacttctccgactcgacccctccaacaagcatcgcagggcactgtcctcgggggtacagaccgtggtcccacattcgctaccactctgttccacgtcatccaggtacacg

SEQ ID NO: 368146 - DNA, 122 bp, Homo sapiens
cctgctcaggcagaacaggtgacactcgtggcgggggctgcaccccaaacacttgccatccgactaagggtgtggggcagcccttctttccttagtcctggcatgtcgggtgggtcagcttg

SEQ ID NO: 368147 - DNA, 122 bp, Homo sapiens
aaggccccgcagtggattccagggtttggcgtttggaggggtgaggggcgacccgcagcgcgactcgacggcgccccccaggggccgcccgacacgtttctgtcaccttggctccagactga

SEQ ID NO: 368148 - DNA, 122 bp, Homo sapiens
tgcctgtcatcctccttttctcttggagcctcaggtcccagcccgggatggtttccactgcgtgcctgggcctccagggcacctccatgctgatgcgtgcttgctgtgggcgtggagcttac

SEQ ID NO: 368149 - DNA, 122 bp, Homo sapiens
ggagtcgctgtgggaagggcccaggggaagaagggttgctggggcctctgaatccccccccgatggaggcagagcctcatccattcccagagagtctctcgccacgagccccggtacagcgc

SEQ ID NO: 368150 - DNA, 122 bp, Homo sapiens
agaggggcgcagggactgaggagcagacggtccccaacctagggccgaggcagggtctcgcggggaggaaggagtgagatggggctgggagagagaagggaagggggcgggtcttggtcccc

SEQ ID NO: 368151 - DNA, 122 bp, Homo sapiens
ttagaaatatctcacaggggagatgacccatgcctagcatctgtgtttgagagggagtttcgtcacagaccagtgtctagggagccctagaaagctgttactcccaataaggcctagttttt

SEQ ID NO: 368152 - DNA, 122 bp, Homo sapiens
accacaataaagtctcttgcctgcatctcccccttgctccctctgcctcctgcccaaccccgtgcttccccacgtggcagtggtgtgcctagcctcctgcttccagggatctgtgagtatca

SEQ ID NO: 368153 - DNA, 122 bp, Homo sapiens
attatttaccatcaaggcataaacacttctcagaggcagctgaacccatttgtcctgccccgcgcgcttatttgagaaggaacacggagagttgttagaatcaaaccaccgctctctgaatt

SEQ ID NO: 368154 - DNA, 122 bp, Homo sapiens
ggtgatctgcctgcctcagcctcccagagtgctgcgattacaggtgttagccactgtgcccggcttcccacttctgatgtttagctttggagctaggtaaattagcacaaacccacatcaga

SEQ ID NO: 368155 - DNA, 122 bp, Homo sapiens
aattttacagagctcaccccaaccccccacactcccaccccacccccagggatggaggctcgcagagattcatccatcgttcagaaaaagtcaggagagaacaagaagggggagggggatat

SEQ ID NO: 368156 - DNA, 122 bp, Homo sapiens
cgcctcctgacagtgattcctcactttaatgagccaccactactgtcactcaagatgcttcgcactgtcattggtcgcaaactcttgctggtcggccagtttcggccaactggcaagcactg

SEQ ID NO: 368157 - DNA, 122 bp, Homo sapiens
gcccggtgagtgcctgcaagtgcccagcgagtgcctggtgaatgcccagtgagtgcccagcgagtgcccggtgaatgcccagcgagtgcccagcgagtgcccggtgagtgcccagcgaatgg

SEQ ID NO: 368158 - DNA, 122 bp, Homo sapiens
taaggaagagtgaccaaacacaatacccagccctgcaccttctctccatccacgaagatacgctgattcctggcagctaacatgggactcaaaccatcaggcagatgaacactcacctgttc

SEQ ID NO: 368159 - DNA, 122 bp, Homo sapiens
gaatcgtcacctttttgtgtgcatgggtgggataagaaaacttaactctatcccctgtgacggaatagtggccattccaactgctccaggctccagcagaggaagaccggggtatgtggccc

SEQ ID NO: 368160 - DNA, 122 bp, Homo sapiens
aagtgttcctaacagtgtacatttctttcccctccttaagagcagaagttcttggccgggcgcagtggctcacaccagtagtcccagcactttgggaggccaaggtgggcagatcacgtgag

SEQ ID NO: 368161 - DNA, 122 bp, Homo sapiens
tgcaccgcgaggtctgcaccgagaacactgccccaagagctatgccccggagctctgccccgagaggtttgccccagagctgtgccctgagagcactgcaccgagagctatgccctgagagc

SEQ ID NO: 368162 - DNA, 122 bp, Homo sapiens
gcagcgtcactcataataggccaaatgtggacataacccaagggtctgtctgcagatgagcgggtaaacaaaacgtggtacagtagtcccctttatcggcgcatgacagttccatgaccccc

SEQ ID NO: 368163 - DNA, 122 bp, Homo sapiens
gggatcggggctgtgctgggcgccgtggggccgggacagcagcagtgccggcggggacagcgccgcggctggggcctcgcgcctcctggagcgccttctgcccagacacgacgacttcgctc

SEQ ID NO: 368164 - DNA, 122 bp, Homo sapiens
ccgatggtgctgggtctttcctaggctctcagcagtttggtacccagacaggccaaggcccgtaatccagggccacaaatcttgcacaaggcaagctgagtccggcgtaaactgcagggcaa

SEQ ID NO: 368165 - DNA, 122 bp, Homo sapiens
ggtactttagctgggatatgaagagtgaagaggcaaaccgcagccaacacccagctaccgcgagcagtgggactaaaatgcgcaaccgcagtggacatctaggcctcagctccgcttctggt

SEQ ID NO: 368166 - DNA, 122 bp, Homo sapiens
gttggtgtttgaggtatccagagcagatcaacttactgtacagttagtggggagtgaggtcggctgacacttgattgtgcaggacctgggaggccatggtaaagatcagaattctattcctt

SEQ ID NO: 368167 - DNA, 122 bp, Homo sapiens
tggaaggcctaggcaggaggatctcgagcccaggagttcgagattagcctgagacctcatcgctaccaaaataaataaagtaggcatccatttgtgtaaaacaaaccatatatacacacata

SEQ ID NO: 368168 - DNA, 122 bp, Homo sapiens
ggggaggggcggcccgggagggggaggtaaccgccaggggaggagaacctctcccacccccgcctgcacagatccctctggataaagttaagagttcccacggctgacagcggatgagccca

SEQ ID NO: 368169 - DNA, 122 bp, Homo sapiens
cactccggcccctccacccggggtgtcagttacagaaggtctagggggcagcgagggggccgaaagtttctgatttaatagtgagatcaacatctagaaagatcaagttaaaatgcgtcacg

SEQ ID NO: 368170 - DNA, 122 bp, Homo sapiens
cggagaaggggagcaggttattaacttaccaccgggccgtctggcccagccctgggagcgcgggaggccctgcagatcctgcccagcctgcaccccgtaccacccctgcaagctgcacagta

SEQ ID NO: 368171 - DNA, 122 bp, Homo sapiens
gtgtctggggaacccctcaccccacaacatctggtgtcagcagtgtgttgtgaggctgggcgcggtggctcacgcctgtaatcccagcactttgggaggccgaggcgggcagatcaagaagt

SEQ ID NO: 368172 - DNA, 122 bp, Homo sapiens
ccatgtagtaagcgatagtggtataattttgaacaggttttttttttaataagcatctaacgtagcagttttaaatttcaaattagcaccaccagaaggaccaccatacattctgctgagtt

SEQ ID NO: 368173 - DNA, 122 bp, Homo sapiens
gctcttgagaaagacatgaaggcccttgccgctgtcggcatcactccttcctccctaatccggtcagttaattgctgagtgctcgcttcctgatctgcgtgatggcctcggaaccgggctgc

SEQ ID NO: 368174 - DNA, 122 bp, Homo sapiens
ttttaattgtgacggtgcggccgcttgggcgtgatcccttggctggggctgcagggggcccgtcctccaggggcgcagagggaaggaccagcgtttccaagccgggctctggccgccggcgc

SEQ ID NO: 368175 - DNA, 122 bp, Homo sapiens
ccaacttggcatttctgcctcctggaaccccaacagagtcttggaggcaggcttctggcccggcatttccactacgtgcttgcatgcatctttgtttcgaagggaggattggtgggtggggt

SEQ ID NO: 368176 - DNA, 122 bp, Homo sapiens
aattcaaccagttatcagatggaaggccaaggaagcttggggagggctactgaggggatacggtaggcttgtctgtggagagcaaaattcttcagtctacaaagttcttttctgggctcctt

SEQ ID NO: 368177 - DNA, 122 bp, Homo sapiens
tgccccctccagccccaaaaggggtgtctgtttccctggggccttgggctgtgccagacacgacaatgtgatctatgctggggtcttggccacggcgcaggctgcctcccacataacccctg

SEQ ID NO: 368178 - DNA, 122 bp, Homo sapiens
gtacagcctactaagaaagtatttagggacttttatgctcctaacagtcactggaactcacgtcacaatgacgtgtattccatttgcaagaatatatactttaggtcggggtgcggtggctc

SEQ ID NO: 368179 - DNA, 122 bp, Homo sapiens
ctccgggctgcacgtgcaaggcctcggggagggtggagctctggcttcccgagctgcgctcgctcccggcttccgccgaggtgcccggggcgccggcctggagcaggcgggggtctgggtgc

SEQ ID NO: 368180 - DNA, 122 bp, Homo sapiens
cctcaaattacatttgagaggagacttcctacagttactccatcttttgtaggaactaatcggagctggtgttctctagcacacactttttggcagcttcataaactgtgtttgaggtttcc

SEQ ID NO: 368181 - DNA, 122 bp, Homo sapiens
cacgcgcagacacctcccccctcgaatctaggccctcgcgacccttgccccgaacctccgcgggtctcacctgctcggagttgtccagggagcccccaggtttccctatacacttccggaaa

SEQ ID NO: 368182 - DNA, 122 bp, Homo sapiens
ataattctacctttctctgtttctagggaaactgcaatctgttctgaaatgactgctgaccgagatccagtctatgatgagagtactgatgaggaaagtgaaaaccaaactgatctctctgg

SEQ ID NO: 368183 - DNA, 122 bp, Homo sapiens
cccagcccggcaccactcaaaaagtctcagcagtcgttgcttttcaatttgctcccctaacgagaccgcataggtaaacagacctccctctaacccccgaccgaaaaaaaggcttattttca

SEQ ID NO: 368184 - DNA, 122 bp, Homo sapiens
gactcttaataaaattacactgcacacagagctagcatcaagatccgctcccgggatacgcgcactgctccggggccctcaggcggagacccagaccccgcgcggggcgtcaagcgcaggcg

SEQ ID NO: 368185 - DNA, 122 bp, Homo sapiens
gcagagaagctggggctgggctgcagtccctagagcggggcgtcatcagtcctccacttgcgggggtaaccctgctggtggccatcgcagcgggggttccccatgctgtccagaggcaccac

SEQ ID NO: 368186 - DNA, 122 bp, Homo sapiens
ggggagcccggggagatgcaggaccacccactggcggggaagcagctagcagccctcccgcgcccccgcgctgccgagcgccttctgcctccgcgctcggacgagagcccgtgccggccccg

SEQ ID NO: 368187 - DNA, 122 bp, Homo sapiens
gcagaggtaaccgcacaggtggactcagtggtggctctcagtcccagatcctgaaggctacggcgagtctcccagccccggggccaacccagcggccaggctgcagccgcacggcggcttag

SEQ ID NO: 368188 - DNA, 122 bp, Homo sapiens
gagggggaggcgattcctgtctgggttttgtgacttggccaagtcactgtctgaaaatcccgcatcacacagttgaccttgtggatctggtgcacaagatcccctggaaatcatctgggcaa

SEQ ID NO: 368189 - DNA, 122 bp, Homo sapiens
ccctccctggcctccagaggtggcgtgggctggctttgcacgaaggttgtgctgggagaccggacccggggctgcagaagaagctgaaggctgactttgtcccctccccgaaaaagggtgtt

SEQ ID NO: 368190 - DNA, 122 bp, Homo sapiens
attgtgaccttccatccagggccccggggatggcagggcagagtgtgcgctgcacaaatccggaagccaccattcacctcccctgcactgtggccctccctggcattgccaagcctaacaca

SEQ ID NO: 368191 - DNA, 122 bp, Homo sapiens
gtttacgttcacactcgctaaaaggggtaggaagaattggagagcttttaaaatacttaccgcgcccccaagttttaggtgtgtaggattcatcagtaaacagaaaaaggagctgccctcat

SEQ ID NO: 368192 - DNA, 122 bp, Homo sapiens
aaagacttaccctgcgccggcgacaccctcgcggggcgcgcgagctgcagcacagctatccggaggcgtctcgcttcctgtgcaacccaatgactcacctgggtccgcgccgggctgctcct

SEQ ID NO: 368193 - DNA, 122 bp, Homo sapiens
gtgataaaaatatgtcacttaaggtttcctgcatctgccatttgtgaacgtacagttgagcgacattagttggtgccatctgtgagtgcacagtgcagcaactttagggggttcacaatgtt

SEQ ID NO: 368194 - DNA, 122 bp, Homo sapiens
ggtctatggcgggtaggtataaggaaagccaaaagcactccaagcgaggctgcagtattgcgcacgcgcagaaggtggccgcggggcggggcctgaggcgaagcaggccccgcctcaaactg

SEQ ID NO: 368195 - DNA, 122 bp, Homo sapiens
acccatccactgtagttcgcttttacttccgcctctggggtccggagcggctaggaggagcggaagtggaaaagactaacttccggcctcgggtcgcgcgcagaggtgatgtcgttggtcct

SEQ ID NO: 368196 - DNA, 122 bp, Homo sapiens
tggtgaggatctgtgggggtcaggctgctgggtgggatggctgagtgttggggccttgaccgttagtgaagagcccgtagtggagggcggggcccaggcagggagaccagctggggtggggc

SEQ ID NO: 368197 - DNA, 122 bp, Homo sapiens
tccttgcgtgattattgcccttcaccgatagtaaatctgggaatcccctggggtcctgagcgcactttggtatgcggagcccacaagctggcctggacaggcatcactgctccaggcagctg

SEQ ID NO: 368198 - DNA, 122 bp, Homo sapiens
tggggttttccccgcaagtcctggcccggggcctggacctgctgaggtcccgcccggccgcggcccgctctagaccggagttcccgccccaaggcccttctgaggcgggtgtcgaccttcgc

SEQ ID NO: 368199 - DNA, 122 bp, Homo sapiens
tgacctcgtgatccgcctgcctcggcctcccaaagtgctgggattacaggcgtgagccaccgcgcctggcccaggtcagtttttgtaaatattccctgtgtgcttggaatggtggctgttct

SEQ ID NO: 368200 - DNA, 122 bp, Homo sapiens
gcttcacttttcccaagtaggggaaagagaaggggtctacagggctaggggtggagggagcggatgcagtgagcagcctccgcagagaaattgacaatttaaccagggacctgcggcagaga

SEQ ID NO: 368201 - DNA, 122 bp, Homo sapiens
cgcgggcgggccgcctctttgttagcaagtttgcctttctgtgattcagagcacgcggagcgaattaagtggagtgaggggtactgtgcgactgtctgcgggaaacctgcggggagcgcggg

SEQ ID NO: 368202 - DNA, 122 bp, Homo sapiens
gtgaagaggcgaagctgcaccagcagtggaggtcacgggcgagggtgccaggtggggcggcggcagcagtgagccccaggtactgcccacctgcagcagggacctcacatacctgtggcccg

SEQ ID NO: 368203 - DNA, 122 bp, Homo sapiens
ggcattaaaccgcagtcctctgaagcacaattagaaagcacttaaggctgctcagccaatcgggggccttgattggctgggcatccctaaccctgtaatcttccatcccgggggccagcgcg

SEQ ID NO: 368204 - DNA, 122 bp, Homo sapiens
agctggcatgccaagcctgaccccttcctggagctttccagcaacggtggtcagagttcacggagtttagcctgctgctagaagaggactggcttgcactggctgtcctgcatgtcttgatt

SEQ ID NO: 368205 - DNA, 122 bp, Homo sapiens
ctgagcagggcactgggtgggcaaggcggtattggcttcctccaaatccatgaggggccccgcgctagaatgtaagccccacaagggcaaggacttgatttattttgttcactgatatatcc

SEQ ID NO: 368206 - DNA, 122 bp, Homo sapiens
ctctattgttgtggtctctgcactgttctgattgcacacctcatcggcaaatcacttttgcgtatgagtttttgcatattcattttgagcatataaatatataaatatttcattcatttata

SEQ ID NO: 368207 - DNA, 122 bp, Homo sapiens
aacacctctacccctcggtattctacagatttcctgtagttttgacagtgaaacaaaaaacgtcataattcttcacatacttcaatactattcttgcagttctagtcttgcattactggtgg

SEQ ID NO: 368208 - DNA, 122 bp, Homo sapiens
ggtcatgacgtcccgctgttggggagctgccacaggacgtggatggcggggcgtggatggcggggcgtggatggtgggacggggatggcggggcgtggatggcagggcgtgtcaggctctgc

SEQ ID NO: 368209 - DNA, 122 bp, Homo sapiens
gtggttttttctggaagcagcagtggtttgtccagcaaggattaactctttgccttttcccgtctaaacttctgaagacacctgacagctcgttttaactctgcaaacgacagttcatcctc

SEQ ID NO: 368210 - DNA, 122 bp, Homo sapiens
aggacttgcccgaagtcacacagcccctgctggaaatgcacacagcccctgctggaaatgcgcacagcccctgctggaaatgctccttccctttccctactctcccgcgccttcaggtagag

SEQ ID NO: 368211 - DNA, 122 bp, Homo sapiens
cctcctcttgtcagtgaagggagtgggactcgccggagaaagaagcgaaggctccagccccggctggatgaaccctgcagctggtcctcaccgtctcgggaggcagctccggcttctgtcca

SEQ ID NO: 368212 - DNA, 122 bp, Homo sapiens
gagcgagctggcgcttcttggagccacagggaagtacacgtgggtctacctttatgagcacggcagccagtggggcaggatatttcttaactgtttcatggctcaggaatgatctggaccca

SEQ ID NO: 368213 - DNA, 122 bp, Homo sapiens
gcacggggctgtcccgcccgaggaggccggggaggatggctcagctgggaggggaaggagcgccagtggccacttgatgtctgtctagggctccccgaggacctgagccaggagagcaggcg

SEQ ID NO: 368214 - DNA, 122 bp, Homo sapiens
ggggctacaattgactagactcaaaggtctaggaggagacgggagtaattagaaatcactcgttaccttttaggtttgagcagctggtagaggaagattccagacactgcgattgggttgac

SEQ ID NO: 368215 - DNA, 122 bp, Homo sapiens
acagcagcttgtcatccatggggatgagcacacgcaggccgtccttcagctcatccttgtcgatgatgcaggagcgaggggctgcaggggttggatcgtgaggcgaggctggagccgggggc

SEQ ID NO: 368216 - DNA, 122 bp, Homo sapiens
cctccctgtgtgtcttgctggcaggcagctagactgctcctttatccaccctcctgtatccggagctagagaagcctgaggagagtttttgaaggaaactcatcaaagcagagagcacctag

SEQ ID NO: 368217 - DNA, 122 bp, Homo sapiens
ttgacatcatcagaagcccactgcaatccgtgtgtgtcttctcagaaatcaaaacatccccgggacttcacacggttattaccaggatcagagactgaggcagacatgaagggcgaataaaa

SEQ ID NO: 368218 - DNA, 122 bp, Homo sapiens
ggtggggcacggagagcaaccgctgcctggcggagactttgatgtgcggctgaggcctggcgaggaattttatcgtcaggcatcagctgagataggaacgctgtcagtcgagaattttcaca

SEQ ID NO: 368219 - DNA, 122 bp, Homo sapiens
gagatttttttaaatgttggtaaccgtgatggtgaattgtatgtgtcacctagacaatggcggcaagttgtttagtcaaacactgatctagatgttgctgtgaaggtattctgtagatgtgg

SEQ ID NO: 368220 - DNA, 122 bp, Homo sapiens
atgagtcaatggtgttactggaccctgtgaactgatgctgtgaagagaggccatttaacacggactacggggaatggtgccacagggggctcagtgctgcccttcactctcagcattttgct

SEQ ID NO: 368221 - DNA, 122 bp, Homo sapiens
tttcatggttcccaggccctcccacacctccctgtgctccctactcattcccaggctccccggggccaccgctgccagccccagggcccagcccattccactagtcccaggctgagcgctgg

SEQ ID NO: 368222 - DNA, 122 bp, Homo sapiens
acggggcctgtgcgcacgcgcatctgacggttgtctcggttactcatgtaagcggaaattcggtgggctcttaggatagtttctgctttctagtgttcctgtctttgggtcctcacctctgc

SEQ ID NO: 368223 - DNA, 122 bp, Homo sapiens
gtgggaggggccagtgtgaggcaaggggctcacgccgacctctctcagtgtgggaggggccggtgtgaggcaagggctcatgccgacctcactcagcgtgggaggagccagtgtgaggtagc

SEQ ID NO: 368224 - DNA, 122 bp, Homo sapiens
actcttaccccctcccagagggaggctgacacaggtgcccggggctcaggctgggctacacggaggcccggtggggtcttgctcactcagacctctctcagacactggccaccatcctgttc

SEQ ID NO: 368225 - DNA, 122 bp, Homo sapiens
tgagggtagcctgggcaacagagcaagacaccatccccacaaaaaatttaaaacttagcccgggtgctaattagctcagtagtatgttctcatagtcctagctatcaggaagactaagatgg

SEQ ID NO: 368226 - DNA, 122 bp, Homo sapiens
ctcatctacctaaaaagcagccacagcaagcacacagcagcacctcacttgagacagcgacggtcagagacgagacgctgaaatgagcctgtggcctctccgtggccatccccacgtcgcat

SEQ ID NO: 368227 - DNA, 122 bp, Homo sapiens
aattactttaaataatatacttatgcctcaatttcttttgtagcaaggttcaattttctccggccatgttcttgggcacttaaaaaaaaaaaaaagattaactttattttctgtaactaaaa

SEQ ID NO: 368228 - DNA, 122 bp, Homo sapiens
cgtctcccccagcaatgggatcacttgccatttatacagtctgcccccctacaaagtcatcgggaatcaacctacagaggccagagtgtcttgacagcacaccagagaaatccaggtaagca

SEQ ID NO: 368229 - DNA, 122 bp, Homo sapiens
aggacggcggcgcccacacaggcgcggggaggtttgcagagccacggagggcgctcaggccgccgatgcttgcgggaattctttttgggtgggtgggtgggtggggggggtgtgtgtgtgtg

SEQ ID NO: 368230 - DNA, 122 bp, Homo sapiens
gactacggttgattggtagagcgtgctcctatcgcagaggctgttattccttgggtctcccggctgaggggaggagccgagcgagcggcgggtgtccctgagaggccacctttcgaccttcg

SEQ ID NO: 368231 - DNA, 122 bp, Homo sapiens
ctcccccaagtctaaggctccgccgcggcccctccctgccggctgcgatccgcattcccgcggccccggggcacacggagcccttggcagtgcgtctttatgggccccctttaaggccggcg

SEQ ID NO: 368232 - DNA, 122 bp, Homo sapiens
ggacggcttcagtcatggtgcatacacacgatgggctctgggcacactctacagggaggacggcttcagtcgtgcatacacacgatgggctctgggaacactacagggaggacggcttcagt

SEQ ID NO: 368233 - DNA, 122 bp, Homo sapiens
acagagcgagactccgtctcaaaaataaaaacaacaacaaaaaaataagaatctgctagacgacagaacagatccgttctgggggttatagtagcaaagaaggaagacactgtccgtgtccg

SEQ ID NO: 368234 - DNA, 122 bp, Homo sapiens
gagttagaaaagctgttcattctgcgtccagataaaagagctcgcctcctcttttatccccgtcgcacactgagacggggccagccaggcccgggctcgccctccacgccggtgagctccat

SEQ ID NO: 368235 - DNA, 122 bp, Homo sapiens
ctgcgccactgagccttgctgtgtctccacaggcctcggcaagacgcgcaggaagaccagcgcgcgggatgcgtcccccacgcccagcacggacgccgagtaccccgccaatggcagcggcg

SEQ ID NO: 368236 - DNA, 122 bp, Homo sapiens
tgcccacctgtagtcccagatactcaagaggatcgcttgagcccaggaatttgaggctgtcgtgtgctgtgattgcacgattgcacctgtgaatagccactgcactgcagcctggccaacac

SEQ ID NO: 368237 - DNA, 122 bp, Homo sapiens
tggcctccttctccgcagggcttgctctcagctggcggccggtccccaagggacactttccgactcggagcacgcggccctggagcaccagctcgcgtgcctcttcacctgcctcttcccgg

SEQ ID NO: 368238 - DNA, 122 bp, Homo sapiens
aaaaaataaatcagccatcttttgattgcttagggacccatgaaaaagtctgagcacacacgcattctttacgatgagtctctggcactaaaccagagccctagtgagtgaggctgagtcat

SEQ ID NO: 368239 - DNA, 122 bp, Homo sapiens
actcctactttcacacccaaatgttgcatttcccaagagcgccctggcccaccacgcccccgtcctatgcctataaaaacccccagaccctagcgggcagagacacacgcagctggacgtgg

SEQ ID NO: 368240 - DNA, 122 bp, Homo sapiens
gtcagagtgtccagacttgttttcagttggagtgaaactaccctcattacctctgtgactcgagcaggttagacagtgagccaaaagagcctggtggacatactggaaaaagcagaggaaat

SEQ ID NO: 368241 - DNA, 122 bp, Homo sapiens
ggaggtttggaagttctgaggccagggccagagggccgtcgcccgtcctgcgaacgctgccgccagcagcagcgaaaaccaaagcctggagcttgtcatggcccgctggtctcccctctcgg

SEQ ID NO: 368242 - DNA, 122 bp, Homo sapiens
tggcctctctcacgctgagggaggtcagcgtgagcccctgcctcacactggcctctctcacgctgcgggaggtcagcgtgaggccctgcctcacactggcctctctcacgctgagagaagtc

SEQ ID NO: 368243 - DNA, 122 bp, Homo sapiens
gatgaactctatcgtcagatgtgcagcctccttattgcctgatagagtcaggagttacctcgccgatagccagatgctttcaaacaaaccaggatgtacccaaaagtcagatgagaacaaat

SEQ ID NO: 368244 - DNA, 122 bp, Homo sapiens
caccctggccacaggctagccgccgaggccggtcatccgctctctccgcggaggagtcaacgccacggaagcagcggcggaacctctctaagaatccttccagcttgtgctcttctgtccag

SEQ ID NO: 368245 - DNA, 122 bp, Homo sapiens
catagggcatcagtaccagtgcccttactgtacagatggggaaaatgaggctcagacaggcgaagtaagtagcttaagttcacacagagaggaaatggcagggattcaaagcctaggagtcc

SEQ ID NO: 368246 - DNA, 122 bp, Homo sapiens
gtcctgcctgcaccctgggcttcggcaggggtcagatatccggggtcgtggggcgggggacggggcgggtgaggtgcgcactgccgagcgccctgggcacgcacgcttacccgccaggccag

SEQ ID NO: 368247 - DNA, 122 bp, Homo sapiens
aatggtgagcgccgttactagaagggctccaggatggaggccgacctgacttctccgcctcggtgggctgggtcggcggctggagcattacccctactgcgggtcccgctgctggcagcgct

SEQ ID NO: 368248 - DNA, 122 bp, Homo sapiens
aggtccaagcgccacgcctggggcccagcttctagcacttctcccttaaccctgctaccacgatccgagctgcccttttggccccgtgcaattttattagaaatcattatccctttcgcaat

SEQ ID NO: 368249 - DNA, 122 bp, Homo sapiens
taaattgcaccagggaatatgttaggacttatctgtatcaggtgcctcatcatcggtcaacgctgcgtcaccctgggcagtcacaacaccacacaaactcacgacagcaccacgcagctcac

SEQ ID NO: 368250 - DNA, 122 bp, Homo sapiens
gagtccacgcccgctggcgccagactcccgggagtactcgaggtctgccccaaacctgaacgcaatccactctacacttccacgcatccagtgggtcaagccagaaacaggggaatcatcct

SEQ ID NO: 368251 - DNA, 122 bp, Homo sapiens
gcccccagccgatggcaggacagtagccgcctgtcagaggtcgtgaacggctgaggcagacgcagcggctcccgggcctcaagagagtgggtgtctccggaggccatgggctacccggaggt

SEQ ID NO: 368252 - DNA, 122 bp, Homo sapiens
aggctcagcccggatctgcagttgccaggtcagtgcggggcccggagtggattcgcggggcggggcggggcactgcccgcgcccggagctcagcagcagctgcccaggggcgggggcggcaa

SEQ ID NO: 368253 - DNA, 122 bp, Homo sapiens
ctggaagcacctcactgggactctgatcttggtgaactccctggacgttctgagagcagccgccttcagccctgcggaccaggacgacttcgtgatttgaatgggtcccctcccctcctgct

SEQ ID NO: 368254 - DNA, 122 bp, Homo sapiens
ttgtattttttccattccaagactgaatcccatcatacttaaaagcaggcaggcaaagtccgaggtgagagttaatcatttgccacacaacataacagtgactagtggaaagctgcagggaa

SEQ ID NO: 368255 - DNA, 122 bp, Homo sapiens
gtggaatagtccttttggggactagaataatttctagagagccaccctttctacatgatacggcgcacattcaagtgtggctacttacactgagactttctgatgagcacgactagacagca

SEQ ID NO: 368256 - DNA, 122 bp, Homo sapiens
agccaagccactcattggcttgaactaaagtcagcctaaaacaatactctgcaaacttggcgcaggtccttgcctatttaaatttccatcacaccattgtcagagtctcatgcctttcacat

SEQ ID NO: 368257 - DNA, 122 bp, Homo sapiens
ccgcggccgctcgccggtaggtgcctgcctgagtctaatcgtaggcgtgtctgtgtgtcccgcagcacccgtgccgcatcgcctgatgctcaccgcaggcccagcccagtcccgcccccgga

SEQ ID NO: 368258 - DNA, 122 bp, Homo sapiens
cgacaccgtcaagtacttcaaaaagatcatgttgctccactggaaggcttcttacaatggcggtaagtccagtgcagacctggacctcaagacaattgggatgcctgccaccgaagaggtgg

SEQ ID NO: 368259 - DNA, 122 bp, Homo sapiens
ggtcccacctacaccaccccccaccccatccccatcccagctttgttagattgctagcatcgatcgctggctttctctgacccaacagtgggtgaaggaaagagactgaaagctggcaaggt

SEQ ID NO: 368260 - DNA, 122 bp, Homo sapiens
cagcacagagcaaggatgggtctatagtatagagcctccatatgtctcatctgtgctctccgtgttcctttcctttttttgatatatgaaaacctattctggtctaaattgtgttactagcc

SEQ ID NO: 368261 - DNA, 122 bp, Homo sapiens
cccgcaccaggcgtcgggggacagctccatccttctccggccgcctcgggcgccttaaatcggaagcgattccgtgaaatacatctcgaatccatcagcggacgattttaggaaaagtgtaa

SEQ ID NO: 368262 - DNA, 122 bp, Homo sapiens
tcaattttctttccaccctagactttaatggactcaagcccatctccaaggctgcctaaacgctagggggctccctggagagcagagtatacaggaagagaatggaaagaaaacaagattgc

SEQ ID NO: 368263 - DNA, 122 bp, Homo sapiens
tgaagatgcctgaggtggcctcggccgtgtcctcatcctcactgctgggtgcctccacctcgggagagctgctgctgccattcagggcagaagccagcttgatggcagacacctcgccacca

SEQ ID NO: 368264 - DNA, 122 bp, Homo sapiens
gtggggtaacagctccagaagggaaggaaggttgcgtttaactaatcccagtgtttattccggaagctgagcttttaaagaaaatgcagatgatttccctctgaaagcgtagacattgtata

SEQ ID NO: 368265 - DNA, 122 bp, Homo sapiens
ggggacttgtgccatttccacacctatcgtaggtcacaagggatgcattttgccctggcccgtgggtaatcaaagctgtaaacccaggagaggtcagctcttatagacggggtctgtgtgtt

SEQ ID NO: 368266 - DNA, 122 bp, Homo sapiens
ggttctcagagatggaaggtgtcttagaggcggtgagaccaactgcccacacagtgtggtcgcccatctatgccacacccaaaaatggtcagtgtcagctggatccactccacaatttggtc

SEQ ID NO: 368267 - DNA, 122 bp, Homo sapiens
gcatgggacacaggatccctgacttgctgtgtgcccttaaaccagccactacctctctgacgttcaaaattgagcaatggaaggcagcctgcccaactgttacctgcctgtcatcatgaaag

SEQ ID NO: 368268 - DNA, 122 bp, Homo sapiens
gtgaagaaaaccttgtctcagcgaggtgtggctgttctcagagtactgtgtgtatatgcacgtgggtgggtgtgggtgtgcatatatgtgtaatggggacgaacgagtattcctgtaccttc

SEQ ID NO: 368269 - DNA, 122 bp, Homo sapiens
tctccggccatagtctcggcgcccagcggagagcgacaggtgggagctgcgttacttcggcgcctcttgcatccttgacgtagaagtttcaccaagcgcagggtgaagtctactccaaattt

SEQ ID NO: 368270 - DNA, 122 bp, Homo sapiens
ccttgacacacatcctattttctgggaaaagattactaccacagtaattgagctgtgaagcggagacaaattgctctcggtggtggttcaaagtactgcaattgactggaatagcaccgcgc

SEQ ID NO: 368271 - DNA, 122 bp, Homo sapiens
acccttcctgagtgcaaagcgctgattaatgaaggcagttgtctcgcctgcaagttcgggcgagacatctctaaagaggtaagatccgccaggggtgctgaatgggggcttcagttcttcct

SEQ ID NO: 368272 - DNA, 122 bp, Homo sapiens
caatttaaccctggtcaatgcagcaaactttgcatctcctttttcttgaagtgcttttctcgcttttcatatcttgcaaattgtgaaaaaagaaatgaaactgaaaaaaaaaaaaatagaaa

SEQ ID NO: 368273 - DNA, 122 bp, Homo sapiens
ggggcgaacggggcgggggccggggtctggtaaggccccgccggctgagatatccagcggcgcacctgacttcccgggaggcaaggccaacgtggttggaggcggggctgggttggggggcg

SEQ ID NO: 368274 - DNA, 122 bp, Homo sapiens
tgcagagcttttgtcttatgcagaccatcaagtagtagctgtctcccagattgtgaacatcgaaagacccaatatttttactaaaactctgctacgtagaatttctgtaaatacacacacac

SEQ ID NO: 368275 - DNA, 122 bp, Homo sapiens
acacaatcagtctgcatatacaggcgttttatatatatatttatatagactacatatatacgtatattatatatgtaaatatttcactgtctttgaggacgggggccctgtcttttttatct

SEQ ID NO: 368276 - DNA, 122 bp, Homo sapiens
aagctgaaaaggctttgttgttttcccagagtacagctagttctctgattaaatcccttgcgagctcttgtaatatgactactctgttttgtctgttttctgtgtggcagccatccaataag

SEQ ID NO: 368277 - DNA, 122 bp, Homo sapiens
ttcataggattgtcctggagcccacggagacgcgggcttgggatccaacgtgatgctgagcggatcttctctgcttcagaccaggcctcatgtggcttcacacaagggtgactgtaaatcgt

SEQ ID NO: 368278 - DNA, 122 bp, Homo sapiens
caaaaagctgtttagaattctttttatttgttcattcaacatgcatgtattaagcacccacgtagtcaaaggctaggacaaagccaaaaagattactgctgcagattcacagttacaataga

SEQ ID NO: 368279 - DNA, 122 bp, Homo sapiens
ggggtgagcaccaggctctctgccgatatttcagacacaaatggggattcacaagggggtcgttaagaaggacattttcggccgggcgctgtggctcacagctgtcatcccagcactttggg

SEQ ID NO: 368280 - DNA, 122 bp, Homo sapiens
tttttgcaaggcccgagacggcgggccttgcgcaggccgccctattccgcgccctcagggcgtcagtatcagcctgaggctggatacccccgctgggcccagatgcccccgctgggcccgga

SEQ ID NO: 368281 - DNA, 122 bp, Homo sapiens
gcagaaggaacggcctgtaccgtgcgctccggcacaatcgcgtctcttgtgtctcactcacggaaagaaacaacctgaaggccatcccgtcggtctgcacgtaaccgtgaagacgtgtggcc

SEQ ID NO: 368282 - DNA, 122 bp, Homo sapiens
atcctgtcagaaagattcactcgctgacctcgtgttcctggtggatgagtcacttgggaccggaggaaatttaaggcatcttcagaccttccttgagaacattaccagctccatggatgtga

SEQ ID NO: 368283 - DNA, 122 bp, Homo sapiens
gggtggcagaagccacctgatttcagccctgtctcaccgtctttgggctaaggaacatcacgcaaagaccgaaaagtggtctgccaagctccagaggagccacattttctcctcttccaggc

SEQ ID NO: 368284 - DNA, 122 bp, Homo sapiens
gggctgctgtggaagcacaggggacccagactctggctccctgcagggcctgccataaaacgcatgactgcctgctggcctccagtttgggcttatattggtggaagagaggttggccaaga

SEQ ID NO: 368285 - DNA, 122 bp, Homo sapiens
cccacacccactgctccctaacttctctcacaggcccccaacggcttcctcctgcgctggcgcacgctcaggtcttacccgccagcaggtggcgaaacacgattttctgtcctctgcggctg

SEQ ID NO: 368286 - DNA, 122 bp, Homo sapiens
tttgcctttgcatctccagctccgcatcctgctcgctgtttattttgtgagcagctccggcggctgcccctgaactgctccgagactgagcagtttaactcacactcgcccacccgccctcc

SEQ ID NO: 368287 - DNA, 122 bp, Homo sapiens
ctttgagacaacttctcaacatctctgagcctccctttctttcgtttgctggctgcaaaacgagaatggtaatagcgtatctctgtaggggcgttagcaaagacagcaggggatgcgtgtaa

SEQ ID NO: 368288 - DNA, 122 bp, Homo sapiens
ggagacggaaagtttgggagcccgagcaggctcggctgcagcctcggggagggggtccagcgggtggcggccctggggatggggaaggagcaggagctgctggaggcggcccgcaccgggca

SEQ ID NO: 368289 - DNA, 122 bp, Homo sapiens
atgtcatcgtctctaagggcgagcccacgactctgaactgcaaggcggagggccggccaacgcccaccattgagtggtacaaagatggggagcgagtggagactgacaaggacgatccccgg

SEQ ID NO: 368290 - DNA, 122 bp, Homo sapiens
ggagggccggtgcattgtgggtagcgccgtgtgctgcatggtgtcagccccaggcttggccgcgagagtggcaccggcgtgcaccgggccggttttgtgtgcccacagacggggccttcatt

SEQ ID NO: 368291 - DNA, 122 bp, Homo sapiens
ttgagaaccaatcatcgagcttgactttggacctggaaccaatcagggatctcagctctgcggcctcctctctcacatctccacaggcttggcgacgccatgtttcaagggcagcgcggttg

SEQ ID NO: 368292 - DNA, 122 bp, Homo sapiens
caaaggttgccttttgaaatcaccccctcaaagtctggatttctatttgtcagccattagcgctaggtgaaataaatatcttaagactctgttacttgttattttttaaaggaggagagctt

SEQ ID NO: 368293 - DNA, 122 bp, Homo sapiens
gagtgctggggctgccacagtgacccttatgctgatgccagagtgatttggaaaaactctcggcttctgtcattcttgtgtggctgtcttctttctctagggctcaggaaatctgggccata

SEQ ID NO: 368294 - DNA, 122 bp, Homo sapiens
gaggatctgagagtccaggactcctgcccccaagctggctgcagagcaatggggcagaggcgtgtgcttaaagcggagggggccagggcccgtgcgcgtggaggtgtgtgcttcggtcctcg

SEQ ID NO: 368295 - DNA, 122 bp, Homo sapiens
gcttgttgagagttgaaaggtctggcttgatcagtgtcttcctttgctggaggtttagctcgggatgtagtgacccctctgtgttgattatttcggtggccttacttgggaggacctggcta

SEQ ID NO: 368296 - DNA, 122 bp, Homo sapiens
ctgcccgcctcagcctcccaaagtgctgggattacaggcgtgagctgccgcgcccggccacgctctcatattttcaaaggaagccggaaacctggacttttaaagtgaaatacccacccccc

SEQ ID NO: 368297 - DNA, 122 bp, Homo sapiens
ttaatttgtcatgttgttttcaagcatttctacacaatctttttgtttgaagtacatttccgttcattaccagttctgcagaacccccatgagatatgatatcacctttattgacctggtct

SEQ ID NO: 368298 - DNA, 122 bp, Homo sapiens
gcactgctgctgagagtggaaagttcccacagagaggaacgcctgcagccggtggggaagcggaattcctaggcagagcgcagcgctcatttgcacacattagcctttcagatctggacacc

SEQ ID NO: 368299 - DNA, 122 bp, Homo sapiens
cggggcaggcggcctgcacctgccctgctcgcccagcagaccctccgggctccagcctggcggggcccagcgtccaccttggtgggcccaggtcagatcttggccagggtggagtgggcgtc

SEQ ID NO: 368300 - DNA, 122 bp, Homo sapiens
agtgagggagcacacagccaggggtgcacgtgtaggtgaaggtgtgcatttgtaggcatccgaggcaagtgccccacagcacaccccagggctctgtggctttggactttgcaactgagggg

SEQ ID NO: 368301 - DNA, 122 bp, Homo sapiens
gcccttgttaccactcagagtatgttgaagaacgggaaagacgcagcactttctgttgaacgtgttatcttttaagggctccatcccaagaaaatgttattccatattctccaattttagta

SEQ ID NO: 368302 - DNA, 122 bp, Homo sapiens
tgaaagaaggaaggcccggacctccactcagggccgactaggggactggcggagggtgcacgctgatggatttactcaccgggtgcttggagctccagcagctggctggagcccgcgatgac

SEQ ID NO: 368303 - DNA, 122 bp, Homo sapiens
cggttgaccgtgggtaactgaaactgcagaaagcgaaactgcagataagagggggaactacggtagacgccacccacccgttagtcacttgggagccgtctgggttatcagatcaactgtct

SEQ ID NO: 368304 - DNA, 122 bp, Homo sapiens
gctctggagcctggctcctcacatgcctgttgccctgcggcacacacagctgcttgatatcgttaagtttactaagccgttccattttacaggtgaggaaacttaggtataaagtacaactc

SEQ ID NO: 368305 - DNA, 122 bp, Homo sapiens
ctggccgccaggctgcctctcccgctgggggccgccgcgctgtctgcgggctactagcgccgggcccctccgcgtcgccacgcctgcccttcacagccttggcccataaggtcaccgagggg

SEQ ID NO: 368306 - DNA, 122 bp, Homo sapiens
gtggtgtcattggtgatccctgggagcgccggtggagtaacgttggtccatggaaagcagcgccccagagctggaagggagagccgggctgctgggttgggggccaggagctctgcctggag

SEQ ID NO: 368307 - DNA, 122 bp, Homo sapiens
aaaatctccgggcggctctctgaggccacgaagctgggagctgggggacctggggttcaccggcgggtctttccgagcacagttgctcccggcccacccacgtggctgagcatttcttctgc

SEQ ID NO: 368308 - DNA, 122 bp, Homo sapiens
gctctgggaggggcaggatgggggcccgtggtgccaggggccggctccgggctgcactgccgaggcactgcacccgcctcacacacgtgcaatgcaacagcaatgcaccgcggggccgcccg

SEQ ID NO: 368309 - DNA, 122 bp, Homo sapiens
cctaccccctgccctactccccccaacgcgatcttccagacgcgctcttcccccatataacgtggagtcctggagcccactccccttgtagaccacactccagtacccggaattccgggatt

SEQ ID NO: 368310 - DNA, 122 bp, Homo sapiens
gccccccggcccgctcccctgtttaatatttcagtgctgggtggtgtgagcgccagtcgccggccttcagcgtggcggctgctgggcggcggcagggtggcggacggagcgggggaccgggg

SEQ ID NO: 368311 - DNA, 122 bp, Homo sapiens
tctcagctcccgggtctgccttgtagccgcagccagcctagggagcatttacggcatgtacgtggtgttcatccacaataaaaggagactaaccagctcagcttggcgctgctcgcctggag

SEQ ID NO: 368312 - DNA, 122 bp, Homo sapiens
cagctgaccctgagcccaggagcaccctaggactgcagcacagaaaatacaccagctggccggtcgcccctcctttgttccattcccgggggattggagtagcgttggagtcaccgacgcca

SEQ ID NO: 368313 - DNA, 122 bp, Homo sapiens
cctgggctgctaaggtgaaggacgcccgccctccccagaacttgagagcttattggttggcgatgtcgtcactcagagtgacgtcaggggcgaggaaagaggcggaaccgtagagacttggc

SEQ ID NO: 368314 - DNA, 122 bp, Homo sapiens
acgttcttgccgcctacctgacagcaggccttctagaaagttctctccagaagcagccaccgccgtcctgaggcactttgtgcggagacgggaagctgtcgcctcagaggtgggtgcgtaga

SEQ ID NO: 368315 - DNA, 122 bp, Homo sapiens
tagagtccttctcttcatttagaggataattcataacagaaggtgactgtgactatgggacgaatacaccttagatttgaatacttctgcaatgttaaatttacccaggctctatagtaggg

SEQ ID NO: 368316 - DNA, 122 bp, Homo sapiens
ttgcggaaatgaggcccagcaacggtccctggctttgatttgccaaaatgctctggaagccgcagcgtcggcgcctgcccacgactgcttcttcaggggtttcttcagtttgacaaattacc

SEQ ID NO: 368317 - DNA, 122 bp, Homo sapiens
aaaagaaagagcacagccagagctgctgccaagcagcacccacttagagactgtgtggtgcgttcggctcttcagaactccagtaaggtcaagagctcttctgggcacaccgatcagggctc

SEQ ID NO: 368318 - DNA, 122 bp, Homo sapiens
agaagttgtcagggcatatacccaccaccaagaaagtcatgagtgactctctcgtgacctcgctaaaacaatgagcaaactgcagaaggttttcagggaaaattaacaaattaggtagggat

SEQ ID NO: 368319 - DNA, 122 bp, Homo sapiens
gcattaatatctccaatgattctgtgatctccgccctaaagacctttgatttcttttggtcgcgcctccccttcgggacaccaagtttgtttagggcctgagcacaggggcccagcaggttc

SEQ ID NO: 368320 - DNA, 122 bp, Homo sapiens
gaggatatataattccgacacacatgcatattaaagctgactcatacaacacaattgtcacggcgcaaatttaaaaaatgagttaggaaatcccagcgatgggttttgtgtgccaatttatc

SEQ ID NO: 368321 - DNA, 122 bp, Homo sapiens
cactgctttaaaggcatgcccagtacaggaagtaagaaagacagatgcataggaacccgccgtgtgtgggaacagtctgagtactgggtaatccgagacctaaacaatcatagtttaagagc

SEQ ID NO: 368322 - DNA, 122 bp, Homo sapiens
acagggaggtgagaggagaggggaccacggaaacaaggaagtgaaaagagctggaacctacgacagttaagaatttacaatttcagagacaggcagtcttgggggaaaaggcctgtattaaa

SEQ ID NO: 368323 - DNA, 122 bp, Homo sapiens
gtctttttagcatgtatatgtgtaaatacttacatattgaaaggctcctggggacaccaccgtcactccttttaatccacgtgacaattttagttctgatggcagtattattaaagctatca

SEQ ID NO: 368324 - DNA, 122 bp, Homo sapiens
atcactcacgctaacgtctgccctgttcctgtatggtgaggccgcaccacaagccaccaccgccgccgccttctgcgcaacgccaaccgcccgccaaaacggatccttccctgcgcctgcgc

SEQ ID NO: 368325 - DNA, 122 bp, Homo sapiens
gacttccgcaccccgaagctgtagcaccagtttgttttctcacggcacaggggcggcttccggggcgcggcgtgctgggggttgtagtccgcgctctgcctcctacttccattacagaaggc

SEQ ID NO: 368326 - DNA, 122 bp, Homo sapiens
ttgtattgaggtcacgcggtattacagtaaaagataagccttttagggcagatttctgaacggaggccaagagtattgagattgcataggaggcacccaaggcaggtagttttagaaggagc

SEQ ID NO: 368327 - DNA, 122 bp, Homo sapiens
atcggacatgacaggcacttcccctcagggtctctgccctggttatacctttgcccggaacgcccttcccaaacatcctctgaggtcacttcctgagaggcctgtcctgaccacgaatcctg

SEQ ID NO: 368328 - DNA, 122 bp, Homo sapiens
cacaccataaccctgagtgttttcagtcaggaatgggctcctccttaggagataataagccgaaggacccagtaacccagaaagcatagtctcagggagatcagcatggaatactattatcc

SEQ ID NO: 368329 - DNA, 122 bp, Homo sapiens
gagggccaggcctcggccaagccctgctggggtaaatcccagcagcccaggctccagtctcgcctcgggggtccctccttgccagctctgccagcccctcagggctgctgggcaccccttca

SEQ ID NO: 368330 - DNA, 122 bp, Homo sapiens
catgggagactatgtgtcatatccagaagagttctgtacatgaactgcatttaattgctccgagagtcactggagctttctttaatcagaatggaaatcaggataagctgaggtcttataga

SEQ ID NO: 368331 - DNA, 122 bp, Homo sapiens
acaactcaggaactgctttcttctttttcctttaaaaatccacttgaatactctccagggcggcaatcctcaagcttggcccgaatcaactctctacttatgttaattttggctcagcttct

SEQ ID NO: 368332 - DNA, 122 bp, Homo sapiens
ccttctacaacatcaaccagggccgcttccagccaccgcatgtgcagatgtaagtgggaccggtggggtgggggtgggggcggtgacggccccctggggtgggtgcatggtctcgggtgcct

SEQ ID NO: 368333 - DNA, 122 bp, Homo sapiens
cctcgtggcctctgagtgggagctcggactcaggagtgctgttgccagcgcctgcccagacgccctccgtagttttgcaacttgtggaagcactctggagagaggccgagaggattcctcga

SEQ ID NO: 368334 - DNA, 122 bp, Homo sapiens
cctccgggtagcagcggatcgccgcgcacgcccccttcgccgcagccagctcctccacagcggccactttgggcagtttcctctatgcaaatagaccctgccagaaaaggagcagggaccca

SEQ ID NO: 368335 - DNA, 122 bp, Homo sapiens
aaaccttcaggaagtgaaaagaaaatctctgtttttgaaaataacatagaattgatgaaacggtagagaaagcaaactgaatactgtattctggattcccagtattcccagttcttattcat

SEQ ID NO: 368336 - DNA, 122 bp, Homo sapiens
aggaactatgcttgcatgacagcaactgtaacaggacccaggtcaggagctggcactccacgacttgtcaagcacggcaatggcgaggcacagcaagccccggctgctctgtcagcgggctg

SEQ ID NO: 368337 - DNA, 122 bp, Homo sapiens
cattttcggttggtgaggagcacctattttgtttattactgtttcttccaggaaccctctcgccttcccaccttccctggttccttttatacaccacacttaaaattggaggcataaccttg

SEQ ID NO: 368338 - DNA, 122 bp, Homo sapiens
catctaaaaaaataaataaatactaaatactatacaagaaactagtaacagtgactaccccgggaaacggaaggtaggaaagggcaagaggtttcacaatctgccacctctaataaacattt

SEQ ID NO: 368339 - DNA, 122 bp, Homo sapiens
cgctctttggaaacaagaacccagacgcagaccctgggcgctgtacccgtctgttggccgcgaatccagcagccctcagctgttaggaccgtgctgagaagtgggtccccgaatgccctgga

SEQ ID NO: 368340 - DNA, 122 bp, Homo sapiens
tgtatttgattcacaagaggattctccctgagtgtcaggggaggctgtgggacttcaccacgtggacaaacgaaagcacaggctactcagacttggccacaggtcataggtcagagaatttt

SEQ ID NO: 368341 - DNA, 122 bp, Homo sapiens
gggcgctgggcccacgctcttgaggcgcctcaagccccctaagcctgttctgctggaccgcgtaggccaccctgcccgctggccccatccattgagccttgaaggcttccagaggcgctgca

SEQ ID NO: 368342 - DNA, 122 bp, Homo sapiens
cgatgggggctgcattgcaggggagaaaggggcctccttgggaaccctgggccaagcagacgctgtggccagaggagtcatccatggcagtaaagggcctatggactgcagggcagagaagg

SEQ ID NO: 368343 - DNA, 122 bp, Homo sapiens
ctcctccgtcatcccttttcctctctgtgcctgaatccgacatttaaaggtggcattccccgagtggaggcatgaaaggaaaacggactggacggggcaccggagaagcgccacgtccatcc

SEQ ID NO: 368344 - DNA, 122 bp, Homo sapiens
agttgtcccgattgaaagttcagaattcctgaggttctcctctctgctttctgtttatgtcgacagataatagcaatgcagactacaaataaatcaacagaaagaacccttctcttttcaga

SEQ ID NO: 368345 - DNA, 122 bp, Homo sapiens
gttagctgggaggtatggatttcatttccattactaatgcctgcaattgctgataatagacgtgccccaggaatcgctgcaagggaaatggagcaaggtgagccattctctttgaaggagtt

SEQ ID NO: 368346 - DNA, 122 bp, Homo sapiens
aagtgcgaggaacatgatgtaagtctgcccttgagtgagcacaatgagccttggtttatgcgtttgaactcaactggagaagtgcctgtccttatccacggggaaaacataatttgtgaggc

SEQ ID NO: 368347 - DNA, 122 bp, Homo sapiens
tctcgtgccctcccctctctgaacctagcttgcaccttgctcaaagcagcactcaggaaacgtttgttggcgtggtttttggctttatctgaacagcaccttcacggagtgattccactaaa

SEQ ID NO: 368348 - DNA, 122 bp, Homo sapiens
ctacactccccacaagcctctgcggcagcttccgcaggcgcttccggaagctggggtcaacgagagaagtcatttccgattggcgaatctagcgggagcaatgcgctgtctgtcaggcgtgt

SEQ ID NO: 368349 - DNA, 122 bp, Homo sapiens
acacacacacacacacacatatacacacacacgtgtcttagggacggacacacacaaacacgtgtcttaggggccccgtgtgaggagaggagattcacactactgacccagcaaccagggtc

SEQ ID NO: 368350 - DNA, 122 bp, Homo sapiens
cctcctccacttctaaattgagtgtgccaagctacagggctcgtgggctgcacccacatccgtgccgcttaaagggacctgggccacacccggctggcacaaggggtgcatggcctgggccc

SEQ ID NO: 368351 - DNA, 122 bp, Homo sapiens
atgagagagaggaagcttgagcataagatctacaaattgtgttgatgaccaaacaggagtcgaaactgataccaaccaacactgatcttctaagtcattttttaaaggcctctgcattaagt

SEQ ID NO: 368352 - DNA, 122 bp, Homo sapiens
ttcttaacaaaagcagggtggaaacagttaagcaaagctggcaaagccttatagataatacgaactgtggaggcagagacaaactccaccttcctcctgttttctcttctcccgtgccccca

SEQ ID NO: 368353 - DNA, 122 bp, Homo sapiens
ggaagagtctctagattcattctggaaggggttggaatcgttggacttggtgattgggaacgtccttggagagtgtgaggctctgggctctgaatgcccagaccttgtgctgcccttggggg

SEQ ID NO: 368354 - DNA, 122 bp, Homo sapiens
gggtttgggctcagtgttggtgagtgtctttgtcttctcttttaggattgccacccaggacgatgagcggctgagatggagacgtctgcctcagccactgcctccgagaagcaagaagccaa

SEQ ID NO: 368355 - DNA, 122 bp, Homo sapiens
tgtttccgtactttgttttccctgttggctaggtttttagctggtgctggtgctgccttgcgaatgctgtttccagcccctaaacctgacccattccctcctctaggaccctactcagcctc

SEQ ID NO: 368356 - DNA, 122 bp, Homo sapiens
ccgtgcacctcatggcacagggcttgtacaaccactccaccacagccaaggagggcaagtcggacagcgagtagggcggggggcatggaggccaggtctcagtccgcgctaaacaatgcaat

SEQ ID NO: 368357 - DNA, 122 bp, Homo sapiens
ttgcttgcctcagctgcggcaccggctccatttgtgattcaggctcgtaggccctcggcgcggcaatgcaagaggccatcggcacaaccttgtcagagaggagatgcaggcgaaagacagag

SEQ ID NO: 368358 - DNA, 122 bp, Homo sapiens
ccctccgagttcccccacagcatcccagtgggtgggctcctggagtgcaaagaacctggccgcccaggttcccgcagctcccggtacccgagccggtttactcaccccgcgtcctgggcttc

SEQ ID NO: 368359 - DNA, 122 bp, Homo sapiens
tcctctccctccccaatcatggcttcttggctggtggaagtctctttgctgggtttggggcgcctgtggacggttctgtgtgctttctacagagtcatatgttcgtgtgtgtgtgtgtgtgt

SEQ ID NO: 368360 - DNA, 122 bp, Homo sapiens
ctgggcgcaggaaatgggtagagggggccgaggaaaggccgcagggggccgggagagcatcgggctgctgcggagaggaacttgcctgcttggttgctcacaaaggcagagaagacacagcc

SEQ ID NO: 368361 - DNA, 122 bp, Homo sapiens
tctactgtgagagccacgccaaggcgcgcgtgaagccgcccgagggctacgacgtggtggcggtgtaccccaatgccaaggtggaactcgtctgagctgggaccctgctcccacgcctgctt

SEQ ID NO: 368362 - DNA, 122 bp, Homo sapiens
gaagtcattttctgtcccagacattcgccccttttcctgttgcaaagagaaaggggccagcgacccgtgaagagccaggaatgcatccgagggagctccagctaagttgcagggaagctatt

SEQ ID NO: 368363 - DNA, 122 bp, Homo sapiens
acctccctgcctgattctcctgcctcagcctgccgagtgcctgcgattgcaggcgcgtgccgccacgcctgactggttttcacatttgtttggtggagacgaagtttcgctgtgttggccgg

SEQ ID NO: 368364 - DNA, 122 bp, Homo sapiens
gttccagcgttggaggcagccgtgatggccgcgatgcagggagtgaataatcagcgtgtgcgtccaggcagcaggttccaagcagaagctttcctcctgtgactttgaaaagtgacctcctt

SEQ ID NO: 368365 - DNA, 122 bp, Homo sapiens
aaagtttgattccaagcacgggatcccaacagaaggtggtggtcggtttcagagcagcagcgtgcagctccaatgtgataaaatggctcctcctccccctcttcctcctcttccccttgtcc

SEQ ID NO: 368366 - DNA, 122 bp, Homo sapiens
ctaccctgtttaccctggctaactcttacttgtccttcaggatccagcaaagctttcccacgtggggttagatactgttagtaattgctctcacagtcagtaccctgtgccttgctttaaca

SEQ ID NO: 368367 - DNA, 122 bp, Homo sapiens
actcccaaccattcgctgaagattacgccctatcccaatactagtcgagctgccaaaccacgtgggtatgctaagatttcaaagttcctccaagagtgaatgatttgcacgtgtgaggacta

SEQ ID NO: 368368 - DNA, 122 bp, Homo sapiens
taattgtgactattacatataggaaagtagacatgggccagtctataagtacagaatctgcgccatctttaacaagactataagaatcacaagcattggattgacatgtgccttaacagtcc

SEQ ID NO: 368369 - DNA, 122 bp, Homo sapiens
ccggtgtctggccgcagctaccggacacctgggctccgactctgacttttggaagcgaggcggccttaggcttcctggttatcagtttccttttagcaggccgtccccgggcgctgtttcct

SEQ ID NO: 368370 - DNA, 122 bp, Homo sapiens
actgtagttttttccttggggtacccattgaaaggatcagttctcttctgattgagcgcacggatggaatgattctcacaaaccctcgcagggctgctggctgacctcatctcgatactgaa

SEQ ID NO: 368371 - DNA, 122 bp, Homo sapiens
tttttggaattcttgaggtggaccatgagcaaaaggatgagtctagcaggagagtagttgcgtgtggagagagactgatgctgcaaatgtgcaaagtgaagcagatatgtgagaacaagtgt

SEQ ID NO: 368372 - DNA, 122 bp, Homo sapiens
tcttgtcgcttccgcctcgagcgtgtggcgggattgcggaagccctccacagttcataaccgttggctggttatgaaccgttcataacgggcgttaataaccataccctgttagactaagca

SEQ ID NO: 368373 - DNA, 122 bp, Homo sapiens
agcaggaccctcactcagacattcaagagtgtttccgaggaaaactcgaggaggaggcagcgtggaacatcttcccatggccacggccccggcacagagctcagatgcctgcgggaagcggc

SEQ ID NO: 368374 - DNA, 122 bp, Homo sapiens
gaagccgcgctcgggacaggctctggctcttctcacagcctggaggggcggggcagggggcgtcgctagcgctgttttatggctgaggaaacatggacctggaggcgctgcgctgcggcccg

SEQ ID NO: 368375 - DNA, 122 bp, Homo sapiens
cgaggttccgccagttactccccgccacgaaagcggagcagccaggacaagtacgaaaagcggtccaaccggcggtgaggctggaaccagggccagccagccctgcgggcctccgtgctcct

SEQ ID NO: 368376 - DNA, 122 bp, Homo sapiens
gagagtaggccagcgaggcgatcctctgtccgggcatagccccaccccctcgaattctgtcgcagcagggggcacaactgtcagccaatcagcttggagaacaggcacggccgcgtcccccc

SEQ ID NO: 368377 - DNA, 122 bp, Homo sapiens
gcggagctagaggggcgggggccgggctggttggcggaagccgggcggagtcggagggggcgggactggcgggacaggggcggagcgagagggcagtggggcggagctacatgggtgggggc

SEQ ID NO: 368378 - DNA, 122 bp, Homo sapiens
aggcgccttttttttcatattgaaaccacgcggaatatgtacattttttagtcttacttacgctttcagggggttgtgaatgacagtcgccattttgctacaatgtaacagaatattgtctc

SEQ ID NO: 368379 - DNA, 122 bp, Homo sapiens
tgcccagcccgacttcccgccttctcatgccgcctagctcaagtgcctaccctcccgtaccgtccaagcacccaccttcctgcgccacccgggcctgagggcccaccctcctgtgccacccg

SEQ ID NO: 368380 - DNA, 122 bp, Homo sapiens
tcggggcccctggagaggggtctgtgcctcccaggcagggaagcgtcttgatgtgcaccccggcgttcaccaaccaaataagggcctcgctcacacagtcgatgtcatgctgggtattaaaa

SEQ ID NO: 368381 - DNA, 122 bp, Homo sapiens
tgaggtactgatcattggctcgaattatactttgattgagggcgtcattcaggatgaattcgtatttgatgatcctcataaagttgtatttcacattgctcaggaagctaaaaggtgctgac

SEQ ID NO: 368382 - DNA, 122 bp, Homo sapiens
cctgtttcacccacgtgagggacaggagcaccggcaacgctttcacctcagatgcaccagcgcacagggagagctgggcggccgggaacccacagaggctcatttctcaggaatgtactgtg

SEQ ID NO: 368383 - DNA, 122 bp, Homo sapiens
gcctgcagctagtgccaaacggtccccacttaaagggactactactcccaggaaccttcgcgcgaggccagggccttcttccagggtgcaagtgggtctcgccgcacggctctctgggattc

SEQ ID NO: 368384 - DNA, 122 bp, Homo sapiens
cctgggccaggacagttaggctaaactgactctaggccacgcggaccccgtggggcggggcggaacctggcagggcgccagtgaccgctggggccagagccctgccgggaaaggagggcttc

SEQ ID NO: 368385 - DNA, 122 bp, Homo sapiens
aagactgccaccaccaccaggaccagtctggtgatcctacgcaggttgcgatctttctctcgggagccagaaaggagccggacgctcttgagacgcaggatcatcagggtgtagcagacgat

SEQ ID NO: 368386 - DNA, 122 bp, Homo sapiens
ccaagtgattcggatgcacactaaagtttgagatccactgcttcaggtgatataaaataacgacttcaagatgagagagcacgtgcattttaggagagaacttgtgaagaaggcaagctgct

SEQ ID NO: 368387 - DNA, 122 bp, Homo sapiens
aggtttaggcttcagaaacaaaatataatcctagtcttttaaggtatctcagttcagaatcgcggagatgctttctcatgctgcctgttcttttggacttgccttcgtttgcctgtcaaacc

SEQ ID NO: 368388 - DNA, 122 bp, Homo sapiens
tactgttatatcctgttccatgaggtgctctgtcctatctttcttttcctctctctttgtcgtgcgtgtgtgtgcgcgcgcgcacgtgtgttggggatgtttggagatagtgagccggatag

SEQ ID NO: 368389 - DNA, 122 bp, Homo sapiens
tataatggcagtttcactccatttgtgtggctgagacgtcaaaacaacaatcttctgaagcgacagtggtggaggctccatctcttacattaaaccataaaaatcaagctgtgcttggttcg

SEQ ID NO: 368390 - DNA, 122 bp, Homo sapiens
gggctccggagtgacggaagttgtgctcttggtgaatggggttcttccttttttatttaccggtggctgtgcttccaatttaggaagaccccggcgacctgttcctcacccccgcttcgccc

SEQ ID NO: 368391 - DNA, 122 bp, Homo sapiens
cctacagggggggtccttgcactgtgtagcttatctccttcctggcagtgtgtgggctagcgaatgagtatgtttgcaggcatgcctgcgtatgctgggtggagagaggaaggaggggaaat

SEQ ID NO: 368392 - DNA, 122 bp, Homo sapiens
cttaaatgcagactttcccagaaacagaggtggacttaatgaccatgaaagatcccactccgccttgtgattttgtgatttcaaagtattatacttacacgggtcacagtgtacctacaagc

SEQ ID NO: 368393 - DNA, 122 bp, Homo sapiens
acgacccggaagtgctcgcggaacctggaagtgacaccccgcccgagggacgggaggccccgcccagccctgctctcgcccgccactcaagccttgtcagggaagggcgtggagagggaagg

SEQ ID NO: 368394 - DNA, 122 bp, Homo sapiens
ccacactcccagggtctggttcatgagcacacagccgtgtgaaccatccacacgggcatgcggccctcgggggtgactcagcctccgtcccctgaacatggggtgcgctgagcctccctgca

SEQ ID NO: 368395 - DNA, 122 bp, Homo sapiens
ctgcactgtggccgcagctcaggtgtggctgcgttttgtcctttctctgtgcctcatgtgcgtttctctccacgcaggtgtttgtagccaatcctaacaagacgcagcccatcctagacatc

SEQ ID NO: 368396 - DNA, 122 bp, Homo sapiens
gctcggtgcccatggcccactgctgctggaggaacctgtgtctccctttgcagcctgtggcgcgccttccttgcagggtgtgtacactggctgtttgcagagggggtttgtgcatcctagtt

SEQ ID NO: 368397 - DNA, 122 bp, Homo sapiens
tttttattttgcaaatgccatttttaacatatgtaaattgtgaggtagtgttaaatttcccgctagaactaccatcattaaaacacagagtttgatggaacgtgttgcctcaatgcaatgac

SEQ ID NO: 368398 - DNA, 122 bp, Homo sapiens
ccacccctcccatccccagcagaaaaaaagcagctctgagaattgaatggttaaaactaacgcccaagggatgagataagctactttaagagacaggaagtctttcagagtaaaaggaggat

SEQ ID NO: 368399 - DNA, 122 bp, Homo sapiens
atctgggttccttcaccgaccacgcacgaagggtggggggaggtctgcttcagtctttcccgcgcccctccagcgcccccacgtggaaacttctgaccacctcgtttcccctcccagagcgc

SEQ ID NO: 368400 - DNA, 122 bp, Homo sapiens
aaatggccgatgtgtgcacagagtttagggcggtggcgggcaggtgggctgtgtgccctccgtgtcggccgtgactgcctgccctccctctctccctccagttcccatgcccagaccctcct

SEQ ID NO: 368401 - DNA, 122 bp, Homo sapiens
tgtggaccagagcaccctagaagcctcacccgaggagtgagcagggctccagtgggctcacgtcatgggcacttctagacactctcaggagcagggcagcagggggcaccctgtgttctcag

SEQ ID NO: 368402 - DNA, 122 bp, Homo sapiens
tgaaaaacctttactccccgccgccggccaccgctgccagggtcacacaccttaaactcacgtctctctgaggaggggagacaggttgacttccggtgtgcctgtctgatccgacggcttgg

SEQ ID NO: 368403 - DNA, 122 bp, Homo sapiens
agttcctaaagttaggctggtagtggcgtgaacaggggtcttttgggccaccctgagacccgccccacggggcttctcgatccacgtcttggcttctcgctccactttcacagaacgtactg

SEQ ID NO: 368404 - DNA, 122 bp, Homo sapiens
tggtaataggttcagcattattctatgctgtggagtgtcataatttattaaaccaacttccgtgtttggatacatagggtatatccagtttttacttttaaaatactgcttcattaactcaa

SEQ ID NO: 368405 - DNA, 122 bp, Homo sapiens
aataggctttaaaacacctaaatcccaaagctgccagcctaaggagcacacgtctttgaacgctggcttcacgctgtcatttaagtcatttcgtcctcttggagcctcggtttccacgtggg

SEQ ID NO: 368406 - DNA, 122 bp, Homo sapiens
aaagattggcggggacccactcacactccctggggaccattactaagaggtctgctgtgccgacccgagggggcgccaactgcccgcgcggaaccgggccgtgggcctggggttcgggaagc

SEQ ID NO: 368407 - DNA, 122 bp, Homo sapiens
tgctgctcaatctcactgccatatgcaaaaacaagcaaacaggaacacttaaaagtgggtcgatcaaatgcttgagtttattaacatgtctcccaagtcttttttactgggagtttcagggt

SEQ ID NO: 368408 - DNA, 122 bp, Homo sapiens
acgtcctcgcacacaacacccagacctgccacgcagccggtactgtttcctgagctcatccgagcaagcgtctccacggggcaaagcaaggccttgaggatcccgctaacataacttacaaa

SEQ ID NO: 368409 - DNA, 122 bp, Homo sapiens
cctcccatgtttcccttaattaggaggaggcaaacttctgtcttcccctcctgccggtttcggtttagtaatcagaccacatgagtcacgccaaacacgcagccccctcccgctggagtgac

SEQ ID NO: 368410 - DNA, 122 bp, Homo sapiens
ctcaagcgatccgcccgcctcgacctcccaaagtgctgggattacaggcctgagccactgcgcctggctagagtcagctctttcaagactgcttgtggactcgattccttagcttggaactg

SEQ ID NO: 368411 - DNA, 122 bp, Homo sapiens
cttctatgccctacttcctttacagttgccctcagttagaagggatacttgtaggccaggcgcgatgaatcacgtctgtaatcccagcgcttgggaggacgacacgggcggatcacctgagg

SEQ ID NO: 368412 - DNA, 122 bp, Homo sapiens
aaaatataatgtgtgattcaatggccttgtagatagcataatgatatattaagctttttacgtacagtctcacttgattttcacaatggccttgtaaagtagatgttggatggggacaggga

SEQ ID NO: 368413 - DNA, 122 bp, Homo sapiens
cattttacgtcgtgttacatgtgtgcacacattctggtaaaaacttgcctcactccacgccgcaggctcatgtcagcggcccagcacgagtgtttctatgacaaccatggcgtctctacgcc

SEQ ID NO: 368414 - DNA, 122 bp, Homo sapiens
ctcccgttggtccccacagcagcagtgcctcggttcctctttggctgtcctcggggactccggctgaggcacatctgccacttttgaattcccggctggagagctggcaggaccctgtggct

SEQ ID NO: 368415 - DNA, 122 bp, Homo sapiens
gatgccttggaacgcaacgcacggctttcctcacgctcccgctgtaggcccggcgtcttgcgtctggcgtcatcgacctcgttagccaatggattgttggcagtttttacatttcacctcgc

SEQ ID NO: 368416 - DNA, 122 bp, Homo sapiens
gttgcggttcccaggccaggagcagctgtcacgcttgggcttggcctccagcagctccagcggggacgccggtgccaccacaaggaggccgcgggcgactgggggtgccaggcccagggctg

SEQ ID NO: 368417 - DNA, 122 bp, Homo sapiens
gatttcaattaagctcaatcaatctataagacacttaaagcaagtctacttcctgctatacggtggctcaaagaacacaaaactttctgcttcaagtcacctgtggagttgtgagttccagt

SEQ ID NO: 368418 - DNA, 122 bp, Homo sapiens
cagcaggtggctggagggggcccaggctgcacccgcccacgtgtcacctgccttgcaggccgcctggccatccggtacagaatgtattgccaagtacaacttccacggcactgccgagcagg

SEQ ID NO: 368419 - DNA, 122 bp, Homo sapiens
cgatggaagtcttcatccttagaacaggaggacaacgggctcgggttgaagcagctgacccggtgctgggaatgagtgagaggaggcgcggcacctgccccggcccgcatggacgcaggcac

SEQ ID NO: 368420 - DNA, 122 bp, Homo sapiens
gggctgatgaggtgggtcgggtccgcctgcctcccttccctctcgtccgctttccctgggcgacccagtcctgggtcctggagaagctgcattctcctctgatccccagccttcagggggca

SEQ ID NO: 368421 - DNA, 122 bp, Homo sapiens
tgatccatcgaaacccctgccttaccttaggaaatcgagccagccatcatgaatgatggacggatccagctgcagagagaggaagttctcattgactgtcctgactgggttcttggtgctca

SEQ ID NO: 368422 - DNA, 122 bp, Homo sapiens
tcctgccggcgtgaggaaacaggacggaaagccacagggagcccgggagcccagcgggagcggggcggtggggaggccagcctgccgctcttcccccggggctggaatcacaggagatcgct

SEQ ID NO: 368423 - DNA, 122 bp, Homo sapiens
ggtccaaaaaacactccttattactttaaactacttaggaagaagcacagcgttgccaaacgccagagcccgggagcagcaaagaccccacctccagggctcaccctggcctttcctggacc

SEQ ID NO: 368424 - DNA, 122 bp, Homo sapiens
ttggaggaggcattggcacgagttactataaactccctctgaatctcaagacttctgggacgccgattccgctcctggcctggggcaaggcgtgggagcttggaagccagcgctgcgctccc

SEQ ID NO: 368425 - DNA, 122 bp, Homo sapiens
gtagctcggcaggtgcagtaggcgctccgaggaggaggccccttagcttcaagaaacccgcgtgggcggggtgaggagcgcagtcctcctactggcgccgtgaaggagatcgcgatgcgccg

SEQ ID NO: 368426 - DNA, 122 bp, Homo sapiens
ccatgcctccccagttcccagcccagcacagaggaagctgcggggtccggaagaaaaaaacgcacacaggcggcggccccaaaccgttgccgcccacttacctcagctctggctttacactg

SEQ ID NO: 368427 - DNA, 122 bp, Homo sapiens
actgcacaaagggtagataagtggagatggaggaggggaaggaaagggtgcccgttcatccgcacagagtcaatctagtgaatcttcccgtgttgatcccagcacccaggctgtgcgacatc

SEQ ID NO: 368428 - DNA, 122 bp, Homo sapiens
tgccacagtgaggatacagcatttagatccctcggctccaaacaggcggttccgggggaccggtagctggggaattgggtttagcactttccaacgcttggaactggacatccacggctccg

SEQ ID NO: 368429 - DNA, 122 bp, Homo sapiens
ggagtgggtgggagggccctggctgagcagctgcttcatcttcgtcatcatcatccagcacgatgatgctgttagcggtggccataggggatcaaatcccccggagggaggaagtggtgggg

SEQ ID NO: 368430 - DNA, 122 bp, Homo sapiens
cagcccagaccgcaggggcctgtgagcggacgaacctctgaagttatgtggctgctgtcccgagtggtgtacacgtttctcaccgcattcatccctaagaatatctcatggagacaatcttt

SEQ ID NO: 368431 - DNA, 122 bp, Homo sapiens
atccagctcagccaccacgaatagcactggcaacatcttcgatgagcttccagtcacaaacggactccacgcagagccgccggtcaggcgggacaaccccttcttcagaagcaagcgctcct

SEQ ID NO: 368432 - DNA, 122 bp, Homo sapiens
gttatatcgacaattgggaggggcaattcctttagtaaaatggatatagggctttagaaccgctagcgggaaatcctgtgaggggacccaatcttgacgttgagtggtccaaacgacatatt

SEQ ID NO: 368433 - DNA, 122 bp, Homo sapiens
ccgcctgagccaggaggaagcagcggcgaggtctgcgggaggcatggcgggagctccggacgagcgccggcggggccccgcggcaggggagcagctgcagcagcaacacgtctcttgccagg

SEQ ID NO: 368434 - DNA, 122 bp, Homo sapiens
agcgattggttgaaccggaggttgttgctaggctaccagtgcgccctgagcctggggccccgcagtcccatcctctgtggcagatccatccctcactgcagacctaattccggtaccctgtg

SEQ ID NO: 368435 - DNA, 122 bp, Homo sapiens
tggtgtgctgggcccagcatgggcagggggcggttccacttaaaaaccctgggacgagagcggtccttgtctgcgttccgtgtccaggcaggtgcaggcgccgcggggccggatcctccgcg

SEQ ID NO: 368436 - DNA, 122 bp, Homo sapiens
agacaaacgtacgggaatagacaaaagagaatcaaatagaagaagatacgaaagagaaaacgatgaaagatgacggttcaaaggagacaactgacaggttctagggtttaggacacctggag

SEQ ID NO: 368437 - DNA, 122 bp, Homo sapiens
gactgcgtgagcccatgaattcaagaccagcatgggcaacatagtgagaccctgtctctacgaaaaataaagaagttacccgagcgtggtggcacatgcctgtggtcccagctactcagtag

SEQ ID NO: 368438 - DNA, 122 bp, Homo sapiens
cagtttcagttccgctcaccagtgctacaggagcagcgtgcagcgggtcctgcttccattcgactggctgtgcaggacggccacaaacacacgcaggtgcaccctgcgcttctgagcagaac

SEQ ID NO: 368439 - DNA, 122 bp, Homo sapiens
gcacatgttcctctttgcgcggctgcacgtcaagcgcatagcagcactgccacctgccgacggggtggccccacagcaacactcatgcatgaagggggcagtcaccatcaccattctcctgg

SEQ ID NO: 368440 - DNA, 122 bp, Homo sapiens
ctcctgttcattagcagttgagaaaaattcctttctagtttgatcaatccttgttttcctcggcagagcccgggcgcccgcccagcgcggagacgggcgcgcggggtctctccgcggcgggg

SEQ ID NO: 368441 - DNA, 122 bp, Homo sapiens
tttgcaatggcgcccggtattcgtagtttctgcgaggggagccgccagcgcgccaaccctcgctgaggaggaagaaaactacatttcccacagaggcacgggggcgaacaccggccgggcta

SEQ ID NO: 368442 - DNA, 122 bp, Homo sapiens
tactttccaaatacttgactgatgagcacatgctgccttggttaccggaggataagtgagcgagcaaagtgaggccagtgctgtgtccatcctggtgcctcaagcacaagcccctattcctg

SEQ ID NO: 368443 - DNA, 122 bp, Homo sapiens
atgctcataaaacctctgcataaattagagattaggaaatttaagaattcctagtaaactcgaggctattaggactgagggatttaaaacaaaacccaaaaagcaaatttagaatacagttg

SEQ ID NO: 368444 - DNA, 122 bp, Homo sapiens
tctgtcctcaaggcaggtaggaatccaaaagggagagccgggaggtggcgcggaggacgccggctctgcccacgcctgggcaaggttgagctccgttccctccgggctgctcccgcctcctg

SEQ ID NO: 368445 - DNA, 122 bp, Homo sapiens
acgggcaccctgtgaagatgaggcaggcagcagagctgcgggtggagacatggacaagaacgtgtgtggatgacaggaatcgggttgggggccacaagctgtggtttcaggctcccctgggg

SEQ ID NO: 368446 - DNA, 122 bp, Homo sapiens
aggaggtggcgatggcgggtggggtgaaaccgccgggaaagcagcgctgcaaacgccctgcgctcccagacgcggctcacctggggcggcgggctccgggctccgctctccgctctgcggtg

SEQ ID NO: 368447 - DNA, 122 bp, Homo sapiens
gaagaaagcctgagaaaagcagatgttcaaatgtggatcttgactgacccatcatctacccggagaatgagttcttgtgtgagtgtttagtttctgaagcggaggatgctggctttcctgtt

SEQ ID NO: 368448 - DNA, 122 bp, Homo sapiens
gctccaaccccgctcgttttggtactcaccgtgtggagacgccaccgcagctccgtcagtcgcgagtgaagaacctcagaaaccgccgctgtacctcagctgcagcagcaactgcagttccg

SEQ ID NO: 368449 - DNA, 122 bp, Homo sapiens
cccgagggaagatcctggctttccagacccgcagcatgaagtgggctacttcctgtttctcgccagtgcttttgcagaggctggtccctctgtcaacaacacccttccctctcttctacctg

SEQ ID NO: 368450 - DNA, 122 bp, Homo sapiens
caaacatgcagcggggtacatattaataatacccccaatatggaaagcagacaccccccgcgatgcggggagtaatatccccctgcctctccccgcctggatattacgatccacggtggaca

SEQ ID NO: 368451 - DNA, 122 bp, Homo sapiens
ttttagtgagtatggaaattactgaaggtacaaatcactctgaagataggttcttgtgtgcgaaggtcatcagtgaatcttcattctcagagttgataaatggttgtgagcgctcaagggta

SEQ ID NO: 368452 - DNA, 122 bp, Homo sapiens
tcgaagacttttcctttgatacaaacaagcgaaagttcgattatttgttcaataattttccgttgatcccttagtcttgtagtcgctactttataaccggtccctagaagggggcggttctt

SEQ ID NO: 368453 - DNA, 122 bp, Homo sapiens
caaaggagccgaggaaagcccctctgcccgagcctccccagcgccggccgggctccgctccggagcagccccgccgtctggcagagacatgctgttttgtttaaatcctccacattctttgc

SEQ ID NO: 368454 - DNA, 122 bp, Homo sapiens
agttaagggaaatcaacaaggaatggtgaaacacccccagagccagcaccagcagggctgcgagaacggggaagaagagagagcaattactggaaccaggagagagggctttaggtctcggc

SEQ ID NO: 368455 - DNA, 122 bp, Homo sapiens
cttggttagaggactagcagtcaggaaagtttggacgctgaaggaatcggtctcctggtccgacagatactgggtggaggggcagagagtaaatggaagagaaagactggtacccctggaag

SEQ ID NO: 368456 - DNA, 122 bp, Homo sapiens
aagtcccgtcacttgccaagaagataaactacaactgtatcttacctttatgcagttacacgggcaccaactggcagtgaagtgagttgaaattcttcctgcaaatcactaaagaccatgta

SEQ ID NO: 368457 - DNA, 122 bp, Homo sapiens
atgcagagtcttctccaaacccacctgaggtaacttcttggctgaccctgtctgtactagcgtcagggccccaagtaaatgcacctatatcattttgagatctttgaatttcttcggccaac

SEQ ID NO: 368458 - DNA, 122 bp, Homo sapiens
agactgcactgtccggtaaaaatttccatagtgatagaaatgttccatatctgtgctgtccggtaaggcaactactagccacatgtagccattgagcatttgaaatgtggttagtgtgactg

SEQ ID NO: 368459 - DNA, 122 bp, Homo sapiens
acagtaggatcaaaaatcatctcgtccccagacatggctgcggcttgagtgggcttggcacggacgggaagtcagacgggtcaaccccagaccccggctgcagcgctgctcctgccggtacc

SEQ ID NO: 368460 - DNA, 122 bp, Homo sapiens
aggagaacagcctctctcaagcagctgacaccagtgagcctagctagtttttacctctctcgagtccctatatttttaggttagctggcaagggcacactcactccgtcactgaacccatga

SEQ ID NO: 368461 - DNA, 122 bp, Homo sapiens
tctccgctcgggtcactgcgcatgcgcaggaacgcaagctagcgctttggtgtgcgtgttcgtttttccctttgaatggccgtttacggcaccggcaggccccggatgaaagaactgaaatc

SEQ ID NO: 368462 - DNA, 122 bp, Homo sapiens
ggaggaagtttcatttactaacaacttttatgtaagcttgggacattttaaaaattaaaccgaaacagcaacaaaaaaggattgttttgaacctgaatgtggaaatctcaatgtcagaatat

SEQ ID NO: 368463 - DNA, 122 bp, Homo sapiens
ttataattctccagtttttagtaatgcttttctatagccttccctgcacctgattctaaccgccctattcctttgctccattctcttgtctcaccttgactgtttttttaccttttgacacc

SEQ ID NO: 368464 - DNA, 122 bp, Homo sapiens
cccacaggacttcgggtttccggcccccagacccacgcccgcccggggctgagtgaatggcgtccttgggcctttgataacgggagttggcaagaccacagcctactccatccctgaggcgg

SEQ ID NO: 368465 - DNA, 122 bp, Homo sapiens
acattaacattatgtattatcagtctatcaaacattaaaatgattaacaaatccatgccacgtcagtactaacacacttaacttgcacagatgtagacggaatacaatttgttggaagcaac

SEQ ID NO: 368466 - DNA, 122 bp, Homo sapiens
ggggccacagaacccagctgcagggggagggagggtggctgggcggggcctgggcgggggcgggagcgcggccctacccgaagctcaggctcctcaaagtagtgcagtgacagggtcttcag

SEQ ID NO: 368467 - DNA, 122 bp, Homo sapiens
gcagctccagaagcttgtgggcagctccagaagcttatccgcatctccattggcagcctgcgccggttgcgcaacaagtgcgctgtgtccaaggacctcacccagcaggagatacggaccct

SEQ ID NO: 368468 - DNA, 122 bp, Homo sapiens
cagaaactgtctgagctcttactgtgcatgcagcaccctgctaaattctgtgcagttctccggaggaaaaggtaaatgtcaggtttttcccatctggcactctgaagtcaactgctcttttg

SEQ ID NO: 368469 - DNA, 122 bp, Homo sapiens
tagctccagctcatcctagaggcacatgcctcacgaatccccaagtctctaggaccacaacgcggactgcggatacacgctcagggaaatggcggaggtgggggaggggacaccgggcaacg

SEQ ID NO: 368470 - DNA, 122 bp, Homo sapiens
cctctgagttgcgctgggcttggctgctgcaccatgaccctggaggcgatccgctactcgcggggctccctgcagatcctagaccagctgctgctgcccaagcagagccgctacgaggcggt

SEQ ID NO: 368471 - DNA, 122 bp, Homo sapiens
tctgcagccgtgctcatgcataccaaatgtggctgaatggaggcacactgcctgctgcttcggggaggggatgcacgattttgaagaagagggacagcctgcacaaaacagcctgtggtcgg

SEQ ID NO: 368472 - DNA, 122 bp, Homo sapiens
cgaggcggcagggttgagccgggccagcctctcctggtgtgtgcgatcacctgggaaggacgcgtggctcctatatcaacccagctcctccccggaagacagccagtataatttctgtgctt

SEQ ID NO: 368473 - DNA, 122 bp, Homo sapiens
acccgatggagtctgaaggatctctaaatcaggcggaacccacggtgcggcgagttgggacggaagtaaccggtgggagtggggaggagccggaagttaaggaggggagggggtggagggaa

SEQ ID NO: 368474 - DNA, 122 bp, Homo sapiens
aaagacagctgagcccccacctcccttcacattccagaaaagtgtctgaaaggcccggggcgcttcggggcttgccaagagacggtgtttagagaaagagcataacgcgaagtcacaatcgc

SEQ ID NO: 368475 - DNA, 122 bp, Homo sapiens
cagcagctgcccgggccgggccgcagccggagcctgagccgcgcgcgcgtccttcctccgcgccggccgtactcgcctcagcagagtgaaggctgcatttcccagggcccctcagattcccc

SEQ ID NO: 368476 - DNA, 122 bp, Homo sapiens
tgaagacagcaggttaaccgcaggtttgactgggaggggtggggcttgcctgagtctagccgggcttgcctgactttggctcggctccacatcttatgtcattccagggctcaggctgaggc

SEQ ID NO: 368477 - DNA, 122 bp, Homo sapiens
gccctgggctcccttcagctgcctgggccctaccctggagactgactcagtgaattgagccgcagtcttggtatctggaaggctaacaggtcttcccagctgattgtgctgcaggtgttgga

SEQ ID NO: 368478 - DNA, 122 bp, Homo sapiens
ccgtggaggagggggcggggtcccgctgctctgaggctgcgagaatgcaggcgggggctgcggccaggcttcttggaaaagaaatggaagacctcgtcggccaggcgggttggctcacgcca

SEQ ID NO: 368479 - DNA, 122 bp, Homo sapiens
caggctctgagaagcgtcccggggcctctcctcctgccgcttaactccctcagctccctccgcatcagtgcaggcccggggcaagttcctctagttcagaacacagattaagctcctctgtc

SEQ ID NO: 368480 - DNA, 122 bp, Homo sapiens
cgcccgctcgctgtgtgtgtggcagggcccccaaactgttgccaccctaaatcagagccacgctccaccctattgcccctggcctctggaacctgtcaggtcagccccacctgtctgcctgt

SEQ ID NO: 368481 - DNA, 122 bp, Homo sapiens
ctcaagcgatcgactctccttggccttctaaagtgctaggtttacaggtgtgagctaccccgcccggccatattgagcagtttctaatgatatctatttgtaggtgcacatagtattgctga

SEQ ID NO: 368482 - DNA, 122 bp, Homo sapiens
ccacccaaacatggagactcccgcctcttcttcttttccccacgttcctggcaacatggccgcccctacatacacccatgtgtgtagaacatcatggcgcctgtatttgcatattaaaaggc

SEQ ID NO: 368483 - DNA, 122 bp, Homo sapiens
tccgctgcgcgttcacgccgtgtgagctgcgggcgctccctctgctctgctgcgcgttcacgccgtgtgagctgcgtgtgctcactctgccctgctgcatgcgtggctttctctgctctgca

SEQ ID NO: 368484 - DNA, 122 bp, Homo sapiens
ggtggaaggagcaggaggtagaggggctgcagtgaggagcccctggattccagagccaggcgttcatctccaaacagatgtttccaataaatcacccagtgcgccaagggcaataacagctg

SEQ ID NO: 368485 - DNA, 122 bp, Homo sapiens
ggggttggtagggggtgatgggctcactcacggaccgcaaggcacaagagaagtggcgaacgtctcccaggcaaatgaggcatgaagaatgagggctggagtcaagggggagatggagcaag

SEQ ID NO: 368486 - DNA, 122 bp, Homo sapiens
ctctgaacacacctgtgttgtccccgagcccctcaccaaccccctctgcaacccggcccacgcatttcccatcctgaagggtccagctcataggccggcccatgtgttccctttacccctgc

SEQ ID NO: 368487 - DNA, 122 bp, Homo sapiens
tcgcagggggcggggggggggtgcggtggagcgtccccgaccaggaaacgctcaggcacccgctgtggcccgtgaggggattgccctccctgcggggtggacagacacagggctcaaaggtg

SEQ ID NO: 368488 - DNA, 122 bp, Homo sapiens
attaatatctctgcgcctaaactttctcatctgtaagatgatgataataatgcctactttcgagagttattttgaggcttacaagagatcatatgtataaaatacttagcacagtgctagac

SEQ ID NO: 368489 - DNA, 122 bp, Homo sapiens
ccacactgtcccttaggaaactaaacagtggaaccgccccagcctccaaagctgacactgcgaactggcctctttctaatatcaccggggcgtgggtcatcttctctggagcctctcactgc

SEQ ID NO: 368490 - DNA, 122 bp, Homo sapiens
acgggtcgcctcctctttgttaagtagccccccagtcagcagtccacggccccacccacccgacggctcggccgtcaaagacctcctggcccctgccccaaccccaagggaggatctagggg

SEQ ID NO: 368491 - DNA, 122 bp, Homo sapiens
cgccgcaccttcgcctcgagttctcctgtgatcccgtgtttcctggccggagtttcttaccgttctctggaacgtagctcctcacacacccctcctcgaggtgcgtagatagacgaatccgt

SEQ ID NO: 368492 - DNA, 122 bp, Homo sapiens
aacttgggtcacctggtgacccagactggccttcccttgaggaaggaaactctccctggacgtgcgcacgactctcggccagggaggaacagacaaaaggaaaaagaaggggtgctcaccca

SEQ ID NO: 368493 - DNA, 122 bp, Homo sapiens
gggacgcgggctccggactccctgggggcagccttgctgtgggtgagcaagcgcggaggccgagcttcttgcaaacggactccaaggggcaacgaccttcgcgcgtcaccaaagtgactgcg

SEQ ID NO: 368494 - DNA, 122 bp, Homo sapiens
tgtatcccagaacttaaagtataataaaaaattgaaaaaagaaatggagaaagacaagaacgcagaattgatcataccccatacctcagggaagcagaggaaagggaagatgactataggat

SEQ ID NO: 368495 - DNA, 122 bp, Homo sapiens
gagccggggacgcttccaatgggcagctggcgtgctcattcgtggtcagcccagtgggcccgaggttgggccaaccgggagcaatgggcaaggtcacaagaggacgagcaaaccaggaacgg

SEQ ID NO: 368496 - DNA, 122 bp, Homo sapiens
gtgaagtggtaaacacttttggcctatgactgcaggtaataaaaatctgtccgggctgcccgaggggaggggcgccggtaaagccgtagctgcagcgaagccccgcgtctgccgctgccgga

SEQ ID NO: 368497 - DNA, 122 bp, Homo sapiens
caaagctcactgaagctgtgaactctgacccacataggagagtggcctggggacttttcacgggatgacatcctgtttttgaccacagcccaatgcccttggcagaggacaggagcagttgt

SEQ ID NO: 368498 - DNA, 122 bp, Homo sapiens
tccccagagagaagcaaaatgatgcctgccacactcactgctcttgctgtccacatcttccggccacatcccagctagcagcaagcacaccagggctgtggtgatgatctgcatgtcttctg

SEQ ID NO: 368499 - DNA, 122 bp, Homo sapiens
atcctggacttaatttaggagaaaggccctgtaaccaagatactgactgaacatggctggcggactcaggctggggtctgcagtgcagcattaatgggccgctgacatgaatatggagtagt

SEQ ID NO: 368500 - DNA, 122 bp, Homo sapiens
cctcaattcggattctttgtggccaagaaattcccaccttaccacttacagggaggccatcgggattacccctctgtcacccccccaccccgccccggccccgccgctctttttttgctgcc

SEQ ID NO: 368501 - DNA, 122 bp, Homo sapiens
ggagccgccggggctggaaaaggaggaggagcggggccgggcgcacgggcaccgctgccacgccggcagcgcactcccaggctcctccggccgagtttgcacaaacaaaacgccctaggaaa

SEQ ID NO: 368502 - DNA, 122 bp, Homo sapiens
aagaagaacaggccttgagcagggcttggcctacagtaaacaccatggaactgtttttaacgttaaaggccaactcttcccaaactaacatataagcctattgcaacttcatttcaagtctg

SEQ ID NO: 368503 - DNA, 122 bp, Homo sapiens
gccaggagaagcctcaggccggagaactggaggccggagaggagcttgcggctgtgtgtgcggctgcctacactgtgcgtacatgctccccaggctgttcccagccgccccagaggccctcc

SEQ ID NO: 368504 - DNA, 122 bp, Homo sapiens
accttacccccaacctccggcctggagccagcctcaccccgggcccctcccctcccccagcggcactgtgactccaggaacactcacatccagccccttggggcaggagggggtgtctgcct

SEQ ID NO: 368505 - DNA, 122 bp, Homo sapiens
aacacagcaagacctggcttctacaaaatattttaaaaattagctagccctggtggtatgcgcctgtagtcccagctactcaggaggctgaagccaaaagatcacttgggcccaggagttgg

SEQ ID NO: 368506 - DNA, 122 bp, Homo sapiens
gtaaggttgcgtctgtggcccatgtgccgtttctgctggagggttggaccgagggccagccgagaaggctctggggctgctctacctgaatgctgagtgtgtgctgagcggtagagaacttt

SEQ ID NO: 368507 - DNA, 122 bp, Homo sapiens
aggacagacagacagcaggggcggacgcagagacagacagcggggacagggaggccgacacggacatcgacagcccatagattcctaacccagggagccccggcccctctcgccgcttccca

SEQ ID NO: 368508 - DNA, 122 bp, Homo sapiens
gggcgcttacctaagttcgagttcccggcacgggcgcgggagggcggggcctggagggggcgttcccagctttgccagtgccacgaggagccggttcgcccgccccgcctgggaccttccgt

SEQ ID NO: 368509 - DNA, 122 bp, Homo sapiens
gcctccctaccccaaagcctgcagctcctaagtgcactatttgggctgtcttgtttgcagcggatgtttgaaagacagaccctcttctctagtgctggccttgagtcctcagagagctgctg

SEQ ID NO: 368510 - DNA, 122 bp, Homo sapiens
ggaagtctgaaacacaaactagccccggaaccttcgctgttctcttacctatgaaccttacgaactgtaaagaaaggcgcaccggaagttgtggtacccaagccatactctcataaatccag

SEQ ID NO: 368511 - DNA, 122 bp, Homo sapiens
actgagaggtgacaacgtgctagcagtcctcgctctctctccgcgcctcctcggcctcggcgtccactctggccgcgctcaagcagtggccgcgctcaaggaccccttcagccgtccgctgc

SEQ ID NO: 368512 - DNA, 122 bp, Homo sapiens
catcctacctgcaatgctaaacaaacaaataaaagttatgtttctgtctgcaaaagaccacgttcattcccagaggcacatgggatcagaatgacttcattagaatgagaattcagtagctg

SEQ ID NO: 368513 - DNA, 122 bp, Homo sapiens
agacctccccgggagaagcagtgcccaggaggttttctgaagccggggaagctgtgcagccgaagccgccgccgcgccggagcccgggacaccggccaccctccgcgccacccaccctcgcc

SEQ ID NO: 368514 - DNA, 122 bp, Homo sapiens
agaagtgtgggtaacaataatgataatcaaacctgatcaaagatgccatttcctgagcaacggagccagttgctacactcaaaagtccattatttagagggtgactgttctacgcaaagatc

SEQ ID NO: 368515 - DNA, 122 bp, Homo sapiens
gcagccagggcgacactgagtcgccatcccacgagaagctggtggactccaccttcaccccgagcagctactcgtccaccggctccaacgccaacatcaacaacgccaacaacaccgccctg

SEQ ID NO: 368516 - DNA, 122 bp, Homo sapiens
agctgtccagcctggcgtgcgacaccctgcggaggaggccctggagaggggatggggaaacgttggcctcaagactgagaaagtgaacgcccctgaaggctggatgaggatgcttctgaagc

SEQ ID NO: 368517 - DNA, 122 bp, Homo sapiens
cattttgaaagtgagtgcgcatacctgtacattcggttcattaaaacacgaatcattaaccggatgcgaaaggcgtcatttatgccgcggacggggcactggcgggagggaaaatgcctaaa

SEQ ID NO: 368518 - DNA, 122 bp, Homo sapiens
agtcttgttctgatattgctcttcctctcactgtgtgaagatcgacatttattggtgatacgtctgcctgatggagccgaacatatctcacggtaatacgtgttttcatccctttcagtctc

SEQ ID NO: 368519 - DNA, 122 bp, Homo sapiens
caggatcagaaaccctgccaattctctgccaagtagcccctcattctgacagtgtggaagcgccctggagacacagcctaagccagcacttatgacatatttacttcttctctaaacatttt

SEQ ID NO: 368520 - DNA, 122 bp, Homo sapiens
ggcagtccatgcaggtgcgggaacacatgtcggacccagggagcaaggaacacgccaccccgaggaacatgcaaacggagaagatccctgcagatccaaggatgccacaacccgacgggcgc

SEQ ID NO: 368521 - DNA, 122 bp, Homo sapiens
gaataataattccaggttatttattataggacttctctactttcaccctcacgattatcccgacatccattctggctccaaatttacattctggcttcaattccctccttggtatcccagtg

SEQ ID NO: 368522 - DNA, 122 bp, Homo sapiens
acccccgtccacagggacccttcctgctcaagaccacagcccaggccagctcacagggaacgtccgctggaccagtaccagcctctagaacgaccggctggacttgaagccacacatggctc

SEQ ID NO: 368523 - DNA, 122 bp, Homo sapiens
aaaacctgcagtccttctattcagtctcaacaaagagactggccagactgggaatttggccgcactactgtggaaggagaatgccctggagccccagctaacatgtatttaatgttgttctc

SEQ ID NO: 368524 - DNA, 122 bp, Homo sapiens
gcatccactgggatgagccaggccagggcctgcagccctgggagcctcgggtggatgcagcgtagctcattcacactgcaggggagggaggcgccccgggctcgggtttgcggattttgcac

SEQ ID NO: 368525 - DNA, 122 bp, Homo sapiens
cacgggggttcacggggaacttggtgatgcagagcccggagcttctgccacacacacccccggtgtccatgcggctggcacctccctccgagttggggtccccctggctggctcaccccgcc

SEQ ID NO: 368526 - DNA, 122 bp, Homo sapiens
gctcgccaaccattggctgcggcagccttgcgtcacctccccttgcgggccccgccctcccgcctggtttctaatgaagagctcgtcaattacggctcggccccgcctcccgcccgcccgcc

SEQ ID NO: 368527 - DNA, 122 bp, Homo sapiens
tgattgtctttgtggtgctgaaagccgagtgagtcccacttcccgtggctgcacagacgccgtgggctcagaagccctgcaggctggtagccagactcccttccccaggcacgaactcagca

SEQ ID NO: 368528 - DNA, 122 bp, Homo sapiens
agccggcctgcttcagcatgggcttgtccatcttcttggcatagaaggccgcataccacacgcgcagctcggtacccggggggatgtctctggaggtggtgaagtacacgtcgctgccgtgc

SEQ ID NO: 368529 - DNA, 122 bp, Homo sapiens
gccgcgggcccgcaggctgtccggaaggcagaaattggtgtaggtgaagtgggccaggcccgtgctcatgaggtagatgaggccttgcctcccgatggacgtgacctgaggacacagcacag

SEQ ID NO: 368530 - DNA, 122 bp, Homo sapiens
atggagcacgctgggaacgttggtcacgacacggagtctctgggaggttgtggaggccagcgtgggtctgagcccgtgtccgtgccgccacacagggcacgggagcctgttcagtctcctct

SEQ ID NO: 368531 - DNA, 122 bp, Homo sapiens
atggggtttcaccatcttggccaggctgctcttgaattcttgacctcttgaactccacctcggcctcccaaagtgctgggattacaggcatgagccaccacgtctggccttggccaactttc

SEQ ID NO: 368532 - DNA, 122 bp, Homo sapiens
agtgagacttcgtctaaaaaaaaaaaaagtgccctcttccatgcaagctccagttttaggcgagcgagccgggctctcctaaatagaaggttccaaccaatctcaccaggccaaaggggatt

SEQ ID NO: 368533 - DNA, 122 bp, Homo sapiens
tatgagggaaactttgtgacaggactcagggcagccagtggagctgttagaagaacccatcggtcatcttaggctcagtctcttcggcttccttgacaaactaattcaactaagactttgca

SEQ ID NO: 368534 - DNA, 122 bp, Homo sapiens
tgcctggcccgagctccgggccggggcgggggcgggggcaggcggcggggtctttgttcccgctgccgaagcgcggcggcggcggcaaggggtccgcgccccccttgccggcccagcctgcg

SEQ ID NO: 368535 - DNA, 122 bp, Homo sapiens
tcctttaaatgtgggtgtcaatgtggcttttgtctctaccactgggtcagctccagacagcgaaacaaactgagggactgtagaggacttggtggcccaccgttcgccttgaacttcatcca

SEQ ID NO: 368536 - DNA, 122 bp, Homo sapiens
caggccttggtgacccctcagcctgctgctccttgcttccgcccgccctgctgtgggtcccgcaccttctcagtgtgccatgccttgcattcaagctggtcctagtcacagccaggacctcc

SEQ ID NO: 368537 - DNA, 122 bp, Homo sapiens
agctgctgaagttctgagccgggcaagtcgagagggctgttggacagctgcttgtgggcccggagtaatcaggcagccttcataggcggtcatgtgtgcatgtgagcacatgcgtatatgtg

SEQ ID NO: 368538 - DNA, 122 bp, Homo sapiens
caccccgcaaccgtcccgttgccttgggtcgggattcctttgctttgcagtctacagtagcgctccccgctcttgcttaaggtgcaccagacgcttcgcaaacgttctctcttttctttaca

SEQ ID NO: 368539 - DNA, 122 bp, Homo sapiens
ctgcaaagtaattaaaatgggagaaaaatggaaatggcttaaatactcggtataaaaaatcgaccaaggaatcaaatgggctcacggatttgcgtcagaaacgttgcttccccgataattgg

SEQ ID NO: 368540 - DNA, 122 bp, Homo sapiens
tatgctgtgtcaccaaggggatttcaggattgtttcattggtctgccttggcaaagctgacgcaatctcccattggtctgtgctcaggaatctgggtgggaagtgaaagtacagacaagcct

SEQ ID NO: 368541 - DNA, 122 bp, Homo sapiens
cccgcgggaggccagcgaggccggcactggctgctcggtcagtggtcgggggtcgggggtcgggggtcggggttcttggtctcctcctgctccgcccgcacccgctgctctcccttgccccg

SEQ ID NO: 368542 - DNA, 122 bp, Homo sapiens
taaagcgtaactgagaaatgcgcacagtgtgtttggggaaatagtttacaggaagaaacacgatgttacaataaaattggcctgatctaagcatagctaaagtctgaaattgacagggaatt

SEQ ID NO: 368543 - DNA, 122 bp, Homo sapiens
ctatcatttcacatgcatagaagttttgacaagcccttcagtcttttgtttctttctgtacgccagtaaaaaagaaagaacaagccaggcacggtggctcatgcctgtaatcccagcacttt

SEQ ID NO: 368544 - DNA, 122 bp, Homo sapiens
ctctatgcttaacttttgaattagaaacggtgttttaatttttcgaatatgactcctttacgtgtctgtgtctgtttccatgtcttcctactgtcttagtaggaagctcacgactcatttgc

SEQ ID NO: 368545 - DNA, 122 bp, Homo sapiens
caccccctctccactatatatacagtccatccgggttctttgagatgctgtttggcgactcgtcgccattcccggagcaggtcggcctcggcccaggggcgagtatccgttgctgtgtcgga

SEQ ID NO: 368546 - DNA, 122 bp, Homo sapiens
ctcggcaaagttggcttccagacgttggttcccgccagcaaaaccatccatcatcgcgtgcgaatggctggcctcctaaaagccatgttatgagaagatgccaataagtgtacttacattcg

SEQ ID NO: 368547 - DNA, 122 bp, Homo sapiens
accaacctttatgtttttagagaactgctcatagaatttcttgtagttctctttatcttccgccagttcagtaaagagttctaagcattttttgaccaaattcttcctgataactttcaaaa

SEQ ID NO: 368548 - DNA, 122 bp, Homo sapiens
ccgggaacccgagctcaggccccgcccaggccttggcggcggcgctctccgtggtcctgccgcgcccgcagtctgggctttctgctcagctttgtcgctcaactgagctcctggggacactt

SEQ ID NO: 368549 - DNA, 122 bp, Homo sapiens
ggatgtgaggaacacaagttcatttctgttgttgcggagacactgcagactccactgtgccgaggttgaactcttttttgttgctcaagttctaggagtccctttcctgaatatatacttgt

SEQ ID NO: 368550 - DNA, 122 bp, Homo sapiens
tccgcgagagacgcactccctaactcatgctggaacgcagagggatgatttttaataaaccggccctttcggggcctgaatcactgtaactgcaggcgccggggcaggtttacgcacagccc

SEQ ID NO: 368551 - DNA, 122 bp, Homo sapiens
tctcctaagtggttaagatttaaagatggggagcagagtgggcgggaaagggcgggaagacgtcagcagatgtgaaatcaggcagacaaaaataaacagggcactcttccttcctgtctgta

SEQ ID NO: 368552 - DNA, 122 bp, Homo sapiens
gaaaaaacgcctctcttcccagcattcgcgctgaggacgaagcccgaacgccaacgccaacgggatgtcctgggcgctcagctgccatcagctgtgcttcctcaggccaccggccacggctc

SEQ ID NO: 368553 - DNA, 122 bp, Homo sapiens
ctcaaattcctcacctcgtgatctacccaccttggcctcccaaaatgctgggattacaggcgtgagccaccgcacccagcctgcctcagagccttcaagtgagtcagccacaggtgaaatcc

SEQ ID NO: 368554 - DNA, 122 bp, Homo sapiens
cttgggtcccgcagtcgcagggcggccactgtcttcagcgtctgagtgactcttgggtcccgcagtcgcagggcggccactgtcttcagcgtctgagtgactgttgggtcccgcagtcgcag

SEQ ID NO: 368555 - DNA, 122 bp, Homo sapiens
tccaggaactccagggtacagttattgtgttgatccaacaggtgcccaggccaacaccaacgtggggcctgaagctgcctgcccactcctctctggcctctcaaccctgaccaacagccacc

SEQ ID NO: 368556 - DNA, 122 bp, Homo sapiens
ctgccggggccagccgagcccccgccccagccctagggcccggaggagtctccgccactacgcgcccagctgcccaggaagcacagtgatccgcaacttgcgcccggccccaacggcggaat

SEQ ID NO: 368557 - DNA, 122 bp, Homo sapiens
gcggcacgtgatgggagagaggagtgggctggctgcccagctcgcacaacccagagccctcgcctcgcgggcagagggaagccaaggtcatcctttgactcagaatttttggtgaacaaatg

SEQ ID NO: 368558 - DNA, 122 bp, Homo sapiens
agaggcaatcggcaagattttagcaaagggactctgagacaaaagccacaggtttttgttcgtccatgcatgctttcctcagtttcactgtgcagcacctctcaaactttcatgagaaattt

SEQ ID NO: 368559 - DNA, 122 bp, Homo sapiens
agggttaacgcaggcgttcggccagtgcaaaccggcctcgcaggatccgcgcttaaaatccgggtgttttcattttgggtttgtttcttctactatgccaagctggtggctctcttttaatt

SEQ ID NO: 368560 - DNA, 122 bp, Homo sapiens
gcggcggcggcttccgacttgggctcagaccccgccgctccagacaagtccccgcgactgcgacagtgtctcgggcagttcagctccccagacgggagacagaccctcgcgacctggttcag

SEQ ID NO: 368561 - DNA, 122 bp, Homo sapiens
cccagctagcgcaggcgcaatagcgcaattacgctgcccagcgtgaaactcatcttttcgcgagaacttgtttttccgggatggaaatgacagtgtttcggaagagctgttggtttcaaact

SEQ ID NO: 368562 - DNA, 122 bp, Homo sapiens
tggcttcattaattccactctccaacaaacacagttgaaaacagttacaaaagcaatacccgtttactaaagacattttcagatatttacagatcaatttctcacatctatttctataactt

SEQ ID NO: 368563 - DNA, 122 bp, Homo sapiens
cgtgcaaagtgaatgtgaggtagctgcaataaaatactaataacttaagctgcgtggggccgccagacacactaggggcggcgcggagccccccgcagccccgggtggtcccagcagggaga

SEQ ID NO: 368564 - DNA, 122 bp, Homo sapiens
acaaatgttctcttaaaacgtttttgaggaagagcggatggtaatgagcagacatctggccgagcggcacactttcgtttttggcagctccggagcccgccaagtgactattccctaatgtt

SEQ ID NO: 368565 - DNA, 122 bp, Homo sapiens
gctccccgcgggttttcctcccctggaccatcatttgtagcaataaaggggttccccagccgataggaggggcttggaatgcaggaggcttgtgatgcggctccaaacagtctgcaaaacta

SEQ ID NO: 368566 - DNA, 122 bp, Homo sapiens
tatacaggttgttggtgatctgtgagaggtcagtggccaaggcactggacaggagggccccgggagtgtggtcacccaggcggaggttcggcggccagcgaggagcgaggtgcgcatctttc

SEQ ID NO: 368567 - DNA, 122 bp, Homo sapiens
catgtggcagcccagatcgcctccggcatgcgctatctggccacactcaactttgtacatcgggacctggccacgcggaactgcctagttggggaaaatttcaccatcaaaatcgcagactt

SEQ ID NO: 368568 - DNA, 122 bp, Homo sapiens
gaagtcctctagccctccacaggatggcactgtgcacttcctatcagaactgacaggtcacgctactccatccaccaggcaaactctcagcctaggcaccgggtagggtcactcctctcata

SEQ ID NO: 368569 - DNA, 122 bp, Homo sapiens
ggtggccgcgcagcacaagcggcacgatctccgtctcgggtggcgcatagccgtagtcgtcgcagggcagctccccgcgcctccgccgcccgggcccaccacccagctgcccgtagttgcgc

SEQ ID NO: 368570 - DNA, 122 bp, Homo sapiens
tccctatccctgactcccctgagaccccagccctaggcaaccactaatatttctgtctttcgagatctgggtgttttgtgtaaaaggaatcatacaatgtgtagtcttttgtgactgactgc

SEQ ID NO: 368571 - DNA, 122 bp, Homo sapiens
agtaaataggttggctagaacagtacccaagccagggggccgggcggaggggagtggtcacgtccagactggaaaactttctgcaaagcaacgggttgggtccacctcgctgtccaggtgcg

SEQ ID NO: 368572 - DNA, 122 bp, Homo sapiens
tgtcttcatgcatatggtttctatattttgcattatttcctaggacacattcccagaagtcggattactggggctcgatacacattgtcaaattgctttccaaaaggattttactgatttta

SEQ ID NO: 368573 - DNA, 122 bp, Homo sapiens
aaaatttgtaataaaaactcttcttaatttataggtaagttttggcatttttaaatccaacgccccctcccaccccctaaagttccaaccaaagtgagagggtcacagggtgacccggccag

SEQ ID NO: 368574 - DNA, 122 bp, Homo sapiens
ccctcctctcagcaaggctattgacagcaatttggaatctcagcagtgccaaagctaacccgaaaaactaattcaggccatgatgggaagggtggggggttggacatacctgattctaccct

SEQ ID NO: 368575 - DNA, 122 bp, Homo sapiens
atcccagctactccggaggctgaggcaggagaatcatttgaacccgggaggtggaggttgcggtgagccaagatcatgacacagcatttcggcctgggagacagagccagaccctgtctcca

SEQ ID NO: 368576 - DNA, 122 bp, Homo sapiens
gccattttttttaactgcccaatggaaggggctcccttagccaggaggacgagctttcggcgggagccaatcctcggcggcgaggcgcggccatgtttgtgcggggcagaaggtgcccggct

SEQ ID NO: 368577 - DNA, 122 bp, Homo sapiens
gcaagttgggaagaaagataataggaatgctaattccttcttgatgaaacgaccacaacacgctggagccggccttggaccctacgtttcaagattggcctgcttccagcgtctgccagctc

SEQ ID NO: 368578 - DNA, 122 bp, Homo sapiens
gggcaccaggcgaggtgaacttgcagttcctcacatacatgatgtacatttgcttgaggacggggccaaggaaagtgtccttcttgtgccggcagactctgctgaggaccaggaaagccagc

SEQ ID NO: 368579 - DNA, 122 bp, Homo sapiens
ctcttcaactccagccctaaactccctgaattcattctcgctctggagctcccgtgtcagcggagccatgccttcaacctttccatgggcccctattttgtggctcagtgtccctgagccct

SEQ ID NO: 368580 - DNA, 122 bp, Homo sapiens
ccgccgccgcgcccgccccgcccgccgccccctgcacgcgccttccccgcgccctgcacacgctgctcctgcacccgcacccgcagggcaccggcgccctgcatctgcacacgcgccctgca

SEQ ID NO: 368581 - DNA, 122 bp, Homo sapiens
ctcaggtgatccgcccgcctcggcctcccaaagtgctgggattacaggtgtgagccaccacgcccagccgctcctgcatttctttcgaatggtcttatgcaagtgacctcaaagttctgggc

SEQ ID NO: 368582 - DNA, 122 bp, Homo sapiens
tatgcgacagcaaacaactctgactccttgggactgcctccccaaggcctgctcaggaatcgggaacttaaaatcaaccggaagcagagcatgtgcgctccagggtgcctgagtatgatgga

SEQ ID NO: 368583 - DNA, 122 bp, Homo sapiens
ttggcccttagattagaagaaaataaggcaattgcacaaataggagtccatgaatggactcgcaaattgggcagggatcctgactagcactttttattttgaaaacatgttatgtttccatg

SEQ ID NO: 368584 - DNA, 122 bp, Homo sapiens
gccagaccccgcccccacctccctttcggccgccagtcggcccggccccctcctcccgcccggcctaacctggctctcccaaccttcaagcggccgggaccccgcccctgtcccctccccgc

SEQ ID NO: 368585 - DNA, 122 bp, Homo sapiens
ctggggtggggcatgggagctgggtcagcaaaatggggaaggttcatctaaagagaaagtcgtactgatactggaacctcaagtaatgggaggggcacagggaggaatccaaggtatcctga

SEQ ID NO: 368586 - DNA, 122 bp, Homo sapiens
tccgtgagtagtgcgactcctttacgcaactggcgttatccgaagtgaatagctaggtggcgcgtgtacgcccatagcgtagcacccataggcggacggggtgcggctgcgcagggagctga

SEQ ID NO: 368587 - DNA, 122 bp, Homo sapiens
cgtgatccgcccatctcggcctcccgaagtgctgggattacaggcgtgagccactgcacccggccgattggtgtttcttaactaggctggtttcggtcactgcatgacctctgagtacgatg

SEQ ID NO: 368588 - DNA, 122 bp, Homo sapiens
agcctacgctggggggccttggcctgaagcctggacctcaaccctcccctccacggcatgcgtattgctatttaatgaactagacttgttgtcaacaaaggcgggactctctctctctcaca

SEQ ID NO: 368589 - DNA, 122 bp, Homo sapiens
gtacaggcacgtggatccaccgaccacaaggacggattcgattggattctgattgaccggcggaccagctccagagtaattgtctatggctgcccctgcaatgactgattgattgacaatgg

SEQ ID NO: 368590 - DNA, 122 bp, Homo sapiens
ggtcttgaagtctgctctaggtacccccaaaatcacagtatccagccccgctctgcccaccgggacagccaagttcagctgagactggcctaccgggggagtcgccctctgaagttcactct

SEQ ID NO: 368591 - DNA, 122 bp, Homo sapiens
ggctccacactgctccacctcccacaggtacacacaaacacacacacacattcctgtggccgcaatctgtaggcactcaaaacaaagcctaatgggtgggtggaggaatgctgagatatgag

SEQ ID NO: 368592 - DNA, 122 bp, Homo sapiens
gagggcaggatgtggccgttgagagtgtggacagagtgacagagcagcagttcccaaacccgagtgtgcatcagaatcactaagggcttggtgggcacagaacacaccctgagtttcggaat

SEQ ID NO: 368593 - DNA, 122 bp, Homo sapiens
gcctaggtgccacctgcaggccgggcggggcagggacagggacccagtctgtggggacgccgaggcgccacgctcacctgtgccatggtggccgggctctcggcagctgcaacgagcccgcg

SEQ ID NO: 368594 - DNA, 122 bp, Homo sapiens
aaaaatttaactctgaggtccatgttgggacaaaaaaaatgatactgggatagtggagctcggctttcgttagttcaaagcgagcagcatattaatccaagtaagcagaattcccatgtaga

SEQ ID NO: 368595 - DNA, 122 bp, Homo sapiens
aggaacgcactgcccactcagctctgtggtttgagtctccaaaggtggtctagagcatggcgaggaccatcggaacttgggtgagctagggaagtttttacctagaggttgagggtcccctt

SEQ ID NO: 368596 - DNA, 122 bp, Homo sapiens
taatggtaggcgtttgtatcctgggagcagatccccccatgaattgtttgttaccaaactcgtagtaaagagtgagttcttgctctgttagttctggagatttcccttagagctagctgtta

SEQ ID NO: 368597 - DNA, 122 bp, Homo sapiens
ctttttctgaatctttttccaatctaactttaagactctgttcccaaagcatgctgtaggcgtaacacattttcttcaggcatgagtttagctgcagctgctccaggacacaccccctgcag

SEQ ID NO: 368598 - DNA, 122 bp, Homo sapiens
aggtcggctcagcagctctgggaccgtttcccaggccacggcggtgttgggggcagggagcgcagccagtcaggagcacaaggcgcaggcgcaaggcaacctttgccctttaactggcgcgg

SEQ ID NO: 368599 - DNA, 122 bp, Homo sapiens
gattgggcctcccttctgggaagggttggggatccagttgcagggtccgagccggctcctcgccttacagctcagccagtgcctctcggaaccctcagctccgctgagagcccgccttgcat

SEQ ID NO: 368600 - DNA, 122 bp, Homo sapiens
gatataacaataaacagaagagataaacttcccattttcgtgaattggtgttccactggacgagaaaggcaactaagaaaaactgcaataatgtaggtagattgacaaacttagctatgtaa

SEQ ID NO: 368601 - DNA, 122 bp, Homo sapiens
aaggctgtacctcctcacgtgacttcagtgtagactttaagaacctaaactaacgcttctcgcgagaggaaagattgaccgctcgcaagcgtacatcagctggtgccccgccttccctgggc

SEQ ID NO: 368602 - DNA, 122 bp, Homo sapiens
ctagtcctgagcctctggagcgggcctatactgcaccgccgtacgtgaatttcaggagcgcgcaatgccgccacctgggaagggtgcagcgaggctgacctgagtttgcccgccggggtgga

SEQ ID NO: 368603 - DNA, 122 bp, Homo sapiens
cggcgggcggggggcgggtgccagggctcggatccgggaagagggccttctgggcgatggcgagtggtttggctttatcccaagcctgagaggaagccgccgcgcggggctaggcagaggga

SEQ ID NO: 368604 - DNA, 122 bp, Homo sapiens
agcagttgccaaggcggctggaggagggcggagaaaaggcggtaactggcaggcaaggggcgtaacggggtggggctgtcctaagggaagcctagtcgaactgatttgtccctctctgctct

SEQ ID NO: 368605 - DNA, 122 bp, Homo sapiens
aaagccggggcatggtcattgatgtccagcagtgtcacgtccagcagggcctgggccctccgggggggtgaaccaccatcataggcctccagctgtagcatatagtgtgagcggttctctcg

SEQ ID NO: 368606 - DNA, 122 bp, Homo sapiens
tgcataggctttgctagctaaacttagagttactaaagaattgagcccggcgtggtggcacgctcctgtagtcacagctactggggaggctgaggcaggaggattgcttgagcccaggaggt

SEQ ID NO: 368607 - DNA, 122 bp, Homo sapiens
ttccttcttcgttctttctttgccttcgggattagcatttttatcgagtatttttagactcggttgtgccagtctcccgccccctgagcatgcacgcactttggttgcagtgcaatgctctg

SEQ ID NO: 368608 - DNA, 122 bp, Homo sapiens
attacttgagaggatgagctcgagattgaagagtgaggttggcttttctgtgtgaggagccgataggatccaccaacactaaaatcaaaaagactcctggtgcttgcgagtacaaccccaaa

SEQ ID NO: 368609 - DNA, 122 bp, Homo sapiens
caagtggatcattgcactgctgaagggcctggctgctgttaagaagttcagcatcttgatcgaggtttcgctcaccaaaattgagaaggttggtgcccctgtcctagcccagagttacagcc

SEQ ID NO: 368610 - DNA, 122 bp, Homo sapiens
cccgggccagccctcccgccctcacgcggcccgtgcgcaaagcggaccgggccggcgacgcgaatctccgccccgccccatctgacagcaaattttcccattggtcgagagacccggcgcgg

SEQ ID NO: 368611 - DNA, 122 bp, Homo sapiens
aagaataaaattgagttttacctcacgatttgtgtattcagcccctggtacaacacatcccgtatgttgattagcatggggtccttcttaaggcttttaaaattctccttataatattcgtt

SEQ ID NO: 368612 - DNA, 122 bp, Homo sapiens
taacgcaacgtgattcgctctggcaggagccgggggctgcccgcattgctgcgcaggcatcgggctgctggctggggcaccgccacctggctgcctgcgctttaccccttgctgagggctgc

SEQ ID NO: 368613 - DNA, 122 bp, Homo sapiens
agaaagtgctttgggggagggtttttattccctcaactaaagcattaagtctttcttgagcgctgctcaacagtagtggacactcaagtgttgaccaactgatcctttctaatctttgtttt

SEQ ID NO: 368614 - DNA, 122 bp, Homo sapiens
tgtttcttttcaagctcgcacagccgtgcaggctctagcaaaaggctggggggtccccagcgacccccatcagctttgataaggggatccggagggtgccagtgggtaagtccaggtacagt

SEQ ID NO: 368615 - DNA, 122 bp, Homo sapiens
tcaagtcggaaaattcagaagatggagcggcgtggatgcaggaacccggccgatattcgccgccgccaagtgagtgcgcgccggggcaggagtaggaggtagcgcggggtactggagggagc

SEQ ID NO: 368616 - DNA, 122 bp, Homo sapiens
agccgattcgccctatatgcaaccactttattcaaaagcctattgacatacagactaggccgggcgcggtggctcacgcctgtaaacccagcactttgagagcccgagagggcggatcacct

SEQ ID NO: 368617 - DNA, 122 bp, Homo sapiens
accttcgtggttagtattacagttcttaaaggcagtgcatctggagttgttcgttccctccggtgggttcgtggtcttcctggcttcaggagtgaagctgcagaccttcgcggtgagtgtta

SEQ ID NO: 368618 - DNA, 122 bp, Homo sapiens
agaatgcacaattgtgagcatttaacaaccatcacaactgtggctgaagactgttcatgccgttcttctgaaatgagatctcaaagcagtatagttcaaaacaaaaggttttaacaaaaaat

SEQ ID NO: 368619 - DNA, 122 bp, Homo sapiens
gatggtggagggatgaaaactgtaggcagatggtgtaattctcgtggctagagctgttcacgtggaaaactgcctgcctcggacttcctggaccctcacgctagtctagattagaacctgca

SEQ ID NO: 368620 - DNA, 122 bp, Homo sapiens
cctaggtttccagaaaggctctggtcttgggggctgaagggacaggtttcctatcccagacggtgggatgtgtttcctctcctatttttaaaggaatgggaacagctcctctgctgtgtctg

SEQ ID NO: 368621 - DNA, 122 bp, Homo sapiens
ttactctgtttttaatggatttacaagataacctgatgctgtgcggtttgtttactgtagcggctttatggtgttttgtaccagtaaacgggcttccatcagcagatctgtctggaataaag

SEQ ID NO: 368622 - DNA, 122 bp, Homo sapiens
cggtgtccccttttctacgtcctccttttgccggcgaaagactggcaaggggggcgcaggcgcaaagaggtcgctacgcgcacgcgctgttgttttctcggctgtgcaccaggctgtcgtgc

SEQ ID NO: 368623 - DNA, 122 bp, Homo sapiens
cgctgtgcatgctgggagttgtagtctcttcactgctcccgcccgttgtttcaggcacttcgggactacaatcccagcatgacccgggctcggggacggggcgcagttctcgtgggaggagc

SEQ ID NO: 368624 - DNA, 122 bp, Homo sapiens
ctcagggcccaagaggatgagctgccaggacaccccagggtgggacacttctgggcatggcgccggccatgaccagggtggaaaagcgaccttgagggtgcgagtccacggtcacctgcaag

SEQ ID NO: 368625 - DNA, 122 bp, Homo sapiens
tgcgacctaaactcagttctttttacgctgatgaatgaaagactaaggaacgcaccccgccgactctgctcccgttacccgggcaactggaggcccgacccggaagtcctactagctcacct

SEQ ID NO: 368626 - DNA, 122 bp, Homo sapiens
gagagagactccctgtcggggaaggactccggccccaatgcctcctcctccaggccaggccgccatggtgggtgggaagagaggccactcctagagaaagagacactgtcagtaggtgtcag

SEQ ID NO: 368627 - DNA, 122 bp, Homo sapiens
ccgtgatccgcgggatgttcttcttgccttggtaggacatggtggcggtggtggctgcagcggctggctccctccctccttcttctgctccggctcgcccgcgccttcctcagcgcacagcg

SEQ ID NO: 368628 - DNA, 122 bp, Homo sapiens
ccagagagcttcaaagcagggcagacaaccatctcttctgtctagtccaaagacatcattcgctgcccaaggctcagggctgtgcctggtgctttctcaaggtaacttagcttgtataatta

SEQ ID NO: 368629 - DNA, 122 bp, Homo sapiens
aggagagggaacactaggcagcaggtgagcgcagagccggaggcagagcggagctgagcgcggagccgagccgagctgcctctctcctcccgccccctccccgcggctgtcaccgcctcctc

SEQ ID NO: 368630 - DNA, 122 bp, Homo sapiens
gtatctcccagttccacgtgttagtgacggcgcccccaatgtccccaggtccggacaggccgagatgacgccgagccccctgttgctgctcctgctgccgccgctgctgctgggggccttcc

SEQ ID NO: 368631 - DNA, 122 bp, Homo sapiens
atttcctgactttggattgtgttagatttagccatgcccaaacttcagcttcagataaaacgtgacatgaggaagtctctagaattaatattatggtctggttgtgagagccggcatgttgg

SEQ ID NO: 368632 - DNA, 122 bp, Homo sapiens
agtcaaacggctttctacagcacctcctcgtatcgtgggttacagaacctacgtcgtcctcggaatccccgcattcgtcccacgcggccctcagacacgggctctggttcaaggtgggagac

SEQ ID NO: 368633 - DNA, 122 bp, Homo sapiens
aacctgccccctggctcctcgccaggctgattcctggctcatggcttagccctcaacttccgtttgtttgtgcctaggctcctgcctggttgctgacaccagccctgaatgctgctggcctg

SEQ ID NO: 368634 - DNA, 122 bp, Homo sapiens
gacagcgtttccacgtttgcacagtatttgccatcatgttgctataaaagcagcataaggcgcttaaaatttgaaaaagcaacccatttgcttcaaaatagtatgaaagggaagggctgggt

SEQ ID NO: 368635 - DNA, 122 bp, Homo sapiens
aaaaaaaaaaagtccagtggcagataagggtgtccccaaggccaactggtaatgacaaaccgaaggaagttgactctcgtctggctcctccggggtgggggcagggcgcgtgcgtgaggcca

SEQ ID NO: 368636 - DNA, 122 bp, Homo sapiens
acgttgcccctgcttggcagccaataaaagggggctgaggaaataccggacacggtcacccgttgccagctctagcctttaaattcccggatcgggcacctccacgcaccgcggctagcgcc

SEQ ID NO: 368637 - DNA, 122 bp, Homo sapiens
taacccttcaaagagggagtgagcacctccccttccacggccccaggcgatcgcgtcccacggccgcccctcgctcggacgccataccagggcccccttagtcgccccccagcgtcgtgcgc

SEQ ID NO: 368638 - DNA, 122 bp, Homo sapiens
ttattattatttttcttccctccagaaacaatctcacgcaatcctgttaagtacacaccacggaggactggagggccacgggtcggggctgcttcccctggccctgcccagcgaacagatgg

SEQ ID NO: 368639 - DNA, 122 bp, Homo sapiens
cagcctctaagcagagccagcaagggggcgccgggcgtacccgagagcgctcccaccgagcgtgggcaggcctcgggcccctcaggctccgccctgtcacgtgacaccaagcgctggccgcc

SEQ ID NO: 368640 - DNA, 122 bp, Homo sapiens
ggccaggcctgactccccgcccactctcccacgagatccggggacagtgcagaccctcttcggccacctgccacccccagtttcacgaggcggactacaaaccccatgatgccgcggggctg

SEQ ID NO: 368641 - DNA, 122 bp, Homo sapiens
aactttttatataacacagacccttgctactcaaatgtgtggtggttcttgaatcagcaccgtctgcatcacctggaagcttgttagaaatgcagaatttaaggcttaatcccggacctact

SEQ ID NO: 368642 - DNA, 122 bp, Homo sapiens
ggtgtaggtttagtctgacaagccgcttcaggccggcttgggaagagtgggaggtccctgcgtctgccagggcccggactggaagtcaggttcccctgcgtcccgccctggcccttccctgg

SEQ ID NO: 368643 - DNA, 122 bp, Homo sapiens
tgcagttcccacgatagcagtagccttcttcagtgcacggggttccatcttgcatataaacgtttgcgggacatgtcacggtggtcccgtgacagtactctggaaggtcacatatattttgg

SEQ ID NO: 368644 - DNA, 122 bp, Homo sapiens
acgtttcccattcgccaggtccttatgttctctgtgctgtcactttcttggttctcgcaccgctagtatctgctaaagaacttcctaaaccatgttttactgtgcagaacggtgattgcacg

SEQ ID NO: 368645 - DNA, 122 bp, Homo sapiens
cgcctccagacatcctttcccactttttcagttggcgaattaaaggaacagccctcccagcggaacagggttagctcatgaaagacgcactcactcctggctctcggccagggaaggaaccc

SEQ ID NO: 368646 - DNA, 122 bp, Homo sapiens
aggcctcaggcgagggtccatgaagtccccctcggcactcgtgtgtgggtgggacagggccggtcctgacttggccccctccttcctccctggggcttcttcccgggcgcacaaagccaggc

SEQ ID NO: 368647 - DNA, 122 bp, Homo sapiens
ttgggcgctccgcaacggatctccctgggaggcccaaggcgccgcaagtgcggcctctgtcggcacaagaaggcaggcaaagaactttagcaactgaagagttagccatattgatatccagc

SEQ ID NO: 368648 - DNA, 122 bp, Homo sapiens
ttaagaggcaaaactaaaaactataaataggttagagtgtgaatgaaggtgtacccgcctcgatttctgctcactgtggagaagcctatggttaaagcactgatcttattttgtccgttaaa

SEQ ID NO: 368649 - DNA, 122 bp, Homo sapiens
ccacagccggcagacggagccccccacagccggcagatggagccccccacagccggcagacggagccccccacagccggcagacggagcccccacagccggcagatggagcctgggcactgc

SEQ ID NO: 368650 - DNA, 122 bp, Homo sapiens
gccccatacgatggttgtgattttagctgggggctccacccctgtaagaactcaggctgccgcggattatgaaacggagtggtcatgaagtgaattgatgtgggaaggtggagcttcttgca

SEQ ID NO: 368651 - DNA, 122 bp, Homo sapiens
ccatctgagatcggcctccttcactcctgttctctgggacttccttgtgtgttagagactcgagcaagaccctttcttgtctatccccggacggacccgcctttcccgcatctctgggggtg

SEQ ID NO: 368652 - DNA, 122 bp, Homo sapiens
ggctcctccctgtaacatgcaaatctataccagctaacagaagccgtgagtctcaggcctcgtggtgaccttgtcccctttagggttagtcacaccaggaggaaggagactcaggccccgac

SEQ ID NO: 368653 - DNA, 122 bp, Homo sapiens
cgggggctgctggggcgtaggtgtcggggacgcgcgcacgggcgcgcgcagctgttgacgcgcttcttagctggtgcgcgccggagcccaaattccaagtggaaactgcaggcgcacgaggg

SEQ ID NO: 368654 - DNA, 122 bp, Homo sapiens
cccccgccccctaggcgctgggttgggagtgacgcggggtgggctggagaggtttcctgccgtctgggaagcgtaaacggaccgcccacctgtcgggcctcggccgcccgcacctgcttgtg

SEQ ID NO: 368655 - DNA, 122 bp, Homo sapiens
ccatgggggacaaacttcttagagcttttattccactggaggatgatggggacctgggagcggctggacaggatgagatgcgattttccatcgatatcaacaaactccgcatccgtgtccct

SEQ ID NO: 368656 - DNA, 122 bp, Homo sapiens
tgccgacagccagacagatgtgcacacacgcttacatgcacatactgttccagtctgaggcgtcaaactacaggggctggtccaagcctcaggacaaggacctgcagacgtagagatgcaag

SEQ ID NO: 368657 - DNA, 122 bp, Homo sapiens
ctggcccctcgctaagtcctgggcctgtgagacgtttcacttggtccacttctcgaactccgtagctggtggcagtggagaggagaggagtacagttttggcaggagcccagccagggagag

SEQ ID NO: 368658 - DNA, 122 bp, Homo sapiens
agattgatgccgtagaggagcgattgggtccagcgccagagtaattttcattttcagcttcgctgttcctcctcggactccgtgctggagagcacacaaagctgcccagaaggcaagaagaa

SEQ ID NO: 368659 - DNA, 122 bp, Homo sapiens
atctaacatgaagttataatagccctgacaaacagaatataaaattctattttaagcaaacgtgtcacattttaatttaaggaaacgcacacacagtaacactttcaaattttctccatttt

SEQ ID NO: 368660 - DNA, 122 bp, Homo sapiens
ggaatcctccccgtgtctcaacacactaccctctggggagtcagttctccccagagtccccgttcctgggcctggagggctgctttggggcaggaaactttggccaccaggcctctgacctg

SEQ ID NO: 368661 - DNA, 122 bp, Homo sapiens
tgccttgaagtatttgggggcccatggaggggctggatctgtccagatctgctctgagtgcggactggggccgggggagcggctcacctgccgtgtgccggatggtcttcctgcagtactct

SEQ ID NO: 368662 - DNA, 122 bp, Homo sapiens
tatgtgggcttggtctaatacatagctatgtctttgctgtcagataggagaggtgactaacgcattaattgtgtgtaatgctagtccaatgatcacgtgtccactgttgagttttagtgggg

SEQ ID NO: 368663 - DNA, 122 bp, Homo sapiens
gccaagaagctcagcctggctgcgcaggggaagctctttgcttgctcgtcaccgtggcaacgcgcgcggccgtttccggaggcggtggccaaagtgggcggggctaggccggagctgctggt

SEQ ID NO: 368664 - DNA, 122 bp, Homo sapiens
agcagggctgcctggctcacctccactactggacgtgtttccagggctagtccacaccttcgccaagcaccctcctccaaaatattaggataaagagacactctttgaaacttgaaaaaaag

SEQ ID NO: 368665 - DNA, 122 bp, Homo sapiens
tgccgggcgtcggagttttgaggcaggcgagggtggctcgcaggccaggctcctgcggtccggggaagatgcgcagcaatgcgcctccaagccgggcccaggccgagcgcctctcgccgccg

SEQ ID NO: 368666 - DNA, 122 bp, Homo sapiens
taatatgtgaatgagcaaaccatccagggtcccaacaggccccatttttaggaatccttgcgacaaggaccagcagagcctcctgcccctaacccatccaacactgttgtcacaggcatatt

SEQ ID NO: 368667 - DNA, 122 bp, Homo sapiens
gcccagcagggggcgctgatgtacctgccaagagtggaggtgtcttagcacaggtgtgagcgttcagctgtgtgcgagcgggcttcagagtgatatcccagagcaggtgtgtgtatgtgtgt

SEQ ID NO: 368668 - DNA, 122 bp, Homo sapiens
atgcaacaactcctggtacagttgagtccacagagagccctttgactacatcctcggcttcgtgtatcttctgtcggtagttagccaacctaagaaagctgaaagggccaaatagtccaata

SEQ ID NO: 368669 - DNA, 122 bp, Homo sapiens
ctgccccccttgtcttgtatgcaataaatatcagggcgcccagccattctgggctactaccggtctccgcgtcttggtggtagtggtcccccgggccaagctgttttctctttatccctttg

SEQ ID NO: 368670 - DNA, 122 bp, Homo sapiens
aaatgctatgatacagcaatggcagagaatttatttaaaaataagaaactcaaatactcacggagcagattttgttgcaaggattcagagcggtacaagttcacgtggttcttcttaaagac

SEQ ID NO: 368671 - DNA, 122 bp, Homo sapiens
gtgtggtgcaaaactaatgctctttgccttggactacattgcctattcattgtcagaaaacggtaccccaaaatttggtgctttgacatgctgaactagagaagcagccgcaaggtttctct

SEQ ID NO: 368672 - DNA, 122 bp, Homo sapiens
aaagtacaataggagtcagcaaactgtttacagacagtaggccaagtccagactacagctcgtaaacagagtgtttttgtaaataaaatgttactggaacaccctcaagcccgttcattttc

SEQ ID NO: 368673 - DNA, 122 bp, Homo sapiens
tttacttgtggagtgagctaaaaggaggctccaagacagagtttggttcccaacagtgtccgtggccaaagggcacactcagaaggtctcctcctctcgtaggaactggaacacggatgaga

SEQ ID NO: 368674 - DNA, 122 bp, Homo sapiens
atcctatgcagaggaaaatggagctgaaacaagtatgtctctttccttctttgtatcccacgactgtaaccacaggtatggctcttaggacctgtggagtcattcactgtccaaaggccacg

SEQ ID NO: 368675 - DNA, 122 bp, Homo sapiens
gggccgtggccccatccttcgggccctttaggtggggaatcgggctagcagctccagccacggcactgggacggggagcgctatcgtcccaggagaccgggcgatgagccaaggctgctgtg

SEQ ID NO: 368676 - DNA, 122 bp, Homo sapiens
aaaacatgggtaagatcctaaaaagatcttggaaacgtgcctttgtggcgtggatggaggcgtggctcattcctcgcggtgtgttggttttgtctttcagtattcagttgtctccgccgtgc

SEQ ID NO: 368677 - DNA, 122 bp, Homo sapiens
gttcaaggacaaggagaaagagaatttgggagagatgatttgagtaggccagactggaagcggcagtaggagattacagtacggctgcttccttgctgtgggggatttatctttgtactctt

SEQ ID NO: 368678 - DNA, 122 bp, Homo sapiens
gagtccactggggcacggcagcgtctaagccacaagccgagcacataagccaggtcctaacggagcctatgtgtaagtccactactggtgcaaggttgcacacttctaagaagagcggcgtg

SEQ ID NO: 368679 - DNA, 122 bp, Homo sapiens
tcagatgggaacaggccagctggcctctgctggaaacacagagcgctgcatactgtctgtcgtcatcacctctgcaaccacattgccagaggctccgggctctccgggtcagaaaaaggcag

SEQ ID NO: 368680 - DNA, 122 bp, Homo sapiens
ctgtgcgccattgacctcatcgttccgcattagtgagctcagccttcttttgagttttgccgggagaatccattgtttgcactttatacgggagaatggtctctgtggttttccctgactct

SEQ ID NO: 368681 - DNA, 122 bp, Homo sapiens
ccggcgggggctgggccgggcgggtgggtttctgagccgcagcgcttggagctgggggagcgggagcaggggcggcccggcgggcgggccgggacccggcttttccggctacccgtgggcca

SEQ ID NO: 368682 - DNA, 122 bp, Homo sapiens
ctgcagaaagggctctgggccggctggtaaaatgaaaagattccatttgtggaagggcagcggtgggtgggccaaattcccacgaggctttgaagatgctcctgggcatcagccggccttcc

SEQ ID NO: 368683 - DNA, 122 bp, Homo sapiens
tcctaaagtgaacggtctgtgcccattgttcagtggtgcagctctggcttccccagcgtgcggagggtttttaaggtcatcggcttgcccactgcccagcctgtggtgtcaaatatcctgcc

SEQ ID NO: 368684 - DNA, 122 bp, Homo sapiens
acctcgggcctcctctccgagctggggcccacgtactcggtggtgacatgcggacccaggcgcagcgtctctgtgttctcactgatggcgttgatctcagctgagggcaagcgtagaagggc

SEQ ID NO: 368685 - DNA, 122 bp, Homo sapiens
ctgtcatggtactttccacaagaccctgttaacagtttatttaatggtggtcacccaggacggcagggcctaaggccacatttcttgggcactgttatatctctagcatctagtagtgtgcc

SEQ ID NO: 368686 - DNA, 122 bp, Homo sapiens
tagtacttttccatcagttggcccaattctaaggtgctaatttaaagcgatcttaacttccggactctagcaccatttatagcgctgcattacttgatgtcttatattatggtaatatttgg

SEQ ID NO: 368687 - DNA, 122 bp, Homo sapiens
tggaggctgggtggcatgcccaggagggcatggaagctccataccccttcctccatatctcgccctatgcatctcttcagctgtatccttcgtaataccctttacagtaagccagtaaaagt

SEQ ID NO: 368688 - DNA, 122 bp, Homo sapiens
actagttttcagaacaataggttgagtcactggcctcctccaatggcaaccaattgattgcgtttcctcttttcctttttcttcttttcttctgtcagtatcatatttgatgtttcagtcca

SEQ ID NO: 368689 - DNA, 122 bp, Homo sapiens
ggacgagcgtcgcgggggcggcagcctggggtctccctacccggggggcgccttggtgcccgccccgccgagccgcttccttggagcctacgcctacccgccgcgaccccaggcggccggct

SEQ ID NO: 368690 - DNA, 122 bp, Homo sapiens
tctggaaaagggcttagccgaggtgcagcaggatggggaagctgaagaaggagctacttccgatggagagaaaaaaagagaaggtgtcactccctgggcatcattcaaaaagatggtgacgc

SEQ ID NO: 368691 - DNA, 122 bp, Homo sapiens
gccaccagtgtccccgcgcgcgccccgacggacggagagcactcgcacgtccctcctctccggcccagccccggcccgcagtccagatccgagacccaaactccgcccgccccgccgcgcga

SEQ ID NO: 368692 - DNA, 122 bp, Homo sapiens
cggagcttcgtcctctgctgagccctggccctgccggtcttggtggaggtggtgtcccagcgccctgaccctgccggtcttggaggtggtgtcccggccacactgtgacttctgttgctccc

SEQ ID NO: 368693 - DNA, 122 bp, Homo sapiens
gcctccctgaagcccagggctagtggaccccggctggtctaatcagcggccaataagacccgacaactgccaggcccggagaggagaagccaatccccaagctgggggcgggcctacctcgc

SEQ ID NO: 368694 - DNA, 122 bp, Homo sapiens
aaaccaccagcagggacagagaggggagcaaggactgggggggaaacgccaaggagacagcgggctccctaacttaatgcaggggaatggcaggaaagctttctcagcagcacgagtgcaca

SEQ ID NO: 368695 - DNA, 122 bp, Homo sapiens
tctgagcccgtggtgtgtgccgtgtgggattgggctaacacatcaccatggatattctaacgctatcctcacctgtgcccgtgagaaccagagcaggagaagggaaacacagctgcaataca

SEQ ID NO: 368696 - DNA, 122 bp, Homo sapiens
ggtgaagggtggggattgatcagaggaaagtgtgccaagtgggaagaggggttatcaatccggtccgtggatttacccaacacttgtagcttggctttcaggctttaaactgtctttggttt

SEQ ID NO: 368697 - DNA, 122 bp, Homo sapiens
acctataatcttgtcacttattcactgtcttctagtcctgttttcccagttgctttgagacgtgcacgtagttgctctgctgcttttttcaaatgtagtacattgatgcaattattgattat

SEQ ID NO: 368698 - DNA, 122 bp, Homo sapiens
ctggcagcctgccctccgcttacccactcctctcccctccgccgctgccagccccgccttcgctcgaaacagcagcatcgtcttcattcagcaaatgcgtatggagctgccaccgcgtgccc

SEQ ID NO: 368699 - DNA, 122 bp, Homo sapiens
tcccctggatgtaaagtttactttgtaaacaaacaactgtgaggcaatctagagggttagcgagcctcactttagtttccggagtgggcttcaggtcttgctttgcacatcaatggttcaaa

SEQ ID NO: 368700 - DNA, 122 bp, Homo sapiens
attttttatttatatatatatttttagaaatggggtctcacggccaggcatagtggctcacgtctctaatcccggcaccttgcaaggctaaggtgtgggaggatggcttgaggctagtagtt

SEQ ID NO: 368701 - DNA, 122 bp, Homo sapiens
aaaatttcaatgcattttttaaagaaaaattcttgaacctttgagtgaagcattcagtctcggtacttacatgccagaaggaaaaaactggtatgtgctggcattgtagctgctgatgtttg

SEQ ID NO: 368702 - DNA, 122 bp, Homo sapiens
tggtactcaatttattctctggagcaaattgcaaaaagaaggaataaactaagtcttgtgcggagaagcgtaatttgtaccagaggggattcaaatctccttgaagactttgcggctggatc

SEQ ID NO: 368703 - DNA, 122 bp, Homo sapiens
ttaggaggtgacccccggttttcatgttctgtagaggaaccccatgtagctctaagccaccgcggtttccaatcgcagttagctggcaaggagaaaactgtttggggtgactgcctcatgtt

SEQ ID NO: 368704 - DNA, 122 bp, Homo sapiens
gaattccccttggcgttccggatcgcctggatggccacggcctcgctttggctgtctgtgcgcagctgcagagagggtttgggttggcactgactctgcctccaagccccacctccttctca

SEQ ID NO: 368705 - DNA, 122 bp, Homo sapiens
aatgtatgagaatgtatgaaatagaaatggtaggaaaaaactaaacatgggtcaggaacacggaatttttccaaaaccaggggccaaaggtagatgtgtagcctgtagggcccaaggaggag

SEQ ID NO: 368706 - DNA, 122 bp, Homo sapiens
tttccaagtataaatttggagaaaagacccggatcagaggaatcctccatcaaaactggacgccactgtctgatggcgttaattatgttttagcgactgactaggagggctagagttccttc

SEQ ID NO: 368707 - DNA, 122 bp, Homo sapiens
ggggctggcgcaaaaggggccgcccccgtgccgggaacagactttgaagtgggtttttagcgcgcacgtgtgagagccgggccagggccggagcggggacccgctgggaggaaagaggaggc

SEQ ID NO: 368708 - DNA, 122 bp, Homo sapiens
gcccgccatgcctgggcctccctcgctccctgggctcctgtgcggctcaagcctcccggacgagcgccgccccctgctccactgcgcccagtcccatctaccacccaagggctggggagtgc

SEQ ID NO: 368709 - DNA, 122 bp, Homo sapiens
ctttgggctttgaataataacgactttagaattgaaatcgtgggctggaggtggacgccacgcctcattctgatgggtccaagagccgaaatttcggcttctggcactctcctcactcagct

SEQ ID NO: 368710 - DNA, 122 bp, Homo sapiens
cagacggaaaagcccgaagggagtcggaaatacccgaggttggtcgacgagagagaaaaccgttgccggaaattgtcgaagattaccggaagctaccgagtctgacccaaagcgtaggtttc

SEQ ID NO: 368711 - DNA, 122 bp, Homo sapiens
cccgggcccgcccgacctgccctctgtcccggacccaggtgcccaccgaggcacgaaagccgaggcctctggtcccccacaccaccagcctcagctggccaggggacacctcccccccccac

SEQ ID NO: 368712 - DNA, 122 bp, Homo sapiens
taagtgcccaagagtgccaaactgtttcagacccttaatcaatttagttctgattctcaccgtgacaacatgatgttcagcacggtaggaatgactgccatctctgaaggagtcttaagatt

SEQ ID NO: 368713 - DNA, 122 bp, Homo sapiens
aagaagttagacctggctcaagtttccttagaaatcaccgttctccgctcaacctcaggacggcgacccgggccgacgcgcgcgaacggggaccgggagcgaaggggcctccagccccgcgc

SEQ ID NO: 368714 - DNA, 122 bp, Homo sapiens
aggctggttttcaagctgtcatcaaccatagcctcaaagggccttcgtccttctccatggcgccacccagaccctcacctgcttgcttaaaccacccccgaggcacctgcttcccctgggtg

SEQ ID NO: 368715 - DNA, 122 bp, Homo sapiens
ccttgttttcctcttttcgatccccgttctactgcacagccggccccatccctctggtttcgggagagtggcttctccacacactaacgtgcttctctttagcgaggggttttattcgcccg

SEQ ID NO: 368716 - DNA, 122 bp, Homo sapiens
tacccaagtaggtagacctggaaccccagtttgctgaaggccgggcccttcctccaggggcgctgctccgccctgtctgcttgagctgagtcaggactggccgttctagctgcggcagccac

SEQ ID NO: 368717 - DNA, 122 bp, Homo sapiens
ccccacgagtgtcgagggcgctcccgtcccctccccgcatgccccgtcctcgccccggcccgaggcccagctgggcaaacccccgcaacccgcgcttccccgctccgcgccgctgcccccgc

SEQ ID NO: 368718 - DNA, 122 bp, Homo sapiens
ggggcaacatgcaggcagagagggtgagtaggcaggtttatgtgacacagaagctgcgaacggaggctggggcaggagatacatatttgggggccatcaatacaaaggtcatggtgctgggt

SEQ ID NO: 368719 - DNA, 122 bp, Homo sapiens
gcggggccgctatatcagcagagtccctgtcgcagcgcaggcagttgggctgctggagtgcggcgccaccgcggaggacaggggcagctggcgggcagcgggtgagggggtggcggggacgc

SEQ ID NO: 368720 - DNA, 122 bp, Homo sapiens
ggaaacgcggcaccggggcaggaaacagtgacaagtgggaacacaaaaaccaaagttctccgtatgcagcatgaggatccagaacccactgtgacatcaaattgccagagcaccacctccga

SEQ ID NO: 368721 - DNA, 122 bp, Homo sapiens
acgtattgtcttttttttgttctaagatttcatgttacatttagtcatcatgtcaccttacgctcctcttggctgtgacagttactcaggctttcctggtttgacagttttaaggagccctg

SEQ ID NO: 368722 - DNA, 122 bp, Homo sapiens
gtttcagggcattgctgacatgctgtaccctttggtcttgccttccatgtaccacaggatcgataaacaaataagcaggtttcggagatggttacctaagaagccaatgaggctggacaagg

SEQ ID NO: 368723 - DNA, 122 bp, Homo sapiens
ccgcaggtacccagccctgggcccagatcgccgggcccgctcgccggcctgccaacgagccgggcagcctcaaccccgggcagagccacgcactgcaagcggccaccaggcgggcgccgcca

SEQ ID NO: 368724 - DNA, 122 bp, Homo sapiens
ctcgttgtcaccctgaatttgctactgcgtattgaatcacagcttcttgtttggggactgcgaagctatggatcataggagggcaagccagcagtcctttatcagacaaatatgcttttaaa

SEQ ID NO: 368725 - DNA, 122 bp, Homo sapiens
aggtctcggacaggactatccttcagcacaaaggtctcccgccgaggactgggcttcactcggcgaggccccaggccctcgcctgcgctctcccgatcctgcagggcacactgctccagctg

SEQ ID NO: 368726 - DNA, 122 bp, Homo sapiens
ggcaacattgccaggttcccaagggtagcaacaacaggaagctgaaactgccagattacccgcccctaccagcatcctcccctggaaggcaacttcctgccagcttcctggtcactcagcct

SEQ ID NO: 368727 - DNA, 122 bp, Homo sapiens
gaatggatgggtctttggctcgagctccaggtgcagatttacgttcattttcttttgttccgccacacaattcgaccggttccgccactgtcctcggggcgcgaggaagccaagtgggcttc

SEQ ID NO: 368728 - DNA, 122 bp, Homo sapiens
cccggtgcccgccctgggcccggcgggtgccccctgcccgccgcctgacgcaatccgaggcgcccttgctgcatgccggcgctggagaaacctcccctgccgttgcatcactcctgccaggt

SEQ ID NO: 368729 - DNA, 122 bp, Homo sapiens
cgtttctgccactgctgtcgatgctgatgtggaacctctactacatgttcgtggtggagccggagcgcatgctcactgccaccgagagccgcctggactacccggaccacgcccgctcggcc

SEQ ID NO: 368730 - DNA, 122 bp, Homo sapiens
tttctccctttatttccacccacaagatctatttgctccattgtttatacataatgctcacgatctatctgtgcatgcttgtgctcctttatttcatcagtatctcttggcctgagtaagtc

SEQ ID NO: 368731 - DNA, 122 bp, Homo sapiens
tggcggaaccaggacttcctccagaatctgctccagaagcctgcgctgtgctgtgcactccgtgcgctgtgtgctccgtgcgctgtgtggtccgtgctcgctgtgtgctgtgcacgcggtgc

SEQ ID NO: 368732 - DNA, 122 bp, Homo sapiens
aaatctagtttccggggacagcacttgcaggagtgtagctgctgctttcagggtctggtccgggtggctatgggtgacaggagctgtggaatctactgttgagattcttcaccagactagtg

SEQ ID NO: 368733 - DNA, 122 bp, Homo sapiens
gcgcccggagccgggctgcttggttccagtgttgggccacatactgcttgcgtgctaggtcgcccctccgggtggctcagcctcttcccctctctcacaatccctgaatccctctgtccctt

SEQ ID NO: 368734 - DNA, 122 bp, Homo sapiens
aggaggcgttccccgggggacactgcatctccatggtgactgtgttgggcgtgctgcccccggcctcccccagctcagcgccgtcccgcagggcccgctggaagaccaccctgagcggctcc

SEQ ID NO: 368735 - DNA, 122 bp, Homo sapiens
ggactcgctggtttttaggttccatgaagggcatccagatctaggatgatacgaaaagtgcgtggtgggagagtggaatcaacctctactcttaggtccgatacaacccctccaagcacctg

SEQ ID NO: 368736 - DNA, 122 bp, Homo sapiens
cagtgaaggcaggttgactgtcagtagcagcctgtctgagacctgctttgttctgtacaacgtgattgccatgtttaggtggtgaaaaaggggtaaactaggaaggaaagggttcttctttc

SEQ ID NO: 368737 - DNA, 122 bp, Homo sapiens
ccccttgggcctgagcccaccacacctcttggttacagtgactgtgacgactgccctacccgcttgaggccaggtccccagggctgccaaggctcagcatgcccagccctgctcagatgatg

SEQ ID NO: 368738 - DNA, 122 bp, Homo sapiens
atccagccatcctccagcggactcttgctgaaggcagtcggcgtcagtcgctgtttattccgggccccacagatccagagtcactgctctcatggagcttatattttagtgtgacaaaaaga

SEQ ID NO: 368739 - DNA, 122 bp, Homo sapiens
tgcagggaggtagcctccaggtctgatttcctggtttccagctggagattgaggaatgtccggtctgttccaggccctgactgagcctgaagagagcggaggtggaggcagaagccatcccc

SEQ ID NO: 368740 - DNA, 122 bp, Homo sapiens
gggggcgaagggggagagggctcctgtgggctcttcggtttcgagggcaaacgacctctccggccttttaaactgtctgtgcgaaccactgcaaaggaagagccctgttagcgccgcttttc

SEQ ID NO: 368741 - DNA, 122 bp, Homo sapiens
tctccccgaccccagagtgattgcgctgcttcctccagagggcgggaaccttggacgtggcggggctgggtcagccacgtcgctgggcctgaggcgctcggctcagcctccctgcaggctgg

SEQ ID NO: 368742 - DNA, 122 bp, Homo sapiens
cggaccggaaaaggaggcaggcgggggcggtgagtcagcccagcttcacccagatctcggcggggcggggcagggcgggagctgggccctcagccggcctcacgtccctgctccacgtgtgc

SEQ ID NO: 368743 - DNA, 122 bp, Homo sapiens
gttgtctgatttcacagacagcacggtgacaggcatgatctgctgaggctgccagttcaccgcgggagggagctggtggccggtcttccccacgggagccaggctccgtctggtccctgcgc

SEQ ID NO: 368744 - DNA, 122 bp, Homo sapiens
tgtgcggcttctacaatgccaacgccagtgacgagttctgtctccccaacggcaagtgcacggacaacctggcagtgttcctggaaagctggacaactttcgaggagatctgcaatggagag

SEQ ID NO: 368745 - DNA, 122 bp, Homo sapiens
cctcatgtgatccacccaccttggccttccaaagtgttgggttacaggcacgagccatcgcgtctggccagaatatagatttctttctgcaggcaacagggaggtccctgcaggtgcctggg

SEQ ID NO: 368746 - DNA, 122 bp, Homo sapiens
tccctgcaggcccttgccagtcgccagcccagcgagcagcaaggcctggagtggcagggccgaccgggggcccgcgaatcccggggtctgaggggcgcggcgtcctcaccatcagaacttta

SEQ ID NO: 368747 - DNA, 122 bp, Homo sapiens
gcggggcttgggagttggggcggggcccgggtgaggggcggggcctcggggcgtcgcggacgtcctggcggcctactgcgtgggagggagtcctgggccgcgccccgcgaggccgggcccag

SEQ ID NO: 368748 - DNA, 122 bp, Homo sapiens
ctgccttcttgcctcaccattaaccattcctggatttacctgccaggtgctcttacaaaacgatgtgcacttggagccccaggatgcagccattaccacttagtagctttaaccaactccct

SEQ ID NO: 368749 - DNA, 122 bp, Homo sapiens
gcagccgccccggcgcaggggaggagcgccgagaaagggcggggccgggcctcacctccacggcctggcccagctccaggtcgaagcccaccacacacacgcagtgcagccaggcggagaag

SEQ ID NO: 368750 - DNA, 122 bp, Homo sapiens
ccagagggcacaggatgttcagagaaacccaggaagttgatatgactgaagcaaagtcagcgaaaggtatgtagaaggcaggaagaattgctgccaggctggccttctaggaaggggcagga

SEQ ID NO: 368751 - DNA, 122 bp, Homo sapiens
agcaagttacaagatgctacataaccaacataaaaccattacacagaacaccaataaaaacgaaacacaaaacatatgcccaaggtctatttctgttagtccatacagcaaactgacatcag

SEQ ID NO: 368752 - DNA, 122 bp, Homo sapiens
gccccatgccgtgcaggtgctccgtggggcctgtgcgccaagccagatgcacggtggcctcgctctcctatcccggcggtcataccaagagaggagagcccaggctgtctggaggccgcgac

SEQ ID NO: 368753 - DNA, 122 bp, Homo sapiens
gcgacgcgtggaggccgggaggactttgtcagggcctgcagagcttggcttcctccgccccggcctcccttagccagcccttcctcctcagtggcaggaaggtgcctgctgtttgcaagctt

SEQ ID NO: 368754 - DNA, 122 bp, Homo sapiens
ggccggccggccgcactgccggggagcaggccaggggctgtcatgtccctgccgaccctccggagcacgcacttggttgttgaaactcccaccataattaatcacagtattaatcctggcca

SEQ ID NO: 368755 - DNA, 122 bp, Homo sapiens
atggaagcctggagggcccacacgcttccgaagcagggtggccctaggctggcttgtcagcggaagctgtctagcggggatatggcggtggcagaagtgagggggctgaggggcggggcgga

SEQ ID NO: 368756 - DNA, 122 bp, Homo sapiens
tgagtcatactaattcggttacggtttaaatctcgcctccactgctaattagctgagtgacgcaagacaattcatttaatctctctctgtaccttagttttcttatcagttaaaaggctgca

SEQ ID NO: 368757 - DNA, 122 bp, Homo sapiens
gtccttcttggccacagcccaggggtgagcaccggcacccaccccgacgtgcagacttcccgggcttgcctcacggggaaagtcctgcctccccagggctgccacacccaggacgggaagag

SEQ ID NO: 368758 - DNA, 122 bp, Homo sapiens
caagaggaagcaagccaagtgttcactgatggaggaacagagtgtggtacgcacatgtaacggaacattccattatatgtataatacaggaaggaaatcctgtcacctgacacaacatggat

SEQ ID NO: 368759 - DNA, 122 bp, Homo sapiens
taacgagccactttctggcagacccgttgctatggcaatgcttgctaatgagcccagtgccgtgattggcactgcttgaaggctcctccacaaaggactctccagcaagttctctcttcccc

SEQ ID NO: 368760 - DNA, 122 bp, Homo sapiens
ctccgtctctgaaacaattcagatatgggagagcctgaagtcagcggtgtgactgaagcacgtggggtcatggacacccctcagtccggaggctggggctgggctgggactcagctgacttt

SEQ ID NO: 368761 - DNA, 122 bp, Homo sapiens
gctgaaacatgggtgcagtgagcctgttgcagctctctgagcagactcatttcctgtgtccggccgttcttcatgcacactcggatgtaggggactcggggagctgttcgggctgttagatt

SEQ ID NO: 368762 - DNA, 122 bp, Homo sapiens
gcgggaccgagggaggaagtcggaaactggtggccgcgtctcgcgagagttgcttttgcgcgcgaactgtaagtgccagggtctcagggtcaggtcgcggctggtcactgtgcaggcgcttg

SEQ ID NO: 368763 - DNA, 122 bp, Homo sapiens
ggacttgtgggtagggtgagggccctctggcttggaatggcacctggtctccctcagggccggggagggggaggcgagatgccatcctaccccggctgccccttgtgaggcctccggggtgt

SEQ ID NO: 368764 - DNA, 122 bp, Homo sapiens
cctgaacaccgctctgcagaatcttggtggctaaggtgtccaggagcctctgcagcggaccgccagcctgagaggcgcagagcttgtcgggcaggggcccgcttgtcccactcccctgattt

SEQ ID NO: 368765 - DNA, 122 bp, Homo sapiens
taaaagctgtaagataacgaattgatcagcaggtggcagtgtccgcggaggctcgcatcccgtcggccctggctctcaaggcggaaacacgcaccatggtgactttccggcctgcatcgcct

SEQ ID NO: 368766 - DNA, 122 bp, Homo sapiens
atagcttcagtttgtggagacgttctcagctccctgtggtgggggatggcagaggcttcccgctccccgcagctggtttgcacagcctcccgactgtgccgtggtgtctccttccctaaagt

SEQ ID NO: 368767 - DNA, 122 bp, Homo sapiens
ggtcagcgtcttccaccaagtttcacgctaccgccctgggcgccgccatctttaccgagccggaacacagtcacgtggctgagaccttggcctgacctgtccggaagtaggcgtggctaatc

SEQ ID NO: 368768 - DNA, 122 bp, Homo sapiens
ataaatgaagtactgatacacgcttcaacatggatgatcctttaacacatgctaaatgaacgaagtgagacccaagagaccatgtattgtatgactccatttatatgaactgtccagaatag

SEQ ID NO: 368769 - DNA, 122 bp, Homo sapiens
ccgggggtaagcgggttagtacgacgagaagagtgacagacaggctccataaccagtagacgtagaaggcagaactgagtggcgggtacggcacccgatggctattcgagctctcgatctcg

SEQ ID NO: 368770 - DNA, 122 bp, Homo sapiens
tgcgtggcctgagccgtgcgggtgactgcttcagggcttctccgcgactggaccgggcgccgctcgaaagcacgccctccattcgcactgcttgttgggctcatcatgaagcgcttgggctc

SEQ ID NO: 368771 - DNA, 122 bp, Homo sapiens
atgttctgaactgtcactttgcctaaatgtttttaaagtctaaggacctgctttataattcgccggagtctggtttggtttcacagaggttctcagaattcccatctgtgacaattaatgct

SEQ ID NO: 368772 - DNA, 122 bp, Homo sapiens
cgaggctgtccgaaggctgactctaagccttttagggaattaaacggaattaaactttggcgactatcatttgggttgcccagcctttagctctgggacgtctagttagcttaagtgacttt

SEQ ID NO: 368773 - DNA, 122 bp, Homo sapiens
ctattcggctcacggctgcggcgctcggctctctccgtgccccggcccgggggctctttccgaaggccgaattccgcagatctctgccgggccccgcccctatgggcaaggaccaatggtct

SEQ ID NO: 368774 - DNA, 122 bp, Homo sapiens
ttcagccttctgcctctgtccttcagattacaaatacatgcgagagtcatgctagtaacacgtatgtgacacttaaacattaatacagtatattcacatacactttatcagttgattattaa

SEQ ID NO: 368775 - DNA, 122 bp, Homo sapiens
cggcgcgggcacctggggagaaatggatggagaagggacctggctggaaagcctttgccccgctgctctgctccgcccataagaggacccctgaaatgtcccgtgcagtttgttcaagtccc

SEQ ID NO: 368776 - DNA, 122 bp, Homo sapiens
gagaagatgctggtatgatgtaaacacagtggtgaagtcacatcctcccctagctcccatcgctgcttaccagagccaggcctgccataagcccctctggccatggctgatgtcatatccac

SEQ ID NO: 368777 - DNA, 122 bp, Homo sapiens
gcgcctgccgggggtaggtgagcgccggagccggaccggggacgcgtgatgggtagggcgcggggcggggtctgtggtgggaagcggcccgcaggccgggagagagggtgcggccgggccct

SEQ ID NO: 368778 - DNA, 122 bp, Homo sapiens
cgatggtcctaagatactggaggaagtaaaaaagttgaaggccctacatattttagttcacgtttggcatttcttggtctttaccctatgtaaggcaaggagaaaaagacatgaaatttaaa

SEQ ID NO: 368779 - DNA, 122 bp, Homo sapiens
cagcagccaccggaggcagtgagataatggaggaagaatgtagggagacctccagtggaccgcactccttctagcgagccgcggaaaccatagagatcagggctcagccggagggccggccc

SEQ ID NO: 368780 - DNA, 122 bp, Homo sapiens
tcctctggaaggtggagcgggacaggggctgtgggtgagaggcccctgtgggtcctcgctcggcttcgctccctttctcctctccagcagtgaagtttgactattttcctggtgcttgtaaa

SEQ ID NO: 368781 - DNA, 122 bp, Homo sapiens
agctgattcctttaatttctgtgccctttcaggattatatttttccctcttgacccttcccgctacggagagaagtcggttcgaaaccatcacagcacaattcacacacggggtccccggcc

SEQ ID NO: 368782 - DNA, 122 bp, Homo sapiens
cacttcgagcccctttagggtgcgtttaagaacagtgggcgtggcctttacgtaaatcttcgagatgggaacctccagaatttgtctcaattgtctaaaaggtaatgagcgtcagcgacatt

SEQ ID NO: 368783 - DNA, 122 bp, Homo sapiens
atttatgttgaacatccccataagaaaaggcatatacaggtaaagaggtgcactacagttcgaagagttacatattgttggaattttatgatgtactgcacgtaattgtatatttttgtaaa

SEQ ID NO: 368784 - DNA, 122 bp, Homo sapiens
agttttcactcactagctactttactaaaatgtagccccaaaatgacgggccagcctcagcgtatctgccatatgtatttcaaagattacagtcagaatgagttaatgaaaatggcaggttc

SEQ ID NO: 368785 - DNA, 122 bp, Homo sapiens
aatcaagcacttggactaaatttggcatttggtttccctttaaacagttttagtcctttacggtgatttgtaagcccaggccttcttaactaggcaaatgctgccgccaggtggcctaggcc

SEQ ID NO: 368786 - DNA, 122 bp, Homo sapiens
ctaggcctgttctaggtgctagatacaagaataaacaacacagacataaattcatgtcctcgtgaagcttatattctactgggagatggcaggcacctaatgagactcacaatctcttggga

SEQ ID NO: 368787 - DNA, 122 bp, Homo sapiens
gcttgctcaggtagcctttgcgcgtgccgtccttgcgcgccagcagtcccagggacgcgacgtggccatcattcagccggatccccttctgcatggtgctcagaggccagcgagaccccacg

SEQ ID NO: 368788 - DNA, 122 bp, Homo sapiens
gcagaggctcctgctccgttcctcacacatgcgcactcacccagcgaacacgcccaccgccgaggagcgtggagacacaaaaacgcctggaaaagccccatccgggtttcagggggaattcg

SEQ ID NO: 368789 - DNA, 122 bp, Homo sapiens
aatcatcgcgcagctcgtccctcgggcttgtaccctttagtgaaagaattcagctccttgcgagaaagttacctgtggccgcccaagtccgccactttctgctctgtgtctgcccattgcca

SEQ ID NO: 368790 - DNA, 122 bp, Homo sapiens
ataaccgccctaaaaggccgggcttctgctgtcaagtagccagggtgggctccgccgaggcgaggaggggcgccggtggggagatgcgctcccaggtgtttgcagcggaagtgggaaacctg

SEQ ID NO: 368791 - DNA, 122 bp, Homo sapiens
agcggtgggctgggtctagggaggatgcttgagggtgcgtcggggcgggcagggcgcggccggctccaggtcctcaccatccctttgatgccttcagggaagaggaagcggttgtacagcgt

SEQ ID NO: 368792 - DNA, 122 bp, Homo sapiens
cacgcctgtaatgccagcacttcgggaggcccaggcaaccggatcacgcattcaggagatcgagaccatcctggccattatggtgaaaccccatctctactaaaaatacaaaaattagccgg

SEQ ID NO: 368793 - DNA, 122 bp, Homo sapiens
cgctcgctcgttccctcctccctcggcagccgcggcggcagcaggagaaggcggcggcggcggctagggatcagacatggcggcggatctgaacctggagtggatctccctgccccggtcct

SEQ ID NO: 368794 - DNA, 122 bp, Homo sapiens
gcggagggaaggcagacaccctgcaacggcccgcaggcccgtgtcacctgggccaccgagcgcagggcttgtgggtcgtcacagcataattcagccttgagccacgagacacggagccgaca

SEQ ID NO: 368795 - DNA, 122 bp, Homo sapiens
gctacaactccgtgacaactgagagcgtagtcttcgagtacccagttgcctactgacagccgtctcctctaaggcgcttcttttagccaagaaagcgttctttgcgtgctgtgacgtaaaaa

SEQ ID NO: 368796 - DNA, 122 bp, Homo sapiens
ccttactacgccgaagcgccacggctagagccacttccggcgcgacctcctcacccgagacgacctcagcccagcgagtactgcaacctcctgcaaacacccgcagcgcccaccacaggcta

SEQ ID NO: 368797 - DNA, 122 bp, Homo sapiens
aggccatacctgagaagggtggccctgctggcagtgcccaccaggatgccgttttgaaaccgcattgcttccatcaggttatgtggagtggagcaagccccggctgctgaggcgcattgtgg

SEQ ID NO: 368798 - DNA, 122 bp, Homo sapiens
ctcatgctactttaactctctgaaaggctaacattttttttactctcctccctttcttcccgaacctgtcacaatcctaatcagcctatctaactgcttagtaatatctcttcctccgcact

SEQ ID NO: 368799 - DNA, 122 bp, Homo sapiens
aggccggtgggtgggggccgctggtcagagttcaggcccacagaggggcagagtgggcatcgggctgcggcctctgctctttcctgccccagctctacgaggaagtgcggctgacgctggaa

SEQ ID NO: 368800 - DNA, 122 bp, Homo sapiens
ctaaatatccttgtctccagtactctgaatcttgggagttgacagaacaggaggaatgttcggaagtcagatgcatccccgttgcacaggcaatctgagtgccagaacagtcccaagagtga

SEQ ID NO: 368801 - DNA, 122 bp, Homo sapiens
gcaggaggctgggcccgcgttcccatggccaccgggggcctttgagcagcgttcacatcgcgccagtgcaccacccctactcctaaacccgggacctggtcctggggggaagtcatttggaa

SEQ ID NO: 368802 - DNA, 122 bp, Homo sapiens
aaaaaggagacgtgtgggcaccgcggaaaacggccggcgctggcctctctccggcgaactcgagtgaaagtttctggcctcggggaatcaaataactctgccacccgcgagggagggaggaa

SEQ ID NO: 368803 - DNA, 122 bp, Homo sapiens
ctgtgtttccggaggcatttccagaggacctagcgaggaccaacttccggctgcgacttccgcgtcttccgagtttcgagacctgctgcttccgcccggagttgttgtgggctccagcagcg

SEQ ID NO: 368804 - DNA, 122 bp, Homo sapiens
agttggggggcaacctcaggtctgtaagattctaaagctccataggtctctgaagctggtcgtggtcaccactgcagccgccaagctctgtactctgaagcaggcacagtgccaggggcttt

SEQ ID NO: 368805 - DNA, 122 bp, Homo sapiens
ccccaggcgcggcgctccctcgccagagacgcagcgactgccagcagctcccgcgccgcgcgctcagtgactgactgactgactgactgactgactgactgactgactggcgggcggcggcg

SEQ ID NO: 368806 - DNA, 122 bp, Homo sapiens
cccagaacaacagtggccttgagagggtagaactcgcatttctttccctgggttttgtggcggccatcttagaaaaggcagatgagcacttagaaatgggcacctgcgattacctcaggagt

SEQ ID NO: 368807 - DNA, 122 bp, Homo sapiens
gagatctttttaggcaggtgatcttccgggccctttagtattgaccatataggctatgtccgggcggtgtggttggccctacagggagacgggaattcctcttttgtgctctaccctcaggt

SEQ ID NO: 368808 - DNA, 122 bp, Homo sapiens
tttaggaggcctataatattgtattcaatattttatatattttgtgccttttttttttgccgaggagagagtccatatatttcatcatagtctgaaatgactgtcaaaagtgaggctaataa

SEQ ID NO: 368809 - DNA, 122 bp, Homo sapiens
ctgattcaagctttgattggcagagccacccggtgactgacagggggtctccatggcgcccgcgccgccaatccgcccaccccaatagcggagccagctcgcctgccggcgtgcctgagccg

SEQ ID NO: 368810 - DNA, 122 bp, Homo sapiens
cagattttccaaatttcttccataaaacattggccaaggttgggaccagagtgtgggggtcgagggctgggaactggatcaggtagcaaatggaatagaagaaacaaggtgatttaccctgg

SEQ ID NO: 368811 - DNA, 122 bp, Homo sapiens
ctgagtccacaggtcaaggtatcttcagcgacgctgtaaaccagacgcacctgctgttcccgctctttatgttaatgcgagtcaacgcctgaccttcaccctgacgagtccaacccagaggc

SEQ ID NO: 368812 - DNA, 122 bp, Homo sapiens
agttgggattaataatatctacctcctagggtggttgtgagaattaaatgaattcatatacgtaaagcacttcaaacagtggctgacatgaactgtgtgctatacagatgatggctgttaaa

SEQ ID NO: 368813 - DNA, 122 bp, Homo sapiens
ctgcagggggacatcttctctgtgggctctggatctccctatgcctacggcgtgctagaccgtggctatcgctacgacatgagcacccaggaagcctacgccctggctcgctgcgccgtggc

SEQ ID NO: 368814 - DNA, 122 bp, Homo sapiens
cagttgttctcaacctgctaccaaataccaacctggaaatatgccactatttaaaaagcccgaagaatagggttttgtttttcctttttaattgtttggtgttcaaactacatagtaaacca

SEQ ID NO: 368815 - DNA, 122 bp, Homo sapiens
cccgggagtcaggggtgtggaaatactgcagttcatggtgaactttgactattatccactcgagtcgtacttgagacgttccgcgccgcagccgctctccctccttccatcaacatcttccg

SEQ ID NO: 368816 - DNA, 122 bp, Homo sapiens
gtgcgtttggagataaatcctatctttccctgccatcagcacttaccttctgggaaatcacgcggctgtaccacatagagaaagatatgcactagttcaaagagaatgccaatgggtccagc

SEQ ID NO: 368817 - DNA, 122 bp, Homo sapiens
tgtggctctcgccatgcaaggagcctgtggtcttggtcagcctgggctgctgtaacaaaacgttgtcgactgcggctctgaaccacaggcatgaccttctcacagttctgggagttgggatg

SEQ ID NO: 368818 - DNA, 122 bp, Homo sapiens
gggaagcttctggttgctgcctgcgggaggcaggtggcccctggcaggttgggctgcagccgctggtttatctcttcatttccctgatgggcttgggccctgcgtgcaggtgacaggtgata

SEQ ID NO: 368819 - DNA, 122 bp, Homo sapiens
tttttcaaccacgaggcagtgctggagtctctctgaacctattgcagttcagtggctgcccgatttgcacatcactctttgctcaattaagcactgttaaatttaatttgactaggtttgtc

SEQ ID NO: 368820 - DNA, 122 bp, Homo sapiens
ggtagctctgctgttggggggctcctgtgagggtagaagtcaagctgaggaaggggcccccggtcagacccacctgaggaaggggcccccagtctctacccagtgggggaagaatagaaagc

SEQ ID NO: 368821 - DNA, 122 bp, Homo sapiens
tgaacttctgagctcaggcaatccacctgccttggcctcccaaagtgttaggattacaggcgtgagccaccgctcccagccgatagatagttttcttacttgttaaactgggatgactgtga

SEQ ID NO: 368822 - DNA, 122 bp, Homo sapiens
acatcatatgaaatcattgaaaccaatcatcctaaggagaaagtaactaaagggctaccacgcaggactgtaatggcagtttaggctgactacttctattttgggttctccagccagattat

SEQ ID NO: 368823 - DNA, 122 bp, Homo sapiens
gccgaggcggtcgtgagagacggacggagaggaagcgccggctggaatctcctaaccgcccgcttctcatcttgtcctggggcagggacctcaggatggaaaccagcagcctgcaccgcccg

SEQ ID NO: 368824 - DNA, 122 bp, Homo sapiens
atagtgagacacccatccctacaaaaaatttttaaaaattagctagatgtggctgggcaccgtggctcacgcctgtaataccagcactttgggaggcccaggcgggtggatcatgaggtcaa

SEQ ID NO: 368825 - DNA, 122 bp, Homo sapiens
aaacaaggctgtaaatcaccattgcatgcatggcctgcagagttgtaaagtgcagattttcgttataaaaacacttctagtatgaatgaaaaaaaaaaaaaaccaccaacatttcataaaca

SEQ ID NO: 368826 - DNA, 122 bp, Homo sapiens
tacaaaattcaaccccaacagggttaggaaacactcttcaatacaattttcagccaccaccgggccctcactcctgggtggcaaaattaatgtctgttcttgacaagacaacagtgaataac

SEQ ID NO: 368827 - DNA, 122 bp, Homo sapiens
gggacactgtgacagcagcaggctgggggacccgtggcctcactgggggatggtgaaagacgtttaaagacaccgcacaggtggatcacaagcccccaggacctggcgtgtttctggtccag

SEQ ID NO: 368828 - DNA, 122 bp, Homo sapiens
gaaagtgaggcacggcgggcagaggtggtgaagtcctcgcaaaagctggaaacatgaccccgggctcctgacgcatgggccattgtcctttgcactccaccgcgccaccttcctgtcaggtg

SEQ ID NO: 368829 - DNA, 122 bp, Homo sapiens
ggagcaatatttaaaaaaaaaaaaaaaaaaaaaaaaaggaatgtttggggaagactcttgcggtgcaaaggctgtttcagattgctgagatcagaccttaagtaccaaagcccaaatatagt

SEQ ID NO: 368830 - DNA, 122 bp, Homo sapiens
gcccagaggatagagtgcacgtgaaatgcttaacagtgaagtcggtgttcctgatggccgcgggtcggctgaaccggactcccagcgcccgagaggaggccaggggaactacaatgcccaca

SEQ ID NO: 368831 - DNA, 122 bp, Homo sapiens
taagtgaggcaaggctaagtgttggcgccaaagtatttgcttttgctgttgctgtttgctcgcagaacttgagcttgattagtaaaggagtgaaaaaggagattcatgactaatcctccctt

SEQ ID NO: 368832 - DNA, 122 bp, Homo sapiens
ctcgggtccgggcttggggagggggcggtctgcggggtcggattgagggccgggaacccgcggagtcttgcccctgggcacctgtggggccgagatcccgagccacctgtccacacaccccc

SEQ ID NO: 368833 - DNA, 122 bp, Homo sapiens
agccaaaacccaggcagtgggatggtcatgttagcatctgttttacaagggagttcccgacgcatcctccaggatcatggttcgctcagcctcacattgctacaaagtgggaattttaccaa

SEQ ID NO: 368834 - DNA, 122 bp, Homo sapiens
ccggagggatgcggagtggcggccgcggcggtggcggagactgtggctttaagagcgtgccgggagcccgagccccagccgggccgcgcttcgccgctgcgcaccccagcggagccaagccc

SEQ ID NO: 368835 - DNA, 122 bp, Homo sapiens
ttccagtggaaatgctctgttgttaaaaaggaagaaactgtctttctgaaactgacatcacgatgctcccagattttatgctggttctcatcgtccttggcatcccttcctcaggtaagcac

SEQ ID NO: 368836 - DNA, 122 bp, Homo sapiens
tactcaccaagaaaacactgcaagccctgaccttccaaaaactcagcttgttctcattcccggatgcgttttcaaaagagaaaagctaacttttgccctctagggtgggaaatgtgaaaggc

SEQ ID NO: 368837 - DNA, 122 bp, Homo sapiens
tgggagatgcgagcattcggggctgaagccgttcgcaccgcctcctccatggagaagcgccgaggaaaacctgccaaggacaacctccggcaccgccgtcaccaccgctgccgggacctagg

SEQ ID NO: 368838 - DNA, 122 bp, Homo sapiens
gggcctacgaccacggtcaccccactcacgtgcgcgcgccacgtgggcccgcgggctcgccgaggacccttggctgcctaccggggcaccccactagctgctctggcctatcgagcacccct

SEQ ID NO: 368839 - DNA, 122 bp, Homo sapiens
ggcagctgtagcatgactgtcacctcatcagcgaggccgtgcctgggtcccgagtgagggcgctccctgactgatgcggtgcctgccccttgctctgacgacattgcagcaccctctgcctg

SEQ ID NO: 368840 - DNA, 122 bp, Homo sapiens
cgcgctaggcggcggcgccagccggagtgaagccctccagcctttggaaaaagtaattagcgctgcggacaaacccaacgtggtaaaccccaagccccgccttcccctcggaaggcgggagg

SEQ ID NO: 368841 - DNA, 122 bp, Homo sapiens
gtttaaagttttgtcttgggtcagatttttgggaaatttcaaatgagcagttagcacccacgctttttgcaggccatccaaggcaaggacagaatgctgtctggaaagcaagctctgctttt

SEQ ID NO: 368842 - DNA, 122 bp, Homo sapiens
cctcagcgttcgcctgctgcctcggtaccctcagccgtcactggtggcctgcagcgtccgcgttacagtggtacatggtgacctaccctgtgccgcgtgtgctcactcgtcccctttgaatc

SEQ ID NO: 368843 - DNA, 122 bp, Homo sapiens
ctgccatggccttttggcctagttctctctccccactcccatctttctgtagagaatgcacggcttgcattccactgtacagtgttatattgtgtatccacctctgtgtcctctgggtctaa

SEQ ID NO: 368844 - DNA, 122 bp, Homo sapiens
ctgagggtgcagagatcccccaaggataagttaatccaactaaacatcgagaaaagcctacggcggttgcaatttcctattataaaaacattccagtggccgaaactcctcaacttagggag

SEQ ID NO: 368845 - DNA, 122 bp, Homo sapiens
gtggcacatgcctgtaatcccagctcctcgggaggctgaggcaggagaatcgcttgaacccgggaagcagaggttgtggtcaatacactccaggctgggcaacaagagtgaaactctgtctc

SEQ ID NO: 368846 - DNA, 122 bp, Homo sapiens
tcaataccttttggtgtacaggtggtttggggttacacggatgaactgtacagtgatgaacgctgagattttagtgcacctgtcgcctgagtagtatacattgtacccaatatgtagttttt

SEQ ID NO: 368847 - DNA, 122 bp, Homo sapiens
ctcagtccagccccacatggtatgtgagagtattaacagcacaaagcagaggtcctggatcgggtaagccaggggcctaacaaggaaggcaggatgcatgggaacccgcagagatgacatca

SEQ ID NO: 368848 - DNA, 122 bp, Homo sapiens
gctcagagagtgctgccgtttttaaggggccagcaagcccatcaggtctctttcccttcccgttcacctaaacagacacagctttacaaaacacagctgtgtcgtacgctcacattaaatat

SEQ ID NO: 368849 - DNA, 122 bp, Homo sapiens
aggctgcgggcccagtcggaggccgccgaggaacggatgcaggtgctggagagcgagggccgccagcacttggaggaggctgagagggagcgccgggagaaggaggccctccaggcggtagg

SEQ ID NO: 368850 - DNA, 122 bp, Homo sapiens
cgggacctgcagcccgccatgcgggagcctcccacccgctccgtgggctcctgggcggcccgcgcctcctcgacgagcgccacccctgctccacggcgcccagtcccattgaccacccaagg

SEQ ID NO: 368851 - DNA, 122 bp, Homo sapiens
acacaatccctatcaaaatcccagcagggattttatagaaaattgacaaaataggccgggcgcggtggctcatgccggtaatcccagcactttgggaggctgaggcgggcggatcatgagat

SEQ ID NO: 368852 - DNA, 122 bp, Homo sapiens
atgtctctcattctatttcccagttccaaattccaggtgcttgtctggagtgaagctacccgttactttctcccagcttttctccacccagcatgtctcctgcccatgcagctgaagacagt

SEQ ID NO: 368853 - DNA, 122 bp, Homo sapiens
ggtctgctctgagcgtgcgctcaactgcactcaccctccggttccaaggccctcacggcccgggcgcccccgcccacagccctctgacaggtggctccgcttgtcttcgctgctgcaccagg

SEQ ID NO: 368854 - DNA, 122 bp, Homo sapiens
agagcccagcgtgctggagggctctctgcatctggctgtgagtggcccctggactgggaccgtgggaggacagctttccatagtttaacataaatgaaccacaccataaggacaatctgctc

SEQ ID NO: 368855 - DNA, 122 bp, Homo sapiens
tagaatatttgctccctgcagacgaggcatagcataacgcagcaaggggctttgaagggacggaatacaggtttcaaggtaggaagccagtagagaaatccccagttttacttagagtccct

SEQ ID NO: 368856 - DNA, 122 bp, Homo sapiens
gaggtctccccacccaaggaagctccctgtgttcctcctccaccctcccgggtcctcagacgctaggcctgccctctgcctcaccctgtgagaacaaggaggtgagaacaaggatggagatg

SEQ ID NO: 368857 - DNA, 122 bp, Homo sapiens
agagagaaagagagagagagagagagagaacgaacaaatcaggatgcttgagggaatccacgtggtcgccaatctgtaactgatcagagcagctacactgaagcaaaaaccccagcgcccaa

SEQ ID NO: 368858 - DNA, 122 bp, Homo sapiens
tccgccacagaaaaacttagtagacaaggtgagttcccctgtgctccgtggcaaagagtgcggtgggtgacattgacccatggttaggtaatctggtaaggaaagaccccgttgtaacacat

SEQ ID NO: 368859 - DNA, 122 bp, Homo sapiens
gccgtggaaccccaagatctggagcctgaaccccagtatatggggctggaatctcaacatcggtcactgggacctcaatatttggagccggaaccccacaatttggaacacagaccccaata

SEQ ID NO: 368860 - DNA, 122 bp, Homo sapiens
gaactcagctaacccctggaatgaaccacggttcatcttcacggtgtcctcagtgcagagcgccgtgcatcagacgatcgatgcgtattcgcagcaaattggccattcagcagtgccgtgca

SEQ ID NO: 368861 - DNA, 122 bp, Homo sapiens
tgcctcctgagctcgtccagttctgcccgcaggaattcacagtcgtcggccgcctgctgccgcaggtgctgctgctcggccagatctgcttccagctcgctgacgtggcccttcagctgcag

SEQ ID NO: 368862 - DNA, 122 bp, Homo sapiens
acggacgcgatgtttcgtcccctttgatgaagcgttctggagatgggcagtggcgacactcgcccatatacgcaacggctgagtgcactccatgccaccgaactggttaagatggtaaattt

SEQ ID NO: 368863 - DNA, 122 bp, Homo sapiens
tccctgagtcagggcacctcctgagaagtgacgagggctgagaagttgcctctggattagcgaccttgacaggagctctcccgcaggaccagtgggaccaaaagccggctggagtggatgga

SEQ ID NO: 368864 - DNA, 122 bp, Homo sapiens
gggattaggatcaggcagattcccagggaaggacttggagccatgcctgggttttgaggccgggctggcacctccacttccagggcatcacgggagggtgcatgggctgtgctcgcaggcat

SEQ ID NO: 368865 - DNA, 122 bp, Homo sapiens
ggattcagcctggccacttggctaggactctgccagcacccatctgagactgacctcttccgggcctttggacactatgaccttgatgctgcccttcaggcaggaaacagggctggtgcctt

SEQ ID NO: 368866 - DNA, 122 bp, Homo sapiens
acctgagtgcctcctccgccggagacccgccagcggccaggcagcctctgctccccaggccggcctccgcacctgctttatccgcccttgggtggctgcgataggaaggtccagaagtttcc

SEQ ID NO: 368867 - DNA, 122 bp, Homo sapiens
ccagctgtgtggccttgggggaaagtatttaatctctcagagcttcagtttcctccccagcgagggaataagtgtgaagattacctgtcttgcaggactatggttaaactgagacagtgaga

SEQ ID NO: 368868 - DNA, 122 bp, Homo sapiens
acagggtggcaagctcgggcatgggcacttgacagggtcgcggttggcagtcacagcatccgtgctgacacacgaggaaggggactctttggtaatcccaactatttggtaccagagccaag

SEQ ID NO: 368869 - DNA, 122 bp, Homo sapiens
atttcccggctccgccccaccccttcgcccgggatttccgccgaggcggtgcagctaccgcgccgtgttgtcctctgtctgcaccgccgctgacggaaagctaggcccttctggagacccgc

SEQ ID NO: 368870 - DNA, 122 bp, Homo sapiens
ccgcgccgggggaggttgagtcagtggcctggagggagcagggccgggggaaggcagcggcgaaggactgccccccaacccaggggactattttcccttggggattcaaagagaaaggtagg

SEQ ID NO: 368871 - DNA, 122 bp, Homo sapiens
ggggagccgggcttgggcgagggaggtggctccgcttacctcagcttttccattcgccaccgttcggcccccacacgccacacccacaagtcggcgaagcccaggagaccaccgaggagttt

SEQ ID NO: 368872 - DNA, 122 bp, Homo sapiens
tcacggtgcctgttatgtttcttaaaggcagcgtgtccccagtttgttccttctgatgtccggctgtgttggcagttttttctttctggcgggttcatggtctcgctggttcaaaagtgaaa

SEQ ID NO: 368873 - DNA, 122 bp, Homo sapiens
acctctgtcaatccgaccacgacttctccttgaaaaccacgactcctgacacagtagttccgcctcctcagaggcccccgggatgaagtgacccagcagaaataccagagaccggagacgga

SEQ ID NO: 368874 - DNA, 122 bp, Homo sapiens
taatgaattatttggggtgattaccatccctttgatcactgtctttgtcctgtgcttttacggtttacactatgcaggcacagacttacacaatacctctgcgagaggcagagtgcttatta

SEQ ID NO: 368875 - DNA, 122 bp, Homo sapiens
tgacggggccttggctgcgctgccggggcagccggctcaggggagaggcccaggggcccgcgctgtcctcgccgcctcagcccacacggctgccgccgccgccccctagagcatccctgagc

SEQ ID NO: 368876 - DNA, 122 bp, Homo sapiens
gagcgggtcgccgcggttccagcgcgccgggccaccagcaccggcctacagggcggagttcgcaactcacttgaaagttgcacggaaccgagtgctgcccaaccccagggctccggcttgcc

SEQ ID NO: 368877 - DNA, 122 bp, Homo sapiens
tttccactatcacgcagtaattattcctttcaggaatatgtctgtctcagcccctctccccgtagaacacctcctcaaaggccttgaaggccaatggctgtgttattcaccctcatgcccag

SEQ ID NO: 368878 - DNA, 122 bp, Homo sapiens
acaccactcatacagctagataaccaaagataacaaccaaccccgcctcctggctgctgtcgccgcctcttccacgcagcctcccggccgccgccgccgccagcacctccgcagcttcccgg

SEQ ID NO: 368879 - DNA, 122 bp, Homo sapiens
aatgccagaagagagccagggggcccggcaatgcagaccaccacacagattaggagtggacgttctcagcattttggccttgggaacactcgggctgctgtgtttgctcaggttggcttccc

SEQ ID NO: 368880 - DNA, 122 bp, Homo sapiens
ggaggtctgggcggtaggcggtggggtgggtggaacctagcgtccagctaggcggaagggcggagcttcaggtctccatggaggcggcttctcctagcaactcgacgggcgttgagcggagc

SEQ ID NO: 368881 - DNA, 122 bp, Homo sapiens
agccttcattagagaagaagcaggcagcttgagacaggtggagctggatcaagctgtgaacgtgatttgctggaagctggtcattagtgttagaaaccccgtcttatttatttcatccttca

SEQ ID NO: 368882 - DNA, 122 bp, Homo sapiens
gtttgaaagtgcttctgtggaaaccagaaagagctgcctgagagaacacagcaggatgcccggaggcagaggcccagcatgtttacactgctgatacaggctgaggtcccttatctgaaatg

SEQ ID NO: 368883 - DNA, 122 bp, Homo sapiens
tgtaacctggaggggaatctgctctgatgacccagcacaaaaacggcagcaatctggtaacgcaccttcggaagggaaggcgtgctctcctcgccagtcctggggggaaagactgataagtg

SEQ ID NO: 368884 - DNA, 122 bp, Homo sapiens
tccactggagttcaggctttgaactcgggcacaggctgacaggatttccctacagagccccgtatcacagtcaggatctacagctcagaataccacatctctggcccctcccagaaggccca

SEQ ID NO: 368885 - DNA, 122 bp, Homo sapiens
agtccgtttgcctctaggattcctcaagaacctcaaaagagtttccagtgaggttttcctcgtaggcagtcagaaagccaatggagctgcccaatctaagcctctggttgagtatcctctag

SEQ ID NO: 368886 - DNA, 122 bp, Homo sapiens
ataacaggaaatttcaaataacaggaaaccaagaccagcaaggcgggtggctccaccctgcgtcgggcctcagtcagcccccgggggaggccatgaacgccacggggaccccggtggccccc

SEQ ID NO: 368887 - DNA, 122 bp, Homo sapiens
cctgggttcttaatgtacattagatatgtttgttctttctttctttttgaattgactctacgtctatcctggtttactaaggacagtcacaacttttgtctaaacataattactgataatgc

SEQ ID NO: 368888 - DNA, 122 bp, Homo sapiens
gtcctcccacctgggtttctgtggctctacgaaggttttagcccatatctgccccacacgcgtacctcccaggcaggccttccctccatccttatcttctctttccttccttctcattcact

SEQ ID NO: 368889 - DNA, 122 bp, Homo sapiens
ccgggtgggcgtgggggttcacctagctcggtggtgaacagctggcatgtctctgggttgcggacggtaaaggccacgtagacctcaggagcccgcttgtgctcccggcaggcagccagcct

SEQ ID NO: 368890 - DNA, 122 bp, Homo sapiens
ctgtcaagaagacccacacgcccccctccagcagctgaattcctgcagctcagcagccgccgccagagcaggacgaaccgccaatcgcaaggcacctctgagaacttcaggtaggagaaaag

SEQ ID NO: 368891 - DNA, 122 bp, Homo sapiens
atgcggcccttttcaggccgcccgcccccgggccccccgcccccccccccccccccgcggcggagtccaggccttgctgcgctcctcaactgcgaccgccgcaagttccacactagcccccg

SEQ ID NO: 368892 - DNA, 122 bp, Homo sapiens
gatgaaacattgtgtggatcttggctttcttctagcacagtcagctctgttcctaaccctcgccatctactgggcatttttattcatatgcttgatcagaagttggcttgggtgaatgtgtg

SEQ ID NO: 368893 - DNA, 122 bp, Homo sapiens
ggctgtgcagagagacaatttcaagctgagattccagttgaagcccattcagaacagcagcgcggcgatgggggaaagggaagccagagaggaagaagaatcagactgcagccaggcaggcc

SEQ ID NO: 368894 - DNA, 122 bp, Homo sapiens
gccatcggcgcggtgcggggaggcgcctgcggctccagctgctggaggaggctggccgagcgcctctctgataccagcatggtaaggtttggacacacaggggcttgacagattttcagcga

SEQ ID NO: 368895 - DNA, 122 bp, Homo sapiens
tgctccgcctgatacctgtccctcctcccggggcttgtgcgaggattgaagcgttagtgtcgttcttgccggctcatgggtgggcacctgcctgctttcaccacctgccgccagcttgcttt

SEQ ID NO: 368896 - DNA, 122 bp, Homo sapiens
ccaaagcccggacgaccacgtcccggaacgcggccccgcccacctcggctggccgcaccccgcagttagaaagccacgccccctggctcgcctcgcctcgcctcccgtccctcgactccgcc

SEQ ID NO: 368897 - DNA, 122 bp, Homo sapiens
tacagcctaggcgccgccaacaaactagtttctccggccttcccgccccgcctcccggcccgaagagcagcagccaatcagaggcatcgcctctgtgacggatgggcagccgaacccttcag

SEQ ID NO: 368898 - DNA, 122 bp, Homo sapiens
acacgtccaataatgggactggtggaggatgttctggatcatcagcatcatgaaattttacgccgtccgtaaattggactctagaaacaactgtggtgctgtggacccgtggccacaagaaa

SEQ ID NO: 368899 - DNA, 122 bp, Homo sapiens
cactgaagcatcattccaatatcagataaatataggcatgagagctgactcaacctcggccgggtcctcaacacatattcgttcattcatgtaatatttagtaaacattcactatgttccag

SEQ ID NO: 368900 - DNA, 122 bp, Homo sapiens
ccttttttctgtgctggcgtcccccacccccggcttgctgtcctcgtgaaacctcgctcccgcactgcagctgggtcgggaagcccttcctgcaagccttacagggtccttggttctgtgaa

SEQ ID NO: 368901 - DNA, 122 bp, Homo sapiens
tatagaactttgtcccaaagtgaaaagcacagccagataagcacgctggaagcatctgctcggggctgccgctattgtgggaatgcaggcgctgtggctactttgggtatgagacatgcatg

SEQ ID NO: 368902 - DNA, 122 bp, Homo sapiens
tgcacacacaggaacacagaggcccacttacatataaatgcagatgcgtgcctgcatcaacgagcgggagcacattgggcaaatgcacgtgtacatgccctacgtgaacacaaacccgtgga

SEQ ID NO: 368903 - DNA, 122 bp, Homo sapiens
tccagccacgcggggctggggtctccgcccgggtggacagtggctgggaggttctgaacacgctgcggctgctcctggccagtcaggtggggagggcggcaggggtgggagggacgtggtgt

SEQ ID NO: 368904 - DNA, 122 bp, Homo sapiens
tgtaattaaaaattgtcactaacatgaggatttttgcacatcccacaacattcctgtttacgactgttaggacatattcttgtactttatgaggctcattcaaccctaacaactggggaaag

SEQ ID NO: 368905 - DNA, 122 bp, Homo sapiens
ccaccttgcggccggtgtagaccttgacgtagccgcccgcttcgtctcctttctgcaccacgatctagaagattaaaggatcagaagtaggagaggaatcaaaggaaaaggtaggagaggac

SEQ ID NO: 368906 - DNA, 122 bp, Homo sapiens
aggccctgcaagatggtcatctgtcttgtcccgcaaaggccaagacaaacgccgtgtcagcggcagcctctccaacccagtctgtgatggccagtggtggtcagtgagggctgggccgcgag

SEQ ID NO: 368907 - DNA, 122 bp, Homo sapiens
gacctgcagcccgccatgtctggcccggccccctaaaaccccccaaacccccgcttcccccgccttgggctcccgcactactggcacctctccaacatgcgctgccccctgctccacggtgc

SEQ ID NO: 368908 - DNA, 122 bp, Homo sapiens
cgtgcactctctttagagtgcagggctgacgggcggtccagccctggccaagtcatggagcgtgaatctcccaagtcagtgttcccgctgaggagggtcggaaccggggaggacgccctccc

SEQ ID NO: 368909 - DNA, 122 bp, Homo sapiens
gtgagcagcggcggcaggggaggaggtggaacccgcggccggagacacacgccgtggggtcggtcaacacacactcacgcacttgcacacgctccaaggcccggaaggaagctgaggccggc

SEQ ID NO: 368910 - DNA, 122 bp, Homo sapiens
gccatttgggagacattaactgctcaaaaaactcgagtctgtattttggctctcctctaacgatggcaggacctggggcaaaagtacaaatagatacctaaattatttaaaattacaaacca

SEQ ID NO: 368911 - DNA, 122 bp, Homo sapiens
gtggacagcctcctgtccccaacctctaaccgtggcagccagtgagcagtggctggacagcgggatcgggcttatctgacttgcatctaaagtaaagctttgctcctgagtgcacataatca

SEQ ID NO: 368912 - DNA, 122 bp, Homo sapiens
caaggactcctttgtggaggtcctggcttagggagtcaagtgacggcggctcagcactcacgtgggcagtgccagcctctaagagtgggcaggggcactggccacagagtcccagggagtcc

SEQ ID NO: 368913 - DNA, 122 bp, Homo sapiens
cttcaccggtttgtggcccgggaaaagataatgtctgtgctgagtgaatggggcctgttccggggcctccagaaccaccccatggtactgcccatctgcaggtaacctcattttaactcctt

SEQ ID NO: 368914 - DNA, 122 bp, Homo sapiens
gacagtgggggctcaagctcagagccatttgaccgtcatgcacctgctatgttacgggaacggggcactccaccggtggatccaaagttggcctgggtaggagatgtcttcaccgccacacc

SEQ ID NO: 368915 - DNA, 122 bp, Homo sapiens
tcactaatgagaaagaatgtaatctcaaggtgaactccagagtagggagtgagtgtgtatcgtgaccttgggggctagtcatcaccccagcctagacaaagatgatgtaaaacacccgcgtc

SEQ ID NO: 368916 - DNA, 122 bp, Homo sapiens
taaaatggggccacctgcatgcagcgatggttgtggggtccaccccacagcttggggacccgcgttcaggcagctaggaggggacccacatggacggtgccaccccgacacttcccgggctt

SEQ ID NO: 368917 - DNA, 122 bp, Homo sapiens
ccgggctcgggagcatttattagttcttttacccaaagcttggtcaggagccctgagctgcgattggccgacgggtagaccgtcccgggtggcggagacacgcgctgattgggcaacagcga

SEQ ID NO: 368918 - DNA, 122 bp, Homo sapiens
ccccgggcaggggcgggagtggtggaggcgccggcggttggcactgacaggggcggtgagcgagccgctccggtctccgggcgaggcttggccttccgagcagagacggcgggaagcggcgg

SEQ ID NO: 368919 - DNA, 122 bp, Homo sapiens
gtggcttcttcctctgcctttctcttcctccgctgtcgcctcccaactctagtcagcctccggccggccgtctccttaacacagaacaccatgccttcaattaagttgcagagttctggtgg

SEQ ID NO: 368920 - DNA, 122 bp, Homo sapiens
cgtggcggggcgagagagctgctagggcggtttctccgcctcgggcctgttgggcggggccggctaaggtgcgcgtgctcgctggtcctaacggttctgttgggcgtttctgctgagaggcg

SEQ ID NO: 368921 - DNA, 122 bp, Homo sapiens
agccctatctgctgaaagagagcgcctaatgccgttacttcccagtgtagcctttccactcggcagaccaagcgcctctccttcgagtcgctacccgcttggagtcggctcagaatcaggct

SEQ ID NO: 368922 - DNA, 122 bp, Homo sapiens
ctggaattctcatctacagacaagaacaaactggggcggggcccatcaccttcacctacgcgccgggagggtggcggctggcgggcggggccgggctcgggccgtgacgccgagagtgcggg

SEQ ID NO: 368923 - DNA, 122 bp, Homo sapiens
ggagaagcaactccataaacaacttgttagagaaatgcaggattatgggtctgtgagctacgggagcaggggcagtaggcaggagcctggctgttttgcacccccacgcctaagaaactcag

SEQ ID NO: 368924 - DNA, 122 bp, Homo sapiens
ggctgggtgggtagagggtccctgacccctgatccagcagcatctccccctccccaggcccgctcagcagggaagtggccgctcaagtggtacgcacccgaatgcatcaacttccgcaagtt

SEQ ID NO: 368925 - DNA, 122 bp, Homo sapiens
acctcttaatggaataatttaattgttgaaagattcacaaatgactctccgaacagcatacgggacctttagaaggaagcacacctttcattgttctgggtttctaccttaattgaagtgac

SEQ ID NO: 368926 - DNA, 122 bp, Homo sapiens
ccggttaatccgcttcatctttcatctgtgctgcagtcgtggattttaatgagttgcaggcgacccattcagacgtaatggtgtggaggtcaacgtgggtcaagtttaagaagggggggctc

SEQ ID NO: 368927 - DNA, 122 bp, Homo sapiens
tggaaaggacctgtgtgtcagccctctgtgcagtgattctcccttccctggaattttcttcgccatctggagcgcaaacatcttcctccctccatctgccccatcttggcctgcagggccct

SEQ ID NO: 368928 - DNA, 122 bp, Homo sapiens
tccgcccaccccaatagcggagccagctcgcctgccggcgtgcctgagccgagccgagcccgaaccccaagccgcggagccagcacctcctccagtcggggtcgtccgctcccggccgttga

SEQ ID NO: 368929 - DNA, 122 bp, Homo sapiens
gtaggggcgactgaaaagctgggagcccacgtagtaaaacccagttacctagcctggacgcgggcgagttgccccgagcgaccccttggctgcgagagctggccagaagccgaggccgctga

SEQ ID NO: 368930 - DNA, 122 bp, Homo sapiens
ggatcgcccgggacaaaccgacacagagcatgggagaccccggccctttccccgcgctgccgggaggggagagtctgggccatctgtgtccccgtacccctgccccaacatcccacccactc

SEQ ID NO: 368931 - DNA, 122 bp, Homo sapiens
gaggaacccgcttggcaggggtagctgataacttagggccagcgcagacacagaactgtgcgaaatgacgctgatgtcgcagtgatgcgagccgcatgttcctcgcctcacctgctcacttt

SEQ ID NO: 368932 - DNA, 122 bp, Homo sapiens
cgagggtcgcagaggagcaggggcgttggcagcgggcttgcttgggcacagtctgcgggccggagcagaacttccgcccctggtcagatccctcggcctcagatccaaagccctccccttgt

SEQ ID NO: 368933 - DNA, 122 bp, Homo sapiens
agcagtatggaagccccatccgtgggcagcatgaggtccacggcatgcccagtgccaacacgcacaatacgtggaaggccatggaaggcatcttcatcaagcctagtgtggagccctctgca

SEQ ID NO: 368934 - DNA, 122 bp, Homo sapiens
tgctctgaagcaaaggagcattttcctgagtgctgcagaccagctacaacaaagaaaagacggccagacaaaggcacaaagcttcctgcggcagtgacaaggcttgaggagtgtgggttttc

SEQ ID NO: 368935 - DNA, 122 bp, Homo sapiens
cagctgcagtccaagagcatcgagctagagtcggtgcgcggcaccaaggagtccctggagcggcagctcagcgacatcgaggagcgccacaaccacgacctcagcagctaccaggtaggaac

SEQ ID NO: 368936 - DNA, 122 bp, Homo sapiens
aaggaggcaacattagtttaaaaaataactgaacaagaatctggcctaataaccagacctcggattagcatactttctagttatagatgtaaatcttcaaagtacatatattcagtacaagt

SEQ ID NO: 368937 - DNA, 122 bp, Homo sapiens
atgcttttttcttttttttcctaagtcttttgctcatctttttctgtgtttcaggagtcccgttctgtgtaccagctacagtatatgtcctggccagaccgtggggtccccagcagtcctga

SEQ ID NO: 368938 - DNA, 122 bp, Homo sapiens
cggctcctcagcccccaggctctcaaggccggaatcacgctttgtggggagttaagatagcggagctcaatccaactgggctgtggcgggtgaaggctcgtccctagctctgagatgcacgt

SEQ ID NO: 368939 - DNA, 122 bp, Homo sapiens
cgcgccagcgagagagcgcttgaacgcgagctgcgcctgcgcccgaggctttctgaaggccgggaatgggcattgctgtatgcttggcacattgccgtttattccattagttaaaaaaggaa

SEQ ID NO: 368940 - DNA, 122 bp, Homo sapiens
ggcaaccggagcgtaccactgcggagccggctgcggggggagttaggggacgcgggcacccgtaggcctcacagacccacactgcccaccccggtacctttgttacactttacatcctgagg

SEQ ID NO: 368941 - DNA, 122 bp, Homo sapiens
tacccatcaacaaggctgtcagtgactgcagtgacttccaggcgccttatcctctctaagcgtcctgataaccctgagagatgttattacggccattccctttttgtcatggaggtgggggg

SEQ ID NO: 368942 - DNA, 122 bp, Homo sapiens
tcatagcgcaggcagtccgagaaagcctctaccccgaacttggtgatgcagtacggggagcgggccgggttggccatgcggcccagcatgctgctgatattgacgacgcggcctacagaggg

SEQ ID NO: 368943 - DNA, 122 bp, Homo sapiens
gttctgaggcatggtgagggctgctggagcccatcactgagctgcagaaggagatactaacgctggccatgccaccctccaggcaggcacaactggagttgaaaatcgagatggggcagggc

SEQ ID NO: 368944 - DNA, 122 bp, Homo sapiens
gctgagtactgagccctggacgctaggctgccttagtccagaggaggacagattcagagacgtgcttcaggaattcaggacacagctgcaatcattcctggagagcccggatctgtaggacc

SEQ ID NO: 368945 - DNA, 122 bp, Homo sapiens
ccactatcattaactatagccctcatgttgtacattaggtcttcccatttgttcatcctacgtgtttgtaactttgtatacttttacctaaatttccccatttctcctgaccccactccaac

SEQ ID NO: 368946 - DNA, 122 bp, Homo sapiens
gacggcctacgaggacttcaccctctggagctgggaaccgctgcccacttacagggaggccgaggtgtaggaaaactggaattccaaaaggttacaggaaccaccttattcagccttcccgc

SEQ ID NO: 368947 - DNA, 122 bp, Homo sapiens
aggttgggcccctggagagtggggtgcaggaatggtctgctccaggaggtgagaacagagcgcatgactaatgccaccaggactactcacggcactgacttcatcgcccagcttgcggacat

SEQ ID NO: 368948 - DNA, 122 bp, Homo sapiens
tgcagctggctgaaagagaacaagaaaggctgtaaggtggaggtgaatttttaattgagccgtgaaagatagggaaattctgtatgaaggagtaaatggaggcatagaggcatagaggcaga

SEQ ID NO: 368949 - DNA, 122 bp, Homo sapiens
gaatgaaatcaggcttcagaacagaccaacgccacctgtgactcagagggaagggagctgcgcctcccagggaaaccaggttgcgggtcactccagccgcacccccacccctccctccgccg

SEQ ID NO: 368950 - DNA, 122 bp, Homo sapiens
tccctctttttcttccctcttgcctttccctcccattgcccactttctttttttggctgccgaagatttattgcctttcagtacttatagatgatgttttcataagttctaatgaggtccca

SEQ ID NO: 368951 - DNA, 122 bp, Homo sapiens
aacactgctatagaaatctataaagtgtttccttcgtaggagggccgtaggcagccatggcgcccagcaggaatggcatgatgttgaagccccacttccacaaggactggcagcagcgtgtg

SEQ ID NO: 368952 - DNA, 122 bp, Homo sapiens
agaaattttctttttgattactagtacctgtattctaacagagagtttgaattttttgcccgtgttatcagaatgatggaaattgatcattttcagttgttcattgtgtattcaatccagcg

SEQ ID NO: 368953 - DNA, 122 bp, Homo sapiens
aataccagccagtagaaaataaacccaaccatcggtagtttatcaacaccagccgccagccgaatttcagtatcggccgtctccagaggttcagtatggatctcaggaggtgcgtcctgtgc

SEQ ID NO: 368954 - DNA, 122 bp, Homo sapiens
tggaacagataagtggggctgctaaccaccataaccaaagaccactaactctgttaacaacgtctagcagcaaccttagcacagtacgagtcaacgaatttcagcgtggctaatgatctcag

SEQ ID NO: 368955 - DNA, 122 bp, Homo sapiens
aggggacccagcggccccaggagcagcagcatcagcggcggcggcagcgcaggcttcgagcgcagcagcatcttgggctcacctggctgctccccccgccagctgccgcgcagcggagagtc

SEQ ID NO: 368956 - DNA, 122 bp, Homo sapiens
gcagcccggactgccccgaggtggcgggtttcttgggctggcagcccaggatggtggccacggtgtaggtggggctggcctgcccagcaaaacctaccttacaggtgcctgtgcccatgtca

SEQ ID NO: 368957 - DNA, 122 bp, Homo sapiens
ctgtcatttcatactggtcaattctgctgcttgcaacagatgtaggaaaggattttatggcgagtagattttaaaactgctgtattctcaacacctacacaatgcctggtgcattacaagag

SEQ ID NO: 368958 - DNA, 122 bp, Homo sapiens
gcctcacaggcctgatgacctagaaccaactaaccaagccccagagaccctgcttacctgcgctccgcactgccccgcacccctcccagctcacctgcgctccgcactgccccgcaaccccc

SEQ ID NO: 368959 - DNA, 122 bp, Homo sapiens
cactcataggaaaactcctttcaccagaattgaaaagataaatagaattcaactcagctgcgcagggaaggaaccttccacgttctgcctttgatgtctgcagaactcagctgcttgggaag

SEQ ID NO: 368960 - DNA, 122 bp, Homo sapiens
agacaggaggatcacctgaccctaggagttcaagaccatcctgagcaacgtggccagacccgagctctacaaaaaatttaaaaaattagccaggcatggtggctctcacctgtagtcccagc

SEQ ID NO: 368961 - DNA, 122 bp, Homo sapiens
tcccaggtgacctgacgcctctgtcgcttatgccctcctattggctgataatgagtccaacgtgaggataaagtatccaatcagtgaaggtctttttagagtgaagcgctcataggtggttt

SEQ ID NO: 368962 - DNA, 122 bp, Homo sapiens
tgatcggcttggcggtagggggtctgtctctccggtgcacatcctatgcctaggcggaggcgcccagttacagcgctctcctccctacacccctttgcgtcggccaaattcagcctcccccc

SEQ ID NO: 368963 - DNA, 122 bp, Homo sapiens
gcacagtgtctaacacataaaagcttaggagaagttggctattaagcatttctaggaacccgaggactcagggttgttattttagttcttggaatcaaaggaacttgaagcgtagtcattcc

SEQ ID NO: 368964 - DNA, 122 bp, Homo sapiens
atcaagaaaaaacctccaataagttctatttcctagtcttactgtagatattccactccacgaacaatgagggaatggttgcacttaattgtttgatgtccatgtagtccagtggaagaaaa

SEQ ID NO: 368965 - DNA, 122 bp, Homo sapiens
attccgactctggagctccagagaccggatccgagacgcgggtggaggtggagttacactcgcctgcagccctgagggtgtaaatggcccattaagatccaggttaaatcaacctatggagc

SEQ ID NO: 368966 - DNA, 122 bp, Homo sapiens
ctgcggcccctcgctgggacggggggcagggggcttgactgggttatctctgcggagatccgccgcccaccccaaaaaggagaaagaaaaggcttagcacacggtcccacccaccgcccctc

SEQ ID NO: 368967 - DNA, 122 bp, Homo sapiens
gttttgttttagcttgctaagtacagaattggaggatacgatgggataaacaactgaatacgtgacaacagtttgttgactcagacagaaagccatcagatggcaagggttgaccgttgaag

SEQ ID NO: 368968 - DNA, 122 bp, Homo sapiens
atggccagaagctacaataagcatgtggataatgggcattctgccaagtgagagagagagcgagcagcagcattggataagaaattatagatattctttagggacaggaaagtggtaaggga

SEQ ID NO: 368969 - DNA, 122 bp, Homo sapiens
gtcattttcgcggcaggctgcagagaaatcttaaactttcgtgttgtttcactgagggtacggcagaagagcccaaggaatgtgaaaggagaaacttgcataattagactttatgtggggag

SEQ ID NO: 368970 - DNA, 122 bp, Homo sapiens
ccggggcaggcgcagagctggcaagcacgtggtggggcccctgaggcgtgcatagggtcgcgcgcctgggagcttgtcgctggcgcggtccgggagggaggttcggcggcgggaggcagcat

SEQ ID NO: 368971 - DNA, 122 bp, Homo sapiens
ggattcctgccagtgggagcaaagctcagggacgtgtgggtgctttgtgtacttcctgagcgcagtgtagggcctgtcccgggagaatgctggtacctgggctgggccttgcttcagagcca

SEQ ID NO: 368972 - DNA, 122 bp, Homo sapiens
ttagctcagcacgttgatttcactggcactgaagcaacagcaattagctatcttgcttctcgcagcacatacaggagacagctgagtgcgctaaaccacgcactgactggtgagcgctttgc

SEQ ID NO: 368973 - DNA, 122 bp, Homo sapiens
gcctctcccctccaggatcagcggcccagagatagggacatgtcattgtttccgaggacgcgttgtttgaggtcaccttaaggccagatcggtgtttcattgacgattctgttggttttatt

SEQ ID NO: 368974 - DNA, 122 bp, Homo sapiens
ctgctcttgtggggggcgggctttttccccggttaatcagctcttaaccgactgcagcatcgatgaaaacaggcatttccataccgcctttagaagcctaactcaactgttagactccttag

SEQ ID NO: 368975 - DNA, 122 bp, Homo sapiens
gtggtggcagggcagtggatgctgagtgttgtcgttttgaactttgaagccctagtctggcggccagctgaccggcctttgctgggctcctgacattggctggctgctggttcctctggtat

SEQ ID NO: 368976 - DNA, 122 bp, Homo sapiens
tacacattcccaaccagttagctaaataaatctgtgactaattcacagaattcaaatcaccgtgtgtattctgcatcataagacaactagtatgaagaaaatcctaaggtagtgctaagaac

SEQ ID NO: 368977 - DNA, 122 bp, Homo sapiens
agggactacccagcactggaccgccccctccacgccctcccaccgcgggcccctgcccaccggcactcacccccactgagaggggaggccaggctgcccccagctcccccattcaggctctc

SEQ ID NO: 368978 - DNA, 122 bp, Homo sapiens
cttttacgctcgaacttgctttagtcctggagtctgcgcacgcccaaagggcacccctcgcgtcctaccgcgccatcacctttctgcgcttgcgcattcatgccgtcaagttttccttttcc

SEQ ID NO: 368979 - DNA, 122 bp, Homo sapiens
ctggacccttcgcttctgtgctgaaggggcacggagcgctgagggggccgaggacatacccgcgctggccgccacgcagtgtgtgtaccctagagacgtgtgacgccccaggaccggagttc

SEQ ID NO: 368980 - DNA, 122 bp, Homo sapiens
cctgcactgggggcgggcgcggtggcctcagggctgcccgcaccgcgccgcgggtcaccgcgctgagctcctccagggctgaacctgccctgccctggccaccctagtgcccacccactggc

SEQ ID NO: 368981 - DNA, 122 bp, Homo sapiens
cttgggagactaggtcagttctgggagtgtcttggaagttagaacacactccatgggtgacgtgggatgtagctcattgggggtcctttaccccatttttgtgtcagtctataccctacact

SEQ ID NO: 368982 - DNA, 122 bp, Homo sapiens
caggtgatttagagagagtaaagaccacctttggccgtcattttgtctcagcttaactgacgccctcttgttaccctctagttttcctgactcggtcccttattagcatatcctcatttcca

SEQ ID NO: 368983 - DNA, 122 bp, Homo sapiens
tccttttgcagaaaagacaagacatttctttgccaccgctggccacccctgcccaagccccgttcttttagggaagagcactgaaatgtcctgcaccctccacgcgatgaagtgtttcctca

SEQ ID NO: 368984 - DNA, 122 bp, Homo sapiens
gactcgtggcgtctataggctgtttctgcgtcactcatgcatggaagaccaatcagagagcgtacttgtctcatgggacaatagcactcatcgaaatagttgtctgactggaagagaaagga

SEQ ID NO: 368985 - DNA, 122 bp, Homo sapiens
ctcagatagctgggaaaacgtgatttctgggtggctctgggaagagactggcatctgaaccgggggactgagtaagaagatccctcctcgccaggtggggcaccatcactcaatctgttgaa

SEQ ID NO: 368986 - DNA, 122 bp, Homo sapiens
aacttttaaaccaaagaagaacattccagagggttctcaccagtatgagctcttaaaacacgcagaagccacacttggcagtggcaaccttcggatggctgtcatgcttcctgaaggggaag

SEQ ID NO: 368987 - DNA, 122 bp, Homo sapiens
ccgctgcctgcgcgaggggggcaggtcccgggcgggccgcgggctgggggtggtgctgcccggagggcgggcgtctagggccggagggtggagctgggggttcgggggtgtacccgggggcg

SEQ ID NO: 368988 - DNA, 122 bp, Homo sapiens
gcccgggaggaagtgttcccgccctctgtcccgccccgcggccccagccacttctcggcccgccctcaggtttactctccgcccttcaaaggcggcagccaatcggggagccgcgtccccgc

SEQ ID NO: 368989 - DNA, 122 bp, Homo sapiens
caattcctttctcttatgatcaaactcatctttctctgccagttgattgacctccagccacgaaaggagctcgttgcatttatccaatattttatttttatcagactcactaatcttgccct

SEQ ID NO: 368990 - DNA, 122 bp, Homo sapiens
ttatttatcttttttttcatttcatatcagtttgccatcctgcttggcttcaccaccctccgggtacctgagatgctcccttccccagtctgttcattttcttctgggctctgtcagtattt

SEQ ID NO: 368991 - DNA, 122 bp, Homo sapiens
ccctctggctcctgggcctgccgggtctcggcgatgggcgagggctgtgcccggtgcctgcggctccctccgcgccgtggacccccgcggcctcccggccttccttaccccggcggcctggc

SEQ ID NO: 368992 - DNA, 122 bp, Homo sapiens
cccacgcacaaagccgaaatcgattctgcgacaattagagtgcctggccgtcatctacctcgccttccctggagccttttcctgtcttctggtccagccgctcaccattaagctcttccctt

SEQ ID NO: 368993 - DNA, 122 bp, Homo sapiens
ataatgttacagcagtcagcacaggcctcctgctttcctattggtgggcaccgtgtcagccgacatcagaagataatcatcattggctagacaattacaactggagcaactagcatccactg

SEQ ID NO: 368994 - DNA, 122 bp, Homo sapiens
aacaaaagggcttctgttatcatggaaaaacctgaagatgtctcaacaatatcagagatacgcagtgtcaggaaacagcctcccaagcatgggcagggggcagagaaacagcatggcaaccg

SEQ ID NO: 368995 - DNA, 122 bp, Homo sapiens
cctgcgtgcagcctgcagcccaccagagcagtggctggggctgtcctctcccctcttcctcgcctacaaggagaccccgtgaatcaccaccagcccctgtgccctcgccccactcacgggaa

SEQ ID NO: 368996 - DNA, 122 bp, Homo sapiens
gaccacagggctgggaaggcagggcctcaccgggggttctggagttccatgacctgtggccgtggaacacccggcctggctcctgtcctcctcctgttgatagctcctcagggctcggctcc

SEQ ID NO: 368997 - DNA, 122 bp, Homo sapiens
gtagacactggacttgtaaacgaaaagcttcataagtccctctttgcttagtacttttctcgtcctttccccagggtgcacgtaaccctcaagcactaggaccgtgcggaatccaggctgcg

SEQ ID NO: 368998 - DNA, 122 bp, Homo sapiens
ggtaggtgggcgtggtctttgtgccagcggtcatgtgcggtcatttttctaacgcacgtccgtgcatccagctcactgtgatcactttgcagggagtctttggcaagagggaagaccttctg

SEQ ID NO: 368999 - DNA, 122 bp, Homo sapiens
acaccaagatggctatacccctcactgccagtttctttcacagagctgtggtgaaaagctcggacagagatggaggcaaacagctctcagccatgcggggcttggggttggtgcttttctct

SEQ ID NO: 369000 - DNA, 122 bp, Homo sapiens
tttatctgacttaatgaataaaagaggcataggaaaaatctctggggccctgggacctaacgttggcttagccacttgctagctgtgtgacattatgtgggatgaatttggcttcaagtaac

SEQ ID NO: 369001 - DNA, 122 bp, Homo sapiens
tcttcccacagtggttccaggtccagccctgacttcatcctcccttctctgtccacaccacgagtggcacatcccacctgctgattccagctcctggccctcctggaacccaggctctaaac

SEQ ID NO: 369002 - DNA, 122 bp, Homo sapiens
ggcactgccctggcctccaggccgccccggaagccgcgccgcctgcgtgggaccctgcgacgctgccacccagccgcaagcggaactcgcttggctcgtcaccccttcacccggtgcgcctg

SEQ ID NO: 369003 - DNA, 122 bp, Homo sapiens
cattgccagattgcaccgtaggagtgcagcagcactgtgagggactgggaatgcttcctccggcccttggaggcctcagcaactcactgatgtcacagccaaagagggctgttttcaaacat

SEQ ID NO: 369004 - DNA, 122 bp, Homo sapiens
cgtcctgtgcggctgtgaggcactgtcagcatcctcgcgtcctgtgcggctgtgaggcaccgtcagcatcctcgcgtcctgtgcggctgtgaggcactgtcagcatcctcgcgtcctgtgcg

SEQ ID NO: 369005 - DNA, 122 bp, Homo sapiens
gcttgactggccataaaaaggttttgtttttttcttttctctcttcttccctgcccgtgacgccgccccctcccccgccctccctccgcccccacccccacccccaccccctccccacgctc

SEQ ID NO: 369006 - DNA, 122 bp, Homo sapiens
aagaaatcctaggctgggagtctgctgctgctcactctgcagagctggttgccaagggaacggttggcaagcggaagtggggctgcgctggcgcttcctcttccgggtcggcgctcctgcct

SEQ ID NO: 369007 - DNA, 122 bp, Homo sapiens
tgtcaatagtctttctgcaaaagggggtgaccgtggcggttactagcgaatgttcagcaccgctatctacaagaaaatcaatgtctttacccccgactgtcattctgaccagagactctttg

SEQ ID NO: 369008 - DNA, 122 bp, Homo sapiens
ggaggcggaggaaggctggggctgggctgctgcggtcggcactggctgcggtgcgaggggcgcgctctttacgcccgaggcgcggcgctgggagagaggcgcgggcggagcggggcgcaggg

SEQ ID NO: 369009 - DNA, 122 bp, Homo sapiens
gggagctccacttacgggcagccttggctggtttctgttgagcgtcttcaccgttatctacgagtccagaaacatccagcagagggattgtgcatcgatattgccatcaagatgaaaagaca

SEQ ID NO: 369010 - DNA, 122 bp, Homo sapiens
atgagcctgtccaagtgctactcctccctgctggactcgatgaacgctgagatccgcatccgctggctgcagattgtggtccgcaacgactactatcctgacctccacagggtgcggcgctt

SEQ ID NO: 369011 - DNA, 122 bp, Homo sapiens
ggaaaatagggaaggataaacctgaagcctgtgcgtccaggtgcgcctggctagggtttccgacggccgcggtgtctcggtggggaccggtcccggaggcttcggcgaggaggacccggagt

SEQ ID NO: 369012 - DNA, 122 bp, Homo sapiens
tgctttttttagacgctcctcataagggggatcatacggtatgtggcttcttccactcatcggcgtgttcgaagttcgttctctttgtggctgagtagcagcgcgtcgtatagcacagcacg

SEQ ID NO: 369013 - DNA, 122 bp, Homo sapiens
tcaggcctgagcgtcctccatgcagattcagccccaccagggcaacaccactgacctcagcgagtggtgacgcctcacagcgtccacaggatggcactcacgcctacctggcacacggacac

SEQ ID NO: 369014 - DNA, 122 bp, Homo sapiens
ctgaagccaataacagcacactgcaacttgtgcaaacagatagggcaaaggtttagagggcgccggtcagcttcttccaagtggaagaagccccagatttccctatcaaaatcctttgctgc

SEQ ID NO: 369015 - DNA, 122 bp, Homo sapiens
cggaggaagccccgggcgtggcgtggtcaggctccgagagcggccgggatgcggccacaccggcctggtaaactcgcacctcttaggatcttgctcccggactcattcccttccccaccccc

SEQ ID NO: 369016 - DNA, 122 bp, Homo sapiens
ttgtactgtctccttctccttttgctgcaagacttggatctgctcttgaatctgcccctgcggaaagagggccgtttggacaggctgtgcctggagatttctggcctcataaaatcctcctg

SEQ ID NO: 369017 - DNA, 122 bp, Homo sapiens
atgcagtatgtactctgaattagtgaccaacaaattgttttttctcccaaagccaggacacgactagtctggaaaccaagaggaggatgtggcaaaactcaaaattaaaattaatgatttac

SEQ ID NO: 369018 - DNA, 122 bp, Homo sapiens
agctggtgtacccctccgggagccacgcctcgcgcggagcgggagccttcaaagaggccgcgccttcctggctgctcccttcgcatcctgatccagtccaatgatgtttttgcaattttcct

SEQ ID NO: 369019 - DNA, 122 bp, Homo sapiens
tacatcatcccctgtgttgatcatggaacataagcaaaacatcactttgttttttttccccgtgttaaaaacaacttcctttctgaggtgtccctggattgcagcatttcttccctttgaaa

SEQ ID NO: 369020 - DNA, 122 bp, Homo sapiens
gctattcaccagtctgagaaggataagctgcctcttattagaagtgcaacctgaatctatcgcccccacccctaccccagagggttaggaggaatgatgtgtaaaatctcggatctatggaa

SEQ ID NO: 369021 - DNA, 122 bp, Homo sapiens
accgcgctcaccacccagcacagcgtagccacggaagggcatggcggtggcggggacagccgcgatgtcgttcagcatgctcaggaaagccaggtcctggctgtgccggaggccctgctcca

SEQ ID NO: 369022 - DNA, 122 bp, Homo sapiens
tgggagtcgtagtctacattgtttagggaaggagattggcgtacccgcagccacttccgccggaaatgctccaatcccggaaggcgcactaaattagccctaaagatcgctgggaattgtag

SEQ ID NO: 369023 - DNA, 122 bp, Homo sapiens
tcgctgtgcgctcggtctctagtgaggacgtgtcttaccgtgtggcgagcttgtggcagacgaccccagtgtctgtgatgacctcgctcagccgcagctccaggtgcactttgccctgcaag

SEQ ID NO: 369024 - DNA, 122 bp, Homo sapiens
agtagagacagggtttcactatattggcaaggctggtctcagatgacttcgtgacctgcccgcctccgcctcccaaaggaattattattattattattttatatttatttatttatttattt

SEQ ID NO: 369025 - DNA, 122 bp, Homo sapiens
cttggcgcgaaacttcatgatgccacagggaaggcagctgggggcctctgagggggattccgcgtgccacaagcccttccggtccgctggggtccgtggcgctgccctccccgccctccctc

SEQ ID NO: 369026 - DNA, 122 bp, Homo sapiens
cgccgaagagtagctactgcctagtgcaagcacctttgtaagaccggcgatcgcagtggtcgctctgagcagtaatatttaccggcttaactgaagcacccgctcttttgcttgctgggaga

SEQ ID NO: 369027 - DNA, 122 bp, Homo sapiens
tccctgtcatggtctctaaggagagtgccctgtgaggaccaggccaggtctatcctgtgacgttgcagccaagatccttctgcaagaaaacgtgtcggccgggcctctgcacgtgcggttcc

SEQ ID NO: 369028 - DNA, 122 bp, Homo sapiens
ggcttgggttgagcagggagcctagggatcaaggagcacgcatttcagcaccatggacagcggggcacatggctgcctggaggctctcgcaaaatacccattcctagacctcaaccccagac

SEQ ID NO: 369029 - DNA, 122 bp, Homo sapiens
cgtcatgtcataatggctaaaacgcattgcacgtttatcatgagccacacacctgctaaacgctggacaggtgttatctcctttaatggaagaaatgaccttgtggagagggcactatgact

SEQ ID NO: 369030 - DNA, 122 bp, Homo sapiens
accgtaggggtgtccagcgagccacatggatgcgttgcccgagcggggcaaccaggggtgcgtggccagatgggctgcggggtcggcagaccagcgacctgagcccgccagcgccgggcccc

SEQ ID NO: 369031 - DNA, 122 bp, Homo sapiens
aataaagaataaaaatccctctcaaaataccctgaatgcaaatggaacaatggatttgttcggcagagatctttcttaaaaataaattcatagagtaaaggaaaaagtgatacatagggatc

SEQ ID NO: 369032 - DNA, 122 bp, Homo sapiens
gccgggcccactcgccgcgcgcccagccatgaacctggcgagccagagcggggaggccggcgccggccagctgctcttcgccaacttcaaccaggacaacacgtaaggccggggtcgggggt

SEQ ID NO: 369033 - DNA, 122 bp, Homo sapiens
ttctttccttcaagttcaagtaaacctagaacaataaaataagatccagaatcaaaatcccgtttctgcttttgggaaggcttcattcacactatttcaggcagatccctaaataatttgaa

SEQ ID NO: 369034 - DNA, 122 bp, Homo sapiens
gaggaggagggaagaggaggaggggcacgtatggggcatggcatcaccttgggtccctgacgtccaggatagccaggcagaccaggaacacccagcttgccctgtggagggacaggaagcag

SEQ ID NO: 369035 - DNA, 122 bp, Homo sapiens
agtgcttgtcctctgcccactcgctgcacagacctggggtgaggaagaaatgccgccgagcgccagaagattaggagggaattgtgtgaggcctcctctcaaagccagggtggctctcggca

SEQ ID NO: 369036 - DNA, 122 bp, Homo sapiens
cgaggcgggcgggcccctttgtgacgtcacaatcagctgtttgaacgttccaatttgtgccgtgagccccgccgcagcggccgcacagactcaaagccccgcgggcgagctcagcagcccgg

SEQ ID NO: 369037 - DNA, 122 bp, Homo sapiens
ggagcggtatcacacagatccatagactacaggtccaaagaccccctcctccagttagcccgcccagagaaacgtccccacccgtgctccctgccaccagcgggacagctccacctgagttt

SEQ ID NO: 369038 - DNA, 122 bp, Homo sapiens
gcttgccatgagactcctgggagctgcagccgtcgcggctctggggcgcggaagggcccccgcctccctaggctggcagaggaagcaggtaccggagcatagagaggctaaatcgggaccat

SEQ ID NO: 369039 - DNA, 122 bp, Homo sapiens
gtccaccacagcgctgacccctgcgtccacgacacggacacactgtggcagacgtccctccgtccgccacagcgctgacccctgcgtccacgacacggacacactgtggcacacagcacacg

SEQ ID NO: 369040 - DNA, 122 bp, Homo sapiens
ataaggaattcccatgctgcaaatattaatttgctcctctacctacgcctctgagagtcacgagacaccaaaggccaaatttacttatctatattaagggccttatgtgaaatgaaaggtga

SEQ ID NO: 369041 - DNA, 122 bp, Homo sapiens
aacagaggcctgctagtctattcatccattcattcaaatatatattcagcatctcttgagcgccaggcatggttctaggcaccaggaaacagcactggagacacagaaatcccctcctggca

SEQ ID NO: 369042 - DNA, 122 bp, Homo sapiens
gttagaggcgggagccaggttgtagaggggctcaaagttagaggaggcggccagctccaccggctgcacccggctgggcgacccggcaaccttcagggggcgctgtttcccccatccctgtc

SEQ ID NO: 369043 - DNA, 122 bp, Homo sapiens
cgccctcccctcggcccccgcctgcgcccgtgacgcacgaggccgccgcagcccagggagcggggctggcaggtggggggccgtgcaccagaccccactcagattttctcactccgggttcc

SEQ ID NO: 369044 - DNA, 122 bp, Homo sapiens
gatttgaactgtaaactccttttcatccatgcctcggcgaagtttggtgaactgggctgccgctgtgctgactgcagatgcttcctcctctgccatggaagctgcactactacttcgtggtg

SEQ ID NO: 369045 - DNA, 122 bp, Homo sapiens
gagtggagccaagggaaaagatcgttagagacagcgcccctgaccaaccacttagagcagcgcaggggtgggagggcggccgcaggctctcctctcgttagtgccccctgtgtttggggccc

SEQ ID NO: 369046 - DNA, 122 bp, Homo sapiens
gcaggagggatgggggaggagacgtcaagggatggaggtctcccacaccaatcgtgcctccgtttccccacggggagattcgacaaaaccaggcagcagcccagtgtccctcaccatccatc

SEQ ID NO: 369047 - DNA, 122 bp, Homo sapiens
ccagtagagctcgctgggtgagcgccaggcctccccgccccaaggatagcgcgcacagggcgatctgctgctcgcgaggtagaaagtggcttacttggggagaaaacagagctggtggcgct

SEQ ID NO: 369048 - DNA, 122 bp, Homo sapiens
tcccggccctctcgacagctgcggcccgtccgcccttccccaccccctctgcgcacgggacgggatctggtctcgagagcctggacctcaccggcaccctccccggggcccccagcaccagc

SEQ ID NO: 369049 - DNA, 122 bp, Homo sapiens
ctttccttggagcagggaaactcacaggtgcaggggcactggaagtggctatctgccttccgcctccctcctcttgtcccacagaggctcacagcctggattgcctgtagttgagcactttc

SEQ ID NO: 369050 - DNA, 122 bp, Homo sapiens
gagaatgcctactctgggttaatccatggggattgttccttaggcatacatttggctgagcgggcaccaaggtggatatggactggcaggcagtaactctgcaacaagattaggttctcttt

SEQ ID NO: 369051 - DNA, 122 bp, Homo sapiens
atgggttgtgagccccatgctgggcaggtgggccctagctgcagagagtctgatcttcatcggacccagagtgacatccagccaatagctatgggtagtccactaattatactttgagaaac

SEQ ID NO: 369052 - DNA, 122 bp, Homo sapiens
gagttgacgggtggagctggaagaggctttggcgatccagcgggcaagcgaaggacaccgcgggaaggggtggtacccggaaacgcagctgggcagtcgcgccgctcccctgtcctcgccag

SEQ ID NO: 369053 - DNA, 122 bp, Homo sapiens
taagcccgagatgaaaagctgttaaagggacctgcatggaagcaaaccggtgtgcggcgccgagcatagggtgctgggggcgccttttttctgtgctggcgtcccccacccccggcttgctg

SEQ ID NO: 369054 - DNA, 122 bp, Homo sapiens
ggactaactctttggccagggcatgtaaaatttaacctgaaagactggctcaggccgtgacgggaagtgagggttggacatgcctcattaacattaacacagaccttaagtctgataagaaa

SEQ ID NO: 369055 - DNA, 122 bp, Homo sapiens
ttcctgttctcagggcagggggcgtgcgctgagccagaggtagatctgcagaaagggccccgactgggcctcgggcagggccggcgcccaccacactctgggggtcagctatgctggtccct

SEQ ID NO: 369056 - DNA, 122 bp, Homo sapiens
gccccgacccagaatcggggactgggcccaacaacaaggtgcactcaagggggtgccacccgaacacagcacgttcgcaggcacccggggtcatcaggccacgttcgcaggcacccggggtc

SEQ ID NO: 369057 - DNA, 122 bp, Homo sapiens
cctgtcccaagacaattgtgctgcactaatcaaccccttgccgcagtaaacttcaaaagacgaaaagagatgcagtctggctaacccctgatcaatgtaaatccctcctttatctccaaata

SEQ ID NO: 369058 - DNA, 122 bp, Homo sapiens
agggggcggtgctgctttagttttggcctggtcggggttgagcggaggagggagcgacttcgaattcagtctgcacctgactgacctcgagcaaaaacgaagcgggcgcacgttaccgtctt

SEQ ID NO: 369059 - DNA, 122 bp, Homo sapiens
actttttcaaccatccaagttattgtgtgtatcattagttttcaccactgattaatattccgtggtacatttaaccatttacctgctgaaggacatttggagtgatttcagcactgggctat

SEQ ID NO: 369060 - DNA, 122 bp, Homo sapiens
ctttgggacttaaaagtctcccatgagaaagaaagcatccttgaaataaatgtggtttcacgaaatacctcaggcttgtggaggaaacaaatgactcggttcttttcaactcacagcactca

SEQ ID NO: 369061 - DNA, 122 bp, Homo sapiens
ctacggatcagtcatgggaatttgaataaccctttctctccttaggtcccagtgacctgccgagtgggaagagccgtggctggccggcctcccagtggcgacgacgacctcgctgtgttcgt

SEQ ID NO: 369062 - DNA, 122 bp, Homo sapiens
aacccatcacttggcctgcttgccctcctgccggccggaagcaggagacccaagtccaggcgaacgtgacgtccttgtcctcgtgctgtgcctgggggtaatctgcctgtcagggatgtgcc

SEQ ID NO: 369063 - DNA, 122 bp, Homo sapiens
tctaggcgttcccttaaactctccgccctcctcctcgcggctcagccttctaggagtttgcgtgcgtttatggcctgtgcaaaggggttgcagaaatattacccttttgctccttttttccc

SEQ ID NO: 369064 - DNA, 122 bp, Homo sapiens
cgccctctaaagggaactgcctccttggcctcctctcgtccgcagctgcctccacctgggcgccaggagctctgtcgggccaggtggaagcttgagcaccccagatttcgtctgcagcctca

SEQ ID NO: 369065 - DNA, 122 bp, Homo sapiens
caggcgcccgccaccacacccggctaattttttgtatttttagtagagacggggtttcaccgtgttagccaggatgatctccatctcctgacgtcatgatccgccctcccaaagtgctggca

SEQ ID NO: 369066 - DNA, 122 bp, Homo sapiens
gtattttaccatgaaggaactatttaagaaagctatagcaaggaaatagaagttgaggctcgtgcccacctggggacgaatgtgtggaaccacacattcagattgtgtgaagttagtgagct

SEQ ID NO: 369067 - DNA, 122 bp, Homo sapiens
tcttctcgctggaagactggaggaccagcgaggggctgtttgtggagccggcgggcgggccgtttgtctctccttcctgcgcctctttggtgctgggaggcgggccgcagggtagctgttgg

SEQ ID NO: 369068 - DNA, 122 bp, Homo sapiens
ccagctcagctccggggagggggtcgcgggccgcaggaggaagccggagcgcagatacctcgattgcaactcctctgagtcgacgccggcctccccccgcggctcccagcgtccacacacac

SEQ ID NO: 369069 - DNA, 122 bp, Homo sapiens
tgtgctatacggatgcgcaccatcaccatcaccgcgcagtgggtctcctgttagaggagccggtcacgcacggtgctccgtggattttccactgccaagtcctgacgagcacgcccctgcct

SEQ ID NO: 369070 - DNA, 122 bp, Homo sapiens
ggggcgaacgacgtcaacagatgtccctccagactccggcaccagccggccgagcccaaacgagttctcgcccccgaccccacccaccgcgggagcagggttcggtcactcgcagtgtcaga

SEQ ID NO: 369071 - DNA, 122 bp, Homo sapiens
cagtgcctaggtgacagagagtggtccctgtcctactgaggggatgggagcacagtggagcgtgacttcccgtgaagctgctgtccgttgctatagaaatccagcctcggaaccgggagtac

SEQ ID NO: 369072 - DNA, 122 bp, Homo sapiens
gaaacttgtcactgactactcctctgagggtaaccactaccctcactatagtggggctagcgtaacactagggattagtgcctgtttttgagctttatataaatggaagcataaagtacata

SEQ ID NO: 369073 - DNA, 122 bp, Homo sapiens
aaaccagcgacaaaggagatgaaaaaggtgttcattgtgcatccttgggcctagttgccacgacagaggtggctacaggcagctgcactcatctctggagcctctgcagcccagggaggtgc

SEQ ID NO: 369074 - DNA, 122 bp, Homo sapiens
tgtgactgcaaagccagcctctaggccaagtaaggcgctggaatgtggggcttgctgcgacgtacgtttctctcctcctcagcggagagatgagtgctcccggccggaggccgctccgctcc

SEQ ID NO: 369075 - DNA, 122 bp, Homo sapiens
cgaggaagccgcccttcccggctgtgctggcagccggctgtatttttctatcacatccatcggcagggctcaaatattccgtgccgtgtcggatcaaaacacacggcgcctgcaggcccatc

SEQ ID NO: 369076 - DNA, 122 bp, Homo sapiens
gacctgccgtggcgcccccgaggggaccgtctgcggcagcgacggcgccgactaccccggcgagtgccagctcctgcgccgcgcctgcgcccgccaggagaatgtcttcaagaagttcgacg

SEQ ID NO: 369077 - DNA, 122 bp, Homo sapiens
ggaccgcggcaccatgccattagcatagtgtttcgcgaaggcgccgtcgcagacgagtgacgcaagcctagcgcgaccccttctttcccagtcgcgcgcatggcgcagcagcccgatggctc

SEQ ID NO: 369078 - DNA, 122 bp, Homo sapiens
tgagggagagcacagcttcagctttgaatgttgcagagactcgtaaggagaaaaaaaaaacgggtgaaacaaattttttcaaattgaaaaatattttccatggggtccaagtataatttcag

SEQ ID NO: 369079 - DNA, 122 bp, Homo sapiens
cctcccccttctaactccccaccgacggtctgtgtccgctgccacgcgtgtccagtacctcgcagacctgaggaatgtagttctccttgaagtagttcttcagcctcgggttggcattgcgt

SEQ ID NO: 369080 - DNA, 122 bp, Homo sapiens
taagtttaaaaaaatcataactcgctggaatcttttctcctctctggatattggagaactcgcccaggtttgggaaacgttagccagctcctgcaaaacacctcctccctcagccctccccg

SEQ ID NO: 369081 - DNA, 122 bp, Homo sapiens
actccacggagagcaggccggacagtcactccacggagagcagaccagacactcactccacggagagcaggccggacactcactccacgcagagcaggccggacactcactccacggacagc

SEQ ID NO: 369082 - DNA, 122 bp, Homo sapiens
actaagtcccttactgcaaatgtgttagctctaacatctcccacaagctagaggaacttgcgagtatattaacaaggacacatctgacatcctgtgtttggttagaatatacagcacattgt

SEQ ID NO: 369083 - DNA, 122 bp, Homo sapiens
tcccgggccgcttcctctttaaggcggagcccggcgtggatctcgcgagatccggcttggcgccgtgacctccatgtgggagctccagctctataagtaaacactctgcgcggcgcagacat

SEQ ID NO: 369084 - DNA, 122 bp, Homo sapiens
ggagggcagcgcaagacagcaagtcatctccatttcctggcccactttcaaaatggcagccggaaggaaatttgtgattagaagccgcgctgttcttatttaagagcgttagcgcaacttcc

SEQ ID NO: 369085 - DNA, 122 bp, Homo sapiens
ctccgcattacatcctgactcagagattccactgatgatttccaggaactaccaaagccacggatcagctgagttacccgggctaatagcaggaggaaacagtgtcagagagggatctggct

SEQ ID NO: 369086 - DNA, 122 bp, Homo sapiens
tatttttgtgggcagcagccatcccagacctgggtgctggcattccatggctgtgacattcgtagtgttggctacacacggggctcctggcactcccagacagggcttcccatcaccagcca

SEQ ID NO: 369087 - DNA, 122 bp, Homo sapiens
tagattagtttaattggagtaagtggactaagttggaagaaggaaacaacttgaatttgacgtatgattttgatagcaaaggacatcaatgtgattgggtacacttcgtagtttattctatt

SEQ ID NO: 369088 - DNA, 122 bp, Homo sapiens
ccccaaggtcagacagggtaaaagtggaccggatctgtttggtcctgagcccaaacatttcgaatggacataaggctgacaaaggaacagtcggtcccagagcgtcaggagttgaggtggga

SEQ ID NO: 369089 - DNA, 122 bp, Homo sapiens
aaaggtgcatgagtgatactttgctattttaaacagagataaaagactgtgttggcaatgcgtagccacttagcacctgatgtttttctaccaacattagtgttagtgcccatggccccttg

SEQ ID NO: 369090 - DNA, 122 bp, Homo sapiens
ttgatttcaagaagctggacaacaacataaatcatatctaaggacagcaaaaggcaggtacgtcccggcctggcctgcatggggcgggggccgcggaagaaccctgcgccctccacacggga

SEQ ID NO: 369091 - DNA, 122 bp, Homo sapiens
atcgctactgccaatcgcaaggctttcgtatcccggaagtggctgatctgttggatttgacgcggaggcggttcctcttactacggtggccggggtgctcaaagtacctgtagctgcggcgc

SEQ ID NO: 369092 - DNA, 122 bp, Homo sapiens
gcctgacgtcctctagccggcccccagggagagcagggccaccggctctctacagatgcacggccatccttttcaaatgcaggctgccagaaacgattccacttatcacagctgcgcaggag

SEQ ID NO: 369093 - DNA, 122 bp, Homo sapiens
agctgaggcacacacatgggcagtcgtgggcaggcagctgcccccgtctgggggctggaccggggtctcagtggaagggagtctgcaggaggcgtgagcactggctgctctgttctcctaga

SEQ ID NO: 369094 - DNA, 122 bp, Homo sapiens
cagcctcagagctcaagcgtcatgattggggaaatgagactgggcagccattcggaaggccgggcaaagaagagtgtaaagagacattggtctcgtgctgcagaatgagttacaaatagtga

SEQ ID NO: 369095 - DNA, 122 bp, Homo sapiens
ctgttcttacattgattagcttaggatactggcctccagctgcattcatgttgctgcaaacgacatgaatttgttcttttttatggctgcatagtattccatgctgtacaggtaccacaatt

SEQ ID NO: 369096 - DNA, 122 bp, Homo sapiens
gggcaccgccatcttggattgtcacatgatcagctagaaccaagtctcgcgagaacaccgcgagcaacgttccagcccctgcgttgcgagattgtgaaaattctaactagtcctttgggatt

SEQ ID NO: 369097 - DNA, 122 bp, Homo sapiens
gacacgttgcccagtgaacatccctctggcccctgcaggggatcctgtgcagggagccagcggagactgaggttgctcagaggctaggctaaccaggagagagaagacagaaagaaaaacca

SEQ ID NO: 369098 - DNA, 122 bp, Homo sapiens
tccacactctcgaggcagcacctcgcagagcaggtcacctcgactgccccatgatgtccacgaggcttgttcctgtcttactacgatcgagaagacagcatgtgattttatgaacaccccgt

SEQ ID NO: 369099 - DNA, 122 bp, Homo sapiens
cgaacgcactggagaaggggctgccggacccagtgctctacctggcggagaagttcacaccgagtagcccttgcggcctgtaccaccagtaccacctggcgggacactacgcctcggccacg

SEQ ID NO: 369100 - DNA, 122 bp, Homo sapiens
ttatgtgcggcattaatttagaattctcttgaatggtaagatgccagctgacatagactacgttttgtaggatttcctgtagcttttgaatgtgacttaatctaaactttatttcatttggt

SEQ ID NO: 369101 - DNA, 122 bp, Homo sapiens
tgagacgggactcccggttctcccgctgcgaagcagcgcggccccccggggccggggcagcggcgccggcatgtcgtctggcaccatgaagttcaatggctatttgagggtccgcatcggtg

SEQ ID NO: 369102 - DNA, 122 bp, Homo sapiens
ggaagcgaaggcggaccctcctcccccagcgctactgcccgggccgaattccaaggccagcggctgcccgctgagaaggaatccggaccaacgggattctggcttccctctggcccctcctg

SEQ ID NO: 369103 - DNA, 122 bp, Homo sapiens
cgggcccggcggcgggctgtgtccgcggggagcgtccaggctgggccgcaggaccgggcgcggagcctcgcagggtcgggctcgggctccctaaccgtctccgcttcttccgccagtcggtg

SEQ ID NO: 369104 - DNA, 122 bp, Homo sapiens
ggtggtcgctcttcttattctcctttccaatgtctcccattctggagcatcatttcacagcgctgtgcctcaggcccgtggctggaataatgacaggaaatctatcttcctctccatactca

SEQ ID NO: 369105 - DNA, 122 bp, Homo sapiens
gcgccccggccgcccccggcccgccccgccgccccccgccggactggccgcccgggcgggcgctggctcccttaaaggccgcccggctcgcttggctccgcttgcctcggcgctgtcaggga

SEQ ID NO: 369106 - DNA, 122 bp, Homo sapiens
gcactggggaaagacattcaaaacagccaggtgatttcaataggctgcaaagctgagagccggagctccaggccatgccatggcctcttatctgggagcctcaccacgcaggtgtccaggtg

SEQ ID NO: 369107 - DNA, 122 bp, Homo sapiens
ctgagcagagaaaaatttttctcaggtgagtctgtcagatattctcctttatcctcttgtcgtagcagcattcttaatttaccattatttaatgtatgctgttattatccgtttgtttgttt

SEQ ID NO: 369108 - DNA, 122 bp, Homo sapiens
cccgaaaaaacaaaaacaaacattaacttcctaacagagagagatcaggccactcagattcggtggtcaatcttagaattaggaatagtttgacaactagtttatgttatctcctcgtgtga

SEQ ID NO: 369109 - DNA, 122 bp, Homo sapiens
tagtttctgaggctggcagcctgtagtacatgtatcagggagggcctgaggaacaattcccgtctgcacataggaactgccctgtccagtgtccatgggttcagaggcaccagaagcacctg

SEQ ID NO: 369110 - DNA, 122 bp, Homo sapiens
ttattaatgtaaaacaaacaacattggttctgtaccttccaaaccccaagagaaacaagtcgcaggtcatcagctctctggaattcttaggtaagtctccatcatgagagaggatgaaaagc

SEQ ID NO: 369111 - DNA, 122 bp, Homo sapiens
aaccatggagtgactgactgggtgagtgtgctttcgtccttccatctccggaaaaaatgacgggagctctgaaaccattttgaaacctgaacatcgtggcttgactttttctaaactggtat

SEQ ID NO: 369112 - DNA, 122 bp, Homo sapiens
tttcaaagattcccaggtgatgccaacctgctctgcggatggagcccctaagaccccaagcggcccagactacgtttcccagaggcctccgcggcctcagccacttccgcttccggtccagc

SEQ ID NO: 369113 - DNA, 122 bp, Homo sapiens
gggggccgccatggcccgcgcaggcctcttctcggagcgcggggcccacatctcgggaaccgtcgggctggacaacaacgctgccgcctccaggactccaaagggcccctcgcgtcctctcc

SEQ ID NO: 369114 - DNA, 122 bp, Homo sapiens
ccaacttctgtctcatacccccaacttcaggaagcgtcttccttttttccgcctctcgttcgcttttgtcttacgaggcttccggaacacggcccagaattacagagaaaacacactgcgca

SEQ ID NO: 369115 - DNA, 122 bp, Homo sapiens
agtagacacgggtgctagcctggaaggctgccttggagttgtccgggatgaagtcccagacgcgggtgtaggggacgtgaatagtgccaaacaggtaggccggaggatcacgccgaatcgtc

SEQ ID NO: 369116 - DNA, 122 bp, Homo sapiens
agtgagctgtgttctaagggagcagcaggctgtacctgagctcagtgagactcatgcaggcgtccgggggtctttctgtcctatgtgtgcaagttaatgccaaggtgagggtcggccctcac

SEQ ID NO: 369117 - DNA, 122 bp, Homo sapiens
gagggggaaagggcaggcccttgtcctggtggcaacgcctggcagacgtgtgcagtgggccggttgtctcacaggcctctaggatgtgcccagcctgccacaccgcctccaggaagcagagc

SEQ ID NO: 369118 - DNA, 122 bp, Homo sapiens
gcagacttagaaaggatttactgttcataacaacaaaactaattttctactgtacccagacgatctcctctaaaaatgttcctttttaagtgaccaagttaaaggtaaaggatgacttcccc

SEQ ID NO: 369119 - DNA, 122 bp, Homo sapiens
tcctatgtactttctcctgcggaacaaatcagtcctggacatcgttttttcatctatcaccgtccccaagttcctggtggatcttttatcagacaggaaaaccatctcctacaatgactgca

SEQ ID NO: 369120 - DNA, 122 bp, Homo sapiens
ttgactgggcagcacaaaggaaagcgtattcaaagaccaggggcttgaaatagcctcccacgctcagggaactgcaagtctggagttgagctgaagcatacaatgagaatcaaagagcgggt

SEQ ID NO: 369121 - DNA, 122 bp, Homo sapiens
cccggtggctcgctgcaagggcggaggaggtgccccgactcaggtcaggcatgggaggagcgggggagccttctgtctctgcaggtctgactcctgcctcctgtgaggaagcagagccattc

SEQ ID NO: 369122 - DNA, 122 bp, Homo sapiens
attcagaccttattaggtgtattacatcaaaatccctgtcaccttttcactaccaccccccgcccccgccgacccagccccaaatcccctatccaaccccaaatccccgatccaacccccaa

SEQ ID NO: 369123 - DNA, 122 bp, Homo sapiens
gaactccgctcaccggcttctcctccttcgtgtgagcaaagcgccgcgcctccctcagggcggaacggaggcaactttccggagtctatttttgttaagacaatcaactccaataactgagc

SEQ ID NO: 369124 - DNA, 122 bp, Homo sapiens
gctctaatgtgatattgatgaaataccatctttaagaaagtgtacagattgtaagtgacacgtggctgcttacgttactcctgagatgcaagtagatcatgacataatgataaccagtcata

SEQ ID NO: 369125 - DNA, 122 bp, Homo sapiens
tgttcaacagaccttaatagaaatgaatattgcttgtatcatttaacgtttgaagaggagcgataaagactattatcatttaagagtagtgagaagtacaggtaattctcacactagtaggc

SEQ ID NO: 369126 - DNA, 122 bp, Homo sapiens
ggaagtcagtgggattcaacctgcatttattacctattctgcgccaggcactctgtgggacgggagtagacttggtcctgaacatccaaagatgaatgaaatgggtccctgctttctttttc

SEQ ID NO: 369127 - DNA, 122 bp, Homo sapiens
ttatctttgcagatacttcattttcttagcgtttctggagattacaacatcctgcggttccgtttctgggaactttactgatttatctcccccctcacacaaataagcattgattcctgcat

SEQ ID NO: 369128 - DNA, 122 bp, Homo sapiens
ataccaacccccacctgaaattcccctacctaggtttggtagagttttgagcagccccttcgtcatcagagctgctgcagtccagatcctgaagctgccccccagacccagtccctcgaatc

SEQ ID NO: 369129 - DNA, 122 bp, Homo sapiens
tccctcacgtggattgggagcagcctccacacatgcagactcacaatcccatatgcaccacgtggacacacagccagacatcagagcagatatgccccttcctcagaggtccagacatatca

SEQ ID NO: 369130 - DNA, 122 bp, Homo sapiens
aagagcagcctgtcttgaagtggatttgtgaacggcacaaggccccggtgttaagatgcccgacagacaaccttccatccttcttttcaagacagaaacaatgccaaagtgttatccgagtt

SEQ ID NO: 369131 - DNA, 122 bp, Homo sapiens
ttcccgcggggtctcggtcccagggggctgccagctccacttgggcggcggtggtggctgcggcatgtgccagtactgggaagcgggaggccggcgtggccagggctgacatcaagctcatc

SEQ ID NO: 369132 - DNA, 122 bp, Homo sapiens
aaccccggacgcccgcacactcagcatcagtaccggcacccagcacccagcaccgagcaccgagcacgcagcaccaagcaccgatcaccgagcagagcaccccgcacgcagaacccaccgag

SEQ ID NO: 369133 - DNA, 122 bp, Homo sapiens
gctacttccatctcttcccgccccctccgtccccctgcacggactcatcctgacctcggccgggccactctggcttctctgtgcccctgtaaatagttttaaatatgaacaaagaaaaaaat

SEQ ID NO: 369134 - DNA, 122 bp, Homo sapiens
ggactttgttgcttcaggtgtgcccactgccacctgcttgggcagaggatgactcattcccgcatctcaggcagttatgggaatctgagctgtctgtacaaacagggggccgactgagaggg

SEQ ID NO: 369135 - DNA, 122 bp, Homo sapiens
caccaggaggatggagcccttttccctgtaagcaggaggccaggatcctgattcctgagccggcttcccacggaccccaggccccggcagggtcctggcgggaggaagaacccacggagtga

SEQ ID NO: 369136 - DNA, 122 bp, Homo sapiens
ggatctgaaggaggcgccagagcactaggcaggggccttgagtggtgcagcgtgaggcagcgcccagaatggagatgggtcttgaggttccagaatctgagatcaatcacctcttttgtatt

SEQ ID NO: 369137 - DNA, 122 bp, Homo sapiens
tgtgtcaattaaagataaaatgtgaattcctactgcaatatgctcctactggcatagcatcgtgattttcctaaaattcacggaccagttcccaaagatgttggctgcttggatgcaagagg

SEQ ID NO: 369138 - DNA, 122 bp, Homo sapiens
cctctcttagcctcagtttccccacctgtaaaatggcagaagtaaccaagcttaccttcccggcagtgtgtgaggatgaaaagagctatgtacgtgatgcacttagaagaaggtctagggtg

SEQ ID NO: 369139 - DNA, 122 bp, Homo sapiens
caggagcggcgggagcaggagcggcgcgagcaggagcgacagctggcagagcaggagcgtcggcgggagcaggagcggctccaggccgagaggtgagggacctgctggcccgcctgcctgcc

SEQ ID NO: 369140 - DNA, 122 bp, Homo sapiens
gttctggacagacttgggcagcttgttcagctccgtgcgctccaggacttgctgcaacaccgccgccatgtcggtggggccagggaccccagtggcagcggccgacggggtagaagcggaga

SEQ ID NO: 369141 - DNA, 122 bp, Homo sapiens
agcagtgcacagtcatgtcccaggccctcacgttcactccccacccactggctgactcaccgacctaacggtgcagtcctcaggatgtatccccgtcattacacaaagcatgactgtattgc

SEQ ID NO: 369142 - DNA, 122 bp, Homo sapiens
acttattttcaagcacaaaaatactgcataaaattaccttcaggctatgtgtataaggtacgtaggaaacataaattctaacaatacattagacttgggttccatcttcaacctatctcatt

SEQ ID NO: 369143 - DNA, 122 bp, Homo sapiens
tctggcgggcgctgcgctgtccccggaggagtccggagtccggctgaaagcaaaggttctcgaggctaactgtagcccccgcgctggtaacccgacacccctttcccagcgccgcacgcggg

SEQ ID NO: 369144 - DNA, 122 bp, Homo sapiens
ccggggtcgactcccttaagacatctgtcactttctttgactccgccggggagagcaaaacgaggtggaccttgcttgaacttggttctcaggcatcacagcagtgtccataacttgagcgt

SEQ ID NO: 369145 - DNA, 122 bp, Homo sapiens
ctgcagtgagtgcccgcatgtctctgcaggcgggaccacatactggccattctggcgctgcgccgactgggccgccagcggaaccagcatctcttgcagcacactcaagacctgctgagagc

SEQ ID NO: 369146 - DNA, 122 bp, Homo sapiens
agggggacgcgttgcgcaaggtggaggcagacacctgggcgggcgctaggacccgggcggcgcacctgttggctgggcccggggccccgcccgcccggcctccgcccggagtgcgggatcgg

SEQ ID NO: 369147 - DNA, 122 bp, Homo sapiens
tatctttaacagtgccagtaccatattcaccctcgatgtgtacaaacttatccgcaagagcgcaagctcccgggagttaatgattgtggggaggatatttgtggcatttatggtggtgatca

SEQ ID NO: 369148 - DNA, 122 bp, Homo sapiens
caagactgatacttttctatcacctgctgctaattttgcctcccaaagagtctcccatctcgacgcagagagaaccttcttagtggggtcacagcttcccttgcgtccaagagctgtctgtc

SEQ ID NO: 369149 - DNA, 122 bp, Homo sapiens
aaagccccttataaaaccatcagatctcgtgagaactcactcgctatcacgagaacagcacggaggtagccgccccgaggattaaattacctcccactgggtccctcccatgtcacgtgggg

SEQ ID NO: 369150 - DNA, 122 bp, Homo sapiens
cccggctaagagccgtaagagaatgccaggaagggcagaccatccccgtgggaggcggaacggcagagcgggtttcctttttacctggcgcactgcaggggtccagggtgccttctgctggg

SEQ ID NO: 369151 - DNA, 122 bp, Homo sapiens
gagctccccggccatttccttacgggggaagaccaagccagacccggcctgaaaacatggcggacaggcaggagagctgggaaaggagaacgacgccttccagcttccccctgacacgtgac

SEQ ID NO: 369152 - DNA, 122 bp, Homo sapiens
ccaaaacccatctttggaagtgttggcagagtaaataggcaccagtaataaaggcaacggcgcctgaagacctaaggctggtttaaaccaaagcagatttttcaaaaccagagagggcttgt

SEQ ID NO: 369153 - DNA, 122 bp, Homo sapiens
gaaaaaaaagaacccaggctcctgggttcctggcctgtggttttgcccactaggctgactcgtgtttacagatgaatgtaagtttgattcttcctggccaactttggggttgatgaccccta

SEQ ID NO: 369154 - DNA, 122 bp, Homo sapiens
cgatgccacgggcagtgacccgctgtggcagcggctggagccatgtggccaccgagacagcgtttcctcctcctccagcatgtcatccagcgacactgtcattgacctctccctgcccagcc

SEQ ID NO: 369155 - DNA, 122 bp, Homo sapiens
gcctgtaaggcacaggcagggcagagggcatctgatgtccctctgcaagtgccacctggacgggcggtggtaaatcccagcctgaccgagtgttgaccccggtgaatggcagcagcgtccac

SEQ ID NO: 369156 - DNA, 122 bp, Homo sapiens
tttaattttcccatagaatgaaatattcaaatagtttgcattctgagattccttaatcctcgcttctccaatgattacagctactcattcccatggtcatatcttaaatattggtgttaatg

SEQ ID NO: 369157 - DNA, 122 bp, Homo sapiens
gctgcggtgcggggtgctgcccagggtgtcccggccgccgccactgagcgctggggcgcgcgaatccagctgcagccgctgctgccctgcgccggttccctcaggctgcgggcgctgcgctc

SEQ ID NO: 369158 - DNA, 122 bp, Homo sapiens
gagaccccgcggccgcgccctaaccctcagtctcccgactgcgactgcgacccgggaaaacgcctacgtttttggaaaggaagtcccatcacagggagctgacccggtgtcagcgcgcagca

SEQ ID NO: 369159 - DNA, 122 bp, Homo sapiens
accatcttggaagcagagagcagttctcaccagacactgcatctgcaggtaccttgatttcggacttcccagcctccagaattatgagaaaattgataaagaatttctattctttataaatt

SEQ ID NO: 369160 - DNA, 122 bp, Homo sapiens
tagtatggacctggctggataagactgttggtatcatgagtgggacttgcgccaagcctccggatacccagactgtcagatgagaacaaattcctcatgtcaccgtaagatacatttacagc

SEQ ID NO: 369161 - DNA, 122 bp, Homo sapiens
tgaaagacaaagttgggggtgcaggtcaaagttattccaagaaagcagcagggtattctgcgtgtcatttggacacggtaccttggaggtcacgcggtatgggcaaggcatgcatgctgatg

SEQ ID NO: 369162 - DNA, 122 bp, Homo sapiens
caagctgtggtttcaggctcccctggggatcttgcataagacccccgcaggtaagggggacggctgtacacaccacggaatactattcagccttaagcaggaagaaaatcctgtcgtgggcc

SEQ ID NO: 369163 - DNA, 122 bp, Homo sapiens
tgggagggggcagcagcctttttaaccggagaaggtcagggtccccacctgcccatcccccggtctccccaattactgaggcagcaatgccctttgccatgtatcatagcacttgcactgat

SEQ ID NO: 369164 - DNA, 122 bp, Homo sapiens
gcagtgattcccctgccatggaaggtggaaagttcccagtaaatcaggctacgctttcgccgggtgcactgtgtcaactgcagcctctcctggtgcttcatcagtgcggttgacctattgga

SEQ ID NO: 369165 - DNA, 122 bp, Homo sapiens
tcaatgcttgtctggggcaagttcaacagggaaacgagcagctgagcttctcacagcctccgtcatcctggcgggttttgtcagctttggcggtcactgtcatttacctgtcctttcagaca

SEQ ID NO: 369166 - DNA, 122 bp, Homo sapiens
gtgtacgcaggcgcagtggcgtctaaatttgggcccactaaatgcgtcggagcatctccgcgcccaggcggctcctcctcactgcggcaacccgggaaaacttgtgaactaatcagaaaaag

SEQ ID NO: 369167 - DNA, 122 bp, Homo sapiens
cggggcctcccgcgaggtttgaactgtattcagcggcgacagcggcgactgcggcggccgcgggagggcatcccgttggggatccttccgcacactgaagagtacgtcttcgggtctacccc

SEQ ID NO: 369168 - DNA, 122 bp, Homo sapiens
ctttgcagcccagaaccttcagcaaatatttgctattccaaagtatgatcccctgtgggacggttactgattaacatcctgcttgtgatggtggagtttctggaaaaccaaagaccaagtgg

SEQ ID NO: 369169 - DNA, 122 bp, Homo sapiens
ccggggtcccacccccaatgtgctcgtcctaccacagccaaggctgggattccagggcgccggcagggctgctgccccaaacccgcggttcacttgcctggctactgagggccaaggccgcg

SEQ ID NO: 369170 - DNA, 122 bp, Homo sapiens
cgaggagccggcgggccgagccagcgagggtttgggctgcccgcggtgtgtgtgcaagagcgcgcgcctcgtgtaaccattcaggaccagttgaagcaacacaaataaagtcaggtctcttc

SEQ ID NO: 369171 - DNA, 122 bp, Homo sapiens
gcagggctcgggacctgcagcctgccatgccctcgctctctcacccgcggtgggctcccgcgcggaccgcgcctcaccgatgagcgcagccccctgctccaaagtgcctggtcccatggacc

SEQ ID NO: 369172 - DNA, 122 bp, Homo sapiens
gttccctccgaagggtcggacaaggctccggagccctgtagctgccctccctaggagccccgggtcttcactggccgaggtgcccaccccgcagcattctgggagtggtagttttcttcctt

SEQ ID NO: 369173 - DNA, 122 bp, Homo sapiens
ccaatcaggactccattgtcatccagggagttcacctgcccaggacaggatgagatagggcggaggtggaggaggggctcaggacctgccatgtggtccatggggaccagccgggccccgat

SEQ ID NO: 369174 - DNA, 122 bp, Homo sapiens
cggagctgcgcactcataggtccaacttgccagaagaggtggagacagcccccggcgaggcgcgcacacccgcgcagcgcgcacagccccctggtgcagctcctgccattcagacccccagc

SEQ ID NO: 369175 - DNA, 122 bp, Homo sapiens
gtgccagggctgtcagctccagctgtcctgtcgtagctggttacatgctgatgttgccctcgccttgagtcttgtcacctccgatgctgaggcccactggaacgctgcttctggcgcatcgc

SEQ ID NO: 369176 - DNA, 122 bp, Homo sapiens
tcatttgccaaatttggccagatatcatgactgtggtcctctcgagatgccctcttgaatcggcttaaaaattatccttccgcaaccacccctagctttccccaccgccagtgcgccgggca

SEQ ID NO: 369177 - DNA, 122 bp, Homo sapiens
gcacagacagagtacagaattgtctggtctcaaagcaagactgcagaataagggaagcagcgccaccatggagatcaggaataggggcctggaaaatccctccatgggcctccattgttgct

SEQ ID NO: 369178 - DNA, 122 bp, Homo sapiens
ctcagactctggacttagaaggatccgattgatgattccagatcccagtggcttcatgaacgtgggcgagttacacaacttctcggtctcctgcttttctccttagtaaaacaacccatgcc

SEQ ID NO: 369179 - DNA, 122 bp, Homo sapiens
tgaaacgactaaaacaaaagcaaaacagagctccactgcccaaaacaaagatggccgagacgactcccatgcccacacgcaaaatggacgctgactatgacgttccctgcaacaatcctcaa

SEQ ID NO: 369180 - DNA, 122 bp, Homo sapiens
ccatggaggagaagaggtattggcctcaacgactccacctccccgccacgtgcccagatccgggatggaaggaccctataaatgcccacaacccagcctccccagaggccttgagaaagaga

SEQ ID NO: 369181 - DNA, 122 bp, Homo sapiens
gacagatgatagtacatcccacactgctgctggaaaagatagtgcaaaagttgagcgcgccgagggctctcttttctcccggaaacaatttttccctagacccggaagcagttgttgtttca

SEQ ID NO: 369182 - DNA, 122 bp, Homo sapiens
tgtgagctttccaaggactcacacctccccctaagagctacgctgcatcagcctggggtgcgcagggaatggagtgggggcggggacgggcggcagctgcggggaggccagggaatgcctgg

SEQ ID NO: 369183 - DNA, 122 bp, Homo sapiens
gaagggacacagagaagaccaggaggcagcttcctttgtaacagacattcacactggctccgactccctcctccctcctctctccctcttcccaagccacccccgcccaaaggggggtgggt

SEQ ID NO: 369184 - DNA, 122 bp, Homo sapiens
cattaaacaaagattatgagagatcgacgcctctggaccgagcccaattcactgctcagccgggtcagcccctgccccgcgggccgaggatggggagggggcgcgcaaggagtgaaaacggc

SEQ ID NO: 369185 - DNA, 122 bp, Homo sapiens
ttaagtcttatacttcagaactgctaggcatctacctctataggctaagaatatcttgttcgggtaatcatcttgtttgtaggtctttaacaagctgccctctagcttgtgggcgaggggca

SEQ ID NO: 369186 - DNA, 122 bp, Homo sapiens
attaaatgtatcagaatataagaactgtgtcactactacgtcaccagatggccatttccacgaattcatgtttccgttcggcggccggcgtccctcgggtggtcgcatgcaatgagtgcatc

SEQ ID NO: 369187 - DNA, 122 bp, Homo sapiens
ttaagccacagccgggagaggctgagcagagcccctcagagcacaggggagccgaccctgcggagctccatcctgcacgtccagccctcagtcggcgagagggcaggctctgtttaaaagcc

SEQ ID NO: 369188 - DNA, 122 bp, Homo sapiens
gatcatgtatcgcctcctggggctgcagcccgtcctcaaggggcccagacctcacaataccgcccagtggttgccaaaggacgaccaagggctccctgctgtgcccccacgtggtaaggaca

SEQ ID NO: 369189 - DNA, 122 bp, Homo sapiens
aggcgcagaggcgcgaacaaagaggggagggggacgaggcgcgcggccggaggtggtgcgcgctcacgtggctctatctttgcaggggtctgtcctcccagctaccccctccctaagcaggc

SEQ ID NO: 369190 - DNA, 122 bp, Homo sapiens
ctatatataccttgctaatatgctgcaggcttcttacatgcccacatcacttctccagcccgtgatgttgtacatcttgtatactctgagtgttcaagcagttgtcatgagatatttttaag

SEQ ID NO: 369191 - DNA, 122 bp, Homo sapiens
taattggccagatccgcagcgatgacctgacttaaggaacctacagcaaaacactcctcccgtactcctaaatgttcacacagagaactgaggcctgacactaggcatctgatctgcagcag

SEQ ID NO: 369192 - DNA, 122 bp, Homo sapiens
gcgggaggccaccggcaagcggctctaaagttaccggaagaactaggtagtctcttctcgcgagaaagggaggggtcgcaggcccaggcgctcggagcgttaccagggaaacaggtctcggt

SEQ ID NO: 369193 - DNA, 122 bp, Homo sapiens
aggagagttgacttgaagttgcaccgccagaagtaatgcacctgacctacctgaagtctacgcctccctttcaagatgaattagggtgcagagggtgctctccactataacagaggggaagc

SEQ ID NO: 369194 - DNA, 122 bp, Homo sapiens
cgcgaagaaacgagactgaagaagagagcaaggtgggaggggcgcgctggggagcttcggcgcatgcgcgctgaggcctgcctgaccgaccttcagcagggctgtggctaccatgttctctc

SEQ ID NO: 369195 - DNA, 122 bp, Homo sapiens
ttgaataagaaacagaaacctcacactcaattagcgagactgcaaacactctgtattaaccggggcctggagaaacaagaacgccggcgagtcaagtgagcacacagcggcacagctccttt

SEQ ID NO: 369196 - DNA, 122 bp, Homo sapiens
cgagcgggaaggggtctagctggcctttgctcggccctccccagcgcccggctttgaacccgccctgcactgctgtctgggcgggtccggggactcagcactcgacccaaaggtgcaggcgc

SEQ ID NO: 369197 - DNA, 122 bp, Homo sapiens
aaaatgaagggtctggcaactatgaacctaatggtgccctaacgtttgctattctaaggccgagaatgccagatggggagaacgccatgagcttttgagcttgtgtattttgcgagaggctc

SEQ ID NO: 369198 - DNA, 122 bp, Homo sapiens
tcagtatttaaagtctcacctgtgccctttccccctgatcttacccacctcctgctatggcgcccatcccatgccacgctcactggcctgcaggatcctcaaatgtgctcctcaatttttcc

SEQ ID NO: 369199 - DNA, 122 bp, Homo sapiens
atttgggttttttccttcagtggatttctccctgctgctgtcactgagctccacgctgctcgctctggacccgagacagctgctcggcgtgtgtgtgtgtgtgtgtgtgtgtgtgtgtgtgt

SEQ ID NO: 369200 - DNA, 122 bp, Homo sapiens
gtggcgttcgcggtgaggatggggcgttgccgttggccggtgtctcagcgcactggctgtcgggctggtccccctgggttcgctgctggcgtgcttgttctccgagcactcgccgttcacgt

SEQ ID NO: 369201 - DNA, 122 bp, Homo sapiens
ggtgcgggatataatctcttggtgcaccgttttttaagcctgtcagaaaagcgcaatattcgggtgggagtgacccgattttccaggtgctgtccgttacccctttctttgactcggaaagg

SEQ ID NO: 369202 - DNA, 122 bp, Homo sapiens
cctccctgttgcacacttggatagttttttaatttttttacacagggtttacctcaatctcgcaggctggaatgctgtgatgggatcatagctcactggagccttgaaccgttgggttcata

SEQ ID NO: 369203 - DNA, 122 bp, Homo sapiens
ccccacccatccgtctgcagcacagacataaacacaaatgaaaactaaaatcacaggacacgggtgactatagtttaatgaatcagagtctggaatcttaagccccagaaactttcaggaaa

SEQ ID NO: 369204 - DNA, 122 bp, Homo sapiens
ctgtcttttcaagatagggtctcactctgtcccccaccctggctggagttcaccatcacacgtcaccacagcctcaagctgccaggctcaagcaatcaccctgcctcagcctcctgagtagc

SEQ ID NO: 369205 - DNA, 122 bp, Homo sapiens
aaccagccgggctgcggctttcacttgctcaaccgaccgggaggaggctctggcggatggcgaatactgcgcagaagtgaaactaaaaacagcaggattagaggaggcggccgaggcagacg

SEQ ID NO: 369206 - DNA, 122 bp, Homo sapiens
cttatacaaatcatatttttctctgggtttcacttcccttatctacaaaatgggttcacccggctaaattatatttaaggtcctgatgagctttctatgattcctatttcttattttgtttt

SEQ ID NO: 369207 - DNA, 122 bp, Homo sapiens
gaagctgagttctttgctacattattaccctttacaactcagagcttattatcaccattccggaacttatactgacactatataattctatttaagggaaggtttacggacctggttattga

SEQ ID NO: 369208 - DNA, 122 bp, Homo sapiens
tgaggcctgagaaggctccacgcgtgcgcaaagggccgctcgctgtgattactggggtggcgatggttgtgatgacgccgctgccccgcctgcgccgaaagggaaaccccaggggaggcgga

SEQ ID NO: 369209 - DNA, 122 bp, Homo sapiens
cctcctcactgctcttgcctccgggcatgggaacgatgccgtctgctcgtctgcctgagacgctttctactccactccgagagtaggaggtcagccggggccaaatgacatggtggacatca

SEQ ID NO: 369210 - DNA, 122 bp, Homo sapiens
gccccaaagacgccccgccccacttcccacagcttcctggcccgccccgccgctgcctcccgccccaccgcggctcccaggccgctggccctaccggcaccccccctttggcgagtcggcag

SEQ ID NO: 369211 - DNA, 122 bp, Homo sapiens
attcggccgagagttcacgctggggaagctctctgaatgcctctgagaagcgagatccggcgccatctcaccgacgagcctcccctttaccgccccgtgcgtttcctcagcactttaggaac

SEQ ID NO: 369212 - DNA, 122 bp, Homo sapiens
cacagacacagaaacaatgctggccactgtctacaaaagggtcttcattcaacactctcacggtgttcaagaccattagaggacaagatagtggagatgaaaaaatgatgaggaagttacta

SEQ ID NO: 369213 - DNA, 122 bp, Homo sapiens
gcggttcccccggtccctggcgcaacagcagtgcaccgggtctcttggccaggccctttccgctcgcatcctccacgaaccaacactcgatcaccgcgggtcctgctgagacggcggtcgcc

SEQ ID NO: 369214 - DNA, 122 bp, Homo sapiens
tctccgtccgagccccaggtgacagagctgtgcgtggccaggcaggggcacctgttgaggcgggaggctttggcacccgccgagagtgcgctcgagcgggcgcattcttccagacgggggcg

SEQ ID NO: 369215 - DNA, 122 bp, Homo sapiens
tctcagcagcctgtcccacactactcactgcgtgaccatgaacaagtcacctagcccttccgaaccatcccttcaatgggaaaaacggattgataacacaaattctgctcatttctcggggc

SEQ ID NO: 369216 - DNA, 122 bp, Homo sapiens
ccgggtacaacagagaaggcggcgcttcccaaaggcaccgatggagtgcagggtagccgccgccctcaggatttatcaaccgcgaggcgctgtcagcaactcgtgcccggaagccaccccgc

SEQ ID NO: 369217 - DNA, 122 bp, Homo sapiens
gggtggatgtgggcatcattgtggtcgttgagcgtggatgccgagagccttcacacaggacggagggtggatgtggcacctgctgaatggagggtggatgtgggcatcatcgtggtcgttga

SEQ ID NO: 369218 - DNA, 122 bp, Homo sapiens
agaaatcctttgaattaagcaaatataagtctcttgccatttcaatgcctaggcacccttcggacattccataaatagttattgatgactgattgcaattcaccaaaaggaatgactttgaa

SEQ ID NO: 369219 - DNA, 122 bp, Homo sapiens
ttccagggcagggtaaaccggaacgttgttagaattgggaacagtcatcaccgtgggccacggagaaagtccacggaaccccactttctccatcagccttctggtctgccttcgtactgtga

SEQ ID NO: 369220 - DNA, 122 bp, Homo sapiens
ctggagccccgtgtcatcagcaaaagccgtgtgagtcaacaggtgtgaagactcaagatgcgcacacagacgctgtccgtggttttatggggaatgatgagggctggtcagttctcctcatg

SEQ ID NO: 369221 - DNA, 122 bp, Homo sapiens
agctttctgtaactctaagcttccttgaatagaaagcctcagaatagagatagcctggtacgacactcttgaccaagttaataccagacaggtggcaatttacatgtgtgagaggctctcat

SEQ ID NO: 369222 - DNA, 122 bp, Homo sapiens
atttccatttcacagacaaaaaaacctgaagtttgttaattacggtgttaaattatcctacgattaatggcagaaataggtcctgaaccaatatgcctttgagaacttaaacgcggtgagtt

SEQ ID NO: 369223 - DNA, 122 bp, Homo sapiens
gggcccctgctagggagggagggggtgcgggcccagatgtgggcgtgggacccgggtttccgaggcagggatccagcagtctccggcttcaggggcttctagcttcccggctcccggcgggg

SEQ ID NO: 369224 - DNA, 122 bp, Homo sapiens
gcggagtgggtgagggggccttgcgcacagggcaagaggtggccaggcagggcgggggaccggggagagcggaggatttcagatgagggacaggggaaggtggagaggggagggcaggcccc

SEQ ID NO: 369225 - DNA, 122 bp, Homo sapiens
acttgagcagatctgattattcttggatagtattcaagtggtatcttgactattaaactacgtatagtgttgctgaaatagaaagaaaacagcattggaattggattcatgtatcgtgggat

SEQ ID NO: 369226 - DNA, 122 bp, Homo sapiens
cggccagggatttgttataatcagcataaggattcgggaaggccctttgagccatgacgccggaagcaagcctgcagaacaggggaaaaacagaaactaggttgagataggggcctcggccg

SEQ ID NO: 369227 - DNA, 122 bp, Homo sapiens
actgtgaggtcacctactggaaatcaccagcatcccatttcccactggcaaagagctcagcgctgccccctgggaaaccaaacctatgcccaaatcccatctgtgtgggtgtatctcctggg

SEQ ID NO: 369228 - DNA, 122 bp, Homo sapiens
ttgcggacccggggcggggcaggtgggagaggctcgttctccgcgggtttcgttgtgtttcgcgccatgtcgtttgctgagagcgggtggcggtcggctctgcggcgccgcggtcccggcac

SEQ ID NO: 369229 - DNA, 122 bp, Homo sapiens
tctcttctgcctgtttgtatgaagagctttataaatgatctattcttgtcactctaactccgctttgaaaaatgtctttaggagacctctggctaggtaaaaatgtaagatgtaatgttttt

SEQ ID NO: 369230 - DNA, 122 bp, Homo sapiens
cttgccctgctccgcacctttggggagccgggccgtctccaggccccaaggggtcactatcggaacccgtcatcacagtacctaatgcgaagacccggaaaggttgtgagtgaggccgtccg

SEQ ID NO: 369231 - DNA, 122 bp, Homo sapiens
cggcaagtcaaaatctggttccagaatcgcaggatgaaagaaaagaaactgaacagagaccgtctgcagtatttcactggaaaccccttattttgagagctccaggaagcgccctcacccca

SEQ ID NO: 369232 - DNA, 122 bp, Homo sapiens
gggcctcccttcccatgtcccagcactggacacgagacagtttctgcagtctagcatgagcggtcacaaaacatcagagcctgcaaggagtgcagggtgcagaggctgccaagggcagcttc

SEQ ID NO: 369233 - DNA, 122 bp, Homo sapiens
tcggggaggggcctgcgcagggcagggggaggggtgcccctctgttgttggtgggggcagcggtggcccatgcggtcacttcataagtaatgaggctccgtggaagctggaatcagagtaag

SEQ ID NO: 369234 - DNA, 122 bp, Homo sapiens
tgaggggcagggctattcttttccacagtatttaaagctgggaggttctgccaccaagcacggccttcccactgggaacacaaacttgctggcgggaagagcccggaaagaaacctgtggat

SEQ ID NO: 369235 - DNA, 122 bp, Homo sapiens
ggaaagggaactaaactttcagctatatattaatcccctgagggaagagccacctagacacgtttttggcttatgtcaaatagtcaagctaccatacttttaaaaataagggcatagtcttt

SEQ ID NO: 369236 - DNA, 122 bp, Homo sapiens
agtattagtgtttttgctggtctgtgcaatagaaaacgacacgtggccggctgggccctccgtcagcagatcgcggatccggaagcagggaggtggcagcgggcgggtgggggcggttgggg

SEQ ID NO: 369237 - DNA, 122 bp, Homo sapiens
gaccggaagctgctgggtatccgcgccggaaccgcgagggggttggttcaggcctaggcgcggggcaggacgggaccggtgagtggctcctccaaacagctatagagacccagaaatgcctg

SEQ ID NO: 369238 - DNA, 122 bp, Homo sapiens
gtgttccccaaatgcacccccactttgctgagtcacacaggaagagcacttggctacaaacgcagattccagccacctgccagcaccaagagtctattttaatgtctggggtaggattccct

SEQ ID NO: 369239 - DNA, 122 bp, Homo sapiens
accccggacccggtgcccaaggtcgcctatccccgccgcggcatgcggtggttcgctctccgcacttccctgtttggggcagttaggtccgcagaagtctgtccgcgagctgtcagcgcggg

SEQ ID NO: 369240 - DNA, 122 bp, Homo sapiens
tgtggggagcgcctctgccccgccaccccatctgagatgtgaagagcgcctctgcccagccgcggccccgtctgggaactgaggagtgtctctgccccaccgccaccccgtctgggagatga

SEQ ID NO: 369241 - DNA, 122 bp, Homo sapiens
ctgaaactcaccagttgccaaaccacctgcgcccggaacttactggctcccagaccgctgcgcatgagactcgctgggggcgttactcacaacgcaggctcctggggccctccagagactcc

SEQ ID NO: 369242 - DNA, 122 bp, Homo sapiens
cacttcgcctttggcacaccttgttggtcctgaagaggccctcagaaatactccacattccgccctaaactcccaacagattgtattttctactgaatggaaactgacacctcctaagatga

SEQ ID NO: 369243 - DNA, 122 bp, Homo sapiens
gtgcacttcagcagttgcagaaggttccttagtgctcccatccatcaagacgcactttcccgaaaagccaccatggttggtggacctggactgggagaagagtggagtcggggttggtttgt

SEQ ID NO: 369244 - DNA, 122 bp, Homo sapiens
tgggcacagcgcactccacggggtatgcctccctgagggaaggccacaggtaacggtgatcgggagacattcacagtgagattagaagtaaaacataagcaagaaacgaagtgggcttcccc

SEQ ID NO: 369245 - DNA, 122 bp, Homo sapiens
ctgggaacagtagtgcctgccaaccgagaagagtgaacggggtcctggcgcgtgatgccccgtcctgggcactgagaagagtgaacggggtcctggcgcgtgatgccccatcctgggcactg

SEQ ID NO: 369246 - DNA, 122 bp, Homo sapiens
ccagccgctgtcaaagttcacaactacgggtgccgaagcgactcaaacgcggaggacgcacgtcttggtgggctggtctttcctgagctgggaggagtggaggcgacggagaagctgaggtc

SEQ ID NO: 369247 - DNA, 122 bp, Homo sapiens
tggtggcactctttagtcagtgtcccatcacagcctgcaagaaaaccctgctgcaggccacgtgatgtcattgctgcagccctaagggccctttgacatgggcgtaaacaagctgagaattc

SEQ ID NO: 369248 - DNA, 122 bp, Homo sapiens
aggcctgactcctgcaggggccaggtttttgcggggactccatgcctgtggaggcccgaccgagtgcagcctggcggggtgggcgggcaccaggctggacaccattcagtcctcctgatagg

SEQ ID NO: 369249 - DNA, 122 bp, Homo sapiens
tctgcagacggattcctaactgcgtaatgggcgctactggtttgcaccccaaggcgaaggcgctgaaaatgctcctgtcaccttagatctcagtgatgaacgacaggaggaggagtagacac

SEQ ID NO: 369250 - DNA, 122 bp, Homo sapiens
ccagccagccttagacaggggtcaggtttctagaggctggcagggtggactgggaagggccgggctgcaaagtccccttggccactagagggcagggtctgaagagagcacacagccatctc

SEQ ID NO: 369251 - DNA, 122 bp, Homo sapiens
tccggtacccgcgagtttttaaactaggggttatggcaccgcccagtcctgggcagggcccgcccacaggcctgggagtccccgggtcgcgctccggcgaacgcagtccctgaatgggcgcg

SEQ ID NO: 369252 - DNA, 122 bp, Homo sapiens
gagtcctcacagcgcggcggactgcggcgtggtaggaactacaccacccagaatactgtgcgccgagcgtgccggggccttagaccaatcattgcccaggaaaggggcacctccgtaagtgc

SEQ ID NO: 369253 - DNA, 122 bp, Homo sapiens
cctcctgaccgcagcggctagaggttccattgcagacccggaggccgtggctgtggttcgcggcggtgctgtcgcgggcgccctggcgcagcccacgcaggggctcctgagggtccgcgagg

SEQ ID NO: 369254 - DNA, 122 bp, Homo sapiens
ggcgctcgctgaggtccatcagcgtgcctccggggctggggccgtccttcgggtgggagtcgtctggggacccagggaccaggtcttgttttggagaaaagacatcaaactcttcaagccgg

SEQ ID NO: 369255 - DNA, 122 bp, Homo sapiens
cgggctgtcccgggcggggccggcccattttcactttctccactagaggcagcagcgcaccgtgaccctggcttactacggtaagaaagcggagaccttttgcttcgaggcggttggtggcc

SEQ ID NO: 369256 - DNA, 122 bp, Homo sapiens
tgagattatagacattttcctttggcattggaggaagcggagtccagacacactctgagtcgcgggcaagttggctcaggcgggtggacgagtgaattctgggaactgtagtccatcaactt

SEQ ID NO: 369257 - DNA, 122 bp, Homo sapiens
ggaagctgagggctgtctcaggagggaggggcaggagtgcggggtctacacccctaactgcgccccaggactgcagtgccatccgcccaaggacgacgaggcgcctttgcgggcgctgctgc

SEQ ID NO: 369258 - DNA, 122 bp, Homo sapiens
tcaccgcgcttcctcctcgtgccgcatcctcggcaggggggaggggcgcggtgcggccggcgctctctgattggctgccgcgtcggcgatccacgccacaattgttccctaagaccgtctgc

SEQ ID NO: 369259 - DNA, 122 bp, Homo sapiens
aagcggcgctctagccttggtgccaaaatggtagctatcgttggtctgtcacggaaaagtcgcagtgcttctcagctcagccaaacgggtaggaatttcaatgttacttttaacttgatatt

SEQ ID NO: 369260 - DNA, 122 bp, Homo sapiens
ctctgagttctcctccccgggtgtgcacaggggccccagagccagggaatcttcgaggggcgcttttctccggattcccgaggccggggcgtgcaggagtttacctggaacgtgagcagctt

SEQ ID NO: 369261 - DNA, 122 bp, Homo sapiens
aatactgaaattagaccggtagatttttatgtggacttgaatctgcttctttgtaatttccgtgggtacttggaagtgttttgccatgaatgctaatgtgctttgtgttttaagtagtgatt

SEQ ID NO: 369262 - DNA, 122 bp, Homo sapiens
gcacttggtatgtgcaggccctggttgggcactggggactggacagacaaggttccagtccggtgagcagcttacattctgggagggagacctgcaataaacaagcaaacaacttcaacttt

SEQ ID NO: 369263 - DNA, 122 bp, Homo sapiens
aggcaaatagggaaagacaggcactacagagagacgacaagagggcgggatagagacaaacgagggaaacagagaaagggggaccccaagccagacccgaccggaccaggaatgtgcgtggg

SEQ ID NO: 369264 - DNA, 122 bp, Homo sapiens
ctcccccatatttagtgcgaattcgatctggggctgggctgggccctacttaatggggcccgggtgtccgagagcgtgccgagcggagcgaagccaggagcccgatcgagatgatgatggtt

SEQ ID NO: 369265 - DNA, 122 bp, Homo sapiens
ctctctccctcactcgccatgtgcagggcagtgggcgagtcccagccagcatgggcaccccgcatttctctgcttctgcagccccgactgaccaaggccccccaagtgggctccagccctcc

SEQ ID NO: 369266 - DNA, 122 bp, Homo sapiens
tacaaggtgatctttgagatcccctcccacaccaagattccatgcttctatattcctgcccgttccaggaagcctcccctgtttgccctagcctcctactcatctagcagcccaggtgatgt

SEQ ID NO: 369267 - DNA, 122 bp, Homo sapiens
ttgtatcctattcttaattgctgttcattgtcagtgttccctacttgactgtaacctccacgaggtcagatctcatcttgtatccccagtgcttgaagagtgcttgctacatagtaagcatg

SEQ ID NO: 369268 - DNA, 122 bp, Homo sapiens
cggagatgacgtgcacgtgctggaaggccaggtgcaggccatctgtccactgtgacacgacgctccacatgacgcggtcggcgtggaacggggcccagcagatgccaaacaccacgaccagg

SEQ ID NO: 369269 - DNA, 122 bp, Homo sapiens
gaggccacaaatgcaggaatagctacactcttgaagcaactgtaaccaagttggtaacaacgcaggggaattcttcggtaaaattccttcctcttacaaaatccagctcaccctgcacagtc

SEQ ID NO: 369270 - DNA, 122 bp, Homo sapiens
aaacctcagggctaagggctcctgtctgtccttttctatcctatatctgctgtgaagaaccgtacctggcccatacgtgctcagtaggtgtttattgaatgaacccacttttctaaatcaca

SEQ ID NO: 369271 - DNA, 122 bp, Homo sapiens
gaaaaacatctagctcttttttgatccggattttctctccctcaagtcttgtctgttgcccggcatcataagctcctagggttagttcttagggaggggcttgcacatccgggccctgccat

SEQ ID NO: 369272 - DNA, 122 bp, Homo sapiens
ccaagttgaagagcccaagacaggtcagagatgggctgggcggcctctgccactcacctccggagagggcagggagcagaggcctcagtcatgaggtggggctgtcctcggcgtgggcctcg

SEQ ID NO: 369273 - DNA, 122 bp, Homo sapiens
tgctggaaggagcatcagggtcccaagactctgctcacagcttaaagcacctcattgagccgagaaccctgctaggtaaccaaggcctctcttttatcctgaaaagtcacttcctgaacatt

SEQ ID NO: 369274 - DNA, 122 bp, Homo sapiens
atacaaagaaacatccatattgcaatttctgtttacaattgcacacagaagtacagtgtacgtaagaaatacatgtctgcatataacaaggtatgtacattggcaagtgatgtctccaatgt

SEQ ID NO: 369275 - DNA, 122 bp, Homo sapiens
ctaaatcccaggccagcctccagggcctgtaacctacccgcggcccggctgtcactcggacggcttcattgaccgccgttagaggccaagctagcctgggagagaggccacagcaaagccac

SEQ ID NO: 369276 - DNA, 122 bp, Homo sapiens
ggcagctggcagacagcagatgagcagacgaagcagctcaagtcagcccttgccccagagcgccaggacgggccacacagaaggctctgtcgccttgcacggctctccagcttcacgacaga

SEQ ID NO: 369277 - DNA, 122 bp, Homo sapiens
tattcatttctgtctttttaagcttccctgctcccgagaattttcaggcttgtaagactgcgtgcagttcattaatattctccatcctggcatcccagatagacataagaagttgactgaca

SEQ ID NO: 369278 - DNA, 122 bp, Homo sapiens
cgtgaggaagagctgggtccggagaggacgcccggagggtgcaagtgggtctggagaggccgacttgaggaggttctgggcccggagaggccaccggaagggaaaaactgggcctggaaagg

SEQ ID NO: 369279 - DNA, 122 bp, Homo sapiens
gttctaattttcaagtcacacataagccctgattagtggtgataaggcaataaggaggaccggtttttttgagactatgaaaccacaaagaactctgagttccaaaacactctattagcact

SEQ ID NO: 369280 - DNA, 122 bp, Homo sapiens
cgcacccctccaccaccaaccacacccccgcgctccatctctccaccaaccacacccccgcgccgcacccctccactactgtttataggctctcaagagggacagggaaaaccagtattgtt

SEQ ID NO: 369281 - DNA, 122 bp, Homo sapiens
aagaattactatggctttataagcctaggaaaaagtctgaaagaatcaaaatgttaacagcggggacctcaaggaagcattgaagaggccatgggagaagttttcactttgttaaaaaatca

SEQ ID NO: 369282 - DNA, 122 bp, Homo sapiens
tgaccttgtgatccgcccgcctcggcctcccaaagcgctgggattacaggcatgagccaccgcgccctgccggcagagcgtccagtttctaaaggatctgccctgtcctgcgttctgtttcc

SEQ ID NO: 369283 - DNA, 122 bp, Homo sapiens
ggcaggcctgagtcccgccgccttccccacaccagatccgcgcccactctagccaacagccggactctaggctcagctcccgcagccccgccaactttccgatttcaaacctagtgcacttc

SEQ ID NO: 369284 - DNA, 122 bp, Homo sapiens
aatgaagtggattcgccctattcctggcgactctacaaggttggagacccccgtagacttcgcagccatcgccccttgctgcagacccccaaagtcaccgacagccttacctagacctgacc

SEQ ID NO: 369285 - DNA, 122 bp, Homo sapiens
ctcccgaaggtaccagcccgtggcaccttcattatggccagtgagctggctgtgggactgcggactgagactatacatatgccctgttttcagccaccaagtgtgtggtcctttgttgtggc

SEQ ID NO: 369286 - DNA, 122 bp, Homo sapiens
ctgaaaaggggagaggcattcagccgctgcttttgatgcgctatctatattagaccgatgcgccgttcttaatcaggcctagtccgatttcctttcctctctcggtcggtcctctgaacttt

SEQ ID NO: 369287 - DNA, 122 bp, Homo sapiens
caacaacccgggtccctagggatgcttgggttgccacccgccgctcgaagctggaggggccgccggagcctgcgattggctgcttcgggcacatcgtcccgccccgacctgtagctcctccc

SEQ ID NO: 369288 - DNA, 122 bp, Homo sapiens
tagtcaaagaatagaatattacacagaaatgaaaagaatcaactactgcttaacacgtagcgatacaaatgcattttacagcatttggttgattaaaagtaaccagaggtgagttcaaacta

SEQ ID NO: 369289 - DNA, 122 bp, Homo sapiens
gagtgaaagtgaaactgcaacttctattaaatcatgctttttaatcatctctgagcaccacgactttttacacggtttcccctcctaggtaattatctaagtgaaatctttcattctgtcct

SEQ ID NO: 369290 - DNA, 122 bp, Homo sapiens
accttgtgatccgcccgcctcggcctctcaaagtgctgggattacaggcgtgagccaccgcgcccagcccacccggcctaaatttcttagtttggacaaacgtgccatggtaatgcaaaatg

SEQ ID NO: 369291 - DNA, 122 bp, Homo sapiens
gcacggttctctccaatgactctcacacaggaaccagacctgactctgtttcttccaggacggtcctccctcactccacagcctctcatggcagctggacacccaccagggctggattccac

SEQ ID NO: 369292 - DNA, 122 bp, Homo sapiens
tccctcatttcaattcgctctctcctcagaggcggcaaccttctgaacgtagccagggcccgcctcacggaatggccacggaatggtcagacaccccgtcactcctggctggtgggcggggc

SEQ ID NO: 369293 - DNA, 122 bp, Homo sapiens
aatgttcattaaccctccattcctgttagattcagtcaggtcttagcaatttttcctgctcgtctccacccccttctctgactcttgtcctttccacttctctattccccatttcctctttc

SEQ ID NO: 369294 - DNA, 122 bp, Homo sapiens
caggaaccacctctgtgacctttaccaacctcagcctatagtggggacaaggtcctacagcgtgggcctctcctttggaaggctttgggacagagttctgcccaccagctggaggacagtga

SEQ ID NO: 369295 - DNA, 122 bp, Homo sapiens
ctctcagtgactgaaacaaatggatacctgggctcaagaaattctgcatcagctgggttgcgacctatgcttaagtgactctactgtggagctggattactaaggatacccttagtggatga

SEQ ID NO: 369296 - DNA, 122 bp, Homo sapiens
tcggattttgttgcattttttttctgagactattgagatgatcacatggtttttatttttcggtgtgctaatatggcaaaatacatggatggattttaaaatatgaagtcaaccttacattc

SEQ ID NO: 369297 - DNA, 122 bp, Homo sapiens
gggccctgaggagcctggggccggccgggctgccgctgccgcggaggagcagagggcgggcgaggacaaacccttcccgaccacagctgcctattgttcccgactgaggccccggccgcggc

SEQ ID NO: 369298 - DNA, 122 bp, Homo sapiens
tcgttggatatggaatagatcgtagatgttgtagactgagatttgggactatgttgggaccgtacaggtgaatgtgccacctccacaaatggcttctccgagtgagtcacgtcacctggtgc

SEQ ID NO: 369299 - DNA, 122 bp, Homo sapiens
gcgtcagacccctccctccacactgccctctccagggccttgcagcagtgaggtgtggggcgttcgcagttcccctcccagcttgtgcccgctgactgctggcgcactctctcctaggccaa

SEQ ID NO: 369300 - DNA, 122 bp, Homo sapiens
accccacagtcagccgcatggctcccctgtgccccagcccctggctccctctgttgatcccggcccctgctccaggcctcactgtgcaactgctgctgtcactgctgcttctggtgcctgtc

SEQ ID NO: 369301 - DNA, 122 bp, Homo sapiens
cttcctctctgtcatttattcctttgtgggttagtttatttgttgaacaaacatttattacgtacccaccctggacaggctccatgccagctatagatgaataaagataaaatcagcccctg

SEQ ID NO: 369302 - DNA, 122 bp, Homo sapiens
cccctgccaccaccctgcccctgtcgggctgacagctgagagatcgggaagtgctccctgcggccgcccaggcctgcttgatattccggagagggcggcagcagcgttcagaatccttagat

SEQ ID NO: 369303 - DNA, 122 bp, Homo sapiens
ggggcggcaaggccaccaggaggtgataggatgctggggtaacctggacactaatccccccgggggcgagaggtgcacatggccagggaggcgcaggagtggctcagcagagcgccccagcc

SEQ ID NO: 369304 - DNA, 122 bp, Homo sapiens
tcccaaagcaggccactcacactgtctcctgaagattcatttttctccttcagggaaacccgaggagcttattttctccttattttaccagggaaaaaatgttggaaggagatttgcctgaa

SEQ ID NO: 369305 - DNA, 122 bp, Homo sapiens
acaattaatccctaaataatgattttcctaagctcgcgcggacttcgggatggggttgagcgacccgtgatgacgctcccatcagcctttcagaagggacggtttccaaagaaaactacaac

SEQ ID NO: 369306 - DNA, 122 bp, Homo sapiens
aaaccacagcaaaagcaagttgatgccgaagtgaaacacgcagctttattaagacaggggcggtagaagaaggtctccatgctgaacagattacattatggagcccgggagcctgggaagga

SEQ ID NO: 369307 - DNA, 122 bp, Homo sapiens
cttgtccacatgggttcccaggttggcctgctaggctgacaccctggtggaaccacttgccgtatgtcctcgggcgctggaggtctcccagcgctggcatacataagccctggcgtgcgggg

SEQ ID NO: 369308 - DNA, 122 bp, Homo sapiens
cctttcgggagctaggggggcgttggcttggacatcccgttctggaagggtggccgggggcgctaccacgggcggggaaaatggctccgagccacccggcctcgggcatcaatcgacgcggc

SEQ ID NO: 369309 - DNA, 122 bp, Homo sapiens
cagacacctgtgatgtttgaaagaaccagtttatcaaagtgcttagcctgacgcctgacacgctgtgcacccaagataaatgtttgttgtgtcattcgatctgtcgaggaaggaggtgagac

SEQ ID NO: 369310 - DNA, 122 bp, Homo sapiens
gcggaggaatgtgccaaggagagaaggcgcctgggcagagcacagtgctgggcagatacacgggacagaagagctcacggcaggtctggggaatttggggtcagctttttgtagcagcagca

SEQ ID NO: 369311 - DNA, 122 bp, Homo sapiens
ctcggtcagccggctgccacacgccttcaggagcctggagaacacagcaccagctatgagcgttctcgccaaaggaaaaagcaaacctgacgctcacccagcccctgatcctaccagtttaa

SEQ ID NO: 369312 - DNA, 122 bp, Homo sapiens
aagagtacatgccatgttaggctgcataatagaagtgttgtcatccgccagagggagacccgtggtcccactaacatatgtgctatgagagctgatttcctgtctcaccataggctccatct

SEQ ID NO: 369313 - DNA, 122 bp, Homo sapiens
cgggggcccggcgagctgggcaggtgccccctccggggccgtgggatctggtgagcttcccggcgcgcggggggcggtgcggcttccggtcccggctcagcctccgacccaggtggtctgga

SEQ ID NO: 369314 - DNA, 122 bp, Homo sapiens
tcccaagttagaatttgagtgacacacagcaagtgctgttaaatgagacttaatacctagcggggtgccaccacaaccttgcccttctgcaaacctctgtagcccttttctaccaccctcaa

SEQ ID NO: 369315 - DNA, 122 bp, Homo sapiens
tcccagcgggagccattttccattccttcagcttcgctggttttgtttccgaggagcgggcgtgctgcgctgcttctctttgagtcatctgggtcctcgcctgttgactttcttcctggtag

SEQ ID NO: 369316 - DNA, 122 bp, Homo sapiens
atggtatcttggagctgaattcttttctgcctggctggcaatgggcacaaggtggcagtgcgattgttaaaattctcagcagtggtacactagcatgactttactgggtgaagcaaatgcct

SEQ ID NO: 369317 - DNA, 122 bp, Homo sapiens
gcccttcagggcgcgcaaggggcgagtctgtccagccggcagcaccccaggccggatggacgcttgttcctggttctgtgccccgtgagcgctcaacgccctggtgtgttcactgaccatgg

SEQ ID NO: 369318 - DNA, 122 bp, Homo sapiens
ggctttgcctcaaggtgtataaacttaaagcattatctccggtgcagtttgtcagtgtctcggcatatttgaaatttttagtactgcatttggtatatgaaagctgcatcctatgtaagacc

SEQ ID NO: 369319 - DNA, 122 bp, Homo sapiens
aacaaacacagagtgcaatcttagggaaatgccaagaccttcaccttgagcgtgtgcatgcgctgctctacagaacccaggaggcgccttccgcccacccacaggtactacagcactagctc

SEQ ID NO: 369320 - DNA, 122 bp, Homo sapiens
aggcccttcgcagcacagcctatccccagaccgcttagtccttcataacatatatctccacggaaaagggtatttcctcccgtcagaaaaagcgccccagtctggtctgggttggtttttat

SEQ ID NO: 369321 - DNA, 122 bp, Homo sapiens
gagaaccctgaatccattccgcgcacacccggccgcgtgacccctgccgaccggctggcgcgccacccattccccgcggcccgcggattagtcagcagttgttctagtccgggtcccttccc

SEQ ID NO: 369322 - DNA, 122 bp, Homo sapiens
gtgtttggtatcaggtggctctgggctttctgggcagcatgtcggcctgatttgagcccacgtgcatgggtaacacctccttgcccctggctgttgtttctccaggtctggaggtggccctg

SEQ ID NO: 369323 - DNA, 122 bp, Homo sapiens
tgtgtgtgcttgatcagattcccactttaattctggggtccatgtagttcagtgacacagcgtgggtcatgtgcttgtgtctttgctacaagggacactggaaagtaagttctgttgcttca

SEQ ID NO: 369324 - DNA, 122 bp, Homo sapiens
cacagtgccgccccatggcccagggctgcccgtgctggcaatgctcttgccagcaagaggcgagagttgttgaggtctgcagacttgggggcaagtgaaggcccaagctgcccgagaagagc

SEQ ID NO: 369325 - DNA, 122 bp, Homo sapiens
cgtttaaatttcaaatgaggaaaacgaacaccttcgtttttcaaacgcggagacagacgccgggtgggccgcgtcgtatagcgactgatcttgctcctttcttgggcacctccaatgtgcca

SEQ ID NO: 369326 - DNA, 122 bp, Homo sapiens
tcagctaagcagctctgcacgtcccttcccacttgctcagccaatcgctgggctcggccccgcccctttgggcttggtccttctcacgccaccaatccgcgcctcttgtcccgccccctgcc

SEQ ID NO: 369327 - DNA, 122 bp, Homo sapiens
catcgcgtgggcgcccgtaaaggcacgcgcggagaaagcccctccgtggactccccactccgcaaagtttaacaaagccgtgaagtaaggaaaccgaacctcccgtccgcgcccgctgcaaa

SEQ ID NO: 369328 - DNA, 122 bp, Homo sapiens
cgcggacccgctgcggccagagaacccagtctgcgccagcccggctcgctcgcgaagccacgggcttcactgacgcgactttccaagacgtgggggtcaccatgggcagaggacatcggttc

SEQ ID NO: 369329 - DNA, 122 bp, Homo sapiens
ggcacagcccggcctctagccgcccggtagactccccgccccccacctcgccccggttcccggaggaaaagacaatacattttaacgccattggagctgctgctgtgctgcggctgctgctt

SEQ ID NO: 369330 - DNA, 122 bp, Homo sapiens
ccattgcttttcctccataacttggatctaatcatgagaaaacaaatccaatttaaggaacgtactacaaaatatctgccctgtaatcttcaaaagtgtcaaggacatagaagtcaagaaag

SEQ ID NO: 369331 - DNA, 122 bp, Homo sapiens
agacatctctcacatcttagtgggagaattaaatgtctctctttttcactgaagtcttaccgagaatcatttcttttctgtcactcttgctgatcttgctgatgagccctagttctgctttg

SEQ ID NO: 369332 - DNA, 122 bp, Homo sapiens
ctgttcatgagagtcacctcagctccacgaaaaccttgttcaacaaaggcacacagagctcgggccactggaggaagcagcaagcaccctgatgtcatgcttactccagggcaaaactctgt

SEQ ID NO: 369333 - DNA, 122 bp, Homo sapiens
gtgtcgggacgactgatccctggtgcatctcatttgtcagcagtggtgcctctcatggggcgatgcttggtgtgtgcagtgagtctgacctcatcatccttccgagtggagcattcccgtag

SEQ ID NO: 369334 - DNA, 122 bp, Homo sapiens
ggggcgcgaggctcgggcccaacacagcccacctgacacaggcgtgggagaaggcgagagcgcctctgaaccaaaggcagtcatggaggtctggtgccttgtccacccccagcccgcagccc

SEQ ID NO: 369335 - DNA, 122 bp, Homo sapiens
cactttctcctaccaccatatttaagcaagaggcttcgccagtcaaaaaagcagtgacaccgtctgtcttcccactccctgaagacacccattctacccgggcgtctgcccttgaccccatt

SEQ ID NO: 369336 - DNA, 122 bp, Homo sapiens
tccaataggcggagagctggtcagcgctcacagcctattggctcggaggagctgccgctccgcgcctgggtcccgcccccctgcccctgtcgcgtagttgggttgcagcgcactagagggca

SEQ ID NO: 369337 - DNA, 122 bp, Homo sapiens
aaggggctggcctgagcgagtctgcagggcctgacagacagggcttgggcacgacttctgcggctgcagattgcgctgggccatggtaaccaccacgccggcccgagggcgctatacagtgc

SEQ ID NO: 369338 - DNA, 122 bp, Homo sapiens
gctgttgataagacatcctgctggagtctcaggatctgaaagaaatgatacaacagtgttcgtgggaagggaatcctccagagagagaagccaaagcttatgtaataccatggcatattatt

SEQ ID NO: 369339 - DNA, 122 bp, Homo sapiens
agcaaaagcgtcccaggatccacgctccgacagctgcgcacgtcgcaatcctcgaggactcggtcttcccaggtgaaattgtgggcaggagaatccgcgtgaaatggacacagcagctcaca

SEQ ID NO: 369340 - DNA, 122 bp, Homo sapiens
cggcggcctccttcaggcagtggtcgcaggccacctgggcattcgggctgggtgcagaggcgcgggcgggcggcgtccagacgtcggcgggtggctcccgggccaggtcggcctgcaggaac

SEQ ID NO: 369341 - DNA, 122 bp, Homo sapiens
tttccaaaaacaatcctttagaatatttctggaaatatataacagtaatactagttgccacgtaggaaaggaactgagtggcctttaagagacagggaaggaaactgtcatgtacttcttgt

SEQ ID NO: 369342 - DNA, 122 bp, Homo sapiens
caccactgggagctccgtaatggcggcggcgggggcggagaacccggggggcgggcccgccgcagccagtcaccgccgccggcatctttcgaaccggctccgaaaaccgctgagggagtggg

SEQ ID NO: 369343 - DNA, 122 bp, Homo sapiens
tcagtaagtggctcttcccgactccttggctctccggaaatcttcggtgactctcgcagccggctttgggggcccacctctcagttggtcgtctctttccggaaaacttcggcgcctctcga

SEQ ID NO: 369344 - DNA, 122 bp, Homo sapiens
atgaacttatgaaacgtggtcctgtctgccctaaagccagggtctcaccgacaaggacagcgatgctggggcgagaaataaagttcgtcctgggcctgcgtacggtacagcgcccttgggaa

SEQ ID NO: 369345 - DNA, 122 bp, Homo sapiens
tgtcccccaagtccactagttacgagcccagcacagcattagaactttctaggccaggtgcggtggctcaggcctgtaatccgagcactttgggaggccgaggcaggtggatcatgaggtca

SEQ ID NO: 369346 - DNA, 122 bp, Homo sapiens
agtcacctggggtcacacacgggtgggtgggtctcagcctgaggccggccccactgtccacgtgtgcaccttgatttaccatccctgctcctttaacggcgtctccgggcgccggctccgag

SEQ ID NO: 369347 - DNA, 122 bp, Homo sapiens
aaacattacttactgtccactaattcccgtgtctggccctgaacatgaagatataatggacgatccctataaagagaaacaaaaaaggatgatctcaatgtggtcaaaaccaaaaaaggagt

SEQ ID NO: 369348 - DNA, 122 bp, Homo sapiens
gagagggtgggaccacgcaggaggcagatccaataaacaggaagatttttctcgtgacgtcgtcggcgcgcgccggaagcgcggatcacacgggcccctacaaggggcccctacaagcggcc

SEQ ID NO: 369349 - DNA, 122 bp, Homo sapiens
ggaggctgaggtgggaggactgcttgagcccaggaagtcgaggttgcagtgagccacgatcgtgccactgtactccaggctgggtgacagagtgaggccctgtctcaaaaaacaaacaaaaa

SEQ ID NO: 369350 - DNA, 122 bp, Homo sapiens
ggaatctctgtcaccttgctctcttggcagagaaaaaccctgttagagcagtgacagatccgatgatgacatcctgagcccaagctcaggaatgccagcaaagagaccaggagcagggccat

SEQ ID NO: 369351 - DNA, 122 bp, Homo sapiens
aaacaaaaaattaaaaaattagccagacatggtggtaagtgcccgtaggcttgtagtccccgctacttggaaggctgaggcaggaggattgcctgagcccaagaatttgaggttacagtgag

SEQ ID NO: 369352 - DNA, 122 bp, Homo sapiens
ctcagagacagcattaggatggcgaccactgccccagacggcccagtgctctacccctagcgtgatctgaactgctgaagtcagagaagtccacgttggataaacaaagccagcccagtagt

SEQ ID NO: 369353 - DNA, 122 bp, Homo sapiens
aggccacccttcggggaggcgacagcagccccagcgagtaatgaggagcagcggcagtgacggggcagagtcggggctgggagattagagagcccctcccagggcctttccctcccgcctgg

SEQ ID NO: 369354 - DNA, 122 bp, Homo sapiens
gacgctccccacctcccggatggggtggctgcggggcggaggggctcctcacctctcatacggggtggctgccgggcagagggtctcctcacttcccagacagggcggccgggcagagacgc

SEQ ID NO: 369355 - DNA, 122 bp, Homo sapiens
accacgacccaactcctcggccaggcctgggaccggcatcttagcacggggcccgcggctcggctaagagaggcgctgaccccagcgcctcaaggtctccttcaccagcactgcagtccgag

SEQ ID NO: 369356 - DNA, 122 bp, Homo sapiens
gctcagagagatcctggctgaaatccagcctccatcatttcctagctttgtggcctagcacgcagccgcctctgagcttactgttcaaatccgtgcggtgggtgtaaggatgccctcacccc

SEQ ID NO: 369357 - DNA, 122 bp, Homo sapiens
ctgggaggacggttgggagcctcggctgtgccagtagatatgtaaacaagggcaaagagacgtgtcctgaaaaaatctagagttccacagctgcaggcctgggcttccagctgtggctgggg

SEQ ID NO: 369358 - DNA, 122 bp, Homo sapiens
ggggacggagggtgagcgccgatgcccgggtcctcctccgcccgggccgacccgcgccctcgccataaacatccctgggaaaaaggaggaggtgagaacctccacacagccccagtgacaag

SEQ ID NO: 369359 - DNA, 122 bp, Homo sapiens
taagatgagttaggccaccactgagaggtgtttcccaaattgtggtcttaggagtacccacgtcagcatcaggcaaggacagttgttacaagtgcagattgcagggctcaaatgcacttttc

SEQ ID NO: 369360 - DNA, 122 bp, Homo sapiens
gggcaaaaggcctctggcgccccctactggcagttcagcttcaagactcccaagccctcacgcttcaaccctgtctgaagtgaggtccagcctgaacacttctagggccaattccaggctgc

SEQ ID NO: 369361 - DNA, 122 bp, Homo sapiens
tgacgccagggggcaggatgagacaggggaacgaagtcggtgcggcaggcgtggcggcctcgccggtcttttcctgggacgctctcaggatggctctcggagggtgcccgggcggcaggcag

SEQ ID NO: 369362 - DNA, 122 bp, Homo sapiens
aaaagccgggtcctccactggctagggccgaggaggcaagcactcaagctgccacagaggcgaagcttcctagagcggcccggaagtgcccggctgaagcggccgggcgccgattggtgtct

SEQ ID NO: 369363 - DNA, 122 bp, Homo sapiens
attgctatcaagatctcattgatgattgttatcaacacctcatcctgcttctgccaccaccggccccatctaacactgctcagtccactgctagtggaagacagccatggatctggggaact

SEQ ID NO: 369364 - DNA, 122 bp, Homo sapiens
tcagtcctttaaaaagtatacaatttggtggtttttactgtactcaaagttttataatcacggccactgtctaatgccagaagattttcatcagttcatttctattgacttcttatttcttt

SEQ ID NO: 369365 - DNA, 122 bp, Homo sapiens
aagccgctcgcaagactcccgtagtccccacctctctcagcttccggctggtagtagttccgcttcctgtccgactgtggtgtctttgctgagggtcacattgagctgcaggttgaatccgg

SEQ ID NO: 369366 - DNA, 122 bp, Homo sapiens
acccccatgcacagcgagagctagggccatggaaattccgtgcctggaccaacctcgtctcgtgcagcgtggaagaggcgcgtagcccagtgcttgggttgggaacctcgtcatcgtctcct

SEQ ID NO: 369367 - DNA, 122 bp, Homo sapiens
cgccacccgccaggagatgctgttcttggcgttgctgctcctgccagttgtggtcgccttcgccagaggtgagagcagaaaccaggctgggagggccagcagcggcgagggggagtccggga

SEQ ID NO: 369368 - DNA, 122 bp, Homo sapiens
accggagagggaaggagtggagacgagtcaacgccccttcgtacagcagtgaggttagaacgtgaggggatcacagacttcgtccaccttcgggaggaccgcaggacctctttctttcttgc

SEQ ID NO: 369369 - DNA, 122 bp, Homo sapiens
acttcgcgcccctagctccggtgcccgtggtgctgcggggccagtgggggctctgagccccggtaaatcagcagaaccagtggcctttttttttttttccggagagcaggcttcatctggga

SEQ ID NO: 369370 - DNA, 122 bp, Homo sapiens
cagcctcactctactccatcccttcttgatccaagtccagagtctctttcacaccagccacgctgccagcattgtcgggaggtttgatgtggtgtgaattcctgcccctgggagatggacgg

SEQ ID NO: 369371 - DNA, 122 bp, Homo sapiens
ctcaggtcgcctgttttcctctcctttctcagctactgtgggtctcctattgctgcgcgtcgcgccaatttctccctccctaggggactagcgccagaagtcgttcctcacccggctcctgg

SEQ ID NO: 369372 - DNA, 122 bp, Homo sapiens
aatttagaacagagattattaggcaaaaagtttttaaagttgcagcgaagggagggtaaacggcttgtgcaccgctgctagctaatatccacagcttccccagggactttaatgtggtggca

SEQ ID NO: 369373 - DNA, 122 bp, Homo sapiens
aggaacccgttgcgaggggagaggaaatgcctgtggagggcggcaggcccccacatcccacgccaggtatcctcagctcaggctgtccctggctcctgaaggctggccttaagtcaagacct

SEQ ID NO: 369374 - DNA, 122 bp, Homo sapiens
tgagaacatttaaaatctactcctttttagcatgccgcgttattcacaaaagccaagatacggaaacaacctaagtggccatcaataaataaatggatgaagaaagtgtggtatatgtacac

SEQ ID NO: 369375 - DNA, 122 bp, Homo sapiens
ttgggcatggcagaagaggcagagaggcctggggagaaagccggccagcacagccccctgcgagaggagcatgtgacctgcgtacagagtaaggagcccttaagcaactagcctctctccct

SEQ ID NO: 369376 - DNA, 122 bp, Homo sapiens
tggatgcttcttcagcaggtccccacctgagtctggagcagttaagagttctgtcttccccggctctggcttttatttaacgtgggctcatgttaaatgtgagcttatttaatgtggccttc

SEQ ID NO: 369377 - DNA, 122 bp, Homo sapiens
tgcggcgcagcgtggtagagtcggaccaggaggagccgccgggcttggaggcagccgaggcgccgggcccgcagcccccgcagcccctgcagcgccgggtgcttctgctctgcaagacgcgc

SEQ ID NO: 369378 - DNA, 122 bp, Homo sapiens
tgggctttgcaaagactagctttggctaataggactgaggagagctggcacgtgggtacccgcctcctcttcctcctccaggaacccagggatcatcaccgcacgaatgggcacacagaaac

SEQ ID NO: 369379 - DNA, 122 bp, Homo sapiens
gacaaattagtcatcaaaacaaactcaaatctcgcctgtaatccgagcactttgggagaccgaggcgggcggatcatgaggtcaggagactgagaccatcctggctaacatggtgaaaccct

SEQ ID NO: 369380 - DNA, 122 bp, Homo sapiens
caggggcctgcgatgccttgtgcggcctgggccgtgctgcttggcgtctgcacgcaatggcgagggctcccggctccctgtgcggaaccctgtgcagccaaggggaggctcccggcccggtg

SEQ ID NO: 369381 - DNA, 122 bp, Homo sapiens
tagagcaggtgtaaatgtttagcaggcaattactactagtagtggtagaagcccagattgcgacattactgagaagtgatgattgaaacctttgtggtagataagatcactaaggaagaata

SEQ ID NO: 369382 - DNA, 122 bp, Homo sapiens
ccgtgggaagaggagggatgggacctggtggcggttattaaaggatccctctctctgccacgcagagaacaggtcccaaagaggctactgaaataaggctatgacattaaggtccccctttg

SEQ ID NO: 369383 - DNA, 122 bp, Homo sapiens
cttctctcctcctcccagggcccggagccgcccgagggctcaggagacctgcaccggcagcgctacccgttccggacacccacgcggaggcactcacggcttaggggccccgggccccgctc

SEQ ID NO: 369384 - DNA, 122 bp, Homo sapiens
tttaacagggcatgtttgcgcagctggtggcccaaaatggtaagtatcctccgccacttccggtccctggccccccaccatccccaccccgggatacgaagaagggggaacctggagagtga

SEQ ID NO: 369385 - DNA, 122 bp, Homo sapiens
tgagtccttgcagctatcaaaagtctaggcctcccttgcagtcctgaatctctcagaacccgaatcacaaggctatcaagaccatgcaaccctgctgtcttgagagaggaaagcttgtgacc

SEQ ID NO: 369386 - DNA, 122 bp, Homo sapiens
cacataccctcgtccccatgtccccacgcagggctctccttcgtcttaggatctgtccagcgctgctctgggtgggttagcaaccccagggctgctgtgataggaagtccctgttgttctcc

SEQ ID NO: 369387 - DNA, 122 bp, Homo sapiens
tggaagaaggcctgggaaaatcatatgtggacatgtggggcttgtgagcttttgtgtggacgcatgcccatcgccaggttgtaccaacaggtttctccgtctgtagcaggagtgatgatgag

SEQ ID NO: 369388 - DNA, 122 bp, Homo sapiens
accttattcttaagatcctcaattgttaggtgatatctgctatagtcatgatcaagtccacggcaagatccaggtccgtatttttcataccaacccttgatttttctctctaattcagcatt

SEQ ID NO: 369389 - DNA, 122 bp, Homo sapiens
cggtgacctgcactctgtccaggaggaggggagacttgcccagggacaaacccgaaaacacggcaaggtcaggggaggagggcactgtttcctgtcgaagtccacatttgtgaaaaaacatt

SEQ ID NO: 369390 - DNA, 122 bp, Homo sapiens
cgcacaatccaacatggcagcgggggcgggcgagaccacaggacggagggcgcgggggagcgcgccggaaacgcgcggctgcggcccgggagaaacccccccactcggcggcgggcctcgcg

SEQ ID NO: 369391 - DNA, 122 bp, Homo sapiens
gactctttttgtttgtttgtttgtttgttttattgttgttgttattctttatttttgcagcggcaagtggatggtggtagcataaactgaaataagaaagacttgaagtttcagaggacaga

SEQ ID NO: 369392 - DNA, 122 bp, Homo sapiens
gtcaagtccctccgggtaggtcccgaaggcccgatgggcacagaactgggggacttcctgcgagaggtatcggtcatgatgaacttggagcacccacacgtgctgcgtctgcacggccttgt

SEQ ID NO: 369393 - DNA, 122 bp, Homo sapiens
gggaaactgaggcagtgcagggccggtagggtgggtgctgggctggtgaggcgcgcccctcgggcccgcgccaactttcttaggagccgccgcagcgctggcgctccctccgaggacgacga

SEQ ID NO: 369394 - DNA, 122 bp, Homo sapiens
cccaaggacgcaggactttcctgaaccagaaaaatccctgctcgcgagtgtgcacatctccgcttagagtgcagaggagcaaacagcagaaacttcccccggctgtggagccgaaacaggaa

SEQ ID NO: 369395 - DNA, 122 bp, Homo sapiens
tctgatagtgttactggaacaacgagacaaaagcggtgtgctccttccacctgtttgctccgtgtccctgtcggcgccccctctcctgctaacccccccgtgctttctctgattgctgttta

SEQ ID NO: 369396 - DNA, 122 bp, Homo sapiens
cccgcgttcctgaagcgctctcgagctgttctgtaaatacctggtgctaacatcccatgccgctccctcctcacgatgcacccaccgccctgagggcccgtcctaggaatggatgtggggat

SEQ ID NO: 369397 - DNA, 122 bp, Homo sapiens
tgaatatttcagaaaactggattgagaaacctggcttgaaaagttgatagcataggcagccgcccccttctgcgctgtcacgccgagccagcgcctgggcctggaaccgggccgcagccccc

SEQ ID NO: 369398 - DNA, 122 bp, Homo sapiens
tcccccgggttgtttcggaattcaggggacatgcagcctaaatgacccacactggaatcccggccggcttcccatccctcgttctaggtgaaggccgcgctggaatcccggccggcttccca

SEQ ID NO: 369399 - DNA, 122 bp, Homo sapiens
tcctcctcttgttattacctgtttcctaatggccctgatcctgtttgcttcttctccttccgagattttttgcaggggggaccagaatctccccagttgtgaggagagacgcctccattgaa

SEQ ID NO: 369400 - DNA, 122 bp, Homo sapiens
cggaaggggctgtactttttcggcctctaagcactacggtggccgagcgagttcaaacctcgcggaaccatacctgaaaactcggggtaattcttttttcttcatttcgcctctgtccagtt

SEQ ID NO: 369401 - DNA, 122 bp, Homo sapiens
aagtagattctatgagaggctgcatagcaaaatggcgtctgcagccagatttactgggttcgaatcccagcgttgccacttactagctgtgttaccctggacagacttcacctctctgtgcg

SEQ ID NO: 369402 - DNA, 122 bp, Homo sapiens
ctggaaattctcgcctgtcttccttcatccagagcaaattgagatgtccccgtaagagtccggaagttgcttgcttttgggtttgaactcgtccggaggctggtcccaaccccggtctttct

SEQ ID NO: 369403 - DNA, 122 bp, Homo sapiens
gcagccgtggaggcagccaggatggcatttaagggctggagtgcgcaccccggcgtcgtccgggcccagcacctgaccaggtgatgcagctgaggtgtggaccccgggaggcggggaacccc

SEQ ID NO: 369404 - DNA, 122 bp, Homo sapiens
gtgttgtgtgtgcatggcgtctacacgcacggtgttgtgtgtgcatggcgtctacactcacggtgttgtgtgtgtatggcgtctacatgcaaggtgttgtgtgtgcatggcgtctacatgca

SEQ ID NO: 369405 - DNA, 122 bp, Homo sapiens
agtggatgagagatgagtcatttacatccaatgagggaaaaacagcctccagagactcttcgtccattggccagtgagagtgtcaattcccaggctcctgccgcacgcgggcgagcccttct

SEQ ID NO: 369406 - DNA, 122 bp, Homo sapiens
ggcgcggagcaggcgccttggagcagggtctcgggggtccccggaacagtcacgtgttctcgagacgccgttaaacccccgccccctcttccccaccgccgcctccaggtcctgctcccgct

SEQ ID NO: 369407 - DNA, 122 bp, Homo sapiens
gcattcacaactgtgcgatttgtaagtgtgaagtagttaatgcccaagggcattaaccttcgatcaaagaggacaggagccgacatacaaatgcttcctccgttctttcctttaatggacag

SEQ ID NO: 369408 - DNA, 122 bp, Homo sapiens
agttccagcttcagtgactcagtagatcctcaaatacttcccatgggaaatacaactccacggtatcagaaaatacagttagccaatgtttcctgatgagttttgtgcacatttttcttgat

SEQ ID NO: 369409 - DNA, 122 bp, Homo sapiens
ctggagcggatgggcctggagcgcatgggcgccaacagcctcgagcgcatgggcctggagcgcatgggtgccaacagcctcgagcgcatgggccctgccatgggcccggccctgggcgctgg

SEQ ID NO: 369410 - DNA, 122 bp, Homo sapiens
ttgtaggcttcccagcgcccgacgtggctctgaaaggtgaggcggggcctagatccctcacgctcagcacagccccgcccctgttacctgaacgccccacagcagtgcccgggggctgagcg

SEQ ID NO: 369411 - DNA, 122 bp, Homo sapiens
gtctgagtccctggctttctgtccccagggcagcaccctcctgtgtttgatggaggggaacgtgtcttcacaggcacagcgctctcccctgggaattcactggcacctgccagctgcaccca

SEQ ID NO: 369412 - DNA, 122 bp, Homo sapiens
tctaagccttagtttctgtattatcatgagagatgacaccagctgcttagcacaaggtggcgccaatgagctttagaataagttgggcttgaccacttgggccattgttttcctgcttcctc

SEQ ID NO: 369413 - DNA, 122 bp, Homo sapiens
ggcgccgcacacgccggcaccgggcacacatagggccgcgcgggcgcacgccgggcccgccgcagcgccacggacacacactcgcacgctcgcacgctcacacccgcgcacacacccgcgcc

SEQ ID NO: 369414 - DNA, 122 bp, Homo sapiens
aaggtacaatctaagctctacaaagagaattgaaacagtgaggttctcacagagacaatgcggagagaaagaagaaaggaatacataatgtaggattccattcaaacaaattctgaaaatag

SEQ ID NO: 369415 - DNA, 122 bp, Homo sapiens
tgccgtaattatgtgcacaaataattgcatggccggcgtcgcgtgagacgcgggaaggaccggggagcggcagaaccagggcttccaattcccgtccgcgtttaaagcgcgccagcgccctc

SEQ ID NO: 369416 - DNA, 122 bp, Homo sapiens
gttcccacctgaggctgaggacgcacctgccgccttcctgctcctcaaactgcaaagcgacgggtgaagctgcccggaggaaatctaaactctaaagtctgaatcttcatgaaagtttgtga

SEQ ID NO: 369417 - DNA, 122 bp, Homo sapiens
gtcagggaccccccgggaaggacgggggacggaggagggcaggggccgcggggtgggggccgagggcctccccgtcagctggcagcagcggcccctcagcagcctggagtgctggcctgcca

SEQ ID NO: 369418 - DNA, 122 bp, Homo sapiens
actgaggcttccacaacactaagtccacacctcctgcccactgacctaagtgttaatgctcgtctttagatgaaactacggaggtctcgagaggtgacatgacttgcccaaggtcacacggg

SEQ ID NO: 369419 - DNA, 122 bp, Homo sapiens
tagaaacgttcttcttctgtgcttcaataacacctcctgtatacctcttttacagccacacgcaatcttaaaaagagcgtatcatctgggtacggtggctgacacctgtaatcccagcactt

SEQ ID NO: 369420 - DNA, 122 bp, Homo sapiens
gcccactgacgactcccgaggggctggaccaagcggggtcagcccgggcttcttccctggcgcctctggaagggagctggtgcaagtctgccgtcacatccacccccagatgcctgtggata

SEQ ID NO: 369421 - DNA, 122 bp, Homo sapiens
gggctagcctttcccgtccagggaagttgccagattccagctctggcagctgagagttgccggggtgtattcatgtgaaccacagggttaaggattttgttacttggtacttggctggtttc

SEQ ID NO: 369422 - DNA, 122 bp, Homo sapiens
cctggtgtggacagaggctctcttctcttgggcgaatgctggggcagagcctccagatcacgtggtgatgaatgtttaacttttttgtttgtttgagatggagtcttgctctgtggcccagg

SEQ ID NO: 369423 - DNA, 122 bp, Homo sapiens
atggggggcggggcccagcctgtgtttaggggaagccttaaggactggggcgtgttctagcgtccagctaggtaggtgttatggcctctgtcttatagatggggaaaccgaggctcagtgag

SEQ ID NO: 369424 - DNA, 122 bp, Homo sapiens
ctccgggaaaggagccgatcctggtggaagactacaggtctgagtccactggacgaaaaacgaggtgcgttaagagaccgcgggagtggggaaatggggaagtgagggtggggactgggcaa

SEQ ID NO: 369425 - DNA, 122 bp, Homo sapiens
gtcatcactaccatcggtgagccgcccggagcctccctccgcgcccgctccagccccagccgtcccggggcgcctctgggtttcggtcccacctctgcccccgcccagctgagctactttgg

SEQ ID NO: 369426 - DNA, 122 bp, Homo sapiens
atgagatactttgccttttctcctaacttcctcgcatttctggatagacagtgaaatgtccgcaggacttttcccaaatcttattaagccatgagttctgagctcattagaagattttgttt

SEQ ID NO: 369427 - DNA, 122 bp, Homo sapiens
gtacttcctcagcgcctgacagatttttgtcccccgcccccaggtttgggtgtgtgcgcgcgtggtatgtgtgtgttttcgttatttttctgttttaagagtaattggctaatgactaccac

SEQ ID NO: 369428 - DNA, 122 bp, Homo sapiens
gtgttttactctagctccggagtccccaacctccagtaaacgtaaccgcgtatcaggcagcgcggcaggcgagccagagaagtttcatctgtccttatacagcaactccccaacgctcctgc

SEQ ID NO: 369429 - DNA, 122 bp, Homo sapiens
gcctcgcgagctgatctttcctgtgcggagccaaggatgcagcagagggtgtgctcacggcgaggtgtccctctccggaggcagctcttcagggtttggcagaggagaggagcgcagtgacc

SEQ ID NO: 369430 - DNA, 122 bp, Homo sapiens
ctcccagtcgcccggcccgaggcccccccgtggtcccccagccccggtttgcgagagagccgggctggaggcgaaggcttctaataccacctgggtgtcgagtctctaatttctctcatcca

SEQ ID NO: 369431 - DNA, 122 bp, Homo sapiens
caagaatggggctccctagtggagatctgtcgaggggcaccaccagggctagcactgtaccgctaccgctggtggtggctctcgacctgcgctggccccttagggctccctggtcggcctcc

SEQ ID NO: 369432 - DNA, 122 bp, Homo sapiens
gcagtaacaactcttcacggggacacagacaggtaaccggggcacaggtgtcctgaacaccgcgaggcagccccctcctccgagctccctctctctctcctctctcctgccgtggctccccc

SEQ ID NO: 369433 - DNA, 122 bp, Homo sapiens
caaagaggtaagaagcgtttgtttttaagtatctaatcatttcttattttttgcagcaggcgagagaacatgacaaaaggcaatcgtaccacagtgaccgaatttgtcctcatgggattcac

SEQ ID NO: 369434 - DNA, 122 bp, Homo sapiens
ctgggagaaagtggcaccataaacctttctgctctgtttgatttttaaaatacagtacatcgtgcatgtagtgcctgaattaataatgaacaattaaaagtaaaattacatttttaatgcat

SEQ ID NO: 369435 - DNA, 122 bp, Homo sapiens
cctagaatggcctggcatcgagcaggcccagcgcaaacgcaaggtctcttcctctcctttcggtgaaccccacgcccagtcccgagagagagagcggatgctcatttccgaaagctggcaat

SEQ ID NO: 369436 - DNA, 122 bp, Homo sapiens
ctacagctgacctgtctgcttgctggtgggtttcctgctgaactcctctctgggtcagtgcgtctcactgtccacctgtccctgcatccccttctgtgcctcgctggtcatctttctccctt

SEQ ID NO: 369437 - DNA, 122 bp, Homo sapiens
cggctggaggcggggggcccaaggtggggacgctgggggggcgcgtgtggcccccacgcccgccagccagagggtaactgcagtttgagaaatgagctaaaaatgtcagtagtgtctaaagc

SEQ ID NO: 369438 - DNA, 122 bp, Homo sapiens
ccgttttttttttctgacttccagatgtgcaatatgatagttaattgctaacagaggctacggtatccgtttgcttcctccctgctaggagtagcgagaatattccatcatcacggtttgca

SEQ ID NO: 369439 - DNA, 122 bp, Homo sapiens
cggggcagtccagggaggcctggggctgcccttggttgtttggtgaccccattccttctgcgtgctcgggctgcagctcatacccccgacaactccttcatgggcttcgtgtccgaggagct

SEQ ID NO: 369440 - DNA, 122 bp, Homo sapiens
ggaactccctgaccccttgtgcttcccaagtgaggcaatgcctcaccctgcttcggctcgcgcacgatgcgcgcacccactgacctgcgcccacagtctggcactccctagtgagatgaacc

SEQ ID NO: 369441 - DNA, 122 bp, Homo sapiens
cccggcagccgacggggcggggcggatatgactggcgggccgactagtgctggttgccaccgccggtttagaaatcctattctcgcgccggggactggatttttccctacgtcagcgcagct

SEQ ID NO: 369442 - DNA, 122 bp, Homo sapiens
gatggatgttgaagcccacagggctgcagactcctcctccttcctggggacaggccagggcgccccactccggcctgcccactcctgcagtcatctttgtcttcagcccaaatgcacaagga

SEQ ID NO: 369443 - DNA, 122 bp, Homo sapiens
ctgcccttcgcctttcggaggctcacgggaacttggttcctttgctggggccttgaggaccggcctgggaaggaggggtggataagagcagtaagcgacaccggggcctggctgggcaaggg

SEQ ID NO: 369444 - DNA, 122 bp, Homo sapiens
aattatgtgaaggtacaaagttaacattagcgagattggcttaaataaccctcagcattacgaaatagtaaacttgaactcacactcacatttatcaacctgaagccagtcagctttccttt

SEQ ID NO: 369445 - DNA, 122 bp, Homo sapiens
gctgggccgcgtgcgcggcggctggggccgcaggtgtgagaggccacgtgggcgcaggtgcggggacactgggagcgcgggtgcagaacccctccgtgcgcatcccgggcgcttcgtgtccg

SEQ ID NO: 369446 - DNA, 122 bp, Homo sapiens
gattcccagatccctgagtccgactttttcctttcggtaattcttaatacccaggaagtccgagaaacaatggtctagacagtgactcccaatggctgtgggagtaaagtggaggaggtaga

SEQ ID NO: 369447 - DNA, 122 bp, Homo sapiens
catgtctggctgtcttcaggtgagaagccccttcatggcagggaaatgtaatggggtctgcggagtggaataaaatatcataggtaaaagtgtagcagcctggagtcggggtggggactggg

SEQ ID NO: 369448 - DNA, 122 bp, Homo sapiens
ttcttccccggggcgcatccacaaacctgagctccttggcgctcaccaccataacgctggcgtacaaagctgcttccattcactgagcactcagtaggcgccgggcacagcactaggtgcct

SEQ ID NO: 369449 - DNA, 122 bp, Homo sapiens
tcgatttcggcgggacaaaaacaatcttcgcggctcgtcagcacattgcatgctgggatgcgtgagctattttcttcggaaggcagcgaattgtattctgggacttgtagtgtccgcctggt

SEQ ID NO: 369450 - DNA, 122 bp, Homo sapiens
cacacacacaacacacacacttcttggctttgcaaaaggattgcgtggggcctgagactgcgtcccatcctcactagcaagcctggcgtgccggggagcgagaaaagggggagggcagtctt

SEQ ID NO: 369451 - DNA, 122 bp, Homo sapiens
gaggcggggtggggtggagtggggtgtgcctccggcgggcggtcagcaagtcagtccgtccgagcgccggcgtcccggtctccagcgcccgcccgcgacagcgaccgggactggcgccccgc

SEQ ID NO: 369452 - DNA, 122 bp, Homo sapiens
tgcccaggacgcacacaaacatgaacacccacaggaacagccggtccaccaccatagccacgtacttccagtcctcaacgacctgcaggcagacagaggagttggtcacaggtgccaagtac

SEQ ID NO: 369453 - DNA, 122 bp, Homo sapiens
ccctttggctggagtgcctctctggtctggggatcacctcaggcgctgtccttcactgggcgatccagcatggaccccgaggacgaaggggtagcgggagtgatgtctgtggggccgccggc

SEQ ID NO: 369454 - DNA, 122 bp, Homo sapiens
agggccctcctgcatagacagtgcctaaccctggggcttctcagctaagggagagggaagcgggcctcactccaaacaagggtcaccccttgccggcctcacatctaaagggaccaccacag

SEQ ID NO: 369455 - DNA, 122 bp, Homo sapiens
tcatgcgcttactcaagtaggattccgaaaaaattcagtcgcgcgtccctcctgaggttccgcagctggccaggcccggcccgggctggtgcggctgcgcactgcagcccagcggagcgggc

SEQ ID NO: 369456 - DNA, 122 bp, Homo sapiens
cactgagagcatttggaatttcacactctagcatcgtcggtgcactcagcaagctggaggcggggcgtgggcgagcggtggagcacgtgcgggtgcaagccttaccgtggcccctgccacca

SEQ ID NO: 369457 - DNA, 122 bp, Homo sapiens
attgtttagggaaggagattggcgtacccgcagccacttccgccggaaatgctccaatcccggaaggcgcactaaattagccctaaagatcgctgggaattgtagtttaatctttccatcag

SEQ ID NO: 369458 - DNA, 122 bp, Homo sapiens
ggggaccggtagctggggaattgggtttagcactttccaacgcttggaactggacatccacggctccgagtcctttgaggtcttgctcgggactacgtttcccagaaggctaggcgataatt

SEQ ID NO: 369459 - DNA, 122 bp, Homo sapiens
tcccggtcccacctccccgccccagcagcctgcccgcccgcccgctggccgggctgtcaccgtctcatctgcataggcgcccgcccattgggccgcccacccgcgccttatctgcatggcca

SEQ ID NO: 369460 - DNA, 122 bp, Homo sapiens
agggaggcgcagcctgggctgcagggccttggctccctggtttccctctgggcctcgggtcgcggacctccggtcggggtccctgcgcagctcagccgtcggcttcctcagcgttaggagcc

SEQ ID NO: 369461 - DNA, 122 bp, Homo sapiens
atttactggattgtttttcagtttgcagctgccctcttgacatcccaaataaggaattcccgttaagtaaaacctgcagtgcaattcactcagtggttagtttcaggccaagcctcccccta

SEQ ID NO: 369462 - DNA, 122 bp, Homo sapiens
cccaggccggtccccacttccgcttcctcactttctggcctggtgcagttcctgtcagggcgtcaagcaagatggttgcagatacctgagctggagggtaccaaggggaatgaaggtaagtg

SEQ ID NO: 369463 - DNA, 122 bp, Homo sapiens
tccgtccagctcttatctgggtgcttcggcagctagcactggggagaccttttttaaaagcgaagcctggaggggtggggggtggggcttggagagcgaagggggccgggcaccgagatgag

SEQ ID NO: 369464 - DNA, 122 bp, Homo sapiens
gtcaaaggtccgtcgagttatttcccggatccgagtctgacgtcttttccccgccgcttgcggtggttgtgaccgaaccttgagttttggaacaggtcacatggctttgaaatcacggtcaa

SEQ ID NO: 369465 - DNA, 122 bp, Homo sapiens
cacctcgctggactccaccaaggactctgcagctgcgccgtcaggcagggtggtggcagccgggcccgtgcgcttcttcagccagttcacgatgtcatcagcctctctgccagctaacccca

SEQ ID NO: 369466 - DNA, 122 bp, Homo sapiens
atcgccgaggtggggcctgacagtaatcttgacaaatgtgtgaagtgtcagctcctcctgcgctccttagcgccgggttttgtgcagttttgtaccgtatataccgagaaacttgggagcag

SEQ ID NO: 369467 - DNA, 122 bp, Homo sapiens
cttcctgtcttggttttggcaggttttgaccagtttctttgctgcattctgttttatcagcggggtcttgtgaccttttatcttgtgctgacctcctgtctcatcctgtgacgaaggcctaa

SEQ ID NO: 369468 - DNA, 122 bp, Homo sapiens
gtatgaatcgaagccgtgtgagcaaaatgccagctccaccacaaaatagttatataatctcgtgcaagatatttaactcctaagggctttggtctctctttacgatgggagtagtataggta

SEQ ID NO: 369469 - DNA, 122 bp, Homo sapiens
tgggcggcgtggcaggggtcacccactgctcttccggacgcaattttgaggaggtcggagcggaaggacgtcgtggagattgcttgcgctggggtgccacacttaggctgagctgcaggttt

SEQ ID NO: 369470 - DNA, 122 bp, Homo sapiens
tgggggaggatggcggaggcccttttaaggacccagtatcaccgtcctttctcggccagccgggcacccacccacctgagtgagcctggagcagcccattaagcgatttttttcctccactt

SEQ ID NO: 369471 - DNA, 122 bp, Homo sapiens
gggcgccccccggtggcctgtgctggggtcgtcggccgggatcccctgttcgacgtactccggggctgaatgggaaacagacagtcccagaccctacgtgagccacccggatcttgcaggtg

SEQ ID NO: 369472 - DNA, 122 bp, Homo sapiens
gcccgcatcgtcgaggtgaggcccgggcagcaggcgggctccttggggcttgacgggatgcgggccggcctgtcccgccgcccctagtccgcgccccgcggagtcgccgagccgcagactac

SEQ ID NO: 369473 - DNA, 122 bp, Homo sapiens
tctgtcccctgcccaggcttttctcgcacaagtacctgctgctctgaaccttgccattttcggcaatatacctgcgttaaaaaggtttgcttcttgttaatgctggcagaatgccctcctcc

SEQ ID NO: 369474 - DNA, 122 bp, Homo sapiens
gggaagaaggcatggagttcatggtgttagcgcaaaagttctgaatggcatccgtcctaccggaaacctaggaaaaggtatcagaactcagatctataaagcccacttaaaatgtgtgggtt

SEQ ID NO: 369475 - DNA, 122 bp, Homo sapiens
atcggttcattcaacaaccagtatttagtgcctgctgtgttctgcaggccctgccataggcgcttgatacagcggtgcatagcgtatgagaaagatctgtcctggtaagcttacattcttac

SEQ ID NO: 369476 - DNA, 122 bp, Homo sapiens
tctattgtgttttgcttcgggtaagtggtatctggggtctgtactgagtttgatatgccccgcactgaaatcattctgagtttccgactcatcccaaaggaacatgtgtaaataacaaccct

SEQ ID NO: 369477 - DNA, 122 bp, Homo sapiens
gcagatgcagatgcctcgagccagacgggcccacaggccccgggaccaggcggccgccctcgtgcccaaggcaggactggccaagcccccagctgctgccaaatccagcccttccctcgcct

SEQ ID NO: 369478 - DNA, 122 bp, Homo sapiens
ttttcgcacttattcatgcttcaaagcaggcagtttctgggacttgtctggccaacaacccgttcccaaaggctcggggaaggaggttgcgggtgggtggcgcggacctcgggtccccagcc

SEQ ID NO: 369479 - DNA, 122 bp, Homo sapiens
atactctaaaagtgatctagctggagcccaggaaggtggaagccttgtcctagggtcatacggtcagtttatggtggacccaaaccaaggagaattcaggtgatctatgaaaatggtcagag

SEQ ID NO: 369480 - DNA, 122 bp, Homo sapiens
agagaaaagagccaggacgcacctgcatttatggcgccatcgcccgggcggaatcctccacggaataaaaagtatgcagaagcaaggcgatttatgactgcataaaccctccgtgctcctgg

SEQ ID NO: 369481 - DNA, 122 bp, Homo sapiens
gagggggaaatacgagttcctttctgaagggacaggacggctgcttttccacagccgcgacgtgattgagaaatggtggctggcaagggtaggcctgccttcgcccctccaaagtaaaaatc

SEQ ID NO: 369482 - DNA, 122 bp, Homo sapiens
ggattcacaaagcaggagatgagagtcctgaactttccaactccgtgcactgcgaaatcacgacctcggcccacacctcccaccccttccctgctccccgccagatttcagccctgcacagg

SEQ ID NO: 369483 - DNA, 122 bp, Homo sapiens
cgaaacagagaacacacacaacgcggaccgacagcagtcaccgcaggggtcgccggggcgcggctctataaagcctcggctctataaagccgcgctaagccgcatcgcgctgcacgtttcct

SEQ ID NO: 369484 - DNA, 122 bp, Homo sapiens
ctacctttcaggaacaaatcaggattcccacctgcccaaggcctttgccctggaggctctcgcctgaccacttggcacctttccttccatggcttgtttctccttcaccagcgctcagctca

SEQ ID NO: 369485 - DNA, 122 bp, Homo sapiens
gaggacgaatctctactgcaggagcttgcacggcccctggagggtcagggtccggaggagcgcacagtggaggagggcggaggagaggcgcgaagcgtcaggctatcgggaggagccggtgc

SEQ ID NO: 369486 - DNA, 122 bp, Homo sapiens
ggggggaggtgggaattaggaactggggggtgttgaataaagctgaagatttggtgccctcgcctcagctccagactctacgggaaatgtttggtgcagcatccagaatggacaccactgct

SEQ ID NO: 369487 - DNA, 122 bp, Homo sapiens
taaactgtccttttatgacagaatgactttctgagggctggccatttgagatcctacagccggatgagtagagacactaatatattgtgagggagggcagggagtgtgacccttttatctaa

SEQ ID NO: 369488 - DNA, 122 bp, Homo sapiens
ccgtctccgcgctcaccacgcctgcgctctccgctcccaccttctttcttcagccgaggccgccgccgcctctccttgctgcagccatggagtgagtaaccgcttacctcttctccaactgc

SEQ ID NO: 369489 - DNA, 122 bp, Homo sapiens
cgaactcctgggctcaagcgatgctcccgccttggcctccggaagcgctgggattagaggcgtgagccgccgcgccgggcctccccccttcccctccgccgccgccttctcatcgcccttcc

SEQ ID NO: 369490 - DNA, 122 bp, Homo sapiens
gccaccggctatccaggtctggccttaggagcgagggccacgctgggctagaagtcaacccggagtttagggatctggtgttgagccttgtaagtgcctcagggtggggactccacatttcc

SEQ ID NO: 369491 - DNA, 122 bp, Homo sapiens
gtgaaaagttaaaatacatagcaaacattgctccaggctcaagacaattctgtacatacacgtggcctcatgtgaagccgcaagcacttcaatcttcagagaaaggaaataacttcataaag

SEQ ID NO: 369492 - DNA, 122 bp, Homo sapiens
caaatcaaggtgaggaaaggtctaaaatttaggagtactcctaaccccagtaatcatattcggcacttgccaaccacaacctccccacaccactcccgctttgcctctgtggttcactgatg

SEQ ID NO: 369493 - DNA, 122 bp, Homo sapiens
gttttaaaaatcaccattatcttttcagagtgcttctggagtctccaaagcagaaatgaccgcatacatttcaacaacatctttgcaatcctccctttacatgaagaaagcaactgagaacc

SEQ ID NO: 369494 - DNA, 122 bp, Homo sapiens
cagaacaatctggcccttacaagccggcggagacgggtacgaattaccatgacaacagcgcgcgcctcgacattgtcggctcgcgcgttgtttgggaagaaaaagcctaggctgcgtgttgc

SEQ ID NO: 369495 - DNA, 122 bp, Homo sapiens
tatccttctcgctctcaatattacactgtaaaatccaatgataatgctaaatcaacctaacgttcttcaataggaagtccagctcatcgctcaagtataagagagtaagtggtttaatgcct

SEQ ID NO: 369496 - DNA, 122 bp, Homo sapiens
ggagtccacaaacagcgaggcggtgccctcggcgatacccatgctagtggtgaagtcatccgttgtgtccccgttgaagttgccgcagagccctgagccggcggggcgtgagctcgacttga

SEQ ID NO: 369497 - DNA, 122 bp, Homo sapiens
agcactggacacagagattggaggccaagtgcctgccctgcccttacctggctgtggtctcggccaagtcctaggtggggtattgggtacttgtactgtgaaggtacagaagagtaccttta

SEQ ID NO: 369498 - DNA, 122 bp, Homo sapiens
gatgcgcttctggggcccgggtctgaaagtgggagcggtgccgctttggggaccagccagcggggcagccattgctgccatcgccgaggatgccgggttcctgtgcctcgggtggaggctct

SEQ ID NO: 369499 - DNA, 122 bp, Homo sapiens
gaggtcccctgcttggcatgagcagacaggctgtgcgtccctggaaccacttcttcaccgcggtgtggacgtgcctgccggccagcagctggcttcctgtgggacacctgactcagccactg

SEQ ID NO: 369500 - DNA, 122 bp, Homo sapiens
agacgcggctgcgagcgccacctcctcggctcgggcttcggctccggggcgcccgggctgcgggaaaatcaaatctgcccgaagccgcagcctcccgccgcccgggaacgccagagggggcg

SEQ ID NO: 369501 - DNA, 122 bp, Homo sapiens
aggtccatcccacggcaggtccatcccgcggcaggtccatcccacggcaggtcctccccacggcaggtcctccccacggcaggtcctccccgcggcaggtccatcctacggcaggtccatcc

SEQ ID NO: 369502 - DNA, 122 bp, Homo sapiens
ctgggagaaggcatttgagggtcctccaagtgctgggtcttggtctctccacttctagctcgtgtggaaggaagtcctggttgggaatcctctgctatggctcttcctgtgaccttaggtaa

SEQ ID NO: 369503 - DNA, 122 bp, Homo sapiens
tataggatgactggcgtttgttctaaaccagcaaccccatcccagaggtggcctagcttccgtggggctgatgtacattccttgggaactaaaaatgttcttgtcctctgggtagaagtcaa

SEQ ID NO: 369504 - DNA, 122 bp, Homo sapiens
aatcattatttctctaaaacaataattagtcacagccagcacgagggaaaggcaatctcccgacagacagaaaaaacctgaaactggttatcagcagcgtcccaataagatctcaggtgtta

SEQ ID NO: 369505 - DNA, 122 bp, Homo sapiens
gcagacgggcgggcatggggggagcgccgagcggccccggcggccgggccggcatcaccgcggcgtctctccgctagaggaggggacaagccagttctcctttgcagcaaaaaattacatgt

SEQ ID NO: 369506 - DNA, 122 bp, Homo sapiens
ttgaataagaagagtagtaggaaatgagatcaaagaggtaacgagatcgtgggcaaattgcgcagggacttgtagacttctgttaggactggagctttttctgagtgaaagcacgtgccact

SEQ ID NO: 369507 - DNA, 122 bp, Homo sapiens
gccacatcatggacttttcttccttctgaagtccagaattgaatgccctaatcaatgatgcgtactgcctcctgacatctctgtattgtactttacttctgtatgtaggcttatttagcttc

SEQ ID NO: 369508 - DNA, 122 bp, Homo sapiens
ggaggggtaaagagggggccgcagacgctgaaggcatcttccctgctcagggccagccaccgcattccgggtggatggagacagccccgagagccggctgaccgtgccgggcctcagcgaga

SEQ ID NO: 369509 - DNA, 122 bp, Homo sapiens
cacctcacatcatgcatgggaggccttagtatgagacttcacatctctgggactttccaccgcaggaggccaatccaaagccaagggtttccttctttcatgttatttcatgacataaaaga

SEQ ID NO: 369510 - DNA, 122 bp, Homo sapiens
aactagcacaagtttaaaaaaaaaaaaaaaaaagaggttattattataaaggtctggcagcgtctcatgagacttcaggaaaagttaaaggagcaggaaggagagaaagtgaggcagttgca

SEQ ID NO: 369511 - DNA, 122 bp, Homo sapiens
acgctctgctctccgacgtcccctcccgcccgcgacctgccgacctgcggggatcgttagcggtcccagcccccgtctagattcaaatccgactgggtgaaggaggacccgaggaggaccca

SEQ ID NO: 369512 - DNA, 122 bp, Homo sapiens
aataaataaataaataaataaaaacccataactcggccgggagcagtggctctcaaacagcgctttgggaggctgaggcaggaggatcacttgaggccaggagttcaagaccagcctggaca

SEQ ID NO: 369513 - DNA, 122 bp, Homo sapiens
tggggcgctgtgtgcccggacccacgtccttcccgagcccgcaaacaggagagccgccagcgctcgtgagcacagtgtacactttatttcagactacaggtttctgaacataataaaatctt

SEQ ID NO: 369514 - DNA, 122 bp, Homo sapiens
tagcttttcatctttgcagccatcttatttgtgacccaaaatgggaggcaggtttgcatgcgctggttcccagcttgacttttccctctggctgagtgagtttgggagtctcaatatttatt

SEQ ID NO: 369515 - DNA, 122 bp, Homo sapiens
tggtgtgcgtgcctgcccagcggcatccgtgtatcctaacacctgccctccgtgtccttgcgtctgcaggttatgccaaggacgccctgaatctggcacagatgcaggagcagacgctgcag

SEQ ID NO: 369516 - DNA, 122 bp, Homo sapiens
tcgccccatcaggctgctcttgctgcgacaatgcactttccacagctcccactgaagacacgtgcagtcacccactgcccctagtgctgggactgagtgtggccgagagggcggagagccct

SEQ ID NO: 369517 - DNA, 122 bp, Homo sapiens
gaaggagggggttttcatactatttcagggggtccaccgaccccaagaagcccaatcagacggggtcctcaacccaaaactcactctgacgccgcccgcggaggcccgaggtggtctgcgca

SEQ ID NO: 369518 - DNA, 122 bp, Homo sapiens
caaattcctgacctcaggtgatccacccacctctgcctcccaaagtgctgggattacaggcgtgacccaccgcgcctggccagaagaaatctttatcttggtgtgcagtgtctggtgaggga

SEQ ID NO: 369519 - DNA, 122 bp, Homo sapiens
ttttcttgttttcagactggaactgaaatgctggtttgtcctgcgtctctagcctgccagcgttcagactcaaaccacacttttggctctcttgggtctccagcttgctgactacagatttg

SEQ ID NO: 369520 - DNA, 122 bp, Homo sapiens
aggttcagatttcatttcgttttagatctcaatgatattagaaaagaaatagtttactggcgagaattctcagccatctgagagaggaggctggagggaaaagagagccgctgacctcctgg

SEQ ID NO: 369521 - DNA, 122 bp, Homo sapiens
gctctccggttctcctgggatcgcccgggcggccccagaatcgcaggcgcgcagccagcccggcctgaggaggagggcctgtctggccttgcagcccgccccgctcctcctcggaagagagg

SEQ ID NO: 369522 - DNA, 122 bp, Homo sapiens
ggaggctctcagaaacactgaatatctttggtagggcagaggtaccaggaatggggtcaccgtctaacacaggcaaaggtaagctccctggataagtccatgctgtcacctgtactcctaat

SEQ ID NO: 369523 - DNA, 122 bp, Homo sapiens
agccaagaggcagaggaacctcaattctgatgacattgcttgagtgcttcagtccagccacgcggagtattcagttacacaagccagtaaatttcctcccggtttaggctagttcaggatgg

SEQ ID NO: 369524 - DNA, 122 bp, Homo sapiens
aggggcgctgcgcctgctcccgctgctcccggcccggccaggagtagggagggcactgcccgagccgcggccccggccctaccaggcctggagccaccaaagccacgagagaggtgggcgcc

SEQ ID NO: 369525 - DNA, 122 bp, Homo sapiens
ttccaactcctgacctcgtcgtctgcctgcctcagtctcccaaagtgctgggattacaggcgtgagccatcgcacccggccagaatcttttctattgtggtaaaaaaaaaaaaaaaaaaacc

SEQ ID NO: 369526 - DNA, 122 bp, Homo sapiens
ccctcagatgccccctgtcagttcccccagctgctaaatatagctgtctgtggctggctgcgtatgcaaccgcacaccccattctatctgccctatctcggttacagtgtagtcctccccag

SEQ ID NO: 369527 - DNA, 122 bp, Homo sapiens
cagggggaatcatagattactgaatgtcttgcagggaaaatcatatagtaactgtcttgacgcttctactgttattctgatggctttgggatgtcagggaatgagttccatttggtggtgct

SEQ ID NO: 369528 - DNA, 122 bp, Homo sapiens
ggagataaaatttaaagacagagcagtcttcgtgctggagagagagttaggggttcaagccgggcatgctcagagactgcagctccaaaaagaggctctagatgagcagctgtcccaggtcc

SEQ ID NO: 369529 - DNA, 122 bp, Homo sapiens
gtgtttttgataagtgttgttaacaagtttttagacgagctataggtctcatcctttaatcgccagtttaaacagggattgtaatggaacaaaccaactgtaaaaattcctgtgagtgaagt

SEQ ID NO: 369530 - DNA, 122 bp, Homo sapiens
ggccgtaggtgagccgccgcggctcccgtactccgttcaaactggtcccgccgagccaatcggaaggttcaaccttcacacgtgccctggcacttgggaaacccgggctgagacaaggtccg

SEQ ID NO: 369531 - DNA, 122 bp, Homo sapiens
cgtgagccccggaaaagctcagtgcaggcagggccaggccggctgctctccgggaactggcgcggctgcagtgcggacctcgcggcgccaggctctaggctcagactccgggccgccccagc

SEQ ID NO: 369532 - DNA, 122 bp, Homo sapiens
gggcttctccgcagaggcggggcttctgtgctagccaatcagcagcctcaccgccctctccgggccccctcaccacagccctgtgacgtgccaatcaggctgcggttgccacagcaacagtt

SEQ ID NO: 369533 - DNA, 122 bp, Homo sapiens
gaccaggtgatgggagttaattcctcaacctgcatgcccagccctgcctcttctcctcctcgtttcttctaggccttggctgtctagcaagatggagaacaggggacaggcttagcctaggc

SEQ ID NO: 369534 - DNA, 122 bp, Homo sapiens
ctacaagagttccttcactagagggcatctctcctctctcctcccacacatgggaacacgcgggtgggctttcctccgcccactgtggtccacagcccggctttccactcctcaccctctgc

SEQ ID NO: 369535 - DNA, 122 bp, Homo sapiens
caacaacaaaaaagactcaaacagctatttgtacaccagcattcatagtagcattatgcacgatagctgaaaggtggaaacaactcacatgttcatcagtggataaatggataaacaaaatg

SEQ ID NO: 369536 - DNA, 122 bp, Homo sapiens
ccggggctccacgggcaagagatgggcgggcatgctgcggggtccctccagggcaggcagcgacagtctgggcccagcgacggcatcaccaggttggggagggcggggatccagaaagcagg

SEQ ID NO: 369537 - DNA, 122 bp, Homo sapiens
ttcatctccctatcgttttctgctttgtttgcatcctttctctttcaaactatgccacatcgtgacaccatctgaaaacaaaagtatcttcccccagatctcttgaaaaaagaaggaaaaga

SEQ ID NO: 369538 - DNA, 122 bp, Homo sapiens
gtggatgagagcagagggtgctgtgtgcacattgtcgggagagggaggcttccccccagccgcatgtcgaatcttgttggcatttccattcgtttaatcacgggctccgggagatgctgtgg

SEQ ID NO: 369539 - DNA, 122 bp, Homo sapiens
gtcttgtcaggagtgggcggggcagggtgatgtatgatctgaaaggccgggagtgactaacgactgtcagtgtgtatgtgcctgtgaggctgtgtctgtgtgacagtatcattgtgtgcgat

SEQ ID NO: 369540 - DNA, 122 bp, Homo sapiens
tgggaccaggcaagaggccaggagtggtgaggaaacattcccttcttgtgaaaatgcaagcgaggggaaaggaggtttcccccacaatgtgctagaatattcatgcagcctttgttgttgtt

SEQ ID NO: 369541 - DNA, 122 bp, Homo sapiens
ctggccggggaagcgggtgggcgggaacagggggcggggccggcagtgggcgggaggaggcgaggcctgggggccctggcgcctccaatacaggagcttcctgggcctggcagcccctccct

SEQ ID NO: 369542 - DNA, 122 bp, Homo sapiens
cgcccaccaccacgataagccaactggaggggcttgccgggtacacgccagtgatgatgccgttctaaagacagacacccgggccgtgagcggtgtcctcccacaacccacagggcaatgac

SEQ ID NO: 369543 - DNA, 122 bp, Homo sapiens
agagagaagggcttctgcaccaggtggtaggagatggcccgcagcaagggcacggaccgccggctctgagctgccagcatcaccagcaccttccgcagctcattggggccaaagtgctccac

SEQ ID NO: 369544 - DNA, 122 bp, Homo sapiens
aaacatttccgtgctactgtctgtcatcgtctctggggaaatcagccagaaccaccggaacgtaactgaaaccagacaagagaggcaggagcccaggcagtacctgcagcgtccgggcacca

SEQ ID NO: 369545 - DNA, 122 bp, Homo sapiens
gcaagttacccgtgttctgcgttgccggccgtgggtgctctggccacagtgagttaggggcgtcggagcgggtttctccaaccgcaatcggctccgctcaaggggaggaggagagtcccttc

SEQ ID NO: 369546 - DNA, 122 bp, Homo sapiens
cccttttccttgctaactggattcctaagatcataaatggactgcatctttggccgggcgcggtggctcactcccataatcccaacactttgggagtcggaggcgggagcatcggttgagcc

SEQ ID NO: 369547 - DNA, 122 bp, Homo sapiens
gaggcaccacccatccagcaagtcaggcaaggagaggaggtgttggaagaggtccgcatccgttttctgacttcaggtcttggaatctatgtagtcagttctattgctggactcatccaaag

SEQ ID NO: 369548 - DNA, 122 bp, Homo sapiens
aaagatctaatctaattcattttattgaactactttgactcagttggtttgtgtccagaacgatagcctgtaataggctgaaagttatcatttgtttagtttggaatcagtagcttaaacat

SEQ ID NO: 369549 - DNA, 122 bp, Homo sapiens
gataagataaatcaaagagtcatcactaaaatattattttattctaaggacagtctgcgtcgtatgttttgacctaaaagatatgactcacagggagcccaggattccttttcctttcttcc

SEQ ID NO: 369550 - DNA, 122 bp, Homo sapiens
aactgccgcacagaatcgttagatcacttggccaaggtcacacaggtagtaagttactgacgtggaatttaaaattgatttagccagtccacactgttctagacctgtgcaagttgatcccc

SEQ ID NO: 369551 - DNA, 122 bp, Homo sapiens
gcgccgggacctggcccacttggctgccgaggtggagggcaagtgcttacagtcaggcttcgagatgcttaaggttcgacctttgcccctgcatagcccctcaggctgagtgcagcgtagct

SEQ ID NO: 369552 - DNA, 122 bp, Homo sapiens
gtgggagctttccgttagcaacgcaggaatgaggctgggggtcgggagctgagtttcctccggcctcagttgctggtcggaagcctgcattccttctacgctgaggctgacgcttttgggag

SEQ ID NO: 369553 - DNA, 122 bp, Homo sapiens
aagaaagatgagtctaggttgaccgccagattcctgctttgggagactgggtaacttttgcgtcgttgtgtcatggaggtgggggaagagaatggatgatgttgtgaagatgacaagtacaa

SEQ ID NO: 369554 - DNA, 122 bp, Homo sapiens
acactgctccggagtccctccgcaggagttgaggcagcgagttccgagggcggggtggggcggaatccggaggcacgcggacccggtggaacgcactgcgcagacggcgccggcgcctgcac

SEQ ID NO: 369555 - DNA, 122 bp, Homo sapiens
tcctcaaatggaagagaaagtatccataagccaggtcagcaacctcagtgaagagcccaacgaatttagagcccgcctaagatctctttattccataaaagagtgtgggattgttgtggagg

SEQ ID NO: 369556 - DNA, 122 bp, Homo sapiens
caaaggctgcaggccaagaggtccagacgcctcggagtgggaggggccgtggcctgccaacgttgtctgtcctcaagggaggggcgctgggaagttcctgggcctgtttcccctttggggtc

SEQ ID NO: 369557 - DNA, 122 bp, Homo sapiens
aactaaatgaataaatataataaagtacttacagtggttcctgacacagactcagcactccgtcagtgttgccatgactatttttattatcattattaatgattacttagatcaattattta

SEQ ID NO: 369558 - DNA, 122 bp, Homo sapiens
caggggtcctggtgggcttgccgggcagagggcgtgcgggtctcagcaagctgccgggtccgcccaggccccgccccatgcccattcaggccccgcccccgacccgcaggccccgcccccga

SEQ ID NO: 369559 - DNA, 122 bp, Homo sapiens
tgacctctgaccctgggcctagtgggattgatcagcgcttggatctgtgacctttcaccccgggcccaaaatgtcccaatcaaaggatgtggttgacctggcctttctgcttcctcacaata

SEQ ID NO: 369560 - DNA, 122 bp, Homo sapiens
gaaaggaagaagaggaacacgttgctgtgtgctcgtggcacgtggcctgttgggtcctttcgcagtcctttgaagcagttgcttttactgtcccctgttttatagaagaggaaacagccaag

SEQ ID NO: 369561 - DNA, 122 bp, Homo sapiens
cagagacctcctttggattggtggatggtcaagccccttctctttagcccctcctacaggcgttccgcccccttcgattggtctcgcaagttgattggtcaatcccctggtgctagtcctag

SEQ ID NO: 369562 - DNA, 122 bp, Homo sapiens
gagacacgcgaggcgggtggcggaggagccccccgccaggtttagggcaaccccagggggcgggcgtggccgggctggggacagagggtccgagccaaacccatggaggccacggtgccccc

SEQ ID NO: 369563 - DNA, 122 bp, Homo sapiens
tactcaggaggctgaggcaggagaatcacttgaacctgggaggtggaggttgcagtgagccgaggctgggccactgcacgccagcctaggcaacagagagagactccatctcaaaaaaaaaa

SEQ ID NO: 369564 - DNA, 122 bp, Homo sapiens
acagcagcatgaacagactaagacccaagaactcgccaaggaccgtaaggggcccggagtcgtgagacacaaattcaggcctggaacagcccagagaaacaggcggacatcaggcagcccca

SEQ ID NO: 369565 - DNA, 122 bp, Homo sapiens
ggccctcggagggaggtgagacccggcagcccctgcctcccagcctgtgcccccagcctgcgtgctgcccagagcccccatagagagaggtgaggagacagagccgggcagggtgggggctg

SEQ ID NO: 369566 - DNA, 122 bp, Homo sapiens
tgtcaccctccgcagtttggcaggacagccaataggcacacgagatcctccatcaaggggcgttcccatctggggatccccacgccggcagcaccaaggcctctgggtcagcttctttaagg

SEQ ID NO: 369567 - DNA, 122 bp, Homo sapiens
tgtgttgcatgaacaagaagtagagtatctccaaagagttgtctaaggtgacaataaacacggccaatgaaaagaaaccactttttgttgaacatctatgtaccaaaccaagtcagtaaggt

SEQ ID NO: 369568 - DNA, 122 bp, Homo sapiens
attccaggaggcactgccctgatgagccacattcccagcgccagactacagggctgggagcgcgggcgcctttccccaccaaggcccggtccccagacagaacgcgcgcgggttcctcgccc

SEQ ID NO: 369569 - DNA, 122 bp, Homo sapiens
caatggtagggacctggcttgattcctatttaagtagccagagtccagcacaagggatggcgctcagtagaccctgcgtgaaggaatgattaaattggtgcaaaagactagggtaagcggca

SEQ ID NO: 369570 - DNA, 122 bp, Homo sapiens
ctgttctgaggtttcccctccaggtgcagcttcagagccaggcgagccaggaaggaccagcgggcgaggtggtgagttgtgaggcgcgcccagtccctctgttcccgcctggcacttgctct

SEQ ID NO: 369571 - DNA, 122 bp, Homo sapiens
ggcgggacctgtgtggtgggagcgctcttggtagaggatgcgatgagccccagctgagagcgaccagcctcggcggcacctttcctctttctggcttttttcaggtcatccgcgcacccctg

SEQ ID NO: 369572 - DNA, 122 bp, Homo sapiens
gacggtcccgtgttgtggctgcaggacgtccagtggaacgacctggactacatggactcccggagggacttcacgttcaacaaggatggcttccgggacttcccggccatggtgcaggagct

SEQ ID NO: 369573 - DNA, 122 bp, Homo sapiens
aagctgcacccaccaggtcatttcctttcaccttctcagggattcccagcgacgcagaagcgcttgtgtgtgccaaagccgagggcagatgattcacatgtggctgacccttgccacgttaa

SEQ ID NO: 369574 - DNA, 122 bp, Homo sapiens
ttgcctgcttggttggtcatcgctgctgctcaaaccctgtggggagggggagcacacagacggacaggtgcaggagcccaagtgggcattgtgttgcagtgtgcccttgtagccctaccctc

SEQ ID NO: 369575 - DNA, 122 bp, Homo sapiens
tccttatggcatggggggcgggggcctcacaccaggcagccttgagggacaaaacaggcacgtggatgggtgtggggcctcaaagtccaggcacaagcacacataaatgcctcctctttcca

SEQ ID NO: 369576 - DNA, 122 bp, Homo sapiens
gaaagccggcttcgaggcattcctctgaagggaagggactccccgacccagcgcctcccccgtcacgtgaccctgtgacccggagcagccatcttaggcatcgcctcatagaggaactacat

SEQ ID NO: 369577 - DNA, 122 bp, Homo sapiens
tctccccttcctcagcgccacaaggaacagcagggacggatgggaagaaggggagggggccgaaagcaagctgggtgcgaggagccagccgaccctgccacactcaagatggcggcgcggcc

SEQ ID NO: 369578 - DNA, 122 bp, Homo sapiens
aggtctggctcatgaagccggcggttatcagcacgagactgggctagagaaaaactttcccgttcatctggggaggggtagaaattaggatgacacttcagtcactccaggttaacttgtag

SEQ ID NO: 369579 - DNA, 122 bp, Homo sapiens
agacgggcgagtgggcttctcgggttctactctgtgaaggccaaggcaagggcgtcgtcgcgcgctgcctggcggagcccagccccttccccacactgtcgctgacacgcccgcctgtcaaa

SEQ ID NO: 369580 - DNA, 122 bp, Homo sapiens
actgagcagtgggtgtgaaaggaccagggctaatatttgaaaccacgggagcaggaattgcgaggctgactcaagtcataaggcacctgacggttaacagggtggggtccttaaatccggaa

SEQ ID NO: 369581 - DNA, 122 bp, Homo sapiens
tgctctcagaaagacaggaagctatgatgacgggctgcaggtgcaggggcccgcagtgtccgtcagaagaggctcgggaaagtaagcgagaatggtgttcacgttgtgactttgtttggaat

SEQ ID NO: 369582 - DNA, 122 bp, Homo sapiens
ctgggcatattgattaacctatcttagcctcagtttcttcatctgcaaaatggggctgaacgatgctgccttacttctgagaggattcatgcaaaatatttacttctgcgctctgctggagg

SEQ ID NO: 369583 - DNA, 122 bp, Homo sapiens
gccacagccggtaaagatggcggtggcacactgacgtcacttccgctccgagcctccggccgggtggggctccagggcttgagtttcaggcacgtaggacaaagaaattctagtttcctcct

SEQ ID NO: 369584 - DNA, 122 bp, Homo sapiens
ggcggcccgttgctggcccaggtgcccctaggccggatagagtgcgtcccaaccgattcgcggccccaccccggcatctgtgccggccggccagggggtcacccagatttttatgttttaaa

SEQ ID NO: 369585 - DNA, 122 bp, Homo sapiens
tgcagaggggcagtggggccggggacaggaccggtctactagtcgggcacctgccggggccgagcctagccaggacacgcttgcgggggcgcggccgggggcgccatccagcccaagaggag

SEQ ID NO: 369586 - DNA, 122 bp, Homo sapiens
tgaaggtgctgagcagcagaggctgcgcgtcagatgtgagtgcgtacatgcgagtggctccgccttggtgtagggtcacggtcaggaatgccaccttagacacgtcatctgaaacgaaccac

SEQ ID NO: 369587 - DNA, 122 bp, Homo sapiens
ggcggccttgcaggtcacttccggcgactttcgcggggccgggcaggaagcggagttagtcgccatctttgagtggggcagacgtgggccgcttttgctcgcggtcacttcatcttaagttg

SEQ ID NO: 369588 - DNA, 122 bp, Homo sapiens
ccccggcgggcttcaggcacgaaggccccgtccgctagaacgtgatcgcttgcctcctcccgtttccacagattttccagtcgaagacacgggagctggctgtggtttgtggtggtgcccgt

SEQ ID NO: 369589 - DNA, 122 bp, Homo sapiens
tcgcgtggtttggtgatggccggctagtatgaaggttttccgtggcgttgagatcccacccgcccttttttttttttttttttttttttttttttttttttgctgccccagtggattaggat

SEQ ID NO: 369590 - DNA, 122 bp, Homo sapiens
gctcgagggagacgaggagagcggggccgggggtttgggagagagacaaggagagcggggcggaggcttgggggagaccaggagtaaatcacaaaaatttactttggaaaccgtggcttctg

SEQ ID NO: 369591 - DNA, 122 bp, Homo sapiens
acagcatggtggctggggcaggccgagagaatggcatggagacgccgatgcacgagaacccggagtgggagaaggcccgtcaggccctggccagcatcagcaagtcaggagctgccggcggc

SEQ ID NO: 369592 - DNA, 122 bp, Homo sapiens
gtagacacgcccggaagcccttgtcatgtaaatagctgtcggggactggtgtattgtcgccgccccagccggcgggacctggggcgaatccacacccattgtctgctgcccaaggggcctcc

SEQ ID NO: 369593 - DNA, 122 bp, Homo sapiens
cagcagaaacaactggtttaagtgcatctttgtgggtgccttaatctcctgcaatgatcccgcctcagcctcccaagcagctagaactacaaatgcatgccactacgcctggcttttttttt

SEQ ID NO: 369594 - DNA, 122 bp, Homo sapiens
tcagtcccgcagcgcgctggcgctgccggggggttagtttgagcaagtctggagaatgtgcgcgcacatatggagggggagctccccggccctcgctgcagccccaggctcgcgtcgccggg

SEQ ID NO: 369595 - DNA, 122 bp, Homo sapiens
aatagtatctgctcaacctaatggcttagatgggaaactgctttattcaggaaaggactccggaaaggtaagctgctttattaaagtgtggtggcatgttcttccaagttgagaagttctgc

SEQ ID NO: 369596 - DNA, 122 bp, Homo sapiens
caagagccctttgattgttggagaggcccgataatgctgtcaagagctcggtggactgagcggcggccgagacgcaccagatctgcactaagtgtagctgacagcaaacgatttagagtcag

SEQ ID NO: 369597 - DNA, 122 bp, Homo sapiens
agggtaataatctgcagctcaaaaaaaccgcgggtggagaagacgaccccggcccccgaacgcctgcttctaagacaaagctcagcaccgccaacctcgacaaacatacaaagaagaaatac

SEQ ID NO: 369598 - DNA, 122 bp, Homo sapiens
aggaagggacagataataagtggcctgtaggttaaaaaaaggtgacataggaagttagatcgtttggtagaaacatgaacaaaaaattatttcaccaagaagaaatgatagagaaacactga

SEQ ID NO: 369599 - DNA, 122 bp, Homo sapiens
ggaagatgtaaggaggaagagtacagctgataatgaaaccagctgcctgggtgtcaaaaacgataacagttgggagaaatgtggccaggctgtcaaggagtacttatcttttaaacaaaaat

SEQ ID NO: 369600 - DNA, 122 bp, Homo sapiens
gtctcatgcaaccctaacccaaagttgtttcagggagaacattaagccgcctcccaagctcgccctctgctggtgaacaagggtcatttttttcctaaaccctcacccagcctttcttgctg

SEQ ID NO: 369601 - DNA, 122 bp, Homo sapiens
tgaagcacagtgccagggagtactggggcctgtgcacccagagcacagcctgaaagagcacgcacagcttcagcaaagtgttgctgctgggaaggaaggtgtggtgttgcctgattttccta

SEQ ID NO: 369602 - DNA, 122 bp, Homo sapiens
gcctccccaccgctgtcactcaccggggcctggcccgcccgaccacctcccgccctgccacgcaaggggtcccgccagtgtagacccgggctgcatcctgagtcctgttccaactctatgct

SEQ ID NO: 369603 - DNA, 122 bp, Homo sapiens
tttaccagaatttttttaaagtttttttaggccagatgggatggctcacgcccataatcccggcattttcggaggccaagatgggaacccaggaatttgagaccagcctggggaaaatagca

SEQ ID NO: 369604 - DNA, 122 bp, Homo sapiens
gatgtaggattgacaagggcaatagagcgatgactccctggctgtgttgtatttgatggacggcagtagcttttcacaaaatgctcatttggatgtttcaaattaaaacgtttcactttcta

SEQ ID NO: 369605 - DNA, 122 bp, Homo sapiens
cacaaacacattttttttctccataatgatatagcattgtacatattattcttcaacttgcgttttcatttaacggaatatcagcctgattcactattgatctgcagcgggaacatattcag

SEQ ID NO: 369606 - DNA, 122 bp, Homo sapiens
ggacctgctgggtctctggtgccgtctcagaccctggagataaagcagtgacagagacagcgaggcccctggctgcacacaggtgaccttcagtgtgaggcctggtcaggaaataagcaagg

SEQ ID NO: 369607 - DNA, 122 bp, Homo sapiens
attcgttttggctatttcttttggagatgtctgtgcattgggtggggggaaagggggcgacgaggagaacaattctcgcagccctaggtatttgtacttgtgagcgtcacctgaggtcgcaa

SEQ ID NO: 369608 - DNA, 122 bp, Homo sapiens
ctccagagtcccagatgttgtgggaaggggaggaagaggccctggccgggatgcaggattcgcactcagccctcagggtgaggagaggcgcctccctgcacacttggccaaggcctccttct

SEQ ID NO: 369609 - DNA, 122 bp, Homo sapiens
cccacagcgccttccactgcgatattgctccaaatccgaggaaattcaaactcccgggcgcgcgcaggccgacgggacccgaggaggaggggcaggacgaaggggtcgcgcgcgccacgtcg

SEQ ID NO: 369610 - DNA, 122 bp, Homo sapiens
cttcccgcatgccgtgggagacctccccttcataacatccgccggctttgtactccatgacgccgtagccttgaggctctcccagaacaaactgtccagagaaggtgtctcctgcatgtgga

SEQ ID NO: 369611 - DNA, 122 bp, Homo sapiens
caggcggggagacaggagatgcaccgcgggtgccggggttcggggagcacccgaggaccgcggcgaaaggagaggggtttccgagcccaccttgctcgccagctctctgctccggtcgatcc

SEQ ID NO: 369612 - DNA, 122 bp, Homo sapiens
tttaaagctaccctgttgctttggctttctctgtctgccagggtctccgactgtcccagacgggctggtgtgggcttgggatcctcctggtgacctctcccgctaaggtccctcagccactc

SEQ ID NO: 369613 - DNA, 122 bp, Homo sapiens
ttctcccgctccagctgctcccgcagctcctcggcctggcgcaggcagcgctgcgaggcccgctcatccgactgcagcagctccgcctcgtgcaggctcttgagcctccgcacttcctgctt

SEQ ID NO: 369614 - DNA, 122 bp, Homo sapiens
gaaatgggtttagaagccacttacagtggttatttcctcaggatgtttacgtcagcttcccggagcctggtgtgtgtttttcttaaaaaggaatgttcgatgggaggaggcaggtgggagga

SEQ ID NO: 369615 - DNA, 122 bp, Homo sapiens
gcggtggagggggcaggctgcccgctctgggctggggagggccggccaccagctggtggtcgctccgcaggcagaagcagttcttgcaggacccgggtttccagatgtgctccacaaagtca

SEQ ID NO: 369616 - DNA, 122 bp, Homo sapiens
aatgaacccttttgagccccaaatgcagcctggctcagagtgggcatcaggaagtagtggcgacacacaccactgtctggccccacccgtgggtggtgagatagaaggaaaccaggttaaac

SEQ ID NO: 369617 - DNA, 122 bp, Homo sapiens
gggaggcagggacattttacagaggaggaaacagaggctgagggatgacttgcccacgaccgccaagccagcttaggctcccgggtcttggtgcgctcgccccatccaggggaccccaaaac

SEQ ID NO: 369618 - DNA, 122 bp, Homo sapiens
tatttagctagcaactattatttcctttatgtttctaccttgttaactaagcttccactacggttcataaatctccaatatcgtgaattaaagaaacaacaacaaaaatcctcttctgtgtg

SEQ ID NO: 369619 - DNA, 122 bp, Homo sapiens
gggtgcagacccggggcgcccgcctgggtttggggcgcaagagcagaggcggagccagggcggagccagcgcgccgggtcccccctgaatcgaaagcgaaacaggggccggggaggaagggc

SEQ ID NO: 369620 - DNA, 122 bp, Homo sapiens
gcctgtttattaagcttccataatgagagcttccaatccaggtgatttgtgttcctgtctcgtccatattggccccaaactccaagatcaaatacgcttctctgacttcaaagctgaaggtt

SEQ ID NO: 369621 - DNA, 122 bp, Homo sapiens
gttgtcttaactcttggtatttttgaagcaggataagtcacacagcgggtcacgtagacacgtgctgttttgtgggacaggccctgggcctccttgctcctggcaggcctcaggtgccgcac

SEQ ID NO: 369622 - DNA, 122 bp, Homo sapiens
aatgccacccttcccccagcgcacacagactctgggcacggccgggggttcgcaccgccgcgcactccccaggctagctccacgcgtggtcactctccagggagacccgcccgccggcgccc

SEQ ID NO: 369623 - DNA, 122 bp, Homo sapiens
ccgacgtcccgcccagcccagccggcagcagcagggggcaggatttcccgctgatcccggcggtccgtcctctgcagtttaaaaagagcccagcggggcttaaccctcccgcgtccggccgg

SEQ ID NO: 369624 - DNA, 122 bp, Homo sapiens
tggcgccggagggtcccccttaggaggtggcgttagcaccgaggcctgaaggctaaagagcggggtgtggagaaccgagcgcctgccgtccgctggaccggacaggcctgcacagtgttcct

SEQ ID NO: 369625 - DNA, 122 bp, Homo sapiens
gtctcacccaacgctttgtgaggactctggcctgaggcagcgcctttatacgacagttggcggaccgaactgagaacctgaaagaagtcggcgggaagtcccgccccggtgggggaggggaa

SEQ ID NO: 369626 - DNA, 122 bp, Homo sapiens
accgcctttttcaggggttgattgtcgggtcacctgaaacacacacaaacacacacaagtcgatggttaagcacattggatattcacacacccacaggaagccccccgctaattccttgccg

SEQ ID NO: 369627 - DNA, 122 bp, Homo sapiens
agccctatttttctatttctcatctcccaataagattgcaacctcaactagggctacctacgtaggcctaatcagaaaacctgagtttagtcttacttctttgtttccttctctccatagcc

SEQ ID NO: 369628 - DNA, 122 bp, Homo sapiens
gactcctggactgttagcctcggtatttagagagacatccccctggcttggcccaggggccgctcgcaggggctgtcgccgtgccaagggcccccccacctctgccccaaagtccctcccag

SEQ ID NO: 369629 - DNA, 122 bp, Homo sapiens
tgttcccgacaggacagatggcagcacagccagacccgctcagtgtcccaagagcagccccggcaaagcaaggcgggagccgcccctcaccagcccagctgtgctcacacaccccctctgca

SEQ ID NO: 369630 - DNA, 122 bp, Homo sapiens
cgaaggagtagctgtcagcacaggtgccatcgaggttcaggaggcggcaggagtactgcacggcatacgtgtcgtagtctgtgtcgacgatccagtggtcatcatctgcaagccagaaagcc

SEQ ID NO: 369631 - DNA, 122 bp, Homo sapiens
ttgcttcgaataagctccgtgggagccaggactttgtcttgctaacaggtgcatcttcagcgcactcagaacaatatctggcacagcacgagacacctagaaatgttcgccgaacgatcgaa

SEQ ID NO: 369632 - DNA, 122 bp, Homo sapiens
cccgcttgctgcagtcacctttgaggccccgctgggtcccggctcccaccccagggagaacgggagcagcctcaaatgctgacggcgaagacccagggcccccagaagtgcgagggcctcct

SEQ ID NO: 369633 - DNA, 122 bp, Homo sapiens
ggggtggaggtccttctggagctcaagggaggtccagtcatccagacttggctttctcatcgatcccttttcccagagcctggttactgccggcacctttggatcctcggccaattctctgc

SEQ ID NO: 369634 - DNA, 122 bp, Homo sapiens
ttggaaatagaggctgcctgcacatcaaaacgtttgcagagcaaacgaaaactttgtacccgggtgatacgccggcgtctgctgcccaggccaccagttctggggcgccttccgcccagggg

SEQ ID NO: 369635 - DNA, 122 bp, Homo sapiens
ctttaatttttttacaactttcaagatactattatagctgtactgacaaggaaaaattgccgttgatgatccatagctgatgaagtgtatgtagctactcttccgtgtggtcttcgctatag

SEQ ID NO: 369636 - DNA, 122 bp, Homo sapiens
ccaaaaggctgagccatctggttgacattctccatctgcctctgcagggagcccccagcccggagcccttccagcagcctgcagcccaggcaccccgcaccccgacctgtggtctggaagct

SEQ ID NO: 369637 - DNA, 122 bp, Homo sapiens
gtcggcatggtgtgtcgaactcactgcgcctgcgcagcgagctgacccgggcttccctagcgaagcgcgtaggacccgcctcttcttgtgcgtgttgtcttgaatatcgccattctgctggc

SEQ ID NO: 369638 - DNA, 122 bp, Homo sapiens
atttttctctctgaggatgggcggctgcaggctggtaggggaggagagacaggcaagcggcgggctggattagggcgtgacgccccccaccacgcacacaaacatacacagcccactggatg

SEQ ID NO: 369639 - DNA, 122 bp, Homo sapiens
gaagaggtgccgaaagacgctggcttccggaacacgtgtgtgtgtgtctatggttccatacgcacgctggcacgcgtgtatttgcatgtgtgtgatgcatgtctatggactatggacgcagg

SEQ ID NO: 369640 - DNA, 122 bp, Homo sapiens
ttcaacatcaaacaacacttacagaaaatattattttcttcgaatcaggtttacaaattccgttagttccattataatataattgagagtattttatcatggaagtcaggagttcgcagaaa

SEQ ID NO: 369641 - DNA, 122 bp, Homo sapiens
agccacgtgcgatgctcggagctgcgtcctctgtcctggggcgtgggtccgcgagcgccgcgcagcctcccggaccgccctgagctgctgcgcccggcgctgctcctccttccccagctccg

SEQ ID NO: 369642 - DNA, 122 bp, Homo sapiens
gcaggcaaaatgacgaacccatcagaccgtgtcttgcctgccaactcgatggccgagagccgtgaaggggactttggctgcacagtaatggaactgaggaagctcatggagctgcgttcaag

SEQ ID NO: 369643 - DNA, 122 bp, Homo sapiens
aggtacccaaactgcaatttgcagaacctctctgcttaaagttctcccatcccagacccccgtctcatgatgcccgtgccactatctctagaggtaggcatcgtacttgctctattcaggac

SEQ ID NO: 369644 - DNA, 122 bp, Homo sapiens
gaatacctcctcggccctacgcggcctctgctcttctctcttggagccaggcagccagcacggaggcagcctcgataactcgctaacgtgctgcccatgctgttcttaaaaatttatgactg

SEQ ID NO: 369645 - DNA, 122 bp, Homo sapiens
aaagatccgatgctggaggccaggatgtaccaggcctcctggttgagcttgcactgggggcgcccgcgcggctgggggccctggtcgcccttgtagatgaggggcggcagcgagatgacggc

SEQ ID NO: 369646 - DNA, 122 bp, Homo sapiens
aggaagtgagatattcaacccttggagatgacaggagtccccttttctgtatttagactacgtctccgcagttcatgaaaatacatggcttgttcttttcccctttaaactattctctctct

SEQ ID NO: 369647 - DNA, 122 bp, Homo sapiens
cgagtgcccgtcaagagttacttccggtttccacggagctccgccccttaggggggttctcgctcggccgcggctgggcattaactccgctccagtgctgcttgtcagactccgcctccctc

SEQ ID NO: 369648 - DNA, 122 bp, Homo sapiens
gcaggagtggaaaggatcctggcgagcaccgggaggagtggcggctgcgggatcagctgccgagcaggcacagggacaggtgcctggagaagtactgggagagcgcccaggagcgctaccgg

SEQ ID NO: 369649 - DNA, 122 bp, Homo sapiens
tatagttaactttttacccaagagtttttctatagcatttctcatctctgaatttctcaacgtatatattaaaggactcagcatgtgtgtgataatggtataaaacacagtcatgaacttat

SEQ ID NO: 369650 - DNA, 122 bp, Homo sapiens
cttaatctcgtggctcaggtcagcagcagcccgcagaactgtggccacagctggagctcccgccttgctgaccacttcccctgtcacaggagttggagctctggcaacggcaacggtgagac

SEQ ID NO: 369651 - DNA, 122 bp, Homo sapiens
cagcccactgatgacgcccgtcacacccagaatcttgatgacgggcgccacgatgcggatcgcgatcctgaatcctcctctgatggaagcttttcaggatcaccccgccactgtcccacgca

SEQ ID NO: 369652 - DNA, 122 bp, Homo sapiens
gggccttgctcctcgctcggattggctgacagggaatcagtatcaatgtttaagcggcggcgtgaggtgaatagagtcagtcagcaagagacgctggggagagagcagggatcgcgagcccg

SEQ ID NO: 369653 - DNA, 122 bp, Homo sapiens
ccagaggtggtagcagatgagacaccagcagtccaggctgttcttcgagctgacaccaagcgattgaagctgctggaagaggagcggcggcttcagggacagctggaacaaggggatgacac

SEQ ID NO: 369654 - DNA, 122 bp, Homo sapiens
tggtccctgctgctcctggccagaggtgagaaaggaggtacacagtgcaggggtcttgagcgccatctccagagttctctccatggctcagcaaggcctgagggaagcccatccagacacca

SEQ ID NO: 369655 - DNA, 122 bp, Homo sapiens
tagttcatcaccagcagaactgcacttcaagaaacactaaagaaagttttgggccagacacggtggctcacacctgtaatcccagcattttgggaggctgaggcaggtggatcacctgaggt

SEQ ID NO: 369656 - DNA, 122 bp, Homo sapiens
agaggatttgtgcaaacatttcctctgtggaccaagaggaatgcaagaggaggctgcctgcggtgcatcttggacggctagagagatgtacccctacttgtgaaggtgcacgaggaagatga

SEQ ID NO: 369657 - DNA, 122 bp, Homo sapiens
cctctgttctcatgctcaccaagtgactatctaattataatttgaacttccttttagaatcgtctcccagaagagaatcctctgagtagggtgatgaggctattctactcaacatagctctt

SEQ ID NO: 369658 - DNA, 122 bp, Homo sapiens
gggaggagggagcggtgcagtctgtggcagactttggcacagctgctcaggactgttatacgagtgtcagagggcacaaactggttagcacttggttcaggtatttttaattcagatatttg

SEQ ID NO: 369659 - DNA, 122 bp, Homo sapiens
gattgctactcggagcagcgggagtactattgggagtattattcacaccgatcccggccccgccgaggctgctgttcaggctactgttgatgcaaatactactgccattcgcggcagcagcg

SEQ ID NO: 369660 - DNA, 122 bp, Homo sapiens
agagagcatagagagaggctggagacaggagtgggacgcgctcccagaacgtcccgcgtgcgcccccctctaggcagccagcgggcggccgcttacaaagccgcctttgatgctctggctac

SEQ ID NO: 369661 - DNA, 122 bp, Homo sapiens
aggtgagggactcaagaatcgcgccctgcttctgtccccaccgcgccgtccccaagcccacgcagtgaaaagaccacccttgaggctgattccgggtccagctgggagcggccagccgtaaa

SEQ ID NO: 369662 - DNA, 122 bp, Homo sapiens
agggagggtaagtgtgtgtcccagaggaggcgaggaggaagaggggctcttgtgttctttcgctcggattcccctggggcagccctaattatttggcggatccttaggggtttcttgttgct

SEQ ID NO: 369663 - DNA, 122 bp, Homo sapiens
cggccgctccgagtgcggggctcgctgagctcacggccacccagaacttgggctggctagcgcggcgcgcagtcccggttcccgaccgcgcctctccctccacacttccctgcaagctgagg

SEQ ID NO: 369664 - DNA, 122 bp, Homo sapiens
catttggggttccataaggaaacagaggtttctcctccaaggggaatctggcaccttctccgttttctgtaaggaaccctgggtattacaaactatattaggtttcccatgaagcagagggt

SEQ ID NO: 369665 - DNA, 122 bp, Homo sapiens
agaactatgacagtccagcgagtaaaggccaagagtaaactccaggtttccccagagtaacgctctcacattttaaaagttcctcacgttcccaccgctcttgtccctctttctgagagata

SEQ ID NO: 369666 - DNA, 122 bp, Homo sapiens
caacatcctgagtcatttcctcagcaagacagaatccccggaggggtggcaggttcattccgacacttccttcttcccacattgttgtccagacctgggcacagaagcaccctggatggtca

SEQ ID NO: 369667 - DNA, 122 bp, Homo sapiens
cctcccctcccccgaaataaataacacacacacacacacacacacacacacacacacacacggagtgactggtgtagacaccccagggaggcattccggaaggtttctgaagagtgaagtgc

SEQ ID NO: 369668 - DNA, 122 bp, Homo sapiens
ggcggctgagagctgcggggcagcccctgtcacgtagcccttctaggttcctgtgtatggcggattccctccagtttctcccgctggcgggctgcatctaaagtcgtccgagtcaacagccg

SEQ ID NO: 369669 - DNA, 122 bp, Homo sapiens
aaagcccagccgagctctgatcgttgcagagcatgagaagaagcagaagctggagacggacgccatgttccggctggagcatggcgaggccgaccgcagcacactcaagaaggcgctgccca

SEQ ID NO: 369670 - DNA, 122 bp, Homo sapiens
gcgttttcccggagcctgtgggctgtgtgatgccggggcctcccgcagccccgctgcgcccgcacccacgcttcagggcgattccccgcaggcataacggtgccacttccttaaccaggcta

SEQ ID NO: 369671 - DNA, 122 bp, Homo sapiens
ggagcggagggagggagcagcaatttggtggctgcgattggagacaaggccgcctcccaccgcgcctcccgggagcccccggcgcgcaccccgcccgctcgtggccgcggccggtcccttta

SEQ ID NO: 369672 - DNA, 122 bp, Homo sapiens
tgttggtttaaattcacatcttttaatgtttaattggctttctttaattttagccttgatcgaaaaaaaaatccagaaccttgggaaactgtggaccctactgtacctcaaaaggtattgtt

SEQ ID NO: 369673 - DNA, 122 bp, Homo sapiens
tgccagctggaactgtggagacgcacatttggtcaggcagcgttccttcccctttccccacgggtgtcctgcttgtatctcaggagattacacaggccattgcctgtcttccagctggctaa

SEQ ID NO: 369674 - DNA, 122 bp, Homo sapiens
ctgcctgtcccccacggctggccagcaagcctcatggcctggttgaaggagcagaagcctcgctgtcagacagacctgcgttcctgtactggttcagctgtggagcccgggcagggagcctc

SEQ ID NO: 369675 - DNA, 122 bp, Homo sapiens
gctaggcttgttcaatcggtgttaagagtctggcaggtgggccctcatgtcgcgagggagcgggtgatccctttttcctcactcttaggcttccaacggaggtgcgtgtcctgcgtcgcggg

SEQ ID NO: 369676 - DNA, 122 bp, Homo sapiens
attgaggcttcaggggaggttgaagggattctcctgttcccagggccatcagaaaaaccccgtgccttccctctgcctcatcatacacaaatgctgatactttgtgggcctcataactgtct

SEQ ID NO: 369677 - DNA, 122 bp, Homo sapiens
tgctggggtaacctggacactaatccccccgggggcgagaggtgcacatggccagggaggcgcaggagtggctcagcagagcgccccagccctctcccctcagtggtctagcgccagaggtg

SEQ ID NO: 369678 - DNA, 122 bp, Homo sapiens
actatcatctttcaagtaggaggaaaagagaatgaagagagctgtgcctgttttactctccgaggacaactctgaaggttaacttgtaagaggtctcactggagtacaaactgaaatcttac

SEQ ID NO: 369679 - DNA, 122 bp, Homo sapiens
acgtccgagacagaaaaaagcttgccggtcgttccctcctcccaggcctgcaatgaaatgcgctttaattgcatcaaagggttcttctcaatggggtttcagaggcgcgagagcggcgttcc

SEQ ID NO: 369680 - DNA, 122 bp, Homo sapiens
agcaaaaggtgcccaggccaccagatgtggggcacacagacacctgcagggccagtgtgtcgagagcagaggcagaggcggagcttgcagggctggctggtgtctcttctcttttggcctta

SEQ ID NO: 369681 - DNA, 122 bp, Homo sapiens
ccagtcacaatggacagcgccggggcctccccaaggccgtgtgtatgaacggcacagaggcggcgcagctgagcaccaaatccagggcggagggccgggcccccaaccctgcccgcaaggcc

SEQ ID NO: 369682 - DNA, 122 bp, Homo sapiens
atgggagagcaaccataggcagccagattctggagggagctgtcatgagaaggaagagaacggcactgggtgggtccccacttttcagtggccattagtgagaaggcaggcgccagtgttac

SEQ ID NO: 369683 - DNA, 122 bp, Homo sapiens
agactccagaaaaaaaaaaaaaaaaggtgcggggggcggtgggaataaaacaaccctccacgcaaccaggccggctctgctcagccgcgcaaaccccgcccatgctctgacccaactagcca

SEQ ID NO: 369684 - DNA, 122 bp, Homo sapiens
gcatcactgtgaagaagaacgacatgtcggggctgcacctgtcctcccgtcggcatttgacgaaagctccctgaagcggggcagcactctcctcctgagagatttaccatttattgcccctg

SEQ ID NO: 369685 - DNA, 122 bp, Homo sapiens
ccttggtgactgctagtgagggtgacgggtgtggaaaaggatggggtcccagcagcagcacgaggcaggaggacctgcgacgggggccccatgattatgttgcagataacaggtttcagaag

SEQ ID NO: 369686 - DNA, 122 bp, Homo sapiens
gcagtcatcgataccagtcatcatgagcagcttcttgggcacacgtgccaagacgatgcccgtgctcctgggggtgcgacgaggcgcaccagcacagagccgcagtggcctgtcaccttgca

SEQ ID NO: 369687 - DNA, 122 bp, Homo sapiens
ctggctacacatttgaactacaattgcagagcttttaagcaaatattgatacccagattccgcctcagagaatctgattgaattggttgaaggtggagccaagcattgctcttttttaagtt

SEQ ID NO: 369688 - DNA, 122 bp, Homo sapiens
gacgcaggcacagagggctgactgtgttttgagtaatgcacgcgaggcagtccaatccggcgagatggcccgaagcggggcccagcggtcgggggtgtgggtctggagagagagggtctccc

SEQ ID NO: 369689 - DNA, 122 bp, Homo sapiens
ccgctgaggcgggggcaaaaagccgcggcggcaggggcgaaaaccagcaaaaagccgccgcggtgggggcaaaaagcagtgggagctggggtaaaaaaccacaaaaaaccgcggcagcggcg

SEQ ID NO: 369690 - DNA, 122 bp, Homo sapiens
atcttcgaaggagaggaaggacagcaaacgaattgctatagcgtccccatgcgcacttggcgcttctcctcaagcggagcaggaacggaactgggcggacccgccggaagactcggcgagtg

SEQ ID NO: 369691 - DNA, 122 bp, Homo sapiens
tagagttctgctgttccttgtcattttgcccgtgaggatggcctgttggccgcacggggacgacagtcaagagagaaccgtgaccttgtttgcattgcgttgctgatacacacgagtctttg

SEQ ID NO: 369692 - DNA, 122 bp, Homo sapiens
ggccggatccctgccccagatgaactttgtgtcacgaggcgctcgctgttggcagattagcgccgaatcaggcccgcggtggccgtcccgagggtggaaaagaccgggggcttttttagcgg

SEQ ID NO: 369693 - DNA, 122 bp, Homo sapiens
cacgcaggtctcctataaacgccggtacatcctcccaaagcgtgatgggaatctccaaatcgctaaatgtgtcctgttactccgtttctcttttcccacatcaacgtctggtagaaggaagg

SEQ ID NO: 369694 - DNA, 122 bp, Homo sapiens
gaggccgaaacagcgtccccaagggttgcccacgatggctttgttctcgccagatgtgcacgcccacagcacgtgcggtttccgaggtgaatcagcatttctggaaacctggcagggattga

SEQ ID NO: 369695 - DNA, 122 bp, Homo sapiens
ctaattggcttctccggaaaggagggctcggctcgtgacggaacaaagccggaaggaccccggagcttcagtccccgcttgcctgtctgccaacgccgccacctgcggtggccctcgcccct

SEQ ID NO: 369696 - DNA, 122 bp, Homo sapiens
aggggagggtgcgggaggctcggggcggggcggggagctgtccgcggtgctgaacaccaccggccgagcctgggaacaacagagcccgcagggttcttgttcctaccaggtttctcgacctc

SEQ ID NO: 369697 - DNA, 122 bp, Homo sapiens
ggtcggtgtttggggcggacacctgcggttgcggacgcccgatcgtgcggggagacgtcgcggggacagaggggctgcacagggaaccgctggctgaacccctgccatccggctagatccca

SEQ ID NO: 369698 - DNA, 122 bp, Homo sapiens
ggacaacggcctctcttttcgttcttgtcagcggagccttcttggtcttggggctgtcctcgcgtccccgggcatgaggctgggggttgggacttggtcgggacgcgtctcgcctggtttga

SEQ ID NO: 369699 - DNA, 122 bp, Homo sapiens
tcctaagaataagaatactcccaagtcctgacggctgcctggggcagtgagggctggagacgaagaggactcatctcttctttgtacttatacctgactcagtgttgccctcagtccaacta

SEQ ID NO: 369700 - DNA, 122 bp, Homo sapiens
ctggagtaaatgatgttcccagttaggctttacaatccatactttcccatgccccgccttcgtcagagatagcttagtttttggacaactgccaggcggattttgcctaggcagaatgggct

SEQ ID NO: 369701 - DNA, 122 bp, Homo sapiens
aagaggatcgaggagcagagcctgcacgacgtcctgttcgagctgagcaagacggtcctgcgccacagcgggagcctgaccagagacaacctgtccgggtaggcagcgcgtccccgccccca

SEQ ID NO: 369702 - DNA, 122 bp, Homo sapiens
cagcgtggcgccgctcacatcttttcagctgaggtcctgattggacagatccaatggccccgcctctttatcactgagtgacagcggagcaggaaggggcgtggttgagctggcctggcttc

SEQ ID NO: 369703 - DNA, 122 bp, Homo sapiens
ggtggtcgtgaaggctctaaacacctgcatggcaatgaggccaaccttctccgcttgatccgtttcaggctctggctccgctactgcatcgtgtgcttctgtccaagaggcagagagactga

SEQ ID NO: 369704 - DNA, 122 bp, Homo sapiens
cttcactcctgagccagcgagaccaggaacccaccagaaggaaaaaactctggaacacatcggaatatcagaaagaacaaactccagacacgccgcctttaacaactgtaacactcacagcg

SEQ ID NO: 369705 - DNA, 122 bp, Homo sapiens
gaaggccctcatcgaggaggtcttccccgagaccggagacgtcatgtgcaactccgtcaacgccggctggaaccaggaccccacgcacgtcatccgcttcccgctcaatggctactgccggc

SEQ ID NO: 369706 - DNA, 122 bp, Homo sapiens
ggtcctgggtggtgggcccaggtgcctctggcctcccaggtacatctagacacggtcagacggggttaattgaagaaactgtctgtctccaagcctcagctgaaggccaacattgctaactc

SEQ ID NO: 369707 - DNA, 122 bp, Homo sapiens
catggtctcttcctcataatatgcctaagagtgttgagtagaagcagagatggtgtcccccgttttacatatggaaaaactgaggcccaaagagactaagtaccttctctgaggttccattc

SEQ ID NO: 369708 - DNA, 122 bp, Homo sapiens
aaaatcccctcatcctggatcccgacagccggaaggaagagggagccgttgggaaggacacgagccacactgtcccaggggcctcctccctggggagacaggaccttccaagcttctgtccg

SEQ ID NO: 369709 - DNA, 122 bp, Homo sapiens
taagaagtgacagtgccattctaaaggactagccttgagttggctctaatttatatgactcgtgcctgtaatcccagcactttgggaggccgaggctggcagatcacttgaggtcaggagtt

SEQ ID NO: 369710 - DNA, 122 bp, Homo sapiens
ctcgttgggtccgcgcggcgcggagctgggcatccgggcggcgcgggctcttccgcgggccgctcctggctctctggcgccctctgctggcctctcccgcacaccgccgccacgccgggctc

SEQ ID NO: 369711 - DNA, 122 bp, Homo sapiens
tgctcactctttgggtcacactgcgtttatgagctgtaacgcccaccgtgaaacgctcatcgcgaaggtctgcagcttcactcgtgaagccatcgagaccacgaacccaccgggaggaatga

SEQ ID NO: 369712 - DNA, 122 bp, Homo sapiens
cttggagttactcactgcggacgttcccatgggtgtgcgtgatgcacgtggtaataaactcgtgtctgtttttctctcgttaatctgcctttgtcagtctctttcagagccccagccagaga

SEQ ID NO: 369713 - DNA, 122 bp, Homo sapiens
gcaaggtgacttcatttaatttgcactgtgctccttcatccctgtctgcatcaggttgaacgggaggctctccctactaccaaacgcctaacatttccttgatactgccttgaaaaatcatg

SEQ ID NO: 369714 - DNA, 122 bp, Homo sapiens
agacggggtttcacagtgttagccaggatggtctcgatttcctgacctcgtgatctgcctcggcctcggcctcccaaagtgctgggattacaggcgtgagcccctgcacctggcctaaaagt

SEQ ID NO: 369715 - DNA, 122 bp, Homo sapiens
caggccaggcctggccgtgttggggtgcgatttgtggggttcacaaaatggcatgtgagccgcgacgatgtgaacatttctgagtccctaaggactgaagatgctgaatcctttaatccttt

SEQ ID NO: 369716 - DNA, 122 bp, Homo sapiens
ttcccagcagagggtgctgctcccagcagagggtgctgctcgatcccacgtagttgtctacggcagagggcagacaacgaaggtgtggctgggagctgggttgggacttcccctaggcctgt

SEQ ID NO: 369717 - DNA, 122 bp, Homo sapiens
gagaggcctggcactgagcctagtgtcgggagcaaggcggcagagtcatgcggcagccagcgcgggcagggacgcacgcgggaatcgagctggggtggcgccaccggagcaggaaggggaca

SEQ ID NO: 369718 - DNA, 122 bp, Homo sapiens
gttcagagaccagcctaggcaactccgtctctaccaaaaataatttctttaaaaattagccgtggctggctgtgcgcacctgtagtcccagctatttggggggctgcagtgggacatcgctt

SEQ ID NO: 369719 - DNA, 122 bp, Homo sapiens
ctccagaaagaattcaattaaaccattggattattttttgcatagagctgttaccctctgcgtacatcaattatatacagggcttttcctctgcgtgctgccatttcataatctctgcctga

SEQ ID NO: 369720 - DNA, 122 bp, Homo sapiens
gtgagaatgaatgagctgcgggggcccttggaggcaaggggtgtctgaaatacaaagcagcggctgcgctcctggcaccgatgtattgtctctgctccccatgatgaagttcttggcaggtc

SEQ ID NO: 369721 - DNA, 122 bp, Homo sapiens
gctggtaggggcgcccccaccccaccccttgctcccccgacgccccctcgggggcctgcgcgtgcacacaggcaccgaggtgcgactcgctgagtctcaggctcaagctttaatctctgcga

SEQ ID NO: 369722 - DNA, 122 bp, Homo sapiens
cttcccgccctgggcctctgccgaagccagaggcaggggctctccaccggcagcagcgagcgcctcgcctgctgtgacaactctgtctggctctggggctgctcgggaacccggtcctaaac

SEQ ID NO: 369723 - DNA, 122 bp, Homo sapiens
tccccggggcgctctgcccgggggactccggacactgacagccgcgtggtacaaaataaacgtgtatttgttgttcttatcagtcccgtttcagtacaacactggcagagatgattctagat

SEQ ID NO: 369724 - DNA, 122 bp, Homo sapiens
gcgccccgcccgcgcctccctcctcccagcgctgccgggaactggcagcctttcggctcccgcagccgcagcggacgccctcccagatccaactttgccgcttccccgagctcgcgctgtag

SEQ ID NO: 369725 - DNA, 122 bp, Homo sapiens
cgcaaccgttttccattaatgttaccatcttgtgactcgggtgacctgtgcgacttgggtcgtgaattctcaggtcggccttcccaatgcttgagaaggttgggggtggttaataagccccg

SEQ ID NO: 369726 - DNA, 122 bp, Homo sapiens
aaggggtgacagacggcacctggaaaatcgggtcactcccatccgaatactgcgcttttccgactggcttaaaaaacggcgcaccaccacgagattatatctcgcacctggctcggagggtc

SEQ ID NO: 369727 - DNA, 122 bp, Homo sapiens
ccttccctgtctggggccccggctggctcgaagagcctggctcctaggaggcccaaatctcgacgcctcgcacgtcccgccccgccccgggcccgctcgcgtcccctcgggcgacaaaaccc

SEQ ID NO: 369728 - DNA, 122 bp, Homo sapiens
ctcccgccgcccgagctgctgagacccacagcggggtcggtgggagaaccgaatggaacccgaaactttcttattttgagacaggatctggctctgtcacccaggctggagtgcttggctca

SEQ ID NO: 369729 - DNA, 122 bp, Homo sapiens
gctggggtctggcccacaggcgggagcccatctgcctctagcctttcccttggggacaatcggcccacaccactgaggtccccaggtggccaggtttgctcctgcagtcttttctaggaact

SEQ ID NO: 369730 - DNA, 122 bp, Homo sapiens
tccctcctttcccacctatgactttaccttggcttgggcatttccacctgccctgtccatcgcttcctcttgggttttctgctctccacgagaaccatcaagcaaaacaagaacaaaatgag

SEQ ID NO: 369731 - DNA, 122 bp, Homo sapiens
tccgagtttgagaattgggagcaaatggagtccgagtggacagaaagacaagaccctgaccgtggggaatttaaaggccggccagcgtgcttccgaaggccgggggtggaggcattaccgcc

SEQ ID NO: 369732 - DNA, 122 bp, Homo sapiens
tgcccagccctgggtgtgctttacaggggacttgagaattaaatgggtgtctaacacttgcgggtacatgacatagagggatctatggtttatgcggaaagctaatgggggcaggcgggtta

SEQ ID NO: 369733 - DNA, 122 bp, Homo sapiens
aaagatcaaaagcgaggctgctttccctgctccttttacacaccagtggttttctttgcacgcaacccttcatcagtcaaacattcactaaatgttgcatattttatctctcttagaatatg

SEQ ID NO: 369734 - DNA, 122 bp, Homo sapiens
ttcattatgttcaccgctttgagtccaacccctggcccaaaataggcactaaatagttgccgaatgcatgaatgatagatacctctctgtcttcaggggtgtgtagaagtgcgaaggggtat

SEQ ID NO: 369735 - DNA, 122 bp, Homo sapiens
gccgggccaagaagatgaacctcatccagagcctcaacaagcacctgctcagcaacctggcggccatcctgacgccggtgaagcaggcagtcatcgagctgagcaacgagagccagcccacc

SEQ ID NO: 369736 - DNA, 122 bp, Homo sapiens
ttaggggatactttacaaaattattttaatcaccgtgcaaacctaataacttgacccaagcgcaatcacctgtattcacccagagtaaatattcctaaaatcccgttcagtgtgtctgtgtc

SEQ ID NO: 369737 - DNA, 122 bp, Homo sapiens
ggcgacgcctcgctcgtcagatgggagttacctgtgaccgtcttgggtgcgcttgcgcaacgctcctcttcagccctaaccggctcagctgacgtgcccagaagacgaagatggccgccacg

SEQ ID NO: 369738 - DNA, 122 bp, Homo sapiens
ttttagtcagagcccacattaacacagcaagagcccagccagagcaggtggggcaggagacgggtggagcgggtggtgctgtgtggcggagctggcggcgcagtggagcgggcgttgtggtg

SEQ ID NO: 369739 - DNA, 122 bp, Homo sapiens
gtttcgggtccgggctgctctgggcagcaggtatccgaggccccaggctggggaagggggcgagaaccagtcccttcccggaagccccgtcgcgctcaggcgggccttcctacccctcctct

SEQ ID NO: 369740 - DNA, 122 bp, Homo sapiens
accactttagattttctccttggcccgacaaagagggagttacgaacccgcccttcctcgcgcgtcagaaatcctacccgccttcttcacagtacttgtgcgcaaaggacaggatgtccgag

SEQ ID NO: 369741 - DNA, 122 bp, Homo sapiens
aaagaaaaagtcctcataagtagggcagaggtcacggcagagtggaggtaccccagacttcgacctttgctcactgagggctggaaaaccacaaaacacccagataacggtcttccctcccc

SEQ ID NO: 369742 - DNA, 122 bp, Homo sapiens
ctctaggaaaggaggatcctttaatagagggccgtcctggggccgcgtgcccatggaaggcgagagtggaggagtgtcctctttctcccccaccctcaggcggcggcccggccaaagccaga

SEQ ID NO: 369743 - DNA, 122 bp, Homo sapiens
aactgcggcggcggaggtaattgaacctttcttttgttactttagccggtccttctcttccgggcatgcactgaccccagcctgtacggaagtgcgagggagctcagaagccagctccggct

SEQ ID NO: 369744 - DNA, 122 bp, Homo sapiens
gtcggaaccggcagtggctggacctgggcctccccgcggcgactgtgggggtctgggacccgagtcccccaggcgcagctcgacccttggtcccctcggtcgccgggtggagctggaccagc

SEQ ID NO: 369745 - DNA, 122 bp, Homo sapiens
cttcgaggaggtcaagccctttaaggtggcatcgccctaagtcgcaggagcgggtctctccgcccctccctcgggccggggggcggggcctcctaatccggaactgaaggtcttgcgtagcc

SEQ ID NO: 369746 - DNA, 122 bp, Homo sapiens
cacggcgggcagcagcatgtacacagccacttgccaggcctcctgcagctgagactccagcgcctgccctccctggggtccttgctgcaggccgggtggccaatccaggtgggagagacact

SEQ ID NO: 369747 - DNA, 122 bp, Homo sapiens
gccccttctgagccacagcctgctacctatgctgattgtgtggccctgccatcccttattcgaaattcaagcttggctcactttctaacaggttgtctgtgccccctttcccagaagggttg

SEQ ID NO: 369748 - DNA, 122 bp, Homo sapiens
atacctctttttatgacattcaaatactctaagacctgtatagcaggggtccaccacccccgagctgtggaccagtatcggtccctggcctattaggaaccgggccacacagcaggagagga

SEQ ID NO: 369749 - DNA, 122 bp, Homo sapiens
gaatattagcataagagtagcacaagacgaggcagggagtttcagacctgagcatatgtccgagagcaagccatgccaaaacttgctggattcaaaccacaacagcttattattctcagtgt

SEQ ID NO: 369750 - DNA, 122 bp, Homo sapiens
tggggtggggccctacaagttaggtttctaactttccaggtgatacagttgctgctggcccgggaaccatactttaagaactactgatacaagggaatgtctttgtaggaaaaacccactga

SEQ ID NO: 369751 - DNA, 122 bp, Homo sapiens
atattgagatgaaacaggaagcaccccttgtgtggagcccctgttgggtataaaggctggcggaagtggcagggggcctggagggggagctatttcatggcagcatgagcatgggggaagac

SEQ ID NO: 369752 - DNA, 122 bp, Homo sapiens
gaagcagagaggaaactattaaagctcaaactgccaaactgctacagggtcaaaagggggcgctggtggggctccacagcctcaccacagactgaagctctctgtgccccaactactaagca

SEQ ID NO: 369753 - DNA, 122 bp, Homo sapiens
ccgtttcttacctggacccaagagccccaggagatgtggcacaacgtccatgttgcgattcgcagagggagggtggccgggtcgggtaacccccaaggatactgctcttgccctcaacccca

SEQ ID NO: 369754 - DNA, 122 bp, Homo sapiens
gagggggcgggggagaattgctcagaacttggaaagcgactggtctctcaggatagagaccgcgacgcaaagaagtgacggaaaagatgcgtccgccatcccttttgctccacccctgacgt

SEQ ID NO: 369755 - DNA, 122 bp, Homo sapiens
aataaaaaaacccttgattacagacaaccccaccaaagtacaagttgagttccagctgagcggcaagcctttctccacgataactctttagctataaaacataattctagtttaattatatt

SEQ ID NO: 369756 - DNA, 122 bp, Homo sapiens
cacagcaaatggcagctgccaaagagaacaccaatcccattcacactcacgcaaaaaccgcgatgccgacaagaaaacttctatgagagagatcctgaacttccttttgggggactattttt

SEQ ID NO: 369757 - DNA, 122 bp, Homo sapiens
agcaattgtcctgtgtcagcctccccaggagctaggactacaggtatgtgccaccacacccgcctaaccttttaatttttggtagaggcgggggtcttgctatattgcctaggctagtctca

SEQ ID NO: 369758 - DNA, 122 bp, Homo sapiens
ggggtagcggttcctctggaaggtcgcctctagctcctgtagctgctggctggtgaagtgcgtgcgctgccgccgctgcttctttttcagcgaaccgtcctctggggagccgccgggcagcg

SEQ ID NO: 369759 - DNA, 122 bp, Homo sapiens
atgtagtatgacttcatccctagttatgttatacatttataaataagttcattcagtcgtcgctgaaacaatttaaaagggccgaatgatagttattgagtaatgatgctgacgaatcagaa

SEQ ID NO: 369760 - DNA, 122 bp, Homo sapiens
ataaacataaataatccaaattattaacagccaacagcagaaattaaactatcaattcaacgatccagggctctttgtcttgcccagttttactcctccctctctctcccatccaggactga

SEQ ID NO: 369761 - DNA, 122 bp, Homo sapiens
cctaggtctgcagacttcaattatagtccttgcagtttagaacagtctgttctaaacaggcgttgtacactggaggcctgcttgtacatgtgagcctgttcagtattttattttgttttatt

SEQ ID NO: 369762 - DNA, 122 bp, Homo sapiens
agggcggcgctgattgataggagccaaggccaatcataacgattaccgtagactggaaggcggaccaagaatacgctaatgagttgctaattttgacaggtgtgtagaaaatggtaggtaga

SEQ ID NO: 369763 - DNA, 122 bp, Homo sapiens
gagaacgctcggatttccccttctttacttgcaacaactccgtaacccgcaaatcggctacggacaactgcgatgtccactatgttagttctcgtagcgtggattctctctcctcaagatgc

SEQ ID NO: 369764 - DNA, 122 bp, Homo sapiens
tataaaaccaagctgcaccctgaccgccttgggcacgtgtcctcagaacctcctgagggccgtttgctgtgtcacgggccatggtcattcacatttggcttaggataaatctcttcaaatat

SEQ ID NO: 369765 - DNA, 122 bp, Homo sapiens
ccgccgcccgcgtctcctctcggtcccttgcttgtttctttctatggagagggtccccctcgccccgcgctgcccgttctcgcggcgccgggcgtttttgcctgagcggggctggacgggtg

SEQ ID NO: 369766 - DNA, 122 bp, Homo sapiens
acttttctctcagagacccgtccctcaaaatctacctttctcctgagtttatttcccttccgagactcctcttcccagcaactgccttccctggagttttccctccgttagaatccccctct

SEQ ID NO: 369767 - DNA, 122 bp, Homo sapiens
tccaactcacctttgcgaagcatgttggccacggggccgccgctccgaggtcggcctaggcgcactccctcccggggtccagattcaaatccctgggcgccagctgcagctaatccgagcgc

SEQ ID NO: 369768 - DNA, 122 bp, Homo sapiens
ttaccattgtgacagcataagctgttcacgcattacccagatcccctttacaggctggtgcggtaacgctcctcccagtctccaactgggagcgttggctgcaaatggctcacagctgtcac

SEQ ID NO: 369769 - DNA, 122 bp, Homo sapiens
cccaaagtgcttggattacaggtgtgagccccagcgccctaccaaaatgggaattttaatcgtacttcagtcatagttggagatgcattaaaacgtatcactcatttagacagtgcctaata

SEQ ID NO: 369770 - DNA, 122 bp, Homo sapiens
gggctggcgtgtgaactctacctcagtaaagctgtgtcaagagaaaaggtaacaactcaacgagagtttcctcagaggatgtttctaggccaacccaggccaggaactggattccaccccaa

SEQ ID NO: 369771 - DNA, 122 bp, Homo sapiens
gactcggcgccgcacattgccccgggggggcccggcgcagtcacgcgcgcgcagagctcacgctctccgccccgcacacctgcgctccgccccctggtcctgggcccgcgacgggtgaaggc

SEQ ID NO: 369772 - DNA, 122 bp, Homo sapiens
tgtggaaagtagtaagacaaggcgtgtgcgggaccgagcgctgggcctggcacctagtgacgaagtaaacacacaggcaggtaatgctaactccggctgtttgagtcttctgccagcgaggg

SEQ ID NO: 369773 - DNA, 122 bp, Homo sapiens
agctgacagcacaaaaccgaagggggcgccgccaggccgtgggaaaggtgcgcgcaagggcgtgggcactcaccgtcttcccagcattgtccaggcccaggatcaggatgcagtactcgtcc

SEQ ID NO: 369774 - DNA, 122 bp, Homo sapiens
agatgttaaaggacagacagacaacagctaggacaatgcccaggctggagagaactgagacggagataaagagtttctgtgacaggaagcggaatgtcttgatgaccagggtctggtcagct

SEQ ID NO: 369775 - DNA, 122 bp, Homo sapiens
cccgcggtttcccaccgagagggtccaccagtgagacaggagggaagctccacctcgggtcggccgcctcacgcagcgcttccctcgtgctgccccatcattcactgacttcaggccacgag

SEQ ID NO: 369776 - DNA, 122 bp, Homo sapiens
gaagaggcggaaggaaggggtcttcctccacccttctgatccgtcttccctcccccctcccgcaggcctccccgaattcctgaagacgctgctgggaggggactgaagcttccccgccttga

SEQ ID NO: 369777 - DNA, 122 bp, Homo sapiens
attacaggcgtgagccaccgcacctgacctccttcccccttttcttactactcactcccacgtcctgggtggcccattcatggctccacccaactctgggagctccccatccttcaggcagc

SEQ ID NO: 369778 - DNA, 122 bp, Homo sapiens
acacacgcgcgcgcgcgcgcgcacacacacacacacgtacactaaaaaactcggaccagccgcgccgcagctgctccaatccctggaaaaggcaatcgagcgccctccggaccgctgcgcac

SEQ ID NO: 369779 - DNA, 122 bp, Homo sapiens
aagcagggtttcaaatagggttgccagggagggtctcattagaaggggacctgaagtatgcgctgagtgaaataaaagtgttagccaggaagatacatttggcaaagcactccaagtagacg

SEQ ID NO: 369780 - DNA, 122 bp, Homo sapiens
cttaagttaaggagtgggtagtcctaactgtaatcttgtgttatatgcggcttactcttacgctgaccataattacagctgatgtaattattaaatatccagataaagtcctggacctaaag

SEQ ID NO: 369781 - DNA, 122 bp, Homo sapiens
cactcagagccatcctcttcccaaagctctggccggtagcatactctcccctcctcccgccgacgacaccgttctagatgagaatgccaagtgcaggtcctccgccccattaatgaccccag

SEQ ID NO: 369782 - DNA, 122 bp, Homo sapiens
gaaaaacccacagttgtccaatggcctgggcttcgtgggacctccggggctgcacgcccacgtcagcctcagccgacccctgccaggaaaccagggaggcccctcctctcccagcctccttg

SEQ ID NO: 369783 - DNA, 122 bp, Homo sapiens
gcgctccacggtcacacttcagcactcccaatacaccaggcagacactgagtacgagtctcggctggtgtcctagcaacagcgacgcgaccccgccccttcccgcgtacacctcctacctta

SEQ ID NO: 369784 - DNA, 122 bp, Homo sapiens
tcccagaggccccccagcagcccccgagcagtccccggagcgctgggggactctgcagcgcgcaggtgaccacgcagagacagccccagcgcgatgaataattgaggcgcagagtggaatta

SEQ ID NO: 369785 - DNA, 122 bp, Homo sapiens
ccaaagaccacaacacgtagcgtggaagccttgggatcctcatctccactcaggaaggggcggcggcgctgggggcgtgaagcaggggccagaagccagctgggcagctgggtaccgagttt

SEQ ID NO: 369786 - DNA, 122 bp, Homo sapiens
atccttaagatccccagctacctcttctccgcctgcgtatggtccctcccttcccctcgccgctccctttgataaaggtcccccgcgcccagaggcctgcagacctttcccctctctccctg

SEQ ID NO: 369787 - DNA, 122 bp, Homo sapiens
tgctttccagagaataaaactccaggcttctgccagggtaggggaagggtacttcggagtcggagaaggcatctaaagactaaggtcattcttagcagtctttaaaccaatcctcctgcctt

SEQ ID NO: 369788 - DNA, 122 bp, Homo sapiens
ttcaagaactcaggatccaggaccgcagactccctccagggctccgatcccaagaccccgcgttggaggaacttgagatccggacttctaagcgccccaaccagtttcgggctgcagcggcc

SEQ ID NO: 369789 - DNA, 122 bp, Homo sapiens
ttgcagtcagaatgcgtgaagctgcggcggtgctctgagatgtcatagacggatgactcccgtcggatgaagtccagggcgctctgcggtgagccattcacaccagacaggttagccatgtt

SEQ ID NO: 369790 - DNA, 122 bp, Homo sapiens
ccaccccgccgctgtcaccggggccctggcttgggttgcgggtggcgtaaggagacgaggcgcccggagaagagtcctgggaaccgcaaggccgcgctcccgcaggcccagccctgcctttc

SEQ ID NO: 369791 - DNA, 122 bp, Homo sapiens
agattcccactagtcttcaaactagcaaaccacagccttaacaggcagagtaaaaagatacgggtaaggcagtgtctggtcattggaagagactgattggaacaacgaacatcatccacaaa

SEQ ID NO: 369792 - DNA, 122 bp, Homo sapiens
agaagtaatgtgcccatttcccagccacactctcccaaaggcttttacaggcgctgtccccgtgaggtggtagaacagaatgtcagaattcaacacattccaacactgtcttctgttgagct

SEQ ID NO: 369793 - DNA, 122 bp, Homo sapiens
ctcacctctggcgtggccgagctcacgtggtccggcttgtgcaagtcccaggtccaactccgggtctcctgcttttggccactcaggattggacctgggactgatactggtcggccctgcag

SEQ ID NO: 369794 - DNA, 122 bp, Homo sapiens
tgttgatatccaggcgtccgcagtgcctgtgtatttactctcttcttagtttcgtgtttgcgtttagtttcaagacacgtcgacaaaacgactgtcattaatgaatgtaataacgaaatatt

SEQ ID NO: 369795 - DNA, 122 bp, Homo sapiens
taataaaccggccctttcggggcctgaatcactgtaactgcaggcgccggggcaggtttacgcacagcccaccctcccactgcccgcccccggcgccggcaggcagcctcttgtttaggaga

SEQ ID NO: 369796 - DNA, 122 bp, Homo sapiens
aaagtctaacttctacgtgctttcttcattagtagggctcacaaggctgctaacagcagacggccagaaaacggagaagtgttcagagcttcaaagatgaggcagtttgggtaatcttccag

SEQ ID NO: 369797 - DNA, 122 bp, Homo sapiens
tctcccagaccgagagcggcgtttccgggcttccaccccgcccctgctcccaggccctgtcgcctcccctcagcgtccatcagcgcggcctgcttcctgcagccggcctgagcggccttact

SEQ ID NO: 369798 - DNA, 122 bp, Homo sapiens
gagagatttcttgcgagtgctcctctgggcttgcaggctagagtgcccaatatttctgtgcgggtagactcattcacatcactgggctcccaggcttgtcatttgatcaggctctcatctgc

SEQ ID NO: 369799 - DNA, 122 bp, Homo sapiens
ataactgatggcaccatgcccatggtacttgaggtgccaataagcatacctgtatcagcccgcatctgtagctgtcaaattcatgatgattccatgcataggaccaagtatctgactacttt

SEQ ID NO: 369800 - DNA, 122 bp, Homo sapiens
ttcccgctggatactggggggctccgggccccttgctctgatggtacagcttcccccgcccgatgtcccagccccacgactcgctgttgctgcccagcagcgccgcgtagtggtcagtctgc

SEQ ID NO: 369801 - DNA, 122 bp, Homo sapiens
atagtgtgcatcgcctgatgggagatgtagtccgcctcggtcagactcgccctattactgcgtgaacgactgggtttttttttttttaacctccagaaacggaagcctcagcctatcagcga

SEQ ID NO: 369802 - DNA, 122 bp, Homo sapiens
agagataccgaaacctaaaagtttaagaactgctgattgctgggaaactctgcagtttcccgttcctctcgtaacctggtcatgtgtccttcttcctggatactcatgacgcagactcagtt

SEQ ID NO: 369803 - DNA, 122 bp, Homo sapiens
ctccttgcttaaaagcctcttctgatgggtaagtgcttccacttgcgatcgccgccttgccgcatcccctcagcctgtggcactcaaactgtgggggcactttctgctctctggtgaaagtg

SEQ ID NO: 369804 - DNA, 122 bp, Homo sapiens
ggccgccccctgccgcccggaggccgtcagcctcccggccccgccccggaggcctccggtcgcctggctccggccccaccccgccatcccctggccctggctgactcgccacccccgacact

SEQ ID NO: 369805 - DNA, 122 bp, Homo sapiens
ttcaggacggaggggccagggcgagtgtccgcacttcttcgttcaggttgatttggatggcgttgctggggtagctccagcggcccctgccagagcgaccctcccagaaatatccagccatc

SEQ ID NO: 369806 - DNA, 122 bp, Homo sapiens
caaaaaccctccacatttcttcatggattgtattagtccatgttctccagagaagcagaacgagttggatgtatgttttggaagagattatgaggaaccggctcatgtgatgaaggaggttg

SEQ ID NO: 369807 - DNA, 122 bp, Homo sapiens
ctgctttcttccatttagcataccctttttggagacaaattatgcacagttgcaactcttcgtgaaacctatggtgaaatggctgactgctgtgcaaaacaagaacctgagagaaatgaatg

SEQ ID NO: 369808 - DNA, 122 bp, Homo sapiens
gggcggagcgcagcccaccccggccctcccgccgctccacccagcaccggagggtgggggcggcccagcttcagggagccctgattgggtgtacgcagggaaagcctcctgctattggctgc

SEQ ID NO: 369809 - DNA, 122 bp, Homo sapiens
gatttgatatttgcttggaaactattactatttcttagttttacgccatttgcaatcaggcgaagctgaggactttaaaaatcatccaaagtcgtcaaggtccatcccttttgtgtttcgtc

SEQ ID NO: 369810 - DNA, 122 bp, Homo sapiens
gtaaaatggctaattattttcatataccctccaataggttgtaagccccttaagtgctgccgccatagatgagatctgcatctctcacagattgtacagtgctttgcatagtaattatttgt

SEQ ID NO: 369811 - DNA, 122 bp, Homo sapiens
caagcgtggagaggtcggtctcaagcaaagccctgttgaaaccggcatttgaatcagatccgctgactgactccaaagccaatgctctcaaaaagcaggtttgggggttagacggtgagttc

SEQ ID NO: 369812 - DNA, 122 bp, Homo sapiens
gcagcccgttggcttcgcaaaactggggtgtgcagctggcatactcacaggctcccacggcgcctggggaacgaagagggggcatgctctctctctgacccatcccagacctgggtgaccct

SEQ ID NO: 369813 - DNA, 122 bp, Homo sapiens
tgacacaccattacagggaattgtctcctccctcaagggaaagggccgcagctgaaaggccgggagcttcttgtgtttttgtgggtgtttaatttccttaatgatgtcgacagcaagcctgc

SEQ ID NO: 369814 - DNA, 122 bp, Homo sapiens
ctgtgtccttgggggagtggacaggtgttaaatgctttgaggtgccagctttaatactggcgttaaagacatgtgctgtgaaatctccaaaatggggacaaatagttgtggaatgtattaga

SEQ ID NO: 369815 - DNA, 122 bp, Homo sapiens
tgcatcctccgctggccccgtggttgaactttaatggcagggccggggtctccagcgccacgccgcccacagcagcccattcgggacgccctgcaattggtcctgcccctgtcctcccgcgc

SEQ ID NO: 369816 - DNA, 122 bp, Homo sapiens
ctccgggccagcctggaactcgccccgtggagggaggcaggcggcgggcgacgggggtggcgagcgccggacctaggagtcctcgatcccactgcctccatgacttccctttgccaacccca

SEQ ID NO: 369817 - DNA, 122 bp, Homo sapiens
ggactgccttctcgagactgtgagctgtcagtgactaagggttcatcatttttatgctctcggtacttggcacagagctaaacgaatcaggccttgcattataaagcactgatctatctact

SEQ ID NO: 369818 - DNA, 122 bp, Homo sapiens
gagactgcagaagtggctccttttcataaactcccctaaaccacacacaggagagagcgacgggcctcggccctttgatgatagcacatggcgcaggacccttgtcctggtggcacaaggga

SEQ ID NO: 369819 - DNA, 122 bp, Homo sapiens
gactggggccttcggagtgcctgttattcccagacggtttactaagtggtgatctatatacgtaatgtaactacatacgtttcagacaaaggttatttattcactgaacagatattgagtgc

SEQ ID NO: 369820 - DNA, 122 bp, Homo sapiens
gcgggcaggggcgtcgcagggctgacggtgctgctctcccaccagacctgagcgaggagccggtgggaagctccctgctgcaccagctgtgcagctgcacagaggccttcttcctgggcctg

SEQ ID NO: 369821 - DNA, 122 bp, Homo sapiens
atagcgaggtcggcgtcacggtgtaggcgcgcagttggggaaaccgaggcccaacgtgggcggcagctaccagagatggcacacggaggactcaaattcgtccattcagtcattcgttcatt

SEQ ID NO: 369822 - DNA, 122 bp, Homo sapiens
ggaaggagagagaaaccaagagaaccggttcccccgccttgacagcggaggccctcacaccgaggcccttggactaaaccgggcagggacagcccgcaggtaaagctgttctccggggcgtc

SEQ ID NO: 369823 - DNA, 122 bp, Homo sapiens
cggaggcggagtctgaactcaggtgtggccggagggggctccttccaaggctatggggagcgtctctctgctcgaggcctctcctcagcttctggtctggctgcctcctgggtctccctggg

SEQ ID NO: 369824 - DNA, 122 bp, Homo sapiens
ccaaccctgcagggaactaagggatgcttttgtgcatccccctgctctgccctagatccccgcccctccgatactaccccagcctccaaatccccgccaccttcctgtaccctgggatggat

SEQ ID NO: 369825 - DNA, 122 bp, Homo sapiens
acaccccttatgcgcatgcgcgcgtgagcaaaagtaacggtatgcccacccttgcgcagacggcaccgcgccagacacccgctcacagagcgggcttctagaaacttccgggcctcggcttc

SEQ ID NO: 369826 - DNA, 122 bp, Homo sapiens
ccgggagcccgtctcctgagtcctgggggaggatcatttatttgtctgcagatcggcaagcgggcaggtttgcagagtccctgggggctagtagttcttataaaggagaatgcaccaccaag

SEQ ID NO: 369827 - DNA, 122 bp, Homo sapiens
ctgtgtggctggattagtggccactctatatacaactgtgctgtgtcccctcaccttccacgtcccttagcagagcagtgataattcccttctttgggtctccttttaatcagtttatgtct

SEQ ID NO: 369828 - DNA, 122 bp, Homo sapiens
ggccagctataagacgaacggttgcattccagcctcaatcgcaacaaccacaaatcagtgcgccggcttccttatctgccccgaacgcaggctgccggctatcgagggaaggaatcctaccg

SEQ ID NO: 369829 - DNA, 122 bp, Homo sapiens
cccagggcggcgtgggtgaggccccagcacacttccctgtccggaggtgtgtctgggcggcgcttcagcgggcgcagggcggcccctggaggagccccaccgcttcccggaagggcccgcgt

SEQ ID NO: 369830 - DNA, 122 bp, Homo sapiens
ccacccacaggttcaagcctcctcagtatctgagaaaggcgcgaagcctctacgcagttgcgacccgaggcgagcaacaactagcgcatgcgcacgtgagcccgcggcgcacgcgcgctgac

SEQ ID NO: 369831 - DNA, 122 bp, Homo sapiens
aagccggcctcggacaggcgatcaaaggcctgctccaagtaggtgaacttgaggtagaagcgggacgtgtacttctccggctgccggtcggggtcgcggctctcgttgagcgtgtccccgaa

SEQ ID NO: 369832 - DNA, 122 bp, Homo sapiens
cattacgatttttacacatccccgtgccacagaatggcgtctccttctaatcgttccccccgacagatgatagtacatcccacactgctgctggaaaagatagtgcaaaagttgagcgcgcc

SEQ ID NO: 369833 - DNA, 122 bp, Homo sapiens
aggctctgctctcaggaagtgccccgtgggtggcgacgggccgagaggtgctctgggggacgagttatggctctgagctgcccgtgcaaggcagggaggctgcgttttcatgcgttcacacc

SEQ ID NO: 369834 - DNA, 122 bp, Homo sapiens
acaggctggcgggtctgtgcttcattcataagactcagagctacggccacggcagggacacgcggaaccaagacttggaaacttgattgttgtggttcttcttgggggttatgaaatttcat

SEQ ID NO: 369835 - DNA, 122 bp, Homo sapiens
gagtcatttgattaaaaacaaaaaaacctgtatcttgtttctctggggcatctggctgcccggggaatattatcagatgaactagttgtaggtatcaaaatggtagcctaggctttcctctg

SEQ ID NO: 369836 - DNA, 122 bp, Homo sapiens
tcctgaggtctaatcaactactaatttttgtctgtgtagatttgcctattctggatatttcgtataaatggaattcaacatattgtcatttgtggctgacttctttctcttagataatgttt

SEQ ID NO: 369837 - DNA, 122 bp, Homo sapiens
aagtatccttccctttggaatcttgtttggagaatagcttaattagatgatgtcttagtccgtttaggctgctatagcaaaatacagtaaactgggtggcttataaacaatggagatttatt

SEQ ID NO: 369838 - DNA, 122 bp, Homo sapiens
acgttatttctagggtttcttcccagtgtcacttctctgactgagaaatgtctcccaggccggtgatttcagtcatcatctaaaaccaatctcatgtctgcacctgggaaggtagtgtgtgt

SEQ ID NO: 369839 - DNA, 122 bp, Homo sapiens
gtggggtgggtggggtgcgggcacgccctcccgcggaggcctataagggtgcgggggggacggggcccaggaggggagtggagcctcaccagccacgtcctcatggccctgctgctcttgct

SEQ ID NO: 369840 - DNA, 122 bp, Homo sapiens
caccccaccatgcatgcttactgtagacctaatcactaattagcccaagggttgactgagcgtgctggtgagagtaacaggaggcaggtggatggggaggtgtgatgctgcgcgcatagtag

SEQ ID NO: 369841 - DNA, 122 bp, Homo sapiens
tggagtgaccctcctcctcaccctggcagcagagacccacgttggccatcgagaaagaaccgacgcctagcgagaagtgacagggaacattcaggatcccccgcctgcccccgtctggacct

SEQ ID NO: 369842 - DNA, 122 bp, Homo sapiens
cagctacttgggaggctgaggtggattgccttagtccaggaggtcaagtttgcagtgttacgatggtaccagcctgggcaacagagccaagaccctgtctcaaaaacaaaaaaagaaagaaa

SEQ ID NO: 369843 - DNA, 122 bp, Homo sapiens
caagaggccagacggggtcccagctggggtgacacagctcctttcccagtcgggaaggggcgtctgcagggaccaggaagggcttagcttggggctgcccgctccggcaccgacctgggacg

SEQ ID NO: 369844 - DNA, 122 bp, Homo sapiens
aggcctttgcttgtctgacttcgcgagggtcccggctctggcccaggagctggggaggggcgggacttggtgacagccgggtcccagcaccgcgcccagacctaggcccttctcaggggtgc

SEQ ID NO: 369845 - DNA, 122 bp, Homo sapiens
aggcttcgatcccggcccctatcatggccaagctggacctcagtttccccagatgcagagcgacgtttgtgggcgcggcccctctcccaccccttaccgctgggggcagctcccagggcggg

SEQ ID NO: 369846 - DNA, 122 bp, Homo sapiens
cctgtgtggtggcaaagccggtgtggggctggggaacgcagcgttctccaggaggggacccggctctccttctgcagtgcaggcgaaggcctagatgccagtgtgacctcccacaaggcgtg

SEQ ID NO: 369847 - DNA, 122 bp, Homo sapiens
atgagttggaaggaaccaggaaagcagacatcagggcgtgggggacacgcagtctaactccgtttctcttccgagtaggaatttccccagtgccccaccggggatttcggtttactgctttc

SEQ ID NO: 369848 - DNA, 122 bp, Homo sapiens
gtgttcagaatcactcctacagtcaggttctccacaatggatctcagtgctgcaagtcaccgcatacctctaagtgatggaaacagcattcccatcatcggacttggtacctactcagaacc

SEQ ID NO: 369849 - DNA, 122 bp, Homo sapiens
tggtgaccccagaggaggacttgcattgggcccactgtccccgggccagtggccatcagccgggtgcctagcccctgttgcactgaagctcaggcccttcctgttgccctggtctcctgcat

SEQ ID NO: 369850 - DNA, 122 bp, Homo sapiens
tgctcccggcgcggccggggggtgggggtgacgagatgcctgtggctgcgccagcaaccacggttaggtgagaagcgtggaaggaaaggggcatgtggctgcccgggccttgccctcaatgc

SEQ ID NO: 369851 - DNA, 122 bp, Homo sapiens
agctcagacacccaacgctccccggggccgggtcttaggcgcacattggctcgcggtgcacgtccactctcctgtaggctcgtgcccttgacatatccggggctgtcacagtcccatgcccc

SEQ ID NO: 369852 - DNA, 122 bp, Homo sapiens
cctgcccagcccaatggactcctgccagcccatcgcagagttcttggcgcaccaatgactcggggacaatcactacttatttctatcaatagaaagtgttgtgtcaataacgcagccaagat

SEQ ID NO: 369853 - DNA, 122 bp, Homo sapiens
gtgtcctgcgctgtgcacctgacgtcccgcctgcgagggtctgcctccacgtgcgtcctgcgatctgttcaactttgcacgtttggcagccagtgttgggaggcacattgtaggtgttcaat

SEQ ID NO: 369854 - DNA, 122 bp, Homo sapiens
cacctctttcactctagacacctccagaacactcgccccccgcgcgccggagccccgggtcgccaccaaccgcccgcggagccagacctcccagctctgcgccccaggaccgcgcggtgcaa

SEQ ID NO: 369855 - DNA, 122 bp, Homo sapiens
caccagggtcaccacagggtcccgggcccgcccctcactgctggggtgactctcggtgatcgagggctcctgtcagctcttgtgatatataactgaggacgaacccagacagacacacaaag

SEQ ID NO: 369856 - DNA, 122 bp, Homo sapiens
agctcaacctctcatttcgttgacagcattattaatgtaaaaacagcacacatggaaatacgaatggctccaacaagcatgcacacctggcatgaaacttcatctctttatttgcaaaccaa

SEQ ID NO: 369857 - DNA, 122 bp, Homo sapiens
acataggctagggacacatacgaaggaccttgaccaccaggccaagaaactcaaaggacccgcaaaaggaagggttctgacttcctcaaggccccaaagctagcacagaactagacttgagg

SEQ ID NO: 369858 - DNA, 122 bp, Homo sapiens
tgttagcttgggttcagaagcttgtgtctgtcacccagggccgcccagccccggggtttgcgaaggtccggggtaggagggctgcagcctgcgcgacgcggcgggaggctacccgggggcga

SEQ ID NO: 369859 - DNA, 122 bp, Homo sapiens
caggtctcagagcccccaactggcagcggccacagggcagcaggggccatagagctaactcgtgcagctggttttgggctcagcgaggggcggtgagcgggacccgcctggctggcacttac

SEQ ID NO: 369860 - DNA, 122 bp, Homo sapiens
cagccctgaattggggacagtggcccagcaatctcctggcgccccacgatggacgtggtccgagcttgccaggcgtaaagcctgtttgcaaacgcaaggcattcattaaagaatgactctta

SEQ ID NO: 369861 - DNA, 122 bp, Homo sapiens
aggtaacccgggcccccgcgcgcaaggccgaggcgcaggcggagcgggctggagcatgtccggccctttgttctgcgctcgtgcgtgtgtccgggtacttgagctccctagcggtccgcctg

SEQ ID NO: 369862 - DNA, 122 bp, Homo sapiens
tgcttttcttagatcctaaagtggttcctgtgcctgggctggccaaggtacagccctgcccgggtcagagaaatcatttcaatggcctttaaactctttcagtgattggtttgctattgaaa

SEQ ID NO: 369863 - DNA, 122 bp, Homo sapiens
ggggcttccctctgacacccctcattcaaaggcacctcccaccccgcacctcagccttggcggagaggactcacaggtaccgattctctaggctgccgcccccaaccccatttcgtaccccc

SEQ ID NO: 369864 - DNA, 122 bp, Homo sapiens
tcactgttggatcttggaaaagcagcgtctctgctcttagttgaccctcaggagcacacccgtgaggatccacccaatagtcagcaggaaataaaagaaacttgtcaggaatagacagtgcc

SEQ ID NO: 369865 - DNA, 122 bp, Homo sapiens
ctgattatgggctggaaaatcaaactggcacctgcaagacgcagttccaaggatgcagttcgcagtgagttttcagacctggatgatgtatgtcaggtcggacgactgagacagctctccac

SEQ ID NO: 369866 - DNA, 122 bp, Homo sapiens
ggagcccagctaagtaccaagaagcttttccatgagggagcctgtgtttggatgggaaaccggtatctctctgttttgtctccttgtctcagcaaaagctgatggagttcttggtgagggat

SEQ ID NO: 369867 - DNA, 122 bp, Homo sapiens
gccgcccgccaggaggggggcgctggccagagtcctccctccccggggcagcaaggccagcgcagagcgggggccgcctttcctctttttacccctctcccaaatcctaaaatgagcgctct

SEQ ID NO: 369868 - DNA, 122 bp, Homo sapiens
gcagggaggctggagagtcagggggcttgggtactgattcccatctgggaggaggacacacgcccaggcccagcccatgctgagtggcccccagatgtctgcactgtgcttctgtttggtcc

SEQ ID NO: 369869 - DNA, 122 bp, Homo sapiens
ctgtcagagagatggatgtggccaacttccggcgggtgccccgcatgcccatctacggcacggcccagcccagcgccaaggtgaccggccctcagggcctgggtcccccagtgggtttgggg

SEQ ID NO: 369870 - DNA, 122 bp, Homo sapiens
ctgtgacagtcctggggccgggctgggtgagggtgggagccgagctcgccctgtggcagtcgtggggccgggctgggtgagggtgggggccgagcttgccctgtggtcctgtggcagtcgtg

SEQ ID NO: 369871 - DNA, 122 bp, Homo sapiens
tcgtgcggcagctgcggcttcgggaccgtacgcaaaaggcgcttttcctggagctggtgccggcctgtgagtgcgccccggtgctgagaggatggcggctgaggggacgcggctacgggcgc

SEQ ID NO: 369872 - DNA, 122 bp, Homo sapiens
gaggtgggaaaggaggaaaagtttcatcttctacatgctcataatctggtaggtcaatcacgccattctcctgtggttctagcatcttttcctctaggggaaaaaattaaagttatttgtat

SEQ ID NO: 369873 - DNA, 122 bp, Homo sapiens
ctcttcctggcagtcaaggttgcacatgaagcgctcccagtgcagccagcccatggtaggcgtccttgccaatccattgtccagtgctctagccccagggatgtcccaggaaacgagggcca

SEQ ID NO: 369874 - DNA, 122 bp, Homo sapiens
ggcggagcggggtcatcgctggcacgcggaaggccctcataaggccctcgctgccggcaccgtggcctcccacccactcggggcgctcgcttcacctcatgcccgcctcagtggctcggggc

SEQ ID NO: 369875 - DNA, 122 bp, Homo sapiens
aaagctgaagcccgagaccctggagctggaaggatcaaaagtgaaatctggtgtgaagagcgatctttctacacaagtgctggccagcaacgactgcaagcctcagagcgttattttgccgc

SEQ ID NO: 369876 - DNA, 122 bp, Homo sapiens
gaaaggaggagatgctgagccagcgcgactacgattcggctttgctacaggaggtgcgggcgttgctgcggcgccacgaggcctttgagagcgacctggcggcgcaccaggaccgcgtggag

SEQ ID NO: 369877 - DNA, 122 bp, Homo sapiens
aacaggattttaaatgcaggtgaccttcttgggtcatttctgagagtgaaataaacattgcgagattactgtttattgccattctgctacccctcagctcagcctgggggtggaagcaaggg

SEQ ID NO: 369878 - DNA, 122 bp, Homo sapiens
gcttctgcatgccgcgcgcggcacgtcgggactcgtagttccggcgcggaggacgtgcgtcgcggcactctcgcctgaccgtctccacgtgactctcgcacctccggaagtgacgtaagcag

SEQ ID NO: 369879 - DNA, 122 bp, Homo sapiens
gtcccctacttccctccccaagaagtgctatttttagcaaattctccgcgcgccgccgcccgctcagctcgcagctcgcagccgcccgctgccgccctcccgagccccccccgcgcggcggc

SEQ ID NO: 369880 - DNA, 122 bp, Homo sapiens
agcttatcagaagctcgctgcatgtacgaaagcagcaggttgtgcggagcaggcagccttcgagcaggacagtctggtcagcaaagaggctcatctcacagcgccggcctcgggcctgtccc

SEQ ID NO: 369881 - DNA, 122 bp, Homo sapiens
gtagccctccggggcgcataggaacccggagccaggcaggaggaccgagcgggaggacaacgcagggaccaacccatccatggggatccgggcccggccagctgcttggcctcccggccctc

SEQ ID NO: 369882 - DNA, 122 bp, Homo sapiens
caggcccccttcctccggcctccgcctccggagtgctgagctggagattccgccccgcgacggcccccagatctctgacccgcgttaccggcactcacctgccgctgcccccgaccaactca

SEQ ID NO: 369883 - DNA, 122 bp, Homo sapiens
gttcagtcaacgttgagaaccattgatctaagcctagggctctccaacttaaacttacatcggagtcacttggagggcttggtaagcagtaaattactgattccatccctagagtttctgat

SEQ ID NO: 369884 - DNA, 122 bp, Homo sapiens
aaatgtggtataaatacacaagggaatgctattcagccataaaacagaacagaatattgccgtttgaaataacctggatgaacctggagaatgatatgtaagtgagataagccagtcacaca

SEQ ID NO: 369885 - DNA, 122 bp, Homo sapiens
ttggtgagccccagccttatttgatccatattttaattactctgtgattcaaatctgcatcgtagggaatcagtacagcgacataagagcttcaaccagcataaagaacattttcaggagct

SEQ ID NO: 369886 - DNA, 122 bp, Homo sapiens
acaaaacatcaagcactacaataatttctggaaggctccatcttctggaacatagctcaacgctggaacttaacaaaaaacacgtccaaatccctggcacaaagcacaagcactgaaaacct

SEQ ID NO: 369887 - DNA, 122 bp, Homo sapiens
gaggttatgtgggagcacagccttatggcaggaggaagatggtgaatccaagtcaggtttcgtgcaatccatctggccattctgaggctgtgtcttttgagctaagatcctggtgaattctc

SEQ ID NO: 369888 - DNA, 122 bp, Homo sapiens
tttaggacttcttctactcatcgtcatggagatcgtcaactgtcatggcatggatgggagcgcaatttagcctggaaacgggattacaatgaagcgtgaggtctttttgaagtcatttggcc

SEQ ID NO: 369889 - DNA, 122 bp, Homo sapiens
cctgttcgccctcaggtcgctggactacgaggccctgcaggctttcgagttccgcgtgggcgccacagaccgcggctcccccgcgctgagcagagaggcgctggtgcgcgtgctggtgctgg

SEQ ID NO: 369890 - DNA, 122 bp, Homo sapiens
tatctgcggccggagctccaggtctcgtcctcactactctgtgtcttctgcttttaggggcgcagcctctgtggccctgtgacctgccccctggaagcctagaaatggtgagagtgccgggt

SEQ ID NO: 369891 - DNA, 122 bp, Homo sapiens
gggcaccttgagtgtgcccgtgtgctcctggcgcacggcgcagacgtgggcagggagaatcgcagcggctggacaggtgggcagccctgctcaccccagccccacagccggggcctccccag

SEQ ID NO: 369892 - DNA, 122 bp, Homo sapiens
gcgcgcctgattggacagttcccaccccagagccctgattggatagtagtgcaggcaccgcgacctcaggccttgcgtgtcagaagatgctaccatacactgcacggaatgagccgagagtg

SEQ ID NO: 369893 - DNA, 122 bp, Homo sapiens
tccccgggagagccgagcccgcccgtgcgtcttcccccgcgcgcccgcccctgcgccctgcgcccgccccagcccagcccagcccagcccagcgcggtcgggctcccgctccggctccggtg

SEQ ID NO: 369894 - DNA, 122 bp, Homo sapiens
cccactggactcagctgtgcaggcggatgagaccacggtgcctggcaggacacaaaaacacgcagagtgtggactggaggctgggttctccctgtcacaagactgtcccatcggaagcccca

SEQ ID NO: 369895 - DNA, 122 bp, Homo sapiens
atgagagagcatcctcctgtgtagtcctggcaggagttgtgactaatgggatataaagatcgagcaagaggagcactgggaggggtcttggggtgggaagaaagtggataatgtgctgttcg

SEQ ID NO: 369896 - DNA, 122 bp, Homo sapiens
ggcctggaaggtgagtgaagtcccgaaagacgacgggtggaacggttagcggctatcgggcggttggtctttgttctaccagactttgctgtcagaagagagaaatggtagaatgacaggcc

SEQ ID NO: 369897 - DNA, 122 bp, Homo sapiens
gaccgggggaggggtcctcctcggcatggaggtaggggatgctaggctgctggagacgcccgcagaaagaggcgggatggcggggcggatgctggcggcccgggtctggccacctgggtcag

SEQ ID NO: 369898 - DNA, 122 bp, Homo sapiens
gcggaggagcgagctaggtcaccggagtccctgtcagccgtggcggcacctcccctggcccgcccccaaaggggaagctgcgcattttgattcctctgtatattggtcaatctaaaggattc

SEQ ID NO: 369899 - DNA, 122 bp, Homo sapiens
acgttccagggcatgctcttctccttcttgtgcatctcctccagcttctgctcccagctccgatcctcgcgcagctgctgcgcctcggcctgcagctgctccagctctgccttgccgccctc

SEQ ID NO: 369900 - DNA, 122 bp, Homo sapiens
gattgttctgtccacaggcctcttcttttcttagttccgctgtcttctaggcgtggggaccggggctgtaggggggcgggctgtgcagtaggaggaaggtttcatccaacaccacatcctgt

SEQ ID NO: 369901 - DNA, 122 bp, Homo sapiens
tctcttccctgttttaggtttttcatagtctcctcaaggctcacgcaatggaagctcgagcgatcgtcagacaggcgatggccattctgaccccggcggtgccggccaggatggaggacggg

SEQ ID NO: 369902 - DNA, 122 bp, Homo sapiens
cggcggcagcgggcggggccgggggcccggggagcggcctggctccgctgcccgggctcccgccctcagccgctgcccacggggccgcgctgcttagccactgggaccccacgctcagctcc

SEQ ID NO: 369903 - DNA, 122 bp, Homo sapiens
gggcctgcaggatggtcatggtcgggtggcagctgcgagagtgacacatggtgagccgagcggagtgtaaggccaagtgagggtcggctgccggcagaggtaatttatgtgctcctgaaaat

SEQ ID NO: 369904 - DNA, 122 bp, Homo sapiens
tctccgttttccttctctaagggaagggtgggacttcctattttatctcttagcggcttccggcaagagctgatgtgttaaaaacaagacagcacatgggcctgccggccactcggataaaa

SEQ ID NO: 369905 - DNA, 122 bp, Homo sapiens
agtcttagcaccatcgcatataaatgcctttggcaatccacatgtcggtttatctgggggcgggggtcaggctgtcggaagggatgctgtgcccttgcttgatgtgagtgggcagccagggc

SEQ ID NO: 369906 - DNA, 122 bp, Homo sapiens
cccaggaggtgtgttttggttttttgtttttaaagaaaataaatatcttagtatcatttgcgcaagagaacaaagaagctatgtgggttttcttaaaagcaccaaagaaggttcatatcagg

SEQ ID NO: 369907 - DNA, 122 bp, Homo sapiens
cctggctgctgtcctgggccctgcccacctgcgctcatgacgccctgcacacccgtgtcccggaggcagcgctccacgtcctgcaggcactggatgttcccgttagcaaacacagggatggc

SEQ ID NO: 369908 - DNA, 122 bp, Homo sapiens
cctcgctccgcggctgcagggtccacagcgccacctgggctggaggctgagccgcagaagcgaagcgcgcagccccaatcggactacaatttccgacgggccccgaggccccgccccgcact

SEQ ID NO: 369909 - DNA, 122 bp, Homo sapiens
gtaggtaaataacgaatacacagacatgcagatagacagagtatcatgtggttataatggcgatggagacatgagtcaggatggggaacgggagagattgtgtgtgaagaggcgccatattt

SEQ ID NO: 369910 - DNA, 122 bp, Homo sapiens
cacaagctccaaggagccgcgcttatctcctctggccagcctggcgttgcaccgtttgtccgcctgctggggcctggtctgtgttcccgtgctcccataaactccctgatgtcactaggaaa

SEQ ID NO: 369911 - DNA, 122 bp, Homo sapiens
agtttgattggggtacgggtggacgtggatacttacctgacctcacagcttcccccactccgggagatcatcctggggcccagttctgcctatactcagacccagttccacaacctgaggaa

SEQ ID NO: 369912 - DNA, 122 bp, Homo sapiens
atccggtgatcggcagctcagagccacttgggggatcctgggaatcggctcggaggtgcccgccacctggacttctcaagggagcgcccgccaacgctgccctgccttcacttgtaggctaa

SEQ ID NO: 369913 - DNA, 122 bp, Homo sapiens
acgttcccggggttggatgtggaaggcagctaccccgacgggtgtgctctctgcatacgacgggtgctaacactagcatcacagatgcagtgttattagcactacagaggttattgtcagtg

SEQ ID NO: 369914 - DNA, 122 bp, Homo sapiens
gacttcctgttctcctgctcacagcagggaggcagtcgccgagccggtcagcagcgtgcacggagatcttcactctgcgcccagccccgggacacaggtgcagatctccagcggagcactgc

SEQ ID NO: 369915 - DNA, 122 bp, Homo sapiens
gccagccaaatgggagactggagtgagctcataatgtgaagatttatattttgcaatagacggctttggcccagaaaatgaggcctagcaaataggtctaacaacagcctggagaaaatgtg

SEQ ID NO: 369916 - DNA, 122 bp, Homo sapiens
cgcgggccggacggccggggggccagaagctcccggaggttcctgccccgggctgctgagcgggttcccccctcctgctgtcctcgggactcgggcgcgggaccacgaccgccgcggctcag

SEQ ID NO: 369917 - DNA, 122 bp, Homo sapiens
gctctcaggtaaatgcgcaacaggcagtctacaaatccacaaataaatcgcatctcaactcggatactggggctagggaatgtgctgatggtaaaaccattggtcctgactgtgtgaccttc

SEQ ID NO: 369918 - DNA, 122 bp, Homo sapiens
ccccccccttacacgtttgcacgcgcttttcacgtcctcccccccgccgccagcacgcaccgtgcacgccctgcccccacgctcagagctccgtggcacgcccccccagccccacgaccctg

SEQ ID NO: 369919 - DNA, 122 bp, Homo sapiens
aaagcttcccagattaaagctccccggggccctctatctctgcacgtcttgtcaactgtacgaaggtgtggttttctacaagaatcctcctcagacagcactgcatactttctatggtatca

SEQ ID NO: 369920 - DNA, 122 bp, Homo sapiens
aaacgctggatccaagattagctgcgcccttctttgcttcagttgaacaagcaccagagtcgctgatttggcagtgtcggagcgggaggaactggtcttaaaaaggtacctcctgaactcgg

SEQ ID NO: 369921 - DNA, 122 bp, Homo sapiens
cacagaagtgtgatttgtcatgtgcgtctgcaggaaagacactgtccccacggacatggacgtttgctcatggcattggttaggacttattttgactgatgattcactttgaaatcagccct

SEQ ID NO: 369922 - DNA, 122 bp, Homo sapiens
gccagccccccaggatctctcagagcctccgactgggtcattttgaactgctccttcagccgccctgaccgcccagcctctgtgcattggttccggaaccggggccagggccgagtccctgt

SEQ ID NO: 369923 - DNA, 122 bp, Homo sapiens
gggatgagctcactgcgagttggccaggatttcatcagcttcctcctgcggacttgcccccgctcctttcccggcccggccgcgcgggcgaatccgccggacgcctgctgcccccgagcggc

SEQ ID NO: 369924 - DNA, 122 bp, Homo sapiens
gagcccttctggagcccttccgcagggtcagggctgaggcctgggggtcagggccccttacgttcccctcttttcccagagccggcttcccagcccaccatccccatcgtgggcatcattgc

SEQ ID NO: 369925 - DNA, 122 bp, Homo sapiens
ggggctggccatgtaaggcccacaggcggtcctgcccgcccggtgccctgcggagagcctcgtgcagccctgggcaccgcccctgccctgccctgaccccttggccttgaaatgctgtcatc

SEQ ID NO: 369926 - DNA, 122 bp, Homo sapiens
ggccctccgtcctcacggcctggggaacgatctgcacccctcctgggtcctctgtcatcacggcctggggaatagtccgcgctcctcctgggtccccccacctcaggccacagcttccctca

SEQ ID NO: 369927 - DNA, 122 bp, Homo sapiens
acccctacgcgcttatggcctcgtcccacaatcccccaatctcgtcccaattcgaaaaaccgaggaggagggaataaactgagagataaagatccccccatcttgctctttccccgggaccc

SEQ ID NO: 369928 - DNA, 122 bp, Homo sapiens
gcccgcccggggctagaggcggccgccgggagggcgcgcggcgccggagacatgtccaggcggaaacagagcaacccccggcagatcaagcgtgagtcaaactttgcccgcggtcccctccg

SEQ ID NO: 369929 - DNA, 122 bp, Homo sapiens
cgtgcagcacggtcaccgagaacacggctatcctgcggggacacaggagcatggtgagcacgcgccggggacgctcatgcagccctccctccgccatcaggggctccataaccatcactagt

SEQ ID NO: 369930 - DNA, 122 bp, Homo sapiens
taccgccatcatcagcacgcgcgagctgtcaccagggcgcgagacaaccgaacacggccccgccccctgcccgtctattggcccgcccgctggagccccgcccctcaggccctgcattgcgc

SEQ ID NO: 369931 - DNA, 122 bp, Homo sapiens
tcgtcctccttgctgtacattcccaggcccaccttgagaggtttgtcactggcatcgagccggaacttcagtttacacaggctatcgaagagtttggacaggtggcggctcacctgggagga

SEQ ID NO: 369932 - DNA, 122 bp, Homo sapiens
ccagagtgcctccgtctgtcctgtaggttcattcaatctcccatacacacagactcacagcgagaccgacacacactcccatacactcacacacacaactgcaggcagcgaggctcgggaag

SEQ ID NO: 369933 - DNA, 122 bp, Homo sapiens
tctgacaggcagaggctgggaactgcctgtccctggaaacggcctgtctggcacaaaacccgtaggcgctgcccggggccgggttggggcagtcggcctttgccctcctcctcccgggaggc

SEQ ID NO: 369934 - DNA, 122 bp, Homo sapiens
ttgggagccttggtaattaaggggaatgtgcaccaaaagcatgaatggctgtgtcgtgggcgcaggagccagctccagttgtagttgtcattttcagctagagccaggtggggagctggggg

SEQ ID NO: 369935 - DNA, 122 bp, Homo sapiens
gaaacctggaggctctgacgccggcccacactccttcccgaagaaacctggaggcttggacgccggcccatacccatttttggacaccgggggcttcaatatctgtggcatcagctcctcag

SEQ ID NO: 369936 - DNA, 122 bp, Homo sapiens
ttcagcaggatttcagaaccgttctagaccccatgcagattgtttctctgttaaagaaggcgctttaagaagctgccgaagaggctctgcctttgaccgtcaacaggcatctttcctctagt

SEQ ID NO: 369937 - DNA, 122 bp, Homo sapiens
ttgatgcgaacatctaaagcgcccggctggacacgcaaggctcggacagtggtcactccgcgaacgcactctgtgacctggagcacacaggtcccccgctgagtgtcagtttcccagatcgg

SEQ ID NO: 369938 - DNA, 122 bp, Homo sapiens
tctggttgagagatgaaagcagcagcaggaaaatgtgttcacagaacctcatacgagtggcgtctagggccaaggctccttgaatgcatacccaagggctgatgagaggtggggacgagtgc

SEQ ID NO: 369939 - DNA, 122 bp, Homo sapiens
attgttcccctctgcccttggtgtaaccaggagagaatgagtttggccaaagctgtggggcggttctggccataggaggattcatcctttaaccagagaatgctgaaaaattagcaccatct

SEQ ID NO: 369940 - DNA, 122 bp, Homo sapiens
tctaggggtagagactcagagcggagagagggggatgggcagggagagaagagtggtaatcgcagtgggtcttatactttccggatcaagattagaggctctgctctccgtgttcacagcgg

SEQ ID NO: 369941 - DNA, 122 bp, Homo sapiens
cagtacacgctatttagaataataatatgtgtggtgctcccaagagttcacaaatgatttcgcatcccatctctcatccaatccttccagctgccctgtgaggtgagcggggcaaatgttcc

SEQ ID NO: 369942 - DNA, 122 bp, Homo sapiens
gagccccaggcttgcttgctcccacctgggaacctccggccccaccccacccccaccctgcgttgttcctgcctccacagtctgggtgcacgtgccttgaagccccatcagtccctgacctt

SEQ ID NO: 369943 - DNA, 122 bp, Homo sapiens
ttttaaccccgacctctcagcgtctgaatgaacagcgctcccacctccagtcctggcatccgctgggggcgctgttctttagctagtgccagtattaaaacattgtcattacgagagtgcca

SEQ ID NO: 369944 - DNA, 122 bp, Homo sapiens
ccctccgccgggctccccagggaagcatttttagcagcgccctcctggatcggagaaaggcgcctgcgacccagatcaccgcaacacagacgggcgtcatctccctttgtcctcaacttgag

SEQ ID NO: 369945 - DNA, 122 bp, Homo sapiens
actcatatagctgttagtctcagaggtcctcaatggctgttggagataccagttttctgccgtataagtctctctgtaggcagtttataacatgacaatggggttccctcagcccactgttt

SEQ ID NO: 369946 - DNA, 122 bp, Homo sapiens
acaactctgggtgcgccacctttaagagctgtaacactcactgtgaaaaaggtggcacgtcggacgtgccacctttaagagctgtaacactcactgtgaaaaaggtggcacgtcggacgtgc

SEQ ID NO: 369947 - DNA, 122 bp, Homo sapiens
accgtccctgaggccatgtatggctgtgtcttcacgggggcgttcctggagtgggtgaaccgggagcggcgccatgtccccctgcaaacctgcttgctgacctcaggcttggccgtccaccg

SEQ ID NO: 369948 - DNA, 122 bp, Homo sapiens
cggccaagatgtcggcctggagctgccgggaggaatccagggcttcctcgggcctgctgtcgggggctctgtcggggacctcactgaaggcccgggggcccccggcccggtcactctggtcc

SEQ ID NO: 369949 - DNA, 122 bp, Homo sapiens
tggtgttccctcaagagacagccaccgttcattcatgaggagtgttccttggcactgttccgtcacccgagactcgtgtagattctccaccgtcacatggagcccacggcatagtgttcact

SEQ ID NO: 369950 - DNA, 122 bp, Homo sapiens
gcgcccccagctaggacttggcgtcctgctcgcttcacctcgggaatggcccgttcggaccgtcctccatgactctggccactgcagggcccgagcccctcaaagccagtccacggacccgt

SEQ ID NO: 369951 - DNA, 122 bp, Homo sapiens
ggtgagtgcgcctctgctggcgcgccgcgccgggccccctgcccgcgccccctgtcacttcgcctctccgccccgcccacgctcccgccgggtctccccgtgagtgtcccgtgtcctgccag

SEQ ID NO: 369952 - DNA, 122 bp, Homo sapiens
gctgaagctgccagcgccgctgacgggccccttcctgtattttacacctttcgcgaattccgctcctttggaaagggaataatggctttgggatgttgttctgacacagaggaaaaggatat

SEQ ID NO: 369953 - DNA, 122 bp, Homo sapiens
tacacacttggagacatgggaagaaggtctgatggagaatgtggctctgttgaatcacttcggcttaaagagataacaaggtcaatatggacaaggattaaaaaataataatagttcacggt

SEQ ID NO: 369954 - DNA, 122 bp, Homo sapiens
ccacctcgcccttgtagttagttgtgcagccattcccgtgcctgctttcctccctcaggtcgtctcttggggtcctctatagctctcagaattcctcctcccagacactccttccccagcct

SEQ ID NO: 369955 - DNA, 122 bp, Homo sapiens
ggggcctaggggcggagcctcgcggatcctgggcttatgagagtgggggctatgctctaccggggtggggacggtggcggggatcctgtctcacagaggaggatgctaccttgaaggccagg

SEQ ID NO: 369956 - DNA, 122 bp, Homo sapiens
taccagaccctgcttgtaacctggagtgggtcagttggcttctctttgcttctgtctgtccgtctgtaaaccagggcaatatctgctttctagggtttttgtgaaatttgacaaagcaatgc

SEQ ID NO: 369957 - DNA, 122 bp, Homo sapiens
ataacaagacaacaactgcagtaacaatccagtccaaaagtatttgccaagagtttattccgcggttagcaccaaactctccatctattttgccactgcaaacagtgaacccatagttcccc

SEQ ID NO: 369958 - DNA, 122 bp, Homo sapiens
gttgatagtaacataaaaagctagatgacatgaccatggactcaaaatgaacttggagaacggaaggccaacaagaaaatttttccttgtagaaaaaattaagatgtttaaaaactaatcaa

SEQ ID NO: 369959 - DNA, 122 bp, Homo sapiens
ccacgccaggccgtcactcagaccccagagttcaacagccgttgactggtgagtcaatggcggccctgtagacagaggagactcctgacaaacagctgagctaatcaccagtcaacagccac

SEQ ID NO: 369960 - DNA, 122 bp, Homo sapiens
gctatcttcgccttctgggttgagtgctcaagccaagtgtggaaatgcaagtcactgcttcggcagattgcaagctgcccaatataatctaagagccttctatgccagcctgcagactggag

SEQ ID NO: 369961 - DNA, 122 bp, Homo sapiens
tcagggtcaggaatgaaaacggcagccccagcccatagtaatgagaaaaatccaatctgccggggagcgcccttttcctgtgaagggcaggtaacaactgggtcaggctcggcaggcccacg

SEQ ID NO: 369962 - DNA, 122 bp, Homo sapiens
ggaaggcctcccagctgccgtgctcatcccctgccacggcacctctggcactgacccgcacgcccctggctcctctgtacccagcggagcctcgcactgcctggctgacagggcctgagggt

SEQ ID NO: 369963 - DNA, 122 bp, Homo sapiens
gcaggggacgagctgcggcggtggcacctccgggtgtggaaggctccagtgagatggagtcgcgagtcgcggacgctgggaccggcgagaccgcgcgagcagcgggcgggagtccggcagtt

SEQ ID NO: 369964 - DNA, 122 bp, Homo sapiens
cttctctcaccctccttctctacctcccacctcctgataccctctacccccatacctgtgcgtccaggtgggcagaggcaggagaaagagcccacccggtcaatgcaggtggatcccggggc

SEQ ID NO: 369965 - DNA, 122 bp, Homo sapiens
gcctccattagtgaacatacataggtccgcaacggggtcttgcctgtctctcccactgagcggggcttcccgcaagccgggccaggcacagcggccagtgatgtccgcgtgctggggcctct

SEQ ID NO: 369966 - DNA, 122 bp, Homo sapiens
aagcacccactacctgccaggcagcaggttctgggccacaagaggccataaccatgaggacgctccaatctgacagtctcttgttaaatgagataaaactccattcttcagtcccatcagga

SEQ ID NO: 369967 - DNA, 122 bp, Homo sapiens
aaatcagtttttagtgacccagatgcctggagaaaagctgccaggatttttctggtctatcgcagaattttctacatcaatgagaaggatgctgcatatcttggctgtattatttcctactg

SEQ ID NO: 369968 - DNA, 122 bp, Homo sapiens
tcattgctccgaaacatatgcatcaccgctgcaggaccctgggggccggacggtgggatacggccaatctccggggagatgctgtggctcttaccgagcgggagaagggtacgcctccccgc

SEQ ID NO: 369969 - DNA, 122 bp, Homo sapiens
aaggagagtacttttttcacacagtcaggggatgaggatctgatccgaattacattttgtcgagtcactcattcccacagatttgagtttgaatgcagcttgtggggtacatcatcaggaac

SEQ ID NO: 369970 - DNA, 122 bp, Homo sapiens
cagcaggaatggagcaaacccctgaaatgaacctgtcagaccaatcttttcccagcctgccgctcctcactactggcagcagcccttcagtgaaattgtccaagtgctgctttattttaagg

SEQ ID NO: 369971 - DNA, 122 bp, Homo sapiens
ctcagtttcttcacctgtaaaacggggccgtgatgcctgctgtgcaggcccatgtgacaacgtgccttgaaagcgtgtgggaaaagtgctttgtgtgttcagtgagccctcaaactgggctg

SEQ ID NO: 369972 - DNA, 122 bp, Homo sapiens
ggggtataagcactgtggcctgtgtactctgctgcagctggaaccagaaggaaagcatcccgggaccctggtttcactgattctcttcaacagctacatgaacttgtgcacagtgtgctggc

SEQ ID NO: 369973 - DNA, 122 bp, Homo sapiens
gagcctgtgacttctgcccgaccagatcccgtggttctgaggaccggccctggaaccctgcgtccttccgacccaccagctccctcgaggatggacttgaggctggatgctttcctcttccc

SEQ ID NO: 369974 - DNA, 122 bp, Homo sapiens
gaaattggggcgctcttgtgtagggctctggtgatggctgtctgcctttttctgacctctcgttttaaatgggtgcatgtcctgtttctcactgggggcctcaggatgcttgtcacttagcc

SEQ ID NO: 369975 - DNA, 122 bp, Homo sapiens
taaagcggcggccctaagacgacgcgggggtccttgtgcgcacttaaatggagtcggctgcgcttggtgagttcccacacccggtagatgtgagggaaaaactgccttactcagaaggcacc

SEQ ID NO: 369976 - DNA, 122 bp, Homo sapiens
caccctgtatcccccggcagacgcccgggaactctactaagtgggtgaccccagagagctcgcccccacactccgactccgagtccagcactcggtccactgcacagggacctcgcgcccca

SEQ ID NO: 369977 - DNA, 122 bp, Homo sapiens
cctgtcggataaggggcaagtgtaagaccggcctcatcagctccagcaattgtaacaaagcgccatgggcgggggcttcaacactagaaattgttccctcgcagcctgggggctggaagtcc

SEQ ID NO: 369978 - DNA, 122 bp, Homo sapiens
tcacggtgctatgattcttgtgctcctggaacatgcaaaggtagcagatgcaggtctggtcggtctggcagaagagctccatcgtcttgccatgcacgggacacttgcgggcctcaaagtcc

SEQ ID NO: 369979 - DNA, 122 bp, Homo sapiens
ttaatccttctgtgccatatttatcataaatgtcccgtttctcatcatttgataatacctcgtatgcctcagctacttctttgaattttctctctgcttcttctttattttctggattttta

SEQ ID NO: 369980 - DNA, 122 bp, Homo sapiens
tgaagaagaaaatccagtgaaaccaaacgaatatgtacagtatcatctagcacatgtccccgggagcagctgggtctgggctgggctcagcttcaggtggggagttttggttctattcggag

SEQ ID NO: 369981 - DNA, 122 bp, Homo sapiens
ggagcgggtccctaggcggttccgcgcggtttttagtagccaagactgtatccctttctgcggcaatcatttcctcctagacttctgtcctttggggactttcagagtctcccccgcaagag

SEQ ID NO: 369982 - DNA, 122 bp, Homo sapiens
caagttgtcccagcaagaatgagaagggcatacactcagcctgagtaagggaggataggtcgtgggagacctgttttcaaaggtcttgccagcctttggagaaaccagtaatatcagttcag

SEQ ID NO: 369983 - DNA, 122 bp, Homo sapiens
aggtcccgccccgctccctcctgagctctggggtcagggaggcctgggaggggttagccccgcccactcccggggctcagtcgggtaggcgggccctggaggcatgaggccccgcccctgtc

SEQ ID NO: 369984 - DNA, 122 bp, Homo sapiens
tctaccctagtcaactctagctgtaataagcctactggaactttaacatcgcatcttctgcgattgctttccttaccattgtaagctaaaattactcctctctttactctagaaaatgatag

SEQ ID NO: 369985 - DNA, 122 bp, Homo sapiens
tcgcccggcaggggtcgagtggaaagcgaggacgggggtagcccccacagaccctccgcccgggcccagactgccgccgccacctcggctcggctcacccaaaccccagcaggccttcgggc

SEQ ID NO: 369986 - DNA, 122 bp, Homo sapiens
tgataatgttatccaccatttcttctgtgatatcaactctctcctccctctgtcctgttccgacaccagtcttaatcagttgagtgttctggctacggtggggctgatctttgtggtacctt

SEQ ID NO: 369987 - DNA, 122 bp, Homo sapiens
acggggctgacccagccggggtagggaccatcgtggaaaaactttggcgaggtggggggacgcggaaagagagcggcccgcgccctgcaccttgcgccgggcatcccgcgccagtgcctcgc

SEQ ID NO: 369988 - DNA, 122 bp, Homo sapiens
agatgaagacggcgctgccactgtttcagatgtggctgattggagtaaatgagcacaccccgcacgtggatgcagcagtggctgacggcagctccctccccctctccctatctcggtctgtc

SEQ ID NO: 369989 - DNA, 122 bp, Homo sapiens
cttctggatctttgagaagaaacggatcttctttttggactcctggaacgtgaacgacctcgtctaggactcctagagtgccttctattccagacaggtctataaccacctcgatgatatct

SEQ ID NO: 369990 - DNA, 122 bp, Homo sapiens
gacggaggccctgatcccgcccgaggtgcctccccgccaatgcccagcacacgaggctgtcggaaaggttcattggctaatttgccacagttggttttcaatatgtccatcccttttcctga

SEQ ID NO: 369991 - DNA, 122 bp, Homo sapiens
tccgtcttcatcagtgtttccagcccacctgggagacctcgttagcgcagaatccaaaaccgtgacctgagacggcagggctgtgatcgtcacggcaggccggcccggggggaaacacctag

SEQ ID NO: 369992 - DNA, 122 bp, Homo sapiens
aatggcatcccggatcagcaaataccatattcacttcagaggctcaagatgaatctagagcggtggggagaatctgatgaaatccccccacccactcccctgccccgggaggagccctgaag

SEQ ID NO: 369993 - DNA, 122 bp, Homo sapiens
cccctggccgcctctctcagttctctggcagggtttggtgcgcggtacaccgacccggaccgcgccttcccaaacgagtggcctctcctccagcccgattggcgagctagagaaaagaaggg

SEQ ID NO: 369994 - DNA, 122 bp, Homo sapiens
gggcctcggattgggcctcacgtagtgggctggacagaggatggagcctcttggcgtaagcgcggttgggcggggcattcctggattggcccactccggcgtcgcagaacgcttggcgtatc

SEQ ID NO: 369995 - DNA, 122 bp, Homo sapiens
ccgcgccggctccccgcgccgctgcgctcctcgccccgcgcctgcccccaggatggtccgcgcgaggcaccagccgggtgggctttgcctcctgctgctgctgctctgccagttcatggagg

SEQ ID NO: 369996 - DNA, 122 bp, Homo sapiens
gcactccagcctgggtgacagagtgacactccgtctccaaaaaaaaaagagacggggtctcgctctcgcccaacctggagtacagtggcatgatcatagctctctggaaccttgaatgcctg

SEQ ID NO: 369997 - DNA, 122 bp, Homo sapiens
ccgccgggggggcgcggcgtgtgcatccgcgagttccgtgcggccgagcaggaggcggcgcgccgcatcttctacgacggcatcatggagcgcatccctaacacggccttccgcggcctgcg

SEQ ID NO: 369998 - DNA, 122 bp, Homo sapiens
tgaggcggtgtgtccattggagccactggaatcgggcataaccctgggcccgaccgtgagcgtgcaccctggggtgaacaccacccagcgagaatggctctgggaacacaggccaggggcct

SEQ ID NO: 369999 - DNA, 122 bp, Homo sapiens
cccccgcggctccattgagaaactgagcgtctcattcacaagctggcggcgaggagggcccggcggagcgaggacgcagtccgggagggggagacagagaggagcccgggcgggggagggga

SEQ ID NO: 370000 - DNA, 122 bp, Homo sapiens
cccaggcaggtccaagcttccccctcagacgccagggcagagcctgcctccctcctcagacgccagagcagggtgtgtctcccacttagacccacagccacctcacctcaggctgagtcacc

SEQ ID NO: 370001 - DNA, 122 bp, Homo sapiens
acctcgtgatccacccgccttggccccccaaagtgctgggattacaggcgtgagccaccacgcctggccaagtagtggcattttaagtctcagcctaccaagccaatctgcctgtcccttgg

SEQ ID NO: 370002 - DNA, 122 bp, Homo sapiens
cagcccccaggggccggtgacgacagcatggagcaaggcagatggagaacgcgctccccacggcaggaagctctgctggacggcaccggtctactcaggaggcataattcacaaatcaagat

SEQ ID NO: 370003 - DNA, 122 bp, Homo sapiens
gtggatgccgagtgaacagagaagagggggacatgcctcctgacagtgaaaaccaacccccgggtgagcgccactgcacggccatgacagtcacagcccacaaaggcaggaatcatcacgac

SEQ ID NO: 370004 - DNA, 122 bp, Homo sapiens
ctctctatgggtctcgacacttagctgcaaagatggcatcgaccccgcacccacctggagcgagaggcaccagccaactgcatggcatggttagtctgggcaatttccctagcactgtagct

SEQ ID NO: 370005 - DNA, 122 bp, Homo sapiens
acacgccctcaagcccttcatctcgagctcttcaactccagtccatccccactcaccgtccgcagtcctaccaagcctcacgtggggctcacacccacaatcctccgcgtgacgctccgccg

SEQ ID NO: 370006 - DNA, 122 bp, Homo sapiens
cccctttcaaccctatccctttgctcacgaagtcccgctccagcggctcctcctcttggtcgtcagtcccggaatcccgcaaggggtctggcttccccatcgacaccttcttctcttctgtc

SEQ ID NO: 370007 - DNA, 122 bp, Homo sapiens
agatgcatcggctcccagtgccaaggccagctccccagcatgttgtgagccttggggaaccggtggccttccttgtgctgcccagcccctacagtctcagaatgggaaagtggaaagggatc

SEQ ID NO: 370008 - DNA, 122 bp, Homo sapiens
ttctccctgaccatcctgggtggtctctgtcctctgcgaggctgattgtcctgtggtcaccgcaccttccccacaggtggtgccaggagggaatggggagctgcacagggacccctcacaga

SEQ ID NO: 370009 - DNA, 122 bp, Homo sapiens
ggcggagccggggcgaaaaggcggggcggggcagcacgggggcggggcgtctgttgtggtcgggttctgaggtggtctggtctttctgaggtacagcgtagttttgtcctccgcgaagtccc

SEQ ID NO: 370010 - DNA, 122 bp, Homo sapiens
cctcaaccattggaacctgggacgaactgaacccacttcacttgctgtggacaccagcgccgacgaacttcgcacaaagcccgtccactggacagctgcgcgctgccaaatggaatccagat

SEQ ID NO: 370011 - DNA, 122 bp, Homo sapiens
ggaagacgactacgatggtgaggaagacatccgatccagcgggggaaatgatggcaaggacgggaggatgatgtcagggacagcaagtagtatgagattgagaaggttcctttgtggaaggg

SEQ ID NO: 370012 - DNA, 122 bp, Homo sapiens
agttgtttttcaaggccctgctcaaagcagtctcatctaataagcctcctagaagcccttcgatggagtatctttgcacccatactgcatggtggttgacacctctgttataaccttcgtcc

SEQ ID NO: 370013 - DNA, 122 bp, Homo sapiens
gtattgaactctccccttctatccaagcatgaaagtaccaagctctttcgcctagaagaacgctttcaaagcgtatcaaattcacgggtttggagacaaagagaaagatgctgctcttatcg

SEQ ID NO: 370014 - DNA, 122 bp, Homo sapiens
ccacgggccacctgtgctgctccgtggacgcctaggactcctgggcagcagacgcgtgcccgagtctccgaaccctctcccactggactagagtgggcagtcgcagctccaagcctggacct

SEQ ID NO: 370015 - DNA, 122 bp, Homo sapiens
gatagtttaatttgggagctagtgaaaaggtctgctgagtatgtgttggcctgtggggctcggctttatagccgcccagctgtggccctcatcagggattgaggatcagagactccccagca

SEQ ID NO: 370016 - DNA, 122 bp, Homo sapiens
ctcagagtgagcttctgaggcaagaagtggctcccaggccggctctgcgggttcccggcccgggtggacgtacaaagttgccccttgtcaactccggccaggtcccccgtaattgaaaataa

SEQ ID NO: 370017 - DNA, 122 bp, Homo sapiens
tctggctacaatgaaaaaccaattatagaagggtctgaagatattcaaaaccaaccctaccgaaaaagaaaacaatgaacattgtgtgtagacccttgtggatccgtttgagcagccactct

SEQ ID NO: 370018 - DNA, 122 bp, Homo sapiens
gaatttggggggctctgagataatggcagcatctctcacggtgacggcggcctcaggtcacggctgtggtggagtctaacagtgggggctctcttctcatccatgctgtggggagggggtcc

SEQ ID NO: 370019 - DNA, 122 bp, Homo sapiens
acactaaacccaaagctgtccctggaaacggccccacttgcttcagggcatggtgcaaaacgttgatttaatctgagaagctgctctctggctttaggccagaggagccacccacccagcca

SEQ ID NO: 370020 - DNA, 122 bp, Homo sapiens
agggaaatgtaagagagatgcccttcactaaataaactgttcatgcaggtgcttgtttgccgtcggtgttgagtgtgctggagcaaaatgtgtcagactcgctgggtgacacccttgccatg

SEQ ID NO: 370021 - DNA, 122 bp, Homo sapiens
gggcggggtcagggcggtacccacctcccaggatagattttttagagtccacaggggacccggcctggagttggagcttcactgtccgggtgcaaacacagtggaagccccaccctgaggct

SEQ ID NO: 370022 - DNA, 122 bp, Homo sapiens
tgcacgactggtgcgtcatccatgagcagaagaccaagagcagcgcccccaggacgatgccgcactgcagggtggagacaggaacacatgttcacagcagcaggtgctccccagaggccctc

SEQ ID NO: 370023 - DNA, 122 bp, Homo sapiens
cagcggaaggagccgcgtgcctggcgggaggctccttgaggacgagagaagatgaaaactcgggaaggcagctccctaggcaggtcttccgtgatatgcaggaactatcccggctgggaatg

SEQ ID NO: 370024 - DNA, 122 bp, Homo sapiens
tctagacacgttatctaaaacctggttcatctgtccttccacgcagggcctaggggatgccgaattccagggtccagaaagagcttgggataaaaagaaacttcaaggggacggctttgacc

SEQ ID NO: 370025 - DNA, 122 bp, Homo sapiens
catcctccgcatggccgtctcgcacatgaagtccatgaggggtacagggaacaagtccaccgatggcgcgtacaagccttccttcctcacagagcaggtaccctggtcatcacatcaccatt

SEQ ID NO: 370026 - DNA, 122 bp, Homo sapiens
tgttgttgttgttgttttgagatggagtctccttgtgtcgtccaggctagagtgcattggcgcgatctcggctcactgcaagctccatctcctgggttcacgccattctcctgcctcagcct

SEQ ID NO: 370027 - DNA, 122 bp, Homo sapiens
cagccaggccgctggactcgggctaggggcggggccagcgcagggggcgcaggcgcacaccgcctccgcggcagcatggcggacgcagctcctcaactaggcaagaggaagcgcgaattgga

SEQ ID NO: 370028 - DNA, 122 bp, Homo sapiens
gtgcgtggttattctgagctgccttcctgctgcgcgcgtcaggaatttgttgcatttcgtcgcttgcagggtcctgttgtgcggaggtgccacagtttggccgtaccctcatctgttgatgg

SEQ ID NO: 370029 - DNA, 122 bp, Homo sapiens
tcacagggttttgtgaggattaagttgatacatttgaaagtgcttggaggccaggcacagcgactcatgcctgtaatctcaccacttttggaggctgaggaggacagactgcttgagcccag

SEQ ID NO: 370030 - DNA, 122 bp, Homo sapiens
catttccactcaaggagacctacctgggaagagtgagcgctgcaagacccagcctgaccgcgctaagattactatgcagcgcccgagcccgctgtctgcccggcaaccgatgacgtcactgt

SEQ ID NO: 370031 - DNA, 122 bp, Homo sapiens
caaccctgcacctcagagccgcccgagggccactgccacgggggcagcctggatggagggcggtcatagtccgtccgtgtagggagcgcagcccccggtaaggagagcgggggtttaatctc

SEQ ID NO: 370032 - DNA, 122 bp, Homo sapiens
ggaatttaaacttccgggtcagcctcagtgcagcttgggaaacgtagttcctagtccccacgtctcgctccttggagcccagactgagggagcgtcgcgaaagttgcccgttttggaacgct

SEQ ID NO: 370033 - DNA, 122 bp, Homo sapiens
gcagcgcccccaaggagcctccgcctgccacttgctggggactgtcggctttccagctaccgtagaatgcgcttgcgtatcaaaaagaaatcatctttctactgtaaactagagaccgagac

SEQ ID NO: 370034 - DNA, 122 bp, Homo sapiens
gcggcccgcgcgcttcccgcagtgtccgggaggtcgctgggggtggctttgcgtgcaacccgggtaaaggccctgcagccgtgaggctggcgctgggaggagggtggaaaatctcaaagtca

SEQ ID NO: 370035 - DNA, 122 bp, Homo sapiens
cctgcagcggcccgtaggacacctccctttccgagcacggactggtccccgcccctcccccgggaagtctccgcccacagggccccagcagcccccgcgcgccctcgctccctcccgtcagc

SEQ ID NO: 370036 - DNA, 122 bp, Homo sapiens
ttgctctactgcctttcctcctaaggcaggccttagcctgaggggatatcagctataaaacggatgaggtgatctcttagcctccacagcagttttctgtttctgtgccaggaggccaacaa

SEQ ID NO: 370037 - DNA, 122 bp, Homo sapiens
cacaagtgggtgtggacagaagcacaccagtgggcagtgcctgccggtgaggaatgggcgcgtggggcaggggtgggccgacacttccaaggcactccttttagtaccatcctgattcttgg

SEQ ID NO: 370038 - DNA, 122 bp, Homo sapiens
gggagacaaggcctgggtgacggataaatttagcgcacgagtcgagtagctagcgcgggccggcaggcgtgggaccgcgagccgcgcgggggcctcgggggcagccctccatcccctcgggt

SEQ ID NO: 370039 - DNA, 122 bp, Homo sapiens
gaactcccgacctcaggtgatcctcccgtctcggcctcccaaagtgctgggattacaggccgcgcccggccatctccacctgcttgaaggtcttgccgtcgtagacgcccaccgtgctaccc

SEQ ID NO: 370040 - DNA, 122 bp, Homo sapiens
gtgtttttgggtaccagcccttcacctgtgtcgaccttctcaactgggaaaacaatacaacgccccataccgaaaagccacaagccctaattgatttgctccaagctgttatccagacccac

SEQ ID NO: 370041 - DNA, 122 bp, Homo sapiens
actagtgtgcaaataaggtagtgactttctccagtgcgctctgaggtgcgtggcttgaaccggcctgggaggcgcccgcagccccaggccctgggaaagcgcggctgcagtgtcgcaggtcc

SEQ ID NO: 370042 - DNA, 122 bp, Homo sapiens
tgtctcctcctccagcaacactttgttgccactgcgacaaagtgggtggtcctcaggcgccgtcaggagattttgaactctctgaagaccgtccctggatcttgggttaaaaatctgttttc

SEQ ID NO: 370043 - DNA, 122 bp, Homo sapiens
aagacaataagcttttggagggccaggaagttgtgttcccatctgccgagtgtggggcctcgagggccagaacctcagaatgtagaagctgagttagtttgtggcagggtgaagggctgacc

SEQ ID NO: 370044 - DNA, 122 bp, Homo sapiens
acctcgggtgagatgggctgaggcgaggtgtggatactcgcagctacccctcagctgacccgagctgtgtgcccggctgaggccacaggcaaagccagggacactgtcctcaggctccttac

SEQ ID NO: 370045 - DNA, 122 bp, Homo sapiens
aaagccgctgacagccccactaggaacgatctggagtctggtctagggcacttctccctccgcgttcatacaggttgccacaaaaagcttgggcctgaagctcgaaggccccggacccgctg

SEQ ID NO: 370046 - DNA, 122 bp, Homo sapiens
tctgaaaacggctgacaaaaattgctacatgccaaggactccagctgtctgaacaacagacgacacattctgcaatgctggtgccctctactggctgacactacctgatgctttactctaga

SEQ ID NO: 370047 - DNA, 122 bp, Homo sapiens
agcgagtgcagggagggcaggttaagagagtgtgggtccagtagcctcaccgtgactcagcgcttcgcggccggcggcctagaggaggcgggaggcgggagtctacgggtctcggaggccct

SEQ ID NO: 370048 - DNA, 122 bp, Homo sapiens
gcggcatagtacctgttgcccgccatctgagggaggtgcaggtgccaatccttcacgtgacgtgacgtggctcaccacagcctgtgtacatgtgagcagccgcgtgcagaggggaagctctg

SEQ ID NO: 370049 - DNA, 122 bp, Homo sapiens
tccatgctacagagataagaggcaaggtcacgttctctgctcagggcttcatggctgtgccgaggaaggctgggtcaccggacacttctccagccgttgtggggcccctggttagcagccag

SEQ ID NO: 370050 - DNA, 122 bp, Homo sapiens
cacctcccctaatgcagtgcttgctgtgatcccgcccctgggggaatccctgtccttagacgcagccaactcacctctcttcttgtaacaatagcaacagcaatgctatccagctttttttt

SEQ ID NO: 370051 - DNA, 122 bp, Homo sapiens
cccaaacatcgtgaagccaagcataacatggctgtattaggaaacactcagattctgctccgggaagacaacgaagctgtgggcaagtgcccacccctctatcaatatcagcatctcggagc

SEQ ID NO: 370052 - DNA, 122 bp, Homo sapiens
agctcgtaccacgtggcctctcgcagttccgtcagaaacacctccccggagctgttggcccggaggccctgccaggcccaggtccccttgggccggtactccagaacgatggctgtgatagg

SEQ ID NO: 370053 - DNA, 122 bp, Homo sapiens
agctctccccgcgccccctcggagttccgcccggtcacctccacgcggccgagctgcaagcgaccctggcagcctcagaacccaggggtcaggggctcatcgatcctccctcccagcccctc

SEQ ID NO: 370054 - DNA, 122 bp, Homo sapiens
ccacgggccgcctaagcggagactctggaaacgcctggggcgggtaccgggtggtctccgcgtccttccctttcaactgttacgtcgatgtggacttcagtcacccgtacaaagctgggctg

SEQ ID NO: 370055 - DNA, 122 bp, Homo sapiens
ctcagctccagttggctgcattttcctgtggttattttatggtccttggtctgccactcacgcaggcactggctctctgtgtcaacgctctgcatgaccgttactgtttaagccccatctga

SEQ ID NO: 370056 - DNA, 122 bp, Homo sapiens
acatgtttgagcatttgtggcgagtttcagttgccaggggccccagggaaggctggactgcggcttgtctggcctcccccgcctccctatggcttctgtaggcgatgtgactgaatcacaaa

SEQ ID NO: 370057 - DNA, 122 bp, Homo sapiens
acagggtggtaagctagtgaggcgcatagaaaaggcaggcccgtggcatcgccgcaggtccgggaagcacacacagtgtacttgaaggaagctgcgtgccccgaggaccggctgcaccctgc

SEQ ID NO: 370058 - DNA, 122 bp, Homo sapiens
aatacagtgttgttgctgtaggaagactcccggattctaccccaggatacttcatgagaacgaaccccttcagagaggccctacaaaacagattagagggaagacagaggggtccaagggag

SEQ ID NO: 370059 - DNA, 122 bp, Homo sapiens
gcgacgcagccaccgggcgcccagctggggtccccaaccccacccccagcctcgctgtcccgctgtcctcgcgccgcgtcgcctccccaggctgacaatgcgcctttcaggggcctccgccc

SEQ ID NO: 370060 - DNA, 122 bp, Homo sapiens
ggtaaagtgtgccccaggccatgagcaggggccctgaggaggaggactgtgagcaggaagcgagctccctcacctgctcgcaggagacaacccagatagatcaaaagccaagagcacaaaac

SEQ ID NO: 370061 - DNA, 122 bp, Homo sapiens
ccacatttgtgtttgctcttagagatcgagctcctcagtggtacctgaagcctttgcttccggaaagcgcggtagggttcgtaggtagggctagtaggtagggttagtaggtagggctagta

SEQ ID NO: 370062 - DNA, 122 bp, Homo sapiens
gggccgctgtcttccaggaaagagagagctgtgcccagagaggagacagaactctttctccgtgaatcgcatccttttctgtgcgggatgatttacattctgggaacaaacggggccgtatc

SEQ ID NO: 370063 - DNA, 122 bp, Homo sapiens
gtatgcgccacactacctggccacggtctcttcctcagatttgccataaacctcacctggcgtcctcaagtacactttgaccacatgggcatcagaacatcaagtgggaaacacgcatgaat

SEQ ID NO: 370064 - DNA, 122 bp, Homo sapiens
tccgcccggagcacaggcgggccccgggaggggcgcacttgacgccctggacagggggagcgcgttgcgctgccccctcggtgccgcctcactgggcctcgtggctccgatcacgttccaac

SEQ ID NO: 370065 - DNA, 122 bp, Homo sapiens
ccaccaggcgcttctaagaccaggagagtcttagaaccttgagagcaaatctgattcatgcgcacttccccgggagctgactctggggggtgggtgacccgtagtctgttcctctgggccga

SEQ ID NO: 370066 - DNA, 122 bp, Homo sapiens
tagctggcaagaatcccaggcaaacactaggcagattttctttacagagcatgagaaagacgaaggcttctaaagtgtgtgctgtgttcgtgtaacaaaagagaaaacaccatcttctttct

SEQ ID NO: 370067 - DNA, 122 bp, Homo sapiens
ggggccacaagggttggggcgaggacggaggccctgacccgcggcctgtggggcgagaagcgggccccgtccagagaggcctgggtcagcgggtagctgggccggggactgggaggagaggg

SEQ ID NO: 370068 - DNA, 122 bp, Homo sapiens
cagctctactgtctttaggagtcccaggaacagcaatttcagcaagtgcctttgcagtcacgtgaccacagcacaggagtcctcccttcagacagcagaattattctggggtgtgctctccc

SEQ ID NO: 370069 - DNA, 122 bp, Homo sapiens
gtggccggggtggggtgaggatcggaggcggggctagagaccaggaccaagtccggaaggcgtggctggggtggggcgaggatcggaggcggggctagagacggggaccaagtccggaaggc

SEQ ID NO: 370070 - DNA, 122 bp, Homo sapiens
aattagcttctccagcaattcacccatatccttagatttgagaaccatggttccctcctgcgtatcagcttctctcgccacacctctgccaggattctagggcttggggaaattaatcagtc

SEQ ID NO: 370071 - DNA, 122 bp, Homo sapiens
cctgaaatgaagaatgagtaatctggatgagtcggccctgaaatcgacctgcaacttacccggaacgtgagctgtctctctctgacctctgctggctgcttcacctggagtctgagtccgac

SEQ ID NO: 370072 - DNA, 122 bp, Homo sapiens
gggcttgcacccccacacccaagtgagcggcctgctcactcctcagctgcaggagccagacgtgtggagtcccagcagaggccaacctgtgtctcttcatctccgtgagaaaggtgcccccg

SEQ ID NO: 370073 - DNA, 122 bp, Homo sapiens
ctatccattttcactgacaaagcattgcaggttcccaacctgtgctgacacatccaggaacgctggcaacttagttcccaggcgcagtttgagaaatcagtttgtttgccccaatctctcgg

SEQ ID NO: 370074 - DNA, 122 bp, Homo sapiens
ccagcctgctaataaagcgagactctgtctcagaaaaagaaaaaaggaaaaaagaaaagacgatgaacaaaaactctgagaaatacagtattacggaaaaggaccgaacctacaactgactg

SEQ ID NO: 370075 - DNA, 122 bp, Homo sapiens
aagctgaggtgggaggatggcttgagcccgggaggttgaggcgacaataagctgtgatcccggctccagcctgggtgacacagcgaaacactgtctcaatatacacacatacaaacacacaa

SEQ ID NO: 370076 - DNA, 122 bp, Homo sapiens
tctgtaaggtttaccactgcttttcatgtcactaaatcaaaagtcagttctcaggccgggcgcggtggctcacacctgtaatcccagcactttgggaggccaaggcgagcggatcatgaggt

SEQ ID NO: 370077 - DNA, 122 bp, Homo sapiens
gggtgaggttgagtctatgtagaaatgttggcttctcagttctggcagagtcttatggtgcgtagaggtctgatggagttagggagtcagaggtgaaagctcagaggcaggtggatgtatgg

SEQ ID NO: 370078 - DNA, 122 bp, Homo sapiens
aatcccaagccctgcgcatctcagctgccctggctcagctcagcatcagactcggttaagcggggaaggctggggaaattccccaacctctacacaaccatttcaccagctctaaatgttta

SEQ ID NO: 370079 - DNA, 122 bp, Homo sapiens
tctcggaggccctggcccttacccagacctgggcgggtgagtgcggggtcgggatggaaacggcctctaccgggagtagagaggggccggcccggcgggggcgaaggactcggggagccgcg

SEQ ID NO: 370080 - DNA, 122 bp, Homo sapiens
agaaatgtgtgtagggaggttttgggggttttgtttgtttgagacggagtctcgctctgtcgccaagctggagtgcaagtggcgtgatctaggctcactgcagcctccgcctccggggttca

SEQ ID NO: 370081 - DNA, 122 bp, Homo sapiens
ggcactgtcctcgcctgacacgcagactctcggcggcagcccagacggcggggcacaggacgtggggagactccacgcttgacctcttgcccaccgccttccggtctgctcgcgccaacatg

SEQ ID NO: 370082 - DNA, 122 bp, Homo sapiens
tccagaagctggttagacctaaggatggtcggtccttggggagggttcagctgaagagcccggagcccctgaccctcacccctactctacggcgagtccctccggcacctcgccacccacaa

SEQ ID NO: 370083 - DNA, 122 bp, Homo sapiens
tgtcagcctgccctaggacttcatgtctatatatttccccattcactggtgagtaccctgcgcctgcggcgggcgtctgtctcgcggcggtggctgcgggcccgggcgcctgcttcgtgccg

SEQ ID NO: 370084 - DNA, 122 bp, Homo sapiens
aagagtggagggggtaacgggaaatactgcagtgggagaatctttaatatttccaccatgcgggtatgtggtgatgtggaactcatggtagagaactgcaattgtaaatctgggaatcaaaa

SEQ ID NO: 370085 - DNA, 122 bp, Homo sapiens
agtagctgggactacaggcgtgagccaccgcgcccggccatattatgtattatgtataaacgcatatgaccttacacacaaggttaaatgcaaatacctttgggttgggcctggctcagctc

SEQ ID NO: 370086 - DNA, 122 bp, Homo sapiens
cagaatataatggggaaactgagacaggcctcattaacagaagagctgacgcaaaaaccacgttttctgtgcctcacagccttgccacttcaccctaccgggtaacgatcatgctggcgtgg

SEQ ID NO: 370087 - DNA, 122 bp, Homo sapiens
ggcagccccctggcttcgggtatggatcactggatgctgctgctaaccaaatgtgaacctcggttttcatatttgtgaaataggctttaaaacacctaaatcccaaagctgccagcctaagg

SEQ ID NO: 370088 - DNA, 122 bp, Homo sapiens
taggactctctccaagtcaagcgacgagaaagtgcatttttcacagtgcttgctgcagcacgtttcagggagcatgtgtggagcctcctggtggggagaatacctggcagctgccagacaca

SEQ ID NO: 370089 - DNA, 122 bp, Homo sapiens
gggggctggcgaggtgggcggggcgggcaggcgagactaggtctttccctgtttggcctccgtagccggcgccggcgggtcgttctgtttgaatgaatgatcccagcagccgcgcccaatgg

SEQ ID NO: 370090 - DNA, 122 bp, Homo sapiens
cctagagtgaaggaaaaggcttttgctcgctgtgtcaaatcataggttgtgagctctaagcgggcctctggtggcactccgccctgtgcccagcgggcacttaccgcacactcaacagtggg

SEQ ID NO: 370091 - DNA, 122 bp, Homo sapiens
tgggtgtcggggtgggcacccagcccccggacggacttggaccgcgcccggggacgcccacgcactcccacgctccaggcccgccgggatctagattcggcgccccccgcacggcgggagcc

SEQ ID NO: 370092 - DNA, 122 bp, Homo sapiens
cttctagccccgctccccaagagcgcaagcagccctggcgggtggagagtttgagggactcggggttggaggaggaaaacgggattcagccagagatggcaggctgacagcttcaggcagat

SEQ ID NO: 370093 - DNA, 122 bp, Homo sapiens
ctggcggaggggtggtgcgaggggcgggggagggtcggcttcccacgtgggggctgacgccggctgctcagcaacgcttgcttgatcctggggctataaaacgagtccaccgtgagcgcagc

SEQ ID NO: 370094 - DNA, 122 bp, Homo sapiens
gagcagacagctgaccctcctagcaagtagaacatggcttccattttagaaggtcctgaacgcttgaaggagcctccaggaactacacataaagctgtgctgtcaacggcacggcaggaaga

SEQ ID NO: 370095 - DNA, 122 bp, Homo sapiens
taatgtgctaatgaggggaagcccagatgccagcgggctcagtggagctctttgtgacgccgggttcccggggctggctggagtctctgtacctatctggatcctgctgcaggccggggaaa

SEQ ID NO: 370096 - DNA, 122 bp, Homo sapiens
ttagggctcatcccaacgtcataaggatttggttaggcggggagggttgcgggtaggggtcggtggggtggggtcatggtttacttacctcagcgccacacagaaccactacgcaagctcgg

SEQ ID NO: 370097 - DNA, 122 bp, Homo sapiens
gggagcgcccgcagggttcctcttaaggggcaactccctgtactcccttttcaaaagaaccgcaatcgagacttgtagaccagctccgaggctccgagtgtgggtgctaagctgggcgtccg

SEQ ID NO: 370098 - DNA, 122 bp, Homo sapiens
acctgcaccccagatgaaaatgtacccaaatgcatcgttcatgctgggaaacctctggaacgtaatgggaggaaggatcgggcgagccctgtccggctcctgttcttacactctcgtgcctg

SEQ ID NO: 370099 - DNA, 122 bp, Homo sapiens
ggctcaggctggagaacccgccagggcttcctaaaaagggcgagcaggaccaggagttggcgccactccgggcgcggtgaggaggtgctgccaggctgggttggagcaggcaggtgttccgc

SEQ ID NO: 370100 - DNA, 122 bp, Homo sapiens
cttctcccctcctcaacactggcttttagggtcctccctggaggagcacagccacaggagcggctcgcgtgggcactgactacggtcgggagccccagccagctcccagtcgacagtcagca

SEQ ID NO: 370101 - DNA, 122 bp, Homo sapiens
ctccctctcatagtcccgcccctcgtcctttcccacactttccctggcagcccctctcaccgccctaggataagaaacccgcgctggggcgctgtccaggaaacctgtgccagcacagcgtg

SEQ ID NO: 370102 - DNA, 122 bp, Homo sapiens
aggaagtgtagcgcaggagatctgttgaatgacgagcaagtaggctcaggacggcgtatccggggaattctgggaaatgtagttcacacgctgcgcggggtaggggcacttccgctcccggg

SEQ ID NO: 370103 - DNA, 122 bp, Homo sapiens
gtcatggccatctcttgggccagttttctttcatcccctccgagatgggggagtgggagacgattcctaaagtccttcttagtaagcccttcaggaaaaggtttgatattggagattccctc

SEQ ID NO: 370104 - DNA, 122 bp, Homo sapiens
gtctctacaacatgaagaatgtctcaagatactttatgtgcttcatcctacataacaaaacggtatgaatctgccgagattgaaactttttagaaattgtttaattaactagttttggggac

SEQ ID NO: 370105 - DNA, 122 bp, Homo sapiens
catcccagaatctctgaactctggtgatgggaggacccaggagggctcctcaggagggtccgggcctgttctctgtgcactccaagtgctgagtgcctgggatcaaagccctcatgctgtct

SEQ ID NO: 370106 - DNA, 122 bp, Homo sapiens
aacggaactcagatgagaaacaccagaagcattcctaataaagtcagtagtaaaacctcacgtgaccactgaacatctttctaccagccctggccaatgcagtaaaacatgaagcaagaagt

SEQ ID NO: 370107 - DNA, 122 bp, Homo sapiens
tactaattagtgagccacagtcatgacatcctttgtaaggaaaaatgttcctaactgaagcgctcgcccatgtccgcggtgagacgcctgcatggggcggtctctgcttctccccaaggacc

SEQ ID NO: 370108 - DNA, 122 bp, Homo sapiens
ctcctgttctccgtattttcaaacatgttctcgaacatgggtttgacctttccgaagtatcgctagtccctggattccacctcctattctatatattttgtaatgttaatgtccagtttcat

SEQ ID NO: 370109 - DNA, 122 bp, Homo sapiens
cccaggtgtggacacagcacattgctgagggtgcccctgagcacccaccttcttctgggacggaccggcgcccagcggacactggaagcatctgaactggtgtgcagtgcagccctgatttc

SEQ ID NO: 370110 - DNA, 122 bp, Homo sapiens
aagtgctaactgggaagaatttgggcattaatcggtggctttcagttttctgtgcttgtacgcttggtctatgcctgccagatttaagcaagagaaactagctgatgaaaacgtaccgatat

SEQ ID NO: 370111 - DNA, 122 bp, Homo sapiens
aaagttcttgagtttggaagtttcctgggtccatagcccctttatacccgcctgaaggcccgttgtcaccacgtcattatttccttgttattatttacctactgaaaaaattaatcatgtaa

SEQ ID NO: 370112 - DNA, 122 bp, Homo sapiens
tcccaactcctgaggttgagcttaacacagccgggagaggaaatccaaagccactgtatgcgtgactttaccagctgtgagtcagccggtgttccacaaactgtattttttaatgatcacaa

SEQ ID NO: 370113 - DNA, 122 bp, Homo sapiens
agcatatttctacatggttatcaatcatgcctatccaaggaagttttcataaaaggcctacgaggacatgatttggagggctttcagataggaggttcctggaggatgccactcccagggag

SEQ ID NO: 370114 - DNA, 122 bp, Homo sapiens
ctctgctgcttctcaaagtcgagttggggccttacagggacttcaggatggcttagggagcgccttctacccaagacacgatgtacggaagctgtcttttggagaaagaagcaggcatgtac

SEQ ID NO: 370115 - DNA, 122 bp, Homo sapiens
ggctgtgggtccgtgtgtctgtgacgtcagaagatgggtcctgggatgtcactgcaggcccgggcggggacctgggctcacggaagggccggggggacccgcagggtagaaaaaggaagttg

SEQ ID NO: 370116 - DNA, 122 bp, Homo sapiens
tgactcacaagagcaggccaggccagttgacatgaatagcagtactttatttaccaaaaccggttacattagtgcaagtaactgctttaattttcagatcattgaaaatttctgtgattcag

SEQ ID NO: 370117 - DNA, 122 bp, Homo sapiens
ggtcctccctctcttcctccccctactccaccctgttttctcctccttcctcctcttccccgcccctccctgctgaggtagtttctgagcagtgtcccttctgtgggctccctttgaaagca

SEQ ID NO: 370118 - DNA, 122 bp, Homo sapiens
acgcacgcacgcacggagttcatccaaggtctccgtccaagctatgacaagctacatcctcgctcggtgattacgagagacacccctgcagttacctgatggcacaggatggtctgttgcac

SEQ ID NO: 370119 - DNA, 122 bp, Homo sapiens
ctcgtggtgtgctgtttttcaagcccatcggaaaagcgcagtattcgggtgggagtgactcgattttccaggtgtcgtccgtcacccctttctttgactcggaaagggaactccctgacccc

SEQ ID NO: 370120 - DNA, 122 bp, Homo sapiens
tggcagtggtgtctgctgtcactgtgccctcattggcccccagcaatcagactcaacagacggagcaactgccatccgaggctcctgaaccagggccattcaccaggagcatgcggctccct

SEQ ID NO: 370121 - DNA, 122 bp, Homo sapiens
actttttacctacttaaagccatacggttctctcttttctcgcttttatccccgggtacccgctaggacccagccccggcccctggacgaccctcgggcagccaccttcaagcctccagccg

SEQ ID NO: 370122 - DNA, 122 bp, Homo sapiens
acaatttgcaccatcgaaacgagccagcaactggttgggaggcgggcggtagctgggccccgcgtgccctcggcggccggggtcctctccggggagaggcacacacacgcatagccggatcg

SEQ ID NO: 370123 - DNA, 122 bp, Homo sapiens
ctcctggacacagaggctgccctctgattgggttgagcaccttgggctgaacccctcatccgtggaccaggcaacccggcatcgcccacgtggagccgctgaggtgatcatgtgttctggtc

SEQ ID NO: 370124 - DNA, 122 bp, Homo sapiens
ttaatttgcatttttcaaacagcaaatcactttcacctggtgactttcacttggtccacacgtcaagctccataagaaggtgcgtgctgaagcttgagctgttccctgactggcacacgggc

SEQ ID NO: 370125 - DNA, 122 bp, Homo sapiens
ccctaagcttcctccagaagagcttcgacgtggagaaacggggtggacgctccacctaaccgcgccattgggaaaagaggaggcacctggagcagaagcttctctcccaagtgcacaacaga

SEQ ID NO: 370126 - DNA, 122 bp, Homo sapiens
acttccggcggatgtgggggccagccctcggaaacggaagtgagcggcggggtcgactgacggtaacggggcagagaggctgttcgcagagctgcggaagatggtgagtgggtacccgggcg

SEQ ID NO: 370127 - DNA, 122 bp, Homo sapiens
tcccgaggcgggaggcgctggttcctcggctccctttctccctacttgggtaaagttctccgccctgaatgacttttcctgaagcggacattttacttaaatcgggtaactgtctccaaaag

SEQ ID NO: 370128 - DNA, 122 bp, Homo sapiens
ctttgaatctcttgtcactggcaattttcatcttcccggaaacaggtgtgctggggagaacgtttccccctcccccacgtataaatgcttatagtttaatggtaaacaaccattgacagagc

SEQ ID NO: 370129 - DNA, 122 bp, Homo sapiens
gaggagggctcaggtacagggaaggtgcgtccatactcatggtatgttcaagaacatgagcgagcgtctctgtgttgtgtgtttgtggctgtgtggctgtatcatgtgaggttgtgtgtggt

SEQ ID NO: 370130 - DNA, 122 bp, Homo sapiens
atttaaaactctgtgaaccaccggtctaggctatactttgcagtgtattaaggtggtcttcggcacctctcgcagacccccttcctcttgcctctagcgccaacctctcagcctctcgcata

SEQ ID NO: 370131 - DNA, 122 bp, Homo sapiens
taaagccaaaatatttcctagcggctaaaagagctccaagcctaggcgaatctgccggtccgctcgccggaaatgcgggctctcctgccggaagctgcccctccaccattttgtggcccgct

SEQ ID NO: 370132 - DNA, 122 bp, Homo sapiens
caagctgacccctggctgcagtggcctgggtctgtgtggcgttcgcggctttggcgactgcggtggagctccctcgtgggtccccgaggacgcctggatgggcacccaccttaaatatttag

SEQ ID NO: 370133 - DNA, 122 bp, Homo sapiens
cgcattggccgctgcggcacggacggcgcagcctcgggcgcggcccggcacaggcgccggcggtccccgccagctagcagcccggcgaggcgctggcccacccatggtcctcgggcggcggc

SEQ ID NO: 370134 - DNA, 122 bp, Homo sapiens
gcattagggcctcctgggagcaggagctgaaaggaaacagccctcctccagatggcttcccgggtgggtgcctgtaggccatgaggaggccctgcatgcagccctgcttcactgggaccttg

SEQ ID NO: 370135 - DNA, 122 bp, Homo sapiens
aactctttccattgtcaatagaaattgacaaacctcatctcctaaatagtgcagctgagccgggcgggatccacgcagctgtaaagggctctgctcttggggccggggagcactaacaatag

SEQ ID NO: 370136 - DNA, 122 bp, Homo sapiens
ctgcctgactccagtacaagtcagatagttgtagggacatatataaacccagctcccctccgccttggtccagttgaatcatgtcctgtccaaacacagaacccaggcaggtaacattagac

SEQ ID NO: 370137 - DNA, 122 bp, Homo sapiens
ggaagccttagcccaagagaccccagcacccaccccagggaccacagccagccaggccctcgaacctaagtcctccaccagggagcttgcctcagagaagtctagagtctggagccaagatg

SEQ ID NO: 370138 - DNA, 122 bp, Homo sapiens
atgttaactccctcttccaacccacagatgcaggagcaagtcagccaagatcagcagagccgcttcagctgagcccagctgacccacagatgtatgaacattgttattttaagatgtggaga

SEQ ID NO: 370139 - DNA, 122 bp, Homo sapiens
cccgccccgcggggatggcgagcggctgccggcgtgggcggtttggagctgcgctccccacgcactcgtcctggaggaaggagtcatcctcccaggcgaaatgaaaaaaataagaacggagt

SEQ ID NO: 370140 - DNA, 122 bp, Homo sapiens
acatgaccgtatggaagaacagagaagaccattcagagcttcatcggaggcagtggtgaccgcaggacccctgcatctgcttcagcccaaccagacatccctgaccctgcccagcagaccct

SEQ ID NO: 370141 - DNA, 122 bp, Homo sapiens
agcttccccaccttcagctattttaggctctgacactggaaatgaaattcttatgaagcccgggccaaggctgaggttgtgtggaactagggtgccctctactgtcttccacaacgatcacg

SEQ ID NO: 370142 - DNA, 122 bp, Homo sapiens
tctgcagccggtcagaactcgtcctcttccccgggaatctgcgagctcccccttttcctccgatcaggcagctcgaagtttacacccctgtgccgctgccaaagccgaaagcctttttcttc

SEQ ID NO: 370143 - DNA, 122 bp, Homo sapiens
gtttccctcaggctgtaaaatgaattaagggagcactcttctctgtagtcattttcttcccgcgttggttctaggctcaatcatttagatgtctctggtatctgcatagtctgggaattata

SEQ ID NO: 370144 - DNA, 122 bp, Homo sapiens
atattaaagttgctgcagttaaaaagcccgtagttggatctcgggagcaggcgtgaggtccgctgcgaggcgagccaccgcccgtccccacccgttaactctcggcgccccctcgatgctct

SEQ ID NO: 370145 - DNA, 122 bp, Homo sapiens
cgggccggcaggggaggagttaactccggaggtaccggctgggctcactgtacctgccgccgccgccgccgccgccggtgggagggacgaggaagcgggagccgcctgggcgccaggagcgc

SEQ ID NO: 370146 - DNA, 122 bp, Homo sapiens
actcttccagcaggaccagaccaggggcctccttcctgtccccaggcgttcccggcccctcgcaggccccacccatgcccttggcctcagggtccaacaactgggggagctaccagggctct

SEQ ID NO: 370147 - DNA, 122 bp, Homo sapiens
ccatgggccacgcgctggggattcaaggtggctgggacattcccctgctctagaggcgctcgcaagttagcggggacaccgttaccgcaattacaacacaatgtagcaagtgcttctaccag

SEQ ID NO: 370148 - DNA, 122 bp, Homo sapiens
gcaaaatgtgacaacttctatatctgagggttgtggtaaggaccgaatgggataaaatttcgagtccttagcataaggcatgacacacaaatatttctataaggccttattaagcatgtgga

SEQ ID NO: 370149 - DNA, 122 bp, Homo sapiens
caaatgtgcaaatgtgggcacagtctctgcacattgtactgcctttaataatttgccagccgtttaatatggagagcctatcacagtaatattcacctttgtttattctttagattgaccct

SEQ ID NO: 370150 - DNA, 122 bp, Homo sapiens
gacggaagaaggggagcggccggggtcactgaggcagatgtggcgctaccgctcctgggacgtgccacagatcccatcagaggcaccccagacacagtaggtacaaggggtggcctgggagt

SEQ ID NO: 370151 - DNA, 122 bp, Homo sapiens
acgggtctctggttcttcaagttttcatctgaaagtctcagtctttgctatcacaaccaacgcccccttcctacactccaaggttgatggaatgaaatgtcttggaattgagggtttaatta

SEQ ID NO: 370152 - DNA, 122 bp, Homo sapiens
gttatactgagtgaaaaatgccagtcccaaaaggttacatactgcagtgagctgtgatcacgtcacttcactccagcctgagcaacagagcaagaccccatctctaaaaatagataaagaaa

SEQ ID NO: 370153 - DNA, 122 bp, Homo sapiens
ggccaaagggttaagtctcaggggagttggagaggagcgggctcccggctaccacgcccgcgccttgcagggcacctgtgcccgtcgacctccacctcagctcgggaaacgggctgcgccta

SEQ ID NO: 370154 - DNA, 122 bp, Homo sapiens
gacatttggtcacaaatgataaacagttaataattaagccaactgaaatattttcaagtacgctttttttggtgcttgcaattatttttgtgacaggatagaatagttttctttctctgaaa

SEQ ID NO: 370155 - DNA, 122 bp, Homo sapiens
tctgtgggtgtggagggaggggactgagcaaagcctcagggaggccacatacgttctcagcgccatgcttggctggtgactggtcatgcaccattggcagggcctggagcacgtgcaaggaa

SEQ ID NO: 370156 - DNA, 122 bp, Homo sapiens
ccagggaggtgatgacggccgagcgctggggtccttccacgggcaccacctggggctgcccgtccctgtctttgtactggatcacgaaggagtcaaactcgccctcggggaccgtccagcgc

SEQ ID NO: 370157 - DNA, 122 bp, Homo sapiens
ggaggagtgctgcaggcgggcgcgtctggcacgggcccctccgggtggcggcaagggcgccggtggcccaggctcagggcctctgtctggcgccacgtcctgctgcccagagctggggcgct

SEQ ID NO: 370158 - DNA, 122 bp, Homo sapiens
tctccctgagttatttagccacagtactcacagtggtctccatggctgtactcggtatggcgcctcccagcaacctttctgtctccacttcctgcccctcttccggctgctcaccctgctgt

SEQ ID NO: 370159 - DNA, 122 bp, Homo sapiens
cagtaattgaggacaggagccaacatttactgagcgattactatgtgccaggcactttaccgggtgccaggacacaggacaatgatgactgactcagttatgccctcagagcttatggcctg

SEQ ID NO: 370160 - DNA, 122 bp, Homo sapiens
gtggaaggccagaggctcctcatgcagtgaccgcgttttccgtgctgcttgggattttcccgggggaagggtcctgacgggcaccatcctgtagaatcgcctccatctttgctgcctggcac

SEQ ID NO: 370161 - DNA, 122 bp, Homo sapiens
acctcaggtgatcctctctcctcaacctcccaaagtactgggattacaggcgtgagccaccgcgcccagccacaatcatgattttagaagttacaaactctaatggaaacaatccactctgt

SEQ ID NO: 370162 - DNA, 122 bp, Homo sapiens
gcgcgcactcccagctggcgcagaaagtgtggggcctcgcgggttgtacggcgactacggcgcctgccaagggcaaaaaaacctctttgccgagggggtggggccttcctagggagtgggcg

SEQ ID NO: 370163 - DNA, 122 bp, Homo sapiens
ttgcttcctgcccacgagtgaggcctctggttgcccgcaacctaaggggcatcgcagccccgagcaacaccgcccccaccagccttagctgagtgctcccattggccagaggccagcgggtg

SEQ ID NO: 370164 - DNA, 122 bp, Homo sapiens
acctcacgttagcgtctgcagccttgaatcgggaggcaggttgggcgcaggcttctcgtgcgcaccagcgagcacccgggccaagcgtggaggctctgcgggctgggggtccggcccacacc

SEQ ID NO: 370165 - DNA, 122 bp, Homo sapiens
atcccagggaggcccctcctccgggaagccttattctgacaaagccccgccccctggtgtcgtttttttcggcggagccccacccccctggaatcgacttccccggggaggccccgccccct

SEQ ID NO: 370166 - DNA, 122 bp, Homo sapiens
cgcgctgtgtgcagcaggaagcccacgccaggtcctgacggctgcatcctgtgtgctctccggcctggccgcctcaagacacgccacctttgatgcacacgcgcttccggaggcacaggaag

SEQ ID NO: 370167 - DNA, 122 bp, Homo sapiens
tctcagctgagatgactggggcgtaggtggccagggggaagtggatgcgggggtacggcacgaggttggtctggaattccgtcaagtccacattcagggccccatcaaatcgcagggaggcc

SEQ ID NO: 370168 - DNA, 122 bp, Homo sapiens
tccaggcctgaatccttcataaaccataaaaccttgaatgcactgaaggaatgcataaaccgatttcacttagcgctgggcctaaataaactggatccaacttctcaggctggacttcttcc

SEQ ID NO: 370169 - DNA, 122 bp, Homo sapiens
ctctggccattcagggactttgaccctctggttacattgccaatgaggtggctgtgctcccgtggtattagcaggagaaaaaggtgacctgcctgccacacctccggcaagcacctagattg

SEQ ID NO: 370170 - DNA, 122 bp, Homo sapiens
ggggaggatcctttcctggtaaggggagagggacgggctaggagccaagcggaaggaccccgtgttcaaggcccttcaagggacgggacaggcgaggaatctctttgagtcttttgaattgt

SEQ ID NO: 370171 - DNA, 122 bp, Homo sapiens
cagaatcaggaaaacctggctggggccagagtacccgggcacatcctcgctctcctgggccgcctggggcctgcacctgccgggggatctgccagcccccatacctgcggccgggcacattt

SEQ ID NO: 370172 - DNA, 122 bp, Homo sapiens
gctggtggcaggtggccacatcccggatggtgcctgtgtgtgaccatcacacgctctctgcgccccctgggctgcagcaggcaggcaggacacagggtgcctggcttattcccggggaggct

SEQ ID NO: 370173 - DNA, 122 bp, Homo sapiens
caacattaattccctgcagagcctttatcattatctgacagtcttgttttgttttgtttacgatgtatccactctcactagaaatgtaagtgccatgggcaccatgatcttgtatcaagaag

SEQ ID NO: 370174 - DNA, 122 bp, Homo sapiens
cttgctgccgttgccactgctaccgccgctgccatattgggttcttactgtacaggctgccgctacggtcatgtgaccgctcccgcgcggccgtcactactgtacgcagccggccgcgcgaa

SEQ ID NO: 370175 - DNA, 122 bp, Homo sapiens
ggagggcagatgattcagaccccaccctgatgggccgggcagtcactgcagaacccaacccggtgcagtaagccactgcgggcagctgtggcccagccccaggccccagatattgggagggg

SEQ ID NO: 370176 - DNA, 122 bp, Homo sapiens
agaaggctaattgaaattgataaaatcattttatagtcagctacggtggcctgcacccatcgtcccagctacttgagaggctgcggcaggaggattgcttggcccaacagttgcagactagc

SEQ ID NO: 370177 - DNA, 122 bp, Homo sapiens
gcggcgcagggcagcgggtgcggtgacacctgtgggcacaggtgagcggcgggagggctacgcggcccgggggcggggcggccgggacccggggcctggaagccggggcgaaggggaaggaa

SEQ ID NO: 370178 - DNA, 122 bp, Homo sapiens
caggccgttccccgaagctgggggatcccacaggacttgtgctttcggagcccgggagtgcggtgctgggtgttgggggaggggggaggaagaagtcaaatggcttcctaatatatcatcaa

SEQ ID NO: 370179 - DNA, 122 bp, Homo sapiens
ccagctgggaccaagttagagaggcgccgcttagagagctgcccactgtgacgcttcatccgttccctcttcagcagcccttcccacctggagcttgtaggagaatccacgatgttcatccg

SEQ ID NO: 370180 - DNA, 122 bp, Homo sapiens
aaaagaaaataaaggctgggaaaagtagctcccatctgttggctaggctgttctcaaactcgtgagctccagtgacctacctgtctttgcctctcaaagtgctggaattacaggcatgagcc

SEQ ID NO: 370181 - DNA, 122 bp, Homo sapiens
tcttgaagccctgttgacttagtggctaatctgatcaactgatttgaaccctggggatagcgtcctgtaagatggcatctgccttttcacaggggactcagagccctcaacccacagacttg

SEQ ID NO: 370182 - DNA, 122 bp, Homo sapiens
ctgcatgaacgtaatccagtatttggaaagtaatccagtttgaaatgtgaagatgtattccggcagaatagtgagtagaatgacatgcttactatacagaaggcaaaaataggactctcagg

SEQ ID NO: 370183 - DNA, 122 bp, Homo sapiens
gtcaaggaccatcagatttcgcaccccctcctttgcctcattaactcaagtatgatgagacggattataacaagagaatacagatgaatcggtctgaagacttgaagtggcttttagcctct

SEQ ID NO: 370184 - DNA, 122 bp, Homo sapiens
acaatgggctgttgtggttaaattgaacttgaacttgaacctcttaccttgaagtctgggcgcacatttgagaaaagaataaagcaagtaggtatgatgggactgggtgaaatcaggtggtg

SEQ ID NO: 370185 - DNA, 122 bp, Homo sapiens
cagaagtcctgctctacctgtcgcacaggaagctgcgtgattgatgtgcacttgcagctgcgcagctgctccttggagtacccagagtccccgtgccccgccgctgggtcagcactttcctc

SEQ ID NO: 370186 - DNA, 122 bp, Homo sapiens
cttgacgggcagtttgcaggctgtacttggatctcgcagagcataagtttctcatttacacgttatttccgtcccccgcccccattcctgccaacccagtatcgaattgacggtcgccggcc

SEQ ID NO: 370187 - DNA, 122 bp, Homo sapiens
tctctctcctccccaagacgaccctgagggtgccttcgttccccccgagttcgacgtgaccgggaacacctttgaggtaagtgcaggtgggggtaatgtgccacaccccccttttacctcta

SEQ ID NO: 370188 - DNA, 122 bp, Homo sapiens
ctctcagcccctgccctcatacaagatttttctcagccttcagcctaccactgcagaatccgatgtgacccaccattagggagtctgcatcttggaagagttggaaataaccctttaacatc

SEQ ID NO: 370189 - DNA, 122 bp, Homo sapiens
ggcctgcgcctgtgcccacgggatgctggctgaagacggagcatcgtgccgcgagtatgccggctacctgctctactcagagcgcaccattctcaagagtatccacctgtcggatgagcgca

SEQ ID NO: 370190 - DNA, 122 bp, Homo sapiens
catggcagaggaggaagatgagggcacggacagacctgggtccccagcctgaggagggagcgtgagcctcccagagccccaggactgggccagagcacttaggtttctttttccatggtttc

SEQ ID NO: 370191 - DNA, 122 bp, Homo sapiens
acgttggccctggctgggacttttcccaacaactgtgacccatggatgcgggcagggtagcgggctgccagacctcagcacctagcacaacacctggtcagcaagcgaatgaatgaacagtg

SEQ ID NO: 370192 - DNA, 122 bp, Homo sapiens
ttttttttttttttgagacggagtcatactctgtcgcccagcctggtgtgtgtgcagtggcgcaatcccggctcactgaagcctccacctcccgggttcaagcgattctcctgcctcagcct

SEQ ID NO: 370193 - DNA, 122 bp, Homo sapiens
cgcccctccgctgccgtgggtgcagctggagttcgtggactacgtgttccacggggagcgcggccgccgggagacggccaacttggagctgctgctgcagcgctgcagcgaggtcacgcact

SEQ ID NO: 370194 - DNA, 122 bp, Homo sapiens
agcaacaacagatagacatggttagggccgggcgcgagcgcggggctgcagctgcaggggcgccctcgggctggctgcggtcggtccccggtgccgctgctcatgtgatgcccacggccggc

SEQ ID NO: 370195 - DNA, 122 bp, Homo sapiens
accttttcttctaagtcttttatttgtcttttctggatgtctgttttatcttctaagtcacgaattctctgaagaaagaaaagaaaagaaagaaagcatcagtaggtggtaagttgtgcgga

SEQ ID NO: 370196 - DNA, 122 bp, Homo sapiens
gtgacattcatgggagactctccacaagtatttactagatgacattgaagattccagattcgtcatgtgtcatctctgaagtcaatgtccactgagtaggatgttggaggaggggcgagagg

SEQ ID NO: 370197 - DNA, 122 bp, Homo sapiens
caggccatttcttttgaaaactagccacagtctagatttgtctgctcatgagaagattcacgttcaacatcttggcaaggatattgtgtagatgatgtggtgattttccattcaattgcatg

SEQ ID NO: 370198 - DNA, 122 bp, Homo sapiens
ctcacgccttactcccaagcaggttctgtagtccagcccccgcggctccctacagccagccgatgctgcgcaagcgccgtacccacgctttagcacatgcgtactcaggtgcgccggtaggg

SEQ ID NO: 370199 - DNA, 122 bp, Homo sapiens
gcgtcacgtgttcgtcaatttccttcctgcataaccggaagtctctctctcctggcactccggaaaatgtagtcaatttttgccttgttttcagctagccagaagggggcgcacgagagcag

SEQ ID NO: 370200 - DNA, 122 bp, Homo sapiens
cagcgcttgggcacaatgccagcctgttcccgggaccccagcacaagggctgctgggagccgggtttagggcaggaagtcagagtgaagcactggtcctgccacatcccaagccccttgtcc

SEQ ID NO: 370201 - DNA, 122 bp, Homo sapiens
ccccaccctccgtgaacttcaggtgaccgaccacgtcggcctgacacccgggcgggcgggcgctccggctccactcccgcccccagcccgggttttgcaggatcgggctccgagcagcgcca

SEQ ID NO: 370202 - DNA, 122 bp, Homo sapiens
ggtgggagagctccttctgatgggcgtcatttcagtttcacagatgaggcatgggaggctcgagtgctccccaagggtcacacatctaggaagtggtccaggcaggaactgaagccaggtct

SEQ ID NO: 370203 - DNA, 122 bp, Homo sapiens
cacatcagcgagaacctctgacacgtgaggtaatgtcgtcacaccttccgaggattaggacgtggacccctctacggagtcacgactctgcccaccacacccatgtcccacagaggctaacg

SEQ ID NO: 370204 - DNA, 122 bp, Homo sapiens
gaatgaaatgagccaaagagagggactggcccacttctgctataatgcccttgaaggagccgcataatgggaagctggctctgctctcatggatagaggaaaggaccctgtaggcagagtaa

SEQ ID NO: 370205 - DNA, 122 bp, Homo sapiens
agccagccctccttagccatggcccccgcacctgctcccacctccaagatccctgctgcccgcttagtgtggggtgacataggttccttattgcatccgcagctcagggacgggcgcagtgt

SEQ ID NO: 370206 - DNA, 122 bp, Homo sapiens
gggccgggcaccgagcggggacttggggcgcggaggcgggcctggcccggggagccggttcgcaagcctgtttccagcggccgcgcggccgccccgcgtgctccgaggacgggctgaagttg

SEQ ID NO: 370207 - DNA, 122 bp, Homo sapiens
tggcctcacctcccccgccgtggtgtgggagtcgatggccacagcacaggcaccagcccccggacagtgcacggtacacagcagctcctgccgttggctcaacgcggaaatctccgccagcg

SEQ ID NO: 370208 - DNA, 122 bp, Homo sapiens
attcttgggcggaggggaccatctttgagtcagcgacgcgtgtattcaagtcctcctcctcgttttttattacaaacaaataagaattattttaggaatacctgttaaggtgattttcattt

SEQ ID NO: 370209 - DNA, 122 bp, Homo sapiens
cctctgagtcgcggttactttaggagcaaacgcaggtacaaacaaactgagtctgtcacccgcagcgtgggagaggcaggtcgcgtgttcctgacagcacgcgaagcagctaaatggtatcc

SEQ ID NO: 370210 - DNA, 122 bp, Homo sapiens
tgcatgccaggcattgtgctgggcaccagggagacagcagtgaccatgtcagataaagcccgtgaggccatggagtttacagtctagtgagagaagggtaaacagtgaaataaaacaataaa

SEQ ID NO: 370211 - DNA, 122 bp, Homo sapiens
ccgctcctgccctctggaagcactgagggtatcaggcccaggcttagggctcgggtccggcgtcccgatgcaggactccgggtttaggtctcccagacccgcgcgatcgaccccgggtgcgg

SEQ ID NO: 370212 - DNA, 122 bp, Homo sapiens
tctcagaacaccgagctgggtggggcccttggtgcaaggcagctgtgaggagctaggctgcgcgaggcctgctgggcccacggcgccgactcaggtcaggctggtaggggccacagccgcag

SEQ ID NO: 370213 - DNA, 122 bp, Homo sapiens
tggctgctgcactgggctctgctggcgtcggcctcgtgtttccctccgtgcggcgtctgccggccagtccttaactcacgcactccattcgagtatatgatcctggccaccatcatcgccaa

SEQ ID NO: 370214 - DNA, 122 bp, Homo sapiens
ggccatgtgggtggctgggtcccacggggcctgatggttgcaaggatcctcaaaggccagcgggctcagtggcctggacccagaacctcaaatgtcagggttggagcacccaggacccatct

SEQ ID NO: 370215 - DNA, 122 bp, Homo sapiens
tcatgttttcctagtcctttcgttcctatctggggtggcctggttttgtaacagtcactgcgttaggaatctagagactaggtgtgtgtggctgcgctaacacctaccagctcttcaactct

SEQ ID NO: 370216 - DNA, 122 bp, Homo sapiens
cggggtcactcaccggcctcgctctggttgtagtagccgcgcaggttccgcaggctctctcggtcagtctgtgcctgggccttgtagatctgtgtgttccggtcccaatactccggcccctc

SEQ ID NO: 370217 - DNA, 122 bp, Homo sapiens
gcactgtcagtgtgtcagaagatgttcagagaatggaatggggcctggaactgatgtgtgcgttaatgtgactaaacaaggtcaacatgagacaaaaacccttttcatacagtgcttcaact

SEQ ID NO: 370218 - DNA, 122 bp, Homo sapiens
ttcgatgttggtctccttctgttctttgcctgtggagagggaagaacaaagggaccagttcgttggtcggcagaattactggagtggctcacaggccccaccttgtgcctggggtccctgcc

SEQ ID NO: 370219 - DNA, 122 bp, Homo sapiens
ccgccttgccctccctttgggcccctggccctcgggcctgccgggccctccgctgcccttcgcctcttgtctcagcagctgcagggcgagtctggtccggaccaagactcagccggtccagt

SEQ ID NO: 370220 - DNA, 122 bp, Homo sapiens
ggagagcccgccccgcctctcagggactctcacaaccttggtgcgcagaaggttctggaccgcaattcggggacgccctcactggctttctccggagcgtgggcattggagtggaaatacgt

SEQ ID NO: 370221 - DNA, 122 bp, Homo sapiens
gtgccccttctaacaataagtagcaagtttggctgaaatgcagatagccaacgaccagggcgcagggagtgagcttagccttagaaaggctgtagctaggattaatcagccgggctctgcag

SEQ ID NO: 370222 - DNA, 122 bp, Homo sapiens
gcgttgtggagaagaggggaacggagggccccagaggagaggcgcccacccccaaccccacgggtgcacctgcggatccccagtccccgcttcgcccccaggcacccgccggacacagggaa

SEQ ID NO: 370223 - DNA, 122 bp, Homo sapiens
ggaagcatactgcaggggccctaccgacttggcgcccatcgcgtagcgagccttggcgagcgagagccagccctgcagggagaggaaagcggtgagactcagtttacgcccgtgtaccctcc

SEQ ID NO: 370224 - DNA, 122 bp, Homo sapiens
cacgacttacccaaaagtttcccttgaacagtgagcgcgtcatcgcagcgcgagtgggggcgcggaggagagccgggccgcaggtagcacagagcggggaggcctgactgccactgcccgcg

SEQ ID NO: 370225 - DNA, 122 bp, Homo sapiens
gtttcggtttgcaccgtgccctttgcttgttcctccgcctgatttctccctctccgcttacgatgggttcacagacaagtttccagagaatgagggactcttgtgggccctggcacctggcg

SEQ ID NO: 370226 - DNA, 122 bp, Homo sapiens
cctgggtaacacgatgaaatcccatctctactaaacatacaaaaaattagccagttgtggcggcgtgcacctgtagtcccagctacttgggaggctgaggcaggagaattgcttgaacccag

SEQ ID NO: 370227 - DNA, 122 bp, Homo sapiens
aggagtccccagccccacgccgagccgctgggcgcctgggcccacccggctcgccgctgccgggctcacccaggccgccctcgccgcccctggggctctgccacagcccgcggcgcagctcc

SEQ ID NO: 370228 - DNA, 122 bp, Homo sapiens
gccgtaatgttggcataatttttcatgatcatcttcattaaccacagcgaacgggaggagcgtttgcctgcacccagccatcgtcatgacaacgcctccaccgcggccagcccagtgtccac

SEQ ID NO: 370229 - DNA, 122 bp, Homo sapiens
ctcgagtcaccctttctcgggcagtgccggagcggactctgtgacacctggaaggagccacggtcaggccgggctgccaggctcgacaggaggggcaggatcaggcgggaaggggttggggc

SEQ ID NO: 370230 - DNA, 122 bp, Homo sapiens
aaaatatattctggaattatgagattaatattgcataactacattgcaagctttttagtgcgtttacaaatttctttgaatagaagtgtaagtgagctacttgttgggtaaggatttggttt

SEQ ID NO: 370231 - DNA, 122 bp, Homo sapiens
agagaccaacctcccacggcaggctggagggatgtgcagggggaccacccagaaaggaggcgaggggtggaagacagagtcaggactcagacacaagagcaaaagatacaaagagagggagg

SEQ ID NO: 370232 - DNA, 122 bp, Homo sapiens
gtcctatccaatcaccatggtcccgcctcctggctaccacaattggctcagggatgagcacgtggcccatagcagcccagtgagagtcagccctgggtgggaactggtgggaaagaattctg

SEQ ID NO: 370233 - DNA, 122 bp, Homo sapiens
ggagggggctccgtgcgtgtgatcgtgcagctgtgagcgcgtggccgccccgcggggctccgctgcaggcccctcagccccaggagcagtactcgctcttcagggcctgccctggatcctgg

SEQ ID NO: 370234 - DNA, 122 bp, Homo sapiens
gatgatgcacccgcctcggcctcccaaactgctgggattacaggggtgagccaccgcgcccggccgcttcccagggacttttaaggacacgcacagccgttgagaatatgcgagatggccca

SEQ ID NO: 370235 - DNA, 122 bp, Homo sapiens
ctgccagtttcctggtggcagtagtgtagggtgagaaaagcggctgtcctttgccaataccgcttctaggattatatttactaaagttaacttttcttaggaaagtaggtaattggttgttt

SEQ ID NO: 370236 - DNA, 122 bp, Homo sapiens
catggttgtgacagggttgggactgacaagcatcgagttcctttgagcagttctgtccatcgtagcctggggcacactgcagacaaagaggattagacagggaaccagtggatgagcccaac

SEQ ID NO: 370237 - DNA, 122 bp, Homo sapiens
cttcctgcacacgtgtgtagacacacacaagagaaaagaggcagagtatatttctagcatcgcacttgatgtttttcaacacagagttataaaaattgaggcaatgtcaccaaattagctaa

SEQ ID NO: 370238 - DNA, 122 bp, Homo sapiens
taagcagaaagtcttcatggcttttctggtcttcggctgctcagggttcatctgaagattcgaatgaaaagaaatgcatgtttcctgctcttccctcattaaattgcttttaattccagtct

SEQ ID NO: 370239 - DNA, 122 bp, Homo sapiens
ccagttctagcagggcatctactaagggtatgaccttgggcaccttgtttaacttgtctgcgtccaagtttcctgatctgcaaagtggaggtgttaatagttactacccgcctcacacagtg

SEQ ID NO: 370240 - DNA, 122 bp, Homo sapiens
gacttctgctgggacgtgtccatgatgtcgatcagcatgttcttcttgtcatcgcctttccggtctcggcccaggtcggtctcgtacttgttctccgtctcctgccgcctcaggggtccccg

SEQ ID NO: 370241 - DNA, 122 bp, Homo sapiens
agttctgtgagagatgataggaagtgggtgacagggtcaggggctggggtgtagtaatagcggatgttgaaaaggtgacagagatactgtcacgtattggagtacctcttgtgcatataacc

SEQ ID NO: 370242 - DNA, 122 bp, Homo sapiens
aaaaaggcatagatgcctagatgctgtcgcttaagcaaatatactgttcttcttcctttccggcggccagtcgtcctccctgaggccgctgctgggggctaaaggctatcagagactccaga

SEQ ID NO: 370243 - DNA, 122 bp, Homo sapiens
acctgtcagaacacgccagggtggagacaggagatctgtgtgcttcccgagtacagatcacggctcagcatctcatgggaaagggacagggctctcttcaggacacgcagtaagatttcaag

SEQ ID NO: 370244 - DNA, 122 bp, Homo sapiens
tgtatacgtgggcctttgcacgcctcgccaggtggtgtacatgcaggccttggcacgcctcgcccagtgcccgccccaggcccatgaggccccgcttcccagccgtgggtgtctgtgtctgc

SEQ ID NO: 370245 - DNA, 122 bp, Homo sapiens
aaaggcttgcacaggcccagcatctgcctcacagtggactctccacgaacagctaggtctcgcctcactgcggcctcccgagtccaaagctcctgcctctcggccgcttcggcagacccagc

SEQ ID NO: 370246 - DNA, 122 bp, Homo sapiens
cctggagcctggctctgacatctacccctgctctcctagtcagtgaaaaagttcccctgtcgcctgtgtgagcgctccttctgctccgcccccagcctgaggcgccatgtcagagttaatca

SEQ ID NO: 370247 - DNA, 122 bp, Homo sapiens
ggagggctcggcctgggaccccctctgcgggcctgcggctttagccagcagaaagaggggcgtcagtcctatccccaaagttccgcctcgggaaagagccctgagctctgaactccgacgaa

SEQ ID NO: 370248 - DNA, 122 bp, Homo sapiens
cacctcctacccgccttcaacatgcaggcactgcctcctctaaggagccatctgtacttacgtagctgtgagcataggatggggcatacagcaggcacttaacaaatacttgtggaatggaa

SEQ ID NO: 370249 - DNA, 122 bp, Homo sapiens
tcaccgcctgagattcttgcaaacatttgtgcaaggaacctgtgaaaaagacttctttcacgtaaggaagtagggctaggagatattaatctgggcattgttgagcattagcatcagtgtgc

SEQ ID NO: 370250 - DNA, 122 bp, Homo sapiens
aacaacgtaggaatagaagataatttcttctatctgataaagggcatctacaaaaaaaaccgacaggttttctccttaagatcaggattaatattgttactgagggtcttagccagtacagt

SEQ ID NO: 370251 - DNA, 122 bp, Homo sapiens
ctctagaggcaaagtacaaagtttaaacacattccctgtggtctgcgtggaactctcccacgcaacataagctacttcctcacttgtttctggctgggacacttcaagggcaaagtcagaac

SEQ ID NO: 370252 - DNA, 122 bp, Homo sapiens
tctcccccaccccccaaacacggattttatacccccccagaagcaaacttttcttgaaaacgagataaacagatcacacgccgaaataaacaaatacactgcaccagaatatcatacttgcc

SEQ ID NO: 370253 - DNA, 122 bp, Homo sapiens
ttatggctcgaggacaggagttgtgttttattcactgttacccgcaattctctagagcagcgcctggcacatagtggatgcttaataagtatttgagtaaatgaggtaactatgtaaaattt

SEQ ID NO: 370254 - DNA, 122 bp, Homo sapiens
agacgagcatttacttttcagacagtggcttgatcacggctgactgcagccttgaactcccggagtcaagcgatccacccatctcagcctcccaagtagctaggactacaggctcacatcac

SEQ ID NO: 370255 - DNA, 122 bp, Homo sapiens
gggaagattcttgccaaacttaccaggattcatgatgaaggcaggtcagggtgatcagatcgagggggcagattgtctcaaaattgacttagcatggttcttgctaaaactgggatatttat

SEQ ID NO: 370256 - DNA, 122 bp, Homo sapiens
tcaaagtattaaaatcaggacacagcatcaactttgttttctcttccagcctttaccttccggctcgtttttgatgagctcttccattttcctctgcttcaaggtgtcaacaacatcagcta

SEQ ID NO: 370257 - DNA, 122 bp, Homo sapiens
tccacggaggcaggaacagtcagctggaagccagctgaccgaaaatggctctgcagagaccgagcaccaaggcccctcctggaacacagttatgctggaagctgcaaagctggctacaaccc

SEQ ID NO: 370258 - DNA, 122 bp, Homo sapiens
tcttctccttccgagattttttgcaggggggaccagaatctccccagttgtgaggagagacgcctccattgaaggaagtagaagagaccatgcctgctccattctctaagacagtggtgaag

SEQ ID NO: 370259 - DNA, 122 bp, Homo sapiens
cccgcccgcccaagtcccgcccgcgccccaccctgcgccgtggcttacacaacgcacattcgcggtttaccccctcgactttccacgcctcctgcccggggctgttccgggttaggacggga

SEQ ID NO: 370260 - DNA, 122 bp, Homo sapiens
ggcaggggccggccattcacaaagagccccccaagctggttcatgctgctgatccctgggcgtgagacagaggtatccacacaccacctctcccactgccctgcccgcctgtggagagggtc

SEQ ID NO: 370261 - DNA, 122 bp, Homo sapiens
catactgaaggaatgtataggacattgacatccaaccctcaggaaaatgcaagaatttgccgaagggcaggacttatggtataacggcaagactgttttgacctaagggcaagatttacagt

SEQ ID NO: 370262 - DNA, 122 bp, Homo sapiens
ttgagacttattgcaaagcattttgtatatgtaatatattgtaagtaaatatttgtgtaacggagatatactactgtaagttttgtactgtactggctgaaagtctgttataaataaacatg

SEQ ID NO: 370263 - DNA, 122 bp, Homo sapiens
gtggacagagcggagtttgaccatttgcttgtggacggacacagggttgctgtaaacactcgtgtgtgcgtttgtgtgaaggtgcatttcccgccctctgggctaaacgcctaaaagtgcaa

SEQ ID NO: 370264 - DNA, 122 bp, Homo sapiens
ctagtgcatgacgtccacattcagagatatctccctccactgaatatgctggttttcactcgttcatttaaaaaataatgtattgggcatctaccacaagcccaaaggagtatacataaaca

SEQ ID NO: 370265 - DNA, 122 bp, Homo sapiens
acaggtgtgactgaagccagtgggccagtggcaccatacatctgagtctccaattttcaccgatgatctagatacagcctgaggtatgtaggcaggaaggggtgttgcaccatggggcaggt

SEQ ID NO: 370266 - DNA, 122 bp, Homo sapiens
gggcggtcagtcaactacatcacggccgtagattggctgatatcgagtctgtaggcgtgtcgcgaggctccagacccgcctctgggagccccgctgtggagcatgcgcggagggagggctgc

SEQ ID NO: 370267 - DNA, 122 bp, Homo sapiens
agcaccaagattctgttcttcattcagcaaccacccatgagcctcctgctttattccaatcgcatggcaccagcctgaaaacctctctcccttctgagaggaatgctggaatgacactccac

SEQ ID NO: 370268 - DNA, 122 bp, Homo sapiens
ctttggggttcacatgcccagggcaaacctgccccccacaggatggtcccaatgagccgccgtagtttaagttctcacaggcaaggcccgacctgaagcactggctccagccttagggaagg

SEQ ID NO: 370269 - DNA, 122 bp, Homo sapiens
gaaagcaactttatatgttagtattgatatagcacccctttaaagaaccactgctttagacgaatctttatttgtatattggccaaaaaaaaaaaaaaaaaaagccgcctatatttagagaa

SEQ ID NO: 370270 - DNA, 122 bp, Homo sapiens
gagggagccaggcagccagcgcacagccagtggtctccgagctgatgagaattcagaatacgcgtgtgcttcaggccccctgtgttggtactccatctaccaaataaacacgtacagatttt

SEQ ID NO: 370271 - DNA, 122 bp, Homo sapiens
caaggccagctccacattcttccctccccctcccacttcaccgtagccccgaaccctgcgcgcagagaaagggtctcagctccacagacgactgggtccctcctcaccaaaaatggtgagac

SEQ ID NO: 370272 - DNA, 122 bp, Homo sapiens
cccaacgacacatcctaacatcgtgtgaatccgtttgaagtattactttctcactgcccacgcttccctctctagttctgtttataattatcggttatgttttcccccagccatttgacatg

SEQ ID NO: 370273 - DNA, 122 bp, Homo sapiens
gatcacgtggcgccgcagccagcctccgcatgcaaactggtagaagtcgtcacacggttccgtggtcgggtccatgttctggaggatcctggcagctgctcgtccccatggcgtggagcagg

SEQ ID NO: 370274 - DNA, 122 bp, Homo sapiens
tatttccaggacttgatgtcctgtcatgtggcacagtggccacaggggaggtgtttgcaccgtcgatgcgttcagaccagcccaagccttcgggtccccggtgcccacctgcgttcagacca

SEQ ID NO: 370275 - DNA, 122 bp, Homo sapiens
gacgtgggctgacccaagacccctcacccctgctgcccggaggcccccaccaggagacgccgacctgcaggaaaggcagggactccagggccacacttgagcccaaacccctgaccctccac

SEQ ID NO: 370276 - DNA, 122 bp, Homo sapiens
gggttgggaccagccttctgctgccctgggtgctggggatcccggggctttccaggtgctcggcctccaaggtgcgcggtcctcagctccacccgcgggcggctcctgcgtccgaggagcta

SEQ ID NO: 370277 - DNA, 122 bp, Homo sapiens
tgctgcagccctgctcgatgcacacgaagggctttgtcttctggtgggtgagcatgtgcccggtcctggagccagacacaagcaggggcgtcaccggggcacctgggaccgggctttctgct

SEQ ID NO: 370278 - DNA, 122 bp, Homo sapiens
cttttcaaccaacatttctccactgcctatgacacagcaagctggtatcttgtgagctggcgcttgaaataagagcatgaatgagccatgcccctaccctggaaagctcctggcaataacaa

SEQ ID NO: 370279 - DNA, 122 bp, Homo sapiens
aaaagatcagagaggagatttattcagatgatgtttgaagagttttaggttaactgtgtacgaaagatttgaaacagccagaaagtatcaacatttgtggtatgcttcataaacagtagagt

SEQ ID NO: 370280 - DNA, 122 bp, Homo sapiens
gcaggaactggagctatatgtactctccttcgcactttgttttaaaacaagtttgggcctcgcgatttcctgaggaaatccaggcaaattagcaaagtgtcgcttgggccgcgactttagaa

SEQ ID NO: 370281 - DNA, 122 bp, Homo sapiens
tctgcccgaacccttgcccctagggtgacatgatgataatcagaccaactgtcttacacacgcagctggataacccgtaggtgaggaaggaggaaaaaggatttttctcttcttataacggg

SEQ ID NO: 370282 - DNA, 122 bp, Homo sapiens
agtcggatgttggaccgctgggaagaggttgaaccttcgcctcaaacgatgttgcgcagacgcagtgggccattctagtgccttctagaaaaggttgtaagaagggtggagcttggagctgg

SEQ ID NO: 370283 - DNA, 122 bp, Homo sapiens
ccacccagcgtgtaccaacgcccccagcaccatctccctgctaggctgacagacccctggcggattttgacctcgcaagaaatgcaaaagcaactttgggttgcagaagccaggcgccccga

SEQ ID NO: 370284 - DNA, 122 bp, Homo sapiens
gtgcgggtgagctatcctccacctggagggttatggtagctgggtcacctgggaacaggccgtgggagaactggcctccttgggaatgtgttgtcctgcgcggcagagcactttcaggtacg

SEQ ID NO: 370285 - DNA, 122 bp, Homo sapiens
cggctgctgcccaactttgaacggaggagcacaggaggagctccaaggcccctcaggagtcgccactgttgcctccggtcacccccaccttctgttggagtggccttcagggaaaatgcccc

SEQ ID NO: 370286 - DNA, 122 bp, Homo sapiens
ccctctcggaaagttcccgccatgctctggcgcagtttttcatcgtgatgcatctcccggcgcagcctggcgctctgcgggctccgcttctgctcacactggcagcgttggtgcacgtggga

SEQ ID NO: 370287 - DNA, 122 bp, Homo sapiens
gagagcggccggcgcggggccgggagaggaggaccgggccaggtgtgcgctcggaaggggcggatgcctttgcggccgcctgtacctgcctttctaaacaactgcggaagcccaagaaagcg

SEQ ID NO: 370288 - DNA, 122 bp, Homo sapiens
gatgtgggcatatgagactggaaagtcgacttgagggcttctgagaaaagttttccttgccgattaaaaaaagagacacacaggaagaaatagtctctctgtttctgctggacattgtgcat

SEQ ID NO: 370289 - DNA, 122 bp, Homo sapiens
tgtgcaggcacgaggagcgtggtcagcagcaagacgctcttcatgtttcccagctgcctccggctcggctctccagtcgtggtctttgctggtgggaagcagccgtccaaactggtagctga

SEQ ID NO: 370290 - DNA, 122 bp, Homo sapiens
gacgttatttatctgtcgttgggtcagggtctgccagacagacccccgcagctggtgccccgtgtgaggaacgctgcggaggaagcacgacggaccgccgaaaagaagtgaaaagcaccgcg

SEQ ID NO: 370291 - DNA, 122 bp, Homo sapiens
gttcccaagcttcttcaacattttcaggtatctttatagcaacaccccacttctcagtatcgattttctgttagtgcatttttgcatcgctataaagatataccagagactaggtaatttgt

SEQ ID NO: 370292 - DNA, 122 bp, Homo sapiens
cagactctcggcaccacagcctggtaagggggcggggctcgaactcgggttcggtgggagcgggacctgggagtcaagtttcctggcttctgaagggaccataagcttggaggttccagcga

SEQ ID NO: 370293 - DNA, 122 bp, Homo sapiens
accaatgctgcagtcctgcagtcacctatacattatttaaatgtatttaactgttaaatgcgctacccaccaataatgaaatagacctttatgaaaactgtgcaattgtgtgcatgtttgtt

SEQ ID NO: 370294 - DNA, 122 bp, Homo sapiens
cagtctcaggtgagaagaatcccagcaactgcctctaagggacttccatcacaggggcttcgcaggtaagcaacgaaaatagccccttgggggatctataaacaacagttctctgcaactct

SEQ ID NO: 370295 - DNA, 122 bp, Homo sapiens
gagcagctggggcttggggtccctgctccacctccgggccccaccccctgacatcactgtcgcattattgcaccaggtctggctgaccaataagctgctgcttgctatgataatgggtccta

SEQ ID NO: 370296 - DNA, 122 bp, Homo sapiens
cctaggagcagtgaccaggactgcagccagccaggcccgtgttattaacagggctggctccgtgggccttcagtattagtgtatttataaacaaccccaaacactgaaaccactgtttggtt

SEQ ID NO: 370297 - DNA, 122 bp, Homo sapiens
tccgtcccccgtgtccctgctccgtcccgtgtctctgctccgtcccccgtgtctctgccccgtcccgtgtccgtcccccgagtctctgctccgtcccgtgtctctgctccgtcccgtgtctc

SEQ ID NO: 370298 - DNA, 122 bp, Homo sapiens
ctatttttaatgtagagcccaacatccactaatgtcagatggagaaccattcacctaactcgttgttgcgaactagttcttctgcttgcggtgaagtgaggggatttgtaaatactcaaaag

SEQ ID NO: 370299 - DNA, 122 bp, Homo sapiens
aggaagcccaggaaatgctcggccgtgcggatggagccaggcactgcctctgcgaggagacgctatcagcggcgacggggaggcgggaaagggactggggggcagcggggggtcggggctca

SEQ ID NO: 370300 - DNA, 122 bp, Homo sapiens
tctacatggaaatcactccaatcagaccgggtaggctggcctcagggtgtgcgggcctcacgtgacaagaagggggccgtgctgggcacgtgggagtctccttcagaagcccagcctcagct

SEQ ID NO: 370301 - DNA, 122 bp, Homo sapiens
gataaaaattttaaaacaaaatcagctatgtttggaaaagttccaggatgcttttaatttcgtaaagtcaagataatgaacatatggcaaatgggtaaacatccataattccaaactctaca

SEQ ID NO: 370302 - DNA, 122 bp, Homo sapiens
cgcccccacatctgcccgctctcgatgggatgcgcacagtctcgatcctggcaccagtatcgacctcagctggcaccaaaggcctgaacagagggtaatcggtgtccccattccagcccaag

SEQ ID NO: 370303 - DNA, 122 bp, Homo sapiens
gcctgtctccagtttttcctcatcttggggcattccgccacccttcctttaaaactaccccgttcaacgtaattaataacctctttgttgctaaatactttggagatatatacatgtatgtg

SEQ ID NO: 370304 - DNA, 122 bp, Homo sapiens
ctgtacccccagccactgagcagagcaggatcagtttttgtccttcagtcacctgtcccccgggggcccggatctccaagcttacattagagatggggattcctagatggatataagacaac

SEQ ID NO: 370305 - DNA, 122 bp, Homo sapiens
tagggtgagacagttatacttatttggaaaacgtgatgcatgtccccaatttttctggaccgctctacagtaactgtggttcccagccagagcggcatgaggaggactgaggcctgactctc

SEQ ID NO: 370306 - DNA, 122 bp, Homo sapiens
tgcctcagcctcctgaatagccgggattgcaggcacttcccaccacgcccagctaattttcgtgtttttagtagagacagggtttcaccatcttggccaggctggtcttgaactcctgacct

SEQ ID NO: 370307 - DNA, 122 bp, Homo sapiens
cccaagtttgacaaggcataagaaagacattaagggaattttaccttgcagcagttaggtcgtctgcattttaagcttggaagtagttttgtgctgtgcatgcataaaagctgttggcagac

SEQ ID NO: 370308 - DNA, 122 bp, Homo sapiens
ttccctgagattgtttcctcatctgtgaaacggggcaaaataataacactgtcctaactgcgatttggtgactaaattaaataagaatatcggccgggctcagtggttcacccctgtaatcc

SEQ ID NO: 370309 - DNA, 122 bp, Homo sapiens
gaggccggctctgcggcctgtcaggagatttacacccgactcttaacagcctcgcggaatcgcaggcgggtgccgggcctggggtggtctgctgtgaatcggccccctgtgagcagatgaaa

SEQ ID NO: 370310 - DNA, 122 bp, Homo sapiens
actgtgaacgtgcagtgcctcctctaccaatccctgcccctgcgccctggggtcgtgtggcgccaagtaggtgctcaaaacatgagaagtgagatttcgttcttcagatcacagggccattt

SEQ ID NO: 370311 - DNA, 122 bp, Homo sapiens
acttttgtaaagacggggtctcactgggttgcatcggctagcctcaaagtcctggcctcacgtaatcctcccaccttggcctcccaaaacatgggattataggtatgagccactgtccccta

SEQ ID NO: 370312 - DNA, 122 bp, Homo sapiens
cctcccagtggccacgcgccttctcacgcccctctcccgtgacgtcatgctcctctcgcgcggcatgatgggagaatcctaatgttttccaacagatgctccaagaacagctttcagattaa

SEQ ID NO: 370313 - DNA, 122 bp, Homo sapiens
atctggctcatccaaggccttgggtctctccagctgactcgacggtgatggggggcaactcggcgggggagctgtgcgtcttccccttcactttcctgggtaaggagtactcgacctgtacc

SEQ ID NO: 370314 - DNA, 122 bp, Homo sapiens
cgcgcagcccctaggcactgtggtttagggctagtgccctcggcacccgctgccaggagccgggcgctgccaagggctgcggaggggccacgttctcccggggactggggcatctcctgcgt

SEQ ID NO: 370315 - DNA, 122 bp, Homo sapiens
acagtgtctctgtcaggaaaatacacttggatgtggtgacagacgttttcccgaggcttacgtttgattctgcaccaggcgctgcgtacacctgcttggaggctgcaacggggcgggctctg

SEQ ID NO: 370316 - DNA, 122 bp, Homo sapiens
gccgggtgtggtgacgcggggcgcactggacaccgcgcgtgctccacgcagccggcctggcggcaccaccacagctcactcctcccgcgtgagtcacctgaactgcactctcttaaaagatg

SEQ ID NO: 370317 - DNA, 122 bp, Homo sapiens
cacctccacgcggcccgccgccccttccctgaatggcggcaaatgcagtcaggcgagcagcgtcctgggcggattcagaccctggggaagtctggaattcctcaccccgaccctcgtcccgg

SEQ ID NO: 370318 - DNA, 122 bp, Homo sapiens
ccctgaccagcgtctttgtgtcctttgagctccggacctggtcctgggttcctcccacctcgggctgtgctgcagttcaggacgccgcccccagggggcgctccaccttcagagcaggcggc

SEQ ID NO: 370319 - DNA, 122 bp, Homo sapiens
cgggggtggttctatcccgcaccagctgtgtcctcggcccagcccttctctctggaccagcgacaaagttggactagatggtctccaaggcaccttgccgacccttttccagtgtatttggt

SEQ ID NO: 370320 - DNA, 122 bp, Homo sapiens
ggacccgagcgggggcgaccggcacgcagcctagaaggtccctttggaggactttgcagtcgggagcagtgagcatgcgcagacgccagagggcgctcctggccaggggctgagcaagcccg

SEQ ID NO: 370321 - DNA, 122 bp, Homo sapiens
cccacggccggaggacaggcgggcgaggagcacaaaagcctctgccgcatggatcggggccgggccgcagggtcccccgggggtccttctcctccccatccaccccatcgcagcctccccgt

SEQ ID NO: 370322 - DNA, 122 bp, Homo sapiens
tttcccctttcttcctacacttagtttctcgggctgggtgggatttgcatggctgcagtccggccccggcagcccagaggcttggcagatgcctgccacaaattgcaagaattatgccctct

SEQ ID NO: 370323 - DNA, 122 bp, Homo sapiens
cccgctcctaaccatgtccctggcggtgctgcctgtcagtgctgctggattcctccagcccgagctggcacctgtgcccacaagcagtaggaactcagtaaattacaatgataaacactggc

SEQ ID NO: 370324 - DNA, 122 bp, Homo sapiens
tttgaaatagcagataacatactaagtactttggcattttctcccttaagccaacaccttcgcttcttgtacatgttgtatctattaagaaataggggctcaaagatgtgctgcacaactga

SEQ ID NO: 370325 - DNA, 122 bp, Homo sapiens
cgagtcataacttagcaattgactgcattaatcattaagatggcaagctgaaataaataacgtgaagtttaaaaagaaaatctgaaagcatctttagaagcagagacttaaattatatattt

SEQ ID NO: 370326 - DNA, 122 bp, Homo sapiens
agccggcaagtgagcgcccagcggagcgcaagggcggggcccgcgcgggccggagacgcccgttcgctgtcggccaaccagcgcctgtctctgaacagccaatgaacacgcgtcttacagcc

SEQ ID NO: 370327 - DNA, 122 bp, Homo sapiens
gggaccccagctgctgtggagatgctcagttgcgccaggcctgtcccagcaccggtgtcacgcgggagcttctgttgaggggttttcagtgcacagaggtgacacagggccccctgccccag

SEQ ID NO: 370328 - DNA, 122 bp, Homo sapiens
aggaaagagagctaaacaagtgggtggcccaggcctgggaatgccacccagctctcccgacgcagtgttatttctgtggtcccagggggccccagcacctgcccgaatcccactccccaagg

SEQ ID NO: 370329 - DNA, 122 bp, Homo sapiens
gcgctcgcctgcacactgcagggtcagctgactgccgtccctccacttacaacagcgggacggccactctccctgacgcacgcagtgacccgaacaaagcccgtgggaatcatggggcgttc

SEQ ID NO: 370330 - DNA, 122 bp, Homo sapiens
agggcataagaaggttaagtaacttagagaaatcacagagccttggttcagacccatgcacgtcagttccttacattctgtgacttggcttgtccccagtcttgtcatattcctcctagact

SEQ ID NO: 370331 - DNA, 122 bp, Homo sapiens
cgaactcctggcctcaagtgatccacctgccttggcctcccaaagtgctgggattacaagcgtgagccactgcaccgggcaacttcctgcatttctgttcaggagatagacagtttgaggaa

SEQ ID NO: 370332 - DNA, 122 bp, Homo sapiens
gcaggggcgtggaaggggtggggaccgcttttctgcatgccgaagagcggttggtggaggcgggggaaggggacgtctctgcagagccgagatttgggctctgaagcccgacggcccttcaa

SEQ ID NO: 370333 - DNA, 122 bp, Homo sapiens
acagctcccaacggcaccgcgcagctcccaacggcgccacacaagctcacaacggcaccacgcagctcacaatggcaccacagaagctcacaacagccaactgcgggcttgacattgctttg

SEQ ID NO: 370334 - DNA, 122 bp, Homo sapiens
aacaggctttgtgtgagcaagatggctgtttatttcacctggctgcaggcaggctgagtccgaaaagagagtcagcaaagggtggtggattatcattagttcttagaggttttgggataggc

SEQ ID NO: 370335 - DNA, 122 bp, Homo sapiens
tgacaagttccagggtcagctgtgggggacctgggacagccaccagcacagcaaaattcccgatggcccctctctgttcaggaggagccagtggtcaacctcacaggaaggcccaaggggag

SEQ ID NO: 370336 - DNA, 122 bp, Homo sapiens
tcctcccgccgccgctgctgctgctgccgcagggacctcggccgtcgcccccgccgcctccgccaccagcaccgcggcaggcaccggcgccagcacaccgccgccatcctcctcccaccgcc

SEQ ID NO: 370337 - DNA, 122 bp, Homo sapiens
ctcctcagacaagtgagtgtcctcacccagcccaaggcacaagccccgaagaatcctgtgcggtggcgacggtgatggagagaggccaccagagggcgcagaagagcagcaaggctgccccc

SEQ ID NO: 370338 - DNA, 122 bp, Homo sapiens
caccactgctgtctaattccagaacagttgcatctccccaagaagcaccccgtcttcatgcgcagtcactccagtgaggtctgtattcttacggtttcggagctggagatcaggcgatcctg

SEQ ID NO: 370339 - DNA, 122 bp, Homo sapiens
ttactgggtgcagcacaccaacatggaacatgtatacatacgtaactaacctgcacgttgcgcacatgtaccctagaacttaaagtataataaaaaaaaaaagataaaaaaataaaatgagt

SEQ ID NO: 370340 - DNA, 122 bp, Homo sapiens
tgaccactatgcaacgtaactaccgctcccctctcctccgccacccccgccgtggggctccggaggggacccagctcctctgagccataccgaccatcgtccagccctcctacgcagatgct

SEQ ID NO: 370341 - DNA, 122 bp, Homo sapiens
tcccgcttgctgcccatgagaacacggtcttagcagagaacaagtcaaggcatccagagccgtaggggccttacagcccactctagggtggcctaagtgctgtagtcccctccaacatgaca

SEQ ID NO: 370342 - DNA, 122 bp, Homo sapiens
ggcagctttcctcagtttacctgacatgcaaaggaagacgcctcctcactccaggctggacgggcagccgacggcggtccggggccatggcgggcagggactttctccgtgaccctccctgg

SEQ ID NO: 370343 - DNA, 122 bp, Homo sapiens
tggtgtgaggcgtctgtggcaacgtgggctgttgtctgtcacagtgtgtgtgaccgagcccgtctggtgacagtgggtgtctctttcctgccgtctccggtggaggtgaggatgtttcgtgg

SEQ ID NO: 370344 - DNA, 122 bp, Homo sapiens
gcacgctgggagcttgatttgcccctttcagaccatgtgggcctttcatttgcatatttccgaattatagatgaaaacgtatccaggatcaagtgaattgttttcctttgagtcctcttggg

SEQ ID NO: 370345 - DNA, 122 bp, Homo sapiens
tgaactcctgacgtcaggcgatccacctgcttcagcctcccaaagtgttgggattacaggcgtgagccaccaagcctggccccgaaaaggttttcactggccagtgagataggtgcctgcag

SEQ ID NO: 370346 - DNA, 122 bp, Homo sapiens
ggaagtcccgaggtgccgggatccccgatgacacagggcagattccctgaatggggcccccggcgggggcgaggcgggcggtgaagaaggggcctggcacctgggaaggctgcggcctggcg

SEQ ID NO: 370347 - DNA, 122 bp, Homo sapiens
accctggggggacacggaggcctgggagttaaccctcagcatgccagggctccagtgattcgggttttgagagatctttccaaaacccccaaagcccccaaacccaagggaagcgcggaacg

SEQ ID NO: 370348 - DNA, 122 bp, Homo sapiens
ccagccaggctgcgacagcacccaggctcagcaccaactttgctctaagatcagagtgggcgccaagaggagggagaagccaggcagtgggagcagacacttctgagcctgaagggtggggc

SEQ ID NO: 370349 - DNA, 122 bp, Homo sapiens
actgttcttgcagcagcacctggggaatgaaacgctgagaagggagaaggcgcccgaaggcgaccacgtgggccacagccacagcactgtaggtcagccgagagagcgtctcccgcctcttc

SEQ ID NO: 370350 - DNA, 122 bp, Homo sapiens
agtgttgggattacaggtgtgagccactgtgcccagccctccctgcttttgtttaagacacgaggtctcactatgttgctaaggctagagtacagtggctattcacaggcacagtcatggta

SEQ ID NO: 370351 - DNA, 122 bp, Homo sapiens
ggcgcggcggcccggggggcggggcctcggcggcgggctgggggcggggtctgtcgggggcgtgaccaagctggttacgccccagaggaggcgcccagccctgttcagaggatgtggggccg

SEQ ID NO: 370352 - DNA, 122 bp, Homo sapiens
ctggacaaaacaaagccatttgttagtccaaaatctacagtccaatgtctctaagaccagcggcctcctgaggcaagagctgcaggaaggtgagggaagctgatgtggagttggtgggacat

SEQ ID NO: 370353 - DNA, 122 bp, Homo sapiens
gccgccgaggaaacgaaacctagctcgagaggagcagtccctgaagccgtcaggaagtcacgtggggtgcgggggggcgggcggcgaggactgggcgggcctcgcgaggtactcccgggagc

SEQ ID NO: 370354 - DNA, 122 bp, Homo sapiens
ggtccttagcaaaatgagcccggcctcccacatcagggccctggccacaccacgggcaggcgatgtggccagcctgggttcaggtaagcctgccactctgtccttggcaccagaggtcaggg

SEQ ID NO: 370355 - DNA, 122 bp, Homo sapiens
ggcgacctcgcgcgccccagcgcggcctggccacggaggccggggcgcagggggcgccggcgggacttaccccagagcagagtgagtggcttggctttggggatgagcaccagggagtacac

SEQ ID NO: 370356 - DNA, 122 bp, Homo sapiens
ctgctgggtccccagcatcaccagcccagaacaggttataactctttccttctgaacatccgtccctgcagctctctcctactagttcctgccatttaacaatcgtttcctgaggccttggt

SEQ ID NO: 370357 - DNA, 122 bp, Homo sapiens
cagaatctctctgttttagagagagcctttctttcttgcctaacctagagtgcagcggcgcgatcatagctcagttcagtcttgaacccctggactcaaccagttctcccccgccctgggct

SEQ ID NO: 370358 - DNA, 122 bp, Homo sapiens
tcagaaaggtggggcccgaaccatgagctcctacctggagtacgtgtcatgcagcagcagcggcggggtcggcggcgacgtgctcagcttggcacccaagttctgccgctccgacgcccggc

SEQ ID NO: 370359 - DNA, 122 bp, Homo sapiens
caggcatgtactaccacgcccagctaatttttgtcttttaatagatacaggctttcaccacgttggccaggctggtcttgaactcctgacctcgggtgatcaacccgccttggcctcccaaa

SEQ ID NO: 370360 - DNA, 122 bp, Homo sapiens
ttgaggtcaagatcctgctcttcaccaatgagctgcatgaacttgagcagatcatgaaatcggggcctcgttttctcacctctaaaatgggaataataatttctgtcctactgtccctccag

SEQ ID NO: 370361 - DNA, 122 bp, Homo sapiens
tccattttttctagacaacacctattagttccctactaggaaaaaacaatgaaactatcacgttccttctttctctctcatcctttgcatatcctcttccattgattctagtaaaacaccgc

SEQ ID NO: 370362 - DNA, 122 bp, Homo sapiens
gttttaagttcagagaaggaacatttccctgataaagatacggcccattagaatacaggccggagactggctgagccgccggagccgcgccgccattggtcggggcgcacacgggcctcaca

SEQ ID NO: 370363 - DNA, 122 bp, Homo sapiens
agaagcacgccgaggtcaccgagaacttcttcatcctcatctgcccagtgtgcgaccgctcgcactgcatgccctacagcaacaagatgcagctgcccgagaactacctgcacgggcgtctc

SEQ ID NO: 370364 - DNA, 122 bp, Homo sapiens
tggccgtcgctgtacaggaaggccgtgtctatctcggtgtggccgcgctccaggaaggcgcgcgtgactgcggcgctggtgggcgcgtccatgcggcgccccatctccatggcgcccagcac

SEQ ID NO: 370365 - DNA, 122 bp, Homo sapiens
caattagtctttcacccctatacccaggtcggacgatggatttgcacgacagcactgcaacggacctccaccagagtgtcctctggcttcgccctcctcaggcacagttcaccatctttggg

SEQ ID NO: 370366 - DNA, 122 bp, Homo sapiens
gatgacaatgaggataaaaccagggcagagggttctgaaagtcccaaccagcacggtccccgcagaatgccagcgcacctcctcccgccacttcaaagagccggctcggcggggcaggaagc

SEQ ID NO: 370367 - DNA, 122 bp, Homo sapiens
acctggaggcctcttggccgcggctccctgctggttgaagctcagatgccctcttgtggccgcggccccctcgcacgtcgccctgcgcccggggaccggaatccccgacaaggggtggtcag

SEQ ID NO: 370368 - DNA, 122 bp, Homo sapiens
cttcagtgtcttcgagagaactctgacgtgaagacgcacgggccttttgaggccgtgatgcgcactctctgtgaatgcaaggagacagccagcaagaccctcagcaggtgagaccttaggtt

SEQ ID NO: 370369 - DNA, 122 bp, Homo sapiens
agcggaatgtctttatttcgttatctgaacagctctgaggctgcctgagctgtcgctgcccggtcccacacccctcaccctctcaacatcgggaactccatctggggtcatcaggagaaaag

SEQ ID NO: 370370 - DNA, 122 bp, Homo sapiens
cgtgttgcacgccgcttccgctttccggcccagacctcaagaccgcttccggaagcctctcggcttccgtctggccaaactccttgattggctgcactccgccccgcccctctcgtcttgcc

SEQ ID NO: 370371 - DNA, 122 bp, Homo sapiens
atggagtctcagtctgtcgcccaggctggagtgcagtggcctgatctcagctcactacaacgtccgcctcccgggttcatgtgattctccagcctcaggctcctgagcagctaggattacag

SEQ ID NO: 370372 - DNA, 122 bp, Homo sapiens
ctgaaaggtcagctttttcccttgtctctcttggaggaatgcagggtctgtcctcacattcgccttgtgagcccttagaaggagccgggagaggcggaagggctggctgcaatgtggcagac

SEQ ID NO: 370373 - DNA, 122 bp, Homo sapiens
tgacagcgttgcacaaagcagcttggttggggtgcaagccctccctttccccctgtgcagcgcccctcgccgtggtgggaggtgggcgggtgccccagggacggatacctcctgccccggat

SEQ ID NO: 370374 - DNA, 122 bp, Homo sapiens
catcagctcttcaggggcgaagagcaggaaccggagctacctgaagagcgcggctttccccggctcttcgggctgtggaggctgcgggctcgcgcttgttccgggacaggggcgtggcgcct

SEQ ID NO: 370375 - DNA, 122 bp, Homo sapiens
tacaacgtcttgttactaccccctattacaacacttataactcagtatttgtcttttttccgcggtgtccctgcactctccccatacatattcctctcctgccagattgtaagcctctagag

SEQ ID NO: 370376 - DNA, 122 bp, Homo sapiens
atagtaagtatgaactgtctttaataactatttgccattaaaactaggtctggccaggcgcggtggctcacgcctataatcctagccctttgggaggccaaggcagggggatcacctgaggt

SEQ ID NO: 370377 - DNA, 122 bp, Homo sapiens
agttgctggaatgggagaaggaccatcttccacggagttagctctccagcaagtcgctcccgggtcccaggccaagggctgccatgctagtgcagttccctgcgcagccgccaggtggcgtc

SEQ ID NO: 370378 - DNA, 122 bp, Homo sapiens
atggaaatcagcacagcagcccctgcctgtccacgccgcgctgggggacactcctgcacccggcacagctcctctcagttgccgaaacataaagagacgctaacaggtggtccttaggggcc

SEQ ID NO: 370379 - DNA, 122 bp, Homo sapiens
ccctaccccctaaatttgagaaaagcttgccctctttgtgaaatgtagagaaaaggctttcgctcccataagcttggaatccacatcgtggctttgcatagaattccaagccacttctctaa

SEQ ID NO: 370380 - DNA, 122 bp, Homo sapiens
ggggcggcgggtgtcgctggccggtagagagcttcggcctgacctagcgcaggtctggtgcgcgcagagaacaactccaagcgcaccgacgcccgcgagctccttccaaacaccgaacggga

SEQ ID NO: 370381 - DNA, 122 bp, Homo sapiens
gggccggcgggaggtgggcggggcgaggctggcaggccgccgccattggctgttacccgacgcaccgaggctgggcggcttagccaggcacttggattctatttgtgtaatagctgcttctt

SEQ ID NO: 370382 - DNA, 122 bp, Homo sapiens
tcctgccccacctcgacatccacagcgaggcaatgaagaagcccctgccaaggaggagcccgcttctcagtgggacaccgggaaggtagacacccaacagtcaccgctagtgggaggcgatt

SEQ ID NO: 370383 - DNA, 122 bp, Homo sapiens
cacctgagcatcctgaacgccactggaagatggcgtccaacgcccccactgagacattgacgacagtggtgatacgattaccggacagcatgagcgtgtttctgggccaccccttgaatata

SEQ ID NO: 370384 - DNA, 122 bp, Homo sapiens
gggtttgaagacatgcaaagttgtaaaaggaggtgaatctttcactctagccaaaaacagcgatgtataatactctaatccagtggttttcccagctgtgtacatgagaatcctaagattca

SEQ ID NO: 370385 - DNA, 122 bp, Homo sapiens
cttggccctgcctggggtgtgtggtgtgtgctcctgcatcttgtctgggagtgcagtgaccgggaccagaaccttccccacctcaattagggcttagccatctccctgtccccagcacccct

SEQ ID NO: 370386 - DNA, 122 bp, Homo sapiens
acaatgaggactacaggctttttttgtgacttgagatagaaagagtaatttcatcaagagcgcaacatagaccttcaggagtgcttatcaaggctcttcagagaggaagtggccattttttg

SEQ ID NO: 370387 - DNA, 122 bp, Homo sapiens
agcccgcgggaggcgcggccgcgtggctgcggaggtgtgcttgctcagtgacgtcaggcgcggctgccgttgcctcggcaacctcacctgatccgaatgccgtgggcacacacgctgacttc

SEQ ID NO: 370388 - DNA, 122 bp, Homo sapiens
aaccggggctgcgtggggcgcttgtgggccagctggagttccgggtgggtgtgggcttggcgagcccgcactcggagcagccggccggccctgccggcccagggcaataaggggcttagcac

SEQ ID NO: 370389 - DNA, 122 bp, Homo sapiens
gggggcacgagtgagcgcggggagggggggcgcagcagggctggcgagcccggcgcctctcggcaggcatcttcactcccacgttcacgcccacgggctcccacctgggtccctctggagga

SEQ ID NO: 370390 - DNA, 122 bp, Homo sapiens
gtgctcagcaagctgaactgcttcttgggtgtgcgactagggtgccagccaggccagggacgtccaggactggaagaaatgcaggggcaggaccacagcacaggctgatcaggaggctgccc

SEQ ID NO: 370391 - DNA, 122 bp, Homo sapiens
agacaggatctcactattgttgccaagtctggtcttgaacggtccttggggtcaagtgatcgtcccatctccacctcccaaagtgctgggattacagaagtgagccaccttgctcagcctgt

SEQ ID NO: 370392 - DNA, 122 bp, Homo sapiens
gcccccgattcagcgcttcccagcccgcagcaactgcgcagcggggggaacccagggctccgcggcacccgcaggctttagttactgctccgaggccctcggaccaaagagaggctgcgagg

SEQ ID NO: 370393 - DNA, 122 bp, Homo sapiens
cgctgccctgcgccggccctggcagggagcctggtgagatggtggaggaggaggctgtgccgtggctggccttgctgtgtcctgctgcctggttagaaccccatccccgtcccccgtctcct

SEQ ID NO: 370394 - DNA, 122 bp, Homo sapiens
actggggatatagtcgtgaacagaacagaaaaattcttgctctcagggagcttaaattctcgtggaggtggacagaagacaaataacaaattaacaggaaatgtccgttggtgataagtgct

SEQ ID NO: 370395 - DNA, 122 bp, Homo sapiens
cgattcagagaagcagtccagtcagcacagcagctcgcggttttcccaggttcatcttgacgcatcctgagctacttaacttcggttcctatcccactgatcgttttagagcctgaacagac

SEQ ID NO: 370396 - DNA, 122 bp, Homo sapiens
aattggcagcttgacaccagggtatttgcacagacatttacatagcgatggtcctgccaccgactgtggggcacctggagcaggtggagaggtttgggggcccagagggaggaaaggagggt

SEQ ID NO: 370397 - DNA, 122 bp, Homo sapiens
agaaacgcagacagaaagtggggctttcagtagggccatgaaataagtcccgaaccactgcgtgtctgtctgcaatgagccggctgttcacgctggctcatgtttcgatcctgtgcgtgtgt

SEQ ID NO: 370398 - DNA, 122 bp, Homo sapiens
tctgtgcttgtgtcgaagccctccccacctcctggggctccacgtggcccgagaggtccccgccgtccccctgcagcctccctgatgggcggttttgggggagaaatttttctttgtttctc

SEQ ID NO: 370399 - DNA, 122 bp, Homo sapiens
ggaacctcagagcctagccaggggcgcctgccatcagtggagcctctgctctggggctgccggtcgggccgtgtgtgctgtgtctctttaaggaccaggcctcttcaaggcaagttccctct

SEQ ID NO: 370400 - DNA, 122 bp, Homo sapiens
ggggcgctatttacggcgcggagccggagagacctgggctggcgcgggcgggagctgcggcggatacccttgcgtgctgtggagaccctactctcttcgctgagaacggccgctagcgggga

SEQ ID NO: 370401 - DNA, 122 bp, Homo sapiens
agggacgctctcctcaacacttctggggcccccagaaggcatgatttcagcatcaggtctcggcttccatgtggctgttcctttccccttttgcccaacccagcctgagtgtccctgaggtc

SEQ ID NO: 370402 - DNA, 122 bp, Homo sapiens
agctgtgcctgcggcagctgcgatactcgggcatgatggagaccgtgcacatccgcaagtcgggcttccccatccgctacacgttcgaggagttctcgcagaggttcggcgtgttgctgccc

SEQ ID NO: 370403 - DNA, 122 bp, Homo sapiens
cggggctcccccggaagtgaaagtgcggggatccgccggcccaggagacgcggcttctagcgcccggttcccgggaagctctgtgacgcgctaagccccgcccccacccgtcacctgaccca

SEQ ID NO: 370404 - DNA, 122 bp, Homo sapiens
ctgccccccgcggggaggcagctaaggtctggcaagaattcgagtgcaacaccggtggcccgccctgctgtgggacccggtgcacactctgcagctgctggcccaggtgctaagccccttac

SEQ ID NO: 370405 - DNA, 122 bp, Homo sapiens
gcagcaaatgcccacagcaatgacttcatattctggaaaagagcaatgtctaactttagtcggagaagcatcacaattaatggggcctcctagatttaccatgagcgaaacaagaaacatat

SEQ ID NO: 370406 - DNA, 122 bp, Homo sapiens
cctgatgtccgggtatccagtaggtgtctgaccagggcctccagagtgccagctcggagccgtcgggaggaacgtgggggaggcatagggacctggagaacacagagagatgatcgctaacc

SEQ ID NO: 370407 - DNA, 122 bp, Homo sapiens
ccaatttccgaactcttgacgacggctggaggccaacagagtccctacaggtggtgtccacggtaatgcatggacaatgagcggctgttttccagtttctggcctctggtgcctatctagag

SEQ ID NO: 370408 - DNA, 122 bp, Homo sapiens
cccctgtcggtaggtgctggcttcttcccctctcctggtggtggtgggtggttcccgcggcggcctggagccggaggggcgcgcgaccctgggctgggagctccgagggcctgggaacgaga

SEQ ID NO: 370409 - DNA, 122 bp, Homo sapiens
agtctcctttcccagtttttcccgctagcagtggtctttggttagcaatgtaaaatgtgacggaaatacaaacataaatgaaagctaaaaagcagctgaaattagtaagatgcactatactg

SEQ ID NO: 370410 - DNA, 122 bp, Homo sapiens
ttttcccctctgagctcagagtactgttcttaatttcctgaccagcttgtacccctcccccgctccctccgagcatctgtggtggtttccaatggagccgcattcctgctgctctgaacttc

SEQ ID NO: 370411 - DNA, 122 bp, Homo sapiens
tggttctacctgcctttcaagtcgtgcctcagcgaatgcatccccttcccttaggtgggacgcgatttgtgaggtctctgacctcctttccttcccatctcgagcgctttctccactttgca

SEQ ID NO: 370412 - DNA, 122 bp, Homo sapiens
acagtgcctccagaccgtcccactttggtcaaggccctcttcaacacaagttgggactctcgggacactttcccaacaactttcctgcttgcatggtatctctaattctaatatgatgctct

SEQ ID NO: 370413 - DNA, 122 bp, Homo sapiens
gggctctggagatccagcccaaaggaagttttgattaattgtccagacattaacactagccgcaagcctgctaaatggagtgtgctcccagggcagagaaaggacatagggtgctgatgaga

SEQ ID NO: 370414 - DNA, 122 bp, Homo sapiens
ggcggccgcgtcccggggggccgggagcgagcctgtcggaaggtgggaggcggagtcgctcggcatctgggaagagaccaaaggaatgagtcattggaaatgctgtaacgtagacccttatc

SEQ ID NO: 370415 - DNA, 122 bp, Homo sapiens
tcatttggaaacgggcaccctgcaagtgtaactggtgaagctgagggcacactgggtgggcgttggccctaaattcagggacggggtccccctaggagggcagaggacacacacagggaaga

SEQ ID NO: 370416 - DNA, 122 bp, Homo sapiens
ttagtggcctgagcggcttgaccagagctgctgcaactgcagcaagaggtagggctcaggcgttgggaattgcaccgacaggcagtcgcacagaaaggcacacagatgtagtggtgtgcata

SEQ ID NO: 370417 - DNA, 122 bp, Homo sapiens
tctgctcaccctcccgctggctctgccaggagactccttacacaagttcccgtcagacagcgaggccatgtgacttgtctgaagctccaacaccgggtgctgggcaggtgggaggagtcggc

SEQ ID NO: 370418 - DNA, 122 bp, Homo sapiens
taatccttggagcaatcttgagaggttggagttttgatttccattctgcagttgaggaaacggaggctgcaagattaaatgaatgacttatacacggatatgtagtaagggagtattttaat

SEQ ID NO: 370419 - DNA, 122 bp, Homo sapiens
caggtcttactcttcagtaaactcctagtttcaggtgttgaaatttggcagtcagtcaggcgttgttgaaatgaccagtaattgtttctgtactgtaggtaataaagctgcggaaattattc

SEQ ID NO: 370420 - DNA, 122 bp, Homo sapiens
gaacacagggcaccaagtccctaggctgcacacctcagaaaatgggattttcttttctatcgaattgtcaagctgcaaattttccaaacttttatgctctgcttcccttataaaactgaatg

SEQ ID NO: 370421 - DNA, 122 bp, Homo sapiens
ggcgctcctcacttcccagacagctgggcagctaggcagaggcgctcctcacttccgagacggtgggcagccgggcagtggcgctcccgacatcccagatggagtggcagccgagcagggac

SEQ ID NO: 370422 - DNA, 122 bp, Homo sapiens
ctagcgacttaaggatctggttagagtggcccgaatgcattcttccagggtgagggcagccgcagcacacaccagcctcagtccccagggtggtcgtcatctcgcgagaaagggttggcggg

SEQ ID NO: 370423 - DNA, 122 bp, Homo sapiens
gagttgctattccaaaaaaaatcattactctctaattgttctgattttagatcagcaaagcgtgccgggcggtggtggagagactgagggcggacaaggcgagagggaacgagccgtccacc

SEQ ID NO: 370424 - DNA, 122 bp, Homo sapiens
cgcgcgcggcacttcctgcttttgctcctccctgcggtcctgccggccgttgtaaactggcgctgcgggccacacccgtgttccaggcccgctaacccaccggcggccccagagccccaggc

SEQ ID NO: 370425 - DNA, 122 bp, Homo sapiens
tccctccaatccgagcacggatcattttgttaaataccgactagtattttgtcattggagcgaagaatttcagaaacggtgttaatatttaatcacattagtactggcatgttttacggcgt

SEQ ID NO: 370426 - DNA, 122 bp, Homo sapiens
ctgagcgtggcctgggcgcaccaggcgggtgcgcggtagacgttcctgtggcttacccgacggtgccaccttctggtcacctctggcatagcacccgggcttcaagcttggcgcatgcgcgg

SEQ ID NO: 370427 - DNA, 122 bp, Homo sapiens
ccaagcctcaccctcacacaggaaagcagatgtgttctggccggaagttgagtggggccgcggggcctgctgggaggtgttgtcctcggaaacgtcgctggcgcggagggatggttcggcgc

SEQ ID NO: 370428 - DNA, 122 bp, Homo sapiens
agaagccaaggtggtgagtgtctccactgccctctccccctcttcccctggtctccttcccggcgtgctgggctgtcacagaggaagcagtgaattctgtcattggtctgtccagtgtcagg

SEQ ID NO: 370429 - DNA, 122 bp, Homo sapiens
ctcttccttctccaccggcccgggacatccttacctgcctctacccggagaccattcctgcgaggctcctaccggaagtagctgtggacagcagtgtcctctgggaaatgcagtccgagggg

SEQ ID NO: 370430 - DNA, 122 bp, Homo sapiens
tggcacagttgggggcccaggcagtgggttgtgggctctgaggcctggctggcagtgggtcgcaagtcgatgaccaggtccttgatgagctcgtacagctgctctaggatccgctggcggcc

SEQ ID NO: 370431 - DNA, 122 bp, Homo sapiens
gtgtgggctcctgacaaggacacttcaaatgctaactgtccccaggggataaatttaagtcgtcaagcacacagggacatcacactgtctcttcctcagtattctaacgtcattggtagacc

SEQ ID NO: 370432 - DNA, 122 bp, Homo sapiens
ttggggggctgaggcagggggagtgcttgagcccctgaggctgaggatgcagtgagctggcgccactgcactccagcctggatgacaaagcgagactctgtctcaaaaaaaaaaaaaaaaaa

SEQ ID NO: 370433 - DNA, 122 bp, Homo sapiens
aaacccctggcgggcagcgggcaggacccccaggatcccggacctcaaggagcaggggaacgcctggagccacgacctcacactttgccaagacaccaaacaaagacagcggcaccccagcc

SEQ ID NO: 370434 - DNA, 122 bp, Homo sapiens
ctcctcaggagtggcgggccgcggaagtgacgtggtgcacgggcaggagcgcgtttgaatcggttcccgggtgatcctcgcgcctgccgctgctcggccgccgccgctgacgaggagctgca

SEQ ID NO: 370435 - DNA, 122 bp, Homo sapiens
gccaatcagtgaccgctctaagcctccgacaatagccaatcaacaagtgcctgacaccagcgaccaggcttccgaaagtcagtgggtactcagctgccgcactccacttctgattcggaaag

SEQ ID NO: 370436 - DNA, 122 bp, Homo sapiens
tgcaacccatgccttttccagcgggttcctagggctctgctgtttgactcatggagaagccggtggttttggtgttgtgctaaatcgaagcccacctagtgggctctgggccgaaggctccc

SEQ ID NO: 370437 - DNA, 122 bp, Homo sapiens
gaacgtccgagtcggggtccggggcggggggcgcaggcccgcggcggtaggggaggagagcgggcacccgagtctccatcctcagggtggcctgaaggttccaggagggcgtccggcgaagg

SEQ ID NO: 370438 - DNA, 122 bp, Homo sapiens
ctgccgctttctcttgttcgtggtggatctttctcagcctgagccgtggactcaagttgacgatttaaaatatgaactggagatgtatgaaaagggcctgtctgcgaggccccacgcaatcg

SEQ ID NO: 370439 - DNA, 122 bp, Homo sapiens
cagggagagagccttggagccctcacctctttatctggagcagctttaaagaacagaaagcgaaaaggccaggtaggatctctggtttctgggcctaggggtggtattccctcagcatatgc

SEQ ID NO: 370440 - DNA, 122 bp, Homo sapiens
tcattcctgactatcccaggagaccacggcagaccaaaaacacctctctgaacagccttccgcaccgctcgctgcaagcattcgtccacacacggtacacagattgcgggcggatcgtaatt

SEQ ID NO: 370441 - DNA, 122 bp, Homo sapiens
ggcctcagggacccaggagtgaacatggggtggtggacggtggatctcccagggctgacccgggcctgacagtgtctgggtgtaaagttcctcctctgaggaggtcactgttccgacctcgc

SEQ ID NO: 370442 - DNA, 122 bp, Homo sapiens
tgggcgcttgcagaggggacgggcaccacgtggtcatccccatggcaggttccgtcgtggcgacggtgttgtgggaggatggtgtgctgctgcccctgcaccccgtgagatgaatcctgcct

SEQ ID NO: 370443 - DNA, 122 bp, Homo sapiens
cgctcaccccgttgtccctgcaggccctggctgggcatgaactgggcgccttcatcccagcgccgtgtccgggtgcgcgccgaaaaggccgaattccggtttcttgcagccagcaggggggc

SEQ ID NO: 370444 - DNA, 122 bp, Homo sapiens
tttccgggttcatcttccccccattcccgccatcccggctagcacgcgtgcccactaaggcgcgtcactctcaggaaaacgaaacctaactaacgccgcccttgccccaccccgactccgcc

SEQ ID NO: 370445 - DNA, 122 bp, Homo sapiens
ccggggcgcgccccggccacggcgcacgcgccggcctcagcgctccctcctccatgccctcggcgcacggcgccgcccactcacccagctgcacctctccgtgcgtccccaagctcacccgc

SEQ ID NO: 370446 - DNA, 122 bp, Homo sapiens
gttgggtggggaagaaggactggaggcggacatggggatcgtgaccgcggaggccagccccggaggaagggcaggagctagagaagtgccaaaaaggagagagaaaaggaaactgcagggca

SEQ ID NO: 370447 - DNA, 122 bp, Homo sapiens
gagtggaatcacaggaaggaaacctccgtgggcagcaggagcaagtgcaatccctggagacgagtcgaaggggcccgaggccccgagaagggcaggatgcgatgctgggtgtgtgacctcag

SEQ ID NO: 370448 - DNA, 122 bp, Homo sapiens
ggacagaccagcttcaggagccccagcttcaccacttgctcaccagctacctgcagcccccgcccccgtctgccctcctgtctgtaaaatgggaataagaagccctgcctcacaaaatcttt

SEQ ID NO: 370449 - DNA, 122 bp, Homo sapiens
ctcataaaagaggattatagatggagatttgctggtaaacacccctgtctgccgcccccgcgggtattatccttgcattagagaaggttttagggaagagaggggaggggagctcaggaatg

SEQ ID NO: 370450 - DNA, 122 bp, Homo sapiens
cttcaaaatccagcctcagattccctggtcccgcagcggtggcctcacctctggcgtggccgagctcacgtggtccggcttgtgcaagtcccaggtccaactccgggtctcctgcttttggc

SEQ ID NO: 370451 - DNA, 122 bp, Homo sapiens
aagtcaaggaagcgaaaggctccggggctgggtaggttgttcctgtggatcttttcttcccgctgcaagtttctgaccattcttcagggccagtatcaaaggccatctttgtaataacttac

SEQ ID NO: 370452 - DNA, 122 bp, Homo sapiens
tgggaaaggactttgccataggtcgctgaggccaccatctgctctcttactggccaagggcgtaaaaagatagtcttcccattagctagagagcaaaccccagaaagcctattggctgcgcc

SEQ ID NO: 370453 - DNA, 122 bp, Homo sapiens
aaaatcttttttcttataaaatcacgttactcaaatgaaagatttttacaagaatgtttgcgaaagagtaaagatgggaaattctactgaagctagataactttcttctttataattcccca

SEQ ID NO: 370454 - DNA, 122 bp, Homo sapiens
tatttctcctttaaaaatgtttttaaaaacacaacagagtatcttttctgctcaagaaatcgaacatctgattgttaactaatgacctcttgtttccccatctgtgacaatcttgttttaat

SEQ ID NO: 370455 - DNA, 122 bp, Homo sapiens
cgaagccaagtgtcccccaagcggggcttgctgtgttttcatcatttcccttgcctggcccgggttgcagtggtcagccgcagcggtctgctcccggcggcggcccgaggctcccccgccac

SEQ ID NO: 370456 - DNA, 122 bp, Homo sapiens
ccaccattggcttcaaagttcaagcctttcattttcttgccccatacatattttcagattcgctgcatgccactttcttgcacttgtcctgttaaagagtccaccatggctatttaatattt

SEQ ID NO: 370457 - DNA, 122 bp, Homo sapiens
cactcacgtaaggcacttatttacaaggtatggacttaaaacagaatcacagcatttctgcgaaagccctcaaactctccatctatgtttgctgctccaggacttctaaatagtcaggttca

SEQ ID NO: 370458 - DNA, 122 bp, Homo sapiens
tgcagggttgtggcaactcccattgcagaagctcccctcttccagcaggatcccagaacccggaggacaaacgatgaaggcttggatgtggacctgggcagactttctccctacaggagccc

SEQ ID NO: 370459 - DNA, 122 bp, Homo sapiens
cacacccactcccgcccccatgcctgtgcattgggtctcaggagcccaggtgggtggctgcggcccaggctcctggcgtcccatggggtacacacagagcagtggaaggcctgccgggcctt

SEQ ID NO: 370460 - DNA, 122 bp, Homo sapiens
tgtgaggagcccctctgcctggctgcctagtctggaaagtgaggagcgtctccgcctggccgccatcccatctaggaagtgaggagcggcgcctcttcccggctgccatcacatctaggaag

SEQ ID NO: 370461 - DNA, 122 bp, Homo sapiens
ttacagttttgataaagaggctctcatttcctgtgtcttgtatattcagtcctttcaatacgtccacctggaggctcaccacttggagagacacaggaaggtaatatttacagctgtcatgt

SEQ ID NO: 370462 - DNA, 122 bp, Homo sapiens
cctccccaccaggcaagaaggggtcatggggagggagggacaggtgatgggagtctaggccgagggattctgactaactctgacctggctctggtggcagcgggcccagcctcctggcctgc

SEQ ID NO: 370463 - DNA, 122 bp, Homo sapiens
gggtggtgagctagggaaggaggccgcgttgccccaggcctagaccctgcactgctcctccggcccaggtgaactacacacagcccctggtggctgtgaagttcctgaatgtgacccccaac

SEQ ID NO: 370464 - DNA, 122 bp, Homo sapiens
catctgccagcctgaacatgaacacaggcaaagctgatgatggccagggaccccaggggacgtggggccctgtggggtctggcccccaggagcaagacctctgatgatgctggtgtctggga

SEQ ID NO: 370465 - DNA, 122 bp, Homo sapiens
ataactactgcaactgaggtaaaccaaacagttgtttttgtttattggcacagtggcccacgataagacacataggtatagcacactaaagctcaagatcctgggaacaggagtataaattt

SEQ ID NO: 370466 - DNA, 122 bp, Homo sapiens
cctcacatggcacacacctgctgctctgcagagcacgcctcgctccccttcacgaaggagcggaaatacaatggcagccgcgaagctctggctactaagatgcattatctgctccaagcttt

SEQ ID NO: 370467 - DNA, 122 bp, Homo sapiens
ggagtggggaggggactgagccggccggagggccccccgcacccccgctcccacccaccccgggactgataatgtgaagttcctcattttgcacaagtggcactagccccagggccaaccct

SEQ ID NO: 370468 - DNA, 122 bp, Homo sapiens
ccaggaccttggtgaccctggccagcttgataggctgcacacggctggtgttcatgatggcggcgcagcgacgatgtggcggagaggtaaatatatattatataaattaacttaatatataa

SEQ ID NO: 370469 - DNA, 122 bp, Homo sapiens
cagggtcacacagccagggtgggtgtccagaggggatccacagctgccctctggcctgaccgggtctccattccccaccccaatgccccacagccggaggagctgaccaacatcctggagat

SEQ ID NO: 370470 - DNA, 122 bp, Homo sapiens
taagcacgaattggagccatgagggtggactggaacccttttcattcttgttgcctctgacggtatgggtgcctgcagaagctggagccctttgtcacggagctaaagacacactggctggc

SEQ ID NO: 370471 - DNA, 122 bp, Homo sapiens
gaactactcctaacagcagtagaaccagcaggctgaatccattgcaggatgtccatccttcgcagcaggtcatggtcacccctggctcagaaacgttgtcaaagtggctatgcttgcatggt

SEQ ID NO: 370472 - DNA, 122 bp, Homo sapiens
ccagagcaggaacgctgcgcagcgccccctccctaggatcgtgccaaccccctacccctccgcgcaaggacaatttccccgtctcgtaggacagtgacacccctttgtgccgccgccttgca

SEQ ID NO: 370473 - DNA, 122 bp, Homo sapiens
tatgactgtgggactcaagtatgtctgtcattaggtggaggcttgatcgataggctcagccgccctggtgttctgactcttgttccactcactgcatgaaatgaagctggcggaatattgct

SEQ ID NO: 370474 - DNA, 122 bp, Homo sapiens
aattgcgggaatgaagatggatcgggacctgagaaaagctgctcccaggaacaatatgctcggccccctgcccccgtaggccggactgcattctcctgaccccgggctgccctgctagcact

SEQ ID NO: 370475 - DNA, 122 bp, Homo sapiens
acatttcattttgcctgaatcctcatcgtgggagaaatggacagacccatcttggggctccgggatttccgtgggcagtgaactatgtgcctggtggtttcggaagccctggctcttgttca

SEQ ID NO: 370476 - DNA, 122 bp, Homo sapiens
gcccgaggacgggctcaccacgcagcagctcttcgccagagccgacagcctcacctacaacgagttcctgattctcccaggattcatagacttcatagctgatgaggcggacctcacctcag

SEQ ID NO: 370477 - DNA, 122 bp, Homo sapiens
gactccgcgtggtgctgaaggggacagcgccagatttgtcgcactgcgcaggcgcagaggcgcgaacaaagaggggagggggacgaggcgcgcggccggaggtggtgcgcgctcacgtggct

SEQ ID NO: 370478 - DNA, 122 bp, Homo sapiens
aagtgcccaagtttgagtcttagaaaaaaaaaaaagataacccgtcctttgcttcactggcgaggtgcggactgatgtagtcaaagtttgggttcttatcctccgcaagttcagatctgccg

SEQ ID NO: 370479 - DNA, 122 bp, Homo sapiens
gggagccacatccagtgtgggggctgcgggctccaggcctggtgtctctggagggggcctcggaaccggaggggaagaccccacagcgtctgcggagctccctgaggccccatagcacctgt

SEQ ID NO: 370480 - DNA, 122 bp, Homo sapiens
gctacatagctccgcgccgtcggggttgcactgcccagaagaacactttcggaacgggggcgttacgaaatcgccgtggtcattgagtccgcagttttcccggaactcatagtctagcggga

SEQ ID NO: 370481 - DNA, 122 bp, Homo sapiens
gcgcgccccaggagcagctcgcactcctggttcaggttgcagctgcccttctccaccacacggtcttaggggtcagagtttcaagcagggctgctgtcccctccagttaaccccccaccccc

SEQ ID NO: 370482 - DNA, 122 bp, Homo sapiens
cactactctggccataccacccccgcgatagaggagcaacacagctgtctctgtgcgctccggatcagcgcttcctagatttctagccggatcgtttggagaagggctctgcatcttatttc

SEQ ID NO: 370483 - DNA, 122 bp, Homo sapiens
atcacccgtgctggaaccccagcgtgtggagaccggaggccaaagaaacgaaactccccacgctgcgccgtggagaataatcactgccttttcagaggccgacttcgccccctgccaaggca

SEQ ID NO: 370484 - DNA, 122 bp, Homo sapiens
ttcctgccccgctgagcgagggctgtgctggtgcagggctggtgggcggggccagggaaacggccggggcaggggcggggcttgtgggaggggcggggctaagaatgggggcagtgggggaa

SEQ ID NO: 370485 - DNA, 122 bp, Homo sapiens
gtggcctcaccaagtaggcaatctcagagatctctccctagaatctctgggtactggacccggtgtcttagccttctctccctgccccctcccgccccgtaggaatgataaaaagcagcctg

SEQ ID NO: 370486 - DNA, 122 bp, Homo sapiens
tcgtctgcttactcattccacaagtgtttgttgggcacagttctagacactgggcagctgcggctgtcagcgctgtcgtggtaccctctctcctgatcttaacatcctcattgggataattt

SEQ ID NO: 370487 - DNA, 122 bp, Homo sapiens
tgtgtctctaccccctagcctgggcgttggatctactggaatgagcagcagccgcttcctcggcagccttgggaagcacgggcgactggacagcagccgccgggcacggttatgggggcggg

SEQ ID NO: 370488 - DNA, 122 bp, Homo sapiens
taaggagcttcctttgtccagctgctgtggcctgctttccagcatagaggggtaggtccacgggggacacagacccgagcctctcccaggtttcggcaccagatgaaaagttcttgtattgg

SEQ ID NO: 370489 - DNA, 122 bp, Homo sapiens
agctcacttttaaaaggacaatgctgaagacacaaatgtttacaatgaccacagcgatgacgggatccgagagaaaggcaaggcggaaggggtgaggccggaagccgaagtgccgcagggag

SEQ ID NO: 370490 - DNA, 122 bp, Homo sapiens
tgggggtgtggggaagccatccatgtgccttctgaagggatgagccttggagaaggagctcgtgtcctgtactaaagagctagaggctcaatcatcacagaactccaatcacggataagcag

SEQ ID NO: 370491 - DNA, 122 bp, Homo sapiens
gcccggtagacccggctttgtgatggagtccctggctggccccccaggatgggcaggatccgaaaggtccaggtccctgggttccgaggtggaaggggcaccacggctgaccgctcctgagg

SEQ ID NO: 370492 - DNA, 122 bp, Homo sapiens
tcaataaatggaaagctacaccatggtcctggatacgaaaattcagcacagtaagatatgcggaatatttgtaaaaagaaaataaatgaatcattactgttatgcatgaactggatcttaaa

SEQ ID NO: 370493 - DNA, 122 bp, Homo sapiens
aacatagattgtatgatttctcgtcttttatatgtattgagagttattttattggcataccgtattttctgtcccagagtgttgaagaatatctatcctgctcttgttgggtggagtgttgt

SEQ ID NO: 370494 - DNA, 122 bp, Homo sapiens
atgatcccactgctgtttctcctgggagccactgcagggatcatttcaaattctcctgtacggctgttgtaataaagacaataactcaaaagttttagtgaggcagccaacatgaaaagtca

SEQ ID NO: 370495 - DNA, 122 bp, Homo sapiens
agaagaaagttagggccaagtatttgcttgtcggccttctagactaggaaggctctcctgcgggctccactcccgcaccccgcgtctctccttctgccttgcccgggttcccccaacttatc

SEQ ID NO: 370496 - DNA, 122 bp, Homo sapiens
tgccttggaaccaaccaccacccacgccgtttgccagctggtaaacatgcccatcaggtccgggggttggcattgcctggacatctttagtgttcatcttgctgacatctggtgccctcggg

SEQ ID NO: 370497 - DNA, 122 bp, Homo sapiens
aggtgtctgagctaagaggaaagctcaggcgacaggcacagtctcagcagtgttaaaagccgacactgactggagctaaccctgagcgaattaggaagctggcgtctcctcaggaatcctgt

SEQ ID NO: 370498 - DNA, 122 bp, Homo sapiens
accatacagcaacacacactcacacacacgcagaaacacaattcccacttaactcgccagcgagtgcggcccccagccccatctgcattgctgctgacttgtctcgctcgctctccccatcg

SEQ ID NO: 370499 - DNA, 122 bp, Homo sapiens
gtcgcaatccgaggtctccgggccccaaacggcaggatttacaaaaatcggtttttgggccgtgcgcggtggctcaggcctgtaatcccagcactttgggaggtcgaggcgggcggatcacg

SEQ ID NO: 370500 - DNA, 122 bp, Homo sapiens
cacctgttctccgaggaccttcaattacattctccgggagcttccaaaagtgcccacccacgtgccagtgtgcgtgctgggaaactaccgggacatgggcgagcaccgagtcatcctgccgg

SEQ ID NO: 370501 - DNA, 122 bp, Homo sapiens
atgtcacaaaagttacctgaggctgtgacaagcagtcatctatagacactaattctgggtcgatgactaatctctcagattctgctgctcttccctacccaacctccagctcctaagtgtta

SEQ ID NO: 370502 - DNA, 122 bp, Homo sapiens
caaacactgacaacctggtgagaatctgttcaattttcctggaagtcctcttggagcccccgccccagtcccaaacgtgctaccgtcactgggccacgcctttcttcccgctggctgtggct

SEQ ID NO: 370503 - DNA, 122 bp, Homo sapiens
tgattttgtttctcactcggctctgtgtttgtaggatgcgtctgtgctcgctatgttcctcggcttcctaactgatgacagtgcccaaggcagcacccatcacatttcgcccacgggcaccc

SEQ ID NO: 370504 - DNA, 122 bp, Homo sapiens
cgcttcaggctgcccagcgaggtcttctcgcgggccacgggccggggcgcgccctccagccgccctgggggccccagctcgtcggtgctcaccgacttattctgctgataaaccgagtcgtg

SEQ ID NO: 370505 - DNA, 122 bp, Homo sapiens
agccgcggccctgatgcctgtatatgtggttttgagagctgacaacatgctagcagccctcgctcgctcttggtgcctcctcggcctcggcgtccactctggctgcgcttgagaagcccttc

SEQ ID NO: 370506 - DNA, 122 bp, Homo sapiens
cctttctttcgctcggttttgaaagttgctctctttcctattccgtttctccttccttttcgctcctcctactgccgtaaatggcctactagagttgtcgtgaaatgctcctccccgccctc

SEQ ID NO: 370507 - DNA, 122 bp, Homo sapiens
tgcggggcgggcggacagactgcgggacggacggtggacgctgggacgcgtttgtagctccggccccgccgttccgacccccgccgccgtcgccgccatgacggggctagcactgctctact

SEQ ID NO: 370508 - DNA, 122 bp, Homo sapiens
tactgagttccaacatctactgagcctcattctgagtgcgtgcagtatctgcctgggaagcggtgttagcatccccattcaataaataaggacgctgagatgcatagggaccacttgccaga

SEQ ID NO: 370509 - DNA, 122 bp, Homo sapiens
ggacagaagccctgggaacctagttagcgcagacttaatacaacacagagcaaaactcaccgcggcgatatgacctacactccacccgatccgcttccgggtttgcgttaatctgcgcgcgc

SEQ ID NO: 370510 - DNA, 122 bp, Homo sapiens
cactgtacaactcgccaagcaggacccgcttttcaggatcaaagcatgactgccatctggcggcaagcgaccttcgctacaggtacaattcagaagttcagcagcctctacagagacagggg

SEQ ID NO: 370511 - DNA, 122 bp, Homo sapiens
gcttaataaacacatgcccagtgaacgttccttgacaagccaggttcgtggagtgacagacgcatactgcagaggtttagggagtgaagcggaaaggaggttgtggaggcaggacatgtgga

SEQ ID NO: 370512 - DNA, 122 bp, Homo sapiens
gtctcccggcccccacgggcgcgcgaacccaccttcttgtagtgcttgcccagccagacccgcaccgaatccagctgggacaccgtctccgggctctcccaaaacttggtggccgggccccc

SEQ ID NO: 370513 - DNA, 122 bp, Homo sapiens
caccggggcggcccacaggctgagcagccgccagccgggccaggcactccaggcagaagacgtgggtgcaggagagctccttgggtgtcttgaagatgttgtcatagcctgagaaacagatg

SEQ ID NO: 370514 - DNA, 122 bp, Homo sapiens
cttcgatgcggattcgaatctcctcgtatcctcccacagcgtgcttggaatggattctcccgtacccggggcaacacatcacacaataaacgccagctgtggtggaacgtgcagaggcgctg

SEQ ID NO: 370515 - DNA, 122 bp, Homo sapiens
gctaggattcggcctcagagcctcggtgttgagcagtttcgccgtgaggccaggagagggcgggctgcccctctgctcttccgctcctgggctcccgtctccctgtcctggctgtgaccctc

SEQ ID NO: 370516 - DNA, 122 bp, Homo sapiens
tccagggctgggagagcaggccccggggagggcagcctcagaacaactttgctcccgcgccgctgcccagctagggcagggttcatgtctgggcccagcaggctttagcaaccaaccacacc

SEQ ID NO: 370517 - DNA, 122 bp, Homo sapiens
cccgaggtagagctgtgcccggggcagtgccacgatccatggagccaagcaggagctgggcgtggctgcagctaccaagctgcagctgcagacggaaacatctctgcactcttggggatcca

SEQ ID NO: 370518 - DNA, 122 bp, Homo sapiens
ctttaccacagttcaagaatcaactcctttgatcagctcttttacgctaattagaatgcccgtttccccacttgaggcccaatgtattctatataaattcctattgttgtaattctcacata

SEQ ID NO: 370519 - DNA, 122 bp, Homo sapiens
cggcgtgtcacccatattgtgacatcatcgtaatttctaatccactcagcccacaggtcgcgggcgtggcccttccctcactgtgtgcgttcttgccagcatcctcaggttcccgagccggt

SEQ ID NO: 370520 - DNA, 122 bp, Homo sapiens
ccagacacaatgtgggagaagctgcggtgaaatcaatcagtgagagaggaaggggaggcccggtttccatgacaacggtagtgtttgtggcaagctggggactcctgggtccccagggcccg

SEQ ID NO: 370521 - DNA, 122 bp, Homo sapiens
tttccccgtttattcatctacttactctttcatgcatgtgcctaatattgattgagcacacgtaggtatgctgggtgctattcagagaactgacggtgccacagtgggcaaaacagacaaaa

SEQ ID NO: 370522 - DNA, 122 bp, Homo sapiens
cttctggcggccctggtgttgctgctgtcctccttctccggtaggaccccggggtggattcgcgcgtccgcggcgaggctagagctctgctcagtcagtcgggcaggaggcgcggggcgaag

SEQ ID NO: 370523 - DNA, 122 bp, Homo sapiens
ctgtgtgtttgttcactgatggattgttgaacacatatgagaacttaagtgcttatttgacggtgggcttaggcaaaggctctctggagcttgtgtgttgctttcaatacttctggaagtct

SEQ ID NO: 370524 - DNA, 122 bp, Homo sapiens
ccaaggagtcacagcttgaagccaggggagtggtgagataatgaggcataagacaagaagcggagactaaggaggaccaacatttaaggaacaggtggaggaacagggatgggccagtgaag

SEQ ID NO: 370525 - DNA, 122 bp, Homo sapiens
gggttttctatttcaggattccatggttgctttgccttttcctaagtgctttcaggcagccggcccaaattaacctctttcctcttattcttcacttatggcccaagcaataaataaagtgc

SEQ ID NO: 370526 - DNA, 122 bp, Homo sapiens
agcgggagggagggaaattgaagccgggatctcagggctgccccgccctggtcagctggccggggtctgtggtccccacaggcaggcactagcttggtccgcaggtctctcctggatgtgtc

SEQ ID NO: 370527 - DNA, 122 bp, Homo sapiens
gaacatattcaaaaacagagatcattcacatcatcttatggctttaaagcccctcaaccacgtcctgctgatctgacaaaacccaagtgcttacacaggttttgcaacctaggctccctcct

SEQ ID NO: 370528 - DNA, 122 bp, Homo sapiens
tgctcagggcgccaagggggcgtccagggacttcatggtttctagcactttgtagtccaccgaaatgcccccaggagtggcaatcaagtggagaggctgggctgtgtgttgatggccagtct

SEQ ID NO: 370529 - DNA, 122 bp, Homo sapiens
ggcctggcaggagtactgccggcgtgtgccttaccgcatcatgccctacatctactgaagcggctccaccaccccaggtgggggcatgtgcccactcatccaccagcacacccaggaccagg

SEQ ID NO: 370530 - DNA, 122 bp, Homo sapiens
cagggtcctgggtaaggcctcggccatgactgtgggtgggtttaactcagctagcagctgcggcggtcttggcgcgctctcgccgagggctgctcagccccaactcggaagcgacggccccg

SEQ ID NO: 370531 - DNA, 122 bp, Homo sapiens
gcctcgacctgctgttgcggctgctgcaggcgccggagttggagacgcgtgtgcaggccgcgcgcctgctggagcagatcctggtggctgagaaccggtgagcgcgccaggccggggttggg

SEQ ID NO: 370532 - DNA, 122 bp, Homo sapiens
tggagagaacacggagcaccagtcaccacgtgcacttaggatgcagagcttaccgcacaccgctgatggggacctccggaaagagcggtgccttgtggttggcctggaagttctctcccaag

SEQ ID NO: 370533 - DNA, 122 bp, Homo sapiens
ataagtgagccacccgctccctccctcgcaccttctattcccagaatcactaggcgccggcgcctccgaggcagtgtgtttccgcccagagctggagtctcccagctgccagccgaccccga

SEQ ID NO: 370534 - DNA, 122 bp, Homo sapiens
ccttcattcctgtgggcccctgctgcggcgggcacatttctcattcccgggagctggaggcgcctcgccgagagcgggggagtcggtgctgatcggcccaaggaaaacccgaaggctgcgct

SEQ ID NO: 370535 - DNA, 122 bp, Homo sapiens
gtcccgcgctcttgaacttgatgtcggccttgaactcctgaaagaatttcttcatggtggcggctggcccggcggcggggggccgcgggggcgggggggcacggggcccagtcggggacggg

SEQ ID NO: 370536 - DNA, 122 bp, Homo sapiens
cctcctagaggaaccctggtgtctgcttgggtccaggagcacacagtggctgccttcctccgggtcctcctggtccctgcaggtcatgggctggaggccccggaggatctctgtgatggtca

SEQ ID NO: 370537 - DNA, 122 bp, Homo sapiens
gccgagactcggtcgtcccaggccagctcgacttgcagtccgccctcgtggggcgggagacgcccgacgcccgcccacctcacccccggggtgccctccgtggcctcacggggacgcagcgt

SEQ ID NO: 370538 - DNA, 122 bp, Homo sapiens
cacggcgtccggccctggtcaggtttctttctattaaaacaaatataaagtggcagggcacgatggctaacacctgggatcgctttagccgaggagtttgagacacgccagagcaacacagt

SEQ ID NO: 370539 - DNA, 122 bp, Homo sapiens
gaaccaatccctccaggatactgagagacaactgtactttgggcccaactggataatccacgataacccactcatctcaggatccttaacttaatcccctctgcagaatcgcttttgccaca

SEQ ID NO: 370540 - DNA, 122 bp, Homo sapiens
gccggcaggttgggggatgcgcgaggagagtgggccggccggtgggtgtggcccgggtgccggaggtttgccttaagagctcttcgagacctgggatggcgggcacgtctgcagcatcttcc

SEQ ID NO: 370541 - DNA, 122 bp, Homo sapiens
gaaggttcgagctgacttgccagtcccgtgctaagtctcactgaggcagggccttgctgccgcggaaaaacgtgtggacagaggaacgcgccggtcggatgtgggccacagtgagccgcggc

SEQ ID NO: 370542 - DNA, 122 bp, Homo sapiens
accaccagagttgatttactgggctccctgtgggacccaggtcccaagatgcgatgcctccgtgtaatcctgaagcgacctgccacaccttccaccctccagactagagatctgcaaggggc

SEQ ID NO: 370543 - DNA, 122 bp, Homo sapiens
taaggaaattaagtgcgggagagcatggatgcaggaggtgaggtccccagagctacgtggcgctatcagttaccaggatgagcctcaggatggccctccccgcaccccacgttcccccacct

SEQ ID NO: 370544 - DNA, 122 bp, Homo sapiens
cgcactagcttccatcacaatacctggcaggtgatgagcaataaatatttgctgaaagaacgcaaggttgtatcttttgtcaattaggcagatgcctttgggcctcaggttttgctttctat

SEQ ID NO: 370545 - DNA, 122 bp, Homo sapiens
atctgagatttttaacccacccatttatttcccatccaagaaaacggatctgtcctatggcgtgttattagccgcaaggctgcctgcatgggagtggcctggaccatcgccccagggcccag

SEQ ID NO: 370546 - DNA, 122 bp, Homo sapiens
cgcctaggaaactgtcagcctcgcaaacccataggcgcagccccaaggtcagggtcacctcgagcctccagacaactcgtcaccttgacgaccaactgaaaaaaccggaagggatggaagca

SEQ ID NO: 370547 - DNA, 122 bp, Homo sapiens
catgacgtcgcgttccgtagggctcttcccgggctttggtgggtcacgtgaaccacttttcgcgcgaaacctggttgttgctgtagtggcggagaggatcgtggtactgctatggcggtgag

SEQ ID NO: 370548 - DNA, 122 bp, Homo sapiens
ggccatggttacacacatgcaggcaaacttaaggttggcatttatccagggattttgatccgtgccaaaagggatgatgagttatccatcctgaggtcaagatggaataaagaaaatacact

SEQ ID NO: 370549 - DNA, 122 bp, Homo sapiens
tccccacccgaggacccgcagtgcccggccgccgcgagctcgcggggtgtatgcccgccccgaggctccaccgcgcctgtgtgccgggaagcctggctccacaggaccctcaggcactgggc

SEQ ID NO: 370550 - DNA, 122 bp, Homo sapiens
gctggcagctcccctgcccccacccagctgcctgggcgccactgcgcagctgtcccagtccgttgccatagcaactggcagcagtactacactaagggggagaagcaaatggaaaagttaaa

SEQ ID NO: 370551 - DNA, 122 bp, Homo sapiens
ggctcccatgcacacatgcctatgatagaaaatattacaaggactgtctgaggctgggcacggtggctcatgcctgtaatcccaacactttgggatgctgagatgggcggatcacctgaggt

SEQ ID NO: 370552 - DNA, 122 bp, Homo sapiens
ccctggcatggtgtggtggggcagctggtgttgtgaatcaggccgttgccaatcagagaacggctacttcacaacaccagggccacaccacactacaggcagcattccagctccagaacccg

SEQ ID NO: 370553 - DNA, 122 bp, Homo sapiens
gtgtgttttttttgtggccgtggacacccttcagccctgtcttttggccttcaaagacttcgccaaaaggaggggcgggagcttccttcggctttaggtggggcaggagcttccttcttcgc

SEQ ID NO: 370554 - DNA, 122 bp, Homo sapiens
cccccgtgaggggccgagagttgcgggggggctcggctttcttggttcaggtttcctcagcgccaactacgtactaggcgcccccagcagaaacggccaccgcgggtcccagctcggcacgt

SEQ ID NO: 370555 - DNA, 122 bp, Homo sapiens
tggaagaggactttgctggtgcccacccactgtacttgtggcattgggcgctgtccaccccggcctgctcctgtgaatgccccatccctcctcccagccaaaggcagcattcagcttctccc

SEQ ID NO: 370556 - DNA, 122 bp, Homo sapiens
tacccggggggccaggcccagtgctgcccctcctggacaataatttagcaataaatactgcgcagggcaggggtagggcaccaaggccactgccctgcaagaggtcaggcccctgcccgccc

SEQ ID NO: 370557 - DNA, 122 bp, Homo sapiens
cgagattataggcatgagccagcacacctggccaagttaagcttttctttgcccttagaacgagataattgtaaaatgaaaacattgagattagtttttttggtctgtaaatctcatgttac

SEQ ID NO: 370558 - DNA, 122 bp, Homo sapiens
gctgaggagtgcgggcgcagggcgcgggactggcaggcagctcggcctgcggccgtggtgcggcatccactggctgaagccagctgggctcctgagtctggtggggactgggagaaccttta

SEQ ID NO: 370559 - DNA, 122 bp, Homo sapiens
acacagaagctttctacaagcagccctcccttttagcaaccagtcacctttcaaatactgcggcatctttaggcttaagaaatcactgcattataaccaattctgttatataacctacccct

SEQ ID NO: 370560 - DNA, 122 bp, Homo sapiens
gtttgagaagccatcactgaatctcctgatgtgttgaccctcacagtgctgcagttatatcgctttcatgaggcaccagcaaccaatagcagcttggcattgtaaaagtttctccgtgcctt

SEQ ID NO: 370561 - DNA, 122 bp, Homo sapiens
tggtggttttgacttatttatcaggatgccttcaaatgtaaataacaaaaaactacagggcgtcttgtaatatatcccctatgggtaagggggaactagtttattttagattcatggatttt

SEQ ID NO: 370562 - DNA, 122 bp, Homo sapiens
tgtcctcagttttgtttctccatcttatctataactgtaggcaggactgacttgtctacccgaagattttattttgcgtctgtttttccttaaatgctttttatctgccgaggaggggttct

SEQ ID NO: 370563 - DNA, 122 bp, Homo sapiens
gcggctggagtctcagctactcttcaggcagggcccgaagatcgctcgtgcccaggagttcgagactaccctatgcaacatagcgagaccctttcttttctttcttcttctttttttaaagg

SEQ ID NO: 370564 - DNA, 122 bp, Homo sapiens
cctgtaacagcaccaaccaccaggattggacatcaccgaggaacagcgggattgcctccccgaatgcctccctgggaggcacactgattgcccacccccaccactgcaccatttccaggagg

SEQ ID NO: 370565 - DNA, 122 bp, Homo sapiens
atgtgcaccgactgcgtcccctgagctacgcctgcattcaccgcactgattcaagacagccgcatccattcaccaggctctgtgtcatcaacatcaccctgtgacgtgccaacatcagggat

SEQ ID NO: 370566 - DNA, 122 bp, Homo sapiens
aattgcccttttccagccgctcgcgggccacttcggtgcgccggacctggccctgcagctcggccacctcctcctgaagcaggacgtggcaagaagagatgctccagcagttgaaggtgagg

SEQ ID NO: 370567 - DNA, 122 bp, Homo sapiens
gaccagaggccacgtccttgtgcagtgagaagccctcagggaaccagagggtgctgtgctcgcgcttgcgccgggccaccatgacacccaggacgagaatgaccagcagcaagacagcgccc

SEQ ID NO: 370568 - DNA, 122 bp, Homo sapiens
tttccacactaaccagtagggaagggaaacagatgcacccatcagagctctggggctggccgtccaggacacgagttacagcttataggcttgaagggactctaccaacactgggtgcagcc

SEQ ID NO: 370569 - DNA, 122 bp, Homo sapiens
tggggtcctttttatagctgatcccttcctgggaagctttcatttcttggtccctcctgacgagggaagacgggcagccaggggcccgttccctgggagatgctggtgatctggattctgac

SEQ ID NO: 370570 - DNA, 122 bp, Homo sapiens
cagaagtccggagcgtcaccctccgaccctcgctccgcctcccgctaggccctcctgccccgccctgcctaggttgagcatgagcgctggctgaggtgaaaacccagctaggaagctgctgg

SEQ ID NO: 370571 - DNA, 122 bp, Homo sapiens
tgtgcacgtgcacgggcctgggggtattgctgttcttccagcttcctcctacctgagcagcgtggaggtcggcaatgggcttggcctggcgcagtggggacggctccaggtccgagcggtcc

SEQ ID NO: 370572 - DNA, 122 bp, Homo sapiens
tccgcctggaactcccctcgccctgcccttcctcggcagggcactcatgcgtggggccctcgctgcccccagcacccgcacctcatggccgctctcctcagcaggcctcggtttacgggtcg

SEQ ID NO: 370573 - DNA, 122 bp, Homo sapiens
tggtgctagtggtcccacagaagcttgcagggaaccttcccgaattctctaaatgggatgcgaattttcattgaggacgttcatgggttttaagttaattagtctcacttaatcaccgaatc

SEQ ID NO: 370574 - DNA, 122 bp, Homo sapiens
gtcacggggaggatccagggagctgtaggtcatctggtcccgctcctcgtttggggcctccgtggtgacaatgcctggccacaggaaatgggatcactgggagccctgtgtttcccgctctg

SEQ ID NO: 370575 - DNA, 122 bp, Homo sapiens
acttcgagccaatccattgtcacagctctcagccggcgacctattggctcctgctggaggcgggactcccggttgctaggcggtaccttttccggaagtgtttgttgcgcgctgcagggcaa

SEQ ID NO: 370576 - DNA, 122 bp, Homo sapiens
ggggctctggagcctggacttcagcaggtgctgcccccttgaggctggggcctggccccccgcacagactgtagcccaggatagccttttgtatgaagttgggggtcccagggtcactctgt

SEQ ID NO: 370577 - DNA, 122 bp, Homo sapiens
tgagttttgttcactccggtaaaaatatattattattcccattttgaagatgaggaaaatcgaggcccacgaagagtgggacaggagagggcttaatttcaagatctctggacagaaaggtc

SEQ ID NO: 370578 - DNA, 122 bp, Homo sapiens
accagagccaaaatagggggaaagctggcttggaaaaagcaggcaaccaagggtacacaccgttagccaatatttgcaaggctgttggcagattagatatatctgtactcaaacactgcaat

SEQ ID NO: 370579 - DNA, 122 bp, Homo sapiens
cagaatcaaacaagctgattccttctctgtattctcgtaggtagggcaaatcaaaaggttcgatcctgtggcttcacgctgtgattctcatttggccaaaaacacagctgagaaaaaaaaaa

SEQ ID NO: 370580 - DNA, 122 bp, Homo sapiens
tgggggaaggggagctcgggacctcgaggcggctggaagtcgagggcatcgccagggggccgagttgggcccgggtgtggagaacgaagccgaacgctgggctctggattctcctccagagc

SEQ ID NO: 370581 - DNA, 122 bp, Homo sapiens
gggggagagggaatttcagagaggctttttttgaaactcctttcccttgccaactggctccggtcccttgggcaatactccggtcccctcggcaacgcccccaatccccgacctgccgcacc

SEQ ID NO: 370582 - DNA, 122 bp, Homo sapiens
gggtcgtgcaagtctggttccagaatacacgagcgcgggagaggaaaggccagttccgggcggtgggtccagcacagtctcataaacggtgtccgttttgccgagccctgtttaaagcaaag

SEQ ID NO: 370583 - DNA, 122 bp, Homo sapiens
cggcggcggccagtgcagggggactggatctctcggatgctccttcgctctcagtctcagcggcggcggcggcggcagcggcagcggcagcgcccggagctcagctcgctgtctccctcgct

SEQ ID NO: 370584 - DNA, 122 bp, Homo sapiens
acaggcacttccggacgcggggcactgtgggaagttgagttcgcggggctccttccttcgcgcatgcgcacatgcactcttggtaatgcttgcaggtggcccgttcttcctctttgtccttc

SEQ ID NO: 370585 - DNA, 122 bp, Homo sapiens
cctcggctgtagggcgtcctgaagagcggcctgctcggagctgagcgcacggggttgcctcgccctgggcgtctctggccctcaccagccccgtcttcccatgggcaaaacggcggtcctgt

SEQ ID NO: 370586 - DNA, 122 bp, Homo sapiens
ccaaaaagcagccaggctgcttctttgagaaggtccctgatcccattcctcctgactgggcgagacctcccaatgagggtctccagccacctccaacagttgcatgtgggctggcaacaagt

SEQ ID NO: 370587 - DNA, 122 bp, Homo sapiens
gctcagacgcgcggctctgggctctccgccagcaatcactgcggcgctgcgtttgcctcccggggacctggcagcctccgcctccgcgcctgccaagcctgcaggccagagccgggctcggg

SEQ ID NO: 370588 - DNA, 122 bp, Homo sapiens
cccacgtggtctttcttttttcctaagtgcatgagggaacccgattccctttggtaggtgcggtgaaacatcaatcggcttggtccacagataagcgtgttcaactccccgacgagtggtga

SEQ ID NO: 370589 - DNA, 122 bp, Homo sapiens
tctaaggttcaggaagcagaggaaagctgtggtcagcaccagcgacaagaagatgcccaacggaatcttggaggagcaaggtacagaagctgctctctggctggggcttgggggaaaatgtg

SEQ ID NO: 370590 - DNA, 122 bp, Homo sapiens
caggttccagactccaagttctatgcttttttgctggtccagcatggcctgtctcctccccgcaacagatccaaccagtccccttcagaagggctggaccaagtgaccccaactctgggttc

SEQ ID NO: 370591 - DNA, 122 bp, Homo sapiens
gcttaagtgactgataacaaaaatggaattggctaatcttttgcttagttactatcctatcgaagaagaaggccaaaagaatgctaaagtgtttataaaggttaggctctcaggtcaagtgg

SEQ ID NO: 370592 - DNA, 122 bp, Homo sapiens
cgcccaccgggcatggagtcagaacagggtcaggtcccagctgtcctgacattgtccctccgtggggcagcctgccctggcccagggacacccagacacatctgggcagaagccagaaccac

SEQ ID NO: 370593 - DNA, 122 bp, Homo sapiens
ccgagttttgtgtttccacagctttccagttgggtacaacggagccgaactccgtgttcccgggctggagagccttggtgtccccgccaacccccagtaggaagcgagcgctgtaacatggg

SEQ ID NO: 370594 - DNA, 122 bp, Homo sapiens
ctgctcttcccacttgactgatggaaaactaaggctcagtcacctgagtaagcgtggtgtcgacctcagagcgggcaatcacccctcgttttaaaaccaaagtttccctcgcagtcgatttg

SEQ ID NO: 370595 - DNA, 122 bp, Homo sapiens
attcccatcagaggacaggccctgcctgtgggcccatcaccatcccatctcccacctagacggaaaacccgagctctgctcctcctgaaatgaggccagccctctggtgtcaattacatgca

SEQ ID NO: 370596 - DNA, 122 bp, Homo sapiens
catcgggaacagaactatgctgccacctctggtgacctcagcacgctgcatcactgtccccgtccacgtgctaccctgtgggcccaggagagccctggggtccctgggtagcagagcgcctg

SEQ ID NO: 370597 - DNA, 122 bp, Homo sapiens
atctaaatatagaaaagatacagtaaaaacgtgacattataattcttatggaaccaccgccgtatatgcagttctctgtttaccgaaatgttgtcatgccactcatgactgaatgtataatc

SEQ ID NO: 370598 - DNA, 122 bp, Homo sapiens
ttcgatcactcacttccggtctcgaaaagtttctacttccgctatcaggagatctacttccgggccctgcgtggcagttgaaagagtggcgggagaagttgcaggtgagcgtccccggtcgc

SEQ ID NO: 370599 - DNA, 122 bp, Homo sapiens
gagcgccgtggctggcttggctgttccatgtggctccggcggggatggaggactcggtggcggcggcggctgctgctgcggcggcgacggaggagcggctatgagaagggaacggggccaga

SEQ ID NO: 370600 - DNA, 122 bp, Homo sapiens
tgtcggaatagcgcagtattcgggtgggtgtgacccgattttccacccctttctttgactcggaaagggaactccctgaccccttgcacttcccaagtgaggcaatgcctcgccctgcttcg

SEQ ID NO: 370601 - DNA, 122 bp, Homo sapiens
atctgccgcgaggtccttcctggaggtgctgactggactagctgatgttggctagatgaccgccaaccagatgaccttggctaactgatcttatcccttgggccgctgtggcacaggatgag

SEQ ID NO: 370602 - DNA, 122 bp, Homo sapiens
tatcaggtatggacaagagagatgaaagaaatgtgctcttcaactaaaggcacttgtcagcggccacctacagccattctctaggcctggtgagcaagcagggtgctgttttgatagaagcc

SEQ ID NO: 370603 - DNA, 122 bp, Homo sapiens
tcggagcctcgaggagtggggcaccagttgctgcccacaactgcaggacggcaggaggcccgaggctggcgtgtgcctgaacagggagccctgtgcagcacccacctgggccctgggcctcc

SEQ ID NO: 370604 - DNA, 122 bp, Homo sapiens
ggcgaagcagcccacggttaccctggtttcagagttccgagagcagccacggaaatgcagcggccctgcaggatccttggtgtttatccctctccgggtgggatcagaaagaaactcctaat

SEQ ID NO: 370605 - DNA, 122 bp, Homo sapiens
gcgttaacatcgcttccctttatactccagactgtgcaggaagcccacgctgccacaagccggttttcaatgagctctttatggggcactagaccagactgtcagaaacactgatctgttct

SEQ ID NO: 370606 - DNA, 122 bp, Homo sapiens
cggcggccgcgccccgctccgcgcccgctgctgccgcctagcgcgctgccacgctcggggcgccccgccacccggagggactgtaacttcggccaggccctgcccctgggacggggacatcg

SEQ ID NO: 370607 - DNA, 122 bp, Homo sapiens
caggccgcagctgacctctcaccaccccgagactcacgagcgcagggctaagtgtgtgtgcgagggcatttgcttgcaccctgcctgcggaacccaagaatgtgcaggcccgagccagcgtt

SEQ ID NO: 370608 - DNA, 122 bp, Homo sapiens
ccccttcatgcatgcgcggaggccgcctgctagcaaggtaggtggctcggcggcgagagccgtcaagggcgcattggagagtgaccctcggacccggctgccgccgtcgccgccatcttccg

SEQ ID NO: 370609 - DNA, 122 bp, Homo sapiens
gcaggcgccagggccccggcgggtagttctttgggcgccgtcttttgagaaagtcagcagcgagcagaaaggcgacagtgcccagtaggagagtccgaggatggaccactgcccagagggca

SEQ ID NO: 370610 - DNA, 122 bp, Homo sapiens
cttggctgcttccctacctgtttgtggtgtctttcgggggaccccttggcaaggcagctgcggctgagacggaggtagccccccagaaccaagatctcctcggcagttgggtaccgcttctt

SEQ ID NO: 370611 - DNA, 122 bp, Homo sapiens
gacacaggtgtttgcaagcagctgtcgtcacgtggctctctggactgggggcgtttgtcacggtcatctgtaggcctctgaatgtcagggtgcgggtttggttacaagggattattaggctg

SEQ ID NO: 370612 - DNA, 122 bp, Homo sapiens
agcaaattattcttcaaactcttttctacctcaaatccctcttcaaattaaaaaaaacttcgcggcatccctttgcctactcagccacaagaaccttcaactacctggctgcaacttccctc

SEQ ID NO: 370613 - DNA, 122 bp, Homo sapiens
cttggtggtctccagattctccaccaaggccgtgtctcccagaaagttccccgacgcagccgacagacgggccaggagcgaatcttccagctctttcagaacaatcttaaattcgttttgag

SEQ ID NO: 370614 - DNA, 122 bp, Homo sapiens
agactcagggcagagggaggaaggacagcagaccagacagtcacagcagccttgacaaaacgttcctggaactcaagctcttctccacagaggaggacagagcagacagcagagaccatgga

SEQ ID NO: 370615 - DNA, 122 bp, Homo sapiens
gccccggtggggagcagggggctgattagccgaggagcaggggtgtggccagcggggccccgggtagtgagtcacacacgccgctcgcccagtcccagggcccagcgccgtcccagccccag

SEQ ID NO: 370616 - DNA, 122 bp, Homo sapiens
tgagaataggaaactgtttttaatcagctacaattctatcaacctgttctactctgcaaacgtaattaccaagagatcacagacctaaaggagattctgttttcaaacataccaaaccggtg

SEQ ID NO: 370617 - DNA, 122 bp, Homo sapiens
tgcctaatgggtgttgttcctggctggacttgatgtccagggcctgaggggttttctcgccgagtctcctggggcggtccggaggctcgtgccctgttgtggggcccccatttgccgccgcc

SEQ ID NO: 370618 - DNA, 122 bp, Homo sapiens
tgggaaaaccccgggttatggggacccagaggagccgcctggcctgccgtggaagcagtgcgggctcccctgagcagaggacatgtgagctgagacctaaagaatgagtgattggggcaagg

SEQ ID NO: 370619 - DNA, 122 bp, Homo sapiens
gatcaagccatcctcccagcctctgaaggcgtgggaattacaggccagagctaccgtgcccggcctccctgttatttctcggatgaaatcctgccctgttggtgacactttccaggctatgg

SEQ ID NO: 370620 - DNA, 122 bp, Homo sapiens
agggcccgggatgggcagcgcgaaatcttgccgagaggcgcagctcgcatcaccagaccccgcacctcgccggccctccgtccgggtcgcctacccagcaaaaacggaagtgctacgtcgcg

SEQ ID NO: 370621 - DNA, 122 bp, Homo sapiens
aaggaagcacacaaccagatgaggcctgcctgccgctcctgaaccctttgggagggctcgcgcgggaaccctgggaagctcccgcggccggagctgggcctgaaactgttctttcgtttcct

SEQ ID NO: 370622 - DNA, 122 bp, Homo sapiens
ctgcatttgccctgcagctaaggccaacatttgtgactcctgccaaccccctacacaccccgtagaagcattgacagaacccacccagctctggcccttccagctgccatgcgggccagagc

SEQ ID NO: 370623 - DNA, 122 bp, Homo sapiens
gtctccaggagggtggaaatgccctgctaggaaaggattctaattcccccactctatccccgaatgtgtccctcctccttgcccatcccagctagtggagccaccacccaccagcccagggt

SEQ ID NO: 370624 - DNA, 122 bp, Homo sapiens
tgtccccttcgtcccggccacagatgcaggttctcccaagaggcgggtctgtacccgccccgcgcccccagcccagcgggcccggcctccgcccctgccccgcactcccacccccaccctca

SEQ ID NO: 370625 - DNA, 122 bp, Homo sapiens
tctttaacatgggggtgtgggggggttcgcggcagccgagtgccaaggcctgggaagcggcgcggcgcgtgcgcagtggcgttcggcgggacccgctgaggcaaagcggagccgcagtgaca

SEQ ID NO: 370626 - DNA, 122 bp, Homo sapiens
ccccactctttcttgctctcttcccccatcacttcatggacctccgaggcgcaaagcgctcgaccctctcctgggctcagtggcttgggtactccgggctgagctcagctggggagtcccct

SEQ ID NO: 370627 - DNA, 122 bp, Homo sapiens
aacaacctggaacgcaaattcgttaaattatgatacaataaggccaacctcgaggatcctcggtggactactagcgcacttccttacaattagaaagtgaaaaactgggtcagccctagagt

SEQ ID NO: 370628 - DNA, 122 bp, Homo sapiens
cggccccggctccgcccgcgaggtctgggctgctgcgagcccgcgccgggtttcgctttccgacgatcataaatagcttggtgtttgtaaacaggcgctgggggcacattccccgcgctcag

SEQ ID NO: 370629 - DNA, 122 bp, Homo sapiens
cctggggggcttccagccgcgcgtcctgcaacgtcaaatccagtgcgcccagaggggggacgctgtctcggggtgcctgtgaacagccttcaaaccatgggccccaatctctgcggggcccc

SEQ ID NO: 370630 - DNA, 122 bp, Homo sapiens
gggagcccatgagcccgggactgatgcctcgaggccctgctggcggctctgggtttgtgccgggctcatggggggcaaagtccacatctcctctgtctaccccagtgaagacaggtcccccc

SEQ ID NO: 370631 - DNA, 122 bp, Homo sapiens
gagatgatccgggccgcggacacggacggagacggacaggtgaactacgaggagtttgtccgtgtgctggtgtccaagtgaggccggcgcccaccatgctcctgggcgcccacgcggcccac

SEQ ID NO: 370632 - DNA, 122 bp, Homo sapiens
cctacgtcttttcctagtgttggtaaacttttctgaagtcaatagaagctctaaagcaggcgaaatatgggagcttggacgtacatattcttattctggtgggggaaaaacaggtttgaaaa

SEQ ID NO: 370633 - DNA, 122 bp, Homo sapiens
ccagagaagaggtcatggggagaaggcacaccttaaacgccccggggtggggggggggggcgacattccctaatgggaaaaaagacacaccttaaacgcagtagagggcgacattctctact

SEQ ID NO: 370634 - DNA, 122 bp, Homo sapiens
tttcctattccttaactcttgcagtcctcacaagagcctctcaggtgtaggtattgttcccgttttacagaggaggggattggagcccagaaaggctaagtaactggccagcgccggcagcc

SEQ ID NO: 370635 - DNA, 122 bp, Homo sapiens
ccagaaatcacccaaagacacacagcatgttggctggactggacggagatcagtccagaccgcaggtgccttgatgttcagtctggtgggttttctgctccatcccacccacctccctttgg

SEQ ID NO: 370636 - DNA, 122 bp, Homo sapiens
gctttcagagagcctcattaaatgagtttcattatacattatacatctctcaaccctggtcggcaaacaaggctcactcctaaccccctccagtcgaaaagtgaattttaaaagcagttcat

SEQ ID NO: 370637 - DNA, 122 bp, Homo sapiens
cagaccaggagggctggggctgctgcagcacggcctggccacgtcgccccggggcctcgccgtgtgtgccacatgcaccaggaccgagcctctccctgcagccccacagctgagcgggacgg

SEQ ID NO: 370638 - DNA, 122 bp, Homo sapiens
actggtatcacctctgccttatactgatgtatttccagaattccaagtataataatataacgtagattttctggagtacctttaaaaccaaattgttaaaagctgttgggttatttttacca

SEQ ID NO: 370639 - DNA, 122 bp, Homo sapiens
cggatgacgccggtgcagcgggggggcccagagccctggtggccatgggatagggaaccgcggtggcttccacggaggtttcggcagtggcatccggggccggggtcgcgggagtggacggg

SEQ ID NO: 370640 - DNA, 122 bp, Homo sapiens
gccagtgctttggcctggcccctggtctgccgccatcccttgtccagttggttgaggcaccgtgtgctggccttgtccctccaggccagagcgcggcagcccttacccccacagcgctgcag

SEQ ID NO: 370641 - DNA, 122 bp, Homo sapiens
agtaggttcagatgcaatggaaggagagaagaatcaagccttttgataaaatctctaccccgaattctatggaaaagacaggcaagcgggattccagccacagcacccccaccttttgctct

SEQ ID NO: 370642 - DNA, 122 bp, Homo sapiens
tgtctcttgagaccattttggggttcgtcaggggctcccgtttgggactgcctcattatgcggttccctgacaagggcaatgaattatgtccctgatctctttaagatctctctttcataag

SEQ ID NO: 370643 - DNA, 122 bp, Homo sapiens
ggaaggaggaaggagcttaagacactcctggagagtagtgcacaccctcccatttgggctcgcgctgctgccgttaaggcgggaaccggcgcgatctccattccagcgcgaacctcatcaac

SEQ ID NO: 370644 - DNA, 122 bp, Homo sapiens
ccttagtttagagagagagtctcaggccacacaagaaattacatatttatgtatcaggaacggcaaattcaaggattctgggacttaacccaagactaagggaggggtaagggaacggtcgt

SEQ ID NO: 370645 - DNA, 122 bp, Homo sapiens
tttgagatggagtcttgctatggtgcccaagctagtcatccaggatggagtgcaggggcacgatctcagtgcactgcaacctccacatcccgggttcaagtgattctcccacctcagcctcc

SEQ ID NO: 370646 - DNA, 122 bp, Homo sapiens
gcctcaccacaaagcggttggttgcggcagggactacaccggtgtatcatgggagcggcccgggctacacgttaaaaacactaaggggagcgcgcgaagctgaacttggcgctcgatggggg

SEQ ID NO: 370647 - DNA, 122 bp, Homo sapiens
aatagaaaaaaaaattaatgcaggaaatcatatgatacataaagtaggcattttattgaacgtaacacgtgcgcgtgtacttttatgagatgatcttctgatgcagggccaaggctgtcttt

SEQ ID NO: 370648 - DNA, 122 bp, Homo sapiens
tgcggggaggcagctaaggaccggggagaaatcgagcgcagcgccgcactgctgggggaccggatgcaccctccgcagctgctggcccaggtcctaatcccctcactgcctgggctggcagg

SEQ ID NO: 370649 - DNA, 122 bp, Homo sapiens
cagcattcttggtcggccaaggggagttggatgttggatgtccaggaacggcaaggcttccgacctctggcccctgcttgtcccctctgagggatatctgggtccataaaagttgagcgtca

SEQ ID NO: 370650 - DNA, 122 bp, Homo sapiens
cgacccggagcgcgggcgcggggctgcgccgtgccaggcggtggagatccccatgtgccgcggcatcggctacaacctgacccgcatgcccaacctgctgggccacacgtcgcagggcgagg

SEQ ID NO: 370651 - DNA, 122 bp, Homo sapiens
ctgcacggggctggagatgcaggtcataagagaagatgcatggagagagagagtgaaaagcggaaactgaagttgaagcaatggacttgggggtgccccattgatggggtaggcaggaagac

SEQ ID NO: 370652 - DNA, 122 bp, Homo sapiens
cccggcggtctttgctgccgcccgggggcgcagaggccgggccttttctttcagcacaaacgtcagtttgtaaaagggaggtgctggagtctgaggagttttcaggcttccgtctcgaagga

SEQ ID NO: 370653 - DNA, 122 bp, Homo sapiens
ggcgctgctgctcggggctgaggtcatcaaactcgcggcccgtgtaggccttgcccgccacgtcttccgtgtccccaaagatgccaagcctgcggcagatggccacggcagtgcctttgtta

SEQ ID NO: 370654 - DNA, 122 bp, Homo sapiens
cggcagcgcctgcccggccgggagcacaacccacggccctactccagcgaagtcccgcaccggcttctaggaataaagtttacgttctcctgaggccgcaccccccacctcccacccaggac

SEQ ID NO: 370655 - DNA, 122 bp, Homo sapiens
ttgcgaagtgattgcagagcggttggagagtgaatggatccggagcagcgtagcaaacagcgcagtctggggggctccatcccgccgcagggccaaggcctttcctgccagtccgacgaact

SEQ ID NO: 370656 - DNA, 122 bp, Homo sapiens
cgcccaaggtaagtgtgagccattgcctgctctggggcggggggagctggcggtgcagcccgccccggctcggctacccgggcatccccgggtgggcagggagggaggcctgcggggtgtct

SEQ ID NO: 370657 - DNA, 122 bp, Homo sapiens
acacactcctttattgagcatctgctgtagatcaaatccaataaaggtgttgagagaacacgctactgattcaaaaggaaaagagggagctttgtttctaaattcacctggtaatttttgtc

SEQ ID NO: 370658 - DNA, 122 bp, Homo sapiens
ccttgcttggcagaggaggcagcgcgggcaggccagccaaatgcttgggcgacagggaagcgtggagtctgcgggcttgcggcggatttatcagcgcagccatgccacctccctgctcacaa

SEQ ID NO: 370659 - DNA, 122 bp, Homo sapiens
tttttctctgtccctgactcctttcttccccctactcccccctcctccttctctgctctccgcccttttaaatgtcaaactgagcagatggttttaaggtgtggaaaggtatatagccctta

SEQ ID NO: 370660 - DNA, 122 bp, Homo sapiens
ttcccgattcccctaaatcctcccctctgtaaactcatagtcttatttctgtgaagctgccgttggtattttggaagagaccgcatcgaatctgctgatgtctattaatagtatggtctttt

SEQ ID NO: 370661 - DNA, 122 bp, Homo sapiens
gagtgtagctgggggttggagcagcagcctcctaggcgatgggacagagcccacagggtccggtatgccacggtttcttcgtcagaccctgggaatccaacgtcgcaaaataaacacggccg

SEQ ID NO: 370662 - DNA, 122 bp, Homo sapiens
gcgccgtgtcaggtagcggttgtagtgaaattccttctccagctccaagacctgctggcgcgtgtaggcggtccgagagcgcttgggctccccgccggcgtaattggggtttactggacaca

SEQ ID NO: 370663 - DNA, 122 bp, Homo sapiens
caatctgcaaggaagaggaaaccagcagcagcgcggcgctgggcaggctgcagagccgggcgtttccgcccctgcccaggggtcgccgttgcgcacggcggtgcaggctgggagcgctggcc

SEQ ID NO: 370664 - DNA, 122 bp, Homo sapiens
ctggggtccttggcccgggagccccagcccgcagagcaaggggaaggctgcggcccgagccggcccccgacccacccgccccgcctcggcctcgtacaagcacctttgatctgcaaccttca

SEQ ID NO: 370665 - DNA, 122 bp, Homo sapiens
ccggtcgccagagaaggcggggcaccgaggtagcgcgcccaattggggcgcgggagaggccgggggtgtggcagcgttggcggcgagcaggggcctgggcgcgctgggggcggggccagggt

SEQ ID NO: 370666 - DNA, 122 bp, Homo sapiens
ggattttttgccagttttaaaaatacatgtatcataaagtttactatctcagccacttgccggtgtatagtttggtggtgttaagtacattcataatgttgtacaaccaccgcaactgttca

SEQ ID NO: 370667 - DNA, 122 bp, Homo sapiens
ctggagcctttgctggttctcagagcgggaacatggtcgagttggccaacagtgtacccacgttgaagcagctgtgccgaacatctggctctgattatctggctgggaatggccgggggtgg

SEQ ID NO: 370668 - DNA, 122 bp, Homo sapiens
gatgctggggctggcggggtccccgtcaccctcgtccgggcgcgcacgcgcacgcgcacgcgcgcacaccccctcgcgctccctcacgccgccgacgttccatttttgaacctgcgcaacgt

SEQ ID NO: 370669 - DNA, 122 bp, Homo sapiens
gatccagcccccgtgggctgctgaggttggcagagctgctgaaagacctctctgtccagacgcccagactccgacgatgcggacctgcactcgggctgcctgcttcctcggtggtgggacgt

SEQ ID NO: 370670 - DNA, 122 bp, Homo sapiens
ctcaaagcgcgaccaaagagcgtgacagagcgctttacgacagttgctttgaggcagtaccggaggagaaagatggcggctaccttactagctgctcggggagccgggccagcaccggcttg

SEQ ID NO: 370671 - DNA, 122 bp, Homo sapiens
cagtcgtagatttgaaggaaatgactctgacttctgggaaatagctttcaagttcttcaccgattggttctaaagccaaacatgcagtttagaagcagttcaggtctggatgatggggtttg

SEQ ID NO: 370672 - DNA, 122 bp, Homo sapiens
cagtgaaagtggcggggctgaggaagggcatattcagttaatctaaagggaggaaacaaacgttccaggtagatttagaggaagactttgaccagagtaaggtggttaccggttcccactgg

SEQ ID NO: 370673 - DNA, 122 bp, Homo sapiens
cacgtctgtgggttgtggacggtaaaggccacgtagacctcaggagcccgctggtgctcccggcaggcagccagcctccgcaggaccccgactagcgacacgatggcttctgggcaatacag

SEQ ID NO: 370674 - DNA, 122 bp, Homo sapiens
atttcagcggaggctcttcttacttcactatgttgaagatactgactaaaaagaaaatggcgcactgctttccaattgaatgagcagattttttcagtgtctgggaaaacaataaaatcctc

SEQ ID NO: 370675 - DNA, 122 bp, Homo sapiens
ctgcggccgcccctcgccctgccagtgccaccagaaccactcgctgccccaggcgggcaccgagaacacgccccagtggatgaacaccccgaacttggcttcgtcgaaccaggccggcagcg

SEQ ID NO: 370676 - DNA, 122 bp, Homo sapiens
tgcagcgagggccgttctctggggcggctggagcagccggtgggcatttcctcccttcagcgctgacccccacctactggtgccggccgtgtgtgctgggctcagcactgcgggtgccctgg

SEQ ID NO: 370677 - DNA, 122 bp, Homo sapiens
ggtgacatctgtaatccattcattttaattgattcagcagttactatatgccagactgtccggaagcagaatttaaggagatgaaatctccatcttcgagatactcacagtccaatggaggg

SEQ ID NO: 370678 - DNA, 122 bp, Homo sapiens
ttttaacctcttgttttttaaatctcaaaacgtaagaatgggccagggatgatacaaccccgtttaacacaatgaaaattaactttgttaactttgagttacttttctgtgatcaagtcttg

SEQ ID NO: 370679 - DNA, 122 bp, Homo sapiens
gcgaaccttgtggctttgtctgtttcctgtttcagcaaggctgctgtgcaaaaagaaagacggtaccaagaagggacgtgttaatggggcccagacctatggattgaaagcgtgtgctttac

SEQ ID NO: 370680 - DNA, 122 bp, Homo sapiens
aataaggtctatcagacatcttgaaaagctttttctccagacgacgcagaaacaggcacacggggttctgctttccccacctcccacccccaagcccaggtcccattcttctcactttcaat

SEQ ID NO: 370681 - DNA, 122 bp, Homo sapiens
tccagcagatttaaagggccagcacctttcccccatgcttctacttttcttttatcccttcgggaagccagatatctaaggactgagacattcaaacacaactgcatatacaggggaattta

SEQ ID NO: 370682 - DNA, 122 bp, Homo sapiens
gcgtcaccacaggcgcttctcttcctcctgcagtgcagccctagactaaagcgtgaaagccgagtatcgcgtgagagtccggaggcgctgaagggagggtcgcagcgccgtgactttcgctt

SEQ ID NO: 370683 - DNA, 122 bp, Homo sapiens
aagcactgggcacacacgaagcagtgctcatggtacagctccccattgctgttgacaatgcgctcggcgggggagaagcgggcctggcagcgctggcacacggcgttggccaaggcgtccga

SEQ ID NO: 370684 - DNA, 122 bp, Homo sapiens
cgaggggcggggcgcggctctgggcaccgcccacgctgtgccgacacctgggctgtccggcggtcagtctgtccgccccggagccccctgggccccacctcctcgtcccgctctcggaggcc

SEQ ID NO: 370685 - DNA, 122 bp, Homo sapiens
gccttcctcacttgctgttttcggtgccgcctcgcgcttgtcccttagtctttacctcgtcggagaggttagaaaaggaaccttagagctaaaccaaaggccattcccactctgccctcctc

SEQ ID NO: 370686 - DNA, 122 bp, Homo sapiens
gtgatccacctgcctcagtctcccaaaatgctgggattacaggctgtgagctaccacacccggccaaccaagttgacttctgattaaccagcttttagggaaggcctctaagatttccagtt

SEQ ID NO: 370687 - DNA, 122 bp, Homo sapiens
cattgactctctctgtccagggaccgccatatgtgacttgtgctgtctgtgaccaggacgcgggctcttgaaggagcagcgaggagcaagagagaggggagcggacgccccgactcgcgcag

SEQ ID NO: 370688 - DNA, 122 bp, Homo sapiens
tctccttcctggaagccagccctgccttcctgagcaggctgtacatggaagcaattgctccgacacagacagggacaccgtggtgcgtctctcggccccatcacgacggcctgcaccacatc

SEQ ID NO: 370689 - DNA, 122 bp, Homo sapiens
aatctgatctgtatgtcaaaacagcactttgacttttgcttgaaaaaagaaaggattcagcgaagaaatagggaggcaattattaggaagctattgcattgatccaaaagatggttgtacca

SEQ ID NO: 370690 - DNA, 122 bp, Homo sapiens
gcggccaggaccgaccctgtcccgacaaaatggagttccccgtgtggcttcagctcgcggcgcgttcccagagctcctcagtgatccggctttcggattgttcgcctttcatctcatttgcc

SEQ ID NO: 370691 - DNA, 122 bp, Homo sapiens
gggaaaccgagggccccacgcgggggcttgggaacaacccatgacggagcccctcctccgcggtcgtctctcaggcctaggcctgctgggcctggactgttccctctgctctgcttctccaa

SEQ ID NO: 370692 - DNA, 122 bp, Homo sapiens
ttaccaggtgattttccctaggtgagcgggagcaaactccagtttggcaagatttcctgccggagatgagcgatccaattacagtgagggaaggaaggaggaaagctaagccgcagaaggag

SEQ ID NO: 370693 - DNA, 122 bp, Homo sapiens
cccctggtcaccgtcgtcctgttctctggtgacagtgaggctgtgtcccctggtcaccatcgtgctgttctctggtgacagtgaggctgtgtcccctggtcaccgtcgtgctgttctctggt

SEQ ID NO: 370694 - DNA, 122 bp, Homo sapiens
ggggacagagctttgggtagaggagggtcacctgcaaagctggaatgccaggggagtgggcggtgcctccagctcctgggggccagggtgtctccatacctcatgggcctgagcctgggcag

SEQ ID NO: 370695 - DNA, 122 bp, Homo sapiens
ggaggccatgaacgccacggggaccccggtggcccccgagtcctgccaacagctggcggccggcgggcacagccggctcattgttctgcactacaaccactcgggccggctggccgggcgcg

SEQ ID NO: 370696 - DNA, 122 bp, Homo sapiens
gggccggagcctgctctgggggtcgcggaggtgtctcgagagttgaggacccgacccgggcgcgcgcgggcgcaggtatggggagggcgcggcggctcctggccggtcctaggagcctgcgg

SEQ ID NO: 370697 - DNA, 122 bp, Homo sapiens
cgccgcgagcgggggggggggcgctggtgtaggacggacctgattggccggaggcccgggcggtggccgcgcgcgcctgcgcaggaggcagcagcgcgcaccggcggcgggaggagcgcgcg

SEQ ID NO: 370698 - DNA, 122 bp, Homo sapiens
gagggaaggagaggggctttccttcccaccctggtgtccatccagtctccccagttcagccggcaggtgtgcaccagggcagccacccgttggtcaggcaccatgctagctccaaagcccgc

SEQ ID NO: 370699 - DNA, 122 bp, Homo sapiens
gagggggcaactcggcaggcctgggagcaagaactcacacagagggcctgccctggccctcgaagaaccatagacgccggggcagcagcctctcagcaccaccctcatctgtgaggactctg

SEQ ID NO: 370700 - DNA, 122 bp, Homo sapiens
catttatctccaaatttcttaatgcagaggtcacagactggtgaactacttctagctgtccgcatggttggttggtttgcttgcacagtgtttaaaattttttaaatttgttgctagtattt

SEQ ID NO: 370701 - DNA, 122 bp, Homo sapiens
aaggaaaggtgggaatatggcatagacagagcagggagacagaatctattcaagttaaaccgaatagactctgcagtcttgctctcctgcataatccaaagtgacttctgagaaacaggtca

SEQ ID NO: 370702 - DNA, 122 bp, Homo sapiens
gggcggagcctcgatgggagcccgccccaggggcggggccacgggagccaggcccaggtgcggggacccaggccggctccctactctgactgcaaactaactgtacagggtatgtgcagcag

SEQ ID NO: 370703 - DNA, 122 bp, Homo sapiens
acaagaacatgatcagttttgtgccaactggctccacacagtgaagtaattgtcaatatccgcatagagaagctccaagtagtagagggctcagaatgtgcaacttgtgatgattcagaaga

SEQ ID NO: 370704 - DNA, 122 bp, Homo sapiens
tttaaccacaattatgcttgaatattttctgaatgaatgaataaaggtccctgggtagtccgatccctggcctgtcatgtgctagcgtatttttatttagttatatggtttggactaaccac

SEQ ID NO: 370705 - DNA, 122 bp, Homo sapiens
gcagttacttttgagttgagacctaaatgacaagaagggactagcacatgatggtctgtgcgggtacaggcagaaggcacaggtacagtacacaggccctaggctgaagccaagcagaaggc

SEQ ID NO: 370706 - DNA, 122 bp, Homo sapiens
ggctccttgagctggctggatggttgcgcccgccctaccccggaatgtgggcctttggagcgagcgaagtgggagggaccgacgcaggaggtgtcttgggcccgggcggctgtagaggcggc

SEQ ID NO: 370707 - DNA, 122 bp, Homo sapiens
tgcgtttttctttttttcctttacgcatgtaaccacggtcctgcatcgtgaaacggtacgcgcgtcggtggcaaaagaaaaacagcagtggctgcaaagctaagggccctcgctttcagagg

SEQ ID NO: 370708 - DNA, 122 bp, Homo sapiens
cctggatctgccgctccccccttccctctcctgggagcatcggtgcctgggcgccgtgggcgcaggcggtcggcattgttacttaggtccgagctaagttacgtctcctctgcccaaatcct

SEQ ID NO: 370709 - DNA, 122 bp, Homo sapiens
aaggccgtgtgcttggacagcatgctggccctcttggcctcggcccggctgcccgtgcgccggtgggacttggtgctctgggttctgtgcaccacccggacactctggtggctgccgatgct

SEQ ID NO: 370710 - DNA, 122 bp, Homo sapiens
tccctttctatcttccccgactgtcagtccggtcccgtgggaacccggggcgggttggggcgagtcaagagcccctgcaccccaagtcagggtactgcacctaccccttggggagaccaacg

SEQ ID NO: 370711 - DNA, 122 bp, Homo sapiens
cacctgaagcagggatgctgcccggccagaaatcgcccgtctgcccgccccatctttctccgggctttttccaccgagcttaagccccaaaagggagggggtgcatgggagagaaaaaggca

SEQ ID NO: 370712 - DNA, 122 bp, Homo sapiens
ttttttaaaataaataagttttttaaagcagacggcaaaaatgccaggtgcgctggacctcgtttgggcaggaaggggagtggctgcctcctctctgccacggtgcagctcaggtgcccgag

SEQ ID NO: 370713 - DNA, 122 bp, Homo sapiens
cacagtttcttcagtgtgaatctgatgccaacgggatcagtcagtctggcagccacagggcgagggcaaaagcagcctccttgcctggcttgtccctgggcatccacacaagacccccagaa

SEQ ID NO: 370714 - DNA, 122 bp, Homo sapiens
gaggctgaggtgggaggactgcttcaggccaggagttcaaaaccagtgtgtgaaacatagcgaggccccatctctaccaaaataataataataataataataataataataataataataat

SEQ ID NO: 370715 - DNA, 122 bp, Homo sapiens
ccaaggatcatgtctgttgcccttataactcttgggcaatgacaaccgatttttgctcagcgtatagaatgctggtcaagggcaggatatttgaagccacagaggatgtaggtttgaattcc

SEQ ID NO: 370716 - DNA, 122 bp, Homo sapiens
ggaggacggcttcatcgtggtgcatacacacgatgggctctgggcacactacagggaggacggcttcatcgtggtgcatacacacgatgggctctgggaacactctacagggaggacggctt

SEQ ID NO: 370717 - DNA, 122 bp, Homo sapiens
ggtatcttttacagataccttcaaattttaccttccccttaaactggtgaccttcagccacggcctcctttatgcactgtaggatcctacttttcagatcatctgaaaatctttacaatttt

SEQ ID NO: 370718 - DNA, 122 bp, Homo sapiens
ctttcagccccaggggcttcttggcctcctgcttctcagaggagatcttggcaatctcgtcgacgctcttggccttgacaagtgcgtacttggggttgacgagcttcttggccacagtgccc

SEQ ID NO: 370719 - DNA, 122 bp, Homo sapiens
tccaaaaaaaaaaaaaaaagaaatggtaatggtaagaaggaagagaggtaggaaaggtaacgtaataatagccttcgttttgtgtgtagaaaggttgttattacttttgattcaattgttga

SEQ ID NO: 370720 - DNA, 122 bp, Homo sapiens
tcgatgaaaactgcgcgaagtcgaggtgctaagcaaagaaagtgaccccgactgtggactcgcttagagtagaaactgctgaagtagaccagacaacgtcagcgcctgggtgatttttgctc

SEQ ID NO: 370721 - DNA, 122 bp, Homo sapiens
gataactgttggcggagcgtagcttcaaaagtgttagtgggcatgcgcgcggttcaacagcgcctacggaaatcctaacgggaatgtaacccaaaccggaagtggcctagagcgaccattta

SEQ ID NO: 370722 - DNA, 122 bp, Homo sapiens
ttataaattcctattacaaagggatccctgctatgctaattgcaacctttggggtctaaccgtgctgtacacacacacacacacacacacacacacacacacacatgctcaacaaatttatg

SEQ ID NO: 370723 - DNA, 122 bp, Homo sapiens
ttgatttcctgagctacttgttcgccttctgtgcgtcaccaagtaatctggttcatctttcgtctcattcatgttattttcaagtgaaacaagacattttgggggtcaagtctctttgggtg

SEQ ID NO: 370724 - DNA, 122 bp, Homo sapiens
acagtttatccttgtgcttcagaactcacaggtacagccaccccattctgaaggaccaaccgtaggggacctcccaattgtcaggtagcaaggatgtcaagctgcctactgagatggaagat

SEQ ID NO: 370725 - DNA, 122 bp, Homo sapiens
gccgccgccccgggcctgttttgagcgccagcagcagcgaggcacccctcaaggaagcagcgccctgcagctcctttatctttttgcaaaagcgaatccgactctccctcaacgagccagca

SEQ ID NO: 370726 - DNA, 122 bp, Homo sapiens
tgcgggaagccaggcagggtagggcggccgaggaagttcagaggatgggaagagcagaaccgtatctgtctctctgtgttgtgtttgcctctgccttgctgggtggtatcaaaaaactctcc

SEQ ID NO: 370727 - DNA, 122 bp, Homo sapiens
ccggagagagccccagccgccgccgtcgtcccccaccccccgaccaccgcacctacacgccggcccggactcgggcttcacgcagggaaggatacttaaagccagcattttggattggtagt

SEQ ID NO: 370728 - DNA, 122 bp, Homo sapiens
agagacctaagccgagtctggcttaatttgcacattgcttcctggctgtcttcccaccaccgtggagtctcacacgagattaattacgctcaagcgccttaaatctgtaaatcgctatgccc

SEQ ID NO: 370729 - DNA, 122 bp, Homo sapiens
gctcccgtgacagaccaagtctggcgctttcccagcgtcgcagctggaccgagagaggagcggccgttctgcaaaaggaagcaagtcgccaatctcgccggaaccgcgccccggctcctccg

SEQ ID NO: 370730 - DNA, 122 bp, Homo sapiens
tattcccgctctacaagtgaagaaattctgagaggtgatgtcgtcgatgcagggtcggcccgaaataggcggagttgggattcgaactcatttcacaggcagagggaggagagcagccatag

SEQ ID NO: 370731 - DNA, 122 bp, Homo sapiens
gcagccctggggcagaggatgcgactactggactgaggttgaatcctttacgtgtcgccacgcggtcccctgtggggagcgcatccatccccatctgttcttttccccagctcccagctcgt

SEQ ID NO: 370732 - DNA, 122 bp, Homo sapiens
agtccagtgtttccacggctggatacctgtgtgtctccataaaagtcctgtcaccaaggacgttaaaggcattttattccagcgtcttctagagagcttagtgtatacagatgagggtgtcc

SEQ ID NO: 370733 - DNA, 122 bp, Homo sapiens
gtagggctgtggaggggggatctctgttggggggctgtgctccaaatttccaaaactccacgttttggaaattcagtggagtctgctcgccgcattttaacaatgggggccctgcaccggcc

SEQ ID NO: 370734 - DNA, 122 bp, Homo sapiens
tcctcagcgcggtgacgagtgtcaaagccgtgagtcagcagttatgagggcgtcgatgcccgtggggcagctcggagcccatcaacgcaccagtggaggttttgttctctgctaaacaacaa

SEQ ID NO: 370735 - DNA, 122 bp, Homo sapiens
gaagctgagcaccccccagtggaggccacggtgttatttcctcacctctcagaggcagggcgttctgaatggctcctgtgaactgcaaaatcagagactgaggctctcagctgggagctgaa

SEQ ID NO: 370736 - DNA, 122 bp, Homo sapiens
ctcctttgtcagcagaggcagccgcagaacaacgggtcagcatcttccttagaacagccccgcgccgggcgagtggtaatgagacacctgtcagccttctcatccccaggcttctgtgcaga

SEQ ID NO: 370737 - DNA, 122 bp, Homo sapiens
tttgtgcctgattggacagttcccagcccagcgtccctgattagataacgtttaaggccccgccttctcaggccctgagtgacagaagatgtgatcagacactgggctgaatgaagaaagag

SEQ ID NO: 370738 - DNA, 122 bp, Homo sapiens
caaggctctcaaggggcttcagcaccccaagcactgcagcgtttctcccaggaggctgggcgagtccgtagcggaagtcggagcggcagagcagtgattgggtgcggccggcaccgtctctg

SEQ ID NO: 370739 - DNA, 122 bp, Homo sapiens
agaagatgctgtccctccaggatcaggtgttcaaggaaagcaagagatggcccagacctccgaattgatgctcaaatgttcctggatgactggctactgttagatactcggcttcctgctga

SEQ ID NO: 370740 - DNA, 122 bp, Homo sapiens
caataggaataagtgtttactagagtctaccatatgctttaattctaagtttacagttggcgggtacagaagggaaagatacaatgaaactgtctacttggatagaaagacttcatgcacag

SEQ ID NO: 370741 - DNA, 122 bp, Homo sapiens
gggcacgcactttgaggtcccgcgcgaagaactgcgcagaggaaaaccctcgaaaagagacggttatgaaagcttgtgagaagaaaatctagagggctctggagttgctagagagccctcgg

SEQ ID NO: 370742 - DNA, 122 bp, Homo sapiens
gtaatactggtaacccgggtgctccagccccaagagcaaacgactgcgctacagaaagaacgagggatggagaagcaggtcctgccgccagtagataattcgcagccctgccccgcgggaca

SEQ ID NO: 370743 - DNA, 122 bp, Homo sapiens
gcagcgccccctcctggagcagccgggagcccggacgtcaccccgcgagaccctggaggccgagcgccccgtatccccgtttcaagaactcaggatccaggaccgcagactccctccagggc

SEQ ID NO: 370744 - DNA, 122 bp, Homo sapiens
tccaggaaacacctgcccggttttctgtcctgtgggtggctgagaccccggcattggacccgtgaggcgacctgtctgaatgcagaagacacacaggcccacagtcctggccacgccccgag

SEQ ID NO: 370745 - DNA, 122 bp, Homo sapiens
cttcttccccaaggccggtgggctctagggagtcccacttctctgccagccaagtgagaacgcaggcttgaaggggaaggaggaagagagacttgttggcggggctcccgctgggtcgagag

SEQ ID NO: 370746 - DNA, 122 bp, Homo sapiens
gccctctccccacccactctctaagaactccacagccaacccgaagtcaaactcgtgcagcgggggcccatccactgcgatcttcaccatgtggcccccccggccttccccggccccactct

SEQ ID NO: 370747 - DNA, 122 bp, Homo sapiens
ccacactcacctgcccagagcgggatttgcaaggactcaggacttgccaggtcccagacacgcggagccaacctgctccaccctccaactcggctcaacgatccctgcctgtgagctcctca

SEQ ID NO: 370748 - DNA, 122 bp, Homo sapiens
cacccacacacagagcagctgccaggtccacataagggccactcaacaaccagacctgaacgaggcagggaagagcaggtgtgcctgacccttcaggagcctgcggaatgtggagttctggg

SEQ ID NO: 370749 - DNA, 122 bp, Homo sapiens
gggatataccccaaagtcctctaccccctcacttttatggccctttccctagatatactgcgggatctctccttaggataaagagttgctgttgaagttgtatatttttgatcaatatattt

SEQ ID NO: 370750 - DNA, 122 bp, Homo sapiens
cccgcgggccgcccccatgcagcggcgcgggccctgggcagcccccggccctggccccggcgcccagctcaggccgctcccgccgccgccgccgcttccattcatggagccccctacccccc

SEQ ID NO: 370751 - DNA, 122 bp, Homo sapiens
catattatctaaaccatgcccatcttcaaggcacagctcaaattccaccttctcaagaagcgtcccctgcccagatccgcgaagccctctttcccacccacttctgaggactgactacctgt

SEQ ID NO: 370752 - DNA, 122 bp, Homo sapiens
tgcccaaatgaactctgatactggagcaagatggagatatttccattttactcagcaagtcgaaatcattcaagattaaagtcatctctaacggtgcagcaggactttatggagaagtccag

SEQ ID NO: 370753 - DNA, 122 bp, Homo sapiens
ctgcgcgggcccttgcggccgggcagtctttctggccttcgggctagggctgggcctcatcgaggaaaaacaggcggagagccggcgggcggtctcggcctgtcaggagatccaggtgagcg

SEQ ID NO: 370754 - DNA, 122 bp, Homo sapiens
ggcaaaacgtgtctacgtgtcttttgaacacactgataatgctgtctgcattaagacttccggccagccgccctgtccgggagggaggtgggggggtcagccccccgcccggccggccgccc

SEQ ID NO: 370755 - DNA, 122 bp, Homo sapiens
ccagccacgtgcccagcccgtgggtgcggtttcccagggcggccccggcgccgccgcccacgccgtccacctcctccaagccgctgtggttcaggaaggtcgcgttcatcgccgcgcggcgc

SEQ ID NO: 370756 - DNA, 122 bp, Homo sapiens
agagcctacctcccttctttacctggccaatactaagtccctagtgtgggagaggttcttcgcttttgtgttataggaccatgtatataagaccctagggcttaagggaggtctccctggga

SEQ ID NO: 370757 - DNA, 122 bp, Homo sapiens
aagacctcattctctatcctccaagggggctatgtgtgtgagggtcccttcatttacctccgcgctatgtattgcaataaacagcctctattttttgctgtttttagtctcttcctttttcc

SEQ ID NO: 370758 - DNA, 122 bp, Homo sapiens
ccgggaccccgctgctgcatctgcctctccaggctcggccattccccgggggtcccttcccggtctgtcccccacagaacgttctcccccaggccaggcccaggctccccacaagcgccccg

SEQ ID NO: 370759 - DNA, 122 bp, Homo sapiens
gcgtcgggggagcggcggagggggccaggggaccccaccggaatgagtgcctgtccgcagcgactgggggagaaattatgtgaataattcagcccctccaacatccccctgcccctcaactt

SEQ ID NO: 370760 - DNA, 122 bp, Homo sapiens
cctgacgtcgagcgccgcgggcctctgcactgcgatctgctgccccttggtgggcacgcgcggcactgtttcctgagggcctgatggtggacgtttgcaagacaaatccacatgcgcgttgt

SEQ ID NO: 370761 - DNA, 122 bp, Homo sapiens
gaccgcacagcatcctgggagcagagtaaagtgttcggagaacatgatcagcactgcagccgcgcagcatcctgggagcagagtaaagcgttcggagaacaccatcagcaccgtgaccgcac

SEQ ID NO: 370762 - DNA, 122 bp, Homo sapiens
gcgcgtaattctcccggaagggttattctctcgctccattcttgttttggggggagccagcgagacagctcctttcggggcgcgctggcaaggtgggagggggtgggggcctgccgattgga

SEQ ID NO: 370763 - DNA, 122 bp, Homo sapiens
ctgcacacacaatgcaagtcctggcctccgcgcccgcccgcccacgcgagccgtacccgccgccaactctgttatttatggtgtgaccccctggaggtgccctcggcccaccggggctattt

SEQ ID NO: 370764 - DNA, 122 bp, Homo sapiens
gaaggagcagggtagacatctattcccagcaaatgaccatcctgtgaaatttctcgccatcgtcaatgcagagattgatgagcaccacggcccccctggacacctcagtgttcattaggaag

SEQ ID NO: 370765 - DNA, 122 bp, Homo sapiens
tcggccggcgctgacgcagccatggcggaggcggctttggaagccgtgcggagcgagttacgagaattcccggccgctgcaaggggtgagtggctctcccacaggctgcggcgatttccgaa

SEQ ID NO: 370766 - DNA, 122 bp, Homo sapiens
cgagtcatcagggtgaggctggccgtgtgtgatgcagtcactggctgggtgacagacccccggaccgctgtggactcaggtgtgctggaggtggaggtgttgggcgaggtgcctgcagctgg

SEQ ID NO: 370767 - DNA, 122 bp, Homo sapiens
gaaaaaggaattatacaagaaagtgaatggttaaaggcatccttccttaagatgcattaacgtacaacacaccacaatgctatgaatggggcgcatgcatcagatgaggttttaattggttt

SEQ ID NO: 370768 - DNA, 122 bp, Homo sapiens
actgaagggggggctgagggcggagagagcataagaggcgtggcctagaagattgaaagccggacatctttgtgatttggttggttcaaaatttacccagtaaggacaaaaaagggaaattt

SEQ ID NO: 370769 - DNA, 122 bp, Homo sapiens
gggtcatgcacaggggaggagggagtgtcctgagtgtactgtgcccaggtggcatgggggcggtttggcaccagaaaaagaggagctgtcccacctagcaaaatccacaatgcctgcatcac

SEQ ID NO: 370770 - DNA, 122 bp, Homo sapiens
gtgggcgtttgttagggaagagccagccgccccgcctgttctttactccttatactctcgcgctgctctccccggtaaaaatgttccgaccacgccccagtggcttcgcctcattttctccc

SEQ ID NO: 370771 - DNA, 122 bp, Homo sapiens
cccaccctccccttcctgcggtcaactgtccagattccaacagacaaaagcaagcatgggcgaaccaccgtgcgccgcggtccccgacagaagcacgcatgcgcacacctctgtgtgcggag

SEQ ID NO: 370772 - DNA, 122 bp, Homo sapiens
ggtctgattagttttgaatttattcatattgatcttttcacgtgctgttagtttaagactcgaagtggagttatgctaaggtttaccgatagtttgcccactgggaattagtggacctctag

SEQ ID NO: 370773 - DNA, 122 bp, Homo sapiens
tcttctacagcactgtctagcatgtgatttccctaaatcctaccatttaaatgtacatgccgcacactgccaagaaatgtacagaactatgctgtgggtaagtgtagctcggggaatagcca

SEQ ID NO: 370774 - DNA, 122 bp, Homo sapiens
ccgggtccgctgagcggtaccaggcacccccgagacacgcgctggcaaccacgcgcgcagcgagaggtgaacaatggggggtcaaattcgccaggaaacacgtcccagccttctcccccggc

SEQ ID NO: 370775 - DNA, 122 bp, Homo sapiens
ggctttttaggaggcactcttaaaaataatagccagccaaggatcccagacatttcaaaacggtctgcaacatgaaacacaaataccaaaataaacagagaaaaatggaattcagatgttag

SEQ ID NO: 370776 - DNA, 122 bp, Homo sapiens
ggccgggcacccgccgctggtggggctttggatgcaacaataattagtattttgacgatgcgattccgatcgccccaccaagtaggaggtcccaccctgagtagggagccccgtgggaactg

SEQ ID NO: 370777 - DNA, 122 bp, Homo sapiens
cggcggcgcgggctgagagcagctccgtctaaggccacgccgccccggcgtccccgacagcgctctccgcggggatagtttccagctttacctctaaagaggcggcccaggactgcggacag

SEQ ID NO: 370778 - DNA, 122 bp, Homo sapiens
tgattaagtgaaaagccaaggcaaactgatcctttgaaagcttcccacagtcctttgtgtcgcataatgacctgcacaaataaacaaaatgaatggtatgtaagtgccacaactgcaaaaag

SEQ ID NO: 370779 - DNA, 122 bp, Homo sapiens
tccagccgggactgcggcgcgcgggggcggcgcctgcacgccgctcggctgggggcgcagcgggcccggccccgcccctgacccgcccctgcccccggccccggccccgccccaacccgcgc

SEQ ID NO: 370780 - DNA, 122 bp, Homo sapiens
ctttttgacccaaataagttaccagaaggggcgagtaggaatccggttttcagggttttgcggatttcagaactgtggataagagatcgtggggttgcaaaacccccatttcacagacgatg

SEQ ID NO: 370781 - DNA, 122 bp, Homo sapiens
gacagatgcatccttgggcatgcatccctgctttcctgccaggtaggggactttctgaggcgtgagaggcctctgcagatcccattatgtggggctactctgtgccagtgccttgtcctgga

SEQ ID NO: 370782 - DNA, 122 bp, Homo sapiens
ctcaggaacgagatggcggttctctggaggctgagtgccgtttgcggtgccctaggaggccgaggtgaggggtcttcccaccctgaggtgcttagcgtagcctccagccagggaaggggatg

SEQ ID NO: 370783 - DNA, 122 bp, Homo sapiens
tcagacctacatcagttccctcgcgtgggcatcccaggggagaccttagtcccccccctgcggtggctgtcactccattagtgaggaccaggctctccccagacctgtctactgggagacag

SEQ ID NO: 370784 - DNA, 122 bp, Homo sapiens
agcgtggtagcatcccttgctggctctgggcgcgtcctcggcctcggcgtccgctctggccgcgctcaaggagctcttcagcccgccgctgcgctatgagggcctctctctggggctggcgg

SEQ ID NO: 370785 - DNA, 122 bp, Homo sapiens
gtggctgcccagataacgcgcctaccccgcagcctaccactctggctgagctgaagtctccgtcactaccaaccgcagcctccgtcgccacaaaccacagtgaagcaagctacagtggtgca

SEQ ID NO: 370786 - DNA, 122 bp, Homo sapiens
tacagcgggcggggacatggggtgcgcatgcgtgcgggggggtacgcgtgcgtgcaagtgcgcgtgcgcgcgcaggaccgctgaggcgggagccccgaatgcggttctcgcttgctgcgtgg

SEQ ID NO: 370787 - DNA, 122 bp, Homo sapiens
agatggatgacagagagggcacttggagttctgaggtgtgagcagctgtattttctgatacgcacttcatctagccgcctgcaccgagaatgtaccacatggtcagtagaatggaatgtagg

SEQ ID NO: 370788 - DNA, 122 bp, Homo sapiens
accggagtggtggttgattctggctatggcctgacccgcgtgcagcctttccaccagggccgccccttgcccgccagcggcaagacgctggagttcgccggccaggatctctccgcctatct

SEQ ID NO: 370789 - DNA, 122 bp, Homo sapiens
ctccctccctccctcccctgctctctgtctccccaaccatcaggaataacagatgcctaccgtgaaggctccactggagtgcagctggatgaatgatgctagggtttgaacaggtgcagact

SEQ ID NO: 370790 - DNA, 122 bp, Homo sapiens
gttgtaccagcagatcaaggacatgttccccttcatcttgatttggtactggccccgggccgggggtgtggctgggttggtcagcatggacagtgggaggccggtgcagtcactcttccgcg

SEQ ID NO: 370791 - DNA, 122 bp, Homo sapiens
gccgcttcgaaagagattaccgggtgggctgggaccgccgcgaatggagcgtcaacgggacgcatgggaccaccagcatctgcagtgtcacctcgggggccggtggcggcacagccagcagc

SEQ ID NO: 370792 - DNA, 122 bp, Homo sapiens
gtatctcacactgtccaaattaaagatgtactctgtccttcactctcctttggatgtgtacggttagggtgacgatgtttgaaaatcaacacataactgaaatccaggatgaaacagtaagc

SEQ ID NO: 370793 - DNA, 122 bp, Homo sapiens
gcttcccgagagcacgacccgctagcttccgaaactcctcctggcggaactccatggtggcggctcctgccgccggtcaccccgcgggtcccccccgccgatccccccgcccgcgggcccgg

SEQ ID NO: 370794 - DNA, 122 bp, Homo sapiens
ttgcatgaggtcattgatgatggcttgcttgtcaactgatccagcaggggcgcctggcctcgtgtctgggaaaagctgtggtaattgactattctgcaaatcatccaaaatctcctccaagt

SEQ ID NO: 370795 - DNA, 122 bp, Homo sapiens
ttaaaaaacatggcccctagtttgtcacctcatcttaaaaagcaagaaattccccttctacgtctgttctgttcttattctagcaccttgcacctctattaaagcatttgtcagcttgtatt

SEQ ID NO: 370796 - DNA, 122 bp, Homo sapiens
cagctactgcgggaggctctgggaggccagcggaaggcgcagcgcgcggtggacggtgctcgggcgtagagggggagagcggccggtagagggggagagcagaccagcccggccgccggcga

SEQ ID NO: 370797 - DNA, 122 bp, Homo sapiens
ggctgtgattcaggagggaaacagtgagatgtgagcaatccgtggctaccttgctgcccccggggctcagggaagtggtatattaaccaaggaataaaggagaggaagaaaaaaggccaaat

SEQ ID NO: 370798 - DNA, 122 bp, Homo sapiens
gattatacacccagcacaacaccttccccatagtggctacccaaagaccttttccctttccgtccagaagacagaagcttcccaaaggagtaccatggcaggaggaagggcaaacttcctca

SEQ ID NO: 370799 - DNA, 122 bp, Homo sapiens
atgagtgtgggtgtgggtataaatctaggggttggcgcactgagcctaggcctgcgcccccgcctccagcacccccaccgaccccaccccgccaagcgcccgagcaaggccaacctcctgtt

SEQ ID NO: 370800 - DNA, 122 bp, Homo sapiens
tgtcctgtcattggccgaaagagtctcgttttgatgccacccgggctcagattggcccagcgggtccagcgccgcatgaggcactggctgggtgtgaggtggcgcgagccgccgccctccct

SEQ ID NO: 370801 - DNA, 122 bp, Homo sapiens
cgggctggggcaggacgtcggtcatgccgggggggacgggacgcggcgctggagagaaggcgcctgtggagcgctcagtcccggctgccagtcccgctagttccctagtcccgccggctttc

SEQ ID NO: 370802 - DNA, 122 bp, Homo sapiens
cacagtccccctgcaaaggcagaggcctcaggtgaggcggggcgcggggtgactggaacccgagttttcagcgaggactcgctcttcctctgcactaagttctatgagcagtggcggcaggt

SEQ ID NO: 370803 - DNA, 122 bp, Homo sapiens
cacaacgtcgggatattgagattcatcgaaaaagttctctagctcctgcagctgaaactgcgtgaacgcggtgcggcggcggcgtttcctctctgggggctgtggtccctcagcggtttgtg

SEQ ID NO: 370804 - DNA, 122 bp, Homo sapiens
ttcggatgttcgccgggctggggccgtgaggcaccgaggaggatcaggaacaccagggtccggccctgcctggggtatttcttcaatggagaagttggtgagtgtagaggaggctgaaagga

SEQ ID NO: 370805 - DNA, 122 bp, Homo sapiens
taagcctctccgacatggggcgtggcggggccgcggggctaccaggtgggacctctgacgcgccgccttcgccttcgccttcgccttcgcctccaggactcgcccttcttccagcagtacga

SEQ ID NO: 370806 - DNA, 122 bp, Homo sapiens
ctgcgggctgctcagcggcgtgcacagtcctgccggctggcttgggtgggtggtgggctgcgggtaggggaggggatggaccgagtcccggcttgtcgggatgagggttccggaagatctgg

SEQ ID NO: 370807 - DNA, 122 bp, Homo sapiens
gccgcggtcgccagtgggacactggctcatccagggcactcgtcggcttcttctccgcctcgatctgctgttaagtgaggaaaacagaggccaatgctgggacagaaaaccatgcccaggac

SEQ ID NO: 370808 - DNA, 122 bp, Homo sapiens
ctgcgtactgaggggggacgcggcccggctggctggctctggcggcggctgggctggggccgcggtggcggcagccgcggcggcgggcggcggttgctcgtgcgcggcggcggcggcgggtc

SEQ ID NO: 370809 - DNA, 122 bp, Homo sapiens
gatgccaggtcttcctgttcccactttccacatagggaaactgaggcccagagatgggcacgagctgctcaggttcacccagtgagatggtgcagagacaagacatgaatttgaccatgtca

SEQ ID NO: 370810 - DNA, 122 bp, Homo sapiens
cagagaacagcagcatcagatgggggcgggctcaaaagggcttcataggcgccccgacatcgcagctacggaggggccagaaaggaggcgtggatattgtactgcactttctggactttcac

SEQ ID NO: 370811 - DNA, 122 bp, Homo sapiens
gtgcctgaggctcctgaagccccagagggcatgttacagtgttcttttggctctgtcgtccgtggacagcttaagtgttaacagctccgtgggcccgcggttgccctccaccagcaagggca

SEQ ID NO: 370812 - DNA, 122 bp, Homo sapiens
agtcaaacagcagcagaaatgaagagaaatagttcttagaacacccaaaagagctcacaacgagtgtgagtgaagtgctccaaatgatgccatactaatagtggagattgaaatgttggcat

SEQ ID NO: 370813 - DNA, 122 bp, Homo sapiens
cacttcctgctggagtcttctcagggaccctgtctccaggcacaacaggaaaggccctctcgtttcttggaattcccagggcctgtgcctctcgtgcctgcctgactcatcccattgcactt

SEQ ID NO: 370814 - DNA, 122 bp, Homo sapiens
caagtcctaaaatgcagtgtagacgctccagggaagaggaagcaagtgacattcctggcccgctcttacgccacgagctctgcagacgccgaaaggttgctcacaggaggcggaaagtgcca

SEQ ID NO: 370815 - DNA, 122 bp, Homo sapiens
cagagctttttgtgaggattaaacaaagaacagtccctggtacccagtatgtgttagtttcgcccattatcacaccacttgtacatctgaagtgatgctgatggtgacatcaatgatgagac

SEQ ID NO: 370816 - DNA, 122 bp, Homo sapiens
cccatgggacctgattcctgcccacaccctccaatctagaatcaaatcagagagcagtcccgagtgcccacctcaaggtctgaagcgcctcctcctccacccagacccgtacacgaagtggg

SEQ ID NO: 370817 - DNA, 122 bp, Homo sapiens
cagagctggggcctgtcaaagcagacgggcgactcaggtagcagggccccagccagtacccgtggaggacccgggaaattgcaccttacagacagtggaggggtgtcccctcccacaggcaa

SEQ ID NO: 370818 - DNA, 122 bp, Homo sapiens
tacgagacctctgcctaggacgggggttgtgaatttctcctcgcagttggctgggttttgcggcagtgcattgctttgggaaacagctaactttgtggtgttgccccgttcacgggagatcc

SEQ ID NO: 370819 - DNA, 122 bp, Homo sapiens
gcggggccctcacagaatttgttcacggtgggggcagatcaccggagaacttctccagagcgctacggcacggttccttctacacactggcagaactgccattgccatcgccccgaggcggc

SEQ ID NO: 370820 - DNA, 122 bp, Homo sapiens
gggcgtgatgctctgtggtatgcctgcacttttctttcttcagtacgtacttattcccgtcgcaatgaatctccacactttgttctgctcatccatgaattccttctcacgacagtgtcaag

SEQ ID NO: 370821 - DNA, 122 bp, Homo sapiens
cccagcctctaccccgaagtcctcttcccaagtgaccccagtgatgtttccattgagatgcgctcctggctatggcaggcaccttctcaacttatatgtgggaaggggtcccccatgcttgg

SEQ ID NO: 370822 - DNA, 122 bp, Homo sapiens
tatttttaatagaatcacagaattttaaatgcttgaaacaacccaagcacctgtctggtccgatcacccatcccctggagaatttcactgatagccttctcaggctagctaaaagaataaag

SEQ ID NO: 370823 - DNA, 122 bp, Homo sapiens
agcgcacccactgcgaccccgcgcccggccgcacgcccccttcccgctccggccagcctccggccaggcctacacccccgcttcaaacgctcctgcggcccccggccgcggtcgcccccacg

SEQ ID NO: 370824 - DNA, 122 bp, Homo sapiens
ggggtggggcccaggtgagtagcgggcagggctggggcctgctgtggtgcccactggttgcggggcgcgcgggcaggtgccggaggtggtgggcctgggcctctagctgtgcgcaaggcgga

SEQ ID NO: 370825 - DNA, 122 bp, Homo sapiens
aatggcatctacgttcttacttccttttttccctctgaatctggaaactggagccaggctcgctcttgaactacatgctaccccgaggaccttagatctttctaggagagatgagttctagc

SEQ ID NO: 370826 - DNA, 122 bp, Homo sapiens
gctcgacgccttcgtcgtgggtgctgtcatggccaagatggccaaacccaagaagcgcaacgagacgctggtcttcagcgagaacgccgtcgtggcgctgcgcgaccaccgcctctgcctca

SEQ ID NO: 370827 - DNA, 122 bp, Homo sapiens
gaggcgggattgcattcgcacctgattacgctgcgcggacacaacagaggcgcccggacccgcagccctgccttcgccgcctttgctgggctgtttgcgcttcgtttccttctcgccgcccc

SEQ ID NO: 370828 - DNA, 122 bp, Homo sapiens
gcataacccagtcctccctgctgactccctgtgcaaggggcggggcaggcaatgggtgcacgcatgcgtgtatgagacgtgtgcacaggggagagtcaggcctacaagccccagatctgggg

SEQ ID NO: 370829 - DNA, 122 bp, Homo sapiens
ttccattctctctagtaatcctttattgcccttcaacagaatctccttctggccaaagttcggtttatttaaaaacaaatagagctggacatgctggctcaggcctgtaatcccagcacttt

SEQ ID NO: 370830 - DNA, 122 bp, Homo sapiens
gctgcgggtccgcgtggcgtgcccgggggaccctaaagaccgtcgggtgggggctgagggcgaggggcgggacaccggggccgcgggcggggcgcacccggaaccccgacagctgtgtcttg

SEQ ID NO: 370831 - DNA, 122 bp, Homo sapiens
agagcagagcgttgggccgtggccaggctctgtccagagacagctgcgaggcttccaacccggctgggtggggtgggagggagctgtggctggcatgcatctgcatgcacccaacttagcaa

SEQ ID NO: 370832 - DNA, 122 bp, Homo sapiens
attcccactggccgcttgcagcagggctgtctcctgtgaaggcaagagacaaacgaggagcgttatgacactttgctcccaggactttggcgcacagttcccatgagtccaggtccgtccag

SEQ ID NO: 370833 - DNA, 122 bp, Homo sapiens
ggacagagtcccattagcactttcatggcctttcatctgggcaggacacggtgcccttatcgtgagagtcagaagggctctgagaagccctgagttcttgtgccatgttgggttacccatcc

SEQ ID NO: 370834 - DNA, 122 bp, Homo sapiens
gagaagggtgcagtaagagtttacaagtcctgtgtgggctaagagctgcggccgccgctgcggctgcgaccctggctggcaggagggacgctcaggaggagccccgcagggacgtctgtgcc

SEQ ID NO: 370835 - DNA, 122 bp, Homo sapiens
gggggatgtggtggccagggcaaggtggcacaaccagtaaagagtagaccaaacttgtgacggaggcctctggactccaagcccagggctgcctgcatgcgcaggccatcatgagtgtgggc

SEQ ID NO: 370836 - DNA, 122 bp, Homo sapiens
tcatcacttaataacatctccgtggccagtcatatccaaattctttggtttcttcatttacgaaatgtcgcttcaacattaaatagtacagaaggtatatatagccaatcatttctataact

SEQ ID NO: 370837 - DNA, 122 bp, Homo sapiens
ctctggtgattcacccacctcagcctcccaaagtgctgggattacaggcgtgagccaccgcgcccagccagcaaatgtttttaaaatagggcattcatgggcttttgggggtaagtgacacc

SEQ ID NO: 370838 - DNA, 122 bp, Homo sapiens
gggcttgccacaagagaaagtttgcgtggtgcccgcggcccactctcgggatcgtttatgcgcatgacacacttcgggtcctctacaagtccctggctggctggttatttgggaggcggtat

SEQ ID NO: 370839 - DNA, 122 bp, Homo sapiens
gattgtatagtttcctccaggacggatctccttgttatcttttgaccaagtgattcgcatcggttgagcaccagtaacatgacactcaaaatcagcactttctccagcaataacatctatag

SEQ ID NO: 370840 - DNA, 122 bp, Homo sapiens
ccagggtctgcacctcgacagtccaggtggcaagtctgatttcgggtgccccgcaatcaacgccgaatactccagggcatcctctaagagcagactgatggtgtcgatgtggacaaaatggt

SEQ ID NO: 370841 - DNA, 122 bp, Homo sapiens
ttactgacagactaaatgtaaataatggccaaaatctctcagcaaatcaagtggtgagctcgcccaggtgctggagagggaggaatccagatcctaatctcagtgattgctgtcttcagcta

SEQ ID NO: 370842 - DNA, 122 bp, Homo sapiens
cttcttctctgaagcctttgcagcattttccctgagattgctgaagaggcccctggggatcgggctcccaactcacccgccgcgtcccacggcccgaagccgacgagctgcaagtgaggatg

SEQ ID NO: 370843 - DNA, 122 bp, Homo sapiens
acctaagaatcctgccccggtgaaaatgcagggggaaaagctggagaccaaaagccgcctcggctccccaattaaagaaattctcgaaggagagtcgctgcttgccgccgcgctgccttctg

SEQ ID NO: 370844 - DNA, 122 bp, Homo sapiens
taagcggtcatctgtgagtcagaagatttcgccgtggcctgatttcccaccctttctgcccgcgcaagccgaaagcgctcatgttggcttttcctttgccacttttccaacttgccagttcc

SEQ ID NO: 370845 - DNA, 122 bp, Homo sapiens
gctaagagtactaggaatgggctatcccaagctgcaacaccttggaaatgcccattgcctcgtagacagagacacttccccaggcccaggccctccacaggctttgcaaatggctggatcag

SEQ ID NO: 370846 - DNA, 122 bp, Homo sapiens
ctgtcgtcaggctgacggacgtggagggtgcatcccccagggcctgtggggctcctggctcgccctcgggtgctgggcagtggggaggctgcgccgcctgccttctgtactcaggacactgc

SEQ ID NO: 370847 - DNA, 122 bp, Homo sapiens
cgtcctcaatcaagtgaagtagaatcttctatctggcatggacacatggttctggccacccggcagggagtccatcagtactaactctagacaccggagagttactagtgtatgaaattgag

SEQ ID NO: 370848 - DNA, 122 bp, Homo sapiens
acaatcctttagctagacagaaaagttctccaagtcctcacctgtcccggcagcccagcccgcttcacctcttactgtcactcgccggggactctgcggcacctagcccaggtactccggca

SEQ ID NO: 370849 - DNA, 122 bp, Homo sapiens
ccgctagccgccggcggcggcgacgagctcccccagcttcacgacatcccgagcgcggcgcgtcccgccccttttacgattgtcccacgcgcggcgcgctccgcccccttttacgacagtcc

SEQ ID NO: 370850 - DNA, 122 bp, Homo sapiens
cgccactcctgggcgcgtcccggggggaagacgccaccgccctggagtctcaggggtcctcgccccatcccggtccaggccgtttgtgtatctttgtaaactggcaagcgcggtaacttcct

SEQ ID NO: 370851 - DNA, 122 bp, Homo sapiens
agagcgaggctgcagccgctgctgccggaagcggaaaccccctcctaccaggaggcggggcgagacagcttccgactccgcccccagaggaatctctctgaatgcggccatgctgggatgtc

SEQ ID NO: 370852 - DNA, 122 bp, Homo sapiens
tcggtgggggacgtgcgcgaatattccagcggctgcgagtcccgggtctggcggatttcccgcacgatgccttgggcccaggcctccggattctcttgcattttggtgctgcgccgggagcc

SEQ ID NO: 370853 - DNA, 122 bp, Homo sapiens
ggagcttcttagggccaggacaggaagagctccatcaggtcaacccagaaaggcttgaagcggacctgccccacagctgagccctgaggcagcccaggtgcactgcgtccattccccatacc

SEQ ID NO: 370854 - DNA, 122 bp, Homo sapiens
gttctcctgcctctgtgcgggtctgctgtcgccttgctattcctgtttcccggtccccgccgaataagttgtgatcactgcagaaaaggtgtcccattgctcggggccgcaggcgtcagaga

SEQ ID NO: 370855 - DNA, 122 bp, Homo sapiens
ggacaaagccagtctcacaggcaggcgtgcttccttctacacctgcgccgacatgacggccggctctgcttccaacagcatcaaagggcagcgcctgtcctccccagcttggcagctcagac

SEQ ID NO: 370856 - DNA, 122 bp, Homo sapiens
gcgccgccggttgctgctggaggagtgggactacgaaggatggggactccgctcggccaccgctcctgaatggtctctaatctcggtgttaaatactttatgagagtatcaataccacctaa

SEQ ID NO: 370857 - DNA, 122 bp, Homo sapiens
aaggacaatgcagtgtattcaattatgagtgaggtttaagaaaacaaaaaggaaaagacacgcagtttcaacacaaagaagctatttaaatcatgtgaaacagagcaccagaacttaccaac

SEQ ID NO: 370858 - DNA, 122 bp, Homo sapiens
cgccgtccgcaccagcatcgtggagaagcgcttcccggacttcgtgcgggacttcatgggcgccatgtacggggatcccaccctctgtcccacctgggccactgacgctctggcctctgtgg

SEQ ID NO: 370859 - DNA, 122 bp, Homo sapiens
ccatcagcactggaatgctttcaccctgatatttgattcaatgccccctttccaaatcctcggtccatcaacgtggcctcttttggtttgagctgaagagtatgttatatttcatcattgac

SEQ ID NO: 370860 - DNA, 122 bp, Homo sapiens
ccaacatggcagcgatgcccagacagcgcccagcacaacagcacagggaaccgcaggccccggcccaggacaccatggcctcccatgtgcaggggagagcggaggctcctagcacccgggct

SEQ ID NO: 370861 - DNA, 122 bp, Homo sapiens
cacatgggaagaggagaaaggcagcaggagccaccgtgaggcaaatgagctacaagacgccgctccgtctgatttcccgccacagctcccaacacaggtgaaatggctcagaacagctcagc

SEQ ID NO: 370862 - DNA, 122 bp, Homo sapiens
tctgcaaaaatgaccggatgcaggaatgtcacctagaaccggccagctttccgacctctccggtcaaggacgcattcctaagagacgaagggagaatgacagaagttaaaaacaaccaaaca

SEQ ID NO: 370863 - DNA, 122 bp, Homo sapiens
gggattcccagggggctcctccgtgggctggcagtcttggtgggggtccctacccaggcccggaggaagcacctgcggttgtccactgggtgggcactgcccgcggggaacgggcgggaccg

SEQ ID NO: 370864 - DNA, 122 bp, Homo sapiens
ttccctcccagtgacctttgaagtaaggcgaattgaagtccgctggtctccagacaggcacggtaacgtgcacgcatcggatgtggttcccggggaatggtgggtgattgtccatcttccta

SEQ ID NO: 370865 - DNA, 122 bp, Homo sapiens
tgcaaaaaactcatttcctacccaccaggcattgtcgatggtggcgatgaacagcaaggccgcagaggtgatgtggaaggcgacggtgaaagtaagaagcaccaacattttcatagggcagg

SEQ ID NO: 370866 - DNA, 122 bp, Homo sapiens
agagctcccgcccgtagggacacctgcagctggcgggagaggggtaggggagctgtaagccggcggcacagggcggagtatgccacagccccaacccacccctccaggtcctccccgcgatg

SEQ ID NO: 370867 - DNA, 122 bp, Homo sapiens
cgttaaggggaaagaacaaaacggaacacacatcctgagacacactggcttaatctggggcgaacatgcaggaatttcaaaaaactcagacaggcgaaggcagccaggccatggggcgacgc

SEQ ID NO: 370868 - DNA, 122 bp, Homo sapiens
ggccttcgggcgctggtctgcggccatggtgggtggccgtcagtcggtgccgtgacgccacgcggagacgtcgccgcgcgggctgggcctccaaggccccgctccgggccccgcccctgcct

SEQ ID NO: 370869 - DNA, 122 bp, Homo sapiens
taagagatgtccagttgtttgcagcagctgctaggaatgaaatgcagaactggagacattcgagagcagaagagcagaagcagcaacaaggtgtggtgtgtgcaggttccacagtcacacag

SEQ ID NO: 370870 - DNA, 122 bp, Homo sapiens
ggccgcaaggtctgaacccagactcagaagagccgcggtcagagataggagccggatatccgcgcagaaactgtgctttctttgcggtggagacgcccaggccaggagtggggctgaaagtt

SEQ ID NO: 370871 - DNA, 122 bp, Homo sapiens
ttatttttgtgcgctaagtttcacatcaacccaactatctcttgataggttcctaccaggcgctagagatatcttactttcagaaattatttatgatagcagaagccgctggaagtccatag

SEQ ID NO: 370872 - DNA, 122 bp, Homo sapiens
tcaccaaggttgaacatgcgcagagggtgcggacgcagtgtctcttgggaattatagtcccggagtcgtagtcacttttgacttggctgccaaagatttaggacctagggggattcctcaga

SEQ ID NO: 370873 - DNA, 122 bp, Homo sapiens
tgtctgccatggaacgcttccgcaacatggacaagagagccacaactgaggaccgcaacacggccttggagacgctgcaccagaatagcatcacgtaggtgccgtctgtagagaggtggtca

SEQ ID NO: 370874 - DNA, 122 bp, Homo sapiens
tattcctgaaagactcctcaatttgggtacctttcagctccatccccatccttactcccacgcctgctgcagatataggcacaagacccgcctctggtcagtcagggttccggaatcccact

SEQ ID NO: 370875 - DNA, 122 bp, Homo sapiens
ggccggggacggcactccagagcagacaaagggcgccgccatgttagagtcgggcggaaccgacctcgcaggcttcccggctgcaacttccggcgcatgcgcagcgtcctcgctaggagagc

SEQ ID NO: 370876 - DNA, 122 bp, Homo sapiens
gccactagccccttccgtctgtctctttgtctcaggaacccgaggtctgcaggccgcattcgacaccggcacggctcaccccatccagtgagtgttgggggagtggggggctaaacaggggg

SEQ ID NO: 370877 - DNA, 122 bp, Homo sapiens
gagtcggtaacctgggtctgtccctgacctcaaggcactgccagtctaatggcgggtaggcggggagacagtcatataatcactgtatattagtgactttaatcaatacataattacacatc

SEQ ID NO: 370878 - DNA, 122 bp, Homo sapiens
tgcaaagtctggcgtcccacaaaggccagaagctgtggcgcagcaatggcagcctgcacacgctggcctgccacccgcccctgagccccgggccccgggccagccaggcccgggcacagctg

SEQ ID NO: 370879 - DNA, 122 bp, Homo sapiens
tggaggcatgagccactgtgcccagctccagtttacccgtcttaaaaagggctaatggggcgcctgtagtcccagctactcgggaggctgaggcaggagaacggcgtgaacctgggaggcgg

SEQ ID NO: 370880 - DNA, 122 bp, Homo sapiens
cagtttccattgcaatgtgacagtcttgatttttcccatggaaagtgtggtatttgtgtccgggctatgaaattggtaatgtcattcctgtttcacagatgaggaaactggggttcagagag

SEQ ID NO: 370881 - DNA, 122 bp, Homo sapiens
ccgggcacgttggaacccggccacccagccttggtgcggcagcgttaccggcagagaaggcgtggatgttgagggccatgtcctgctcctcgctgtccaccacgtccagcagataggcacgg

SEQ ID NO: 370882 - DNA, 122 bp, Homo sapiens
ggtccagctcctcaggacacggctggagccgtccaggtctgactgggaggcctcttggcccggatggttggagcaggaagaggaggggctggggatggaggaaatgcctgttgtcccaggta

SEQ ID NO: 370883 - DNA, 122 bp, Homo sapiens
ctccaggctgtaacccacgtttgacccggctggggacatttctgggccggaactggggagcgtgttttgcttcccagcccacgctgggcaggcagtggcctactttgcgtggggcgccccgt

SEQ ID NO: 370884 - DNA, 122 bp, Homo sapiens
ccgctcctctgaatctaacaagggctgggtagactcggatcttgagaagacttggactgacggaacttggtgtctgtagccactgtgtaccacggtagaatactggacagtgctcgaagtgt

SEQ ID NO: 370885 - DNA, 122 bp, Homo sapiens
tcacgtggtcaggctgttagcgcagttgctaggcaaccacagctgcgggcgtggtctgcgcggggttgccctcctgttctggtttatcaggggatccccaaagaaagcaaggggaccaaggc

SEQ ID NO: 370886 - DNA, 122 bp, Homo sapiens
cccatcattactatttaattattattactctcattcctctccttggctaatggggtgtgacggctggaacgggaaccaggtgcatgcatcggacgagaagcgcacttggactggcctctgtg

SEQ ID NO: 370887 - DNA, 122 bp, Homo sapiens
aatcaggtacttacctctactcggctctgaatagccattgcataaatgaggagtcatattcgtaaggattgacctccagataaaaactaatatcagttgaggaagatacaggatggcaggtt

SEQ ID NO: 370888 - DNA, 122 bp, Homo sapiens
tgaggcccagttcgaatctgtggagagagggagagatgtagatgagagtgtgagtgcagacgctgattgacccatgtgtgcacaatgaaagggagcatagattcctgagttgggcttaaaat

SEQ ID NO: 370889 - DNA, 122 bp, Homo sapiens
tttgcgagtggcacttccaaatggtttctgtttcctaaaatgagtgatggaaatacttcacggcacgttttcaaagggcctaagctaaaatgtgatttcgtgtatcttgttccatgcctgag

SEQ ID NO: 370890 - DNA, 122 bp, Homo sapiens
gccttgggaatagctgaaaagttagcattaaaacaacagctgcaggtgaagctatttcgccggctgcatcaccgcagccaccccctcttctgtcgggcaccgtgggagggtgggggcgggga

SEQ ID NO: 370891 - DNA, 122 bp, Homo sapiens
ttgttttctttctgaataaaaataaatgggacccatagacatctttgtttttttccaaaccggcccttgtgcagagaaggttgttgttgctaattttagtccttgtgatgtatggtggaatt

SEQ ID NO: 370892 - DNA, 122 bp, Homo sapiens
gaaccttcacagtggctctgcaagggattactgtcccttctttatagatgagagaatggacgctcagggagatgctgggacttgcctgagatcacttgaccagcaaataacaactgaggtgg

SEQ ID NO: 370893 - DNA, 122 bp, Homo sapiens
ctgggaagctgccgccccgcttcccttgctcacacagggctttgcagtagtggtggcagccgcggcagaaactggctctggggaagcaattgattcgtctactgccagcagcccggagttgc

SEQ ID NO: 370894 - DNA, 122 bp, Homo sapiens
cccgctgcttggcggggtgggtggcggcgccccgggaggggccgaggtgactgcaggcggcggggtcggagtcgggcctggcccggaccctggcggggcccccgaggttggtggagtggcgg

SEQ ID NO: 370895 - DNA, 122 bp, Homo sapiens
tgccaggatggagccctgctcggccacaaccacgggctcagggtccgtccctgtgtctcccggggccgccggatgtgccacccactcctgttctgctgctttgtgacactgcctcccttcct

SEQ ID NO: 370896 - DNA, 122 bp, Homo sapiens
ctgtgagggctagaggctgaggcctgtgttcctttgggtcccaggccgcaggtggttacccgaggtctgtcgcttctgagcccctctgcgccatcgattgcccacttcccagaactcacaat

SEQ ID NO: 370897 - DNA, 122 bp, Homo sapiens
ctgaaggactttctgcttgtcatcccctttgactgctgggagccagtccaggagtgagaccggccagatgaggctggccaagccggggagctgctctctcatgaaacaagagctagaaactc

SEQ ID NO: 370898 - DNA, 122 bp, Homo sapiens
ggttaggttgcgtggactgacaccttagagattttcacggcctatccggtctgagtcccacggagagcagaactcacgtgctgtccttgtgcaaaccccatccagaaatcaagcgttatgct

SEQ ID NO: 370899 - DNA, 122 bp, Homo sapiens
cttgtttgttagaatgcagacgcgcaggccccacctggcctcctgaatcaaaatggtgtgcggcagggtgcagcgagctgttttcacgaggcctccaggtgactggatgtaagcttgcttga

SEQ ID NO: 370900 - DNA, 122 bp, Homo sapiens
gactccatgcacctttcctaatgagaccacgtggactccgcgcacctttcctagtgagaccgcgtggactccgcgcacccttcctagtgaaaccgcgtgggctccgcgcacccttcctagtg

SEQ ID NO: 370901 - DNA, 122 bp, Homo sapiens
tggcgtgaatccagaaccgggtcagcgaatccctagggtcccactttggcttgacgttcacggaattcccaggtaggcctcaagaggaacggatcctgcatcctgagctctgggactcgcgg

SEQ ID NO: 370902 - DNA, 122 bp, Homo sapiens
cccttctcccagcccgccgcggtcccgcctgctgcggctccacctccgccgaactgcaagcggtctggcctgcctgtcagtcctcgtggcttcgcagggaccccaccatggccgcacgcccc

SEQ ID NO: 370903 - DNA, 122 bp, Homo sapiens
gctcaagatcgctacgctttatttctgcgtgagcttatttgaaaaccttacttggtgtcccggcttactctccacgtctgctccagaccacggtctgcccacgcacccctcagcctgcaccg

SEQ ID NO: 370904 - DNA, 122 bp, Homo sapiens
gactgatccccgatttaccctgaggaacacgcaagccggcctcctccaccctgtaaaccccgaagcagcctcatccctgtgccacacgggggtcgagaaatcttggtgacatgcaaagattg

SEQ ID NO: 370905 - DNA, 122 bp, Homo sapiens
gctttataaagcatggcacagacagttatttcatcctctcctgagtttaccctgctgccacgggctgctaggtaaccctctctatgtcaccgctctctgccttaacatctacaatggcattc

SEQ ID NO: 370906 - DNA, 122 bp, Homo sapiens
aggtagaagacgctctctgaacttgtgacgtgtgcctcgctagaaaacgccgtctgatgacgctccgtggatgttcctgtctttctcattgatggagcggttccctttagctgcatttgcag

SEQ ID NO: 370907 - DNA, 122 bp, Homo sapiens
gatgccctacattaacagaaacagcctgaaaaccagggggtctgaaaacacatcccttcacggagcttaacagtcactcagggttaacaccacggggctacaatctgctgcaagagacagtg

SEQ ID NO: 370908 - DNA, 122 bp, Homo sapiens
aaagccaaaaccaggcgcatccttcctgtttgcaccaccagggtggccgagaccccgccccggcccccagcgggctactctgggttttggacgcagcctcggtttccctggggcggaggctg

SEQ ID NO: 370909 - DNA, 122 bp, Homo sapiens
aggctgcagagaaatagcctgcacaaggggcccaggcgctgggtgtgggagggtccccaccgagagccagaacatgcaggaactaaaatgttgcctttttctattttaggaaaacttcgagc

SEQ ID NO: 370910 - DNA, 122 bp, Homo sapiens
ttagacaggggcttctaggagacttggtgtggagttacaagccactgacagtggcctttgcgagcagccaaggcgcgaagagcagcagctgggagaatgagccctgaacggttccaggaagc

SEQ ID NO: 370911 - DNA, 122 bp, Homo sapiens
gccaactgcgcttgcgccgccgggacagtgcggccaaggaacccccagcaccccgacggccggccagcctagcccagcgcgctcgtcgcttcctggcacgcctgacagcccgcagcgcacgc

SEQ ID NO: 370912 - DNA, 122 bp, Homo sapiens
tggcatggtcgtttaataaattcacataaacagagtttatttggcaaggcaaactgggatcgctgtccgccagtaggttagggtgagtgtgatgttgtacaataaatgaaaggttctgtgtg

SEQ ID NO: 370913 - DNA, 122 bp, Homo sapiens
ctgggaggagggccgcggggcaggcagccaatcccaggaaacttcgggacgagggcaggacgggggctggacgggcccagccattggccacctgtgtccactgcctgcctaggtctggcttc

SEQ ID NO: 370914 - DNA, 122 bp, Homo sapiens
actctgccttagcaaggccctggcctgcgtgttgtaactccaatgacccaagcttcttcccgcctgggaccttcctagtcactacttcccactccaccaaaaagtgcatcctagacgggcgc

SEQ ID NO: 370915 - DNA, 122 bp, Homo sapiens
attttcctatttgcctccctatatctacttgcccctcagacctgagcacagctcagtcctcggagctcatgtctgaccagaggccccagaggcctctccattgccagccaacctggcttctt

SEQ ID NO: 370916 - DNA, 122 bp, Homo sapiens
tgaggccagtgcgtgtgcaggggccctgggcacggtggacaatcatgaggccagtgcgtgcgcaggggccccgggcacggtggacaacgaggccagtgcgtgtgcaggggccccgggcacag

SEQ ID NO: 370917 - DNA, 122 bp, Homo sapiens
acaggatgatgatgataatgataacgatgatggtggctaacatgtatacagtccttaggacgtatcgagcattttcctgaggaaactatattaccttatttaatcctcaaacaatccaatga

SEQ ID NO: 370918 - DNA, 122 bp, Homo sapiens
tcagggagccggcagcagggccggcccagggccagcctccgtgatctcgtttcagtctcccgggtcacttgcttctttatgaggtttccaagtcattgatagtttcaggtgaaagcttttgg

SEQ ID NO: 370919 - DNA, 122 bp, Homo sapiens
tctcctgaccatagcacctcctctccagtggtacctcaatggtccggtgcagagggtccacgatctgccagatggcgagagtgaggacatccatgcccaccagcaggcccactgtggcatac

SEQ ID NO: 370920 - DNA, 122 bp, Homo sapiens
gttgggggcaggaagggcactgggcgggccggctccctcccaggatgggagcgggggaggcgttcagggcctgctttggagctccccctgccccgccccgcagactgtgccctctgttttcg

SEQ ID NO: 370921 - DNA, 122 bp, Homo sapiens
gccagctcatcgagaaaggtgctcccccaggctcacatcgtgcgcgcccccaggccgtcacgagccccctaggtctgggtcctaggagccccggctacttgcatgcaccatgccctccatct

SEQ ID NO: 370922 - DNA, 122 bp, Homo sapiens
ggaatctggtgaggccaaatgtcagcacctcaaatgatgtcttgtgaccccacctggcagcgttctggttttctggatggcagcagaggacagggagatgatggaagcccggggtgcgggag

SEQ ID NO: 370923 - DNA, 122 bp, Homo sapiens
cacagcacaagacacacgatctccaagactcacagccacaaccctgccccgacggcgcggcggttccggggccccagctcgccctgcgcaccccgcacaccccaactctggggcgctcggcg

SEQ ID NO: 370924 - DNA, 122 bp, Homo sapiens
ctaaacatctcatccatttttttcccctctaatctgcagaaccgcaaccagagaggtgcgcgggtctgatgtgtgtttggggaaggggtggggaggggagagagtccctttcagtgcccaag

SEQ ID NO: 370925 - DNA, 122 bp, Homo sapiens
gggcaagacagtgtaaaatcttggagaaggcctgtccaaaggcggagtgagacaactcctcggacaaattagagtcttcctgcgatggggcttccagagcgctgtcaagctccattcctgac

SEQ ID NO: 370926 - DNA, 122 bp, Homo sapiens
gggagggcagcaccaccaccccagggccctccccagctgcagggtggaggcctggctggccggctgcccactggcctgactggtctgcaggcctagggggcccatccctgctgcccccggct

SEQ ID NO: 370927 - DNA, 122 bp, Homo sapiens
caactgtcgccacaacaccgccggccgccactgccattactgcaaggagggctactaccgcgacatgggcaagcccatcacccaccggaaggcctgcaaaggtgggctacacgtggcggggc

SEQ ID NO: 370928 - DNA, 122 bp, Homo sapiens
cagagttcaaaacgacctgcaacgtctggcgcttagctcctaaagaggtctccagtccagcgccgacggccagcggctagaggccgtccgcccgactccaagatggcgcccgccacagctgc

SEQ ID NO: 370929 - DNA, 122 bp, Homo sapiens
atgactgggtgtcactggtattgcccccctccgcagcagagagtccggaaatgacgagcgcgctggaaaagctcctcttgccgaagaggaagctcagggtggagctggtggaggagcccagg

SEQ ID NO: 370930 - DNA, 122 bp, Homo sapiens
ccgggcccaagatggctccggttcaatttcgctttcgtttcctcggaaagccttcccctccggaaagtttggccaagaggaggggcttgagcaaatcttgcgccacgcttggtttcaggccg

SEQ ID NO: 370931 - DNA, 122 bp, Homo sapiens
agtgcccggcggcgggtcctcagcttcgagccgaggtgcagtgagctggtggggggaccgcgaggcgagcgcgggagcctgggcggcgagccgggtgtgagctgcctgaaaatgcactcgga

SEQ ID NO: 370932 - DNA, 122 bp, Homo sapiens
taggtttgttccgaggggcttagactattggcccccagattcctggtgtgcctggggtggcgggactgctccggcggggccctctctccacagcgcagccggcctggggctgacagctcccg

SEQ ID NO: 370933 - DNA, 122 bp, Homo sapiens
accaaaacctcctttgctagctccctctgtttagacctggacaggatacctaccttaaggcgacaaaaatgcgtgggaatgggccaatcagagtcttttgagattttgggactggaatgttg

SEQ ID NO: 370934 - DNA, 122 bp, Homo sapiens
gcaggcgtcctgtgaaagtcagatcccctgtgccctgtcccacctgctggggacccggttcgtcctgccacccagcctagtcttctggaaaccggcccacgtgcctgctggggaggaaaagc

SEQ ID NO: 370935 - DNA, 122 bp, Homo sapiens
gagcgcatggtgaagtggcgggtggagcgcggcgtggtacagcagaccgaggcgctggtgcgcggcttctacgaggtgaggcccggtggcctggggaaggcaagctgtggccagggtgctgc

SEQ ID NO: 370936 - DNA, 122 bp, Homo sapiens
acagaaaacactggttgttcctgaggttattggcacaaaatgctgggctctgagcggtgacgtttgaagaaatacaaaggtgtctgtcatgtttgaactgttgagtgtggagggttttgaag

SEQ ID NO: 370937 - DNA, 122 bp, Homo sapiens
ttcgggaggatcacttgagcccatgagttaaagaccagcctaggccacatagtgtgacctcgtctctatttaaaaaaaaaaaaattcacataaaaatcagaatgatccaatttctcttgaaa

SEQ ID NO: 370938 - DNA, 122 bp, Homo sapiens
ggtccacggttgtacttcagggaccccagaaactccctgaggttataagcaaaattgtatcgctgccttttttcttcagaaaggctcatggcttttgtcaaattctcaaaggagactgtgac

SEQ ID NO: 370939 - DNA, 122 bp, Homo sapiens
ttcctccatgtggacccgctacatatgagacgtgaaacacagacagcagcacagcagacacgaccctgttctgacactcaccagcttcacaaagatgccgaacaggcagaagcaggaggacg

SEQ ID NO: 370940 - DNA, 122 bp, Homo sapiens
tcgcaggctggtcttgaactcccgggctcaagcgataccccctgccttggcctcccaaaccgttgggatcccaaggcgtttgccacctctcccggtctgctttacttcttttcagacttcac

SEQ ID NO: 370941 - DNA, 122 bp, Homo sapiens
gagagggtgggagggccacagccgggagcgaacgagctaggcttgtcagctggggaaggccgggacgctgggcccagcttagctgggacaccgcgcccgaggtcaaggcgggtggaccaggc

SEQ ID NO: 370942 - DNA, 122 bp, Homo sapiens
gctctgggggcggccatctttgagtacgtgacgtacagaaggcacagcggccgggagacgcggtggacggaggcctcttaaactgtccgatttccagacacctcagccctggcagaaaatgg

SEQ ID NO: 370943 - DNA, 122 bp, Homo sapiens
atgcagcggaggaggctctagtgtctggttacaacctggcggtttagaatcggggaaccgcggccacagcactgcagccattgctgacaccaggcttccaaccaggggaggctggaatttga

SEQ ID NO: 370944 - DNA, 122 bp, Homo sapiens
agcccttgcggggtccccgcgaccccgcccgcgcgccctcgctgctccccggggcgggtgcggacagtccccagtccgccggccaacaggtagggagcgctccccggcctccgcgccgccag

SEQ ID NO: 370945 - DNA, 122 bp, Homo sapiens
caaactggtctcgaactcctggcctcaagtgatcctcctgcctcagcctcaggcgtgagccgctgcgcaggcctgctcttgccagttttatctttattgggaagaagggtgttgtgtgaatt

SEQ ID NO: 370946 - DNA, 122 bp, Homo sapiens
aaatgtctctgggtgtttgccttgtggtcttattttagaggcagtagtggcttctggatgcggggaagagccaaggggaaagtagaaacaattgtgctgtaacacaagtagttctgcctgca

SEQ ID NO: 370947 - DNA, 122 bp, Homo sapiens
ccccagcgtctggaggattccacaccctcgcaccgcaggggcgaggaagtgggcggagtccggttttggcgccagccgctgaggctgccaagcagaaaagccaccgctgaggagactccggt

SEQ ID NO: 370948 - DNA, 122 bp, Homo sapiens
ttgtgcagtagttcgcactcctcaagctctccctgtaggctgcattttcatttcctctttcgtgtagggaagtgcctttgtaattccatttattgcattggtgttttcacccaattgttaag

SEQ ID NO: 370949 - DNA, 122 bp, Homo sapiens
caagctccccacacccgtgctccccgcgcccatctctgctccccatgcccatgctccccacgcccgtcctccctgcagccatgctccccacactcgtgatccccgtgcccatctctgctccc

SEQ ID NO: 370950 - DNA, 122 bp, Homo sapiens
accaccatggaaacacggtcaggttcttagaaacctaacccatattgggaaataacagtgcggcgagaggtggaggcagcaggaaaattctaggctaacatcctagctggccaccagggtgc

SEQ ID NO: 370951 - DNA, 122 bp, Homo sapiens
agttcacaccagggcgaagccgaggtgccatccccatggggcctggccggtagcgtgcaccgggcaaattttatcccagaggtccgcatacttttttcgcaaaaggccagagagttggtatt

SEQ ID NO: 370952 - DNA, 122 bp, Homo sapiens
tgctcatgagtcctctgggtccccactgctgcccccgtccctcccccgcagctgtctaatcgtgtatgccttccaggatcccaattctgggtaacggtgcagaggactgaggccgccgagcg

SEQ ID NO: 370953 - DNA, 122 bp, Homo sapiens
aataactgagtctccattccaaacatgcacattcagttaatcttgaaggaactatggggacgtagaatgaggcagagaactggtgacagataccttctagttttgactctggcaaaattata

SEQ ID NO: 370954 - DNA, 122 bp, Homo sapiens
atcctagcagcctgcgcgggaggccaatcgaacgccgcgccttggagcgatcacccaatccgcgaaagggggcagggcgcatccctgccaggaaccaatagaaagcctccaagggtcaggag

SEQ ID NO: 370955 - DNA, 122 bp, Homo sapiens
agggccagatgaagcaggcagttgtagagctgtggctaacaccaaatgctgcttcctgttcgtgattttaggacatgagtcatcaaggggctggcccggcacattcagggcgctgagataag

SEQ ID NO: 370956 - DNA, 122 bp, Homo sapiens
gtccttgcataatttttgtgatatctgccacctgccaccacaggtaactaaaaaagtcctcgcattcaaatggctggacacgggtgagaatctccttcccttactaggtctcttctgtgact

SEQ ID NO: 370957 - DNA, 122 bp, Homo sapiens
agaagtaattggctgtgcagaatggcagctcattggcggtacttaaggatacattatccccgttgtgtggcccgcagaggctgtttatcaaaactgctcacactgcagacgcggagtcgcga

SEQ ID NO: 370958 - DNA, 122 bp, Homo sapiens
tctgctgatgcatgccagcaataagagcccctgcttgggcctctgtatacacgctcctaacgcttaacagtggcagtatatggtcagcagaggaaagggactgtctgggacagagctacaat

SEQ ID NO: 370959 - DNA, 122 bp, Homo sapiens
gaggaggggctgcttcacttgggaagcgtggggatggaattctcagccccccgatgactccgaggccggccacctgcctggtttctggccggacaccggacttcccctggaagttgctcgag

SEQ ID NO: 370960 - DNA, 122 bp, Homo sapiens
tgaccctggttaatgagaccaggttccgctctgactgaatgtgacttccaaaaggggccacgtccaatccaaagatcccttcacctctgaaggggtctgctgctattttgggcacacacatc

SEQ ID NO: 370961 - DNA, 122 bp, Homo sapiens
ccaactcgcctcgagacgcagacaactttctcacttccgcccttgggccgcgtcactgcccggtccccgcggcaaccgctcctggggccaccacccccgggcccgccccctcctaaaagctg

SEQ ID NO: 370962 - DNA, 122 bp, Homo sapiens
agtgggtgcgcgcaccttgcgcgagccgaaagagggtgaggcattgcctcactcgggaagcgcaaggggtcagggagttacctttcctaatcaaagaaaggggtgacggacggcacctggaa

SEQ ID NO: 370963 - DNA, 122 bp, Homo sapiens
cacactgtttgtaaagtctgcaagtggatatatggacctgtttgagaccttcggtggaaacgggattttaacatataatgctagacggaagaattctcagtaaattctatgtgttgtgtgct

SEQ ID NO: 370964 - DNA, 122 bp, Homo sapiens
ccacccagcaggcacgctcgccccgcccgccccttccagctcgggaggccctgctcctcacgcacgcactctcagtcggcctcaaccggcgctgctccgcccctcaggcacgcacgttccgt

SEQ ID NO: 370965 - DNA, 122 bp, Homo sapiens
ctgaggatggtagtttgggatctgacatggccctgctggctaaggagacagtggctgggtcgggaagggaggcgatggggatggaatggagggagctcagggtgtaagagatttggtgggag

SEQ ID NO: 370966 - DNA, 122 bp, Homo sapiens
ctattctagtaaagccctgaaagtttactgcgaaagccatctggttctgtcctctgcacacgagcacagattacacaaattgctttcccacttttagaagaaatatcacaatctgccacact

SEQ ID NO: 370967 - DNA, 122 bp, Homo sapiens
gcgaggagcgcggggcgcgggaaggcaggcgggtgcacatgggtgccggcgggcgagctgcggggggagggggggcggggtgtggcctccccgcctcccgggcgggatttgcatgtgtgtgg

SEQ ID NO: 370968 - DNA, 122 bp, Homo sapiens
gggagacatgcggaatcgcagcggaaggcgggaggcagctgtgaactgtggctcggcctgcgtccgccctgcgcatgtacactcagagaagatgataatgaaaaagaaagcaaatccaattt

SEQ ID NO: 370969 - DNA, 122 bp, Homo sapiens
agattctagctaatcctaaaatctgtttttcaccagacgacgccggcccttccggcttgtcgtgcagcacggcattatctggtacccaccatttgtatcccggcatcatttatcttctccct

SEQ ID NO: 370970 - DNA, 122 bp, Homo sapiens
ctactcacatggccaagtttatttgagctgctgacttgagctgctgacttgggctgctgacgcagggtatttgcagcagctgcactaacccactttttctcatggatgattttaatctcttt

SEQ ID NO: 370971 - DNA, 122 bp, Homo sapiens
gccttcttctgattggctctgagtaatcagagccaaagcgttacttccggcggaaaaggacgcgggagattcgattggaaggctgccggcgtgctactgagttcggccggtccgagtcactg

SEQ ID NO: 370972 - DNA, 122 bp, Homo sapiens
tccacctctcttatggttccattggcaaaatcattcatcagtcgtcctatcttttcctggcgagcgctcacaatggcttcataagtgtttcaatacagtgtcccaggcagtcactacctata

SEQ ID NO: 370973 - DNA, 122 bp, Homo sapiens
atcgcggcccctcggccgaccggcgaccacagcagtggctgcgacggcgtggagcgtacccgagcgatgtcccaggagctactgggtaacacaccaccccacccgcttcccggctgccccgg

SEQ ID NO: 370974 - DNA, 122 bp, Homo sapiens
ggcgccgctcttagggggactgagcaggccctttgcgacccagacctgctcttagaggggcgtgggacgagagaaatctggaggggagtcttttctcttgaccttcgaggaggaagaagcaa

SEQ ID NO: 370975 - DNA, 122 bp, Homo sapiens
agtgagtggatgtccctcaaaggtccattctaagacatccccgtgtctccctgcaccctgcggcttgaattgtagaggctagtgtttcttctgaccctggaatacatgcagattcgcctcca

SEQ ID NO: 370976 - DNA, 122 bp, Homo sapiens
caggctctccacatccaatctgttctccaaggggtagccagagtgagtttcatcatgttacggtttgattatgtttctcccccactcaaaaactaaagactcccaactccttagcttggcag

SEQ ID NO: 370977 - DNA, 122 bp, Homo sapiens
tgctgggctatcttatggtacatttgtcttgcagcattctcaggaagcagaggatgcttccgactgataggaaactttgagcaaaggaaaacctctcctgtaggaacattttgaaaggtctc

SEQ ID NO: 370978 - DNA, 122 bp, Homo sapiens
acaaaaacagattttcagcaatacatttcaaacctttccaaagtaggacaaattacctttcgttacatccaagcagttgttatccaaacaactgctgggatgtttaggaaggaaaacctgta

SEQ ID NO: 370979 - DNA, 122 bp, Homo sapiens
gagaggcagccctcctcgtcgggctgctgcatccaccctcggcagcacctgagcacggtccgggcctccgtggtatacacctgcctgtagcccatgtagtagacggttctagaaagaaagag

SEQ ID NO: 370980 - DNA, 122 bp, Homo sapiens
gggcggggcggacagctgccccagtcctgagtcaggcactgagccagaggccttgtttcccgggctccagcacaggctgctctcctggggagaacggcagcaccttcggcctgtaccgttta

SEQ ID NO: 370981 - DNA, 122 bp, Homo sapiens
aacttccttgggttgttatgaggattaaatgagttaacattagtaatgctcttggaacagcgtctgacacatcataagcacaaaagtgtttgttagataaaaagtgattttttttcctgcct

SEQ ID NO: 370982 - DNA, 122 bp, Homo sapiens
aaaggccgtactctgccccccgcgggacccaggtccccgcctgctgcagagcgcactctgcgcacgtcgagccgcgaaaggttcacagaagaaaacaagagaaagaagtagcaggcactgag

SEQ ID NO: 370983 - DNA, 122 bp, Homo sapiens
ccgctgcggccgctctccccacccctgccaggcggctcgcaaagggcagctccttcttcccgtctgggtccgcaccacgcacccgccctggcctcctgcccggggacatgcagagtcaccat

SEQ ID NO: 370984 - DNA, 122 bp, Homo sapiens
ccgcgccgggctagggagcgccggggcgagggcgctggggggagccgcgggctgggccagcgccggccccgcccctttaacccgcccgcgcccgccgcattccgcggggaagtgtaggcttt

SEQ ID NO: 370985 - DNA, 122 bp, Homo sapiens
cctcttcaatggtcaggggcttcttcagctctgcgcaaatcgcagcgcggtagtgccggccgctgccctgtccggctctcctgcaacacaaaacaagggaagggtcagtcgggcagccccgc

SEQ ID NO: 370986 - DNA, 122 bp, Homo sapiens
cccagcagggaaatgacaggaggcgcagcttaggtgtggaggctccaggtggccggtccccgcgcggctcagatgaagtggatccagctctcttcgcactccccgcgaggcatgtgcagcgc

SEQ ID NO: 370987 - DNA, 122 bp, Homo sapiens
tccagcggcctggcttttgcctccaactctctgcagcggcgcaagaaagggctcttgctgcggccagtggcacccctgcgcacccggccacccttgctaatcagcctgccccaagatttccg

SEQ ID NO: 370988 - DNA, 122 bp, Homo sapiens
ccccacagcgatttctaaccagttatgtctggagagactgaagcaggtgaattagtctctcgggcacggtgttttgcagttgagagaaagaaatcctagtgtccacattgagattgggagga

SEQ ID NO: 370989 - DNA, 122 bp, Homo sapiens
attgtacaaaagcttatggtcattctcctactctctgtaggaagcttgctgtcttcgatacgtggagctccttggcggtccacattgcaatggacaacactgttgtgatggaggaaatcagt

SEQ ID NO: 370990 - DNA, 122 bp, Homo sapiens
cctgcgcggctccggtggcgtgaatgtcgctggtctcccgtcaccgtttccgtttccgggcgagtctgttcggcttatggcgtctgctaggagtctcctatccggcgtttgtgccgcagaaa

SEQ ID NO: 370991 - DNA, 122 bp, Homo sapiens
tagggaccagacccccaggcgcgcgcgccagccaggtggtcacgtggcacgcggcgcgcgcgggcttctggaaactgtagtcctttgggtgttattcgtgcctccgccctcctagtacctcc

SEQ ID NO: 370992 - DNA, 122 bp, Homo sapiens
ccttgcccccgcccgctggccgttgcccccgcgacgccccggaagccaggtcctgcctcccgcacctgccaagtccccgccctgccggagtctcgctctgtcgcccaggctggagtgtagtg

SEQ ID NO: 370993 - DNA, 122 bp, Homo sapiens
gtgacaccttgaatgtgacagtaggtgagggtattgacatgcgggcggggccgcgtgtgccgtgattaatattgtccttgcaatgactgtgatttgaagactctcagctgcgggacacttac

SEQ ID NO: 370994 - DNA, 122 bp, Homo sapiens
tcccatccaagcaatggacaggttggaacaggcgttcgtagggaacgggctgaacgcccgcggctcccgcgatgtctcgcgatactacctccctcgcccccgctcacttaaggaccggaagt

SEQ ID NO: 370995 - DNA, 122 bp, Homo sapiens
gctggcagcgccgtggcttcagcaacggtcatctctactgcgccaagctcgggtcgtgcccgggacaaattgagactatcccagagctcggacacaaggagaagtaaatttcaaattgggcc

SEQ ID NO: 370996 - DNA, 122 bp, Homo sapiens
gggccaccttcaccctcgcaccccgcccagtgtttagggccaggcctctacttgggggtacgaattaccagacacccccctccacgaaaccctcatcggggtagggcccgtcgagccccctg

SEQ ID NO: 370997 - DNA, 122 bp, Homo sapiens
ctgaggtagagctttatcgaaggtttctcttggtaaacgttagctttctgaactaagggccgtcttttttttttttcccgcttaagcccattgcataacaatctcttgttttaatcttttgc

SEQ ID NO: 370998 - DNA, 122 bp, Homo sapiens
ccacagcatagtcctgggtggggtagggtgggaacaacgtgagcagttagtgcacaggtgcggaaggttgagcaattaatactgctgccttagcaggggttattggtgtatggtgcactggg

SEQ ID NO: 370999 - DNA, 122 bp, Homo sapiens
ggaggccgccctgaggggctgggagcggcgcgggggtgggtcccggtcctgcagccccagcgaggggcgagcggcggccagtcggcgagctgggcaataaggaaacggtttattaggaggga

SEQ ID NO: 371000 - DNA, 122 bp, Homo sapiens
aggtaggaggttcggagctcttgggtctctgcgaacgacagccggatgcgtatgaggacgcgtgtttgcgctcactgtcactcactgtcacgcctggggtgaagcacacacgggctcttcct

SEQ ID NO: 371001 - DNA, 122 bp, Homo sapiens
aaatgcacataattagatttaagcaaacaacaacaaaaggaacacattggctcacataatcgagaagtcctggcacagctgactcctgcacttcaaacaatgctgagtgtgctctcaccacc

SEQ ID NO: 371002 - DNA, 122 bp, Homo sapiens
ccagcattcctttatgattaaaattctcagcaaaagcagcatacaagggacatatctcaacgtaataaaagccatccatctctgacaaacccacagccaacataatactgaatggggaaaag

SEQ ID NO: 371003 - DNA, 122 bp, Homo sapiens
tttggttgtaataaaatgtgactgctggggaaatgttcacagagttggcattcatttgcacgctactgccatttcagcccagggcattctctctttcttcctggttctcctgcctccctcca

SEQ ID NO: 371004 - DNA, 122 bp, Homo sapiens
accccatctgtcctaccatccctgtgcacctcgctgtgtggctcggggccttgcagagcgcgggtgttaggaggcgaccctgcgaaccccaggctcacccaatagggggctgcagcaggaat

SEQ ID NO: 371005 - DNA, 122 bp, Homo sapiens
ctacaaagacgtggccattaaaactcacaatgagggccatgcttgggcgtttcctgtcctcggaagtgtggtgttatcatcgcttttgaaatccacctgttactcagaccaaacccactccg

SEQ ID NO: 371006 - DNA, 122 bp, Homo sapiens
agccgggccgaggagagtctgggaggtgcatcagcctctgggactcttaggaagctccaacgatgacaccggccgtccctcacctgaaaatgcacaggctgcgtcacgtgggagggaggagt

SEQ ID NO: 371007 - DNA, 122 bp, Homo sapiens
ctgcctggggcccttcccccacctctccgagactgacactctgccgtaccaaccaacccgcgtcaccggacagagtccagccaatcagcacccagtatcgggcgggctctggctaacctagc

SEQ ID NO: 371008 - DNA, 122 bp, Homo sapiens
accaaagcctctatcaactctcccacctgtgaactgcccctctcccaaggtaggcattgtcggggtgtgtagactgggagccacccacacacctgactctcccctcctaggaaatgcgtcca

SEQ ID NO: 371009 - DNA, 122 bp, Homo sapiens
gctgctgagtctcgggtgtgcagggtgtgctgtggcagcaccaaccactccaaagctgagcggcttccaccgggcaatttcacgatgcccacggcctccaggcccagaattcagagtaggcg

SEQ ID NO: 371010 - DNA, 122 bp, Homo sapiens
tgcttgaaacgcattttccagcccgccaaattcttgggagagtttcttccactctccaggcgctgagagctacaaagttcaatctggctttccagattttttttttcttcccattactaacg

SEQ ID NO: 371011 - DNA, 122 bp, Homo sapiens
ttaaagtgctttccaacaagtactccaagaagatcacattaatagggaataaagtctgggcgcggtggctcacacctgtaatcccagcactttgggaggccgaggcaggtggatcacctgag

SEQ ID NO: 371012 - DNA, 122 bp, Homo sapiens
ttttccttattgtcagatactgaactctcagatacagttccccttcatccctccagggggcgccatggaacgcagggccctcactggccctggggactgggtgacgtcaggggtgagcctct

SEQ ID NO: 371013 - DNA, 122 bp, Homo sapiens
cctaacctcagttttgccttttctgtggcacctactctggctccagggcagtggttacagcgagagtgggtttctttgagtcagctagctgtttaggaagaaaatacattttatgaatgagg

SEQ ID NO: 371014 - DNA, 122 bp, Homo sapiens
ccctcttctacagtgtaacctacagtagattgcgtcatgagagtgtgtccgcatctgtaacgccatgaaagtcgtgagggttaaaggcatgggcagacagctttgcacggtgctcaacagcc

SEQ ID NO: 371015 - DNA, 122 bp, Homo sapiens
ctcaggtgatccgccagcctcggcctcctaaagtgctgggattacaggcgtgagccaatgcgcacagccatgctgcttagtgttttaaggaagtctaaaaagtattcttaggatatttgttt

SEQ ID NO: 371016 - DNA, 122 bp, Homo sapiens
tgctcactcagttcttagtagctctcctaaagcatggtggtgttctcttccagttctctgcgtagactttgctatgcttctccgcccactgcttcatccagagaaacactcgtatccacagc

SEQ ID NO: 371017 - DNA, 122 bp, Homo sapiens
ccctgagctgaggagtgggtgagtcagcccagcccatggaggggtgtgtgaggatgccttcgaacttcctcacccctctcagaaaggctgcacctgagccgcattccagagacgtttgggat

SEQ ID NO: 371018 - DNA, 122 bp, Homo sapiens
gtttccccgccttggcctctaagagctgattggcagaaattactacccaaccctcagctccgcacctcctcccccgaccaacgattggccacctgggaggactggagtaaggggtgcgagcg

SEQ ID NO: 371019 - DNA, 122 bp, Homo sapiens
ctgattgattaaatcctagcaattggtgcaaccctctgtacctcttagagtgcctctcaccggcctgctctgggttcttcctttgtggccctcctttcatgaaatctctgtgaagtcctggt

SEQ ID NO: 371020 - DNA, 122 bp, Homo sapiens
ggaaggtcagcctgacttacttaagtggagagaactcacccctggtgattctgatgattccgatgctagatcttgaaaggcttggctccaggagccttgtgttactccctcactggtgctcg

SEQ ID NO: 371021 - DNA, 122 bp, Homo sapiens
ggagtggcctcccccgggaactttctttactctggctttgacctccatccctcggaagcccgtggcttttcaaggcgagggagtagaggcagcttaagactacaaatgaggaggggccaaaa

SEQ ID NO: 371022 - DNA, 122 bp, Homo sapiens
aatctagcctgtcgtggcttcaaagaaccatggagtcccacacgtggacttcaaggttcacgcataagatcctggaccagcatagccggagcacaggacaaacctgtccaggggcacggcag

SEQ ID NO: 371023 - DNA, 122 bp, Homo sapiens
aaacgttatccagtcagggacgctgggctggaaaccgtccaatcagacacgaagctggagcggacagggtggcttccgggtttggcgggtactttgtctctcgctctagcccgagctgcagg

SEQ ID NO: 371024 - DNA, 122 bp, Homo sapiens
gtggacatgggtgttagacacccacatttacacgcagggcctcagaaacaacaatgcttacgtttttctaaatggttaattttagcatccatccaaatgtcagttagcctgtcagtgaagtg

SEQ ID NO: 371025 - DNA, 122 bp, Homo sapiens
gcagcatgactccttgccctctctgaaaggcccatcccttggcttcttctccttggcagacgctttgatcattggcgccaaaggatggcttctcctaatctccgtcggcccctctaagcaaa

SEQ ID NO: 371026 - DNA, 122 bp, Homo sapiens
ttggcttctgagccgcggggagagagctcccagcaccaccgagggcacttttggtggggacgttcagtcgttttccatagatctaccactacaagagcaaggccagtgatttggcaagttgg

SEQ ID NO: 371027 - DNA, 122 bp, Homo sapiens
ctccattttctcacttgcctgctctttcgtcctgcgaaactgggcagtggccggtgacagcgcagggtcagccctcggatggccaggtgggcgtgatcccaccctcctccgtggctgggtgg

SEQ ID NO: 371028 - DNA, 122 bp, Homo sapiens
ttccagggatgcactgcttgttggtggtagtttagataccaaaccaggatgaatactctccgaagcttgtgctttaaaccactctccgttatttgacttacaaatcacctttctcaaaggaa

SEQ ID NO: 371029 - DNA, 122 bp, Homo sapiens
ccctccgcccggggcgctccgcagctgccgaggagcggaagtgggcgccaggccgcggcgcgcccagcccagcccagcccagcccagtcggcgaccccgcgcagcgctgcctgcagaccctg

SEQ ID NO: 371030 - DNA, 122 bp, Homo sapiens
aagagaagatatatttgcttcgtctacatcagggcttctcatccctgagctggataattccgtgtgtgggggctgtcctgtgcaatgtaggatgtttagcggtatccctagcctctacccac

SEQ ID NO: 371031 - DNA, 122 bp, Homo sapiens
caatgggactccagatgggtacaaggaagggaatagagccagatccagacaagtaaaggccgcaggcaggctaataatctgacagcattcaagtcagtatattttaaatatttgggccaggc

SEQ ID NO: 371032 - DNA, 122 bp, Homo sapiens
cttgatcagcagcagcagcagcagcagccatcattagtctctgtaaggatggatacccaacggtataaaagaaagcaagcaatctaatgtttattttcagagatagtaagagacagagcaag

SEQ ID NO: 371033 - DNA, 122 bp, Homo sapiens
tttcacttgctccttcgtaaaatcctgattgagccattcccatgaggcagccctggtggccggggcacacttctctcactgggtcgttctctttctccttttctctctctcttttcctgtct

SEQ ID NO: 371034 - DNA, 122 bp, Homo sapiens
tcgggatggctgcaccgcagtcctgcatgtctgggcctcggtgccggccaggatggagagcgcaggaggccaccaccccaggctgtgtgccccggcctgtccagcggctgcaagcctccatg

SEQ ID NO: 371035 - DNA, 122 bp, Homo sapiens
tacatcagaggccaggactggcacctggcgcctttcacttccctaaacttgcctgggaaccggggcggggacatcacgagggtacagactcctcccccgagacgcgatgctgcgttttggag

SEQ ID NO: 371036 - DNA, 122 bp, Homo sapiens
ctcgggaaacttaccatcagggtggaaggcaaagaagaaacacgcgccttcttcacagggcggcaggacccagtgagcgagggccagcaggagaaaagccagacgcttataaaaccatcaga

SEQ ID NO: 371037 - DNA, 122 bp, Homo sapiens
gtggagctacctccacaagcttcggtcaccggaacgaggttgcgccaccggtgcgcgggtcggttgcctgcctccccaagtggatccacccccggtccagtgtgctcctgcgtccctggtct

SEQ ID NO: 371038 - DNA, 122 bp, Homo sapiens
ctgggtaatgtagtttcccaggttccaaggccgtaaagagagagattcccaggggcgcttcggaaggaaaagcccagctccacctccggggccctcagggaagcctcctgacccgcacggtg

SEQ ID NO: 371039 - DNA, 122 bp, Homo sapiens
ggtcacggaagccgtggcagcccatgtgaatcgtgaacatcacatagtccaggaagaggacgcggcagtggtcacaccgatacacatccatcacctccccttccttgttgatcactttgacg

SEQ ID NO: 371040 - DNA, 122 bp, Homo sapiens
agccaacaattgagtgactgagtatgctaacacatcttcggggactaacacattagatgccgtaaacacagccagtaggtatagagttctatggagcaataggtctgaaggaagaaaaagag

SEQ ID NO: 371041 - DNA, 122 bp, Homo sapiens
acccgttaccccgtgggtctggccgaccgtcctgactcggagatccctgagctgcgccgccgcttccttcgtcaacatccagcagctacttgatgagcgccctccagtgggccttaggtccc

SEQ ID NO: 371042 - DNA, 122 bp, Homo sapiens
gggaagaggcggctcttggccagggagttgttggggctgtttccaacccaggcaaaccttcgcttcctctcctgccctcctgccccgggtttttccccagacagacctacgggtgccagtgc

SEQ ID NO: 371043 - DNA, 122 bp, Homo sapiens
gtacagctgcctcaaggccatagtcctgttcacctcaggtaggaaggagccctgtcttctcgtgcccacgggctcctagcccagagctggggcccagagaacttgggagtccccagggcaaa

SEQ ID NO: 371044 - DNA, 122 bp, Homo sapiens
ggctcccacccgtgcccctccgccccggcccgccgggggcccccgctaacctgacaccgccgcgccactcaggtggccgccgtgcacccctcgccatggccagcccgacagcggccgctgcg

SEQ ID NO: 371045 - DNA, 122 bp, Homo sapiens
aggaaataccacttgatgacctgcgatctggggaagccgcgccagggctctgcgaagctgcggacgagggaggcgtcagtgtgggggctgcagctcagctccgggggggacgcgcctttctc

SEQ ID NO: 371046 - DNA, 122 bp, Homo sapiens
ttatatccacaaggtcaagaaatagcccagacattcctctcagccaattggagcactcgacggagcccagttcataaaacacacacacacacacacacacacacactcacacacactcacac

SEQ ID NO: 371047 - DNA, 122 bp, Homo sapiens
cattatggtcaaatcgattttggagacaggtcggtccgctaaaacaaagtaacagtagaccggctgcaagctgctttgggtgtccactttcgtttctcacgaagtcctgataagtttttttt

SEQ ID NO: 371048 - DNA, 122 bp, Homo sapiens
ctttccttgctggtgctgggtaagacatggctcagcctcttccaagttcctcccaaacaccgtctgtgaactgcctcaatgagctagctacagtattctatcggatctgtttctgtcccttt

SEQ ID NO: 371049 - DNA, 122 bp, Homo sapiens
gatgctgccttcctcatcatgccacccctccttctccccagcccctggtgggcaccagcccgggcattctagcctacagcccaagacagatcaggcggacagcagctgaggctggggagagg

SEQ ID NO: 371050 - DNA, 122 bp, Homo sapiens
agagtggggcgcgcgggctgggcctccggcctgacaccctctcttctctccatcagtgagcgacagctccccctaccacagccccaaggtggaggagtggagcagcctgggccgcaacaact

SEQ ID NO: 371051 - DNA, 122 bp, Homo sapiens
agcgccatatttcttcacattatggcgatttcaaaatgattttttaaagatcaatgccggcgcccatctggccccctcctttcccacccctgctctccgagggtgacagcccggcagatccg

SEQ ID NO: 371052 - DNA, 122 bp, Homo sapiens
aggaaagtcacaaccaataaatgtctggaacaagtgtcacaattacaaggattgtggcgtcgcttcaatcgacctttactgaaacaacagtaaaccatctttattatggtcatatttcacag

SEQ ID NO: 371053 - DNA, 122 bp, Homo sapiens
gacctttcagaaccgaacccaatcctgaggctgactcctctacggaaaatgaggacaggacgggggtgagggaatgagagtgggaggtccctgcacctcctcgcccggctcctcaggaagaa

SEQ ID NO: 371054 - DNA, 122 bp, Homo sapiens
tcctctccgggctagacctccttactcaccgtcctttccgagcggcgcggggttggggggcgccctcagcggcagcgccagagtcttggagaccgccctgcggagatacatcgcgcccgctg

SEQ ID NO: 371055 - DNA, 122 bp, Homo sapiens
cccatatcttccccatcgggccctttgtacgtgctcggcgccgtgcaagcgcgcccggcacgtgaccccgccgaacgtggcattgtgttatcacgtgacccaggtgcgtacgcgacggagcg

SEQ ID NO: 371056 - DNA, 122 bp, Homo sapiens
ccaatgcaaagaaaacttgatttcattaaaacagagctaggggccgggcgcggtggctcacgactgtaatcccagcactttgggaggccaaggcgggcggatcacgaggtcaggagatcaag

SEQ ID NO: 371057 - DNA, 122 bp, Homo sapiens
gggccttgaagggaggggggatggatatgggtctggcagagccttggggaggtcattccacgtgtaaatcaagattttagaaggaaatcactcttgaggattcatgagcattagaggttctt

SEQ ID NO: 371058 - DNA, 122 bp, Homo sapiens
cacaggacacacaggacacacagtctccaccctgcagcagcctgtctctcagagagggtccgagagggtcacactagagatttccggtggggtggggaggagccctgggcaagcctgctcag

SEQ ID NO: 371059 - DNA, 122 bp, Homo sapiens
ccagccgtattttggggatgactccaattcatgggcgcttgtctgcctttatcacttcctcgatgtgccctcactcactactccctcagggcctctgcctttccggcattttcctcatcacc

SEQ ID NO: 371060 - DNA, 122 bp, Homo sapiens
aagtgcccggcattgttcaggaaattgtgtgtgtaaagtagagctgcctgcgcccagcttcgacaagggagcagccttgcgaaggtgcttgaaaccgaaacagaggcttatgtatcctatta

SEQ ID NO: 371061 - DNA, 122 bp, Homo sapiens
aaatatatgtaacacacatatgccaaaacactggttatctgaaattccaatttaactgggcgtcctgtattttatctgacaagccctaactacttctttaaaataatttgttaacttcctac

SEQ ID NO: 371062 - DNA, 122 bp, Homo sapiens
agagacaacgatcaggaaccctaagaagaggcgccagaggagccgccttctgcctcagaacggcgtgactcggaggtgagagcgcgggcactccctccgcgaaaggcgggggacaccgagcc

SEQ ID NO: 371063 - DNA, 122 bp, Homo sapiens
gtgctgggattacaggcgtgagccatcgcgcccggccagatgcgttaactttctaaactccgtgagccagcgtccctcggtgttcaggagaggagctatggtatatgttcatttaaaattgt

SEQ ID NO: 371064 - DNA, 122 bp, Homo sapiens
gtgtgaaacgccaagcgtaccctactcggccactcggggtgtgctccagcttcaaaaccccgcgtgggtaagacacatgagcaacccagtgacctccaccttgagctaatgatcgtctttga

SEQ ID NO: 371065 - DNA, 122 bp, Homo sapiens
cccggtgcattgtgggaacggcccgcggcccgttttcgggaggaggcggagggcgcgaagcgagctggtggatccgtaaagaacccagccaacccccagagggaggggaggggctgagctgt

SEQ ID NO: 371066 - DNA, 122 bp, Homo sapiens
ctacccctgctaaagggagattatgaagtgatgttgagtactacttccagcgtaagacttcgtggtttacaaagaagagtttgggaatgattctgaggagaatcacacagatggtgatatga

SEQ ID NO: 371067 - DNA, 122 bp, Homo sapiens
cagcactccactgtcagccagggggggtcactcctgccatgagctcaaagctgtttatggcgggttgttttcctgccgtctcttctcttcactgtgatgcgcctactgtgcgtattttgtcc

SEQ ID NO: 371068 - DNA, 122 bp, Homo sapiens
tgactttccaatcacttttggaagacgcagggtaggctggaaaagaaaaaggctattaggcgggcctgttcagcagaacgagacccggagaggcattgtatcaaagaaaaggagtctccggt

SEQ ID NO: 371069 - DNA, 122 bp, Homo sapiens
ggatcagggcctgggaccaggcggctgtaaaaagcaacagagctcggacgcatgctagagcgtaccgggaagctggatgagggcctgggaccaggcggctgtaaaaagcaacagagctcgga

SEQ ID NO: 371070 - DNA, 122 bp, Homo sapiens
tgctttccgaaacgcttacatcattcagtcgttgggggagggagagggatctgggcgttccgataggattccagcatctaccgggtccctggtttctggaaggaagcagggaccctagcttt

SEQ ID NO: 371071 - DNA, 122 bp, Homo sapiens
gctgcatgaaccgctgggctgaggagcccagcacggcccccgggggccccgccggcgccacggccactttctccaaggcctgaggcgccccggccccgcgccctccctgcctccacggcctg

SEQ ID NO: 371072 - DNA, 122 bp, Homo sapiens
tgtcaattactttctttaatttaaaagaagttcagataccaggtcaagctaggaatgatccggtctcagagggaaggagcgctctaggaaaggaggatcctttaatagagggccgtcctggg

SEQ ID NO: 371073 - DNA, 122 bp, Homo sapiens
gccaggagccacgaatgaacgacccagacagtaacgggtaggacctgctgcccatggccccgcgcagcccactgtcctcttcctgtccctcccacagctcaggccagagcgctggaggctgg

SEQ ID NO: 371074 - DNA, 122 bp, Homo sapiens
gatccagaaacaaaatgagctgggcttgggatttgaaaacacactgcagacagaccagggcgaattagcatgcactgcggaattatctcaccttcctaatgacgctaacatttatttttact

SEQ ID NO: 371075 - DNA, 122 bp, Homo sapiens
catcgcaggatgggctatgccggctgggcaggcctaggggtgtgggattctccactgacccgaggccacgaggctacaccttggaggtgccggctggcaggacgggttgttggtgggttttc

SEQ ID NO: 371076 - DNA, 122 bp, Homo sapiens
gcgccgcgcgtcttggtaggcgctgcgctgccggggccgggtcctgggccagtgcaactccgcccccagccgtatccagcggactgtcctccgccgcgcgcccggcacagcatggggaggcg

SEQ ID NO: 371077 - DNA, 122 bp, Homo sapiens
aggctgaggtgggaggatcccttgggcccaggagttcaagcctgcagtgagctatgatcacgccactgtgctccatggtgggcaacatagtgagaacctgtctcttaagagagagaaaaaat

SEQ ID NO: 371078 - DNA, 122 bp, Homo sapiens
gtttacccattcatccatcgatggatatgtgaattgcttccacttcttggctgtcgcgaacgctgctgctaagcgggcgtgcaagtatctctttaataccttgctctcaatgcttttggatg

SEQ ID NO: 371079 - DNA, 122 bp, Homo sapiens
acccagagagcaggacggaggtgtgaacttgagccagaccagaaggagctcgagagcggccgcaggacaagcccgaggagcaggcgggcgctccaggggaaaaccacgcacaaaaccttctt

SEQ ID NO: 371080 - DNA, 122 bp, Homo sapiens
tgggagaagcgcatgagccgcagctcaggtgccgcgggggtcggggctggggcgggactgcgcgggcccgcgtaagcagggctcgagctcgccccttgggcgcggcggcagcgctgcctccc

SEQ ID NO: 371081 - DNA, 122 bp, Homo sapiens
tgtggagaggaattggggcgggatcattcaggggaaggtgacagcagatggtgggaaggccggagtcagcaagccaagtgtcaggggcagagtgagcctcagaaaacagcagctgcccggtg

SEQ ID NO: 371082 - DNA, 122 bp, Homo sapiens
tctgctttctgtctctgctctctgtcttcacactcaatgaaatccttcatgcgcctctcccgaagcctgccaagcaccacaagggtcgccaccagcacagcgacaagaggccacaccgggga

SEQ ID NO: 371083 - DNA, 122 bp, Homo sapiens
tgtcctggggcgcgtgcgaccacgtgagggggttctgtatctcccattttaagggccttccgtccgcttgccccgcctgtccccctccacaccttcccacttgaaccggcaccgacctgagg

SEQ ID NO: 371084 - DNA, 122 bp, Homo sapiens
aattcataagcctaaggggccttgagattagaataatctaatctgtgtccttttgccaggcgagtgagtccatttctgatagaaaaaccatttttgtgtgtataggatctatggtgtttttt

SEQ ID NO: 371085 - DNA, 122 bp, Homo sapiens
ttggatttctcagctgccacactcccaaccgggataatgtgctgtgtttgccagcaggggcgtagcattttccctgggctggacctcaagggccgctcagaacaggctgtttaatctccccc

SEQ ID NO: 371086 - DNA, 122 bp, Homo sapiens
atacagacacaaataagaggaactttttgcccttgagaagctcgcgaataatgctagtgtcgcaagataaattatttaatggtggtttgtgtgtcctgtaggagcctgaggggctggggtgg

SEQ ID NO: 371087 - DNA, 122 bp, Homo sapiens
ggcccaagtgacaaaccccctccctccctccaccaggcaacagctgcatggggatgggggcgtctctgcgggtgcagggagtccccccatccacagttcccacgccccccccccccccgccc

SEQ ID NO: 371088 - DNA, 122 bp, Homo sapiens
gagaggcttttgtatttcatggcctggcgtacccagtttccagggcaaccatggacaccacggttctgttagaggtggaagccaagaccagaagacagccaattaacatccagagcccagtt

SEQ ID NO: 371089 - DNA, 122 bp, Homo sapiens
gaaatgccttaacgccagcaaagctcagaggcatctcagctccagcctggggcctccaaacggctgctaacatccagttaatgctccaactgctgtttaacaattaacattaatgacttggg

SEQ ID NO: 371090 - DNA, 122 bp, Homo sapiens
ggggctgtgctacgtgtagtgaccctgggcctgtggtgcgtgttccggggctgtgctacgcgtagtgaccctgggcctgtggtgcgtgttccggggctgtgctatgcgcagtgactctgggt

SEQ ID NO: 371091 - DNA, 122 bp, Homo sapiens
tggatggtttccagggctaggggtctacctgctggatggtttccagggctaggggtctaccggctggatggtttccagggctaggggtctaccggctggatggtttccagggctaggggtct

SEQ ID NO: 371092 - DNA, 122 bp, Homo sapiens
tggcacgccccctggtggtgatacgaggttctaccaggcagaaaggaccgttctggggagcgactcctctgggtggaacggagaacgggaggaggaggaggtttccggacgttctcagcggc

SEQ ID NO: 371093 - DNA, 122 bp, Homo sapiens
aggcaggagaatcgcttgaacccgggaggcagatgttgcagcgagccaagatcacgtcaccgtactccagcctgggcaacctaagcctgggtaacgtagtgagagcctgcctctacagaata

SEQ ID NO: 371094 - DNA, 122 bp, Homo sapiens
tttttacctgcagaggatatattcccttgcaagtcctgtggcatctggtatcggagtgagcggaatctgcaggcccatttgatgtactactgcagtgggaggcaaagagaagctgctccggt

SEQ ID NO: 371095 - DNA, 122 bp, Homo sapiens
ggcttttggaactcaactagcaggtgcagagagtactacaaagacccgggtttccgtccacgttcacgtaaacctccctacgaggggaaactacaggcgcgctgccggagggcgccgccagt

SEQ ID NO: 371096 - DNA, 122 bp, Homo sapiens
tacctgcccaggctctggaatcaggcttcctgggttggaatcccaactccacttaaccagcgtggggatttttctgaggagctggtctgtagcattcatcatatctgaaaggtgacccagaa

SEQ ID NO: 371097 - DNA, 122 bp, Homo sapiens
gaacagaaccacagcgggtgtcttactccgttctggagacctgcatttgggattaaacggcgtatgagacttgccaataagtcagaatttggaatttggagaggacgtacccatgcggcctt

SEQ ID NO: 371098 - DNA, 122 bp, Homo sapiens
tcgcgcacttgggacccattcccacctaggaccataggctcaagatggcctggtggatgccgccggcacgcgcctctcctctggcgggaaccgaaggcgccggtaggttttcacacttgcag

SEQ ID NO: 371099 - DNA, 122 bp, Homo sapiens
tcgtctccgggcggactacatctcccacaatgccttgggcccagcctccctcctgccgcccggctgggtgccgtctccaccaacagaaaggcagaatttccagggccgttctcggcagccaa

SEQ ID NO: 371100 - DNA, 122 bp, Homo sapiens
cgctcagcccgcaggcgtaggatagggaggcgtctccgggaatctactccgggacgggtccgcggtcctcagtcgggatggagcgggggcggaggcagccggagggaactggagtccccatt

SEQ ID NO: 371101 - DNA, 122 bp, Homo sapiens
tctccagctgagctttgtcatttccatgcgtggcgttcccacgcattttgtacctgtggacgcgcggccgcctctcctgcccgggatggccccgcgaggcgccccctagcgggcgaacggcc

SEQ ID NO: 371102 - DNA, 122 bp, Homo sapiens
gctcaattactctgtctccgccagcctaccacctataaacaattcctcaaattaggaaagcggggagatttaataaagacataacacgtaaagtgtaggaaaactatttgtatggcattccg

SEQ ID NO: 371103 - DNA, 122 bp, Homo sapiens
gaaatggtttgaaggctggagaatatcaccgaggaggaggagggtgaaagaatggagcagcggtgacggatggagacatggagaagggttgttcttcaccaggctcaagaaaagaataaagg

SEQ ID NO: 371104 - DNA, 122 bp, Homo sapiens
cagagacgggattaagctgtctctggcgaaccagggagcagctgggtaggccgcggggggcgcctgtcatcgacgtcatttccttcagcaagagcgccgcaggaaaccacttccacaccact

SEQ ID NO: 371105 - DNA, 122 bp, Homo sapiens
gcgtcccgaagcccgcccgcctcaccacgccgcgcctcacctgacgccctggctgccgggcgagcgctgacataagtggatgcgaatctcacgcaggcccagctttgccccgactcctcgac

SEQ ID NO: 371106 - DNA, 122 bp, Homo sapiens
tgtgttcatagcctgctcccagacattctcttgttatctctctgtttcctagcctacacacgtgcacagacacgtagctgctgttcaggaactgagctaatggttttaaagtctgttcctta

SEQ ID NO: 371107 - DNA, 122 bp, Homo sapiens
tctggaagtggccagaactgtcaaaactagcctggcccctcctgcagctaccagaacagccgcttccagagtccacacttatacatggaaagggtttggtgctggggacggagggagagagt

SEQ ID NO: 371108 - DNA, 122 bp, Homo sapiens
gcttggccctgggcagaggaagccccccttagatctgccttggcagtagtgaggaaagggcgtgcacagaccccacgcagcccgaggtgacgggtcaaatgcaagagtgagaagccccctcc

SEQ ID NO: 371109 - DNA, 122 bp, Homo sapiens
acaagtatcattatatcaatccctcactcaaaaacaccaaatgaaaacgagtaggatgaacggtgggaggtagggtgaagccacattatggtggcccttgcaagttgaacttaaagtgagaa

SEQ ID NO: 371110 - DNA, 122 bp, Homo sapiens
atggcctcaaactcctgggctcaagcgatcctcccacctcagcctcctgagtagctggggcgacatatgcgtgccaccatgcctgggtgtttccattcttataccagggtctccgtagggaa

SEQ ID NO: 371111 - DNA, 122 bp, Homo sapiens
tagtgtgttccttgcttttcccggctggagaggtgcctgtgatccttggctgtctcaatccgacctctgcctccatggtcacagcgtcttctcccttctaaggagccctgtgattatatggg

SEQ ID NO: 371112 - DNA, 122 bp, Homo sapiens
gctgaggctcagcgaggagctcagcggcgggaggatcaaggtaggagccagaggcctccacgcagtgcctggggctattgccccaggcctgaccggggccctcctgacacagagccgaagga

SEQ ID NO: 371113 - DNA, 122 bp, Homo sapiens
cccactgtcttccttaggacgctcttccacagaaaaacgcctccacgcggctccccgccacgtcctgctgcagttccgatgcctaccgcgagatggcagcagcaacccggaacacagagtcc

SEQ ID NO: 371114 - DNA, 122 bp, Homo sapiens
cacctcctaacgcccccccgcccccccaatctagggccgctctcgcccttcggattggctcgatgcgtttttccccgaatcctttgcgggtccggcctccgatccctgtgtggctgtttggc

SEQ ID NO: 371115 - DNA, 122 bp, Homo sapiens
aaacacctccctccgggtacttctgtttcctctctttcattggtcgccttggaggccgctcgcctccggcgcgggcacagagaggggcggggctgatagggcgttgctaagcgacggagatg

SEQ ID NO: 371116 - DNA, 122 bp, Homo sapiens
tgaggctcttgtagactgccactgaaggtatttggcgccacctgttgggcgtgttacccacgattgcctcctgaatctattgtcatttttgtgtcctgcccccgaggttaggtggttcttcc

SEQ ID NO: 371117 - DNA, 122 bp, Homo sapiens
cgggagcctaggccatggggcagcctgggccttctgcagtgtgaggcgcggggcctcccgcgtcgctccgctgacaggctgcgggcgggcaggcgggaggcgtagtgtgggtcgcggtggcg

SEQ ID NO: 371118 - DNA, 122 bp, Homo sapiens
ttccgctgccaagcctgcagaaaattgacttgttcatggaggcggctattgacacatcaccggggggagggttaggggagaaagcagtggagccggcgcccctccattatacgttaatgtaa

SEQ ID NO: 371119 - DNA, 122 bp, Homo sapiens
caatgttaattttggtccctgataaggtggttcctcctctgaacagtcactgattttcctcgtccttgggtatattgcgggagatctgctgaggctgagaacgccctgtctgcacataaagc

SEQ ID NO: 371120 - DNA, 122 bp, Homo sapiens
cacggggatgacctgcggtgtacaaagacttagatctccgagatgaaccggaacatcagccggctccaggctgagattgagggcctcaaaggccagagggcttccctggaggcccccatcgc

SEQ ID NO: 371121 - DNA, 122 bp, Homo sapiens
gcgaggatggaaagaaacttcagaaaaactctcgccagacaacccggcagcacttggccccggaacagagaggagagaaagacctgaccgccgcactcagggccacccgccgcactaagttt

SEQ ID NO: 371122 - DNA, 122 bp, Homo sapiens
ggactacaaccatgaggagtggatcgaactgcggctctccctggaggagttcttcaacagcgccgtgcacctgctctcgcgcctcgaggacctccaggagatgctagcccggaaggagtttc

SEQ ID NO: 371123 - DNA, 122 bp, Homo sapiens
tgcaccctgtgccggttccctccaggcagccttgctccctaaatccttcctcaggcggagcgatgtatgcccagagtctgctcttgacatccctgagaaagacgcagaattactctacttgc

SEQ ID NO: 371124 - DNA, 122 bp, Homo sapiens
acaccacactgctttgtagtctatacatttattgagtaaaaacaaaatcagtgtcagacacgttatatttgattgggttcaaatttggctgatgtccaaatgcagcagagaagaacggtggg

SEQ ID NO: 371125 - DNA, 122 bp, Homo sapiens
cgtcgcagtcgccgtcccacacgggctgcggacaccaagggttgctagtgagtagcggcgcgcgcgcgtgagtgagagcgcgcaccggacggggaagtgcgcacggcgggtgcgtctgcctc

SEQ ID NO: 371126 - DNA, 122 bp, Homo sapiens
ccacctcaggccccttggcaggctgccaccctaggcagttgtctcgagtctgggtgtcctcggagggcagagcagggacaggaggctgatgtcccctccctctgccagggcacgggcagcca

SEQ ID NO: 371127 - DNA, 122 bp, Homo sapiens
gctctggggtgtgcggaaatgtttctctgctgtgtcttctggggtgaagtcgtttggcagcgctggttttccctccctcactctgctcaccacctctctgtccaccactcactagcgatggg

SEQ ID NO: 371128 - DNA, 122 bp, Homo sapiens
cctgcccgaggtggcacagtggggctggcagagctggggttcaggccattttccatctggcggcttgggcaggtgggcgctctctccccgtgtgccccccacccggggcctggtggcctctg

SEQ ID NO: 371129 - DNA, 122 bp, Homo sapiens
tccatcacattagcaaaaagctgagccgtaatccccagcccggggcacggagcggccccgcgcacactggtagtcagcgcacaggacagtctcgtcgttcgagaagcgattcctcgggatac

SEQ ID NO: 371130 - DNA, 122 bp, Homo sapiens
gccgcacgcctggcctttgggccagggccacacactgggctagaggagcctggcctgagccgatgcctgtgagtgacactattcagcctgggctaatacccaaagcctctcttttttttttt

SEQ ID NO: 371131 - DNA, 122 bp, Homo sapiens
tataacccattgtccttgcagacctgtgaccgcatcaagcagtcagcagctggcaccaagcgtcgggtgtttatcattgagactatgggtggctactgtggctacctggctaccatggctgg

SEQ ID NO: 371132 - DNA, 122 bp, Homo sapiens
aatgaactcaatccttgtttctccatcttatccactagtaaatattagttatattctcttcgaattcatcatgaattccatgaagactgaagaaaacaagtcacttagtgccacaaaagatg

SEQ ID NO: 371133 - DNA, 122 bp, Homo sapiens
ttaagaaataaagaaaagaaaaagaagtgaaaggagacaggtgcacagtgtcaagggacacgcaccttggcatggcagtggagatggaacgagagggaccagaggcttccccgacccccctg

SEQ ID NO: 371134 - DNA, 122 bp, Homo sapiens
tccaaaatagaatcttaaaaagaagaagaaaaaaggcaggaaaagttggattattttaagcgccactaggttcttcctgtgctttgcgttttctacatcacgacgccccactctttccactc

SEQ ID NO: 371135 - DNA, 122 bp, Homo sapiens
ggctacaaagccggtgggcaggtttggctacgctcaaaccgggcagtgccgcggtttaggcgtctccttccttcccagcgactgcacaaaatggcggccgccgctgagtcggctccaactta

SEQ ID NO: 371136 - DNA, 122 bp, Homo sapiens
atacagggtgttgctctgtctcccaggctgacactgcagcctcaaattcctctgctcaatcgatgctcctgcctcaggctccccaaaaaactcgttttatatttgtttatttttattccaga

SEQ ID NO: 371137 - DNA, 122 bp, Homo sapiens
aaggaagatgacaaaatgtgaaaattcgaggctcccttctaaggagccactctaaggccgcgccagggctttagtgagcctatctactcgtgggcttcccctactcaaaacaccgtgggtgt

SEQ ID NO: 371138 - DNA, 122 bp, Homo sapiens
cgagcgcccggcgtccgcgcggccctcccttgcgctcccgacccgcccccggagctcgcacgctgtctcccctaggaggggtggccggcccgcacctccatccacccccgctacctcttgcc

SEQ ID NO: 371139 - DNA, 122 bp, Homo sapiens
agcatccacaagggcgccggcaaggctcgcccagcgcccggggaaaacgccggcgggtcccgagttccccgggcggtggctgcagcccctgctccagtcgccccgcacctgtcttctccccg

SEQ ID NO: 371140 - DNA, 122 bp, Homo sapiens
gggttcagagagtgggaactgaatttttttcccctaagagtagagagggagttgcttacacgaaagagctttgattacaacaggagtgatggaggctagacagctggaaggattttccttat

SEQ ID NO: 371141 - DNA, 122 bp, Homo sapiens
tttctgtgtatctggggaaaaaagaaaaatcctagtagagacggcaaagcgcagctggtgcgcaggcgtcacccaataaggtttttgtgagcaggccccaatcgcggtgtgggcggagcgag

SEQ ID NO: 371142 - DNA, 122 bp, Homo sapiens
gaggtgggtctggagcgtctcctcgggtcctggagtgcctttccctgggaggaaaacttgcgccgtgaagcgttcctcccgttgttgaacacatgaggaaaactacactacttagaaggctg

SEQ ID NO: 371143 - DNA, 122 bp, Homo sapiens
gacgatggctccacggtcctgccgtcaacggtggctctcagagacaatgtggatcacctccgagatgactctgaaggcaggttgtcctatgacagctgataagacaatctagatggtgctgg

SEQ ID NO: 371144 - DNA, 122 bp, Homo sapiens
cgacgcccgaggagggaggggccacataccagggggccccagctaagcaaggccctgggacgcccccccttccccccggtggagcagcgccccctggagggcggggtgggagaggctgcggt

SEQ ID NO: 371145 - DNA, 122 bp, Homo sapiens
agatcccgctttcaaagcagcagcttggccaaggcctctgggggtaggagtgaagggcagcgacccccatgtgcgggtggaggggaggacatgagcagcactcactgcaaagctaaggcaaa

SEQ ID NO: 371146 - DNA, 122 bp, Homo sapiens
aaataggtgcctgctggtcatcacttctgcgatcatgctttcatctccactcaattacgtcgcctccgcgtacttctgggctgctggtttatcatgtaagaatataatttaaaagtgatccg

SEQ ID NO: 371147 - DNA, 122 bp, Homo sapiens
gtcttcctgttatctggactcaccaaaaatgagtccctgtaagacgaatgtaatcacacccgaacagctcatttcacaagataaggtacaagtttaatttcttttccctgatccattcattc

SEQ ID NO: 371148 - DNA, 122 bp, Homo sapiens
gcgattagctccagtaccgattagggctgaaaggagcttggccctagcgctcttgcaagccgggcctgaaagaggaagtcctgaaaatgcctctcgtttagctttgtcatcttacttgcgcc

SEQ ID NO: 371149 - DNA, 122 bp, Homo sapiens
acaaatgccgcaccagcctagggttgtgagcgccaaactattttgcaaactttgcaaaggcgcacggatttccaagacttgcagatctctcattcgccccatcctcccctcgcctggtccaa

SEQ ID NO: 371150 - DNA, 122 bp, Homo sapiens
aaggctgttggaccggtggtctgaagctgaggcgagacctgggaacccagtggacaggctcgtgagtcaccggagcatacaagacagacagaacctaaggggacagcatcctcaagtgaaaa

SEQ ID NO: 371151 - DNA, 122 bp, Homo sapiens
ctcggcgtccgtgatggcctacggggcttccgaggcgatcgggcagcatcagtcttcagccgctaagccgagaaggagtcagtcagagagcctcgggccagagttccaggggctcggggagt

SEQ ID NO: 371152 - DNA, 122 bp, Homo sapiens
gcaagtcgagggggagccaggagtcgtggggacgatcttcgagggaaggagaggggcatccgtagaaataaaggcacctgccatgccaagaaaggtcgtaaataggagtgagggtcccgggg

SEQ ID NO: 371153 - DNA, 122 bp, Homo sapiens
acgttgagcccaaatcagtttgaccttggggaacacagtgagcatccctgcgtggaggtacgcaggatccctgagggtgacaaccttcgaggtcgttccctggcctctctgcccagggtgag

SEQ ID NO: 371154 - DNA, 122 bp, Homo sapiens
agtcagaacccttcccacagctgggcacagagcacaggtggagtggcttcagccacccatcgactctcatggggagtaactccgtgctgagtgcccaggagctgaccctgatgtcagaacct

SEQ ID NO: 371155 - DNA, 122 bp, Homo sapiens
atcaaacgccgaccagctagcccattggcccgtacaggcgaatgcagaagacggtgtatacgaaagctgataacgtgtagggcttgacatttttatgcgtctgaattgaaatacatgaaatg

SEQ ID NO: 371156 - DNA, 122 bp, Homo sapiens
cagctggaccgggctgggccaaccgggagtcagctcgaactcacctgcttggcaggtgcgcgcttcccgaggcgtgacaagggagcgccggcgcggtgggtggggggcagagaatgtgaagc

SEQ ID NO: 371157 - DNA, 122 bp, Homo sapiens
gcctgcatcccagatgcaaatcagtaagaaccacccgagacagcgacagacaggtgacagcgagtgcctgcgtcccgggtgcaaatcagtaagaaccacccgagacagtgacagacaggtga

SEQ ID NO: 371158 - DNA, 122 bp, Homo sapiens
gccctcggtcgattacgcctctccagttctgctggggacgttctagccttgccccacccgcgtcgatctttatgttataccgtcactcccagtgccctaatggaactatccctccactcact

SEQ ID NO: 371159 - DNA, 122 bp, Homo sapiens
gcgcaggcggccccgggtctcaggcctcaggcggaccgcgccccgggctcgcagccctcccgccccggctgccgggctacggggcagatggactcggagcgccccgccggtgagtagctacg

SEQ ID NO: 371160 - DNA, 122 bp, Homo sapiens
gggctggttcccgcctctccaccttgtgcgggagactactttgagaacacccaacaacttcgcagcctaagaggaatgcacagctcaccacttccgctagatggcgctacttcccctactcc

SEQ ID NO: 371161 - DNA, 122 bp, Homo sapiens
atttggccaaattccaatatcagctcatggtacagcacaccgggggagggggacgggaggcgagaactaaggctttttaagaatgtgttgatggaagtatgtgcctagatcaaaagaataat

SEQ ID NO: 371162 - DNA, 122 bp, Homo sapiens
ctcggctgttcggcttggctacagggctcggctgttcggcttggctacatggctcggctgcgcggctcggctctgttcggctcggctcggctgctgggctcggctgttcggctcagctgcgc

SEQ ID NO: 371163 - DNA, 122 bp, Homo sapiens
gggtgggtcttggcggcccaggtcctgctggattggccgggtggttgacaggttggggcccgacacagggaccccggagccctggttctctctgaggaaggcaagtgaatgaaaaagaacca

SEQ ID NO: 371164 - DNA, 122 bp, Homo sapiens
ccagaagtcgacttctagatcatttctctccctaggtgttccaggctggtgatgtgccttcggaacgcccattctatcccccaaccttggtctccaacctgcccccagcctccccatgtgcc

SEQ ID NO: 371165 - DNA, 122 bp, Homo sapiens
gccaactcctcccagcctgggcaagttgccagtcatctgtgctcccaccatcctctgggccgagcctggcattctcattgtttacttctctgcctccttccccagactgaatgtcctgaggg

SEQ ID NO: 371166 - DNA, 122 bp, Homo sapiens
cttgtaccacagtgggtacctctgggaggggttcattcctggggaagaggcaaggtcagacgatggaggcctgggaaagtcaggaccacattccccaaacagaaacagagatacatggtttg

SEQ ID NO: 371167 - DNA, 122 bp, Homo sapiens
ccacagcctgctctgggtgtgcctgcgattttgatccagccattctagcggatctgtaatcgcgtctcactgggattctgatgtgccgttccctgtgggcgaatgatgctgggcatggttca

SEQ ID NO: 371168 - DNA, 122 bp, Homo sapiens
agagactaggtctcaaccttggaagggcatcagcatcaccccagcatcacctggtattgccgggccccgcccccagaggatctgattcgaaaggccagggtggagcctgagaatttgcattt

SEQ ID NO: 371169 - DNA, 122 bp, Homo sapiens
aggttcttaggtccttcacttcctgtttgccggcacttcaaaatccgggtcaaagggtgtcgcttcggtctcttctccccggctgatcccagcactctccgtgacagcgcctcctgactcag

SEQ ID NO: 371170 - DNA, 122 bp, Homo sapiens
cgctgtgctcgcggcggcagcggcggtcccacttgttgcgcagtgctggaaaccggcacgcgccattcgatgttgattcacagagggctacagaccagcctaccattgctccacgccatcca

SEQ ID NO: 371171 - DNA, 122 bp, Homo sapiens
gggatagcattgggagaaatacctcatgtaaatgatgggttgatgggtgcagcaggccagcgtggcacatgtaaacctacgtaatgagcctgcacgttgtgcacatgttccctagaacttaa

SEQ ID NO: 371172 - DNA, 122 bp, Homo sapiens
aggtgcaaagacgcgagcgtttgccccactaaccacagggtgtctgtcccgccaggggcgcggcatcggccacctctggctgtcgttagattctaagacccagtccctgctgcatcagagcc

SEQ ID NO: 371173 - DNA, 122 bp, Homo sapiens
tactgcatttacttgaaacagctgggtttacatgcagcataaatactgctttttaacattcgaaggcataagaagaatccagtatataagtgccacttttagataaatatattttgtaattt

SEQ ID NO: 371174 - DNA, 122 bp, Homo sapiens
cacgaacccaccaaaaggaagaaactccgaacacatccgaacatcataaagaacaaactgcggacacgcagcctttaagaactgtaacactcaccgcgagggtccgcgacttcattcttgag

SEQ ID NO: 371175 - DNA, 122 bp, Homo sapiens
ggctgctggtccgccctctgggactacgagacgcccaaggtgatcgtggtgaggaaccggcgcctgggggtcctgtaccgcgccgtgcagctgctcatcctgctctacttcgtgtggtgcgc

SEQ ID NO: 371176 - DNA, 122 bp, Homo sapiens
gtctggggcgacattggacacccatcgagaggaaagcacctccgaggttcctagagaggccggcttggcgacttggggagccggaagcccatcccgaggcacttcctgtccggtcattgttc

SEQ ID NO: 371177 - DNA, 122 bp, Homo sapiens
cccgcccgccgccccccacccactttgcagcagaaatgtgcctgggctttttcacgcgagcgatggaggatcctcttaccagatggagttcttgatcttgtgttgcagcgcgctggcctctg

SEQ ID NO: 371178 - DNA, 122 bp, Homo sapiens
gtcttcctggccttcgtcatcgtgttgctggcgcacaggctgcggcgctggcacaagtcacgcctgctgcaggcttcaggaggcagcttgacaggcatgcagagctcgcactttgtgggcgt

SEQ ID NO: 371179 - DNA, 122 bp, Homo sapiens
caccctccagatgaggaggtctccttccagaggcttccgctctcagctggtctcacatctcgcaggctcttcaatgcggaggccaagttatttataaaacttgcccatccccgactcttctg

SEQ ID NO: 371180 - DNA, 122 bp, Homo sapiens
gatttctgtttataaaagattgccatggctgcacattgcatttgggtcaagagtggaggccgccgggaagtaggacgctattcccgagtccggtcacaagatggcggactggtccggcagaa

SEQ ID NO: 371181 - DNA, 122 bp, Homo sapiens
cctccacctgggtctctgggtttctccctccttctctcagagtgactctttcctggggtccgtctccccccactcctttcctggatctctggtctctctttctctggcctccatccctctcc

SEQ ID NO: 371182 - DNA, 122 bp, Homo sapiens
gcaccaggctcgatgctgcatctcaggctctgtttcataaacaggaggattatttcagaccgatcagaggcggctgcattctgcaaattaccgtgtgctgtggctgcgctcacacattgcca

SEQ ID NO: 371183 - DNA, 122 bp, Homo sapiens
gcgactgtcccccagcgtgtgagtcaaaccatactccaggcctccaggaggtgtttgtcgcgacaacacctgcagagggcccgtgcggagtcccttagtgagcggaccgaaaaccgccaccc

SEQ ID NO: 371184 - DNA, 122 bp, Homo sapiens
ctgtttatgtctttctgtctctgacctgcagggggggtttcctgttatattcttttggggcggggtggggaggatcctttgtttaagtaaccaatctcccccttatgaggatccccacccca

SEQ ID NO: 371185 - DNA, 122 bp, Homo sapiens
ccggttcgacaggtaacaaataggtgggttgtcaccgttatttcccaacgcatgcgccgtcgctccccgggccaccccaagctaattagatcagatcaccgccccccacccccacccccccc

SEQ ID NO: 371186 - DNA, 122 bp, Homo sapiens
gcctcatgctagtttgttaaatgcaaaggctaccagacgaccatttagctggagaatatacggaaggctttcagacaacgcacaggtatagtgctgctcacagtgcaggatggtagaggact

SEQ ID NO: 371187 - DNA, 122 bp, Homo sapiens
ccggggcggtccggtctccgccctcacccgggtaggcccgcgtgggcggcgcgggagggccggcccggcaggcataggatcgaaaccctggagccttcccatgttctcctggccgcacgaga

SEQ ID NO: 371188 - DNA, 122 bp, Homo sapiens
tgtctgttgcataagatgcacggccttcaaatcaaaacagaagagtttgtcctcattaagcgacagggcgcagccagtaggcagccgcgggaggggtgtcctcgtgtctggcacggtggagc

SEQ ID NO: 371189 - DNA, 122 bp, Homo sapiens
cagaagttttgataaatcacaatatcctttaactaaataccctcaatgagcaggatgttccggttgtgattataatcacattttctcttcatgttctcctgaaagagtggcagtagggtctc

SEQ ID NO: 371190 - DNA, 122 bp, Homo sapiens
ttctgtctgccccatccaatttcccttgccctcttccacctctgtatttttctgtctgtccgtctgtctgtatcctgcctccctgcccctctcgctccaccccccgcaggtcgggcctgcct

SEQ ID NO: 371191 - DNA, 122 bp, Homo sapiens
acggccagccctcagggggcggtcacaagtcagcgcccaagcaagtcaagcgacagcgctcgtcttcgcccgaactgatgcgctgcaaacgccggctcaacttcagcggctttggctacagc

SEQ ID NO: 371192 - DNA, 122 bp, Homo sapiens
gtcagcctgctctgtgtgtcaggaagtccccagcctctctgatttgttcttgaggtgtgacgtacctgcagtccgacacgtgtgactgacagctggtggctccggcaggtggggtcttccag

SEQ ID NO: 371193 - DNA, 122 bp, Homo sapiens
acaaagcttttagtttccagcaagtttcatttgtaagaaaatacacacaattcacatatacggtgaccttgtaattctccctcctcctgcttcttttcccagcaaaaattctattttacccc

SEQ ID NO: 371194 - DNA, 122 bp, Homo sapiens
gcctgtgggggtgtctgcctggcactcaccggccggcttgctgacctgcaggaaggcctgcgcaccccggtggggctggctcccacaggcccagctcggcatccaggctgcagccatcttgc

SEQ ID NO: 371195 - DNA, 122 bp, Homo sapiens
acagcttcacagcgtcaccatccatggcacagagagggctgttcatgagcctcactcgaccgaaaagggtgaaactgcgctcaaacgtcctgtacaaggaggcctggaccatccatggcaca

SEQ ID NO: 371196 - DNA, 122 bp, Homo sapiens
ggcggccaatcagagctaagctccgcagcgatgagctcagccggctggtttcccattggacggctatattaagaaagtggccggactctttaaatagcgggcgctagggccgcagccctcat

SEQ ID NO: 371197 - DNA, 122 bp, Homo sapiens
catgtgtttctccgcgactacagacctcgggagaggagcggtgggcaacgtgtctgtgctcggtcgaatgcgcacactccagttaggccgctggctcggacctagaaatgtttccgctttcc

SEQ ID NO: 371198 - DNA, 122 bp, Homo sapiens
ctggcccggcttcggggttggggaacagcgcagggaggtgggtagccgggctcccaggcacgtgggtctctgcggctgcggcgggacccgggcactggcacccgggagcggcggcgacggca

SEQ ID NO: 371199 - DNA, 122 bp, Homo sapiens
gagcaactggagagtgaggagatcctcatccggggaagccccgcggccgcgtctctacagcgccccttctcgggctctggccctcccgctggttattctggacctgggggcccccagctggg

SEQ ID NO: 371200 - DNA, 122 bp, Homo sapiens
gccgactgggggcccggctctcggcggaacgagggctgcgcgccccgagcctcgagtccgcgctcctactccagctgggctcgcacggctgctgcaccttcgcgcctcctccctgtgcctgc

SEQ ID NO: 371201 - DNA, 122 bp, Homo sapiens
agggtagaggaaccagaggatcaaattaaggttctggaaagaaagagtcctcatgcaatccggctgtcttactgaggcctcacgttaaaacacaagcacatgagcagacaccctcacacttg

SEQ ID NO: 371202 - DNA, 122 bp, Homo sapiens
gcccggccatccgggagccacaaagggcagagagagtgcagcgccgcggccagcagccaacggggccgccagcaatgtggtttcaatctaattgtcccaaaatattgttacaacacaaacca

SEQ ID NO: 371203 - DNA, 122 bp, Homo sapiens
catcagcgctctgagagccaaccctcacaaaccggcagtctaaataaaagctgcgcttgccgtgcaaacactgcttcaaatccggtatccgagcccttcccatttgcaactgaaggccgccc

SEQ ID NO: 371204 - DNA, 122 bp, Homo sapiens
cgacgccaccatggtgtgcgtgaacgtcctggccgatgctctcaagagcatcaacaatgccgaaaagagaggcaaacgcccagtgcttattaggccgtgctccaaactcatcgtccggtttc

SEQ ID NO: 371205 - DNA, 122 bp, Homo sapiens
agcatccccgcatcctcccgcagtggaggacgccaggtggcgcctggagccatcggaggacgtagggaggaggggccctagggccgggtgaagtctgccggtgacccatgacgtctcgaggc

SEQ ID NO: 371206 - DNA, 122 bp, Homo sapiens
cgcagagtgtccttccttaggccatgtgtgattggaaggtggccccaactccaaggagagcgtggttggtcagacacaaacctggcgtgagtgtgcagggacgggggcatgtgtgtgtcagg

SEQ ID NO: 371207 - DNA, 122 bp, Homo sapiens
gccccccgcgattcggggagtaatatcacccccctctcccccgctggatattatgatccacggtggtcccatagcgtgtttacgttattgtcagtaatgtcttctccgcctctggaaattac

SEQ ID NO: 371208 - DNA, 122 bp, Homo sapiens
cggggagaaccagcaacccttatcccaactcctaaaagagctgcccagactcgtggcatccgtccttccctaagaagtcctctaaatggaccactgctgagtgttgcctgcctgacatcctt

SEQ ID NO: 371209 - DNA, 122 bp, Homo sapiens
aaaacatacagttaactggctctgcatttctctagctcaagttctttgactgtatatacccgagtttgaccttagaagatattaacatttcattcctttagcagttagaacaaggacagttt

SEQ ID NO: 371210 - DNA, 122 bp, Homo sapiens
ggcaccgcaatgtgtgaatggctgaccccctccccgtctcctggtgggatcaggaaccctcggggtatgctccgaaccgggacttcggtctcggtccagtctccatgggccccacacagcgg

SEQ ID NO: 371211 - DNA, 122 bp, Homo sapiens
taggggtggccctgctcacccagcttgtgccgctgccccgcgcttccttcccaggccctgcggtgtcctgtgttgctgtcaggctgtccgtgaactccggacgtggccctggcgggccgtgt

SEQ ID NO: 371212 - DNA, 122 bp, Homo sapiens
aagcatatcatttaagaattttcctgtgactgtggttttgcgtgcacgcatgtgtgtgcacgcgcgcgcacacacacacacacacacacacacacatcaggccagctttggctggacagagt

SEQ ID NO: 371213 - DNA, 122 bp, Homo sapiens
gaacataggccttaagcttgaagcagagagaatgaaagcagactgtattagattcctcctcgagcagaacggaatgcctgataacagccagccaggagctgggggagttaagagcagcgatt

SEQ ID NO: 371214 - DNA, 122 bp, Homo sapiens
ctgacagctgaaagatttctagaagtggtcccatgacttttttgttgagcttcaacatagcgtacacaagagttgtcttaacaagctgcacaaactcaggccgaactacgcagcacactgct

SEQ ID NO: 371215 - DNA, 122 bp, Homo sapiens
cggggcggagcggagcagagcaaagcgcacaggaggcccgcctctgctcccctcccccgccggcgaagattgacacagctcgagcacccgccccaaccaatgagcgcgtcctggggcgggcc

SEQ ID NO: 371216 - DNA, 122 bp, Homo sapiens
actttcagggtaaggtggatggtcttctctttgtcaatgccataagatgagaggcttctccgtggctttaagatcttggagcccagcaaaagaacctggtcctgcacaggaaccttggtctt

SEQ ID NO: 371217 - DNA, 122 bp, Homo sapiens
gttgctgcttgtccttccccatcctcttcctttctcaaaagaaatgatgtggggcagcttcgctgggggagaggagtctgtcccctcgagcaaggaccccactgccagccaagcttggatgc

SEQ ID NO: 371218 - DNA, 122 bp, Homo sapiens
tatttattccatcagtccatcagggctgcctggtgacccactggagccccatcttgattgcgcaaagttgcatcaatagggttcaggccagactgttgtctgcaagggtgcaattgggcctg

SEQ ID NO: 371219 - DNA, 122 bp, Homo sapiens
cctgtcaattcccaacagaggcacaggcccctgttttctcatctgtaaaatggggtgggccgagcgcagtggctcatgcctgtaatcccagctctttgggaggctgaggtgggtggatcact

SEQ ID NO: 371220 - DNA, 122 bp, Homo sapiens
cgcaagggcgtccccgcgaggacggccgcttcccgcaccgcggcgcccgggcgcgaatctcgggagccagccttgcagtgggggcttctcggcccccagactccacgctgcgcacgttcctc

SEQ ID NO: 371221 - DNA, 122 bp, Homo sapiens
ggaggctgggccaaccccatgcggagctccatcggccggggaggcgggaaacatgcccggcgtttcttcaggggcaggacgagatccctgacagatgtcgcgtggctctcaatcgtccttat

SEQ ID NO: 371222 - DNA, 122 bp, Homo sapiens
actgggagagctgggcttgactttctttgcgtttgcgggaggaatgccccccacgccgcacgccgcgcagctcgctgggcagaggcagaggcagaggcagcagcagtacgacccctccacgg

SEQ ID NO: 371223 - DNA, 122 bp, Homo sapiens
tcggtgctgcagatggccaagacgctgagcgaggtggactatgcccctgctgggcctgcacgctcagcgctcctcccaggccccctggagctgcagcccccccggggactgccctcggacta

SEQ ID NO: 371224 - DNA, 122 bp, Homo sapiens
caggagccactcaagggccaggcctggagacttggaacatgcagggtttagggcaacccccgccagccacacagctggggaaagggtttgctgcgaaatggtccactcttgcgtgcacttcc

SEQ ID NO: 371225 - DNA, 122 bp, Homo sapiens
cgtgaatgaatgtggggaagctgtttggcccgagaaggctcacagtcctcctgggcctgacgtcgtctccttctcttgagacgcctctccacccgcctgcataggttcctgtgaacgccaca

SEQ ID NO: 371226 - DNA, 122 bp, Homo sapiens
gaaggaggtaggacggggaaccgagcagcagcaggtggtggaatgccagggaaatccaaccgtgcttcccacgctggcatcgctctgattatgaccaatcctctaatcttattctcacaatt

SEQ ID NO: 371227 - DNA, 122 bp, Homo sapiens
ggggcttggacacctgggccctgcgggaggagggtcagagagcgcaggccccctgtggctcgcagaggttgggggtccaggtacccctttctgcactgacctaggatccctgactcttccag

SEQ ID NO: 371228 - DNA, 122 bp, Homo sapiens
ttcgagccgccgctgcagccccgggagcgagaagccgtgcggccgggcgtgctgcgttcgcgggccgagtacaccgaggccagcggcccctgcatcctcacaccgcaccgggacaacctgca

SEQ ID NO: 371229 - DNA, 122 bp, Homo sapiens
gacataaaaccacgatcctctttggtactacaagctaatcaacgttaatttttcacacaacgactgggaaaatctgcctacaggaagatgccaccctgggtggcactggtgtgccgggaggg

SEQ ID NO: 371230 - DNA, 122 bp, Homo sapiens
tgcggtcgaccctgcggggaaccggtgggaaaactgaggtccctaaacacagattcggagcgccctcttccagttggcagctggatgccagccagagctatgctgtgcccttgccctgagag

SEQ ID NO: 371231 - DNA, 122 bp, Homo sapiens
tgtgcataaaatgggatgaactgtgaggcctaagtgcgagtatgtgactggtaccttacccgggcctggtacacagtaggggcctcagggtgggagaagcaggtcctaggttttcccagccc

SEQ ID NO: 371232 - DNA, 122 bp, Homo sapiens
aactggctcacgcctccccttcagcttctcttcacgcactccaagatctaaaccgagaatcgaaactaagctggggtccatggagcctgcacccgcccgatctccgaggccccagcaggacc

SEQ ID NO: 371233 - DNA, 122 bp, Homo sapiens
tcactgctgtcctaaaatgtgacttgtgtcaatacatatttactattatgtaaactggtacgtttttcttgtaggtgagcttattggtcatatctgggtagtccattcagtacctaggtgcc

SEQ ID NO: 371234 - DNA, 122 bp, Homo sapiens
cacaggctaaagcccagagggcggatcccttcttcagcctcgggggcctgcaaggagctgcggtgtcgcaaccaaaccagggcccctgccggaagcggaagccagcacgcagggcggtgggg

SEQ ID NO: 371235 - DNA, 122 bp, Homo sapiens
atcaccccccccatccatgtgcagaagcgtaactgcgtgtctccccagcaactgcttagtcgatgccagtttgcaggtagagatgctggcattttactgctgaaacccagagctagattttc

SEQ ID NO: 371236 - DNA, 122 bp, Homo sapiens
tccacggttttataagggccacaagaggccatctagcccaaaacagctaactttccaaaccgaaactagttcagaggaaatcactgactcaggtcagctttttattaaggaaattaattttg

SEQ ID NO: 371237 - DNA, 122 bp, Homo sapiens
tgtctcaatgaccaatcaaatttcgccttacattgcatcgctgggataaacggagctggacgactcagtctcttggtctgtggctgctgcggttacctggatgggcgagcacctctgaggct

SEQ ID NO: 371238 - DNA, 122 bp, Homo sapiens
aggggaggggagacttgtaaacatgagtgcaattttcctctggtttccccagaagttgcccgtttcctgggccattcctctccaggcagccctcgggagttcccgccgcaccgaccccagcc

SEQ ID NO: 371239 - DNA, 122 bp, Homo sapiens
agcatgtcctgttattccaaagagaatggagcaaatctctctgttagtattaaccaattccgcacttggtaaccttgtctagtacagacagctggtgtcattttgacacctggggccacaca

SEQ ID NO: 371240 - DNA, 122 bp, Homo sapiens
tgaggggataattgtctgtcttcccaacctcggctgcccagcgcctgcacatagtaggtgcgcagtaagtatgtgtgggatggacgaacaaatgaatgaatgaatgactctctgtttccccg

SEQ ID NO: 371241 - DNA, 122 bp, Homo sapiens
atagcatgctactgtggttatccccatctttcggatgagcacatccaggtttaaagttgccgtcgcctgccaaacagtggcagagccaggattcgagccttggcagttgattcctagggtct

SEQ ID NO: 371242 - DNA, 122 bp, Homo sapiens
agagtattcaataattggtagctattctctctcattgtttagcacatcaccttatacctgcgtagcactttgcagagcacttaggaaacaggcagcacttaggaaactataactatggagca

SEQ ID NO: 371243 - DNA, 122 bp, Homo sapiens
gttcccggcagggaaatgtgttcctgtcactttttggggtgattgggccttggtacatgtcgtcctaatgacataccaatcccgtgaccccctacagttaacacaattttctgaatgtgagg

SEQ ID NO: 371244 - DNA, 122 bp, Homo sapiens
cgttccccgccgcagcgccggagcgtccagccagaatccccctgcatgcgcagcccctggcgtcttacgtcccacaggccccaccccggcgccttccgtcccgcaggctccgcctttggcgc

SEQ ID NO: 371245 - DNA, 122 bp, Homo sapiens
ccccggcagctaaagggcatcccgggctttgaggagacttctctgcagctctcactcccacgctcggtgccctccctcccctagcccccccacccccgcccccgggaactgagaaagtggat

SEQ ID NO: 371246 - DNA, 122 bp, Homo sapiens
cgacctggactcagacaaggtgagggcctcacgggccagcccggagggtcctggccttcccggcctgcggctcctgcacacgccctgcttcgtgcggaggagacttcagcgggagcgggcga

SEQ ID NO: 371247 - DNA, 122 bp, Homo sapiens
gtgcgtgcccgcgtccgcgcccggcgcaccggaagcacagcggacgccactgcgcacgcgcggccccttctaccgtccccgactccgcggctcttagagggtgggctgtgtcccggctgcgg

SEQ ID NO: 371248 - DNA, 122 bp, Homo sapiens
ccgcttctgaacggtgctcaggccttggtgcccttgggctgcccgggctgcgggcctgagcgccgtttctatttgcagctcagctggtgctccctccctggcccacggcggctttcccacct

SEQ ID NO: 371249 - DNA, 122 bp, Homo sapiens
ctggcctcccaatttctctggtcgatgtcctcagctctgaggtcggggctggcggggcggcggccgggtcgatgtcttcagctctgaggtcggggctagcggggcggcagccgagcactctt

SEQ ID NO: 371250 - DNA, 122 bp, Homo sapiens
tgagcagcgtctctgcctagccgcccattgtctgggatgtgaggagcccctctgcccggccgccccgactgggaagtgaggagcacctctgcctggctgcccccgtctgggaagtgaggagt

SEQ ID NO: 371251 - DNA, 122 bp, Homo sapiens
tctggtggatggttttcctgttcttttgtctttagtttttggtctttttgtgagtatctacgtacactcaattgtgagttcttgtcattttatattatgtggttcatttacttatttaattt

SEQ ID NO: 371252 - DNA, 122 bp, Homo sapiens
caaatgtgtttgattcagttgaataaaaggatttctttttctctttttctagaacaatgccgcagaagaggttgaagaggtaaaaaataaataaatacataaaaagcaaacaagcggggaca

SEQ ID NO: 371253 - DNA, 122 bp, Homo sapiens
tgacagccgggaggaatgaaaaagtcaccgaacgcagggtgtgtggtcacaagtacacaacgtgcagatggtgggtgggtgggagggggcccaaacacgcagcagaatccggagttggcttc

SEQ ID NO: 371254 - DNA, 122 bp, Homo sapiens
taagcggcctcaccaactcggttgcgcaaaccgcgctcctggctgagcggccgctgtgcgcgccccgcctgctggaccacttcatctgtgagctgccggcgttgctcaagctggcctgcgga

SEQ ID NO: 371255 - DNA, 122 bp, Homo sapiens
tcacaccaatcacagttggtagctatgtagtattttttgacatttgtctttctaactagacgatggacttattgagacaggagcctgttttgtaccccagagtgtctagcacctaaacagtg

SEQ ID NO: 371256 - DNA, 122 bp, Homo sapiens
tttgtgttgctgtaacagaatgccacagactggtaatttataatgaacagaaatgtatttcgctcatggttctggagtctggaagtcaaagaacatggccagcatctgatgaggaccttcat

SEQ ID NO: 371257 - DNA, 122 bp, Homo sapiens
actccatacagactcagagtcctggttgcacatgtcccacgccatccagctcctgaatgacgccagtcaagctttttcaactccaatccacagtgacacagagcacacactcatgcaggcaa

SEQ ID NO: 371258 - DNA, 122 bp, Homo sapiens
gacccggggcgcccatggagttggcgtcggagcaacagctgcgcgggcggagcaggtaggcgcgctccagtccctgcagcccgagcggggttcagcgaacgggtaacgggagaatgcgggcc

SEQ ID NO: 371259 - DNA, 122 bp, Homo sapiens
ctggtacccgttccacgcggacctcaggatccatccagacatacagaatcagaagctcagcgagaagggcctgaggatgggttttcagaaatgtgggaaaccttgcttgaaatgggtttggc

SEQ ID NO: 371260 - DNA, 122 bp, Homo sapiens
gctcctctgagggacacggcctccaagagctggctctgccctggccgccctccacagtcacggcggctccccgcatgctcctcgggacggagatctcctggcttcctcccgcttcctttcct

SEQ ID NO: 371261 - DNA, 122 bp, Homo sapiens
tgaagtaaacccctttggacttgagggactgggggaagcccaggcagggtatgatcatgccggctgcattgagcgtcagcaccagcacctggacgtcgggcttttcaaagaactctgtgaac

SEQ ID NO: 371262 - DNA, 122 bp, Homo sapiens
agccagaagataagtatggggtctcactatggtaattgtagtcagggcacaccttttgcacgagtttataatcaacactgtaaaaggcaatgtaaatgcaaatgaccttgaagggcttggag

SEQ ID NO: 371263 - DNA, 122 bp, Homo sapiens
atggaaggacacacccaggttcacacggaacgtcgtgggaaggacacacccaggttcgcacggaatgtcgtggaagcacacacccaggttcatacggaacatcgtggaagggcacacacagg

SEQ ID NO: 371264 - DNA, 122 bp, Homo sapiens
gcagctgcgagtagaggccggtgatgctgctatatactctacgatgcacagggcagcccccgccccgccccgccccccaaccaccacaactaagcactacccagtccaaaatatcaacagtg

SEQ ID NO: 371265 - DNA, 122 bp, Homo sapiens
ctaccacgtccagccaggtgcaaagaattttgattggttaacagaaagcttgcctctatgcggtttggatacataattagccttgttacaaattgaggtaagactggattctaggagatgct

SEQ ID NO: 371266 - DNA, 122 bp, Homo sapiens
ctctgctgttcagaatgggcagatgggcagttcctatcggtccatctctgagttcacgaacgcgctcctgtcgcctccattctgctgctgaccttatatccattaagtttttctttccatta

SEQ ID NO: 371267 - DNA, 122 bp, Homo sapiens
atggtacataaatgggctcctgtcagcaggagaaattctctactgatgcagtgcctggggcgacagaggctcatgctgccaaaggcgaagtgggctaaagtaaaggcttcacactgatggac

SEQ ID NO: 371268 - DNA, 122 bp, Homo sapiens
agccgggcgtggtggcgggcacctgtagtcccagctactcgggaggctgaggcacgagaacggcatgaaccttggaggcagagcttgcctccaagctctgccactgtactccagcctgggcg

SEQ ID NO: 371269 - DNA, 122 bp, Homo sapiens
aatggaaaattaattgataacacaatcttatttcaatttactttttatttttaacttaaacgactgtgtattttccacagtcttatgatgagaaaggctccagaatcacgtgtaggtgtcct

SEQ ID NO: 371270 - DNA, 122 bp, Homo sapiens
catttccaccgtggccagtgtggtgtcgaagccgggccactgcctgtgggtcatttccaccgtggccagtgtggcgtcgaagccgggccactgcccgtgggtcatttctgctgtggttggtg

SEQ ID NO: 371271 - DNA, 122 bp, Homo sapiens
gccagctgcagccacggccaataggcgagagacttcttgtttcctggcagagcggggtcccggcaccgcggcgctcgggtgtttttgggggcccgggtggagggcccgggtgccggggccca

SEQ ID NO: 371272 - DNA, 122 bp, Homo sapiens
ttgaaaactttcataataaaaatgttgggggaaaaaaaagctccatgacagcagtgtgctcggtgtttctgaggaccagcagggaggcagcatgactcactgaatgtacaaggagaggctag

SEQ ID NO: 371273 - DNA, 122 bp, Homo sapiens
ggggcggaggtctgacgggcccttcccgtgctctgtgccgcaggtggagtatgcctacagcgacaacagcctggaccccggtgagtagctgccccatcttaagctctagagggacactcccg

SEQ ID NO: 371274 - DNA, 122 bp, Homo sapiens
aactaaaatagctcaacccttaggggtgcttttagagatgttgtggagactcaaagaatccgtgctgattttggtggcaatttatgagcactttgaaaggatagatgtgatcagtggtaacc

SEQ ID NO: 371275 - DNA, 122 bp, Homo sapiens
atcatccagtgtgtgggaagtccaaatggagcacagaggcggagaaggggcgaagttactcgccctgtgtgatctggaacatccatcctctccggcctgcaggcatcagagctcctgggccg

SEQ ID NO: 371276 - DNA, 122 bp, Homo sapiens
caccagccccatgtctctatcatcagggacccagaggttttccccagtgcagatttagaacgatacctccagtcctggctgttgcattggtgataagtgatgtagctgaggcagactacttg

SEQ ID NO: 371277 - DNA, 122 bp, Homo sapiens
tccaccaccgcccgggcgtaggtgacatgcagcaggtgctgtgaccgctcgtccatttctcgcaggctcaagggcccggaccacttgctgaggtccaccggcatggcaaggccaagcagagc

SEQ ID NO: 371278 - DNA, 122 bp, Homo sapiens
tcttagatgtgcaaattgaaaggctgtctggcaaggagatgtcttacttaactagaccaccgccccccaacaggaatgtctccctctttgcggcctctgtctcagaagagctgcgaggaacc

SEQ ID NO: 371279 - DNA, 122 bp, Homo sapiens
gttgcagtgagccaagactgctccactgtgctactatactccagcctgggtgacagagagcgactccatctcaaaaaaaaaaaaaaaaaaaaaaatatatatatatatatatatatatatat

SEQ ID NO: 371280 - DNA, 122 bp, Homo sapiens
gaaaatggccataagtggagtccctgtgctaggatttttcatcatagctgtgctgatgagcgctcaggaatcatgggctatcaaaggtaggtgctgagggaatgaaatctgggacgatagac

SEQ ID NO: 371281 - DNA, 122 bp, Homo sapiens
tcctggcagcccttgaggaagcaaagtccccagagggccctgaagcagccacagtaaagccgcgtccaccagcagcagggaggtccagggtctcaggtcagggagccgcatggctctgtcaa

SEQ ID NO: 371282 - DNA, 122 bp, Homo sapiens
aataaggtgctgtctaataattatctcaaaagtaatgccagggctggatgccgtggctcacgcctgtaatcccagcactttaggaggccaaggtgggtggatcacctgaggtcaggagttcg

SEQ ID NO: 371283 - DNA, 122 bp, Homo sapiens
ttagatgcaagtgtgaggggaagaaaaaacaatcaaaggtagcagggattctcctaaactcgcctagaaggataactgctgaaacaaaactcagcaggctaaggacaatgaacggctagaac

SEQ ID NO: 371284 - DNA, 122 bp, Homo sapiens
tggtttaaaaatctgtgatagttcctcctttgatcgctctctctcctgctgcaagcaagacgtgccttgcttcgcctttgccttcctctatgattgtaagtttcctgagggctccctagcca

SEQ ID NO: 371285 - DNA, 122 bp, Homo sapiens
ccaagtccaagaatagtcgtggcatctcggggcccttcctctcgggcttgggggggtccccgtctccgctgagtgccgtgtctccgccggccctgctgtctggggccccgggctctccctcg

SEQ ID NO: 371286 - DNA, 122 bp, Homo sapiens
gggtggaaaaggcactgagcatgctcggtggggagggcggggcgctcgtgggctgcgagtcggggccggagctcttcaggccggctcccgcgcctccgccgcccgcccgctcggagccgcgc

SEQ ID NO: 371287 - DNA, 122 bp, Homo sapiens
tattcttgtagagaagatgggaggcctgtgttacagtgggaaacacagaagcctgggaatcgaaagatctgggctgggtcctgactccatggctaattatgttgtcactctgtacaagtaac

SEQ ID NO: 371288 - DNA, 122 bp, Homo sapiens
gttgcagtccccgcgccctccaatggctctggtcgcgacttcccgtccctagtatgagctcgggtactagaacctcgcgccccgcctacaacttcggctaacccccctcggacccgccccct

SEQ ID NO: 371289 - DNA, 122 bp, Homo sapiens
ggagccgaggagcgggggcgtccgcagggaggtcagctctcctgggcggaggtcctcgggcgcagcgccctcgcctggaaaccagccgtcgcccccgcaggagccagccggcccgtggacgc

SEQ ID NO: 371290 - DNA, 122 bp, Homo sapiens
ccaggacacccagacagagtggggcacaaaaatcgggtgggacatgtctcttctctcagccggagtcccactccacgtaggcacagagatcccgaacgggccctcaggttgtgagaaacaca

SEQ ID NO: 371291 - DNA, 122 bp, Homo sapiens
gtgggtctggataaccgtttggaggaaatcaattagggcttgtggcttttcgctctaggacggggtattgttttcccagttgagaaggtcggcagaggtgaagggctggtacacaaaaacac

SEQ ID NO: 371292 - DNA, 122 bp, Homo sapiens
gaactgagctaggggaggagggggagtgttagggaaagaccccaactgcagtgccagacgcgcaggcagctctgtaatgagcaaaggcacagaatctcaactttacaaccgacctttccagc

SEQ ID NO: 371293 - DNA, 122 bp, Homo sapiens
atctttgttctgaggtccctgtgtgtctctggaattggctggcattctccattcaggtcacgccttcccctgcctgcaacagatcccctctccccctctctccctctggcttttcctctctc

SEQ ID NO: 371294 - DNA, 122 bp, Homo sapiens
cacgtgacggccgctataagagcgcacggggcagacgctcggttccccgccgtgcctcctcgctggccgcgctccctcccggtgccggcttctctgagtcaccaacctgaggctgccccggc

SEQ ID NO: 371295 - DNA, 122 bp, Homo sapiens
tatgtgaggtgagaggcatggcctctgccaaggcctggactcaggcgagagggtcagccacgggtccaggactcagggtagccccttggcacactggaagggagtggcctggcaccattgtg

SEQ ID NO: 371296 - DNA, 122 bp, Homo sapiens
cctgcatctcggagaagcgcattttcccagagctggagctgggcgggcaagaacaccccgcgtcacaggacaagccccaggcacctctccaacgcgggctcaggggaagcggtgactgcgga

SEQ ID NO: 371297 - DNA, 122 bp, Homo sapiens
tttgggtggcgttctccagctctagtgcagacaattagcatgatttctccactctgggcacgtcccctttgtaccactcggagtttctctgcccgaacacaaccctgccaacttccctctga

SEQ ID NO: 371298 - DNA, 122 bp, Homo sapiens
gcagggccccggcctgagctcctggccaccgggaggtcacagcatctccgccggcggggccgcctcacccagcgcttcgctgtgcttctctgcaggcgtctgcaaagtcagcacagatctgc

SEQ ID NO: 371299 - DNA, 122 bp, Homo sapiens
ctcttaacaatgaaagctacaagcagaagagaagtgtgaccttaaaaacttccacacagccgaagaacagtggcagaacagactgaagcacgtatcttcgcggaacagaagaaaacttccac

SEQ ID NO: 371300 - DNA, 122 bp, Homo sapiens
cagaggcaagataagcacagaagaatagctgagagcagcataaggcaatatctaatcatgcggacattatacctacagggatgctggggaggaaagaccatggtgggtgaggatggtttaga

SEQ ID NO: 371301 - DNA, 122 bp, Homo sapiens
accactggctagttagagattgtgaatgtacagctgcacagggcacagcaattaatgtttcgggtgtggatgccacagacctgaaatgctcttctgacatgggtgtggccaccaaataagaa

SEQ ID NO: 371302 - DNA, 122 bp, Homo sapiens
tgcatcgggcagaagttcgcgatggcagagatgaaggtggtcctggcgctcacgctgctgcgcttccgcatcctgcccgaccacagggagccacgcaggacgccggagattgttttgcgtgc

SEQ ID NO: 371303 - DNA, 122 bp, Homo sapiens
ctgaaaggaaggtggaaaactaaaaagatcaacaagggaaggactgcagacagaatatcgcgaggtattggtcagccaagatggcttctaacactggccgccacacttaatatggcggccag

SEQ ID NO: 371304 - DNA, 122 bp, Homo sapiens
agtttcttcccgggtgggcgcggacaggcccttacttgggggcggtttagaggtgggacccggctagccggcggttcaggtggccggacctgctggaagggcgggcgtgggggatgggacgc

SEQ ID NO: 371305 - DNA, 122 bp, Homo sapiens
gaaaatagggaatgctgtttttgaggtaatattaataatacacagaattttcattagtgtcgaaggatctaaaaagacaaagtatatcatgggaataaaaaaagatagaaaaggaaacagtt

SEQ ID NO: 371306 - DNA, 122 bp, Homo sapiens
agaagaggattgctcgaggaggcctggggtctgtgaggcagcggagctgggtgaaggctgcgggttccggcgaggcctgaggtgaagtgaagggaaaagagctgagctcgctggaggtctga

SEQ ID NO: 371307 - DNA, 122 bp, Homo sapiens
tcacactatgctccagaaactggggtctttatttctggcgagacaaaacagtaacacttgcgtgactctgtatcaggcatttttctaaacattttgcatatattaagtcatttaagaaccct

SEQ ID NO: 371308 - DNA, 122 bp, Homo sapiens
ggagctgctgtgcaaggtgtacagcgatgcccagccccacatccagtggctgaagcacatcgtcatcaacggcagcagcttcggagccgacggtttcccctatgtgcaagtcctaaaggtaa

SEQ ID NO: 371309 - DNA, 122 bp, Homo sapiens
gaagagccacatgaaatcaagaggagacactttggcgttcttcaagcagaactgaggctgcgaaaaatccaagtctctacagagacactgatgaagttgaaagggtaattgtttttccatgc

SEQ ID NO: 371310 - DNA, 122 bp, Homo sapiens
tcttctaaaataaaagcccatggctaaatggagactgtttggttcacccttaattgccaccgtaacacagtgcctgttgcctggtaaataactgctggttaataggctgcagtgctatcagt

SEQ ID NO: 371311 - DNA, 122 bp, Homo sapiens
ctgcaagactgcactggaatcttaggtctcctttcgtcgcctaatcttagcagatcctttcgtcgcctaaatggtaagagcgacttgtaccgacagtccctcggcaatttccggaagtgttc

SEQ ID NO: 371312 - DNA, 122 bp, Homo sapiens
aatagaaggaattttcgtggatataatctacaaccgattttgctctgcgcaggtaagatccgttttcagaccaaaaccctgaaaacaagcgcagccagtcaagcgaacggaagcgcaggccc

SEQ ID NO: 371313 - DNA, 122 bp, Homo sapiens
gcatctctaataacaaaagcctccagctgtgaaaagtggagctaaatctctctaccgggccgcagcatctctcaagaaccttttccccgcagcacccgtcaaggcccagggccagctggacg

SEQ ID NO: 371314 - DNA, 122 bp, Homo sapiens
gggaggactctgagggtggatgtgtgtggagcacagagtacaaggcctggcttgcagactcggcccgtgtgacactgatctcaggtgggtgcaacaagtacacagcctgacttgcacacttg

SEQ ID NO: 371315 - DNA, 122 bp, Homo sapiens
gtcaggcagcagcaccagcaggctcagctccttcctggcgtagggcagctccagcagctgcgcgcgcacctcgcccacgtgggcgagcttaaacgtggcctcctgatacatcatctgcactg

SEQ ID NO: 371316 - DNA, 122 bp, Homo sapiens
gcatcttgcccatgtgggagagtaagggagtggaggccacacaagcggcagggaggaggccggagatctgattgccccccaccaaacaaggatacccagtatgtgctgcagagacccaagag

SEQ ID NO: 371317 - DNA, 122 bp, Homo sapiens
gagccaggaagaagagttagggaagatatgggagaagacagttctagggagactgagtgccgagaacctctgaagcatgcaaacccagaagaggactgaagcatgcaaacctggaagaggac

SEQ ID NO: 371318 - DNA, 122 bp, Homo sapiens
taaataactcgtgccctttttacaacacagtgaaaactcagagtctatcccagtaatcctcgagtggctaacattttagtcattctactccaatttgctgttatttgttggcatctctggct

SEQ ID NO: 371319 - DNA, 122 bp, Homo sapiens
tgaggccaggagttcaagaccagcctgagcatcctagcaagacccccatcgcttaaaaaacgaagtttcagatgtctttccatgtatgtactcagggcctggcattgtatctggcctgtagg

SEQ ID NO: 371320 - DNA, 122 bp, Homo sapiens
gctctgaagacttaacttcctcctgcgggggagaaatgaggtcagtttcctccccagattcggttttgaaagcatgaggagaaagcttccctttgtcagcaagctggtttgtgtcagccttg

SEQ ID NO: 371321 - DNA, 122 bp, Homo sapiens
cattttggggcagaaccgtggggaggcgttctgactggagagaactgttgtgcccaaatccggaagcccagggtgtggccaagtccggctttgcgctctcctctgcaacttctactgccgac

SEQ ID NO: 371322 - DNA, 122 bp, Homo sapiens
gtttaaggttgtctaggagcaaggagaaagactctcctttgcctcaaggctctttagcatcggaaaagcccctttgctagcttttccatgtgagtctgagctctcatgaccatgttcattgc

SEQ ID NO: 371323 - DNA, 122 bp, Homo sapiens
aatttctatggtgtcctaaagggggctgcagcaggggtgtgacaacggtgggattgttggcgttgcttctttgaccttacaatatcctcaacaagcattagaacaacttctgccatcttctg

SEQ ID NO: 371324 - DNA, 122 bp, Homo sapiens
accagtgcttttaagcccttttttcttttttttccattaggaatcctttttgaaaatctgcgaaaaactatgcattttcattattcagcaaacacatgtgtacatatgtatatacacataca

SEQ ID NO: 371325 - DNA, 122 bp, Homo sapiens
ggctgagatttgctccggcaccctacgcgcctgacgttataatgcacctggggtgggctgcgacctcccagctgagccttgttcctcgaagagacaggagactaagagacaatgagctgagt

SEQ ID NO: 371326 - DNA, 122 bp, Homo sapiens
gaactgcccaactctccccagctcccccaaacccgctttgtccattaaacaatcgggaaacggagaaaaatatttgcagacacaatgtggtctgaggttgatacattcttatctagagtaga

SEQ ID NO: 371327 - DNA, 122 bp, Homo sapiens
cggggcgggaggcagaaggagcagggctggctcccgctggggacgggtagggcttgcagccgcgaccccaccccatacatttcctcctgtcacgctgtccccggaccgccagtccgggaagg

SEQ ID NO: 371328 - DNA, 122 bp, Homo sapiens
tagaggaaggagtcctgcctagagatccacgagggctagaattagctcattcatcccctacgtaccagggggcaccatgctgggcgctggatgtgcagaaatgaacaaacaggccggcctct

SEQ ID NO: 371329 - DNA, 122 bp, Homo sapiens
ctcttttgtttccagcgccttgcgtctcagtgcgcctgtttaaggatagcctcagagctccgcccaggctacctgctgttctgacaattagggaggcttctgaacttggtttgttcttcggg

SEQ ID NO: 371330 - DNA, 122 bp, Homo sapiens
cccatggccgatttcttgtgaaatctcctaacttttaaatatttccaatcaaaagactgccgttcaaatgcagcccaccaggagcatgtttgcaaactctggagtaaacaagagtgggaagc

SEQ ID NO: 371331 - DNA, 122 bp, Homo sapiens
gaggcgctctcccgcgcagacaggactgatggagctgctcacccttcgggcagagcgaggcgagaacccaggcctctgtgcccacagagaagccgatcgtgctgcctcaggggaagggaaag

SEQ ID NO: 371332 - DNA, 122 bp, Homo sapiens
cacttagctgaaggcctcctgcgtgtttcccccactcccaccccatcccagtggactgtgcgctcccggagggcaaggccctatctggtttgaagtcccgtacatccccagagcctagccac

SEQ ID NO: 371333 - DNA, 122 bp, Homo sapiens
agcacccctcccactccacgagcacccccacccgcctcatcccactgcctccctcggagccggagccgtgcgccaccctgcaggttcccgtgctccgagccttcgttctatgcgggctgcgg

SEQ ID NO: 371334 - DNA, 122 bp, Homo sapiens
cgccccgccgggtattgtagagatgaatactactgccactggccaaggccaagacctgggcgttgggggagagggccaggcggcacggcgcggcacccgccgcctcttcaaagcggcctgtc

SEQ ID NO: 371335 - DNA, 122 bp, Homo sapiens
gtacaatctctatatacaagctgagacctttccttttgtctactccaagccttccccctgcgtatgtgggattgagggtcacatcattggcactagtgagagggtagtcagtagccacttct

SEQ ID NO: 371336 - DNA, 122 bp, Homo sapiens
cacagaagacagctcaggtggggcacacactggcttctaacacctagttgacccaggcctcgcacacacagaccctgaagggtggtctatggggaaggggctcctggaccgcccccggcttg

SEQ ID NO: 371337 - DNA, 122 bp, Homo sapiens
tgcactgggcccacctgacctccagccgggccccctcccaccatgcagctgcccctcccccgcccccatctcctgtcactgcccccggagacactgggaacaaagtgaaaatcttgctccaa

SEQ ID NO: 371338 - DNA, 122 bp, Homo sapiens
cggattccacagcacacacgccatgcgtccctgctgtccggtagagggcagtagcggccacgctgcaaccctgagaagtggcgggtaccttaggatcctttctgattgcagacgtggtccag

SEQ ID NO: 371339 - DNA, 122 bp, Homo sapiens
ctcaaacttggtttgtctgcccgacttagacatgcctacagcaagacgaccgatgcactccggcttcactgtgagttttgtttctttgtcgccaaattgccggggcaatggaactgtgtgtg

SEQ ID NO: 371340 - DNA, 122 bp, Homo sapiens
gcgggaccccgacgcaccaaggccggcgaggggagggcgtaggggtctgagatttgcaggcgtgggagtaaaggggaccgcaaactgagctagccactcgcgcccccacggggctgcctttg

SEQ ID NO: 371341 - DNA, 122 bp, Homo sapiens
aacgagcagggctcttgctaccacgttgaatggaaaaataaaagggaggcatttggtaggcgaggggtctcctagcagctgaatcaatgtaacttaagcccgatcgccggctgcattccctg

SEQ ID NO: 371342 - DNA, 122 bp, Homo sapiens
aatgaatgtacaggtgatagtcaacacagttaacagcagtggagcacgagcactgacagtcggaaagggagctattctaattttacaggtaaaggatctgaacagacatttctcaaaagaga

SEQ ID NO: 371343 - DNA, 122 bp, Homo sapiens
tagttttcatttcggttttatctgttatttatttgctgagactttctgttttttttcaggcgtttagtaattgcttgttgaaacattgctggatcttatggtaatactatgtttagttttgt

SEQ ID NO: 371344 - DNA, 122 bp, Homo sapiens
gcacctgtgaagccctggcctggcttcagagtctgctggtgagatgacatcaaaacccttcgtgtaggagggtggcagtctccctcccttctggagacaccaccagatgggccagccagagg

SEQ ID NO: 371345 - DNA, 122 bp, Homo sapiens
ggaaaggaaattgcagcagtgcctgtgtgcgtgcgtctgttggcaaaacgctgctaataacgtcaatgcccatccgctattgaataaacctgctttactgccactatggaataccaaactgc

SEQ ID NO: 371346 - DNA, 122 bp, Homo sapiens
tgctgattctccttctccatgtgacgtgtctctcaacccacaccagctaggggagcctcccgcagcttcagttcccctttgacgcccacacagtgttatgcaagcaccgagcccagagtccc

SEQ ID NO: 371347 - DNA, 122 bp, Homo sapiens
tcatcccacacccagcctggccccgaacaccgtggggcttttgttcggggccccgcacaccggacctcaggattccatcctcccagaaccatggccacagaataaggtccgccaagatggat

SEQ ID NO: 371348 - DNA, 122 bp, Homo sapiens
cgccgaagagttgagcgcctgcgagttggacttggaggacgagaggctgagcgagcggcacgagtccccggccccatacccggagtccaaggtcaagtcctccagcgtcttcagagtcgagc

SEQ ID NO: 371349 - DNA, 122 bp, Homo sapiens
tccggcgccggctcggcagatgttccgcctgcgcagagctgagcataggcgccgtgtgagcgccgattcacccaggcccgagcgcgaggcccaagcggggtacccggcgaagggcgtgcgcc

SEQ ID NO: 371350 - DNA, 122 bp, Homo sapiens
cctcccagccagtctcttctctcctgcacccccaaccgggagccctggaccatcccgtagcgaagtgccatgggctcccatcctgcacccccggctcatctctgcacagggcagtgaagggg

SEQ ID NO: 371351 - DNA, 122 bp, Homo sapiens
aatatcgaatgttacaacaatataaaacatcacttacagtggggaattgtcatttgataacgattcagttttacgacaggtcacacatgaacatacccactatcaaggtgatgcccatgctg

SEQ ID NO: 371352 - DNA, 122 bp, Homo sapiens
tccgggtgattccagcttgcagccagggccgttccagcaactccaaggctggctggtgtgcgctgaagctgtcgggagtcggaccagctgcacagttaatacatatgtgtcctaggctcctc

SEQ ID NO: 371353 - DNA, 122 bp, Homo sapiens
aaagcactttatatatatttgaattaattctgtaacacaatccttaacagttttaaggctcgttttaattttttttttcttttttgagacagggtctcgctctgttgcccagtctggagtgc

SEQ ID NO: 371354 - DNA, 122 bp, Homo sapiens
gttccgaagttttcatcacctttatcccagcccttagcccaggtcctagcacgtggcaagcgcattaaatgcccgataaatgagtaagcctggcaagacaggcgccaggtaagtttccaccg

SEQ ID NO: 371355 - DNA, 122 bp, Homo sapiens
ggatgcccttggaggctgagggaccctccgtgcatggggtctccatcttcccagcagctgcgtcctcagctttcatcagatttgctactcaggggttccacggtgaccctataaatcgttca

SEQ ID NO: 371356 - DNA, 122 bp, Homo sapiens
ctctatttctccttggagttttataagtttgtgcctcgtgtattttaatgctctgttgttcggtgcatacgctttaaggattgttctgtcttcttgaagaattgactccttttatcattatg

SEQ ID NO: 371357 - DNA, 122 bp, Homo sapiens
gggggaggttcaggctggagggctgagtgcggggacgggaggaggggactcacctggactcgcgagggggactgagcgctctccaaatataggtcaatgtcccgctcagcctccctccccca

SEQ ID NO: 371358 - DNA, 122 bp, Homo sapiens
gccgcgaacaaagggcgcaggatttaacctcggctctctgggcgtgcctttgcaggccctcgtgcgctctgctggggaaaagaaaaaaagcttctgccaatgccagtgcagctgtgtgtccg

SEQ ID NO: 371359 - DNA, 122 bp, Homo sapiens
gtcaatggcttatggttgttgtttgaaccttgactcagaatactgatcatgacttcaaggcgtggacaaagaacctattgagaaatcattttctgttaacacaaggcatgtgtgtatctata

SEQ ID NO: 371360 - DNA, 122 bp, Homo sapiens
ttagggctggaagtaggaggtgtcgatgcacatacatttcccagtaatgcaacttcaaaacgggcttcttaatgggagataatcaactgcaatgcaactttaatgaactctgatgttggaat

SEQ ID NO: 371361 - DNA, 122 bp, Homo sapiens
gggaaacccctggagcaggcactggtgggtgggcttgagccactctggacggctttagtccgcaggtcaccctcgaggcgtcaggggagggtggcctggaggtgggcagggtggaagccacc

SEQ ID NO: 371362 - DNA, 122 bp, Homo sapiens
cagcaccaaatcttacagccaaggccaatctggacccagccagggcctggccagggcatccggtctggacctagcagctgagtgagtcctgggaggaagtggaagccagcccctcctgcacg

SEQ ID NO: 371363 - DNA, 122 bp, Homo sapiens
aaataaccacagagagcaccagtgtgccggctggagactgtgggtgtgatagagaggaaccggcttttacatcgcacgtcgtccaagaggacctctctgagctgaggctgtaactcagggag

SEQ ID NO: 371364 - DNA, 122 bp, Homo sapiens
gggaccctggaagcgcgcgcggagaagtgaatgcagagaccaacgggagcgcagggaggtcgcctgtagcagccagcgcttgcaacccgcaatgagcatagagtatttcttttctgaggggg

SEQ ID NO: 371365 - DNA, 122 bp, Homo sapiens
gcccgggcggtggcacctcaggtgacacccacagtctctccagcgagagcagccccggggcggtccctgcagccaagccccaggcgcgcccgccgccgtctccctcggcacccagccccgct

SEQ ID NO: 371366 - DNA, 122 bp, Homo sapiens
gtaaaaagtggctgcggtgtttggcaatgctaattcaatgccgcaacatatagttgaggccgaggataaagaaaagacattttaagtttgtagtaaaagtggtctctgctggggaagggttt

SEQ ID NO: 371367 - DNA, 122 bp, Homo sapiens
ccccccccgggcggaacgtgaacggcactgggggctcccaccaggagaacccgggtgtcccgtcccgcaggagcggctggcgcgcggccttctggaacttctaatttttgttttttaaactt

SEQ ID NO: 371368 - DNA, 122 bp, Homo sapiens
cccgctctcccgccccggggaggttttgattttagtggctttcttccttttattttccgtcgtgtgcggatttcgctgcagagcgaacttgcggctcgtccgagtacatgtgagcggtaatc

SEQ ID NO: 371369 - DNA, 122 bp, Homo sapiens
ggaaggcccttaggcctgcacccttgtgttttggttatttaagattgagaactttgacaccgaggcatatttaacttggcaaggggaggcactcatggtgtttgctttgtgaaggcttatct

SEQ ID NO: 371370 - DNA, 122 bp, Homo sapiens
aggaataagataagacctgtgtttccgaaggattaatttagcagcaatatagagaccatccgcaaggaaattggttacaaggttattacagaggtctggttgagagacattgagggagacag

SEQ ID NO: 371371 - DNA, 122 bp, Homo sapiens
ctttgacctttgtcttttccctttgcttttagattttggctctctatttgacttggagcacgacttaccagatgaattaatcaactctacagaattgggactaaccaatggtggtgatatta

SEQ ID NO: 371372 - DNA, 122 bp, Homo sapiens
cccatggcagggaccccagggtgtccagcactcagcagctcagaggggttcccgtggggccggagcaccctagatccaggaaggagcccagaaggcaccagccgaggagcacgtcccagctc

SEQ ID NO: 371373 - DNA, 122 bp, Homo sapiens
ccgccgcaaccccgggcttcgcttctggaccacccagaaacaaggcccaagactctgggacgctctcgcctggcaggccaggagggagggatggcgggattggagccctcggggaggagccg

SEQ ID NO: 371374 - DNA, 122 bp, Homo sapiens
ctcgttgtagttgtgtaattgtaacaatgtaaggctgtatgtgtaggtatgactgtgtcccgtgttgggactgtgattgtgtgtggctgtgtaactttgcgtgacatttgtggagggtgttt

SEQ ID NO: 371375 - DNA, 122 bp, Homo sapiens
gtctgcactcaccagccccatcccagagaactcgcctgagatagtagttgctgttttcagcgtttcagatcctgactccggaaacaatgggaagacgatttcctccatccaggaagaccttc

SEQ ID NO: 371376 - DNA, 122 bp, Homo sapiens
gcctgtccccgcctccccttaacctgctagctgaggtggggagcggcgggaggagccggccgcgcggtgattggcggaggccgctcccagcccccgacacgcgcccctcccccgctccccac

SEQ ID NO: 371377 - DNA, 122 bp, Homo sapiens
cactgcccgggtgggggcgggggccagccggcggctccgagtgtggggcagcggagcccacgcccacccagaacttgcgctggcctgcaagcacagcgagcagccccggttcccgccggcgc

SEQ ID NO: 371378 - DNA, 122 bp, Homo sapiens
tggacccatttgaagatgtgtgtggaccagagaacattgcttcctctctgaggaggtccccgtggcctttcctgtctgcacaagagttcccttcacaggcctgtcttctttatctgtgtttc

SEQ ID NO: 371379 - DNA, 122 bp, Homo sapiens
ccgcctcgggcgtgaggcggagcgtagctgttcctggatcctgggcctggctcctcgacccgcccctggaggcggaccccacttgacttaaactctggggcccgggaggccgccggttttct

SEQ ID NO: 371380 - DNA, 122 bp, Homo sapiens
ggcccacggctcccactaaggcctgcccaccaccgcccgcctgggcagccatgaatgtagcgccccaggccctgccccagcccgccatgccacaaggtgggggaggccctgggcaggatgtt

SEQ ID NO: 371381 - DNA, 122 bp, Homo sapiens
ccagttgaacctaatatttggggtcccacccaccacacagcaccctgggcaggggactcccgacgaccatccttggtgtgcacacaatctgtgctcagatgggagagctgggcccttcaagg

SEQ ID NO: 371382 - DNA, 122 bp, Homo sapiens
ctcaaactcctgacctcgtgatccaactgcctcagcctcccaaagtgctgggattacaggcgtgagccaccgcacccggccccttcaaactgttttctaagcagttgacccattctgtatct

SEQ ID NO: 371383 - DNA, 122 bp, Homo sapiens
tgccagctcaggcgtcaactcgtggaaaccggttaatgacccgaggggacagcggattctcgcctaagcaagatcccgcagatgggagggcgtaggaagaggttccccgggccggctccagg

SEQ ID NO: 371384 - DNA, 122 bp, Homo sapiens
atatttttaagccattttggaagtagaaacctaatatgtaatcttgacccaacaggataccgcccttggtgaggctttcctgctaggattactcacagtgattctggaatgccatttcactg

SEQ ID NO: 371385 - DNA, 122 bp, Homo sapiens
accccgggccggcggggcgaggctctccaattgctgggccagagcgggacccttcctttccgcaccctcctgggtatctccggtcttcaggcctccttcggagagccctgctccgagcccat

SEQ ID NO: 371386 - DNA, 122 bp, Homo sapiens
attcatttgaagcgagggccactggtatttgaaatagatgacatcatctgccagcagaggcgtgaggcaacttgaggcggggtgtgggcctgacgtcatcacgcagcctcttcctttccccg

SEQ ID NO: 371387 - DNA, 122 bp, Homo sapiens
cagcttgcatgtcaatctagtccactgtaagctggagaaagttacatgaattctcatcgacggcctcagcaatgtgcctcaagtgtcactgtgagatcattccctgcttcctggagacatgc

SEQ ID NO: 371388 - DNA, 122 bp, Homo sapiens
cacgctggggtcgcatcacatcccgcaaagccacgtgctctgtgaggccaacaggagccccgccgggtggaccagctggaatctcagagagcgccgactctgaaaatacccggctctgcaga

SEQ ID NO: 371389 - DNA, 122 bp, Homo sapiens
agaatctattatttaaaaccactctgttcaaaggggcaccagtttgtagtccctctgtttcgcacagagtactatgacaaggaaacatcagaattactaatctagctagtgtcatttattct

SEQ ID NO: 371390 - DNA, 122 bp, Homo sapiens
ctgccagcatgctgtcacctctcaatagggccccttactttccctgcctgatggtttatccgccttccttcagtcactcctcgaacacttaaccagctcccacagtgcagtgtaaagagcga

SEQ ID NO: 371391 - DNA, 122 bp, Homo sapiens
gcctaaggtgtgatcatttcatgcctgatcggcctccctccagcctgttccctccgctgacggccaagcccagccaggcagggccactcggtgctcccaggacagcgtcccaggttttctgg

SEQ ID NO: 371392 - DNA, 122 bp, Homo sapiens
ggaaggaacttagtggcctctttctctggggccaagtcgctgtcttcggtcctgaagtctcgtccctgttccaccactccgcgactggcggaagttcccctagcgagagccccgcaggcctg

SEQ ID NO: 371393 - DNA, 122 bp, Homo sapiens
gtgcccagtatgcaatttgctcaggatcaaatcgtgaatccctcacacaagaaggaaagtcgttggaaaaaggaaatgaatcatcctttatcaggctgctttgaaagcactggactctacga

SEQ ID NO: 371394 - DNA, 122 bp, Homo sapiens
cgctgcgggaggcccgggagcggcagtggaaccgactcccagaactccggacgtgtgcggcggtaagcgcccggcccgtaccccctccgcaccccgcaactccgactttggcggcccccaga

SEQ ID NO: 371395 - DNA, 122 bp, Homo sapiens
cgtagatctgttttcaagtcctgagcaatttcttgcaccagacgctgaaagcgaagtttgcgaatcagaagttcagtggccttctgataacgtctgatttcacggagtgccacagtaccagg

SEQ ID NO: 371396 - DNA, 122 bp, Homo sapiens
gggaggttgatgctgctggatccagaacgacactttggaaaccactgtgggaggaacgcacgcttctgggtggggaggcaaaacacggtgggacagtggtcagctgtgtgtgtgtgtgtgtg

SEQ ID NO: 371397 - DNA, 122 bp, Homo sapiens
gggcggggcggggaggggcgaagcggcgggtaggtggcggggccggcgcggtctggggcccgccccgccggggagacccggggcactggctccgggttcgtgccgggccgggcgcccatcca

SEQ ID NO: 371398 - DNA, 122 bp, Homo sapiens
tggactcctgacctcaagtgatccgcctgcctcggcctcccaaagtggtgggattacaggcgtgagccaccacgcccagcctattactcttggtggaggcagagaatgagggtgaggaatca

SEQ ID NO: 371399 - DNA, 122 bp, Homo sapiens
cccgcctgacttttatagtggtcactgtgtcactgtcaggagcgtcctctgatggccaggcgctccttgtctatctctgcaggtggcaccaatgagaggacctttctgtcccccacgtggga

SEQ ID NO: 371400 - DNA, 122 bp, Homo sapiens
tgaacaggtgacccgataggaagcacaactgcttctgttggagtgcggttacctggagaccgcagtctgaagggactcccggcagagatgtcgttacggtgtcctgcctgtctggatgctta

SEQ ID NO: 371401 - DNA, 122 bp, Homo sapiens
agaagcgtccacgatttagccaaacccagagtgcccaacggacgcgccaaagaagaaaaacggacggacgtgccaaaacttgaaggctagcacaggacagaacaagcctgcggacgcgccgc

SEQ ID NO: 371402 - DNA, 122 bp, Homo sapiens
actgtgcccagcaaaaccagcacacacggactattaactggtcgactttgctcctgggggcgtggaaggcagaatcaaagtgaataatgtaagcattccccaggcagggccggcacaccctg

SEQ ID NO: 371403 - DNA, 122 bp, Homo sapiens
atgccgcaactggccccaaacactgcgttcctggactgcaccagcagctcctggcgcggccgcagagttggtggatattttccaagggggaaaaaaatcttttaaatgccatctgtttactt

SEQ ID NO: 371404 - DNA, 122 bp, Homo sapiens
agcatttagtttttatgtcttctccaatctgtgatggttcctcattatttccttgtctttcgtgaccttaacactttttaagagtactgctcagttattttttagattgttactcagtttgg

SEQ ID NO: 371405 - DNA, 122 bp, Homo sapiens
gggaggagaagagcggcgccatcatgtgtgagaactgcatgacaaccaaccagaagaaggcgctcaaggtggagcacaccagccggctgaaggccgcctttgtgaaggcgctgcagcaggaa

SEQ ID NO: 371406 - DNA, 122 bp, Homo sapiens
gcctggcgcaccacccggacggacagacagacggacagacacacagacagaggcgggcctcgcagccccggccagcagagaagtcctgcgcgcgggagccagcaaggccgctgccctgcctc

SEQ ID NO: 371407 - DNA, 122 bp, Homo sapiens
ttgagttctcaatcctgtgctcttttcttctgaagatgtcttctattcttatgctttcaacgataccaccaaaatatctgtctagccttgacctcactgccaagaccagatccacatctcta

SEQ ID NO: 371408 - DNA, 122 bp, Homo sapiens
tctcagtccttcctccaaccctcccctttccccgtggctctcctctcctcctgcccctttcggccaagagaggaaacttgagcccgatgtggtttctgcccacaccccgcccccaccttgct

SEQ ID NO: 371409 - DNA, 122 bp, Homo sapiens
ctaaacaggaagtttgtgacaaacttagaaaacacgcatgcacaatggcaagaggctgcacgccactgagaaaagatgaaatccggccctgctgggggctctgtgtggaggagaggcgtgca

SEQ ID NO: 371410 - DNA, 122 bp, Homo sapiens
aggaggaggcgaaggaggcggcgacgagcggagcctcgaggccaggaggcggggcagcaccgcggaggcggcggccggggcgagcgagcggcggcggcaggggttctcctagcggggaccgg

SEQ ID NO: 371411 - DNA, 122 bp, Homo sapiens
caaagccagccccaatccctgaactgagtttcaggtgcagaaagcactccaagaagtcctcgctggtctgtggaacgggaagggaaacccattcaagacagaaagagaggagggaaacgccc

SEQ ID NO: 371412 - DNA, 122 bp, Homo sapiens
ttgcctcctcagggccggtggacagctgaggcccgcattgtgcattgtttgcatagttcccggccaggtggccgggctctcaagcaaccaagggcagtgcgacagctgctaagcaggaggaa

SEQ ID NO: 371413 - DNA, 122 bp, Homo sapiens
gactgctgcttgctctgctggtcactgcagttgtcaggaatgtttcgcctcagaggcaaacggcttagggccgtctcaacttggagacagaaaaacccacctcctactcctggctcagacct

SEQ ID NO: 371414 - DNA, 122 bp, Homo sapiens
ccttcaggaagaaccaaattcctaatttttaaagtgtatgccctagctctcaaaagcaagcgatgttagacagcttgaagtgaaatacaattctaaaaggaacaatatttttaggctacatc

SEQ ID NO: 371415 - DNA, 122 bp, Homo sapiens
cagagactcggcagcttttcctctgatgtgtaagttatttggaacgcgtgctgtgtcccgcgatgtccctgatgtactgtgcaggcgcggtgcctccgtctcgtcgcacagctgcgcgccct

SEQ ID NO: 371416 - DNA, 122 bp, Homo sapiens
aggcacatggtctctccccgcccgaggtgatgggctgcagacaggctctgaccaggtctgcgcctggcctggagtcacagggagctgctagtttgctattttacaaaatacagcatcaagga

SEQ ID NO: 371417 - DNA, 122 bp, Homo sapiens
cggcgcgatctgaacgccggctgggaggctcctggggggaacttgcggtcgtctgccctccgcactcctccgggaaccgcagccggccctggttcgctgcgcgccggggctgagacccggga

SEQ ID NO: 371418 - DNA, 122 bp, Homo sapiens
cttaggtctcctttcgtcgcctaatcttagcagatcctttcgtcgcctaaatggtaagagcgacttgtaccgacagtccctcggcaatttccggaagtgttcgggataggcccgagcgtggc

SEQ ID NO: 371419 - DNA, 122 bp, Homo sapiens
cgtctgcgccccgggttcctcctctgagcgcctcgctctcgcccacccgcactgccgggtcggtcaggttcgagtcccagtccacgaagacctcccgcagccaccgatttcttcctaggacg

SEQ ID NO: 371420 - DNA, 122 bp, Homo sapiens
agcgtgaccccggggtgtgccaggcgaccacagtggtggagcgcttggtgccccatgcggcgtggggcggggcctgagggagcggggatggtgggtgaaggcgacgggacgggggaggcggg

SEQ ID NO: 371421 - DNA, 122 bp, Homo sapiens
cttcctatttcttaagagtcctcaactctaacatgagcttagcaatagtgtccaccccaccgggggggggggggggttgtaaggactaggttagttattatctgctttataacacagcttgg

SEQ ID NO: 371422 - DNA, 122 bp, Homo sapiens
aaggatcttgtcatggatcctaagagaacaggagacacacacaggagaaaccaagggtggcgatgggctccataactcccagggagctgctggctagctgtcgtttcttcacaatgggagtc

SEQ ID NO: 371423 - DNA, 122 bp, Homo sapiens
tggcagcaagtggggggtccgtgtgcagctcaggtgtgcggagcagggacccctgagctgcgtcttgttgggtggaggacgttttgctgagagaggagggaagagcagtcccaggaagcaaa

SEQ ID NO: 371424 - DNA, 122 bp, Homo sapiens
ctgctcagaagttcatgctcccagcggccttccccacccagaagcgcttcctccaggctgcgcaacggccttccccgcccggaagcgcttcctccagtctccacagcggccttcccgcccgg

SEQ ID NO: 371425 - DNA, 122 bp, Homo sapiens
ggctctgagacgttgctagaggacaaatccgcgggatttagagcgcggccaatgggacagcggtgcctggctgagtgtcaggcaaaactagccaataaacatgtagtttgggcaaggtgggt

SEQ ID NO: 371426 - DNA, 122 bp, Homo sapiens
tggcttctcagctcactggcggaagaaactagagctgagctgggacgagggcaagaagcgcgtcgcacctttcctggcagctgaacagtgtgatgaacagtctggaagggttatgttattac

SEQ ID NO: 371427 - DNA, 122 bp, Homo sapiens
ggcctacgctccatgtgtgatctccttcttcccagcctccctgggagtgttgctgagctccgtttggagtttcagttgcaaggctttagccacccatgttaactgtagctcctatcgcttga

SEQ ID NO: 371428 - DNA, 122 bp, Homo sapiens
tcacgtgccagagggtggggagcccggcaaaggcgcttctcacttcccagacagggtggtcggacagagacactcctcacttcccagactgtcaggtggccgggcagaggcgctcctcactt

SEQ ID NO: 371429 - DNA, 122 bp, Homo sapiens
atgaaaatcaaatgacgaaagatgaatgtgaaagtataaagcttatcacaagtaaaatcccgcttttagagatgtaagcatagtacccctactatggtggaactggttaaagcctttatttg

SEQ ID NO: 371430 - DNA, 122 bp, Homo sapiens
ccctggcggcctggccccagcccaccccgcgcccccggcggcggcccccgccctagcgcccggtacttgcctgcaggcgagcgccaccacagtcagcccgcggcttttctgtcttcctttct

SEQ ID NO: 371431 - DNA, 122 bp, Homo sapiens
tgccgccgcctcctccctttgtccagcgccgggcactccggggagcaccagccgcgcctgcgcgctgcgctccctgccaccgccccgccgtccccgtctccccgcttgggcacggggctgtg

SEQ ID NO: 371432 - DNA, 122 bp, Homo sapiens
ggagctccccctgccggtggacgcccgtggccccctcggactgcgggtgacggccctgcccgccaccagacccctaaatcttggccatcgtgtggccgccacctccgggaagccttgtacag

SEQ ID NO: 371433 - DNA, 122 bp, Homo sapiens
caggcgatcgaccacacaagcctctccactgctccagcctcggtttctcttcctgtacagcgagggcgactcagcacagcccacgtgtttcccgctcagctttgtgagattcagtgaggatg

SEQ ID NO: 371434 - DNA, 122 bp, Homo sapiens
tccgtgctgcgcgctccggctgactcactggggctgggggcccctccgtgctgcgtgctgcggctgactctctgctgcacatgtgctggcagctgttccaggttgccacatcctgggattat

SEQ ID NO: 371435 - DNA, 122 bp, Homo sapiens
cagttttggtaacatgaagctcgtgtgttgcacgcccaccaggtcgctgacaaagtgaagcggtttttctccaagtactccatgaacagacacaagatgaccacgctcacacccgcgtacca

SEQ ID NO: 371436 - DNA, 122 bp, Homo sapiens
attcagcacaaaaagccaaaattatcccccggagtgcagaggttacacggttacaaaagccgaggattttttttttttgtcctctttagagaaataaaatcatgaactgctccgatataaaa

SEQ ID NO: 371437 - DNA, 122 bp, Homo sapiens
cggcaccgcgacggcggcgaggccctggtcagccccgacggcaccgtcaccgaggcgccgcgcacagtcaagaaggtactggggccgggctgcctctctaggagaggaagggaggggagggg

SEQ ID NO: 371438 - DNA, 122 bp, Homo sapiens
tgctttcatcttgcacaacttgttcataatcactccaatttttcttctggcagattggagcgccatgcaaagtgaagttgcataggaaatccccctgtagcctactaggtgcagagaagaga

SEQ ID NO: 371439 - DNA, 122 bp, Homo sapiens
tttggttgctaaggagacagaaggctggtgtttccgatttgccactattacacagcggcccgcgagaagcatctcttggctcgaagcgcgctgtaggtgaaccgcccttgacttaaacgcca

SEQ ID NO: 371440 - DNA, 122 bp, Homo sapiens
ggcgtcctcaactttcctctttcttgagcccggcctgctccgggctctgaggggcgaggacgcttcacgtggtggcctggggcccaccccgcctaggaaaggcggatcctttacgtctgacc

SEQ ID NO: 371441 - DNA, 122 bp, Homo sapiens
agagaaatgtttgccagccaggttttctgctaagaatcatttattgaagacataaatcaacgagtttgatccaaccattagtaattaaaggggatatatttgaagaggcaaccattgtgttt

SEQ ID NO: 371442 - DNA, 122 bp, Homo sapiens
acaaatgtacatatttatcaaacctgcagttgacacaaagctgagagggatacctaataacgatggatggctgaatcaggatccaaaaggtcttgacaggctgcaactctgtgtcgaatcta

SEQ ID NO: 371443 - DNA, 122 bp, Homo sapiens
acagcctcccctccagcccccctgccatgggatggctgctgtctcctttggatctttttgcggtctgggcttgctgttcctctcaacagtagtcaggaagcccttaccccaaaaagtatctg

SEQ ID NO: 371444 - DNA, 122 bp, Homo sapiens
gtccctccggggggatagtggtccttggttccgggcccagtcagcacccaagggaggctgcgaaccacagccttgggtctggcaggaaccctggtggattcaacatccccgggcctcgaacc

SEQ ID NO: 371445 - DNA, 122 bp, Homo sapiens
cctgatgaaagcagatggctgcagagaccctttgccctctgggacagctgcttgattcgccggggggaggtgctggcactgacggacatgctttgtgtttacggatttgggtcctggaatgt

SEQ ID NO: 371446 - DNA, 122 bp, Homo sapiens
aaggctcagaaaatgggcaggaatctaggcagatagccactgggaacccagccagagatacgctacttgtcttgttagggtgaggtcaccatagagactgctgctgctcctggactccaggg

SEQ ID NO: 371447 - DNA, 122 bp, Homo sapiens
accccccacgccgccccgtgccatggacatctgggtccactcatcgcccctccaggcccccggtgccccaccccctagagtgctctgtgtattcggatgacttagagttgtcatttctcttc

SEQ ID NO: 371448 - DNA, 122 bp, Homo sapiens
aaattctcagaattaaaattactgggttggagggaaggcgccttttctggctcttgacaccgactgccgacttgttttgctaaaggtttgcaccagtttgttggcaacatgtgaaaactatg

SEQ ID NO: 371449 - DNA, 122 bp, Homo sapiens
cagccttagggcggaagtcctagctctgctgctgggtgcccttagaccaggcaatcccttcgcgtctcccctccctcctctgtaaaatgagaataacacccatcttgtgggctcctgaaggg

SEQ ID NO: 371450 - DNA, 122 bp, Homo sapiens
tccaccgacaaatccagccgtggagaaacagccccacggcatcaaactcttccagcagtgcgcttcccgctgagacacgtaggaagaatgtaagtaatttcatcttttagtagctgaaatct

SEQ ID NO: 371451 - DNA, 122 bp, Homo sapiens
aatgtccggctgcacctcctccggacatggtagctgtcctctcgccggcgccgtcgtgtccggtcactactacttgaccaggaacggcttcttcgttgcttgttttcggctccgatagtgtt

SEQ ID NO: 371452 - DNA, 122 bp, Homo sapiens
ttcagcgagtcacattcctgccttgtggtttccattttcagtctgtctgtgtcacagccccggacagaagccactgaggggagaggtggacctcctcaatctcctgcttcctcagtaagagt

SEQ ID NO: 371453 - DNA, 122 bp, Homo sapiens
ataactgaaaaaaaagtgatgaaacaggccccagaacgcataacgctgtccaaagtacaccgctggcttctggccacgtgactctccccatagcagtcacaaaactgtggggctgactttgt

SEQ ID NO: 371454 - DNA, 122 bp, Homo sapiens
atattatatgtatacatgctgtatccactgcattagattgtaaactgatttctgtggctacggcatctaacatatatagctgtacttaacatagttgtagttaacactcaataactatgtaa

SEQ ID NO: 371455 - DNA, 122 bp, Homo sapiens
ggtgcgggcggcgggacaatcccctcgccggggcaccgtcatgtatgtaggtgcgtggctcgcgggcccggtcccgggctccagggctccaaggccgggaggaaatgttgggggcacagtgg

SEQ ID NO: 371456 - DNA, 122 bp, Homo sapiens
tgggccggatcccgccggtatgggcggcacctaccagcagccggccaacaccttcgacaccgagccccagggctaccagtcgcagggctactgagccacagtgaccgcctgcccccgcccct

SEQ ID NO: 371457 - DNA, 122 bp, Homo sapiens
ttttaaaatactcccatcttgtggcagttttgaaatatggcaacctgaatatgacagtcccgacttatcagtccttattgttcatttgtccctctgctgtagataaggttccagtaaattca

SEQ ID NO: 371458 - DNA, 122 bp, Homo sapiens
ggacggtgtcccctgagcgcacgggacgcgggaaacctggggtgtctgcagggacagtgtcgcggggaacctggggtgtctgcaggggcggtgtcccctgagcgcacgggacgcggggaacc

SEQ ID NO: 371459 - DNA, 122 bp, Homo sapiens
aaaattattttctggtggggagaggcgtcacatgcctgtaatcccagcactttgggaggccgagttggaggaatcatcacgtgaggccaggagttcaagaccaacctgggcaacatggcaag

SEQ ID NO: 371460 - DNA, 122 bp, Homo sapiens
agacagggagagagacaaggcgtccccgagtcgctgagtcccagccggagagtgaggaggcgccctcgggccccgccgccccacccggcccccgcggccgcccccagcatgtttgtccaggg

SEQ ID NO: 371461 - DNA, 122 bp, Homo sapiens
cagcggcggggacggcggtgcgcggagccgggcatctcccgcgcccccccgcctctcccgcgcgccccccccgtggaagttacacacctttggattgcatttcgccgtcaccttctccccca

SEQ ID NO: 371462 - DNA, 122 bp, Homo sapiens
acttgtcgtacacagccatgagggcaccgtcctcgggaagctgggggctctgcgagggggcggggctcagacacgggtggggtcaccgggagcgcccctccccacgggccacagggctcgtc

SEQ ID NO: 371463 - DNA, 122 bp, Homo sapiens
gttctcccttgctcctgaaaacccgccgcaaagcttgccatgcgccccgcgtcatcctggcgtctgcctcctttggcaggggaattaatggttttttagaggttaataacttgttggtgttt

SEQ ID NO: 371464 - DNA, 122 bp, Homo sapiens
ttagctaatggtacaatattcatttattttaaaattatttttcttttagggtgttactatcgttaaaccaatagtttacggtaatgttgctcggtattttggaaagaaaagagaagaagatg

SEQ ID NO: 371465 - DNA, 122 bp, Homo sapiens
gcctacctttccagacggcgaagatgcggggtccgctccttaggtggccctgggcggaggcggcggccgcccagagcagcagcagcagccgcagccgcagcggaagccccaaccgagccggc

SEQ ID NO: 371466 - DNA, 122 bp, Homo sapiens
atgccaacgttaacacacacagcgagaaacaagcagggggagaatgggggaaagactcaccgttctgttccttgttgctggaaaactggaatttactactcaggttggattccgcctgagtc

SEQ ID NO: 371467 - DNA, 122 bp, Homo sapiens
tccaagaggaaaccttgtgtgacaggctctccctaggcatgaataatcactagcctctgacgaagaagaaagttttctctctggagcctaaagacctgtgcttgcagcccctagcttctttt

SEQ ID NO: 371468 - DNA, 122 bp, Homo sapiens
gtgcccctgggaaagcctgaggctacttgtacgcgttggccttgtgcttcggcaagaaggcgaagctggggggcactggcccaaggagcatctcgctgtgggagagcaggtggaaagcgagg

SEQ ID NO: 371469 - DNA, 122 bp, Homo sapiens
cctggccggcagcagggatgtagccccacaggccggagcggccaactgtgggaactcccccgcgggccggggtgcgggctcggacccgcctccctccctcccgaccgaggaagccccggcgt

SEQ ID NO: 371470 - DNA, 122 bp, Homo sapiens
aaaaggaataaaatagagcctccgctctcaccatctctgactggcccgttcctctctaggcgcgtctgggagaagccagggctgtggtaaccgtcgtgttttctgtccctccccagagccga

SEQ ID NO: 371471 - DNA, 122 bp, Homo sapiens
taaacagagaaagctttggagatgcaactttgcccctgaaataccaaatgatattttcctcggtgaaatgttaaacaatgtgccttcaacaataaactgacaatgcctttcctgaggcttgt

SEQ ID NO: 371472 - DNA, 122 bp, Homo sapiens
agaaggagtttcctcaaatcttgttgcccttcccatctttgtgagctgagatcagagtaccgtatctcaccctctgcctcttggaggtgattatggtttacatataaatgcagattgcaagt

SEQ ID NO: 371473 - DNA, 122 bp, Homo sapiens
aaggtgaaggcgaagcgggctcggaagactagggctcctcaggtagtagaatgcagcggccggcagatggcgtcacagcggcggaggccatggccctgcgcaagcgcattcggcgatgccag

SEQ ID NO: 371474 - DNA, 122 bp, Homo sapiens
cagaaacaggccagctggtacgacttgtatcaaccctccctcctccaggtgccgcagactcgccctttaaccacccgttgaagtcaaatgagccgtcttcagcagagattttcaggcaaata

SEQ ID NO: 371475 - DNA, 122 bp, Homo sapiens
ggccctcccctccaccctggctgtgtttccacccaaagagaaccattgattccagcccatcgaagtttcttaggccagatcttcccattgcaaggttatcttactcaggtgtctgttgcaga

SEQ ID NO: 371476 - DNA, 122 bp, Homo sapiens
tcagcctgcaggatgcacgttcagaataaacacccaagggccctgtgaggcctcagtcaccgtcactcactcagcttcacaagtccggagtaggactgccaacacgcagagagcttctcagc

SEQ ID NO: 371477 - DNA, 122 bp, Homo sapiens
caaacagacatgctctgaagacagggtggtccatggcattcaaagtgtattcatttctaccgatggtgcttttcttgcataggttctgacttgtgtagatttggacttcaagctaaaataaa

SEQ ID NO: 371478 - DNA, 122 bp, Homo sapiens
tttcactgaattggtatgtctgacctaatgaagactttttagattatttagaaactactacgttttctgcagtcttacctgtttcagagcgtggtggagaatccaaacattcaaaaacatgc

SEQ ID NO: 371479 - DNA, 122 bp, Homo sapiens
gctcatcaccccccaatgaccaagtccctgctggccagaccccacacaccaggtcctccccgaccaaaccctcaccgattagacctccatcaggaggtcccactaaccaggcctccgctgcc

SEQ ID NO: 371480 - DNA, 122 bp, Homo sapiens
acttccgggaagggcttacttccaagacagacacggaagtgctgggaggcgccgggagcccgttcggttgcgggtgtctctggccctgcggtcagccctgggaacgtcccggagagctagat

SEQ ID NO: 371481 - DNA, 122 bp, Homo sapiens
tcactgcctgacaaatgactcaaaactgaaatagctgccaggccggaaaaagactgactacgtcaaccttcacaggcacagcttgtggacccaagagcctccggtcttgggacaccaaatgg

SEQ ID NO: 371482 - DNA, 122 bp, Homo sapiens
tgcacactcccacacacacgggtgcacgctcccacacacttgggcgcacactcccacacacgcccctgcacacaccgagctgagtggtgtgggcagggaggcacccccgcagcaggtcagag

SEQ ID NO: 371483 - DNA, 122 bp, Homo sapiens
tgggcctcctcccaggcgtccaggcggacggacttcaccttgctgacctgggggatattccggtggattcccgagcagctcaggcagatgaagacgcccagagtgtaggaggcccagtcggg

SEQ ID NO: 371484 - DNA, 122 bp, Homo sapiens
cacggtgaaaggcaaaaacccctctaagcctcctcctgtggcgacaaagctctcggccaacgctcaccgccatacacatccgcgggaacgcttcctccaccagccgaaggcggggcctctga

SEQ ID NO: 371485 - DNA, 122 bp, Homo sapiens
cagggatggcaaagggggcttctagaggggaagcgaggggaagtgaacaatgtcccaagccgggcctgaaaagagaagaatcaaagccacacatgagccgaggcttcggcaaggctctgccc

SEQ ID NO: 371486 - DNA, 122 bp, Homo sapiens
gacagcaccttcctctagctcacacggggtggacgcaccgccgtcaccttgtcccacatgcgaagctctttctcgtgacacatctgtgtctctgtgtagccaaccagagcgcgcctggggaa

SEQ ID NO: 371487 - DNA, 122 bp, Homo sapiens
ggccctgggtctggttggtgaagcgggtgaaggcgtccatggcttctagcccaaaggccacgagtcgcacggggctcaggcgtgggtcctctggggcccgtcggatccccagggaacggtca

SEQ ID NO: 371488 - DNA, 122 bp, Homo sapiens
ctggggaggtcacaagagcagtttgcgccttccgcggctctcggagtgctgagggaaactcgcagaggtatcccagctgccctctcctcctccgaggccagcatgcactgtctgtcgcatgc

SEQ ID NO: 371489 - DNA, 122 bp, Homo sapiens
catggttgaggcgccaccggtgcccagcaacctccccaggctgtggttgtgacctgaggacgcgtgtgtccccgccctcaggccaccgctacgcgaccctgagtgcaccttcaagaaggccg

SEQ ID NO: 371490 - DNA, 122 bp, Homo sapiens
accagttctttgggcggcttctcctgggtctttccaaacagccccatgacgaactgaacccgtcttgccccttccggctttcagttccccgcgcccaggcaggtcacgggcagccgcctggg

SEQ ID NO: 371491 - DNA, 122 bp, Homo sapiens
ggacagtgggggtgggacagcccggatcttcagcctgtgcggggacatggcctggggggacggcaggggtaggacagcccgggtcctcggcctatgtggggatggcctcgggggacagtggg

SEQ ID NO: 371492 - DNA, 122 bp, Homo sapiens
ctaggtctgctggggccccggcccttcgcccggaccccaggcccccgcgcggaccctgaccgctttctgcagcctggaacaacccggacccccgtgagaagcaaagaaggggcgccttccag

SEQ ID NO: 371493 - DNA, 122 bp, Homo sapiens
ctatcaatgcacccacactccactctccactctctggagaggggttctcagtgcagggagcgggggttgagacttccctactttcttctccattcctcacttccttctggggaggaactcac

SEQ ID NO: 371494 - DNA, 122 bp, Homo sapiens
cctgccgcagcactgtctccgtctgcacgcacacgcctggggacacgggggacagggcggcgctgtcatcctcaagcaaggatggcccccggttccaggccgtgcctcagggggacccactg

SEQ ID NO: 371495 - DNA, 122 bp, Homo sapiens
atgggttccgtctggacgggcaggtgtcctcaccatcgggcgccacatagtagtcgaaggcggtgtccccgggccccgctggcggcggcagctccagcgtccctgtgggccgagagcgcagc

SEQ ID NO: 371496 - DNA, 122 bp, Homo sapiens
cgagcccgagaggggaccgcgagggcgggagggaagctccgcgagccggcgccagcgccacggcccaaaccccagcctctacaggtgctcactgcgcgactgcctgtcccaggcgctcgggc

SEQ ID NO: 371497 - DNA, 122 bp, Homo sapiens
ctgagactcagtttcttcatctgacaaataacccaacagagatgcatgcatagatgcatacgtttagggattgttaggaagagcagagataatgcttgtaaaatggctagcatggtacctgg

SEQ ID NO: 371498 - DNA, 122 bp, Homo sapiens
gcatattttgatagattgtttctagatatctaaaattgtgccaaacagcttctaaatttgcgaataagaaacagataattcactttaaaaggataacaggaaatactagcaatttttattct

SEQ ID NO: 371499 - DNA, 122 bp, Homo sapiens
atggcaccgagggagagatggggagaaatgggaaaaccttgcttaaaaaatttggacatccgccccaccatacactgtattccaccaggaatatatgagccctgcctcgacctccccttccc

SEQ ID NO: 371500 - DNA, 122 bp, Homo sapiens
caaaggtgtaaagtatttagaaataatagctctccctttaatataaccagtgaaagaaaacggacatgtgatctcgaggtacaacttggtaaaagtctgaataggcaaatgacaaagcctaa

SEQ ID NO: 371501 - DNA, 122 bp, Homo sapiens
tcttcccgcccgttcctccccggcccgagcctcttctctgctcaccctgcatgttattgtcggctttgccacaggtcacccatttgcccccctggaagcgccagtggttggggtccgccagc

SEQ ID NO: 371502 - DNA, 122 bp, Homo sapiens
ctgcgaacccaccaaaaaggaaaaactcccaacacattggaacatcagaagggacaaactcgggacacgccgccattaagaactgtaacaaacaccgcgagggtctgcgtctttattctcga

SEQ ID NO: 371503 - DNA, 122 bp, Homo sapiens
taatatttcagcctctccttaggcgaaagaagccattgttctgagcttggcacgagctcccggacccttcacgtattgtgtacatacagctttgtgctcacagaaaaatgcatttttttccc

SEQ ID NO: 371504 - DNA, 122 bp, Homo sapiens
agggccacagcggaaggcggtgtcgccgcaccgagaaggctcttgggaattgtagttctccggttgaagaaaaaagggattcattgttgtccagcaccctaccaggctcgctctgcactgag

SEQ ID NO: 371505 - DNA, 122 bp, Homo sapiens
cgactccatccaggaggtgagtgaggggcggcagtcggaggtcttccagcgctaccctgacggcagcttcgaccccaactgctgcttcagcatctaccacggcagccaccgcgagtcgctgg

SEQ ID NO: 371506 - DNA, 122 bp, Homo sapiens
ccatggtactggtcttatactgtactgaaaattatttctctactaactgcaatattttaacgctttcagactcctttcagtcattgaacacacatgatagagcccctattaggttatcaggc

SEQ ID NO: 371507 - DNA, 122 bp, Homo sapiens
ccccccaggcgccgaccaggcagctgagggtatgctggcccccagcacccgctcggccaacgggatgctcatgaacatgatgatgatgagtgacgagaaccaccgtgacatctacgtcagca

SEQ ID NO: 371508 - DNA, 122 bp, Homo sapiens
ctccttcgtatgcggagctgatggttttgcatcagcgcttttgccagtagagccgactagcgttttctcagttacggcaccgttcttagcgcccagtgtgacgtttcccattcgccaggtcc

SEQ ID NO: 371509 - DNA, 122 bp, Homo sapiens
acacccatttattcgccatggggtgaggctggcataggtttgtcctctagggcagaacagcgctggcagagatcctggggataggtatgaacttcaaaccacatgcaaagtcattgcaaaaa

SEQ ID NO: 371510 - DNA, 122 bp, Homo sapiens
caagtgcgaaactccgtctcaaaaaaaaaaagcaaaaccagaataatacacatataacaacgcaaagaagatatagacttgggatcttcctggaaagcagagtcttaacggaaactatgcaa

SEQ ID NO: 371511 - DNA, 122 bp, Homo sapiens
gggtggaggggagacgggtgaagaaccgatggtcagacgcgcccgaggtggcgccagagtcgtctcagccctcgggcctgggacttggggaccggccgcccagctgctgcggggagcccgcg

SEQ ID NO: 371512 - DNA, 122 bp, Homo sapiens
agcccttctcctgacgcaggctgctggcttgtcaaggaatggctggttccaccgctgggccgtgtttactcttttgcttcaaggaaaagggtttcttgagggaacaactttacctccaataa

SEQ ID NO: 371513 - DNA, 122 bp, Homo sapiens
ggacattacatactgaattgggtccttgtcatttctgtccaattgaatactttattgtaacgatgatggttacccttcatggacgtcttaatcttccacacacatcccctttttttggaata

SEQ ID NO: 371514 - DNA, 122 bp, Homo sapiens
cacatgctgaaacgttcctcctggacaggaacttcttcatcttaaaagcatttcttatcccgtctctgcgcttctaaacacaaggttttagaaacaaatgtttccaggtgattgtgtgaagc

SEQ ID NO: 371515 - DNA, 122 bp, Homo sapiens
ctcacgccgcccccgaagctgccgccagctccgggcatctgcccagccgaaaagccagggcgccggggcctgactccccacagccaggtttcccgggcacagagacccaacgggagcgggac

SEQ ID NO: 371516 - DNA, 122 bp, Homo sapiens
caatttctccaattatagaagagcactgagggggcggtattaggggaaaaggcaagtccacgtgatctaagacaatgggatacagcggaaaggagagcgctgtaaaaggctcctgatccatc

SEQ ID NO: 371517 - DNA, 122 bp, Homo sapiens
ccaccccttgccccacccaccgggaaggaggagggagcacaggctgctttgagcagtcatcgtgcctctacctggagcctgtactcactgtcttgggggccggtatttcccaggagggctat

SEQ ID NO: 371518 - DNA, 122 bp, Homo sapiens
ggccatcagttgaccaagcacagaatcctggggtcttattgctgaatatacctaatcttacgtttggaagattaaggcccctggagagcctgtggtttgagctgttttttcccctattgcca

SEQ ID NO: 371519 - DNA, 122 bp, Homo sapiens
gaataaagactggatacaggtccattacgtcattctgcaggccagtaagtgtttgattaacggcttgagctcctcaagggttcaggagcttagaatgctgacaaagcaactctgctttgcat

SEQ ID NO: 371520 - DNA, 122 bp, Homo sapiens
aacgcaccccgaggcggggtgagggctggcagtcgcccctgcacccgccgctgcgagccgcgcccctcaaacccaggtatgggacctcggaaaatcgacccgctgccctgagtgctcaccac

SEQ ID NO: 371521 - DNA, 122 bp, Homo sapiens
cctgcagcctagtgccacttagtatcaattgttccttacgcaggctacagcgttgcggaccgctctagcgcatttttgtattcccgttgtatcccgcaggcctggaaataaaaagcgattag

SEQ ID NO: 371522 - DNA, 122 bp, Homo sapiens
ttttaaaatgggtataatatctaatgagcaggacaagctctgcttgtgttttctctatagcgcatcaatccctttctcacatcttcctaccctctcatctttaaactacagtgactacctga

SEQ ID NO: 371523 - DNA, 122 bp, Homo sapiens
cttgtgaggtgatgcacagatgatttgggccagttcgctgcccaccctttgcccatccgccgcgccactctgtttatggtcaattctagctaatcagcgcacttctgcaacgcctccttagc

SEQ ID NO: 371524 - DNA, 122 bp, Homo sapiens
acctcaggtgatccacccgccccagcctcccaaagtgctgggattacaggtgtgagccaccgtgcccggcctgacattgttttaatagcagtaagtggtcaccctgtgctttagtcctataa

SEQ ID NO: 371525 - DNA, 122 bp, Homo sapiens
gacagcttcttggaggacctgttagaggaccaacaagttagttggttacttctgtcttcccgcctagaccgtgagctccctgaggtcagcgaacatctgtattgggtgtcgtgtccatgtgg

SEQ ID NO: 371526 - DNA, 122 bp, Homo sapiens
tgtctattccatgtccccactacaaattacataacttgtgaagcctatatatactgaccacgatattaccaactcctaaaactccaattaaaaaaaaacaaactcattcctaaggtgatata

SEQ ID NO: 371527 - DNA, 122 bp, Homo sapiens
agagacagagacacagagagagaaatacacagcgggaagagacagaaatggacagagacacgcagagaaacagagagacaaaagagacacacagagagaaaaagagcagagacagaaatgga

SEQ ID NO: 371528 - DNA, 122 bp, Homo sapiens
aagcaactgggccatcgtcccacccggaaaccaaacctgtccctgaccatggcaaccccccgtcccttcatggattgggttaccctgggcacaacacgtgcgctcaggatttcctccgatta

SEQ ID NO: 371529 - DNA, 122 bp, Homo sapiens
ggaagttgaaagcgtggagggcagaccacacgcagcggccttttgtgtattgtttcaagccgtatcactaatagatttcttccaccgaggctcccagcaattcagctgtgctcaaatgctcc

SEQ ID NO: 371530 - DNA, 122 bp, Homo sapiens
ctaaggatcccatttgatcctctgggtcagataaagacagcaaaaagctgagacaggaaacgagggctattgttcccattctatggctgagagactggggcttagggagaactgtgcctcgc

SEQ ID NO: 371531 - DNA, 122 bp, Homo sapiens
ttaaaggaccacactcctttctcggagttggctgttgacctactttagtccctaccctgccgcttggatcgcatatttaaaaagccaaaaccccatcttctgcgattccttcattactagtt

SEQ ID NO: 371532 - DNA, 122 bp, Homo sapiens
gaggagtgaggctagaaccagagaaacctagctgatgctgactcatgctggaggttcctgcggagtgagcatcagagctcatgagctcatctccctagaaaccagcatgcctgaacttgacc

SEQ ID NO: 371533 - DNA, 122 bp, Homo sapiens
ctctgggaaagccactgcccctcagaccgcagttgcgagtagcacgaggatctggggtggcggggggagtacaggaacctcccggttcattctccctcccgggctgcttgtctcctccgtac

SEQ ID NO: 371534 - DNA, 122 bp, Homo sapiens
gaaacactcttgggaaagcggccaaggctgtatgggcccaggctcagctagatgtgcggtcgaggataaagcaagtacaattcgaaaggacttcacagtttacaaagcacaaacgtgctcat

SEQ ID NO: 371535 - DNA, 122 bp, Homo sapiens
ccacgcctcccgacttcctcctggagtggctgggcagcatgcagggcagcgtccagtaggcggcagtggcaggaagggagcgggcggccctcgcaggtccctcagttggcagggctgcattg

SEQ ID NO: 371536 - DNA, 122 bp, Homo sapiens
acgccccaccttgctctgagtcgtccgtggagacagcagagcccgtgctatctgtgcgcacgcgctccacgctctgcaccgacagctgctccaggcgccgcttcaggaaacgatgctcctgc

SEQ ID NO: 371537 - DNA, 122 bp, Homo sapiens
agcaatgaggaggcagatgtggttgagacagagatgagaggaagtggtagcagatgaaatcgaagagttgggtgttaaatcttgcaatactttgtagtttattttgggtaaaattgggagcc

SEQ ID NO: 371538 - DNA, 122 bp, Homo sapiens
ctgagctgtttcctcttggaaaggccgaggaggctccgccactctcctttggactggtcgcgctgaagctctatcctagggcactggtcgcaagagcagatggtgccacacgctccgggcct

SEQ ID NO: 371539 - DNA, 122 bp, Homo sapiens
ctttatataatctcagaatcttgatggagcccctgtgtgtgcactggactgaaagcccatcgtgctttgctgggcttcttatgcatattagtcctggtccttttatttgtactcgttgctcc

SEQ ID NO: 371540 - DNA, 122 bp, Homo sapiens
ctccagccctttcctgccggtgagccccgaggtcatgaagcggcggcgcgggggcctcatcgagcagcgcgacatcatcaaggcccacgaggcgcacaagatgcagagcaccccgcaggccc

SEQ ID NO: 371541 - DNA, 122 bp, Homo sapiens
gcccggcccgacccacggaaattatgaaactgcagatttcatgtaacaacttggtggcaccgggggggaagtacagtcacctaataagttgccggcgcccgcgcccccattggccgtgcgcg

SEQ ID NO: 371542 - DNA, 122 bp, Homo sapiens
acccaaaaaaatctcacatcacatctacatacatcgtcagaaaaatacgtggaataaagacgtctaaattaaccacgaaaaaaattatcaaaatctactaaataaacattgggaaatatgac

SEQ ID NO: 371543 - DNA, 122 bp, Homo sapiens
gccgcccgcggagccgcgagggcgtctcctggaggcgcaagaggactgggcggggcggggcgcgcccaccggccggcccagggcacctcgcgcgggtgcacacgccgcagccccccggggcg

SEQ ID NO: 371544 - DNA, 122 bp, Homo sapiens
ggcttttgtaccaagggttctgcttgttccctgaggaagcaggctctttgaatcttggaccgcatttaaaataaatctccagcagaactcaaattcacttagcaaatgatagcttattctga

SEQ ID NO: 371545 - DNA, 122 bp, Homo sapiens
agctggggtggggctgggaacatctcctagctggacctgctgtccttcctctgagaaccacgttcacctctgtgtgcatctcccctaagctcctgagtcttttcttgaatacagctccaaga

SEQ ID NO: 371546 - DNA, 122 bp, Homo sapiens
tcctccaggctcggagctcccagccctggccctctgcctgctgtgctccgagcccaggctcgctcgcttcagatacccctcaagtctgggagcctgggaatccccaaggcccccagcccccg

SEQ ID NO: 371547 - DNA, 122 bp, Homo sapiens
ccacccccaggttcccgtgcatacacaacattgcgggataggtattgtggaatgaggatccgtgttacgacctacagaagatgtggctgtgaagtcaggagtcacggtctcagagttgactg

SEQ ID NO: 371548 - DNA, 122 bp, Homo sapiens
gccaatcatcgcccttacaggaagtgacgttatcatgcctcgcccgacggaaaccagaatcgttttgggtctggtcgccaagatggcgtcctccgcctccgcccggactccggcagggaagc

SEQ ID NO: 371549 - DNA, 122 bp, Homo sapiens
ttaagataaaagaactgcaccttgaaagttacacactctaagtttacacactatgcaagccggagtgaaggttaagagccaagtgcctgagacaacatccctagctgagttgtactcttctg

SEQ ID NO: 371550 - DNA, 122 bp, Homo sapiens
cattccctgcggtctgggcgttcaggcccttcggtctgggcgatcccggagaaccacccacggggctttaaaaatgttggtgcccaccacctccccggaacagggcccgctctacctcggtc

SEQ ID NO: 371551 - DNA, 122 bp, Homo sapiens
tacactgcaaacaatggcgagggcgcctgctcggctcggctcgaaactccggagaggcagcgcaaagattctgacttttcacttgggcagagcccgtccgccgcctccccgcgctccggctg

SEQ ID NO: 371552 - DNA, 122 bp, Homo sapiens
tccatggctttcagcgtgtttatagatgggcaacatccccacgggcccttttagaacattcgcttcacctcagaaagaaaccccacagcttttagccatcaccctcctccccaggcctaagc

SEQ ID NO: 371553 - DNA, 122 bp, Homo sapiens
tggggagaggagaccggtctgcgtggccaaggtgattgaggcctctgaggggcctcatgccggtggggttgctgtcccccttcctgagactcaggagccctgtgggtcagggcagcacagca

SEQ ID NO: 371554 - DNA, 122 bp, Homo sapiens
gaaatacccgctcgaccatgcaaaatggcgagccccatgatacatttctgctcaagatggcggcgccatgtaatgcaaaaggcagagggaaattgcaaggcatcacagtcccgtcttccgta

SEQ ID NO: 371555 - DNA, 122 bp, Homo sapiens
tccgggccgcatgggtcctggataaggacctcaagaggttgtagtggcgccccttcgctccggcgtactgtctgaaccctgtgcccaaagagggctgtggcagttcctgcaccaaccgcctg

SEQ ID NO: 371556 - DNA, 122 bp, Homo sapiens
gccccctgcttgagcatgttagccgggcggtagggacggagacagttctctcatgacgttcgagtaaccaggaaacttcatcacagggacaacaccacagcacccgaggactcaatgtctag

SEQ ID NO: 371557 - DNA, 122 bp, Homo sapiens
gcagccggacgccgtcctcccgccgcgacggggcaccagcccgccgagaaatggctgccccggggctcctgcgccctctgagaagagtttgtgggcttgatgagtttgctttaccaagtatt

SEQ ID NO: 371558 - DNA, 122 bp, Homo sapiens
ggcgagggcttcaccaaagtggctgcgtgaaggccagaccggcagaaaatgaatcgcaaacgaaaaagagagagagagaaacacacaagcaggacttcctccaactctcaactacaccccac

SEQ ID NO: 371559 - DNA, 122 bp, Homo sapiens
gacacaatttccaagacatctcataacaggttgatctcaagccagtaaatataaacacaccgcagcctagagttcacttttcccccttctgattttctcaaggagctagtttcttttgggca

SEQ ID NO: 371560 - DNA, 122 bp, Homo sapiens
cgggcgggccccaggctgcaggggcggtggcggcgctgagctgggcgggccggggcggggcggccgggcggccggggcggggctacactcgggccccgcgtcctgctcccatggccgccccc

SEQ ID NO: 371561 - DNA, 122 bp, Homo sapiens
agcccccgccctgttcgaggaaggaaaggcccagaacttgcacacagcaggcaggcccagcggctgggtttctctagcacctcggcattgtctgcctgctcttccaggcgtgcagggcagtg

SEQ ID NO: 371562 - DNA, 122 bp, Homo sapiens
gaggagctgcaaccccttccctttctgcaaccccttccctttcggcaggccaggcttgggcgccacctgctggccgctcccggcaccaccgcctgcgcccatgcgagcagcgccactgggga

SEQ ID NO: 371563 - DNA, 122 bp, Homo sapiens
gaacacatagtaatgtatgaagagtggagagtgtatccggagggacaatcagaagatacccggtacagaaaacaaatgtacttaagaggaaaattatattcagagtaggcagagaggaagaa

SEQ ID NO: 371564 - DNA, 122 bp, Homo sapiens
cgcccactttggcagcatatatactaaaattggaatgatacagagaagattagcgtggcccgtgtgtaaggatggcatgaaaattcatggtgtcccatataaaaataaaataaaaaaagaag

SEQ ID NO: 371565 - DNA, 122 bp, Homo sapiens
tccccgcgtcataatttttcttaattcccaagttttagttctggtatccttccaccagaccgtttttccttcatgtaaattaactttctgtccagaaaagtgttgttccgctgctgtggaga

SEQ ID NO: 371566 - DNA, 122 bp, Homo sapiens
ttatcagctccaggacaaatctgcctctgaccaccacgtttgctgggacatctttgggaccggaggttttcatgtgcattcttgtttctcatgcctttcctcctctttatcatcttccccgc

SEQ ID NO: 371567 - DNA, 122 bp, Homo sapiens
ggggcagattgaggtgggagcccccctgtgtctcttcaaacacacattttagactggccacgttcaaatatgagaactgccatctgctaactgtttgacctgctagcaagtgagttaacttc

SEQ ID NO: 371568 - DNA, 122 bp, Homo sapiens
cttatcaggacatatacctaccccacccctgcccagtgcctgttattattcctagtacaccgcaggagtaatgtatataaaattgctctactgaattgcctggataaactcagcctttaagc

SEQ ID NO: 371569 - DNA, 122 bp, Homo sapiens
cgcataaaagcccactcccgggggcggggcctgagctagctgggcggggcctgaaggagccgggagctcctgcagcttcatcgcgttactaagagacgcgagggtcgcgaagggcacaacac

SEQ ID NO: 371570 - DNA, 122 bp, Homo sapiens
tgccttgcccttccctgagctcaggatggacgctcaattggtcccagttattgtctgcagcgcctgcctgcagcctcgatccagcccagctccaccccttgcctgcaaggtctgtttcctaa

SEQ ID NO: 371571 - DNA, 122 bp, Homo sapiens
gggggggggtcatgcaattggctaagcacggagaagctctcgttccattggccatttttccggcctcaagcccacccctaggcctgaatccccgtcgcgttccgccggtctgcttctcggcc

SEQ ID NO: 371572 - DNA, 122 bp, Homo sapiens
ctcccaagtgtgtgaggggctgcagtgccgagctccacttcacaagactcactcctgccccgccacctcctgagcagacgcagtcaagcccgacctacctttcaacaaacatgtattagcac

SEQ ID NO: 371573 - DNA, 122 bp, Homo sapiens
cttaatgaataccacactgctatactcgagttcacaggcaccacccccaacacagcaactcggaccagattccaatggggaacgggaggaggtggcccactttctacaggcatccactggaa

SEQ ID NO: 371574 - DNA, 122 bp, Homo sapiens
atcagaactgcaaagaattgtctccttcttcctgccgaatggcccatgtctcatccacaccgagatggtgaacggctctttggggctgaccgacacgacgccatccgggatcctcactgcct

SEQ ID NO: 371575 - DNA, 122 bp, Homo sapiens
gacactcgcggatgggggaaagcggggagcagggggttcctccttacctttgagggatctcggtttcgcttgcttgcggcgagacatcctaaaagcaaacagctgaagttgtttcaattcag

SEQ ID NO: 371576 - DNA, 122 bp, Homo sapiens
gaatctcagggtttctggcatcccgactcagtccctctaaggagacagcactacgtttagcgccaggacccggcgggtgtcatgtgtagggggaaatcaaataaaacatacggaggagcgcg

SEQ ID NO: 371577 - DNA, 122 bp, Homo sapiens
aacttcttcccctaaagcgccacgacatcagtggagtctaaacaccgcgccggatgatggcgtcaccacggcgctcattggagccctgggaagaaggttgaaaggcattctgggaaatgtag

SEQ ID NO: 371578 - DNA, 122 bp, Homo sapiens
tttctgattaatgcccacctaagcactaggaggacagagtggagcctcaggacatttgagcgccctttgcagaggggaggagactgtcttctcttattcctgggtagtgactgggattcaat

SEQ ID NO: 371579 - DNA, 122 bp, Homo sapiens
aggagcttcagggttcccgccaggccacactcatctccctgcccctttgaggttcccgaccgaggcaaggggtcttgtgcaagtcaggtttgtagatccctagtgaccagacccacgggagc

SEQ ID NO: 371580 - DNA, 122 bp, Homo sapiens
agtgatggcaggcggatgggagaactgctgccactgaaggaagcgtgtggtttatatgcgcgcaggaagcgtgtggtttatatgcgcgcaggaagcgtgtggtgtatatgcgcgcaggaagc

SEQ ID NO: 371581 - DNA, 122 bp, Homo sapiens
cctggcctttcctggcaggaccctgagtgacccaagtgtcctcctgttctccctgggtcccggctcctggctcccgtgccctgctggccttctttgacaattgcagtgtttgctgttcatct

SEQ ID NO: 371582 - DNA, 122 bp, Homo sapiens
gttatgctctctcagcaagttccccagacttgctcaggagaaggccatctcccaggccctcggtcctctgctaccactcttgtcaaatctcagcacaaggacagagcctagaccaggtcatg

SEQ ID NO: 371583 - DNA, 122 bp, Homo sapiens
ttttctcctggcagaagaggacctctttgtccaggggcagggctgatcaggggctgattccgcagctatagtagtacagaacctttctgcaagtaagttagtgaggttgagataactctctc

SEQ ID NO: 371584 - DNA, 122 bp, Homo sapiens
cttcactttggcaagcttataaatgcatttaacaataggatgtgtcacaaaaattagccgcgcatggtggtgccagcctgcagtcccagctactcaggggactgaggcgggagatcatttga

SEQ ID NO: 371585 - DNA, 122 bp, Homo sapiens
gggatattcctcgcgccgcgagtggacgcttccatccaccccatggggagggcctctgcgcgtggctactctgagccctctggaatgccgagatagttgcataatttcagaaaccacggcat

SEQ ID NO: 371586 - DNA, 122 bp, Homo sapiens
gtcattcagttgacgtttctctcttagactcccactgagaaaagcaatcctgggaaaagacgtcatcacgaaggctgtggaaggaggcgagggccttcaggtgccgagggtggtgggcgccc

SEQ ID NO: 371587 - DNA, 122 bp, Homo sapiens
ctggcccacaacaccctatagaatctgtcccttcctcaaacaccactctcccctgcttgccggtctcatcaccttggccttctggctgtcccttgagccactgaggctttctgtgcctcagg

SEQ ID NO: 371588 - DNA, 122 bp, Homo sapiens
cctgcagtgttctttttgacaatttgtcaagatttagggacataaaatgatcttgcaggtcgtaaactggaaaacagtattttggttgtcttaggataattgctgactttgtatcttggata

SEQ ID NO: 371589 - DNA, 122 bp, Homo sapiens
tttaaaatttgataaaagaccaaggccacaccagaaaacacagaatataaaactgtgtatcgacaaaaattaaaaactaaactccttaagagaatcgcttgctaaaaagtttaaaaaacacg

SEQ ID NO: 371590 - DNA, 122 bp, Homo sapiens
gaggcggagcagctaatttgagagcacaacaaataaacaaggagcatctttctggatcatcgatttgaagatgtagaaaaaatcatattttgtattaaaacgaacaagaatatatttggaat

SEQ ID NO: 371591 - DNA, 122 bp, Homo sapiens
cattaatttcacaacataaagaaaagggtttggactttctactgccctccattctgcacacgaaggcaaggtggtaggacatataacaaagattttctctggtgttcagagaagtgactttt

SEQ ID NO: 371592 - DNA, 122 bp, Homo sapiens
cagggagcagcgggctcagtgggtcccgggagtgggtggggcttgcatgttgacgggcagcgcgaggggcgcggctttagtccagggggcggagcctgaccggacctgggtttttcgggcgg

SEQ ID NO: 371593 - DNA, 122 bp, Homo sapiens
tcttgactttgaagtaaggaagctttggaaaatgaggagctttcttttttaaaaaggctgcgctgcatgtggtattatgggagagccacatttaagttaaaggtggttgacaaagggaatgt

SEQ ID NO: 371594 - DNA, 122 bp, Homo sapiens
gccgtgatttatcggcggctcctcctcgccagggcccacggcaggaggagttcaaacacccgcgagaaaagccacccgctattgatcctcgcgtcaggcctcccaagcgctggcgggcattc

SEQ ID NO: 371595 - DNA, 122 bp, Homo sapiens
ttcaggaagtgacagagggacccggagcgggggcggggcaggggctcgcgggggcggggccgaggtcacgcgcggaggggctgggcgggaggctgagcggcgccggggggccgggagcgggg

SEQ ID NO: 371596 - DNA, 122 bp, Homo sapiens
caacaagaaggacctgctggaggacaagatcctgtactcgcacctggtggactacttccccgagttcgatggtgcgccgggctgcggcatggggaggggctcgcgggcagggccttactggg

SEQ ID NO: 371597 - DNA, 122 bp, Homo sapiens
ttggacgaagcgccgggccccgccccctcagccgtgagtgacaatagaagcccttggtaacggggctctgaaaacgggtttgaccggatccagcgatagattctttaagccagaggtctgta

SEQ ID NO: 371598 - DNA, 122 bp, Homo sapiens
ttttgctcaggctcttgcctagtgtcggcgtgttcctgtctgtctccctggcaagagtgccggcttgcgggggcaggacatgtcccgttgatcccccgctccccagtgcctagatcagcccg

SEQ ID NO: 371599 - DNA, 122 bp, Homo sapiens
tgcccccttccaggcatccctgaccagcacagcctcaccccaggggagcccgacaccctccgccatctgctgcctggcacacgacgtgagccacgggcactgaggttaccacagggtccaca

SEQ ID NO: 371600 - DNA, 122 bp, Homo sapiens
ttttcctccatggagcattgcctgcttgccggggctggctatttttatcccaaatgtggccgagagggggctggggctgggtgacggggcagggcaacgtggctgatgggcctgacctgctc

SEQ ID NO: 371601 - DNA, 122 bp, Homo sapiens
cgctgctcggggctctcgcctcagcctcctaccccgcgttccagggtatcctcccctcctcgcgccctagaaagactccagataccgtgtctaactggagagagaaaagctcagacgtggaa

SEQ ID NO: 371602 - DNA, 122 bp, Homo sapiens
gctgatgagaacaatctcagatgaggtagcagaaatggtgtcaacagaggccagcacttacggggaatagataggagccacccaacaccacagcaaatcagcagtgtttccatgaagtgtcc

SEQ ID NO: 371603 - DNA, 122 bp, Homo sapiens
aacctcagccccagccaaagcagcacgcaggccctcagcctcagctcggccggccttctccgcccgtgccagagcctctagctccatggcctgggcctctagcctcatcttctgctgcagcg

SEQ ID NO: 371604 - DNA, 122 bp, Homo sapiens
tcggcgaccttcaggccttccagggccacggcgcgggcaacctggcgggtgagtgcagcgcgcccccgtcccgggtacctccggttgaatctggtggcttgcaccgaccccctcccctgtcc

SEQ ID NO: 371605 - DNA, 122 bp, Homo sapiens
tgagtccgaaagaacgggggaaagccgaattatgcaaatgcggatccctgcgatggggctcgggttacggcccccgccggccccttaggtgaggcacccaccggcagcaagcgcgggcgagg

SEQ ID NO: 371606 - DNA, 122 bp, Homo sapiens
atggggaatttaaatttgtgagcaaagtaggcgactggggagtggggcaaggattgtatgcgtgaaactatgtgttcacctggaggagtaatctagggatacccttaagcctctggcttgag

SEQ ID NO: 371607 - DNA, 122 bp, Homo sapiens
ctctttgtcttcctgtctgccaggtcttatcttctcttttcatatcctggtcttgatcaccgcttccacagtgtttttatacttggcccacttggcaatttatgcatgtgtttttgagtgaa

SEQ ID NO: 371608 - DNA, 122 bp, Homo sapiens
gtgttaactgtattctgactgcgtgggattcaggacggccttggtaataatttcggcctccgagttggtccttgagtaaaacactgccctggtctgcaggagttcccggtgcctgagcacgc

SEQ ID NO: 371609 - DNA, 122 bp, Homo sapiens
ggggccccagtgtctggagaggctgcactttactctctcgaggaagccattctgcacttccgctctcggggctgcttcccgggatggtccctccctttgggtccgcggcgcctccagccaca

SEQ ID NO: 371610 - DNA, 122 bp, Homo sapiens
aaaattactaaaactaaagcaagtgactaagagtgtgaatgaccctggctgcaatgactacgcctgctgggcttcgtaagtaattatgggtgtcttctgtttttgtcagtatcacaagggag

SEQ ID NO: 371611 - DNA, 122 bp, Homo sapiens
atcggagtgtgggctgggactccattgagaggcggaacatgacaggagacggtggagcagcgaaaagtttgttagaagacagggttccacttcggggcggggcgggggcagtgaacattccc

SEQ ID NO: 371612 - DNA, 122 bp, Homo sapiens
ccgtgccgaacttgaggatgtcgtccagctcctgcttggtcatggaccccgacttggagccgaggccgggccgcaccaccaggtgggtgagcatcatcttgcgcttggccacctgcgtgatg

SEQ ID NO: 371613 - DNA, 122 bp, Homo sapiens
ctacaccccgctgcctctcatggagaagaggcagggtagtgtaatggagagagtgcgggccgagtagcagactgggccttctgcagtcacggtgtcgtcctaggctccctggagacggtggc

SEQ ID NO: 371614 - DNA, 122 bp, Homo sapiens
actaacattctgtccccttctctcatgtagatgaaccactaacattctgtccccttctctcgtgtagatgaaccactaagccttgggaattgtacccttggtgggggttctttgcccaggtg

SEQ ID NO: 371615 - DNA, 122 bp, Homo sapiens
acctgaggatcaggccgtcaccttttgcaacttttcttctaaagggaaataagatgatatcgttcctatcctggggagcttgctctccaagttagtagtagttccagcagagagattgggga

SEQ ID NO: 371616 - DNA, 122 bp, Homo sapiens
cggaccgcctcgcgggctgccaaacggccggaccccctcagcgcgctacgcccccagccgcgctcgccctgcctgtgtccgccattacgcgattccccgccctgggcggcagccacaccccg

SEQ ID NO: 371617 - DNA, 122 bp, Homo sapiens
cccccggcgcgggcagctctgcgcgaaggtgggcgacggtgggggcacaagaacagcagccgggggcgaaggaatcagccccgcagcggctcctaagcctccccgctggccgcggctgcgcc

SEQ ID NO: 371618 - DNA, 122 bp, Homo sapiens
tgcaggctacctcgttggcgtcgatgccgctgttgacggcccacgtggtctggaagtattcgagcatgcgctgcttgagcggccgcggcaggcggtgcacacggatgaagtccttgaggtcc

SEQ ID NO: 371619 - DNA, 122 bp, Homo sapiens
gacttgttaagtgccaggatagaaactgggtagcccaggaaagatgcccagaggaggggacgtctacttggagatgtaaaggctgatgtaggatagaaatacctggaggaaatgcctttgag

SEQ ID NO: 371620 - DNA, 122 bp, Homo sapiens
gaactccatttctatggcaacccgcgcggcagccgcctctttgttctggagcggcggccacgccccctccagtgtgaaaggctgcgtttccggcccgtggggctccaatcaaaatgggacgc

SEQ ID NO: 371621 - DNA, 122 bp, Homo sapiens
atctggtccagttggtccttctgggtgacagctgtggcacctgaggcctctcagtggacacgtgcagaaaaagcggtctacagtgcagctcactgcgggcaggcttgagtgtcctgagtgcc

SEQ ID NO: 371622 - DNA, 122 bp, Homo sapiens
agacagaaaaagccttaggccctctggataatgtagaactgtctaccagccctaaatttccggcagctagacttagtttaggtaagagaattacctcctaaatccttcaagctattgtagtc

SEQ ID NO: 371623 - DNA, 122 bp, Homo sapiens
gccgagcaagccgaggtaactcctggctgcgcggggctcgtcttgtcttctcaggttggccgctctgggggggtccggtctccatcgcaggctgcggtccacggctgtgactggccctcggc

SEQ ID NO: 371624 - DNA, 122 bp, Homo sapiens
taaaactttctttttaaagtatttgtatttgatgtgcttagctacaaaaaaggtaacattcgtctttaaaaaggaggattggaatagaagagtttgaagtagttgatttgcacatgttagta

SEQ ID NO: 371625 - DNA, 122 bp, Homo sapiens
gccaccgcgcgtccggcctgggaactcggttccgtaaacctgacaccctcgtgggaggagcgcgccccgcagggcccgcccccgggcatgtggtctctccgctgccagggcgccccctgcct

SEQ ID NO: 371626 - DNA, 122 bp, Homo sapiens
atgtaatcttgcccagctgtacctggggaatctgcctgatagttccactggggatcctctcggggaactgctctaatgccttccaggaggtctggctcatgaagccggcggttatcagcacg

SEQ ID NO: 371627 - DNA, 122 bp, Homo sapiens
gaaccatagagatgtggcttcctagagatccgggatgaggggcggggtgcaaccggaagtcgcagtattctcggctcggccattattctgtgcctcggctgccggaagggctcgttcctgtg

SEQ ID NO: 371628 - DNA, 122 bp, Homo sapiens
ggactgcgattcctttcgcctgccgagctgtagcggcagtgtctgcgggcagaggagcggcggccgtggcagcagcatccccagcccgggcgggacccttgagcgccggagccgacagctgg

SEQ ID NO: 371629 - DNA, 122 bp, Homo sapiens
gcccccggagcagccgcggagtgtgcctgtgcagagcctgcacccaggggccagcagaggcgagagcccgtgtgcacagggccccgtgcgaccgagaagggccacccgggggctcgggaagg

SEQ ID NO: 371630 - DNA, 122 bp, Homo sapiens
actccgatgtgcgcttcctcctctcggagagtggcagcggcaagggggctgccatggtgacggcggtggcctaccgcttggccgagcagcaccggcagatagaggagaccctggctcatttc

SEQ ID NO: 371631 - DNA, 122 bp, Homo sapiens
cctgaggagaccagcgtctcttaagatggacgcctggctggaagggcagcccgagggaggcggggcgggagggggcggcctggcggggctgtgggcgtggtcaaggacaccccgtgccagag

SEQ ID NO: 371632 - DNA, 122 bp, Homo sapiens
tctgccttctctgtcattacatcatttcaccgtcttctcatggatggtgcattgtgacttcgtgcattccatggccattccatatggcaaccaaaggaagggcagggaatgaggacagagtg

SEQ ID NO: 371633 - DNA, 122 bp, Homo sapiens
cacacatacatcggctctgtagggtaaaacatccccgcctgtttaccaagagatcagatccgaaaagacagtatgaaatgagacctctggggagactgtcaaccccaggggtaaaacaaaaa

SEQ ID NO: 371634 - DNA, 122 bp, Homo sapiens
gtgtttacatgagtaatggagctgccgggggaggggagttgtaagcagagcgctgagcctcgcagctcgcattcggagggaagctgacatccacaccaagtcgagacttccagggatgtggc

SEQ ID NO: 371635 - DNA, 122 bp, Homo sapiens
gatttggccataccactgtggcttgggcagaactttgcccaggacagatggcacttcctgcggggttctcagtcaaggaggggacagaaaaaaagacagacaacctctgcggggttggagcc

SEQ ID NO: 371636 - DNA, 122 bp, Homo sapiens
gacacgccgcgcggccccccagtctcccgcggccgctcccccaggcatggcacagggcctcgcctcactatggcagcagcacggcacagcacgctcgacttcatgctcagtgccaaagctga

SEQ ID NO: 371637 - DNA, 122 bp, Homo sapiens
atttctacttcggagaatacccactttaaaaatcagagtggcgtccaagaaagaagtcttcgaagccaacctgaaaaccgagtgtgacctttggcacctgatggtgaaggagatgtgggctg

SEQ ID NO: 371638 - DNA, 122 bp, Homo sapiens
atcgcggggtaggtggggtcgtctggaggtagctggctccgcccggcccgcgggcgagtccggaatacagttacccacctcagttgcccaccggaaagcaaagggagaggaacccgccagac

SEQ ID NO: 371639 - DNA, 122 bp, Homo sapiens
gcacctgcctgagttgctgtgatcagtgtcagtctctgcactgtttggcacaagcgtgcgcgctgtgcgcattccctgaaccccctgcactgtttggctcgagcgcgcacgcgctgcttgcg

SEQ ID NO: 371640 - DNA, 122 bp, Homo sapiens
tccaaagtccatcttgcagagtcaaatgaaaaccagattcctggtcttatctgagagctacgtgactgtttcctgtcactcctttggagcctgggaaggtccccacatgcattgtctaaact

SEQ ID NO: 371641 - DNA, 122 bp, Homo sapiens
tcctccctccaggaaactcccagtacagccagcagcaggccgggtaccagcagggtgccgcgcagcagcagacgtactcccagcagcagtaccccagccagcagagctaccccgggcagcag

SEQ ID NO: 371642 - DNA, 122 bp, Homo sapiens
acctcctcccttaataaaacatgtatagaagactttgagctcaatggattacatatgcatcgtactcagatattttacaaagaacatgagactagggttattgagaacatattccatgaaga

SEQ ID NO: 371643 - DNA, 122 bp, Homo sapiens
ccacacgaagaccagattggtcagagctgaggcccctcagacagcaaaggacataaacgccgttaagagcgcctctggctccggacgctgtgtccttctcctggtgattaaaggctactttt

SEQ ID NO: 371644 - DNA, 122 bp, Homo sapiens
agacgcgatggggaggggaatacttgcgcgcttcaaaaccccaacctcgaggtctccagccgcgcctgacccgggagccgggtgcgcccccagtgtccgcgcacgaacccggcgccctggca

SEQ ID NO: 371645 - DNA, 122 bp, Homo sapiens
tttggcaatcagacaacctctttcatgatagttttctcgacaagattaagaaggctattgcgtctataagagtgattagaatgtgatgcctctgaaaagccactgaatcaactgagcatatt

SEQ ID NO: 371646 - DNA, 122 bp, Homo sapiens
atggagctgggccttggagagtggggaaggcaggcagtaacacagcaggcagtagatcaacgaggccatatcatggattgtgctgtgggatgtgaaggaaatgaacagacggaggacgcaga

SEQ ID NO: 371647 - DNA, 122 bp, Homo sapiens
tgcagcccaccttgccaaacatccactcgtcgaagaagtagcgcgaggcgtccaccgggacgcaggtgagcagcagcagcaagtccccggccgccaggttagagatgaagatgttggggacg

SEQ ID NO: 371648 - DNA, 122 bp, Homo sapiens
aaaaatctatcatagaatatcgctgctagggtgttttttttctaattcactgattacagccgtatggggaccgcgctactattaaactattgaattcatggagacaaggttgaaattggacc

SEQ ID NO: 371649 - DNA, 122 bp, Homo sapiens
acaccggagtgggaggactaggggaccacagtggggctggcagtcagcccacctgcccagcggagggcacggccgtccgtcccggccggtgcaaccgctgggcaagcagcaggcgggaaaag

SEQ ID NO: 371650 - DNA, 122 bp, Homo sapiens
aggactagtccctactcaagtgagtgagggaagggagggcaggggagaaagcaaacatcccggctgagcacagggtgatgccatacctggcaccgagggaacaaagggcagggagggtgtga

SEQ ID NO: 371651 - DNA, 122 bp, Homo sapiens
cctcggaggaggcccatgaggaactgccgcatggtctcgaactcgaaagggcgcacgctgcgggagctgtcaatcacgaacaccagatccaggggcccagtgtgacacctgggacctgcggg

SEQ ID NO: 371652 - DNA, 122 bp, Homo sapiens
tgacaggtaggtcagggtggagggtgaaggactccgctggaacggtctcaggcttgcaaacggagccttgctagtgagtactcaagttatggccccttgggcctcccctgtcctggcatccc

SEQ ID NO: 371653 - DNA, 122 bp, Homo sapiens
attctcctgaagggaagtgtatctgaggtgtatgggacaggtctccctgcgctgggatgccggccactaatgagccctgaggtgattttaggtcaaaagtgtattgttgggttttctgcgtt

SEQ ID NO: 371654 - DNA, 122 bp, Homo sapiens
ttgcataaatattcaaagggtcaaagaaatggtaaattcaaccccatccctgacataagacgaatacaaacctcactggctttcctaggtttgtgtttttgattgagaataggcagggaacc

SEQ ID NO: 371655 - DNA, 122 bp, Homo sapiens
accaagcgccgcaaagaagttgtagggctgcgagatgctccagctctgccctctgagaaacgcacttcagcgttaaaccccagggttcctctcaggcggagcagtgagcatggagagccggg

SEQ ID NO: 371656 - DNA, 122 bp, Homo sapiens
ccggggtcggaggctgggccatcggggctcccggaggtggaggatgcaccatcaggaccccgggagtcggaggcttacccatcgggccccccagcgggggagccgggactatcgggccccct

SEQ ID NO: 371657 - DNA, 122 bp, Homo sapiens
taccagccctgctggacccccgcaggtgagccctggatgtggcctgcatctagcatgggtcgggaaaggcagccccaacacccctcaatccaggcttggggcaaagggaggggtgggcaggt

SEQ ID NO: 371658 - DNA, 122 bp, Homo sapiens
cttgctcatccctggggtggttagcccgagtaagaaaccctgaagccaaatgatccctcccggccctagtggagcagcacctgcacctcaaatgtcaaaatcgcaaatcagttcacagcgga

SEQ ID NO: 371659 - DNA, 122 bp, Homo sapiens
cttctccagtgtccttctttggggccctgtgggacccgggttggcagagcaagcttgatgcgtctgcgtcccagcccccgaccccagattcgccctcaccccggcccaggcctgagccctcc

SEQ ID NO: 371660 - DNA, 122 bp, Homo sapiens
atcgggtcactcccacccgactattgtgcttttcagaccggcttaaaaaacggcgcaccacgagactatattcccacacctggctcggaggggcctatgcccacggaatctcgctgatcgct

SEQ ID NO: 371661 - DNA, 122 bp, Homo sapiens
tgcatatattagatggctcctaaataggatccatctagaattgttcgtctatcatttttacgcatggagcccaggaatttttaatacatttgggctttctggtgggttcttccaaatgcttt

SEQ ID NO: 371662 - DNA, 122 bp, Homo sapiens
tttcccaaactctattttttcctcaatcaacattctactcaatcccctgcaattgactctcggataattacataaatcactgggcacctactgggtgcagggcacaatgaaagacaaaagtg

SEQ ID NO: 371663 - DNA, 122 bp, Homo sapiens
ggcggtggccgaagaagtatctcttttcagcatgacggacatgattctgttttcgctcatcgtgggtctcctaacctactggttcctcttcagaaagaaaaaagaagaagtccccgagttca

SEQ ID NO: 371664 - DNA, 122 bp, Homo sapiens
atagctgtgagccactgcagccagccgacaatggtttatctcaaagcacatgcaatccaccgtgttgcttcatccataaatatttcaaatgtatctctaattaagactactttaaaacacag

SEQ ID NO: 371665 - DNA, 122 bp, Homo sapiens
aaccccaacaccccaatactttaatgtgtttttcacgcaaaggcatttttgcattataaccgtaatcaagaaataaacacggatacaataactccaaatagccttcaggccctatgcaaaat

SEQ ID NO: 371666 - DNA, 122 bp, Homo sapiens
tgtctacctgaaggtcagagaaggcttctctgagcagctgaccttgagctgaaaactggacgagaagccagctctgcaaagacggcagggaagtgcattcagacggaggaacaccaagcaca

SEQ ID NO: 371667 - DNA, 122 bp, Homo sapiens
ttccggtccgccccgcgtctcttcccgcccccggccgcgcccacaaggaacgggaggacgcgcagggtccatgtgcactttattcactcgtgtcgtcgcctctcgggtccatgcgtcggggc

SEQ ID NO: 371668 - DNA, 122 bp, Homo sapiens
tattgcagggactcctcgctgggctgaccctggcaccagctctggaaatgcaggcaggagcgaaggggcaggcctgggccactccctccccatcctccctgggccccacccacaagtttcca

SEQ ID NO: 371669 - DNA, 122 bp, Homo sapiens
tcctacagctgtaatgaggttcatgggggatgccccactgaagggccagagtgacctggacgtgctttgtaacctcctgaaggtcagtccagccaactttgccagatgccccctttcctgct

SEQ ID NO: 371670 - DNA, 122 bp, Homo sapiens
gccgtggggttcatggtgggacagggatgcagcgggtgccggggctggggcccggcatcccgaggagcagggctgggccgtcttactgagagccatctgatacacggtccgctttttctcca

SEQ ID NO: 371671 - DNA, 122 bp, Homo sapiens
agaggtcagaggccaaaatatggggagacagacagatttagagagagacccagagggtaacgaggtaagaacaacacacaggcagagagacagagagacagacagacagagagaggccgtca

SEQ ID NO: 371672 - DNA, 122 bp, Homo sapiens
tgaccttgtgatctgcccacctcggcctcccaaagtgctgggattacaggcgtgagccaccgtgcctggccgcccaggcctgtgtttttgaatatccagcagaacattagaaaatgttgcag

SEQ ID NO: 371673 - DNA, 122 bp, Homo sapiens
agtgaacagaagctcagtgctggtcaagtgaagcctccagttaccaggcagctgccctcacgtgcatcttctgggatgtagaacaaaggaagtgaggctgaagccagaagcaggtttttcca

SEQ ID NO: 371674 - DNA, 122 bp, Homo sapiens
ccttctcgccacactccgccccctcgtccccgagcgcccccaggcttctttctcacgcttcgaacctccgccccagcactccgatgcggccccctccgctgggactaggcctctccactcac

SEQ ID NO: 371675 - DNA, 122 bp, Homo sapiens
aaatatctaatgttcaattgtaggttgttttctgggctgcaactcttttctgttgcccctcgcaaatcttcaataaaatctgctatgaacattgcctgtgtcaatgatattatggggagagg

SEQ ID NO: 371676 - DNA, 122 bp, Homo sapiens
aggcggttctggaagtgctcctggcagacggcagggcagtgaatgaaaacacttggaaggcgcagtgtgaagcggaaatgcggacgcaaatgtcacgtattattaccgctgccgccacggtt

SEQ ID NO: 371677 - DNA, 122 bp, Homo sapiens
acccagcggccacgggcttctgaagacccgggtgggaagtgcggcccgggaaagcgcaagcgtctccatggcaacgagggcggacggcgtcagagcgagtcgcttccggaagtgacgtgcgg

SEQ ID NO: 371678 - DNA, 122 bp, Homo sapiens
ctccagaggcaaagctgctgccctcgcctcttccaggggtaatgactcaggggaattcagcgctgcggcagacacagccaagcggccagcggagctgctggcatcccagccctgcctggccg

SEQ ID NO: 371679 - DNA, 122 bp, Homo sapiens
aaggaacttagcccagggcccgtatgcagcaagcacttaaatggtatagctgctgctactcgggttatcaaaaaggagctgcaaaaaagtctaggttctgcaggagagcccttccaagaacc

SEQ ID NO: 371680 - DNA, 122 bp, Homo sapiens
gaggtcctgcacacctggggatgcgtcgtgggcgccgaggagagcgtagcctcctgttaacgtagcctcctgctgctctttggggtagaccagccgtttccacgcacaggctgcacattgtt

SEQ ID NO: 371681 - DNA, 122 bp, Homo sapiens
tttaaagtaattgtctatagaatttccatgtaagaagctgccttcactttgcccagtatgcgctgcaagaaaagatgagacatatgacatcttataccaaaagacagatacaattagctcca

SEQ ID NO: 371682 - DNA, 122 bp, Homo sapiens
gccgggaggaaaaggcgggccgagaggcggggctggaggccgagtgtggccgagggaagccgaactttccagtttcgctgaggcctgttaaccgctgggggcgccttcgggacagctggctt

SEQ ID NO: 371683 - DNA, 122 bp, Homo sapiens
tggagctcccggaggcgcggcagggtcaggagctcggtggcatggcggcggtggctgccccgatttcctccagctgccactccttgcttcgtgtccccggtccctagacgcctcgtctcctc

SEQ ID NO: 371684 - DNA, 122 bp, Homo sapiens
aggcggagaatccgattttgctgctcctgtttcctaagtgaggacatggagttctagccccgctgaatgaaccacccgaggcctgaaccagaacccctctgcctccacggccgccccttctt

SEQ ID NO: 371685 - DNA, 122 bp, Homo sapiens
ctctctggaggggagtgaagccctggctgtgtctccctgtagggctgcctgacgcccgcccgcctggagccgcagcccacggaggtcggagcctgcccacccgccttgtcctccaggatcgg

SEQ ID NO: 371686 - DNA, 122 bp, Homo sapiens
agaggatgctagaatagggcaatgggaaacgcctgagtcaccggagggcctctttgattccgacagcccaatcactgaaaaggaaaaagagagagagagtggttcattaatgatccgaggga

SEQ ID NO: 371687 - DNA, 122 bp, Homo sapiens
aggcgacagcagcttctcagggcccagctccgcactcagcatggcccgggcccggctcagcgcctgacggatgccctgcagctcctggggctcgggcccagcccgcacctgggtcagtaggt

SEQ ID NO: 371688 - DNA, 122 bp, Homo sapiens
cccgtctgttcccggccggtaaaactccactgagaatccgaagaaggagcccgggggccccgagagtactgctggggcctccgcgtctaagttgaagcccccgaccctgggtggcggcggca

SEQ ID NO: 371689 - DNA, 122 bp, Homo sapiens
cccgccgtgtacgtttcgcgggacaaaaaccacgcgcccgccgggccgcgctcaggccttcgccctcagggacttcggaaccgccccgtcctcaagatcgaaaagcccagagccccgcggcg

SEQ ID NO: 371690 - DNA, 122 bp, Homo sapiens
cggagggggcccgaaggacttcggcgcgggactcaagtacaactcccggcacgaggtgagcgcgggccggggacccggggcgctgggaagctcctgcccgcccgaccctgcagcgcggcgct

SEQ ID NO: 371691 - DNA, 122 bp, Homo sapiens
tccccgcccccgacccctgccctcgggcctccccccggggaggggctgctccctggcacccggcagcgctccccggaacatcccgggcctcgcacccagccgtccccttcccgttcctttca

SEQ ID NO: 371692 - DNA, 122 bp, Homo sapiens
tcataagagaaaaagcattttgtttgaactccacccactgaccttttgtgggtgagctttcggtgaaacagcaacatcctcagaaatcttagagacacggctttgtaacccgggggagagac

SEQ ID NO: 371693 - DNA, 122 bp, Homo sapiens
ttcacagcccagatcttcggcgtccccgagacgcagccaggcgcccggcccggcccggcccggccctctgcacagccccacttcaggccacgccgtttccttgaccttcccccggcagggtc

SEQ ID NO: 371694 - DNA, 122 bp, Homo sapiens
actaagactgcatggctggcaaactccaagcccagcctaagctgttcttacaccaacaggcgccaccaaagacaccacccaggcctcactgcctgcgccgtatgcctcccctctgcggagca

SEQ ID NO: 371695 - DNA, 122 bp, Homo sapiens
ggagggcgtcccgttagaatgacagggcttttgcaaaagtctgacacccgtggcacagagcgccccagatatggagggtttcacaggtaggtatacttcagaagaaatttcctgacttgaat

SEQ ID NO: 371696 - DNA, 122 bp, Homo sapiens
cgtattctgggtacctcaggggtttcttcgcacatactgggaccctcaccccacttgctgcgtaccaggtcctggtatttgtcccagtggactccagggaaatcatcctcctccctgaaacc

SEQ ID NO: 371697 - DNA, 122 bp, Homo sapiens
gattcagcactgcacattccaaaaacagagacacagagtccacccggacagcagcaagctcgactttgctaaaattcaaatggtatcatccactgacagaggccacgcgttcgagtagggtg

SEQ ID NO: 371698 - DNA, 122 bp, Homo sapiens
caggattcaccatcttggcaagatggttcttgaactcatgacctcgtgatccaccctcgtcggcctcccaaagtgctgcgattacaggcatgagccaccacgctcggcctcatttgttgtta

SEQ ID NO: 371699 - DNA, 122 bp, Homo sapiens
tatctgggaaggatggagggagctcaggagacacagaaaagatggcgtatgaatcctgtccggcctgaacgaggctggagttgtgcctctggatagcttcaagcactgatcagattgtcagc

SEQ ID NO: 371700 - DNA, 122 bp, Homo sapiens
ccttttcccgaagtcgcaacacgcaggcgcgctccggctcgctcaccacgcacggaagtgcgcctgcgccaggagacgccccgcccagcccctggccgactataaagtgtcgagcttctcct

SEQ ID NO: 371701 - DNA, 122 bp, Homo sapiens
ctcgcgaccccacgtgttgagtcacaaagagtctcttgtgtattgatggccggacacactcgtttccgcagtggctgctttcctggaagacgtttcctttcttctgtattaatgaagcctgg

SEQ ID NO: 371702 - DNA, 122 bp, Homo sapiens
agtgatcctcctgcttcagcctcccaaaatgctgggattacaggtgtgagccaccgtgcccggcctccctgacctttttacacagaccaccacagctacagggaggccctggtggcggtgct

SEQ ID NO: 371703 - DNA, 122 bp, Homo sapiens
gactggatggaggacgagaagcagcctgcctctgggcgacagctgcggacgcagcctcgccgcctcgccgcctcagcctcggtcccagcgtctctaaagccgcgcccattttacagatgcag

SEQ ID NO: 371704 - DNA, 122 bp, Homo sapiens
cccctaggctggccaggtcgcctcagtgccacgcctccctggcccgcgattcagcctgcacgttacgctttgttcccagaagcaggttttcgaaacgcggttccctctcggctccagctgtt

SEQ ID NO: 371705 - DNA, 122 bp, Homo sapiens
ctgcctagggctcgtctgcacagccagccgggccaccctttgtctctgcagcaatggttccgggtagaacccaagaacgtgcatttctaacaaggtcccaagcaacccactgttaagtttca

SEQ ID NO: 371706 - DNA, 122 bp, Homo sapiens
cgcgagcgcctgggcgcgccgggcttcgcgtgggagcctttccgcggcctggagctgccacgtcgcgccttccccgctgccgcccccgccccgggctccgccgccctcttggagcccccgga

SEQ ID NO: 371707 - DNA, 122 bp, Homo sapiens
ctaaagagggtgagagtcctgcgggaggactcaaaatccacaacgggcggagcccatagccggactcctggctgggcccttcatggggcgggacgcctggaatctcgaggggcgggggcctg

SEQ ID NO: 371708 - DNA, 122 bp, Homo sapiens
tcttttggttagatttaaaacaaagttaagagaatctttaaaaaaaaacaaaacaaaacacgtttaccatgttgaaaattagaggagaagaaagaaaagaagaaaataaaaattacttgcag

SEQ ID NO: 371709 - DNA, 122 bp, Homo sapiens
gtagtttccctctgggggggtcgcctgattggttgtgagagttcagcgccctgggtcctgcgccctccgtggaagctcctcccagcctaatgatggaggctgggcaaccagcacagtgttca

SEQ ID NO: 371710 - DNA, 122 bp, Homo sapiens
cacaccaagcccggcagccacccgagggtgaactgaggggaaggggaccgcactggggcacggacgccaggcacagacaccgaatggctggctttgtcagaagactctaggcaaaccgtgga

SEQ ID NO: 371711 - DNA, 122 bp, Homo sapiens
gcatcccccaagtgttgcccttggctcttttccaataccattgtttcttttttatgttctcgctttcctgtgggtgacagattatggagttgtgggttgaattttgtctgccaaggacatat

SEQ ID NO: 371712 - DNA, 122 bp, Homo sapiens
cgaggggcgccgggaggctccgcgcgctgctgctggcgctggtggtcgcggggatccccgcgggcgcctacaacctcgacccgcagcgccccgtgcacttccagggccccgctgactcgttc

SEQ ID NO: 371713 - DNA, 122 bp, Homo sapiens
gtacatcggcttcctgggcctcatcttctcctcgtactttgtgtacctggctgagaaggacgcggtgaacgagtcaggccgcgtggagttcggcagctacgcagatgcgctgtggtgggggg

SEQ ID NO: 371714 - DNA, 122 bp, Homo sapiens
ctgtgctgggagtgactggagctcggctctgtggagcagccacatctgcttgggtgggggcgctcttcccccatctctgtcctgcatctaccacaagctgggctttgccactgtctcctgtt

SEQ ID NO: 371715 - DNA, 122 bp, Homo sapiens
tagagacagccagcacctcctgaggtcaccccacacctccccctgcttcattccctcacacgggctgacaccttctgggttgagagttcttcagcagactatggagcaacacagaaaaacta

SEQ ID NO: 371716 - DNA, 122 bp, Homo sapiens
tgaagcttcagagaagccgtgccattgccggggcacgtaaagtcaagccaggacttccggcgtcctagccgtggcagccattttggcctgtcaggtccatccggcgatgctgggtctggacg

SEQ ID NO: 371717 - DNA, 122 bp, Homo sapiens
cggcgtagagccgagtccagccagcgccccagctccatggtgtctcccgagcgaggacaccgaaggcgccagctttcttgccccagagcaagagcagggtccactcttccccgacttctaag

SEQ ID NO: 371718 - DNA, 122 bp, Homo sapiens
gcggcttgaggcttgcacagtgcagagctgggctgttagggatcgggaccgaggcagggtcgggcaagcaggtgcaggcaggcagcacggctccccctggccccagtacctttctcgagctc

SEQ ID NO: 371719 - DNA, 122 bp, Homo sapiens
agggctcttgactaaatgtatattttctcaagtgtcaaacctaacatctagctgcacattcgccatgtgaaccacaaagataaggaaataatagcatcacctggtaccaagaaactgcttat

SEQ ID NO: 371720 - DNA, 122 bp, Homo sapiens
aaattaaaataaatatttgcttatttcaaacattttaaatttaatgtgaaatgtaaatggcgacatatcacaagtagttcttggagctcttaaggcaataaagaaaacaattaagattgttc

SEQ ID NO: 371721 - DNA, 122 bp, Homo sapiens
cgctctgacctttgaccataagccctaactctggatagctggccccaccacacacataatcgtggccttgacgtcagtcccctgaccccggacccttatctcggcctgactgtactctgccc

SEQ ID NO: 371722 - DNA, 122 bp, Homo sapiens
tatacaatgttttatcccaagaaacacgaagttcactattcagctcttaccggcaggtggcgccctctggctgtacgtgatgcccactcccatctcctttctcttggatcagttctcctctg

SEQ ID NO: 371723 - DNA, 122 bp, Homo sapiens
ggacctcgggctctgtgcttggggtgagaaaggcagggtctcgggtagctgaggcgggggcggagtctgtgtgtcctcgaagcccagcaggactaagttggggaccaatagagtagggcggg

SEQ ID NO: 371724 - DNA, 122 bp, Homo sapiens
tgtccatctgtcagcctgctgtggtcacaggtctccgttcctcagtgtgaacggggactccgggctgcagcgtgccacccgcctcctgcatgtgtggagtagatggtttcgaactccgtggc

SEQ ID NO: 371725 - DNA, 122 bp, Homo sapiens
caaacacctgcccacagtagacaatctcccctgaagccttctttgtctttaactgagatacgaagtaccagaagtgggacctgttgacaaatgattaggcgcaaagatttgcatgtggtagt

SEQ ID NO: 371726 - DNA, 122 bp, Homo sapiens
gtgctgtgctccattttttcttgctccagcagccctgacccctgatctgttggcagacaccggataatgctgccagctcttggttattcagaggctctttatccagactctttgctcttctt

SEQ ID NO: 371727 - DNA, 122 bp, Homo sapiens
taacaatacatggaagccagcaagtcccatgcctcgtgctctgcagggcagctgtccaagcggtatctgaggccattgggaccatggctggatctggggtggctgggatgtgggaagcagca

SEQ ID NO: 371728 - DNA, 122 bp, Homo sapiens
atttttaaattcccaattatattaaaatcatttggagtgggaaccagacaccaatatttgcgaaagcctccaaggcggttctaatgtccagccaaagttgattatcactgctttatggccaa

SEQ ID NO: 371729 - DNA, 122 bp, Homo sapiens
ctgctctggccgcccgctgcaatcctttggggtctgtggctgagtggggaaccgccgacccgcgatccggaacgcgactttgaggccgccgggagcatcctgtggcctctctctgcgcggcc

SEQ ID NO: 371730 - DNA, 122 bp, Homo sapiens
ccggctctcctgcgattgggcccagcggtcggtgccccagcggcgattggtccacccggacgtcactctcccctggagagtggctagtggatcgtgcacccaccctcggaggcccggagtgg

SEQ ID NO: 371731 - DNA, 122 bp, Homo sapiens
tgatggctggagagagaaggcgctctcctggctcaaaatattccaatggtaagtaataaacgaacagcagagaaatcacactggttagaaaaacaaacaggcaaggggccaattctgtgcct

SEQ ID NO: 371732 - DNA, 122 bp, Homo sapiens
agccccttaaggacttggggatcccttgcagggcctctcactgggttcgggtggcagggccggcagacctttgattttttttttaaaggtaccaggcagattcatttattgtattctatttt

SEQ ID NO: 371733 - DNA, 122 bp, Homo sapiens
ccccgtcaacaccccccaatgttgcccccttcccacccctggggcacccactttgggatccgatcacacagacaaccacaagcagcaggaggctgaggcccagggagagcaggaggaggcga

SEQ ID NO: 371734 - DNA, 122 bp, Homo sapiens
ttccccgaggctgctttccgcggcgccggccggccttgcctggggcggaggcggtgggggcggctaccgggcgtcctccggtttccctagcaaccgcgcctccccgcccccgcgcgaccagg

SEQ ID NO: 371735 - DNA, 122 bp, Homo sapiens
cgggggagcgagcgcgccccggccccctcccgcctcgcttcttacctctggcagaggagccgctcgcccgccaccgtccgcagttcccgccgcagccgagataaacaacttagcttgtgaac

SEQ ID NO: 371736 - DNA, 122 bp, Homo sapiens
aagatggagaggcgggtgggagcctcacctttggactctatcgccacagcccggtctagccgctacgcccgagctcaagtctgactcgaaactccgctgggtgcctgagaggacccggcagg

SEQ ID NO: 371737 - DNA, 122 bp, Homo sapiens
atgtgaaaccttttgtaactgattgttttgcttttctttttgtggaacttgaacatttttcgtttttgaacagaaagacttgtctgtaggaacgacagctcaggcagccacgtgggctgcgg

SEQ ID NO: 371738 - DNA, 122 bp, Homo sapiens
gtccggagaggcaggctatgtgcctgtgtccactgcctcctgcctccagtaagcacacatcgtgtgtccatccagctaatggccagatgagcaacctaccgctgcacatgtatccctggctt

SEQ ID NO: 371739 - DNA, 122 bp, Homo sapiens
tcagaacctccacctggcaggccataaaccagaaggtggcagacagcatcactgtcatgccggtaataaaggagaagcagcctccctgaacccaagaaaaccacccctctctccaagcagga

SEQ ID NO: 371740 - DNA, 122 bp, Homo sapiens
atctcggggtgtcggcccccccccgaactttttctcttcccaaactgcacggtggccacccggtcacggccctgggccgtacccgcgcaatctcagcaccattcccgaccgagtcctccgcc

SEQ ID NO: 371741 - DNA, 122 bp, Homo sapiens
gctgggattacaggcatgagccaccgcacccggctctacactggtcttttgtttttcccacgagcactacaagctctcactactccaagggcctttgcattgtgtgttccctatgtctggga

SEQ ID NO: 371742 - DNA, 122 bp, Homo sapiens
cgctgacatcacaacctgtgacaggcgcatcacgcccggtacctgctcccggccgctgcccgtcctcccagcctctttgtatgccgcagacatggccagccagcaggattcgggcttctttg

SEQ ID NO: 371743 - DNA, 122 bp, Homo sapiens
tcgatgcatctcttcgatttgctgagcatacttctcagatgtaatggtttcactgggattcggaaagctgtggtggatcagactggcacagaccaccagacagtgaccaggacctgtttttc

SEQ ID NO: 371744 - DNA, 122 bp, Homo sapiens
gccgtccagggagccctggtccctcagctgcaccggactgagccgcgaccgctcagcacgcgctgcttataaatcaggggtgcgcttcccaagccccgggtgaggtcccctacgtcggcaca

SEQ ID NO: 371745 - DNA, 122 bp, Homo sapiens
agtcctgcagtcaactaggactttctgatcaactcagttgtaggaaatatctttcctacccgatggactgttctgtttgaattgagaaaatgctgagaccccactgggttgatctcaggccc

SEQ ID NO: 371746 - DNA, 122 bp, Homo sapiens
ccgaggtggggtgtatgtgggttatgtaatggagctggggtcgcattggcaaccatgtgacgttctgagctcctcaacagcagggcaaagccccaagaccaccccaaggggtcctgtctgga

SEQ ID NO: 371747 - DNA, 122 bp, Homo sapiens
agagacaaggatcactccagacatctcctacctacggtttggggttttttttcttaaaggcgaggcttgcattcctcagcagctatgtacaaagctccctgaaaccttgtctctctaaagtt

SEQ ID NO: 371748 - DNA, 122 bp, Homo sapiens
tcctttgttcctaaaatcaatgccacgtccccagcttacaactccttgttcctaaatcaacgctgcgtccccagcttacaactccttgttcctaaatcaacgccacgtccccagcttacaac

SEQ ID NO: 371749 - DNA, 122 bp, Homo sapiens
gctgtgtagaaactgtcaatttagttagcctgaggtcaggagcagtgctctcccaagagacgtcagaggagggtctcaacaggacaactgtcccactaatgaataagaaagctttctctttt

SEQ ID NO: 371750 - DNA, 122 bp, Homo sapiens
gctgcaaagagcaagagtgatcgccatgaggtcctgcgacatctgagatcttccacgtcacgacgctgctccctaccacggacgattggaacttccagaggatgagctccatgatccagagc

SEQ ID NO: 371751 - DNA, 122 bp, Homo sapiens
gtccccggctcgctgctgccgctccctgcccagccagcgcggacgactgcccttcctacccgccttctctgcgctttctcagcggctccgacgcgccctggcccctgcgtcacatccggcgg

SEQ ID NO: 371752 - DNA, 122 bp, Homo sapiens
ctgcccgccgccgcagggcgtccgagcagccgcgcacatcctctgcactgctcttgcgctcgctcacaatgtccagctcggagtagcccttgtccttcacttgtgagtggatttctagcatc

SEQ ID NO: 371753 - DNA, 122 bp, Homo sapiens
acttgtgtacaatgggcctgttctggttcatgtgaaaatcaacatccttttttgtgttaccgggtgacaggatgctacaatactattagcatttgcaaagagtgtgctctgtccaagggtgt

SEQ ID NO: 371754 - DNA, 122 bp, Homo sapiens
caaatctcaacagagctggggctgccctatcactgctgcagcaatctagggcccccaggccggggttttatagcaggaaacagcttggagtgtgggctcacaccaacttgggtttggatctt

SEQ ID NO: 371755 - DNA, 122 bp, Homo sapiens
cttttgtgatattgcttaggattcctctagaacaatgttattcaaacgtatatacttagccgtgaaaacaaaaagttctgaacacctaagttcttctgcagctgtctcatgttggcaagctt

SEQ ID NO: 371756 - DNA, 122 bp, Homo sapiens
aggggaacaggagcaaaccacaggcagctccctagtgaggcgagtgcagtgtcaccaggacgtgctgcttggggccagcctggtgtggccagtgccttgcattgtatgcggagctgcgagag

SEQ ID NO: 371757 - DNA, 122 bp, Homo sapiens
agagacagaaacagaaacgaatgaagtattcggctgtccactgattgcggcagggcgcagcgtcgggagccgggagagcctagtgctcatccctcccgggttcgggggatggttatcgggaa

SEQ ID NO: 371758 - DNA, 122 bp, Homo sapiens
ataggtcaaagttcagggatctgaacaaataggctttttttttttttttttttttaccatcgaagatgaaattgttcagccaattgtatatgagaaaaagatggaaatgtgtggtccgtgtc

SEQ ID NO: 371759 - DNA, 122 bp, Homo sapiens
ggcctgagatgcccactgatccatcttcaaagctggaaatcttagcccagccagacagcacgaagccacagagacaaaggaagtagtggcagagagcacactggtggggagaagcctccagt

SEQ ID NO: 371760 - DNA, 122 bp, Homo sapiens
gcctggatgcagcctcgcggtggacagtgggctgatgttttgccgtgggagcgccacggacgggagagggagtgataatgattgtcaacctaataacaggctaactgaaaatgatatttatt

SEQ ID NO: 371761 - DNA, 122 bp, Homo sapiens
tgaggtaccttgggcggccgaattttgcagatgccggttttctccgccaaaggccggatgcggccgataaagctgagcggatctgtgaactcctcccaactcggctcaaagacggggcactc

SEQ ID NO: 371762 - DNA, 122 bp, Homo sapiens
ttggaagccccccgagggtgcgcgcgcgtgggtatgagtgcgtgcgtgtgcctgggtgtgcgtgtgtgtaagtgtgcacgtgtgtgtgtgagagtgcgcgcggggaaggaggcacagagaca

SEQ ID NO: 371763 - DNA, 122 bp, Homo sapiens
gacaaaaggactctttaggtccaaaatgaccctgaaggagagtccagaatgcccagtggccgcgtctgcaacggagtcttctttctccaattgccttctgccccatcaccatgggccccacc

SEQ ID NO: 371764 - DNA, 122 bp, Homo sapiens
ctgaactggttgctgtggagattaaaaactttgtacacagcacattgcacacaggcgatacgcggttgttagaatctcattaccattgacaatggctaattatagatgtgaacatctaaatg

SEQ ID NO: 371765 - DNA, 122 bp, Homo sapiens
tccacgcgggccaagagactggatccatcttcttcccaaagtgggaaagcctgtgtcaggcgtgcccattgtcgggcagcagcagcagggccggcgggaagaggctgctggtcccggaccag

SEQ ID NO: 371766 - DNA, 122 bp, Homo sapiens
caacaatcggcccacaaaaattcctaaaaatgtaatcagttattgtaagctggtatgtaccggtcccaacaaaccactgactatcaaatattataaaggttacatattttggctctcaagca

SEQ ID NO: 371767 - DNA, 122 bp, Homo sapiens
tctataagtcgtgtgaccttagaaagagtatttaatcctctaaagtacagtttccttttgcgtgcattaagaataataaagccacacaaattatgataattatctcagagcatgcgtgttaa

SEQ ID NO: 371768 - DNA, 122 bp, Homo sapiens
gagaacaggtgggtccgaggggctgagagtgtggtccaggtgtctcaccaacctcacgtccgctctgtctgcagcgtccggggtgccgcagctggtggagccggtgctctgggactacacgg

SEQ ID NO: 371769 - DNA, 122 bp, Homo sapiens
gcacctgctcctaagctcgaggtgaaggtggctccgtctccacccgagctcgcctcagagcgagcccgcgacacagaaacatctctcttcagaccccagcttggtccaggttgccccacgcc

SEQ ID NO: 371770 - DNA, 122 bp, Homo sapiens
ggcgtaggaccctccgagccaggtgtgggatataatctcgtgctgcgctgttttttaagccggtcggaaaagcgcagtatttgggtgggagtgacccgattttccaggtgccatccgtcacc

SEQ ID NO: 371771 - DNA, 122 bp, Homo sapiens
caagtctcatgtcctgcctatcagggatgttttcggaccctacatgggaagcccttggcccgtttgaaggtcgggtcagggggcggctgaggctgtccagggcagtggtcaagggcttgggg

SEQ ID NO: 371772 - DNA, 122 bp, Homo sapiens
gggcccctgaggtgtgcagagggtcgcgcacctagaagcctgtcgctggcgcggtctgggcgggaggttctgcggcgggaggcagcctgttggttgcagggctgaaaaagcagttctacaag

SEQ ID NO: 371773 - DNA, 122 bp, Homo sapiens
gacagaggttagagccacagccacgtggccagggtggtgtggacctgtttctggatctgccgctttaaagtgtgtgtttggttcgtgaacacttgctgggggtccacttacgctttgtgaaa

SEQ ID NO: 371774 - DNA, 122 bp, Homo sapiens
ccagaacacaggatgtgcccttgttagaatacggcctgggacataaaatcagtgaaatcacggtgacgtcatacttgagtagagtgaacctccaattcgatgactggtgtccctatatgaag

SEQ ID NO: 371775 - DNA, 122 bp, Homo sapiens
gaaggcggttttccttccgtgaaattcgaaattcagccccccagttccaagcgcctgctccgttaatagcatctactctcagcgacgcccagacccaggctgtgcactgtcttggctcagac

SEQ ID NO: 371776 - DNA, 122 bp, Homo sapiens
aacgatttccagatgtccccggggctccccaacccttcccgcacgtgctgaaggagtcagcgctggtgtcagctgtcctgcctgcctttgatttggttgaaaacttccacctgggtaggctg

SEQ ID NO: 371777 - DNA, 122 bp, Homo sapiens
agggtccgaaaaccactgttacgcccattgggtagccccgcccttggggggggcaaagggcgtgaaagcggaagtgacgacacccggcgctccattaaatagccgtagacggaacttcgcct

SEQ ID NO: 371778 - DNA, 122 bp, Homo sapiens
gggagcaggtggccgcagggtcctctgggaagcggtgttgggagtgagggccgtcagccgcgccccgcggaggattctgggagtggtagttcggcctcatggttggccggcgctaggcgtcc

SEQ ID NO: 371779 - DNA, 122 bp, Homo sapiens
ctacagatgctccgggagctgcccaccagatggaagtcggggtcacaccggaaatccacccgggctccgtccagagctgggaggtccccacccgtcaggaaaaccttcccattttccagggt

SEQ ID NO: 371780 - DNA, 122 bp, Homo sapiens
ttgctgcgaggagctgccctgtacattgtaggatgtggaacagcttgcctggctcctggccgctagataccagtaaacaccaccccttcctcaattgcgataacaaatgtctccatgcattg

SEQ ID NO: 371781 - DNA, 122 bp, Homo sapiens
agagccggaacgaagcgagctggcggtgggcgtgcggagtggcagcaacgcgagagggaacgcgctggggctagcgcggaggcccagagcccaggcgggggaaaaggtgccgaccggcttcg

SEQ ID NO: 371782 - DNA, 122 bp, Homo sapiens
ctactcagttacgaggtgtgtagtgctagcacgagaaacttggaggacgcgctgacaagccgggctgcagtctccgggtcgccccgccccgccctttccctgccgccgtgcgtgcctcgggg

SEQ ID NO: 371783 - DNA, 122 bp, Homo sapiens
ccgttgtggagaggagaggcagatgagcgctccagggtcatggggaagctcccagggccacgcggctggtggagctgcacccggcaccttctcgggggagtcagggctggatgtctctacgg

SEQ ID NO: 371784 - DNA, 122 bp, Homo sapiens
atgcggccgagccagttggggtacacggctgtctgtgcagtctgctcacatgtgcacgcacgccagggggtgtgtggggaggcaaggaggagccagactgtgctctaacgggtccctgggac

SEQ ID NO: 371785 - DNA, 122 bp, Homo sapiens
tggcccgggagcgttcgccggcccacctggtggctttccctggacgtttaacggcgactccgcccggcctcccgactttttgatgcaggcgttctcttacatgactttcttcgaggctagat

SEQ ID NO: 371786 - DNA, 122 bp, Homo sapiens
gctgccgccccctcctggctcgccgcctcgcagcgctgggacccggcgggacctacctcgcggacaaggctgtcaagatccgcctgagtccggctcacagccaccacccgcgcgcccgtcgc

SEQ ID NO: 371787 - DNA, 122 bp, Homo sapiens
tgttcacaagcctggcagtgtgaaccagtaagagaaccaggttccagccccaactctgcccgaaactacttcatgtccataggctatagtttcctcagctgacaaatgggaacaaaatattg

SEQ ID NO: 371788 - DNA, 122 bp, Homo sapiens
ctatctcccagatagttgaaggttttttttctgtttgggattccacttcattacctacaccgaaaaaacataacaaagttctcggtttcatcccagacgcctacaggtcaaggacgttttgg

SEQ ID NO: 371789 - DNA, 122 bp, Homo sapiens
gccggtaagggtcaaacatggccagttcttcacccaggctaggaaacgaacgtgagggaacgtgaccctaccagatgcccacccagccggggatccccctcgttgcagtgtcactttcgctg

SEQ ID NO: 371790 - DNA, 122 bp, Homo sapiens
tccctctccgctctcctccctccacccgctctccttccccctcccccctccgaacccgggcgcaaggggggaattagaaactgctctagaaggattttaaacaactggctgttctctccgcc

SEQ ID NO: 371791 - DNA, 122 bp, Homo sapiens
tgcagcgtaggcagaggtggattccaccagctgtgtagttttgccaaacaagtatggcaacgcaagggaggggcaagggagggatggaaattatttacaatagaattcaaaatggctgaaga

SEQ ID NO: 371792 - DNA, 122 bp, Homo sapiens
gcaaacccacacagagtatttcctatctgtccccatcctgtggtagctcccacttcaagccgtctataatcaccatcaacattcccttcatctttatggggagttgacaaatgtttacaagc

SEQ ID NO: 371793 - DNA, 122 bp, Homo sapiens
tcgggccctgaggagacaggtgacaagcctcgtggttctgggcagtgccatggagctctgcgggaatgactcggtgagacccctgccccgccgcacaccctgggccccgggggcttggtgtt

SEQ ID NO: 371794 - DNA, 122 bp, Homo sapiens
ctgacgtcttcatctcctactatcggtagtgtgcagcgaaaaagcaattgtccgaacacgcggtgcccaatttccaggttgttggatactcaatgtgagagattcccgcaatcctagagggc

SEQ ID NO: 371795 - DNA, 122 bp, Homo sapiens
ttctttaatcgtgagttagggtatgaggcgtcgagacttgggtgcaggttttagggtgtccgcatggtgtttggagtgtggagagtgactcacaagcagctggtaggaaagaaaacagccga

SEQ ID NO: 371796 - DNA, 122 bp, Homo sapiens
gtgtccccgagtccgagccaggaggctggaagtgactgctgtcccatcctccctggagcccggagctgtccttgtcttgagaaagagaaagcaaagccaaggaaagcagagcgagcagaacc

SEQ ID NO: 371797 - DNA, 122 bp, Homo sapiens
tgggggtaaggaatgtcagtgctttttccgccaacgtggccgcgcgagtcagttgtaacccggcatccagaaccttctccgtaggggccttgcctgggactacaactcccaggatgccgcag

SEQ ID NO: 371798 - DNA, 122 bp, Homo sapiens
ggaggcgcgggccgggtccgccagggcctcatccaggaggtggtcgatgaagtagatgcccggctccacggtgagcaccatgcctggctgcaggtgccgtgcagtgcgcaggctccgcaggc

SEQ ID NO: 371799 - DNA, 122 bp, Homo sapiens
gaataatcagaataatccaataaacagttctggggagagcatctgaagtgagaagtagcccggatatacagtaagtctggggtccacatgaagcccagaatgtgtctgaaacccagagactg

SEQ ID NO: 371800 - DNA, 122 bp, Homo sapiens
tacaccagggcggccagtgctatcgtgttgtgcagtctctttctgtgcaggtcgtccttccggaccagcaccaccggggtggaggaggtgagtgtgtgcagaggcaggcgcgacagtttata

SEQ ID NO: 371801 - DNA, 122 bp, Homo sapiens
aggttgcggctggtttgaaagcggcagtttcctggcagcttgggcaggcgttggtctccgcgctacagctccgcagcggccacgatcgatcccgcgacgggtctacgcgcgcttctgcgcgc

SEQ ID NO: 371802 - DNA, 122 bp, Homo sapiens
aaaaacaaaccctttggaagtataaaataacaaaatgaaaatatttccatctaatgacctcgactttctttgtgaagttagctctcttagggcctgtggtgagggatgaagcttaaagagtg

SEQ ID NO: 371803 - DNA, 122 bp, Homo sapiens
taattcccaaactggtttgcctggagctgtgcacacggcccgtcccctccccccagtggccgggcagtcccagccccggccccagccccagcccacgccggtcgccctcgatctggagtgga

SEQ ID NO: 371804 - DNA, 122 bp, Homo sapiens
ggtgttccagaggggtgcaggctgctgctcccctttactctggtgtggttttccatggatcgatgtaaagctgtgtgtgatgtcctcctccagtttaatctctgttttgcagttttaaattt

SEQ ID NO: 371805 - DNA, 122 bp, Homo sapiens
tggccaggcggtcgttcaggaactgcatagtctccttctcgctgccattgaaggagccctcgcagaaccagttgcagttgctcacattggcagggatgttgcaggccccgggcagggtgtag

SEQ ID NO: 371806 - DNA, 122 bp, Homo sapiens
cttagtcctaagcaagaataagctgccctcttggtgatcatactttatacggagtgctatcgtttatgaaatgctttcagtatgctttttaaattatgcaggcaaaataaccacacttcaga

SEQ ID NO: 371807 - DNA, 122 bp, Homo sapiens
agagtctgcgacccgaaggggaaccccaggctgggaagtcgctgggagccacgcccatgccgcgaagaggctggccgcggcctttcctgaggctacaaaagtctcgaagtttctaactctcc

SEQ ID NO: 371808 - DNA, 122 bp, Homo sapiens
tatttctgtctggggcggcaggacctcatgtggtctccacgtggcaggatcctagaatcacggggtggcagtacatattttcccctatggctttaagaaaatggcttttcattttgagtctt

SEQ ID NO: 371809 - DNA, 122 bp, Homo sapiens
gcggggggagtggtgggggtaggactccctccctccaccccttaggctgtgttctcacttcgtagcggggagggccgtccctcccaccccacccacgctgcactcgggatagggcagaggag

SEQ ID NO: 371810 - DNA, 122 bp, Homo sapiens
cagccaccagggggcgccagagccccgcgcaaagcggctgccaccaagtggctgccaccgcgcgttaccaccctcagggcctgatgcctgggactgcggccaagtcccggccccaggagctc

SEQ ID NO: 371811 - DNA, 122 bp, Homo sapiens
ctgggtcctgggtgtgggggctgagatgagcatttcttcatgagcctaggaataccgaggcgtacggaatctctgcccctcccctctcaccgtgccgacccgggaatctagttattcatgcg

SEQ ID NO: 371812 - DNA, 122 bp, Homo sapiens
agtatacaataatacctgggttggaaaccacaattatgatgcaatcaggactgtacttgacgatctgaggaataatgaatttgaagacattaacatttctctgcaccagattgagccgactc

SEQ ID NO: 371813 - DNA, 122 bp, Homo sapiens
agtctgggtaacacagggagaccctacaaataatttaaaaacattagccaggtgtggtggcgtacctgtggtcccagctactcaggaggctgaggcaggaggatctcctgagcccaggggat

SEQ ID NO: 371814 - DNA, 122 bp, Homo sapiens
ctatcacccgtgtgcactgcccggatggtgccaagcgcattggagcaccggaaggagacgcggagccgaggccaggccttccggcggtcgttacgggacgccgctgccatctacagcactcc

SEQ ID NO: 371815 - DNA, 122 bp, Homo sapiens
caggcccacaggacttcctgaccagaaaacaaattcttgagctgcaacaggtttctaacccgatccctgcttcaaagggtgggtcccttccactctgacaaccatgatctcctcatcccatt

SEQ ID NO: 371816 - DNA, 122 bp, Homo sapiens
cactcggcggcctcgccggctcccctcccacccttgaccttttccgccacagctacagaacgcccaagcgctcttccgcctagggtgccctccctgccccgcccacctgcgtcccgcgggct

SEQ ID NO: 371817 - DNA, 122 bp, Homo sapiens
gtaggacacagggaaagcaaaaaacattccagctgctgatgaatacccagctagggccaacggacaggtgctagaataggggcagacggattctgcaacaatgataacagctaacagtgatg

SEQ ID NO: 371818 - DNA, 122 bp, Homo sapiens
aatgggggagcccttctttagttgataaggtagtgaagagatgccaaacactagggcctgcgtggagctttatggagcagttaaccttgagacttacctgtatgtaaagataaaactgcaac

SEQ ID NO: 371819 - DNA, 122 bp, Homo sapiens
ctcgggcctccgctcgtggtcgctgtcaggaggcgctggggtgatggggcgagctggagacgcggcctggagcccacgacctgggcttctcgccctgccctactgcttgctggttcgtggcc

SEQ ID NO: 371820 - DNA, 122 bp, Homo sapiens
actccggactgaatttcttctgtataatgcaagcgatctggcatgatgatatacaaagaccgataaaattttgctggggattctgaaagtaaaaaaaattgcctttgatattatgtccccat

SEQ ID NO: 371821 - DNA, 122 bp, Homo sapiens
ctaactaacatttcacaagaacttcctatagaccctgttaggtactttaaaagagtgtctcgtttctcagtactctattcttcccaaattcaaactggcatttgtgtctaaaatctaaattt

SEQ ID NO: 371822 - DNA, 122 bp, Homo sapiens
cagaaagagccaagcgtctctcggggctctggattggccacccagtctgcccccggatgacgtaaaaggaaagagacggaagaggaagaattctacctgagtttgccataaagtgcctgccc

SEQ ID NO: 371823 - DNA, 122 bp, Homo sapiens
ggccgcctcgggcgccttaaatcggaagcgattccgtgaaatacatctcgaatccatcagcggacgattttaggaaaagtgtaaataaaaaatcaacacactcacgagaacattggcatttc

SEQ ID NO: 371824 - DNA, 122 bp, Homo sapiens
gggatggtgtgggcagctcctgcactccctcttttcctctcgaggacttaatggctacagcgaaagcagaggcctgctgtggggagcggggggagccgggcagcgcagtggcctcccaggag

SEQ ID NO: 371825 - DNA, 122 bp, Homo sapiens
cgtcaggatgttggacataaactcgttgaagcgtttggagtactgctcagggttcacagtcgagatctcggcccctgcctgtaatacacaagaggctgattcaggttgagttcctgtgcccc

SEQ ID NO: 371826 - DNA, 122 bp, Homo sapiens
tctcttcataagttaccttctgggtccctttgcttctttgtccagttgtctccattgtcacgccaatttcccctagtccaagttttttctttgctgattcctttgtccatgtgtgctttgag

SEQ ID NO: 371827 - DNA, 122 bp, Homo sapiens
ggtcacagcagggaatcttagcttggttttggtgtgctgctggatgaccagaccgggcgtcgggtgagcccagaagtgagagcagttggctgtgccccagtgctgtgtgacccagaggcgcc

SEQ ID NO: 371828 - DNA, 122 bp, Homo sapiens
gggagaggcgcggcggcgaacggggcggccgcggtccgggccggggacgcgagcggcgggcgaaagcgtagcctttccgcagctgagcgtgaagggatggaagctctttaacttttatgaag

SEQ ID NO: 371829 - DNA, 122 bp, Homo sapiens
aaaaaaccactacagcatccaggtgacagagagaggacgcaaccatgcccgctttgcctccgcgacgcattgtatttttcctaaactgcagttccccggcaccctgtctgtattgcgtattg

SEQ ID NO: 371830 - DNA, 122 bp, Homo sapiens
ctttgcctgccacgtggcttctctgcccctccagtggactaggtgactaaagacccgtcccgttctaatattctgtgactattctccaagagtctaatctttctgcaggaaaccaggaaagc

SEQ ID NO: 371831 - DNA, 122 bp, Homo sapiens
atgggtaatagaagcactatcagacacagaaatgtccttttcaaggctggggttgggttccgaggagaccctagcaggagaggcccagggcaaggggaaagatgaacagttgacacacctgc

SEQ ID NO: 371832 - DNA, 122 bp, Homo sapiens
gtcagccagctccattcaacaaatgcgctgatgtcagctgtgtgctgggccccaggaatccgggagtaaatgaaccaacatgtccagtgtgcatatggaacagaacactgagggtttgatag

SEQ ID NO: 371833 - DNA, 122 bp, Homo sapiens
cccttcacaggccttgcaacaggggtgccttgcttactcagcccatagctctctacccctcgcgggagggggagatgcagatgagtgggtgcaggagttggggcaagtgcttctgggcacca

SEQ ID NO: 371834 - DNA, 122 bp, Homo sapiens
tccctgcagaagaggtgtgtcgaccccacagctgccaacgtgtcccagaatgaggcccctcgtgagtctgcaagggctggaaagcaagcctgccccaggtatgcgtggggcgggggctgagc

SEQ ID NO: 371835 - DNA, 122 bp, Homo sapiens
ctcgacagctcagttgtttggaggtatagtgcttgcagaaccaaggtcacaggtaatgagcgggattattgttcatcattaagcattaagtgttatctatgaaatgatgttgtttaatggtg

SEQ ID NO: 371836 - DNA, 122 bp, Homo sapiens
aaatactgctctaagaaagggacaggaagtctcagaggctggagagcagagcaccaagatcgttctggcaggaacagccagtgggaggttccagctgagcgctccccagaggtgagctgatc

SEQ ID NO: 371837 - DNA, 122 bp, Homo sapiens
cagccctttccagccctcaccctagcagcagaaccaccgagtcacccccttctccagggacgaccaccccgggccacaccacggccacctccaggaccacagccacggccacacccagcaag

SEQ ID NO: 371838 - DNA, 122 bp, Homo sapiens
cacctggtagttgtctagctgctcttcggtgaagatggtctgcttgttccccatggtggccgccgcgccgccgctcgcccgcccgggctccgactcccatcagcggccgccagacccggagc

SEQ ID NO: 371839 - DNA, 122 bp, Homo sapiens
tcttctattgcaacagttatgtacagacttctttctcctactagaccctaagtgccttcccgatccaatttctcatcttttccaaagccctgaacaaagagggaagcttgaaaaatataagt

SEQ ID NO: 371840 - DNA, 122 bp, Homo sapiens
tttggtctggaaagtcttctaaaaccttccacatgactgtggaataagtcatgtggggcgcggggataagcgaatctctcaaattccaccacgtatgccctcattcaacctggatccttaga

SEQ ID NO: 371841 - DNA, 122 bp, Homo sapiens
gctagtcgcggggcggcggcggcggctgcgggcgcgaggtgaggggcgcgaggtgagggtcgcgaggtgaggggcgcggcgggcggcgggctcggggcgcggtctccctctctctcggccag

SEQ ID NO: 371842 - DNA, 122 bp, Homo sapiens
tccgagtgtagagggcatgctgccctcctctctccacctaactgcccgccagcaagggagcggtgccagccgccacacgctgacggtggagacgctactacacagccagctccctccctgtg

SEQ ID NO: 371843 - DNA, 122 bp, Homo sapiens
tcagctgtcctagaactcaatgcagaggcttcgcttcctttctttccttggattctgagccgggggagcacaatgggggtcttgtgctctgggccagcaaggcatgcagatactcggaaagg

SEQ ID NO: 371844 - DNA, 122 bp, Homo sapiens
tatctctgtgagccacagagggaccatctcctacaattaagaatggctattggcagccgccgccgcccgaccgccgggaggatggagttcagcgggcagcggagctgtctcagtctttgccg

SEQ ID NO: 371845 - DNA, 122 bp, Homo sapiens
gggcatgggggctgcatgccacttgggggtcaggagtcttaacaggtgctttggggttgccgctgaatagaacaggctaaggtggctttggaagcattttgcaagaccacgcccaggccgcc

SEQ ID NO: 371846 - DNA, 122 bp, Homo sapiens
gcgcccacccctgcctcccggaccggccaccgccggaggccgcggaggagggcccggccgcgcagatcccgcttatcgggcccatctcccgttacataaggccacccccctatctccgcggg

SEQ ID NO: 371847 - DNA, 122 bp, Homo sapiens
gtcgaggcggagggtgcagcggggggcttggagcagggctccagagggcgctccctccctcgcccaggttcaccccagggccagcctcggcgccggggcccgcgggctgcgcgctctgcggc

SEQ ID NO: 371848 - DNA, 122 bp, Homo sapiens
tagcagacctgctggtgactccaatttgtagtgtgcttttgggcgaatcacctcattccccggacctcatctggaaaatgtggaaattataccggatgactggtaaggttctacgattttat

SEQ ID NO: 371849 - DNA, 122 bp, Homo sapiens
caccatgcccagctccagctcgtggtgcaggttgcagctgtacgcgggcatgaggatgggcgagccctcaggtgtgtaggccgtggacagcttcagaaacagcacggactcgctcaacaccg

SEQ ID NO: 371850 - DNA, 122 bp, Homo sapiens
gcggggcgggcctaggtactcattgggccgggaattatgtcagtcttgggaaatcaggtccggggatgaggaggtacactcagccattgggccctctctgctgccaatcagagggacatccg

SEQ ID NO: 371851 - DNA, 122 bp, Homo sapiens
cccgctcagggtcgggtctgatcacagggaagggtacggggagccaaacaggtaatatcacgggtagcagccaagttcccacccttgtgcctaaacccagctcaggtctttctgaagctagg

SEQ ID NO: 371852 - DNA, 122 bp, Homo sapiens
gaactaaatgattcccaaagactcttccaccgctgacactcagaaattccatgaatacttcgatcaatatttttcttctccttgcattcagtcattaataatatattgttaatagctacttg

SEQ ID NO: 371853 - DNA, 122 bp, Homo sapiens
aaatcctaaatgaaggcgacatggagagatttcctcctgttagggacgggcctgacatcgcgcatctcaggtcttctgtgcaggcagaatccacggcgaagacgtgccttgttcatcacctg

SEQ ID NO: 371854 - DNA, 122 bp, Homo sapiens
ggttccgcggcccttatcactacagcccaggagagaacccggttttgagcgtggtttccccgcctgcccccatttgcacgccgcgactctcttttttaaaacaagagtggaagagaaaggcg

SEQ ID NO: 371855 - DNA, 122 bp, Homo sapiens
gctgagagcgtgctgtggctgcctccaaccccagagacctttatatgcagctggggaaggcggggccctcctaactgctgactccaggttcccctctggatttcatcactcccggtcccgtc

SEQ ID NO: 371856 - DNA, 122 bp, Homo sapiens
aagaatgacactgaaaccaaagggacttggagattgcaatgcgagttgggtaatgcagctcggtggttttgtgttctgccactctattaagagagggtgaagcaggaagacccacgtctcat

SEQ ID NO: 371857 - DNA, 122 bp, Homo sapiens
tgaatatcacccgggatatcaaaaacctatcagcacacctggcgaggaccctcaccaaggcgagctccctgcaatggttcatcaaaaattgcccagctaatgatcggctgggcagataatcg

SEQ ID NO: 371858 - DNA, 122 bp, Homo sapiens
gagctacaataacagcggtctaaatatatcctaggatgaaaaggtgaggaaggaaacaggcgcagaagtgttataagaaaccaaagcggccttttgagaagggatgtaagagcaggcccctg

SEQ ID NO: 371859 - DNA, 122 bp, Homo sapiens
tcgaagggccgtctgtgctgaccaggtggccgtgctttgtcgtgggaggcctagggtctgcggatgggcgatgatggggtggggcttggaggagagtttgtgcaaattgccgctgcgagggc

SEQ ID NO: 371860 - DNA, 122 bp, Homo sapiens
acatttggtagcttgaagtcatccacacgggaacatttacagcatggaatttgcccaacacgatgtgttaggagcctgtcctcccagtgagagccagctgttaaacgtttgccagcacacca

SEQ ID NO: 371861 - DNA, 122 bp, Homo sapiens
gcgccccgccgagctggcggatggagctgcgcagcgggagcgtgggcagccaggcggtggcgcggaggatggatggggacagccgagatggcggcggcggcaaggacgccaccgggtcggag

SEQ ID NO: 371862 - DNA, 122 bp, Homo sapiens
cagctgaagaaacaagataactgaggccccaggggctgggagagcggccagctccccagacgccaggccagcttctgctccacaccagccacctcctccagctgggatctccattagctccc

SEQ ID NO: 371863 - DNA, 122 bp, Homo sapiens
ccccagagccccaggactgcctctgcctccaccggaatggacggctggacctggggtagccggaggggtggggctaagcagaaccaccctccccctctttcctttcctccttccccctttaa

SEQ ID NO: 371864 - DNA, 122 bp, Homo sapiens
gcgcaatgcccaccttgcgaggaaacccaggccagaccacaagaaggtgcatttgggttccgggtgttcagaacagtcaatgtctgggaggccataggtgtggggacattctcagccacttt

SEQ ID NO: 371865 - DNA, 122 bp, Homo sapiens
ctggatgaaatgcggaaacacacaaacccgcacattggagcgcatggttaaagtcaacaccgacggctcctggagcaccgcctgggttgtaatgactatctcttttgacaaagattgacaaa

SEQ ID NO: 371866 - DNA, 122 bp, Homo sapiens
ccttgaatgaagaaaatcagaactgtgtgaaacaaacttggtcctcaggacaatcagccacgttgatctagtttggacgtctgtccccttccaatctcatttggaatttggtccccaatgtg

SEQ ID NO: 371867 - DNA, 122 bp, Homo sapiens
gacaaaagaaacctcccattccgttccttacctctatccgagcttcccaggctgcggagacgccaaggctcagtctagcttagaatagttgcttcttgagttcaggcccatccggatgggtt

SEQ ID NO: 371868 - DNA, 122 bp, Homo sapiens
aggtcagggcttacctgtcgctcccgttccaggcacattcaaacttgtcgaaaatgcagtcgttctcgtacagggaacagagcttgctccgaaggtagtcatggacctggtgggataaggga

SEQ ID NO: 371869 - DNA, 122 bp, Homo sapiens
tgcccgcctccccgttgtcctggactgcgaccggaacggcggccacgcatgcgcagtgtgcggagagggtccacaacctctgtcgcagggcaaagccaagttgagcaaggaggatgttgaaa

SEQ ID NO: 371870 - DNA, 122 bp, Homo sapiens
gacacttgaacctctgcagatctcgaagatgctaaaatggaccacgcggtcctgaccacccgcccccggcccctcaacaaactcacgctatttctcagttcctgcatatcacacacaatatt

SEQ ID NO: 371871 - DNA, 122 bp, Homo sapiens
cggggaggggcagcgggggcgctgcgggggctgcttgtctgggctgcaccgggtgggcggcgggggacgccggcaggagggagtcgggggtacccccgccggcctgccctgagccccctgcc

SEQ ID NO: 371872 - DNA, 122 bp, Homo sapiens
ccaaaatctcccgggcgtgtgcaagagggaaagctttctaattgtgaacaccgcgcgccccgcagaaggctgcattggcatcacctgggactggttagaaatgccaaaaacgcctgacccgc

SEQ ID NO: 371873 - DNA, 122 bp, Homo sapiens
agttgaagctgctgtggttccagacgcaggcaggtcacccctgatgctttcaacaagaggcgtgcagtgcatcgcaggacatctgctaagggccatctcagaggcccacccctggaagccac

SEQ ID NO: 371874 - DNA, 122 bp, Homo sapiens
cgtaagaagggcacgcagagcaggagggtgcgtaggaaggacacgcagagcaggagcgcgcgcgtaggaagggctcgcagagcaggagggtgcgtaggaaggacacgcagagcaggagcgcg

SEQ ID NO: 371875 - DNA, 122 bp, Homo sapiens
aggaggccctgcccgtccacacgacacctgggccaaccagccctttctgctgtaaaacttcggctcctctacctgcctgagtctttgccaagcacgagggacagtgactgacccctcgttcc

SEQ ID NO: 371876 - DNA, 122 bp, Homo sapiens
tgcggccctggcctgtcctcctgtctgtgggtgacactggacactgagccacacacgatccgtggggactgaaggctcggccccccgacccgctctggtgggtggcagtagatcgggacgct

SEQ ID NO: 371877 - DNA, 122 bp, Homo sapiens
cgctgcgccccggccccagcgcagcgcccggggagcggcccctcctcgggcagcggccggcgcctgtgtccctagcgcggtactgcttctgcctgaggactccccgccggggtcctccctgt

SEQ ID NO: 371878 - DNA, 122 bp, Homo sapiens
aagtaaccctcccctgagctccagagtaactccttcagcaacatgtatggagcagatcagcgaggctccagaaattccatcaggaaatcctccacatagtcagctctctagaggacgtgatt

SEQ ID NO: 371879 - DNA, 122 bp, Homo sapiens
catcgttcccagtccttgaatctctggtcccaccttccttgccactttagtcagtcactacgtttcccacaagtggtttagtattcacccttgcaaatctcagtgcgtttcagtcatctttt

SEQ ID NO: 371880 - DNA, 122 bp, Homo sapiens
agagtgtcttccacccaaagacagcagggaacagccccgattcctaagaaaccctcagcgcgcctcctcacaaactcttggctgctccataaaccattggtgtaggtggaatcaagtggctt

SEQ ID NO: 371881 - DNA, 122 bp, Homo sapiens
ttatcagcttcagacttccttaattgagttccgccatcctagtgagtctcaccatactcccgaaataacctgctggagtaggcttatcctactcaactcctcagatctctgtatttaattct

SEQ ID NO: 371882 - DNA, 122 bp, Homo sapiens
agagattgaaagagccgccagagccttgtgggggcagagagggaagagtgtaatagagcccgtgatggtagaggatgaaccacaactctcaactcttgtggggacatgctactatactccaa

SEQ ID NO: 371883 - DNA, 122 bp, Homo sapiens
accccccacctgccccgcctgtggcccctccccctcaccaatgcggtccaggcggtccagcgccacggtctcgaaggcccttcgcatcatggggtactcctccagcacctcattgaagttgt

SEQ ID NO: 371884 - DNA, 122 bp, Homo sapiens
tccaagcagcccacctctccagaacagagaccccatgacggtgactgtaagtcacaaagacggcccctctttacaggcagctcctcctgaagccggaccagagagagaattcactaactgcc

SEQ ID NO: 371885 - DNA, 122 bp, Homo sapiens
aacgaaagtaacagaaaaccatatgccacagaatagaacattaaaagcaatgaagataatcggctttctggaaggttggagtactggtgctttaccaaacaaagttactttctctccttttc

SEQ ID NO: 371886 - DNA, 122 bp, Homo sapiens
agaagcacacacaccagcaaggacccacagaccggcactttcaaccaaacagagacactccggctcgtacacaaccagccgtgtggcttcctcagttgtgggctggaccctaggagcttagg

SEQ ID NO: 371887 - DNA, 122 bp, Homo sapiens
aacagcgatgggcacgcgtgtgtcctgtgactacaaaacagcactggggttgctggaagccgaagtgacccggtgatgggtgggaaacagaggtccagagcaaaggcctttgcccaaggtca

SEQ ID NO: 371888 - DNA, 122 bp, Homo sapiens
tctgcggctccgcgcccctcctcgttacccagcaccccggaggccagggcccgcaaggcacgaatcacacatgtgaggcggcaccccctgcacccacagaccgaccgggaagtcgcccctgc

SEQ ID NO: 371889 - DNA, 122 bp, Homo sapiens
gctggcggagctccgcgacgtgagccacctggcagcgctcagcctgctccggcagctcgccgacctctgtggccactcgttggctctgctcgaggacctcgaggggcacctgctggccctgg

SEQ ID NO: 371890 - DNA, 122 bp, Homo sapiens
attcaacaaatgttgaatgttgaatagtgatgacagtaatagtgatgatgatgacagcagcgtgctctgaggcccatgggctttatttcttgatctcatggtgaggggaagactgagactgt

SEQ ID NO: 371891 - DNA, 122 bp, Homo sapiens
gctcctcccggccgctcctcccgccccgcccggcccggcgccgactctgcggccgcccgacgagcccctcgcggcactgccccggccccggccccggccccggccccctcccgccgcaccgc

SEQ ID NO: 371892 - DNA, 122 bp, Homo sapiens
gggcggtagctggcgccgagcgcggtgggagaggagagggtacccggctggctcggctggcggcctctgcctggatctcggcgccgcagtcctgcgcctctcccgcccctgtctcccgctcc

SEQ ID NO: 371893 - DNA, 122 bp, Homo sapiens
ccgcgcaccggccgcatcctgcctggtggtccctccccagcgcgtctctccacttcagtccgacggtgcttccagccttcgggactgcagaccctacacctcctgcagccccggagactcct

SEQ ID NO: 371894 - DNA, 122 bp, Homo sapiens
cggatcgctaagcatgtttcatgagggtcgctgtccccgggtggaatgcggccgtatgcacgcgcctccctgcacacgcacacacacgcacacttacaataagtgtctgcaggaggagtgtc

SEQ ID NO: 371895 - DNA, 122 bp, Homo sapiens
agcagaggggctacgtccatatccaggcctctgccatgcgaccagaggctgaatccaggccgagaccctgccaggggaccctggccaggccatgactgagaactcagctcctctgtctgggg

SEQ ID NO: 371896 - DNA, 122 bp, Homo sapiens
agaagaacctatttacgttaaacgtttaaatttatcctgacaaatcctgaattcgccgtccgtactcaccccatctcaagaacctctgttgacaagtaagtgggtatacatttttaccgcaa

SEQ ID NO: 371897 - DNA, 122 bp, Homo sapiens
agtccaacgtctcctgtccccaacagcctagctacagggggccgggctatgggttagtctcgcccccgttcatgctcttcacccaatacctgagagaatcggaaggaggcagagctacaccg

SEQ ID NO: 371898 - DNA, 122 bp, Homo sapiens
gctcgcctcaagttgttgctcccgctggcgatccgcttctgtcagtctcgctgctggtgtcgttgagtgtgtttcgggatgtccttgcgcctaacagcagtgaggcgcagaattggcccacg

SEQ ID NO: 371899 - DNA, 122 bp, Homo sapiens
aggcaacatggtgaaaccctgtctctactaaaaatacaaaaattagccgggcatggtggccgcctgcctgtgatcccagatattcaggtggctgaggcatgagaatcgcttgaacctgggag

SEQ ID NO: 371900 - DNA, 122 bp, Homo sapiens
cgacttcactcccagcccctatgaccacgactcgctgaaactgcaggtaagatcagcatccgggcttctctggagcctggcaggctgtgcccaaaaaggaagctggactgaaccaggctatg

SEQ ID NO: 371901 - DNA, 122 bp, Homo sapiens
ccccagtgtgcccaatcaggcccacctccaggtgctgtttggctccctgcagctcacattcgtacttattcctgatcacatccagacagaagcccttgtagatccctgcagagaaagggagg

SEQ ID NO: 371902 - DNA, 122 bp, Homo sapiens
atggacaatggtttaatcattattccaatgggaagaagtacccaaggttggtggtgggggcgggagttgggaaagtagggaatcaattgacttctgcagtcactgtgagtgagcaggacagg

SEQ ID NO: 371903 - DNA, 122 bp, Homo sapiens
gcatctcaaccacaagaggccagtacaggaacctcagattttgcaaccagactgtttactcgctccctaagcagccatgcgcaggcgcgaaactcctccccaggccagacccggcctgcgca

SEQ ID NO: 371904 - DNA, 122 bp, Homo sapiens
acctcactaaagttcctaagcattaaatgatagcaaggtacagctttaaacagtaagcaacggtaacaaccctgcaaccccaaagcattcttaagaaccaaaagaaacaatgaaaaaaaaaa

SEQ ID NO: 371905 - DNA, 122 bp, Homo sapiens
tttggagttggagtcattgcctggagaaagagaaaaggtggctttttcttgttgccgccacgcctgcatgcttactgtcggttcttatcttcgggaaactgattgtaccttgtgtgtgaatt

SEQ ID NO: 371906 - DNA, 122 bp, Homo sapiens
taagagagcatgaaacaaaaaagtgagcacagaaggaggatgggggaactggctgcaaaccgtgcctagcttctttacatctgggacacggaccatcatccctggcacttatcttcccaaga

SEQ ID NO: 371907 - DNA, 122 bp, Homo sapiens
ggggagagactctagagacggggccttggcagagtggctcttgacaggaagcagccaagccgctgcaaaaccgtaggaggaaaaaagaaaacccaggaagtttctttttcaggagctaagta

SEQ ID NO: 371908 - DNA, 122 bp, Homo sapiens
aggcggacggcctgcaggaccgaggtgcagctgggacgagcggaaagctctgcgcgtgggcggggagcccggagcctcgccggggcaatgtcatctaggtgctcggcgctccactgatccgg

SEQ ID NO: 371909 - DNA, 122 bp, Homo sapiens
actgtttgtcactgaccttctggggtccccaggcgacctcagagccacccgagtcctgcacgccacggctgcacggaggctggacggtgctcctgctccacttcctgtcaggacaggaccgt

SEQ ID NO: 371910 - DNA, 122 bp, Homo sapiens
cctttgttctccaaactctgtactcagttattctttcttcacatttgattcttcatgcaccgatttccattctatattttccattctccatacaccattctcaactttccattttccatatt

SEQ ID NO: 371911 - DNA, 122 bp, Homo sapiens
taaaagcagaatcaagtaacagttggctttcataaccaaatacagtcatatgctggataacgatgttttggtcaatgatgtaccgcatatacaatggtggtcccagaagattataaaaccat

SEQ ID NO: 371912 - DNA, 122 bp, Homo sapiens
ccggaagtgccataaaaacaggagactcagcagtaaccagatgggagcggtgcagatgtccgtcctctgtgacagaaaggaaagggggcctgggcttctggggagcggtagagacaaatgag

SEQ ID NO: 371913 - DNA, 122 bp, Homo sapiens
aactgggaaaaagcaaacctctcaaggctgtttgttgccacattattagtaattacaaaacgtggaaacaatgtaaataccagcagtagggaagttagccaaattaatgggtgttatgtggc

SEQ ID NO: 371914 - DNA, 122 bp, Homo sapiens
tggggggacacgtttacgtgtctgcaaaccgctacattctgctaagacatctcaggagcccgccaagcccttagtgaaaagtttcttaaggcggtttcataggtgcgtgtggggctgttgga

SEQ ID NO: 371915 - DNA, 122 bp, Homo sapiens
ggtaattatcagaaataattctcacaggctgcactcctcaacacattgttcacatggcagcgttccacgggcacccagcaccaccgcgttggtcattgtaacgggatgggctgcaccccgcg

SEQ ID NO: 371916 - DNA, 122 bp, Homo sapiens
tgggctccaggtccccatgcagggcagtccgagggtgtcctcatccacctccctttgtaccgtgagtttgctgagccagatggtgacacagggctcctgagggctcagcctggagtctgtga

SEQ ID NO: 371917 - DNA, 122 bp, Homo sapiens
gtggtaatttctgacattttcgtgcacctgtatcctgagcagtgtacactgtacccaatacgtagtcttttatccctcaccctcctcctatcctttttccctgccccgccccaagtccccaa

SEQ ID NO: 371918 - DNA, 122 bp, Homo sapiens
tcctgtgaggagacgggggagacgcttgctgccagacccgtgcagggcatgttcaccttccggtctgcattgctgaaatctggagaaggagttcgctcactatggccccacccaccttcaaa

SEQ ID NO: 371919 - DNA, 122 bp, Homo sapiens
caccgccaggagcacaatccctgaggccaataaagaccccagctttgcaagtcaggggcgcgagcactcttgcccctcaggttcccagaagaaaccgccacgagggtggggtgcggggtcag

SEQ ID NO: 371920 - DNA, 122 bp, Homo sapiens
gatggggaggggcgtctggaattatggggcgggcgaggcgcagatactttgatgaaggggcgtggctcttagctgctccgagaggtacagggcggggcctggaaaggggtggcacttgtgac

SEQ ID NO: 371921 - DNA, 122 bp, Homo sapiens
ctctggcctctcagcaggtgcggcctacagtgatgtccgtccgggttttacatccttccccgacctcgacatgagtcccagccccctcgggcctctgactctcaggtgtcccctacgatcgc

SEQ ID NO: 371922 - DNA, 122 bp, Homo sapiens
tgaaggattgtggctgaggctttagtgtgtaaaattcatagaaagactaggaaggaaggacgtttgacaggtgagaaggcactcatggggctgccctaccctgcacatttaattatgcatcg

SEQ ID NO: 371923 - DNA, 122 bp, Homo sapiens
caattaaagccgcttgttagtccgaggcccaggacggccgaggacagctggagagctcttcgttgcaggcagctctggttaacatcaaccgggaaagctctttgtaaacacatgaataattg

SEQ ID NO: 371924 - DNA, 122 bp, Homo sapiens
ggaagtagttattattattctcattttactgatgaactatcatctgactctgaaagagtgcgtcaactacgtcaattgcaggctgaggtcaatggttagccttaatttcaatctcgatgttg

SEQ ID NO: 371925 - DNA, 122 bp, Homo sapiens
tagctggggaccaggcacttaaacccgtagaatctaatagacagaaagcccctgctttaccgcctttgcgccatccgggttgtctggccacgcctggggcggaaggggcggggagtaagaga

SEQ ID NO: 371926 - DNA, 122 bp, Homo sapiens
ccggccctgccctgagtctgcgggctgcggcgaagagaccgcacttgcccggcaggagggcggacaatgacccgggttttccaccgactccagatgcgtccctcctcctacccctccacctt

SEQ ID NO: 371927 - DNA, 122 bp, Homo sapiens
gggacgcggggcggcccgaggggcgcgggcgggctccgcggctcggggactcgaggacggcgcgctcatggcccggccccggccctggaccgcgcaccccggacacccctggttcgctccgc

SEQ ID NO: 371928 - DNA, 122 bp, Homo sapiens
cactcttcaaattccgcttctgaagaaactaagatccagggccagtagggaaacagaaaccggagtcgggctttggaaaacatagcagcgtccataaccacgctcagtcaataacactaaaa

SEQ ID NO: 371929 - DNA, 122 bp, Homo sapiens
ctgtgcagcctggagtcactgaccatctctgagccctcaattcagcatctggaaagcaggcgtgatgacagcttgggcctccggggcttggagacatcagggacacggccggggttaggggt

SEQ ID NO: 371930 - DNA, 122 bp, Homo sapiens
tcaactgtggtatttgaaatacacagctttatttattgatgtgtatgtggtacaacaatacgtgaaaaacattagccttcatctaattatatcagatgttgaaaatgtcattttagacatac

SEQ ID NO: 371931 - DNA, 122 bp, Homo sapiens
ccgcgcaccccggagcccttccagccttgacacacagctgggactttcaggtctgaacagcggtcctggacttgctcccacagcacgggaactccttcgtagcgaagcagccggtggcgaag

SEQ ID NO: 371932 - DNA, 122 bp, Homo sapiens
gatctccattttacagatgaggacattgaggctcagcgtggttgtgacttcctcaggtcacgcagccactgaatgaaagcgccaaagattcaaactgaggtctgattctaaagctttgctct

SEQ ID NO: 371933 - DNA, 122 bp, Homo sapiens
gggaaaatgagcatagtaatcacaataaagaaagacatctgaaaggtgctaacttagcctcggatcagaagtgctctctgctaatgccttgctggtgaaaagcgtatccagtgtaagccctc

SEQ ID NO: 371934 - DNA, 122 bp, Homo sapiens
atttccttatgtctcttttaagcacagctccattgcacccatgttcaattttagcctcagcgtctgcccttagccacaagttcccggcatctctgtgggaattcatgattgtgagaggaaga

SEQ ID NO: 371935 - DNA, 122 bp, Homo sapiens
ctgcccgggagcagtggccgcaactccaggctgaggcctggctctgtccactgggaaccacgcgtgggtgcaggcaccgggccttggatcacacttgcgcactccgagcacagcgcattact

SEQ ID NO: 371936 - DNA, 122 bp, Homo sapiens
caacaggcagcattcaaacgactctcttcctttatggagatgatcttgttcaactgcttccgctgttattagtcttaagagttgaaaataaaatgcttatagtaggaagcttactaagaaga

SEQ ID NO: 371937 - DNA, 122 bp, Homo sapiens
tgctaggttacacttgagtaactccgggaatgactgggtgggtggggcggggaacagtaacggtctcctattggatggcagcctaaactcgcaggccagctaattggacgcaatcagaaccc

SEQ ID NO: 371938 - DNA, 122 bp, Homo sapiens
ggttacagatgtgagccaccgtgctccgccattacctgtatcttcttgcctcagaaggaacgtttgtgcagacactgcctttcctgaagtcagtgtttgactttctggtcccctgaggctat

SEQ ID NO: 371939 - DNA, 122 bp, Homo sapiens
agattgtgaaacgttgaactgaccatggctgtgctttttacattacttgaaaaataatcgcgttatgtgtgtttttaagagttctgtggttaagataagatgttcttgtactaacttgtttt

SEQ ID NO: 371940 - DNA, 122 bp, Homo sapiens
cctccccttcccgggctaaacgctggggtcggtctggcagctattccgggaatctgagcgcggattctgacaaaggagacgtcttccaccgaccacatcacatggagctccaaagcacgagc

SEQ ID NO: 371941 - DNA, 122 bp, Homo sapiens
cttggacacccccggcctcgcggtggctccgccgtggtgcggcggcggcggcggcggcggcgccggcagctcctgctcccccggccccgcacaccccgccgcgcccagcgccagccccgcgg

SEQ ID NO: 371942 - DNA, 122 bp, Homo sapiens
aaagaaaagcaaagaacaatgtaaacctcatagtcttttggcccaaaagatccttcaacccgttcccaatctgtcagggtgctaatctgttttgaacatttggtccttctttccagaatgtc

SEQ ID NO: 371943 - DNA, 122 bp, Homo sapiens
acagggtggctccggttccctatcccctggacgccctctgaggatggcactgcgctggcccggctggagggacggtggcctgtcgctctcttcagaggccctgccctttcacacctgtcttc

SEQ ID NO: 371944 - DNA, 122 bp, Homo sapiens
gattcatagacttcatagctgataaggtggacctgacctcagccctgacttggaagatcacgctgaagatgccactgatctcctcccccatggacgctgtgacagaagctgacatggccatc

SEQ ID NO: 371945 - DNA, 122 bp, Homo sapiens
tccaaagccagggcaaattagcctttggcattgaaactctcgattatttatccactcaggcgcatctatacaatgagaaacaactgccttgaaaggcaataaaatgttgcatacagttccca

SEQ ID NO: 371946 - DNA, 122 bp, Homo sapiens
gttagttcccagccatgagcacagaagctgaggacctgaccctgagggtcccactcaggccgtggtagccccagtccagggcactgaggcaattctagtctagctgtgctttgtttactccg

SEQ ID NO: 371947 - DNA, 122 bp, Homo sapiens
cccagtgttttggataccaatgcataggactccatagtaatcgaatttaccagaggcgaacgtcatgagcatagtgatcccattgggggttgatacagcagagacgtcatacttggaaatgg

SEQ ID NO: 371948 - DNA, 122 bp, Homo sapiens
gaggaagggacgaggggcaggcggggccagggccgcggggcggagccgggacagggtccacggcagccgccatcttggctgagggcaaagacgctcctggcgctcccgtctttcggcttgcc

SEQ ID NO: 371949 - DNA, 122 bp, Homo sapiens
ctcctcctgatcattccgaaaccaccggactttgatctggcctggatagaaatctgtcaccgagcagaccagcaggttgtggtggttgagggcctctgtcctggatggggagatggtcactg

SEQ ID NO: 371950 - DNA, 122 bp, Homo sapiens
tgctcgggtgtcagcttctcccgagtcgggtcgatacgctgagcgaacggggcctctccacgcttagaatccagagggtcaccagctcccgaagacgccatgttgccactcctcccttcgcg

SEQ ID NO: 371951 - DNA, 122 bp, Homo sapiens
atattgattttctagtttgcacagttaccaagatgaatcatgtggtaaaacacaatcacacggcagtgaccaaggtgactgaatttattctcatggggattacagacaaccctgggctgcag

SEQ ID NO: 371952 - DNA, 122 bp, Homo sapiens
ccagggaccactcaccgcggccggcggactggcgggtctccgacaggtgcgcacactcggcgcaggctgtcgctgagcccggaattctgcaccgggagaaacttttcagcccgcagagcaac

SEQ ID NO: 371953 - DNA, 122 bp, Homo sapiens
tgccgaggcggccctgggaaagaggaagggaaaggtggcacggatttcaagggagggactcggagttaacagatctgatccttccgagcctgcagtctctagccgcgcgcccccgcccccac

SEQ ID NO: 371954 - DNA, 122 bp, Homo sapiens
gaaaagccggcgggaggtgctaaggtggggatgctgaatccacggatggccaagcggagacgcggcacttcaccgggggcagcgaggggcccagaccttgctcggattgtcccggtggtaac

SEQ ID NO: 371955 - DNA, 122 bp, Homo sapiens
tctccgtctcctgccgcctcaggggtccccgggtgttctgcctggtgaccgtagggaagccggcatccaggctgggccgcattttggtatcaatgtaaagaggtttgttgaggtcggccttg

SEQ ID NO: 371956 - DNA, 122 bp, Homo sapiens
acacatgaatgctgtgaaaactagttctatttcccaaggataaacaatctactttgccatcgttaaaaaataaatatccaatttatcatacaacaaccaaatgctttcttttgtagataata

SEQ ID NO: 371957 - DNA, 122 bp, Homo sapiens
acagtttctgtccttgtggagatgacagtctactctggaaaacagaaagttgtacacaaacgtgacccagcaacatggcagcaaatgcaaaaatctcaaggctgcaaaccaactccagaggg

SEQ ID NO: 371958 - DNA, 122 bp, Homo sapiens
cggcgcccctctcggccccgcagcgcaggattctggcgccccgggctggcaggccgtgcgcgctgcccacctgcgccctgactgctccgcgcacccacaccgcggccctcagcacccggctg

SEQ ID NO: 371959 - DNA, 122 bp, Homo sapiens
ctggattttacacttggagtgaacgggcgccatcccgaggctttgcacaggggcaagcttcgagttccgttttccaagacacctcgggcagataggggtgtggggaatcgactgtaggagct

SEQ ID NO: 371960 - DNA, 122 bp, Homo sapiens
tcaggtaataaggcaggggaaaggattagaggatgtccggggcctagtttcaatagtggccgaagaagtcctcctggaaaagtcaccattcaattagagactgaaggaagtgaaggagggag

SEQ ID NO: 371961 - DNA, 122 bp, Homo sapiens
aacagagtagaccggggtaaatacggtaggcggggtaaatatggtaggcagggcaaaatacggtagaccggggtcaatactatagacggggtaaatacagtagattgcggtaaatagagtag

SEQ ID NO: 371962 - DNA, 122 bp, Homo sapiens
gaggttcgctgagggcagtaacttgcaactctgtgtctgtgggaatttcgggagggagggcgtgggcggcaggaaaacggcccagaacagacctagtgcccctcagttattcaccagagggg

SEQ ID NO: 371963 - DNA, 122 bp, Homo sapiens
acgtgtggatccctgaccgccgcaacctgctccgaccgggcccggtctccccgaactcgccgggacctttttgttatgtgtcttcagcttgtgagcccgaaaaccctgtgcgtctttgctcc

SEQ ID NO: 371964 - DNA, 122 bp, Homo sapiens
ccaagacaggggcttcggggtggaggggaggtgggcggcaggcacttagcgggagactcacggcattggggatcaattatatgtggccacagagagagtggggactagcaggggggtgcagg

SEQ ID NO: 371965 - DNA, 122 bp, Homo sapiens
cgagcctccctccctcccgcggccagcccttccctcccagtcggcctccttcgtcgcccccgcccccgcgaaaagccctgcagcttgcagccggcttcactcgcgcacgccgacctcccggc

SEQ ID NO: 371966 - DNA, 122 bp, Homo sapiens
agccctggcggagctgcagcagctcggacagcgtgtggttcttgcggagctgaaggccgtcggggaagggctcctggcacagcgggcagcgggccgcgcctccgggtccgccggctccactc

SEQ ID NO: 371967 - DNA, 122 bp, Homo sapiens
agcttcgttgcacgaaatgaacacccagtagtgatctgcccggctaacgctggggctttgcggacctcaggtcttaggcaggagcttgcgggcctaaaatgcattagctggtttttactgaa

SEQ ID NO: 371968 - DNA, 122 bp, Homo sapiens
cttcggggtctccgggaagtcgcggcgccttcggatgtggcggatgcggccgtgagccggcgggggaggtgcgccagtgtcctccgagctcgcccgcagactccccaccccgttccgcgccc

SEQ ID NO: 371969 - DNA, 122 bp, Homo sapiens
ctggcgcggggcttaggatttgggatgcaggagcttcctctaggggtgcgcctcctggctcgccgccagggaccgggcgctgtcaggcctgaggcccctgtgccccagatcctccacggcgg

SEQ ID NO: 371970 - DNA, 122 bp, Homo sapiens
atctgcccacttcaaatcgctagctagacggagcatagggactcgaactgccgttttcctcgcctccaagagtacagggacgaaccggtgagcagaaggcctaagaagtcaggcacaagagg

SEQ ID NO: 371971 - DNA, 122 bp, Homo sapiens
gggtgcgggatgggaaaggtaagagtgtgtggagcccagtcagcactcaacatgaggtcccgtgggggctgcctgagggcgtagcttccagaattcagcccctggccctcagaaggtgtcac

SEQ ID NO: 371972 - DNA, 122 bp, Homo sapiens
aagagaaagtgaacaggcctaaaacactccagaaatgctttcagacacgggaggctgcaccgggaccacaggtatttaaaggaacacactgactccgcccatgtcctactccaccagttccc

SEQ ID NO: 371973 - DNA, 122 bp, Homo sapiens
aaacaaacaaatgggcattttcaacgcataaatgtttaggagtggagaccgaccaagagccgccttgcaccgcaaatgggccctgaggtccagggctgcaggagcagggtggggagcccggc

SEQ ID NO: 371974 - DNA, 122 bp, Homo sapiens
tagaagaccccggttctatttctggactccggcccaagttggcgctcctcactttggacacgtcactaccctccgtgcacaggacagccatctaagccaagggttcaagcttttctcttctt

SEQ ID NO: 371975 - DNA, 122 bp, Homo sapiens
cggccctaaatcctcatagagcccagtgaccgtttgctgactagaggtcacacgggtacccggagttccttgaaatcccatacctctgttaaactttgggacttccagagctcccctgaacc

SEQ ID NO: 371976 - DNA, 122 bp, Homo sapiens
aggctgggcttttatttaagtcgtcttttctctaatccagactcctgccacaggggccaccgccgtcctggccccgccaggggtccgcacccacggcggagcgggaggcgactttttgcggt

SEQ ID NO: 371977 - DNA, 122 bp, Homo sapiens
agctgccagcagataatgggagcttaatgagttgtcactgtcatcatcattaattctttccggatggctcctttgtgggcagcagcgagtggcacacgtgctcagggccagcagcacaggac

SEQ ID NO: 371978 - DNA, 122 bp, Homo sapiens
gaagccccaggctgagtggcaaaggttgagattttctatcgtaagcacacctcacccaaacgcttgctccctgaaagctgctgacggagctttggcgagggctcatcctcccgttggctgat

SEQ ID NO: 371979 - DNA, 122 bp, Homo sapiens
cgccgccgccgccggcccctcgggcctcgcccctcactctgccgccgcctcccacagcagcgacaccccagccacctctgccgggccgcgggacccggaaccacttccttccggaaccgcct

SEQ ID NO: 371980 - DNA, 122 bp, Homo sapiens
gagacgcaggtgaccggagccatttacactaatgggtaaatctcgggaaagcgctggtttcggctaccggccagttacaggtttgaggtgcccgtcgccgccaccttccctttttttatatt

SEQ ID NO: 371981 - DNA, 122 bp, Homo sapiens
gtgttgccccctgcaaggcggcttccagcgtacttggttcttgttttacaggtcgctttccgttaccaacgctaaattcagatagtaagtcaatactacaaacgtcttgccaaaagctgtta

SEQ ID NO: 371982 - DNA, 122 bp, Homo sapiens
tgaggcctcggtagatattagctgtgcttagttgcgtcacatgtgggttccataaacgaccgtctcaccgcgtggggcccagagaacttcacagatgagaacgtttcatttttctacttttc

SEQ ID NO: 371983 - DNA, 122 bp, Homo sapiens
caaaatgaggtgcccagaaaatacacacaataaaagccaaacgggtccaggctggttctccgatgcctcaccatccctgagtcatatctggggtcaagaggagggaggatttgcagaggttt

SEQ ID NO: 371984 - DNA, 122 bp, Homo sapiens
ttttaaatacaaagaaatatttggtgtgaaatgttccccgggagctggtgcaagcagaggcgacagggcaagggagcttgggttgtagcctcgaattcctccggccagggctaccgtcagcc

SEQ ID NO: 371985 - DNA, 122 bp, Homo sapiens
agtctggctctgcagggccccgttatcccgggcttctgctgtcactcagggctctgaaggcgaggcggggagcacggtccaatcaggagcgccggggcggggccctgccaacttttttcggg

SEQ ID NO: 371986 - DNA, 122 bp, Homo sapiens
cgtcgaaaaaggaagaggcgacggcacaggggatccagaccctgctgacgggactagggacgggggtaggggaggggggcgggccggaccggggcgggcgggcggagcagacactgcggtac

SEQ ID NO: 371987 - DNA, 122 bp, Homo sapiens
ggcccagggcgcagcccgccgccagcagcgcggcgcacagcagcagcgaaccgccagcctcggcccccagctcccactcagcgcccatgcttcaggcttccgacgccaacggcccaggacca

SEQ ID NO: 371988 - DNA, 122 bp, Homo sapiens
ttcatggccaaatattagtaaatttaggaaactctgggttaagcaggtttaaaatgctaacgttgtgttacgttgtggattttcaaggcagtgttcaatatactgtttctcccaaatgtatt

SEQ ID NO: 371989 - DNA, 122 bp, Homo sapiens
ccaggcgctccttgtctatctctgcaggtggcaccaatgagaggacctttctgtcccccacgtgggaggtgtcagttttcttctgcgtctggacaggcaccagctcctcagcagaggagcct

SEQ ID NO: 371990 - DNA, 122 bp, Homo sapiens
actggccacttgcaggtaggagcgcggggcccccccgcccactgcgcacgcgcggcggcccgttgctggcccaggtgcccctaggccggatagagtgcgtcccaaccgattcgcggccccac

SEQ ID NO: 371991 - DNA, 122 bp, Homo sapiens
caggaggtgagtggcaggtgagtgaaatttcatctgtagttacagccactcctcatcactcgcattaccaccagagctccactccctgtcagatcagcggcggcattagattctcataggag

SEQ ID NO: 371992 - DNA, 122 bp, Homo sapiens
attgaggaagaacgaggaaggcttcccccggagctctcagagggctctccccgaggtccacggaggaacgggcaagtccctgcccagcccggcctggccaaggatacgtcacgatgcccgcc

SEQ ID NO: 371993 - DNA, 122 bp, Homo sapiens
gactgctcacagctctcttgtctgccccttgtccttgggtgggagcctgggcctgcgacccgagccacctgtcagcttcccttacctgcattatgatgtaagtctcggtgctcttgttctga

SEQ ID NO: 371994 - DNA, 122 bp, Homo sapiens
tctgacctccaagttaatctccattcccatcaatcctacaaatattcctgttgctaatgccgtctatgaaatagacaaaccccataattatgcttaaataattatgggactatttcactctg

SEQ ID NO: 371995 - DNA, 122 bp, Homo sapiens
gggatgccccacatcttccatggtttctggggcactatcccagtcacttcctgaattctccgaggagctgtccacccgtctgggttctgggtaaggcgggtcaggcctcattggtttccggc

SEQ ID NO: 371996 - DNA, 122 bp, Homo sapiens
gcccctggtctccaacatcatcgacctccatggtctcacccagaagttgaagtccagaggcggtgccggccatgcacaatcactgctcagctgccccgacttctgtacagacttgctggagg

SEQ ID NO: 371997 - DNA, 122 bp, Homo sapiens
tgccatgtgcggggcttctgagtgccctgtgccttgcatcgctgccggctctgaggaccacgcggtgctgggactccactcccactggggagggcgtgagtgagagggtgagagaaatgagg

SEQ ID NO: 371998 - DNA, 122 bp, Homo sapiens
gcttgtccccagctcctgcctagtttgtggagcaggaggcccaggtctgcagccgccagtcgggtggctgcagctgcacccagacaggcagatcttgcctgctcccagccccgctaagagca

SEQ ID NO: 371999 - DNA, 122 bp, Homo sapiens
gcctctgcggcaccgagcctagctctgagctaacgcagatctctaagagcgagtaccagccgccgggagaaaggcaaggggagtgcgcggctcgccgcgcgcggcactccctcagcagaggc

SEQ ID NO: 372000 - DNA, 122 bp, Homo sapiens
ttcctcatctccaaaagggactgcccctatctttgccctggtgaccccacaaccttgtgacgtgtaaggggcctgcaaaggttttactaccagagaggctctgtcattgggcaagggctttc

SEQ ID NO: 372001 - DNA, 122 bp, Homo sapiens
cttcttgccgtctttcttctgggctttggtgacggctttcttggagccctttttaggggccggagcggattttgccggttcaggcatggtaagacacagtacaaacgcggcttagccaagaa

SEQ ID NO: 372002 - DNA, 122 bp, Homo sapiens
ggcccgcggcccccgcgccgcccgggcgccccgcattcctctcgcgtttctcgggctgcacgattccggctgccctgtctgcctggcggtgcctctcgggtctgagcttaaagcgggtgggt

SEQ ID NO: 372003 - DNA, 122 bp, Homo sapiens
tctggaccccagagaggcagtgagggatgccctcagtgggcagagatggctgttccagcccgggcagcttgtgggttatggaactctggctgctggaatagagaagctggcaagagtaggga

SEQ ID NO: 372004 - DNA, 122 bp, Homo sapiens
gccgccccggggcgctctcagcaggatggccaacaccttccctccatccctacaccccgccgccccctggcccgtggccgcgctcggctcccgcactgctcactccaccccctacatcccag

SEQ ID NO: 372005 - DNA, 122 bp, Homo sapiens
caaaggccgggattgaacaggtccgcatggtccttgcacactcagaccccaagtgttctgcgccctgagttgaggtatccacccaggcttcggagtcattggaagggaaagatcttggaatt

SEQ ID NO: 372006 - DNA, 122 bp, Homo sapiens
cccaagccccatgcccccgccagggaaaagcaccattaagaaagtgattctggctggctgcggtggctcatgcctgtaatcccgggattttgggagtccgaggcaggcagatcacctgaggt

SEQ ID NO: 372007 - DNA, 122 bp, Homo sapiens
acctttgtccaagtttctagaagagttctggagtgtggtaggcagtcgagtgagtgggatcggattccaggccaaggtcccaagctctcgaaggtgtgtgaccttcctgactgttagcatct

SEQ ID NO: 372008 - DNA, 122 bp, Homo sapiens
gaccctctcccatgggggcgacgggagacgtcctgccggtagaccttggccagggggtcgcgctccccgcccgcacccctcccggagccccggcggggacgtgcggggacgcgcccgggcgg

SEQ ID NO: 372009 - DNA, 122 bp, Homo sapiens
cgccgtgctcctggcccatcccagcaggcctcaggctggcgtctggggagtgtgttgggtcggccagtccagcactgacctctggttgcagagctggcaggcgaagcagtcgaggtgataca

SEQ ID NO: 372010 - DNA, 122 bp, Homo sapiens
cccccaggtctcccgccagtagactcagtagagcatccccagcaaggtctgaggtgggagcgagggctgcgctgcgaagcacagctgccagttgtgggttggtggctcgggccccagcgccc

SEQ ID NO: 372011 - DNA, 122 bp, Homo sapiens
tctaccatgggatgtgcccaacctacaagcaggcacttgccatcttcctggggtagaaggcggaggatctggggagggctccagaacctgctgtgtgactgtgggtaagcctcacttcctct

SEQ ID NO: 372012 - DNA, 122 bp, Homo sapiens
aagccgaaaaccaattgccagtacccgtggcaattgtgagcgccgccattgctgcggcaccgcacgcttcccaccaacttgatccacatccgggatcccgcgcatgcggagaaagccctctg

SEQ ID NO: 372013 - DNA, 122 bp, Homo sapiens
atcacagaagagcgctgccctgccccactgtaagctgattaggtctggggaggcctagctcggacccctctctgcactaccatgccgtacggtcacacggaaggcacgaacccagactcacg

SEQ ID NO: 372014 - DNA, 122 bp, Homo sapiens
cgagcctgtgcactggttcctggacaagacacccctgcatgccaacgagctcaatgagatcgatgcccagcccgggggctaccacgtgctgaccctgcggcagctggcgctcaaggactcgg

SEQ ID NO: 372015 - DNA, 122 bp, Homo sapiens
cgagctgctgggccgggaggcgctgagggggcggggccttgaggtcgcggggcggggctccgcccacgctctcaggggctaccccagttaaggaggcgctgtcctggcgtcggatggggacg

SEQ ID NO: 372016 - DNA, 122 bp, Homo sapiens
ggcactgaggccatcaatccagatgcagtactgtggggagcaagttgcaaaatgtcacatcgtgacccctggtcagcaggagatcctgccaaggtctcttttctgatggggctcacaacagt

SEQ ID NO: 372017 - DNA, 122 bp, Homo sapiens
atgagcatctacctgctgcgaacgtggcggtgacactactacagctcccagcctgcctcccgcccgcccccactcctggactccacagaccgtgacttgtagtcccagcccacggctggcgg

SEQ ID NO: 372018 - DNA, 122 bp, Homo sapiens
gcgggctgtcgttggctggagcagcggctgcgcgggtcgcggtgctgtgaggtctgcgggcgctggcaaatccggcccaggatgtagagctggcagtgcctgacggcgcgtctgacgcggag

SEQ ID NO: 372019 - DNA, 122 bp, Homo sapiens
atgtatgcatgtttatgttctcatgtattacgtatgtgtgtatgcatgggtatgtatatgcgtttttacttgcgtatagtttctgatctgcctgctgaaagggcccagaagcatacataccc

SEQ ID NO: 372020 - DNA, 122 bp, Homo sapiens
ttattcacagaccttgccttatcttgatttcactattctatctgaccagtgtgtcattgccgaaatgttttccacatttatagttactctgtatctttatgtttcccttaccctgttccttt

SEQ ID NO: 372021 - DNA, 122 bp, Homo sapiens
cggctgggaaccaaagctatttccatagaaatagggccggccagccttgagttgtagccccgccagtgcctgaaacgccaggaggaggggacgagttgccttttaaaggcgtagcgacgaga

SEQ ID NO: 372022 - DNA, 122 bp, Homo sapiens
tgtccccggcctgggagccgagcagcgcggctctggcatgctaagtgggcagcactggggcgcctttgttcctcgcggccgtctcccaggaccggcttccctctgaatctaaatgggcttct

SEQ ID NO: 372023 - DNA, 122 bp, Homo sapiens
ctcaagtgatcctcccgcctcagcctcccaaagtcctgggattacaggcgtgagctaccacgcacagcccaacttgctcttttggttctgtggctgctgcagttatggggatgtacccgctg

SEQ ID NO: 372024 - DNA, 122 bp, Homo sapiens
gacactaggataggctcctctccaccggaaaaggcgggatttagatcacgtcccgcaggccggcggaagtagctgatactctcattggttgcaaaaccttgatctgtgaaagcgggcgtttt

SEQ ID NO: 372025 - DNA, 122 bp, Homo sapiens
ctgtacctgctgctccggagagacggccgcttcctggcgccgcgcttcgcagtggaacagcggccaaatcccggccccggccccacgggggcagcatccgccccgcaacctcccgcgccacc

SEQ ID NO: 372026 - DNA, 122 bp, Homo sapiens
taggtacaaggggcttacctgcttcagaatctgactcgagacttgattctgagatctccacgtgggagcccgaggagccgggatccaaaatcctttccagctccttgatctcctgtgttatc

SEQ ID NO: 372027 - DNA, 122 bp, Homo sapiens
tcataagcactgtggctctgggtatggacagcagacaacttttgaaagaaactccaactccgatcagggaaaactttggtcactacgttgcccttgtaagtgtcatttcagtcaaactctga

SEQ ID NO: 372028 - DNA, 122 bp, Homo sapiens
gggggccatttagttttctgcaacaggagaacactaatggtttcttaatggctcaggcaccggggagatcaggctcaattatatctgaaagcattcttagttcctggggtaaaagacactat

SEQ ID NO: 372029 - DNA, 122 bp, Homo sapiens
ggagctctgaagagcccggcgacgcctgcgctggccaggcgccgtgcccacgggaggcgccgtcctctttgtaactcgagcagaccctggcgggccagttgctatggcaatgttcctcgctc

SEQ ID NO: 372030 - DNA, 122 bp, Homo sapiens
gtatctggccccactcacatcctgctgattgctagagcccagtggtctgttttgacagggcgctgattggtgcgtttacaatccctgagctagacacaaaggttctccacgtccccaccaga

SEQ ID NO: 372031 - DNA, 122 bp, Homo sapiens
gtgctcggaggagggtggaaggccaagatccctaggtcctggagcagggagccgggcccacgccgccgaggtatcttttccgtccgggccaccgtcgcgggggctcactggcagcggcttct

SEQ ID NO: 372032 - DNA, 122 bp, Homo sapiens
tgaattcattcaccacggaggctgggagactcctcctggagcgtccgcagttccttttatcgctgagtggttttccctgtgtgtctccagcacaattgtttatcccttcagctgtcgggtaa

SEQ ID NO: 372033 - DNA, 122 bp, Homo sapiens
gctgtaccttcaaaatagatcagcatctaaccccttttcactactcccacacccagcaggcgggtccaagctactctcatgtgtaatatggattatagcagtaccctaactgttctccttgc

SEQ ID NO: 372034 - DNA, 122 bp, Homo sapiens
ctcaacgcctgcctagcgccagggtccacgggtgagttcatggccacggcccgggtactccgcagcctgcccttagcagcccacgccacagttcattcacactaggtagcgggtgcggtacc

SEQ ID NO: 372035 - DNA, 122 bp, Homo sapiens
agagcctatcccttggggagctgctggaggagacaggcagcgccgggaggtggctcacaccgcaccgccgagagcgctttgccctcgcatcgctgaaatttaatcacggtcacaggttacaa

SEQ ID NO: 372036 - DNA, 122 bp, Homo sapiens
tcttggagtcctcaaagggccccacaacttgaatgtcacctacggacaccatttggtgtccgccatgctctttttctcctgcttagttggtacccagtgccaaaacaccacctgaaggctct

SEQ ID NO: 372037 - DNA, 122 bp, Homo sapiens
gaggttgactctatctcaaaactagctagcccagtccacagggcaggataatcctgatggcgtgtagccacatttgctgcaaaccagatgtctgcgatggatataatgatacccccggggct

SEQ ID NO: 372038 - DNA, 122 bp, Homo sapiens
tgggggattaccaggcaaaaggtgagctctgctgccattttgaggactcgatcctggcagcgataatgaggtagtccaattggggagcctgggactccccaccaacttcctgggtgtgctct

SEQ ID NO: 372039 - DNA, 122 bp, Homo sapiens
tcccgagaggcccaatgcctgtggggcagccctggagtgcagaggacgagtgggcactggcgttcccattgcaggtttgccaaatactacaagatcaatggcaccaccacccgcacgctcat

SEQ ID NO: 372040 - DNA, 122 bp, Homo sapiens
caggaggttccactgggggtgtggcatggggggaggggctgagggcagcttcttggcacccgggctgccctgcctcatgggtgcccttctcagggcctctggccccgcctcccaagccgccc

SEQ ID NO: 372041 - DNA, 122 bp, Homo sapiens
cgcagggtcgcaggagcgagaccctaaccaaagtctgcgacctcaggtgcaggaggggtccgcgcgtcccccttcggccgtggcttgcgaggactgcagctgcagggacgagaaggtggcgc

SEQ ID NO: 372042 - DNA, 122 bp, Homo sapiens
cgggcaacacaggagacccacgttcctcaaatctgttctccacgtgggctcctgggaccccgcactcaccaaagtcgtaaaggttctggagcagagcgtcaagaagtgtcggagaactggga

SEQ ID NO: 372043 - DNA, 122 bp, Homo sapiens
gagtgagcgccaaaaagggcctgacagacagaagcctttggccccagcaccggcccagcccgtctctagacgattcttgctcctttcaccctcacagcctccagtggtcgcttcatcttcgc

SEQ ID NO: 372044 - DNA, 122 bp, Homo sapiens
catacctgcctgcaagagctgacgggtatgtctcttcccaaccagcattcagtgagctcacgtaggtagcttgaaatcagccatggtgggagtatttacaccgcagaaataagcagcactat

SEQ ID NO: 372045 - DNA, 122 bp, Homo sapiens
cttgggccatggctcctgccgggagcagcagccctggggccgggatccaggatgcagaggcgagaaaatgaactgcccggccaccacgaagacaacccaccccttgccagtcacccctcaaa

SEQ ID NO: 372046 - DNA, 122 bp, Homo sapiens
ggcctacagcacggccgacatcttcgaccgcatcaagcgcaaggacttccgctggaaggacgccagcgggcccaaggagaagctggagatctacaagcccactgcccggtactgcatccgct

SEQ ID NO: 372047 - DNA, 122 bp, Homo sapiens
cttgcacactaaaaaagaaaaataccagctttcttcacagagaagcacatggaagtcactcgatgcaatgagaggacaccccacagtgatcaacctaagtgtatgggtcctggaggtttaag

SEQ ID NO: 372048 - DNA, 122 bp, Homo sapiens
tatacttttaaatgattcgaatcttgaggtttcaaactgaaccgtcttgtgccttttgcccggcgggcatttctgcggggaccgcgggtcaccttctgaatttttaccttcataaacagcaa

SEQ ID NO: 372049 - DNA, 122 bp, Homo sapiens
gctgtggtagcccgggaaagtaacccaactctgtaactctgaggccaggttcctggattgcgaaactggagcaagaattagcagcctgcagtttgctgagaggattaaacgtgatagtgtat

SEQ ID NO: 372050 - DNA, 122 bp, Homo sapiens
ccctcctctgcccactggaggcttcagccagactccacttctccccagactcagagtacacgcctatgccaggcacatcgtcttccacgcccatccctcaaaacctgagcagggaagtctac

SEQ ID NO: 372051 - DNA, 122 bp, Homo sapiens
ccggaggtctccctggagcggtaggcggccggtccctggccctccagcactccccatcctcggccatacaccggggcaggtgacacaccaccgccacctggcggccaagtggggaattctga

SEQ ID NO: 372052 - DNA, 122 bp, Homo sapiens
ggtttgggctggcggggggctcattgggaaaatgcttttcaaagcattctgtttggctgccgtgagcacctatttgccttatgtgcatattgagaaatgtgtgcttctactaaggttagtcg

SEQ ID NO: 372053 - DNA, 122 bp, Homo sapiens
aacatagggagacactgtcgctacaaaaaaaatacaaaaaattatccaggcgtggtggcgcgcgcctgccaacccagctactcagggggtggaggtggagggaggcttgaacccggaaggtg

SEQ ID NO: 372054 - DNA, 122 bp, Homo sapiens
agataacccagtatgcagaatccagccacccacacgcactcaggagacccctctgacgggcggcactggctttccggggcctctgtgggctggacagcatctcaacctcttcaccatcctac

SEQ ID NO: 372055 - DNA, 122 bp, Homo sapiens
tgcctctgaaatatattataacattgagccacaagtaactccaacaccaaaagaatccaacgtattaacaatgccccatgcattcctaaaattccttttattttcataaatatataaacaga

SEQ ID NO: 372056 - DNA, 122 bp, Homo sapiens
tgagagccgccgctgcacttccgccaccgtgaccttgtacttcgaggtggagctgaggagcgagaggcgacccggaactgaacagaagacttcgttggggttcaccacgccgccgaagaggt

SEQ ID NO: 372057 - DNA, 122 bp, Homo sapiens
gcgtgcggacttggtggtcgctggggtccgcgacggggtgggggctcccggggaaccgcacgcggccgggccgggcggacgacggagtgcggaggggggcggctggcgggagggtgcgccat

SEQ ID NO: 372058 - DNA, 122 bp, Homo sapiens
caagttcagctgatgtagttcctggtttcccaattgcgtcctaaaaccccagggatatgtcgtgactattttatttaacaaaaatataaaggcagagggcttttcactctgttgctgatgtt

SEQ ID NO: 372059 - DNA, 122 bp, Homo sapiens
ccagcctagagtcaagagcggactggggcagggcagacattcacctggtgtaccccagcacgcctcctgattgattggtaaatagctgttgttccagtccttgagttccccctgtgcctctc

SEQ ID NO: 372060 - DNA, 122 bp, Homo sapiens
gcgagaccgcctccgcccgctggccgcactccgagcctcgcgcctagctcccaccggtgccgcgacgacgaccacttccgtgtccacgtcaccttccgcgaccactgagatgggctgggcca

SEQ ID NO: 372061 - DNA, 122 bp, Homo sapiens
tttccccatgagatctgtcccctggttttaataatgttggcctcttttctctgtgttctccgaccttcctaggctggacaaccaagtttataatccagaaatagtttcttgtcttggggtct

SEQ ID NO: 372062 - DNA, 122 bp, Homo sapiens
ctctatcaagggtgattttaaaataaacaggatgcatattgttagctagttattaaccagcgagttgtaaattcttcaaaacagttcagggtgtaatttacatgactcaagatgagcaagac

SEQ ID NO: 372063 - DNA, 122 bp, Homo sapiens
ctgggcgaggcggcgccagcgatcagagcagcgctgggtgttcaggggccaagatggcggcgcgccggggacggagagacggagtcgcgccgcccccgagtgggggccccggtccggaccct

SEQ ID NO: 372064 - DNA, 122 bp, Homo sapiens
gcacgcgtccatgaggcgcatagctgagcgcaggtagcgttcccgggccgtggcgaaaagcgggctctgcgagacgtggtagagcatatacgccactccggccacgtcgccataaacccccc

SEQ ID NO: 372065 - DNA, 122 bp, Homo sapiens
agacttgtgggaattcggcccaagggttcccagggcaacgcgcaagcgcagttcggctcccggctgcagactccagctcattgtgttctgactgcgatgtggcgcttgcgatctctcgccgc

SEQ ID NO: 372066 - DNA, 122 bp, Homo sapiens
taattagtttctttagaacttgatgtataaatttaatatcccctgtatagagggagttgtcgtcccatggaggatttcagtatctgtggcacaaattgtcaggctcctctccccacacactg

SEQ ID NO: 372067 - DNA, 122 bp, Homo sapiens
ctagcggcctgaagcgcaccctggtctcaaaccaggaatgccagggtcccctgtgcccagcgcaagggctgatgggaagaccctttcgtccgttggggacccaggctccgcttcttcgtggt

SEQ ID NO: 372068 - DNA, 122 bp, Homo sapiens
ttgctaagactccactatggcggctccacttgcccggagcttttcctcttaagcgtcacccgcggatcctgatattgcttctggactgtctgccagcgcccctcctgccagatccttcaagc

SEQ ID NO: 372069 - DNA, 122 bp, Homo sapiens
agagcccaaagttaggtcatgaggctttggccttgacaccaagggatgctgtctccttgccggaagcagctcaccaaagccggcagagaacccaggttccgtggggccacgatgtggggctc

SEQ ID NO: 372070 - DNA, 122 bp, Homo sapiens
ttatgaagtattcaaagtgtcctagcttactcactctctcatttttttaatttttaataccgttagctgttttttaataactggcactcagatagtgtataattattctactatacatgtct

SEQ ID NO: 372071 - DNA, 122 bp, Homo sapiens
cgtggaatgtttgtgaggctacccttcattgaaggggggcccgtgatgttgagtgttcaccgtctttcagaacgtttgtgcggtggcgtgtcccttctgtaaattgctgtgacctgggctgc

SEQ ID NO: 372072 - DNA, 122 bp, Homo sapiens
ctacgacgctactcattagagagatgctgctttcttccagcacggtcatgcacagagtctcggcaccatcccctgatcccacgtctttctccatgaggctcgtggccagaacttgctgaggt

SEQ ID NO: 372073 - DNA, 122 bp, Homo sapiens
acacctaaactaaggttttatgcaccaaagcttgagaataggaatggagctggtacaaaacggatacagaaaagattgtgggttaaacccttaaaaggaaaagagaccctgacaaatatttt

SEQ ID NO: 372074 - DNA, 122 bp, Homo sapiens
atcagaggcgtcctcctgggtccaggatcttctgggttctctcctgctgcggaaccacagcgcggctcctgcaacccacgggctccgctgtgctctgccgccccctagcggcgcctcttcca

SEQ ID NO: 372075 - DNA, 122 bp, Homo sapiens
tccccgtattgattaagaatgggacggacttaccctccaccctaagagttacccgaagctcggcatccgcgattgtctaaggggcctccgagacgttcgggcagcgtcagtcttcagccgcc

SEQ ID NO: 372076 - DNA, 122 bp, Homo sapiens
gggaggccttgaggaagaggtgtgcagaacccaagggattaccttccacctttccctgcacgctgcatccagctaagccctcctgcccatccagccctgagggggccctctacagatgtggg

SEQ ID NO: 372077 - DNA, 122 bp, Homo sapiens
attttctcaaccattcttctatgcttttccagtcttcttttaacattgtcagtgacctgacgtctccagggagaccctggtaaaattacaagtctgacttgagattgggtgacatgtcatta

SEQ ID NO: 372078 - DNA, 122 bp, Homo sapiens
cgttgttcgtctttgtacccacggaacctggcaaggtgctcgcttattttgatagaaaaacgcactccgcgccgcagaggcagagaaacgacggagcgagattgtcctgggagccagaagag

SEQ ID NO: 372079 - DNA, 122 bp, Homo sapiens
cgagtcactcaacctgggtgacagagtaagaccctgcctcaaaaaaacaaaatgaaaatccggtagcttttgttataactcagtaactggccccaagagctagtttgggcagaaagtagcca

SEQ ID NO: 372080 - DNA, 122 bp, Homo sapiens
cccaccgagggccgggaccagggggccggtgagggtggaggtctcgctggcctttgggtccgtggggaggggcgccctgatctggggcctccacctcccccatccccagactccagcccttg

SEQ ID NO: 372081 - DNA, 122 bp, Homo sapiens
tgattctcaagttgtgaagagcaggtatgtggtgacacagaacaagactcaagctctcatcgaatgccaagggcctcaggtgaagctgcaggaggaaaggaggtgggaaaattgatttccac

SEQ ID NO: 372082 - DNA, 122 bp, Homo sapiens
cagtgctcagatgatcatcccaccggaaatttgtttttaagcacccaggtctctaaagaccgtgcttctctctcactgggagtgctgcattagcctaagacatctttaattataggccacgg

SEQ ID NO: 372083 - DNA, 122 bp, Homo sapiens
gaataaacaaaccccccgctcagcctcctgagaccaggacactcgagacgccaggcagaacgtgagagtcacaccaatgcttcccagtgatttcctgcatgcctgggaggaggcttgggagt

SEQ ID NO: 372084 - DNA, 122 bp, Homo sapiens
gaatctgctgtgttcctatctgccaagttcctatatgtttctggggtaaacactgagacacgccaagaaacaaacacacacatgcacaacttccctgaccacaagactacacacacacacac

SEQ ID NO: 372085 - DNA, 122 bp, Homo sapiens
agtgctggggaggctgtcagctactgacgttcgacttcaggttccctccaggtggaagaacgaggaccagaaagcaagggggaacgtgcccatcgccagaggaggagtggcacgctcttctg

SEQ ID NO: 372086 - DNA, 122 bp, Homo sapiens
tgcagcagagaagggcagagcgcccggggggagaaagcaaagaggcgctacactccaaggcggccctttggaaccgtccttggcccgggtgcacctactttggattcgcccagactgcaaat

SEQ ID NO: 372087 - DNA, 122 bp, Homo sapiens
acctcgtcagcgccagagccgtcctgcatgaggcaggatgtggtgggcgcacagcagggacgaggcggggggcacggggcagaaaggagagggcgacgggaagaaggcagagaaaacccaaa

SEQ ID NO: 372088 - DNA, 122 bp, Homo sapiens
tctcgtccctcgtgcagcccggagagcgcgaagcgggcacacgcgctctatttataggagcgcagcgtccggctgggttggcttatcgcgcaacccgcgggctccgagaaaagggggagaag

SEQ ID NO: 372089 - DNA, 122 bp, Homo sapiens
tggctgtggccacatggctcttgcgtggctgtgcagttattaaaacctggtcctgtctgacgagaatcgtgcttttttccactgtgccaatacccagtgggggattccctggtgtgagcgcc

SEQ ID NO: 372090 - DNA, 122 bp, Homo sapiens
cagtacctggccggggagacatattagacaccctggcttattcaggcagcttcatttctccgtcccctccccaccctcggaggtctctgtggatgtgatgtcacacgatcacttgcaagggg

SEQ ID NO: 372091 - DNA, 122 bp, Homo sapiens
ttttccaaatgattttcctctggttgcaaagcctgttcagtccttcaatccttttttagtcgtttagcttttgcaatgttttcttggcgtttttgcttcttcttttgctccttctccctggc

SEQ ID NO: 372092 - DNA, 122 bp, Homo sapiens
gtagagctgcacatgcggctgctccctgctccgtcccgcccagccactgtcgcgcaggaacgggtccctgcagcccccagccgatggcaggacagtagccgcctgtcagaggtcgtgaacgg

SEQ ID NO: 372093 - DNA, 122 bp, Homo sapiens
ctgtagcacatgtttacacataaaagtgatcaataatttttcactgaataaataaagtaacgtgagctagaagtgagagtaaatgatctatccaagatagcatggccacttaatatcagaat

SEQ ID NO: 372094 - DNA, 122 bp, Homo sapiens
ctctgccccgccttctcgcctgacctgttttgccgagcctggccgggatttctctttctgcgttgggctgactgggccgcagggaaaccatgtggacacacagtttgccgggcacagcgtga

SEQ ID NO: 372095 - DNA, 122 bp, Homo sapiens
ttccgggttgcgccttaaccttaagaaagatggctgctgtgcctactataaatgcggaatcggggctagctgaatccatctttatcgtgggcatgttgttagactagaagacaatatgcatg

SEQ ID NO: 372096 - DNA, 122 bp, Homo sapiens
acggcagacaccaaacttcccctgcagccacgccctccccactttgggagtctgggtccccgggaaggaaggcctccctattggtgctcaacgtgttacgtcacttccgctacctccacggc

SEQ ID NO: 372097 - DNA, 122 bp, Homo sapiens
gagcggtgggtctccttcctccagggagcatttatacctcgtccatggagggtgtggacacgtaagacaaccccttttttttttttttttttttgctcatttggtgattgtcaaaagccctt

SEQ ID NO: 372098 - DNA, 122 bp, Homo sapiens
gacagcctgcccaggtgagcctggcctccgggtccccgccgcccgccgccgtcccaggatcggccccaacctgactgcagtcactcatgactcctctagtgaacccgtttccgcccccaagc

SEQ ID NO: 372099 - DNA, 122 bp, Homo sapiens
cggcgtggggcactagcgggggcggggtcaggaaccccggggccagaggttggggggcaccgagttttgcccccttcaccctctgtcgggaaaagcctcacctcggccttagtgcccttccc

SEQ ID NO: 372100 - DNA, 122 bp, Homo sapiens
ctttagtaaaggagctgatggggaatcggatgcctgaccccgagtcctcactctggggctcgagcttaggataacttcaggttcagctgaggcctctgaactgtgactccgccccgtggccg

SEQ ID NO: 372101 - DNA, 122 bp, Homo sapiens
gcggcgcccgcctctgctccctcccctcgggcgctgggtgccgaccggccggctggccggcgccgcctcctgggaagatggcgctgcacttccaggtcagtgtgctctgcgccgcgggcccg

SEQ ID NO: 372102 - DNA, 122 bp, Homo sapiens
ccagaaataaataagaactgggagaagtaaaaatatttcctcagtacaatccagtgtgttcggattatttttaaattgtttattattaggatttctatcacttgatgtgatggagagcacct

SEQ ID NO: 372103 - DNA, 122 bp, Homo sapiens
ggtggctgcagtagactggatctggatctctaaatggcaatctattgacatggctgccagcggtaactcgttaactcatttgctagtctaagagaatttatatatgatgggaactgaaattt

SEQ ID NO: 372104 - DNA, 122 bp, Homo sapiens
agcccagggcctgcccgcatgctggacaggaaccctgcagagggtgagctccgggctcttcgccagctgcggacaccgcaagctgtgacgcagtcccaccccatgactcgataaagcagtcg

SEQ ID NO: 372105 - DNA, 122 bp, Homo sapiens
gcccgtcctagccaagcaacatctcattttcccagctgcttgtaaagagcttctactatacgcacggctgttaaaagcatagagtcttgggcctggttcgagtcccagctccaccactttct

SEQ ID NO: 372106 - DNA, 122 bp, Homo sapiens
ctaaaacatagcacaaaaaaaaaaaagtaaaatggtaatgattgaattcaggctgcttgacgtgtggaatggggaaattcagaagcttctgcccatatcacactctgtacacttaactgctg

SEQ ID NO: 372107 - DNA, 122 bp, Homo sapiens
gggggatgtccagttttttttcctcttcccaagtacagacgcagagcagacttgtctttccgcttaacctcaacctcgtgtgatctgccagtttcgctcccggttagcccaggactttttat

SEQ ID NO: 372108 - DNA, 122 bp, Homo sapiens
gtgtcagctgttgccgcagtccttgctcattcaggatgggtcactgacctctgcctcgttcggttaggttccaaagtgactttttgccgtacttgttccctgctctgataaccaagagtggt

SEQ ID NO: 372109 - DNA, 122 bp, Homo sapiens
tgtaagcttctagggcaaggctgggacatagcaaattctcaataaataagtgccagctcccgcgctcagcaggctccgagttttattcgatgcgctcggcgctcttggtcgagcgggattcc

SEQ ID NO: 372110 - DNA, 122 bp, Homo sapiens
cgattcagcacttttcacattatttagagaataaaattaaccctcgcaggcccgggctgccgcctgtccccgctggatctggccggctcagcgctttcccatatataattacaagctgctat

SEQ ID NO: 372111 - DNA, 122 bp, Homo sapiens
ggtttggtaagtgttgcgagagaccttggggtttgggagagactgcagcctctgccattccgacctcgacctcgacctcgattagggcagggcaagacgcaaggaaggccacgggggaaact

SEQ ID NO: 372112 - DNA, 122 bp, Homo sapiens
ccacccttgctcacactctcgctctggggaagaccagatgcggcacttcctccctgacctcgggtccccagggcaggctgagacagacagacaaggctgtcctgcagcgctcccccagacag

SEQ ID NO: 372113 - DNA, 122 bp, Homo sapiens
ggtgagtgcccaccccaggtccgtcccactgcattcgcccaggcagacccccggggggtacgcaaagagcagaaatggggcgagtggagccaccgcgccctttaatgtccccacgagggccg

SEQ ID NO: 372114 - DNA, 122 bp, Homo sapiens
acgccctgtcgcttcactgcgcgacgctcgcgaggccggggacgccactcccagaccgggcgggacgcgcacgctcacagtgaggtctcaaaagatccccacctcagttttctcatctggaa

SEQ ID NO: 372115 - DNA, 122 bp, Homo sapiens
tgctgcagctcggccgccatctggtccagcagatcattgtcctgcaggccccagcgtgctcggagctcagccaccgcactggcaaggtgggccaggaaggccttctccgtcttcttcagtaa

SEQ ID NO: 372116 - DNA, 122 bp, Homo sapiens
ccagccggaagcgggcttctcgcgaccatgtggcgaagccccattcgtcagctggccgcccgcggccctggtacccggtcacctctctgatctgcgcatgtgctgggctacgcccgggcgca

SEQ ID NO: 372117 - DNA, 122 bp, Homo sapiens
cagatcagttcacagcctggttttgtatggcctgtgagttaagaatgagttttacattttcgaattgttgaagaaaaaaagtcaaaagaattataatagtctgtgacacatgaaaataatgt

SEQ ID NO: 372118 - DNA, 122 bp, Homo sapiens
actcgggactcagctgccggagggacaaactaacttcctgagcgcgggacctgaggctggcgcggccgggagccacctgcagcctgcggtgaggcgaccctggccctcggggcgcgcggcat

SEQ ID NO: 372119 - DNA, 122 bp, Homo sapiens
tctacgagtcctcggagatgctcaggcagaggtggccgaggagaggccgcgggataagtacgcggagcgccaccgccccgcacctgccgaggagacttcgaggtgcgaggagggaccccggg

SEQ ID NO: 372120 - DNA, 122 bp, Homo sapiens
tcttccttgcagggtggggatgggaaagggcctatatagcttctgagcatctcccgactccgggctcaaaagaaactgccttgtcataaagcttctgtgatcagagccgtgtccttgggtgt

SEQ ID NO: 372121 - DNA, 122 bp, Homo sapiens
aggtagccgtgagtaagcctgggttccccatatccaaaggaatccatcggggcagtccatcgtcagctggtgttcctaggattgtcgcatagtgcacttaggcaggggtatgcggcagaaga

SEQ ID NO: 372122 - DNA, 122 bp, Homo sapiens
ctctaaagaaggtacttaaaatataaaaaacttataaaatcctccccagaaggaacaatgcgttggtatcttttcataacccctgagctaccatatttatttcacctagcacatggtaaaca

SEQ ID NO: 372123 - DNA, 122 bp, Homo sapiens
tgcctgggctcctgtatataagagttcttttgatgacgtcacgacgcacgctcccggcagcgtccgcttcggctcctccccctaacctccctcaatcttcctctcatccagtatcaccttct

SEQ ID NO: 372124 - DNA, 122 bp, Homo sapiens
tcttttagccccgcctgcttcccggctccagctggggccggagaggctgagtggttggtacgctgctcgctggcctcccagtcttcccagcaaccggtgacactgcccgcgccagactgacc

SEQ ID NO: 372125 - DNA, 122 bp, Homo sapiens
ccagccttcttagcttgaaggcaagaggccagcatactaatgatttgaatagacacaagtcgtcttccagtaatccgaaggcattaattaatccaacaaaagccgggagcctgctctgtgcc

SEQ ID NO: 372126 - DNA, 122 bp, Homo sapiens
cctcaactcggcggtcaaccccatcatctactccttccgcagcagggaggtgtgcagagccgtgctcagcttcctctgctgcgggtgtctccggctgggcatgcgagggcccggggactgcc

SEQ ID NO: 372127 - DNA, 122 bp, Homo sapiens
acaccacactttgtacttttctggggggctgggggtgggtggggactaagtgtgacagagcggaaaggaaattgcaaggggagtcaggaaatctggcttcatattaaggttctaccactaaa

SEQ ID NO: 372128 - DNA, 122 bp, Homo sapiens
gggagagagcacacagctggcgggacagacctgccattcatccctctgatgtgggatgcccgtcttggctgcagcctctgggggaggtgtgcacctgcacacacgtgtgagtgtatgtgtgt

SEQ ID NO: 372129 - DNA, 122 bp, Homo sapiens
gcgaataagttccacagaaggttcttgggggttaggactcttccctgaattatgtctgggcggggcagggggtgatttatgtttattttatgcatcctccccacttttttttttttgctttc

SEQ ID NO: 372130 - DNA, 122 bp, Homo sapiens
aggggagtacttcccaaggacattttatcctctactaaggtctctctcaccgagactctgcgtaggaggcaagaaggggggcaaatatgagtcaagcattcctggctgaactccaggagctt

SEQ ID NO: 372131 - DNA, 122 bp, Homo sapiens
gaaggggataaagcagagaagtccaatttagttggggaattctcactctatccaaagccccggatgaggtcactgcttttatgagcctccttgaaagaagccttgacataatccctggctta

SEQ ID NO: 372132 - DNA, 122 bp, Homo sapiens
ctgataactgtacacgggctcacaagacgttaccctcgggaaagctggcggagggtgcgtcgaaacattctccacgacttctgcaactttcctgtcagtgtaacattatgtcaaaatgaaaa

SEQ ID NO: 372133 - DNA, 122 bp, Homo sapiens
gccgctcgcccttcctgcccgccggacctccgagcttcctgggcccggcgcgggcagtgccgttgtccgagctcggctcctcccaggccgcctccgccgccgccttcttcctgggctagttg

SEQ ID NO: 372134 - DNA, 122 bp, Homo sapiens
acctgaaggggccaagaaaaataatatgtggcatcttcatctgtcacaccttttcttactcgaagtggagcaaactggggaaaaggggggaatttcagtcatccggttgaatggctaacagt

SEQ ID NO: 372135 - DNA, 122 bp, Homo sapiens
ccttactgcctggggccggcggcgctggccggccgctccaagtgcggggcccgccgagcccgcgcccacccggaactcgcgctggcacggttcccgcccacgcctctctctccacagctccc

SEQ ID NO: 372136 - DNA, 122 bp, Homo sapiens
ctcaatgatatcatcaagtatttgggtgttttctatctttgccctcaaccatcttcagcacgtgagtttttctttcctttttttttttttttttgagacggagtctcgctcttgttgcccag

SEQ ID NO: 372137 - DNA, 122 bp, Homo sapiens
agagcgagatctcttagcaaccacacctgtgaaaaggttaacagggaggccgtgtcctgacgcagggggagggctgtgctccaggagactgaagactcctctctgggaccctgggctccaga

SEQ ID NO: 372138 - DNA, 122 bp, Homo sapiens
aacacaattagatttgcttcttttgccccagaacaaagcgggtttgttgatgtactgaatcggacacattactttctagctgaacactcagcttcatccactccaggacagctgagcgtctg

SEQ ID NO: 372139 - DNA, 122 bp, Homo sapiens
tccccactcctcccagagtccggggctgagatttgtttttcccttctgagtttctctctgcggttgcagccccggggggcgtgctttccctccttcttcctttctttcttcccggggttccc

SEQ ID NO: 372140 - DNA, 122 bp, Homo sapiens
ctacatctaaatgttctagttggaaaccttaggaacaagtaagttcctcaaggggccgggcgcagtggaatcaaggataggatcaagtgtcttacccttgtgggcctcaaaagggggcaatc

SEQ ID NO: 372141 - DNA, 122 bp, Homo sapiens
ggtctacccctgggcttttggattatgtgtacagttggttcatccctttttctgctaattcgagtcatggctaatttaacaccctttagaaccttaaagaaccatcagcatcacccgggaac

SEQ ID NO: 372142 - DNA, 122 bp, Homo sapiens
gcatggccaccgcaagcgcaactaaaatccagggcttgtcgcaggcacaggctcctccttcggtgggtgggacggcggcgcgcactttctctacgccccactgctaggatgtgcggccacca

SEQ ID NO: 372143 - DNA, 122 bp, Homo sapiens
ctgcactgcgtgctggtgacggtaagggactgggggactgcagcctgcagggtagagccccggaaggacgggagtcagggctgggttgcctgattgtggatctgtggtaggtgggggtcagg

SEQ ID NO: 372144 - DNA, 122 bp, Homo sapiens
caatatccaaacaacacccagcaacggcaacccccatccctctccaaagttctaatttcccgcacttaaagtcctgggctatccttgtgttgcaaggatcttagaatcgaaatggagggatt

SEQ ID NO: 372145 - DNA, 122 bp, Homo sapiens
atgcccatcaggagagcaccactgtccatgctgacagcaccccttcctgaatacccaccccgccattgatccttagggaccagagccgagagggagtccacatgggaatgagggcagggacc

SEQ ID NO: 372146 - DNA, 122 bp, Homo sapiens
gagtgagacgcggcagccggggcgggagacgggggggggcaggtcccagaaaatcaaacacggacacccacgtggcccagcactccccttccgggcacaagcccagaggaccaaaagccgag

SEQ ID NO: 372147 - DNA, 122 bp, Homo sapiens
cctcacttcccagacggggaggccgggcggaggggctcctcacttctgggacagggtggccgggcagagacactcctcacctcccagacggggtggcagttgggcagagacactcctcagat

SEQ ID NO: 372148 - DNA, 122 bp, Homo sapiens
ctccgggaaggtgtggaggagactggcagccttgacagcatcgaactgggttccgcccaccgagatttctgcctcgaggaccttgcggagcagccacaggcagcctcatgcgggtgcccagc

SEQ ID NO: 372149 - DNA, 122 bp, Homo sapiens
tgtgtcacctgccactcccctgccagtgtgcgaggcagcgtgaagctggggcctgctccccgcagcctctggagcgcatctcagaccttctgagacctatgttgctggccccccagaacccg

SEQ ID NO: 372150 - DNA, 122 bp, Homo sapiens
acgcacgccactgcatgatgtgttgctgtttaggtcagagtatatatgcatgccattatgcgcatgcgtgtgtatagtatgcatctatagaatagacattatctatttctgtatatgtgaag

SEQ ID NO: 372151 - DNA, 122 bp, Homo sapiens
aagggacccgcctcacttggaaacggggctgcggtagccacaaccctccggtagcggtagcgtaaccccgttcggtgatccagccgcacagcgcaacgggtacaaagaaccccactggctaa

SEQ ID NO: 372152 - DNA, 122 bp, Homo sapiens
gtccctcaggattgtcacagtgaaaccaccactgcaaaattataactgagacactgaaagcgatctgacctacccaaatccatgttgtttctaacctccaaactgtccttgttcattgctgg

SEQ ID NO: 372153 - DNA, 122 bp, Homo sapiens
gctactgcactccagcctgggcgacagagcgagacttattctcaaacaaacaaaatcctacgtagtcttgtctcctgctccccactgcacctcctattacctcacccttcacctactcagct

SEQ ID NO: 372154 - DNA, 122 bp, Homo sapiens
atgccttaaacatccaggcttctctttcctccaagtgctaagttccctttaaaatacagccgcttgctacgaaaacacagtcagttaacataatatccctgggttcatgtggacctttaata

SEQ ID NO: 372155 - DNA, 122 bp, Homo sapiens
aaatgaagcacacagggaggtaaagtgccccaaaatcccatctgaactggctttagaaaccgtatatttactttttcatataatttgtttatctaagggaaaaaaataacagatgtgtttaa

SEQ ID NO: 372156 - DNA, 122 bp, Homo sapiens
ttagcataaagttaggaattatgcgagtgctgggtgtatcacggtcaattctgtgagcctcgtcacagtttatagccgaagtcagaggcttcaaaatcagacacacattgacctggaatgct

SEQ ID NO: 372157 - DNA, 122 bp, Homo sapiens
gaagcaagggggtactcaccggggtcccaggcagtcctatcccagggggtccagggaggccggggggcccaggctctcctgccagcccctcaggcccaacaaagccagggtctccctggcac

SEQ ID NO: 372158 - DNA, 122 bp, Homo sapiens
aggacctacgtatgatgatatcaatgtaagccatcccggccagcccctgacatctgccatcgatcttgcaccaagactgaacttgaacactgacattttgttagtaaagaaaaccggatggt

SEQ ID NO: 372159 - DNA, 122 bp, Homo sapiens
taaatggggcaaactctgatttttttcattataatttaacaactgttaagcaagctcccccggaaactgtatttacatctgcagctcagttggggcttggggtctgggtttaggggtggagt

SEQ ID NO: 372160 - DNA, 122 bp, Homo sapiens
ttttggattctcggctgagttctcacagaagcattttccccatgtggctctctcactgtgcgttgctaccttgcttctgtgagaattcaggaagcaggtgagaggagtcaagccaatattaa

SEQ ID NO: 372161 - DNA, 122 bp, Homo sapiens
cgccgcccaaggagggagagtggcgctcccgccgagggtgcactagccagatattccctgcggggcccgagagtcttccctatcagaccccgggatagggatgaggcccacagtcacccacc

SEQ ID NO: 372162 - DNA, 122 bp, Homo sapiens
aaattcagccatgggaaacattaaaccttccagccttaggcacctgataagagcttgcatcgtttccttttttaagaaatcatcaattagagactgtttctgatcataaaatttaatagaat

SEQ ID NO: 372163 - DNA, 122 bp, Homo sapiens
ggattactttcggggtggagggggaactgctaaacctcgaatctccgggactggccctggcgcgtttccagtcccagcagaaagggcaatccccatccagaccacactcctagtcctcctta

SEQ ID NO: 372164 - DNA, 122 bp, Homo sapiens
ttagccgaatccagatggggttttcctataaacaagtgcacatggaatatttatgctgcccgtggcacctgacgccttaatacttaggacttctatgtagtagccactcttcctataagtca

SEQ ID NO: 372165 - DNA, 122 bp, Homo sapiens
gcgcgctgggcctgtggagccgggatgccccagcggaggcggcggttacccgctgtctggcgcggcgagctgcgccgggggagccgcgggagcggagaggggggtgtcgctgtcttggacag

SEQ ID NO: 372166 - DNA, 122 bp, Homo sapiens
accgagggcaggtcgcccactcgccgtccaccgagggcaggtcgcccactcgccgtccaccgagggcagggcctgcttctgcagatcacccacacaccatccaccaagggctgtggaggtcg

SEQ ID NO: 372167 - DNA, 122 bp, Homo sapiens
ttcgatctctccaggatgtggctcacccgctctttgtcatgtgtctctgtgtggagtccccgttagtgcctcagggtgggccccataccttgcatctctcacagtcaggagctcattcagga

SEQ ID NO: 372168 - DNA, 122 bp, Homo sapiens
tcgtccactgcgcattcggccccgagggatgctcctggggccaacaacttctcggcggatcgccaaacacctgaagggattagacagtaaaactcccatcagtgctggcgaggtccggcgag

SEQ ID NO: 372169 - DNA, 122 bp, Homo sapiens
gtcccgcacaccctataactcagccacttctgcagcaacagggtccccgcaggccactgccgtcacagctggcggccccgcctgtgtgtgccagatcgcctggcacactgtatatcaacctt

SEQ ID NO: 372170 - DNA, 122 bp, Homo sapiens
ggcggggcgagcaggagggtgggtgtgaggcgggagctggccgcggagcccagacctacccgggcgaagcgggcgagcggtggtttggacgccggcggagacgcgggcgaggtacggagcgg

SEQ ID NO: 372171 - DNA, 122 bp, Homo sapiens
tccgtggaggatctcaccagcgggccggtggggctcacgtccatcgaggagcggatcctgcgcatcactggctactatggctaccagccctgggcagcgagctgcaaaagtaagaccccctc

SEQ ID NO: 372172 - DNA, 122 bp, Homo sapiens
caccggctctttaactttacagcccctttcttggcccgcacttacaaaaagtaccaggttcgagttttggtttgggcctgggagccgaattgtcttctgaaacatttcttattttattgttt

SEQ ID NO: 372173 - DNA, 122 bp, Homo sapiens
ggaggcaggccctgctgtcttcctgcaggccggcagcctgctggcagtggaggaccaggccgtccaggaaaggaaggggtcaggaggtcgggcagggcctcagcaggttcagacaagtcccc

SEQ ID NO: 372174 - DNA, 122 bp, Homo sapiens
tgtccacagagccacaggtaaggtctaggaaaggccggcaaggagggtgggcttcaggggcggcttggagcagaggacagttccactctaaccacagcaaggcaggatgaagagtggcagtc

SEQ ID NO: 372175 - DNA, 122 bp, Homo sapiens
cacagacagatacactcctctccaccatactaagcttctttcttaactctaggttctgcacgagctgtttccactgccagaaacacttcctcctcctagtatttttctcaacctgccactta

SEQ ID NO: 372176 - DNA, 122 bp, Homo sapiens
acctttgtctttcaatcaagatgaaatgggggagttccctgattcccctcgcaggacgtgcgagaggggtgttatctgctttgtcgccccgcagctcaaacccctaggggcagcttgcagac

SEQ ID NO: 372177 - DNA, 122 bp, Homo sapiens
acgcgtcaaagaaatggccctgattgcgtggtctttcggtgcccactgttttggccaaagcgtcccatggtcgtcccggggcacacggggtctggagatgccaccctgccaccttcgcaatc

SEQ ID NO: 372178 - DNA, 122 bp, Homo sapiens
aaaaaatgagttcaagactgagctcaaaagaagcacggcttttgtttgctctttcagaatcgctcactcaagaaagcctgggaagtaagaaaactaaaccaagacagacaagcagatgtgtc

SEQ ID NO: 372179 - DNA, 122 bp, Homo sapiens
ccgtgctgcctctcccttcccccgctccctccctctggcggacttccctggggtccgtttcgggggctggcctgaactccgaaaatccagatgtgtttgggggtcattcaaggcacactccc

SEQ ID NO: 372180 - DNA, 122 bp, Homo sapiens
catcctggtgcccacagggcctggaagcgtagttctcagcccttgcagcccaagactgggcgaaggggacaccggggtggaaatggcaccctgtggtagccagcggcggccctatcactgtg

SEQ ID NO: 372181 - DNA, 122 bp, Homo sapiens
gatggcgaacccactgggagggacaaacaaatccagatgggaggaacaaataactccagacgcgccgtgtttgtgaagtgtaacactttgaaggtctacagcttcacttcctaaggctaaca

SEQ ID NO: 372182 - DNA, 122 bp, Homo sapiens
ccaacaggattctattaaagctttttcttccaagtgagtatctaaggccaagttataaagcgttgcaggggaaaagcgaatatttgccttgaaacctcttcccttgccttatagaaaaccag

SEQ ID NO: 372183 - DNA, 122 bp, Homo sapiens
tggacggcaagcagctaataagtagcactggacttgcggaccccaggcaaactgccgaggcgcacctgagcgctcgtcctcctgcttcttcaaccacaaacgctcctacagggacgggatcc

SEQ ID NO: 372184 - DNA, 122 bp, Homo sapiens
tcaccacctggtgacaggacagggtgaccggtgggtggcagcactggggattcaaatgaccgcagcccggtcaggctgagctgagcagagccaaggactcagcacagcaaggaacctaggct

SEQ ID NO: 372185 - DNA, 122 bp, Homo sapiens
agtaaggggtggggagagcttgccctccctcttaagctgaggagaaacacccgaagacaccgcaggagcctgtgaaagtccctaggactccaagtgaggaagtgacactcccaggcgagccg

SEQ ID NO: 372186 - DNA, 122 bp, Homo sapiens
aagacataactatctcaaaaacaagataaacatatctgggaaccacagtcaggatagaaacgtgaaggcattattacataaaaccacaagcctcctgggctccagatccagaagcaggcaaa

SEQ ID NO: 372187 - DNA, 122 bp, Homo sapiens
cgttgggatcgagatcgggaccaggtttaaggttgcgatcgggtcgggatctggggtcgccgtctgctttccccagcggaggagccgctttccggggccgctctgcgcggagggttccgggg

SEQ ID NO: 372188 - DNA, 122 bp, Homo sapiens
ggatgacaggagctgggaacctcaaggtaggtgagcctgccaagacgcgggtccgggactcggctggggcgcagatggagcccgcccggtagggggtgtgcggagccctgttttctgggctc

SEQ ID NO: 372189 - DNA, 122 bp, Homo sapiens
ttcctacactacccccaccatccagtgtgcagtttatttctcaaggacttcgccagcagccgctaataacctgaatgctgacaaataggaataagttacaactgaaaaggataagaattacg

SEQ ID NO: 372190 - DNA, 122 bp, Homo sapiens
ataggcaaaagggaaactcagaggtgccaaggacccggctgagggggtttatgaatacaacgtagcaccaagctcaaggttatgtgactttctcttccaattctgccctgcagagcgtaaga

SEQ ID NO: 372191 - DNA, 122 bp, Homo sapiens
ttagaagttgagttggccgcttactcagtgtttttttgtttgcaaatacctttctaacaacgataagcccctcccaagatgccccagaagttctaagtgtcccttgctgcctcccaccctaa

SEQ ID NO: 372192 - DNA, 122 bp, Homo sapiens
ttgggctgcggtcggacctcgccgcgagctccagacccgagtttccgagcccgcgcttcccggcccgcaaccctcccaaccgcgtagcaacgccgctcctgccggacacccctggcccctcc

SEQ ID NO: 372193 - DNA, 122 bp, Homo sapiens
tcctagaggcccgctccggacagcgtaggcctgggcgcctgggtggagggtgcagggtgccgggcgcgggacttcggctctcgcctgggccatcccgggctctgagggcccggcatccatcc

SEQ ID NO: 372194 - DNA, 122 bp, Homo sapiens
caggtgcggcggccgcggggctttgtgattcatgcccactttcaaaggggggcttgggcccgtctgagaggcacccaaacaactgtcttctaatattagcacggctgtatttcgggatctat

SEQ ID NO: 372195 - DNA, 122 bp, Homo sapiens
ccgccctgtgatggggaaaagccggaatctctcggtcccaggtggtcatgtggcccaggccggacaagcgtcccgaaagccccgggagagactaagaagcaatcctcccacgcgctttctcc

SEQ ID NO: 372196 - DNA, 122 bp, Homo sapiens
cagagcttctcacatcccccagcacaaactctcaaagtggcatttccacgcctttctctgcgcacagctttgtttaaaagtcccaggttgtgtggaggggcagcccaaagcgactgattctc

SEQ ID NO: 372197 - DNA, 122 bp, Homo sapiens
gtggggactgcgactcctcccagattcagagctactgctctgggagggccgtcaggaacccgtatttatagaagacatggtaggtgccaaacgtgcttatgagataaacgacagggtaactg

SEQ ID NO: 372198 - DNA, 122 bp, Homo sapiens
ggttccagttttcgaggcgcacgggtaatcagtgtttagtgacgccccaccctcagcgtgcggtcacccagagagggacagcagcaagctattggggtcgatcttcaactaagaggcagcgg

SEQ ID NO: 372199 - DNA, 122 bp, Homo sapiens
ctgaggagcaaaccgcgcgagtaggggcaggaggaggcccaccctacgccctgtccggcgcggggcataagccctgcctgcatcctgagatcccgggtccgcaaacttgggccccactgagc

SEQ ID NO: 372200 - DNA, 122 bp, Homo sapiens
ggggccgcacctgtgtgttcgcgcgcgtggccttgcgtcggcccgacgtctgaggagcgacgtggtatgtctgtgggtttgtgtattctttgtagagccatgagtgtgtctgcgcatccgtg

SEQ ID NO: 372201 - DNA, 122 bp, Homo sapiens
atttcccagttgccttggggagtgctccttcagccttggttacaagcaggtttttaaaggcgaaggggaagagtgggctgagacaaagttggtcaggaattgttattggtttacagagatac

SEQ ID NO: 372202 - DNA, 122 bp, Homo sapiens
ccggagggctcggcccctcctcagccaggaaaaggctggagagtgcgcccgagcgggacgcgtgctcctcctaagccggaaggagcagcaggcatgtctggtctggcccaggcaaccaggcg

SEQ ID NO: 372203 - DNA, 122 bp, Homo sapiens
gaacggaactcccaggctgtagcgaaagcgtgacagggccggaccctgaagctgaatgaccgctaagtggccctcacgcctcggaaaccgggaggctctggtgtgagcccacatggattcta

SEQ ID NO: 372204 - DNA, 122 bp, Homo sapiens
tttgtatttactttagtagagatggggtttcaccatgttggccaggctggtctcgaactccggacctcagttgatccactctcctcggcctcccgaagtgctggggtaacaggcgtgagcta

SEQ ID NO: 372205 - DNA, 122 bp, Homo sapiens
ggcgtcctatgcatggctgaggacgggaagcctgcctacaccagtggttctcaaccctagcgcacttcaggaacttcctggagtttagaaagaagaaaaaagaatacaggtgctcaagactc

SEQ ID NO: 372206 - DNA, 122 bp, Homo sapiens
agggacatatagggatcaagaaatggtattttcaagataaaagatgttagaacatgtttgcgaggctatggcagttattaaatggaaagaaaaaagatgctgaacagaaggggaataattgc

SEQ ID NO: 372207 - DNA, 122 bp, Homo sapiens
acggccttgcagaaaaaaaatgagctgttgtgaaaatgggcatggtcccctgaactgacccgggctctagcatttgggaaagagggaaagaagtgcacaaaagagaaggatagtgactgcgg

SEQ ID NO: 372208 - DNA, 122 bp, Homo sapiens
cctcaggaaaccatggagatgggggaggcggtgacaagacagacagtcccagagaaaagccgctggggtgaagccagaaaggcaaggaggaaaagagaaagagagaccaaaagaacaaaaca

SEQ ID NO: 372209 - DNA, 122 bp, Homo sapiens
gcccagccggagtcgtgcagaggcttatggggactcgtagtcccgctcgccggcgttgtccgcaattcctgcaatcggaagactacacttcccggcaggccatgcgggggatcctgaggcga

SEQ ID NO: 372210 - DNA, 122 bp, Homo sapiens
aattgaattttcccaatggggcacgagagtgggaggtacccaatcgagggttggctggcgcgtcggggcagggcggggccagccgggctgctggcgcggctggacgggcagctctccgcaga

SEQ ID NO: 372211 - DNA, 122 bp, Homo sapiens
gcggtggcctgttagagaaatgtacgtgctgtgaaggttgcatggatgctgaatgcacttcgtcccgaccaaacaaggcacaacgaatctcaacattctaccaaaggacatggcgacgtggc

SEQ ID NO: 372212 - DNA, 122 bp, Homo sapiens
cctgtagtttcctgataaaaggtcctttggaaactttgattctcttctcaccaagttgaacggagatgtgttcccatagtaagagtgaggcccctgcatttgctgccctcggttttcccaac

SEQ ID NO: 372213 - DNA, 122 bp, Homo sapiens
caagatggccgaataggaacagctcccgtctacagctcccagcgtgagcgacgcagaagacggtgatttctgcatttccatctgaggtacggggttcatctctttaggaagtgccagacagt

SEQ ID NO: 372214 - DNA, 122 bp, Homo sapiens
gcagcacaataccaggggcagggcaggcaggtggctggtcagagcgagaaactggcctgccgtcctcagctaggaaagcagacagagcttttgcgtctccatccagtcttcctgcttttgct

SEQ ID NO: 372215 - DNA, 122 bp, Homo sapiens
agagaatgagctgtttggagtcaacagctactcagatagagacagactgaaacattcgaacgaattacaccactgtctctgtctctctgtctgtctcattctctctttctctctctcttccc

SEQ ID NO: 372216 - DNA, 122 bp, Homo sapiens
gccatccgtcctgagctccctgctgcccgtgctgggcgtggccaagcaggacacggtgcgcgtggccttctgctccggtaagaggcggcctcgtcaccttctgtctcaagtgcccctttgtg

SEQ ID NO: 372217 - DNA, 122 bp, Homo sapiens
gctgctgaggaggctggagggctccgggagaggggctgaggcctggcgccccaccccctccggaatcgtcagttgccctggctcagcgaccacccttcaggctccccaactcccgttggtcc

SEQ ID NO: 372218 - DNA, 122 bp, Homo sapiens
ctcttggcccagcttccaaagctatttgccgccccgtcaaccctgcagcccctacagccgcgaatccaggaaaccctctacccgcagcccagctactgagtttacaatcccctgggctttgg

SEQ ID NO: 372219 - DNA, 122 bp, Homo sapiens
ctgtgccaggcagtgagcaagacaaccatagttacggtgtgcccggagctcccagcctggcgggggtgccatggggaggcaccgggtgttaggggagttcatagaagggccgctggacccag

SEQ ID NO: 372220 - DNA, 122 bp, Homo sapiens
gaatcccctccctgcattctcggacagtgccacgtcctccggctgccagcggggcagcgccgctaggtaccgctgcgcgccgcccccgcttcccgccagcagcctcacctttcccggccccg

SEQ ID NO: 372221 - DNA, 122 bp, Homo sapiens
gtcgcccccgccccacctccctgcgcaagtgcgaggctgccggcagcgcggcgcacgctccggccgttcccggcttccgcgcaaaacttccatcctgtccacgtgaagttgtcgctgcctta

SEQ ID NO: 372222 - DNA, 122 bp, Homo sapiens
ccggctcaagacaaccctggcttgtttacgtttaaagctgctgactcttaaagctccagccgttataagcaaaacgcagctagacacttttccacgccttctctgttgcttctgtagccctc

SEQ ID NO: 372223 - DNA, 122 bp, Homo sapiens
gatccgtggaccaacctctttggctcccagctccatcatggagcccgaggtggcctgaggcggggagtagtgggtgaccattagcaacatgggcaggagggttcccagcggtcacctcaagg

SEQ ID NO: 372224 - DNA, 122 bp, Homo sapiens
gctgggcttgcggggactggggtctcagttctccgcaggcctcaatgtgcgggcttgacacgcagccctcggattagccccgaagctgcacccgagcaccgcctgcctcccggccggggcat

SEQ ID NO: 372225 - DNA, 122 bp, Homo sapiens
ttcaaatctctgcactcccggccgggtggtgggcgcatatcctgggtagcctctaggaagcgctagacacatgtaagtggttccttttccgcggttattttattctccccccgccccccacc

SEQ ID NO: 372226 - DNA, 122 bp, Homo sapiens
cacattttcaggcattatagcaacaaccccattcttggcaccaatcttcttagtccatttcgcgctactataacaatatttgagactgggtaatttgtaaagaacagagattttaggctagg

SEQ ID NO: 372227 - DNA, 122 bp, Homo sapiens
acaggaaaaggtgccattagtaaaaactccatcactaacattttggtaccactcgtagagcgtcacataaatattcagaccatgataactcagtgcaggaatgttatcaaatatttccatgc

SEQ ID NO: 372228 - DNA, 122 bp, Homo sapiens
tagcagccattcccctacaacctggagtactttttaacccaatctgtttgggattgagggcgggactccagggtccctgggaggccccggcagccgcgcatgctcagagcacagggaccgct

SEQ ID NO: 372229 - DNA, 122 bp, Homo sapiens
aggtgggcctgacccatggaagtctgcacactccaagatggggcctgcccatctcagcagcgtctcggccaagcacttcctagaacatcagggatgacctctcccccaacccgtgcctgccc

SEQ ID NO: 372230 - DNA, 122 bp, Homo sapiens
gatcacagttatctagttcctctcgcgaggactccgagggacaggcagggtgctgcggagcgcacaggaaaggacctgaccctgtcgcagggaaggaaggtgatgcttaagctgagctctga

SEQ ID NO: 372231 - DNA, 122 bp, Homo sapiens
ctcttttcctccacccatttcccatctgtctagccattcttgctccgctgggctttttcgcgagcctctccccagctgcagccccgcccatctcctggggcgtgaccacctgtccaggcccc

SEQ ID NO: 372232 - DNA, 122 bp, Homo sapiens
ccaggctgcagatcagcgagctcagcggcaaggtgctcaaactgcagcacgagaaccacgcgctgctgtccaacatccagcgctgcgacctggcagcccacctggggctgcgtgcccccagt

SEQ ID NO: 372233 - DNA, 122 bp, Homo sapiens
gagggacaattacaggcctgcgctccgtcccggggacagaacgccgtcccctgccatccacggctgagtgcccggcgtacacgctgcagagccctcactttgttccagcccttagcatgact

SEQ ID NO: 372234 - DNA, 122 bp, Homo sapiens
gctattgtgcttagagttgactgtgaggcaagcctctgcatctgtacaggaatagaactacgataccaaaaagtacttctgatctccttttattggttgtgaataagcactagtatcctcat

SEQ ID NO: 372235 - DNA, 122 bp, Homo sapiens
ctggtgcttagctcctgctcaggcagcctgcaggcgaaaggttcatcagtcactactgtgcgtgccccggggaggcatctcagacccagctattccacttaacctgagtttcttccccaaat

SEQ ID NO: 372236 - DNA, 122 bp, Homo sapiens
agccaccgcgccggccgagagttcgctttcctttttcttgctctatacgttaaaaagccacgaagtgttaatcaaaagaatcctggaattaggccgggcgcggtggcttacgcctgtaatct

SEQ ID NO: 372237 - DNA, 122 bp, Homo sapiens
cgaactcctgacctcaagtgatccgcctgccttggcctcccaaagtgctgggattacaggcgtgagccacaacgttgggccaggtattgtatttctatgttattattattttttgtatttct

SEQ ID NO: 372238 - DNA, 122 bp, Homo sapiens
ctcgatctcctgacctcgtgatccacccgccttggcctcccaaagtgtcgggattataagcgtgagccactgtgtccagcctaagtatttgtccttctgtgaccaacttatttagtgcaatg

SEQ ID NO: 372239 - DNA, 122 bp, Homo sapiens
gtattatatgggcatgcagtacaggtgtgcagcatctgagctccgtcttcaccttaatcccgaacactcttttcacctctcacctgcactgcagtgctgtttcctggatcacacttttttgt

SEQ ID NO: 372240 - DNA, 122 bp, Homo sapiens
ggcccactgcacaagaagcacgattgctgcccagctcattgctctgccttcagagaggctcgggtgctgcaacctcggggcctccttgaggtgtctccatccccccaggtgaagtcagctgt

SEQ ID NO: 372241 - DNA, 122 bp, Homo sapiens
tgtgattcgcccgcctcggcctcccaaagtgctgggattacaagaatgagccaccgtgcgcggcctcaaaaatatcgtttgatttaccactgcatctgaggttcctcacttcctttttgccc

SEQ ID NO: 372242 - DNA, 122 bp, Homo sapiens
gcggagctgagcgcttagagccgccgaaccatagagatcggaaataggagcgagcggcagcgccggaaaggaggccaagagcgcgggcggcgaggcaagatggcggcaaccaagaggaaacg

SEQ ID NO: 372243 - DNA, 122 bp, Homo sapiens
gcgtccagggtgtgctccagctgctcacaccacgcgctccagtcctcgtgcagcctcagccgccgccgaaattaaagagaaagaaacaaagcatcatgggaaacggagttctccattcaaag

SEQ ID NO: 372244 - DNA, 122 bp, Homo sapiens
ccagaaggagaagaaaaacattcattcccgggcagtttcgttttcttgttggtgtggcgccggggcacgctgctaagtagcgcccgtctaagtggcgtggccagtttcctttccggcgctga

SEQ ID NO: 372245 - DNA, 122 bp, Homo sapiens
ggtgtgaggcttcctctgggcttccgcagtcccctggagttacctcatcagagcttggctcgctctgggttttacctctgtcttctcctagactgggggttctcgagggcagggcttgcagc

SEQ ID NO: 372246 - DNA, 122 bp, Homo sapiens
agtgaaagaactgagtgagcagctcctcacggaaggttagttcggcgcgttacgtcattacgttcagtgaaagaaggtgtgggagtgactaatcacttgtttgataaaattgattgaaaaag

SEQ ID NO: 372247 - DNA, 122 bp, Homo sapiens
tgaccttgtgatccacctgcctcggcctcccaaagtgctgggattacaggtgtgagccaccgtgcccagcgagtcacttggattataggcaggggccaccacaccgggctaagtttttaaaa

SEQ ID NO: 372248 - DNA, 122 bp, Homo sapiens
tgccagaacaaaaagagtaaggagctggacacggggccccgcgctccgatcctggtgctgcgctaactccctgcaagttcccgaaacaccgtgagtcctctgggcctcgtcccttctactgc

SEQ ID NO: 372249 - DNA, 122 bp, Homo sapiens
aaccagaagacttcccaggactcttcctgctccaaaagatagggctttttaggataacagcgagggactgggtcatgacgaggactcctcctgccggtctctctctttccagaaaggcttcc

SEQ ID NO: 372250 - DNA, 122 bp, Homo sapiens
taggagcaaacggaagtggtgggagcgagccggacaggcggctgcctgcacaccccgaggcggggactgtgtagaaatctggggctttaacaggggtaggagcccggcttggcgtctcctct

SEQ ID NO: 372251 - DNA, 122 bp, Homo sapiens
aacctccacaatacaaacaggctgaaggctttatttgtgcctgtgtttctatccttgatacggattttctcaaaggagactcttggcaggcctgcccacccagtttaacagacttacctaga

SEQ ID NO: 372252 - DNA, 122 bp, Homo sapiens
gggagccaacgagcgcgtgagcgtttgagaccagctggctgagggacgccgaaaatcccgcgcggaggaaggcgggagagcgctaccgctgctaccaaggcggcggcgcgggcgctcggccg

SEQ ID NO: 372253 - DNA, 122 bp, Homo sapiens
cctcctcccctagacatgccaggagctgctcgccccggaaagcagctctgtttgcagaatcgcgcaccggctctgcacactcccactcgcttttccggttgctcagctttctactccctctt

SEQ ID NO: 372254 - DNA, 122 bp, Homo sapiens
ctggtttcattgtcctgaccgggtgcgaggagggacacctggccaggagatataacctgccggccagtgtggcatttctttcaaatgaccacttaagcctcagccacgatttggggtgactc

SEQ ID NO: 372255 - DNA, 122 bp, Homo sapiens
ctggtcacatggccaggaaacagcagagtaggggcaatgtgcagaactgcttaaccccagcgcctaggcctaaccactgtgccccgccccatgagcccagccccaaggggtgtttttaaact

SEQ ID NO: 372256 - DNA, 122 bp, Homo sapiens
aggcactggaggctaaacaccctcttgggcaaaagccttagattttcagtaaatgccaggcgggctagacaatttgagtagcaacggataacctgtgtgagtgaacaagtggggaaactgag

SEQ ID NO: 372257 - DNA, 122 bp, Homo sapiens
ctccgcccttccttcatttgcccattcctctgtccttggcccttttacagttttgtttttcgctcttttgttaccctgaaacaactttgtatacttaggtaaagttattttagatatgaagc

SEQ ID NO: 372258 - DNA, 122 bp, Homo sapiens
cggcatcagctaccaccctaaacactcaaatgtgtgatacaggcaaagggctggaagagccgtgaggaggggtccacctggggtgcatggaaagggctttgtgaagaggcaggactctgaac

SEQ ID NO: 372259 - DNA, 122 bp, Homo sapiens
cagggattttagttagcatggaactcagtatagcagtctgctcagaccagatccaaactacgtaagaaatagtgtatggaagactggactctctttcatctcccagctgcaaattggtatct

SEQ ID NO: 372260 - DNA, 122 bp, Homo sapiens
cctgggcaacagagcacgactccgtctcttaaaaacgagcctgggcatcatggtgaaacccgatctctgctaaaaatacaaaaattatctgggtgtggtggcacacgcctgtagtcccagct

SEQ ID NO: 372261 - DNA, 122 bp, Homo sapiens
ggaggcagaacctggcaccgggagatccgcgaagaaattattttgtgaaggtccagagaccgcactcatttgaatactaaatgggaaaaggggggctacataggtccctatccttcagttga

SEQ ID NO: 372262 - DNA, 122 bp, Homo sapiens
atggcgtccgttgccgctactacctagtgagtaccagcaggactgggcagcggaacggaacgggacggggtggggcagaggaacggaacgggacggggcggggcagaggaacggaacgggac

SEQ ID NO: 372263 - DNA, 122 bp, Homo sapiens
atcccccggcagcctgcctattccccccctcaacctggacccccaaacgccgaaggaaaacggtcccacaaatacaaagaaaaacccaagccaaagggcaggcgacggggagtggtgagaaa

SEQ ID NO: 372264 - DNA, 122 bp, Homo sapiens
agaactcgcacccttgtgcactcctgggaagccccgtcctgcttagacctactccgagggcgcgtggagcccgcctccccctggaaggggaaataggaaaaagaaccgtgaaaagctccgga

SEQ ID NO: 372265 - DNA, 122 bp, Homo sapiens
cacatctaggtacaggaagacacagtgcgagagcaggtggctccgtgggggaggggcaggcgacataggcctgagcagtgagttaaatgacagggtccctgcctcaattattttgctcccaa

SEQ ID NO: 372266 - DNA, 122 bp, Homo sapiens
gttagcaccttacactccatgttattttgtcatgaattaacctgaacaggctcccatacacgtgcccttctgaatctgaaagtaaaggtttctttataccttcacattttgttaatggaaca

SEQ ID NO: 372267 - DNA, 122 bp, Homo sapiens
ctcaggatgcctgccctagttcaataggactcagggtgtctcaagttcactcacagctcacgcttatcagtgggctcaggataggacccaaggcctcttcccagggtatttacccccagccc

SEQ ID NO: 372268 - DNA, 122 bp, Homo sapiens
ggcctctccagccctgcttgcattttaaaatcaaccgcaacttgagattttactctttatcggcataaaaacaagtcatctgcctcccaagtctcattcagtagccagggaccccatatctg

SEQ ID NO: 372269 - DNA, 122 bp, Homo sapiens
gcctggctcacaagatttaacagatttcctaggaactcaattgatttcctctttctcagccgcatttgccctccctggagaggataaaagctatttaacttgatgggtggagatctgagcaa

SEQ ID NO: 372270 - DNA, 122 bp, Homo sapiens
gccggcctggttgattcgggcccagcggaccctgcctggccctggccctggaggccgctgcggcccccacccagctcctcagcagccacatggcgccggccctcacaccccggggcggcgca

SEQ ID NO: 372271 - DNA, 122 bp, Homo sapiens
acaagattggcatggaagagataaagctaaggtggagttcaacagctcaggaggaggagtcgaagaaacctgggtttaggcaggtaggttctcatgtgaaagtcagtcagagaaatctcagt

SEQ ID NO: 372272 - DNA, 122 bp, Homo sapiens
tcctttcctcctgccctggcctctctgccggaggtcagtgtcctcttcagtgacaaaagccgccctagatctgggctccctggagagggaggtggctgggtctggcagttacagccgctgtc

SEQ ID NO: 372273 - DNA, 122 bp, Homo sapiens
gaggtccttagatgtaaagcgagtaaaatggctgatgaacagccagtcttagggcatattcgtgtcccattagggtctgttaccattatttatttatttatttatttatttatttttgagat

SEQ ID NO: 372274 - DNA, 122 bp, Homo sapiens
ttacaggtgtgagctactgcccccagcccattcattattattattattttttatagaggccgtgtctcactatgttggtcaggctggtcttgaactcctgggcccaggtgatccttccacct

SEQ ID NO: 372275 - DNA, 122 bp, Homo sapiens
gctaggcagtgatgagcctagttagaaatgtggggcagcctgggcaacatagcaagactccgtctctgcaaaaataaagaaatggacaaattagctggacatggtggtggtatacacctata

SEQ ID NO: 372276 - DNA, 122 bp, Homo sapiens
gaaaaatgtgtgtcatcaagatttttctgtaccgtttaatttgttaggcctttctgggcacgctgactttgtgcaacattgaactaccttattagaagaaacactcgcaacagttaatgaga

SEQ ID NO: 372277 - DNA, 122 bp, Homo sapiens
aggccaaggcgggaggatcgcttgagcctggcacattgaggttgtagtgagccatggtcccgccactgcaccccagcctggaagacagagcgagatgctgtctcttaaaaaaaaaaaaaaat

SEQ ID NO: 372278 - DNA, 122 bp, Homo sapiens
agtcgctggtggccacctccccccactgccttcaggatttccccttctcgggctgcctaacgcttctcagaggtggctgtccattagaatcattgggagctgtaaaaattcctgatgcccag

SEQ ID NO: 372279 - DNA, 122 bp, Homo sapiens
ggtcatttgagcattggttaccaaggctgcctctgaaatggcaggctgggggcaggccagcgtgaaagggactggcaggagtcctgtggggacaggctgggggcaggccagcgtgaaaggga

SEQ ID NO: 372280 - DNA, 122 bp, Homo sapiens
catcccggctgcttttgctgcgccctctcagcttcccaagaaaggtgagtctcgcgccgccgtgagggctcagaagtcaccaagccgcagaatctcagggtagacggattcttagagatcct

SEQ ID NO: 372281 - DNA, 122 bp, Homo sapiens
gtaaagattgccttctgtataatgtttggattatataaaattgcaaaaatgataacagcccgctttactgtactaagcctgttactttcatgacgtgtgagcagaatgccttattttgtaat

SEQ ID NO: 372282 - DNA, 122 bp, Homo sapiens
caaacttctgacctcaggtgatctgcccacttcagcctcccaaagtgctgggattacaggcgtgagccactgtgcccaggccaccttctatttgatttttagaagtttgtttgtttgtttgt

SEQ ID NO: 372283 - DNA, 122 bp, Homo sapiens
gcgtttttgcatcgtcacatctgcgacttctggttaggcggaggcggccgagctgacaaccggatatgacgttaaggactgccctgtagtgcccgcggttgccagtcctctatccgacttga

SEQ ID NO: 372284 - DNA, 122 bp, Homo sapiens
ttacaggaaggtaggaaaatgccaccctcagggcactggttgggctaaaggtgacactggcgtctcacgggctatgaagacggaatgcctcttaatgccggaattccaagacggaatgcctc

SEQ ID NO: 372285 - DNA, 122 bp, Homo sapiens
agcctgacgccaggcgcccgcggagcgtgagtagggggcgcgggagccggtcagctggggcgcagcatgccctctgctcccgcgccatggagatcgccctggtgcccctggagaacggcggt

SEQ ID NO: 372286 - DNA, 122 bp, Homo sapiens
gcggctgcggggcggggcggggcgggagcctggcgggaagctcgcggggctgcagcccggcggaggccccgggcctggtgttccgcacgttctaaaccgcctgtccccgaggaagtcgggca

SEQ ID NO: 372287 - DNA, 122 bp, Homo sapiens
atctttacagaatttaacctattttccatctggtggggagctaaacttgaacagcctctgcgtttctgaccaagtcctgttacacctatttttcaagccacattatttagaaaaccacaact

SEQ ID NO: 372288 - DNA, 122 bp, Homo sapiens
cggggtggggcaatggaatgcggggagcttagcctactcttctgagtccctcccggcccccgctagaatggggttactcctctgcccttttgggttcccccctcctctcctctccctggcct

SEQ ID NO: 372289 - DNA, 122 bp, Homo sapiens
agtacatgggggtgtggaggtgggagtctgagattgtggccaggatgatgagcagattcccgagcacagtgaccaggtacatggacagaaacagcccaaagaggaagggctgcaattctggt

SEQ ID NO: 372290 - DNA, 122 bp, Homo sapiens
ggaagttgccagaactaactctgggcagcatggcgtctttccggcttctccaaacccttgcgaaaaactttattggcaaagctatcagagaacggacagtgtacccactgaggcggccaaag

SEQ ID NO: 372291 - DNA, 122 bp, Homo sapiens
ggcagcccgagcttagcgggcgtccgggtgtaaggaagaaacccaagggccgcgagggagcgaccaggacgctgcttcccgggcgctcccgggactcccagatacctgctcggtccccgcgt

SEQ ID NO: 372292 - DNA, 122 bp, Homo sapiens
ctgagggagaaagaaactgcaaacccctttggttctgtttccttgctttcaataatgaatcgagacagcgtgtgtgtggtgagggagtgacgagtttcaacgtgatgaaggagataaaaccc

SEQ ID NO: 372293 - DNA, 122 bp, Homo sapiens
cgtattcaatgttcggcgggagagtggctgcaacctgtactcctgctgcagagaatctgacgctgtcatgaacctgtgtggaaaagatattgacagaccaaaagctcatccgaacgtcccat

SEQ ID NO: 372294 - DNA, 122 bp, Homo sapiens
gcaagggctcctctcttggcttcgttccccggagggtggtgctgttctcgttggagggggcggccaggcgctgggccacgtgtgcatgcagcccctacagagttgctgccccgtgggggttg

SEQ ID NO: 372295 - DNA, 122 bp, Homo sapiens
gagccggacccgggcaggaggggaccccgggtgtgcagagggacgttcgggccgtggcggcggcagcggagcgagcgagcctccggtcccgcggccgagacacctgccgggctgccccgcgc

SEQ ID NO: 372296 - DNA, 122 bp, Homo sapiens
cagctgcaaaaccctctcccaaccccaacagcacacttcagaggtgccgccaatgagaaccgaaacccagagtgacagctgagtcctggggagtggagagacccatggaaggcagatcagag

SEQ ID NO: 372297 - DNA, 122 bp, Homo sapiens
tgctgctcggctcggggctgcaagggcggccggcaaggcggggaggcgacttctaggacccgcaagtttcccaactacgtgccggagcccgagcttcgccttcctgccgccttcctttccct

SEQ ID NO: 372298 - DNA, 122 bp, Homo sapiens
gagccactgcacccggctcatgatgaggagccttgacagatatggaacccatgttaaaaccgtttaattgcagctttagttttcacttacttggcatttgccaggaggcatatatctaagcc

SEQ ID NO: 372299 - DNA, 122 bp, Homo sapiens
ggtgaccagacccagcagcagcagcttgaagccggtgtcagtgatgttcctcagcgccagcggcccctgcaggaggccggggaccaggacaaggcccaccaggacggagctcaggagcgcca

SEQ ID NO: 372300 - DNA, 122 bp, Homo sapiens
gctgtgtcgagcgagaagtgagctcagtgctcgtctgcagtgaagggtggcccaggcttccgcttcctgcccacataccccacctgcccctccctgctgcaggacccctggtccacaccaga

SEQ ID NO: 372301 - DNA, 122 bp, Homo sapiens
gaaaagcgtatccagtgtaagccctcagaaatcccagaaaacaaagaccaaaagaaacggcgccttgtcaaccgaacgaattgaaaaaagcttcctgccgcgatcgggcattaaaagaaaaa

SEQ ID NO: 372302 - DNA, 122 bp, Homo sapiens
cgtcaccaggtcgctccagtagttgctcgccctctattggccgatcggcctcggcgcctccgccccggccgcccctatcccgaactgccattggttttgcctaacgccactcgacgatgcct

SEQ ID NO: 372303 - DNA, 122 bp, Homo sapiens
acacccttgtaattactccggtttacaccatgtgtgctagctcgtaggacaagtccccttcgttgttattcttttgcaaaatgtagtctgttaggaatgttaaagtaccaaatatgattcta

SEQ ID NO: 372304 - DNA, 122 bp, Homo sapiens
ggagtgggcgtgctgctggaagaggggcactgatggggttgctctcgtggggctgccacacgcctgtaatttataaaatgcacaatgaagtgcaataaaatgaggtgcgccagtagttgcca

SEQ ID NO: 372305 - DNA, 122 bp, Homo sapiens
cggtcggcgcctgccgtaccctggtcagactctgggtcagagcgctaagtttcaaggaggcggcgctaaacaggccctctagccgggagcctgtcgcgacccgagcgaccgtgggtcgaccc

SEQ ID NO: 372306 - DNA, 122 bp, Homo sapiens
gcggcgaggggagggggcagcggcgggattggtccctccaagcttggcccggctagtcggcgctgccattggccggggccgggcggctgcacctggcgggagcgcgggtggagaaggttggg

SEQ ID NO: 372307 - DNA, 122 bp, Homo sapiens
agtctcaccggcagccattccggcccggaggctggagccgtgagagcgtgcgggaatatgcgttgggaaaacacaagtcgagggccggggagaggagacctccctgctcggtcctacagtgt

SEQ ID NO: 372308 - DNA, 122 bp, Homo sapiens
tgaactagggtgtccaccccaacctttggaggaatcctaggacatgtttgccaaaacatacgagtggaattacaaatagaggattgcttgggctcagtggccatcctcatgcacagaaagaa

SEQ ID NO: 372309 - DNA, 122 bp, Homo sapiens
tttccctgtggtcttgaggaaataaagggaaggggaggatccagcctcattccagccccacgtcccccccaacacacacagtgggggctgcttcccaggaggacagatgttttcaccaaatg

SEQ ID NO: 372310 - DNA, 122 bp, Homo sapiens
attctaagaaatcagggtctcagccatcatcacccccaattctaagaaatcccagtgttccgggcacggccctttctttccgcaggctctgtgctgtcataagcagaagtaactgtctattt

SEQ ID NO: 372311 - DNA, 122 bp, Homo sapiens
tttccatttttctgtcagaaggggagaatgaaagaaatttaggcaaattaagccccaaagcgcactataattttctatttctgaactgatttgtaagagaatgggtaactgaaattagcaaa

SEQ ID NO: 372312 - DNA, 122 bp, Homo sapiens
gtgggcgcagctgacaggctgtgcgtgcaggagagcgagagcacgtgctcctgctgctgccgggtgccagcctagcaacggctcccaggggcccagagaggtggtgctggcaggggatggca

SEQ ID NO: 372313 - DNA, 122 bp, Homo sapiens
cacgacgaagtgggactgttaagtttacagagctgctttcctcccccgggactgatggtacggtccccgggcggctccccacccatctgtcgcagaccttggtacaggcccagggggccctc

SEQ ID NO: 372314 - DNA, 122 bp, Homo sapiens
tcttcccccatatgcagagccttcttcagggtcaatttctttgactaacctatcccaggtcgcactgctgctaagtgtatggcaaaggaaggattcaaatcagtgtctgctgaactcaaaag

SEQ ID NO: 372315 - DNA, 122 bp, Homo sapiens
tgagagtttctcttcctaataagctgtttcctggcatcattctagccaagccccctttcccgtttgataaccaatgttgctgtgttgccattcccctcccctgagtttaaaacatttgacaa

SEQ ID NO: 372316 - DNA, 122 bp, Homo sapiens
gtgccaaagtcacagtgggccagcagagggcacactctcaatgtacaggcactgtttccacgtatctgtcacccactgctgcataacaaattatcacaacttagtggctaaaaacaatgcca

SEQ ID NO: 372317 - DNA, 122 bp, Homo sapiens
ctcctcactttcttcctgccgggacgttctcagccgggaactgacagatcctgcttagcccggggcccagcactgagaaatctgggaaggaacgttgctcaccgcacatgggccgtggcccc

SEQ ID NO: 372318 - DNA, 122 bp, Homo sapiens
gacatctaccgctgccagaaggccttcgtgaaggccctggagcagaggttcaaccgcgagcgcccacacctgagcgagctgggtgcctgcttcctggagcatgtgagcgcgcggcccccggc

SEQ ID NO: 372319 - DNA, 122 bp, Homo sapiens
gggaggatgtgaccaggtggagggaggtggcggcagcggccaccagtgcctcaagtctcacgccagtttgggattaccaagaactctcactaagaatggctcacaaatttacctcccctttc

SEQ ID NO: 372320 - DNA, 122 bp, Homo sapiens
tgagcctgggtttctcctcattctcacttgagaccaatgctgtcctcgcctagtgggggccggcgtcggtggggagctgactgagtccgaggccgtcgagtgaaaccagggggcagccagag

SEQ ID NO: 372321 - DNA, 122 bp, Homo sapiens
aagcgattctcctgcttcagcctcccgagtacctgggattacaggtgtgcactacaccaccgcacccagttaattttgtatttttagtagagacagggttaatccatgttggtcaggctggt

SEQ ID NO: 372322 - DNA, 122 bp, Homo sapiens
gaaccaagaagggaaagttgtagcttaagaacatgtatacagaagatacgtgtaaccacacgctgtttgtccttctgctgaatgagtttttcagattaatacatcattcatcagacttcatt

SEQ ID NO: 372323 - DNA, 122 bp, Homo sapiens
gcgggagctgaggtgcggggcggggcctcctgcccggcgccggcctgtggggaggcggggcggggcacagtctcttaaccgtgcagcccgcccctgacgccgccggtaactgcgagagtcgg

SEQ ID NO: 372324 - DNA, 122 bp, Homo sapiens
ggtttcctcaagatggggagaaacctgtccctgaagccgccagtcagataagactgtgctcgccccttaagcctcctccaagcacgccctatttccggtcctcgcagtcggaatctgaatcc

SEQ ID NO: 372325 - DNA, 122 bp, Homo sapiens
agggtagagctgttgctttgtgaaaggcccacgccctacatatcttccatcactccaccccgtttggaggtgagtcaagagggacagaactatgaagaaaaacatggggctggagatagatg

SEQ ID NO: 372326 - DNA, 122 bp, Homo sapiens
tcaggtttgtgggggactcccaggacagcacagcagcacttgactagatccaaacagacacgcatcatggggagccagtttgtttgacagggacagaggcttggcagtggcacagcggtggt

SEQ ID NO: 372327 - DNA, 122 bp, Homo sapiens
acttgatgttatacactaatggcatttattagaatggaattctatatgtattattacttccgacaccagcctggcctttgtagcctcctcacagcatgcaacgtcggtaattatgctaatgc

SEQ ID NO: 372328 - DNA, 122 bp, Homo sapiens
atttgacatcatgaggccctgctggagacacataacctcagtcacagcagaaagtagagtcggtaggagaagtattgccaacccacagctcaatgggaaatgtttctgtctctttaaaccat

SEQ ID NO: 372329 - DNA, 122 bp, Homo sapiens
ctaccgcccctcttccatgtgacttccttccactaacgaactacacttcccagcaggcctcgcgtaggaatccggccttcctagtctcccgagatggacgacgggagccttctgaccggtcg

SEQ ID NO: 372330 - DNA, 122 bp, Homo sapiens
aagacagcttcttgcttctggctgcgatggaggcggatctgggcggggccgaaacgggggcggggccaagtgtgggggcgtagtcaggcgtgggggcgggccggcgccggcgccgcggtcgg

SEQ ID NO: 372331 - DNA, 122 bp, Homo sapiens
gacatattcaccagctgccggcggcgaggtcagaccccagattcgggtttgcccagcaggcgctcggcttccatgctcgctctccacctccctgcctctcttaaggaggacctggcccatta

SEQ ID NO: 372332 - DNA, 122 bp, Homo sapiens
ttgttaggtgtttgaggacccagaacagtctacacagctgtagtccccaagtgttgggcacgccttaagcgctccataaacacctgtagaaatgaatgaatgacgtatgcatctgcacgtgg

SEQ ID NO: 372333 - DNA, 122 bp, Homo sapiens
gaggccaagacgggaggatcacttgaactcaggagttcgagaccagcctgggtaacacagcgagacactgtgtgaaaaaaatgtaaaaattaactgggtgtggtggtgtgcgcctgtagtcc

SEQ ID NO: 372334 - DNA, 122 bp, Homo sapiens
atcccgccggtagaggccggtcggccttacgggtccgctatataaagccaaatctggccccgccccttccggcgtgcgagcgcgcccccgcggcagacgacaggtcgggggcacgtaccgag

SEQ ID NO: 372335 - DNA, 122 bp, Homo sapiens
ccaaaaagacttaacgagtatcttctctaactttctgagcatttcaatattttccgtaaacggcaacaattaagctaggtacatacacacacaactatacaagaatgaatcaaatatctcag

SEQ ID NO: 372336 - DNA, 122 bp, Homo sapiens
cgggggacgcaacgccgcgtcaggccgggggctgacctggaaatgaggccccggcggcggcggcgccaactgttttcaaacagtggcggacaaacagggcttggggctggcccgcacgctgc

SEQ ID NO: 372337 - DNA, 122 bp, Homo sapiens
tctggaaactcctcagtttcgtgacctttgcaactctgcagctgctcttcctctgcacggcgctcttcccgttcttgccattcttgcctttgccgccacagctcctcgtcgcggcgctgcct

SEQ ID NO: 372338 - DNA, 122 bp, Homo sapiens
cacgcaagctttcacagcaggagcccttttctaaaatatatcacactagcctttgaaaagcgccgcacactataaggaaatagcgtttcacggcttgctttatggtgcgatgacatttcttt

SEQ ID NO: 372339 - DNA, 122 bp, Homo sapiens
ccccctgcctctaatccccagttaccccagcaatgcaccattaaaaatagtactaaccaccgcctattccctctccaaatacaccagtctcccctacccacgccttaggggttgtattcact

SEQ ID NO: 372340 - DNA, 122 bp, Homo sapiens
agaggccggcccagcagagcgatggacttggacaggctaagatggaagtgacctgagcctcgcccggcggcttcctcgacgggacagcgcaagagttggagcacaggcttgtccggggagca

SEQ ID NO: 372341 - DNA, 122 bp, Homo sapiens
aagagggtaactgcagagaggatatggggggccctaaaatctgacagctcagtgcatgtccggccttacgtgccttactttgtgctttgtagcctcagacctgtttctgctggtctgaggca

SEQ ID NO: 372342 - DNA, 122 bp, Homo sapiens
ttttccttgtgcagcttttgcccttctcagttttattttctcacatcgtcctaatattaacgttcactgtggttgaatgaaagactgatagattacatttatttctcaaagaagctaagttt

SEQ ID NO: 372343 - DNA, 122 bp, Homo sapiens
tccttaataagcgaagtgtggggtgatttctaaaaggatttaaatggccctcatcagccacgtcctgctgagcttgctgggtaagccctttgaggtacctgatgtattgcagggagcaggga

SEQ ID NO: 372344 - DNA, 122 bp, Homo sapiens
gaagatgcaacggcagaagcagctcagggataagtgctgacggggcggggcattagggggcgggggccagtggactgcctgattggccaaatgaagaaggggcgtggtctaggcgggcggaa

SEQ ID NO: 372345 - DNA, 122 bp, Homo sapiens
cctcagggtaacgtggggagccggccggccggacagtgcgcgtgcacacactatctgcggcggtgtgctgacaagccaattgaggggactccatcttacaaaacgcgcttcatgtcgccgcc

SEQ ID NO: 372346 - DNA, 122 bp, Homo sapiens
tggtgccctcgaagacctcacttgtgcacctgtgggacccctgccggggcagataggacacgagctaatgggtgctgggcacagctcctgtggacctgacaaaggggacctgagcagtatgg

SEQ ID NO: 372347 - DNA, 122 bp, Homo sapiens
ctactgtactaaccaaatgcaaggtattactcatataaagacctagtcacggccaggcgccgtggctcacgcctgtaatcccagcactttgggaggcggaggcaggcggatcacgaggtcag

SEQ ID NO: 372348 - DNA, 122 bp, Homo sapiens
agggagaggtgagttgactgggagttcatccctctgagaaaaagatccgaagcggagtctcgtgttgtctagcccgggctcacactgcgcctccctccatgcccgggaaaaccatcttcagg

SEQ ID NO: 372349 - DNA, 122 bp, Homo sapiens
ctttctggaaatgacccccctctccagttagttaactgggatgggaggtggctccaggaacgtcctctccctcctctctcaacaaacatgactgagggaagcagtggcccttccagcgccag

SEQ ID NO: 372350 - DNA, 122 bp, Homo sapiens
ggttgaggtaggtaagccgaatgtgaaacaggctctctcattggcctaaattccccccctcgatctgcgtcgccatcccggccctgctggaccccggggtcagtaggaagccgcggggtggt

SEQ ID NO: 372351 - DNA, 122 bp, Homo sapiens
ctctggattcgtctctgtcggaagtgctcttcctcccctctggatgtccaaatctgccaccgcccctgcaggacaggtcccctctctcctctgagctcccccagcatgtctcaggtgttctg

SEQ ID NO: 372352 - DNA, 122 bp, Homo sapiens
tccccgtagtcggtactgtcctgaatgttccttttccaggaaaggtggggctctttcctgcgtcgccaggactcaagctagcacctaggttttgaatgtttaaaagttgattcttaagaaat

SEQ ID NO: 372353 - DNA, 122 bp, Homo sapiens
ggaggctgaggcaggaggatcgcttgagggcaggaggatcactcgagctctgaaggtcaacgctgcagtgagctatgatcgtgccactgcactccggcctgggagacagagctggaccttgt

SEQ ID NO: 372354 - DNA, 122 bp, Homo sapiens
tatgcagtcttatttttgttcactgttacgtaacacattttacacattttccgcattccacgccccgcccttcaacaacaaccaccacaaactccgaccgtcctttccaggccctttccctc

SEQ ID NO: 372355 - DNA, 122 bp, Homo sapiens
ggactttcgtgagaggcagcagagtgccttggatgagagcaacacctatcagctcccagacggctcccgcgtggagctgacccccatgcagcgggtggctcctgagatgttctttagcccgc

SEQ ID NO: 372356 - DNA, 122 bp, Homo sapiens
gagcccaactttggacccggcagagctgtctccagtagcttcgcctcactgggcttgggacgctgcagctcctgtccccgtttcgcttctaccaggacctccgggaggcacaaaagcaggca

SEQ ID NO: 372357 - DNA, 122 bp, Homo sapiens
gcccgctctgaccggttcaggcaccacgggggccatgcagtttcctcctcctcccagaagcgaggccctgccaggcacagctaccatgactacgatgaaccccctgaggagggcctgtggcc

SEQ ID NO: 372358 - DNA, 122 bp, Homo sapiens
actgtggttatgtcactctcctgtttggttctcctgctctcagccctgaaataaagagcacggtccctgtgcaggcccatacgtcctgtctccagccctggagcagtccttaagctccttga

SEQ ID NO: 372359 - DNA, 122 bp, Homo sapiens
actggaaagtcaaatctcaatcaggaaagcatcaggtgcgatgagactccggagtcgggacgccaggggtgatctacacagcaggggtgccggagccagagaaccaaagctcccaccagtcc

SEQ ID NO: 372360 - DNA, 122 bp, Homo sapiens
aggggcgcgccccgtccgctgccacccgcgggaggagcctcggaaggcggcgcaccgcgccgcacactcagtccaagaacccgcctcgcgtcactgtcgccgtcagggccgcggagccaatc

SEQ ID NO: 372361 - DNA, 122 bp, Homo sapiens
cgcccggcttcagctggtttttcaaaagtcatggcgtgtaactgtccgaacagtgaacttcggagatccaccggaggggcgaggccacagctcgaccgcgagcacctgagcatcctgcaccg

SEQ ID NO: 372362 - DNA, 122 bp, Homo sapiens
cacaaagcaggtgggcactagcaccccctgcccagtactctgccaccagcttccctcctgcgttcattctctcacccagtgctgcggggccacctggagctacagagagggagtgggatcca

SEQ ID NO: 372363 - DNA, 122 bp, Homo sapiens
cccagcatcccaggtaccacgcacccctgcaagatgcctgggctgccccgcctccgcacacgtccaggacctgcagcctccaaggccccgtcccagcggccttggccacctgccatgcacaa

SEQ ID NO: 372364 - DNA, 122 bp, Homo sapiens
tggtcggtctcagccactcactcagcgccactctatgctccgaagtccgtgtagcaccaccgctccccgtgttctctgagctggcttagcttgaaggaacctcacaaaaccaagcccggatc

SEQ ID NO: 372365 - DNA, 122 bp, Homo sapiens
gggaagggcggcaaacactgttgtgcttggatacgaaaaccaaggcctgattagcgtaagcgtttgttgaaaaagcattttctctgcacactaatctctacatatcctgtggggaaatcctt

SEQ ID NO: 372366 - DNA, 122 bp, Homo sapiens
caccattctcctgcctcagcctccggagtagctgggactataggcgcccgccaccacgcccggctaatttttttaatatttttagtagagaggaggtttacaccgtgttagccaggatggtc

SEQ ID NO: 372367 - DNA, 122 bp, Homo sapiens
gaaattattagaataaacaagacaacttacgtcgtcagtaagaaaacaccttcactgcatcgttcaaatgcctttcttgctgctggcttagaagcaaattcaacaatgcctttccctgtaga

SEQ ID NO: 372368 - DNA, 122 bp, Homo sapiens
cccccacacgaccctctcctagtctaactcctgggcgtgctttaagctcagctcaggcagcgtcaccttctctggaaagcccaaacccagccaccccactacccgctacccgcggcccacgc

SEQ ID NO: 372369 - DNA, 122 bp, Homo sapiens
ggggattgcggttgggactttccctaagtcatttcctgttgctcttggtcttgccacttccgcccctcacccacctcccccacccctgctccccaggggccggggtcccgagtggcaccgtc

SEQ ID NO: 372370 - DNA, 122 bp, Homo sapiens
gagcgcctggccagttagggattccgcgtggccaggacaacggccaatcgtcgtggagcgcggcgcctccgcggagaggtccggtccgaatatccctccgccttcctccctccctcgctccc

SEQ ID NO: 372371 - DNA, 122 bp, Homo sapiens
accgcgcccggcctcattcagtattttattgagcgccgatggaacacagtggggctgggccgcgctggtgggaaagtcaaggccaggggtgtttgcggggccgagggcaggggaggcgatgg

SEQ ID NO: 372372 - DNA, 122 bp, Homo sapiens
cggggcatggcggagcgcggcggctgcagcgcacctcccaccctccatgggagcgtccaacggcggcttgctctactcgcagcccagcttcacggtgaacggcatgctgggcgccggcgggc

SEQ ID NO: 372373 - DNA, 122 bp, Homo sapiens
gttttaatatccacgttggttgttgaagcagtatattctaggggtgcctgggaagacagtcgtttaaaatgtctctgctttttataggtcagtttttcttcttctttctcactcccttgcca

SEQ ID NO: 372374 - DNA, 122 bp, Homo sapiens
attaagaaagcaaaaagtaaacccatatactaccatgtaagaaaaccgtttttggccaggcgcggtggctcacgcctgtaatcccagcactttgggaggccgaggcgggcggatcacgaggt

SEQ ID NO: 372375 - DNA, 122 bp, Homo sapiens
cggggagcatcccttgccgtgagactgacagcctttgggggcgcagggtcctgttctctgcgctctagcccatctgtgcgcagagcctcgttcccaggcgcctggaacccggcgggcattga

SEQ ID NO: 372376 - DNA, 122 bp, Homo sapiens
cgacgatgacctggaggaggacgatgaggacagcctggccgggaagtcgcaggatgacaccgtgtcccccgcacccgagccccaggccgcctacgaggatgaggaggatgaggagccagccg

SEQ ID NO: 372377 - DNA, 122 bp, Homo sapiens
agtaggacgtcaggcttgcaagctctgggattaggccgaccagagcccatatcccagtcccgcctcttactgcctgcttgatctcaagcaagaccgctttgttcatgggcgaaaggagcgcc

SEQ ID NO: 372378 - DNA, 122 bp, Homo sapiens
ctgacgcgttactatggatactccatagcttggagggccagtcgggccacaccctttggacgtcacccggagcccacaggagcacctggcaaaagccaggcccacttcctgctcggctccgc

SEQ ID NO: 372379 - DNA, 122 bp, Homo sapiens
ttccctctgggaaacatccctatcttcctcttcaggattgccatgaggactagatgcccacgctctggaaacacctgtgctacaaaagcagacactgaccataattaggagattttcgaatt

SEQ ID NO: 372380 - DNA, 122 bp, Homo sapiens
gcactgttttccctttttgctcataaaacctccacagatccggctgagcgctgtggctcacgcctgtaatcccagcattttgggaggccgaggcgggtggctcacgaggtcaggagatcgag

SEQ ID NO: 372381 - DNA, 122 bp, Homo sapiens
ctgctcccatgctgggtcaaagcctgcagttggagagggcctccggcctggtgagggggacgcctgccaggtcattgacctcttggcaggtggggtaggctttcagggaggggtccgatgcc

SEQ ID NO: 372382 - DNA, 122 bp, Homo sapiens
aggacactgagtgagggccgcctcctctgcgctgcccatacgagaaggaagccctggagccgggccttccgtcgctgcgccctcctgcaccctccgagtgtctcccccgcccacgtcggagg

SEQ ID NO: 372383 - DNA, 122 bp, Homo sapiens
cgtcaatggcagtacaaagctccccctcattattgcataacaacagctttgcagccaacccggttttcattttttttttttcggagacctccagtggatggctcttcgtcgaccctaatccc

SEQ ID NO: 372384 - DNA, 122 bp, Homo sapiens
ccgccccagggcctgcccccgcgtcacggccccgggtcagtcttcgctccccaccgcctccggacgcatctccaaggcctcgccccgcccccaggagtcgctcttgcgtcaccgccccgccc

SEQ ID NO: 372385 - DNA, 122 bp, Homo sapiens
cctttttctggtgatcatgagtgactgatctgagcaataagtatatgactgagaggccctcgccaggcatttgtggagcggattgccgaagcttggttagttaagcaatatgccagaaattt

SEQ ID NO: 372386 - DNA, 122 bp, Homo sapiens
gtgacaaatatagagctgctgtccttaaagctctaacaagagactaaccctcaagggagacgccatgcaataaataatttttgccataacacatttctttctttgcataaatttaacaccct

SEQ ID NO: 372387 - DNA, 122 bp, Homo sapiens
ggctcactgaggagagaggaaatagggagtgtgtaggggagtgtggaagtggagtgggggcgagctcacagcagctcccgtccatcccccaggactggggcttgtggtctttatttagcaga

SEQ ID NO: 372388 - DNA, 122 bp, Homo sapiens
gaggtcactttcttagagcaagcaaattgttttctgtaaggaaactattttatataagcacgagagcattatctgaaaaaaggaaaatgattcttctctagtacacagctgaaaactcccta

SEQ ID NO: 372389 - DNA, 122 bp, Homo sapiens
cgccttggaatatgaaggaccatatcacaggggggctgtacacaccctgcgctatgaagacgaatattatcctctcccaccctgcacatgagaaaaaatatcacagggtgggtgtacacctt

SEQ ID NO: 372390 - DNA, 122 bp, Homo sapiens
cgtctcccgtcttgctgtccttgtcccggtaagaccggggaccctggaccagggaaccgacggagggccactcccatgtggatgcccaagggaccaacccaagaaagatgccgcccttatcc

SEQ ID NO: 372391 - DNA, 122 bp, Homo sapiens
gcctcttccactacgggtcgaaggatgggtcacgtcacattgcgcgaacaaggatggtcacgcgccacaaaaggacttgcagggcggggcgactcgacggccttcccttttgctcccattgg

SEQ ID NO: 372392 - DNA, 122 bp, Homo sapiens
cctggtcctagggggcggccccagggtcgggatgaagtctggggtcgcgggcgcgggctgcgtggggtttcagttactcgtggagtttcagttactcgtggacaaagcgccgcgcgctagca

SEQ ID NO: 372393 - DNA, 122 bp, Homo sapiens
ttgacaactctattaatccgatgacctcattaaacaggacagacaaggtccccactcttgcggtttggctggggagatagactttaactcagtaattgcataaataaagaatgacaattgca

SEQ ID NO: 372394 - DNA, 122 bp, Homo sapiens
cggctgagcgcttggccagagtttctgtgatgctagaatctggactgcctgcgacctctccgggactcggacaccagccctcgcctcctggtgatcttttaggtcctgcagagaagtgaaga

SEQ ID NO: 372395 - DNA, 122 bp, Homo sapiens
ttcttcgctcctccccttgggggacccccggctccaccgagccaggccagccccactcgacggcgatttaaacatcccttaggcaaggcgccaagttagcgctgctggcccagctctaggcg

SEQ ID NO: 372396 - DNA, 122 bp, Homo sapiens
accctgggggaaaataagcttatgtgccagaaaatatttcaagagcacaaacactaaaaacgataagagagctgggtgcagtgcacgcgcctatagtcccagctacttaggaggctaaagtg

SEQ ID NO: 372397 - DNA, 122 bp, Homo sapiens
ggatcttgggccagggaagtgccggcctgaagtgaccccctcttcctgtacttctctccccgctctgggccgcctccgctcccccctcccccgcacaggttgtacgggatcaaatgcgccaa

SEQ ID NO: 372398 - DNA, 122 bp, Homo sapiens
aggcgctggagggtcttgccccagccctgcgggggacagatggctgacttatggtttcctcgcctccgttgtagcagagcaacatacaagccaggctgaagaagccccacttcatttgcctt

SEQ ID NO: 372399 - DNA, 122 bp, Homo sapiens
acatttggaggaggtggtggtggtgctagaagtaatctcaatatgaatgctgctggtaaccgaaatagggaagttttacagaaagaaaagtcaaccaaatcagagggaaaacatgaaggtgt

SEQ ID NO: 372400 - DNA, 122 bp, Homo sapiens
tttctccgagcagctccaacagagtctttgaaaacccaaccctggggagcagccaaggagcgaactattgagaatgagtacaaggtaaaggagctgggagtcccacgatagtctcagcaact

SEQ ID NO: 372401 - DNA, 122 bp, Homo sapiens
gaggccaccttgcttctcacaaaatggcggatgacacaggcggcgcgccgcctttgtcctcgtcttatataggccagctggcacggccccgcctactccacgatcgacagctccaatagcca

SEQ ID NO: 372402 - DNA, 122 bp, Homo sapiens
ataggtagggatctcggagcctcacctgtttgaggcccatgagctcagcatagtcaaagacgagaaggatgctaaagatgaggagccaggagatgacatggagcacaaagcagaggagcggc

SEQ ID NO: 372403 - DNA, 122 bp, Homo sapiens
cattatctattcattctgtctccatggaaaggcccagagtgctcagggaaggcagagccacgttgcatgtgaaatctagacgagtccatttggtagtctccacagcttcctgcaacaccaaa

SEQ ID NO: 372404 - DNA, 122 bp, Homo sapiens
gcgctggaggctgccccagccgccgcgccggtgccgccgctgccagtggagttgcctccccgcttccctagggtggttcggctccaccaaacatgtcggctcctgtcgggccccggggccgc

SEQ ID NO: 372405 - DNA, 122 bp, Homo sapiens
acccccgccaacgctcgccggggtcgcccgaggcctgagccaagggggacgctgtgggcgcggctcaggccaggccctcaggttagtgggtccccgctgtccccgcgcttcggcccgtcctc

SEQ ID NO: 372406 - DNA, 122 bp, Homo sapiens
ggaggtgagctgttgtcggcgttttgagcaatctgcgggcggacgcggggatcactcacccgcgatgacgaatttggccatggtcgagagagactcagaggcagggaccgcggcttcgcggt

SEQ ID NO: 372407 - DNA, 122 bp, Homo sapiens
gaatgcacattaaaagagggactgaatgaagccaagcaacaagacataacctgacagctccgctcccggccacgcggccaccgtcagccaccctggcctggcgtcgcccgccattcctggcc

SEQ ID NO: 372408 - DNA, 122 bp, Homo sapiens
tcggttcacgggcccatgcaatgggccgaggcagggcccagaaatgggcatttcttgagccggcagcgttaagcgcccactgtgtgcaaggaacgcgagggcagggcgccgggctggggccg

SEQ ID NO: 372409 - DNA, 122 bp, Homo sapiens
caagggatttccacgtgttctttaaaaccacctgaaactgtcctgcgcaggctcacactgcggctctgtaccaagggcttggccccgcctgcagccagagggcatctcactggatgtcatca

SEQ ID NO: 372410 - DNA, 122 bp, Homo sapiens
gcgcggcgaggtcgggggggagcagggtggcggtgcggccccggcggggctccgagcgcgcgctcccgtccccaccacgccaggtccgcggcagttcccgcccgccccctcctccggcccag

SEQ ID NO: 372411 - DNA, 122 bp, Homo sapiens
ccaagctaagctcctccccaacatccctcaggcccagagccagcccttcctcctcccgagcgccctgccctgggattctcagaccttgaaagccacaagtcttgaaagtctctgaaggaaga

SEQ ID NO: 372412 - DNA, 122 bp, Homo sapiens
ggctttatcccccgagccccctcccttaggtggagatgctttccttctcgccagggttctcgttcctctcagctgtctactgttgcctgcctctagctggggaggcggggtgcgaggagaaa

SEQ ID NO: 372413 - DNA, 122 bp, Homo sapiens
gagcacgagagggaggtgcgcgctctgtacgaggagacggagcagcttcgggagcagagccggcgcccgccgagtcaggtgggcctcgggccccgcccctcccgccaggcccaatcccacct

SEQ ID NO: 372414 - DNA, 122 bp, Homo sapiens
gctgcttctctctggcgcgcggcggcggtgactgacggcggcggctccgagggacgggcgcgcacccagctccccggccccgcctccccgggcttcctgcgagccaggtaaacacaggccga

SEQ ID NO: 372415 - DNA, 122 bp, Homo sapiens
gaagggccttgacctatttattgcatcttaactgtccccgctctccaatcttagcagcggcgcccagcccctaatcctgtgggctgccccgtcctcccaagtccaccagacatgtggacccg

SEQ ID NO: 372416 - DNA, 122 bp, Homo sapiens
atgaccagggccagggtcagagtgaggccccgagtccggagccgtggacggggccctaggcgacaccagggcgccctgactgcggcctcccactccgagacgcgagtttgcgggacgctcca

SEQ ID NO: 372417 - DNA, 122 bp, Homo sapiens
acacttctcataacaaatgaacgcgatttatgtatatctaagccagggcacattggacgtcggtatcctggacatcagcatcctggacacagctcccaaaccccgaattcccccattttatt

SEQ ID NO: 372418 - DNA, 122 bp, Homo sapiens
acctcccatgtgcagagggcgctgctggggccacaggcgaggctgcgtggggaagcggagcgtggattccagcgctttcccctagatccaactctgagctgctttgctatgtgaactcagga

SEQ ID NO: 372419 - DNA, 122 bp, Homo sapiens
taaaaatgtgtcaccaagtcagagtcattaaaagggtgggaaaaattcctttaaaaaacacggtgtttagcttaagaggaatattccgtgtttatttcctgtcaaggggaactggctcaatt

SEQ ID NO: 372420 - DNA, 122 bp, Homo sapiens
gcattcctggcgcctcttcattcgaaaaacctctttccaggagacttcgctgattctgaacgaatactttaaaatatgggcaagggaaaaaaaaagacaactcttagaaactctccccaccc

SEQ ID NO: 372421 - DNA, 122 bp, Homo sapiens
accccggaggttatatcctcggtggcctcagcttttacacgatctaagtccatcctacggcggatacgctctcctttcactggaaaatgactgtttgcgttgaaaaaatttttatctaacaa

SEQ ID NO: 372422 - DNA, 122 bp, Homo sapiens
ccggcctgccacataagcatgacttcctgagacataacactagaggtgatggaggcagcacgaaaggacagcaccacagagaaagaggtgaggaaggaacccgggagggctgcctggaagtg

SEQ ID NO: 372423 - DNA, 122 bp, Homo sapiens
tagcgatttgcagtgcgtttttctgggtgggcgggaaaagacctttcctgtctgctctgccgtggccgatggcatctgccatgtggacgggaagtgcacgctgtccgccatggggatggtgg

SEQ ID NO: 372424 - DNA, 122 bp, Homo sapiens
agggtctgggccaggcacactggctcacgcctgtaatcctaaaattttggaaggccaaggcgggtggatccagtttgggcaacatagttggaccctgtctctacaaaacaaaaaaacaaaat

SEQ ID NO: 372425 - DNA, 122 bp, Homo sapiens
gacttgggcacttagcagagggtgcacgtgcccgtgtgtgtgtgtgtgtgtgtgtgtgcacgcacacctgtctcagggggtacctagcatataccctgagcagatttttaacacctgccctc

SEQ ID NO: 372426 - DNA, 122 bp, Homo sapiens
ctgaaaagctccctcttgtcaccctcttgggctccagcatggaagcaagcagggaacaggcgtgtgtgtgtgttgtgtgtgtgtgtagtgtgtgtgtggccacacctgcaccaaggttagta

SEQ ID NO: 372427 - DNA, 122 bp, Homo sapiens
ttttttcccatttagagtcgtcttaatgggagcagggacggcctcagcttccagccacctcgggcagcaccacccccagccgccggcccttcctgccctgcccttttctcacggcagctgtg

SEQ ID NO: 372428 - DNA, 122 bp, Homo sapiens
tcatcatcatcttctaatccccaaggagacaagctccctgttctgtgttcttgtatgaggcggtcagtcaagcgcagcccgagaggagaggcaggagcctgggagagcctctgctagacctt

SEQ ID NO: 372429 - DNA, 122 bp, Homo sapiens
gatttcagacttctggcctccagaactgtgagaggatacattttattttcgcaagccactcgatttgtggtaatatgttacagcagccagcaagttgactagctaatagtcataggcatttg

SEQ ID NO: 372430 - DNA, 122 bp, Homo sapiens
taagatagaagattctagaggaagtcaaggcaaggaccagattttgaagtgttttgcatgcggagctgaagagcttgaatttagcaccagcaatagggtgtcagtaaagagttttataagag

SEQ ID NO: 372431 - DNA, 122 bp, Homo sapiens
cgtgtcattcagttagcaaacctgctagggagatgcctcctgtgccctgtgcctgccgggcgacagcagtgaccagggcgggagaagccttgccccataaactcacgcagcagaaggaacaa

SEQ ID NO: 372432 - DNA, 122 bp, Homo sapiens
tgtcttcctaccagggaagtctgcacaaggaccccctgcccctgccctgagccaacaggacgttatctctgagatccatttgcccagccccagcccatcttcccctgactcccctgaagact

SEQ ID NO: 372433 - DNA, 122 bp, Homo sapiens
tcctgtgtggtggtgaccgacgattctgtcctagatcccagtggagaacaccaaagcgagcgaggaggaggaggacccgaccttctgtgaggtgtgcggcaggagcgaccgtgaggacaggc

SEQ ID NO: 372434 - DNA, 122 bp, Homo sapiens
gccaaggtgtgtgtttatttgattgcttttggtggcgaggcgcggggctcgggctcgtcgcgcgccccatggccggggagcgcatccgccaaccccgggcggaggtgggcccctccgagcgc

SEQ ID NO: 372435 - DNA, 122 bp, Homo sapiens
acggaaagacaaattctccatgatttcacttctatgtgaaattttaaaatgttggacttacggaagtaacgagtaaaatgatggttatcagccttcctttcatttgtgttcattttgttttt

SEQ ID NO: 372436 - DNA, 122 bp, Homo sapiens
agagagggcacggcgggggaggggggaggagggggcggggggagaggtggggcaggagcccgggtttatggcagccggagtgtgctaattaaaatgccatcttctcaaacaggtattggtgg

SEQ ID NO: 372437 - DNA, 122 bp, Homo sapiens
gttgtgaagagagaagcagctttgaaagaaatgcttttaaactaaaataaccacggcattcgaacaaaataacgtttggcattcttaggtggcccttttagactaagttaatggcagcagaa

SEQ ID NO: 372438 - DNA, 122 bp, Homo sapiens
atccctaatactcagagaattgacaggaatgaaaagctaaaagatctaggaagttgcaaacgttacctgctgatggaaatctgttgtctggcttcgtttcggcagcaaagtgtgggcacacc

SEQ ID NO: 372439 - DNA, 122 bp, Homo sapiens
aaatgcttccaagatggatgacatatgtaaagcgatgatgacgtgtggtgtggagagcagcggtcatatccagtgctttctacacctggctgcacttgggagtcatcttggcagcgtggcca

SEQ ID NO: 372440 - DNA, 122 bp, Homo sapiens
gcccgcctcagggcctcacaggtgggaccgcgcctgagagccctgcgcttgcgcactccacgccgtgctctacgcatacgcctgtccagccccgcctctgggtgtgtggcgtgggcacgccg

SEQ ID NO: 372441 - DNA, 122 bp, Homo sapiens
gccccgccgcccgactttgccgccgcctggagccggctggccgcgacctcagccgcccgccgccctcctgggagtcctgtgtatggaaactcacatgagtcagctcagtttagaagggtagt

SEQ ID NO: 372442 - DNA, 122 bp, Homo sapiens
ttttggcagcctcccccatcttctcgtgtggctccatatctttatatcttctgtggcagacgtagcctgctgcctccccaaactctatcgtcctcttctccttcaaccatggaaacttgatt

SEQ ID NO: 372443 - DNA, 122 bp, Homo sapiens
atgagtgcagggtctgtacctggctgtatctccagcatctatcacgactgaaaacccaaacgtatttgctgaatggatagtatactggcctctgcaccagaagacctggggtccaggcccag

SEQ ID NO: 372444 - DNA, 122 bp, Homo sapiens
atttacttatttttttgagacagagtccggctcagtcacccaggttggagtgcagtggtgcgatctgagctcactgcaacctctgccgcccgggttcaagcgattctcgtgcctcagcctcc

SEQ ID NO: 372445 - DNA, 122 bp, Homo sapiens
gatgcatggtattataactgcttacttaattgtctgcctctcccactagactgtaaacttcgtgagagtggggaccacatctgccttgtttatcactgtatccctggtacctggcacagtgc

SEQ ID NO: 372446 - DNA, 122 bp, Homo sapiens
tcccttatacctgcgatagtgtctcccggcatacagccaagaatgggtgtgcacactcctcgacctgctcccttccacttcgtcagcctggccgggggctctttcaagaggtggggccgctt

SEQ ID NO: 372447 - DNA, 122 bp, Homo sapiens
tggagcctcagggcgggttggggaagctggcgaggccgagccccgctttgggcttctgggcgccctgacctcgctcccggaaccctggggactgggaggcgggagggggcttattgattcca

SEQ ID NO: 372448 - DNA, 122 bp, Homo sapiens
gctccgcctctgccagttcaatgttttattggtgaacgtgatccggggccttccaagtcccgccaatccagatgtaggagaggtagggttaggcgcgtgccgcgagaacagagtggacggag

SEQ ID NO: 372449 - DNA, 122 bp, Homo sapiens
cgggatataatcccctggtgcgctgttttttaagcctgtcggaaaagtgcagttttagggcgggagtgacccgattttccaggtgccatctgtcacccctttctttgactaggaaagggaac

SEQ ID NO: 372450 - DNA, 122 bp, Homo sapiens
ctgaactgagaagcgagtcctctccgccctgcggccaccgcccagccccgacccccgccccggcccgatcctcactcgccgccagctccccgcgcccaccccggagttggtggcgcagaggc

SEQ ID NO: 372451 - DNA, 122 bp, Homo sapiens
tgtgccagcccagagacgggctcccacagtgcagcggggggctggagggcccctcaaacacggccagagtgggtgccaaggccgaggaggcgccgagagcgagccagggctacgaggctgcc

SEQ ID NO: 372452 - DNA, 122 bp, Homo sapiens
ggtggctcgctctgttgttgccacagggcctggttttggtgggctccggggggaccaccacgctcgtccccagcgcgtccgcggccgcgggctcctcgggccggtggcagttggcgccgtcc

SEQ ID NO: 372453 - DNA, 122 bp, Homo sapiens
agagaggagggtgtgaggcaatgtagagaaatttataagatcagtacttactttgttaaacgctgtcaccgtcctggctcgacaactgaattccaggtcctaatgtatttataagctctttg

SEQ ID NO: 372454 - DNA, 122 bp, Homo sapiens
ccgggcggcgactccgccctcagcggggagcggggagcggggagcgatgcccggggcggccgcgacgtcagcgtccccgcccctgccgcccctactcccggccaggcctcggggacccccgc

SEQ ID NO: 372455 - DNA, 122 bp, Homo sapiens
gggtggggatttgagatcaggtccctttcgggttttctttttgaagcgcccctctgcctccgcccgcgcctccgccaggctcgctgcgtcagcacctcaccggctttgcacacaggctgtgc

SEQ ID NO: 372456 - DNA, 122 bp, Homo sapiens
ccaccccccaaactgaagcccacttgagggccatggctgaaaggttggggggtctccgtgcgtcctgtggagtgggtggtgaggagtccttgggtttgcacgcctctgggcctgagcggcgg

SEQ ID NO: 372457 - DNA, 122 bp, Homo sapiens
tcttcccacgccgcgcctcgaagcgcacgacaccgtggtgctcggtgctccccctggcagcgcggcactggagtccaaggcgtgcgtgtcacattttattccccggcagccgctcgggtgcg

SEQ ID NO: 372458 - DNA, 122 bp, Homo sapiens
ggctgggccatcggaaaactttcagttttgtttccttgcctgcaagaaacgaaactcaaccgaaagcctgcagagagcagaacatggaaggagacttctcggtgtgcaggaactggtaagaa

SEQ ID NO: 372459 - DNA, 122 bp, Homo sapiens
actggcaaatccaaagtctgcaaggtaggccaagaggctctggatccaagaaggagtcaacgttatagctcacgcctgaggtttgcctgctggtaatattccctcttctcggggagaagtca

SEQ ID NO: 372460 - DNA, 122 bp, Homo sapiens
acctcaggtgatccacccacctcagcctcccaaagtgctgggattacacgcgtgagccaccgctcctggcctttgcaagtatttttatgtgggtaaaacagttatacctttcactgagcggg

SEQ ID NO: 372461 - DNA, 122 bp, Homo sapiens
aaaaaatcacccaggcacactttttgccttcaaaccggaagcacgtgagtcagggccgcacgtgtgcggagccaatggcgagccgggactcgcgctgacactcgggcctcggcccaatgggc

SEQ ID NO: 372462 - DNA, 122 bp, Homo sapiens
tcagtggcactgagctcagcagaagaaggcacaggaaggggatgggggagtcctggttcccgctttgttcttggggccaggacagtggccagcctggaaagactggcatgaaccctccagca

SEQ ID NO: 372463 - DNA, 122 bp, Homo sapiens
ggtaagaaaaaagtcctttggttgtaagtcccatggatcccaccaacctgcagtctgagacgcagaaatagaaaaaaaagagaagaaaacatttcgaaccttagtgaagctgctgccagagg

SEQ ID NO: 372464 - DNA, 122 bp, Homo sapiens
tccttcagcaaagtgaagctgaccaacaagctcaatggaggcgggcaggtacgaatgaggcgggcaggcctggccacccgctccggcctccccacaacaccaatcaagaaatatcaagggtg

SEQ ID NO: 372465 - DNA, 122 bp, Homo sapiens
ctcggccgcggagaaggcgagcagcgagccctctttggccaggaagcctttgccgtcctccgcgtcagcctgcagcgcctccgccttgtcgaagttaccgccgccgggcagcggctgcggcg

SEQ ID NO: 372466 - DNA, 122 bp, Homo sapiens
aacatgcacctaaagtctccgcgcgtcagcgcgcgtcagcggcccgccgcccaatcgccgcgctgccgcgctccctggactcctggcccgcgctcgctttggtatatttccgacctgacgtc

SEQ ID NO: 372467 - DNA, 122 bp, Homo sapiens
aaccgcaggaaaatcctggtgaaaaacctgccccaggacagcaactgccaggtactgggacggtgataggggcgacgcgtcccgaggggcggcggggcggcgctccgtgtccaggctgggat

SEQ ID NO: 372468 - DNA, 122 bp, Homo sapiens
gaattccagttttcgcgaactctggccaaaagtttgcagcaagaagtttgcaaactcctgcgcccgatcggcaaaagcggaggggggagttgcaagaggagcaaagtttgaggaaggtgaat

SEQ ID NO: 372469 - DNA, 122 bp, Homo sapiens
tgcctttccggcctcttgacatggaaacacgcggagcgttttcccttctgtcttcctttccggcctgttgacatggaaacgcgcggagccttttcccttctgtctgcctttccggcctgttg

SEQ ID NO: 372470 - DNA, 122 bp, Homo sapiens
gttgatgaagtcttgtcagaaacaagcctggtcaggaccagaagtggggaaagaaacagtcgatttagattgtcacagtacttcgggtagaggactttgatctggaatcgggataaagaatg

SEQ ID NO: 372471 - DNA, 122 bp, Homo sapiens
ctattctcccgccaattcggccttctgaccttcgccttctgaccccgagagctactcttccgtcttccgtagcacaggaatgcgttctggggcttcaagaagctgctgtttttgaaaatgag

SEQ ID NO: 372472 - DNA, 122 bp, Homo sapiens
tcctaccggggaccggagcttccccagttggggtcctaggggacttattccacgcttcagcggaccagcctccccgcgctcccggagaagggggtcggcgacgcggaggcggggtgggggcc

SEQ ID NO: 372473 - DNA, 122 bp, Homo sapiens
tgcacagtggtgcaatcacggctcactgaagcctcaaccttcacctgcttaatttctgaacgttttgtagagacaggagtctcgctgtgttgcccaggcttctcttgcacttttgagctcaa

SEQ ID NO: 372474 - DNA, 122 bp, Homo sapiens
aagcccaacccagaggttgcttatggtttccctaaggttcctgggctctggacatcagtccggtctgcaagccccgccctgattggctgcctccggcaccggtcgctgcgccctgacctaag

SEQ ID NO: 372475 - DNA, 122 bp, Homo sapiens
ggtgtcttatgcactcccagcccctctcagtgagacctgaatctcctctcctgccagtgccgcagcttgggccaccctccccaccggacacctgcaggtgtgggatccgtctcccccgcagg

SEQ ID NO: 372476 - DNA, 122 bp, Homo sapiens
cagtggaaaaagagcatcaaagatgatgtctgcgaggcgcggccacggcgaggaagctctcgtttatgaacaaagggccactcccgggtctcagagatgtgaggctgtgtgggtggcttggt

SEQ ID NO: 372477 - DNA, 122 bp, Homo sapiens
gtggacccgggtcaagaatacccacattccgaagggctgggcacgaggaggcatgggggacgctaccttggactatgactatgctcttctggagctgaagcgtgctcacaaaaagaaataca

SEQ ID NO: 372478 - DNA, 122 bp, Homo sapiens
tcttgtgattggggtcctcccggttcccgcagggcctcaagagctttccgcctccccttacggaggacctctttatgcatccgtggaaggggtcccagaaatcggaaggaggcggctggttg

SEQ ID NO: 372479 - DNA, 122 bp, Homo sapiens
acacataacccaggctgatccccaggccttattaagtgttgatccaccaaacagggcatgcgtagcagtgccttggaccaagggacccactttacaacacagggaggaggtgcagccatggc

SEQ ID NO: 372480 - DNA, 122 bp, Homo sapiens
ctcaggggccgggaggggcctggggtaccgctacttgccccaacccagttttcagaatagcgcggagcctccctagtgacccccttaccccagcgatgtgcgaatcccactgaccacgcgga

SEQ ID NO: 372481 - DNA, 122 bp, Homo sapiens
aaagggacagaaggtgatgggagatgaggctgtgcctccctaagaacctccctagaaatgcgggtatctcctccagccaagggaaacccttctgcccttcccctgtggcagagactgtggta

SEQ ID NO: 372482 - DNA, 122 bp, Homo sapiens
cgggaatcacgcagctgactgcgtcgcgcaccaacaacaaaatggagctgacagctgctgcgtcgagactcgtctcgaaaacactgatgacgcagcgagcgcgtctccgccgcggggcgggt

SEQ ID NO: 372483 - DNA, 122 bp, Homo sapiens
tggacaaaaactcagaaaactaacaataacaacaaagctttaaaaaaaatcctgcacggccgggcgcagtggctcacgcctgtaataccagcactttggaaggccgaggcgggcgtatcacg

SEQ ID NO: 372484 - DNA, 122 bp, Homo sapiens
tgatcatgagaacatgttcctctaggtagtggccatacttttatctctatatccttaggacgtaacacagtgcctggcatataatgtgtctccagaaatattttgtttttgaattaaagact

SEQ ID NO: 372485 - DNA, 122 bp, Homo sapiens
caggagcaagacttcgtctcaagcaaaaacaaaaacaaaagcaaaaacaaacaaaaaaaacgtgggagaggaaattggatattatctcaagaaaagtttagacatttaaaacagcgtttagt

SEQ ID NO: 372486 - DNA, 122 bp, Homo sapiens
caatgacacatagagctcttctcaaaactgaagccttcttcctgcctttatcagttttaacgaatgttttctggaacacctccttctccctcagccctcatccataggaagcaaaatttgtt

SEQ ID NO: 372487 - DNA, 122 bp, Homo sapiens
gcttaagtttgtgttctgttaaaaaaaaaaaaattaaaggttatctggcaattttttaaacgtcaggactgtcatctgtggaatcaattgaaaagggaatcaacacttcagaaactgtaata

SEQ ID NO: 372488 - DNA, 122 bp, Homo sapiens
gtggacgcactccctcctgtcagacgtcctaaagctgggtgacgcatggccgggtgggcgcgttccctcccatcagatgccctaacgttgggtgatgcgtggctgggtggacgcgctccctc

SEQ ID NO: 372489 - DNA, 122 bp, Homo sapiens
gcagttacctgccctggaatcttggcggattctgagagacacagcctggggtcacgggcacggcagacgcactggggccggacgggagcctgatccaggcctagctgcacatctggccacaa

SEQ ID NO: 372490 - DNA, 122 bp, Homo sapiens
ccaggtcccccagggcttcctcccacagcagctgtgaatggcacagtgaccttcctgcagcgtggagatggcacatccttgctgctggggacttggccctgctatttatttttgtatttatg

SEQ ID NO: 372491 - DNA, 122 bp, Homo sapiens
gaaggggggggggaaacaccatgctagaactctgcgtttttaaacaaagcgaggcagggtcgttttctatccccttagccagatctaaggcggagccaaagaatgagtaccctgtaagagcc

SEQ ID NO: 372492 - DNA, 122 bp, Homo sapiens
gtgccctccccttcatcagttccatgcagcggaccctgacggagctgctggccttggagccgggtgtggcctaccagcacgccttcctctacatccgccagctcgccatacacctgcacaac

SEQ ID NO: 372493 - DNA, 122 bp, Homo sapiens
gttgctactctttctacattaaaccctgccatctttgctcaaccttttctttggagtaagcgtattacacaggtggtatttccaatactccacagattttccctgtatctcagcccttaact

SEQ ID NO: 372494 - DNA, 122 bp, Homo sapiens
ggcagatccaggcaacgatgaatgagtgacaatctagaagagcagagtggccaactcccacggtggcaggggtgtggggtgcagggatcgaccttaacgcagcaccccagtgacagaaaaaa

SEQ ID NO: 372495 - DNA, 122 bp, Homo sapiens
tgtggctctgagtgagttacttagcttttccgagccttggtttcgtcacccataaaatggcgatgatgatgtttccctcacagggtagttttaagatttgtgcaatatcgtgtgtgtgaaag

SEQ ID NO: 372496 - DNA, 122 bp, Homo sapiens
cacaggcacagactcgggcacacggagtcacaccgacccgggcacgctgcggaacgcacccgtccacgcatacacagaacgggacttgctgccccgcacgcacaccaggcccgcactccgaa

SEQ ID NO: 372497 - DNA, 122 bp, Homo sapiens
ccagccccctgtcctccatgggaggctgagcccctcacttgctcagtctgagctctttaccgctcactatgaactcctctgttccttttagtcttagcccttctgttccctctcagtccctg

SEQ ID NO: 372498 - DNA, 122 bp, Homo sapiens
tctgcaaccaagctcttcagacccacatcccttctcccagtgactgaacagtcccagctccggctggagaagagcgtctgcaaaacccgctgttgcctcccaggggagtctccaggcccagc

SEQ ID NO: 372499 - DNA, 122 bp, Homo sapiens
tactgtatgacccctaggaggccacatgggtagctgaatttggacccagcaactctcactcggacatagtggttgtaagttctagctaactttcagggtcactttttggacaattatgctga

SEQ ID NO: 372500 - DNA, 122 bp, Homo sapiens
ctatattcaaaagccagatacgccttcagcttccactccctaaacctgtacaaatgcttgcgaaaagtacctgcccattacaaaatgaatgcctctgagaaaaagttaaatgcagtgtttta

SEQ ID NO: 372501 - DNA, 122 bp, Homo sapiens
cccgggatgttgctggagcccgcaggaactgcaaactcaccgcgcgcgtccctgcacacccgcacctgcgcctcgagaactcctggccagttgaatacccggtcccccgccgagcttcgctg

SEQ ID NO: 372502 - DNA, 122 bp, Homo sapiens
aaaaaagaaagaaccggtgaattggctctgagcccaataaacggttcctctttccttctccggtcctttcccttccaacagagcgattgagaaatcatttcaataatcagcaaatcggctgg

SEQ ID NO: 372503 - DNA, 122 bp, Homo sapiens
ctattgcgcacctggccagcggcgcacgctacgcgaacgtcagcgcgcccgacgtgggcacgtcactgctgcccattcccgcaggagcgaccactgtgcgtgagcataggagaacgtctgtg

SEQ ID NO: 372504 - DNA, 122 bp, Homo sapiens
cttaaagcgccattgagtaaaatttggtcatttctaagatttctgttctagaactgtttccgttaccataacttttccttcaaaagccaactcacactcctttcaccatggctgaagtccat

SEQ ID NO: 372505 - DNA, 122 bp, Homo sapiens
ctgattctgtcacagcatcgcagcctccatccaaaggccctcaagctcctgcaggctatgcgaacgtggccacccattccacgttggtactgaccgcccagacatataatgcctctcctgtg

SEQ ID NO: 372506 - DNA, 122 bp, Homo sapiens
ctggctgacggattaacaggacatttcaatgatcgttgcctcgtaggagcaaatgtggtccggtgcgatgcgaggaaactacgtcctaatttctctatcaggggcttgcacaaggctgtttt

SEQ ID NO: 372507 - DNA, 122 bp, Homo sapiens
gtggacgcagccgggggcctcaccatcagcataagcgaccacggtgggcttcagaaggagcgatgagacaggattcaccccattgccatttgcttttctatcggatcaggaagaagcatggg

SEQ ID NO: 372508 - DNA, 122 bp, Homo sapiens
gccaagtgggaatggggttgggggctgggctccaggattccaaggcctgctaaacctggtcgccaaaccctgcttccctcccgcccaactctccggctctccgccagccacctggtgagccc

SEQ ID NO: 372509 - DNA, 122 bp, Homo sapiens
cctcaagagccgccgtttgaatctgcgcacgcggccctgaacctcattggctgtgggggccgcacgcgaagaagcgagggcggggaggggagagcgcgcgcggctgagggcggggctgggga

SEQ ID NO: 372510 - DNA, 122 bp, Homo sapiens
ccctgtctcccgctccactctgacctcacccctgagtccagggctgaacgcacgctcctccgtggcccccgcttccaccccgtgcatgtggggggcttctgctccgctccctcctgttccgg

SEQ ID NO: 372511 - DNA, 122 bp, Homo sapiens
ctactggggttatgtaaaactccttgtgtgccttggcaggtggccctgggaactcaactgcgttatccttgtagtaagcactcaagcagggtgaaatgaagagtcaattctgctgaataact

SEQ ID NO: 372512 - DNA, 122 bp, Homo sapiens
gggagcgggcggtgggggggcttctgggagcgacggacccggcagctgcagagcccagtgcggctgagtggggggagggaggagggacccccctcagaggctccacgcggaggcctgggaga

SEQ ID NO: 372513 - DNA, 122 bp, Homo sapiens
cagccgggaggaccagaacaatgagctgtcactgtctgcagcatgtaaaaactcatggcacgcgggggcctccctcttctcccggatctctctctctcttcttgacgtgaccgtgcttccca

SEQ ID NO: 372514 - DNA, 122 bp, Homo sapiens
cacttcgcaggtttcacgtatcttaaatggtggttaatgttgttcaatgaaatgagatcacgtgaagtggggaaaagactgaaaaccacagaagcccgcgcaaactttactgttttaactgt

SEQ ID NO: 372515 - DNA, 122 bp, Homo sapiens
ccctggccgccctcgccacgtgccgaggacacagggcacagtgtcgggcgtgtcaagcgtcgaggcctccctacagagcaggtctgcccacctgctttcttggcactcgtgggcatctaaga

SEQ ID NO: 372516 - DNA, 122 bp, Homo sapiens
ggcctgaacaaggagagatgaaataggaagggataaatttaggcatggagttttcatttccgtctcttggggctgctgggatctgcacagcaagcatttttcttgctacagtttaagaaaaa

SEQ ID NO: 372517 - DNA, 122 bp, Homo sapiens
taggggccgaggcgaggtgtgggtggggcgggacgccgctgtggaggcggggcctgggcgcggacgggcgcggagcgaggcaccgcaccgccggggcggggagtgggcggggctcgggggcg

SEQ ID NO: 372518 - DNA, 122 bp, Homo sapiens
tggtatgaatccttgtctgtgctgtactataagtcaaatttgagataccagaactatttccggaagctgttatgaggtagatagtactggctgtataaagttaccactcccttaaaactttt

SEQ ID NO: 372519 - DNA, 122 bp, Homo sapiens
caatctttcacatcttatttattaacaaaaatcaacaatccagctttccttaggtcttcacgcactaagagttctctagtcacagaaatcctagccttgtctgcactctccacaactattat

SEQ ID NO: 372520 - DNA, 122 bp, Homo sapiens
gagtacaattttgatgtcaaaaggtaaacacattttttaaattcctggtgcattttcccacgtggccttccataagatttgtatctttttacattcccatggcaggggatgctgtctcacag

SEQ ID NO: 372521 - DNA, 122 bp, Homo sapiens
gatagcaagtcgtttgagacctgtttcatgccatgagggacaaaccacatcttgaagtggcgtggttgacagttgtgtcaaaaaaataaaacaaggcattatcaaataatcttctgaaattt

SEQ ID NO: 372522 - DNA, 122 bp, Homo sapiens
cttattggaggcgggcttgagagctgcggccagggaggtgcggagcagcttcggaggcagcggccgaaccaaccgagtcggaccctgaccctcaaacctggtaattttccacttgttcatta

SEQ ID NO: 372523 - DNA, 122 bp, Homo sapiens
gggctccgcggcttggcctgccttttggggatggggctgtccgaggggctgggcccggatcgccggaggggccagggtctcctgcacaggagtgagcccccacgttccccatacctgtcctg

SEQ ID NO: 372524 - DNA, 122 bp, Homo sapiens
tcctcacttctcagacagggcagccgggcacagaggctcctcacctcccagacggggtggcggttgggcagagacactcctcagttcccagacggggtcgcagccgggcagaggcgctcccc

SEQ ID NO: 372525 - DNA, 122 bp, Homo sapiens
gttcccagatatgtcatcaggcccctttaagaagttctctttcctctatgttgttctacgcgcctcatccacctcactagtcaggaggtccttgatgataaaaccccccgtgtgatttgtct

SEQ ID NO: 372526 - DNA, 122 bp, Homo sapiens
aggtactgggtgcatctcactggggattgttggccagtgggtgcaggacagtcggtgcagcgcaccgagcgtgagccgaagtagggcaaggcatcgtgtcacccgggaagtgcaacgggtca

SEQ ID NO: 372527 - DNA, 122 bp, Homo sapiens
catggcagatataaaacatggcaggtcagtggccggctctggcctcagccccatggcccacgttttgtgccttttcctccgggcgcgtctctgtgctccgtgaatgttacgtgaaagaaagt

SEQ ID NO: 372528 - DNA, 122 bp, Homo sapiens
tggaaaagaatgcagaaatgcccccctaaggctgaatgagcaccacttccacactcagggcgggggaggccgggggacgtgggagcggcgcgccaggagcgaggcgtccctggtgacagcgc

SEQ ID NO: 372529 - DNA, 122 bp, Homo sapiens
gatggcacttatgccaaacagcacatcttctgttttggaggcatctaaagaaggatatctcgtcatttccttggtggggttttctgcctgctttataatccctcagatttacccacgtcagt

SEQ ID NO: 372530 - DNA, 122 bp, Homo sapiens
gtaagaagacgcaaataagcatggcacatcttctgaagatcaactaaatatttacctcaacgtctcgccgggcaaggctccacctccagagtccaccaccgcgacgcggagaacagcaggag

SEQ ID NO: 372531 - DNA, 122 bp, Homo sapiens
gctgcgccctccctcggcccgccgctcggagacgccccgccccgccccaccccgcccccgcgcccacgtgactagcataggcccgcccccgctccgccccccgccacagactccgcctccgg

SEQ ID NO: 372532 - DNA, 122 bp, Homo sapiens
gaagatgctgggttttgcaaactcacatgaacatcagacatttcctgtagcagcaatgaacgacagcacctcttatcctagcattcagtgacgagggcttaaagtccgctgggtgggagccc

SEQ ID NO: 372533 - DNA, 122 bp, Homo sapiens
gagctccgggattgccggcattcccgcttctgctggttgcttcatgctgcaggctgcggccgtcagccctcgctcgcattggtggcgctgaggtgccggggcagcaagtgacatgtcgtcgg

SEQ ID NO: 372534 - DNA, 122 bp, Homo sapiens
gctgccagggatctggggggcagccttgtggcttctggtcgacttgggatctgctcatgtcgggccatgtggcccggggaatgccgtttcctccctggagctctgtcctcatctgtgacatg

SEQ ID NO: 372535 - DNA, 122 bp, Homo sapiens
tatatgtattgaataatcatccctgacctctaggtatttaaaatctattcaggagatggccggctgcggtggctcacacctgtaatcctagcacttcgggaggctgaggcgggtggattgcc

SEQ ID NO: 372536 - DNA, 122 bp, Homo sapiens
tgatgttgatctttctgtgagactctggaagtggagatagctttgggtttattgggcgttcgatgttggggattggatggcctggctcagagatgttgaaatgtccccgacctgaaggctct

SEQ ID NO: 372537 - DNA, 122 bp, Homo sapiens
tgccataggcccagtgcgggtgggcgccgcggccccgcctcgccgagcggcggcggctgccgggctccgggagcgcttgatttattaagctaatgttctagcacattttctccatcccgtaa

SEQ ID NO: 372538 - DNA, 122 bp, Homo sapiens
aaggagacctcatttgaaaatagggtctctgtgggtgtgatctagttaaaatgaggtcctcggggtgggcccaatgcaacgtgacttctaagaagggaagagacacagccacacaaagggag

SEQ ID NO: 372539 - DNA, 122 bp, Homo sapiens
ctctaaaacccactgcagacatgaagagccacagccgggggggactcacccaaggtcacacggttaatcctccatgttccggagattaaagcaaactccatggctctcagtctcgtctgaaa

SEQ ID NO: 372540 - DNA, 122 bp, Homo sapiens
ggagaaccaggctgcccagatccaacaatgtccctgcacgattcctgacaggtaactccccgtctctgggccttctttccccctacgtgtacaataaggctttgacaatgaaggcttctaat

SEQ ID NO: 372541 - DNA, 122 bp, Homo sapiens
ccaggcgcgggccggggccagcgggctgcgctgaccctcccggcgccgcggccatgtccccgccctgtcagccctcccgccggtcccactggtcccgcctgtcccgccgtcccctccctgga

SEQ ID NO: 372542 - DNA, 122 bp, Homo sapiens
aaagcacctggggcccacctggacaaagcacaaaccatgcaatgagggacagcaacacaacggctgtgactggttgtacttttggtcccccatttacacaaagcacctgaggcccacctggc

SEQ ID NO: 372543 - DNA, 122 bp, Homo sapiens
cgcgggagctctcggggcgagggcggtgcgcagcggtgcgggggcagaggtgatgctgggcggggcggggcggcacggggagggagcgggcggggcggggccgcgctgctacgtaagcagcc

SEQ ID NO: 372544 - DNA, 122 bp, Homo sapiens
tcctacccctccatagaaagccaaattcaactgggacccggaaaccgtggggatgatccacggttccttcttttggggctacatcatcactcagattccgggaggctacatcgcgtctcggc

SEQ ID NO: 372545 - DNA, 122 bp, Homo sapiens
cccctaaccccttcttccaaatatactctgttgtctcttgtcttttattcccgtgttgcccgcctttgttcagtccagtaggtccccaacaatgtcctgagggtatgaatcctgaaagacta

SEQ ID NO: 372546 - DNA, 122 bp, Homo sapiens
ctcgctcccgcagctcctctggtacccgccctcgtacctggcgcatctgggcctcggcggcgccgccctcctgccttcgcagctgctcccggaagcgcgcaacctgctccagcagcgcgtcc

SEQ ID NO: 372547 - DNA, 122 bp, Homo sapiens
ggccgggagaggagcggctgcaggctggagagggctcgcagccgggctcggagctggggccgtctgacgggctggtgcccacagggtcgttgccgccacccaccggcaagtcgcagacccgg

SEQ ID NO: 372548 - DNA, 122 bp, Homo sapiens
gtcagctaaggtaaccatttaatgcctgacaacaagtgagtcaagaacactacaaagaaccggatggacagcacttttatttgatgaatgacctgaactacaaaccgagcagacctcaatat

SEQ ID NO: 372549 - DNA, 122 bp, Homo sapiens
atcgctggcgtgaacccagcggccccgtgctctccgggtatccctggatcgaggcgcacgcgttgttgcaaagtctcgcacttagggattagaatgtgcctttgcgtttcgttttgttttgc

SEQ ID NO: 372550 - DNA, 122 bp, Homo sapiens
gcgccgcacctgcgtgtagctccagatggtcccgggcaggcggccgtagtgctgcgggtgcgagccgccgccggggggcaggccgcccagggccacggcattggcgttggcgccggccgccg

SEQ ID NO: 372551 - DNA, 122 bp, Homo sapiens
ggcacgtgtcctcagggccagcatccaacgtggaaggaacgtgtcctgggctttctctgtcgcttgctgcataatgctcagaggacaccaaacaaacctcaagcggttctgttggatcatgt

SEQ ID NO: 372552 - DNA, 122 bp, Homo sapiens
cggtcctgcagccccaagtgagccgctgggtggccttgcccgcaggctttctacatgatccggttccactccttctacccctggcacacgggccgcgactaccagcagctgtgcagccagca

SEQ ID NO: 372553 - DNA, 122 bp, Homo sapiens
tgcttcccaaactatactcatagtcctgcccagaggacagcgcggccgccagggagcacccgctgtactccaggccccaggagtcttccaaaaaccacggtggagtctgggaagcctgactt

SEQ ID NO: 372554 - DNA, 122 bp, Homo sapiens
tgaaaagcttttccatctgtagattgtcccgatggaaggcaagcagcgccggggagggagcgggtatccagagaaaacctgggatgcccagttacatctgaattccagaagaatcattttca

SEQ ID NO: 372555 - DNA, 122 bp, Homo sapiens
ttttttcttttttttttttttacatacttaagctaactcaatgcaggtttattatcctggcgacttgcagtcacattctaatgattttcaagggccaaaatatagtaataatcatttgaaat

SEQ ID NO: 372556 - DNA, 122 bp, Homo sapiens
aatgattatctccctggggcgtgttgcagtgagttggcccaaagcataactgaccctggccgtgatccagagacctgccccctgacgtcagtggcgagcctccctgggtgcagctgaggggc

SEQ ID NO: 372557 - DNA, 122 bp, Homo sapiens
gcggtttcattcttccccatcctttacttttggatctgttccctggagcatggggaatgccgggtgtcttatttcttgaagctgaaatttcctgatattgtgtacagacccccacccgcctg

SEQ ID NO: 372558 - DNA, 122 bp, Homo sapiens
tgacccggcgggccttgacccagaagctgggccctggcggcggatctggacgtggtgagccggaccgggggcaggtggcaaacttcacggctgggggtcggggctcctgggcttccctgcca

SEQ ID NO: 372559 - DNA, 122 bp, Homo sapiens
ataaactgctggttagaaaacctggccaaaaattaccaaaaaaatgagactaaaggggaacgttttaggcaatctaggaaactattggataagaattttgaattaatgggaatttgaccact

SEQ ID NO: 372560 - DNA, 122 bp, Homo sapiens
atttatttgtttattatttgtctcttgttccatgttgaatggccaccatcagatatataccgaaacaaaaaaacagagctaaacaaaaatcagcaaatttactgggtggataaatgaaaggt

SEQ ID NO: 372561 - DNA, 122 bp, Homo sapiens
gctgtcggcgtccgggaagcctggcagcaccatctctccgtcggatttggttgcgctggtcgccgacaggaccctgggctcccgggtactgggtggcgccattttttcagcctgcacggctc

SEQ ID NO: 372562 - DNA, 122 bp, Homo sapiens
gcggctgcgcgaggatgcgcggtgcccggtgtgcctggatttcctgcaggagccggtcagcgtggactgcggccacagcttctgcctcaggtgcatctccgagttctgcgagaagtcggacg

SEQ ID NO: 372563 - DNA, 122 bp, Homo sapiens
cacgatttagaaaacattaagcaataaaatatatataattaaatgtgatagagggggactcgctgcaaaagggcatgaggaagcttttggcataacagaaatgtttttcattttgattgtgg

SEQ ID NO: 372564 - DNA, 122 bp, Homo sapiens
aaagaatgcatgttttgtgaagaaaaatggacagattcataaatatatgtgaagtgagaacgcaggaaaggaagattataagcccctagagagagactgaaatgaattcaatgacagaagag

SEQ ID NO: 372565 - DNA, 122 bp, Homo sapiens
cgagtgcgccatgtttcagcggagcggcgtgtgggagaagccacgtcgtgttgcacacgtcggagttgaatgcatttgtaaatcactaagtcaagtaggctggctgcactgttcacatttgt

SEQ ID NO: 372566 - DNA, 122 bp, Homo sapiens
ctggcctggcctcctccctttcctcactgacccgtgtgtctgagatcctggctcgtcttccgctgggaatgactatttaagagcctgtgctccgtggtcaagattaagctggctttgaatct

SEQ ID NO: 372567 - DNA, 122 bp, Homo sapiens
ttgccttgcactccgcgtgcattggccacacatcctcgcctcctccacccgctccgccgccggttttcttggaagttaaatcttggaggatttgtccacaccttaagagaagaaaatccacg

SEQ ID NO: 372568 - DNA, 122 bp, Homo sapiens
taccccatctctactaccaccgtgctagtccaagccaccatcactttctgcttgggatagcgtgattgtgaactggtccatacttgtctactctagcctacagttctaatctcctcccttcc

SEQ ID NO: 372569 - DNA, 122 bp, Homo sapiens
tttatggccggtggccacttcttgcagaaatacagagtggacctcggtgatcttttaatccgtgctcataaccatattgcaaatgagattatgacaaacaccggagactgacagggccctaa

SEQ ID NO: 372570 - DNA, 122 bp, Homo sapiens
cagacctgagaggaggaggtggctgagctgcaggggaaggaaatagggttccctgcagcacggcagagatgagctttgcttttatcagcagggctgtgggcagtgaattagaacaggagggg

SEQ ID NO: 372571 - DNA, 122 bp, Homo sapiens
aggatttccacctggctaagctgagtgcctctcgggactccgggtaccagttcccgcaggcgggagtagcagtggttcatgtcgtccagcaagctcagcggctcctcagctgccgggccctt

SEQ ID NO: 372572 - DNA, 122 bp, Homo sapiens
agtcgccccgccgcggccactctcctaacacgggcagagggggcagcgacgtgccccggtcgctcagccagctggtggcagggctgtgacggcaacccaggcccccagacgcctctccgcgt

SEQ ID NO: 372573 - DNA, 122 bp, Homo sapiens
atctgcccaagcaccccagcgcgggagaaacgttctcactcgctctctgctcgctgcgggcgctccccgccctctgctgccagaaccttggggatgtgcctagacccggcgcagcacacgtc

SEQ ID NO: 372574 - DNA, 122 bp, Homo sapiens
ctcccagcgcgggattctggagggaaattgagggagacttggaaaccgcgccaggcccaacgggtacctagaagggagacaaagccaggcctgctgcccagtttgagctctgggaagaagag

SEQ ID NO: 372575 - DNA, 122 bp, Homo sapiens
aaaagtaatagaaggtatttctaaaatgtattatgtccagtaggacctcattgttgaggccgccacaaatccttaaccatttattttgcttaaacttctaatgattgcttttcaagctttca

SEQ ID NO: 372576 - DNA, 122 bp, Homo sapiens
tccccgcccaccagtgacggggcgtgctcggccccccttcctcatgacagctggtgaccccgctgcccttccggctttgtaatggcagaaacacaaggaccagagagggaagaggagaaggc

SEQ ID NO: 372577 - DNA, 122 bp, Homo sapiens
accagaatagggaccttcagaatgttggtagcagtccccaaagacccagaggcccagagtcgggagagaagagcattgggaaggaagcccatgagaggttgttgggttttgggtgcaatgca

SEQ ID NO: 372578 - DNA, 122 bp, Homo sapiens
tgtaatcccagcgcgccaccacgctgggggacggagtaagactcagtctcaaaggcatgacgaaaatagcaaaaatgctttagtgttatacctgttacgaatttaatggaaattacaagtag

SEQ ID NO: 372579 - DNA, 122 bp, Homo sapiens
atcaatgtgttgaaattattactatcttcatggtgacaacatttaattgtcacatgacttcggtctcacacctacccccaagggaacagaagaagatgacaagggcaaaattccaaattatc

SEQ ID NO: 372580 - DNA, 122 bp, Homo sapiens
gctggtctagaactccgcctctgcctcccaaagtgctgagattataggcgtgagtcaccgcgccaagatatcttctatttgggaacattttgttgtcaagtatccagctgggtacttcggga

SEQ ID NO: 372581 - DNA, 122 bp, Homo sapiens
ctccggctgctgcccaaatcaggggtcgtggacaaaggatgcctggggcctgcggccctacgccaggaccccgcgccgaatactctgattcttcgggctccctccaagggagtcccaaagac

SEQ ID NO: 372582 - DNA, 122 bp, Homo sapiens
tgcgacgcatgcgttcagcctccaagaaagtggcaaatacggctgcgcgaattggcggcccggccctccttggtcacgtgttgggagacagcggcgtggcggcggcggtggcggtagcgacg

SEQ ID NO: 372583 - DNA, 122 bp, Homo sapiens
ctgctttttgagaagggcagcatctgccggggagatagccccgtagtgtctgtttctgagcgggagaaatattaaagaaacctaaggaggatggatggctttccggggacctttaaacctcc

SEQ ID NO: 372584 - DNA, 122 bp, Homo sapiens
gtcctgggggagggagggtgctggtctgcatcaacccctcccccgggaccagccccagcccgaccaggctggccccgccatcccctcagggccactcaggtctcagtaagtgcccccctcca

SEQ ID NO: 372585 - DNA, 122 bp, Homo sapiens
cccaccagcaggcaccgggcgcctagcgggacccgcgggcggaactgcctttggaagacgcgtgagaactccaccccatcgcggcaggggacagttattatctccgagcttgaggtgagggg

SEQ ID NO: 372586 - DNA, 122 bp, Homo sapiens
ggacctcacctcctcaggcgccttgacgacgtgcctctcccagtctatctgtttgttgagcggattgtagagaaaggccgggcgagtcacgctcctaaacagctcgtcaggtcccgggagcc

SEQ ID NO: 372587 - DNA, 122 bp, Homo sapiens
ccagcccaccctagttcgggcgccagagcaacgcagttccgagggcagatctccaaggggcggaggcagagccgcgggtgagaggcttccgcgccgacttcgggtttgcactccccggagcc

SEQ ID NO: 372588 - DNA, 122 bp, Homo sapiens
gcgcatttctcacacggcagggagggccacacgcgtttgtttctcacacgatgggcagggcgacacatgtttgtttctcacacggcggggagggcgacgggcatttctcacagggcgctccc

SEQ ID NO: 372589 - DNA, 122 bp, Homo sapiens
ggaagtggaaatctcgggcattcaccgtttgggtgaagacggaggcgggttctggacagacgtaggctgtcagggagtgtttacttcgcctccacttctgttcctccctgccctggtgctgc

SEQ ID NO: 372590 - DNA, 122 bp, Homo sapiens
ccacgagcccctcaaactcttgggccactgggaagtttccaggttcttcttatcccaaggcgtgaggaagaagtttgtgatctcagtcgtctgtcttgggtcccagacctccctgtgcagct

SEQ ID NO: 372591 - DNA, 122 bp, Homo sapiens
ctccctcgccccctttgtcctgctccatctctgcagatgggaaaaccagatgcggcggggcgggggaggggatcggcttttgcggttcacccctgcagaggagccccccgcgccgcccccgg

SEQ ID NO: 372592 - DNA, 122 bp, Homo sapiens
caataaaagcttgcactcattctccaagcccacgtgtgatccaattcttgcagtataccacggcaagaaaccccgggatactgaaagccgtctgtgcttgcgataaggcagggggtctattt

SEQ ID NO: 372593 - DNA, 122 bp, Homo sapiens
gagagagtgtgacaactgcctgaccatcacctgatggtcgcctgacattcctggtggggtcgggggagacctctcctgccatgctcaagcctgactagccacctcctgcagcgtacctcatg

SEQ ID NO: 372594 - DNA, 122 bp, Homo sapiens
ctcactctctcatatttcaaaaacgaaacactgtttagttatctcaaatgaaaagtgcctcgaggacaaggaaccaggacttggagttttatcacccacagtgttcaggtagcccagtatcc

SEQ ID NO: 372595 - DNA, 122 bp, Homo sapiens
tttgtggtactaggtaaaaagcacattcatcatggcatgggagaatcagaccttcaactccgacttcatcctccttggaatcttcaatcacagcccaccacacacgttcctcttctttctgg

SEQ ID NO: 372596 - DNA, 122 bp, Homo sapiens
acctccagcaagaggagagctgacagcctgcaacaatgccctcctttcttctcccagggccggtgttttgatagtgtcaggttacaccccagcctccccttggcccatttataaacctgaca

SEQ ID NO: 372597 - DNA, 122 bp, Homo sapiens
aacccgttctcctctagccacccaagatgccaataggaaagaaggctaagggaaagaaggcggcccccgcccctgctatcagtgaagaagcaggaagccaaaaaagttgtgaatcctctgtt

SEQ ID NO: 372598 - DNA, 122 bp, Homo sapiens
gaagttccccctcgtttcgcttccgggtcggttgttcttgccactcacccgtacccccaacgcccacttgttctgtctaggaaaatgggaggtcctcgcctctctgtggtttgctgactcag

SEQ ID NO: 372599 - DNA, 122 bp, Homo sapiens
agaaggtgggaggagccgagaggaagggaagacccccctgagcaacgtgagaccaaggctcgtgagacctacactgccttgtaggtctctggggtctgtggctttgagttcggcagcatttc

SEQ ID NO: 372600 - DNA, 122 bp, Homo sapiens
ctttatcgatgagccctcctcacatctccacccgcgggctctctgaccatgtgtccatgtcgcactcaacacccttgataaatcagcgctgtgaaacactgccaggaaaggcgtcatcagaa

SEQ ID NO: 372601 - DNA, 122 bp, Homo sapiens
gtgagtgttggtgccggagtttctgaggccctggctgcctggaaacatgcactggtgtctcgtcctttgcctccagtgcccctgtcctcagacctcacataccgccaaagtctggccatgga

SEQ ID NO: 372602 - DNA, 122 bp, Homo sapiens
gtgttcctgctcatcctacactactgtcccagcgaccccagtgacaaatactggactgggcgatgtgatgcgatgtataagtggcacaccttcgtggaatttacagtctcactgggattaca

SEQ ID NO: 372603 - DNA, 122 bp, Homo sapiens
tttgattctgacgggggctaaagatagcctctttttatgactttctctactgcccccgaacgaatgccttgctgggctgctggatctgggttccgcaaagtttgttttttgtctcactgccc

SEQ ID NO: 372604 - DNA, 122 bp, Homo sapiens
tgtgtccccttctccggaggaatgggaatagacctgggagaaaagacgcctgggacgtgtcgcggggctcccgcgaagtttcccgctacccaagcgccagaatgcccctaggggtgagagtg

SEQ ID NO: 372605 - DNA, 122 bp, Homo sapiens
tagggtattgttagtgccttgaaatggccaagagggattgctgactctgcgaatatcactcgaaaggcaggaattctatttgaattactaacataacagatgtttgctaggctccaccatgc

SEQ ID NO: 372606 - DNA, 122 bp, Homo sapiens
cagagacgggggatgcagccacaagccaagaatgtctggccaccaccagaagctggaagacgcagaaaggatccttccctggagccttcagagagtgtgtggcccacggagaacttgatctt

SEQ ID NO: 372607 - DNA, 122 bp, Homo sapiens
gacattacattaaagataaaagctaagtgtgtctttttttttttttttttttttttttaacgaattcagttctttctgccgggctgcagtggctcaggcctgtaatcccagcactttgggaa

SEQ ID NO: 372608 - DNA, 122 bp, Homo sapiens
ttaggtcagctggccaggttagccctaggaagcaaccccattaagtctaagatgcccagtcgggactggggaaatcccacctcgagaaccaatttagcagatatcacctccctctggacacc

SEQ ID NO: 372609 - DNA, 122 bp, Homo sapiens
gccccggcctcctttctcctattggtgccagacagccccatgggtcctcgggtgggatggcgctgtccacattccaccgcgctggaagccccatggggacgccgtcaagggaacggcccgca

SEQ ID NO: 372610 - DNA, 122 bp, Homo sapiens
tggggtttgttcccctcttatcacagactgctctggttctcagcctctgtggtggagccgcgcggccacccagcacttccgagtgggcagtttctccctccaaggccgcatctgcatctcat

SEQ ID NO: 372611 - DNA, 122 bp, Homo sapiens
gcttgcaacccgcaatgagcatagagtatttcttttctgaggggggtcgtctagagtgtccgtgaagggaacaggcacgcgaggctggtggaaaaagcgggtgctttgactcttagctggaa

SEQ ID NO: 372612 - DNA, 122 bp, Homo sapiens
ttccacgccaagcaaccagcctgttgtcagtcgctaggcaaaaagataaattttaaaattcgcgagagttgcttccactctcgtgagacctcctgcgcgttaagcctcacccgcgaaggctc

SEQ ID NO: 372613 - DNA, 122 bp, Homo sapiens
taaaagaaaattgtattaaagcctactttaaacttgtttcttaggttcgtcctgataatacggaaggaaaaaagtttccttcctacttcctctcttccttttttttttaaacacaagcaaac

SEQ ID NO: 372614 - DNA, 122 bp, Homo sapiens
tgacgatgatttgttgtagctgaggcgaacggggcgaggctgtgaggacgggttttggagcgccgctcggccgtcctcaaaactttggacacaccctccgtttctgtcagtcaagagttctt

SEQ ID NO: 372615 - DNA, 122 bp, Homo sapiens
cttccaggcacggcaccccagaactacggaaacagtactcaggaatcaagagtggccaaacgctgccaatgggagataggaaactcgttgatcattggtagagaaactcggcacaacgccga

SEQ ID NO: 372616 - DNA, 122 bp, Homo sapiens
gggctctgggtccctgtgaccctgggggatgctcctcaaatcctgagtagtcccatgtgacgtccagcagaagcccccccgagcatccttctgggcactgccccatccccttccagacggcc

SEQ ID NO: 372617 - DNA, 122 bp, Homo sapiens
ggaggctccatgaaactgcctttataactcactcctcagttgttaaatgaacaggctacacgttgtctccaaaagtggcagcgctttccaagaaggagcatgattctctgcaaacgtgcaga

SEQ ID NO: 372618 - DNA, 122 bp, Homo sapiens
gaatatgttatttgtgtcaactgattatacagatacaaaaaagggatgttatggaccaggcgttttattggagcacagcacagtggcatgtgtattgttttccaaattttatagatgaggca

SEQ ID NO: 372619 - DNA, 122 bp, Homo sapiens
atcagtgaattttcagctgacacctcgccttggggcccatgggatcattctgggatgcagcgaggccctgccttcctagcagatgtggtgagcccatcctttctcacccggaggggtccaaa

SEQ ID NO: 372620 - DNA, 122 bp, Homo sapiens
tttaaacttcttaacaaccacggcttcgagacgatccagggtttcatctattaaatcctccgtgggcctgagacacctgagtgctcattactctgtggtttgggaagctctcttaagaacaa

SEQ ID NO: 372621 - DNA, 122 bp, Homo sapiens
gaacgcaggcgcggaagatgtaatttgtgcattaggaagcctccgctcgagcgccactgacgtctgcacctccgtgcttggctctgctgcaatacatcagactgatggcatgatcactgcat

SEQ ID NO: 372622 - DNA, 122 bp, Homo sapiens
tgataatcggaaacaaaagccaagtgtctttgttgtttgtgtgtttgatgctgagtttcccgggcagcaggactgggaggttgagtgggggttttggctcagaccgggagcagagcggcggg

SEQ ID NO: 372623 - DNA, 122 bp, Homo sapiens
ctaccgaaggcgccgcgcgctgacctcacaaacacggcttctcctggtacgggctggttacgccctccagctgcgccccctacacgacgacagacgcgtcccccagcccttctcctgtccta

SEQ ID NO: 372624 - DNA, 122 bp, Homo sapiens
tttggctcagatgtctcaagtgccagaccgtgatggtaaaaatgtcattattttacatcacgaaaatagagaagagagacaataaaatgcgtcaaaattcagtgggttccttcaactgaggc

SEQ ID NO: 372625 - DNA, 122 bp, Homo sapiens
acgggcgccgagaccgagggagagcgcggcccctgtagagaacagacagccccaggcatgcgtgcacgggcgccgagaccgggggagagcgcagcccctgtaggagacagccccaggcatac

SEQ ID NO: 372626 - DNA, 122 bp, Homo sapiens
tgcgtggagacctttggagggttctcattcatctttgcactttttgcgtgtttgactccacggatgtgcatcaccacggcgctgcgctctgcacggaaaccttgaacttcctcaaaaaatga

SEQ ID NO: 372627 - DNA, 122 bp, Homo sapiens
cttttagacaccatctgcaggtggccacgtctgggctgtgagtcaaagctacaggtgatccgtgagaaggaggaagtgggtttggcgctgtgcgatcacctccatatgcttgcggggaagac

SEQ ID NO: 372628 - DNA, 122 bp, Homo sapiens
tttttggagacgtgagtgctgagcattttttcttcagtgaagtgacttggcagccaaaatcgccaacgcccgtctctgtggcgcaatcggttagcgcgttcggctgttaaccgaaaggttgg

SEQ ID NO: 372629 - DNA, 122 bp, Homo sapiens
gctgggctccagctggccctggcttctgcaactgcgcagtcggcgctgtgacgcccggcgcggctctgtgacgtcacgaatcggtcctctgtaagaggggagggcattcttctccaggggag

SEQ ID NO: 372630 - DNA, 122 bp, Homo sapiens
ttattgtattacagtcgcaggagaatttagctaatgtttattaagcatcactttatgccacgggctgtagtttgcactttgtacgttcttaatgcagggagtagacatccactcttagaact

SEQ ID NO: 372631 - DNA, 122 bp, Homo sapiens
gaccccgagatctcttctcgttttagatcgcgagccccctccccttgcagtcagacctcccgttaatttcgttcccagtgtgcctttagttcgctcctcatttgctggtccaccttaattga

SEQ ID NO: 372632 - DNA, 122 bp, Homo sapiens
aaaagagaaactcaagtgcaagaaaacgagatagatgatataagaatggacatacaatttcgtctggtttcagaaatacgcagcccagacaaaagaacagagccccagagagaaatacgata

SEQ ID NO: 372633 - DNA, 122 bp, Homo sapiens
ctgggcaagtctggcctgcgggtctcctgcctgggacttggtgagtgtgggggtcccctccgtcccaccagggaaacaggctgtggggaggccgggcatggactgaactggacaccccttgg

SEQ ID NO: 372634 - DNA, 122 bp, Homo sapiens
ttgggagcaggtagcacattggcgggagacatggatttttgaaaagtacttgatgttgagcgtgggtagtgaggaactgctgggaaggttgcctttcaaaccaaggctcccttttctatggg

SEQ ID NO: 372635 - DNA, 122 bp, Homo sapiens
tttagctagatatatggacgccatgggcctttaagccccttttagaaatactctgtgaaacgttgctagacaacccaccaaaacatataattagtttaaggttgcagtagtagcccagtctg

SEQ ID NO: 372636 - DNA, 122 bp, Homo sapiens
cactcaagcgtgagcaagtggggcttattctggatgacctggaaaccccacgggtgcaatcggaagatgaaataagtgagactgacagtaatgcaacgaggcgggcggcacctcccggggag

SEQ ID NO: 372637 - DNA, 122 bp, Homo sapiens
aggcagaggaggaggagagggaggcggggcgggcaggcccggcccaggagctgggcggcgcgactcacctctgctcccggcctgcggggccagagtagccaggatcccgcgcagctccgacg

SEQ ID NO: 372638 - DNA, 122 bp, Homo sapiens
ggtgagggacgctcgccagacggcccagaggagttagatgacgtcacctccaggaggactcgctttttcattaatgaaaccggccggcgcgggcgcatgcgcggcaggccgccttccctctc

SEQ ID NO: 372639 - DNA, 122 bp, Homo sapiens
actcctgagcccgtgggggtgggtagcctgtggacacaggccgagccctgcaggtcaggccgcttcgtggtccccaggtaggaccgaagccgcttctccgctcttggctgtttggaaggccg

SEQ ID NO: 372640 - DNA, 122 bp, Homo sapiens
ccctaagtcagcctcttcacccagtgagcacaaaactgtattgcccagactcccgggccccgaacgccatacctggcttccgcttccggtggcttctcgttgtgccccgcccgcaagcgccc

SEQ ID NO: 372641 - DNA, 122 bp, Homo sapiens
gggtccagcggactggaggcctcaacgcccgcaatgtggcattaactcttccttgctcgccgggaactcggcttgagctgccagtgaaagtgagcatttagctccagtgaatccgtagcatt

SEQ ID NO: 372642 - DNA, 122 bp, Homo sapiens
tggatcatatagggcagcggcaggatgctgcagccacccttgaaggccaccaggatgtctcgcttggtgctcttgctctccaagttgtgggaggacaccgtgagcagcctcttgcacccatt

SEQ ID NO: 372643 - DNA, 122 bp, Homo sapiens
ccggccccagatatcatttctctggctacctcttttctcgcctggcctggccctctataccgttttttgtttgtttgttttgttttgttttttttctgcaaaacgttttctgctgcaacttt

SEQ ID NO: 372644 - DNA, 122 bp, Homo sapiens
tccctgagatggaacagtgttctgtgtttgccaagggagacagggccaatgctcaggacacgcaggatataggggcatgaggtggcatgttgtggggtttctggtcgatctgcagggcccag

SEQ ID NO: 372645 - DNA, 122 bp, Homo sapiens
agctggattggccacatcccagtgaccccagtactcagcacctggcatagggtatgtgctcgatgcctgtctttgttagactgaacagaactgaaagtgctctgaatggctgggtgcggtgg

SEQ ID NO: 372646 - DNA, 122 bp, Homo sapiens
tgaagcatctacacccgtccacagcagcactggatcgccacacacaacactgtcccctgccggctctacaacccgtcagggagaatctaccaccttccagagctggccaaactcgaaggaca

SEQ ID NO: 372647 - DNA, 122 bp, Homo sapiens
ccctacccgccaccaccaaggcacgggcggagtggctgtgcgctgagtgtgtgccctccccggtgggcaccttcctcatcggccacacacgtgcttccaaggccctgctgaggagtgggcgc

SEQ ID NO: 372648 - DNA, 122 bp, Homo sapiens
cttctgttgggttaacctgaagaagtaatcccagcaagtgtttccaagatgtgcaggcaacgattctgtaaagtactgaagcctcattcaaacagcaatattctagaaaatgtctcaaattc

SEQ ID NO: 372649 - DNA, 122 bp, Homo sapiens
gggctgttgctcccttgtttacagaacaagggctgtccctagagtgactcccagctccagcgttctagaagactgagttagctctgagtgtcatttcaaattctggaaacaaagtaatgact

SEQ ID NO: 372650 - DNA, 122 bp, Homo sapiens
aggctgcttctcggctcctgcaggtaccagtccctggtggccgcctatggtgaggccaagcgacagcgcttcctcagcgagctggcccacttggaggaggatgtccacctggcacgctccca

SEQ ID NO: 372651 - DNA, 122 bp, Homo sapiens
tctgtctgcctgccctctggtggtcctcacaatgctttccacaggctgtaaacaagtactcgtggacagcatgcagagggagatggagagaaataactcacgagagtgtacgactggcccag

SEQ ID NO: 372652 - DNA, 122 bp, Homo sapiens
tccattggtcgtgggtcacacgacgtgaactggggcggtggcagcacgccaggcctctgacgtcccagggctcaagcgcggaggacatgtggaactccactccaaaagcggcggcttgcggc

SEQ ID NO: 372653 - DNA, 122 bp, Homo sapiens
gcgcatcgatccgatcagtgctgggagctggagctccagatggtgggtggcctgcacggacgtgtggacaaagggaggctgtagcatgaaggcggccagcgaggcacgcgcgatgccctttg

SEQ ID NO: 372654 - DNA, 122 bp, Homo sapiens
agcctgttttagtgcttcattgaaggccatggactatgatgggcagtagatggcagtacacgattacaaatcttgggaaactccctctttttccaactccaagcccaaattctgtctttgag

SEQ ID NO: 372655 - DNA, 122 bp, Homo sapiens
gaagccacctgagtctcgcgtggctggccctctctgcacctgagactcccggacagcatccgggttgggggtcctgtggagcagatcccagtctcggcctctagagcctccgcaccatgccc

SEQ ID NO: 372656 - DNA, 122 bp, Homo sapiens
ccggccacggccctgggctccgatgaggccacctctgtgagtgggtgtgtgcctgccggtcgcaggtcgagaatgtcttaatgacttgtgccgcgtgtgcgcgctcgatgagcagagggcct

SEQ ID NO: 372657 - DNA, 122 bp, Homo sapiens
cggagttcatccaaggtctccgtccaagctatgacaagctacatcctcgctcggtgattacgagagacacccctgcagttacctgatggcacaggatggtctgttgcaccagtcgagcgtag

SEQ ID NO: 372658 - DNA, 122 bp, Homo sapiens
tctttctccttaggactgttttaactttaagcaaacagcgtggtgttgtcccagtgcggccggtcgcctgcgggatgctcagggctgcctcagaaacccgccaaggacttcagcctttgtgt

SEQ ID NO: 372659 - DNA, 122 bp, Homo sapiens
gcttaagttcattcattcgctccctagacatttattgggctcctttggtgtgccaggtcccgtatcaggaagcagaacctctgagcctcagcgtctggccagataaataaatggcacatggt

SEQ ID NO: 372660 - DNA, 122 bp, Homo sapiens
taactagccctggcccacaataagggaatttccaagcagagctgggcctgggcttggccccgcccactgggccacactgcctcacactttccccagctcttgttgacccagaaaagtcagac

SEQ ID NO: 372661 - DNA, 122 bp, Homo sapiens
ggagggatccggaaggtggcacggagtgggatcgccgctggggactcgaggcgcagcctgcgccgccgggagcctccctcccagtgggagatgggttgagatgcccccgccaggggggatgc

SEQ ID NO: 372662 - DNA, 122 bp, Homo sapiens
gtagtttgcaaagttgcaagccatcacttttgctttttcctatctgtcagaagggaatcacgtaacccagctcacattcaaggggatagggactgggctctgccgttgaagagggtatcaga

SEQ ID NO: 372663 - DNA, 122 bp, Homo sapiens
aattccttggccaagttcttaacaaggggtgaggatcctaatggtgttcagtgatgaatacgaagaccaactgtgagaaaggacctcagagaagatagtaaacatttgtcaaagttgagtcc

SEQ ID NO: 372664 - DNA, 122 bp, Homo sapiens
ttgtttggataaggaaagtttaatgtaaagactaaactatgatgggagcaactatgaagacgtaaagagaactctacagggtatgtaggactgaggagagtactcaaggaaggacagacttg

SEQ ID NO: 372665 - DNA, 122 bp, Homo sapiens
ggcaatgattgtcctaaggcaaggtgggagagaagtcagagtaaaccacctcgagagcgccggtctcccggagtgtctgggttcgactcctgcctccacaacttactgggtctcctcgaaca

SEQ ID NO: 372666 - DNA, 122 bp, Homo sapiens
actttccaccctaactagaacttccattaaagtcatagtaggattcaaggcagccaaactcgactcacatacgtaaaaaaacttcttaggatgtagaaacccatattctcttcaataaattg

SEQ ID NO: 372667 - DNA, 122 bp, Homo sapiens
gagtgtggtctgggggtccacacacggggtcgtcagcactgcagatacacagcacaggcacggctgcctcatcgacatcccggagcgggtcgttgcggtcccagtaggtatcccagctgatg

SEQ ID NO: 372668 - DNA, 122 bp, Homo sapiens
tgcgatttgatttgcttacgtatccagcctggaaaatcttcatcacagggtccggttcctcgagccagccgggccccaagtcggagggttctccttgaacccagcgagtgggcccaggctcc

SEQ ID NO: 372669 - DNA, 122 bp, Homo sapiens
gctggccactggttctgcagcctggcgagactgcgcttagtccccgcctggagtgcctcccgaaggcctggctggaagctagactcagtccctttgtagtagcagcggtggagcagggacca

SEQ ID NO: 372670 - DNA, 122 bp, Homo sapiens
gggcgcccacctacctcatggtgtgcccgtccagctggcctggcctggtctgcagccctacgctggtctcacctttgatctgtttgtccagtgacctgcccctgcccccagcctccctgact

SEQ ID NO: 372671 - DNA, 122 bp, Homo sapiens
acttctgcacatttttcctcctataaatattgctattggaatattatttggtactgctcccgtgaaagatacatttgcggaatgtactcaaattagaagcatcatgtaaaccctataatgta

SEQ ID NO: 372672 - DNA, 122 bp, Homo sapiens
acagtcccaggagacaaagagccaagaaggaggtgtgcacaggaacccacaaaggctccacggagccctgggccggccagcctaggaccagaggggcagatgctgaccaccaagcagagggg

SEQ ID NO: 372673 - DNA, 122 bp, Homo sapiens
tgtgggtccctgtctttgtgtcctcctgtcactgtggctcctggaccctgcccttcttgtcgcctgtgccctgtgtctggccacgccccgcagtggatggcaagtggcaggcctgggcgtca

SEQ ID NO: 372674 - DNA, 122 bp, Homo sapiens
tacacattcaaagaatacctgtccggagcatgggacctggtagaaaggttaggctctctccgaaggaagttcaactcaggatttccctcccccggtgctgcacacaccatcaacggcaaaac

SEQ ID NO: 372675 - DNA, 122 bp, Homo sapiens
agcctgaaagagagctggccaatgaaacgccgcgttggggcattaccgcatcggtgaggccgcccattggctggcgtgccctgaggcgatggctgcgtttccccggcaccgccccgcgccgg

SEQ ID NO: 372676 - DNA, 122 bp, Homo sapiens
gtctgccctcccacagacaggtcacacagacagttgtgaccatgcatgcagtgagagcaacgtgtccctcctgtgcaaataaggcatggtctgcattcctgaatcatcccagagccacagcc

SEQ ID NO: 372677 - DNA, 122 bp, Homo sapiens
gacaagtccttcgaccccttcactgaggtcatcgtggatggcatcgtggccaatgccttgcgggtcaaggtggggcttgcgggcggctcaggccaggggtgtcctgggggcaggactctcag

SEQ ID NO: 372678 - DNA, 122 bp, Homo sapiens
tctcacttggtcatcagtgtgattatttaatgtctctcctgctacccgtaagggaccattcggagtacagcagaggggctgtgcatagcaggacgccactgccactgagggagttaacagaa

SEQ ID NO: 372679 - DNA, 122 bp, Homo sapiens
gcccctgtaccttcccgggtgtggcagttcagcccgacttgccccaccgaggcgggggagcgttctccttggtcagatggcccctccccagggctgaattgttctcgccctttctgcctgcc

SEQ ID NO: 372680 - DNA, 122 bp, Homo sapiens
tgacccagatccaaagtcatcgactctctagctgctatctctatggtaagttatcacttccggccggaagttgctgacggagctacttccgcccaggggagtgggaagtaagtggagacacg

SEQ ID NO: 372681 - DNA, 122 bp, Homo sapiens
ccgcaggcggcgcgggcgggggccagggcgccgcgtcggacgagcgcaaaagcgccttctcgcagccagcacgctctttctcgcagctgtccccgctggtgctgggccagaagctgggcgcg

SEQ ID NO: 372682 - DNA, 122 bp, Homo sapiens
agctaaaagatctaggaagttgcaaacgttacctgctgatggaaatctgttgtctggcttcgtttcggcagcaaagtgtgggcacaccatcaggggtgctagatttattccatcgggattgc

SEQ ID NO: 372683 - DNA, 122 bp, Homo sapiens
atgattgcattagttcattgaccatccctgagcaacagaaacacaatcatgggtaatcctcggcccctgcctacaagaagcatgggtctagtttagtagcactgccaactggaccgaccatt

SEQ ID NO: 372684 - DNA, 122 bp, Homo sapiens
gtctttcatccatcagtccagccagccagccagccagcaaattttaacacacagaaagtacgaagcaacatatctaacactgggaggggctggggtgtgtttatttgggtatatacaatgag

SEQ ID NO: 372685 - DNA, 122 bp, Homo sapiens
ctgggcggaggtggccacggccgaagccgggactgatgtgcactccagccggggccaacacgagcttccccctgcgcccgagcctctttgcgtgccgctgtctgtcgtcaggggtggcaggg

SEQ ID NO: 372686 - DNA, 122 bp, Homo sapiens
cacccaggcgacatcggtgacttcatcaatgaggtgtgtgcctctcggcagtggggggcccgggcaaggtgtctcctctaaaaattaaattctggtaacacacacagaagccatctccacag

SEQ ID NO: 372687 - DNA, 122 bp, Homo sapiens
tcaatgtggggggcctcaaccacgaagtcctgtggagaacgctggacaggctgcccaggacgcgcctggggaagcttcgagactgcaacacacacgagagcctcctggaagtgtgcgacgac

SEQ ID NO: 372688 - DNA, 122 bp, Homo sapiens
gggtgggttggggctgcccctggcaccacgtcacaggccggccttgtcgctgtagaagggcgtgacatggaacatgtagcagtgggtgcacactcggaccggcttcacctgcccgtagcggg

SEQ ID NO: 372689 - DNA, 122 bp, Homo sapiens
atcgcgcggttgcttctaattctaaaattacaaaatgtccaactgccaggcgagagactacggaagcccagtaagacaggaagggcgggcggggcctgcccgggagaccccaaagcgagaaa

SEQ ID NO: 372690 - DNA, 122 bp, Homo sapiens
gctgagtgggccttgagaacagtgcagagctcattgatgtagacatagagcttggctggccggctccgggcccgagacaggaccctagagaggatgttgcagaactccgccgaggccaaaaa

SEQ ID NO: 372691 - DNA, 122 bp, Homo sapiens
tctgattgggggtttgctttggaaagttctcatgttcctggaggagctgtcctcccctcgcgtgctgataagggatgaaaagaagttctgctggcgtcccagaactgcaagggcaggcgaaa

SEQ ID NO: 372692 - DNA, 122 bp, Homo sapiens
gggttgagttccatggctggcagttaccattggaaacccattcattcataatgcatgactcgaccctccgaattctgaatgccattgagggccagcaaacaaacatgtaggagataatttgc

SEQ ID NO: 372693 - DNA, 122 bp, Homo sapiens
cgaagtggaggacatgatggtgatgggccgcaagccggaccccatgtgtgtcttcacctacgtccagtcgctgtacaaccacctgcgtcgcttcgagtaaagcccctgagcctggattgcca

SEQ ID NO: 372694 - DNA, 122 bp, Homo sapiens
tttagtgattacagccctcttcctttcagggaaaaaacagtttaagcgccgtccattttccgacttggtaaaataatacgaaaccttgggaatagagaagcaacgaaaacatttcacgcagt

SEQ ID NO: 372695 - DNA, 122 bp, Homo sapiens
atagctagaccaagcaaggctggccgatgggagggaggagtctggacgttggtaagtacacgcacattgggaaaagctgttggcaacaaaaactcgcagcggtatttggaaaagttggggag

SEQ ID NO: 372696 - DNA, 122 bp, Homo sapiens
gccgcaccccctcccagcccgcggcgccccggcacccctctccctccccggcgggctccgcggagcattgtactcacatccggggctgggttttgctttaatgcgaaacgtaattaacccgg

SEQ ID NO: 372697 - DNA, 122 bp, Homo sapiens
tcaccatgttgctcaggctgtaatctgcttttaaaggtcaaatttaagctcccgacatagcgattcttaaaatatatatgtgtatatatatacacatatatatatgtgtgtgtgtgtataca

SEQ ID NO: 372698 - DNA, 122 bp, Homo sapiens
ccggtgcgggaggagcccaggacctcgccaactcggcttcacagcgcctcctgggggccgcgaggggactcgccaacctgcctgcaggcgggctccctcctaccgcctccctctgcacccct

SEQ ID NO: 372699 - DNA, 122 bp, Homo sapiens
aggaggcggcccgagtccctgctctgccccggtcccgcagcccttgctgtcgctgaacctcgcggacttcatctgtgcaatgggcaccaaggcttcagcctcgcaagatgccgagaggcaag

SEQ ID NO: 372700 - DNA, 122 bp, Homo sapiens
gcagtagcggcagtagcagtggcagcggtgactgctcctgtgctccctcagtatcttcctcgggctggtccaagatggcggcgctccctgcacagggtttcctgtcaccctcgcaatgggcc

SEQ ID NO: 372701 - DNA, 122 bp, Homo sapiens
attgattttatggctaatacattaaaggaaaaggaagagctttgtaaacagaaggacttacggcttggtaatgtgtgagtattaccttccaaatattgctaaagaatgtatgtgctttagca

SEQ ID NO: 372702 - DNA, 122 bp, Homo sapiens
cgcggtgactaatgtgtgaaggccgctgccaaaatcgggcatggcctggctgcaaaggtgcggacggggtttgttctgctccttcctggatttccatcctgactgtcctcacagaggaaagg

SEQ ID NO: 372703 - DNA, 122 bp, Homo sapiens
gcagcctctccctaagtcttctccaaacgaccacctcacggattccttagtaagtgtatccgaggcctctgcggcgagaggtccatttcagccattctagaagtcagggccggtgggagcag

SEQ ID NO: 372704 - DNA, 122 bp, Homo sapiens
cgcgccgaggcacaagcgcccgcgccgaggcacaagcgcccccgactcaccggctccgcgcgtttccccgcgcgtctcccggacccgcgcctgcccacccctccggctctgctgcggtcgag

SEQ ID NO: 372705 - DNA, 122 bp, Homo sapiens
gggaagtaatattgtgctgagtttcaccgccaaggaggcccctgctccagggtggctaagcggcctcattgtttttgacatttggctggttttcaatttgagggttattataaacccgctgc

SEQ ID NO: 372706 - DNA, 122 bp, Homo sapiens
aagggaaaggatgttatagaaactccagatactacttctcccctccagtggtctgagttgcgcggcgctttcccgcctgtccggtagggcggtgccgcgcagaaagccgcggtccctctgcg

SEQ ID NO: 372707 - DNA, 122 bp, Homo sapiens
tatgcctgtggctgctttcccactataataacagagttgaatagttgtgccagagacctacggcacacaaagcctataatatttactacctggccctttacagaaaaagtttcttgaccctt

SEQ ID NO: 372708 - DNA, 122 bp, Homo sapiens
agcgcgccaagcgcacagcgccgccttccggcagagccctcccaccagccctcaggtacccggacgtcgctcactagacccctccgcaccgtcccctgcccggcccctcttccggggtccca

SEQ ID NO: 372709 - DNA, 122 bp, Homo sapiens
aatccattcgcctttccttagattgtttgattttctcctactggtttgttgttgagcctgcgggcgctggtccccgcgcggcgctgggaagttgcaaagagcgtgggtggagaccctgcagc

SEQ ID NO: 372710 - DNA, 122 bp, Homo sapiens
gatcctcccacctcggcttccaaagtgctcggattacaggtgtgagccaccgtgcccggccgagagtcaaatgttttttaatgtttactaggtactgcgtggcagtcaggcccacagaagat

SEQ ID NO: 372711 - DNA, 122 bp, Homo sapiens
caattagctgctgcaatcgccggcagaaaaatcaccgtcatttcatttcatttcctctgacggtggtggccaccctgtgctaagcagaaatgcttccagcccctcgcactggctgccccttg

SEQ ID NO: 372712 - DNA, 122 bp, Homo sapiens
gtctctacaaaaaaataaaaataaaaaaagaaatcatcttaagagccagtcattaaataccggcctatgaaggtgaccctggtgtagaaagttgggccagaggactacccagataactgtta

SEQ ID NO: 372713 - DNA, 122 bp, Homo sapiens
ccgtctgtgcgcgccctgcgcccccggcacgcgcccccctccaaccgggtgtctgacagccggacagcgggatctgcacagcaagtgaaattcccgtcggatcgataaagccgaaacgctgg

SEQ ID NO: 372714 - DNA, 122 bp, Homo sapiens
gccaggtgcgggttctgggccatcccctcactccctgttcactgccatatgctagctgggcggggttccctcccactcagggtgttctcaatggggcacctacccagcatgcactctccaag

SEQ ID NO: 372715 - DNA, 122 bp, Homo sapiens
ggtgcgggagccgctgcgccccgcgctggggagctactgggggaggcggcgcagcgcagtcgcctggaggagaagttcttggaggagaacatcttgctgctaagaaagcaattggtaggtcg

SEQ ID NO: 372716 - DNA, 122 bp, Homo sapiens
aaccttaaaggctgaaattccacaagccataagcaggtccagtccggtttcctggaggcccggggaggcctcattcccacttttgaagtgcagtccttgtttcttactctcaggcttgtcat

SEQ ID NO: 372717 - DNA, 122 bp, Homo sapiens
aagtgttgacttgctttttctcccccggggcatgtgccacgtcttccaaagtcaaaggaacggatgagtacaaaaagttgctacccttgaagtgttacctatcactatcaaccacagcttgt

SEQ ID NO: 372718 - DNA, 122 bp, Homo sapiens
tgattggccaaaacctgacctggcagggtttggtttgggtgtcttcagatttgcttgtctcgaggtcctcacaattgctctacagctcagagcagcaactgctgaggctgccttgggaagaa

SEQ ID NO: 372719 - DNA, 122 bp, Homo sapiens
ggttggagaggtgagctggggacaggctccagaaggcggaattccaggtcaaagatggggcgtggagaacgtctctctgaactggggttgggggccagagcacagggttctgggatggggcc

SEQ ID NO: 372720 - DNA, 122 bp, Homo sapiens
cgttaatgcataagtaaccttggtcaccaacagatgtgagggcacgtgacgttcgggctgcgccctccccgccccggccctgcacacagtagggccgcaccgcgctttgcaaacaggtggac

SEQ ID NO: 372721 - DNA, 122 bp, Homo sapiens
ggtgcttgctgaaggcaaacggaattcagaatgggtagtcaaagaaggtagtcatcaatacgaactatgaccatgtgaccagctgcagaaaatgaggactgtaattgtcatgagtatttcct

SEQ ID NO: 372722 - DNA, 122 bp, Homo sapiens
gctgatgacagtgttcagcattctacatggagctcaaatcccccaacccctccttttaagcgcttgaaagaattgctcagaaaacttatactacaaatatattttaaaatttagggcttagg

SEQ ID NO: 372723 - DNA, 122 bp, Homo sapiens
gctgttttgcatgtattaactcatttatcctcataactactctgtgaattaggtcatactcgccctgttttacagaagagccagctgaggcctggagagagtaagtgatttcctgaagatta

SEQ ID NO: 372724 - DNA, 122 bp, Homo sapiens
ggcatgggctaggctggggggaggcagcgcccctcctgctggaaaagggaatgcttggcccgtctgaagaaggctccaatgtctctttccagggtaccccaggtgcttcttttccaattcct

SEQ ID NO: 372725 - DNA, 122 bp, Homo sapiens
ggacctttgtttgtctttaaattttgcctagttctcacaagagcctcctctgcttgtacacggctacccaatgaaaatgctgtgttgattaaggtttgagactaaaattcctaaaaaggcaa

SEQ ID NO: 372726 - DNA, 122 bp, Homo sapiens
agtgggttagcaaaaatctctgacatttcatccagcagattgccaactaggcaagattctcgttaaagcctaaacgttgctctctctctctcttattctctctctctctccttattgtttcc

SEQ ID NO: 372727 - DNA, 122 bp, Homo sapiens
ctgggggtcatgtcgaggttccacaccctgccgtgtgcagagagtggcatgcaaacatttcgacaaaggccccagcgagagcaggaagtattttttatggaaagagaaataccttgcaggtg

SEQ ID NO: 372728 - DNA, 122 bp, Homo sapiens
aaagactaaaaaaaaaaaaaagaaaaaaagaaatgaaccaaaaaaccccaacaaattaagcgaactgatccagaaaactggtgggaggatcacttgggcccaggagtttgagaccagcctgg

SEQ ID NO: 372729 - DNA, 122 bp, Homo sapiens
ccacggaccagtaagggttgggaacccctgccctacatggtccatccttccctgaatgaccgtgtcatctggtcaataaccatgcccttttggcagtggtcaactaggagtgaaccctgact

SEQ ID NO: 372730 - DNA, 122 bp, Homo sapiens
gtgttggctccacccacctgcaccgtcaggccttctggaaagagaaggagatccgactgacggagcgtctccaaacttccaagcaaatattacctcgttaaagcccagtgccacatgactga

SEQ ID NO: 372731 - DNA, 122 bp, Homo sapiens
cactgatgtcacctgaccagacggaaatactcctgacgcccctcagtgaccctggaccggcgtctgtctgggcaggaccatctagtgtctgaggtgtcacatgaggatcccagacaaaacac

SEQ ID NO: 372732 - DNA, 122 bp, Homo sapiens
ctgaagtataacttagcaggcattatgcatatcaaaggcaaatgccataaactaacccctcgactaaggctagggaattaggcaggctgagattatgcatgggcctttcccatatatgcatt

SEQ ID NO: 372733 - DNA, 122 bp, Homo sapiens
gctgggcggtcattacacaggtgcgcacagatatggatgaggaggggcgtgagggagccacgtgcagggcagcaagtcctctatatcttgagctgggtggtcattgcacaggtgcgcacaga

SEQ ID NO: 372734 - DNA, 122 bp, Homo sapiens
ggtggggaggtaaaaaacgagaagtcagcacttgagtttaatttcagtggaacactcagccggcgatctgcgcctgccagcacattccttccacacggcgcatgattcagagcatcactcgg

SEQ ID NO: 372735 - DNA, 122 bp, Homo sapiens
ttttttttaagaatcttctgatagagaaaaagactgctttgtcactcaaacatgttccttcgacctttcagtgtgcatgtgactcagtaacttcacatagaatatgattccctaagtatgct

SEQ ID NO: 372736 - DNA, 122 bp, Homo sapiens
tagtctgaattttcaactaattcgggattgaagaatttgtttagaatgctgcgcagcgtgcgccggtcccagtcatcggtcactctgcctccgtaattgcattcgccagtcatgtaccgcag

SEQ ID NO: 372737 - DNA, 122 bp, Homo sapiens
tcctccagccacacgcggcgctcctcggcgaagctggcaccctggcgctcccgggcccgccgctcagccgccagctcggcctgcagccgccccacctcccgccgcagggcccgcgtcccgct

SEQ ID NO: 372738 - DNA, 122 bp, Homo sapiens
aaataaataaaaataaaaataaactggaaccatttggagacctgtctcaatatagggctgcggcaatgtacctgacaaacatgtctaaactgtatcatgagaaaatatcaaacaaaccgaga

SEQ ID NO: 372739 - DNA, 122 bp, Homo sapiens
tgctgctgatttggagatctcccattctgtttcagtgacctcatgccttggactggatgccgctgggtcttttaaagccgcttaatttcctgtgtatttccagcactcagccaaaaagaatg

SEQ ID NO: 372740 - DNA, 122 bp, Homo sapiens
tgctggtttgctcccttatgatcaccagagttactccgtcggtccaaattctttaccttccgaaactgggaaggccatgactcaatgttatatatatagtaaaggctactataaccttcccc

SEQ ID NO: 372741 - DNA, 122 bp, Homo sapiens
ccccggagtggagctccggtccttactcggaaccgtggggcggggagacagtgactgaggcgctccagtcgcaccggggtccggatcatcagacgcgcgccggccaggtctccgcccctcct

SEQ ID NO: 372742 - DNA, 122 bp, Homo sapiens
gccgcgcctgcgcacaaggggagggctccgctactctggccctcagggttgtgtagtttccggggccacggcacctgggcacaccaggtggcgtcgcgcctttgctttcctgagccttctga

SEQ ID NO: 372743 - DNA, 122 bp, Homo sapiens
cagggaatgccaaaggcggagctggtttgggaaatcaagttaaggaatttcactttagaccgtgataacggccagtgttttacactcttttacttgccttgctttacttgaatcttcatgaa

SEQ ID NO: 372744 - DNA, 122 bp, Homo sapiens
cgcgcagtcgccgcttttctcccgggccacccagtcctcggtgccggccccgcgttggcgcgcccccgccccacgccgacccggggccctggcgcagtgccatcaacatcctgcctgatgga

SEQ ID NO: 372745 - DNA, 122 bp, Homo sapiens
acccccgcgcgcgcttgctctgtgtggggggctggcagataggggtgttcctaggggccacgcggggggaagggggtggcggggccggtcttgcgcttcccacgctccatctgttcagttca

SEQ ID NO: 372746 - DNA, 122 bp, Homo sapiens
gctggccaacctctcggtggccatggcggtcatgcccttcatcagtgtcaccgacctcatcgggggcaagtggatctttggacactttttctgtaacgtcttctccatgaatgtcatgtgct

SEQ ID NO: 372747 - DNA, 122 bp, Homo sapiens
cgatcccagtggggcggggtctcagaggaatcggagggtgactcatcacgtgactcgctccggccgcagccccctcggaagctgctaggcggaagtagaagttcagaagagggctaggcgga

SEQ ID NO: 372748 - DNA, 122 bp, Homo sapiens
gtacttttccaggcaggatgcatgccatcagtgggactcagaaccaaccacttggtgcagcgggcccggttcagtcaggggacctcccaccctccccatgactccccacccagggggcagga

SEQ ID NO: 372749 - DNA, 122 bp, Homo sapiens
cataacttgacgcacgacatcaggctggaaggtgccagggggcctctggaaattgcgagccgtaggagatggagtgacttctggggcttggtcctttcgcagagaggggaaggggtctgtct

SEQ ID NO: 372750 - DNA, 122 bp, Homo sapiens
gaggcgggggtagggggcggaacaactgggaaagatactgacaactaaccctggagcccgcgagactccgaatctagtcaaattcctggcagccaatcgggagaagggaggaatctggttag

SEQ ID NO: 372751 - DNA, 122 bp, Homo sapiens
ccgagttccgccgccacagcgtggtgttggtcgtgtggcagttggtgcagcagaggccggcgcggcgggacgaggactgtgggggcgagggagactggagtgagccccgggccgggtgcgcg

SEQ ID NO: 372752 - DNA, 122 bp, Homo sapiens
aaatgggtcatactaggctgagatcatggtgttggccaccttgaaggctgtgttccttctcgtggctgtaggggagagccaccagcttctgcaggccgcccacattccttggctggtggctc

SEQ ID NO: 372753 - DNA, 122 bp, Homo sapiens
ctagtaagtagcaggccttgtcttgtatttcagtagccacgtcaaaacttctgagccaggcgaaatagaaagaggggtcctagggtattttatgcccagggcaacaaacgccaaatgctgac

SEQ ID NO: 372754 - DNA, 122 bp, Homo sapiens
ccccgcccccggcgccggcacgcggacccgaacgaggcgacaaggtcggtcctcccccgccgggccttccccgcgctccccggcgcccccagcccgctgacccccggccaggcaggcccgcg

SEQ ID NO: 372755 - DNA, 122 bp, Homo sapiens
ggatacgtgatgggtggagcaggcgccccctgttctgtcccagcaacctactaagacttccgaacaggaaggtgacacacggcggaggggtgcttgaggggagggggagacgggggagctgt

SEQ ID NO: 372756 - DNA, 122 bp, Homo sapiens
tctttaacacatcacttctactctcctaggacccttccagatctaggagtacaatacaatcgtcaagaagcatgcatgcattttcttctagcaaaagggaagctaaggttacaacctagtta

SEQ ID NO: 372757 - DNA, 122 bp, Homo sapiens
aatgcctgcttcacagagaactgctgcgaggatcacacaagaaaatgcttgtcaactgggcgtggtggcgcatgcctgtaatcccagctactcggagactaagccaggagaatcgcttgaac

SEQ ID NO: 372758 - DNA, 122 bp, Homo sapiens
agagccagtgggcaggagagagacagagagccagaggcagcgtcctcgccaggactcaggcggggccacattatcatgggggtccggcctgcacggacaaaaccaaaacccgatcctcagtg

SEQ ID NO: 372759 - DNA, 122 bp, Homo sapiens
ctgggaaaagggtctgatttacagaaagtctcatatagtcaccccctctcccactagtgccgaagaggctatctgggaagctcatcatccagctcaggaagagatgaaaccaggaggcagga

SEQ ID NO: 372760 - DNA, 122 bp, Homo sapiens
gattcttcgtatttggctctaacagggagggagagggcagggccagggtagaagacatgccggtgggaaggtctattctcagattctcagacacagcagctcccaggtcccatccggaccac

SEQ ID NO: 372761 - DNA, 122 bp, Homo sapiens
ggaactccctgaccccttgcgcttcccaggtgaggcaatgcctcgccctgcttcggcttgcgcatggtgcttgcacccactggcctgcgcccactgtctgggactccctagtgagatgaacc

SEQ ID NO: 372762 - DNA, 122 bp, Homo sapiens
taccaaggatgagaaagcaggcagtagtacatttgaactacaggtttctcatatgctccacgtcatgctgagtttttatagctcctggctttcaaaaagcctgtttcaaagaggtttgcgct

SEQ ID NO: 372763 - DNA, 122 bp, Homo sapiens
atcatgggcagaggatgaggtgggctgaagggaagcccagcctgcatctagctggagccccgcagggaggggcatggtcctgctgaatcccgtagccagtctagacagtaaatgtctggaaa

SEQ ID NO: 372764 - DNA, 122 bp, Homo sapiens
gtacgggaggggccggctgctcctcttcctcctccagccggttctccccagcactctcgtcgtcgtcctcccggaggctccgggatatgctgtcagactcagacagtcctgggaacatcgcc

SEQ ID NO: 372765 - DNA, 122 bp, Homo sapiens
aatgaagacaaacacacctgcaagagttaacagagctacagaagacagatctgataaccacggcaggtagggccctggtgctccaggaatctaggggagggagaaaacagtacgcatgcacc

SEQ ID NO: 372766 - DNA, 122 bp, Homo sapiens
ccgcagggacggtgtcccctgagcacacaggatgcagggaacccgtggtgtccacagggacggtgtctcctgagcgcacaggatgcagggaacccggggtgtccgcagggacggtgtcccct

SEQ ID NO: 372767 - DNA, 122 bp, Homo sapiens
ggctaccaaacctcccagcgcccccgcgcccctttggagttctgaccccgcgggtgcacccgtgtctcctggacacagaggctgccctctgattgggttgagcaccttgggctgaacccctc

SEQ ID NO: 372768 - DNA, 122 bp, Homo sapiens
gattctgtgagtgcatttacacggtgcacgcctgcacgtttccccacactctggattctgcgagcgcgtctacacggtacatgcctgcacgtctccccacactctcgattctgtgaacacgt

SEQ ID NO: 372769 - DNA, 122 bp, Homo sapiens
aggtgcgcggcttgggaagcccaggggaccctgctgtttgcgggtggtcggtagtgagtccggagccggacaggacctcccagaggcatttcctaagtttgagggaagcgggatgcgcctga

SEQ ID NO: 372770 - DNA, 122 bp, Homo sapiens
cagtcacgctcctcagcccggttcagctaattcccaacatctaccctttctttcccccagcggctcttgctacgttcttgtttggaatgagggagggcctttcctcagtcttggacaggaac

SEQ ID NO: 372771 - DNA, 122 bp, Homo sapiens
ctgctcatctaatccacatgaactactcacgaggtattaaccagatgtcaatataatccacgacacagggaaataatgactagtggtcaaattcatataacatctatccttcatttccagta

SEQ ID NO: 372772 - DNA, 122 bp, Homo sapiens
gtcacttgccgtcgcggtgggcggcccccggcgagtccacacccctgccccgcctcctcccggtaggaaactccgggaccctgcaagggatgactcaccccagtgattcaaccgcgccaccg

SEQ ID NO: 372773 - DNA, 122 bp, Homo sapiens
gacgggccgcggccccacgtgggcggggcaggccacccggcctgggtcccggctgcgctccgctcgcccgcgaccccaattcctcgggacttgagaccccgtggtgaagcagcaactgccac

SEQ ID NO: 372774 - DNA, 122 bp, Homo sapiens
ccggcctttgtctccgcggagcgtcacaaaggttggaagggtcgcggggcctctgggtgccgagctgcagatgcctccactgcgagcacagccctgagacaagggcccaggcgcccagcggg

SEQ ID NO: 372775 - DNA, 122 bp, Homo sapiens
cctcaatcacggtctcagtccccccaaccccgtcctgcaggaacaagtgtggtagaggctcggggtcggagggcgggcggccgtcccgcgggctggacggagtttctgggctgcggagaggc

SEQ ID NO: 372776 - DNA, 122 bp, Homo sapiens
aacaaaacatggtgtggggcggggatggaactatttaagtgaattttaattgaaaagtttcgtggttttaacattaaaagacatgcctataaaataagaacctgtaaaagtcttcactaaaa

SEQ ID NO: 372777 - DNA, 122 bp, Homo sapiens
aagttcatcgtctagaggcaatggggtagaaaatgccaaataaatgacaattccccctaccgggaacagtggcatactgtaccttgcttcagcatagacactgtgctgtatgaatatttaac

SEQ ID NO: 372778 - DNA, 122 bp, Homo sapiens
gctgccgcacgccccacccccggaacctcgcctccttccgcgcccccaaccgctctcccccgaaactttccgccaagatggcggcccccgagctggcctgccgcgctcccacgtgaccgctt

SEQ ID NO: 372779 - DNA, 122 bp, Homo sapiens
aagacgctaagtggacgctaaaaagacacgctgtttgtcacacaaggcctccaactgggacggcgtccaccgcgccccgccccgcccgcggcaccgtggcatcttgggacatgtagtctttg

SEQ ID NO: 372780 - DNA, 122 bp, Homo sapiens
tttacttacttactatgtcacattttatggcttataccgtgatatctttccctccagccacggtgttggatacacttgtatgaggcttcagctgtgctgcataaatttcttgaagaacctgt

SEQ ID NO: 372781 - DNA, 122 bp, Homo sapiens
gaaccactgatgcacctgtggccagggtggcccactgcagttcttggggccggaagtgaccgatttctaaatcccgcacccacgttttctttccttttctcccagctcctgcccctcctaaa

SEQ ID NO: 372782 - DNA, 122 bp, Homo sapiens
atcccgagctctgtctttgacactgtgctttgtagacactgtacagtgaaaccagaagtacggcacagttcggccctagaggaatgcacaaaactatttttttaactgtaacattatgagtg

SEQ ID NO: 372783 - DNA, 122 bp, Homo sapiens
tccctcgcgcagagctctcggcgaattccctcgcggagccgcggggtgccggccggccgccgctccccaccattgtcccagggccccggccccagccgcggggccccctcccgggacacgta

SEQ ID NO: 372784 - DNA, 122 bp, Homo sapiens
ggctggggcgcagcccacacgcccgcgggggcgaagcgacagcagccgcagggctgggagcgaggagccactcaccgcagcacgccgagcccagcaacagcgccgctaccaggggccacatc

SEQ ID NO: 372785 - DNA, 122 bp, Homo sapiens
tttcccctggaaaccagcgtttgattcaccaactcgcacagtaggcagcctggagacggccgtcttcttagctgggacaccaggcactccagggcttttgttttccctcctatggtgtcatc

SEQ ID NO: 372786 - DNA, 122 bp, Homo sapiens
ctgggtggccgctccgagggcgggtctgggaaagtttgtgccggggcggccctgatccggcggcggcgcggctcggccactttcaccgcacgcggggccggtgtgaaggtggggcggccgcc

SEQ ID NO: 372787 - DNA, 122 bp, Homo sapiens
tgatggaagtcagaatataattatctctggggagtggagggttttgactgagaacgttcacgaacatgcttcctgcagtgctggaaataaagtgagtaatggttacattgatgcatatatag

SEQ ID NO: 372788 - DNA, 122 bp, Homo sapiens
cgggggcgtcgcggggaggcctgcagggttgtggggcgtcgggctgagctcctgggaggacggagtgtcacttcctgagatggggacacctcgggcgtgctggctttggtgaggagaattga

SEQ ID NO: 372789 - DNA, 122 bp, Homo sapiens
ttagttaattctaaatattcttttatgatatagtttctaaaaattgttggaggccaggtgcggtggcacagcacctcaaacatcattgatagtgaaaaaatatttgttgaataagtgaagta

SEQ ID NO: 372790 - DNA, 122 bp, Homo sapiens
aaatgtaaaggaatgaggtacttgagtcttcctgcaaaaaattaactgcatttacgtgtccgggaaggataggacagtgtgttcttaaactcttgctagcttcaggaatgtctaacctgatt

SEQ ID NO: 372791 - DNA, 122 bp, Homo sapiens
acgaaactaaccaaccaaaaaaaaaaaaaaaccacaaaaagcatgttgttttgaacagagcgcagtgctccagctaaggtcaggccagcacagagggtgctaatgaaattcacctcgcaggc

SEQ ID NO: 372792 - DNA, 122 bp, Homo sapiens
gaagttcaagcctagcttgggcaacacagtgagatctgtctctacaattttttttaagatcgcattagaactgtttagattataacacaattttacacagtgattttactatatgcagttta

SEQ ID NO: 372793 - DNA, 122 bp, Homo sapiens
cacccgcctcggcctcgcaaagtgctgggatcacaggcatgagccaccgcgcccggcaagcgctgatatttttaagagctcccggggccgcccccgggagcctgcttcccgcggtgggagcc

SEQ ID NO: 372794 - DNA, 122 bp, Homo sapiens
tagtgacagtgtacttccaaaatattatgtaactggtacattcttgaaccctttctcctacgaccattaaagacttagaatcatggattcttaaatttgggaaccaactacagggcatattt

SEQ ID NO: 372795 - DNA, 122 bp, Homo sapiens
gttcacggtaaaattactcatcctcagccagtgataaatggcatcagtctagagccagcccgcggcagggggtggggctccctgctcagggttcccaggcctgggccagataaacctggtga

SEQ ID NO: 372796 - DNA, 122 bp, Homo sapiens
aaactatgaagtggcataaatcagaatagtctgaatctggagctcatgtccaggttgtaacgtgggagtgccttgaatgtggagaagggaagattctcaaacatgtgggtttttaatccctt

SEQ ID NO: 372797 - DNA, 122 bp, Homo sapiens
accattttttaaaaactgaaggcatatcacatttaaactgctgaaaacccaagacaaaagcgaaaatcttgaaagcaaccagagaatacaggtacattccatagagacacaagaaaaacaga

SEQ ID NO: 372798 - DNA, 122 bp, Homo sapiens
catgatagagatgcataggagaaacccagacttggcggctgaagggcacagggtggaaggcggtagagagacaaggaaggttgcacagaaataacatttgatgtaggaactaagtgcacgaa

SEQ ID NO: 372799 - DNA, 122 bp, Homo sapiens
caagcccattattaatttcacaggatgaatttctcatcctagtaactctgggggagaggacgaaagggttattatgtaggttgagagttctcttgttgcttctgactgttacagatgttgca

SEQ ID NO: 372800 - DNA, 122 bp, Homo sapiens
tttacttttctggtgagatgattttccctagactcacaagagttacccctcttggataggcgccttcgattatactgattgcatctttggctccccaggtgatcagatgtctccagatggta

SEQ ID NO: 372801 - DNA, 122 bp, Homo sapiens
agccggagaaactgcattcactttagcaagaagacagggaaactgaaattgataatcccccgagttgggttacctgatccagacaggaagctggtctaggcttcccccgtcacccggagctc

SEQ ID NO: 372802 - DNA, 122 bp, Homo sapiens
gtggggtgttgctatctaagcagaaggaaccagagcctgttctttcctttgtatggtaaccgctggcctcagagcctctttgttttttgcccacatcctcaccgtatattctgatacctcct

SEQ ID NO: 372803 - DNA, 122 bp, Homo sapiens
ttcctccacggtgttctccatgcccggtcgagggctccaggactttgggcggtaatgagtcggctacagtgggtctgagccggcgccgcggacgagtcccttcgtttcagccagtttggctc

SEQ ID NO: 372804 - DNA, 122 bp, Homo sapiens
aggacctaccttcaaaatctctctttacttctagacctatcattcaactcaagtaccagccggctccagggggtaaggtacaaagtattgtgacccatgagaaggatactaaaaattggaat

SEQ ID NO: 372805 - DNA, 122 bp, Homo sapiens
gcccctccttcaacactggccaacaactatatgaaaaaatgctccacatcactaactattcggggaatgtaaatcgaaaccaccacgagataccatctcatatcagtcagaatggcttttga

SEQ ID NO: 372806 - DNA, 122 bp, Homo sapiens
attccaaggagttctgctcattctaatgatggcccattctacttgctctggacctgccctcgcatcccctgcctccatcctagtaaagactccttgctatgctgcagctgtctgtgttactt

SEQ ID NO: 372807 - DNA, 122 bp, Homo sapiens
gatagaagcggaagacctggtccaccacgtggggctgcagctccacagtcaggcagagcacggcgatgggcttgccaccactcgctcggaacaagacctgtgaggaggccacgctgagtgtt

SEQ ID NO: 372808 - DNA, 122 bp, Homo sapiens
gcgtgaagctggcaaaacaagcctgtaagtgcgcgtgcgcacctgacggtcagacgtaggcggaacgccccgaggtcataggcggggtcacgcggaaggccgggcagcgcagggcgaaagga

SEQ ID NO: 372809 - DNA, 122 bp, Homo sapiens
agccaagcaagccaagttcgttaattaaagggtggtttaaaatattgcgcccaagggtcccggcatgaaattcatcaaatattagagaccttgaaaattggtgcatgactttagcaagcaga

SEQ ID NO: 372810 - DNA, 122 bp, Homo sapiens
gtgaattaatacctactgtgtgttaaccagcccttttcctaacaccacaaatcctctcaacgtctgtccaaaaggtgggtggtggtggccaggcacctcactcctgtaatcacagcactttg

SEQ ID NO: 372811 - DNA, 122 bp, Homo sapiens
gtagggagaacggcctgttcccagctcctaaccccaaggcggagcatctgcctctgcggtcggacacacacgggcctcaggttcttagccatgtggccaagcctcctccctcagacccgatc

SEQ ID NO: 372812 - DNA, 122 bp, Homo sapiens
ctgtcctccggcagagccagcaaagtggactgaccccacccggccccagctctctctttccgcagctctgccagcctcgctgacgtcgcttttgcagcctttggcaaacggcgttgctgagc

SEQ ID NO: 372813 - DNA, 122 bp, Homo sapiens
attaattattagccacaatcaagatccatgcatctaaaaatacagtgtcccttttaagtccgagttcccagcaagagtctagagctgacttcaatcacttaggcttcataagaatcaacttt

SEQ ID NO: 372814 - DNA, 122 bp, Homo sapiens
gggaaatgtcccggagattgaagggaagccccagggagagggccgctgctcgccaggctccgcaggcccgacctatctcagtgggttacctcacactgctacgcggactctaatgttggcca

SEQ ID NO: 372815 - DNA, 122 bp, Homo sapiens
acgccaccccggggcccgagccgggtgcgtgggccgcgcctccccgccgtcctcgggcgccgccaccgcccctccccggccggcaccgccccctgacggccgcgctctctctcgcaggctac

SEQ ID NO: 372816 - DNA, 122 bp, Homo sapiens
acttgggctctgcctctgagggccttacacgttagggaggagtgggtcaactgccacaaacgtcgctaggaaattaaaaggaaaattttacaaagtggcagttcttgtctgtcttcccctcc

SEQ ID NO: 372817 - DNA, 122 bp, Homo sapiens
gagcctgcccgcctgcctccgcaggtcctgtctgtgcgagtgggagtgagccgtgtgctccgcagacacctgacctgtgcgcttatgacggcctctcctttgcacatggcctcgacttggct

SEQ ID NO: 372818 - DNA, 122 bp, Homo sapiens
gcagcgttttcagcctgttaccccggaggtcgaggtgggtgatgggcacatactggaacacgttggcaggtagggtgctgatgagattgtcatttaaaatgagcacctccagcttgttcaag

SEQ ID NO: 372819 - DNA, 122 bp, Homo sapiens
gagctatttttaaagaacaaagttgaggtcagcatcctcggagcttccccaaacctggcccggggccctgccctcccggagaggggtcagcgaccctccggtcccccactggggcagcggcg

SEQ ID NO: 372820 - DNA, 122 bp, Homo sapiens
ggcatcaagcctactgtcacgattctctcgagaggaatttccgaccctgcaggcggctggcgaccaggacaaggctgccaaggaaagggagtctgccgaacagtcgtctgggcccggaccaa

SEQ ID NO: 372821 - DNA, 122 bp, Homo sapiens
gcatcctattatgccttggctaggttaattatctgggctaattatagtattctttatccccggctacagtgaaagaatcagagataggtatgtatccctagtggggtttaccctgagatatt

SEQ ID NO: 372822 - DNA, 122 bp, Homo sapiens
tcaaacctttcatctttctccttccgagacatctttctattatcagcttcagaaagttttcgagtcacttctttggaaacagcatcctccctcttctgtgctactctggaagaaaaagaaaa

SEQ ID NO: 372823 - DNA, 122 bp, Homo sapiens
catcccgggcggaattggggactgtatgtcccgggagaaggggagaagactctagaaactcgcccacgtgatactcgggctcatctcagagttacaatgactagagaggccttgtggggaga

SEQ ID NO: 372824 - DNA, 122 bp, Homo sapiens
ccacatggcgcctccaagttccacagctgctttcgaggcctgtcctcggccaaagggtgtcgtgggagaggtttgcttgttgtccccggtctctctgttccctttgtctcctaatcctcaag

SEQ ID NO: 372825 - DNA, 122 bp, Homo sapiens
ctctcagaacctggaaaaaaatatttgcagtggtcctgatgtccgcagcaggccttgctccgatggttttgcagagtagcaagtgaagatttccaaaaggcggaagagcgggataagagaag

SEQ ID NO: 372826 - DNA, 122 bp, Homo sapiens
ggaggtggaggttgcagtgagctgagaccgcgccactgcactccagcctgggcaacagagcgagactctgtctcaaaagaaacaaacaaaagaactggaggtggcccggcccctgcgtctaa

SEQ ID NO: 372827 - DNA, 122 bp, Homo sapiens
agtttttttcacagccatccaggaataacctgagtcagcgagttctgaatgcaaaactcacgggaggtgtcgtttgtatcttccacctacctaattttcaccttgaaaggattcccgtaccc

SEQ ID NO: 372828 - DNA, 122 bp, Homo sapiens
accttctgggttcaaatgattctcttgcctcagcctcctgagtagctgggattacaggcacgcaccaccacgcccagctagttttttgtaactttagtagacatggggtttcaccatgttgg

SEQ ID NO: 372829 - DNA, 122 bp, Homo sapiens
gccggagccgctgggtcctagccccgccgcccccagtccgcccgcgcctccgggtcctaacgccgccgctcgccctccactgcgccctccccgagcgcggctccaggaccccgtcgacccgg

SEQ ID NO: 372830 - DNA, 122 bp, Homo sapiens
tgtctggggtatataccctggttctttgtcatggccgagaaaattcacgacacagacacacgtgaggagtgggtttgggagtggaaagtttaatagaaaagaaaagagagaaaaaatccttc

SEQ ID NO: 372831 - DNA, 122 bp, Homo sapiens
aatgattccttcaatgaaagaaattatctgaggaatattttcggttaccctcaggtacaccgtgggtgggagaacctgcaaggaagtggagacgtgaccgtgtttccctcgtgagaagcaca

SEQ ID NO: 372832 - DNA, 122 bp, Homo sapiens
gtgtgacctttagtcaccatgctcaattaattgaatgctttgcatcaaaagtcaccatgccgatccacattttacacccactgcttttctgaaatacttatcccagttccttaggtctgttt

SEQ ID NO: 372833 - DNA, 122 bp, Homo sapiens
atattcttgactttacctttctaccgtgctcactgtggccttgtgacttggtcggcatttcgtagtctgctgaaggtgggtgctgggttccgctttggtggggagacctgttgcctacagca

SEQ ID NO: 372834 - DNA, 122 bp, Homo sapiens
caccggcagccaactcacccacacggccgcagtactaaggaccaactgcgcgtgcgaccgcgacctctttagcccgccctcctgtgcctgcttcctattggctggtagtagttcccgcctag

SEQ ID NO: 372835 - DNA, 122 bp, Homo sapiens
ttcatcccccctctccgtggagtttaagaacaacaccgcagagttggtgtacacgcactgcgatactgagagtaatgtcatcctcctccccctgaatattaaaaacaatatcaccgaggtgg

SEQ ID NO: 372836 - DNA, 122 bp, Homo sapiens
ataaaacaatttctactaaccctaaaaaagataatgcttttgagttgtggcctaacgccgcgcactgtactatagaccagatggcaaagacaacttgcgctcctgggttgggctggcagagg

SEQ ID NO: 372837 - DNA, 122 bp, Homo sapiens
gcggtgggaagggtcgtggccgctgacgccccgcccccggcgctcaggtgcgcggcgtcgcgtccggcccgccgctgcagcctgccctgcgccagccgtcctctgccccgctcccgccgcag

SEQ ID NO: 372838 - DNA, 122 bp, Homo sapiens
ggatcctctctgctgccaaatgtgaaggaacgcattgttagacagcaataccccccatgccgccacctcctccctcccttcagcggcaaagcagagcccaagagcctcctgcaaagagagaa

SEQ ID NO: 372839 - DNA, 122 bp, Homo sapiens
tgaagcggggagtggcttgcttagctgaggaaaaggctaatgacattaagagatattcctcgcaacagctagtgtgtagcctgggatataatgtttatttgctgaatgaattaagcaatggg

SEQ ID NO: 372840 - DNA, 122 bp, Homo sapiens
gactccatatgccctagggatgtgttgtgatgaacttttcctactggtactgtttcctcccgcgagggaatgtctagaccagccgcaccttcttgctttgacccttcagaactttggcctgt

SEQ ID NO: 372841 - DNA, 122 bp, Homo sapiens
ggaggaggggtctcccgaaggccgtctcttccaccccgggttcccgactccccgccccctcggggtagctgttgcatcagcttccagattccaaaccaaagaaagtgggctccactaagctg

SEQ ID NO: 372842 - DNA, 122 bp, Homo sapiens
caggcccaaccaaaacccgaaccccaattgcagccagccgccctccatagctgaaaaagccggaagctctgggtcagctttacctgcagggccctgcgcctcccatatgagtcctgccggga

SEQ ID NO: 372843 - DNA, 122 bp, Homo sapiens
tagacatgttgcagccgtaggtttcagtttccccttagccctgctcacctgcacgtacagcgtggtatggactccccatccctatttccatttgcacctgactcttagggccccaaagccat

SEQ ID NO: 372844 - DNA, 122 bp, Homo sapiens
acacgcgggccgtcaggtgaggaggtaggtgttcctccaggcacacctggacctgggccgcgggagctgggattttttagaagggcagactcagccggcaaatgcgcacctagtcatctcag

SEQ ID NO: 372845 - DNA, 122 bp, Homo sapiens
cgcagtaaggatggctccggtgacttccttcgaacctcacatttcccataaaaaagatggcgccattgcttccgcgttccggttgcggatggtgagtgtgtcggggggcttggcggcttttc

SEQ ID NO: 372846 - DNA, 122 bp, Homo sapiens
acgggacaggcccttctcatgcagcccaggggccccgagtctgtgcgtgatggtgtggctcggatctgcgtccctcctctcacccctgcagcgggggctgggatgaagctaccttctgcggg

SEQ ID NO: 372847 - DNA, 122 bp, Homo sapiens
tctgcccgcctcggcctcccaaagtgctgggattacaggcgtgagccacctcgcccagcccgggaactgttttggatactaatcaaaacaatggttatggctgggcgcggtggctcacgcct

SEQ ID NO: 372848 - DNA, 122 bp, Homo sapiens
tggaagagattcaaaatacataggttatatgaccttcttaaagaatatgtcccagcctggcgtgtaagcctgtaatcccagcactttgggaggccgaggcgggcggatcacgaggttaggag

SEQ ID NO: 372849 - DNA, 122 bp, Homo sapiens
taggaaaggtactcgggagacgatggcggagaggcgtgagaagcctccggattccggtcgcggaggacagggggaaaatgggcgagtagatagttcaggggagagaggaagggcagctccct

SEQ ID NO: 372850 - DNA, 122 bp, Homo sapiens
tgaaagtaaggattggaaaccccaaattttacactatacaaaagaccaggggcaaggaggcgctttaagtattttagattatatactgacaaaactcacccctcccaacaaacctgctgaac

SEQ ID NO: 372851 - DNA, 122 bp, Homo sapiens
caccccacgacgatcctttcttagtcttcgcttttcaacccaatcgttaatcattcggaacgcgcgggcggggagcggcgaggagggcgagctcggggttcgccgccgccgccgccgccgcg

SEQ ID NO: 372852 - DNA, 122 bp, Homo sapiens
gcctccgccgccgacgcagctagctggtttttaaattgctaatctcattaacggcgcgcccgtccgagaggcgaggctggtaaatggatgacggcgagccccaccccgcccgatcgtcgcgg

SEQ ID NO: 372853 - DNA, 122 bp, Homo sapiens
cggggcgggtggaagcccccccgcccaggtgggcccggctgaatggggggcttgtgcaggcgggggcgggaaggggaaggggaaggggccgcccacctcccgccccgcccgcccgcgcgccg

SEQ ID NO: 372854 - DNA, 122 bp, Homo sapiens
gatagcttcttcctgctttggttggtaaaatgaactctttaagtgggcaattcatgatgtcgcaatagaatagtgaatgaactaaaaagaaaatgttcacaatataagcttaaaaagcaagt

SEQ ID NO: 372855 - DNA, 122 bp, Homo sapiens
cgacagtggccccgcttgcattattctgaatcatgggtggatgctcctcgatgatctgcacgctgcttgtgttctcgatctcctcgctcttacgcttgagtccacatttttggtaggtatca

SEQ ID NO: 372856 - DNA, 122 bp, Homo sapiens
gggtccaggaccagatgacactgggccctgcaagccatgagaagaatcaggattggacggcgcaggcaatgggaagtcgctggagggttttggccaggaagtgttatgatcacgtggttgct

SEQ ID NO: 372857 - DNA, 122 bp, Homo sapiens
ctgtggggaagcctccctgcagcctgcagagcagaaggcagggtcaggagcatttgacaccgatttagaaacaagcttcttgccccaaggtacgaacccacccagcaaagctgggagctggg

SEQ ID NO: 372858 - DNA, 122 bp, Homo sapiens
ttacctatctctgctgtaacggaagcaaaatctaagagctgaggacacagccagaacatgcgcgtgagtgtgtgtgggagtgagcatgcatgtgggagcaagtgtgcctgtgcaagtatgtg

SEQ ID NO: 372859 - DNA, 122 bp, Homo sapiens
aatggccgaccgcgaagcgcgcaggaggctggggattggccagtgccgaggttgctggggcgacgggtgggtccggcgggtccccgggcggggcggggccggggcgaggggtgccgggtggt

SEQ ID NO: 372860 - DNA, 122 bp, Homo sapiens
gcaaattaaagcaatggaagcagagtcctaggtaactccctgaacccaacccatgcaagccgttttttcaaaagtgtcacaacttctcccaccttttcagagcagcttgcttggtggggtag

SEQ ID NO: 372861 - DNA, 122 bp, Homo sapiens
ggacattttagcaatgaaagcagcattaaccgtgataaaacccgttactttccaaggacccgctccgcaaagcgcccaccctcgagggaggaaagccgagctgcgcctccgcgcaaggccag

SEQ ID NO: 372862 - DNA, 122 bp, Homo sapiens
tgccctctgctgcttcctcttgtgcggaggcacgggctccttctgctggatcagacttcgcggcaacctccgggactctgacggtgaccaacttattagaaaagggtaaagaattccgggtg

SEQ ID NO: 372863 - DNA, 122 bp, Homo sapiens
ggtcctcagttttctcatctgtaaaaggggatgacacaccactagccacaaagaaacatgcgcgaaggaccccaccggcccttccccaagggccagccctgcccctcatcctcctcatcctc

SEQ ID NO: 372864 - DNA, 122 bp, Homo sapiens
ggccggcccccgaaaatggtgagctaaagcctgcagggaccagggaggcagcggtcacctcgccacctgcccccaacgtgaacacccagcaggcgtgttcttttcttttttcagttatatgg

SEQ ID NO: 372865 - DNA, 122 bp, Homo sapiens
ggcccatgcatctagtgctgctgtcctggacagagcggctctaagtgatctgcttttacacgctttatggtccgactatacataatcctcccattagtaactaaagtattggccaataaatt

SEQ ID NO: 372866 - DNA, 122 bp, Homo sapiens
gcagtggatcctgtgctcctgggcactctagagcactgccgggccctggtcaccagagggcgctgtggggcagcaagcagtggaggccccagctggtggcaaggctatgcatagaccatgtg

SEQ ID NO: 372867 - DNA, 122 bp, Homo sapiens
cttcattggtgccacattctttgtagccacctgggctgtcagccatgagggaaggaccctcgttttagtctcggattgtaaggtttccatctctgtaccttctcacaaagaagagtcagggc

SEQ ID NO: 372868 - DNA, 122 bp, Homo sapiens
tattgatctataacagtgctggccattggctcattgtcgtgagtttatttcatttacttccgttttaatctcaaaagtcaaaacagtgtattcaggcaaggcaaggtgactcacacctgtaa

SEQ ID NO: 372869 - DNA, 122 bp, Homo sapiens
ggagggaggctgacgggttccctgtgggcccagacccccagtactctagcatcggggaatcgtccccaggaagccttgtgagaagccaaaagggagctcgaggcgggagggaggagctgaga

SEQ ID NO: 372870 - DNA, 122 bp, Homo sapiens
ccctgcagggttctctctgtgacttcagaggcccaaggagtcctcagcactacagatacacgtggcccctcagaagacaacatttcacagatctgcaaagaataaaggtcaaatttacttaa

SEQ ID NO: 372871 - DNA, 122 bp, Homo sapiens
ctcaccccggctcgggcagtgccagtgcatctgcctgggtgagagcagggtctgtgctgccggccccggcttcctgtgaacgcagttgctcctccggcctggcctctcccgctggagggcag

SEQ ID NO: 372872 - DNA, 122 bp, Homo sapiens
tttaaagctggtgtccgggggagacattacatgttggcaggttctgtgatgcccccgagccgcaaaaccagcaagtttttattagcaattttcaaaggggagggagtgtacgaatagggtgt

SEQ ID NO: 372873 - DNA, 122 bp, Homo sapiens
tgttattactcagctttctctaaggctgttacttccactatgatattggagggtgatggtcgtcttatgctcttatgcaattatgtaaatcattagatgacaaatgtgcagtgtccagcaca

SEQ ID NO: 372874 - DNA, 122 bp, Homo sapiens
ccagaggagagagagaaaaggcgggtgcggggctttgggtgagtaggaaacagctaggggcgacccggaccgcgtcttcagtaccagggcccagcgaaacaccaacttcttcccctaaagcg

SEQ ID NO: 372875 - DNA, 122 bp, Homo sapiens
gcttaagcggtttccctctttttgctaccaggtgaggccgcatgtagagtgagagagagacgcctggaggcacctcacttctaattgctgtctaacttctgacttagcccatttggttccca

SEQ ID NO: 372876 - DNA, 122 bp, Homo sapiens
atccggctgggggttcccgtgcggcagggacagtagagccggatccaattcaagggtagacgtagtggaggcccccgaggcccggacccgcgggcagggcaggcgcgggccgggggctccgc

SEQ ID NO: 372877 - DNA, 122 bp, Homo sapiens
aagcccaggcacctgcacagtgccgcggcaattgccgggggagccctagcaaccttcccgcgtccttagttaccaaacaggaaacgctccagcccgaaggcgaaacttccggttgagaactc

SEQ ID NO: 372878 - DNA, 122 bp, Homo sapiens
ctgtgaggagggtagtgggggggcattgatgttcccgtttctgagtgaggagacctatgtcggggccttggtgacctcaagccgaatgctcaaactgctactgctactcctaaggttgtgcc

SEQ ID NO: 372879 - DNA, 122 bp, Homo sapiens
ccccagagagggaggagccggtgcccggcacagccccgccggccctagaagctccccacgcgccaccatgcctctgctggacgttttctggtcttgcttcaggaaggtgaaggtaagtgact

SEQ ID NO: 372880 - DNA, 122 bp, Homo sapiens
tactttcagtggcagaagaggccacatctgcttcctgtaggccctctgggcagaagcatgcgctggtgtctcctcctgatctgggcccaggggctgaggcaggctcccctcgcctcaggtaa

SEQ ID NO: 372881 - DNA, 122 bp, Homo sapiens
tctcttcagctttgtgaaataccgcaaggtctttggagatgagccaggaaaatccattcacgtgcggaaatttgccgggctacgcgcgttgctgctgatgcctagggttcggagtgaaagga

SEQ ID NO: 372882 - DNA, 122 bp, Homo sapiens
ctctctaagctgcatgaagggtgcccccattccatccctcttcacttctccccagcatagcgcctccataaatgtttgtgaactggatgaatgactgttgagcgcttggtatgatgagctgc

SEQ ID NO: 372883 - DNA, 122 bp, Homo sapiens
gtaggggtagaagtcaaacctgggctcagggcgtggaccttgtagggctctccaccaacacgccatcccatacacatgccaggctgccctcaagattccagggtggatgctggggttactag

SEQ ID NO: 372884 - DNA, 122 bp, Homo sapiens
aatgtctatgatgtattagaaacccaatacatgttagctattattgttatcagcaacctacgcctttctcgtatactgtgttatattgtgtatccatcatgactctgatgcatcacgcatgg

SEQ ID NO: 372885 - DNA, 122 bp, Homo sapiens
cagtccctcctatgatagaaatgggaagaatacataaaatggatgctgaattgaatgtcacgaaaactgagccaaaagctaatgtttttaaaatgggagaagtataccaaatggatgccgag

SEQ ID NO: 372886 - DNA, 122 bp, Homo sapiens
tgagggatgtgtgacccctaagcatgcacatagtctgctgcccaggttggactgcaatggcgccatcttgactcaccgcagtctcgacctcctgggctcaggtgatcctcccacctcagcct

SEQ ID NO: 372887 - DNA, 122 bp, Homo sapiens
tccacgttctcgaaaatgcagggtgaccctggcgcaggatcgggtctgagagctgctcaccgacccatgcctcctctagcaaatcgcctctctcacagtcacctcaacagcatctcagccgt

SEQ ID NO: 372888 - DNA, 122 bp, Homo sapiens
cgccagactccacttcaaatctaccagcaataccagtacacacatcaaaaacaacttactcgtggaaatactacagacaatctaaagaacctacagctggggcatccttatacgccttcctc

SEQ ID NO: 372889 - DNA, 122 bp, Homo sapiens
gatagaaagaaccacatccgtgccccctgtagatctcagctgccacatccacctcctcctcgactcctgatctcagaagccaaatgacctgctgaggcagcctctccaccctccccatggac

SEQ ID NO: 372890 - DNA, 122 bp, Homo sapiens
ttagtgttagttcggtgtccagccagcacagctgtgtgcaagtttacaaactacacacatcggcacatccccaagaacaataaatgcagccacaatccctacgagcactgaggaatcatcag

SEQ ID NO: 372891 - DNA, 122 bp, Homo sapiens
cctctctgagcctcgtatgttaatcttgaacatttaaatatcaacacctaccttgaaggccgctgggaggaaaaaaatgagataatttatgcaaatcacttagcacagtgcctggcacagaa

SEQ ID NO: 372892 - DNA, 122 bp, Homo sapiens
agaaagggcctgctggtctcatcctctgcttcctttgcctttaccctatacctctctgcacgtcccaccccattttgctgtgtgctcacccccaggatgtgtacccggttgtagtaggagct

SEQ ID NO: 372893 - DNA, 122 bp, Homo sapiens
ataaaatcatctttgaagtctgggtgaaagacttgaaagaaaaatctttcggtaatctcacgagtcagctagggaaaaggtgctgaggctgaactccatcagacacacacgctgggtggtca

SEQ ID NO: 372894 - DNA, 122 bp, Homo sapiens
gtatctgggtacgcaagggaccccatgagcaggggtgagcaggccagggcagggtggccccgagtgtgttgtgatcagggagtattgttgagttgatgtccatgctgtgatccgcgatggct

SEQ ID NO: 372895 - DNA, 122 bp, Homo sapiens
ctcgctgcttcatgagctgattaggcgtctcagtgccaccctaatgagattgttgggccccgagggggggcacaaccaccaaggttcaggggatggagaggaggggctcaggtgctgtcaag

SEQ ID NO: 372896 - DNA, 122 bp, Homo sapiens
tactagattgccacatcaaatcagttcctgtttatgttgagcgagctgggtttgtaactgcgagctgtttcaactccagttttgctgattctttgttgtgaatagctgtggtttatctcaag

SEQ ID NO: 372897 - DNA, 122 bp, Homo sapiens
cgttcctcggtcactcctcgctagggctcctctgggccagtgactgagggtcttatttcccggaatgctcaggaaggcggtgctttccaggcgggtccactcgaggccccagggctcttcca

SEQ ID NO: 372898 - DNA, 122 bp, Homo sapiens
acctgaatgcagggagaacagccaagagagaaacagcggtgggaggcagtgatagcctgccgctacaagcctcacacaattgatgaatactagacatagcaaggaaaagggaagaattctaa

SEQ ID NO: 372899 - DNA, 122 bp, Homo sapiens
acggggcggttgccaggcagagggtctcctcacttctcagacggggcggccgggcagagacgctcctcacatcccggacgggcggcagggcagaggtgctccccacatctcagacgatgggc

SEQ ID NO: 372900 - DNA, 122 bp, Homo sapiens
tccctggacgtgttcgcggacgagatacgcttctaccagctgggggacgaggccatggagcgcttccgcgaggatgagggcttcattaaagaagaggagaagcccctgccccgcaacgagtt

SEQ ID NO: 372901 - DNA, 122 bp, Homo sapiens
gccatcgggagaggagtgcctgtcagctgccgccacccactcgaccctgccgccgcgactcgcaagctgtggccctttggggcttcttttataagggcacaaatcctattcatggaggctcc

SEQ ID NO: 372902 - DNA, 122 bp, Homo sapiens
agttccctttccaagtcacagaaaggggtgacgcacctggaaaatcgggtcactcctacccgaatactgtgcttttccgactggcttaaaaaacggcacaccatgagataatatcccgcacc

SEQ ID NO: 372903 - DNA, 122 bp, Homo sapiens
ctatagcaggacccacaaccctcgggctttcctcctggagtaggcggttctcggctctcgcggaggaacccgccatctgccagaagccccaaagacgccccgccccacttcccacagcttcc

SEQ ID NO: 372904 - DNA, 122 bp, Homo sapiens
ggccgtgcggccgcgcttggcgggctcagaggtcttgctcctggggaagctgagaatctccgcgcggtggactgtggccggccaaccgaaattggcgcgaaacgtcgccccccacgtgaccg

SEQ ID NO: 372905 - DNA, 122 bp, Homo sapiens
acacatactacaataccaacaaaccctgcaaacatgatgctaagctcaagaatctagacacgaaaggcacatggtatacatatatgattcaacttctggaaaatgtccagaacaggaaaatc

SEQ ID NO: 372906 - DNA, 122 bp, Homo sapiens
agcctctggggttgagtttctccctgtactctgggtgtctcttctactgtcagagggccccgggagacaaagggcagagagacatccaggcgatggtactggcagagcaagtcagcaaagag

SEQ ID NO: 372907 - DNA, 122 bp, Homo sapiens
ttggtggaaggagagggacttggtcctgagcctgccccggatctacctacaccagaaccccggagtccccccgaatgggctcagtcccacccaggccagacgccccagagccccgtagcccg

SEQ ID NO: 372908 - DNA, 122 bp, Homo sapiens
agccccccgcaaaggggaaatgtgccggcacaccagcggtcctcggcgccgtttggggtgcgtggcgggcgcggggggcggcggccgggccagcgggccgcccggcggggaagcccagggag

SEQ ID NO: 372909 - DNA, 122 bp, Homo sapiens
ttcggattatccgggagttcttttgccatggcaccgcccccgccacttccgctaggaacccggaagttcctacccgacgccggaagtcccacggccttgcctcctcagattcctctctcacc

SEQ ID NO: 372910 - DNA, 122 bp, Homo sapiens
cagcgctgcaggtttgtttcgtgcgcacctccgggcggaattaccggccggctgggaccccgctcccggtctgagccacccaggttatagaaggggaatctcgggaagctttccaagtcact

SEQ ID NO: 372911 - DNA, 122 bp, Homo sapiens
cagtgttagagagacccagtggtgacaaacgtcctctgtacctagggtcaccgtaaggctcgggtctcatcgggtttctgtacatgctctagacgtgcagcgtcatgctaccgacactccaa

SEQ ID NO: 372912 - DNA, 122 bp, Homo sapiens
tccaaactgccctagtccctccccattttgactaaccaatgcatgacaacactggatgaccgtggggacacagtccatgctgtgaaactctctatgaaagctcaaaggttcacacagggcct

SEQ ID NO: 372913 - DNA, 122 bp, Homo sapiens
gtccctgtacctggcctacattctgtactttgtgctgaaggagttctgcatcatctgcatcgtcacgtacgtgctgaacttccttcttctcattatcaactacaaacgactagtttacttga

SEQ ID NO: 372914 - DNA, 122 bp, Homo sapiens
ggaaaacaggagcctcacctcgagtcggcgagcggggcggggaaaacaggggcctcacctcgagttgtcctgctagctgggtgcctggtgctatccagcctcagtgctttgggaggcagagg

SEQ ID NO: 372915 - DNA, 122 bp, Homo sapiens
gtgcttgacccaaggtaggtactcaaaaacatgcagtttcagccaggtgtggtgactcaacgcctataaatctcggcactttggaaggttgaggcaggcttatcatttgagctcaggagttt

SEQ ID NO: 372916 - DNA, 122 bp, Homo sapiens
accccggggccgcctcagtgtccatctcgactgcagagttggccctgctgacagtggcagcggcgtttatggagcctctgctgtgtgccgggcacttaagttgcgcgcttgcacgccggggc

SEQ ID NO: 372917 - DNA, 122 bp, Homo sapiens
gagatagaggccacagtgactgcaggtaaaagacagcagaggagggcagtgaccatcccccgcacagtctttggaggaaatttccaggtgtctgttttctaagtcagttcatttccattacc

SEQ ID NO: 372918 - DNA, 122 bp, Homo sapiens
aggggtgacggacggcacctggaaaatcgggaaaatcgggtcactcccacccgaatactgcgcttttccgacgggcttaaaaaacagcgcaccacgagattatatccgcacctggctcggag

SEQ ID NO: 372919 - DNA, 122 bp, Homo sapiens
ctttgcaggcataggatctagacaggtagcgcaagccaagcacaggatccagacaggtggcgcgagccaagcgcaggatccagacaggtggcgcgagccaagcgcaggatccaggcaggtgg

SEQ ID NO: 372920 - DNA, 122 bp, Homo sapiens
gggctgaaggaagggctgcatgaaccccaaagcccccagggagccatggcctcttggagccgcaccccccgacttggctgcctggctctcttacctgtggtggtgaggatgctggcagcgaa

SEQ ID NO: 372921 - DNA, 122 bp, Homo sapiens
agtctgttctccaactcagcctgcctttaaagatacagaaatgccaagctgtcaggctgccggtcgggttaagagggttctctcgtgcactgtggaccaagctgggagaactagggcttcat

SEQ ID NO: 372922 - DNA, 122 bp, Homo sapiens
ctgaagcttaagcggcttcgctaaattcctgctttgggcagccgtggtggaggcctaatacggtgaaggggaggctggtgtccgcccaagtctgacaacctaggtgtggtgagcaaccttct

SEQ ID NO: 372923 - DNA, 122 bp, Homo sapiens
ggccgtccgagcaggagcacacgtcgtagcggcagttccgcaggtagggcagcgggctgacggcacgatggcaggcctcgaatgtgggggacgtcaggaccgcgcacgcctcctcggagaac

SEQ ID NO: 372924 - DNA, 122 bp, Homo sapiens
gggaaccttgtacactggtggtgggaatgcggactggaacagccattatggaaaaccctacggaggttcactcaaaaagttaaaaacagaactaccagcccagtgttatccgtccttcgtta

SEQ ID NO: 372925 - DNA, 122 bp, Homo sapiens
tcattaccactttctattctacaaagtactaaatatgatcaccactcagctttcgtcacacgttttggcattattcagatgttcacttatgcaacacagaaggcttaaaaaacaacaagcac

SEQ ID NO: 372926 - DNA, 122 bp, Homo sapiens
ctccggcctcatctacgtgagtgggctcctgctggggggcgcgtgcggcggagttgctgccggttggggaaccaggtccaccacccggctcccctgcattaacttgaggctgtttatcatct

SEQ ID NO: 372927 - DNA, 122 bp, Homo sapiens
cggggcggggcgtggagctgggctggcagtgggcgtggcggtgctgcccaggtgagccaccgctgcttctgcccagacacggtcgcctccacatccaggtctttgtgctcctcgcttgcctg

SEQ ID NO: 372928 - DNA, 122 bp, Homo sapiens
ggaccccgactggcagtgggggctggaggaagctgtgctcatcggatggcttggcactcacgcgtctgagggttgtggctggccttggcagaggcccgctcctggcagtggctgagctgtcg

SEQ ID NO: 372929 - DNA, 122 bp, Homo sapiens
cttctcggccctgctactgtaccttgagcagcacctgctggcagcttccagggatcacgccggaacgcggccgctgctcgagcccagctcgcaggatgcctggagccagggccaagccggtc

SEQ ID NO: 372930 - DNA, 122 bp, Homo sapiens
aggaggcaacaccaaaaaaaaaatgcaaaaagctgaccccactggcggatgtgcattattcgctagcttctgtgaaaaaaagggtgacaaaatgctaagttgaagggttgttgggaaaggca

SEQ ID NO: 372931 - DNA, 122 bp, Homo sapiens
aattatgccctggtgatctttgatgacatcaacaaatgatgagcatcaacaaatgtttgccgcagaattttctaccatcacctaccctccaatcttaaagttttgaattatctctttatgat

SEQ ID NO: 372932 - DNA, 122 bp, Homo sapiens
ataagatattgttgatacagtggaacgatgtcatgttttgtggaatgtccagaaggtccacgtccagtggtgtgctgcatgcagctagctcatactgcctcatggagccaactgttaaattt

SEQ ID NO: 372933 - DNA, 122 bp, Homo sapiens
atagcaccatatgcactttcagtaaatacagaagtttaaaaattcaactgtctaaacccacggctgctttactttaaagaaataaaatgccatctggtgaaatttagtatgggttaggtgtg

SEQ ID NO: 372934 - DNA, 122 bp, Homo sapiens
ctttcccgacggcgaattggccctctggaaacagccgaccaatcacaggcagcaggggcgcgccctgcagcggggctccggctgcggttccgtggactcggcgactaggcgccgcctgacca

SEQ ID NO: 372935 - DNA, 122 bp, Homo sapiens
gaggcctctctccatccagttttgatggaggtagctctgcctgccatgtggatccagcctcggaggtaaagcagctgcagaatcaatggggcctttctgcacctgggcggccacttccagaa

SEQ ID NO: 372936 - DNA, 122 bp, Homo sapiens
ccccaccccacctcctaattgagtgcttatattcagtaatagctttttgctgccctgggccgcatgacactgcctcatttggccacgcacagctattattctaggaggcagctagtgaagtg

SEQ ID NO: 372937 - DNA, 122 bp, Homo sapiens
tcacgtttttgaggccagagttgggtctgtgacctcaaaggcgctacctcttagttacctcgcagtgcagcctcccattcatctctgacaaatggaagcttttaggtctgctgcatcaattc

SEQ ID NO: 372938 - DNA, 122 bp, Homo sapiens
cggctggtttcccattggacggctatattaagaaagtggccggactctttaaatagcgggcgctagggccgcagccctcatctgccaccgcagtctggttggagctgttgtcttgtatgctc

SEQ ID NO: 372939 - DNA, 122 bp, Homo sapiens
aacgggccagcagctgacattttttgtttgctctagaatgaacggtggaaggcggcaggccgaggcttttccgcccgctgaaagtcagcgagaaaaacagcgcgcggggagcaaaagcacgg

SEQ ID NO: 372940 - DNA, 122 bp, Homo sapiens
tgaggccctgagggagtgtcctgacctctctggggttagaagacctctaagcaggccaggcgtggtggctcacgcctgtaatcccagcactttgggaggccaaggtgggcagatcacttgag

SEQ ID NO: 372941 - DNA, 122 bp, Homo sapiens
atgtgttccggaaaggtgtgcacactcagcaactcatcatctctcctctcaccctggccccgggggcaggaaatgtcgccttacccacagccttagttctggcgaggactcacgtcatggaa

SEQ ID NO: 372942 - DNA, 122 bp, Homo sapiens
tgaccactggccctaccttgctcctgacctggggcctgtggggcagctgtctgcacagcacggctgaggcctgtgccagtcccctcctctctggtgagcagccttgagaaatacagaaagga

SEQ ID NO: 372943 - DNA, 122 bp, Homo sapiens
cgaggaccggatctgcgcggcgcagtggcctaaaaaggaggccgagccagtccctagctccgccttcccgggccctgcgccctagtggcctctgcgcggttcttcccgacccgcaaacacgc

SEQ ID NO: 372944 - DNA, 122 bp, Homo sapiens
tctccagtggacctgccggactcgctcctcacccctcaccctttgccgtctcacgcgtggcgtcatcctagggtcattgctgcccatgagctgctagtaacctgttagtcccacgcagaaac

SEQ ID NO: 372945 - DNA, 122 bp, Homo sapiens
tcggtttcccggcagttccggtttgggggtctgtgaaggcctccgcaacgcgggcatctgcgtcggaaccgcaggggttttcgtcccctccccatccggagcagcctctttgctaggctaga

SEQ ID NO: 372946 - DNA, 122 bp, Homo sapiens
caaggacaggctgctggggatgggtgtggtgctggtgggggccttctgcctggctgggagcgggggcggctgccctgccctcgctgccaccctctgccctccctgactctggggatctcctc

SEQ ID NO: 372947 - DNA, 122 bp, Homo sapiens
ttactggttcctaagcccacagaccagctgtagcaaattgaggtattagtgaaacgtgaccgctggctgcctgcggtgtgccaagctaacccaaaactcaaaatcccccgccactggaccac

SEQ ID NO: 372948 - DNA, 122 bp, Homo sapiens
ggttgggttgccatagtgacacgcaaagcgtgctgggaacgccctgcggcatgtcgcacgcgtacttcatacaccatagagtatggttccgggtctgctggctagagcgtcacttcttccgc

SEQ ID NO: 372949 - DNA, 122 bp, Homo sapiens
tcttgctgtttgggcactcctttttaaaatgccctggcttgccacactgatagcaactagcggatgcacctcagaaatcttggactttgcaagcttgcaaagctgctactagagcctctgtc

SEQ ID NO: 372950 - DNA, 122 bp, Homo sapiens
gaatattttctctccgtaactcgaaagactagatcctggcaaatcaatcaggtgtgattgcggcagtattttccatgaatcagatttaatgttatagcaaaatgtatattgattttctccat

SEQ ID NO: 372951 - DNA, 122 bp, Homo sapiens
atccacccacttcggcctcccaaagtgctgggattacaggtgtgaggcaccgcacctggccgagaagaggtttttttaaaggccttttgatatccgataatggtttaatgtgattcccacag

SEQ ID NO: 372952 - DNA, 122 bp, Homo sapiens
gatgttcagtgccaaaggacgtagggtgcacagcttcatggaggtgcacctctgtggagacgtccagaggcagggagaagagctttggggaacacaaattctgagagggatgaagagtacta

SEQ ID NO: 372953 - DNA, 122 bp, Homo sapiens
tgtggctcaaaggataatatcaaacacgtcccgggaggcggcagtgtgagtaccttcacacgtcccatgcgccgtgctgtggcttgaattattaggaagtggtgtgagtgcgtacacttgcg

SEQ ID NO: 372954 - DNA, 122 bp, Homo sapiens
cctgtgtgtgagtgcgcgggggcgcgcgcgcgcgggcccgggagaggctcccgagccaggcggtcttcggtcctcgcagcgcttccagctccccgcgcccctatgtgagggagacggggagg

SEQ ID NO: 372955 - DNA, 122 bp, Homo sapiens
aatttcggggtcgtttgcaaggccagcttcctggggcttctgcttggaattcaggtagggcgcggtcattctcggctctgaggagactgtggccagctgttctgtgtgtcccagcgcagcag

SEQ ID NO: 372956 - DNA, 122 bp, Homo sapiens
gggggcaggaagaagggtgtgggggatgaggaggggaggaaggaataaagaataagctgacgagggtgcctggaggtctatgctgtcttccacatgctggaaggaggcctggagaaatgcca

SEQ ID NO: 372957 - DNA, 122 bp, Homo sapiens
ctagaagctcttacatcctttggtttctgtgaggctctgccttgttctttgacagacaatcgacaactttttttttttgctgccttttttccttcataaatgcttgacctgctgctttttat

SEQ ID NO: 372958 - DNA, 122 bp, Homo sapiens
tgattccaattcctgcaatcagtggataagcaactgccatctgatcaatggtcatgcacacgtgtatgtgtgcacacacacacaattctggtcttccccaggccctgctccccttcacacct

SEQ ID NO: 372959 - DNA, 122 bp, Homo sapiens
ttatgtaattattttataatactgttaagaacagtggcaggtgagaggctcctgcctgttcggtgcccttgacatagagagaagaagtaattatacaactcaaacgccattttttaatatcg

SEQ ID NO: 372960 - DNA, 122 bp, Homo sapiens
atgcgcccctgcccgcactctgcgttctccgcggacgcgattggcctccccggctcggggcgccttttgcacctgcaaccccaggcgttgggcccccagcgcggccgtgcagcagcgctgct

SEQ ID NO: 372961 - DNA, 122 bp, Homo sapiens
gggcttcgggaaggggcggggccggactgcggaaggaccgcgaggtgggggcgggggccgcgtccgcgcgcgcggggcggccgcggcggtgagcctgcgcgtcagggccgccggcctctcct

SEQ ID NO: 372962 - DNA, 122 bp, Homo sapiens
ctgtgctttctttttttgccccgagatggagttgtgctctttttcacccaggctggagtgcgatggcgcgatctcggctcactgcaacctccacctcctgggttcaagcgattctcctgcct

SEQ ID NO: 372963 - DNA, 122 bp, Homo sapiens
catcgggggcgccgccaacctctaccgccagtctgcgatgagctttaacatttatttccacgccctggtgtgtgctgttctcaccaatcaagaaaccatcacggccgagcaagtgaagaagg

SEQ ID NO: 372964 - DNA, 122 bp, Homo sapiens
agagctccccctaggacagttgtcacagcccttcacagcccagacttctttttaactcctcgttttctggacaaagctgggtgccagatatgagcagcaagcagtctgttttctgcttacag

SEQ ID NO: 372965 - DNA, 122 bp, Homo sapiens
agacaagaggcagtaggatatctgtgtgtcctcccgctgaccacacttcctttagtgacccgattgcctcctcaagtcgcagacactatgctgcctcccatggccctgcccagtgtgtcctg

SEQ ID NO: 372966 - DNA, 122 bp, Homo sapiens
aaatacagatgaggtgggcggacagtatgcagatgacgggggcgggccgcgcctggcgggcggtgtgcagttgaggtggtccggcaggatgcagatgaagggggcgggccgcgagggcgggc

SEQ ID NO: 372967 - DNA, 122 bp, Homo sapiens
atactcactgacctttggaaataaacacgaaggttcacttgaagacttgggggagaatcacggtcaacttgtgacgcttggtttttcagatattcagctgctctggagagccttggagttcc

SEQ ID NO: 372968 - DNA, 122 bp, Homo sapiens
agaggctgatttgaggagtaataagcctctgctctcctggttagccagctctatgtgtatcgaactctttattgcaattcccatcttgaaaaattggctctatctgggcgacaggcaagaag

SEQ ID NO: 372969 - DNA, 122 bp, Homo sapiens
tctcctttcggcccagggctacaggcaggagaaattcacacctggaatatctcgaggaggcgccttatttcctctgagcccttgctgagtgtcgagaggcagctcatgtccctcctccgacc

SEQ ID NO: 372970 - DNA, 122 bp, Homo sapiens
gggtgtttccaacccctttcatgggggagaggaagccgcggggagcccaggaacagcgaccgcagcaagatctgcacccggagcctcaggaacagccccagaggccaaaactgcaccctgcg

SEQ ID NO: 372971 - DNA, 122 bp, Homo sapiens
gtaaatgcttttcagctgttccctagtaaatgcccttccaaaggttaaaggtcacccctccgcaacaacccagttctctctattgaggccttttccccatccagtcctcccctccaagtctt

SEQ ID NO: 372972 - DNA, 122 bp, Homo sapiens
gaagttccgggatccgatctcctcctggcagtgggtgcagacgaagtgctcggggtgccacgtcttccccatggcggtcacaacctgaggaggagatggaatgcggtccagggccaaggcca

SEQ ID NO: 372973 - DNA, 122 bp, Homo sapiens
cacctgtgaagctgtggccacaatcacaatggtgaacttgtccgtctctcgaagagtcctcgggccctccctccccatctccaggcaaccactgatccgctttctgtcactgtaatttagca

SEQ ID NO: 372974 - DNA, 122 bp, Homo sapiens
ggggctgtaggggaaagtgctaaagccgctgaggtaagaggccgaggggtcgagggccctcgggagcttggtgaaaagggagttaacccccaggatcctacctgcagggactagaaaaatgg

SEQ ID NO: 372975 - DNA, 122 bp, Homo sapiens
cctgagcgtagcccgcagcccagactcggacccgcctcccggaccctgggcccctccccacgtcggccctccctaagctctgcctcccagagtccgagcaccgcctggtcatgtgctacgac

SEQ ID NO: 372976 - DNA, 122 bp, Homo sapiens
ggattttggcgctcctgctgttgttaagttaccgtagggtctcttggcgcggagggaacacgcgctgcgttgcctaggtgtctcattggacttggagaagaacacctgaggcacctctacga

SEQ ID NO: 372977 - DNA, 122 bp, Homo sapiens
tgctcctcaatgtcccatcccctcccgaactgaccagcggtgctatctacggggaagcaccggggcagttgttgttgaattgatttcagttaattcagtttttaactgaatcacacaaagga

SEQ ID NO: 372978 - DNA, 122 bp, Homo sapiens
ctgaaaaagtgactcttatccagactcctttaaaagaaacacctttattgcaagatcacacgtggactggaattggaagaagaaagcaaagtcccaggggatagagaacactctaggtctcc

SEQ ID NO: 372979 - DNA, 122 bp, Homo sapiens
ggggagggggcggggaaggggcctggcgaggaggggcgtcagagcgctgtcaccgggtgtcgcgccgccctccccgcccctccgccgggcgtgtggggacgccggagggcgggagtctccgc

SEQ ID NO: 372980 - DNA, 122 bp, Homo sapiens
ctccctaagtcccactggcttttcaacccactgcagtcttccccaatcacgtctccgtctcggtcttgaggaagtccaaagggatttggacaaatgcaacttcatggggtaaagaatatggc

SEQ ID NO: 372981 - DNA, 122 bp, Homo sapiens
agaccagcacctttgacagcctgaggagctgaaaacgctacctggtgggcccagggtgggcggaccgggcgtttaaaggtcaaggtcaaggtggggtttggcaagtgatgcatagcgctcaa

SEQ ID NO: 372982 - DNA, 122 bp, Homo sapiens
cgcaggcggagtcctcaatgaccagcactggcactatgtgcgggtggaccgatttggccgcgatgtaaatttcaccctggacggctatgtgcagcgctttattctcaatggagacttcgaga

SEQ ID NO: 372983 - DNA, 122 bp, Homo sapiens
ggccacgctccgctctagaggagtgggcggtgcctcccggcctagctgccggggtctaggcgtttccgaggacggcgcgttccgggaaaggcgggtccggtggctataccctccacccagtg

SEQ ID NO: 372984 - DNA, 122 bp, Homo sapiens
cgtcgctgtcgctgttgcctccgccacctcctccgccgccgcgcgcccctcggagttccgcgccccaccatgcccaacatcgtgctgttcagcggcagctcgcatcaggacctgtcccagcg

SEQ ID NO: 372985 - DNA, 122 bp, Homo sapiens
ccaccgagccttctttcccgggcacaggcctgcgccgacccgaccctgctcgagagcccgcgctagagtcggggaggatctgcgcagagaccgcagcatcacccaaatcggcgccggccccg

SEQ ID NO: 372986 - DNA, 122 bp, Homo sapiens
aagcaattatcgccggtcttgactggaaaagctggtcattaattagcctccttttgccttcggtgcagcggattagctggtgccgggactgagttaatggaaacgcgggttaaatgagaaaa

SEQ ID NO: 372987 - DNA, 122 bp, Homo sapiens
aggctgaattccagatgtgacctgaccagcggcgtgaggctttcccaggggttagcttcacgcaatccaggctgtgctggcttctcctggcagtgtccccatcatcaacttccatgacattt

SEQ ID NO: 372988 - DNA, 122 bp, Homo sapiens
tctcccacaagtcatttctctcagaaggatcattacctaaaatagcagaaaacatacgatcgaggttgctcaatttcaatatgctgggatcctatctctgagtgcccacctcccccaaaacc

SEQ ID NO: 372989 - DNA, 122 bp, Homo sapiens
cacactgcagtactcactggagagtggacatgtcagctcagaaccaatcctgactcccaccgcaccctcacctctccaggacaggttctcaccgcccattcccccatcacctggcacctcag

SEQ ID NO: 372990 - DNA, 122 bp, Homo sapiens
tttctgcagcatcatgtatggcattgtgatccgaactatttggattaaaagcaaaacctacgaaacagtgatttccaactgctcaggtaagtctctactctgcatggcccaattcttggcta

SEQ ID NO: 372991 - DNA, 122 bp, Homo sapiens
gtttggataacgtggtgcttcccagaatgcttatagtggttcattcttcccatgaatacacgcaatcctctgaaatcctgatgtgaccttggcatgatttaccaatagcctcttttacattt

SEQ ID NO: 372992 - DNA, 122 bp, Homo sapiens
cgcgagcggcgctgggcggggctgcgtgcgtggcgtgtccgctggaccaggggacgggggcgcgccgcaggtgtaggagctttgcgcgcctacctggcggtcgtgggtcgaggaggggtcaa

SEQ ID NO: 372993 - DNA, 122 bp, Homo sapiens
ggcagggaactttgtttaccctagcacacatcaatgaatcttgttagcagtgagagaaaccgaggcacactgaatcgtggacactgttggtctgggaaggcaaaggaagaggatggaatcag

SEQ ID NO: 372994 - DNA, 122 bp, Homo sapiens
cctgtgtgtgcagaagtcaggaagcctgggtacaaggcttcttcccggtccgggatgactcggtgttaccgccgccctctgttaggccagaggcctttgacctgcctgcctgcctgccccac

SEQ ID NO: 372995 - DNA, 122 bp, Homo sapiens
gatataaaggcagggaaatggtgccagagcatggcctaaaagcagaagctgccagcaccccgccgggacagaagatgagctacaggcctgaatatggggctgtcttagtcaatttgtgttgc

SEQ ID NO: 372996 - DNA, 122 bp, Homo sapiens
ccaacaaccgtactagttgccacctccaaattagattcaaatgtcatgctgaaaatttcccgttggtattttgctttttatacagtttgtaaatggaaagctttaactccgaattggaaact

SEQ ID NO: 372997 - DNA, 122 bp, Homo sapiens
cccacggatggccattccggaatggagttccacaagggctgaaggtttgaaagcagcacacgataaggcgagaccttccaccgcgttatattccggaccaactcaaaccaaaccgtatccca

SEQ ID NO: 372998 - DNA, 122 bp, Homo sapiens
cccggcagagctcagtgatgtcagcttcagcaggctcctttgcttcctcagctgtctccacggcggcatcgtctgggccaagggagaatgactaagtgtcccgcctacacccggtgctaatc

SEQ ID NO: 372999 - DNA, 122 bp, Homo sapiens
gcatgctgctctgctcactcctcttcagcccctgaggttgagagagaaacagaaccgtcacgaagtctgggccagaatggcccacgggggacagcgcagtatctggatatggggtcagcaga

SEQ ID NO: 373000 - DNA, 122 bp, Homo sapiens
gtggtgggaagagatacatttccattcctgatatggccacaagagggagctcccaatggtcggctgcacctgaaagtcctgtccgtgaaaactgacaaagaaaacttgatttaaaaggcgtc

SEQ ID NO: 373001 - DNA, 122 bp, Homo sapiens
agactgtggtctccagaataacaaccttagtacttggtgatttttacttgttttttccgtcgtaaattcttcttagtgtattacacttgtgccagtttattcttccaaaaactctgttctgt

SEQ ID NO: 373002 - DNA, 122 bp, Homo sapiens
acgggctgccctcaggaagaccagtgttgcccgaggaggggccggcctgctggcctggggcgtgcagacactgctgagtggagacagagctgcggggtcccatctggacacttacttgccca

SEQ ID NO: 373003 - DNA, 122 bp, Homo sapiens
gggaagcggaggctgaggtgagcctagagcggcggttagagccggtgaggtgaaagagagcgaccgttaggacaggctgaggacttctggtctgttcggtacttgaactgccagcaaatttc

SEQ ID NO: 373004 - DNA, 122 bp, Homo sapiens
tattggccccacctggctcatgagagcaacttccagacctgggcagaaggccaggaggtacgtgtgccatgtagggtgggcattacatgagaagctcataaagcccagtgcttacatagatg

SEQ ID NO: 373005 - DNA, 122 bp, Homo sapiens
gacacggcggggcgggcgggggtggcagcgtccgaggcggcgcgggccctttaaggcggccggcctcgttagcatacatttgcatggccccgccccgccgcttgaggctgccgcgcggggct

SEQ ID NO: 373006 - DNA, 122 bp, Homo sapiens
tcagagatgaactcagttcttactggtaaccttgttctggttaccttctagtttctctctcgaggtctaactagaaggtttgacaaaagatgagagtaatttatggatacgttagaccttgg

SEQ ID NO: 373007 - DNA, 122 bp, Homo sapiens
ccccttgcagtccgggcctttgggctctcatgtttagggtcagtccagggactttgcattcgttaccactgtgcccatagtgaaccggctgatgccaagacaagggcagtgccatcagggga

SEQ ID NO: 373008 - DNA, 122 bp, Homo sapiens
gaaaccctattcgttgcggcagcgcagcagccaccggacaagcgctagcaacgtcacaaccgcccgccaaaatcgcacttcccacccagaaaactgcccaagggcgaacgttcccggggcgg

SEQ ID NO: 373009 - DNA, 122 bp, Homo sapiens
ctaggtggaattatgcaaaacttatcagggccacaagaagggtcgggtgacaggccaatacgtgacaagtttaggaaagacagcaaaaaaattgttggttcaccactgtcgcccgagggtgg

SEQ ID NO: 373010 - DNA, 122 bp, Homo sapiens
ggcgccagtgcccccgccgctgggcagccctctggccaccgcgcactcggagctgcccttcgccgccgccgacccctactcgcccgccgcgctgcatggccacctgcaccagggcgccacgg

SEQ ID NO: 373011 - DNA, 122 bp, Homo sapiens
cataggcttctacgaaggggggcgggggctcccctcggtgaccacgtcctctgccccccccgccacttggctccgtggtacgtcccgacctctgctgaattgtcacacccccctgctctcct

SEQ ID NO: 373012 - DNA, 122 bp, Homo sapiens
gggaataatgtgaacctctcagggatatcatgaagatgaaacttatgtgtgaaaagtactcggcacttaatccagtggaaaaaatggttatcttcttgataagttccaggctgtatcttttt

SEQ ID NO: 373013 - DNA, 122 bp, Homo sapiens
acatatgctggtgttagtagattattataaaagcaactctggtattaagcacatttttaccgaagcacaaaagactgatagattgactcattaattggttcagcaattatacagtgagtgac

SEQ ID NO: 373014 - DNA, 122 bp, Homo sapiens
ctcccgggggaatgcctgggcaggtagagggtctggggtcattggcttaattgaggtgaacgatttatatcagattacatccctgtgcctggttccatcctggcgacaggtgagctggagac

SEQ ID NO: 373015 - DNA, 122 bp, Homo sapiens
ggagccggacttcctctccgcgccccccgactccgagctcctcttaatggagatgcggtgcggaaagttcaatgaaaagccttggctctaaccctgtggacacaccttccgtatctgctttc

SEQ ID NO: 373016 - DNA, 122 bp, Homo sapiens
tcgcccaggccccgaggcccgctccccgctccctctgccgcgccgggcaaggcctcacctcgcaaagccccacgaagaggatcttggccttcagcatctttgtccgccgcggcgcagccgcc

SEQ ID NO: 373017 - DNA, 122 bp, Homo sapiens
cacatttcataaaacactgatcataagggacacttgttttccagagaattcagaaatggacgccgaatttccaggtactggcgaggtctcccttggcctgtgtcatgcaggaaggtgtcagc

SEQ ID NO: 373018 - DNA, 122 bp, Homo sapiens
gtgcagatggcactggggagtctcgaaggcttcgactcgggctgagcgtgggggtgggcgcgggggatgctcagtcctgaccccaccaccgcggcccggaggacataagacgggggctgtgt

SEQ ID NO: 373019 - DNA, 122 bp, Homo sapiens
cacctcctttacagagagaaattcaagaagcggaaagactagatgccgatccaaaaagtgcgcgatgcgagtagtcaagtcgtactccgccatcttgccaaagaaaagggagtctgtgctca

SEQ ID NO: 373020 - DNA, 122 bp, Homo sapiens
aaattactgacatgaggcagattgattaatagaaaaaaaggcacacaaacttaatgtgtacgcatgggagcgttcagaatgaagacccaacccccctaaggaggtacaaaagcttgtatacc

SEQ ID NO: 373021 - DNA, 122 bp, Homo sapiens
ctactaggacgtctcgcagggactgtggcctcctagggagcctggtcagttcaactgctccgagcgaactttccctccgcctctcccacacctgaaccttcgccgcccctccctgcgcaccg

SEQ ID NO: 373022 - DNA, 122 bp, Homo sapiens
ccttgcctgaaattagctggttatcccagttctggactgatcatatgaacacagttcatccgtagccagaaaagcccagacaactccaaatagagatctgcctgaccttcagagtttgccta

SEQ ID NO: 373023 - DNA, 122 bp, Homo sapiens
ctcagagaaaatacaagcccgttttccctagctgtgccatttggtgctctgccaggctgccgtgcaagggaataccgacgagacgagctgcactgtctctgatttggagccctcaccggagc

SEQ ID NO: 373024 - DNA, 122 bp, Homo sapiens
tgcataattctggcctgcttcctgctgtccggtacaaaaaggagtaaatggcagtccctccggtgctcagcggcaatggcaatcagaccaagtttgcaaagaagagttttctttctggaaca

SEQ ID NO: 373025 - DNA, 122 bp, Homo sapiens
ggccccaaatgtcccctttttataaggataccaatcatattggtttagggtccaccctaacggcttcattttaacttgattacctctgtaaagaccctgtctctaaataaggtcatattcta

SEQ ID NO: 373026 - DNA, 122 bp, Homo sapiens
gcgtgacattgcacaggtttagaaacgcacagcgggaaggtggccccggcgggccgagggcgcaggatccctgctccgtccagggtccgtcctgcgaggaggcgccgggggcgggcccgggg

SEQ ID NO: 373027 - DNA, 122 bp, Homo sapiens
gagccgtggccagccgggggctccacggagtgaataggaggcggctcaggcttcctggctcgcgtgggcgccagaaagcggaacctcccgggccagtcgcgcggtggtcaccctcttgggag

SEQ ID NO: 373028 - DNA, 122 bp, Homo sapiens
ggtggtcttgagaataaacaaaggtacagtctacagtctgtcaaactgaaaggcatttgccgtgctcaagtgttaggcttccgcagtgacaatttgctgaatctctgtctgttagaacactg

SEQ ID NO: 373029 - DNA, 122 bp, Homo sapiens
attttcgagccttttctcccttctgcagttcagcactgggaaaggcgtgaggcggccggccgtttggctgaatgcaggcatccattcccgagagtggatctcccaggccactgcaatctgga

SEQ ID NO: 373030 - DNA, 122 bp, Homo sapiens
cagcctcagcggcagcctggctttcctgtacagccgctgcagggtgtaggatgctgataacgggaacaatgctgcagaggaaaagtggcagaagcaggacaatgagccggcggcaggactct

SEQ ID NO: 373031 - DNA, 122 bp, Homo sapiens
tcgccggaaccggcctgggctcggcatcatcaggtcgcgccgggcaaggactagcccttccggcgcataggcaatgacgcaactccgccctgcgcggccaaatggataaccggtagcggtca

SEQ ID NO: 373032 - DNA, 122 bp, Homo sapiens
atcagtttaaataagtacaacaaagatttatgacttcagctgggcgaagtggctcatgcccgtaatcccagcactttggaaagctgaggtgggtggatggcttgagcccaggagtttgagac

SEQ ID NO: 373033 - DNA, 122 bp, Homo sapiens
ccgcagtgcctgctcacagtttcctcaaggtcgagtctcttacaggaacataagttcagccgctccttttagagggcgcagtgaatcatccctcttagcaaatatagaattccctgtgacct

SEQ ID NO: 373034 - DNA, 122 bp, Homo sapiens
caccatcttcctcttttgactgccattacccggagtgtcgccgtccccccaccctgcgggcggttcgcagatgtttcccgcactggacggtcaggtctctgctccccgggttttctgctcgc

SEQ ID NO: 373035 - DNA, 122 bp, Homo sapiens
ttgattggctgaggcgggagcaggcggctggccggcagcagttactcggggtttccggtgcgaggccagaggtggggaagccatcggacgtcggcggtgaggtacgtgcagcggcggccggt

SEQ ID NO: 373036 - DNA, 122 bp, Homo sapiens
cttgcccggggatgtgcacctgccgtgcgctccgaggtcagtggcaggtctgcaggcagccgagggagcggtgaagccggaagacctgtctctgcccatgtgcaaggcagtgatttcgggtg

SEQ ID NO: 373037 - DNA, 122 bp, Homo sapiens
aggagttgaggtcttaagaaggcaacttctgggcaatcttccattgtgaggtggggtccacgtccccacaacccacgaacttgggtggccgtgcggcatgtggcaaacctgaggggtgactc

SEQ ID NO: 373038 - DNA, 122 bp, Homo sapiens
gcacccggggaccggacacctgtaggcaggcagaggtgacacactttattgtctggccaccgtcgcctggtggcttctgtaacaaagtcagaataacccggcatgaagaagaaaaaaacaac

SEQ ID NO: 373039 - DNA, 122 bp, Homo sapiens
tcccaaagtgctgggattataggcacctggcccccactgtgccatttattattataggcacgcctggcccccactgtagcatttattattgtgtgacccaggcaagccacatgtctcagtct

SEQ ID NO: 373040 - DNA, 122 bp, Homo sapiens
cttgtgtggacaaacagcaggtgtccagctgttcctggtcttggccaggcttctctccgtcgttttctttggtctcatgagtggctgggcacatggtggctcagccccccgggcacagtgaa

SEQ ID NO: 373041 - DNA, 122 bp, Homo sapiens
aaaagaagtgtcaacaatgcaatatcttatcaaaatgtgattctatttcttctctcacttcggaaggaaatctgcagaatcgcactgaagttgcattattgctctccaatgccaatccaggc

SEQ ID NO: 373042 - DNA, 122 bp, Homo sapiens
ggccgagggggcactcacgcctcacactcgtgctcgtcctctgcctgaaagtggtacgtccggttgtctgtcgggagagaagggggcttctgacccacagaaatgctgctggccttcccgga

SEQ ID NO: 373043 - DNA, 122 bp, Homo sapiens
gacaacccctggtgtctttcgtgaagctctccccgaagggtggatacatcgtggctgccacgctgggcaacactcaagctctgggactacagcaaggggaagtgcctgaagacatacactgg

SEQ ID NO: 373044 - DNA, 122 bp, Homo sapiens
gagttctagtaactgtgaggcaccatgccaactacttacatattatttcacccaattttccgaacatcctgtcaagtaggtggtgggaattttcgttttatagatcaggcttggaaacgtga

SEQ ID NO: 373045 - DNA, 122 bp, Homo sapiens
gcaggcttctaagggagctgttgtaaggtgctcttccacacctggagcaggaggggtggccggcctctctagcgcggaaggagaaagtgacttccgacttaggtaccaaggcctgagagtgt

SEQ ID NO: 373046 - DNA, 122 bp, Homo sapiens
ggtccatgcggttgtagatctcctgcagacgggcccctttctccagctgataaataccctcgtccacattggacagcagctccttcactagccccagtgctgtggtcaggtcctggcgctcc

SEQ ID NO: 373047 - DNA, 122 bp, Homo sapiens
gactcctggtacatggttgatatttgcagcaagcattcctgagggcccatgccacagccccgaagcccacctctgatttcagctacagctgtagtaggcggttctatgcttcctgctcccta

SEQ ID NO: 373048 - DNA, 122 bp, Homo sapiens
tgccaccgacggccacttccgtttccccgatagtatttggggatctcgaagcgatacttccggctccccccaggtccccaagctttacttttgtggggcacgacgagaaagtccgcagcccc

SEQ ID NO: 373049 - DNA, 122 bp, Homo sapiens
ggccccaaggtaggtggaactcgtcacttccggccagggaggggatggggcggtctccggcgagttccaagggcgtccctcgttgcgcactcgcccgcccaggttctttgaagagccaggag

SEQ ID NO: 373050 - DNA, 122 bp, Homo sapiens
gaggttttggagatgtttattttttataaattctgagtttctgagaaattattctggcagcgaaggcaggctaaatgagagaaataagacattagaggcaagggagctggctatttgattat

SEQ ID NO: 373051 - DNA, 122 bp, Homo sapiens
cacctagaggaccacggctccatctccgagccccgcactcacaactgtgaactcaacccacgaaattgcgactgcagaccaacttcgtcctttccaaggtatcgccagggatgtttgctaca

SEQ ID NO: 373052 - DNA, 122 bp, Homo sapiens
tccgtaaagcgaaagagcgtaaagttattttatgaaactggtgaagcatgtttcagcggtcgaaccaagatttaaagttaggtccctaccgcaaattcagcgctctttcttatggtggtgag

SEQ ID NO: 373053 - DNA, 122 bp, Homo sapiens
ctttctcaggatgagtgctgaggaggaaaaggccctttcctccaatgtcttcagaggagacgtctgcccagtccagactacgtgcctcatgccagccagcctgtaaatgacaggaaagagaa

SEQ ID NO: 373054 - DNA, 122 bp, Homo sapiens
tcctcgctccttcaagcctccaccacctcgcagccggggaggcaactggagcgaaaccagcgacaggtaagggccccgcgctgtgcagctctccgcttacccactccaagggccctggcacc

SEQ ID NO: 373055 - DNA, 122 bp, Homo sapiens
ctggccccttgccccacagggtgttcgtctgtgaaggggtggagtcggtgggggggtcagcgggggagggactgttgaagacaggtctccacacacagctccagcagccacatttgcaacct

SEQ ID NO: 373056 - DNA, 122 bp, Homo sapiens
cttctgcagagcagcacgcagaaaatgtgaagacaaaagaatgactgcccacaggaggcgcggcacagggcagaactctgctcggttgcttgtccgtgtttggtaagagaaaaggctcccgt

SEQ ID NO: 373057 - DNA, 122 bp, Homo sapiens
aggccctgctttccttcctgcgtgtgccctgggatcactcgctctgtggagtccgttgtccgttctctgaggactcaggaactgaggcctcctgctcacagccacgctgtggagctgtcttg

SEQ ID NO: 373058 - DNA, 122 bp, Homo sapiens
cctgccaggggcctcattacaggctacagagacccttctcagcccttgactcatgtggatcggaacagctccattccacagctgagaaaaccaaggttcaggaaggggtgagacccacccaa

SEQ ID NO: 373059 - DNA, 122 bp, Homo sapiens
cccaacctgtgagaagaaaacatactctgtgcctgcccaccaggaacgcgcctatgagtacgtggagtgtcccattaggggcactgcggctgagaataaggagaacctagatccttcaaatc

SEQ ID NO: 373060 - DNA, 122 bp, Homo sapiens
gctggggtccatgtatgtacctcatggggctgggggctgttgccccaggagacagcctcacgctgtgccccttggccttgaggccccgaaggagggagggcttcctagggcccagccatagg

SEQ ID NO: 373061 - DNA, 122 bp, Homo sapiens
ttgggtcttcatgcagccatggatctggataaaccatctgtttggggctcattaaaacagcggaccaggccattgttgatcaacttgagcaagaagaaggtgaaaaagaacccaagtaagcc

SEQ ID NO: 373062 - DNA, 122 bp, Homo sapiens
gggtcaagggtcttccgaagaaagcgagaaaggaacaggcgccttcaaaagcccacttggcgatgggttacagtaagaggtacctccaggcccgggcatccgctggaaacaggggtgggtag

SEQ ID NO: 373063 - DNA, 122 bp, Homo sapiens
tgatcacagagtgctctctggacctatagctgccaacttgaacccatgagagaacaagcacgagatgacaaacaccacaagaaaagtcgcaggggagaaaacgcagagggaacctgggttcc

SEQ ID NO: 373064 - DNA, 122 bp, Homo sapiens
cgagtggcagccgcttacattttctttttcgctaccagttgcgtcacctagcgaggtccacgctgattggctgtctgagctgggggccgaggtggtgttgggtgagagggggtttgcctctt

SEQ ID NO: 373065 - DNA, 122 bp, Homo sapiens
gagacctgggggcccactttacccttccctgtccttggccccttctctgcagtggctgggcgggcacctgtgttctcctgcctggagtctgggcagaaacggggctggcagagacgcagcct

SEQ ID NO: 373066 - DNA, 122 bp, Homo sapiens
actgcgcgggctgaaggcgggggcggtgccatgacgcgcctcgggggcggtcctcgggcgcgcaccgctctcttacactcgggcctcagaagtccgtgccagtgaccggaggcggcggcggc

SEQ ID NO: 373067 - DNA, 122 bp, Homo sapiens
tgaaaagagcaggtcgggtgagcagaggtggctgctctggccccctgggaggtgagagggcgcgtgcctgtgtcagggcaggggaaggaaacctgtttagttttgctgaatcatggtttcac

SEQ ID NO: 373068 - DNA, 122 bp, Homo sapiens
accacccctgcccaccagcctaacaaggataacaaccttccataacaaggatatgacaatcggctacccgtgtgcccagccctggggtggcttccttaggtgcacacaaccgcccccacgat

SEQ ID NO: 373069 - DNA, 122 bp, Homo sapiens
cgggcgccactctctttgtctgacaagagagtcgtgaagcctccgcggtcctagaggggccgctggctgggacgcttcgctcggcgcgcgcaggtggagccagcgagaggctctgaggctgc

SEQ ID NO: 373070 - DNA, 122 bp, Homo sapiens
tgggtccagacatggaagaccccacagcgtccctgggttcggagatgggagaccccgcagcgtccctgggtccggacatgggagaccccgcagcgtccctgggtccggagatgggagacccc

SEQ ID NO: 373071 - DNA, 122 bp, Homo sapiens
caggaaccccttttgactacagatggttctgtttttatccatgggagttttatggtatggcgatgccaagtctggaattgtaggctcagctacatgagaagtgtgtgtctgtgtgtgtgtgt

SEQ ID NO: 373072 - DNA, 122 bp, Homo sapiens
atcttgcaactgcacactcttctggtccgtgtttgttccggctcgagctgagctttctctcgccatccaccactgctgagtgccgccgtcgcagacccgctgttgactcccacccctccgga

SEQ ID NO: 373073 - DNA, 122 bp, Homo sapiens
tatccacccaccttgggtgattagaagaatcaataagataaccgggcggtggcagctggccgcactcaccgccttcctggtggacgggctcctggtggctgtgctgctgctgtgagcgggcc

SEQ ID NO: 373074 - DNA, 122 bp, Homo sapiens
cctagccctagccctctccacaccaggacagaatgccatgttggcactccctacacgtggcgccctcttccccaaaccgccttgccggcccggcagtctcaagtgcctcgccgtgacgccgt

SEQ ID NO: 373075 - DNA, 122 bp, Homo sapiens
tctgcctgggcctgggccaacaggaccaggttacttgagttcagtggagaccctgggctgcggtggcagggatgctggttcctgtgtgactggatgggggtggggtaggcaggcttactggg

SEQ ID NO: 373076 - DNA, 122 bp, Homo sapiens
caattctgtctttggggatggcattgtctggagcacagctgacagggcctgaagaggattcggttgcaatatgctgggaaaccccaatttgcattgtcctaagcattcaaagcgagggcaag

SEQ ID NO: 373077 - DNA, 122 bp, Homo sapiens
gagcttggctggccggctccgggcccgagacaggaccctagagaggatgttgcagaactccgccgaggccaaaaacagagagtgggcacgttgctgccggttatagaggaatgggaccacct

SEQ ID NO: 373078 - DNA, 122 bp, Homo sapiens
catcatttccacgttttccacatccgggaggaagcctggactgtgcagccttcgggcacccggcacagacactgtgctggcaggagcttcagacacgccaagtggatggatttggattgaac

SEQ ID NO: 373079 - DNA, 122 bp, Homo sapiens
tgggaaagcgattccagcctgggagtgacaggcctttcccacccagcagcggctggtgtccgccaggcctgcgaagaagcctggaaagatctgaagacagaaccaggctgcaaaagcgggct

SEQ ID NO: 373080 - DNA, 122 bp, Homo sapiens
tcccggacaggttgaggaagctgctccagaagcgcctcggaaggggagctctcatcatggcgcgtgctgctgcggcatatggacttttaataatgtttttgaatttcgtattctttcattcc

SEQ ID NO: 373081 - DNA, 122 bp, Homo sapiens
gagcagccagagccccggggggccgtcttggtgactgctggggaaagtactagctctcctcgcagagggagctctgacaggctcaatccaaaccagatgtgcagcagagagagcacagccta

SEQ ID NO: 373082 - DNA, 122 bp, Homo sapiens
catagtcattttcaggtgtggaagacaagccagtgctacgcggttgccatagtaacctgacgtcatattagcgacggtgacgactttttattgagaccaatttggcctggggagaaccgcct

SEQ ID NO: 373083 - DNA, 122 bp, Homo sapiens
acattgagggtctgctatcaaccatctgggggtggtggtcaaggagggcttcacagaaggcgtatgacttaagatgggtctaaaagaatggatatgagtgtgccaaccaggaactgtgagat

SEQ ID NO: 373084 - DNA, 122 bp, Homo sapiens
gctgacaggaggcgccggaccccagccccccagccgcaggttggagaggggagttgggagcgagcctggggcaagcccacatcccaccgtgcagcagcccggggctgggcccggaagacacc

SEQ ID NO: 373085 - DNA, 122 bp, Homo sapiens
atccgatttcatcctgccccacctccccccagttgctctagatgggtggcccagggctgccgggaagagtccactggccctgggacaccaacagttaactggagctgaatggcattcccttt

SEQ ID NO: 373086 - DNA, 122 bp, Homo sapiens
aggatcagctccaccaggctgatgagctccgggccctggacccgcagcaccagctcctcccgccgcttctgtaacgggtgcctgcatcagccccggagcaccaccgcctctcccggatgggc

SEQ ID NO: 373087 - DNA, 122 bp, Homo sapiens
agcaagccccaggcagctacactgggcatgctcagtagagcctgcggcttggggactctgcgctcgcacccagagctaccgctctgccccctcctaccgccccctgccctgccctgccctcc

SEQ ID NO: 373088 - DNA, 122 bp, Homo sapiens
tacacttcccagcaggcctcgcgtaggaatccggccttcctagtctcccgagatggacgacgggagccttctgaccggtcgtggcaatcccccctaggagccaggttgagcacgttttcaac

SEQ ID NO: 373089 - DNA, 122 bp, Homo sapiens
ggagaagagtttgcttttccttaatgccagcctgcagagatgaaaaccagaaggaaacggcgggatttgcctgccatccagctcaggattcctaaagcccatggtgagaaggtgctgctctg

SEQ ID NO: 373090 - DNA, 122 bp, Homo sapiens
gtgaacataggtgtaccccaggacccagcacccaggcgcagggtgaacacaggtgtaccccgggacccagcacccaggtgcagagtgaatgcctctgttgaccctgaagccgccggtgccct

SEQ ID NO: 373091 - DNA, 122 bp, Homo sapiens
aaagttccaaaggctttaatgctattgcaacggcagtcagaggtcaagctggtgggggtgcggtgcagctccctaacgcggggcagcctcaaagggggccgaccctgcccagcacgaatggc

SEQ ID NO: 373092 - DNA, 122 bp, Homo sapiens
gcatcttctgagctttctgggcacaagctgtcagctcagccatttctctgcctgcaatttcgctcttggtttataatcttgggtttaggctgtttttcaagggatagagttggtatcattca

SEQ ID NO: 373093 - DNA, 122 bp, Homo sapiens
aatcttgctactgctcactctttgggtccatgctgtatttatgagctgtaacactcaccgcgaaaatctgcggcttcacttctgagcccagtgagactacaagcccaccgggaggaaggaac

SEQ ID NO: 373094 - DNA, 122 bp, Homo sapiens
agaggggtgggcacagatgccgaggccctgctcacccgacacccggccgcctggccttggcgcccgcagtgcctcagtgctcctgatcagtagcggaagggatgccctggggagggagggct

SEQ ID NO: 373095 - DNA, 122 bp, Homo sapiens
tctctaggtatgtagatctcggatcccagtctccactagtttgggctcactggtcttgagcgcaagacctcggcatagcgcttactggaagtggcgtcgggaggaacacaccagttcgagga

SEQ ID NO: 373096 - DNA, 122 bp, Homo sapiens
atctttatttagagcccaagagttgttgtgactcagttttagctggtagtggcttgtacacgccaggggagttttagaactgttctgaagagagatggcagcagttcttccaccttttcgat

SEQ ID NO: 373097 - DNA, 122 bp, Homo sapiens
agccctttgcagtttggagtagtaatagcaaatcaggagctcctccattcccctccagcacgaagccttgggtgaagttaatcttcattcatcatttctgtctctcctaatcgatctctcgc

SEQ ID NO: 373098 - DNA, 122 bp, Homo sapiens
gctgtgcattaagatgttgctgaggattgcgaactcctgcagcatatttatactgtggaacggtgcggacagcaggagtagctgcagcggctgcagctgcaggacgtggacccattgtctgt

SEQ ID NO: 373099 - DNA, 122 bp, Homo sapiens
gcccatcagcgctggtctgctcctttaaaagaacgccatcgacgctcccctgtctttcagcgcctgcaggttccgggaggtcaggttgtattcctggcgggtcgtctggctgggtgggcccc

SEQ ID NO: 373100 - DNA, 122 bp, Homo sapiens
gggcacctggggaaggagagcgccccgtggggcctcggccggtggcctgtgccaaaaggccgggcagagctgcttcggtgtctgggtgaagtttccagccaacccaagaaggaaaccgaaag

SEQ ID NO: 373101 - DNA, 122 bp, Homo sapiens
gaagagattactgacaaaacagaccaaagtgttgggcttgccaaactccaggggcttcagcgtgaacacttcagcgataggaaaccctggtggggggattgaagtgtagggggaaaaagaga

SEQ ID NO: 373102 - DNA, 122 bp, Homo sapiens
ggagcagcgagaccgaggtggcggcggagatccagggcaggaaaaggcgggggaagggggcggtgattattctaaatgctcggcccagtgggaggagtgaagcacctctctcaggcacctga

SEQ ID NO: 373103 - DNA, 122 bp, Homo sapiens
caggctgcaccttactaatctcaaggcttcctgtgtttgtggctttggggccctcttcatcgtgtgaataggaataagaagattgttatttctggccgggtgcagtggctcacgcctgtaat

SEQ ID NO: 373104 - DNA, 122 bp, Homo sapiens
atggcgcgctccatcatgtctgtgggtgggggcagccatcaggtgccgggcaggccctctcgtcctcacacctgtcctcccccatgaatcctccagccggtcttccgggcctgctcctcacc

SEQ ID NO: 373105 - DNA, 122 bp, Homo sapiens
actgtaaacggagatcccgagggtctggagctgccgagagtgcgagaggctcccactccccgccggaagaaggggcttgggcctcctgggtccctatccgggggcggggaccagaaggttct

SEQ ID NO: 373106 - DNA, 122 bp, Homo sapiens
tatatttctagagaacagtttacaaagcctcatctttccaaacttaaccatttgtgtatgcgtcaaatcaagcctgcacgcgtgcgtgcatgtgtgtgtgtattttccccaaatggtgatga

SEQ ID NO: 373107 - DNA, 122 bp, Homo sapiens
gtatgagcttacacaaacaggttatataacaagtggagtggtgcgcctgcgttccaaactcgctgagtcacgctggcctgcatatctgcctcggcctattcttgaccaaagcacatccattt

SEQ ID NO: 373108 - DNA, 122 bp, Homo sapiens
gaggtgaaggtccagatgttggggtttcagggtcaagcattcctggcagagagcatggcacgtgccaagacccggatggggcgtgtgcctggcgcgggtggagggagctgtgaggagcctgt

SEQ ID NO: 373109 - DNA, 122 bp, Homo sapiens
ggactccagctccgtggggtgctagttaatgtttagtgagcggctctcttcactcccacccgcaaagcagggctgtgtcgtgctgccatctccgcggcgtaaatactcccgccgtggctgat

SEQ ID NO: 373110 - DNA, 122 bp, Homo sapiens
tggttgcccacattttcaaactctgtggccgatgtcatgtcagcaggctcttagcagctccgcctgcctcagtcttcatggaaggatccctgggggacagcaacacagtcagagggttatct

SEQ ID NO: 373111 - DNA, 122 bp, Homo sapiens
cctgggatgaggaatggggaaagcctggataaggccagggtaccatggagaaaatggaagcgggagactaacagaaataataagagttactcaaacactctaaaatctgacttctggagctc

SEQ ID NO: 373112 - DNA, 122 bp, Homo sapiens
aggagtgaaagaccagctccaaatcataggcccgccctgcccccagatctgtctctgggccgggtgccctttccataacacacactcgccactgcatgggggacagacatccttccggtgtc

SEQ ID NO: 373113 - DNA, 122 bp, Homo sapiens
acaggggaaggagagaggtgttgggggagggaggaggagggctcaggtacagggaaggtgcgtccatactcatggtatgttcaagaacatgagcgagcgtctctgtgttgtgtgtttgtggc

SEQ ID NO: 373114 - DNA, 122 bp, Homo sapiens
cggactctggcgccaagagctggaagctgtgaattaaccgtccctcttactgcagttgtacggatcctgggtgacattgacttaccggtgtccattttccatacactttagagaataggcat

SEQ ID NO: 373115 - DNA, 122 bp, Homo sapiens
gagagcccctgtagctggtcccaggcaccgacaccaggcttccatggggctgataaccagcgggcgaggtgacaaaacaccaagtcagagggagctttccaggctctgctgcaggagctgtg

SEQ ID NO: 373116 - DNA, 122 bp, Homo sapiens
gctcacacaagctggtgttcatttgcttcttctgtaaactgttcaggaccttcatgaaagcggtgatgcctgaccggtgctcaggggcagctttgcaagagtcaggctgatgtgtgatggtg

SEQ ID NO: 373117 - DNA, 122 bp, Homo sapiens
tggcatcattgaggctgttctggagaagtttggaacctacgaacactttgaggctgccaccggcaggcagctgctcaccaagtgccagatatggtccattgtgggtaaatacagcagaagga

SEQ ID NO: 373118 - DNA, 122 bp, Homo sapiens
gcatatatatttattatattatcttgtctcctttacagttttctatgcacgtgtgactagcgtatcttaaaaaaaatacagggagaagtgaggttgtcccttgtcaggcttggctctaccac

SEQ ID NO: 373119 - DNA, 122 bp, Homo sapiens
cctgtccagatacagcagaaccaggctcagcggctccagatagggcggaaccaggctcggcggctcccgcctctcccagcgcttgtcccagcgcctgggttttccttctgccttttgtgttc

SEQ ID NO: 373120 - DNA, 122 bp, Homo sapiens
caggtgagataaagccaggcaagccaatgggagggaccgcgtgagtgggttgaggccaagcggcgcgagctccagagctggtgaggcagctggtttgcgctggagccccagccacgaggagg

SEQ ID NO: 373121 - DNA, 122 bp, Homo sapiens
gcatcttgcgcaacctgcttatccgctaccgggaccacctcatctacgtgagtgccgccccgcccggtgcccgtccaggccccctcaggccccgccccgcccacctcgccccaccccgcccg

SEQ ID NO: 373122 - DNA, 122 bp, Homo sapiens
gccatcaaagagctgagtggctacctgagcaacctgcgcaagatgtgggccacgggaaaccggcctggcagagtacctgtgtgacaagctcaccctgggccgcagtggggaggagccctgag

SEQ ID NO: 373123 - DNA, 122 bp, Homo sapiens
tgagccacggcgtctgtggggtggccccgtcctcagattggcaggggttctaaaaggaagcgtatcctttcgtctggggtcccaggctcaaatgccgacggggccagagaggtaagaaaggt

SEQ ID NO: 373124 - DNA, 122 bp, Homo sapiens
aacttctgcccaagcgatcctcccacctcagcatccgcagaagcaggggccgcacaggcgcgcagatgtgtgactttctaaggtccggccgcccaaagctacgccgaccaatccaagtagcg

SEQ ID NO: 373125 - DNA, 122 bp, Homo sapiens
gaactgccccatggagaggcccacgtggcaaggaggtgatatctccagctctacaggcaccggctaaactccacatgggttcctggcctgcagaaactgtgagataacaaatgttttattgt

SEQ ID NO: 373126 - DNA, 122 bp, Homo sapiens
agaaacttttccctagcaagtaaccataaagcattttcccttaacagttcagattgagtccgtagcagaatgatatccatagctagcaattatttacatagactggcttttcaaaaccactt

SEQ ID NO: 373127 - DNA, 122 bp, Homo sapiens
tgccaggcttcgcaaataaaagtgcagcgtacgccgacacatgctacaacatgggtgagccgtggaagcctgctgagtgaaagaggccagtcacaaaaaagaccacataccgcatgagtcca

SEQ ID NO: 373128 - DNA, 122 bp, Homo sapiens
catagctccctcaactccttctctccctctcccccttccccaccaggggcgttccacatacgttgtcccgacacagcagtaccctgtgcagccaggagccccaggcttctatccaggtgcaa

SEQ ID NO: 373129 - DNA, 122 bp, Homo sapiens
ttggtctctctttatgggcagcagcgacccctgtcgggtctcaaattcaacctcaatcggcgacttaatctaggtggaggtaaagaggaagcgacccctcgacctttgagtacgggaataac

SEQ ID NO: 373130 - DNA, 122 bp, Homo sapiens
tttcagttttcagcgatgttggaatgtagcatcagaagctcgttccttcacactcagtggcgtctgtgcttgtccacatgcgctgggcgtctgggaccttgaatgcctgccctggttgtgtg

SEQ ID NO: 373131 - DNA, 122 bp, Homo sapiens
taaggatgtcccttgatttgaggttgtctgatgttaccttatgataatattcaggttatgcgttttgggcaggaatatcatagaagtgatgctgtgttcttctcaatgcatttcgtatcagg

SEQ ID NO: 373132 - DNA, 122 bp, Homo sapiens
ataacagatgaaacattcaaatcttttctttcctgttccagagaagtcagaaaagtctggcgaccttgagaggccaaaggtataaattcaaagttaaatagtaaagaatgaggccttccttt

SEQ ID NO: 373133 - DNA, 122 bp, Homo sapiens
ccggcgccgcggcttccctcaggccggggttccaggttggggctgggactggggccgggccgggcgcacgcggcgggagaaggggtaggcggggtcccggccaggctgcaggggccgggact

SEQ ID NO: 373134 - DNA, 122 bp, Homo sapiens
ggtgatgcagctatcggcaatggctggagactagctctgcggtctgctcgtggataaccgcgctccctcgctgccgggccacccgcacagccgggcaaaccaaaaggcccactttttcatgc

SEQ ID NO: 373135 - DNA, 122 bp, Homo sapiens
tcggctccgctcggctcggcgggggcggacgccgctcagctcccctcgccggccgccgcgcgcacctcccccgcggcgcacagctcccaacgccgcctccgcagctggcccggcggagtggg

SEQ ID NO: 373136 - DNA, 122 bp, Homo sapiens
tcagtttgtggagaaataatagatcttctcctggtcggctgttagcagggcagctgtggccgcccttggttgggggaatcaggagtgactggctaccttgttagtgggagggggtcctccca

SEQ ID NO: 373137 - DNA, 122 bp, Homo sapiens
ggacggacactcagcactgacacggaggccacggcagccacctgcagcgagccgccgctgcgcacagctccacaagtgagtttaaagccgggttgcacaggtggagaggacgccctgggact

SEQ ID NO: 373138 - DNA, 122 bp, Homo sapiens
gtcctgtgaagcgcccctgtccgcgcctctgtggggccctcagagagggctgccaggacgcgagccactgaggagccgctcagccagcgccatagcccttaggactatcggtcacattctcg

SEQ ID NO: 373139 - DNA, 122 bp, Homo sapiens
ggcagaattatcactaggcactgcaaaaccttccattgaaatccacgtttaccatggtgacgtttgctagttacggcagagctgatcaactgcagattttcctgctgctgaggctaaattgc

SEQ ID NO: 373140 - DNA, 122 bp, Homo sapiens
tagtctctctctctcgctcttttaaaataaatgttcataaagaagcatactgattttccacgacatgcttaggtcctcttctcaggacgcgatttcatgccatcatacagatatggaagaaa

SEQ ID NO: 373141 - DNA, 122 bp, Homo sapiens
tggaggagaagccattctgacgtacccaacattcagaagcgaggcccagacatagaaccccggtcttcatcgcagccatggctgaccagatgagccactccagtggagaccattgaaatgaa

SEQ ID NO: 373142 - DNA, 122 bp, Homo sapiens
aggaagcagagcccctgcaggcttgtagggaccgtggagaaacgctcacggcacatgggccgaagacaagaaagcaggtggcatggccgcagccgcacctccgggaaaggagcagccacggg

SEQ ID NO: 373143 - DNA, 122 bp, Homo sapiens
agactggttgatgtctccaccatcccagagggtgagcacctctcgatgagtagtgcctgccgggagggcggaatctggaagatgagctggtgcagtagcttgggcggcgcatgcagcagccg

SEQ ID NO: 373144 - DNA, 122 bp, Homo sapiens
gattaaggagtaaatgggaactacgtggattagatttgcggctgtgtcatcgacctttctcggggccagcaaagtgccaagtgtcaacacagtgagggagtcgaggggcttggctcagaccc

SEQ ID NO: 373145 - DNA, 122 bp, Homo sapiens
acgacgggaggcgggagcgccgcactgccttggaggcggggcaacgcttggaggcgggaacgcggcacgcgagcgttgggggccctaagcgtcgcgacctgggggcttcggggaggtagccg

SEQ ID NO: 373146 - DNA, 122 bp, Homo sapiens
atttcccaaggaggtagacgtggtgtccagaggacgacaaagatggcagctcaccatgcacgtggaccagagcccactccatggctgggcgagctgggcagtgggtgactggcaggaaatgg

SEQ ID NO: 373147 - DNA, 122 bp, Homo sapiens
gcctgcaaccaaaagacattaacacaggatccatgaattccaaagttaacatcggcttcacgccttgtctagtgaagttcagatactcccactttacagataagagaaggcaagtgactttt

SEQ ID NO: 373148 - DNA, 122 bp, Homo sapiens
aaaccccttggggcggatcacgcggtatcagccagtggcctccctggtggatagaaggatcgctctgcgccgggggcgggccagtaatcgtaggcggggcgcgggtccagagctccgattgg

SEQ ID NO: 373149 - DNA, 122 bp, Homo sapiens
gaaaaaggaggagggcgtgggtgccaaggtgccaagccacctgctgtcctgcttgctgcccgtcgtctgtagtggggtcacctaatgccaacctcaccacagtgggcgggtgctgccttgga

SEQ ID NO: 373150 - DNA, 122 bp, Homo sapiens
agcacggattcgctgctgtgcctcattcactaagaggccccaccccttccgaggattactcgtcctttgcagagtggacaactagggggcctgagaaaggcgaatgtcaccgatgaccgaac

SEQ ID NO: 373151 - DNA, 122 bp, Homo sapiens
gattgtatcccagattccttaccccactacagcgaaagatttttggaggcaagtgtctctcgggaaatgttgaaccacaagagcttttggatttgtacataccaggcacagttgaggacagt

SEQ ID NO: 373152 - DNA, 122 bp, Homo sapiens
aaggtgcagacgcggccaagaacagggctccctctgcaaagaatccaagcccaaaggaaacgcggaagggatggagaagagagacgcgggaacgagcagggagtctctcccgtcctacactg

SEQ ID NO: 373153 - DNA, 122 bp, Homo sapiens
cttgacccttctctccccgaagtggacatcaaggtgatcctccccccatgacctcctacccgtggcatcctgcgacccccacccccgctgccagcccagtcctcccaggagccctcgagggg

SEQ ID NO: 373154 - DNA, 122 bp, Homo sapiens
ctcttagccacaagacccggatctgccggctcccgcgggcggcggcgcaacagattgcagcgcctggagactccagctgccccgcctgccgagcatgcgcatgcccagcgcctgccctgtgc

SEQ ID NO: 373155 - DNA, 122 bp, Homo sapiens
accgtagggactgtcggccaacccgcgcgcgcacatcttccacccgtggactcgtcagggcgtgaggacccacctcacgtgaccattagcagcctcccgattggttttgctccttttttctc

SEQ ID NO: 373156 - DNA, 122 bp, Homo sapiens
ggggtccggctgatgggggtccggctgacggggggcccggctgacggggggcccggctgacggggggcccggctgatggggaggcccggctgatggggaggcccggctgatgggggacccgg

SEQ ID NO: 373157 - DNA, 122 bp, Homo sapiens
ggacaaaatgggcagatcctgtctatcccctgagaggtggtgttcctgctccatggctggcgtcaggagcacaggatagaggatttcccaccagacaatctccacaaacaggcctgagggag

SEQ ID NO: 373158 - DNA, 122 bp, Homo sapiens
ctttcgtgtcagaggctgtgagcagccgctctgctcacaccgagtggggctgaccgtgggcgctgagcagaggcagaagggtacaacccggctgtgctttttggaagggatcccggaggtgg

SEQ ID NO: 373159 - DNA, 122 bp, Homo sapiens
tatcagggcgttaaaatatctctctgtagcacaactgttccccgaggcaggaatccagatcgcatttggagaaaagaaggcagccctttaacagcccagttaaaagctctttcccaaatcgc

SEQ ID NO: 373160 - DNA, 122 bp, Homo sapiens
cagggacccggaggcctcggccagttctgagagagaggactctgcagccggggatggcggcgacgcccttgtccccgggggacaccagcctccttcgcagctcagctcctcgcccagtgctg

SEQ ID NO: 373161 - DNA, 122 bp, Homo sapiens
aatttacattcaaggtgaaacgcccagatcttgactgcacattagctgagttcggacacacgcgtacacccgtctaaaatctgagatgcaaaaaagcggcataatcaaacgggctgctggat

SEQ ID NO: 373162 - DNA, 122 bp, Homo sapiens
tctttagaggcggccacagccttggtgatgagctctgacaccgggggaccagacgccttacgaggcgtacccccagcctttttggccgccttcttctttacaggggccttctccgcaggagg

SEQ ID NO: 373163 - DNA, 122 bp, Homo sapiens
attccagttagaaatgcccagtttcctgggtgtgtgtgtgacgggggcggggaaccacaacgttaattttatccccgacatagggagcgcctgagtggtggcttttcaccgggtgtggctcg

SEQ ID NO: 373164 - DNA, 122 bp, Homo sapiens
gagcgctcctagctggccgctcccacaccagggctgcctgcacccgactcagcagaggctcgtaaggccccagcacctccaccagggcccgctgcgccgcctcaacctgctggtcccgctcc

SEQ ID NO: 373165 - DNA, 122 bp, Homo sapiens
aaacttcattgtcattgctataattttaggcatccgtatttctcacaagttccccttgcccgtcttgtctccttcattcaatccatgctctatattgtggccaatgcattctttctgaaata

SEQ ID NO: 373166 - DNA, 122 bp, Homo sapiens
cggaaccgagctccaagaatgcctgcgaggaggctgtgggtcctaccctatcgccgcttacgcagtcccagcctccgcggcgcccccaaatgccgcactgttgagtcatctcagcgctgcct

SEQ ID NO: 373167 - DNA, 122 bp, Homo sapiens
ttttcccagcagggccacaggagacagacagccaaagctagacaacggggagagcagccccgggaggctcaggcagggagggcgggggattcccagatctgggaggggagacccgagagccc

SEQ ID NO: 373168 - DNA, 122 bp, Homo sapiens
cggaccccgcgcctgcctgcagcaccctcacacgggtgcgaggtccgtgccaatgagtggcggctggaggggcaactcctcattctatggcctgatggcagggccttctctggcttagtccg

SEQ ID NO: 373169 - DNA, 122 bp, Homo sapiens
ttgctgatggcagatgtcgggtctgcctcacttatacgtgcccttgctgatggcagatgtcggatctgcctcgcttatacgtgcccttactgatggcagatgatgtatgtacatttcacaag

SEQ ID NO: 373170 - DNA, 122 bp, Homo sapiens
ttccttcttcgggtttggattaagttcctaacgccacttgcacaaactagggtttgggctcggctgttttttttttttttcttccagtgtgggcaataaataataacttttaagaggcaacc

SEQ ID NO: 373171 - DNA, 122 bp, Homo sapiens
cggggcggcgaggggccgcaacggtgacgactgtggcagagaaggcccggaggggctctgcgttctgtagtggcgctgcttgggcccttggcggattgtaagctgctggttttgcggctggg

SEQ ID NO: 373172 - DNA, 122 bp, Homo sapiens
tttaaaaattctcttagccacgttgattgtacgggaaaagcctttttaaaacatcttttacgttgcttaaacctacagtttcgaaagcattccgaaggctaaagtgagaaataagcccaggc

SEQ ID NO: 373173 - DNA, 122 bp, Homo sapiens
gcagcgccctgctccgggagccgagggttttccccgccagggtcaggcctgggggcggggcggggcgggggcgggggccaggccgtgtgctctgcccagcgggctggctcaggcctcggtca

SEQ ID NO: 373174 - DNA, 122 bp, Homo sapiens
cctttctgtgctgtgtctggaggtgacagcagggttgtgtgcacgtaagggacccattctcgtgacgcagcccagacccctcgagcccaattcatataaccacaaagtcaaaataaccacga

SEQ ID NO: 373175 - DNA, 122 bp, Homo sapiens
ccaactacaataccgacgagttctcaggctgggctgtggaatggtcgcttagcaggaattcggcagaatgcagatggtggaagggctgatttctcatcacgtcttccaactgtgtccttgag

SEQ ID NO: 373176 - DNA, 122 bp, Homo sapiens
gcgggcccaatgggagcacagcagcaggaagtaacttccagacagtgccataccgccaagcgcatgcgccaaacaggctccagtgataaagcgcctgggagatgtagtacccagtattaagg

SEQ ID NO: 373177 - DNA, 122 bp, Homo sapiens
gttgcccgggcgctcttccaagtaggtagcagggccgagtgaatgagcctaggcaccgcccggtattgctgcaacagccaggcggcgctttgacttctgggtcagtgtcactgcctacctga

SEQ ID NO: 373178 - DNA, 122 bp, Homo sapiens
gggggcggcagcgctaccagatgggccacaggacgtacaggcagcgctcggtgctcatggcgcttagaaagctcaggcttgcaaggtaggaaaacatcatcacagggctgaggattttgaag

SEQ ID NO: 373179 - DNA, 122 bp, Homo sapiens
ttaagagctgtaacactcaccaggaaagtttgcagcttcacttctgagccagcgagactacgaacccgcgagaaggaagaaactcggaacacatccaaacatcagaaggaacaaactctggc

SEQ ID NO: 373180 - DNA, 122 bp, Homo sapiens
tgtgacaatggaaagaagccattgattgagtaatgtgtcactacaggccaattctaagagcggcttgacatcgtagaagaagtgattgagtttctgagagccacaaaaactcaggtgtgcag

SEQ ID NO: 373181 - DNA, 122 bp, Homo sapiens
gactacggcagtggctcctctctactcccagctgacccccagaacactgtcaccgcgccgcggaggagagggggctttgcctcaagtcaggaagatcctcgcctctccatcccttgcacatt

SEQ ID NO: 373182 - DNA, 122 bp, Homo sapiens
gaagaaagctgtgcccttgctcctggcggcttgtcccaagtgggcggctctgggcctggtcgcccaagggctttgcggctgacatccttctctccatggcgccctgggacctgccctgctca

SEQ ID NO: 373183 - DNA, 122 bp, Homo sapiens
cagtgaaggcggggaaggtgaacctgtggccgtcggcagatctgcagatctgccggactgcgggtcggggcgtggcaggggcctagtccccgccccggccgtcagcctgtcgcctctggctc

SEQ ID NO: 373184 - DNA, 122 bp, Homo sapiens
gcatttatgccagttctaggaagttcacagcaattagagaacaaaaacgaaagagaaaaacgcaaagctttcctgcaagcctgcagggtcgtctctgaaagctgcctccacccctgccttgc

SEQ ID NO: 373185 - DNA, 122 bp, Homo sapiens
agtgaagaggttctctgaggagactcaaaagtgactctgcatttggttgacagtgaccctcgaggcagagcaggtattgggcaacataaaagttgtgaggagtaaatgagaggcatgggaaa

SEQ ID NO: 373186 - DNA, 122 bp, Homo sapiens
tggaaaactttgtaattttgaatcgatttggcgatattttccaggccttttccctgtacccggttaccgaaataaactcttctttcccagttcatcatgagaataagcagcccaacccctgg

SEQ ID NO: 373187 - DNA, 122 bp, Homo sapiens
gtttatgcgtaagtgactggcagatggttctcacgtctcacctttggaggggagtggcatcgatactgccctggttcagctaatgcaagtttgtcaaccctacctaaggcgggggacagcac

SEQ ID NO: 373188 - DNA, 122 bp, Homo sapiens
gccttggcttcccaagtagctgagactagaggcatgtgtcatcacaccctgtttttttttcgtttttgttctttttcagatggagtctctctctgtcatccaggctggagtgcagtggtgca

SEQ ID NO: 373189 - DNA, 122 bp, Homo sapiens
accttggaacacggtggcaaagtggccgatcaatatatgggacaagtgggggcgggggggcggactctaaggtggaaaaaacaatactacttgggatttaaggaagcaatctggattctgtc

SEQ ID NO: 373190 - DNA, 122 bp, Homo sapiens
agcaagggggtgggtcctgggagccagaaaggctgcctccgcgaggattaggggcgctttcgggattcaaatgactggaagcagctggaaacaatgtccaaagctccaaaagtaaaggatga

SEQ ID NO: 373191 - DNA, 122 bp, Homo sapiens
ggcgctccatgactgtcccgggcgcctcctcgcagcgctgtcctcccgccgtcggaggcccgcagctccgcccagccgcctttttaaccagaatcccaagctcacgaggcggagcaaacccc

SEQ ID NO: 373192 - DNA, 122 bp, Homo sapiens
agaccactttctgattagccgccacctgcctgcatctgtgaaaagggatctgctcccaggcgttctcacccttcttttgaaggactccttaggctttgttgaatgaagcagagaagattgta

SEQ ID NO: 373193 - DNA, 122 bp, Homo sapiens
cgccatctctctctttccggcagctgcagggtgttaccggggcaacagacggctgtctgacgggatttggcagtttaactcttactccgcacaaaatacgaaagtgagaacgattgaacaga

SEQ ID NO: 373194 - DNA, 122 bp, Homo sapiens
aaaataagcaataaacttcctcaatgcaggtaaagggaattaaaattcatttacagcagtcggatagatgatatgagcagaaacagaacacagtgaatttagagctcacttcaataactgtg

SEQ ID NO: 373195 - DNA, 122 bp, Homo sapiens
cgggatacggaaggtggaagcggggcggtacctttcggagaaagctggcgaccacctgctcgaaggggtacttgtacacctggtgcacatccaccgagacccccatccccgcgcgccgcggg

SEQ ID NO: 373196 - DNA, 122 bp, Homo sapiens
aggccatggttttagacaagcaaaagccaatcagtcctcagggtttctctaccagaaaagcgatttgggaaaacctagacctataatcccagcactttgggaggccaaggtgggaggattgc

SEQ ID NO: 373197 - DNA, 122 bp, Homo sapiens
tctagtccaggaggctgagacttcgagagggacttagagaaggcagacgcatcccgaactcgctggaggacaaggtgaggggcgttgatattggggttttatggaggtcagacagtggttcc

SEQ ID NO: 373198 - DNA, 122 bp, Homo sapiens
aaggtccaggttctcttccaagaaagccatgggaccctcccagccagaggctttctccagcgtttctgccccttgccccaggttctgcccatccagcatttcccatggcttccagataatca

SEQ ID NO: 373199 - DNA, 122 bp, Homo sapiens
aggggagaccgggccggcggaggcggcggcggcaacgggcgggggagggggctgatcccgcgtctcccctcagcagacaatacaagcgcctcggaccgagtccccgaacctgccctagccaa

SEQ ID NO: 373200 - DNA, 122 bp, Homo sapiens
ggagcaagagggagaggcgcgaggaggacagggccccggcagagcaggtcccgcggagcccggtcatcaagatctcctacagcacgccccagggcaagggagaggtggtcaagatcccctcc

SEQ ID NO: 373201 - DNA, 122 bp, Homo sapiens
atgctcagatgctttgttaccgcggcacgaactacccccaccccgactgtgcgtgggtgccggagcctttgtccataaggatccgtgtgggcagtggcttaaggtggcttagggttccccag

SEQ ID NO: 373202 - DNA, 122 bp, Homo sapiens
tgatgatacctatccccgcccccaaggaataaaagtatttattcctgtcctaaaacaaggcgaaaactacggaagccataggaactacaatgggttaaacttgtgaagtttcaaatatgggt

SEQ ID NO: 373203 - DNA, 122 bp, Homo sapiens
aggcaagaaaagaagatagaagacggaggccagcccgccctggcccaccactctggagaccgcacctcctgcctgccaagtgctggcccggggtcagcggggctcactgccttggtgaccac

SEQ ID NO: 373204 - DNA, 122 bp, Homo sapiens
ccttgctcttaggcatcctggcggcgtggagggtgcgtgcgggatgtctgtgagccgcggcgcaccgagagccttcgcgaagctgggctgcctggtcgctgccgctcctcccgccgcccgag

SEQ ID NO: 373205 - DNA, 122 bp, Homo sapiens
gcggtggggtggggctgcagctagcaggctgtgagctcgggctggcctccagggcaaggacgggatggggagtgggggggcctctgctctccaggtaagacactttggggtcccctgtgggt

SEQ ID NO: 373206 - DNA, 122 bp, Homo sapiens
acggaaagtgatgaggaggaagaagagggctgtggtcatacacactgtgtacgtggccaccgcaaaggacggcgtcgtgcaaccctaggaccgacccccaccacccctccccagcctcctga

SEQ ID NO: 373207 - DNA, 122 bp, Homo sapiens
ggctccaggccctggactgtgacctcccgctggttggctgccaccggcaccacctggagccgaccatccttatccttgtactggaccacgaaggagtcgaattcgccctcagggaccgtcca

SEQ ID NO: 373208 - DNA, 122 bp, Homo sapiens
ccaggacaggcccgggagttccgggacggggactgggcgccggaggggtgacgccgggaccgtgggacgggaacaagagacctctcggctccggctaggcctccaccacctcccgcggcgcc

SEQ ID NO: 373209 - DNA, 122 bp, Homo sapiens
cagccacactggaaggtgccatcttgtctcaacagtcttaaagctggaagcggtgactcacgtaaacacccacagagtccacgccctgatgaagccacagcaccatccatctctgcagcctc

SEQ ID NO: 373210 - DNA, 122 bp, Homo sapiens
cccagtgtcccgtctttgtggttctggacgaggtcagggcggaaaggcctcctgggctttcggagtgcctttcggcctcgcgtcccgtgaggaaggggttcagggacagccactgagtgaga

SEQ ID NO: 373211 - DNA, 122 bp, Homo sapiens
ttcgaccatcccattttcgctgttggtttctaaatctctgcatttctgtccctcttagctcgcaaaggatctccttcatccctctccagaagaggagaagaggaaacacaagaagaaacgcc

SEQ ID NO: 373212 - DNA, 122 bp, Homo sapiens
cggggcgggcctagcctgacgcaggaggaggggcggcccccgtcgcacaagaaccaatcacgactgtcgcttctacgtggctagcattgaccaataggagaccgtagtgatagcgacgggga

SEQ ID NO: 373213 - DNA, 122 bp, Homo sapiens
tcccaatgcaaatagcctcaagcctggatggggagcgtggggcagtctttcatagtcattcgaaagaagttattgaggtgggcatccctagacctgggggttgtgcaggagctggacctcag

SEQ ID NO: 373214 - DNA, 122 bp, Homo sapiens
gcctgccggctcctcattgctcccggcgaggttctgcctgggtccgggccggctctggcccgggagaggtcccagcgagctctggccagatgaagggctaccttgattgacttcggtagctg

SEQ ID NO: 373215 - DNA, 122 bp, Homo sapiens
gacgtcgtggagcggggaggtccccccaccccgccccccgtcctttttcccttgggagaacgctctccagcggcaggtgtcgtggggaggtctcctgggccctcccatttcaaggggatggg

SEQ ID NO: 373216 - DNA, 122 bp, Homo sapiens
tttgtttttagttttggaaggggcggagttgaaatggctgcgccgcggttgccgaagcaacgctttggttacttccgttggtttcaatgcttccgggttggcgctgcagtggcgtttccgac

SEQ ID NO: 373217 - DNA, 122 bp, Homo sapiens
agaaccggaactgcggtttctgccgatgtcccatcctgggcagcacacaaccgaggcatccggatctgagccatctgtgaatttgccactgggcatggttgtagcgaacacatgcatgccag

SEQ ID NO: 373218 - DNA, 122 bp, Homo sapiens
atttaaatattttatcatccttccactccacccccacctcaggtctgaagaatttattaacgaacaaatgaccgtgaggcccttcagagctcaatgctagatgcttggagagggtgtgagaa

SEQ ID NO: 373219 - DNA, 122 bp, Homo sapiens
acgcgcgccgggggtggggtggggcggggcggcaggagcccgccgtggcgctccgagatgcggggaccgtgcgagcccccaccccattcgctaggcgacggcggcgaccgggaggagcctgc

SEQ ID NO: 373220 - DNA, 122 bp, Homo sapiens
gagcctgacagcgaaatagagtccacaataacagtgagaaaacaggactgtcaggctctgcgggagcccctgccttctaaattccttccaactcattcagaaagtcacagagtgtctcctgt

SEQ ID NO: 373221 - DNA, 122 bp, Homo sapiens
gactgtgcgaggttgtgagtgtgtggttggctgggaggcttatcctcatcctcccaaccccgtgtcttacgtagagaagaagaaagccagggccagaggtcacctgcctcaatgaaggtcct

SEQ ID NO: 373222 - DNA, 122 bp, Homo sapiens
aacaagaacggcgagcatggttgtaacggccggggatctagcgtgcgcaaagacgacagccgctaggccatttacaggctgccattggcctcacaggtgtctattgttatgatttgtaggtt

SEQ ID NO: 373223 - DNA, 122 bp, Homo sapiens
tcctgcagtagccgctcactctctggtagtgctcggggctgaccacgctgtatatgtaggcgtagtaagccacctcggcggcagtgaccatcccgtagaagaactctacaacctgcacggtc

SEQ ID NO: 373224 - DNA, 122 bp, Homo sapiens
cagtaccggttactagtcacccacggtcagcaccggttactggtcacccgcggtcagcaccggttactggtcacccgcggtcagcacgggttactggtcaccaacacagcctcagggaggag

SEQ ID NO: 373225 - DNA, 122 bp, Homo sapiens
cctcagtgggcaaggtggggagcagatgtgggatgccctgcacccccactgctaccttagcggacaaggctcatggcagcccagtggatgggtgagcagacagatgagtgggtggtgcaagc

SEQ ID NO: 373226 - DNA, 122 bp, Homo sapiens
gagaattcccagatgttcttgaggacccagaatgacaggagccctggctgggcttacgttcggagccggcttcaatactggcccttttctctggccctacccaacccgaaaattctggacgc

SEQ ID NO: 373227 - DNA, 122 bp, Homo sapiens
ctactaccgcgacatgggcaagcccatcacccaccggaaggcctgcaaaggtgggctacacgtggcggggcggggggctggggagacccggggaacatcagtcctcccgctccctcctcgct

SEQ ID NO: 373228 - DNA, 122 bp, Homo sapiens
ctccccctcgcgctggcccgagctccttaagtgcggccgcgagttcccgggcggaatccacgcccctggggcgcaggtcacctcccgccgaccccggaccccgcccctgggcggccccggcg

SEQ ID NO: 373229 - DNA, 122 bp, Homo sapiens
cttcctgcccttcagtttccaaccacggcctcctattggccaaacccaaccagaagccagcgagcaaggggctactgatgaagcacatatagctcagcctccagagacacagaacaggataa

SEQ ID NO: 373230 - DNA, 122 bp, Homo sapiens
cccgcggatagcagttgtgtggtgcctggcaattcctggctcaggagcagagctctccgccgggttcccagaagctttgggccccggtgggcacccccagaggagagagggaggagccgctc

SEQ ID NO: 373231 - DNA, 122 bp, Homo sapiens
agtgatagccattgttgctaaatccttccatacaaaatgctaattgcagacgccagatagcgggtatataggtgtatattgtaccattcttccaactttttagcatgattgcaatttttcat

SEQ ID NO: 373232 - DNA, 122 bp, Homo sapiens
atgccaaacacgcggggtagcgggcgagtctctcagacagcgcacacccacctaggtttgcgcaggggtcggcgccgaccatggcgaggcaggtcgttactgaatcaatcctctcgaccccg

SEQ ID NO: 373233 - DNA, 122 bp, Homo sapiens
tgtctcacttcaaatgttgaaatgtgcatgatggtcaaaagtgggtttcacaccatcacacgttcttggaagtgcttctaatttctcatttgttctgtatggctagaggctgattacaatgt

SEQ ID NO: 373234 - DNA, 122 bp, Homo sapiens
tcaattaagaatttcaagaagcatttaatctttatctattgaaacccccagcatgcagcgcgcacagggtgagcctagaaagaaaaccacagccccctgtggtgagaggaaaaaagatacag

SEQ ID NO: 373235 - DNA, 122 bp, Homo sapiens
atcctggagtttgctgccaaccacgcctcagtctggatcgccatcctgctcacggttgaccgctacactgccctgtgccaccccctgcaccatcgggccgcctcgtccccaggccggacccg

SEQ ID NO: 373236 - DNA, 122 bp, Homo sapiens
ccagcgccgtcaggcagtcctgcgcagagaagtctggatcttcctccaggaggccgctcacgatatccagggccaggccatccaagctgtccagcagccgcctccttctctccctttccgac

SEQ ID NO: 373237 - DNA, 122 bp, Homo sapiens
agataaccatttgggtggcacatttcacaacacagatgcacttcttaagagtcctccatccgtcagcgttgtaaaaaaggaagtggcacgtttgcatgtagttcttctgagacggagattta

SEQ ID NO: 373238 - DNA, 122 bp, Homo sapiens
ccggtcccaactcctctcacccgttgccgagcctgtgctgctgtccccggagggagccgtcggagtctggccccaccctggttcatggagacggcatcccgctgtttttctaagtctgtgga

SEQ ID NO: 373239 - DNA, 122 bp, Homo sapiens
cccgccggcctgccctgagccccctgcccgggtcttctctccttaagtgtccctgcaaggcgagttccagaggaagctttacaaggagctggtcaagaactacaatcccttggagaggcccg

SEQ ID NO: 373240 - DNA, 122 bp, Homo sapiens
ttgagaaagtgcccccgagacaatttcttacccaaaggtgacgcaagcaggtccagatgtcgaggcacagagctaggcactagggtcagggagattatccctgggactttgtggctctagcc

SEQ ID NO: 373241 - DNA, 122 bp, Homo sapiens
gtctcaatttgcctttgacctttcttagggacttgttttctgcttttcctgctctttgtccgctgatctcctgggaagaaagcttccgaaaaggacaccgtttcaggggcgagtgacgccgg

SEQ ID NO: 373242 - DNA, 122 bp, Homo sapiens
tctggccagtgggcagggcagccgtaaggttcttgttctcagtggcagtgggaccctgggcgggggaaggagcatctcaggaaaggggtccccggactctggggctctcagcacctgcggtc

SEQ ID NO: 373243 - DNA, 122 bp, Homo sapiens
ccagctcccccagagcgggccacacagctcatcctgctgctgccggagaccacagcagagcggccagagaaaccctggctcctgccactgaaggatttcttgcaaacttgtctgttcatagt

SEQ ID NO: 373244 - DNA, 122 bp, Homo sapiens
gacaacttgagaagtgcaggcacctcacagaaaaagtggtccacttcctggtgaccacagcgtggcatgttaagagtcaaggaagactgcagcactgagttgccgaaaccaatgagccatga

SEQ ID NO: 373245 - DNA, 122 bp, Homo sapiens
tagcagggtgatcttaggcaacttacttaagcttcttgtgcatcagttccttatctataacgtagggataatattttcctacctcatacagttgttttgaagtctcaatgaatttatgatta

SEQ ID NO: 373246 - DNA, 122 bp, Homo sapiens
aaaagttgaaatacctggaccgataccatactgacagtaagtgagggctggatttgaactcgcgtctcatatcacagcccaagatctttctgctacacatttaattcattcttaccatccaa

SEQ ID NO: 373247 - DNA, 122 bp, Homo sapiens
gtggcacacgccgcttgcatcaaggttttgcgccaggagagggaagctgggcgggtgctccgagggaggagtccagagctgttttctgcagttctcagaagagccccgttgagctgggattc

SEQ ID NO: 373248 - DNA, 122 bp, Homo sapiens
cagccccatccccctaggaggtgggcagacaagctcagaggcagggtccccaccagcctgcggcccactcaccacagcccatgctccaggctgccacgagcagcagctgcacagcccagcga

SEQ ID NO: 373249 - DNA, 122 bp, Homo sapiens
cagatgaggccaagcaaaaactgagtcccactggctttttattctcacttagggtcccgtcgccagcttgacactggggaccaacagaagggttagctttgcgtgtacgactgcaggaccag

SEQ ID NO: 373250 - DNA, 122 bp, Homo sapiens
gttggccagcgtaaacacatgaatcccatctcattcaaagcaaacccgaaaggtgtccagcgctcccaaaataaagtccgccacttacaccccccatgcacgaaagaccaggaatgtgcccc

SEQ ID NO: 373251 - DNA, 122 bp, Homo sapiens
gaaaacattgttattcacataataatgtggggctctgtctctgccgacaggggctgggttcgggcattagctgtgccgtcgacaatagccccattcaccccattcataaatgctgctgctac

SEQ ID NO: 373252 - DNA, 122 bp, Homo sapiens
gccaaatctttttcagaagtctttcagttgttgcctccaaacggagctctttgcagtcctcgggcggacgaatggacggattcgagcgaagcttatttcccttctcctaacgcatctaccta

SEQ ID NO: 373253 - DNA, 122 bp, Homo sapiens
tgataagacacatgtgtctggcagcagaaggggcagtttaggaaaggataataatgaatgcgataacttggaggcagaaaataatcatgaagttaggtaaaggcaaactttcatttacataa

SEQ ID NO: 373254 - DNA, 122 bp, Homo sapiens
agacaaagtgatagaagacctttgtcatgacacctgtttgctaccagagccccaggccatcgtcatccactgatgtctccacattaattctgcagaggtcctggacagtcttctctgccctg

SEQ ID NO: 373255 - DNA, 122 bp, Homo sapiens
aattctgaaaacttcatctgccatgcacttctcaggcaactagtgaaggatgtgctccatcgaagtgagacagtcaaatcaagagaatgacataggttccagaaaagtgaggctccaacaca

SEQ ID NO: 373256 - DNA, 122 bp, Homo sapiens
cacctcctctccatcgatgacctagagggggcccaggagacagacgtggacacaggcctgcggctgtcctcatcggacctgtctgtggtctctgcatattctgcacccagtaggttctgcag

SEQ ID NO: 373257 - DNA, 122 bp, Homo sapiens
gggcccacgccgcccgcgcttgtgggcatccggcccgcagggccgggccgcggcgcgcgccgcctcctcgtgctggaagaattcaagacggagaagaggctgtgcaagatgttctacgccgt

SEQ ID NO: 373258 - DNA, 122 bp, Homo sapiens
cggaagcaccatgcgcctcccacgcgctggctcgacctcgtccaaggtcgctgccgcccgcgcctccctttgggagggccctcgttgcacccggaaaatgggtacacaccttaggtcgaatt

SEQ ID NO: 373259 - DNA, 122 bp, Homo sapiens
ccgggcggggtcccttcccccgggccccgccccggccgaccccacctttccgcgcggctccgccccgccgcccccttgccagtggcccctccccgcgcaggtcccgactccagccgcacctc

SEQ ID NO: 373260 - DNA, 122 bp, Homo sapiens
ggcggcaggtgcagaggagccagcgccgggcccctcacctgtggggccagcccgtcaccccgctgctgagtcctggccaggccagctccccaggtaccccctcagcctgccacatcttcgag

SEQ ID NO: 373261 - DNA, 122 bp, Homo sapiens
cagtggacacattaggaacaattcccggctgtccctgaaaggcccctggaaggctcccttcggcagcacctggagagggaggctgacagcagctttgtgcatctcagagtggatactgtttc

SEQ ID NO: 373262 - DNA, 122 bp, Homo sapiens
attaaggcacttaaaaaaatgactaccttgattttctcatgaagcttatgcctttcccagcgagacaaccccgccccttaaagaggcggcgcggccacgtgggggtacctggtaggccacca

SEQ ID NO: 373263 - DNA, 122 bp, Homo sapiens
ttcacgccagccctccagaaaacttaatttattaaactctcaccagaagtttaacacttgcgtgcagctttttaagctccaggtaacaccatctggcacgtacggcgtctaggaagttccgg

SEQ ID NO: 373264 - DNA, 122 bp, Homo sapiens
cgggctccccgcgggtgggggcgtgggggtccctctcactcacctgcatgcttggcgcggcggcgcgacgactgcgggcgctcgggactgagcggggctggggggtcgcaggagcgggcggg

SEQ ID NO: 373265 - DNA, 122 bp, Homo sapiens
ttaaggacccccacgattccctttgcccggcgggagactaaaggccggaaaagtacagcccgcccaggggtgggagccgagctagccccacctcccggtggcttctcgcgatcgtggagacg

SEQ ID NO: 373266 - DNA, 122 bp, Homo sapiens
cgccattcccaggtctcagagtttacttgtccagagatgcaacttccggcctcttcaggccgggcaagatttaaggaaagaaaagaaacataaggacctccgttcttcggtctccgtcccct

SEQ ID NO: 373267 - DNA, 122 bp, Homo sapiens
gcaatgcattttaggaagatagctctggccacatgatagagaagcagtaggaggctgtcacgataatccaggtgaaagctgatgacagtgggagtggctcaaatcaagagatgttaaggtag

SEQ ID NO: 373268 - DNA, 122 bp, Homo sapiens
agggggttaggatgaggctcccgtagccatgcattttttaatttcataaaagcttggggtcgcaaggttccgcccgtcctttcactgggggcctggggaggaggagtgtgaagcgcgtcctc

SEQ ID NO: 373269 - DNA, 122 bp, Homo sapiens
gctgccgccgcggccgggctgagcccttagggagcgagagtgggaggcggcccctgactccgcgctgacccccgccccccgccccgccgccaccccggcgcccccgccccagcggctggccg

SEQ ID NO: 373270 - DNA, 122 bp, Homo sapiens
gcaaaaatcatcggaccttaacctgggtttcaaataatcatttaaatataaggttttggccgggcgcagtggctcacacctgtaatcccagcactctgggaggctgaggcggatcacctgag

SEQ ID NO: 373271 - DNA, 122 bp, Homo sapiens
tttctaactctgatgccctgggcaccgaaatagtgacagtagtgcacgtcagcctctgcccggagcagctctctgaactaatgacgggaactggttgtcgtaggtatttaacatgaagtcgc

SEQ ID NO: 373272 - DNA, 122 bp, Homo sapiens
gcagctcccgatttggtaaaaagccagtggcttgctgcaatccagagtcactgtggggagcgctggccgggcaagtggggtgggaggaaggggctgagaaagggaggaagcgctgtgcttgc

SEQ ID NO: 373273 - DNA, 122 bp, Homo sapiens
aatctcatacttcaatgtcctgctcagctcaacagaaatgctcccctacaatttgccctacgtctggccttccctttttgggctactactttcagcattttagccagcatcaccgagtaaat

SEQ ID NO: 373274 - DNA, 122 bp, Homo sapiens
ctggtcctggaccagggcctgaccaggcagatgcggctacgcgtggagagcctgaagcagcgcggggagaagcgccaggatggggagaagctgctgcagccagcggagtctgtgtaccgcct

SEQ ID NO: 373275 - DNA, 122 bp, Homo sapiens
cccggtccccggaggcggacgttgcgcgcgttcggggatcccggagcgcccggcgccccacgccctcccttcggctcgctagctgctccttggcgctgctttcagacttgttgcgcctcgat

SEQ ID NO: 373276 - DNA, 122 bp, Homo sapiens
ttgaagcggcgggttgagctctgggcagacacagcatttagtcaacagccattgggcatccgctctctgcccgatctctgtccaagtccaccggcactcctctcactggagcggccagtgat

SEQ ID NO: 373277 - DNA, 122 bp, Homo sapiens
gagccgtagccgctcagcctgctgggacttgtagttctttttttaacaggcataggttcccgaggccactttcggctctgtcggcctgaggccgagcccaggatttaatgttccccaccctc

SEQ ID NO: 373278 - DNA, 122 bp, Homo sapiens
cgcccgctggacgaatccctgctacacagcgggctctggtacctgccgtgcctcatttaacggggcgccagggccaggcgcctctggctgcgctttcagccccaagacttctaaggcttgga

SEQ ID NO: 373279 - DNA, 122 bp, Homo sapiens
atccacccacctcggcctcccaaagtgctgggattacaggtatgagccaccgcaggcggccgagggcactttttaaaataacgtattttggacactgctttgtccccagaacccagaccagt

SEQ ID NO: 373280 - DNA, 122 bp, Homo sapiens
cgtcactgacttggggacacccaggctgaaaacccagcagaacataaccgtgcaggtctccgacgtcaatgacaacgcccccgccttcacccaaacctcctacaccctgttcgtccgcgaga

SEQ ID NO: 373281 - DNA, 122 bp, Homo sapiens
tttggggctatgttacatttcttaaactctgtattagaaagatttacaaagattgtaacacgttaaatagatacttggcttttttaatgttctcaggtgagttttataattatattctttaa

SEQ ID NO: 373282 - DNA, 122 bp, Homo sapiens
ctgtatgatggatatgagaacttcgtaagacccagcagcaaacggggagcggctggcgagcgctccacagcccccaagcgtgggagctctagatcggaatttgtaatttggaattggaacgt

SEQ ID NO: 373283 - DNA, 122 bp, Homo sapiens
cttttcttgagctttgcataattctacctgcctgcctttggtttaattcaggaatggctgcggaggctgcagcttctgcttttttctaaactgagtgcccttatgctaggggtttgcctgag

SEQ ID NO: 373284 - DNA, 122 bp, Homo sapiens
aagctacctgtcttcggacatctttccccgacgcttgagcaggctgcagggaaaggggcccgcttacccggaggaaggaaaccctccgcagaccctccaggaaggcaggcctggggcgcccc

SEQ ID NO: 373285 - DNA, 122 bp, Homo sapiens
accccacagggatagcggcagagccggtagcggacggtccttgcattggcctccggcaggcgccccccgggggcgggaagctggtaaggaagcagctgcggttacctaggggtggggtcacg

SEQ ID NO: 373286 - DNA, 122 bp, Homo sapiens
atttcggagccagaaacttacgggaaacgccatttgcgtattacagtgtttttaaaaacgcgaaacttagagagcaagagaaacatgccaacaggtttttctgtatttacgcttggcttccg

SEQ ID NO: 373287 - DNA, 122 bp, Homo sapiens
ctgaggcccagccagaatttgagcgcggcgcgggcggcccggcagtgctgggggacccggcgccccctccacagctgctggcccgggtgctaaacccctcgctgcccggggccagccggctg

SEQ ID NO: 373288 - DNA, 122 bp, Homo sapiens
gttctgttccaatatcccctgcgcagccatgcagacaggcttccttctttccccttcttgcgcgagcgacacggctctacacgtcctcttatacctcgctacttacgcacggcggcctcttt

SEQ ID NO: 373289 - DNA, 122 bp, Homo sapiens
cgctcacctggtcaagcttggcccggggcacgttctgctggtggtaggcgaggatggagtcggcccggccctgcagcactgcctctgcagccctgcacagagtgggggcaccgacagctcag

SEQ ID NO: 373290 - DNA, 122 bp, Homo sapiens
agttttcaaataaagaaactgaacctggtaggttaggtaaccaaccatagtttttttacccgaattgagatgtgttttgtttatttttatttctaagagaaatttcactgctggtgggattt

SEQ ID NO: 373291 - DNA, 122 bp, Homo sapiens
cccatgagctcccttcagactcagagtctcgtagctgtgtccttctggcccctcacgcagcgcatcctccctccagcttccactgccacgtcttcccgtttctgcagcaggaggaggcccgc

SEQ ID NO: 373292 - DNA, 122 bp, Homo sapiens
cgcaggcgcactcaggccccgccccggacctgccacgcccctctcctctcgcgcctgcctcgcccatgcccagctcccgggccccgcccttcgctgcccggaccctcagtgaccccatccct

SEQ ID NO: 373293 - DNA, 122 bp, Homo sapiens
ctgcgagaggcgaggggaggccggcagggtgtggcggcagagcagcccgggacaagtgagcggcctagagatcaaggccttggagtcccgtccgagagcaggacgttatcagaaacctccag

SEQ ID NO: 373294 - DNA, 122 bp, Homo sapiens
ccttttggattcccaagtgtctgttattcccatctttacatccatgtgtacccaagttttcgctataaagaaaaaaaaaaccctgaatacctattgcatgcctcactgtagaggctacagga

SEQ ID NO: 373295 - DNA, 122 bp, Homo sapiens
gttgtggagttgggaagaggagatatatttaggctactccaggaagaaactcttagggggcgtatgagcagacagatgactgtttcacttctctggagaaatgtaagactctagatgcattt

SEQ ID NO: 373296 - DNA, 122 bp, Homo sapiens
ctgtctgatctcagagacattttttcattcaattcatttctaaatagctttagaccattacggtgtaaggaaaatgtggttaagagactggtttacaatgtatcacttgagattttgacttt

SEQ ID NO: 373297 - DNA, 122 bp, Homo sapiens
ggggcaacgccgccgtcctggattattgccggacctcggtgtcagcgctgtcgggggccacggccggcatcctcggcctcaccggcctctacggcttcatcttctacctgctcgcctccgtc

SEQ ID NO: 373298 - DNA, 122 bp, Homo sapiens
taaaaagcctgccgaacagatcgggatcgcgggtgggcaggtaggacgccaggcctcgtccgggtccacctcaggtcacattcccacctcggggcaccctggcaggcatgagtggaaccgtg

SEQ ID NO: 373299 - DNA, 122 bp, Homo sapiens
gaagcccacctgccccgggcagcccctcccaggggaggctgaaccccccccgccccgtgacgagggggcttgttggcattcctagggacagtccaaaggaagctctggttgcgcgggctgga

SEQ ID NO: 373300 - DNA, 122 bp, Homo sapiens
gaaaataagcctccgagccagccaggagtcgaacctagaatcttctgatccgtagtcagacgcgttatccattgcgccactggcccgtcgttgtgggtctctcgattatctattcttcatta

SEQ ID NO: 373301 - DNA, 122 bp, Homo sapiens
gcacgaccccttcccgccagtgcttcactggggacagagcactttctaccggctacgtgccgtctcacactcgccacgtcctcaccccaggaggcgggcaggatgatccccctttgcagatg

SEQ ID NO: 373302 - DNA, 122 bp, Homo sapiens
cattgtaaagaaagggctttgtggcccaactgtggtctgagcagtgtttgttccccacaccgaggcagcatattttgatggtttagactgagaactgaacccaggacccaaagcctggcttt

SEQ ID NO: 373303 - DNA, 122 bp, Homo sapiens
ccgcgctgccaatgcggagcagccttgcacctgaggccagtaaccagaggtttttgtcttcgctgtggcctgcaggacgaggacctcgccggctttttttctcgctgaccgagcagctgaga

SEQ ID NO: 373304 - DNA, 122 bp, Homo sapiens
attccccgacccatcccctctgctcacctctctttccctgaagacactgacaggtgccttcgtcagaatcagactagaaatggagttggcgtgaaaggaaagaccagtagaaagaattcccc

SEQ ID NO: 373305 - DNA, 122 bp, Homo sapiens
tcaatgccgcaggcaacctactggccaccccgggccagctgcagtgtctggctgggctaccgtgcctggagtacctgcggctccgagaccctttggcccggctcagcaacccgctctgtgcc

SEQ ID NO: 373306 - DNA, 122 bp, Homo sapiens
gagatgccgggatgaacgtgcaggagcgggctttgatctcctaggaggaggtgatacccacgaggaggaggtggttttcccaagagaatcctgccaaggctcgggctcaagaggccccaacc

SEQ ID NO: 373307 - DNA, 122 bp, Homo sapiens
ttacagctcttaaggtggcgcaactggagttgttcgttcctcccggtgggctcgtgatctcgctggcttcaggagtgaagctgcagaccttcacggtgagtgttacagagtgagcagcagcg

SEQ ID NO: 373308 - DNA, 122 bp, Homo sapiens
gtgctcatgtctgggccgtggtctcgctcagggagagcatagtggaaaagcgctctgggccgcatgagccaagaccagtgcttaggaagtgccggggggccctgcagccaccatcacctgac

SEQ ID NO: 373309 - DNA, 122 bp, Homo sapiens
tttccgggtggaagcgggcaagtggagcgtggcccagaggacgcagctggtacatggtcacgggaagctgacccttggttaagttgcgaaatgagcctgtggcaaatcattaactctccctc

SEQ ID NO: 373310 - DNA, 122 bp, Homo sapiens
cttgcctagtgactcacatcctctgcctgggccccgcccctcctgcctatagtcctgcttcgtgcgaccttcagggaatatatagagttgggggagatttctcaggatatttttgggagaca

SEQ ID NO: 373311 - DNA, 122 bp, Homo sapiens
ttttcttccctgcccaaatgcccagaaagattggaactgaaattctggacaaaaagaccacgaaaattgggatctaaagaaaagtaaaataaaaaaacttgctaggttttgttttcaggata

SEQ ID NO: 373312 - DNA, 122 bp, Homo sapiens
ggtcacacgttaaagagcgtccactacccaaagaacaggcctctctgagcactcagaggacgcggttcccacacgcacacaacagtcggccccggggaaatgctctgcaaagtgagctttaa

SEQ ID NO: 373313 - DNA, 122 bp, Homo sapiens
ctggagctcccctttttcgggccccgcccaatcctcggagtctgtccaccccctctactccgccctcaagaggatttcaaagatggaggcggcggctccctaaaccacttttcgtgttcatc

SEQ ID NO: 373314 - DNA, 122 bp, Homo sapiens
ctcactgcagcctctgcctccagggttccagtgattctcctgcctcagcctcccaggtagcggggattacaggcacatgccaccaggcctggctagtttttgtgttttttagtagagatggg

SEQ ID NO: 373315 - DNA, 122 bp, Homo sapiens
gattgtgggtagggctactgaccggcaggtggcggagagcggttcctacctttccccaaacgcctgtcactctgcagccttgtgactgactgctgagctgagttctgttccgggcctggcct

SEQ ID NO: 373316 - DNA, 122 bp, Homo sapiens
gaggagggaccgactttaccaaacggtgagaaggaacagggaagtccattggttgaaagacggagaggcgcagctcagtcttccaacctcaaccaatgttaaaccgaaccttcgccgagggc

SEQ ID NO: 373317 - DNA, 122 bp, Homo sapiens
cctctgggcccagttttctttttcctctcccggttgatgacactaggcccattggtggtacggctttgggtttccttcagtctcaagatctcagtcagggtgggtgaagtggaagaacaagc

SEQ ID NO: 373318 - DNA, 122 bp, Homo sapiens
caacctttaaccaagccacttatcacatttacctggcccttgtggttggtttcagggaagcgcaatgagccccccatcagggctaacacatctcaattctgggactttggtttgtgccatca

SEQ ID NO: 373319 - DNA, 122 bp, Homo sapiens
accagtttgaagatagtgggcaggaagttgaagggcttcctgcctaatggtctctagtttcgatttcttctgcaaagaaggaggcacatgctttgctgagagggcagaggactgaggtaagg

SEQ ID NO: 373320 - DNA, 122 bp, Homo sapiens
gcggctgtgggctgcaggcaagcggtcgggtggggagggagggcgcaggcggcgggtgcgcgaggagaaagccccagccctggcagccccactggcccccctcagctgggatgttccccaat

SEQ ID NO: 373321 - DNA, 122 bp, Homo sapiens
atactagctgccctttgcagtgatgcctgaaaaccttgctttacctttgggagaaaggggcggagtccaacctaatggggattaactccaaacacgctggaggcttcaaacccagcctcaga

SEQ ID NO: 373322 - DNA, 122 bp, Homo sapiens
aactccacgttggctttgccgtcggaccaaaagatgaaaacaggcacgtctggcaggcagcgcgtgcaggagcaggtgatgatgaccgtcaagcggcagaagtccaagtcttcccagtcgtc

SEQ ID NO: 373323 - DNA, 122 bp, Homo sapiens
tgtcgtacgagcgcgacgtaaagcggatctgctttatggcaccttgctttcgccgtaaagcgcagtcagcgagcccacgtgcttgtgttgactggacaacttcctggtggaaaaccgcgact

SEQ ID NO: 373324 - DNA, 122 bp, Homo sapiens
gtagccacaagccacatggggctgttgagcacttgaaaatgtggccagttggaagtaagacgtactgcaagtgtaacatacatacaggaatttgaagacggtaaaaaaaaaaaggatataaa

SEQ ID NO: 373325 - DNA, 122 bp, Homo sapiens
tgtctgccatactttaaaaacacttatttttacctttttgtcctcagaaaaggaaatcctcgcttccatggctgccaaaaggacagtgtttctggctctcagccctaaggccctgcaaactc

SEQ ID NO: 373326 - DNA, 122 bp, Homo sapiens
caggggctccctccgcagactcccagggacttcctgggagccaccgcggagggcgctgcgcgcgtccggagccgacgccgggcttcaaacagaaaccaaagcccgctccaacgccgcgaagg

SEQ ID NO: 373327 - DNA, 122 bp, Homo sapiens
gtctatgctgagatagcaaaatagacatggctttatttgctgattgagaagtggtccagccgtgggctagcagtcatttacatatcagtgaccaaatgcaaacatacccgtactaacagtgc

SEQ ID NO: 373328 - DNA, 122 bp, Homo sapiens
tgtgtgtgtgtgttgccactggacagttgatttattttccaagctgctctctctgcctgccgtgcaagggacgcgcaaagggctagagaggtttggcggacgcgtcaaaactggcaaagctg

SEQ ID NO: 373329 - DNA, 122 bp, Homo sapiens
tgcgggcagccagtgagaaggccgtcaagatggcggcctcctggaggctgggctgtgatccgcggctgctgcgttatcttgtgggcttccccggccgccgaagcgtagggctggtgaagggg

SEQ ID NO: 373330 - DNA, 122 bp, Homo sapiens
agtgtcgtatgggccagcactggtttaattcactggctgttccttcctgtgagggctttccgctaggccggcgaaggctggtgagaaagccggctctgcgccctgccctgtgctggccgccc

SEQ ID NO: 373331 - DNA, 122 bp, Homo sapiens
gcaggctgaggtagaagaagagcttgaacccgggaggcggaggttgcggtgagccgagatcgcgccattgaactccagcctgggcaacaacagtgaaactctgtctaaaaaaaaaaaatgcc

SEQ ID NO: 373332 - DNA, 122 bp, Homo sapiens
caaggctgagtgaggcagcaccctaccgcccacagtttaagaacaagaacacctgcattgcgatttttcttttcttttttttttgagagggagttttgctctgtcgcccaggctggagtgca

SEQ ID NO: 373333 - DNA, 122 bp, Homo sapiens
tggctccccagctgggcatgcctgccctcctcgcctctgcgctcgcctgacgcccccatgcggcctgcaagacacagccgggcctccatctctgcaggaccctcctgcccctcgcctggcca

SEQ ID NO: 373334 - DNA, 122 bp, Homo sapiens
tcacttgtggctgagcataaaaaacaagcatgcaataaatcacctcttccgctgtcttagcgaagaattaaaaaattaaaaaaaaagacaaatttccaaacaatgatgcactgaatggcaca

SEQ ID NO: 373335 - DNA, 122 bp, Homo sapiens
acaaactgctccccactgccccacccagactggctctgatattccagaagcctttaactacggtttgaaagtcccaggtggaagttgccgcccatccctgaggttcctcctgagctctgggc

SEQ ID NO: 373336 - DNA, 122 bp, Homo sapiens
cctctgggaactgcaagccggctctctgcgagcgggaaaccgcctttgtcttggcctttccggagtccttcccagccttaccgtcagccatttcgagttctgctgaagctcaagcaaggcag

SEQ ID NO: 373337 - DNA, 122 bp, Homo sapiens
gtcccaaattccccgggccgcggctaattatcgggagcttgatgttgataagtaaagcgccggagtgcgggcgaagcatgtgtggggctccgggtccctgtctccgccgccgccgcccgcgc

SEQ ID NO: 373338 - DNA, 122 bp, Homo sapiens
gctgggttggtttatccaggaatacctgaagccctacgaagaatgtcagacactgatcgacgagatggtgaacaccatctgtgacgtcctgcaggaacccgaacagttccccctggtgcagg

SEQ ID NO: 373339 - DNA, 122 bp, Homo sapiens
caaacctccacccacatcgccaagtaagtatgacgaggcctgccttccctctcacgccgacgttccctggtgtcctggagagaatgaagggtatttgctttgtacatttaggtagctgagac

SEQ ID NO: 373340 - DNA, 122 bp, Homo sapiens
atctgtctgatcatatcttctttcaaaacaacttctagaaatgactcattgaatgaactacggacttccttagaacttaatattaaagtggttagattcgttggccttaattttggctaact

SEQ ID NO: 373341 - DNA, 122 bp, Homo sapiens
cgcccccaacccgctccacacggcccctctggcctctgctccccactctacgcccagggccggtctccagagcggctccgagatttccagcctaggccctctctgtcgcctttcctcgctct

SEQ ID NO: 373342 - DNA, 122 bp, Homo sapiens
gcaaaaaaactagttccaaaaaagacacttgtacacgcatgtttatagcagcacaatttgcgattgaaaacatagggaaccagcctaaatgcccatcaagcaatgagtggataaagacaatg

SEQ ID NO: 373343 - DNA, 122 bp, Homo sapiens
aggtctacgcttctagagcttgagccagcggggcgaccctgcagtggcaggactcggcaccgcgccctccaccgccggttggtggcctgcgtgacagtttcctcccgtcgacatcgaaagga

SEQ ID NO: 373344 - DNA, 122 bp, Homo sapiens
tcatctcctttgttggctgcttccccacaggtggtgccatgtctcccagctactcgccaacgtcacctgcctacgagccccgctctcctgggggctacacaccccagagtccctcttattcc

SEQ ID NO: 373345 - DNA, 122 bp, Homo sapiens
cttcaacctggccgtgtttatcaacatcatcattgccttcttctacccttacatggagggcgcgtccacaggtgagaacacagggctggccggcaggttccccgggccctgccatgcttcct

SEQ ID NO: 373346 - DNA, 122 bp, Homo sapiens
cagagagggaattttattcccttctagaacatgacttaaaaacttaagctctgggccgggcgcagtggctcacgcctgtaatcccagcactttgggaggccgagttgggcggatcacctgag

SEQ ID NO: 373347 - DNA, 122 bp, Homo sapiens
gacctcaaactactcagctgtgtttgaatttctgccggattagtagggctcagcctgcagcggatgctcctgtagcccaaaccattgtttttcaaactacaggtcatgacctgtccagtgat

SEQ ID NO: 373348 - DNA, 122 bp, Homo sapiens
gccgggaggctcacctgaaggccgccaagtactcagcgtctcccatgggggggtccaggccgccggtgaaagccatgttgacgttgaaacccacgccgggccctgtgcccacctgtggccag

SEQ ID NO: 373349 - DNA, 122 bp, Homo sapiens
agccgacttcacatctccaaatcctactaactggggatgagggtccacgcggttcagaagcggaagcgcaggcgcagggaagcggggcagcttgtccaaggtcgcctcgccgataaacgcga

SEQ ID NO: 373350 - DNA, 122 bp, Homo sapiens
aatttctgccaatgacccccagaactgaccccagggcttgcagtgtggttttaacaggaccgggtattctgtctcccttggtgcccctctgctgttcaggtagcccaggatcccactgattg

SEQ ID NO: 373351 - DNA, 122 bp, Homo sapiens
gccggtacgcagggtggaccgggtggtgagtgcgaaggctctggagagagcgtgggtgggcgcctgcaccagcagccctgctctctggcagcccacagctcacgtgccctcctgagtccccc

SEQ ID NO: 373352 - DNA, 122 bp, Homo sapiens
gcctgcggatcaaagctttaaatatcccagaggaaatcggtaacatccggattgattggccgaaggggtttaagtggaatggggaagataattcgaatttctgaggtttagaggagcagggg

SEQ ID NO: 373353 - DNA, 122 bp, Homo sapiens
catccggtccaatggtgggctgtccagctggatccattgaggaaagggcccttcagggatcgctggaccctagatggcagaggtcaatctgccctttgatgcagaggggagcagggcaatga

SEQ ID NO: 373354 - DNA, 122 bp, Homo sapiens
ctcgttccccatccccttgctttgacagatgtcagcgaggcagggctggctggagtccaccggccactgaggagccaggactgggttccagtcctgcctgctgacccaccaggggccctaga

SEQ ID NO: 373355 - DNA, 122 bp, Homo sapiens
ggccatatggagactgaggacgaaagggcaggcctggtctccgccagagtctaagtgtctcggtgggggccaccggctcctcgcgaggccagctaacctccccaacccccaccccccacccc

SEQ ID NO: 373356 - DNA, 122 bp, Homo sapiens
catcccgctcatcttgggctgctgtgaagctcagcccagggctgactcagagtggattttcggtcagtatctgttgaatgaaggtggtatgttggcaaaggcacaagggaagaggatttacc

SEQ ID NO: 373357 - DNA, 122 bp, Homo sapiens
tcttcctccgcctcatctgactcatcctcactgtcctcaaagaacttggacttagcaactcgaggcagcttgtcagaggctgaagagcaggaaggcccagcctcaccagtgggaatgccagg

SEQ ID NO: 373358 - DNA, 122 bp, Homo sapiens
ctccagcctgaggtttcagtgtttcgcttctagtgtctgcccttccccatgtgcctaccacggattcttctgtctactgtctgcccttccccatgtgcctaccacggatttttctgcagggg

SEQ ID NO: 373359 - DNA, 122 bp, Homo sapiens
gcggctgcctggcttctcctgctggctccctggtgctcagtcgcgtggtttctagtcttccgccattaaaagcaatgccgccgcgaatagctttgttctcccatcatttcttctgtgtggag

SEQ ID NO: 373360 - DNA, 122 bp, Homo sapiens
cgatacaaaaaggacgagatggtctcgaagtcttagctccgtcacctaatctgagaataacgggcccaggagacttacgatcactgatgtccccacagtcgcctcagttcccgccacggaac

SEQ ID NO: 373361 - DNA, 122 bp, Homo sapiens
caactcaggaggccagcatgggagtttgaagtatgtatgcggccagacatccttggccaacgctctcttctaatgttctggctccagcaggcaggcgcttagcctggcagctatatgtaagc

SEQ ID NO: 373362 - DNA, 122 bp, Homo sapiens
tcgagagcgatgatttcatcgagatgcaccggaatcgggggtggggcgggagaataaaggcgtgctcgggtcagggccgatctgggccccgtcttcgtgttttgttttttgacggtggcggc

SEQ ID NO: 373363 - DNA, 122 bp, Homo sapiens
tgggtggcagctttcgcaccacgaccagggttgcatatttgtgccagagccggcggcccccgggctgagctgcttactctctggagggcagcacggcacccaggaaggcaggcagtgcgtga

SEQ ID NO: 373364 - DNA, 122 bp, Homo sapiens
ggccgccgcccggtgaaggaggggctcagtcctcccaggtgccgcgcgcaggaggggacacgcgtgcgcaaaagggcggtgggtggggcgcgactcgtcacggggagggcggggcgcgcgag

SEQ ID NO: 373365 - DNA, 122 bp, Homo sapiens
tgagggtcagcagggctcaagaagtcggggggtgggggtgggcgagaggtcggtagcctccggggatcagctagtccccaggggcaaaagctgaagagcaagtgtgctcacaatgatggagg

SEQ ID NO: 373366 - DNA, 122 bp, Homo sapiens
aacggttaagtccacagctcctgagattgcctcgcaagtcatcttgggcatgaagcagagcggtgcatcagaaaaacatgacgattctgctgagaggtggctttaggaacaaaatagatggc

SEQ ID NO: 373367 - DNA, 122 bp, Homo sapiens
cacattggagattaagacttctacatgcgaatttgagtgaaacaaaattcagtccctaatcgtgtctcagtttgtctctgactctctctgtgtgtctgtctgtctctctctgggccattttt

SEQ ID NO: 373368 - DNA, 122 bp, Homo sapiens
ctggaaaagccgggagggagtcggaggcgccagcccactggggaggtggcgctgggcgcgcgggatgcgcggggagccttctctgcaggagccgcacagtgcactgctgcgcgctgggcagt

SEQ ID NO: 373369 - DNA, 122 bp, Homo sapiens
aatgtgaccctgaggaggccgggccagggaagagagaatgcagctttattctttcagagccgaggaatgccctggaagggaaccgaagcctgagtattggggttaaactaggtgagaggaga

SEQ ID NO: 373370 - DNA, 122 bp, Homo sapiens
tgatttctggcccccagaactggatgttggagccagctctagccacaggagaggagctgccggaactgaccttgctgaccacactgttggagggccctggagataagacgcaggtgtgagga

SEQ ID NO: 373371 - DNA, 122 bp, Homo sapiens
cccattccctccccacctgcttggacctagccgctctcacacccctcttgcgggcccgagcgtagcgagaagacccacgcacactccaatgccgctcacagccgtatcagtgagcccgcacc

SEQ ID NO: 373372 - DNA, 122 bp, Homo sapiens
tgattggccagcttcgcgatccagctagaggctcactggccgcggtccctagtggtacagcgtttcctcccggcaacagcccgagccggcgctcataggctgagcacactgaggtcgggact

SEQ ID NO: 373373 - DNA, 122 bp, Homo sapiens
cataacacaccaccgtcaccctcatcagcattgcctgctgccaaccccaccaggggcccccggtgcccatgcctctgacagcaccaagcagtccggcttctgcccagtttgttagaaaaagt

SEQ ID NO: 373374 - DNA, 122 bp, Homo sapiens
gccctccagggagccatgctgggcatggttgtagagtgggtcaatgttgtgcaggatctccgtgcgtggtgaggcccggccctcgctgatggccggccacacgtcgtagccatctagcccat

SEQ ID NO: 373375 - DNA, 122 bp, Homo sapiens
ggaccagcaccccacctcacagaccccacacgagtacaatcctgcagggtcgtctggagccgagctccttcatgagatgacagcggctccctgagccagcaccagaatgagagaccggatga

SEQ ID NO: 373376 - DNA, 122 bp, Homo sapiens
ggccaagtggcagagtgggtggtggggtgcttatcactcatgatcaggagtgggtgggggcggatcttagagcttgcatcaggcctcaattttccaactcctgcctgtgatccacccccgcg

SEQ ID NO: 373377 - DNA, 122 bp, Homo sapiens
gcgaatgctaatcatgccgctctgggcacccgggcgggaagcccttgccagaagtccctccggagttctctgcccgcgccctgggtgcaggactcgctcctgtaacttcctggcttatgcac

SEQ ID NO: 373378 - DNA, 122 bp, Homo sapiens
ggtaacagccgctgccaccatcgccagcgcatggctgccatgttgaattgattcggcaggcggtgcaagagaaaccggccaatgagaggagtcggttggtcgccctgtggccagtcacgtaa

SEQ ID NO: 373379 - DNA, 122 bp, Homo sapiens
tattactgctgttagggaaataaatgagcctacagatgaaataatatttcatgcggtgtacgtgtcaggataactggagtaacatcgaggcataccagataggccaaggaagtgctgtggga

SEQ ID NO: 373380 - DNA, 122 bp, Homo sapiens
tttgcagaggacgagggctgtcatcctgctcctctgaggctgaggcctcagccagcaaggcggcggggtcaagcggggtgtctgagccagccacacagtgctcactggaagctttggtgctt

SEQ ID NO: 373381 - DNA, 122 bp, Homo sapiens
accggggcggggaggtttaagagcgcgggacactggtgctgcgctgctggactgcgccgccggagcgacgggcttcgggtcggtgcaaggcaggcgcacggggaagggcgcgccgcgcggcc

SEQ ID NO: 373382 - DNA, 122 bp, Homo sapiens
tccacctttggtatgaacacaatatgccacttaatatttccacaaaggaaaagtaaggctcgtcagtatgttaaaagaccagctcaagagcaaggcaaattctctccacctcgaaatctact

SEQ ID NO: 373383 - DNA, 122 bp, Homo sapiens
aaaaataaaaggctttttatttttggtgaggggagaggttttacatccttcagtaaataacgagaagatcacagtcattccctcttgactacagtatgttgtagtgtgcagcacaaaggggg

SEQ ID NO: 373384 - DNA, 122 bp, Homo sapiens
gcaaactctacaattttaaccctgaagtgactggggtaaagtagattggaagacagcactcgggtgaccccttgtcccagttgccaagtgagaggtgtgatctcatttcctagaacctatgg

SEQ ID NO: 373385 - DNA, 122 bp, Homo sapiens
cttatagcaataaattattccttgggtatctgaggttcaaatttaactctgtgggccgggcgcggtggctcacgcctgtaatcccagcactttgggaggccaaggcgggcggatcacgaggt

SEQ ID NO: 373386 - DNA, 122 bp, Homo sapiens
gcaccaccttcctgcccatcaccagcagctagcagttctcttattgctgccttccttccccgtcccatcaacccaacagggctggaactgactctcatcttcagtcagcctctccctccacc

SEQ ID NO: 373387 - DNA, 122 bp, Homo sapiens
atgattatgttttacaggatcatgctttaagaagctgggactcagagaggttaagtaactcgtgttactttcttgtgtacacaccgaacatgttcctgaaagtctttaagaacagggactgt

SEQ ID NO: 373388 - DNA, 122 bp, Homo sapiens
atccacgtggacatggggaacatcagtgtccctgtgcatggttggtgtaggtgatctccccgtgctctcagatctgttgagggactgggctgggcagccagctgtggtctggaagcaccttt

SEQ ID NO: 373389 - DNA, 122 bp, Homo sapiens
ataaacagagagctcctgtgaaggaggctggtggagttatttggtggccgtctggctccccgctgagcttttgttttgctgagtgaggtctgcaggggagcacactgagctgaattgcttgg

SEQ ID NO: 373390 - DNA, 122 bp, Homo sapiens
agatgcaccatttcacaacttcagcaaaagccaaagcagccaacaaagccacagccctatcggctgtactgggctctgccttttgggcagctcgccggccactccccaaaagcagagcattc

SEQ ID NO: 373391 - DNA, 122 bp, Homo sapiens
ctccgatccccaagagctcccgcgggctgggcgcgggacgccgggctcggccttagcccccgggatttagagcatcctcgcgaccacccggaggcttctgggggccactctgcggatgagga

SEQ ID NO: 373392 - DNA, 122 bp, Homo sapiens
cagggggcgaggttcgaagtcctgggctggaccgcagcacgagtgtggcccggacggctgcgtggccagaaggggtgttcgggcagggtgcgagagcaccggcaaggtggattgtgtatgga

SEQ ID NO: 373393 - DNA, 122 bp, Homo sapiens
ctccctaaatacttcccagttggcaagcgccaaagaacacaaaatagcctccaagagcaccggcaaccatataatctcagtgccccgctcctcctttacacccccagggagggaaagttgga

SEQ ID NO: 373394 - DNA, 122 bp, Homo sapiens
ggcgcagcgggctcagggccctcgggcatccggaggggagctgtgcgcgttggagaggcccgatagcggccggaatcagctggggctattctggggcactttctctcagctctgggctcgcg

SEQ ID NO: 373395 - DNA, 122 bp, Homo sapiens
ccgcccggcagcccgcagcccgctgcgccccgggccgcgtctcccggcggtgggagggggcggcccccactcggttcctggcccctcgcggccccgtcagcctcccgctcggggtgcgccgc

SEQ ID NO: 373396 - DNA, 122 bp, Homo sapiens
aattttctttcccagcttaccttccatctctatctcttacatatactcgttttctattagcgttagtgatctgatggtatgtagacgtctataaggtgaacttcattggctcaatatactga

SEQ ID NO: 373397 - DNA, 122 bp, Homo sapiens
gtggacaagaataatgatgacaacataatggggtaattatcctcacaacagtcctatctacgtagtaggtgagaaattactatttcttacagcaggctgtagtggaagacactaagacccaa

SEQ ID NO: 373398 - DNA, 122 bp, Homo sapiens
gtgactctaatgagggctgtaaggtttgcgacccgctgtggcctgggccttccagggtcccggcagagccctctgctcctcagaccatcaccggcctggccccaggctaggggccttcatgg

SEQ ID NO: 373399 - DNA, 122 bp, Homo sapiens
taaatccaaacgtggagaacgacaaactgcttagactcacacaggccctggagttgactgcgcccaggggcgaagagaccgcggaatggccgaggcaggaggccggccagggcaccggtccc

SEQ ID NO: 373400 - DNA, 122 bp, Homo sapiens
tttgataattatcgggtatgttgcaagctatgatgaaagcaaaacatacagctggaaagacgatcattggtcaggaccaaaaaacacacacaccttgggtgtgagcatgcattcagttgcct

SEQ ID NO: 373401 - DNA, 122 bp, Homo sapiens
tcttcttcaggctgtggcctctcccgcagaagctcagcctccatgagttggagattctctcgccgcagcatccctcaggatggagtttcggctttccttccctcggggactttttatacgca

SEQ ID NO: 373402 - DNA, 122 bp, Homo sapiens
agattctcgaatcctggtaagggacctatgaataacgagcgccccgtgcacgcacacacacgcactttgacttttcatgattattacaagaatcagtgaagggtgcagtggcgccaagtgtt

SEQ ID NO: 373403 - DNA, 122 bp, Homo sapiens
acttagaagggaagttgctgggtcatccagtgaccgcctaacctctgaagacccactggacgctcacggcagatgcagcttcacaggaccaccaggtgcgtacgagggcgccgactgcccac

SEQ ID NO: 373404 - DNA, 122 bp, Homo sapiens
acttagatgcccaaaggaagggactccattgccctccactctcagacttggatggaggatcgcagatcactattagactgggctctctttgaggtcagcaacttcatctcaacagatggagg

SEQ ID NO: 373405 - DNA, 122 bp, Homo sapiens
ttctacctgcctgccttggcctgcattttattttcaaccaaggttgaaatggtagccccacgcaaaatccgatggtgtgtggaggaactgcccagtcattgcagtctgcacgccttcttaag

SEQ ID NO: 373406 - DNA, 122 bp, Homo sapiens
atagatctaaggcagccgagagtgctgtcccctttgtcccaggctctgcagcatccaaggcgagtgcagatggggccagctgttcttccaaaaccatcatctcttctttacctgctccttct

SEQ ID NO: 373407 - DNA, 122 bp, Homo sapiens
gccgcgtctttcttctcctggcggtgatgtcattgggcgacggcggccgaggccggggggcggcggcgggcgcccgcaggttcccgagccgctcctgagaaggcgcctgacagcgggccggg

SEQ ID NO: 373408 - DNA, 122 bp, Homo sapiens
tcctgcgcgttaagcctcacccgcgaaggctctccacgcaggaagaagatcaaggagtcacggataaagcctctctgggcggccaagtcgcctgtttgtctatggtttcagtaaatacgtct

SEQ ID NO: 373409 - DNA, 122 bp, Homo sapiens
aaaatctcaggtcccagtttgcacattgattttcttgtactattatgagccactgattgccgtatccattaacttcacctatgcataaaccatgcaacagatgacaatatatcacccattcc

SEQ ID NO: 373410 - DNA, 122 bp, Homo sapiens
atttatgaatagtatctagtaaatgaattcagggcctttgaaatggttttaaccacacttcgtacaagacatatgtactagggctgggtcaatagtaactgagtaataatgttcaagtgaga

SEQ ID NO: 373411 - DNA, 122 bp, Homo sapiens
cctgtggccgcagagcccgggccggagggcacctgctgggcggcctctggatggtgacctcgccgcggggcgggtccccacggtctcgctggacggcaggggcgcggctcactgcagcctcc

SEQ ID NO: 373412 - DNA, 122 bp, Homo sapiens
tgttctgaatctcctcccccacaaatgaaacacaacggatacgaattacagagaattttacggaagacactggagcttaagtctgcagattagttttttgtctacaagcggaggcgactgga

SEQ ID NO: 373413 - DNA, 122 bp, Homo sapiens
taaagagggtcagtttcaaaatagccctaaaaatacagacagccacgggctaagtgtctccgggcttccctgcaagatcacgcagggtggtatctgggcctgcgctcgctacctctttcatc

SEQ ID NO: 373414 - DNA, 122 bp, Homo sapiens
gaaggacctccgtgtccagcgccccgtaggtccgacgcctgtgcgtggctgatcgcttcacgcccccatcctttggttcttgtagcaaataaaggggcttgaactagaaatctgctgcaatt

SEQ ID NO: 373415 - DNA, 122 bp, Homo sapiens
tggtcccgcctctccgggcgccctggctctgattggcaaggaggccacccttttgccgggcggaattgcacgaagccacgcccacccactgaggagccggccaatagacggacaggtgtggc

SEQ ID NO: 373416 - DNA, 122 bp, Homo sapiens
ctgcgtgcgctaatgagctcaaggtgagccgcggcctgttggttacattgaaaaactgtgcggagtgaccggggccggctgcgtgtgagcagagactgaagccaagaaatgggagccttgcc

SEQ ID NO: 373417 - DNA, 122 bp, Homo sapiens
tcttaggaaattaaatggaaacttaaagagtctgctaagaaaagcagaaatgtaatctaccgccttgacctctcaagagattagatattcagggtcatgacaaagctgcttatgttggaata

SEQ ID NO: 373418 - DNA, 122 bp, Homo sapiens
caggaagctttcccaacccactggccactgggccttgtactttgttcaagttccctgccccgctgtcatttaccacgtttcccccaagattccaaacatctgggggcagagcctttgcctcc

SEQ ID NO: 373419 - DNA, 122 bp, Homo sapiens
atctacaccagtgatcaaataagaaataatgccccaaaccagggtttccaaccaccagcgcgaaattactcccattactccattctggatccatgcacccaaattctccacagaagatggca

SEQ ID NO: 373420 - DNA, 122 bp, Homo sapiens
ggagccctaggggagcgggaagcagggcttggcagctgcctccattttggcagagctgggcgttctggcaggggtcaggaaactggcacgtctcacccaggaagccaggggcacacctgggc

SEQ ID NO: 373421 - DNA, 122 bp, Homo sapiens
agtgtcagagtgagactctgtctcaaaaaaaataaaaaataaaaagaacattaacaatgtcgtacgggatcagactagtgtgttttccagccctaaatgtgttctgtggtggggaaatctgg

SEQ ID NO: 373422 - DNA, 122 bp, Homo sapiens
gtcccctgccctgtcccaggagccttactgatcctggtgctgcggctggtggctgtgtggcgtctctctgccctgcgccgcggcctcactgaggtggtgccggacgcccccgccaaggaggg

SEQ ID NO: 373423 - DNA, 122 bp, Homo sapiens
agtggtttctttccctggtgtttgggtgggtaaagtagagggcacaaaccagggagagagcgcaaggtcccctgttgcagacttaatagcacagatctgtgtacacctttgtgagaagcaca

SEQ ID NO: 373424 - DNA, 122 bp, Homo sapiens
ggcctgtgggttctcgcgtcccccagctccccccgcagccggctcctcagtggtccgctccggttgccaggtgcggattctgttcctaactgaaggctgagtgttcttcgccattaactgtg

SEQ ID NO: 373425 - DNA, 122 bp, Homo sapiens
ggccccacgccgcgtgggcctctggtgcaagcgggggccaggccgtgggcagatggacgacgcagcgtcccactggtgctcttcctggggtaggaagcgtcatggacccgggctcatcttca

SEQ ID NO: 373426 - DNA, 122 bp, Homo sapiens
gagggacaaacttagggggtattttagggccctattagggactcttcttcctatcttgtccgatgacggctctcggaggctcctggttttgatgtctggcattgcttttacccggtgggctt

SEQ ID NO: 373427 - DNA, 122 bp, Homo sapiens
cagatgacagaaagtgaagtctctccctaccccacttccctggggctggggctacctttgcgtccctcatgagtgacatctcaggctgcagccccactgttccccctctgtcagcagaaata

SEQ ID NO: 373428 - DNA, 122 bp, Homo sapiens
cacaccgggaacatccactcgtgggctctgattccgtactgcggaacaacggaggcagtgcgtgaggtggaagctgcactacaactcccagtaggccctggggtgttccaggccgagtgcct

SEQ ID NO: 373429 - DNA, 122 bp, Homo sapiens
ggcctggaagcccggagcctcagcgctcgcccctgctcgtgagtccgtctccccttagtccgggcgagcctctgatcttggccgcaagggtgactagagcccccatgctgcggggctggggg

SEQ ID NO: 373430 - DNA, 122 bp, Homo sapiens
cacccaggacaggacaatggcaaactcacacagcaaacgacctgggtgggcctggctgggcggcaccctccgcaaacaaggaggcctcagcactcatttccctgtccctgagaacgtgccca

SEQ ID NO: 373431 - DNA, 122 bp, Homo sapiens
tgggtctgttttgaaaagcccttcctggcgagttggtttcagtgtgctgtgtacagcagccgtttaacgttgatggtggaaaggggtgtctaaggtggaggtggttgtgatttcttgtgatt

SEQ ID NO: 373432 - DNA, 122 bp, Homo sapiens
tgcaagaagagactgatcgccagtcaggcaaaacggaagcttctgaaaccaggaagtggacgggaagccagtttggccagtgggatactgctggttttgagaacgaggaacagaaactgaaa

SEQ ID NO: 373433 - DNA, 122 bp, Homo sapiens
cagctcccggggggtgccgttgagccccttgctgaagcggtggggacgctcgcagatgcccgggggccgcttgggctcctcgccctcgctctcaggctccgacttgatgggctgctggttct

SEQ ID NO: 373434 - DNA, 122 bp, Homo sapiens
aagcaggagctattcaggaagcaggggtcctccagggctagagctagcctctcctgccctcgcccacgctgcgccagcacttgtttctccaaagccactaggcaggcgttagcgcgcggtga

SEQ ID NO: 373435 - DNA, 122 bp, Homo sapiens
aggggaccgcgcctgagctacccaaggcccagtaaatgcaaccatagaggatgatagggtcgctaagaattgggatttgattcgaggcacggtggaagccgcggaagggaacatgatttgat

SEQ ID NO: 373436 - DNA, 122 bp, Homo sapiens
acttgtccaactatgtaaacacagaaagcactcaagcaacaatgccctcgtaattagcagcgggcaggccggcgtctgggctggcccgtcaggcgcggcgtcagctgaaagggcccagcagg

SEQ ID NO: 373437 - DNA, 122 bp, Homo sapiens
acgcccagagaatcccttcggagaccaggtcagggtcactgagcttgcccagcagggcgccgcctcggacgccgccccgcctctcaccttgccagcgccgcgctcgggccgcgaaggtgcgt

SEQ ID NO: 373438 - DNA, 122 bp, Homo sapiens
cgcccgacacccgccccctccccccactcctgagaactctttactttttgtttggaaaatcggggccatttctttatttatctctgggtcttcccggaggagggcagagaaggggagagcga

SEQ ID NO: 373439 - DNA, 122 bp, Homo sapiens
ttccccacccacctcggcggagggctcggcggcttcagagtctgcagtgcgcaggcgcggcgctccctggccaggcctggtgcggccctggccgctggctctgttcctggttagaactacgc

SEQ ID NO: 373440 - DNA, 122 bp, Homo sapiens
gtggaaactcccgataaacccattagatctcgtgagacgtattcactctcgcgagaataacgcgggaaagacccacccccatgattcaactacctccctctgggtccttcccacaatatggg

SEQ ID NO: 373441 - DNA, 122 bp, Homo sapiens
atagaatgaaggcagctaagatgattactcaatcattaattaactatgttgtccaatcaccgcagtttcgacctccctttggcttcaaaagtcaaaaaagtcaacttgcaaaaaaaaaaaaa

SEQ ID NO: 373442 - DNA, 122 bp, Homo sapiens
atttccatgtcagagacgcttttgcaggcggcggcggcggcgcggcggcggctgctgctgcgggcggctgcctcagagcgcgtgtgttttattccagtccccaagccagagtattattcatt

SEQ ID NO: 373443 - DNA, 122 bp, Homo sapiens
ctctgcccagggtgcctgcctcataggatgccccgcgccacagagtctctctgcccagggcgcccgcctcacagctggtcctcgtccacccagatggtcttgcgctgctcctcgccgatctt

SEQ ID NO: 373444 - DNA, 122 bp, Homo sapiens
ggccaatcgccaggtggaaggcactcagccaatggcagaggggctctggggccctgtgggcggggactaagggtggagttgcggcgtcataggtcactgggcgggctatgggcggggtccac

SEQ ID NO: 373445 - DNA, 122 bp, Homo sapiens
gttctattgcgcttaacccgacacacctaagccctcctcaatcttctccactgagctgggcgtccagcagctagcacagtacctacgcgacaacggacaaagaataagtgcttgtgaactga

SEQ ID NO: 373446 - DNA, 122 bp, Homo sapiens
gctgtgccccagaggttgattaggttaatttcagcctcgacacaccccactgagttttaccgttgaccttccatgttcgcaggttccacatctgtgaattccaaaaaacacagactgaatct

SEQ ID NO: 373447 - DNA, 122 bp, Homo sapiens
gcctcttaactcgaactccttgtcctgtccccctatgatctgttcttatatagttgcccacgttgttttaaaatattacgtagttaatactactatgtacccagcactccactaagacttac

SEQ ID NO: 373448 - DNA, 122 bp, Homo sapiens
gatgaaatgttagtgtgggatttagatgcattttttttttctgcaacgacaaagaatatacggtgcaatgataacattagattatccattaaacaagacaaaagtgtgaaggaacacaaaac

SEQ ID NO: 373449 - DNA, 122 bp, Homo sapiens
cagtttcttttctccctctcccaacctacgtagggtccttcatcctggatactcacgacgcggacccagttctcactcccattgggtgtcgggtttccagagaagccaatcagtgtcgtcgc

SEQ ID NO: 373450 - DNA, 122 bp, Homo sapiens
aattttttaaatcagtgtttatttcctttaaatgtcggttatgaccaatggccctgaaatcgggggagggaaaaacgttcaggggagatgctggcagcggtgattgaagcgggtggtaatga

SEQ ID NO: 373451 - DNA, 122 bp, Homo sapiens
tctcgtctctcctctgtgtccccctcttctgccaggcgggtgccccggtgatgactggtgcgggagagagcaccaatcccgagaacagcgagctcaagtattcgggtcaagatgggctctac

SEQ ID NO: 373452 - DNA, 122 bp, Homo sapiens
agacgaaagcgacatcgcttccatctttacgtgagtcttggaaatggttcagcaccatgacgtccgccgaagacgtaggtgtagacgaggaacaaaagagaagacccctcgtggaggtggcc

SEQ ID NO: 373453 - DNA, 122 bp, Homo sapiens
gggccgggcgaggccgtggcctccaggcaacgcgcagccgcgttggcgcgagttttaaatcggtgccttcccagctttgcaagttcttatcaatcgttacatgcaagaggtagtttttaaaa

SEQ ID NO: 373454 - DNA, 122 bp, Homo sapiens
gcatgtacatgcacacagacacactcatgcattcacgcactcacacacaccaagatctgacggttgtagctggataggggagattctgggaagatgaacagaatcctgaggatgtcaggatg

SEQ ID NO: 373455 - DNA, 122 bp, Homo sapiens
cgttttttataaaacgacgcgacacacctagccacacagcctcagatcctattctaacatcgatccatcctgttacccttttaagaggcggatcccgcagtgtcctttcctccctcccagcc

SEQ ID NO: 373456 - DNA, 122 bp, Homo sapiens
gacaggggacccagacaaagcccactttgtgcagggagttggccgcaggcggggaatgtgcgcgtcggcgcgcgccccctccccgctcccggccagctgcgagtcttggctcccggacttgt

SEQ ID NO: 373457 - DNA, 122 bp, Homo sapiens
ttattctaagcgggcatgaggcgcggcggcccgcgccctgattggtccggttatctgacccggggcctgccagcgccagacaatagtcggagtcaaattattcgccatggagacgctgtcag

SEQ ID NO: 373458 - DNA, 122 bp, Homo sapiens
aaagggtccccaagatggcaggcactgtcctcccagccactgtcccacaacagagaacttcgtccagtccgagggtccttattattgagcttccctttgattcttcaccctcatcacgcccc

SEQ ID NO: 373459 - DNA, 122 bp, Homo sapiens
cgaggaaggcataaaggacttctaaattaaattatcgatcttcatgaaccttcttctgcacgcgggcttctctgtgccaaggaaatgttcccttctcttcggcacaggactcctctttgcct

SEQ ID NO: 373460 - DNA, 122 bp, Homo sapiens
cggggtccggcggatcctgggcagcagccggggtggggatgctgtcacattcggggacgacggaccccgacggtgccaaagtctgggacaggacagttgcgggacggttggggagcgtcagt

SEQ ID NO: 373461 - DNA, 122 bp, Homo sapiens
gaagcgcgtaaatggttaaactcctggcctgggctgggctggtgcacagcctgggcccggcgcggcgggggttaaggtgggcgcccgcgccccgcgccccgcgccctcccgccgggatgaga

SEQ ID NO: 373462 - DNA, 122 bp, Homo sapiens
gaggccgcctcggcgaacttcgttttccctcgaatctccagccaccgttcagcagcctgtcggtgtgctccccaatgccgtaaaaaaatcagaattataaatatattcgtatgagcagaact

SEQ ID NO: 373463 - DNA, 122 bp, Homo sapiens
gcgccgggactctttcttgccatctgctggtgggaggtcagaagtcccgagttgaggaaccgccgcggaaagagggtgtctcctaagggcgatttcctccctcccctttttccgcccttcct

SEQ ID NO: 373464 - DNA, 122 bp, Homo sapiens
aggctttgggagggaacagttagttaccgcaaatgtctggctatctaggtgaagcactcccgaccctctgctcctcaactgtagttgtgaattacagagctggaaacagcacacgggagcat

SEQ ID NO: 373465 - DNA, 122 bp, Homo sapiens
acaggtgtgcagtggcacaatcacggctcacaacagccttgacctcccagctcaagcaatcgcaatcctcccaagcagctgggactacagatgtgcatccccacgcccaactaatttatttt

SEQ ID NO: 373466 - DNA, 122 bp, Homo sapiens
gttcgagaccagcctggccaactggtgaaaccccgtctctactcaacatacaaaatcagccgggcgtggtggcgcacgcctgtaatcccagctacttgggaggctgaggcaagagaatcgct

SEQ ID NO: 373467 - DNA, 122 bp, Homo sapiens
gagggagcggttggctggggaagacctgagtgagggagctttcttgaggacgggttttgtcggagtgtagttcatataccatgcacagcctgtcagcatacagcttgaatgaactcacgtgt

SEQ ID NO: 373468 - DNA, 122 bp, Homo sapiens
tccccattgcacttaaaaacatttgggattggctgcagtgcaagtgatttcctagcaggacggagcagagccctctggcgccacattcctcttggcagaagcctcgctctgcgtggcactgc

SEQ ID NO: 373469 - DNA, 122 bp, Homo sapiens
tgccttaattaattaaaaaaataataataaagtgtagtgctgtcatctgatttcaaacatcgctttagagtggggtgaacacacctcaacggcactgtgatgacaactaagcagggtccgtg

SEQ ID NO: 373470 - DNA, 122 bp, Homo sapiens
gacaacagagtgggtaccccaccgaaggaaaggggcaaagacctttgtagagatggcctgcgcagatacaaacaaaaccacgaaaagggacctcaaagaatgggagacagcgttcacgaagc

SEQ ID NO: 373471 - DNA, 122 bp, Homo sapiens
ttgttttccccttcatatttgctgcaaaggctgtaaaaggcactctacagagttgtttgccgccttagggatggaagtcagccactcctgctgtatggattttagtttcataggctatttcc

SEQ ID NO: 373472 - DNA, 122 bp, Homo sapiens
taaaagtggtaacatctgtgctcctgctggcagatgccatcccaccaacctttctatgggcggtttgtctttgagagaaaataaagtacctgatcccaggccttagtcagtcttagctccct

SEQ ID NO: 373473 - DNA, 122 bp, Homo sapiens
ctgctgcctctctaacatcatcaaaaagaaagaagtggggaaagattgtgaggtcagagacgtctcctgtagtagagataatttcccctgagtaaagcttcagtagcagtcagtgaaaagtg

SEQ ID NO: 373474 - DNA, 122 bp, Homo sapiens
ggaaggacgggtctgtgcggaaggctctgcggccggctctgcccccagggctcccagcagcgggctcccgaggcctggcttctcccggaggagaccccagcttctccagcgttcttacattt

SEQ ID NO: 373475 - DNA, 122 bp, Homo sapiens
aatagaataagggtttaaacgaagtaaagtggtacgggcgtaggtttctctgcacagtgccgtatttaagggcacagaaaaagttacgggatgacaaaagaggtgagcaaggaggtctgcag

SEQ ID NO: 373476 - DNA, 122 bp, Homo sapiens
ataagagttgggtaagcagatctctctcccctccacctctgaccctccctccacagggcacgcacctgagggctgtgttggctcccggtactctccgctgctgatttgccgaatgaggtttt

SEQ ID NO: 373477 - DNA, 122 bp, Homo sapiens
agaaaatggctggcccttgtcctctgcgtgaagctggtgtagaaaccaaatgcttgatgccggcacttggcagtgatcatggtgcactcagcttctactccaagcccggccactgccaggca

SEQ ID NO: 373478 - DNA, 122 bp, Homo sapiens
gattatccatttctggatcatcaggtctgccccggataacctagttctgccatatgaagtcgtggtgcctgtgttcattgatgttcttggtggttccgtgtagctccatttttattgtcttg

SEQ ID NO: 373479 - DNA, 122 bp, Homo sapiens
ctggatgcgtactttgtccactctaaaatgggaagttgggttctgtgcgagtccatccagcgtccacattctgtgtggaaaatgaaagggatgtggactcagggcccaagaggatgagctgc

SEQ ID NO: 373480 - DNA, 122 bp, Homo sapiens
cactcggaacctcagctcctccagccggcccctccttctaccaggtccccacccccaccccgccacactaggctcccccgccccgccggtgcccagccagcggccccctcccccgcagcccg

SEQ ID NO: 373481 - DNA, 122 bp, Homo sapiens
gggcaacagagtgagacccctatctctacgaataaaaaaaattagccgggtgtgatggcacgtgcctgtagtaccagctactccacaggcagaggtggaaggatcacttgagcacagaaagt

SEQ ID NO: 373482 - DNA, 122 bp, Homo sapiens
gtcgggggcgggcgcgcgtgtgggggggcgggcgcgcgtgtcggggggcgggcgcgggggcgggcacagcaggcgcagggtctttcccacatgctgggctgcagagtgaggaaaacccatcc

SEQ ID NO: 373483 - DNA, 122 bp, Homo sapiens
tttcccccagtcctgctcattttggtcacgcctctttgaagtcagctgtgcagaaacccgcgacggatgggcgccagacggggctctggaggctttggggagttgtagtctccggccatgcc

SEQ ID NO: 373484 - DNA, 122 bp, Homo sapiens
tcggagcagccggcaggccctgccggccccgggcaatgagggacttagcacccaggccagcggctgcggaggatgtactggttcccccagcagtgccagcccaccggcgctgcgctccgggc

SEQ ID NO: 373485 - DNA, 122 bp, Homo sapiens
atgatattttcggtttgctgtatctgaaaacggctatcatccagggctttgcccagttgtcggatctgtgactctagggcactgtggtcccctgcggtggcaaccataagaatctttactgg

SEQ ID NO: 373486 - DNA, 122 bp, Homo sapiens
ttgccttccctttcccagcctctctcctggcggggaactgtttggaccagtcgtcagcggcggccagaaagttttcctgctgtctgcctgaaggtcgcctgtgtcagggggaagttgcagcc

SEQ ID NO: 373487 - DNA, 122 bp, Homo sapiens
tggagggtaaaaagaatgacttgtgaatgctcactaggtctttgaatatgtaagtagacacgacttcaagccagttgctcagccttgaatatatcctagagtccatcaccttgggctgtgag

SEQ ID NO: 373488 - DNA, 122 bp, Homo sapiens
cagcgtcgatctcgcttgtctatcacgatagtcgcggtgctgcgactgaacgcgcctgcgcggaaagggaagcatccacccttgccgattgccacctctttaaacgctgttccttcacttag

SEQ ID NO: 373489 - DNA, 122 bp, Homo sapiens
ctcatgccctcatccaaggagttcaaaaggaaaaaccaggaaagaggtgatttgcagccacgttctccagttcaccatgggcgaggccacgctcggctgcttccattgctgggagtagggaa

SEQ ID NO: 373490 - DNA, 122 bp, Homo sapiens
ggaattgtagttcctgggagaagccgggctgcctcacgaggcactaggaactacatttcccggtgagagagcggctccggccggccgcgcggtaccggagcgtcgcactgtcagcggccaga

SEQ ID NO: 373491 - DNA, 122 bp, Homo sapiens
aaaggcagtgagttctacttgcagaaatagggcgggagtgcagtctgactccaatccacacgtccttcccctctgacagaacgccccaaaacgcagtcctctctttcttccgcgccgctccc

SEQ ID NO: 373492 - DNA, 122 bp, Homo sapiens
aagcttccgccaagagctcaggagctggggcagccctggagctcttcctgcccttctgcccgcggcggcggaaactccagagtccctactctttctcgggaggactttagggaagaagcaga

SEQ ID NO: 373493 - DNA, 122 bp, Homo sapiens
gaagaccgtgtgtgagcggctagacaggtggttgaggtgcgtggctcccgtgtgccgcgccgcgttgcccatctccaggaggctcagcacctcatccaggccctccacgtcgacctccttca

SEQ ID NO: 373494 - DNA, 122 bp, Homo sapiens
tccggtcgtgatcataaccgaggccttgtctgcagagtaacacaccaggcccaaacccaccgccctcggcagccgccccacgcgggcccttcctcggcagacttcccaacctctacttgagc

SEQ ID NO: 373495 - DNA, 122 bp, Homo sapiens
gcgcggctgtcgcagcccccccgccctcccgcacctgttcggcccgccggggtcagtggacggtgcccacctggtccccactcacctctggcggacatggtgcaggcagcgggagccggagc

SEQ ID NO: 373496 - DNA, 122 bp, Homo sapiens
agtctagcctatctgcagagcagtgctcgcccaggagaggccacagaaggggcgtgcacccgcgagagcgcgcagggcattgcctcggttgagtgcgcccgggtgcgcagggcgcaccacta

SEQ ID NO: 373497 - DNA, 122 bp, Homo sapiens
caacctcatataggtcttcttgttgcaatatctccttctccaacacctcagtgaccctttcgtaaactcctcctctccttctgataaccttcaatggcatggccattcctaagtggccaagt

SEQ ID NO: 373498 - DNA, 122 bp, Homo sapiens
ggcctcttgctcgtgcttggttttccggaccttgcttcctaaagggtctttaggggttcccggactcctccgcctgggagcctctatccgcctgggagcctctatgcgccccgcaaagcccc

SEQ ID NO: 373499 - DNA, 122 bp, Homo sapiens
cagggttgggtggtcgcgacaccggggtcgccttgaggccagtccggctgccgaggtctgcgggagtccacctccggccagctggcaattttgaaagactgccttactttccccatctcagt

SEQ ID NO: 373500 - DNA, 122 bp, Homo sapiens
ccacgcagggggcgtccagcgacctgcactactgggtcgggaagcaggcgggtgcggaagcgcagggcgctgcggaggccttccagcagcgcctacaggacgagctggggggccagaccgtg

SEQ ID NO: 373501 - DNA, 122 bp, Homo sapiens
ttcatagccatgctgtcccctctgtctggaatgctctttcccaccttctctggagaaatgcgccctctcatctttcacaccctccgcagtgtttgtctcccctccattccatttggccccat

SEQ ID NO: 373502 - DNA, 122 bp, Homo sapiens
atccgtaagggcggccgaaatctaggaatcagatctcgaagaagcacaggggttacttcacgagctttctcagttagtgttggataagcctacacccacccagagtaggtgcgcccaagaac

SEQ ID NO: 373503 - DNA, 122 bp, Homo sapiens
tttatgacaatcatttgctcacacacttatctctcttgttaaaccgaaaagttattgagacggaaccatatttatttgttgagttcctagggctagcactatgcttggcacatcacaggtac

SEQ ID NO: 373504 - DNA, 122 bp, Homo sapiens
gactcctgctaggtttggggaggggtcccagtctgcgatcctttctccctcttcgtgcagcgtcctcctccccggggcccgggccggcggcgcccacgcaacgcggcgcggtgcgagtcccg

SEQ ID NO: 373505 - DNA, 122 bp, Homo sapiens
gaaaagttgagaaaattgatgacttcaaagctgaagactttcagattgaagggtacaatccgcatccaactattaaaatggaaatggctgtttagggtgctttcaaaggagctcgaaggata

SEQ ID NO: 373506 - DNA, 122 bp, Homo sapiens
catgaattagtccaaaagaatcacccacctgagcccagcccaaactgctgacctgcacaacggtgagcacataaaatggtcattgtttaggtcactaagttttggagtggtttgttacatgg

SEQ ID NO: 373507 - DNA, 122 bp, Homo sapiens
cgcaatggcccccgccaccggccatttggggctttcaaacgccctaacgaggagtccgagcggccactgaaagcctccctgttcctgggcagggcagccagagtgccctcccctctcccttc

SEQ ID NO: 373508 - DNA, 122 bp, Homo sapiens
agaatccaaaccgggagtagagccgggatgaggcttcagccaggacggcttcagggtcagcggtggagtctgtgggagagtgataagaggcggcatccatcccgggggagaaagaacaggca

SEQ ID NO: 373509 - DNA, 122 bp, Homo sapiens
gccagctcagggctcggatgccactggttccaccctgcatggcggctttcaacccgaacgcgtccatccttcaaggtcaagacccaggacgtagttcaacaagtagttggtgatgatagcat

SEQ ID NO: 373510 - DNA, 122 bp, Homo sapiens
acactgcctccagaagaaagcagcagctcccctcccccatctcagtgcattctctcccaccgaggcaccgaccactggagaacccaggggtcactaattcccaacctgtgaggaaacctggg

SEQ ID NO: 373511 - DNA, 122 bp, Homo sapiens
tgaggcattgtgctttggggcatagaacaaaaagacaccttacaacctagctagggaaaccggacacctgtaagtgtgatttacaagactgagggcaaatgccaggagccactggagtggag

SEQ ID NO: 373512 - DNA, 122 bp, Homo sapiens
ttgtcggggtgtgtagactgggagccacccacacacctgactctcccctcctaggaaatgcgtccaccaggtcatttctcctgcaaaccctcattttaaagtgtcttggatgctttcctgcc

SEQ ID NO: 373513 - DNA, 122 bp, Homo sapiens
gcagccgcgcgcttccggggcaggcacctggatctgggccagggctggcctacaaggaggcgcaggcccactgctgaagcagccacgaccagctcagcgccagggcaggctcttctacagcg

SEQ ID NO: 373514 - DNA, 122 bp, Homo sapiens
actagaagaaggggaaagcgctgagtttaaggaggattgcgatggagcctgacaggagcccgggagtgcaaactctgacccagatgaggaaagacagccaaagccttcagggtgtgtgtggt

SEQ ID NO: 373515 - DNA, 122 bp, Homo sapiens
cctctggactgaagccagggcaggctcagacagctttggagccaagagacggagaggctccgcttctgggagcacaggattttgacaggaattgtggaaaatacacaggtaggatgctttca

SEQ ID NO: 373516 - DNA, 122 bp, Homo sapiens
ccacggcagctgcaggctgagcttgtcctgcttcagatcactcctacactgaggagtgagcgagggagagcattccagtttactgcacacagcccacctccaagtctgaagtttaaagcttc

SEQ ID NO: 373517 - DNA, 122 bp, Homo sapiens
gcccgacccgcgcggcgcctcctcctcgctgtctcttctttcggtctcaagagtctttctcggtcccttcatccgtctctgggctgggcgtggctccagtctccaccatcccccttcccacc

SEQ ID NO: 373518 - DNA, 122 bp, Homo sapiens
agtcccagacgctgtctcccccgctccccactcacctatcgctcacggccaggagcttgtcgtggctgacagcaaagagctgctctctgtgggcctgcttcatctcatccgagaggccgtac

SEQ ID NO: 373519 - DNA, 122 bp, Homo sapiens
ctgctcggctgaggagggctctcagtaacctcagtccagccatccagctccccacagccccgccgccaggaagagcctggctccacaaccccgtgccaggcccttgacttccagccaagcgt

SEQ ID NO: 373520 - DNA, 122 bp, Homo sapiens
caggatgctttatggctgatgaagcaccttctcatacactgctttatttaaccagagcctcgaatctacaagggaggaaggaattatctgataattacattttccaatcaaatgaaatggat

SEQ ID NO: 373521 - DNA, 122 bp, Homo sapiens
cttctatagaagacactgagtgtagttttaacctggggacaatggagacttgcctgcccccggcctaggaggtcctaaggattcatagttcctctccttgtccaagaatctagggatgcaga

SEQ ID NO: 373522 - DNA, 122 bp, Homo sapiens
ggacgcggccgccactctgggtcgaccctgttattcattgggcaacgcgtcttttgaaaccgaactgaagggggaaggggcgagagggaagaggaggggcagaaggagttcggggaggcaca

SEQ ID NO: 373523 - DNA, 122 bp, Homo sapiens
agggcagcctgcggcaggtccccgagcctgagcactcctcctatctggggcctgagaggacgctctgggctttttcccaggcccagggtgcgcggcctgctagcgcctttcgaggcacagtc

SEQ ID NO: 373524 - DNA, 122 bp, Homo sapiens
ctccagccttgacctcccaaagtgctgggattacaggtgtgagcggctttagcttcttaacgttttaaaaatcaatcaccagctgggtgcggtggctcttgactgtaatcccagcactttgg

SEQ ID NO: 373525 - DNA, 122 bp, Homo sapiens
actggtgattggtggagaaagcggcagctgtcccagcggaagcgacgaagggacgggacccgggagcctggacgagtccgagcgcgtcacctcctcacgctgcggctgtcgcccgtgtcccg

SEQ ID NO: 373526 - DNA, 122 bp, Homo sapiens
ccctctgtctctgcctctccatggcctctgagaccgacagcttcccctgcgtctttacagcgttcttgaccgagagtaacaccaggccctggatgggcagggaaccaggcaagtcatggtaa

SEQ ID NO: 373527 - DNA, 122 bp, Homo sapiens
tcccctgccccaaggcttcggagggactattcgtatgaaagagtgggtcctacctcttgccggggtcggggccgaggcgagtattttgccagagggaggggttttcgggggacctatggggg

SEQ ID NO: 373528 - DNA, 122 bp, Homo sapiens
ccgggcgtcgcggatgcatgccggccacgggtatttctagacaagacttgcagggccgcccgtcacagaaggaaaaataaaacagtctgacgcgctagttcaggctccagcagcagccaagc

SEQ ID NO: 373529 - DNA, 122 bp, Homo sapiens
ttgccttccttttccgtcagggcatgagccagtgcctcttgcagggtagcgaactccacacgctgctcgttgagggcgttctgcagccgcatctcaagctctgctctggccgccttctccag

SEQ ID NO: 373530 - DNA, 122 bp, Homo sapiens
cggggtgggcataagcacagttgacctaactagaaatcacgccagcatgtaactttctaacgctccgccccaccgtcgttgcccgctccagtctcaaatcctccctccctacttcccagacc

SEQ ID NO: 373531 - DNA, 122 bp, Homo sapiens
ctcaccacctagagatgctagaattctacttcttggcactaaaagctatatcatcctgcacgcttgtgttctgaagcaggtgctaactctcttctgggccttaatacctctcgttttttctc

SEQ ID NO: 373532 - DNA, 122 bp, Homo sapiens
gagaaaggccgcgtcgagcggtaggtgcagtcgtcgctgtggtgaccccaggtcctgatgcgtccggcccagggccagccaatggcggtagaggtcttgggcacctgacaagaggggcggtc

SEQ ID NO: 373533 - DNA, 122 bp, Homo sapiens
ggacaaatgtataatgtgttaaatatgtagatattttgtcttatgtaaggtagagttacacgagagtcacggaaagcattaagtaggggacccagactttctatgtttttcccactttgtgc

SEQ ID NO: 373534 - DNA, 122 bp, Homo sapiens
gtggggcctctggttccttttccttcccctggggagaaggcctggctcccacgccctccccgcatagtcacgctcaggttgctggaggcctgggtcgccccctcctgcaagccccgagagtc

SEQ ID NO: 373535 - DNA, 122 bp, Homo sapiens
gggaggccaaggaattactcatggccctgcattaacaatggggaaaggggcacccagtgacgctcagcaaaatacccagggtcccacaattgttggaagagcatcagaactggaatcttggc

SEQ ID NO: 373536 - DNA, 122 bp, Homo sapiens
gttctcaaaaagttaaacgttggtctcttccaggagctaccgccagaagatggcagcagccgccaagttgtcactactagagaagtccctgggactgagtaaggggaataataaataaagtg

SEQ ID NO: 373537 - DNA, 122 bp, Homo sapiens
ggttcggcccggggtctctccccgccccctttgcttcggcctgggcatcccggggaagtgcgtctccagggaagcacttgggaggcccttcagagaggagaatggcctttcttctctccaaa

SEQ ID NO: 373538 - DNA, 122 bp, Homo sapiens
cctttccctcgggggtggggtcgctgagtcagcaggcaggctgcggtcggctctggtctccgctggggagccgaggcctctcccgcagccgccgctgtggccccagcccgcgggaaagacaa

SEQ ID NO: 373539 - DNA, 122 bp, Homo sapiens
tctctgatggatttgttgactcctctgtgggagaaaggcttggtctactgcaggtgttaacgctaagccaggctggagctgtggacgtcagtttcctcagctccccgctgttcgcttcgaac

SEQ ID NO: 373540 - DNA, 122 bp, Homo sapiens
ccagttccttgtttccttttctaggagttcattcaaaagtgcctgcagtctgagcctgctcgcagaccaacagccagagaacttctgttccacccagcattgtttgaagtgccctcgctcaa

SEQ ID NO: 373541 - DNA, 122 bp, Homo sapiens
acaccctcccccgcacagcatccttcaccatggttgatccagtagttgaagttggagggtcgctgactgcagacaccatacgggtctccagcaacaccacgaatcccaacgcgcggttgctg

SEQ ID NO: 373542 - DNA, 122 bp, Homo sapiens
cagggatgtgcctggggagcctcttctggggccctacttactgccatcgcaggggccctacgggcgtcctccgggatggtgtcacgggctctagacccacaagcagggttggagccccggcg

SEQ ID NO: 373543 - DNA, 122 bp, Homo sapiens
ttaattttctttgcttttttcatatttcatcaggctccatgctgagcccaatcagggacccgatagaaatccaaacaccatgtcagcgagtccccaagaaatgcattttgtgccaaggctat

SEQ ID NO: 373544 - DNA, 122 bp, Homo sapiens
cagtaaaatattatgaaaataattgtgggtaaacagggagaagccagacatgaaaagaagcgagatcttggagcatatatctatttgcgtgctagtcttgttagctgtaaatagacatgaac

SEQ ID NO: 373545 - DNA, 122 bp, Homo sapiens
atcagagcatgatccaggcttctgacagcttccagttcccaccgcgctctcctccacccacgacctcatccccgccagttccccagcacagcgcgaactctgaagctcggcctctcctcccc

SEQ ID NO: 373546 - DNA, 122 bp, Homo sapiens
aaaccagggaggaaccctgaaacgaataggctgtagaggcagaaaggaagtagacactgacgcagggtgtggaggaggacagaatgttcatttggcattcaagccctatcactctggaatca

SEQ ID NO: 373547 - DNA, 122 bp, Homo sapiens
ctccgcagcgacaagggctagtcgcgcaagatcttctcaccattggtccctaaggaacggcggcctcctattggttaagtgccgggaaagggggcggacaatcgcgtgagtgctgcgggcgt

SEQ ID NO: 373548 - DNA, 122 bp, Homo sapiens
gtttcaatgggcatacagggtattttctagtttttttttcctcttagaaaataatacttgcgatgactttccttgtagctcagactttttcacgtctgttgttatctctttgggaatgctga

SEQ ID NO: 373549 - DNA, 122 bp, Homo sapiens
ctcacaccagggggaggaaagccgccttccgggcaaaccccacgaaaccctgaaagcccccgacacaggctgggcagtcccagaggaaggaggtggctggcctcccccacccccacgggctc

SEQ ID NO: 373550 - DNA, 122 bp, Homo sapiens
cccacaaagggccggggccggggtgggagtcggcttacagggcacagcgcggcgcaggcccgccctggaatggccgtgaacttgttgtttttccacgtcatttgctctcaaatgtactatca

SEQ ID NO: 373551 - DNA, 122 bp, Homo sapiens
gcctctagggcaggccttgacctaactcatgtgagtacagccttgacctcagcaggcaggcgggacagggattcgattattgggggaaaagtctttctgtcccagagcaggcttaccttcaa

SEQ ID NO: 373552 - DNA, 122 bp, Homo sapiens
agagttctaggaagcaatttagtcaagagattcaggaaagcctattaagacggtgtcctgcgagacgctagttgctaccccaggttagagatcaggcggtcctggattaagcctccccgaac

SEQ ID NO: 373553 - DNA, 122 bp, Homo sapiens
cgcccccttgctcctcagcgatcggggttcttccgcctcgcgagaaagggactctggtagcggctgtacccgaaacgtcacttcctgcgacacgcaggaaacaaaggctcccagttcacgcg

SEQ ID NO: 373554 - DNA, 122 bp, Homo sapiens
ccacaggcacaaagcatctgggtgtcagagacaccgcagacgtttggggtgggatgggggcgctgagatcaccgtagtgcaatccacaggcacaaagcatctgggtgtcagagacaccgcag

SEQ ID NO: 373555 - DNA, 122 bp, Homo sapiens
gtgtatgtgtaccacattctctttatccaggttaacactgatggacatttgggttgattccgtgtcttttgtctggcgagattgtaaaaacagattcttgggctccacccccagagattgga

SEQ ID NO: 373556 - DNA, 122 bp, Homo sapiens
ctggcttaaaaagcaagtctttctttggcagccctccggcccttaccttgtctggagacgcgccccccaccccgcgctccctgaactgctgtgcgtcgagctgagtcctcgccaacggccgc

SEQ ID NO: 373557 - DNA, 122 bp, Homo sapiens
cacccaaggtccacccagaattcccatggctccggagagcattgcagcaaggaatccccacgctcttcacttgtccggtttctagaacggagttgacatgagagccctgccgcacagaacct

SEQ ID NO: 373558 - DNA, 122 bp, Homo sapiens
tgggtggggacttatattggccttgacggcccgtggaaaggaactggcggcaattccttccgttttccgtcaatttcttcacgggttgctcggaagctacggaagcaaagtagaaaggagtg

SEQ ID NO: 373559 - DNA, 122 bp, Homo sapiens
tttcctgcaacttgcacttttttttttccttttggtcatcaataattctgccaattataacgttttgttttttaaatagagagtgatgaatttaccagcaggaacctggtggtattcgtgaa

SEQ ID NO: 373560 - DNA, 122 bp, Homo sapiens
aaaaaggaaagaaatacagtgtatattttaagcctacggtgcatctcaatttggtctagtcgtatttcaaacgcttaatgggcacatactgctaggtgctactatattgaacagcatagctc

SEQ ID NO: 373561 - DNA, 122 bp, Homo sapiens
tcctggcctgaccctgggagactccgctggggccgcctgttatggtgctagctgccgtcccggtgcgtactttcccaaggtgaatttgaccttctttgcgacagctaggccctgactaaggt

SEQ ID NO: 373562 - DNA, 122 bp, Homo sapiens
acagcggcccgtgggatcccctttctgagggttcctgcacttcttcccccgactttgggtcgccgagccgccgggaggcaatgacgtttgccttctccttttgcttgcggggaggtgggtgg

SEQ ID NO: 373563 - DNA, 122 bp, Homo sapiens
ctgctgcgtgtccaaccccgaggctcctagctaagaaaccacccactcctgtaagctgcgcgattcgtggtttcgtgttacacagtagaatcgtgaccctagtcacctgatgcacaggcatc

SEQ ID NO: 373564 - DNA, 122 bp, Homo sapiens
gtaagtggcgggggcattgctgctccccgaagggggtcttcctttaagaatgaatcatcgcggcagcctagccagacttgagttgctaaaggaattggaaactgccatatggcgcccagtgg

SEQ ID NO: 373565 - DNA, 122 bp, Homo sapiens
cctctgtaggcttgcgtttcttttgatgagagtctagagaagtcatgggtaatactttaccgtgtgccagagaccgcttatgtttcagttgtacaaggtcaggtcttaatttaaccaccaac

SEQ ID NO: 373566 - DNA, 122 bp, Homo sapiens
tgataattcaacaaacattcactgggagcccacttcatgcaagcctctactctaaacactcgggacccagcaagtgactaaaacagtcacagtccctgcattcctggaacttagggttacag

SEQ ID NO: 373567 - DNA, 122 bp, Homo sapiens
ttctcttgtcctaaactattatggccttctttgtccgattgaacggaggtaacgaagtctcgtcttccgccagtcgtccgggcgaagccagtctggagccgctccggagcgcgcgttgtgat

SEQ ID NO: 373568 - DNA, 122 bp, Homo sapiens
gcccccacaccacagacgggcggcaggtcagggtggcacaggagggcacggtgacacgggcggcagggaagagtggcacgggagggcagggtgacacgggcggcatagcagagtggcatgga

SEQ ID NO: 373569 - DNA, 122 bp, Homo sapiens
gctcaaacagttcaggatccaggacagttccaggcatcatgggagagggatgctgtgatgcgtgctctcagttcttttatgtgtttggggagcctgactggaatggatagtaggtggccaca

SEQ ID NO: 373570 - DNA, 122 bp, Homo sapiens
agtttgactattttcctggtgcttgtaaaaatagtctccttagatctttagcttccagtccgtgtgttcctgcccctgcccctcccagcccctggtctgggatcttggaaagaatgacctag

SEQ ID NO: 373571 - DNA, 122 bp, Homo sapiens
cctcccagctgcagtcagcacagtagctcatttgactcaaagtcaaaaccaccagggtcccgacaatccagtgtctgctgaggaggaaagttctttatttgttatcagatggagtggtgtga

SEQ ID NO: 373572 - DNA, 122 bp, Homo sapiens
cagctggggcgggcttgagctgtgatgtgggagcctgcactgccgccgcgcggccacttccgattccacaactacaaccgattctgcaccatcggggcggtgagaccgaaggggaagcctcc

SEQ ID NO: 373573 - DNA, 122 bp, Homo sapiens
cagggagcggagggtgggggggcgaataacgtgaaagttaccagaaacattatttagcagcggattccctgcgtccttgtcaatttcagagacaaaacaagcagcccaggctagtagtctag

SEQ ID NO: 373574 - DNA, 122 bp, Homo sapiens
gtccaatggcagaaaatacgaggctcatgaaacttctcaacatgcgctcccatggctaaacgtgtttattaatttagaatcaaaatccgtgggagaaacacgtagcatatccaagacttggg

SEQ ID NO: 373575 - DNA, 122 bp, Homo sapiens
ctgagcgacgggctgcggctcatcgcgctgctcgaggtgctcagccagaagcgcatgtaccgcaagtaccatcagcggcccacctttcgccagatgcagctcgagaatgtgtccgtggcgct

SEQ ID NO: 373576 - DNA, 122 bp, Homo sapiens
ttttttttttggtttggaactcctgcactggtcctgtgatgtgactgcagccgccaggcgcgtgcgcagtgtacactgcgtgcgcatacgcgagcccgttgcgcctgcgcgcggtgcggccg

SEQ ID NO: 373577 - DNA, 122 bp, Homo sapiens
agaggcagagctggagaagctgaagatggccgccaagcccatgctgccaccggctgccttcggcctctccttccctctcggcggccccgcagctgtagcggccgcggcgggtgcctcgctct

SEQ ID NO: 373578 - DNA, 122 bp, Homo sapiens
tggtttcggccataactccgggattcttctggatatgtatcctcctttcgatgagtatctcgaccttcacggtccctgtagtcatgggcatcacgagtggaccgagaatctctgggatcacg

SEQ ID NO: 373579 - DNA, 122 bp, Homo sapiens
aatctatctcgtcactgccaaaggtgcctgaatcagggtgaattccacgagattcaccagcggttttgctccagtccaaggtaaatacagtatgcaaaatgaggaaccacccaaggatgtcg

SEQ ID NO: 373580 - DNA, 122 bp, Homo sapiens
ccagaaagtcccccgactatcagtagagttctgactcttaaagagaaaaggtgctctttccggaggggctggcagagagccccaacggcaggaaatacaaataaaggaagtgctctccaacc

SEQ ID NO: 373581 - DNA, 122 bp, Homo sapiens
ggttcgctttacacataggcatatccagttccttagacattgactgggtctcctgggttgcggcagagcgtgcagtcagctcagaggaactagctctcggtcctcttagtgtcattatggta

SEQ ID NO: 373582 - DNA, 122 bp, Homo sapiens
ccccctcccgtccctccatctccaccttctctgtgcttgggtgcaccctgtggatacagccggcctgagggaccgcagactcgtcgggctgctttctgatgagaggattaacaaacaattgc

SEQ ID NO: 373583 - DNA, 122 bp, Homo sapiens
tgctcccccaacagaacggcttgagctttccccagcgcaattcagaaatgctgtggcggtcgccagactcttcgggtagctcccggcagctccgaggtagcgctcccctccccaaccatcgc

SEQ ID NO: 373584 - DNA, 122 bp, Homo sapiens
attgcactccagcctgggcaacaagagcaggactctgtctcaaaagaataaagaataggccgggcacggtggcttacaaggtcaggagatcaagacccatcctggctaacatggtgaaaccc

SEQ ID NO: 373585 - DNA, 122 bp, Homo sapiens
tacatttaaaatcaaaggtattcagctattcatttacttgcatggtatgagtgaccaaaacggaagcacgctttgtatttctacactgaagtattcagaagcatgacagtgggttcaaggta

SEQ ID NO: 373586 - DNA, 122 bp, Homo sapiens
ctgtatttcttgagctggagagaattgggcatacaggtatgtttacaaagactgagctcgcggaagaggttttaaaagaccaaaaaaaagtctcaatgggaaaagataccttctgccctgcc

SEQ ID NO: 373587 - DNA, 122 bp, Homo sapiens
tgctccgccgctacaaccagagcgaggctggtgagtgaacccggccgggggcgcaggtcacgaccaccccccatccgccacggaccgcccgggtccctcagagtctccggatccgaaatcta

SEQ ID NO: 373588 - DNA, 122 bp, Homo sapiens
gtactgggctgtgtgtgtgtgtgtgtgtgtctccacttctccctccttcccacctgttctcgccagtctctaaggcactctgaaatctgccctggctgtatgtgtgtgggttcacagggcga

SEQ ID NO: 373589 - DNA, 122 bp, Homo sapiens
tttccccaacacaggagagactaaggaatttcaggtaaaaatcagatggctccaatcctccgatactaagagcccatcgccccagttcccaggagttccgccagttagactttttcccccat

SEQ ID NO: 373590 - DNA, 122 bp, Homo sapiens
tctgccgtactgtaactgaaacacaggttcagttgctcactgcttgcagagtccagttaacgagagcgggatctgttataaagaaagtgatttattccaaagcttagcttatgagaagaaat

SEQ ID NO: 373591 - DNA, 122 bp, Homo sapiens
ccaattcttctgaggctgcgcttgagggagatctcattgcctcttttgtgtctcttaattcgcaaccactccaggacctataagttggagacacactatgcccagggtgttagttatcaata

SEQ ID NO: 373592 - DNA, 122 bp, Homo sapiens
tcccctcgggttgcctcagtttcttctttggcacgcagaggcggggctccaggcctgggccgctccatggcggggagggcgcggggacgctgcactcggggtgcgctccgagaggcggaccc

SEQ ID NO: 373593 - DNA, 122 bp, Homo sapiens
acattgcttctccaaaaccacagcgaaaaacaaggaaattaacaaggcagaatcgcgatgcgagacttgacaaagttgttaataaggcgaaggcccaaagcgctatgccagggcctgctact

SEQ ID NO: 373594 - DNA, 122 bp, Homo sapiens
ctctgcgtccattctcaggtactgaaagttttccgggctcttccgcacccgcggatgtggcgaagccgcggggcagctccgctcgcgctccagtcgcaggatgtccttgaccgagaaggggg

SEQ ID NO: 373595 - DNA, 122 bp, Homo sapiens
aattattccaaatgactatatttagcagtagattcatcaggatacaacagctctgcattccgtacaagagtgtagaaaataaatcataatccaactggttccaacctcaccaccacaggtta

SEQ ID NO: 373596 - DNA, 122 bp, Homo sapiens
tttattcatcacatttatattgagtacctctgtgttccaggcgctgttgcatgttagagtcgggggagagtagagatggactcaggccatgccttaactacagattatgtcacttgactcca

SEQ ID NO: 373597 - DNA, 122 bp, Homo sapiens
gcgagcctttctacacatgcgcctgccccacgggtgtgcagctgcaggacaacggcaggacgtgtaaggcaggtgaggcggtgggacgggacggggcgggcgggcggggcggggcctggcgg

SEQ ID NO: 373598 - DNA, 122 bp, Homo sapiens
ggaggtactctctgaaatttcctttcctgactagagaagcctctttgtagaagaatcaatcgcattcctcccctcgctgaaatctcgtatcctatttcaaaaagactcagaaatgcagccat

SEQ ID NO: 373599 - DNA, 122 bp, Homo sapiens
tcctgggtccttaatgcatctccgagtccactgtatccattcgtcccttgggctcagtcacgtgcacttgggcttcctcaacagacaatagactgctggggtgggagggtgaggaggagacc

SEQ ID NO: 373600 - DNA, 122 bp, Homo sapiens
tcaaaagcccataatctggataatagtcgtctgtgctggccacatcccttaggaaaggctcgagaaacctgggtcaaaaaatttacaaacttttttggctcattcgcattgtgcgttgaatt

SEQ ID NO: 373601 - DNA, 122 bp, Homo sapiens
cccggggcccccgagcaggtgcccgccgagggtctcagagtgtgactgagcgggttggcccggcggccgttgccccccgcccccgccccttcgcgcctggccgcgccactcactgtcgcggg

SEQ ID NO: 373602 - DNA, 122 bp, Homo sapiens
ctgcatctgccaacaagactggaagcaggtgaggcacacagagggggaggcccgcagctgcgtgggaggaggggtggtctgagggacgtgggatgccgggaatgaggctggtttgcaggttg

SEQ ID NO: 373603 - DNA, 122 bp, Homo sapiens
tcctgcactgttgggcctgttgctgggatgcacctttggaatgtgtgagccaagaatgggcgcgcatgctcatggaacccgcaaggaaggcgcaccggggaggaaagggagggggcagagat

SEQ ID NO: 373604 - DNA, 122 bp, Homo sapiens
gaggccagtcagcgtttgctaactgcaaatcacgggtgggaacgaccacagcataagcagcgcctggcacggtgccgaaagccaagttgaggtgatgagccacgggctgggggatttgaggg

SEQ ID NO: 373605 - DNA, 122 bp, Homo sapiens
atgagcctggtgcctgcagaggctctcgtcttcctttcagggattcatcaagattccccgcgctgggtcctggagcacccagagctgagccctggcttggaggcgctgtagcccttcccaga

SEQ ID NO: 373606 - DNA, 122 bp, Homo sapiens
ctgttttctctttcattatttatcactctctaaccatctccagctgggtgagtaaacaggcgcattggcccataatgaggaacagactgctgccgtggggctgccggaggggcgcgtgtgtg

SEQ ID NO: 373607 - DNA, 122 bp, Homo sapiens
gtgcagcaccttccggaattgggcgcccaggcggcggatgtgatgcaagctctgcgcacgcgcgctagtctccctcggccatctaggatcaggaggcgggtctccctcctcgggaccgcctc

SEQ ID NO: 373608 - DNA, 122 bp, Homo sapiens
gggagggggcaccctggaggcttagtaggctggtgctgtgcacctcacccaggccagcttcgcagatggtcagagacaatcattcaaaccccattcacaccaaccctcctcatattggagat

SEQ ID NO: 373609 - DNA, 122 bp, Homo sapiens
aaccaccgggaagccaagatgtggtacttggattcccatctcggagcacctcctatatcccgacacaccatttcccctagtgtctgatctctctttctcctcctttaattcagtctggagtc

SEQ ID NO: 373610 - DNA, 122 bp, Homo sapiens
cgttctgcagaatcagaggctctgaggaccgccccaagggcgcaatgtccttgttctctgcgtcgcgcacggggttcagggccgcgggctaccagaagcggcagtaggagtggatggaggtg

SEQ ID NO: 373611 - DNA, 122 bp, Homo sapiens
ccttgtggctgatgcagaagctgggccctgccctcctggccttctgaggaaagtgattatcgtttttggcttgtttttcaactatccctttgcccccagcaggactgaacctttccactctt

SEQ ID NO: 373612 - DNA, 122 bp, Homo sapiens
gcaaccggctgcactcccctcccgcgacccagggcccgggagcagcccccatgacccacacgcacgtctgcagcagccccgctcacgccccggcgagcctcaacccaggcgtcctgcccctg

SEQ ID NO: 373613 - DNA, 122 bp, Homo sapiens
aagagcagttttctcagctctgatctgttgtaattttcagagcaggtttacatgtgtggtcgcatgttttggtggttggttttgacctggacctttcaactgagcaaagtctccttggactt

SEQ ID NO: 373614 - DNA, 122 bp, Homo sapiens
actgtctcaaaaaataaaataaaataaaaattaagtgaaaatttaaaaaataaaaagggacgcatgaaagtgtaaagttcacaggtggggaaatcaaaatggccagcaagtgttgggaggca

SEQ ID NO: 373615 - DNA, 122 bp, Homo sapiens
aacatgaaggccgggcccctgacagcctggcgccggcccttctcccgcatcactgtcatgcgtctcagggatgggcttccctccatggacctaatcagtagcaacgataaaacaactgtaga

SEQ ID NO: 373616 - DNA, 122 bp, Homo sapiens
agcagtgggaagggtagagaagagaaaacaagaaagtgagaatgtgtcatccattgaagacgcaggatgataaaaagcctacaaattaactcagtaccacagcaatgttctcactgctgctt

SEQ ID NO: 373617 - DNA, 122 bp, Homo sapiens
cagcaagtctcccctcactccccactgccattcatccagcgctgtgcagtagcccagctgcgtgtctgccgggaggggctgccaagtgccctgcctactggctgcttcccgaatccctgcca

SEQ ID NO: 373618 - DNA, 122 bp, Homo sapiens
cctccatccctctccagctacctgacactagccacacagacttcagggtcagagcctcagcgttcagccaatccgcgaagccactcaggtggccgcggagtgcccttgccagcaccctatct

SEQ ID NO: 373619 - DNA, 122 bp, Homo sapiens
gaggaggaaacgctagaggaagccgcggcggccgaggagcaggcgggggcggggactgcgcgctcccggcccactcccggccctgcaggcgccgcccgcggggacacgcccacccgccggga

SEQ ID NO: 373620 - DNA, 122 bp, Homo sapiens
attgttatttgatcttcacaacggtcctccttttctaataaagaaactgaggctcagagacggtgtgtaatttgcacagggtcccacagcaggtgagctgagatgccaggctttgctgcaca

SEQ ID NO: 373621 - DNA, 122 bp, Homo sapiens
gaggaggaggattttgaaagccggcagtttctttgcttcgatttgatttgttcgaggccccggccggcttgccctcgccccgctcgcgcggcctctcgggtagagtagtccggttccccatc

SEQ ID NO: 373622 - DNA, 122 bp, Homo sapiens
gaccagctgcaaccctggggtgtaagagtgcaggacgcttgtggaccagcacaagggccacgcatgaggctctccacccccatctcaatgccaggatgatagtctgactcttaggtcccttc

SEQ ID NO: 373623 - DNA, 122 bp, Homo sapiens
aggaaaatgaagacacttctaaatagtgcccgttgtgaggcaatgcattatgctaagcagcgcttcataatcctatatttgttaatcataaaaaacggtcctgaaaggaagtatttattttt

SEQ ID NO: 373624 - DNA, 122 bp, Homo sapiens
ccagcccctctcccaagaccccgagacagccggtgggaccaccgaggctacttctaactgcgtttctgttgcaggcacgtctggggtgcacagccctgatgggagcagcttggctgtgagca

SEQ ID NO: 373625 - DNA, 122 bp, Homo sapiens
atcgggcggctgcagagagctccagcgcaagggtggggggcgatgcgccagggtgggctgcgctgggcgctacctttcacaaaagaccagggaccccaacgcgcccgcgaccccagagggcc

SEQ ID NO: 373626 - DNA, 122 bp, Homo sapiens
gcgcccgagtaccttaaacacaggaaggatgtcgacctacgggggacgtctctggagtttcgtgaactcctatgaaaaggtggggagggacagagaaagtagttccgttttgattttttgag

SEQ ID NO: 373627 - DNA, 122 bp, Homo sapiens
ctgcttggccctgtcactcagtctcctatcactgtgctttgtttccttctcagcacctttcgccatgttaaaccatttcattatttatttgcttattatccacaggtctcccctggatctga

SEQ ID NO: 373628 - DNA, 122 bp, Homo sapiens
aggaatagagaaaacatccatgatctgataaaggacatttacaaaaaaaactacagtttacgttatacttaaggtaaattattgaacatttccccatgacatcagtaatgaaacaaggatgt

SEQ ID NO: 373629 - DNA, 122 bp, Homo sapiens
ggttaaggccttcccctgtggcctgggttgcccagctcttttagggcgtgtgtggcatggcggccatcgcgcttcctctcaggctctgaaaactcaacagttttctacttcacagtgtaggg

SEQ ID NO: 373630 - DNA, 122 bp, Homo sapiens
tcaacaccggcgaggtgttttgctccgtcccaggccgtttgtctctgctcagttcaacttcgaagtacaaagtaactgtgggagaagttcagagacggctgtcgccccctgaatgcctcaat

SEQ ID NO: 373631 - DNA, 122 bp, Homo sapiens
ctggggctctattgttggggcctcctcctgggttgcagccccacggacaaccccagctgtcgcttgggcctggctcagcttaccccggcggtgagggtgcgggtcggggacggagacgcgtg

SEQ ID NO: 373632 - DNA, 122 bp, Homo sapiens
tccccggcccaacaagaggaggcgagccgggcacctctcctaggagctcccctgaagcggcgctggaggccaccgagagaacgtttgcttacgttgccggtgtgccctttaagcccgtgaac

SEQ ID NO: 373633 - DNA, 122 bp, Homo sapiens
gtctttcttacctcttcctcctgcggtttggctcactcctccagacacggattagacccacgttcccttcaggcaagctgggctcacagagggaacagaggaacaggaccctttctaatgct

SEQ ID NO: 373634 - DNA, 122 bp, Homo sapiens
gtaaaatcttaattctcaaaggcaccctaaatccagcttaccagatctctgaagtggaaacgcgagttctaacggggaagtccgaacagttttgatgtcagcgtagactacatctccagcca

SEQ ID NO: 373635 - DNA, 122 bp, Homo sapiens
acaaacaaggaaacaaagaaacaaataattctgctttccgataggtgctggttttacttccgctggctgagctgttgttcctgaggtcagaccccagccagtcttttgtgtacgtgcaggac

SEQ ID NO: 373636 - DNA, 122 bp, Homo sapiens
tttaagatttaaagactgccctgctaggattcagacttgtaggccgggcgcagtggcttacgtctgtaatcctaaaactctgggaggctgagacgggcggatcacctgaggtcgggagtttg

SEQ ID NO: 373637 - DNA, 122 bp, Homo sapiens
caataaatgttttaaagctgaatgaattcatgcatcttccttgaaatctgtctgctcttacgttagtgggggacctctgctagctcgggaatcatttgaagagaagagatgacttatattgg

SEQ ID NO: 373638 - DNA, 122 bp, Homo sapiens
cttcctatcgcacatacttgtaagccccttccctgaggtctgagctctgacttcccaggacgtcttcttggtattttcagattttagaatgtcgcagtctttctgatagttgctctcgacca

SEQ ID NO: 373639 - DNA, 122 bp, Homo sapiens
cgggagaaagagcgggggccggggccagacgccaagaggggcgcggggagcacagagaagcggagggaagggcgccacgtcgaggggccgggggaggcggtgactggggggcggagtggagg

SEQ ID NO: 373640 - DNA, 122 bp, Homo sapiens
ctggaacaatatcaccatttgtcctttccttggttcctttcttattgtgctctgctccgccggccttggtgcgaggtactggcgccttcctgtccatcttggagcctgaaggaacagagccc

SEQ ID NO: 373641 - DNA, 122 bp, Homo sapiens
tgcccaggctcaaacttctgggctcaaatgatcctcctgcttctgcctcagcttctgcctcggcctccggagtagctgggactacaggcctgaaatactgtttctttaaggaagggcatgtt

SEQ ID NO: 373642 - DNA, 122 bp, Homo sapiens
gctaaacagtaaccgggggagggtagtaagggaagcctggacgccagcagtgatggtaaccgggggcccagggatgctggggccacagcttatgaactttgttagtgacttaacccctctga

SEQ ID NO: 373643 - DNA, 122 bp, Homo sapiens
ggccggcctgtgcggctctcggaccccggctccgctctttgcggccagacgggtggattgcgctccctagggaagagtaattggcttccaggctccctccagccgggatcagcggaagtcgg

SEQ ID NO: 373644 - DNA, 122 bp, Homo sapiens
tccggaggcggccaccgggcggcgctgtggagcagggaccccggggcccgcaggggcccgcggaggagtgagaataattagtaacagcccctgtctggggtgcacttcccgggggaggggag

SEQ ID NO: 373645 - DNA, 122 bp, Homo sapiens
taaagctgcttcagaaagaatctccggaagaccacggaggaaccccgcaggggagccaggcggatactcagccgctcgcggtagaagggcgcgcaaagctgcggagccgcgtgtgtggagct

SEQ ID NO: 373646 - DNA, 122 bp, Homo sapiens
acccaccgactcctgcctgcaccctcgctgaccctgcatgcacggccccaagaaatctcacgctgcctgcacccacactgcccagccggcctcattgcgcacactgcaacataggcacctcc

SEQ ID NO: 373647 - DNA, 122 bp, Homo sapiens
cataatttaaatcttgttatcttcttgccaccatgaaccctgtatgctgtaggctgaaaacgttaaaagaaacacacgctctcacacacacacaaacacacgcgcgcacacacacacacaca

SEQ ID NO: 373648 - DNA, 122 bp, Homo sapiens
actgggagctttcaaaggaagcccatagctcctccccttcctcccctctgatcctactaacgggcttatttgcatagctgtcttggtaacagaaaagaatgtaaaagaagaagcacttcaga

SEQ ID NO: 373649 - DNA, 122 bp, Homo sapiens
ccttcgccacatctttattgcctcaaggacagaattggagatcggtgtcccagtcaacagcgtggtacttatgacagccgcgagaaagcgcactactaaagcccggctagcagagctgggag

SEQ ID NO: 373650 - DNA, 122 bp, Homo sapiens
gggcggggctgaggtcgttgggctctggccattcctggtcaggtccggacagagggacaacggggtgctagagaaggagagcggggcgggtgaggaaggggctgagggggctgtgccggcca

SEQ ID NO: 373651 - DNA, 122 bp, Homo sapiens
cgggcccggaagcctgctggcgttggactacaagtcccggcaggctgcgcgagagggggccggggctcgcatgcgcgccgcgaggctctctgggacccctagtcctgctcccgaaaggtttg

SEQ ID NO: 373652 - DNA, 122 bp, Homo sapiens
cttcactatgtgttccccttgcacagaggggcgttgcccgagagtggacttggtgccatccgcccacgtagacctcacagttctattcagtgacactgaagtacagtttggcacctctcggg

SEQ ID NO: 373653 - DNA, 122 bp, Homo sapiens
ggtggataagaggaggaactctgcgaccaggtgacttgggtttgaatcccagttctatcacgctctagttgtgtgatgttggccaagttatttaacctctgtatgccttagtttcttcatct

SEQ ID NO: 373654 - DNA, 122 bp, Homo sapiens
accctgaacagtcctggttgggatggtgtccacattcatgttctgcggttcttgaacacacggatgcctctgggccacctgtccttttccgagggtgtgggtgggagtggatcctccgggcg

SEQ ID NO: 373655 - DNA, 122 bp, Homo sapiens
atcgccatcctgaccgtagcctggatcctgggcactttctactacttatggcaggacaaccgagcccacgcagcatcctccggcggccggggcgcgcagagggcaggcaggaggtcggagca

SEQ ID NO: 373656 - DNA, 122 bp, Homo sapiens
cctttcagggcggatggttccgaggaccggggccgggcgcggcgtggggagagtgcttcccgggctcccatccccctccacctccccaggggcggggagccctgtgggcagctctctcccgc

SEQ ID NO: 373657 - DNA, 122 bp, Homo sapiens
tcgacgaaggcaccacccaggagtgggtggaccaggtgccccctggagacgagaaaccctcgaggaaggggtgggtcgggggcggtacttttatgcgaggaggtgctggagggtgggcttgc

SEQ ID NO: 373658 - DNA, 122 bp, Homo sapiens
ctgcgggagggagggacaaggacagggcagggcagttaggaccggccggttcccagatcccgccctccgcgcgccccgcttcctcccccagggttccctcccgccccctgctcagcgcctcc

SEQ ID NO: 373659 - DNA, 122 bp, Homo sapiens
ggccacgcacttccggcggccgcgccccgccccggaaccacgccccgcccccgtgaaatgcgttcccagtagccacggcaacgcccagctccgccctccccgcgcatgcgttatgcgccatc

SEQ ID NO: 373660 - DNA, 122 bp, Homo sapiens
gctcagtgaatgtcagcgattgttattaactatcaaaaaatgctaagttttatgaagcagcgttgggagcaagggttaatttgggacagctaatacttttaatactaatacttaacatttaa

SEQ ID NO: 373661 - DNA, 122 bp, Homo sapiens
atctgccgatggcaggtaccttacttgggatttactatccgacaggggtccgaacgcacccgggaacagaaagaaagcaggacatttgcaatctaccgcagcctaagggcagaaagcatgtg

SEQ ID NO: 373662 - DNA, 122 bp, Homo sapiens
ttttctttctttgttgagcgagctcaaagtgtgaggcggagaaaacctaggggttgggggcggctggagaagggatccacggaaacccaagcgccacatcatgcgtgtctgactgcccacgg

SEQ ID NO: 373663 - DNA, 122 bp, Homo sapiens
ggcattgcttttgacgccatggactcttagggctctcagtcctgcctgggccccggctctcgttctctccaacatgacgccatctgctcaagcccttctggaatcctgtgctagaagagcac

SEQ ID NO: 373664 - DNA, 122 bp, Homo sapiens
atttcagaaacggatgggaaatgttaaattctgcatgcctgcttaagtttccatccacaccgactagatgtaaacgagtgtcaccaaaagtacaccacaggcacccacacagattccttcca

SEQ ID NO: 373665 - DNA, 122 bp, Homo sapiens
tagccagttggtaagccaggtgggcaaagaactactgcgcctggcctacagcgagccgtgcggcctgcggggggcgctgctggacgtctgcgtggagcagggcaagagctgccacagcgtgg

SEQ ID NO: 373666 - DNA, 122 bp, Homo sapiens
gcttgcaactttgtgtagctggctggctttgccctgatacttttggggaagttgtgatgacgtgctgccttcctactttgacgcgatcagtgctttgagaggagccctcggctttctttccc

SEQ ID NO: 373667 - DNA, 122 bp, Homo sapiens
ggggtctggccaggaaagggcctctggacctggctgttgggagccatgtgtgaggacagacgtttccccagaccctgcctggctctgcctttcccaggctcataggtaggccttggacccgg

SEQ ID NO: 373668 - DNA, 122 bp, Homo sapiens
ggcgtggcccagctcaggagcctggcgggcaagctcctccctgtgcgcggcgctgtgcggcgtggagaacctcgccctgggagggtgggcctgattagattagcacacaccgggaagagaca

SEQ ID NO: 373669 - DNA, 122 bp, Homo sapiens
gaaggcgaaatcccatgccaggcagcctgacctcagaccctgcactctcagtccccaagccgtgacaatatttgaaatgttctgaggctactgatataagaaaaaacaatttttttccagac

SEQ ID NO: 373670 - DNA, 122 bp, Homo sapiens
aaacctcagccaccctcataaaagatggcacccagtgggtggggcttgagcagacgattacgtccaatgccacccagtcacttgagccttgccccgccccatctgccgccaaccaaccaagg

SEQ ID NO: 373671 - DNA, 122 bp, Homo sapiens
gctccccctgccgccccgccccgcccccagccccgcccccagcgtcccgcgcccgcccctcgtgttcattggcagccccgcccccgccgccccaccaggcccggagcatgcgcgggcgcact

SEQ ID NO: 373672 - DNA, 122 bp, Homo sapiens
ggaaccgcggccctcacagccccagcccctccggcgtgctggggacgccagccccgctcacgctgcagacagtctgctgctaagcgcgggtctcagctctggcctagcgactggacgctcgc

SEQ ID NO: 373673 - DNA, 122 bp, Homo sapiens
gggcaattccattgaaagtgaagccatcctctgaaaagaccagaaatagtgagcacagagcgactcactaaagcttcagggtcacaaattgagcggcaagatacttgcgagacagaaaaccg

SEQ ID NO: 373674 - DNA, 122 bp, Homo sapiens
gtactggcagagagtctgcaccagcatcattctctgttgcctcagcatgtccagcactctcgggatgtccagcacctaggttgagagaaacggtaatgaagataatgtgttcccctggggag

SEQ ID NO: 373675 - DNA, 122 bp, Homo sapiens
gtcatgtccacagctgcctccctggccttccccttcatcctcatcctcacagtgccgctccgcatggtggtgctcacccgtatcttcaccgaccgagagatgaaatgtgtaagccctcccgt

SEQ ID NO: 373676 - DNA, 122 bp, Homo sapiens
gtccaggagaatgagaaaaagaaaaaacagagtctagtgggtaagaaagggccacctggacggcttgatttggattgtgaaataaaacacacacacatgcacacgtagaataagtggctaaa

SEQ ID NO: 373677 - DNA, 122 bp, Homo sapiens
cctccctctccgcagtactcctttctgtgccgcattctgcccggaggcaggccagtgtgccgctgctgcaatagcaccacctccgccttgcctgcgaaggaaggcagggaagctggcatcac

SEQ ID NO: 373678 - DNA, 122 bp, Homo sapiens
agatgaaaacagaacaggctttccaaggtgcgccggcaaggagccatagaacccaccgaccgcccacaaagttcccagcccctccccacgagctctgagattaagctcggcttctgcccact

SEQ ID NO: 373679 - DNA, 122 bp, Homo sapiens
cctctcccgctgggggccgccgcgctgtctgcgggctactagcgccgggcccctccgcgtcgccacgcctgcccttcacagccttggcccataaggtcaccgaggggcgggaggcgccgccc

SEQ ID NO: 373680 - DNA, 122 bp, Homo sapiens
gcacccagggtttgacttgtttacatggccgactggagtagggtggtggggcaggggttacggcctggggcacggggcctttctctgaggtcaggtttccaactgccaggaaaagattcctt

SEQ ID NO: 373681 - DNA, 122 bp, Homo sapiens
taacccgtccatcggcttctcattttatcctattcaaccctgagagctctcctgagtaaccggtgctcatccgtacacccctcctacgacagacagctttcggccttctggggagctggaag

SEQ ID NO: 373682 - DNA, 122 bp, Homo sapiens
tccaaaccacagactcgttatctcacttctctggaggctacaagtctgaagtcaaggcgtcggctgggctgcgctctccaaaacctgtaggtgagtatccttctctgcttcttctggcttct

SEQ ID NO: 373683 - DNA, 122 bp, Homo sapiens
ggctagcaggtggctcccgtgccatccccgtgagctccgcctggccctgctgctcccgcccggaaagctcagacccataacccagcccacttggcagcagcgtgccgcctgatcggcaaggt

SEQ ID NO: 373684 - DNA, 122 bp, Homo sapiens
gcaggctggggccgagaaccggcacccgtgcacggcggactaagacgagggtgagggacacgggtgggccgggagagccccgttcccatagccggcttccttgagcccctccccaagttctg

SEQ ID NO: 373685 - DNA, 122 bp, Homo sapiens
acgagatcatgaggcacgtgtggccgtgccggttggccaactccaggttggcctggtgctcgccgaccaggtagcgcaccacctccaggaggccctcgaagcaggcggcgcggaggggcgtg

SEQ ID NO: 373686 - DNA, 122 bp, Homo sapiens
ggctcggtattgttatggtggttatttgccaataatcaaagtcgccgccggaaactcagccgagggtgaccatggtcccggcgcctcctccgtgcgggccccgccccgggccgcgctcgcac

SEQ ID NO: 373687 - DNA, 122 bp, Homo sapiens
ttaagcaagcacagcagaactggtagaaaaacaaagccccccagtccccacccccggctacgctgaaccaccccgttcctcaggacacgtgcactcgaacctcgccgctccgggtcccaatc

SEQ ID NO: 373688 - DNA, 122 bp, Homo sapiens
tgcaatgaggggaacacttgagggaatcctaatattttatcatgtcctggatattactgccgttgtacctgcatatctccatactcatcccactctcgatatttcatgtcaagctctactcc

SEQ ID NO: 373689 - DNA, 122 bp, Homo sapiens
ggctgccacgaacctcagcctcatggatgacatatgcatatttcatgctaattctttcttcgttgtatacatttttttttatttttattttttttgagatgaagtctcgctctgtcgcccag

SEQ ID NO: 373690 - DNA, 122 bp, Homo sapiens
aaagctccgtccgcttcttaaaccagtacgggtcgcggaagaccaccttggggaggggcgcgctgtgacccgagttgtggatgatgggtgactcttaaatttaaatctggcttaaatctttt

SEQ ID NO: 373691 - DNA, 122 bp, Homo sapiens
ggggggcgcgcgcgggcggggccggcagggaggggcggggaggagcggggtgcgggctcgcgttgccccgccccgccgcggccccaccctcccgcatcagcaccggctgggtgggtgcggag

SEQ ID NO: 373692 - DNA, 122 bp, Homo sapiens
aactatatgggcaggttgcctagaccttctgacatctggggtagaaaacatggagaacagcgtcatctgtttttttataatattcgttgcctagaaagaggaccttcaaaatcagtggtacc

SEQ ID NO: 373693 - DNA, 122 bp, Homo sapiens
tatcatctcatttaattctcacaatcacctattgaggaaattactgtaattcccattttacggatgagaaaacagtttccggaaagtgaagtgacttacccccagagttacccagctcataa

SEQ ID NO: 373694 - DNA, 122 bp, Homo sapiens
ctgcagcgcagagcacgggcgacgctggctcacgatgccccagtgatgctgtggttaggacgctgttcacgcagctgcagcgcagagcacgggggatgctggctcacgatgccccagtgatg

SEQ ID NO: 373695 - DNA, 122 bp, Homo sapiens
cggcgtctgcgggctcagaccattctctggctctgtcttcgtgtcgttcctgggccaagccggcctaaagtttgccctcctgtggcctcaccggctggacgccgtagtctcccccattttgt

SEQ ID NO: 373696 - DNA, 122 bp, Homo sapiens
aaggcgcacagaggaatttaaagtgtgggctggggggcgaggcggtgggcgggaggcgagcgggcgcaggcggaacaccgttttccaagctaagccgccgcaaataaaaaggcgtaaaggga

SEQ ID NO: 373697 - DNA, 122 bp, Homo sapiens
ttgtactgtgtttatgcaaggggatgcccttgttcttagaaaatacacactgaagtttttcggggcacaggggcatgatatatgcaacctattttcaaacggttcaggaagcacacagggac

SEQ ID NO: 373698 - DNA, 122 bp, Homo sapiens
caccgcgcaactccgacgtctcctcccattggacaacctgccagccactcgcgttaatcccgcagggctattggccagagtctttgtttaattacgtttccttggagccgccctggcagtga

SEQ ID NO: 373699 - DNA, 122 bp, Homo sapiens
aaggaagacactcaaggtcactttgtaacaactttattggcaactagccgggaaggacaacgacaaccacctggtgatggggcaagagggagacaaaaagaaaaactgtagattcaccccgg

SEQ ID NO: 373700 - DNA, 122 bp, Homo sapiens
tgtccgcgcacctggcgtccagcctctccctgcccctgggtccaggacagctggggtgggcggggcagggcggtgacagcctcgggcgatgcgctgtgcacctggctccagggcccgcaggc

SEQ ID NO: 373701 - DNA, 122 bp, Homo sapiens
cgtgccaggcgtcggatggcgggcttggtgatgccctgaatgttgtcgcgcagaactttgcggtggcgcttagcgcctcctttgcccagacccttcccgcctttgccgcgcccagacatgtc

SEQ ID NO: 373702 - DNA, 122 bp, Homo sapiens
cacagatgctggcaaacagcgggcccgtaatagatactcagtgactggggatggatgaggcgcctatgagccaggtcacttgctaaggccatcaaggctagcaagggcgaagagcaggggac

SEQ ID NO: 373703 - DNA, 122 bp, Homo sapiens
attagctgaacgcagacacaaggaatcaaagagtatctcattagcatatcatctttattacgagtcatataagggtctaatatcccacaaaatccctgctaaaactacactaaaaatgagac

SEQ ID NO: 373704 - DNA, 122 bp, Homo sapiens
tgggctccactcttccgggtctggtttgacttaagcctgcttggtggcgaggcagctgagcggatgtggggggtggccggcggcgctcaggaatgcggccctccccctctcccagccgacag

SEQ ID NO: 373705 - DNA, 122 bp, Homo sapiens
atggcactgtgatttcacaatgggttgcacaacacaaaagagagaaattcctgcatacctcggggacaactaaggctggaataatacgatccttaaccagaatcgtgcaagaagatggaaat

SEQ ID NO: 373706 - DNA, 122 bp, Homo sapiens
ggccacgccccgccgcagcttctgctccatccgcaggtaggagaccgtggccgccaccagcgtcaccagcagcaacgccagcttagcctgggcgtaaggagagggatgccagggacccgcgg

SEQ ID NO: 373707 - DNA, 122 bp, Homo sapiens
ggcatgagctgtatgtatggtaactctttttcaagacccccacagcctgggaagacaaatcgtgccaagctcttcctctgctgttcccagttcaacaccctgcgggtcaggccccaagggcc

SEQ ID NO: 373708 - DNA, 122 bp, Homo sapiens
ggtcctgcccattggcagggagcctcttgtgagtcataagatgaccaagagatcacacggcgagagactgaaagaaaagcagcaaagccctgggtaatcaaggccctaaacggaaagtgtca

SEQ ID NO: 373709 - DNA, 122 bp, Homo sapiens
tccacgggcagcatctagacgacgtgcgctgctcacaaggcgaaccttcgctcaatgctccggaagctggtttccgaattcacgccagctcacaactgaccttcatgctacactttgggtcc

SEQ ID NO: 373710 - DNA, 122 bp, Homo sapiens
cgggcagggcagggcagggcaggggtgcacgtggcagggtgggcaggcttcccggcgctccgctcaggccacgcccagcgccagcataattaccgggagaataattacgagcccagagagcc

SEQ ID NO: 373711 - DNA, 122 bp, Homo sapiens
acaggacaccctcccagccaccacccaactgcaccagctctgtaaacaaaccctggctctcgagtgccttctaatggggttggtactgctctgctaggccagtgacaaatggccatcagaga

SEQ ID NO: 373712 - DNA, 122 bp, Homo sapiens
ctcctacgaatctcattactgcacagcaggtggacaagtgaagtacaaagaatgggaaggcggaaaaaaaaaacaggaagaaaaaacacacagatctccaaaggatgccatcattattttac

SEQ ID NO: 373713 - DNA, 122 bp, Homo sapiens
ccctcagcttcacccagttgtggtgaatgtatttgctccacaacactcaaatatgagatgcgccacattttttttttaaatcaaaacagaaacagatgcctcagtctgagattttgccatga

SEQ ID NO: 373714 - DNA, 122 bp, Homo sapiens
ctgcaactgacagaggaataacagtgacagtggctatatatacggccaactgacagtggccgtatatatatagccactgttcttctaggctttatatatctatataaagggtctacatagga

SEQ ID NO: 373715 - DNA, 122 bp, Homo sapiens
ctcttcataacaatgctgtatgcacttctccccctgacaggtgaggacactgaggcactgcgaattggcactgagtaaggtgcccaaggtcacagagatagcaaattggtggttccaaagtc

SEQ ID NO: 373716 - DNA, 122 bp, Homo sapiens
aagtcacaaagttttaatgaaactaagtgtggatcaacgtagcataaagagcatccaggacgacttaaaagatccttgggtggaaattagaatggatcttcgggatttatttggcaaagctg

SEQ ID NO: 373717 - DNA, 122 bp, Homo sapiens
ctgttaacacttaagccgtccgtggacagcagagctaaaagagcactctaacatggcctccggggccccgggagtcgcaggcaccctgcctggacgctgttgtggggcctgaacgaagttca

SEQ ID NO: 373718 - DNA, 122 bp, Homo sapiens
gaagccaggagaggcggcaccaccattttcttcccacctcaccttccttcactggcctctcggtcactccgaggggactttcggcacttgcctctgcccgtccctatcccccactaatgagg

SEQ ID NO: 373719 - DNA, 122 bp, Homo sapiens
cacggagagcgcgtgctcgcggccgcgagccgaggaggggacgtacagcgcccgcgcgcccgcgagcccgctccggctctcccatgcttgcccctcggggtgctccttctgcgctctccgcc

SEQ ID NO: 373720 - DNA, 122 bp, Homo sapiens
aaccagctggagggcatctacttagtcctctgaggacacatgaaggctgtgtggagcccccgagctgattactgacgcgagggtcccctccctgacccctcgcgaccctgcgaggtgagtca

SEQ ID NO: 373721 - DNA, 122 bp, Homo sapiens
ccttatatctaggcggattagatgcagcaaatgttttcttttaaaaggtcagggaaaggtcgagcggagctttttcatgtgttacgcacaggccttctagaaaagggctggtaaagtgtggt

SEQ ID NO: 373722 - DNA, 122 bp, Homo sapiens
tgcttcccttttggttgtggtgttgcccttcagcatgctttggagtttgagacactaaaacgagcctttcgtgtgaaactggtcctagaacttagtagcactgtggttccagcttcatcttt

SEQ ID NO: 373723 - DNA, 122 bp, Homo sapiens
gataggaagggagtgatgatgaccccaggtaactcttgagtgtgtcgctgatgccatcaccgcagcgctctgaccgccccctcggtccagcatttctcaggctcaacgagttcatggccaag

SEQ ID NO: 373724 - DNA, 122 bp, Homo sapiens
cactttactgtctcacataagttagtgctgttaacttttctgacctgcatcaatctatggcgagagaaggagctggtttgagacatagacgggcatagaacattataaagtgctttaaaaca

SEQ ID NO: 373725 - DNA, 122 bp, Homo sapiens
gggacgcgtggcttgaagtcccgggaatgccacggttgcacccacaagggtcgatcaactcggcttccttcaggagacctggactgaccacccgctgtgtgccaagcactgtttaggtgctg

SEQ ID NO: 373726 - DNA, 122 bp, Homo sapiens
gttttcggcagtcatctgactaggtgtgcgaggtggtttctcactgcggtttgatctgcacgcccctaacgatgagtgatgtggagcatctttccatgggtttgttggctttgcagagcttc

SEQ ID NO: 373727 - DNA, 122 bp, Homo sapiens
caagctgaatgcaggcctcacctccccactgtgttgcttccgtgggctactcagagtcaccgggaagttcccacaggagtcataatcactgaatcactctctggctttctagttaatgtttt

SEQ ID NO: 373728 - DNA, 122 bp, Homo sapiens
ccgggaaaggcggctgggcctgaccgggctcccgcatccccccaccccggagcgtgcagccgccccaaacccccagcggcctccggcttccaggtgagcagcaccggaagggagcggcgccg

SEQ ID NO: 373729 - DNA, 122 bp, Homo sapiens
ctatccggactgaataccggatcagaaaaaaaaaattgccataaaagaacattatgggaacgattgatgaaatttgaatatggataatatgcagatagttttttctattaatgttgaatctt

SEQ ID NO: 373730 - DNA, 122 bp, Homo sapiens
gcgccgctggtccgcttcttcctggaggagacgctggtgcggcgggagctgccgggggtgcggcagagtgccctggactacttcatgttcgccgtgcgctgccgacaccagcgccgccagct

SEQ ID NO: 373731 - DNA, 122 bp, Homo sapiens
aggcattcactcttacatatgacacagttgcacacttgcacacacacacacacacacacacgcactgcaatccccttgcatctccacagtgtcgaaggctggctgaacaccaaggtggctct

SEQ ID NO: 373732 - DNA, 122 bp, Homo sapiens
tgggctcaggggggtggtggggtcaccaggcactcacaggctgtcctggctcaccatcctcgcctcggtcacccttagcaccatcctggccctgcagaagtgaagcaaggtcagaggtgggc

SEQ ID NO: 373733 - DNA, 122 bp, Homo sapiens
aagtatttattgagcctctgctgcgtgggggaccgtgaggatccgaaggtgcacacgactcggagtttgcgggagcagcccacggcgtggggtccccaggcctgggcaggtggagggcgcag

SEQ ID NO: 373734 - DNA, 122 bp, Homo sapiens
ccgcagaagcgcccaggcccgcgcgccacccctctggcgccaccgtggttgagcccgtgacgtttacactcattcataaaacgcttgttataaaagcagtggctgcggcgcctcgtactcca

SEQ ID NO: 373735 - DNA, 122 bp, Homo sapiens
ggcttggtgtggccggcggagaagcacttggcccactgcggagaagcacttggcccactgcgcagtagcacttggcccactgcgcagtaggtccactgggcacctggcccccgtgcccaccc

SEQ ID NO: 373736 - DNA, 122 bp, Homo sapiens
ctcttctggggagtctaacaaaggcactttacgtcccagcgttgctatttcctggctaaacgaccttgggctacaaacaaaaggctccaggcttcggtatcatcccgtggagagtgacggtg

SEQ ID NO: 373737 - DNA, 122 bp, Homo sapiens
gaacccaggatgagaagcccacaaataacttgttaactgcaaagggaaagacaacctgtacgatggagaaatctccttaatcgaatggtcaaatttagcatcactaagggtgggatggctcc

SEQ ID NO: 373738 - DNA, 122 bp, Homo sapiens
gcaggggagagcaaacgagagcagctgtggccggaccttcgggagcagtaggctcccgcccggggctctgcacagagctccacagtggcctccccctgagtgtggtgcctgcctgcacggcc

SEQ ID NO: 373739 - DNA, 122 bp, Homo sapiens
cctgaggccagtaaccagaggtttttgtcttcgctgtggcctgcaggacgaggacctcgccggctttttttctcgctgaccgagcagctgagaccgcctttcaggggtcggcagtgtggact

SEQ ID NO: 373740 - DNA, 122 bp, Homo sapiens
aaagcataacacacaggctctcagggtgcagacatgacatggcagactcataatcaggcccggtgggactcacagacccagggtcggcacactcaaagagggccagccctggacacacacac

SEQ ID NO: 373741 - DNA, 122 bp, Homo sapiens
gtatttttaagggccatgctaatctctgtatcgttccaattttcatatctgctgcagaagcgagcactttttctttttctttttttttgacagggtcttgctctgtcacccatgctggagta

SEQ ID NO: 373742 - DNA, 122 bp, Homo sapiens
gacagccggcaggtggaggcagcctggggccaggctcacctcagctgtctccagccctgtcgtcttgatgaggccctgggcttccacctcccaggatccttgggtcacggccaccctcatac

SEQ ID NO: 373743 - DNA, 122 bp, Homo sapiens
gtgaccggggggatggacgacgccggccactcaccttgctcacagttcttcccgccgaatcggagtggacactcacacagatacatattccacctgttgacacaggtgcctccattctgaca

SEQ ID NO: 373744 - DNA, 122 bp, Homo sapiens
aatgaataaacattattcaaccaagaactgtttggacaatgttccatagcctagatcagccggctgctgcaaccttccctattcctggcagaccagagggttaaaatgatcaaaaataattc

SEQ ID NO: 373745 - DNA, 122 bp, Homo sapiens
acttcggagggaacttggcaaagaacggctgaaagcggcacggatagaagaggaagtgagcgaggggactggacagttagagcaccactcctacctagcgatacgattttacggactgaggc

SEQ ID NO: 373746 - DNA, 122 bp, Homo sapiens
ggccccgcccactcccctacgccaaccaatgagacggtcgtcccggcaagcccgtcttcccgctccctagcaacgattggttaacgaggcctggtttccagaaatgggcactatttccggac

SEQ ID NO: 373747 - DNA, 122 bp, Homo sapiens
caggccgacgcgacacacttctggcaggtgcgggccagggccatccgcaggctacatgcccgccgcgccctcagcctctccagggctcgggccacacaaaaggcgccgggtgctgcgggctt

SEQ ID NO: 373748 - DNA, 122 bp, Homo sapiens
tctcaaaggcttgtgattcacctggcaaaaagacaacagtagatgacacttgggaacattcgggaggctgaggcccctactctcccgggccccagtttagacgaatgggctataggcagaac

SEQ ID NO: 373749 - DNA, 122 bp, Homo sapiens
tcaaggggcgcgggggaggggccggggacccccagaggctctgactcctgggtaaacaggcgcaggggcggagttaaccctgcgggggtggagtaggggcttggggaggacgcagtgtcctg

SEQ ID NO: 373750 - DNA, 122 bp, Homo sapiens
ggtgggaaggggtcgggtggattctgcccttccatatgcccagagttccaagtccctcagcgacttcacagcccccttgtctgctcaacacggtcactatgtgtttcaggcgccctcaggcc

SEQ ID NO: 373751 - DNA, 122 bp, Homo sapiens
cgaggccctgctgtttggctagcccaggagtctctccctccgcagcgtctgccttctgggcgctctcaactcactcggctttgcgggaggcgcaaagcctcaggttagggcagaggtgcggg

SEQ ID NO: 373752 - DNA, 122 bp, Homo sapiens
caggcacaggggcggcacctcactactctcacttccacttttgggaccacagcaccgaagcggcacggggaagccaacactccaggtaggccacgcacacacccagaagcccgcgtccccaa

SEQ ID NO: 373753 - DNA, 122 bp, Homo sapiens
agcctctagaggtttcccattggttacttggttacaccctatgtaaatgaaggagtggcccgtcacaagtctgactgatcatgggaggtgaccaatcagagtctgaagtgacggtagttaca

SEQ ID NO: 373754 - DNA, 122 bp, Homo sapiens
aaattttgtacataagttttaaaaaaacattccatttatctcaggagaaaagatctaacacggggatatggtttgagaatcgtgtaactttcatatgcctgggggacatgttctgcttcttc

SEQ ID NO: 373755 - DNA, 122 bp, Homo sapiens
tccctgccccacccctctccggagctgcggcccgagttggcgcactcgattttcactgcgcggttccaagaggagacagccgccactgtaccgggcctcatagccacttcctagaggtaaag

SEQ ID NO: 373756 - DNA, 122 bp, Homo sapiens
gcgcattgcaggaggactccagagcgtctcctggagaccttgagcctgaacgcactcaggcgccactggcctgctctcagtccggattaactctcgaccgagcccagcttctgccggttgtg

SEQ ID NO: 373757 - DNA, 122 bp, Homo sapiens
cccggagctgcactgggattggtggactgggcactcacgtggttaacggtcgcgggaagccgcggagcccgaacctgagactggacctgaggagacctcagcctcggtgctcgggccgcccc

SEQ ID NO: 373758 - DNA, 122 bp, Homo sapiens
ttatcagccttgttcacatctagtcctcctccaacaaagtaagcaattgtcccctgaactcgggaatctcatgccagtttgatgatttggcattggaagctctgggtgccatagccactagt

SEQ ID NO: 373759 - DNA, 122 bp, Homo sapiens
ggggccagggaaggaccctgaaaatgtgcacggacaagttaaaaatcagcgggctacgtgcgcacgccggtgggggcgccacgtgggcgagggcgaggcccacagctccggggcgcatcaca

SEQ ID NO: 373760 - DNA, 122 bp, Homo sapiens
ttaccagtctgtatgggcatcatcgatcaccaacaggatcctgggtctttgaacaatgggcgtggagggacctggaggctccatcagtcctgaggtggcctgaggggcctgcttcatggcac

SEQ ID NO: 373761 - DNA, 122 bp, Homo sapiens
agttttccaagaaaagggaaccccacatatttgaccaagattccaagtttcagaaaccaccgcatcaggtctacttgagccaggaaaaaaatcctgagttcggaacgggccacccagagatg

SEQ ID NO: 373762 - DNA, 122 bp, Homo sapiens
actcagtggagcaccctgcgacctcaggataggacacaaacttgtagaccaacttctggccgctcaccttgcggatgatgttctcgtcatagtcgtgagaggtgacagcatgctggcagccc

SEQ ID NO: 373763 - DNA, 122 bp, Homo sapiens
ttgtgtgtcagggttctgcagaatctaattaagaagtgttctctgcgtatccggggtgttcgaacaattgtgcggcgccgacgatgcaagctgttgacctgcacagataaaccgtgcgtgcg

SEQ ID NO: 373764 - DNA, 122 bp, Homo sapiens
gaagtatgggaagccgttgtctgaggaattctgttttcttagtggagtaagaagatagaccgttcactgatagtggaggagggaaggatagatttaggggatagagaaaagatgtgaaccag

SEQ ID NO: 373765 - DNA, 122 bp, Homo sapiens
caggtgtccctcgacttagccaggtcatggtgtctcagcaggagccattccggcacagcccgaggcaaggcgagggtgagatgaggtagcgagggtgggtctgcctagggcatggggcaggg

SEQ ID NO: 373766 - DNA, 122 bp, Homo sapiens
gccgggcagggccgtggagacagaccacgcagtgacaggccggaggcggctcgagggatccgtaatttatgatgttgttcttaccaatccggtttgggatttcacaagctttgtcagtttcc

SEQ ID NO: 373767 - DNA, 122 bp, Homo sapiens
tagcgtttcggcctgtctcctagaaaacaggaagggagacctgtatctccttgcctgtgccggcatttccttggtgtgtattagaggggcgttttgtcacgagaaatggacagaagagagga

SEQ ID NO: 373768 - DNA, 122 bp, Homo sapiens
cttttcctgctccttgcgtttcccgggcttgcctttctttttcttcccaggtgtcttgagcggctgctctttgtacgtctccaccttgttagtttcctgagttaggtatctgccctcatcat

SEQ ID NO: 373769 - DNA, 122 bp, Homo sapiens
ttcacttccagctgaagcagaatgacagtgatttttaaaacagttttattgaggtacagtcgacgtattacacactatatatatttgaagtgtaaactttgatgtgtgttgatatatgtaca

SEQ ID NO: 373770 - DNA, 122 bp, Homo sapiens
ttgtctcctagtattaactaaaataatgcatatgaattatttagtatagtgcttagtacacggaaaacaccagataaatagtggctaatagtatgattatgttcttatacccagaatttcat

SEQ ID NO: 373771 - DNA, 122 bp, Homo sapiens
gcgagcgatgggggcacatcagagagcatttttgacctggactatgcatcctgggggatccgctccacgctgatggtcgctggctttgtcttctacttgggcgtctttgtggtctgccacca

SEQ ID NO: 373772 - DNA, 122 bp, Homo sapiens
agcagtcattacccgtgaacttgcacttgcacttgggcagggcttggtggagacattccacgaggcctgggccgggttagctccacttcggactggaggatccactcacgatggcacacgtg

SEQ ID NO: 373773 - DNA, 122 bp, Homo sapiens
ccatgctctccctccgcgggaatcacgtgtcgccatcatactcattgggagtctctgcctcgcctgtcgccacgtttcaggagcaacgaggacacttcgttgctgtcctctgcgcgccctcc

SEQ ID NO: 373774 - DNA, 122 bp, Homo sapiens
ctccctcccgctgccgcactggactcccagacctcggcaccaaccgtatctcctgttactcgccccagggtggttgcccggggaaaaactccaagggtttcactggctggcctggaaaccct

SEQ ID NO: 373775 - DNA, 122 bp, Homo sapiens
tccattccagccgctggggtggtttcttgggggcccccttacacttcagcaccagtggctcgccaatccgggctgtgatgttttgagcacctactactgcccctgggagatagcaccatggt

SEQ ID NO: 373776 - DNA, 122 bp, Homo sapiens
ggagagggagggccgggcggggtctacgggggccgggaagccggcgcgggggtggctgggcgcggggcggggtcccggcggggtctgcggaggccggggtgggcaccgaggtggccgcgagg

SEQ ID NO: 373777 - DNA, 122 bp, Homo sapiens
agcgctttgtgaagcgagagtgctgcgcaggcgttagagtgggagagagagcgtttggcgcgtggcacaccctcgtcaagtgtttgttattgttctgaggaagagggcgcggagagagcagc

SEQ ID NO: 373778 - DNA, 122 bp, Homo sapiens
ggcgagggaggtggctccgcttacctcagcttttccattcgccaccgttcggcccccacacgccacacccacaagtcggcgaagcccaggagaccaccgaggagtttaatcgagagatgttc

SEQ ID NO: 373779 - DNA, 122 bp, Homo sapiens
aaaaaaaaaaaagagagagagagcaaaaacataagcccagagttactcaccaattgaatccgaccatgtcactccaccacttagaaaacgtatgtggttagtagtccctctattgatcacag

SEQ ID NO: 373780 - DNA, 122 bp, Homo sapiens
agcggcggcggctgcaggagctcaacgccgagcacgaggaagggagccccgcgccgcggccgccctcccgtcggcacgcccccgcctccgcccattggttgatctgggagggtggggcgagg

SEQ ID NO: 373781 - DNA, 122 bp, Homo sapiens
caaaacatagaatctaaagctgagacatagcaatagaggaccagagaacagacacagcaacgaagtttccatgaggcaaatcaggagggtaggaatgagattttgatgtgcatcctggccaa

SEQ ID NO: 373782 - DNA, 122 bp, Homo sapiens
tcctttgcactaagcaggtggcaggcatggttctgtgtgcttcatgcacatgatctaatgcgatcttcacagcaccctcatgattttaccactctgcacattgctttgtggatgagagagct

SEQ ID NO: 373783 - DNA, 122 bp, Homo sapiens
ggcctttaccctctgtctgtcttggtcacagatttgcattaaaatgtcctccacccctaccgtcccccattaacacattctccttttcaataggaggagatatttgcctcttaagaatgcca

SEQ ID NO: 373784 - DNA, 122 bp, Homo sapiens
cagctcccgctgtccgcgaggctgccctaaagtctagctcatgagaaccccaggcaagtgcggacctacaaagtttgtccgctccggggcactgtagtggcttttaccctggccgggcgggc

SEQ ID NO: 373785 - DNA, 122 bp, Homo sapiens
caaacagaatgtgtttgctttcacaccgggacggcaagcggagtccgcctcagtgagcagcgagctgcgcagtccggacgggtgtcgcccccagagactcgccagccgcccccagacactcg

SEQ ID NO: 373786 - DNA, 122 bp, Homo sapiens
cgggcccaccctctgcacccacggcgaaagcactctttctaaaccacgccccggatgtcccgcctccagcggctcggaggtcttcacttattggcctccccaaaccaacatggcggccccct

SEQ ID NO: 373787 - DNA, 122 bp, Homo sapiens
gtttttctcttcgtgtgcggagatgagagatcgtagaaataaagacacaagacaaagagacggaagaaaagacagctgggcccagggaaccatcaagatatggagacctgtagtggctccga

SEQ ID NO: 373788 - DNA, 122 bp, Homo sapiens
tgacagcttgcgcaggggaagcttcacgaaaaccccgcagcagtgcgtggaggagggcagcgaccgtcagtctctttattttcctctttatgcacacttctacggtcctgaatctctttgtt

SEQ ID NO: 373789 - DNA, 122 bp, Homo sapiens
ttaactcttgtattttagccatcatctgagcgggaagccggtatgactctgcaaggcgttcgtttaaaagttgtgctacttttgaggtgaagttaagagtgtctccatccacgccctctgct

SEQ ID NO: 373790 - DNA, 122 bp, Homo sapiens
ttggaaagtcctacgctcaaggcaaacaagtttgccgctgccacatcccctttgaacagacgtaccagtgactatgagcttatcatctggactgaaacagcagtcaatcattgggaacatgg

SEQ ID NO: 373791 - DNA, 122 bp, Homo sapiens
gggcccatattttactgggccccatgctgcgttagagagcctccagcatcccattccctccgagtcttcccagggctgcgtcatctaggaatggggtcttcatttgaacctatgctggtttt

SEQ ID NO: 373792 - DNA, 122 bp, Homo sapiens
tggactgcaaggatattgagagtgaataaaattggactttgtttaaaataagtgaataagcgatatttattatctgcaaggtttttttgtgtgtgtttttgtttttattttcaatatgcaag

SEQ ID NO: 373793 - DNA, 122 bp, Homo sapiens
ggttcaagctggcttattcaggtctgctgagatctctactggtttgcttttcagatccctcgtggttcgagaacagaatggcgttaaatcacactgccctgcctcaggacgagcgcctgccc

SEQ ID NO: 373794 - DNA, 122 bp, Homo sapiens
tgattcctcgtctctgtcttgagcctgggctttggtcccatttctatgcgctcggtcgcccgtcgtaacttattccactttgcgtcccctcttctttccttttctggaatgggttgtggggg

SEQ ID NO: 373795 - DNA, 122 bp, Homo sapiens
acccgggttcaaatcctgcccgccagcgtgagagagcgtttgcccgcccaggcggtccaccggggtgaggctaatattcatctcacggggttgtgtgcaggtaaatgaagagggtttgtaaa

SEQ ID NO: 373796 - DNA, 122 bp, Homo sapiens
actgttgagaaatttcactgttttcctgcattcctggcgcgggactctagccagaggctccgaggactttgtagcgactgtcccaagcgtccagttcgatgcttctcagggcggcttgcttt

SEQ ID NO: 373797 - DNA, 122 bp, Homo sapiens
agacaatagggccctgttttacttattttctgcttttgggaacattctgtcctgcaaagtcgtatgcgatgacaacggctctaagggttatgcctatgttcactttgacagcctggccgctg

SEQ ID NO: 373798 - DNA, 122 bp, Homo sapiens
cctaaaatctgtgatccctgaagcagcaattgatgtgaaccaccccatcactcaccccgacgctcctgcgtcctcctgagcactcacccttgatggccccagctcctcggagactcagcagg

SEQ ID NO: 373799 - DNA, 122 bp, Homo sapiens
ctgcgaagatctgcagcttctctcctgagccccgccagaccatgagcccaccgtgaggaacgaacaactccagacgcactgcgttaagagctgtaacactcaccgtgaaggtctgtagcttc

SEQ ID NO: 373800 - DNA, 122 bp, Homo sapiens
catttgcaccaaaaaactgcagggctgctcttgttggaagtctgagggaacctatttaatcgcccctctcccctctgagtgtgtaaccgattgagaatgtacacaaggagccaggcgaggct

SEQ ID NO: 373801 - DNA, 122 bp, Homo sapiens
gatcttctttctagagctgccctcttcctggccagcccaagaagcgcgggcgttcaggaacgctctcccaccgccttgggtgaggctgaaaggctgagtggatcccctgttgcagaagtact

SEQ ID NO: 373802 - DNA, 122 bp, Homo sapiens
ttaaatatattttcatgagccactgtaaggtgttcacagaggtgagaccagtgagccacccgcctttcctctggcatccaggaaaacacttgtgaagcaagaagtatcatgttacaccagcc

SEQ ID NO: 373803 - DNA, 122 bp, Homo sapiens
gaggaggagaaggaggaggcgggggcccagggtggagagcacgagggcctggcccaggcacggccggcgcctccgccctcgaggagggcgtcacctcagctccccccggcggcggagccggc

SEQ ID NO: 373804 - DNA, 122 bp, Homo sapiens
acctggacctatcacagagccttcttttgttctaggctcctgttaaaactagcagctttgcgatcagtcagtaaatggactagagttgcataccacataaggaatatgttgcccgcaagatc

SEQ ID NO: 373805 - DNA, 122 bp, Homo sapiens
tggctcactccgtttcctctcctgctgcatcttctaggggggttcttttttaccatacctcggagagtcccgtctcttccccgcttcccatacgtcgctcctctcccagcctccgtcctcgg

SEQ ID NO: 373806 - DNA, 122 bp, Homo sapiens
tcacctggaggccgaccccgttggggtgccatttccttcctcgtcgaggcagacgatgggcgggaggacctggaggttgtcacagtgaaaagaaagggcttcttcctcagtgagacgggaga

SEQ ID NO: 373807 - DNA, 122 bp, Homo sapiens
gtccattccctcactgcatgaggcttcatgtacacttggtttggcctcttagggaactttcgactgccaatctcaagcaaaggaccagacaagattctgtatcagtgaaactgtcccttaga

SEQ ID NO: 373808 - DNA, 122 bp, Homo sapiens
gtagagaaaaggaggagcacagacagaagcttcctgcccagagtcacccaggacggcccccgcccaaggatggaccccagcctggaactggctccagaagcaaaggttagacccctctgatt

SEQ ID NO: 373809 - DNA, 122 bp, Homo sapiens
gcacccgggccagcagctgcggagggtgtactccgtcccccagcagtgccagctcacaggcgctgcgctcaatttctcaccgggccttagctgccttcgcgcggggggtgctcgggacctgc

SEQ ID NO: 373810 - DNA, 122 bp, Homo sapiens
gccaggcctctgtgcccagacctgtctcctgccccacccccaccccatctgcaggagccccgagggtaggcactcaccccactgcaagaagtcggccacgtacttgtcctgggccagttcgg

SEQ ID NO: 373811 - DNA, 122 bp, Homo sapiens
gcggcacgcaccagcacccggctcccgtctccgtcgcctcggcgcccggcgcccctcctacgcccccaaccacactaccgccccgccgagaagcccagagccgtcggcgacggagagaagaa

SEQ ID NO: 373812 - DNA, 122 bp, Homo sapiens
agggtattgcaggggtgatgagggtagagtcaggactgtaactcctcattccaggttccccggagctttgactgttgtgctcctagcctcaagcaatccttctgcctctgcctcctaaggtg

SEQ ID NO: 373813 - DNA, 122 bp, Homo sapiens
tccatgctgggtgcctgggaagtatgtagacggggtacgtgccaagcatcctcgtgcgaccgcgagagcccggggagcgggggcttgccggccgtcgcactcatttaccccggggacaggga

SEQ ID NO: 373814 - DNA, 122 bp, Homo sapiens
agaattagatcagctttgagtttgtactaaatttggaatgtaatagattttcataaattacgtgtgcctttttggaaatgtcaactgtctttatgtctgcttgtaaaagtttcaaaatatgt

SEQ ID NO: 373815 - DNA, 122 bp, Homo sapiens
tgatacctattataatgcatactcattgaataaattttttaaaaaacacagtaattttctcggtgttagcgaaaggtttcccaggcaccatgaagtgttttggctgcagcaggagagtggtt

SEQ ID NO: 373816 - DNA, 122 bp, Homo sapiens
tgactgaataaaccagtttattcattcctctgctgaaggagggctaggtcgtggctgctccgttgcaattacaaacgttttgcacagaccttttcctgggactccttgtgtagacatgaagg

SEQ ID NO: 373817 - DNA, 122 bp, Homo sapiens
gcccggccgccccgtctgggtagtgaggagcgtctccacccggctgccccatctgggaggcggggagcgcccctgcctggcagctgccccatctgggaggcggggggtgcccccacccggct

SEQ ID NO: 373818 - DNA, 122 bp, Homo sapiens
tcagcgccgcttctcctggtttctcttgcagatgctgctgctaggggtggtgggagcagccgtgggacgcgtggccgggagcgggggtgacagcctgggattccgggggcttctcttccttg

SEQ ID NO: 373819 - DNA, 122 bp, Homo sapiens
gaggggctaccacggagcttagggaggaagtggcccccaccagccaggagaggacggccgcgttttcacgatggtcgctgaagccaaagcttgtatgagctacatataagaagaaatcagca

SEQ ID NO: 373820 - DNA, 122 bp, Homo sapiens
caaagctttccagcgtcccccaagcgctagggccgccttctgactcttccgccccgcctccgccccctgcactctcccaactggcgggaggagggcgccctcccagccaatcaacgtcccac

SEQ ID NO: 373821 - DNA, 122 bp, Homo sapiens
tgtaaggtcagagctggcgtggccctcagggatcctttcttttcttcccccagaacattgcgctgccaccagctctccgagccgtggactgcatcctcatcacttctttcccttgccacctt

SEQ ID NO: 373822 - DNA, 122 bp, Homo sapiens
aacattggactgtttcttcaacttaggtgcatagcactgacactaatcagggattatcaccgataatttgacttggactatggagttcattcaaatactttatctagacaatttaagtactg

SEQ ID NO: 373823 - DNA, 122 bp, Homo sapiens
cagcctgctcccgccgccgcccgctttccaggaactgtcactgctgaccgtgcccctggccgatctccacgaggtcccgcgcgcacaattcctcgaaaagttacccacccccttggccagcc

SEQ ID NO: 373824 - DNA, 122 bp, Homo sapiens
cccctccgaggagaggcagccccgcgagcagtgtgtgtacagttcgcattgccaacaacacgcgcgcgcggccgggtgcgcgcgcctgccagcgcacattcacacacacagacacacagaca

SEQ ID NO: 373825 - DNA, 122 bp, Homo sapiens
gaccgcgctccgggttcctaaacctgtgaaagcggcttatcccattcctttacttacattcgcgagggaaagatttcaattcggtctttgcccgacattctgacgataacttttcggctcgg

SEQ ID NO: 373826 - DNA, 122 bp, Homo sapiens
cagtacttagttaaaggaactgaatagtttgtgcaacattccctgtctttgtctgtgttacggccctggcctcccagaattgtgggtgattcaggggaaatgagagccacatgtttctgaat

SEQ ID NO: 373827 - DNA, 122 bp, Homo sapiens
tgcgcggtggccaacgagtcgctttcctctcgggcctttcggccgccgggctcctttccgcgagagaacactgcggcggagaaaagtcattgtcaccttcaacgtggatccctcaactccgg

SEQ ID NO: 373828 - DNA, 122 bp, Homo sapiens
caatttcccaggaaccgctctgagcccggcgaggcggcgctcagtaaaatgacccgaaaacgatccccgactaagcggctctttatcccacagcaaaacggctttcttaagacccatctggt

SEQ ID NO: 373829 - DNA, 122 bp, Homo sapiens
ccccccacgagcccgcgcgccttgcagaccagacacggccccgccgagccccagcagcaccgcctggaatgcatgcgtgtgttctcagagctgcaccaattacaaagcgttttgcctaaaga

SEQ ID NO: 373830 - DNA, 122 bp, Homo sapiens
acccttctctgttttctgtatgctaaggatctccttctcagagacaaaaacccactggcccgtttccttctctaagcaaattgaaatctcttcctcaaacataagagcttataactaagaca

SEQ ID NO: 373831 - DNA, 122 bp, Homo sapiens
gcggagaccacaggccccgcggctgcgggcggctcaaggtcccccgggacgcccccctagcggactttggccgccgcgcccggctgcctcccttgcccgggccctgcccctctcgcctctgc

SEQ ID NO: 373832 - DNA, 122 bp, Homo sapiens
aggggcgattatcctgcggcaatgggttattaccttttacaagtggcgctcggccttccccgctgcctgcgcgcctggggcgcacacacctgggcggggacagggcagctgctgagagccac

SEQ ID NO: 373833 - DNA, 122 bp, Homo sapiens
gagccgtctccattcagcaggcgccggggctatggggagccgtctccattcagcaggtgccggggctgtggagagtgctagggcggtcgccatctgcacctgctgttttcccaagtcctgtt

SEQ ID NO: 373834 - DNA, 122 bp, Homo sapiens
ctcctgtttcaccgacggccaaagagggccttcggcttgaccaacggaggaaaacgtcttcgtgtggagatcgatttcctttcgagagtttattctatacctgtgcagcatcttttgtgtag

SEQ ID NO: 373835 - DNA, 122 bp, Homo sapiens
tcaattcggtggtttttcctctacttctcctccaggggcctccaatccaaactgatggatcgctgcctcccattggctccgcgtctctttcacaagatcagatttcgggctgtcaatcaggc

SEQ ID NO: 373836 - DNA, 122 bp, Homo sapiens
cccggctaccccccgcccccccacttttctgggggctctttacgtgcattcggagcgtggcgtttgggggacccttatcttctgttgctccccagtttgagggaagagtaaggggttaagaa

SEQ ID NO: 373837 - DNA, 122 bp, Homo sapiens
ccgcgccgcctgggcccaggcccggttcaacaagtgcggaccgggccgcccgttcccgcccggcggcttcgcgcctccccaggagcctcgggcgcgccgggttgggccggccccagtggggc

SEQ ID NO: 373838 - DNA, 122 bp, Homo sapiens
gacaattttaggcccctttcggagggtacatctggagccacccaaagaacaacaggctcccggtgaaagcactcagcccatactgtgcacactagcacaacgggggcctctcagagctacac

SEQ ID NO: 373839 - DNA, 122 bp, Homo sapiens
ttttaatatccttctatccctgtagttctttccccagagacgggtgaccactcctccaaccgtatttcatagaaacgaatatttgtgtagaactcattagccccacttcaggtagggtggca

SEQ ID NO: 373840 - DNA, 122 bp, Homo sapiens
gagtttgaaatagttgaagaaaatgaggtgtcacgtgtgcatagctaaggtccattgtaacgggtactaaaccctggtctgatgctatcttgtttagtcacagctgtctgcatttattcaca

SEQ ID NO: 373841 - DNA, 122 bp, Homo sapiens
atccgcccccttctctctctggccgttggggccaggggagccgacagttagaatgcgcctcggggcgactagtcccaagtcacggaaacctcggcgcatccccgcccgcccttcccccgggg

SEQ ID NO: 373842 - DNA, 122 bp, Homo sapiens
gagccccgagcaccgcgacccacccgccccaccgcgccgcggctcccgagtcctgccgggcgccccttgcagcccccgccccatgtgctggggagacccccgggcggtctgggcgggattcc

SEQ ID NO: 373843 - DNA, 122 bp, Homo sapiens
gcggctttgaggagggttgggagtagtagtagccagtgacaggaaagtctcactgagcgccgccatcactaccacgcgcctcagaatacacgcgcacaaacgcccccagcgcctctggccgc

SEQ ID NO: 373844 - DNA, 122 bp, Homo sapiens
cccaccctctcccccacagcagccttctcccccacagaggctgggataggatgaggggggcggagttggggactgagggatcagaagccccaggatgccctgtatctgaagaaagatttggc

SEQ ID NO: 373845 - DNA, 122 bp, Homo sapiens
tttattttaaatttcattacttcttttattccaacatagtttaaatatcaatgtgcaatgcgtgcaaaagaaatcaaaggcacatgggccatgtacatgtaaatattaggaaaagttattct

SEQ ID NO: 373846 - DNA, 122 bp, Homo sapiens
aggatctggagcgccgcgctgcacctgagcccgggcacgaattgaggagcctcgggctgacgccatttattcagcacctactatgtgccaggccttgtttaggcaccggaagataacagata

SEQ ID NO: 373847 - DNA, 122 bp, Homo sapiens
ggtgctgtggcgtggggcggggtgtggtggggcctggcccagcggtgccgtggggtggggcggggtgtgggcggggcctggcccagcggcgcagtgggagcggagccaggacatgggcgggc

SEQ ID NO: 373848 - DNA, 122 bp, Homo sapiens
ttaatttagttttaaataatatgaagtcttgactataaagtttattttcaggctgggatgcgggtggcctcaaagtagctgagttgactagacattagtctctaccttcatgtttaaaatac

SEQ ID NO: 373849 - DNA, 122 bp, Homo sapiens
gcctcccccactcctgaatggctcctttgtgttgcattttacacagttctgaccttgggccgtgagttggatatgaactagaaatgtctggtttgtctctttccttcttaaattaatggcct

SEQ ID NO: 373850 - DNA, 122 bp, Homo sapiens
gcgggcgccgggagtcgcgtggcgcagggagaggggccgagtctcccgaggggaaggaaccgaggctgctgtggtaacctggggaacccccgccccagaagtaccaccacagcgggaaggaa

SEQ ID NO: 373851 - DNA, 122 bp, Homo sapiens
aatgcgaggcctcttaaatctttaagatcctcgggtcagctcaaagagtctttagcaattcgttgttttgtcttgagaccattatcggtccctaagcacctaattatttaatggcagccctc

SEQ ID NO: 373852 - DNA, 122 bp, Homo sapiens
tggtaccagtcttgctgggtcaattacttgcgggcagagctgcagtgggactcacatgcccggaaaacagagccttctggcattcctgggcttcctcccccggccccagggagccctcaggc

SEQ ID NO: 373853 - DNA, 122 bp, Homo sapiens
gactcagaggcacatggagcccaaagtggctgggtggcagtcttgacttccagttaaatgcgatcattattgtgtctcctgctggtagcattcctctttctgaaaaaaaatctctaggcgag

SEQ ID NO: 373854 - DNA, 122 bp, Homo sapiens
aggctcatattggaatactctgttgacaagtagataccacttcacctctgctagggtgagcgctggtagctcctccctgttaaatgcccatctcaatgcctctgccctaagtgagttgtgca

SEQ ID NO: 373855 - DNA, 122 bp, Homo sapiens
ggcgaactggcgggcgggggtgcgcctgtgagtgtgagcgcgcgtgtgcgtgtgtgcgcgcgctctcgtggccttccggcagctggcagctgtcccggcccccaccccaccctaccccaccc

SEQ ID NO: 373856 - DNA, 122 bp, Homo sapiens
actcgaggcccacagaggctaaaacaaacacgacagggtcccccagacgtgtagacgtggcgcaaagaagggaggatccagaaactgggcccagggttcgtacacgccatcagtgtccacag

SEQ ID NO: 373857 - DNA, 122 bp, Homo sapiens
tggagcgggagggtgttttcttcctctcgttttatttttttccctcccttggtgagacatcggaggaaatgctgactgcgagcttttcttttcctgccatgtctccggctaccaccacaagg

SEQ ID NO: 373858 - DNA, 122 bp, Homo sapiens
ccgtgccagcccccaggatgggtgccccgagcgcgtgccggacgctggtgttggctctggcggccatgctcgtggtgccgcaggcaggtaagagccccccactccgccccctctcgatgctg

SEQ ID NO: 373859 - DNA, 122 bp, Homo sapiens
cgctccgtcctcccgcccggccagggacgaggcggggcgggtacgcggacactgcgcctgcgagagtaggccccgcccccgatcggccccgcccccggccagccccgccccgcgccgcgcgg

SEQ ID NO: 373860 - DNA, 122 bp, Homo sapiens
gcagtggaggaagacataaggccggggtgactcagggcagatcaaagctgtggggctcagcgagatgagatgaggaatgttttcctggggctgtggggccagggtggctctggaggcaagag

SEQ ID NO: 373861 - DNA, 122 bp, Homo sapiens
acagtccagaatatctggaggcctacacgtgaaatgacagtcatccgtctttgagtatatcgggcacaccctcccctacatccccgcccttttggcaatgttggtgggtgacaatatgttcc

SEQ ID NO: 373862 - DNA, 122 bp, Homo sapiens
atcccagctactggggaggctgaggcagaaaaatcgcttgaacccaggaggcggagatcgcggtgagcagagatcacggcattgtactccatccagcctggacaacaagagtgaaactctgt

SEQ ID NO: 373863 - DNA, 122 bp, Homo sapiens
aattccccaggctgcagaaaaagccccataggccatcctgttactccagatttgcaagctcggctgggctctccgtgataccaaatgatgcttgtccagttctagcttgcatggtcaggact

SEQ ID NO: 373864 - DNA, 122 bp, Homo sapiens
gaagctcgttgggggaaaaaacggggaaaacacacctgtatcctttgtggcatctcttcccgggacttaccatatggatggagcttccgtgccactgatctctaagaaatcatatccttctt

SEQ ID NO: 373865 - DNA, 122 bp, Homo sapiens
tgatgccaattggctgactggtcaggggttgcaggagacctcggaggttacattactgcccggaccctctatctccttcccctcacagcataactcaaacgtgctaaaaagggctttcataa

SEQ ID NO: 373866 - DNA, 122 bp, Homo sapiens
tcgccgtcaccaccgggtggagccacaggtccgtgtgatcgtccccgtgaccccgggttccggaaggatcctcacccaacgctggcccagcccggctcccaggacccttcacaatcctaaaa

SEQ ID NO: 373867 - DNA, 122 bp, Homo sapiens
acagcctttctctgatgtccatggcatgccattagtaagagtcacaaatactgtgatactcgcctaatccatttttaaagtctgttcagggatagtctaagagtacaaggcatatgtgcata

SEQ ID NO: 373868 - DNA, 122 bp, Homo sapiens
tgcaactggcgccggtagtcgttggcttcgtgcttggcctggcggagcagctccgcgttgcgggcagcagcgtctgtcaggtctgcaaactaggtgggggacacatatggggggctgtgtgg

SEQ ID NO: 373869 - DNA, 122 bp, Homo sapiens
ggtcaaacaggtttgggccctttggtctttcagcaatgtcccctggcaccttctattcttcgtgcatatttcctcctgaatcttattagaggtgagaaaggaaaataaatcttggtgccaca

SEQ ID NO: 373870 - DNA, 122 bp, Homo sapiens
cccttatcaccaagtccagcgcccccattgtgtatctgggacatgtcccaaggcctgtcccgaggagtgttttgcctggaagtggaggggcaggaaagtatggccaagggaacacgtgaggg

SEQ ID NO: 373871 - DNA, 122 bp, Homo sapiens
gcggccgaggggcgggaggcgggcagcctccgtgattggccggcggagggggcggtgtagcgacccgaggagggaagaggactccaagcgccatggccgctgccgcccgagcccgggtcgcg

SEQ ID NO: 373872 - DNA, 122 bp, Homo sapiens
ggcgagggcggagactgggggtccaaagctggggagctggtccagagggcggctgtggaccggaggggccaggttccgtcggggtgcactggcggggaggactttcaggcacgtcccgcaca

SEQ ID NO: 373873 - DNA, 122 bp, Homo sapiens
gggcctgtctgcggcttcggacccacgctcaggacatacaccggccagtatcccggctctcggagcagcaaacttttgctggtgttgtgagggagttctcacactagggcctccagctttgt

SEQ ID NO: 373874 - DNA, 122 bp, Homo sapiens
ctggtgagagtgacaagcctttcctgtgccctttggataccggggcctggacattttaggcgctcagtaaacagctaagtaaatcatgactgctttatttgctggactggtgcctctcagca

SEQ ID NO: 373875 - DNA, 122 bp, Homo sapiens
tctcagggtcgcagaagggcaagacgccgctcaatggttgccaagggcaacgcgggacgccggctagcgaggccttttgttctctgggctggggctcgccggctccagccttagggcgggaa

SEQ ID NO: 373876 - DNA, 122 bp, Homo sapiens
gagcggcgtccagaggctgccttcccgcgactcaaaggagcataggggaacctgcaggggcgtggccggggcgtagctgcgcgccgacggcggggggtcgaagggcacgcagtgccggcgtc

SEQ ID NO: 373877 - DNA, 122 bp, Homo sapiens
gtgggcgagatggtgctgatgccagtgtggggcaccaccgggttcacaacctgctaaggccgaggtacgtcccggccacccaggcctggagctagagtgtgcgcccgccttcgaccatgggc

SEQ ID NO: 373878 - DNA, 122 bp, Homo sapiens
gatggagaggatgggtttcctgttcttaatagcaaatgctccccccgacaccctggctcacggctcggggcaacagagcagcgaagaaagcgccgcgactccatcgctggccgagggccgac

SEQ ID NO: 373879 - DNA, 122 bp, Homo sapiens
tgacagccgcagacacggcggctcagatcacccagctcaagtgggaggcggcccggggggcggaggttcatcctcacagggataggcacctattagatgtggtgtggttttcctctctactc

SEQ ID NO: 373880 - DNA, 122 bp, Homo sapiens
ctgagaactttgagccggccccgggactgccccctgctcgggtcccagacctgaagctagcgcagttaggcaggtgggggaaatcccggggaagcttccagcagtctcttttcctttcctcc

SEQ ID NO: 373881 - DNA, 122 bp, Homo sapiens
aactgtagcagttacactcatcccaacatcccaattattcctaacttaaatgttgccatccgccagatttctcagcctagtgaagctgttccctccatttaaaacaattgctttctgaaaat

SEQ ID NO: 373882 - DNA, 122 bp, Homo sapiens
ccaatcgcgcagggcgcggctccacgcccggccccattgaggaagcgcgtacgcgtggcgcgtggctcacggggagcatcgctaacaaagctgggttcctgctgggccccgccctgctcctc

SEQ ID NO: 373883 - DNA, 122 bp, Homo sapiens
gtccctaacagtttgctcgctctctgtgttcttaagtccctttgttcctacatctttcagcggggggctgtgaggagtccaagagtgaacacccagtgcctgccctggcaaacagtgactgc

SEQ ID NO: 373884 - DNA, 122 bp, Homo sapiens
aagacagcggtgggcctggattccagtttttatgtgtctggctgcatgccccctcccacccggggcctacagctgaaccttgacttgaactgcaggtctgcaagggactgtcagagataacc

SEQ ID NO: 373885 - DNA, 122 bp, Homo sapiens
ccctcagttttccttcttttggattcttatgctgtgaacagtagacattttttaaattaccgtaagtattgagggcatatgacacaaacttatggtggaattagggcagccgagcacagtgt

SEQ ID NO: 373886 - DNA, 122 bp, Homo sapiens
ctctccactgtacgtgaaaattcttcgggaacgctgagttgtgagcatggaagattgtcacgcagcaaataccatttggcacggccctgctctgggaagacagggacaccgtaggtgggcat

SEQ ID NO: 373887 - DNA, 122 bp, Homo sapiens
ctccccagcttggcttccttctgaagggctgtggagttcctgacaggtggaggtggtggacgtctgctgatgttgaccagggagcccgtgctcccaccggtggctggctgccccagacctgg

SEQ ID NO: 373888 - DNA, 122 bp, Homo sapiens
gaaaatcttccaaaaaatagtaagaggagggagttcctctctccctctccgtgccgtcggcgccctaagtttgcaactgaaggggtttgggggaagagggtgattgtaaatttttttctaga

SEQ ID NO: 373889 - DNA, 122 bp, Homo sapiens
tgtgtgttctatatgaacccccatctacaaggtccataaaattcctccgcaaacatgggtcgtagcctcacttttctcccaaccccaaacataacggtaggggaagcgaggtgcagaggggt

SEQ ID NO: 373890 - DNA, 122 bp, Homo sapiens
agggccgggagcccggggtgggaagggaaggggtgcctcgcggcctatcggcggccaccccgtcacctccgaccacagacattgtttccgacagttctcaggagcagtgtggcggaaaattg

SEQ ID NO: 373891 - DNA, 122 bp, Homo sapiens
gtgtaggggttggggcgcgccgggcggcgccgtgagaaacggcgggtctccaggtgcggccgcgggcacctgtttctagtacccccgtccccgcgctcgccttccagccgtgggagccgggc

SEQ ID NO: 373892 - DNA, 122 bp, Homo sapiens
tccccgccgtccccaccgtccccgccgtccccgcctggcgcgctggggaccggaatggcccggctggttttgaatgtagagatcgggctttgtgagcggctgcccccacccccacatgcccc

SEQ ID NO: 373893 - DNA, 122 bp, Homo sapiens
atttaccggggtctggagactggaggccaccagcttcgccactcggtgggaggtggccatcgccccgcctccgaggcctgagcgcctgcgctggcccgggacgggaaagctggtgcggcccc

SEQ ID NO: 373894 - DNA, 122 bp, Homo sapiens
gccgccgccgccgccccctctacctccttctccgccgcggggccccaagcccggactgagcgtgctagacactgtccgaccgccacccccggagccgagccccagccgcgcgcgcctgcgct

SEQ ID NO: 373895 - DNA, 122 bp, Homo sapiens
caatccccgcagcttttatcagcacacaagatcggcgctgagcaccacaactccaatcaccgctagagaagctgggtccagaggagttggaggcagcgcagaaccttgggagggcccgcacc

SEQ ID NO: 373896 - DNA, 122 bp, Homo sapiens
gttcttccgtgttgtccaagagtcattccttctttacagtcccgcaccagtaggccaggccgcttggtttcccaatccgagaccggaaggaaccgggtagacatgagcacaagactctcatc

SEQ ID NO: 373897 - DNA, 122 bp, Homo sapiens
ccccactgcgctgaaatggacgtcgcgccctctgttggccgggaggtttctcagtgatgtcgccacgtgttttctgcgtggaaaaagtgaaagatcatccagtcatttttttcaactgatgt

SEQ ID NO: 373898 - DNA, 122 bp, Homo sapiens
tgaatccttgcataaatttactcttcctcaatccagaggagggcaccagggttggaaccccgttggagttataccactctcaatcttggaatgggggtcatctctcttcccccagagtggaa

SEQ ID NO: 373899 - DNA, 122 bp, Homo sapiens
tttcagccagcagctctatcagcattccccaacagccagcattcccggaagacagcacagcgcagaagtgtggggcaccgagctgagcggcagggagctcagctccaccacaaattggctgg

SEQ ID NO: 373900 - DNA, 122 bp, Homo sapiens
ataataacataaaatcagaatgtaaatccagacgcattgttttgctgcgattaagttgaacgaaaatagcaaggacgaagtaaggagagagccagcctacccgcgggatgaggcgtcccgcg

SEQ ID NO: 373901 - DNA, 122 bp, Homo sapiens
acgcctcgcccccgggctgcgtccggggctgggcaggtggagcgcagcgccgcctccccgcgcgcgccccagaagcttccccagccactggccccgtggtccaggagtgagggctgcgcctc

SEQ ID NO: 373902 - DNA, 122 bp, Homo sapiens
tcgactgactgcatcttgtactgattttgcggggatttctggtcttttttatccaatgcacgctggtccccgccgctgctggagtgaggctggttgtctctgagtgggctctgcaccctcac

SEQ ID NO: 373903 - DNA, 122 bp, Homo sapiens
agcctccgtcccgcatgagagagggggtacttaatcaccgggcttcggtgccaaagcctgcgtcctcgggcactgggcggacacccaggccccgccgccagccactccagaaccggcccaaa

SEQ ID NO: 373904 - DNA, 122 bp, Homo sapiens
agagcaccagagagagagggagagagagagagagcgctagagagagggagcgagcatgtgcgatgagcaatagctgtggaccttacagttgctgctaactgccctggtgtgtgtgagggaga

SEQ ID NO: 373905 - DNA, 122 bp, Homo sapiens
tcagatgtttcccactcggtctctctctgctctcggaccacctctctcctcctcttaccccggcattcaagcccccagtttgggttcctttggagttgtcatggaaacacggaggctagacc

SEQ ID NO: 373906 - DNA, 122 bp, Homo sapiens
ggaattcttggtattttcctcactgcctctccccccgggtcaggtgaccagggtgtggctcggagggcagctgtagtttacgagcaaggtattggcaagggcccagtggtgccaccctgata

SEQ ID NO: 373907 - DNA, 122 bp, Homo sapiens
cccttaaggaaccctgcttggtgtgcctgctgtaaacccagtggcgggatgggcccgaggcggcgctgagagagcggccacgatggccgcagtccgcggtgtggactctcttgcagccagca

SEQ ID NO: 373908 - DNA, 122 bp, Homo sapiens
ccctcctcatactctcctgagagtcccctccaggcagtcatggctcacttatccctgccacgtgaactccataaaggagtctcggtagaaacccacagaaactgttcccagtcacaaagcat

SEQ ID NO: 373909 - DNA, 122 bp, Homo sapiens
ggaagctataatgacattatttggaatcacatctgttcctaatgggatagaatttaatgacgggagatcaggtagagtcacaaaggttttagataggtacagaattcaccaatgcaatattc

SEQ ID NO: 373910 - DNA, 122 bp, Homo sapiens
ccaagtgtttattgaggaccgtgaggggctttctgttgctggggttcaggctgctgggagcgatggaaaacctcggtggaatcgtgaggcaggtgatggggagacgggctgggacgtcatat

SEQ ID NO: 373911 - DNA, 122 bp, Homo sapiens
caagttgcccagagggcggagcgagtaatgctaatacacaataagcatccacaggctgagcgaatgaccttgaggaactgtttggcgtcagctacggcactacaaacatgaccaaagccgca

SEQ ID NO: 373912 - DNA, 122 bp, Homo sapiens
aaaggccacccctgcctgatctgagggcccttcatgaaggtagcagccattccctcagcacggcagccaggacaccgaccctgtcgcgggctggccccaccgctcaccgtatttctgcttga

SEQ ID NO: 373913 - DNA, 122 bp, Homo sapiens
atttcaggatattctgaatatgaacactttcttcaaaagtaattttccataaatctggatcgggattagagatggctgttatctttttatctctcaggtggtagaagcatggttcccctaag

SEQ ID NO: 373914 - DNA, 122 bp, Homo sapiens
gaacggcgcggtcaggctctgccgcagctttcaggtcccctcggccccgtccgggtgcagcgcaaccaggctgcccgcggagccccaccgcccccatgccgccgcccgccatggttcagccc

SEQ ID NO: 373915 - DNA, 122 bp, Homo sapiens
gcatgtattatccagcaacttgctttgtcacctagtgtcctggagatctgtccacgactacgcatttagtgctacttattcctgtccaactgctgcataccatttcacttatcagtactgtg

SEQ ID NO: 373916 - DNA, 122 bp, Homo sapiens
aacgtgctttgggtgtttttctgctttcttttttggcaagtcaggacagcgcacagtgcacggagctccgaagctctctcagctactcccggatttctggttaaacctgagggtgagcccga

SEQ ID NO: 373917 - DNA, 122 bp, Homo sapiens
gatggggccatcaacagggtcccattcagcaccttccctgggtgggcacaatctaagccacgctgttgtgtctgccccattattggtgtcatttctgcagtatttgtaccagcagcctcctg

SEQ ID NO: 373918 - DNA, 122 bp, Homo sapiens
acctgcccttgctgtgcttcaggcctgagaaggtgctacaggtacgcggccccgccccggcgagcgcgtcttgtgctccctgccttagtggggcatcagagcaacgatcagagatgatgaag

SEQ ID NO: 373919 - DNA, 122 bp, Homo sapiens
gttgtctacaccaccccgggcactcgcgtcaacaggtacatcagccgcctcttagaagcccgccagacagagctggagatggcagacctgaacttctttaccctgaagtacaaacatgtcga

SEQ ID NO: 373920 - DNA, 122 bp, Homo sapiens
tgtgtgtgtgtgtgtgtgtgtgtgtgtggtgttgttgttgttggcgacagggtctcaattcgtcgcctaggctgggatgcagtggtgcagtcacgactcactgcagcctcaacctcatgggc

SEQ ID NO: 373921 - DNA, 122 bp, Homo sapiens
gggctgagggacagggtgggggtttcacctgagcctgccggggctgctcctccctcccgccgcggcctcccagccccgcgccttcccactgcctccggaccacatcgggcttcgctgcgctg

SEQ ID NO: 373922 - DNA, 122 bp, Homo sapiens
ggagaggcatcctggcctgcacagcgagggccgtcagaagggtttgttcgcggcagaggccggcggcgcggtcctgggtggcgggcggcgtgggggcaggcgagcggagcccccggagccaa

SEQ ID NO: 373923 - DNA, 122 bp, Homo sapiens
agactataggatctgatttcaaatcccagcggtgtcactcacaagctgcttaaccaaggacgagttatttgaccttgctaagccaagaacacccacctgagggtgttgttatgaggatttag

SEQ ID NO: 373924 - DNA, 122 bp, Homo sapiens
tgaggtgattaataaaatagtgtgtaggactggtggcgattctagatgacgtcatatacacgtttgtccaatccaaagaagcatgtttcataacagcgattccattggttgaaataaaactg

SEQ ID NO: 373925 - DNA, 122 bp, Homo sapiens
cgcccaggagggcggcgagggcgccgcggcagccccagcggtggtcccgggcgccgcctccgccccggacccagcgccaggagccacagactccgcgcaccgcccccaggctcctccgcgcc

SEQ ID NO: 373926 - DNA, 122 bp, Homo sapiens
cgcacagacctagggctggactcaggagctggggggcctcacctgttcccctgaggaccccgccggacccggaggctcacagggaacaagacacggctgggttggatatgcctttgccgggg

SEQ ID NO: 373927 - DNA, 122 bp, Homo sapiens
gcttaggctcccttttctgggacttcaaactttttccacagataagcacacgacgctaaacggcctctcaatccgagcgctgccctcccacctgcctcctggaaaacatggatgtggaccga

SEQ ID NO: 373928 - DNA, 122 bp, Homo sapiens
gctgcgcacagcgatggcaggccagcatgtgttccgagtgggagtgggctcagtggcactcggagcagctggccagcgtggctgggccctggcagtgaggggcttagcacccgggccagcag

SEQ ID NO: 373929 - DNA, 122 bp, Homo sapiens
cacatttaccctgacctggccacaaaggcaaccacaaagacctcctagtttattaatgtccgtgggagaacaaaatgattggaatggaaaagagaaaattatttttgaagactggattaact

SEQ ID NO: 373930 - DNA, 122 bp, Homo sapiens
tcacggaacgccgaacctggccgggcccggttgctgctgcggtgttaggtgagttcaggccgccgccatcgcttctcaagcgcaccagccgcgccccgccccgcgccacacgcagcccgcgc

SEQ ID NO: 373931 - DNA, 122 bp, Homo sapiens
cacgtgctgcaggattcactctcaccacactcagcaccaggttccgtgacaggcgaaggtcgcagctcggcaggagggtttgcatgttgtgtgggagcgacactggtgccctcagctaactg

SEQ ID NO: 373932 - DNA, 122 bp, Homo sapiens
gatgcaaagacaggaacaagccagggtcatgttggcgccggaagagccgaccgtgtgtggcgtgggaaattgacttacctgcctgctgggagatggaggggttgcggttgtgtggtttcagt

SEQ ID NO: 373933 - DNA, 122 bp, Homo sapiens
gggtctgggcctcagcgtggactcaggtaagcagaggaagaagtttggtctccgcggagccgctcggccccgtacccgaccctgggctgtgcctagaccccttaatcctccttggagacctt

SEQ ID NO: 373934 - DNA, 122 bp, Homo sapiens
ctccttggtttcctgcggccggggtctatccatttgtaaaagtctggatggactgggagacgttgatggagcttttgcagtatttccgtttggggctacagcagtatgtagatttgggttca

SEQ ID NO: 373935 - DNA, 122 bp, Homo sapiens
aatgctcccggagctgagcaggagcagatgccatagcctggggctgcatgctggagcgtccgggggtcaccggcaccaacaagcatcccaaggtggagccacttcccacccagcattccacc

SEQ ID NO: 373936 - DNA, 122 bp, Homo sapiens
gataacaggataaaggtgaggaatgaaggaatgaatggatgcaggcagacgtgaaaacagcgcccacctggagagctagaaacatctggagggctaggaccacctggagatgccccgtgtct

SEQ ID NO: 373937 - DNA, 122 bp, Homo sapiens
gagaagcctgacagggctgtcattaggcattcctcagcctgtggcctgaccgcattcttccgtcacccatccccttcccccagccccaggaatggagcaaacgctggtgcattttccaggcc

SEQ ID NO: 373938 - DNA, 122 bp, Homo sapiens
ccggtgcgtgttctcagagcccttctgagaatattcaggattgcacttcctgggctgcagcgcaccctgtaccctccttttttaagcctcctcccctgagtcactgctacccttccctcctc

SEQ ID NO: 373939 - DNA, 122 bp, Homo sapiens
taaaggctgcgaacactccgttgtgtgccaatgctagggcacgtgagcgtttccatcagacgcttatcgggtcagctctgggacctgggagaataccacaggtgcacacgcacacacgtgga

SEQ ID NO: 373940 - DNA, 122 bp, Homo sapiens
aggaaagagatggcactgtttgtctcaaagtcccagctgaaccccaggttcttcccaccacgctacactactacatgcctaagcaggagtgggaacagagatgacagaatgcatttctgcca

SEQ ID NO: 373941 - DNA, 122 bp, Homo sapiens
aaggaggacagatgtgggacccagtcaggccggttgtgataagaaggttggaattcaacacgcccgaagaagagtcagaaaggagagtgccgcatgcttctttttggaattgtggcaggaga

SEQ ID NO: 373942 - DNA, 122 bp, Homo sapiens
aaaagaggatggagtgaagtctccctccaccagagagcattttgcaagctgtctgtgctccggggtgttaaagccggagacccatccagattgtcccagaccacctcagaagaaagaacccg

SEQ ID NO: 373943 - DNA, 122 bp, Homo sapiens
aggtgaaggtcggagtcaacgggtgagttcgcgggtggctggggggccctgggctgcgaccgcccccgaaccgcgtctacgagccttgcgggctccgggtctttgcagtcgtatgggggcag

SEQ ID NO: 373944 - DNA, 122 bp, Homo sapiens
gttcaccgacgtggaaatcttatcactggcggcacctgccgcgtgtggtatctgagtggccgtgactcgtgcgtccgccctcgtgtgtcacacagtcacttaggcacaagcatctgaccctt

SEQ ID NO: 373945 - DNA, 122 bp, Homo sapiens
taagcattcatataccagtttttgtgtgaacgttaagtttccaattatcttgggtatatacgtaaggatatatataaggaggtccccaaaggcctgtcagaggccctttcagctttgcccat

SEQ ID NO: 373946 - DNA, 122 bp, Homo sapiens
tttctccgcccatgttttcctccaatccttaccaaagatggtgcccttcgcttcctctctcggcagcacgcaggtcccgggagcctctacccgacctctctatgatacgtcctccagccccg

SEQ ID NO: 373947 - DNA, 122 bp, Homo sapiens
aaagaatagaaaagagcaaaatgactcatgataaggtccacttgttttgcgggacctcaccgcaagtgtagatgggcactggggtacagtgagcggtcctggcaaagaaggagaggagagcg

SEQ ID NO: 373948 - DNA, 122 bp, Homo sapiens
aagctgtcgctacctgactgttttttgacctataaaaatggcagcttcacaaggcttgaccgaatgacaagagggaacttctgtggcttgccgccgagagtcctggagaaagtaggtttggc

SEQ ID NO: 373949 - DNA, 122 bp, Homo sapiens
gattacaggtgtgagccaccacacccagcccaaaagttgcttctttataaaaaatgaggccgggcactgtggcttacgcctgtaatcctagcactttgggaggccgaggtgggtgggtcacg

SEQ ID NO: 373950 - DNA, 122 bp, Homo sapiens
ttccctacaccaacacctggacccactcaagagttattctggagcggaaatcctggatcccgctatcgggagaaccagtgtctagaaaatgaaatcgtggtgcccattccatcctctgccta

SEQ ID NO: 373951 - DNA, 122 bp, Homo sapiens
cccggtcggcccctggtccccggcccaccaggccaggggccccgcgggggtcccgccggccgagaggtcgcccccggagcactgcgatttgcatacagtttgcatttggcccacaccctggg

SEQ ID NO: 373952 - DNA, 122 bp, Homo sapiens
cagcttctttcatggcctatttttattatctccttctcttaaatctgggctcagaatccacgatccctatgattgtaacaagaacaatcaagctttgaagatagtggacttttcctacagtg

SEQ ID NO: 373953 - DNA, 122 bp, Homo sapiens
ccagacaagcaccagcagggtgtggtggcagatacctgtaattctagctactccggagcccgaggagggaggatcgcttgagcctgggagtttgaagtgtaatgagccatgattgcaccact

SEQ ID NO: 373954 - DNA, 122 bp, Homo sapiens
tgcctcgagggaccaggaaatgcgtctgggggcgccaggaaagatgagaagataaagtcacgatgcgtccagctagctatagacacaagcagaggagccagtaggccaaaggagacgcacag

SEQ ID NO: 373955 - DNA, 122 bp, Homo sapiens
gtcattgccatggtaactgtgcgtcctggtctaagttccgcttctgcctaagatttgttccggattaacgttcctcaataactaatgtttcccccggaccaactttccgttcagatcaactt

SEQ ID NO: 373956 - DNA, 122 bp, Homo sapiens
agaggctggtgtctctaggagaatgaggaatagtcacttcctgcctttgtccattagcgccgaccaacgcgaccagctccgtttacattctttcagtggtgttgttgaaagggcttggcagc

SEQ ID NO: 373957 - DNA, 122 bp, Homo sapiens
tggcctcaatcttgtttcgcgtgatctgtaactgttttatctcccttcctcagctttgagcgctggtgaggagggcagggggctatccccctaccccaccccacgcccggcacagtattgtg

SEQ ID NO: 373958 - DNA, 122 bp, Homo sapiens
tctcgggctttcagggctgggagcctccaggacactccccttccaggctccgcccgcgcccgccccgcgcaaccctccccgcgcacccctctgcgctgatgtcacggcgccgcagcagccaa

SEQ ID NO: 373959 - DNA, 122 bp, Homo sapiens
aaaaacactgttggaaagcagacatcaaagggttttccttgtctaaaaagcataccattacggaatttccagttttatcaagaagaacagtttacaaaatatatttaataaaggtctggctg

SEQ ID NO: 373960 - DNA, 122 bp, Homo sapiens
tcttgtcgcgtctgctcaaaccggcacggtctgatccggaaatatggcctcaatatgcgccgccagtgtttccgtcagtacgcgaaggatgtcggtttcattaagttggactaaatgatctt

SEQ ID NO: 373961 - DNA, 122 bp, Homo sapiens
tccactgagagggactgagatactccagtctttcccattgctcctcctttcccatcaagacgctgttgtctttagccaacaccctcattgctcagctccctcctctcccgctagggcctgcc

SEQ ID NO: 373962 - DNA, 122 bp, Homo sapiens
aagggccgggaagggatccgagggcagcagtgtctcaggagagccatggcggagaggtgccgtcgggcggagaggtgccgtcgggcacaggcccggggctgggcctaggggacagggaggac

SEQ ID NO: 373963 - DNA, 122 bp, Homo sapiens
cagggtgagggagaaggaggtcgcaggtgcagtatcccggcgccagctgatgcgggtgcgcgcgcagctgttgtttactagccggtaactgtttcagagccgcggcgcgcgcagggttcgcg

SEQ ID NO: 373964 - DNA, 122 bp, Homo sapiens
ccgaggggggcgggtccgggaggctgtgcgtgtcttgtgagagctcttgaaccaagtcagcgctggagtcggctaggcggctggaaacggcggctgccgccggtgactcagggaggcgggag

SEQ ID NO: 373965 - DNA, 122 bp, Homo sapiens
ggggccagctgggggtgggccagggtgcctctgagcatcccagctggccttttgcaaagacggtgggcctactggctgtccccatccagcttcccactggaagtaggtgtggtgcccagtgg

SEQ ID NO: 373966 - DNA, 122 bp, Homo sapiens
gaggggagccaactaagcatcaagatggggccctctgggaggctctcaaaccaaaggatacgcggcgtgccctccgtacggcagaccaggtagaggcaggcagcaatcacgtgggccatctt

SEQ ID NO: 373967 - DNA, 122 bp, Homo sapiens
ctgggccggtctcgggggacccctaagggtgaccgtaaggcgaaaaacgtttgaaaaccacggccctgagttaagaaaaacagatactgaaaatagtggtctgagtgctggtctatccattc

SEQ ID NO: 373968 - DNA, 122 bp, Homo sapiens
ccgctcccggccgcctccggcccggcttggatccgggctccggcccgcataggccccggccgcggcctctgcctgcgcttggcccctgggccctaccgggctctcagcaggcccgcagggcc

SEQ ID NO: 373969 - DNA, 122 bp, Homo sapiens
gatggtggcccacacgtgtagttccaggtcctcaggaggctgaggcaggaggatgacttgcgcccaggaggggtttgagtccaatctgggcaatacagcaagatcccatttctaataaataa

SEQ ID NO: 373970 - DNA, 122 bp, Homo sapiens
ctggagagcccgctggtttgtgtgaggccctggccctgtgggtagcagaacactctgtctcgctgtgagcaacaatacactaaaaaaaaaagaaaagaaaaaaaaaagtaagatctgcatgt

SEQ ID NO: 373971 - DNA, 122 bp, Homo sapiens
taagctgcgtcagccaatctccgcgcgcgcgcccagggcctcatggcctatcgttgggctcgcagatcacctgggggcgtgtgcttgctctggaaatggtaagacttgccccgccccatagc

SEQ ID NO: 373972 - DNA, 122 bp, Homo sapiens
ggtgcgccctgagtgacgtcaggagcagaggccggagctgtccatcagcaccaaaggccgcgggcgggctcagggcatggggccgcggttctggggcggcccgagccccggctcctgcgcct

SEQ ID NO: 373973 - DNA, 122 bp, Homo sapiens
agagaagagacgatgcttcaatacaaaaatttcaagtaatttatgtagatactctcccctcgtggagagtaggatatagttagttactcacttccaaggaatacagtatggaataaaaacaa

SEQ ID NO: 373974 - DNA, 122 bp, Homo sapiens
atcgggactggaaaagtggtgctgggagccaggcagtgacaccagcgcgcctccactggccgccgagcgcacggagaagtgggctccccagagttcggcacccaaaggaccaacttcgcctc

SEQ ID NO: 373975 - DNA, 122 bp, Homo sapiens
tccaccggcccgaagaggctgcggcaggcgctggtgcgcactagtactgggaaggtcccacgggcgacaagacgctccatcgtggatgtgctgcggagggacgcgtcggacatggcccgggg

SEQ ID NO: 373976 - DNA, 122 bp, Homo sapiens
ctcctcgttcctcgcgcagaggcgtccccacctcctgtgaacacttgtcagagacagcctcgaggcctgtgtcgctggggcacgcaagcttgccaatccctctgcccaatggcgcctgcgca

SEQ ID NO: 373977 - DNA, 122 bp, Homo sapiens
ttctttgactcggaaagggaactccctgaccccttgcgcttcccaagtgaggcaatgcctcgccctgcttcggctcgcccgtgcgcacccactgacctgcgcccactgtcttgcactcccta

SEQ ID NO: 373978 - DNA, 122 bp, Homo sapiens
ggcacaggcaccaatgggaggtgcctgggctccacaggcccgtcggggccagagggtcgccggtagcgtcaaccaagtgcacgacagcccacgggtggctaggcgcgtgggaagagccggag

SEQ ID NO: 373979 - DNA, 122 bp, Homo sapiens
gggtaggcccggccggcgccccgccccagatctcgggacgcccgcgcggatcccgcagcgcgcgtcacagcctttagggcatccggcggccccaagacactgctgcctcggtaagggagtga

SEQ ID NO: 373980 - DNA, 122 bp, Homo sapiens
acggacacgcacgttccagaggaggcacagaggcggagctccgatttgggagcgactccccggtctggggcaggcagaggtgtccagctcggtcctgggcggcagacgctccatgggcccga

SEQ ID NO: 373981 - DNA, 122 bp, Homo sapiens
gatctagggcacaagccttggccttcctggtcgctgtcaggtatgcgccaagcatcacagcgtttgggtatgaaaccgcccagtcacccgatgtgaaacccccacgactcctctctcctccc

SEQ ID NO: 373982 - DNA, 122 bp, Homo sapiens
ccactctccatcatcttaactgtggtgctcacagccccctggctctctcccaccccggctcggagctgtccttcaagaacctagagcagtggctctcaccctgaccccaggggtggtgagag

SEQ ID NO: 373983 - DNA, 122 bp, Homo sapiens
caaagccatccagtccgggcctgcagctgggagacagggaagaagaggatgtgtggggcccgtggcacttgacctgggtgacatgagggtcacttcaaacacggccagtgtgcagcctccca

SEQ ID NO: 373984 - DNA, 122 bp, Homo sapiens
tcttctcgcggagcaccctatcccctattatcggcatctgatcttcctagttcggatccccggaacacacgccttctccagcctgcaatctacacacgtggggaagcgcgtccaagtggtgc

SEQ ID NO: 373985 - DNA, 122 bp, Homo sapiens
cgggagatgtgaaaatgaaagaaaacccaggggcacggtggacactggcgctggaacacacgtgggctcggtttcacagtctgtgtttgttggtgtgaccaccagccgagggccccaggtat

SEQ ID NO: 373986 - DNA, 122 bp, Homo sapiens
ggacatggagaataggctttatacttacaaatctttagacactgagaaccaagtaaaactcggtgctttctccagttatatataaacatcattgaccctgtactctatgtggaagtcacacc

SEQ ID NO: 373987 - DNA, 122 bp, Homo sapiens
accgtggggaatttaaaggccggccagcgtgcttccgaaggccgggggtggaggcattaccgcctctccgtgccctcttctcttaacctgccctgggccaagggcctcggccccgcgaaact

SEQ ID NO: 373988 - DNA, 122 bp, Homo sapiens
taggctcattatttgtcttttgcaaaggaggggcactgaagcacaaagacatctacaactcgtccacaattgtacagcaaatgaatgggagaactaagtgaagctggaaagaactactataa

SEQ ID NO: 373989 - DNA, 122 bp, Homo sapiens
gggctccttgggctgcagcgccctcccaagcccagcccctcttgggaaggggtgctgccacgtaccctgtcaatctccaggtcatcaatgccactgaggtccagctcaccgtctcctgaagc

SEQ ID NO: 373990 - DNA, 122 bp, Homo sapiens
cgccttgcagtttgatctcagactgctgtgctagcaatcagcgcgacgcgattccgtgggcgtaggaccctctgagccaggtgtgggatatagtctcgtggtgcgccgtttcttaagccggt

SEQ ID NO: 373991 - DNA, 122 bp, Homo sapiens
accttccaataatttaaactatttacagtacctctaggtcattatttcccctgactccaccgaaaataccctgagacactatttacagctgactcctgagttacctcacaggatcagtttac

SEQ ID NO: 373992 - DNA, 122 bp, Homo sapiens
tcacaataaacagagagagagagcatgtctataaaatcccagacaggcggcaaatgagaacggtgacatcgagtctcacaactgcaatgaagtgaaagtctcttggtcctcccgtgtggggc

SEQ ID NO: 373993 - DNA, 122 bp, Homo sapiens
atgtgctggtgggacataccttgtgtgtgacgccgagagcctgggagacatgtgccatcccgcggctctgttcctggtgctttcgccgagtcacacggggtcgtcctggtggtcagggtctc

SEQ ID NO: 373994 - DNA, 122 bp, Homo sapiens
ttccgggcggctcccttcccttgcatgctgcattgtgtcgggagttgctgacagccatggcgccgcaggtctggcgtcgacggaccctggagcggtgtctgacggaagtcggcaaagccacg

SEQ ID NO: 373995 - DNA, 122 bp, Homo sapiens
ggtgatccacctgtctctgcctcccaaagcgctgggattacaggcgtgagccaccgcacccggcctagtattttcattttacagagaaagatatgaagcttggagaggttaaggaatgtatc

SEQ ID NO: 373996 - DNA, 122 bp, Homo sapiens
atgtaacagtaattctttacatcttttgatttttctcttcctttttattcactcttcccacgaatttaaatgtttaagttatattcatcactagcaaggatgataaacacttgtgcactgaa

SEQ ID NO: 373997 - DNA, 122 bp, Homo sapiens
tggtgttgtacctctggagctgtcttctgggcagggtttggggtttgacatgcatggggtcgttggggtcagagttatttgtatagataaagaaaatgtgtggccgggcgcggtggctcacg

SEQ ID NO: 373998 - DNA, 122 bp, Homo sapiens
tactccagcacaggagtgtgggagccctgttaggctgtttttctcagatgcaacattctgcgtccttggtgctttcaactggcttatcttaccttatatttcacctgtttgataatctttct

SEQ ID NO: 373999 - DNA, 122 bp, Homo sapiens
ccccttccagacagcacaaagtcacccagaaatgccttccagtcccctcacaattgggtacgctgctcttctgcaaaaggcctagggtgcatgttgatttgaggtcccagccccaccagtgg

SEQ ID NO: 374000 - DNA, 122 bp, Homo sapiens
ctttgaagtgtctgtcaggatggggtgtcagttcctttatgtcttggacctggagctgcccggctaagtgctggtgcctttaaccttggggagagccttccttcctcctctgctctaagcca

SEQ ID NO: 374001 - DNA, 122 bp, Homo sapiens
gcctcccggatttaaagcggcaggagctggttagccggatagaatgtgggtgccgagggccggtgggggccaccgcagacttctttctgtccctgctcttcagcgtctctgaaacccctggc

SEQ ID NO: 374002 - DNA, 122 bp, Homo sapiens
tctctgtgtcgcaacactggcggggcgggccaaatcggccagagctctgcccccagaggacgcggctaagcccgggggcgtgtcctgggctggccccacccgcgccccgccccgccccgccc

SEQ ID NO: 374003 - DNA, 122 bp, Homo sapiens
cgtttctgttgggttatcccaaacctgtgataggatagtagcgccctccctgcctccggtcgaataaacactacaacgtctgacactcggtgctgaaaggaaatcgggcgcggtgtcttgcc

SEQ ID NO: 374004 - DNA, 122 bp, Homo sapiens
ttcttctgtttaattcagttgcaaaggtctccgtcctctctgggcacgggacccgggctgcgccacccagataacataaaaccgcttcctgaggggcctaggacgccttgagaaacaacata

SEQ ID NO: 374005 - DNA, 122 bp, Homo sapiens
gttggccgggcgcggtggctcacgcctgtaatcctaaagagtaatgcctaaagagtaactcgtaaaaaaaagtagtcctaacaatggacctctgggtttatgttggcctctgaggagtctct

SEQ ID NO: 374006 - DNA, 122 bp, Homo sapiens
ctgcgtccaggttgctggactacaccgggggcacggtcagaggtctttaggggagggcggcggtctgagagtcctgggtgccgacctgttgggacccaaattccttgtgggaacgatgataa

SEQ ID NO: 374007 - DNA, 122 bp, Homo sapiens
cccaggctggagtgcagtggcgcaatctcggctcactgcaagctctgcctcccgggttcacgccattctcctgagtcagcctccccacagctggggactacaggcacacgctgccacgcccg

SEQ ID NO: 374008 - DNA, 122 bp, Homo sapiens
tatctaggtagtcatccatggatgttcagctcagcccttctccagcctttccaatgatttcgaatgtccccaattccccctaacgaatccctttctgactaggagtaactagctgagtgctg

SEQ ID NO: 374009 - DNA, 122 bp, Homo sapiens
ctgtgacccataagttggtatgtctgggttaaataaatagaaatccactatcaggccaggcgcagtggctcatgcctgtaatcccagcactttgggagtccgaggtgggcggatcgcctgag

SEQ ID NO: 374010 - DNA, 122 bp, Homo sapiens
ctcgatctcctgacctcgtgatccgcccacctcggcctcccaaagtgctgggattacaggcgtgagccaccgctcccagcctatagattacatttatgtggctagctcatgattctgcttcc

SEQ ID NO: 374011 - DNA, 122 bp, Homo sapiens
tatttttattgctatttttgaaggagctggtcagcatttgcctagactctcgggacaacacggtaaatagctttcaaggatttggggaaaggagaaattaggccaggccgtgcaatacctta

SEQ ID NO: 374012 - DNA, 122 bp, Homo sapiens
attctccgacttaataacatctctttatccctaggtgttcccttaatttgtcaccagcaccgaaactagatttctccaacatactcatccccaaaattgaaagccactggattaagaaaacc

SEQ ID NO: 374013 - DNA, 122 bp, Homo sapiens
gcagagccctcccgcaaaccttccctgctggtgtccacctcagggtgtgggaaacctgtgcgctggccgagtgctaaccaagagtaggcagtgaaagacaaatgaaggttgaacaggtaaag

SEQ ID NO: 374014 - DNA, 122 bp, Homo sapiens
gagccccgccccgcctgcagatcctgggtatgctactgggtacgggaaccgacccctgaccgtgaggctcggcatcgggccctggctgttctgaagataaggacgatctccctccggggtcc

SEQ ID NO: 374015 - DNA, 122 bp, Homo sapiens
tcgcgtgtgaggtcagggcccatcattgcgcgtgttgggagcgccgcgctggtctatgagcgagcgcctcggcttgtggctgggccgggccggggcggggctgtcttcccgcggagcgtgct

SEQ ID NO: 374016 - DNA, 122 bp, Homo sapiens
tcagcaccactcagactgagggccgggctcgcgggacaggactgcccactgccgtgggatcgcactccctgtctaggggcctggagcaccgtcttggggactgccgatgaagccagacacgg

SEQ ID NO: 374017 - DNA, 122 bp, Homo sapiens
ctcagagagaggtggagtgacttaccagatttttatctggtgccctatcatatgctcttacgacacagagcagctttttgctgtagaaaggactgtcgtcattttacctgtgttaggaacat

SEQ ID NO: 374018 - DNA, 122 bp, Homo sapiens
cgggcctgagcgctttaattagcccggggctaatgtcctcacccatctttgtttatagaacgttgaaactccagtactgttggtaagttccaggaagacaggaactttgcactacttgaact

SEQ ID NO: 374019 - DNA, 122 bp, Homo sapiens
cagagctggaggtaagaaactcgtgctgtcatatgccacctggcgtgtggcactttgttacgacagccacaggtggggggcgaggaccatctgctgaggaagcttcatttataccgggaggg

SEQ ID NO: 374020 - DNA, 122 bp, Homo sapiens
agctctggcaggctgacacggtcgagcagagaagttcctggccacccgcccggccccaggcgtgattctcaggatgcagtaaaagttgggcaaacgccgagaaaccctcaatcccacagaaa

SEQ ID NO: 374021 - DNA, 122 bp, Homo sapiens
tgagacagagtctcactctgtcgccaggctgtagtgccgtggcacaatcttggctccctgcgacctgtgcttcccaggttcaagcgattctcctgcctcaacctccccagtagctaggacta

SEQ ID NO: 374022 - DNA, 122 bp, Homo sapiens
tcacacttgagaggtgcgctcagcaaatccatgagatgcaccaaaaatcgcggtgcctgccgccggcctcagtccacagaaagggcccagttcttctccaccacaacgcctggctgcacgtc

SEQ ID NO: 374023 - DNA, 122 bp, Homo sapiens
agcacggcggccgggtgggtggagaaaacaaagcccccagctgtcagcagaggaaggaggcgacagcgccggagcaggtgagtcaagtgcatttaaagcggtaccgccctggcgcaccccga

SEQ ID NO: 374024 - DNA, 122 bp, Homo sapiens
gtgcctttttatggctgagaaatagtccgctgtgttgactcagcacgttgggtttctccacgcatctgttggcggatgtgttagttatttctggagccgggtgtgttgtgctactcacgggc

SEQ ID NO: 374025 - DNA, 122 bp, Homo sapiens
caccagtagcctcaaaaagcacatgattggaaatgtgagaggctgtcaggagccctggcccgtgggcaaccttgctggaagtgctgtgaccatgtgtgtgtttgaacctggacaaaccactg

SEQ ID NO: 374026 - DNA, 122 bp, Homo sapiens
gctattgttgattattatggccacgtttgccgctgatgatgttcaaccactgaaaagcatcgttttctttcttctagtaactgtgtgtactgaatgcctcgcgtttgtccctactgcacttt

SEQ ID NO: 374027 - DNA, 122 bp, Homo sapiens
gtctcgtggcagcctccaaactcgagcagtgaggagggtgtgttttccggtcactgtttacgaatgctcacagtcctgtccttgacgagcaggagccccgtggttggatcgggcggccctcc

SEQ ID NO: 374028 - DNA, 122 bp, Homo sapiens
ggggccattgagtccctgaggacagccaggtgggctgggggcactgagtccagcccaggacgggtgggagcccacacgctggggcagcccttcccaggatggcccaggctgggtgcggccac

SEQ ID NO: 374029 - DNA, 122 bp, Homo sapiens
gccacggggaattagctgaagaccagcaggcaggaagcctcccacatgccacctaaggggcgctcccggaaccgccgcccctgcgggaggagcggctggggtctcagatcgccgtgcgtgac

SEQ ID NO: 374030 - DNA, 122 bp, Homo sapiens
aacgagtaactatcaaaatatgctttttattcaaagaaataatagatttctttggagacccgtgtccttgggttattggggtcagaaagttaatttgctctttgctagaaagggtgctataa

SEQ ID NO: 374031 - DNA, 122 bp, Homo sapiens
tttactcagttgaccctaggcagtcattagcatagtttccctcagtcctggcaatggcctcgtgaggctgggattattctggtctcctttacagatgggggaactgagctcagcgaggtgca

SEQ ID NO: 374032 - DNA, 122 bp, Homo sapiens
caggtcccaagccctgcccggcgggaaggcagctaagcctccgtgagaaattgagcgcagcgccggtgggctggcactgctgggggacccagtacaccctccgcagctgctggcccgggtgc

SEQ ID NO: 374033 - DNA, 122 bp, Homo sapiens
gaaagtgaccgaaaggattccaactatgattttttaaattaaatttcagagcacttgaagcgaatgaatggctaggaagtacagagcacaatgtcgggttctaacctaacctaacctaacct

SEQ ID NO: 374034 - DNA, 122 bp, Homo sapiens
caaatgacataatttcccagagcctccttagataaaaaactagggctttgcttaccttggcgtattgttaggaaaattaaatgagttgctcaataaatgttacttcctcctgtctttttttt

SEQ ID NO: 374035 - DNA, 122 bp, Homo sapiens
tgccaagggctcaaactccacccgtttgccccgtgcccacagcgttggtgccacaggcagcgttacatgaggctccggccgctgctggccaggtctcctgcccacagctggaccttggaact

SEQ ID NO: 374036 - DNA, 122 bp, Homo sapiens
gggcagccaaccccaatctggtcagcttaaaagtgtcctcggtttcgccccctttcccagcgaaccaacactggcagattggcctgcgagccgctcgctctgttgctctagcacatttatgt

SEQ ID NO: 374037 - DNA, 122 bp, Homo sapiens
ggaacctgaagctcatcttgggtctggtgtggacgctgatcctccgctactccatctccacgcccgtgtgtgaggatgaaggggatgatgatgccaagaagcagatgcggaagcagaggctg

SEQ ID NO: 374038 - DNA, 122 bp, Homo sapiens
ggacatttgtaggggctggagggtgggtgtgccactgtcctagggccttccagtcccagccggtggagacgggggcacccaaaaggctgtccttggtcctgggactccaaccacagtaaagt

SEQ ID NO: 374039 - DNA, 122 bp, Homo sapiens
accaataaatgggcgaagttggaatcgcccggatgggttccgttttatgcaaattttagccgaagaccacacccttcctcattccaaccataggcccggccaacccctttgggttgtgcttc

SEQ ID NO: 374040 - DNA, 122 bp, Homo sapiens
gccccctcagccatgagaaaatcaaatcaatgtgccattcttccaggcgcgaggcagcagcggctgcagttcaacatgaaaggaggcttcctccctgcctgctaattacctgctcttcccga

SEQ ID NO: 374041 - DNA, 122 bp, Homo sapiens
cacggggcgggggcgaggacagggtgcgggggtctttatggcagacaatccccggctgagcgcttggccagagtttctgtgatgctagaatctggactgcctgcgacctctccgggactcgg

SEQ ID NO: 374042 - DNA, 122 bp, Homo sapiens
catttagatacaaaagttacaaactgaatgctatttaggaaacgtaatacactgacataccgctctttaaatagattataaatttagtatatcaattttctggcattttgctgaattttatt

SEQ ID NO: 374043 - DNA, 122 bp, Homo sapiens
gagagaaaatgcacaacacacacccgaggagaatgcgcacaacacacacctgagaggaagcgtgcaacacacacctgaggagaatgcacgcaacacacacctgaggagaatgcgtgcaacac

SEQ ID NO: 374044 - DNA, 122 bp, Homo sapiens
agagaaaggggtcagagatctggcatgtgtgtgtcccttcatccacaggaatacctgtaccgctatggttacactcgggtggcagagatgcgtggagagtcgaaatctctggggcctgcgct

SEQ ID NO: 374045 - DNA, 122 bp, Homo sapiens
gagctccttcggccgtggccctgcgcgctccgcccgggttgcagtcctcttcccccaggccgcagacccttgcctgctgcctcaaccccccgccgccgatcgcctggccctccacccctgct

SEQ ID NO: 374046 - DNA, 122 bp, Homo sapiens
tatgacacttgtccatgacacacagagaatcaaaaacatctgaagattttgcagctgaatcggtgtcaggcctgacaggtgtagaaccttggtattctcataaacgaggtagcatttttcca

SEQ ID NO: 374047 - DNA, 122 bp, Homo sapiens
cttgggggcagaaacctgtttccatccatgtgtccccgcagctagcaaagccctggcacacggctgaccctcaataaatgcttgctgaatgggtgaattgtgtctgcttccccaggaatagg

SEQ ID NO: 374048 - DNA, 122 bp, Homo sapiens
ggcaggtagttccctggactgtttgccgtgtctggagttcgtgcgtgcttagctgaagcacgctcagatgaacataaccttcccaggcataaccttctgctgtttgatttagattgccccag

SEQ ID NO: 374049 - DNA, 122 bp, Homo sapiens
ctaacagacaggcaaggagcaacctgcagataaagcaaatccagatatgtctccagagcccgtgccttaatcgcagatgcattctgactttcatcataggattctaatcgtggatgaaagtg

SEQ ID NO: 374050 - DNA, 122 bp, Homo sapiens
gccaagccgcagtctgagttccttacagtgatgctgctctttctagaaacctcagctgctcgctcctgaggctgggatgccatctgctgctcagcttaggaaactggctgatgggctgcaca

SEQ ID NO: 374051 - DNA, 122 bp, Homo sapiens
ctagctggctctcagctttcttaataatattattctaagcgggcatgaggcgcggcggcccgcgccctgattggtccggttatctgacccggggcctgccagcgccagacaatagtcggagt

SEQ ID NO: 374052 - DNA, 122 bp, Homo sapiens
tcagttcacccatttaaatatatattctcttaagagcaactgtccatagtgcaacggcgacgtcacggaaggcagtgccgcaggcggccgggccgcgacaggctgtcggcaggcgtcgagga

SEQ ID NO: 374053 - DNA, 122 bp, Homo sapiens
cagatatggtgtaataaagatgccaacctgattgatcaggagactggggtcctagagtgccggagttcaacagctctgctccttgttgggacacagtggtgaggatagttgatgctttatct

SEQ ID NO: 374054 - DNA, 122 bp, Homo sapiens
gcggtatggactctggcgacccggggggacagtaatgcctcaggtgcagtccctcccccacggacaaagtgtccccacagctacggttagggctggcgcactccagccgagagtgctcacgg

SEQ ID NO: 374055 - DNA, 122 bp, Homo sapiens
ttgcttttttttttccttactttttcattttttttttaacttcccttcccaatctagaagcgtgctcaaataattagccttgattgtgtggagcatgcagcctatttgtcgtctcctgcatt

SEQ ID NO: 374056 - DNA, 122 bp, Homo sapiens
gcgcaccggccactcggcgcccgcagctgctccggctcccgctcccgtcggtgcgggctccggccctcagggccacattagtgggcgccccaggcccagctgcttcaagaacctgcgcggag

SEQ ID NO: 374057 - DNA, 122 bp, Homo sapiens
ccttgtggagctgcaggagcaagggtaagacagcctgaggcagccctgctcttgtcctgacgcccagccgttgaccccactgccttctgccctcccatatgaatgatgggcacggaaagaac

SEQ ID NO: 374058 - DNA, 122 bp, Homo sapiens
aatgtggctctgtgcctggtttgcatcacagagtcacaaaaaaggttgcataaaatcacccgtctgcagactgtttacttgcctgaagtgtcatgccacttctgagattccggggttccaga

SEQ ID NO: 374059 - DNA, 122 bp, Homo sapiens
ctctgccttacctgacgctgtaggaggcatggaggatgcccaggctgtgaggctccggggcggtggcaggagccccctccagggagctctgggagcctctgtttacttggagacccatggac

SEQ ID NO: 374060 - DNA, 122 bp, Homo sapiens
atgtgtgtccccacagttcaccagtgtatcagcaaaggaaagaagcctttgcagatctcccggtcctcagtgcagaaacttgagtgtgacaggtgaacaacttgaccaaacaaagagggaga

SEQ ID NO: 374061 - DNA, 122 bp, Homo sapiens
agagagggcgaaggtaggctggcagatacgttcgtcagcttgctcctttctgcccgtggacgccgccgaagaagcatcgttaaagtctctcttcaccctgccgtcatgtctaagtcagaggt

SEQ ID NO: 374062 - DNA, 122 bp, Homo sapiens
ccgggtttaaacgtgtatccgtgtagttaccagagttctggtattcgctacccatcaagtcgtcaccctgagccatggaaggagcccttcttctagccttatgaacccactccacccctggc

SEQ ID NO: 374063 - DNA, 122 bp, Homo sapiens
ctaatgtattttatccacagacagacttacggcagcaagatggcaatgccaagcaggagacgcagcacatcttgccacagcttcctcctggccagaggctccctaacatgggtgacactctc

SEQ ID NO: 374064 - DNA, 122 bp, Homo sapiens
gtctcacaccctccagggaatgaatggctgcgacatggggcccgacggacgcctcctccgcgggtatcaccagcacgcgtacgacggcaaggattacatctccctgaacgaggacctgcgct

SEQ ID NO: 374065 - DNA, 122 bp, Homo sapiens
aaaacccggggacagaccccagtgcctagaacattcagtctataaggtagcatatgataccggtgaggaaaggatggacttgttaatacaagtggttaaacgttaaccacttggagaaagac

SEQ ID NO: 374066 - DNA, 122 bp, Homo sapiens
cctagatgccgggtgcgttccgagttctctacgctgttaaccttggatcttcataacagccggaggagacaagcgctactattttcctttccattttatagatgaggacactgaggcagaga

SEQ ID NO: 374067 - DNA, 122 bp, Homo sapiens
ggcaaggactgaagttgctacagacccagacaaatatgcagccagtaacttgggataacgcgatctcttccagccataacaaagtgactaagcacagtgcctgactgcaaagaactcttagt

SEQ ID NO: 374068 - DNA, 122 bp, Homo sapiens
gcccaagaagtccaggaaagttgcggttggacctgagctgggggacttcagaagactgggcgaaggaagaggagccctgtagcccacaaggatgggctgtgagcaggcgacgtgaggggtgg

SEQ ID NO: 374069 - DNA, 122 bp, Homo sapiens
cccctgcctcctctccgcctttaacttctcgggaagatgaggcagtttggcatctgtggccgagttgctgttgccgggtgatagttggagcggagactgtgagtgccggctgcctcgacagc

SEQ ID NO: 374070 - DNA, 122 bp, Homo sapiens
gcgagctgcagcggtgatcgccgcggcaggcccagaagtgtatcctgactcgtaaattgacgaagccactggtgctgcaagtgttcttttggggtagtgtctgggatccggtgcaagtcgaa

SEQ ID NO: 374071 - DNA, 122 bp, Homo sapiens
tcagggtgcagatgatgacactgtaaagcgaccaaagtctgaacaaagtgattggtacctcgttgtctgatgcacctaggctctcctggctctgggctccaaaagaatgggcccaggccagg

SEQ ID NO: 374072 - DNA, 122 bp, Homo sapiens
aatgagaagggggctagggaactttcagtttaaaagtagccgcggaagcaccgagtgacacgagcaaaatcctgaaggtgaaggagcaagccctgtggacgacgctcagggaagagtcctac

SEQ ID NO: 374073 - DNA, 122 bp, Homo sapiens
tagggccgcccccagcaccgggggaggtggctgcctcagcggccgcgctggaagggccctcgaatgccattcacaggagcagcccaggaacccaggggcctcagaaagactggtttgtccga

SEQ ID NO: 374074 - DNA, 122 bp, Homo sapiens
aaggccctggtccaggatgtgcaaggtgtgatgaaatcacagggctggggaaggtcagctcggggtcacaagaagcctgatgggcaggaaagagcatgaaagccccagccagcctcacatgt

SEQ ID NO: 374075 - DNA, 122 bp, Homo sapiens
tcataacttcaatttttgctttttaccaaacccaaacaaggttgcctttgagtattttctcgtggtttccacctagagagggaatgggggaacgtgcgtatttgaataagacgggaaaaaga

SEQ ID NO: 374076 - DNA, 122 bp, Homo sapiens
accacgccctccccgcgcgccggctcaggggctgccccggaatcagctccccggggccgccgcaacgaaggtggatccgcatcttgattgttctccgggagcctcctgggggctccggcggc

SEQ ID NO: 374077 - DNA, 122 bp, Homo sapiens
caccacagcgcccccggcggccgcctggtgtcgcaggcaagaaggggcggggagagggtgcgttaggggtgtgcccgcgtgtgtcactgtgggctggctaatcctccacatcttcccacgac

SEQ ID NO: 374078 - DNA, 122 bp, Homo sapiens
cccgggagcggccgtcaggaggacacaggctggggagcggttcagtagtttggggggcaccggggaaagccctgaggtcctgcccactctgagcttctccatggaccaggctgctcaggcaa

SEQ ID NO: 374079 - DNA, 122 bp, Homo sapiens
tgtggtcttctgccaggggcggcaggccctatcccctctctgggcctcagttccactccccgcaccccgtaaaaagattggcgtagaagtcgtggaggacctctctccaagggcgcagagga

SEQ ID NO: 374080 - DNA, 122 bp, Homo sapiens
gttatgagcgcctgcgcagtggctccgagcgggcggttgcttgttggttgttgtagtaaccggggaagcagccgtcggcggctgccctgagccttcctggggaaggaggagggaggtaggcg

SEQ ID NO: 374081 - DNA, 122 bp, Homo sapiens
atgcccggggcaagtgagacgccactttgttctccagagtccataaacggagtcaccttgcgattgccagcatccaggtcggtttcagagcccagtcctcgctcttgtcgcaggctggcgcg

SEQ ID NO: 374082 - DNA, 122 bp, Homo sapiens
aagtgacttgctaaaaggtctgcgctaatttggggtccttcgttttttattctactcattcgtttattcaccaaatatttatacacgtgtctactacatgtcaggcaccattcaaggcacta

SEQ ID NO: 374083 - DNA, 122 bp, Homo sapiens
agggttgccgagtctgtcccgcaggctctggccgggcgatggatggaagaagttcgctgacgtaggtattctgcctgacagcgcgactaagggaccacacggctctgcctcgccgacgagag

SEQ ID NO: 374084 - DNA, 122 bp, Homo sapiens
ttaggagccttggctgtccctactgcccaggtgctacaagtccttcatggggctgttctacgcaacactttggaatgcagactcccttgagcgagcacttgtttagcatagtttcaccagtg

SEQ ID NO: 374085 - DNA, 122 bp, Homo sapiens
caacggccgagtgaccccagtaactaccacaggaagggcttggttcgcaaaaaagacttgcgcaaacaagggacagccgagccgcccagggaagtgcggctcccgagaagcctccgcgcaag

SEQ ID NO: 374086 - DNA, 122 bp, Homo sapiens
tgggcctggaaatgtgcattctcagaggtctccaagtgtgcgatccacagtgctaagcagcgcctctcaaatccagcccacccatttattttccaaaactcctgggagagacgacagaggga

SEQ ID NO: 374087 - DNA, 122 bp, Homo sapiens
tctgcgaaaagagcatttgccaggcagcagatgtactggcttcctcaagactgaagctttcgttggttttgaggactttgatggaagccacctcattttacccagatggtgtcttttgggga

SEQ ID NO: 374088 - DNA, 122 bp, Homo sapiens
gcggacacaggcacattcaagcttgaggcagagtggagcacaggaaagaacatatgggtgcgttcatcccagccttgtggattcctaatgccagctttgtcactcagtagtatgtgacttta

SEQ ID NO: 374089 - DNA, 122 bp, Homo sapiens
ggcacccactgagcccagacatccctgcccagagccacccaccacggcctccccatccaccgtgactcactcgagtgaagccaataccattgcagaaaccacgacccacacacaggcccggc

SEQ ID NO: 374090 - DNA, 122 bp, Homo sapiens
ccagacgggggagagacgtgtgtggtttcctcgccgtgcagagagcaccagtctctgcagcggcttccccaagtgacaattccagctagagctggaaccttccgccagggttcctctttgcc

SEQ ID NO: 374091 - DNA, 122 bp, Homo sapiens
gccctttccctctgccaggccacggctgcttggggctggcctggcacagtctggtcttggcgtggtccagttgaacagacaatttcatggaacatcaacatcagactaggccatttgtcagt

SEQ ID NO: 374092 - DNA, 122 bp, Homo sapiens
gggggccgaattagtacttccgctttccgtgctgtttaacgagccactatgcccgtccctcggatactctgattggccagcctctctcagctcgtcagtttattggccagcgccgctaggcc

SEQ ID NO: 374093 - DNA, 122 bp, Homo sapiens
acaaatgtcccaaacacattcacaagcagatgagggagcagggggtggctttgggggccacgggtagcaagctgatgtgcagagttgtgaggacaaacatcagtcccttccttacccagtgg

SEQ ID NO: 374094 - DNA, 122 bp, Homo sapiens
ttctcgtagaataaataaatggcagtaagaactgtaaaagtgaaccagtgtgcacccatacgaataggagattattgtttgaagatacctactgagtgcagaaaacagaaaagcaattcctt

SEQ ID NO: 374095 - DNA, 122 bp, Homo sapiens
gaggatgacgaggacgatgacattgacctgtttggcagcgacaatgaggcaacacagctgcggcattaccaatgaggagcggctgcagcagtacgcggagaagaaggccaagaagcccgcgc

SEQ ID NO: 374096 - DNA, 122 bp, Homo sapiens
gacggggcggggccgctggcgccacgcccaccccaggccccccctccacgcgggaccggccggaacatttcttagtccagatccctccacccagcgctggtcttctaagaccactcaccgta

SEQ ID NO: 374097 - DNA, 122 bp, Homo sapiens
ctacgccccagagccactccacattctctctgggtgcactggccctcggccacgcaaggccgcgccagcctccgaggtgagccagaaggacacacacctgtggactcgatgtccctgacttg

SEQ ID NO: 374098 - DNA, 122 bp, Homo sapiens
cccgtgggaggggcctaccgggctgtttggcatcattgggtttgatgcagcggacgtaggcgggctccttagactgcaggatctccaccagctgcaggaggctcatcttgaactgggtggcg

SEQ ID NO: 374099 - DNA, 122 bp, Homo sapiens
agatggtgaatgatacctttggcactattttctttaagatcaactggctctgctggaaggcggtgagatgagaaatctgcaattagcagggcctacctgtgaatatagcagggaaagaaagt

SEQ ID NO: 374100 - DNA, 122 bp, Homo sapiens
cagttctacgtgcttagcagtgaatacttttgtccaaggtactctggcaggaggaagaggcgtgtcctcttgagttcttgacttgggctctggcctgttaatatttccatgttggtgaaacc

SEQ ID NO: 374101 - DNA, 122 bp, Homo sapiens
tgtgtactaggtacataaaagtacatgatagttaaatataaggatttttcttattgcttgcggtttaagctacagtttataaaaagaatgagacttgttattgttttagctttaaaatccaa

SEQ ID NO: 374102 - DNA, 122 bp, Homo sapiens
cccagctttcatatttacaaacaacaacctcttagaaatagaggtctcagccaggcgctgcggcttacacctgtaatcccagcactttgaggggacgagggtggccaatcacttgaggtcag

SEQ ID NO: 374103 - DNA, 122 bp, Homo sapiens
tttgttcatctcacattttctctcatctagtcgttaccccaactctccttatgaccaggacgtgaccaggacgtgaccaggacacatactctgcaaagaaggagtagtttttatttaaatat

SEQ ID NO: 374104 - DNA, 122 bp, Homo sapiens
gttactcttcatttcggcctcacaatctttgcttattttccttctaccagggatgcttttcgctatgttcctttcagggctaccttcctcttgtcccttcagatcgcagttcaaatgtcatc

SEQ ID NO: 374105 - DNA, 122 bp, Homo sapiens
cctgcagcagggccagacccaccttgaacaccttgttgatctgatcgatttctgacttcccggggaacagaggcttctgagtcagcagctccccgaagatgcaacccactgaccacatgtcc

SEQ ID NO: 374106 - DNA, 122 bp, Homo sapiens
agcctcccgtcgtggcaggcgctgtcggagccatggatgattgtgaccaataggggtggtcgccagagttgattgtccagccaggcccaggggctgagaggaggctgtgtggagaggtggtt

SEQ ID NO: 374107 - DNA, 122 bp, Homo sapiens
tggaggatgtgtggagttagaggtccctgggtggccccttggttggccatcagagacccccgggagccagcctgcagggcaggagcacaatgacgtggccaggatcccagaaaggggctgga

SEQ ID NO: 374108 - DNA, 122 bp, Homo sapiens
taattaaattgcgcttacaagatacagtttgtttactgggactttggctaggtcccatcccgtctctgcctcagagtggtggttgctcttagcaccaaggaaataccagcttgacatttgac

SEQ ID NO: 374109 - DNA, 122 bp, Homo sapiens
ggaggagggagggagctgggggcagcccggggaagccgtggggcgggctttcagcagctgcgaggcgaacccgcctcccttcccggtattctcgcggccacccggtggaaggtggcgccacg

SEQ ID NO: 374110 - DNA, 122 bp, Homo sapiens
aatcactacccatatgcaatagtcacagagttccaacttcttccataaaagtgttgaatgcgtcacttatattttttaactctgaatatggaacttaggcacactaagcagtgaccaggaag

SEQ ID NO: 374111 - DNA, 122 bp, Homo sapiens
cccccgcggccgtcggccccgcagcccacacccacccgccccgggcgccccgcacggcggcgacccagtccttgcgcccaggcccgccgagcgccgcagtccgtcacactcccgttgccccc

SEQ ID NO: 374112 - DNA, 122 bp, Homo sapiens
tccacgcgtcctcattggctcctgcgggtttgaaactcgctagtcgtcagcacgggagggcgggacaacaggcaataggctctttgcggttggctctggccttgagaacccgaccttggggc

SEQ ID NO: 374113 - DNA, 122 bp, Homo sapiens
cgcgcacttcaaggagctggtgaacgccgtggccactgtgcgcgtcgatcccgccgacggcgccaagtacgtgcacctcaagaagaggttctgtgaagggccgtccgagccctccggggacc

SEQ ID NO: 374114 - DNA, 122 bp, Homo sapiens
gcccgggcgcatgttggctcggagaggccggcggctccagcctcctgcgccaggagacaccggagagctgggacctttgcccctaacggggctctaccaggtccaggctgcatttgcatccg

SEQ ID NO: 374115 - DNA, 122 bp, Homo sapiens
attagactctccatgttttgtttgtcctttcggaaatttaaactctgagtatattacccccgttgcaaatgcagtctttcaccattgttgtcctttttgggtagagatcagtttttcttact

SEQ ID NO: 374116 - DNA, 122 bp, Homo sapiens
gaagccggggtcaggcgggggtgggggcactcaccctttcctttctgccaggcattcaaccggggcaagcgggagggcttcttcctgaagagcgtggagaatgcacccctggccaagcggcg

SEQ ID NO: 374117 - DNA, 122 bp, Homo sapiens
gcaccaggagcacaggccggcggcggccgtggacttggagcggatgaactcggggtcgaacgtcgggttgccttggtagggcctagcgagggaaccagagggccggagtcgtcaccctgtcc

SEQ ID NO: 374118 - DNA, 122 bp, Homo sapiens
aagggaacaagagagagggctgaacaacaggcacatggggaccctgagcatttctgtgcacgaggataaggagagtatgaccaaaaccctcctccctagaggtccaaacacaggaggtgggc

SEQ ID NO: 374119 - DNA, 122 bp, Homo sapiens
ccagcatgggaggtgtggtcttgtagttgttctccggctgcccattgctctcccactccacggagatgtcgctggggtagaagcctttgaccaggcaggtcaggctgacctggttcttggtc

SEQ ID NO: 374120 - DNA, 122 bp, Homo sapiens
tggcaccaagtccagcaaaaagaaaaaccagaacatcggctacaagctgggccaccggcgcgccctgttcgaaaagcgcaagcggctcagcgactacgcgctcatcttcggcatgttcggca

SEQ ID NO: 374121 - DNA, 122 bp, Homo sapiens
gcacaacaacaagctggcagacgccgggctgccggacaacatgttcaacggctccagcaacgtcgaggtcctcatcctgtccagcaacttcctgcgccacgtgcccaagcacctgccgcctg

SEQ ID NO: 374122 - DNA, 122 bp, Homo sapiens
gctgggtgtggtggcttatgcttgtaatctcaggactttgaggggtggaggcaggaggatcgcttgaggcaaagagcttgagaccagcctaggaaacataccaagactgccatctctacaaa

SEQ ID NO: 374123 - DNA, 122 bp, Homo sapiens
gccagggcgtagggttacgcaagagccactcgagcatgaaatcccaggaacaacgtgattcgctgagaagccccgggggaggaaagcctgcaccgcctgccaggacctgcccagcctggggc

SEQ ID NO: 374124 - DNA, 122 bp, Homo sapiens
aatccagcagtgggccaacgagtatacatcgagcaactgtctactactatgtgtgtgcctcgtgtatgctggacgtcagaagtacagtgaaagatgcaaccacgcaagtatacggtaggttt

SEQ ID NO: 374125 - DNA, 122 bp, Homo sapiens
tattaagaaaaagttggaaaaacctaaatcttcaagagtggagaattagaaagtaagacacgttgtatataagacagatagtgtgtgtgtgcatttatttgtaaatacattgtttggaagta

SEQ ID NO: 374126 - DNA, 122 bp, Homo sapiens
tccaacatccctcacctccctcagttggacatttcccttccacgctcggatgcccagccgcgcctgttttcttgcatccctcctgtcgtgtctgcggggctgccctgaaggcctctttccct

SEQ ID NO: 374127 - DNA, 122 bp, Homo sapiens
cacaaagagatcccacagaggggaaatggagatactctgtgctgataatatctgtgttatcggcaaaggcaagaaaagactctgccttcagggtttccaagcaggccaatactcagagccgc

SEQ ID NO: 374128 - DNA, 122 bp, Homo sapiens
agggagcgggtggtgggatcagtgggctgacaggagctacctcaggaagacgcggcacgacggttgcctgggcaacgggcggcaggcgcgcgggtggccggcgcgcggctgagggcgggagg

SEQ ID NO: 374129 - DNA, 122 bp, Homo sapiens
ttcgtccacgtgcccgtctctccctgcgcaaaattccaagatgagcaaatactgggctcacggtggagcgccgcgggggcccccctgagccggggcgggtcgggggcgggaccagggtccgg

SEQ ID NO: 374130 - DNA, 122 bp, Homo sapiens
catgctcattcccgtcttcgatgctgtaggagatttctgcattggggccctcatccttgtcggtggctatgacgtgatagagcggctcccgtctggcatttctttctcggtctggcttttcc

SEQ ID NO: 374131 - DNA, 122 bp, Homo sapiens
aatttcagggaaagtggtctggactcaggtaccctgcccagatccatgtgccttccaacacgtggcagacagagaggtgacaagacaaaggaggaaagcatgctcaagggatagctaatggg

SEQ ID NO: 374132 - DNA, 122 bp, Homo sapiens
gcagccttggtgagcctcggccagaggggcccagcccctgcagctgccgtgtgtgccacccgccctttccaacaatgggtctgcgcatgggggccccgagggcatcctcccggcctgaccta

SEQ ID NO: 374133 - DNA, 122 bp, Homo sapiens
ttactgtctctaattcaactaaaattcattacattaattttaaaatgttgtttgtgcatgcgacatggggaactagccaactgttctaagccatgacattttacactcttgtctaaattatc

SEQ ID NO: 374134 - DNA, 122 bp, Homo sapiens
tggtgggaggtgactggatcatgggggcagttttctccatgctgttcttgtgagttctcacgagatctgatggttttataagtggcagtttcccctgctcttctctctcctgccaccttgtg

SEQ ID NO: 374135 - DNA, 122 bp, Homo sapiens
gagtcacgtaacttgttcatggtttcaccgaaaacccaattctgccacgttgcaaagacccgctttttccacagttccatctcacaaatatgaatatgtaactatgttaccataacttgttg

SEQ ID NO: 374136 - DNA, 122 bp, Homo sapiens
gaactttgaagaagtcagcagaaaactggttggggcagggttggggggccctgcactccccggcagaaggcagaagctgctcccagccccctccccaccacacgattccagacccttgaatg

SEQ ID NO: 374137 - DNA, 122 bp, Homo sapiens
ctccagttgcagccagacagggccaagcagcaggcgcaggaggacgaggagcccgagtggcgcggaggtgccatccagacgcccaagaatggcatcctcgagccagtagcagctaaatagcc

SEQ ID NO: 374138 - DNA, 122 bp, Homo sapiens
ccaccccaccactagaggagataaaaatcctacgcatgtaagtgtatttgcttcctttcacgaacggaaaccggccagtttcctgcatcttgtctctatctaatcattgccctttcaaaaat

SEQ ID NO: 374139 - DNA, 122 bp, Homo sapiens
ggctctgggttgcacggctccggattggacggctcccgggaagagagaggagtcatctgacgtccagctcgccaatcagagtcgaggactggctgggctccacccaccttcttgctctacca

SEQ ID NO: 374140 - DNA, 122 bp, Homo sapiens
gaagaaaggataggatttccagtaataaccctttgatttgtgtttttttccaagtgctttcgtaaccaaggtcgccgtgggtaactccatgggtggtgttctccctgttttgtagatgaaga

SEQ ID NO: 374141 - DNA, 122 bp, Homo sapiens
tttgtagattgtcatggcgctggtgggagtggagcagcgaggatgcccggaggtcactctcgtcaccatcttcgttttggtgggttttgcggctgttttactgcagcctgttttatcaacaa

SEQ ID NO: 374142 - DNA, 122 bp, Homo sapiens
tttaaaacacctgggttcaaatcctatttgctacataatggctacttttaacctattgaacgccagttccctcatttgtaaaatagggacaatatttaacctatttacaggttgtgagagaa

SEQ ID NO: 374143 - DNA, 122 bp, Homo sapiens
tttcttcagtgtgtgaaaaatcctgaggattcatcttgcacatctgagatctgagccagtcgctgtggttgttttagctccttgactccttgtggtttatgtcatcatacatgactcagcat

SEQ ID NO: 374144 - DNA, 122 bp, Homo sapiens
ccaaagcctgacggagctgaaagacatagggccagaaaaagcgcattcctaacgggatcccgggccataacttcattttctggtattagtgttgttggagaaacacaggaggagggtaggtg

SEQ ID NO: 374145 - DNA, 122 bp, Homo sapiens
agaggagtctaacatgaccaactccatcttgcttctagcctcacagactggctgtcttcacgcattcctgggcataggaagctaaccatggaagggatttagtttctagtttaatgtggaag

SEQ ID NO: 374146 - DNA, 122 bp, Homo sapiens
caaccctgccctccagccccgtaggccctcaggccctcgggctctgggctctgtgcaatccgggagtggctgaaatccaagctgagggtaatgaaaggtgctgctcctaagccgcacgtctc

SEQ ID NO: 374147 - DNA, 122 bp, Homo sapiens
gatcgcagtgcacaccccacgcacctcccgggcccggtcctcgcttttctgaagacagcacgacagcctcctcgcccctcagccggggacgaggcaggacccgtcaatccttaatttgtttt

SEQ ID NO: 374148 - DNA, 122 bp, Homo sapiens
agctgttggctttgagtatccccgcccgcgcccgtccttgctcgctgaccccaggcgaggcgcaaacaacccacgacgccacgtttgaagggaggtctccgctttatgacagaagccgcacc

SEQ ID NO: 374149 - DNA, 122 bp, Homo sapiens
atgagggagaggtacacgtcccccttcttccccgcctcctatcttcgcggctcgctaaagcgttatcagccgccccacggtactaccgtccgtctaggaacgcctccggggcggggctggga

SEQ ID NO: 374150 - DNA, 122 bp, Homo sapiens
gctccatccgctggctgcctcagtttccccctctgcagcatgggcatacagggttcctctcgtcggctcattggctgctgaatgggggctgtgtgggcagaggctctcccggggctttccca

SEQ ID NO: 374151 - DNA, 122 bp, Homo sapiens
gatgcccagcctccagcccagagtgtgttgttgacccccgtttgggggggcgctgacccccgtttgggggggcgctgacccccgtgtgggggtggcgctgacccccgtgtgggggtggcgct

SEQ ID NO: 374152 - DNA, 122 bp, Homo sapiens
gaattttctatctcatgacagaaaggcaaacatcttctgacctgactccttcccctgacccggggttggctgctcctaccctgcaccttcattcagctccgcccagtgttgcctggctgcag

SEQ ID NO: 374153 - DNA, 122 bp, Homo sapiens
catttgagtttcaaaaccacaataaggaagaagacagaaattgttggacaagtccttgatcgctactgcagactacagaaagactccatgggctgaggctgggaggtgggcacagagctgct

SEQ ID NO: 374154 - DNA, 122 bp, Homo sapiens
aatgaacttgaggaactgatgggctcatttttttgtagcttcagcaggctcccaaatatccgtgggggaagggatgaagtgccccctgccacatgtctgtggtgagaatccactgcacatga

SEQ ID NO: 374155 - DNA, 122 bp, Homo sapiens
gtggggagcttctgaccaaactcagccattgatcaatgtggggaaactgatcggggtggccgggagttccagcaacaacccgccacacagcctgaacaattgctaggttcagtgaccctact

SEQ ID NO: 374156 - DNA, 122 bp, Homo sapiens
ccgaccccctcacccctgcttctccgggatgactagtctgcccttctccgtccccgagttcggaccccgcattccgctcgtggaggtccggccctcacccctgcttggccacagcccctagt

SEQ ID NO: 374157 - DNA, 122 bp, Homo sapiens
tggggtgacgcgagatgccaggcgcgggactgtgagcctgtccaacccagccagagaaaacgttcagcatctgcaaacatctgctcccgcggccgcaccagcccaggtccaaatctgctttt

SEQ ID NO: 374158 - DNA, 122 bp, Homo sapiens
tgggacgccctggaacaaactaagcatgtgcgggcctatgtgtccctgccacggccggagcgcccgcgcagcacggattccagctggccacgtccggccgctggggcagacaggctggtcca

SEQ ID NO: 374159 - DNA, 122 bp, Homo sapiens
gagaccagcctgaccttgtgatccacccacctcggcctcccaaagtgctgggattacaggcgtgagccaccacgcctggcctaaaatgagtacaatcactctaggggtttacagttttggtg

SEQ ID NO: 374160 - DNA, 122 bp, Homo sapiens
ccgacacagcggtggtgcatacggaagggtggtagccgggacggttccggtccctgcgagcgtgtcccgggcgtctccgcggaagtttcacctgccgcgccgctcgatcgccgggacctcct

SEQ ID NO: 374161 - DNA, 122 bp, Homo sapiens
caagaaacatctagaaagaattttttttattacgttttcattgttctggtgcaaagtacacgtgaactcacagctcccagccactcgactttgcggagggggctgaaagcctcagtagcgga

SEQ ID NO: 374162 - DNA, 122 bp, Homo sapiens
catctgtcaaagcctgcattttagagatggcattactgaggtccaaaaactagagccactcgctctgggtcatacagccgataaacgcacgcagccgagctcagttcttccctgaccctgtt

SEQ ID NO: 374163 - DNA, 122 bp, Homo sapiens
ggttcccagtgtgtccgaagttccttctgggtgtcagaaaagacacaaaaactgacagggcggaaccgcgacacggtgcctgatgatatcaaaaggtctcacggctccggagggacccagtc

SEQ ID NO: 374164 - DNA, 122 bp, Homo sapiens
gaggccctagacagggagcacctggcaagtcacactcccttgaccacaggactcccactccgctgcttgagtaaacataattatcaagacaatagcagctgtgacttgtcttctggtgccaa

SEQ ID NO: 374165 - DNA, 122 bp, Homo sapiens
gccgccatgtctgcagcagtcgacctctggacacctgtccccggcacggacgctagaaatcggctctgagagctcaccgaaaccacaaagctttcagaaaacaaacaggatctcggaaccgg

SEQ ID NO: 374166 - DNA, 122 bp, Homo sapiens
cgaaagaccagagcgaagcccggctccttgcccttccttcccaggggcttctctggggggcgctctcaggccccgacgaactgagcattgatcactgtggtggctaagcaaggaggggaggc

SEQ ID NO: 374167 - DNA, 122 bp, Homo sapiens
ttgtctcataaaatttaagctgctattgatcgcctccttgcattgtgtgaggattaaacacgtgcgcgtgcacatccaggcacacgcgcgcacacactcggggcgcccggccccgctcaggc

SEQ ID NO: 374168 - DNA, 122 bp, Homo sapiens
ctacccccgccagaggagatggtttctcccgccagcaggcggggaggctgggcggccggccgccacctgggccggagcgcgtcgcagccacctgagcccgccgagggcgcggcggaggctgt

SEQ ID NO: 374169 - DNA, 122 bp, Homo sapiens
tccctctgttttatttttattttcaagctgccggccaggctggatgccgtccattcaccccgctgccttggagcgctgcgcgcagacagccggagccggctcgggctcagccctgggggtgg

SEQ ID NO: 374170 - DNA, 122 bp, Homo sapiens
agccacactcccgccaaggcgacccgccagctgtgggccccgaggaggagggagcccgggcggaaacagcgtcacccatagcttccaggcagggcactgactcgcctcgcccaggtggggtc

SEQ ID NO: 374171 - DNA, 122 bp, Homo sapiens
cggtcgacgggactgggcactgtggccctggagcagggagcggtgctggtcggggagactcgggccgcacaggaacccacggcttgggggaggctcaggcatggagggctgcaggtcccaag

SEQ ID NO: 374172 - DNA, 122 bp, Homo sapiens
ctcaggcacaataaatatagttataccactgcccatcagcccaagtctctttattggaaccgggccccgctggccctggctcaggcatttccatttccattagtgggaccaacccactgggt

SEQ ID NO: 374173 - DNA, 122 bp, Homo sapiens
aaactgggggaggtacttggataacattttgcggtggaaagctccctcaccgcctgttgccggagtctgaatgaaggctggcggctccacggtctcacgtagttcggaaatcctccgggttc

SEQ ID NO: 374174 - DNA, 122 bp, Homo sapiens
tttctttgtgcaaactcagcaaggcctggcagccttggagagcaggcctttagcaagccgcggaaacgcaactgggtgccagggttactcgttgcatttgtggtgggcagagcttcctccaa

SEQ ID NO: 374175 - DNA, 122 bp, Homo sapiens
gtggggttctcaagtggtttgaggtccgggctcagcagaaggaaccctccaaaaagtcagcgtctgcagccaggtgaagtatgtgtatacgtagcacaacccaggcatgggaatgcctaaag

SEQ ID NO: 374176 - DNA, 122 bp, Homo sapiens
agcagaatctatccaaaccactcccagcctgttacgtgagtatcccacttgaagcacctccgttcctggaaagtttcctttaagcacagttccaaggaccaaagtttatttctcagaggcca

SEQ ID NO: 374177 - DNA, 122 bp, Homo sapiens
aagctgctggcagcccctggatcagacattcagtggaaggcccatgtcacagacccaacccgaaggttaattttccctcattagcatctccatagtctgctccttgcaagggatctcaggtc

SEQ ID NO: 374178 - DNA, 122 bp, Homo sapiens
gcggcttcagaccagattcctgtcttctttacacaactctaggttttctgtgcctgttttcggtgagcacagaacaactgaaggaagcgcgggacagacacaagggcgggcctcggtgccac

SEQ ID NO: 374179 - DNA, 122 bp, Homo sapiens
ccctgaggacacgccccgggagagcacggagcaaggccaggacacagaggtgaaagccagcgatcctcacagcatgccagagctgcccaggacagccaaacaacccccagtcccgcccccca

SEQ ID NO: 374180 - DNA, 122 bp, Homo sapiens
gccgggtaggatggctccgtgtccagagagcggcttagtggagtggtaagaggcacattccgattgcctcgctccctggagctgcctccagcactaccattaacttggataaatcccataaa

SEQ ID NO: 374181 - DNA, 122 bp, Homo sapiens
ctatataaatcatcccctatccaatgtttaaaatcaacatctaaccagtttttggatgtgcgttgcatttatctggctaacggatcctcaaatcaatatgtctggaaacatatgtccatttc

SEQ ID NO: 374182 - DNA, 122 bp, Homo sapiens
ttccggcctctgcccccacgtggtggtgcttgttgccactgtcagggctctcaagatgcacgggggcggccccacggtgagtggtgggttgaagtatctgattatcggcagtgtgctgacgg

SEQ ID NO: 374183 - DNA, 122 bp, Homo sapiens
ggctcttaatggtcaaccacttggcttgcgcctgctgggtttccgaagacatgtcctattcggctggtttgagggcatagtggccaggggtgaaggagtatactttgggaacgacatcttgg

SEQ ID NO: 374184 - DNA, 122 bp, Homo sapiens
caggtgagcgaaatagtgtgatctcatacatgatgaaagctaagcaggcaacagcttttccgtaagcaagcatttcaaaatgtatttgtagaaaggcagtaaaagaataagatgcaaatcaa

SEQ ID NO: 374185 - DNA, 122 bp, Homo sapiens
cgcaggcccctccacgtcatcggtgtggaacgcaggcccctccacgtcgtggatgtggaacgcaggcccctccacatcgtgggtgtggaatgcaggcccctccacgtcatgggtgtggaacg

SEQ ID NO: 374186 - DNA, 122 bp, Homo sapiens
gcaagtgtcagagctgcggaaaggagctgagatctagcagggctcgcccttatcaacctccgcctctaacaagggccacacagcacgtaggggagattaggccgatctgcctgcctcatcgc

SEQ ID NO: 374187 - DNA, 122 bp, Homo sapiens
gctgtttgtaagttgtccttgggtgtgaaggataccttctgcctctgacggaaagcctgccgtggctcctctgtttctgcttgctttctgtttgcatggatgtggtatctctctttgcccat

SEQ ID NO: 374188 - DNA, 122 bp, Homo sapiens
gccccctccgttgtgctgttggggagactgaggcccagtgagacctcagggcctgccaggcgttcccaacagcgagggcagagagtacacggagagccggctccccagggggaggaagcacc

SEQ ID NO: 374189 - DNA, 122 bp, Homo sapiens
gcagagatgcagacatacgctggacagtcatgggtgtagggcaggggcagagaatgccagcgggggcagggaatgtcatggagataattcaagcatcagatggtcagcctatgaaattgacc

SEQ ID NO: 374190 - DNA, 122 bp, Homo sapiens
accccttccctaccctctcaatccctggcggctcctcccgtctgacaggtggcgcgaacgcgtccagtgagaggagtctgaggtttgccctgacgccttccacagccttagtagagattccg

SEQ ID NO: 374191 - DNA, 122 bp, Homo sapiens
cccactaagcacttagaattactgtcaataataataaagggctgacctaaaaaatggtcccggacatgatcttccggctaagataaaacagcttgttatcagaccaagtctcctgcagagcc

SEQ ID NO: 374192 - DNA, 122 bp, Homo sapiens
ctgatttaggaacaagccatgggaagaggtctaagggattatgatacagactagccccatcgtggtgtggttccccaaataacaaattctatcttaggtaggctgcatttctatgttgtaat

SEQ ID NO: 374193 - DNA, 122 bp, Homo sapiens
atattaaaattgaggatattattgctgcttacagttctgttttaggcttaaatgtgggaacgcctacattgttgacagtggtgtccagcacccagcaagtgctcaataaactttaattggag

SEQ ID NO: 374194 - DNA, 122 bp, Homo sapiens
cgtgcatcctgggagttatagtttccggctccctccttcagattacaagctccacagagccgcgggaggacggttgcctggtattattagcaagcagcaaatatggcggtggcgcgcgtgga

SEQ ID NO: 374195 - DNA, 122 bp, Homo sapiens
cccactcaagtgctgagcacagatcttggcttggcacttccaagatgcaggccacagctccgagtcaccaggacctggtcatggctccctccggaacctcagggttgggttccagatgtgtt

SEQ ID NO: 374196 - DNA, 122 bp, Homo sapiens
gccactaaggccaaggacatatagacggtctgccctcccccactcaaaccgggatcatgacggtccccaaggagatgcccgagaagtgggcccgggcccaggcgcctccctcttggagccga

SEQ ID NO: 374197 - DNA, 122 bp, Homo sapiens
tgcagtgggtttgagtatcactgtattttccaaaatttgcggaggagtgttttatgtcttcggcaatcttggggtacaagcactcttttgatggggaggccagacttggaagcataatacag

SEQ ID NO: 374198 - DNA, 122 bp, Homo sapiens
cccaaagactctcaggtttattttgtgggccctttggactgtaactccataagatcggtacggcgcaagccactaggactgttttttgttttgttttgtttttgcttttgttttgagacagt

SEQ ID NO: 374199 - DNA, 122 bp, Homo sapiens
tgtgggctctgcagcgccgccgcggcgccctataaacgctggctggggatttctctggggcggggtcaggctcggggaatttccaagccagtcagaccagaaaaagagaactggcttcgtcc

SEQ ID NO: 374200 - DNA, 122 bp, Homo sapiens
cctctggcacccactcaggctcggtactaggcgcttggagtgtaaagcgagcaaaccagacgactccggtgctggagaaggcccgagtctgggagcgccaagatgtagggcaatcggtcatg

SEQ ID NO: 374201 - DNA, 122 bp, Homo sapiens
gagaaaggaaacagcaagcagggctctggcagctgctgcagacggcttcacacagggacgcgggctgccatcttgctctaagtgaaagtgaaagaaaagtcggcagcagagggaacagggaa

SEQ ID NO: 374202 - DNA, 122 bp, Homo sapiens
aggctgccccgcgccccacgccccaccttgctctgagtcgtccgtggagacagcagagcccgtgctatctgtgcgcacgcgctccacgctctgcaccgacagctgctccaggcgccgcttca

SEQ ID NO: 374203 - DNA, 122 bp, Homo sapiens
cagatctgggccatggaggcaaggccgctgtcgctctgggctgtttccggccaggggacgcgagagaaggcggcaccacacttacttctcccgggcctggtgctgccagctccgcggaacag

SEQ ID NO: 374204 - DNA, 122 bp, Homo sapiens
caaggaagccagcccctagagcagcaggtgctcaccgggccgcccaccacactgaggccacgccagctggaccagcccctccagggcccctgcgcttggcacccggcgcccagccagctctt

SEQ ID NO: 374205 - DNA, 122 bp, Homo sapiens
caaggaaaagacttgagctgcctctggacctgtgatggcaggaacccatcctgaccctcccgatcaggcatttcctctccgtaagtcaactctgtcctctggtctgcccctgatgccccctt

SEQ ID NO: 374206 - DNA, 122 bp, Homo sapiens
gccttttggagtcagctgggctgccagattgcctaaatatcacaggcacctgtctaccatcgagttccacagagaacaccctcctgcctacaggcttctctcggattttcagtccagcaagt

SEQ ID NO: 374207 - DNA, 122 bp, Homo sapiens
cctccatcactgctccctgggccatgaagagctgaggttcaggaggggtacccgctgccccgacttcccaggattcacgaggggactgcagggctggcacagagctctccgccagggcctgc

SEQ ID NO: 374208 - DNA, 122 bp, Homo sapiens
acccgactcccttatgctccgggacgctggaggcggtggggaagtgttgccacccccgctcgctcggacccgccccgcccggcgcaggccccgcccctccgcccgggccgccacgcgcaccc

SEQ ID NO: 374209 - DNA, 122 bp, Homo sapiens
ttgtagaccgttttcatttttgtgtagtgggaatgaggaggccaccctttctagttgagacgagagtgaacagagttggagaggtcgcttgactcgcaggacacagaagacccctcagctag

SEQ ID NO: 374210 - DNA, 122 bp, Homo sapiens
ctcactactcatccttcctatttcagcttgaatgccagttcttcagggccggacactggccgtcgccctcacgtacgctcgaggaactcttcctcctctgcaataaagctccttacactcta

SEQ ID NO: 374211 - DNA, 122 bp, Homo sapiens
gcgaggaacctgcggtccggagtgcagaggtccttcggccctggcctcccagccgctaaacgctgcttgttggactcccaaacgctgtaaaaatgggactctcttacctctttctggcattt

SEQ ID NO: 374212 - DNA, 122 bp, Homo sapiens
tccaagaatcagctgtatggaatcccctctgaaatccttcctccagctgcttggcatttccgtggagaccctagaaccatctgtgtggtgacactagctactagattctgatagtaataccc

SEQ ID NO: 374213 - DNA, 122 bp, Homo sapiens
ccttgccatccccgaggggaaaccgggcccacacgcccccttcctgagagcggaccggcgcgagccaccaggatgccaagagcccctgcagccccgacttctccaccaggcgccagctcagg

SEQ ID NO: 374214 - DNA, 122 bp, Homo sapiens
cggctgcgctgaaacccgatcctaaggagttcagaatcaggtttcaaaacatgacagagccgagctgcaccagcaccccacgttgccgcggccgctaagggaaccataggggcagggtgaat

SEQ ID NO: 374215 - DNA, 122 bp, Homo sapiens
caacaagaatgaaactgcgtttcaaaaaaaaagaaaaagaatggaaaactgtgaaaacatcggttgcaaaaatgaatggttttgcatgatgtttattttctgtaatgtataaagtgtatatg

SEQ ID NO: 374216 - DNA, 122 bp, Homo sapiens
tgagtgctcaacattcccttcagaaagacaaatgtgtcctctgaaatgctgcagtccaagcgggcctcttgaccaagaaaacagttttaaaacgagaaaaaaacagcttcatctggcattca

SEQ ID NO: 374217 - DNA, 122 bp, Homo sapiens
ctgtctgcatgagtgagcatatgggtgtttttgagtctgtgggtgtcacagagaggagatcgggagctgcctgctcacaggcactttgggaccccgaaagaaaaggctgtgccgagagagtt

SEQ ID NO: 374218 - DNA, 122 bp, Homo sapiens
ctagcttcatctccgaggagttgttgagcagggccaccagggactccactttggtggagtcggggcggaagcaggggtggtcagggttcaggatcttgccctcctcaggcatgcaggtctgc

SEQ ID NO: 374219 - DNA, 122 bp, Homo sapiens
gccgcgtgggtgggacttaaaagccggcgagtgccggattgttgagctggaggctgaacgcggtcccaggcactagcaaagaagggaaaggcaaaaaggaaaagttcggctttgatgatttt

SEQ ID NO: 374220 - DNA, 122 bp, Homo sapiens
gcccgcgcccgcgcccgggttcccacggcgcccgcccccgcgcgcccggcgcctccctcacgcccgccctccttgccgcccagccggtccaggcctctggcgaacatggcgcttgtcccctg

SEQ ID NO: 374221 - DNA, 122 bp, Homo sapiens
gccgcacgccgggtgccttctcaggtcccacccggagcctcgacgctcttccttctgcgtcggagcattgtacccgcctccgctgctaccacgcagtccccagggcccaaaaccctcctcgc

SEQ ID NO: 374222 - DNA, 122 bp, Homo sapiens
actgtgagggttacacactagtccaggggctgacagctctcagcactgcagttccctgcccggccatcccagtggctgaaacaacagtgtttgcagtcattctcaggccccatctcagaagg

SEQ ID NO: 374223 - DNA, 122 bp, Homo sapiens
tcagccaccttcccgggaggcggtggtcgctggccgcgggaaggatgccgcgctgggggtcggggttcgtcccggctgtcacgccaccttgtgacatcacagggccatgccctcggggctca

SEQ ID NO: 374224 - DNA, 122 bp, Homo sapiens
ctgtctcgcttgctcgctctcgctgtttctctctctttgaggcatttgtttggaaaaaatcgttgagatgcccaagaacctgggataattctttactttttttgaaataaaggaaaggaaat

SEQ ID NO: 374225 - DNA, 122 bp, Homo sapiens
gggacccgggcggcagctgcctagatgaagacctcgtcgccaaggtcggggccgcgggctcggtgtgatggcccgtggagtccatcatgcgctttctctgctggcctctggcacttcgcagg

SEQ ID NO: 374226 - DNA, 122 bp, Homo sapiens
atgttgggccactctaggtcccagctggctccaaacccgtttctggttaatcctgccatgcgtagctattaatgctttacaaataaaggcttctgtctgtttgcccctgccagctccccagc

SEQ ID NO: 374227 - DNA, 122 bp, Homo sapiens
ggctagagtgagagagaacattgcaggagttattaatgcctgtgcatctggctaagatggcgacacttacgggctgctgggaggagccaggagagaggaagaggttgaagagagaagtaggg

SEQ ID NO: 374228 - DNA, 122 bp, Homo sapiens
acttttgtggcacacaaggacccccagcagctgctcagggggcttgtcggggagtgggggcgcggttagttatgggagtcatgattcttggaagtcatccgctgctgatgccatcctgggat

SEQ ID NO: 374229 - DNA, 122 bp, Homo sapiens
cacttgcttggggctgccagctgatgtacattcttacctcagatgagggcctggactggccgatgcctcagaggctccgggcctggcatagtggttgtctggagttggaaccaggtagcaag

SEQ ID NO: 374230 - DNA, 122 bp, Homo sapiens
caaggattctgttttaaatgtgataagtttgagatgcctattagtcatccacatcatccacgtgatatcaaataaacagttggaatggtagtcttaggctgaagaaaggagtctggaatgaa

SEQ ID NO: 374231 - DNA, 122 bp, Homo sapiens
caatggggaagtggcatgtgggagggcgccggggggccccccgccaatggggagctacggcgcgcggccgggacttggaggcggtgcggcgcggcgggtgcggttcagtcggtcggcggcgg

SEQ ID NO: 374232 - DNA, 122 bp, Homo sapiens
aaagagaacatttccatttcacatgtgccttatcaggttgatggtagataaaagccattacgtgctacttcttcaaaacacatctgtgttcacggaatcatttttctaataacaaaatcaaa

SEQ ID NO: 374233 - DNA, 122 bp, Homo sapiens
tataggcatgagccaccatgcccagctaggccttagccatttcaaatgccaggtggatatcgaggcggtcttggggtttgaaacctggttccccatggatcatggatccagtttaagtccag

SEQ ID NO: 374234 - DNA, 122 bp, Homo sapiens
agagtagggacttggagtcagccctgtctgggcctggttctcactattgctttctagcagcgtatacttctccaagcactagatccttcgcctgaaaggagaagaggaataataccaactta

SEQ ID NO: 374235 - DNA, 122 bp, Homo sapiens
tcgcaggccgccccccccccccccccccaacccagggaccactcaggcgccggccgctggcgctgcctgctcttcgactgggcgagcttcctgccaatcagggcggaaccagcgcggcgtcg

SEQ ID NO: 374236 - DNA, 122 bp, Homo sapiens
gcactgattccatcccaggaacccaacagagctcaggacagcccacagggaggtggtggacggactgtaattgatagattgattatggaattaaattgggtacagcttcaaatcccgtcttc

SEQ ID NO: 374237 - DNA, 122 bp, Homo sapiens
tgagggagtcggggtgctgaggacaaagtgcctgcaggctgcacaccaaggcacagatgccgacctacctggcaggtccacgtatgggggatttataccttctacatacgtcactggacaac

SEQ ID NO: 374238 - DNA, 122 bp, Homo sapiens
tgtctttctaggacttttaggtaataccttataaccttaacaaagtttccttattttatacggacttgtaagtcaacaaatacttctacagtgcctattgtgtacaaagaatgaggattgca

SEQ ID NO: 374239 - DNA, 122 bp, Homo sapiens
attcgtagtctcgccttggccatcagttcgcccttcccagagagctttgggaatctaagccgggactgggcggagggcggggagaaggtgatggcgcgcgagggcttctgggagttgtagtt

SEQ ID NO: 374240 - DNA, 122 bp, Homo sapiens
aacctggcataggactctttggtcctacccgcttcccatcaccggaggagcttccccggccgggagaccagtgttagaggatccaagcgacctaaacagctgctttatgaaatatccttact

SEQ ID NO: 374241 - DNA, 122 bp, Homo sapiens
cagcgaaaaatgtggaagggccgtacccgcactctcctagcactgggtgtgaggcagcgtcgtttccccttcgcgctcttcgaatgtcaagtgcaccagcttccaatccctcctctgggcgg

SEQ ID NO: 374242 - DNA, 122 bp, Homo sapiens
ttgtgtctacagtgcccgtgtctacagcgcacgttcattcggcaaacccgcgagcagctgcgagggctgaggctgtgctcataacctggaacacacagcggggtagggctcagagctcagaa

SEQ ID NO: 374243 - DNA, 122 bp, Homo sapiens
ttagccaactcaccatttaacttctcatgtatgcataacaatcttttcatggttttctcccgaaccaaaatgtaagttcctggaaagcagagactgtttacagcttgctgtgcacaaagtag

SEQ ID NO: 374244 - DNA, 122 bp, Homo sapiens
aaacaagcttttctgggctgagggcagagggggagttatccaccttaaaggggccttaaacgtacccggcatatttagctttgggggtcttacatctggaaaggtctatccagctcttctca

SEQ ID NO: 374245 - DNA, 122 bp, Homo sapiens
gcccaggagtccagcgttggggcggactggccggcgggccagcgacagcagccggagggacgagcacgaccctccccagccaccccgcgtcccccgaacccagcccagcagatgcagagctc

SEQ ID NO: 374246 - DNA, 122 bp, Homo sapiens
gcggggctcccgctcctcagcccggagcgcagttggccccgggttcggagcgccgcagcacggattccggcacctggcttgagttttccgcgaccaaagttcaccttgttcgggctcgtccc

SEQ ID NO: 374247 - DNA, 122 bp, Homo sapiens
gctgggtctacgcatgtgctctgggggacagctgggtctgcgcatgtgcaaccttgccgccgtaaggtctctgttttcctgggcctgagacagcagcagaggagttcgagaagagacatgag

SEQ ID NO: 374248 - DNA, 122 bp, Homo sapiens
cgccactgggcctatggatggagagggctggcagatctccctgtaaccccaggtgcatcccgaggcctgccaccgaagcccactcaaggctgaatgcacggcgagctcaggctgctctcccc

SEQ ID NO: 374249 - DNA, 122 bp, Homo sapiens
agcaactgtgtgtacaggggctagtggttggctggagcgaagatgtgcaggatggatttacgaatatctctatgaatggggaagatctccaatttgccaaaaattggaggccagtggcctac

SEQ ID NO: 374250 - DNA, 122 bp, Homo sapiens
cccgtgactcagcctgtgatttagggcgtctgcagggtgaggtgggtggaaggtgatgcccgccccacctcacaggaattacagagcggtgcgcttacctgcgggactgttatgtgcgctct

SEQ ID NO: 374251 - DNA, 122 bp, Homo sapiens
aagtggtccttccaccgtggcctccgaaatgctgggattccaggtgtgagcccccgtgtccggcaggggaacctttcttaagcatgaatggtgtgccctcctcagggtgtgtcctctctgct

SEQ ID NO: 374252 - DNA, 122 bp, Homo sapiens
cagtgttcagtcaagacgtatacagggtgagcctttcagaaaacgtgtacccggggaccacggtgctacaggtgactgccacggaccaggatgagggtgtcaatgccgagattactttctct

SEQ ID NO: 374253 - DNA, 122 bp, Homo sapiens
cgttgatgagtgagaaaaaggttgaaagacagaggtgacccgctaagaagggccagtgtccgtcaataagaattttaggttgagaacaaagaaaacagagaagcaaataaataggaatagtg

SEQ ID NO: 374254 - DNA, 122 bp, Homo sapiens
ggcacggggactaggatgccgccggggacggggatgaggccgtgaggatgcgcgaagggccgccccctctcccggcccgcggggggcgctcggcgctgtgcccgggctagcccgaggcccgg

SEQ ID NO: 374255 - DNA, 122 bp, Homo sapiens
cctggggagggaacaaaaacctgtgggtgcctcagaccacagcagagctcacagaacctgcgggagccaggctgacccgccagcatggtagagttcgcgcccttgtttatgccgtgggagcg

SEQ ID NO: 374256 - DNA, 122 bp, Homo sapiens
ttatccttctacctcacagctaactcctgagcaacacaggggttaggggaactgacccctcgcttagttgaaagtccatgtataactttggattcccccaaaacttaactactaatagccta

SEQ ID NO: 374257 - DNA, 122 bp, Homo sapiens
gggagttgtaggagggacagactgaaagctgtctgaggcggcgataggcattcctggcgccgcgcgcggcgcattgtgggagatgtagttcagctcctcagggcaagccggtacgcagaagg

SEQ ID NO: 374258 - DNA, 122 bp, Homo sapiens
cagatttcccgattgagctatttttttaaacagctgaaggtgatcaaattaccaaggaaacgtggaaacaaagacatacaattgatttggctccaaaggcgctgattgaaataagcagagga

SEQ ID NO: 374259 - DNA, 122 bp, Homo sapiens
tctgttttcaggagctgggcatgtcgccagaggcccagctggggctagcagaggtgcagacgagaccagaaatgctgctgcccatgtgctgctgggatcccagctctgtcccctttgctccc

SEQ ID NO: 374260 - DNA, 122 bp, Homo sapiens
agtgttactttcatgaaaacgcttgggggcatttgcccctttaaccacagaagcactatacgagccaagatatactactctatcttcttactatatactaggacaaactcttccatgcatta

SEQ ID NO: 374261 - DNA, 122 bp, Homo sapiens
gcgccgcatcgtgggattcctgcactgcacgcatttgcaagcactggctggtgagccctgcggatgggtcctcggaacaggtcccgcctctccatagcggctgctgatccctacattcgcct

SEQ ID NO: 374262 - DNA, 122 bp, Homo sapiens
taagcatcgccccaccccctcccccctctggcggcgttcacgtctgtgcgcgcgcttgagcgctagaagattgaggtggctaccgtaaatgcctgaaaaacagtcaccagctgggactctac

SEQ ID NO: 374263 - DNA, 122 bp, Homo sapiens
ctccccagctccagctgtgactcaggcaggcggagttggccttctggggcggcgggagggcgcgagggcgtggggatgttggcagcggggtctcttgaaagcgtttcgccttccgctgtccc

SEQ ID NO: 374264 - DNA, 122 bp, Homo sapiens
gccagtgggtccctgagcctggcttccacaacccgcggcagagcgcccagagccagctcccgcagctcccgcttttgccaacctgtcccgctttaggcaagagcgtggcggcggccccgcta

SEQ ID NO: 374265 - DNA, 122 bp, Homo sapiens
caagttaactcagatgtgactcactggggccccatggactctagagctgtttcccctgatcgtcataggtgaaagataataattctggctgtcttcccttaagtccagggttttaatacctg

SEQ ID NO: 374266 - DNA, 122 bp, Homo sapiens
gaaataggcaaacctagtcccaacattccctctccctggatggacactgtcatgttgtaacgaaaaagaacattacagttcgagagacaattttgcttttctcctgggcaccaggggactgg

SEQ ID NO: 374267 - DNA, 122 bp, Homo sapiens
aggaggcatggaaagtgtagatgtgggtcctcgaggtggcgtcgtagaagactacctctccgccctagtaatccaagcggacgcccactttgttcggacagatcgggagatcctcccgggaa

SEQ ID NO: 374268 - DNA, 122 bp, Homo sapiens
ttttccgattctactgtgacacactatacacttaaaaatgtaccagaccaagtccctccccgagctgctgggcaggtggtcatggggcccttttctggtgcagtcacgcgtaagtctggctt

SEQ ID NO: 374269 - DNA, 122 bp, Homo sapiens
ggcaaacatttagcagcattcttcaaatcttgcctaaaccttccgggatccctccagatacgctcgccagtaataatatttcattacgctgctccagaggcttcctggagaccgtgctgtgg

SEQ ID NO: 374270 - DNA, 122 bp, Homo sapiens
taaatccaacgtgacgcctaccgagctgggtacaacattggtttgtttcataaaacagcccggggtgtttgggactcttactcctttacaactctcatttgactgtccaaagatgcttgcac

SEQ ID NO: 374271 - DNA, 122 bp, Homo sapiens
gaaaggaaaacccaaaaagttccataaaatctttcccaggagccaaagcaaactactattcgtcttttgcagtgaaatgaatgttcctgcaaataatatatgcaaataaaaacctggaaaat

SEQ ID NO: 374272 - DNA, 122 bp, Homo sapiens
tgtcatgtgggggtggggagggggtgtatctgaaacctgtgttttgacaaattctccaggcgatgctgatacacactcaagtttgagaagcattgcttacatataatatctcttcaatgttt

SEQ ID NO: 374273 - DNA, 122 bp, Homo sapiens
tttccccatccttgcttcatgttctgtattctcatatctaagaatgtttgtacgtgagtacgcacatggacacccacatatacgtgggtggggtgggggcagagagagagtagtgagtagtg

SEQ ID NO: 374274 - DNA, 122 bp, Homo sapiens
ggagggggtaagtggtaagtgtctccctccactcccaggtaaaggctttcctagggcttgcggagactctgggtgaagtagaagtctctgtaggcataagtgtgttaagggaaactatttta

SEQ ID NO: 374275 - DNA, 122 bp, Homo sapiens
ctggtgaggaactttttctttccaaaggtggcaggaacaagtctgtactgacttttctcccgccttcgggatcctctctcgtatgatttgtggtttgtgggaccacaacaaccaggcttcct

SEQ ID NO: 374276 - DNA, 122 bp, Homo sapiens
agcaggagcgagtgcctgttgagaagctatgaagggggtccccaggagcagccagtcagccgccaggtctgcccacatggttggcagtcagcatcaggctgagggtacagggaggggcgtcc

SEQ ID NO: 374277 - DNA, 122 bp, Homo sapiens
caaggtcatctgccaggcacccgtgagtgagtggcacaaagtcccaggaaaagctgctgccgggggccccagtggtggtttctgcttgggcacatggggtatgcaggtcccacaactctact

SEQ ID NO: 374278 - DNA, 122 bp, Homo sapiens
ggtgatctacctgcctcggcctccctaagtgctgggattacaggtatgggccactgtgcccggccaggaggttgtttagccgcatccctggcttcatactagatgccgaagcacctacctct

SEQ ID NO: 374279 - DNA, 122 bp, Homo sapiens
agcctccctcagggtttcgggaaccagatctctcaccaggaaagactgatacagaacgatcgatacagaaaccacgctgccgccaccacaccatcaccatcgacagaacagtccttaatcca

SEQ ID NO: 374280 - DNA, 122 bp, Homo sapiens
aagaaaccctgcatttcagacttgcctagccagcacccacaatcacataagccgattcctcgcagtaaatttcttaaaatatgtatttctcctactggttctgcttctctggttgaaacgtg

SEQ ID NO: 374281 - DNA, 122 bp, Homo sapiens
cccctccgcttccgggtagttggcgtcacttccgggcgagccccccaatcgcacggcgcccgcagctccccagccctaccctcccggccaagatggccgccctcctgtgcctcagctgctgg

SEQ ID NO: 374282 - DNA, 122 bp, Homo sapiens
ccggctgtccgggtcctcagcgccaacaccaccgacgccatgctttcgatcactcacttccggtctcgaaaagtttctacttccgctatcaggagatctacttccgggccctgcgtggcagt

SEQ ID NO: 374283 - DNA, 122 bp, Homo sapiens
tatccaagatgcatgactagcaagctgctaagccatgatccagtcatggttttttgaacacgaggcttgtgctcttggccaccactgtcttctggaattataggagtaaagtgttgtctgcg

SEQ ID NO: 374284 - DNA, 122 bp, Homo sapiens
agaattttggctttgctcgccttcctctttcagaagactcgaaatcggccagcaggtctgcgagatttgaaacgcgactgttactccttgttttccggttctggccgcgggagcctctcgag

SEQ ID NO: 374285 - DNA, 122 bp, Homo sapiens
ctgagaagacggaggagcagctggtgactaacgcacagggtacgccagcagccatagctgcgctcgcgagccggttccgtcaggcagccgcttccgccttgggctgcaccacggccgccggc

SEQ ID NO: 374286 - DNA, 122 bp, Homo sapiens
ggcggcgtcgcagagcggagctagctggatgcgtccggactcctgcaggtacctggctggcgtccccacctccctgcgcgctccggagacttctccgggcgaccctgcaactttaccgcgcc

SEQ ID NO: 374287 - DNA, 122 bp, Homo sapiens
tcaccttttctatttcaccttcatcattcataagaaggtgaaaggatgccaggagcaaggcggatctacgggacttttgaaaagaaatgtactgacctttggctgtaaaaactgtgtcatga

SEQ ID NO: 374288 - DNA, 122 bp, Homo sapiens
ctctcccggggaagggcgaaacgctctgaagttctctggcgctcttctcaggagatgattcggcctcccctcctaccctggggcgccctcggggtctcactgccgcggaggaagaaggcagc

SEQ ID NO: 374289 - DNA, 122 bp, Homo sapiens
gcaggagacacaagaagcggatccaggtagcaaagccgagctctgggcagggggcttcggcgcgctggatagtggaaggggcggggaaagccccctaaaagggcgagcgaaagcaagggcga

SEQ ID NO: 374290 - DNA, 122 bp, Homo sapiens
ccaatcgctgctctgacagggaaattggctagcactgcctgagactactccagcctcccccgtccctgatgtcacaattcagaggctgctgcctgcttaggaggttgtagaaagctctgtag

SEQ ID NO: 374291 - DNA, 122 bp, Homo sapiens
gcccctcccctctcccgggcacctggcgccggctcccgcgtcctttcaggaattcacgtccgcctggaatttgcacttcaagtctggagcccccaaggaacccctcctgaccctgaacttct

SEQ ID NO: 374292 - DNA, 122 bp, Homo sapiens
gggagaccccacacaacaaagtctgcactgtacgaaaactggatgaacttactctccctccgggatccctgggccgcaggcctccctctgagccgggtggcatttgagctgggcaggcgctc

SEQ ID NO: 374293 - DNA, 122 bp, Homo sapiens
ttaaatgtgcctcttgtgcagaattaatacgcactatgcccacttctgcacttggtcatacgtaaattatatatttcttattttataattaattgtaataagaagaagcttacatatattta

SEQ ID NO: 374294 - DNA, 122 bp, Homo sapiens
agggagaccccactgcgcaccaggcgcgagccctgcgcatgcccgttgggtcccggaggccgagcctgcgcagttaggggaactcaggcccataggctccccgcctttgcgttgccctgagc

SEQ ID NO: 374295 - DNA, 122 bp, Homo sapiens
ctcccgataccagagggcaagggccgcttctaagctacagaaacttaagtgactttgaaacgagatagcccggggacagcccaggtgcctctttcctagacctgtgcgtttgcggagatgca

SEQ ID NO: 374296 - DNA, 122 bp, Homo sapiens
ccggcagctgcctcagccaatcagcgagcgaagttcgtgaaccactctgccaatcagaggcggaacactatgcccgcctcccacagcctggccaagagcctctagtgcgcctgtgcctgccc

SEQ ID NO: 374297 - DNA, 122 bp, Homo sapiens
cggaaggcagcgaattgtattctgggacttgtagtgtccgcctggtagaagtggatgtaacggtctgttaaccgcgactgactcactcagtatccgtgataagttaaagatgaatcctgaag

SEQ ID NO: 374298 - DNA, 122 bp, Homo sapiens
ctaatgttgtaatgtagactgtgagcagagataaaattccagaagccaaggagtgttgtacggtaagtcctggcagtgcctttggtgaggagagtaaagaagaaatagaaagattagccaaa

SEQ ID NO: 374299 - DNA, 122 bp, Homo sapiens
ttgtgatttggtcacagccagagcacttacagtgagccgagccacagtccagcaagctgccgcgcagccgcatggcctcagctctctgctgggctttgcagaggcttggtgtaggcagatgg

SEQ ID NO: 374300 - DNA, 122 bp, Homo sapiens
cccctctctcctgtctttcttccagggcttttgcagccttgctgcctctctatcccagcccggatcccactgggaaatggccacggccatcactgttaggtgaaaaaagcaagctgcagagc

SEQ ID NO: 374301 - DNA, 122 bp, Homo sapiens
gggattgggccctcgctttcctccgccccgcctcctccttccctactggttgggatgggtcgaaaccacagtgcgtagttaggttgtcagcgctttcttacacgtggtttctgggcagtggc

SEQ ID NO: 374302 - DNA, 122 bp, Homo sapiens
cactttttgtaaagagccagagagctggtatttcaggctttcagttccgtaaggtccctccgctgcttggctctgcggctgtagcgtgaaggcagacaccgacgatgcctccaggaaggacg

SEQ ID NO: 374303 - DNA, 122 bp, Homo sapiens
gcctgaaggggttgtttgggcctcaggcggcgtccagggcggccgaacttgagggccaggcggggacagagcgcccgagtagccgcgccacggccggccgcatttggccccagcacctgaag

SEQ ID NO: 374304 - DNA, 122 bp, Homo sapiens
agcacccgccccccggcagggcccattttcagaaatggttaatggacgggacggtaaggccggcagcgatctcggttgctggggcggtgggcagggaaaccctccagggccctttcttttaa

SEQ ID NO: 374305 - DNA, 122 bp, Homo sapiens
cccatcctgtatgctgtcaccgccaggctcagcctgtcaagttgctcctttacagtggaacgcttcctaaagttaagcaggggtggagaggtcatcttttagctggttgagacagagttatt

SEQ ID NO: 374306 - DNA, 122 bp, Homo sapiens
aaagggtcttccgtgggctctctaccctgggggcccaggatgtggcccctttaaggctctcggacccagaaccttgaactgagactaggggaggtgggggctgggctctctgcgggaaatga

SEQ ID NO: 374307 - DNA, 122 bp, Homo sapiens
aaagcattctgtgttttcatctgactaaaagtttttccttcgcttgttgcagacgacagccgactttaatattatagcaccagcacggtacagttgactcagtaaacctgccacactgtgga

SEQ ID NO: 374308 - DNA, 122 bp, Homo sapiens
agtgatctgcccaactcggcctcccaaagtgttacgattacaggcatcagccaccatgctcggctggatatttagttttgaagatatattgtgtagcctttgatagataagtatggagggtg

SEQ ID NO: 374309 - DNA, 122 bp, Homo sapiens
atatcttattcattgcagagtgttctttcctgaaagaacactttcatatcagaaaggagacgtagagccttaggtgaaatttccctgttactggtttcctgaaagtgctggatatggaaact

SEQ ID NO: 374310 - DNA, 122 bp, Homo sapiens
tccgcctcctcagaggcccccgggatgaagtgacccagcagaaataccagagaccggagacggaatggcccagggtcagcctccacccggaaccggaggatgcagcgaagacgtctccttga

SEQ ID NO: 374311 - DNA, 122 bp, Homo sapiens
tgagagaaggaaacagtttaggcctgaggttagaagaatgccaggtggacagaatgaaatcgaagagaatctgggagaggagggtgttctaaatgctcatgataactcatgccagggtcaaa

SEQ ID NO: 374312 - DNA, 122 bp, Homo sapiens
ggcgcgggggtctccgtgtgcgccgcgggagggccgaaggctgatttggaagggcgtccccggagaaccagtgtgggatttactgtgaacagcatggaggagaatgaccccaagcctggcga

SEQ ID NO: 374313 - DNA, 122 bp, Homo sapiens
ttctggccaagaagatgcagacagagatggcattggcgacgcttgtgacgaggatgctgacggagatgggatcctgaatgagcaggtacctgcttcgctgggagggcctgtgaattgccacg

SEQ ID NO: 374314 - DNA, 122 bp, Homo sapiens
gacggcctcaagatggacgcgggcatcatctgtgatgtgtgcacctgcgagctggtacaacgcagccccgcagggcgggaggggagagctgagccaagcacccagggaccctgaggaatgaa

SEQ ID NO: 374315 - DNA, 122 bp, Homo sapiens
gggggcaggagaaaggtaagacttggcactgacgcgggccacagagcacgcgggtcaccacgacagctttcgggtctcgccgcccggcgctggcgagcagccagccagcgtctcgcggcggg

SEQ ID NO: 374316 - DNA, 122 bp, Homo sapiens
cttctcttttctgtgcccttgggcatcacttaaattgatcctcagtcccctcttctgtaacgttagagacaatcacaagagtgcacttcactgttgttttgaggcaagggcaatggatgccg

SEQ ID NO: 374317 - DNA, 122 bp, Homo sapiens
ccagccgacagattatattttcaaaaagatgttttctttgtttcctagccccttctaccccgctacaaagtttcaaagacttaatgctattacaaagggccgtcagaggtcaagctcagggt

SEQ ID NO: 374318 - DNA, 122 bp, Homo sapiens
gatccatcccaggccagtcttggtactcagtcccagcctcggctggctccggccttcatccgcccgccctgcgtgctccatgagcaggaggcagcaaggccccgctcctttcttcagctcct

SEQ ID NO: 374319 - DNA, 122 bp, Homo sapiens
tgaaatgtctctatctggtctagcggttaagaggctctatgctaagagaattggcaacgccgaaccccagactcaaatttctccttagtttaagggaacgtcttcatggggatgtcttgact

SEQ ID NO: 374320 - DNA, 122 bp, Homo sapiens
attctggagccacggccagtccttcccctagcagcttcccctgaggggcccagtggtccccgtgggagcacagttcgaaaagctctgagtcacgtcactgtcaccgtagaaaccacccctgc

SEQ ID NO: 374321 - DNA, 122 bp, Homo sapiens
tctctgcccaatctggtgctttcctcccaccctgcctatggaccatgggtgggctgagcacggagtgggaggccctgggcaaagctgcccagagggcagaggctctaaggaccatctgggca

SEQ ID NO: 374322 - DNA, 122 bp, Homo sapiens
tcatggtttatagaaatttcagaactcgggttcccacccttttgatcctccaggaagcctcgggaccctcccttctggaatctcacattgcaaacagctgatcttgttctaaacccctattc

SEQ ID NO: 374323 - DNA, 122 bp, Homo sapiens
ctcggcggatggaaggatgatcgcaaggtcccttcctagcagcaagacacaaagggggagcgccgtgcagaaccgagggtaccccgcggggggcaccgggagcacactgctccgagcgagct

SEQ ID NO: 374324 - DNA, 122 bp, Homo sapiens
ccggaacgggccctggggtgcgggttaggaccgacgtacctagcagcactggccctcggacggtccctgaccccacctcggggcgggcgcagcatgagctgcttcccacccagggaaagctg

SEQ ID NO: 374325 - DNA, 122 bp, Homo sapiens
tgagctgtgaactggtcttccgggaggacttacaggaggctggaaacggggcctggcgcgcgcttccctctcagtgcgaggctgactggttggactcgccgggctctactgtgggccccacg

SEQ ID NO: 374326 - DNA, 122 bp, Homo sapiens
tccaaacccaaagaatggactcagagacccggagaacagcgaaagtgagacttttaatgccggtcttgcaagatcgagtgtgtggtgggcaggcacactcagcacggccacaacaagcgatt

SEQ ID NO: 374327 - DNA, 122 bp, Homo sapiens
tagcttctttcctacacagcggcacccgccggcttccaggcttcacacttgtgaactcttcggctgcctctgacagtttatgtaatcctgggatgtcattcagttccctcctctgtgaaccc

SEQ ID NO: 374328 - DNA, 122 bp, Homo sapiens
agggcagcagctgctgccacagcctccagcggctgccactgtgggctctgggagccggagcgatgctgtgtgagaggcagagtgccaaggatgaagctggcactgaacagtaagcggctcca

SEQ ID NO: 374329 - DNA, 122 bp, Homo sapiens
aagagaaaaagaaggattgatcagagcattgtgcaatacagtttcattaactccttcccccgctcccccaaaaatttgaatttttttttcaacactcttacacctgttatggaaaatgtcaa

SEQ ID NO: 374330 - DNA, 122 bp, Homo sapiens
tcagatccacgcttttatgcacagacgagaaggctgcttgtgtttagggactgtagtacccgatcggggtggcggttcacacgggtgcgtggcatcaactcccggcgctttgcacctggatg

SEQ ID NO: 374331 - DNA, 122 bp, Homo sapiens
gcggccagagctcccagacccctacccacagccaggcgggacgcgcacagtccctccacgcggaaagaagtaccttcgccggtcaccggctcctgcagggtgagaagagttgggggaacgtg

SEQ ID NO: 374332 - DNA, 122 bp, Homo sapiens
tcagggaaccaggacagaaaggtccttccgctagctgtcaggtgcgtaacaatcgctaggcgtccgccccgccctccctaccgcaggagccgcagcatcagcaggcgcccgcgaaccgcgtc

SEQ ID NO: 374333 - DNA, 122 bp, Homo sapiens
caagccgtcgtttattccgctacttccaattcctctacagaacagcgtgagatgctgcaccgcccgggagggagcctggattctgtttttcttttctgagatggagtctcgctctgtcaccc

SEQ ID NO: 374334 - DNA, 122 bp, Homo sapiens
tatgtgattgttctatgctctatgctctgcgggctctctgtgtctgtgctatctgaatgtcgaatgataagccactgcgcatctctttgcccccattccctgcccccaccccccaatctggt

SEQ ID NO: 374335 - DNA, 122 bp, Homo sapiens
ttcctgtcatatgacccctcctctgggctccctcaccaccctgcctggcttggcaggagtcgtctgagaaggggactcctccagggacttggtccctaggtccccaggtgagctggatgtcc

SEQ ID NO: 374336 - DNA, 122 bp, Homo sapiens
gcatttggagaatgttggaatgggaagaaaatctggccagaaattaaaatgtaatgcacacgcctgcctccttggtggaaaaggaattactagttcatgggacatagtaaggtatcaaggga

SEQ ID NO: 374337 - DNA, 122 bp, Homo sapiens
gagataagtacagaaacggaggctatgtgctgaagaactatttatagcaaacatgatcgacgggcttatcttttgcatgccactgttgttttctgtattttatttttctagtatttattttc

SEQ ID NO: 374338 - DNA, 122 bp, Homo sapiens
gccataactttgtctttcgtgaggggaatgggatgcagccgggatcgagcaccagtgagccgccagtgtacagacctccgagcgtgcccaggaccaccaaggaaggtgaaacttcctttccc

SEQ ID NO: 374339 - DNA, 122 bp, Homo sapiens
tttttatactaaactgccttcagtaggaaatcccactgtcatgtatttatttattcaaaccgaagggatacttttccaatacctccaaagcaatgattcccaggctttagggtttcacaggc

SEQ ID NO: 374340 - DNA, 122 bp, Homo sapiens
tgattggtctggcatttccggtattaaaatgataaaataaatggcattttctgagttttgcgtctgcccgcgggagcccccattcctcaggccgtggcccctgcactctccaggcaaggcgg

SEQ ID NO: 374341 - DNA, 122 bp, Homo sapiens
actaccacacccggctaggctttatgatgtttattgccttataaaaacaaatggaagccccggcatggatacactttcttcatatttatgatgttctccgggccactgcagcatctggttgg

SEQ ID NO: 374342 - DNA, 122 bp, Homo sapiens
aaaaactgaaaggcttgtctaactcgacttcagcctaaattggagattctgcacatatctcgtttccttgacagtaaagtgaggagtttggagtggccaaggtgcagagcagctgtgaaaac

SEQ ID NO: 374343 - DNA, 122 bp, Homo sapiens
caagcttcttcagggataagcttatttgccttagaaatgcggcagccactccttgaaccacgaacattttatgtggattttataaaacacacaaagcacttccacacagcaaagtgattttc

SEQ ID NO: 374344 - DNA, 122 bp, Homo sapiens
tgtgaatcttccagccgctggttagggccttgggcaccacaggcagcccctcacctaagccggggcctactcctcttacaacagcaagagagccctggggccccaggcctgttgagcttctt

SEQ ID NO: 374345 - DNA, 122 bp, Homo sapiens
gtgtgagggatcgggcgcaaagggcaaactttttgtcagagtgacgccgagttgaggacgcgcctggaaatgttgcctgggttttgagccattgcacgaccccttcactttcttttccagga

SEQ ID NO: 374346 - DNA, 122 bp, Homo sapiens
cgctgccttcctggccggtccgggttcgtcctgggggaacagcacggtcgcctccactgccgccgtctcctcgtcgttcaaatgcgccttgaccaagacgggcttccagttttactacctgc

SEQ ID NO: 374347 - DNA, 122 bp, Homo sapiens
tactccaccccggatgtgggcaccgctcaccagcaaccacatgctcagacattagaaaagcggctctggggtgggtcttcaggggaaaaccaagcccggaggctgaaaagccagtgaaggga

SEQ ID NO: 374348 - DNA, 122 bp, Homo sapiens
tactcactctcctcttttctttcatctccactgagctggaggcagttatcctgtcccccacgtcacattcctactcccgtttcccatgcctggacccaggttgggcaaactcttcctgtaaa

SEQ ID NO: 374349 - DNA, 122 bp, Homo sapiens
caggcagtgccaggccacctcactgccccctttgaggtgagcacagagggcttttgggggcgagcatgaagctgggcacccagagcctgaggccgactgtccctccctgtgtcctggagtgg

SEQ ID NO: 374350 - DNA, 122 bp, Homo sapiens
atacacataattcatagctaacatttagtattccttcttcattaaaaaaaaaattaggatcgcttttcctgtggcagcagctggggtgagaagagcagtggctctctcctctctctgccatg

SEQ ID NO: 374351 - DNA, 122 bp, Homo sapiens
ttgtgatgctttcccagtcctggagctacacaaagaataactcacatttttggccatgtgcggtggctcacgcctgtaatctcagcgctttggaggctgagggaggcagatcacctgtggtt

SEQ ID NO: 374352 - DNA, 122 bp, Homo sapiens
gcaagccacggcggcgggggcaaaaagccgcggcggcaaaaacccggggtggcaaaaagccgcggcgccgggggacgaaaagcttcaaaggccgcttcggcgggggcaaaatagtggaaagg

SEQ ID NO: 374353 - DNA, 122 bp, Homo sapiens
ccctctctgcaccaggcatcaggctcagctctggggacacctggctgcccttgagggagccgcgtgctgagaaaccacccgaacctggtgtgattgtaactcaagcttccccagcagctttg

SEQ ID NO: 374354 - DNA, 122 bp, Homo sapiens
gtgcagaatgggctggggacacctctgagttttgctgcccgcaacgtgacctttttagcgcggtcctggacgcgttccctcgcagccaacccgtcagtctcctcaggccttatcctgccctc

SEQ ID NO: 374355 - DNA, 122 bp, Homo sapiens
gatacttgggggctgaactgagtcctgtggcgcaggattgttgcctggaagtgaacgttccgtcttgtgccattgagactgtgaagatctctgggtcccacaggacgagcagtagacttgga

SEQ ID NO: 374356 - DNA, 122 bp, Homo sapiens
tgccaattaacattgtaattgggtgcgtgataaattcccaaggagcgtgtcagctccctccgggctgacggccgttcagcggggagcgcggggagggccccagccttggctgcccttgcccc

SEQ ID NO: 374357 - DNA, 122 bp, Homo sapiens
tgtggagcccacaaccacctctctctcactgcattggtttacctcttctggtttagcacgcgcccctcccctcacctaacctcaaccctctgcgcccctgccccttctgctttccacctttc

SEQ ID NO: 374358 - DNA, 122 bp, Homo sapiens
gcagttaccacttacagaagccaacgtccacctctgaaacacagaaccccctaactggtgcgaggcagctgaagacaaagttgaggcctttgggagaagagctcggccagaggaggaaatct

SEQ ID NO: 374359 - DNA, 122 bp, Homo sapiens
actccgcgcaggcctggccgcccagaacagtatgcggagggatgactccgacagcgatttcggagcctctctcggcgtcagtcttgcgccggcacccgccacggccagcgcaaccaacacct

SEQ ID NO: 374360 - DNA, 122 bp, Homo sapiens
accaccacttacctcctgctctcgttgaaatattacaacccgaccccccttgtcccctgtcgctagtaattctcccgtgtggttgaattctaccgtagagataatgtcagctgcaaagaaga

SEQ ID NO: 374361 - DNA, 122 bp, Homo sapiens
gaaccttcccatactgcagaggtggaagtttataaatggcatttcacaggcttccatccacgtaggattctgggtgagaactagatatggtccattagatatacttaggtaagatttgtaag

SEQ ID NO: 374362 - DNA, 122 bp, Homo sapiens
aggggagggaagggtgagaattcgtacagcatccaagttcactgcagtgcccaccttggtcgctcacaggagatagatgtccccatttattgcctcctgtttgtaatttgcagtcagctttt

SEQ ID NO: 374363 - DNA, 122 bp, Homo sapiens
tcttttctttttttttttccgaaagaggtgtgacctctcccaggtctgcgcagcccgcagcgtcgcgacacttcactttccccgaagcccctgcgcccgcgcagcggctcggccgctcacat

SEQ ID NO: 374364 - DNA, 122 bp, Homo sapiens
cagactaatactcaaacaggcttgacacacacatgtccaggcttacacacatggctgtcacgtggtcacaccccgttctgcctcaaccttgacccagtcttgaaacagaaataaagggagca

SEQ ID NO: 374365 - DNA, 122 bp, Homo sapiens
ttggagggagcacaaaactctgtttcatcctcaggagtgttgctggccaatgctccatatcgcactccacacagagggttatctttaggatgccatttaattaatataggcatttgaaatct

SEQ ID NO: 374366 - DNA, 122 bp, Homo sapiens
accagcacaacgcctgagcttgaacagggtgaagaaaccgccaaaagacagatatttcagcggagactaagaaacgaggaggaaggtgggaaaaggctggcatgggttttgaaaagaggtga

SEQ ID NO: 374367 - DNA, 122 bp, Homo sapiens
cctgcacgccatgccacatcctgcctgtctgtccccgcgggtcgttgcccacgacagccgcgccatgaccacccagcagctcgtcctccagggcctgggcccatggggcttccgtctcgtgg

SEQ ID NO: 374368 - DNA, 122 bp, Homo sapiens
aaaacaaacctcagaacaaaaacccagtcaccccatgggccttttgttttcagtcaaatgcgcaaagccaggtggctcctttaacacccccagagattgtccccatgatctcctctgcgcca

SEQ ID NO: 374369 - DNA, 122 bp, Homo sapiens
ggtgtggtgttctgctcctttgcgcctcttgacgtctagtgcttgtgtgtgtacccgctacggtctctcgggtgtatatggccataggatagggggtgtggtgggccagaatgctctcggaa

SEQ ID NO: 374370 - DNA, 122 bp, Homo sapiens
gctaggacatttccagaagctgacccaaaacctgtattttggtgttacctcctgccattccgcaaatttactccatcatccagacaattcacacagcttgctcttcctttgttcagcgtcat

SEQ ID NO: 374371 - DNA, 122 bp, Homo sapiens
gacatcctgaatatttgctctacaaagaattatattcctaaaagcctaacccaaacctctcgatgttaaggtggaaagagtattgagagaaaactgagtctatttctccttcctcaccaagt

SEQ ID NO: 374372 - DNA, 122 bp, Homo sapiens
caagggctttcagattttacagaaacgttccggctcttgccatctcagccacatcaggcccgacttaggaccctctgggacctttacaaccccagaggtcagtgtcaggcagccccaccgaa

SEQ ID NO: 374373 - DNA, 122 bp, Homo sapiens
aaaagttttcttaggaaaccatgctccccctggacagctccccaggaaggtaacccttggcgttgatcttgcgattggaagggtgttcattttttaattatgctgacagacattcagtgaga

SEQ ID NO: 374374 - DNA, 122 bp, Homo sapiens
ccccacctcatagctgcaagtaggggcgaaagctggagtgtctcctcccagcagcctcctcgcctccccgcaaacctccgaatctccctggacctcctggttgctgtggcccttcctcccct

SEQ ID NO: 374375 - DNA, 122 bp, Homo sapiens
cctcaggcggtggcgccgcgccccctgggacttgtagtctttcttccgccccggccccggcgccaggccccgcagctcccaaagaaaactacaactcccggcggcccgcgcgagagccgccc

SEQ ID NO: 374376 - DNA, 122 bp, Homo sapiens
actttgaaattcttacaaaaactgaaagtgaaatgaggaagacagattgagcaatccaatcggagggtaaatgccagcaaacctactgtacagtaggggtagagatgcagaaaggcagaaag

SEQ ID NO: 374377 - DNA, 122 bp, Homo sapiens
aaaatgaattagacccaagtttatctgacttcaaagctcactttaaaaaccaaaagaggacgtgggatctttgaacacggcatctgatgtagcacatgctgatgacttctggtgcagactgt

SEQ ID NO: 374378 - DNA, 122 bp, Homo sapiens
tcaaagcaaggcaatgcttagaaacagaagtgctaaagacacttaaaaagccaacaacaacggtacagtgaaatcaatgcatttctgcactaaagtggaattgtgtagcacaaccaatattt

SEQ ID NO: 374379 - DNA, 122 bp, Homo sapiens
tcccacggtttcccagttctaagcaatgctccaatgcgtcatagcacatacctttttgcacgtatctgcgattattttctaggcagcaaggaggtgctggatcagaggtctgcacagtttta

SEQ ID NO: 374380 - DNA, 122 bp, Homo sapiens
cctcttccattttagccaggcaaggagcattctgtgtcttatatcttcttttccctgtggcgttcatttccaattgcagaaaggaggtcatatgaccagattctttccttaaacagctttcc

SEQ ID NO: 374381 - DNA, 122 bp, Homo sapiens
acctccagcacccatgcccgctgcaccgctgccatcctcagattcaccgcgtgctctgcgcggccgaggccggagcaccacatccacctcgccccagagaggctctgctccctcctatggag

SEQ ID NO: 374382 - DNA, 122 bp, Homo sapiens
gtgtcttgtgttgtcttcgtctgtgccgtttgtcttcgtggccatcctgcagatgagcaccgtgtccagtgccacagcacaaggcgcctccccgccccgccgccccacacctctcccctttg

SEQ ID NO: 374383 - DNA, 122 bp, Homo sapiens
gactgtgctcggctgggaggagcagaccctgggccagaagcgcaggctttgtgagcaacccgggccgggcagaaccgccccgggctgcggggaggcggagggggctgcctcctccttctgcc

SEQ ID NO: 374384 - DNA, 122 bp, Homo sapiens
cgagtctcggaagcgcgggatcccagagcatcacggacgagcccgcgacgccccgccccgcgcagcgacgccccgccccgcgcagctccgcccccacgaagccccacccacacgccatcgat

SEQ ID NO: 374385 - DNA, 122 bp, Homo sapiens
tgctgggatctcgaggcggggcctctgccggacccctcccaccagtcgagccccgggcgccgtacagaggctgggtaaatgctcctgaactcagagagagtaagtgggtgtcagtatccccc

SEQ ID NO: 374386 - DNA, 122 bp, Homo sapiens
aaccagaggcgggcgcggtacggccgttccgggctccagccggtgcgggggccacgcgcacgcgcacttgcagtgccctgggacacctcttcagtccgtggactttcccgctgcacactgcc

SEQ ID NO: 374387 - DNA, 122 bp, Homo sapiens
gagggacacacccaggactcccagcagaccccactgttctcgcaggccctctgatagtggcgctggtcctttcctcaaatccgatcccatcctcaagggtgacagcaccctcttcccccagg

SEQ ID NO: 374388 - DNA, 122 bp, Homo sapiens
ggagggaagggaaacagatggcgacggcgggcggcgctaaaatggagcctgcttcctgcgcgaaacaatcccgctcccgaaatgccctgcgctgtttacgcttcgttcctctctgggaacgt

SEQ ID NO: 374389 - DNA, 122 bp, Homo sapiens
ctctgatggaaaggcaggattcatagcgagtgcacgttcttacactaaggacagtagatacggcaggaatcggggcattcccaggacggcggctcatcagaagtctgcacggtggagtagaa

SEQ ID NO: 374390 - DNA, 122 bp, Homo sapiens
ctcgggcgcggctgcggtgggaggtccagccgtagggggtggggcggggctgcggacgcgcgcctgggcccggcaccgcacagctggctgcagctggcgtggctcgggacgcggctagcgaa

SEQ ID NO: 374391 - DNA, 122 bp, Homo sapiens
tttagccagggctgaaagcccctgagctcccctatgccacaacaaggggagttgcacccccgaagacagacagttctgcattgaattcccgaactcctgaacatcatagaagagtagagacg

SEQ ID NO: 374392 - DNA, 122 bp, Homo sapiens
gatgctgtgcaccgtgttttcaaatgcttagatgctggcggtgcttcgtgtcccccgcgccggcccgccactgctcctccagcctgcacagacaagaacctccttcatgggggaagacgccg

SEQ ID NO: 374393 - DNA, 122 bp, Homo sapiens
tgcttatgggccagaggatgtctggctcatctcagtactgctcatggggcggaatgaatgcgaagtccccccagatggggacaccatgtggcagagtgggaccactctggctttgatgcagt

SEQ ID NO: 374394 - DNA, 122 bp, Homo sapiens
actcactggcacggaggccgcatccacctcctcacggccgtggaggggatgcgtgggaggcgcctggacacctacaccaacacaccgtgcactccgccaggtcctctgctctcgccagcccc

SEQ ID NO: 374395 - DNA, 122 bp, Homo sapiens
acttcatgatgaggttgggtgaaagtgttgtacgaaaccagctgcaatgtcatgaaaacacgggagcagttttaagaggagattcacacaggtagggactgagcctttaaactaacagccat

SEQ ID NO: 374396 - DNA, 122 bp, Homo sapiens
ggccccggcagcccagcccaggcgctctggccaagtttgcgcgcggtctccgctgactctcgggttacctgagccggcaaccacgtcagcgccacatcatctgggctttttatattgcaagg

SEQ ID NO: 374397 - DNA, 122 bp, Homo sapiens
accgctacgccgggaagcaggaggaggagccactggtgggaagggggcggactgaggctgcgtcacctgatgctgcgtcacctgatccagcgtccggagcgccttacagccattttcggtac

SEQ ID NO: 374398 - DNA, 122 bp, Homo sapiens
acacatgggttcacccacatacacgtgcatgcttacatgcacaaacactgcacacacgcacgttgacacttcaaggggtggagggtgctggctctggtcccggctgacccaggcaggggccc

SEQ ID NO: 374399 - DNA, 122 bp, Homo sapiens
tactgggggcgagagctcgggaaggagtgtagacagtgagacagctgaattaaacagtgtcggtgtgagtcactgctctcctgcctgccgccccagtcctggcgtgaacctagaagctggtg

SEQ ID NO: 374400 - DNA, 122 bp, Homo sapiens
gaaagccggcagtttctttgcttcgatttgatttgttcgaggccccggccggcttgccctcgccccgctcgcgcggcctctcgggtagagtagtccggttccccatctgggagcgcgatggg

SEQ ID NO: 374401 - DNA, 122 bp, Homo sapiens
gctttattaggaaaatggaaagaaaaaagggagggaaacaatgtacccaggcgcccccaccgcattctgattggacccacttaagcatctgcagaaaacaataaaatgaaaaaaactcttag

SEQ ID NO: 374402 - DNA, 122 bp, Homo sapiens
gactaaagcaaatgtggccaattccatctagaaacctccaggccatggggtgggggagttcgggctgggacatgtctggcattttacattttggggaaatttcttctatatttagagattgg

SEQ ID NO: 374403 - DNA, 122 bp, Homo sapiens
ttcccacatgacgtgcgccaccgacacgcagaacgtcaaatttgtcttcgacgctgtcaccgacatcatcatcaaggagaacctcaaagactgtggcctcttctgaggtaggtcgctgccct

SEQ ID NO: 374404 - DNA, 122 bp, Homo sapiens
gacccctggggctctccccctgcggccccgctccaccgggggcgtggctagatctgaccgcgcccttccaggccccgccctcaggtatgggaaactaggccgcccggtcgcgcgcctctcca

SEQ ID NO: 374405 - DNA, 122 bp, Homo sapiens
ttgatggccttccctggctccatttgccagggttttaacataaattactccattttgattcggacaactttcataactgcttaccatctgtgcctctgtgtataaaagtggacatactaaaa

SEQ ID NO: 374406 - DNA, 122 bp, Homo sapiens
ggtgatccgcgcgtctcggcctcccaaagtgctgggattacaggcgtgggccaccgtgcccggctgagacagaatcttgcactgtcatccaagctggagtgcagtggcacaatcttgggtca

SEQ ID NO: 374407 - DNA, 122 bp, Homo sapiens
ccgcccgggggcgggtggaaggtggctcccggggcagggagcctgcagggcggctcacagcgcttctgctcttgtgtgtgtgtgacccccaaaatgccttttatggtatttttccagtcccc

SEQ ID NO: 374408 - DNA, 122 bp, Homo sapiens
tgtttgcacttgggcagggctctcgagtccttggaagctgccgtttattttaaaacagcccggactccttgaggaagctgaggagagaggaaatggcagaggcgacctcgcctcacacttcc

SEQ ID NO: 374409 - DNA, 122 bp, Homo sapiens
ctcaagcaatccgctcacgtcaacctccccaaatgctgggattacaggcgtgagccaccgcgccaggcctgagtaatcctaatcacaggattttaaaaagaaacttcctgcgccacccatta

SEQ ID NO: 374410 - DNA, 122 bp, Homo sapiens
ggggctgagggctgggggctgcctggctccaggccatgtcagtgcctccagctccaggtccgggtccaccctgaactttggctctgctgcccggacgcccagcttcacctcccttgcctcgc

SEQ ID NO: 374411 - DNA, 122 bp, Homo sapiens
tgacctcgtgatccgcccgcattggcctcccaaagtgctggcattacaggcatgagccaccgcacccagccacgagtcacagagaatttttctgtagaagaatgacattgtgaaagtagtat

SEQ ID NO: 374412 - DNA, 122 bp, Homo sapiens
tcaggcccccagttgggggtgaggagccctgggaagaccatccaaagttccaggggcagacgccagagctacacaatcacctccttttctagatagtaagaaacaaagaaaaacctctacac

SEQ ID NO: 374413 - DNA, 122 bp, Homo sapiens
gttgagattagtgacatgaagccaagcttgtgaaaactatgggaggagcattgcaattagcgggaacagtttgttaagtaaaatttataggaggcagggccgggtgcagaggcccacacctg

SEQ ID NO: 374414 - DNA, 122 bp, Homo sapiens
cctgaggctcttcccgggaacccacctcccagacctttgctggagtggcacccacgctcccgagacgcccaggcagtttctggggggatctgcttatacagagcagccgcccctgaggtcaa

SEQ ID NO: 374415 - DNA, 122 bp, Homo sapiens
ccacccatatcttggaattaaagcttgttagtcaaagtcacaggacatattaacctaactcgttagtgaacactcattagctcaattcaagctccagaacatagtttcggaatacagcaccc

SEQ ID NO: 374416 - DNA, 122 bp, Homo sapiens
ttgaacttccttacttacacagatggagatgatcatgctggtctctctggaatgtgtggccgatttctcacatatttatagttctagattccatattgtgttcatggacagtactgcccttg

SEQ ID NO: 374417 - DNA, 122 bp, Homo sapiens
ttcagctcagcgtgctaccctcactccgaaccgccaccgcaccagcagccaataggagagcgtgaccccatacgcaagcccgccttccagcgtcagcatggccaatcggaacgtcagaattg

SEQ ID NO: 374418 - DNA, 122 bp, Homo sapiens
tgttggccagggtggtctcgaatcctgacctcagatgatctgcccgcctcggcctcccaacgtattgggattacaggtgtgaacgcctggcctggcctcagatatctgtatatccatgttca

SEQ ID NO: 374419 - DNA, 122 bp, Homo sapiens
ctacatttgtggaaatccagtgtaactcagagagatgtagttaaataaatcagtgatggacgttttgtggtgtgtattgtccgcatggatggtaaggaggcaagacctagaggtcatttgtg

SEQ ID NO: 374420 - DNA, 122 bp, Homo sapiens
tttgaccagccggggtgtgaaaagcttcagtgggacaggcttgctcttctcacaggtcagcggccggcagagctgcttctggctttccatttcggtcagtgtgctctgacacagctcctgaa

SEQ ID NO: 374421 - DNA, 122 bp, Homo sapiens
gaccctttaatgcttgttttgaaatccaaggcaaaaaacaattgcaagcgcccttacttccgtgttgcttcatactcctcttgcgcctgcgctgtctccttggagcagaggcggggccaaca

SEQ ID NO: 374422 - DNA, 122 bp, Homo sapiens
cgggaggggtcttaataagatcacggttgctgggcagcactggacagtgcccgacgtaggcgatctcattgattccttcccacaaccccactttgcagataggaaagctgaggcacgagagg

SEQ ID NO: 374423 - DNA, 122 bp, Homo sapiens
ccaccagatcctgcccagcaatggcctttcccttctaaggtcattagattcagccaaaagcgacctcttctctagtccggtgttacgaacagaagttctgagttgtgctacaaaagtagttc

SEQ ID NO: 374424 - DNA, 122 bp, Homo sapiens
ataggaggcccaggaagctgtaggaaaactcagcacacagacggagagtgacagcaggcgcgcgcaggcattgggagcgctccagatcggggattgtttggggggtctcccgcctccacact

SEQ ID NO: 374425 - DNA, 122 bp, Homo sapiens
ggcggggcgggggctgcgctctgccctgtcgcgggtttatataccctttgggcacttaaccgactgtgccagcccagtcccatacctgtcaagaaaattcattgtcttacatcgtccttaaa

SEQ ID NO: 374426 - DNA, 122 bp, Homo sapiens
atagctaaaaccacaggagtgactgatgatgggtagtgttcagcactggtgtggagacttcggggcagataacttgatgagcactttctcactggctacttgatctgcctctgcttggaccc

SEQ ID NO: 374427 - DNA, 122 bp, Homo sapiens
gtacttgtgggccttgcacaggcagatgccgtggatgatggaggcacagttcagctcgtccgacaggactgcgtcctcgggtctcagcaggacctcaaagaggccggcgttggcgtcacaac

SEQ ID NO: 374428 - DNA, 122 bp, Homo sapiens
gctacgaaaataggtattgtatctgacgggggatgattcccctaggtagtaccataaaaccgaaggcatgtaaatgtatcctatgagaactgttcattggactgtggaggaaaagttaaata

SEQ ID NO: 374429 - DNA, 122 bp, Homo sapiens
tgagggaaattacctactacaaattgtagtagtaggtaatcttgttctatagttctttgccgttaaaaaaattatggacccctttaacaatctgccaaaaacacaccttgtgctgtgcgtgc

SEQ ID NO: 374430 - DNA, 122 bp, Homo sapiens
ccagcgttccgaaatcccgggagtgggggccttcgactgtcaccctcaggcccccttggccgctcctcccggcccttgggacccgccagggcagtcccccaacccccgcccgccgctcctct

SEQ ID NO: 374431 - DNA, 122 bp, Homo sapiens
cgacagtcaggaaaggatgagcgctgtgtccttgcactcacagggagtcccacggccgtccgattcctagaggcagaaagtcgaatggtgggggtgccaggggttggggaggggctggggag

SEQ ID NO: 374432 - DNA, 122 bp, Homo sapiens
attcttcaagttcacctcagcttctgtgcacaagcaggttccatgggctttctaccacctcgcatttccttaactaatttgataacttactgtatttttttgtctctgacatttctctgttg

SEQ ID NO: 374433 - DNA, 122 bp, Homo sapiens
gggtggagcccggggccggcctggtgtccggggccgaggtgacaccgtgggcttggggggcggtggagcccggggccggcctggtgtccggggccgaggtgacaccgtgggctgggggggcg

SEQ ID NO: 374434 - DNA, 122 bp, Homo sapiens
tctcccagcatctctctaaaataccgtgaccttgggagcggttctgagtcctggggtggccgagtgggcttacatgcttctgcctctggaggcaggggatggggaacaaagagaagattctc

SEQ ID NO: 374435 - DNA, 122 bp, Homo sapiens
cctagagatggcctttgtatatgggggggtggtggggggacacaaacacatcagacactccgtcctcacactggcaggacggtgttcatcgcattctcttctgtgaccagcctctaggctag

SEQ ID NO: 374436 - DNA, 122 bp, Homo sapiens
tgagacatcaaagcactgtgaacatcttactccccggcaaacttcacgagctggtttcagcgtcattgctgaaggctcttggaaacattgcttacacccgtggttccaatggtgatttttct

SEQ ID NO: 374437 - DNA, 122 bp, Homo sapiens
ggcagcgacgctgtgcagagacctcgtggcacccttcctgggaagagcactctccagcatcgtttacttagctgagagggactcaaaggccatagggaggtgtctgcggtgcgtgagcacct

SEQ ID NO: 374438 - DNA, 122 bp, Homo sapiens
ttggaaactacagcaaacgtgcgtcttcgcggggctccaagcctgggcactggccggctgcgtgcacttttctgtgtataacacgcccgcaggaagcctgcgttaacatttatctcgtggag

SEQ ID NO: 374439 - DNA, 122 bp, Homo sapiens
accggtaagatctctgtggtcttcctcgttcagaatttcgcttcctttctctcttcactccggccacagctgggtactggcctagggagagaccagccgagtagcacgcccgcaccctcgcc

SEQ ID NO: 374440 - DNA, 122 bp, Homo sapiens
gttctaaataagatatctaaccctcaagtatctggggttgaatcagttgttaaaaagcagcgtgttaaatttataagggctttgacaggattggacagagactgggaagcattttaaatcaa

SEQ ID NO: 374441 - DNA, 122 bp, Homo sapiens
gtgcccaggggcctggggcggtcctctgtgctgagcaggacacccaaggactccatcctccggccccagcacccgcccctgcccagggttccgcctgatggtttgctgttggtctctgccgc

SEQ ID NO: 374442 - DNA, 122 bp, Homo sapiens
agcactgaggcctgacctctcgatccttcagcacttcagaggttaattttgttgggggatcggatttctttcctggcctggggaatggtgatccctgctagctagtcctttagttacagagt

SEQ ID NO: 374443 - DNA, 122 bp, Homo sapiens
aacaagaaagcaatccttgtaaaaatagtatgttacatctttgaaaatagtggcaccagccggcgtaacatagggagacccagtctcaaaaataaacaagcaaataaataaaataatacgcc

SEQ ID NO: 374444 - DNA, 122 bp, Homo sapiens
gccgcggtcggcagtggagaaactcaaccgcgacaccggcgccctccttgccgccctccccgcctccagggcgctcggacactcttttgcaaaccccgggactttcccgacctgaaaggcag

SEQ ID NO: 374445 - DNA, 122 bp, Homo sapiens
gggccgccgcactttaagaggctgtgcaggcagacagacctccaggcccgctaggggatccgcgccatggaggccgcccgggactatgcaggagccctcatcaggcgagtgccccgcgtccc

SEQ ID NO: 374446 - DNA, 122 bp, Homo sapiens
tgcccgcacaactccggagtaagcaaaagagacgaggagtcgcaggtcctgggtggagatcgtccgcagagatacctctgtgccctgggattccctcatcccgctcaggagcatggccccaa

SEQ ID NO: 374447 - DNA, 122 bp, Homo sapiens
ccccgttgggacccacggctctcgtccctctgctccgtgtgtctcatgccagcagcacgtcgccatccgtcaccagaattagtcctcacagcctaggaccagttttgtatcaaactcgtctg

SEQ ID NO: 374448 - DNA, 122 bp, Homo sapiens
tgtcccacccccccgaaatgaacgaggcggccgtgtggtagcggggtctcgcacggtctgcggagttcgtggttgtacagaaatgaacctttatttaagaaaaatagaaaaaaaaaaaaaca

SEQ ID NO: 374449 - DNA, 122 bp, Homo sapiens
cttgctcaagtcaaagagtgtggtgagggccctgaagagggtttggcctccatcccacagcggagaggcagactggcagggcctggagccttcctgctccagcctggagccgcctgctggtc

SEQ ID NO: 374450 - DNA, 122 bp, Homo sapiens
gtgatcaactcatctcctagaaatatgttcttacctctttatgctccgtagaactttctgcggcaatcattctagatgtgccctgtacaaaatgtgccatggaagctgtttttcctggagtc

SEQ ID NO: 374451 - DNA, 122 bp, Homo sapiens
caccagccagaggaagacagatacgaacatcacccagccataggccgggtacaggtggtacggggtgtctgcaatcagggcccacaccagcagccccagcaccagctgcagcagcatgaacg

SEQ ID NO: 374452 - DNA, 122 bp, Homo sapiens
ccagtgcagagcctctcggtggacaggctcagatccagactttttggcaaggaggcaaaacgaggcgggagtagggatcaccgtgcgctgcctccaggtcactccgcatctgctgtcggccc

SEQ ID NO: 374453 - DNA, 122 bp, Homo sapiens
tgggctgcggcctgcgcgcagcaggagcaggacttctacgacttcaaggcggtcaacatccggggcaaactggtgtcgctggagaagtaccgcggatcggtgagtgcgcggggtctggcggc

SEQ ID NO: 374454 - DNA, 122 bp, Homo sapiens
aattatgtttctttatcagtttgcttcttactctgaacaaacatattacgccactaagaccgctattatcgcctcctctttcctcctctttaaagtagctgactatgccctttaagtctgtt

SEQ ID NO: 374455 - DNA, 122 bp, Homo sapiens
gaatgatgagcccgtcattgtgaggcagggcccaaagcggactggccagggaacactagccggagacaggctgagattcgtcacgcctctgagtgctcccagtgcctggcctgtttggcatt

SEQ ID NO: 374456 - DNA, 122 bp, Homo sapiens
accactggcgcaccttgaggacctaatgccgggcacagagggacaggcgctgcaggaccccgtgtatgcggctcctagagttctcagacccctggagacaggaagaagagtgggggtgccgg

SEQ ID NO: 374457 - DNA, 122 bp, Homo sapiens
gacgcccggggaaaagcaggtccggggaggtgggccgagagtcccggccagcgtgcggggcggaggcagggtccggtgcacctgtgcggccgcgggccggccacttggggtctgtggtgccc

SEQ ID NO: 374458 - DNA, 122 bp, Homo sapiens
tgggcccaccggctctcatcggtcatcaagaacttgcagaaagccgggcacggtggctcgcggttgtaatcccaacactgtgggagtccaaggcgcgaagatcgcttgagccgaggagttag

SEQ ID NO: 374459 - DNA, 122 bp, Homo sapiens
ctgtgccagcctccccacgcctagcgggtcacagttgacaggagagctgccctctgcagccgcagcctccacatgtccacacagactcaagcctccagcctcaccatggtcaacttttgaga

SEQ ID NO: 374460 - DNA, 122 bp, Homo sapiens
gatccacgttaggagtggtgtatttctattgatcccatctccggtgttgacaaacgccagcgcctaggctttgcagtccggggctgcagtttgcagtagagctaagcggtgtgcggctttaa

SEQ ID NO: 374461 - DNA, 122 bp, Homo sapiens
ttggctttgcccccggagccttggaaggttaacccggctgcggccttggaatcgtctagacggcacccggagccctcaccccgtccagggcctcctcaaagcaggtgagccagtattttcgg

SEQ ID NO: 374462 - DNA, 122 bp, Homo sapiens
ccctccaagagcacacagaggctcgtgtctaccgccccaactcgggcggctgcagccgcgcgggagagattggcggtgctgctgcctgctcctggctcccacccactccgtggggcacacag

SEQ ID NO: 374463 - DNA, 122 bp, Homo sapiens
tcaacacttgcccttctcaccattcagggtctcctcactgggactgtcactctggagcttcgcagagcaccccgcctttggaaggtgagagggaagaaaacgcagcactgtcctcccactcc

SEQ ID NO: 374464 - DNA, 122 bp, Homo sapiens
gcgcgcctggtgagaatgtatcttaacgagtatgttcttaagccggccacagaaggaaagcggtaagtgtcccgccccaccagcccccgtccaggggccctcgctcagggtccacccctgct

SEQ ID NO: 374465 - DNA, 122 bp, Homo sapiens
cagttaccacatgactatattagggaagttgcctccctctctgccagcacctgccaggttcgtaaacttgcctcaagctgtttttgcttccctctggcagacagaatactttccctgaagca

SEQ ID NO: 374466 - DNA, 122 bp, Homo sapiens
cctgccatgccaagagcactgtacttttcatttcatcttgctgtaaccaccacagtgctccgtgcatgggacaaaatgatgcattcaggaagcgtgtgacagttggtcactctaagtgcaag

SEQ ID NO: 374467 - DNA, 122 bp, Homo sapiens
gacgtttcgcagttaccgtggtaacgcgaccatcggttccctccttccgttttctgaaaacggagaccagaaagttggcatatgatctgaaggtgcaggaagctagatcttgaaagtctttg

SEQ ID NO: 374468 - DNA, 122 bp, Homo sapiens
catgctgtggatgaaattatggggtacataacttctttcatgggctccctttgacagcaacgtcatggatagactgctccctctctctggttgaactaatgcatggaccaagcgagctgctt

SEQ ID NO: 374469 - DNA, 122 bp, Homo sapiens
tgtgaccccaggccagtccttttccttcattttcatccccatagtgagggcagtaatgagcgtctaccaggggccagatactatgctgagctttctttgcattatgtggcttaattctcagg

SEQ ID NO: 374470 - DNA, 122 bp, Homo sapiens
ccaggccttaccttgtgccaattaaatcagaatttctccaggttgggcccaggcatctgtcgtttttaaaactcaacaggtgattctaattgcatccagttttgagggtgtgaaacagtttg

SEQ ID NO: 374471 - DNA, 122 bp, Homo sapiens
caagccccggctgagggtctccggcccgcgtccccgccccctctgcctccgcgccaccgtcggggacagagccacaaaggccgagcctcctggcccagccagcctccggggcccccctcccg

SEQ ID NO: 374472 - DNA, 122 bp, Homo sapiens
cagccccaggaatggtttcggtttgagtgcacgtctgaacccaagggcctcgtgctgctgcgggggcaatagcagagaggaggcgggggtgcagagaggaggccggggtgccgtgaaggcag

SEQ ID NO: 374473 - DNA, 122 bp, Homo sapiens
ccttgcccccaaacctgtactgtcccggaggaggttgggaggtggaggcccagcatcccgcgcagatgacaccatcaaccgccagagtcccagacaccggttttcctagaagcccctcaccc

SEQ ID NO: 374474 - DNA, 122 bp, Homo sapiens
tacaccatcgcctgcccctttacccagcagcccctccccatcacatctcccccaggaaggcgaagaaggggttttgccttggttaactgtaaccactccaggagagtagtcttaaggctgat

SEQ ID NO: 374475 - DNA, 122 bp, Homo sapiens
gtataaagacaccatgagaattggcaggaggtcaaaccgtagattctgagatgctccggtcgctccccaggaagcgctgttttcggaagtgttgacccagcagctggtccctgctgctctaa

SEQ ID NO: 374476 - DNA, 122 bp, Homo sapiens
cagctagccggcaagatgagccctctgtggcctagaatcaggatttaccaagctgaaacccgtccagatggaggacccggtttccattaaacctggatggagttctcagggttatcgtgtgg

SEQ ID NO: 374477 - DNA, 122 bp, Homo sapiens
tggcaatggacgggcaaaagtctggacagtttagggacactcgggttgagcaagccaggacgtttaagtttcttgctggcagagagccaaagagactccagccccaggcatttcctatgtgt

SEQ ID NO: 374478 - DNA, 122 bp, Homo sapiens
aatggaggtttactttggatcccattgttttaatatgacaaatggccatgcatcaagctgcgtagcacagtttatttatgcagacataattagccctttgaaatgaaatatacagtgagcca

SEQ ID NO: 374479 - DNA, 122 bp, Homo sapiens
aataccttttcacagatttaaatccccagggtgaatactcccttctttgttagtacctggcgtgtgttcagtagtcaaagtaattaaaattagcacctatataatgagcttgtcatttttaa

SEQ ID NO: 374480 - DNA, 122 bp, Homo sapiens
agacctacggtgagggtggtggacgaagctggggtcctgggtctgggcccagggaggatgcggcctgtgggaatgggcggggctttgtagatcagggggcggggtctggtgtgatggaggca

SEQ ID NO: 374481 - DNA, 122 bp, Homo sapiens
aggatgagagaaagcatacttatcaatacatcttgtattcatccatgcaggacattacagcgctatgcgcctcaaagacactgggtagatgtctgcagaatggacgaggggaagacacgcaa

SEQ ID NO: 374482 - DNA, 122 bp, Homo sapiens
tgactatggggtgatattgccatctagtggccatttttcgctgcaagtgatccccttttccgacttatgcggcaatgaagagacaataatcaggtgcatacacttaagcactcatctttaca

SEQ ID NO: 374483 - DNA, 122 bp, Homo sapiens
tccatcattcccgttgtccttgacttactattcaaaagctagctgcttcaaaccacagcgcgtctcagctctgggccaggactacgggcagtgtgtgggggagtcctggctctgctccacca

SEQ ID NO: 374484 - DNA, 122 bp, Homo sapiens
ggttttctgactcggagacgcggagctctgtctcccatgtcaaagagaaccagtcagaaacgcacgggtgggctgggagggggtgacagcctctggcttacatctgggaaccagttatgtcg

SEQ ID NO: 374485 - DNA, 122 bp, Homo sapiens
accctccctcgcttggtccgtccagcgcggaaagcagcgtcctctgcgggcgccgccgcacgctcctcagggcccgaccaccgccagactcctcccccgggagccgcgccgcccgcccgccc

SEQ ID NO: 374486 - DNA, 122 bp, Homo sapiens
cccaggagagcaacagtggggagctgttgcaaaccctaggattggagggacagcaggaggcgtgatcatcagaacccacaagacctgctgcatggagagagggagggccacccagcggaagc

SEQ ID NO: 374487 - DNA, 122 bp, Homo sapiens
ggccccgcgccctccctgtcccgcggcccgcaggcccagccctcaagcgcccagcctccgcggcctttgtggcgtcacagccagcctgaagaatggttgccttggagacgtaaacccaagag

SEQ ID NO: 374488 - DNA, 122 bp, Homo sapiens
agatgggagagctagagaagccctgtggggtgtccagggtcctttctgaatcccggagcacggtctttcgagcctcagcgggcgggcggggatccgtggcgaaagtgcagctcagtagcgcc

SEQ ID NO: 374489 - DNA, 122 bp, Homo sapiens
taggtgacgcgccaacttaatcatgtctgacgtcacgtctggtcgtcttggctagccggccgagattggccaggctggcttggggactcccctgctaattggaagtccaggttgcctggtct

SEQ ID NO: 374490 - DNA, 122 bp, Homo sapiens
gaactccaggttttcaagccttcagactccacgagttatgcctctggctcttctggttctcgggcctttagactcagactgaatcacaccatccaccttcttggctctccagcttgtagacg

SEQ ID NO: 374491 - DNA, 122 bp, Homo sapiens
gatcccagactctgaaccccagacttcagactccggattccagatcccatacctcagacccggaacccccaacccaaagaccaagcgcaaactccagaccccagaccccggacccaggtggc

SEQ ID NO: 374492 - DNA, 122 bp, Homo sapiens
ctcaccgtcagacggccccgggagtagcgcacagccaggaaggtgtcgtgatcgcggttgcggaagtcagccgtgcagcccgccagctcggtccagcgcccatccttgctgtggtcgtagga

SEQ ID NO: 374493 - DNA, 122 bp, Homo sapiens
cggctcccctcccacccttgaccttttccgccacagctacagaacgcccaagcgctcttccgcctagggtgccctccctgccccgcccacctgcgtcccgcgggctcagcggtgttacgccg

SEQ ID NO: 374494 - DNA, 122 bp, Homo sapiens
atttctgccttttcctgttccccatggaaaagctggtctcaagatccctgtttatacagacggtggaaaagtaaattgggacagcatttcagggaagcacaggtgctctgtagcaggaccct

SEQ ID NO: 374495 - DNA, 122 bp, Homo sapiens
gagcttcccaacacccaactcaggcaaggatgccaaggagctttgcagtacaaactcacacggggtgggggtggggagaggccttctagacacaagggggctccccttcgctccctgaacag

SEQ ID NO: 374496 - DNA, 122 bp, Homo sapiens
gctacttcttgtcttctggaggcgccggcagtggctccggtagagccttgggcgagggctcgggctcccagagcaggaattcgtggagcagcgtgttgaccgtctcagggcattccagcatc

SEQ ID NO: 374497 - DNA, 122 bp, Homo sapiens
actctgttacttgggaatcctccatcgttgcagcttcaggatgagggacagaatgtcaagcgtgaagatgctgttctgtcgctttctagctgcaagacctttggcaagtcaccttcctattt

SEQ ID NO: 374498 - DNA, 122 bp, Homo sapiens
ctgtcctggttgctctcttttcgtttaatattccagggaatgtgagagcttgtggggaaacgtgagtgcattagcagcaggccaatgcttgcttagtgaaatgggaacaaaggcaagacaca

SEQ ID NO: 374499 - DNA, 122 bp, Homo sapiens
cggccatggcgggcaaagcatacgcgcgtgaaactcagcctatttccgctctgccagtggcgtaattcctgtcggggcgtgtcttctcccggaaatggtctaagccccagctcctggcggag

SEQ ID NO: 374500 - DNA, 122 bp, Homo sapiens
aggcccacggcgtacgagatgcaggcgaacacgaactgtagcgagttggcccacagcggccgcgctttctccatggccccggcctcggcgcgctcggctccggctcgggggtccggcacggc

SEQ ID NO: 374501 - DNA, 122 bp, Homo sapiens
tgggctcctgggtgggcactcggcctgtgctcttctcaggctgtgtaagggaggctacctcggaccccgggggtgacgaagacgattcggcaggaacttctgggaggcctggagggacagga

SEQ ID NO: 374502 - DNA, 122 bp, Homo sapiens
ctgggtgaactgagcacaatgcaaacaagtagcactgagcacacacgcacagtggggacccgctccacgggtttatagcttttgggagctgctgctgcagttcttttttcctgagagaacac

SEQ ID NO: 374503 - DNA, 122 bp, Homo sapiens
taaaaatgagagaagaggaatccatgcctggagttgcagaagttcaaatgagggcctctccgcccctgctgaactgcctcctatcttgccccactgctatcataatttttggttggttaaga

SEQ ID NO: 374504 - DNA, 122 bp, Homo sapiens
tgattaatgttttgaaatgatttaggaacccaaatgcacgctgatgttttccatcagctgcgatccgtatgtctcataaacgatgccttcctgctgtttgggttttgggaattgtttgaggc

SEQ ID NO: 374505 - DNA, 122 bp, Homo sapiens
gaaggctaagtctcaacgttgtgctaataatagcatctttaagtccctggactaagacctcggctcctggttcgggaatcagactgcctgggcggcactccaggctccacagctccccacct

SEQ ID NO: 374506 - DNA, 122 bp, Homo sapiens
ggatcctaggcacatggggacagatggaattgacgtgagggagccggacggtggagagggcgtcagcccagctgtgccctgtgtctccaagtccatataaaaaactaaccgcggctgtttcc

SEQ ID NO: 374507 - DNA, 122 bp, Homo sapiens
tgagttcatcctcatgtctgaagaccatcctgatggaaggaagaagctggaatcttgcctcggctgctgatgtcattgtttatgctaagaatattgctttagggataaacccttaggcattt

SEQ ID NO: 374508 - DNA, 122 bp, Homo sapiens
tgcatcgtccacccccgtccccctacatccctccatcttgtacccctaaagccctatcgccgccctcgggtcccctctagtgtgtctgcacccccacggcatccccttatctatccccatac

SEQ ID NO: 374509 - DNA, 122 bp, Homo sapiens
gacacccacccggccgagcccggccactcctcgcacccacccgggcggtttcacccgccccgccagccccacccacgggctgcgggcggccccgcaggacaaccctcacagagggcggcaga

SEQ ID NO: 374510 - DNA, 122 bp, Homo sapiens
gggtcgtgggaaccccttcggcctcagccatctccccgcggcagccacaacatccggggccgtggcccgacaagtcacaataacagcaactgcgcagatgcgcgattcggcgggggaggtgg

SEQ ID NO: 374511 - DNA, 122 bp, Homo sapiens
tgccaccattcaggatggctacccacatctggtatgaacaccatgacttctgtaagccaacggggcttcctcctcagaacagtgcccgtgcaatcttcctccctgtggccttgatcctggga

SEQ ID NO: 374512 - DNA, 122 bp, Homo sapiens
gaggcagagagctctgcacctactgtcggggctgacaatgatttatgcgcttgtgacccacgtagaccataaacctagtttgctagacgtacagggaactgcgccgcagttaatgcagagga

SEQ ID NO: 374513 - DNA, 122 bp, Homo sapiens
caggcctcttctgatcagactctcagaacaaaagtttctgattttaagaaatcctaaagacgaaagggaaaagaaagagaatactaaattccttgggagcaggggttagtcttgttcattca

SEQ ID NO: 374514 - DNA, 122 bp, Homo sapiens
gtgattcttcctctttctcttcctcattatcatacaaattacggggaatgaaggaagggacgtgaattcctatctgggatgccaggtcctgtcccgtccccagccagcagcctcattctctc

SEQ ID NO: 374515 - DNA, 122 bp, Homo sapiens
taggaagatctaatttacaaaggcaatcccatcctccctggtagtgtgcacctgcatcctcggcccctaacacatgtgttcccaaggccaccttctccatgagccccggactctccatcacc

SEQ ID NO: 374516 - DNA, 122 bp, Homo sapiens
tgtgcaggaggccaggcggctcgccttacagggacccggccacctctatatatagcccctcgaagacagctgctcagtctaagcaaaccccagcaggaaagcaggggtacagagaggagccc

SEQ ID NO: 374517 - DNA, 122 bp, Homo sapiens
tggtggaggaagggaagggctggcttcttcccgttggcaaatggcagactgtgggcaggacggggcagtccaggaaacaagatgaaacacagcccacttgtctgtcatgcagacatgtttgt

SEQ ID NO: 374518 - DNA, 122 bp, Homo sapiens
gactggcctcgtcccacaactttggggtgggggatcccccagtcaactctctcccgcggacgggcagctcctgcaccaagccccattcccagcgcttgcctacctcggggtccacacaaacc

SEQ ID NO: 374519 - DNA, 122 bp, Homo sapiens
ggggagcccctccgagaccatgaggaaattcaacatcaggaaggtgctggacggcctgaccgccggctcgtcctcggcgtcgcagcagcaacagcagcagcatccgcctgggaaccgggagc

SEQ ID NO: 374520 - DNA, 122 bp, Homo sapiens
ggtgggatgtggctgcaaaaaatggtcggattcatggaagtctggtgtccatctggcaggcgttagtggtcccacgaatacagctgtgtgccttgaacacatactgcagagcttccagagag

SEQ ID NO: 374521 - DNA, 122 bp, Homo sapiens
cctcgtgtacatcagagtcactcttctgctgctctggcttggggtatttttgtctatttccggctactgtcaggctgggccctcccagcatttcacttccccggaagtggtgatccccttga

SEQ ID NO: 374522 - DNA, 122 bp, Homo sapiens
ccttcctttgggcttaagccagcctggtttggtttccgagtctttcaaccaaagggatctcggtagaagcaggcagttgtgcaactggggcccaggcacgtgactcaacttgcccagggtca

SEQ ID NO: 374523 - DNA, 122 bp, Homo sapiens
tggctcataaacttggtctggtcaatgaatctgctgtgctgggagagagagcttgtcagacgagtcctgtctgtgttgtggagaggttgccagccagctgcaccagtgtctgaagggcactt

SEQ ID NO: 374524 - DNA, 122 bp, Homo sapiens
ggctggagtgatttttttgataatcctgctagagacagaatgggtaaggatgggtaagggcgaccaccaccgttaagcaatgacatgcgagctccagcaccgcgtctccccggtaggatgct

SEQ ID NO: 374525 - DNA, 122 bp, Homo sapiens
tgggccctgccagcgccctcagccaagtaaagcgccctcgaccccggaggccgaaggcaccgggaccctgaggcactgggacccccatggcaccagcaggacgaccacaggggcgcagcctc

SEQ ID NO: 374526 - DNA, 122 bp, Homo sapiens
gtaggagatggcccagaccgggtgagggcagaagcctcactcacgggggaagaaggcactcgaggtcgctctgaggaccgctgggctgggatagaccacccatcccccgccggggagacccg

SEQ ID NO: 374527 - DNA, 122 bp, Homo sapiens
gggaaatggctgggccttggggtgccccagggtcttggaggggaccgggtgttcaggtttcgcacaagtacaggagggaccggcgaccgccctccccccgccccgggaggctccgccaggga

SEQ ID NO: 374528 - DNA, 122 bp, Homo sapiens
cgtctccatgtgccagattatgaccactgcgccccgccagggcggcttgggcgtggtcggcggcaaggggagcttccagagcgacccccaagagccggagactccttcgcctgggatcgggg

SEQ ID NO: 374529 - DNA, 122 bp, Homo sapiens
aagatcccacagacaggtttccccaacactcactagactggctgacaatgggagaacaggcgagctcaacctactccccttccctcctgtcacacaacacatgcaaaaaacatctcgtagag

SEQ ID NO: 374530 - DNA, 122 bp, Homo sapiens
cagactgctgtgctagcaatcagcgagactccgtgggcgtaggaccctccgagccaggtgcgagatgtaatctcctggtgggcagtttttaagcccttcggaaaagcgcagtattcgggttg

SEQ ID NO: 374531 - DNA, 122 bp, Homo sapiens
ggagcggctgctccgcgggaagcggtgcaccttgatgtgcttggagaggtggtcgctccgcgcgaacttcttctcgcacacaggacactggtacggcttcacacctgagtgcgagcgcctgt

SEQ ID NO: 374532 - DNA, 122 bp, Homo sapiens
atatacaaatattacccgttttatataagggacttgaacatcttcagattttgatatccacgggaggtcctgaaaccaatcccctatgaatacaagggacaacaagggacaattgtatatgt

SEQ ID NO: 374533 - DNA, 122 bp, Homo sapiens
aaactgccacttgctggctgaggagagccgctgcggcgttccactgtcacgtgagggggccggtcctcttcggcggcggcactcagtgagtgacgccaagtggccaatcacaggccagcctc

SEQ ID NO: 374534 - DNA, 122 bp, Homo sapiens
accatgccctaccagctttgctaaactgaccagatgttgttagtcaactttttagcataacgtcagtgttttaggctctggatgcttcatttgcctcaagtaaataaggacttgtcctatct

SEQ ID NO: 374535 - DNA, 122 bp, Homo sapiens
ggctgttgtccttattgccactcttcccacccagcgcccacctgttccctgccccctcgacgtccctctggcttggtcacccatgtgtgttagaggctgggccccagttctctggggatcct

SEQ ID NO: 374536 - DNA, 122 bp, Homo sapiens
gcgggcgcgctctggcggccgggccgctccaggctgaagccgccggaccacgtgtgtagtcgcagctgccatctttcatccgggcatcggccatcttggtaaaggcaatgttctagattttc

SEQ ID NO: 374537 - DNA, 122 bp, Homo sapiens
ctgaaggtaacacatatagagcacatgctatgtgcctaggcattgttcataatatacatgcgaattgtctctcctgtccttaatactatggattctctcatttgatcctcttaataatcctc

SEQ ID NO: 374538 - DNA, 122 bp, Homo sapiens
gtatagttcttgggaaagtcagtcttacaacttctcttgttttcttttgaaaacagcctgcgtaaccagaggcaaagaagcagaatgaggtcacacttcctgttgggctcacatcagtggca

SEQ ID NO: 374539 - DNA, 122 bp, Homo sapiens
gagatgtgacggtgacagacgatggccaaggccatcttaccgagtgccaggcacgggcctcggcacctgctgtgctctgtctggggaagcgggcacagagatgaagcggccccacggcggtc

SEQ ID NO: 374540 - DNA, 122 bp, Homo sapiens
ttctatggcacctgtcagtaatgaggtgacacccctttccaccttcccttgtggaagtggcgtcaggaaaagttagcttacaaaaaaagtttaactaagactaaaagtctcataacataata

SEQ ID NO: 374541 - DNA, 122 bp, Homo sapiens
gccccgcgccccgcgcccgcttgtaatccggtccgctccttattcagccgccgggaactgcgaggaggcgtcatgtagcagcagcagcaaatccgcctcgcatttgcaactctttttttttt

SEQ ID NO: 374542 - DNA, 122 bp, Homo sapiens
gagttcagcggacacgtgatattcactcacatcgcaggcattccggtggtgaggggatcgcgcaccagctgtgtttatctcggcaaaggcttgagagcctactacgccatggtaaagcccca

SEQ ID NO: 374543 - DNA, 122 bp, Homo sapiens
aacatgtcattgttaaatattaaattgggctgggcagattgacttatgcccataatcccacgttttggaaagctgaggcatgaggattgcttgaggctaggagttcgaaactagactgggca

SEQ ID NO: 374544 - DNA, 122 bp, Homo sapiens
acgttccgctgctggggtgagtcctgctcctttgttcttcccagccttgcaccactggctcgggggctctcaggtggcgcggccgcgaggcggaccctgatggccatggtggcggtgccggg

SEQ ID NO: 374545 - DNA, 122 bp, Homo sapiens
ccctataacggcggctgtgagtgtacgtgtgtctgcgtgtttcagctccaggagtttggtcgccaccagtcagtgcctgtgattttctcagagcggcagaattggtgcgggaagccagatct

SEQ ID NO: 374546 - DNA, 122 bp, Homo sapiens
tgctgccgctcaccttcagggtgcagcctgggtgcccccctgacgtctgaccaacaatctcgttttgaaagtgttctaaccactgtgttaggatagcccgtcctattgcctgatgaaaatat

SEQ ID NO: 374547 - DNA, 122 bp, Homo sapiens
gtgccagggtggccgccgcctcagtagcacgcggacggctggaaagtcagcccccgtttccgcctcacccaggattgctccactcggggcctttccgcatcccagccaccactccattccga

SEQ ID NO: 374548 - DNA, 122 bp, Homo sapiens
ctctcagctttcctgcctctacaatgggcgggtgtggtcttagaaggggccctctgagctcgcagggcagccccctgggccggccccgcctctggccgctgtctccctcccgccctctcttc

SEQ ID NO: 374549 - DNA, 122 bp, Homo sapiens
ctttatttaaaattttttaaaagtggagataatagtacctacttcccagcatcattgtgacgattaaatgtgctcagcaggttgcataattgtttctgatctagctagtatccagtatttgt

SEQ ID NO: 374550 - DNA, 122 bp, Homo sapiens
acagtgacctccattcgtctcaccttcttcagcacacccgccatgacagcgccaacgactcggtgacgcacaaccctttgggaacaattctcagacctgctcaatcgaccaccgaggtcgcc

SEQ ID NO: 374551 - DNA, 122 bp, Homo sapiens
cgccgcggtctgcaccgccgccccaatgggcttcgccacctgccagcaaggaggacctggcgctccttcaggcagctggccagtcaatcacctgtgcgcgccactgccgccgcgcccgcccg

SEQ ID NO: 374552 - DNA, 122 bp, Homo sapiens
gtccccatgggcgcaaacactgaggccttagctagcagagagcacaggcttcagagcggccgctcccagattcctgcactgcccccctctgcagcttcacaaacctccgcttccgcttccgc

SEQ ID NO: 374553 - DNA, 122 bp, Homo sapiens
gggctgtggggtgggctgggaggggcatcctagctccacctctgcccagctgtgtgacttcgagcggttgcttaccctctctgagcctccatttccttgtctgtaaagtgctcatagcagtg

SEQ ID NO: 374554 - DNA, 122 bp, Homo sapiens
aatggcagaaattgtttttcatttctacatctgcagtacctaacagagtgctaacaatctcgtgataataagagtttgaaaaataatgaacgaagtggtatatcttattaaaacctgaacta

SEQ ID NO: 374555 - DNA, 122 bp, Homo sapiens
acagcggcgccaccccacctcgttccccaacaacctcaacaccggaagagaaaacccaggcgaggcccccttgggctgaatgcactcggctctgaggaaacctccggcatccagcacctcat

SEQ ID NO: 374556 - DNA, 122 bp, Homo sapiens
aaaactgttcatctattttacagaggaagaaacagaggcacagagaagttaagcaagtcacgtaagatctcacagcccatgagtggctgaaccagggtttcagccttgatttctctagctct

SEQ ID NO: 374557 - DNA, 122 bp, Homo sapiens
cgcctgctttctgcagccgctgcctgggaggggttccgaggttctgggcagccacagccccggaggccttacaggagcgacctggcaattcccgccgccggccgccagaggaagctgctttg

SEQ ID NO: 374558 - DNA, 122 bp, Homo sapiens
gcattttccagcttaaaaaagatgtgcacattatttttcttggtttactcttcctataatcgataccgtttagtgtagaaaagccttctccttgctccattgttttgaaagaattaatatag

SEQ ID NO: 374559 - DNA, 122 bp, Homo sapiens
gctggcaacaataacgtaaacgtgtggacccagatttcattgatctggaacttgatccggcgcgtttccagtaagcccgacggcgcgctcttcccagcagagcgctcaccagcgccacggcc

SEQ ID NO: 374560 - DNA, 122 bp, Homo sapiens
aggacgtaaccttttcttaacatctggggctcaattagctaatgacagcaaagccttctccggtgtcgctgacccctgggcggcagcccagctcccccacccccggtatttatacagctgcg

SEQ ID NO: 374561 - DNA, 122 bp, Homo sapiens
acccaccaatgttgctaccttccttcccaggctaggtactgctgtgacaataatgcaagtcggcagtgttgcctaaagatgtgcaaaatcaagaagatgaaattcattaaatttttttccta

SEQ ID NO: 374562 - DNA, 122 bp, Homo sapiens
aaaccctcccatcagaccagcaattggctcgacgcttgagcccggatgtacggcacgcgtcgcgacctaacccggaaacactgcctcccgaaaaaaaggtaaactctagactgcggaaagta

SEQ ID NO: 374563 - DNA, 122 bp, Homo sapiens
cccgggcaccttctccccagccctcgttggtcccctcggctgcacatgggcagggctgggcggctagaagggactgcccctggatggccagcacttcaccctgctctgagtgctcttcctgg

SEQ ID NO: 374564 - DNA, 122 bp, Homo sapiens
cgacagcagtgatgattcggatgttcccgacgacagcagtgatgattcggaagctcccgacgacagcagtgatgattcggaagctcccgacgacagcagtgatgattcggaagctcccgacg

SEQ ID NO: 374565 - DNA, 122 bp, Homo sapiens
taagaagtgtttgcttttgaaagacatctggtttctgtggctaacgcccagtggtcaggccgcccaggtcacaggccggccgggggcgggcggtgggtggggactgctggggcgtcagcggc

SEQ ID NO: 374566 - DNA, 122 bp, Homo sapiens
actcgaggggatctggcctcttatgctgatcacctcaaggtctaggaggatcttaattgtcggatttgcaaggcgcctcagcatgatatcataaggctcgtgacattctgaatcaaggcgac

SEQ ID NO: 374567 - DNA, 122 bp, Homo sapiens
gctcttcacaggcatttggtctcccccatcaccactcgcaaccctaaatctgctctctcacgctatgggcaggctcctgggggctgtcagtctgcagaacagtcagctgtgcaggagcgtcc

SEQ ID NO: 374568 - DNA, 122 bp, Homo sapiens
gtgccgaagtggcttgagaagcacagtgaatggtggcgaagcccgagccgggtcgcaagacgcccgctggcactgccggcgccatggcggccgccttcggccacggcggaggactcgctttc

SEQ ID NO: 374569 - DNA, 122 bp, Homo sapiens
gagacggtgaaaacaaaaatttttcttgatctcctgttaagagaatagtcgaagcacttccgccttgcctctagatgtctggctggccagatagaatccctgtttctaaccaacagctataa

SEQ ID NO: 374570 - DNA, 122 bp, Homo sapiens
ggaatgagggctccccaggcccacccccagttcctgagctcatctgggctgcagggctggcgggacagcagcgtggactcagtctcctagggatttcccaactctcccgcccgcttgctgca

SEQ ID NO: 374571 - DNA, 122 bp, Homo sapiens
ccatgttctccttcctttaaacagtaatcacataaatcactgggggtggggcctgggtatcgagtaattctaatatgagctaggggtaaaagccattatgtcatttccctttcaaaagacat

SEQ ID NO: 374572 - DNA, 122 bp, Homo sapiens
ccagctgctgggccagcagcttgtggatgtgcccgggatgcctgtatctatgcgcgtggacgttggagtagacagaaaccagaggcttcttaatgtcgactgcctttaaagcttgcgtcagg

SEQ ID NO: 374573 - DNA, 122 bp, Homo sapiens
cgaatacagaatttctttacccatactgaatttgtgtgtgtttacaaggtttttgtgtttcgcatcagtggaaataaaagattgacgttgctacccactcaaccaggcattttcagaccaca

SEQ ID NO: 374574 - DNA, 122 bp, Homo sapiens
ccttctctacagcctgctcccccatctccctcagggggagttcaccaattggctgaagagcggaaagacgaagccgactcagtcccccgccccagccgagcccacctcctttccctgcagta

SEQ ID NO: 374575 - DNA, 122 bp, Homo sapiens
gcaagagcgcacggcccggctcgagaggaggggcggcctgggggcgccactagtagttcccgaaccctgtcacaaaatctgcagcctcccggccccaattgcgcttcttcctcttcagtcct

SEQ ID NO: 374576 - DNA, 122 bp, Homo sapiens
ggccagtgatggcccattgtcaccagttcaggagggagcccagggagaagtgaagatatacggttctgtccgaggatgccatccagttctgccatcatgaggtgtcaccaaaatgccatctg

SEQ ID NO: 374577 - DNA, 122 bp, Homo sapiens
ggagctgctgagcggtggaatccaggtcctcgtctccatgagtctggacttccggccacacgcgtggggaggcaggtcccagacggctgccttctcccctctgctcaacccctgaggccttc

SEQ ID NO: 374578 - DNA, 122 bp, Homo sapiens
ggactcaggttatgcgtttttggccagaattccacatgatcaggaggcacatgatgtcggcgtgcccagcaggggtgacggtgacgcccatggcctggccgaggtggtagccttttgctgct

SEQ ID NO: 374579 - DNA, 122 bp, Homo sapiens
gagctcaccgcccccgttcgccattgggtgcgggtgacgtcgctcatttgcatggaggggcggggccaagccgccgacgcccgcccggccgccgttgccccggcgacgcgcggtaaacgcca

SEQ ID NO: 374580 - DNA, 122 bp, Homo sapiens
tccaaggacgaaattgccaacaacgcgtttctcagagtgtacccttgtcattaagcgacacgtgactgtaactgctattataaaccacagtggacccttgagcaacatggatctgaactgtg

SEQ ID NO: 374581 - DNA, 122 bp, Homo sapiens
ggaactggagtggagagatggcctgagctggtcagcacatacttccccatgcccccgcctcgcccctcctggcctgtccaccaccacctcctggggctcggcccgcggtccactctggtgtg

SEQ ID NO: 374582 - DNA, 122 bp, Homo sapiens
aatgccctcagccactacaaggtaagcctgggtcaccgcagccaggccctgcctccacctcgctgaggtgctgcatcctacatgttcatcatgcctggcacctcagagtagctcaacaatgg

SEQ ID NO: 374583 - DNA, 122 bp, Homo sapiens
gggtgctcgccatttgcgccggggctttcccgtcgcgcgccagcagaagaggggatgccgcgcccagcgcgcatgcgtcggccccacccgacaccccccgccccccgcccccaacccaccca

SEQ ID NO: 374584 - DNA, 122 bp, Homo sapiens
gccgcgggctggggtggccattgtggtagagtttctgcttcacgtgtaccatgttcccggcggcctcctcgaagggcctgtgcggccgccggcccagctcccgcaggctgcacagcttgggc

SEQ ID NO: 374585 - DNA, 122 bp, Homo sapiens
ggggctcagagctgcacacttacttcacaggagcactgccagcctgaacacccactccagcgggtgggttctgttgtgcagaccctccaaggtgccacttcctacagggtttgcctggcctt

SEQ ID NO: 374586 - DNA, 122 bp, Homo sapiens
aagacctcaccttctccccggagccgcggaggctgttctgctaaactgtctggaccacgacgaccccctaggaggccgggtcgcttattcaatatggcggcctcggctaactctgtcagccg

SEQ ID NO: 374587 - DNA, 122 bp, Homo sapiens
cgcgaaatatattctttgtgtggttcgctcactcgtgcctggttctccgagagcgcagcgcgggctttattctcagggggtgtggcgcctcgcccccaaacccagcagcccagcccccgctg

SEQ ID NO: 374588 - DNA, 122 bp, Homo sapiens
gctcacaacttggcgaatggagcgagaattggatttcagtttgccccttgctccgtcagccgcgcgccctgatgcagtgcacaaccttagctgctgtgcgcgatggggggcgactcctcggc

SEQ ID NO: 374589 - DNA, 122 bp, Homo sapiens
atggaagagagatatgggaagctgttcaggcacagaggcaaactgtgcaaaggcagagcccgttggggaactgtaggaatagatctgagtgcttcctcagtgtgctggagggcaggaagggt

SEQ ID NO: 374590 - DNA, 122 bp, Homo sapiens
cgctatgaagcagccatccaacggtcagtgaagaagacgtgggccgaaatccggcagcagcgctggtcctgggcaggggccctgcaccacagctctccaggacataagaccagtgagtaggc

SEQ ID NO: 374591 - DNA, 122 bp, Homo sapiens
tatgacacttctttaagttcagcattgatgtccatgaacatagttgcttgaccgtctgtccgatgattacactatctggagtgcccatgtgcctgtatttgttatttctgctaattttgtct

SEQ ID NO: 374592 - DNA, 122 bp, Homo sapiens
ggttttattgagtggaactagctctcagcagatggggaacccagaagagagatggtttcccgccggagtcgggcactcagagaaccacactctgcattgttctgccagtcggtggactgtgg

SEQ ID NO: 374593 - DNA, 122 bp, Homo sapiens
cttcagttgttcaaacagaaaaaggaaaaataaatttctattcaaaatgttgctgtgaagcgtaaatacgatactttgtgaaaagcacctgccactcagtgggcattcaaggactgtaactt

SEQ ID NO: 374594 - DNA, 122 bp, Homo sapiens
acagcaggagagcagttagacgtccacttagaacggattcactgcgctattaaccgtacccgcctccccccgcaccggcccaacctttacacacaaacacattccctcccccaattaactaa

SEQ ID NO: 374595 - DNA, 122 bp, Homo sapiens
ttctatagctgtaaaatgggggaatgttccctacatctgaaggttgttatgaagacaacacgaaaccacatatgtcaaccactttgtgggtgtttgacttatgtgttcaatatgtgctaatt

SEQ ID NO: 374596 - DNA, 122 bp, Homo sapiens
ggcggagcgcgctcgggggcggggctcggggcggggaaggaaacgtgatgattgcgcaagcgcagaaaatgggccctcttggccgtcgggacttgtactgttggtgactccgtctccttaga

SEQ ID NO: 374597 - DNA, 122 bp, Homo sapiens
gagctcccgccttaggcgtagagatgcaaggctgaccaatcgttgtcactcttgctcccacgccataccatcagctcttcccattggtcaatagctgacgtcgctctcacttctctaggcag

SEQ ID NO: 374598 - DNA, 122 bp, Homo sapiens
cgctctaacaactggcttcagactgtcctacgctctgacaactggctccagactgtcgtacgctctaactgacaactggcttcagactgtcctacgctctaactgacaactggctccagact

SEQ ID NO: 374599 - DNA, 122 bp, Homo sapiens
tggacgcctatcttttttctctccctcttccctagctctggattgattgatgaccaccggcggccaatggctctgacaccacgccatcctcggtcgggcatcacagccccacgtccccgacc

SEQ ID NO: 374600 - DNA, 122 bp, Homo sapiens
ggccaaatccagcctattgcttagttttataagttttattagaactcagtcacactcattcgtttatgtattgtctgtggctgcttttgggtctacagtagcagagttgagtagctgcaaca

SEQ ID NO: 374601 - DNA, 122 bp, Homo sapiens
aactctcttctcctggacgccatctccccggagctgggggcctcggctccgcaacggctgcgaagtttcaccgatgccgcaggcctaaggccacccttggtcccaaacccagcgccgggacg

SEQ ID NO: 374602 - DNA, 122 bp, Homo sapiens
ggtaggggcttctctggggcgctgcctgtgctgcactgtggtgagggcttccccagcgcacggtgtcgagttgggcccgctcctccgcccaccctgcctcagcagcgtggaatccacgccat

SEQ ID NO: 374603 - DNA, 122 bp, Homo sapiens
agctagggttaagtgaaggtgcctatgatttgaaatcattccaagtttttgaagggaagacggactgcagcctctgccatgttggaatttcaaacccaaaacagctgcttggaaggagccag

SEQ ID NO: 374604 - DNA, 122 bp, Homo sapiens
agggagggagaagggtgggatccgcgagggcctttgggaaatgtagtctttaatctggcccgtgacagatgcttgcggaggggcgcgttcaaactcagaccgtgaccccgctaggaataagg

SEQ ID NO: 374605 - DNA, 122 bp, Homo sapiens
agattctagagagcacgggcaggtcccggaggtctcagacccgcaggtagatctcgaattcgtagacttgcaggcgaagcccagatatcgtaggctgatcctaaagactcagattcccgagg

SEQ ID NO: 374606 - DNA, 122 bp, Homo sapiens
cctgtgggggggcgggtggtcaagggtgggtgggctgtggggagctgaacagaggggccccgaagcccaaaaagaaagccatggctgagcattgagatgatttttatttactcctcaaaggt

SEQ ID NO: 374607 - DNA, 122 bp, Homo sapiens
gctctgcgtgtttgaagatctcggtgttgcttccagttgccatagagtttcccgcttgcacgttcactacattttactcatccaatctccaggggatggacatctcggtaggttgcagtagc

SEQ ID NO: 374608 - DNA, 122 bp, Homo sapiens
cagtgactcctccggagcaagggcctggccaggcagcagctgcgctgggcgatgagggaccgttgggtaattgggggcataggaccgggcttcgctgggttcggggcagaagcgccgaagct

SEQ ID NO: 374609 - DNA, 122 bp, Homo sapiens
ttagcctggagtgagctcgccccgcccggggttgcgcggccctggggggtcctctcgcggcggctcctgggacctgctggcgccccgggcagagcccggccccatcccaggagtcgcccgga

SEQ ID NO: 374610 - DNA, 122 bp, Homo sapiens
gaggttcggcggctgatggcggatcaggatcggaagcctgcgtaactttctcccttgatccgggagtctttccactgggtaaggcgcctccccggtccaccccagcgccttgtgcggggcgg

SEQ ID NO: 374611 - DNA, 122 bp, Homo sapiens
gagaaggaaacgagagggagacacagcattgagtcgtgaacgcagatgcgctgaaatgtacgccccgacgcggaggccccggcccccagcacccccaaagccggctgcagcaggagatgcag

SEQ ID NO: 374612 - DNA, 122 bp, Homo sapiens
aacaactctttattatggaaaatctcaacctccggagagtgcagacagcagccttatgaacgcctccggatccagcctctatatttaacaatcgctaacattttgccatatttgcttcatct

SEQ ID NO: 374613 - DNA, 122 bp, Homo sapiens
cggcgaggcaaggaagaatcaggggcaggggcagttgcggggccactcacccggctccggcgcgtcctttcactgccgccggcgagtgctggggcttcggcccaggcaggtcggtggccccg

SEQ ID NO: 374614 - DNA, 122 bp, Homo sapiens
caggtaggcaatcagcccagtggcaaagggtagctgggcttaaggcgagggacctcacaccgccagcagggctgcaggagcctggtggacttgtggcatgtggggaaacccgaagggaggct

SEQ ID NO: 374615 - DNA, 122 bp, Homo sapiens
catgttccacacagatgagggattgcttttttttttttttttttttttgagatggagtctcgctctattgcccaggcaggagtgcagtggctctatctcggctcactgcgtcctccacctcc

SEQ ID NO: 374616 - DNA, 122 bp, Homo sapiens
gcagcaaagccacagcaattccaaaggtttgtgtgcttggtagagctgggtggctgcagccgcaggcctttgaagaggaaatgccatccctggtacaggcaggcggccaacccatgagtcct

SEQ ID NO: 374617 - DNA, 122 bp, Homo sapiens
tgagcctgagaagctctatgccatgcccgaccccgtgggccctgatgggcacctttaagccgtggctaccctctgtgacctctttgaccgagagatcgtatttaccgtcagctgggccaaga

SEQ ID NO: 374618 - DNA, 122 bp, Homo sapiens
atcacagcaagatgctattgggaattagagagaccagcatgttgctaacaagaaaacctgcgtatgtgattgcagaattctacaggtggtcttaaagaagttttctcatgggccatattcat

SEQ ID NO: 374619 - DNA, 122 bp, Homo sapiens
ccggccctgtacgctgcttaccctgtacgctgctcatgcactcaggcaggctgcaagtgccggatggcctgggagatgggcactgtgggttgctagtttatttaaaggtatgtttactaaat

SEQ ID NO: 374620 - DNA, 122 bp, Homo sapiens
ggacggtccacgccaggtggactgctgtgccccagaggttgattaggttaatttcagcctcgacacaccccactgagttttaccgttgaccttccatgttcgcaggttccacatctgtgaat

SEQ ID NO: 374621 - DNA, 122 bp, Homo sapiens
cactctgaaacttggaggacagggatcaggcaaagtacctaatgtataaaaggagcttaccgagtctgtattaaaggcctgggtcacaaattctagacagtacatcttagtccagaagtcaa

SEQ ID NO: 374622 - DNA, 122 bp, Homo sapiens
gagtcgggcggggtgctctggggctgcccgggggccgcttggagagccactgtcggggatcggggaggagccgtcgctcggatcttcgtttaaaaacacatagaacatgctacatccgcgca

SEQ ID NO: 374623 - DNA, 122 bp, Homo sapiens
agggtgtcagacgcgccggtttctgcgacgcagttagcgcagtctgctttggtgaatacacgatttggtgcagccggggtttggtaccgagcggagaggagatgcacacggcactcgagtgt

SEQ ID NO: 374624 - DNA, 122 bp, Homo sapiens
ccttttaaggcgcagggcgcgaaagaacagaaacagaagtgtccgttcaagtaggtcggccggggtgtcactcgtataaaaacctatgctttgaaggttctcgtgtgtctcggcctgcaggt

SEQ ID NO: 374625 - DNA, 122 bp, Homo sapiens
agcttcctgggccgctaactctcaaccgcaaggcaaacttgggttggggcccagaacggccgtcagccgttaccctccagcctggccagtgagtgctgagtggacactccgcggctacttaa

SEQ ID NO: 374626 - DNA, 122 bp, Homo sapiens
aaatgaccataattcccaaagcagtctacagatttaattcaattcctatgaaaataccaacgtcatttttcacagaaatagaaaaaacaatcctaaagttcataggaaacattaaaagaccc

SEQ ID NO: 374627 - DNA, 122 bp, Homo sapiens
catcatggccaagcatctgccagctgtcattagcccaggttggagatgggaaggggaagccggccacagcttctggctctggaatgaggggcttgccttccacatcttcgcaggttggcgat

SEQ ID NO: 374628 - DNA, 122 bp, Homo sapiens
tctctgtacgtgacaaatgtccacactcaagctcacagcggcctctctcaaccgcctccgcgcagcagggttatccatggctgagactccggggacaaggggtaggcaaaaagaaacacagc

SEQ ID NO: 374629 - DNA, 122 bp, Homo sapiens
aaaccggcccttgggcagccttaggagaagcgggggccggtgtgcgcaggagagggtggacgccccagatgcagccacggtggccaggtcacctgcgagatgccatgggtgggagatgcagg

SEQ ID NO: 374630 - DNA, 122 bp, Homo sapiens
tttttccttcatttcaactttggtgaatctgacaactatgtgtcttggagttgctcctctcgaggagtatctttgtggcattctctgtatttcctgaatttgaatgctggcctgccttgcta

SEQ ID NO: 374631 - DNA, 122 bp, Homo sapiens
cccacatggactcgggaaccgccgagcttcacccacaagggcccacggcccatcctatcacggatgaaaagattacaggactgacaatgaggccctggagggatctgatgcagctggcgggg

SEQ ID NO: 374632 - DNA, 122 bp, Homo sapiens
aatccagattttaagttcgcatccattggctgaattgatgatataaaaaacatcatcagtcgttccaacacccaccttcaaaatcagaatgtttagagtctaaaaaacgctgcctttcagca

SEQ ID NO: 374633 - DNA, 122 bp, Homo sapiens
aggtgggggcaggggccagacagcgcagggcgcggcgggaatcagcaacaaggaccctcccggggaacttttcccattgaaaatctgttccctcgcggccacgggtgatgtctggctggagc

SEQ ID NO: 374634 - DNA, 122 bp, Homo sapiens
ggtgggggctgctctagctctcgggcctggctttgatttggtcttcagctctaggaatcccgcccgccccctcactggaggggagcttttccgggctgccgctgactatggaaataacttcc

SEQ ID NO: 374635 - DNA, 122 bp, Homo sapiens
tcaagcttcccatcctaagaatcacagacagcccggccatgcaccaccacttcgagcctccgaccaactgatagctgctggtcccaagtagcgctaggattttcgctttcccagtcttaatt

SEQ ID NO: 374636 - DNA, 122 bp, Homo sapiens
acgtctcacagtggggcctgtggaacacgcaaatacggaaagttgccctccctctgtgtgcgtttcgcatcctccagctgctgtgttttcgacccacgtttgaaaaaaaatatgtaagtgga

SEQ ID NO: 374637 - DNA, 122 bp, Homo sapiens
ggctggagtgcattggttcaaacacggctcactgtagcctcgatctggagccgccacacccggtctactcttgcaacttgatgttgcatgtacagtcgtgttccattttacggaggaggaca

SEQ ID NO: 374638 - DNA, 122 bp, Homo sapiens
ccgtattggctcgcgggatgatgagagctggggaggtggtcttgtacgtgcagggaaggacgcttgaggaaaaggtcttctgaactgccagtgtgtctgtcactgtgagagaaggagctctt

SEQ ID NO: 374639 - DNA, 122 bp, Homo sapiens
ttcatactgatattctttgcaccccgtaacacaggaaatgaaaatcttctccgcctctcacgtcgccgctgcgccttcaaatcctctgcgagcagactggcctccccccaccggccccctcc

SEQ ID NO: 374640 - DNA, 122 bp, Homo sapiens
tggccatggcgcagctgtgcgggctgaggcggagccgggcgtttctcgccctgctgggatcgctgctcctctctggggtcctggcggccgaccgagaacgcagcatccacggtgagggccgg

SEQ ID NO: 374641 - DNA, 122 bp, Homo sapiens
ggctccgactaccaccgttcgggggaagggagccccttaccgtcattgctgggtccgctccgcggaaacatgtgccggacctgacttgtgcgccgccatcttcccggaaatgccgttttgtt

SEQ ID NO: 374642 - DNA, 122 bp, Homo sapiens
cctccacctgccatcttggtctcctgcctctgcctcctgccccaggccatgccaaccagccgggtggcatttctgaggctccatgggcacccggtttccccacagaatgggtcaggccaagg

SEQ ID NO: 374643 - DNA, 122 bp, Homo sapiens
atcccctttgggtgaatctgtcattttgtccctttcgtgaaccaccgtcggggccaaagacgtctgctgccacctggtggcgggacctggaatgacaagtctctgatccctgctgtctccca

SEQ ID NO: 374644 - DNA, 122 bp, Homo sapiens
ctccagaacaacttcatcactgagctcccggtggagtccttccagaatgccacaggcctgcgatggattaacctggacaacaaccgaatccgcaagatagaccagagggtgctggagaaact

SEQ ID NO: 374645 - DNA, 122 bp, Homo sapiens
tgggatgcagccttccccccgggcacgttcccaagagaaacaacacacgcccgccaaacacgtgcacaaaaataggcccaactcttcagacagcggaaacccacccgggcgccctcagagac

SEQ ID NO: 374646 - DNA, 122 bp, Homo sapiens
gccaccgcttgacgttgacaaaggactcggcactggtgacgtcgtaaaccacaatgaccccgtgggtcccccgataatacctgcagggccagagtgtgcggcagcatgtcaaccccgacagg

SEQ ID NO: 374647 - DNA, 122 bp, Homo sapiens
cgcctccgaccaccagcagcttcccaaagaacagcagcaggtctgtgactttgtccaggacgaccaccctgtgccagaagttagggcaggttgagggtgagaggcctggcaatgctgagagt

SEQ ID NO: 374648 - DNA, 122 bp, Homo sapiens
ggtcctcttggtgctgccggcttcagggggggcttccagcggccttttccgcgagtccggcgggtccaggtctatgggaaccccagtgtgggtcccgttctgctggatgggagctgccgcca

SEQ ID NO: 374649 - DNA, 122 bp, Homo sapiens
agcgcggggctctccaccacctcctctccatccttggtccagcgcacctctgcccagggccggcatagctcacaggtcagcaccacacgctccaggcgcacggctgccacatacaccttgcc

SEQ ID NO: 374650 - DNA, 122 bp, Homo sapiens
tcgggggcgcagcgttgtaatgtgtgcggacgccggaccaggtgggctccctggtgcctccgcggtctagaggtggctctggtgggtgggtgcccgaggattggccctgaccataccccctc

SEQ ID NO: 374651 - DNA, 122 bp, Homo sapiens
attaaaacttgtgaagagttaaaagccccagggaagagccaggccaagggcacgggtcagcgccggcttaaaagaccctctcagggcacgaggcgttcgctgcgggaatccacctgcagctg

SEQ ID NO: 374652 - DNA, 122 bp, Homo sapiens
cattggtgagggggcgcgggctgcttggccagggcagttccctcagctccgggttggagccggagccggagccggatcccgcgcacaccgccacgtcaacctaaacctacaccgccctctcc

SEQ ID NO: 374653 - DNA, 122 bp, Homo sapiens
tccctggacacacagcagggagatgggcaatgagggtgggggttgtggccctgcctgtcacggtccccagcagtgcagatgaattagaccattgagccacagagcctggagggcagatgggt

SEQ ID NO: 374654 - DNA, 122 bp, Homo sapiens
ctccggcagcacctttatctatggttatgtggatgcagcatataagccaggcatgtctcccgaggagtgcaggcgcttcaccacagacggtaaccagccaagtggaagggtacctggggagg

SEQ ID NO: 374655 - DNA, 122 bp, Homo sapiens
cggtgcggcacggcacggtgggagtgtctccggctggcttgcaggtgtggcccggcccctcgggagggcggggagggcggggagggctcggctggcgcggggagggactggagggcctagaa

SEQ ID NO: 374656 - DNA, 122 bp, Homo sapiens
cgaaggggcgtgtacttgtcggttggagctggtcatgaaagagctcgtgggactgcccgacggttctcaggtcccagtgcatcctgcgtggtggctctctgctgaaccataaagcattcctt

SEQ ID NO: 374657 - DNA, 122 bp, Homo sapiens
tgaaagatggtggttgctaatcctgaagccgttgactccccagatgacgttcccgtgaaacgcttggcagttgcaagaggaactcgggtcctcagtgccgtttaccaaggccgacaaagtcc

SEQ ID NO: 374658 - DNA, 122 bp, Homo sapiens
ctgcaccagacactacaacccacacgctatagctgaacagtggatagccaatcaactcatcggtgtgatttctgtaagccaatgataatgtcagacaaatgactttgcatcaggccacttcc

SEQ ID NO: 374659 - DNA, 122 bp, Homo sapiens
ttctgtccacgggattctttttaatgcttctctttaagcagcgtggtggggaggccatggcgatcattagctctggaggcctggggaggacactctgaagaagaaagccctgcgattatccg

SEQ ID NO: 374660 - DNA, 122 bp, Homo sapiens
cagtcagtggactgacgctaatttgtgtaaacttggaaacacttaatttgatagtggagtcgtgtgatttaaaccaaggcaattggttgttctcagaccaagccccaagctgaataggtatt

SEQ ID NO: 374661 - DNA, 122 bp, Homo sapiens
gcctggatcagcagataataggcctctcgcaactgggtccgcagcctgcctgtctccaggcggccgccctccgcccccagggaggagcccgccgctgggggaggcgggggacgccgttccgc

SEQ ID NO: 374662 - DNA, 122 bp, Homo sapiens
gcaaattccttctttactcgccagttcctcctcatcttatagctccaatgtagcttcttccgtaaaggccttcctgctcctctgcacccctcgccatgctatgggtgtcctgatgccttctc

SEQ ID NO: 374663 - DNA, 122 bp, Homo sapiens
gggcggccaagtcgcctgtttgtctatggtttcagtaaatacgtctgttgcggcatctagcggctatgggtggcaacgcggctgataaatttcgggctggtgtagagttagcccttcaatct

SEQ ID NO: 374664 - DNA, 122 bp, Homo sapiens
agcaaggtgggtcaccagcagctgtactggagccacccgcgaaaattcggccagggttctcgctcttgtcgcgtctgttcaaaccggcagggtctgatccagaaatatggcctcaatatgtg

SEQ ID NO: 374665 - DNA, 122 bp, Homo sapiens
tacgtgtgtggaaagggaggaactgacgtgcgccacagtctgattccggtagattctttccgtctttcccctgagatctgagggttttgcaggaagcagggctaccagcagcttcctgcgta

SEQ ID NO: 374666 - DNA, 122 bp, Homo sapiens
tcgactttacagaaacaattttgcattaagaaatgcacagagcaaactccagggaggtcccgcaggccccggctggctgccaggggctctccctcatttgccgtccccttggctgtggagca

SEQ ID NO: 374667 - DNA, 122 bp, Homo sapiens
ctgttgacagggtcatgagtttccgagtatagttttctttttatcttatttttactcgtccgttgaaaagataatcaaggcctacattttagctgaggataatgaacttttttcctcattcg

SEQ ID NO: 374668 - DNA, 122 bp, Homo sapiens
agtcccacccacttagctgcaggagcccctggcctgccctgtacaccctgctccacactacgggcaaatacagggggccccccggaacatcctggctcacccccactcccccgagctgcagg

SEQ ID NO: 374669 - DNA, 122 bp, Homo sapiens
gagtgcttactatgcgccaagcgctgctttcaccattttacaggttttcactctttcaatcgttctaagaagctgcgagggccttccttttattatccccatttttcagaagaggaatccga

SEQ ID NO: 374670 - DNA, 122 bp, Homo sapiens
gctgcagcttcgcagctttaccaggagagggcgccgacggacctgacttttgccttgcctcgcagtagagcccaactagagggtaaacagcagccacagtaagttctagctgttgcagaaat

SEQ ID NO: 374671 - DNA, 122 bp, Homo sapiens
agctgctacgaggtgagcctgcgtgggtgcctgctgctagacctcctcgtttgcttctcacggccgccgggtagtcgggaggaggagagcttcacctgtcggcttggagagatccaggtgat

SEQ ID NO: 374672 - DNA, 122 bp, Homo sapiens
gaatgcttaagtccctgttcctttacttcccttcactcagagtgctctggcttctagggacgagtgtggtctagaatcacagatacggttaaattgcagaatattgcactagtgggtaactg

SEQ ID NO: 374673 - DNA, 122 bp, Homo sapiens
gaagaccgtggcactgcagtacacaaagagtttaattgatgcggggccagccacgccacgcgggcgacagagttattactcaaatcagtctctctgaaggctcagaggttaggagtttttca

SEQ ID NO: 374674 - DNA, 122 bp, Homo sapiens
tgcagcgcgacacctgcgctgtctgctgggtcgctcaggaccgcggtgcggggcctggtgcgctgggccttattaatattaaaagctttatgacagtcctgggcagtccgtaatgaaaggtg

SEQ ID NO: 374675 - DNA, 122 bp, Homo sapiens
gaaagtgcctgccatcaatgtcaacaactccgtcaccaagagcaagtttgacaacctctccggctgccaggagtccctcatagatagcatcaagtgggccacagacgtgatgattgccagca

SEQ ID NO: 374676 - DNA, 122 bp, Homo sapiens
cggacccgccccgcgcccgcggccgccgccgccaaccagagggcgcgggggcggagcaaacggcacgccaggcccaaccaatccagttctaccgcgcgccgaggtgaggccgcggaaatggg

SEQ ID NO: 374677 - DNA, 122 bp, Homo sapiens
cggaatgtcatctctgaaatgacaggtgtgcaccgtagcttggtgtgcaaaattccaagccgtgcagagcctgtgccgccctgtgtttgtgtacttcacccatgtctccaggtgagctgttt

SEQ ID NO: 374678 - DNA, 122 bp, Homo sapiens
gccccctagacgcacgtccgctcgcccggcgcccgagccagtccgcgcgcacgccgtctgcgccccgaaagccccgccccaaggcgcgcccgcccaccgctctccacgtgctcgctggaggg

SEQ ID NO: 374679 - DNA, 122 bp, Homo sapiens
gtacgtgttgctgcgggaacccggcacgcgaagttccgggctactaagtttcactttgctcgtccgcccgcgctaattctctggtgggagtgggattcacgggcctggtaacgcggggtcga

SEQ ID NO: 374680 - DNA, 122 bp, Homo sapiens
ataatacatatttgctgaataaaagaatgaagaacaagaggtcacgttacaaaattttaacgagccgctgcccgcttctagggggcgcagcgcactatacaaaattctccaattccacatgg

SEQ ID NO: 374681 - DNA, 122 bp, Homo sapiens
tctggatttctgcagcggcagggcaggggtctgcacaggcctgacctggtgttgctggagcgcggcatcccctcctgggtgctgctccgaaaggcaggctgggaggtgcttgctggggtgtt

SEQ ID NO: 374682 - DNA, 122 bp, Homo sapiens
atgttgtttcactgtcacgcagtgtcaacttagtctattcaatgggggctacttgaaggccggagggacaaagcgtgtacacattgcaccgctattcattccggccagctggatcggctgaa

SEQ ID NO: 374683 - DNA, 122 bp, Homo sapiens
tgtagaggagattgtgtggctagaaggaatggattcatcccaaacccccaaaacaggattcggataagtgaccatccagcctgcaccagagcattgccagagactggccattaattatcttc

SEQ ID NO: 374684 - DNA, 122 bp, Homo sapiens
gcacagtgcccccaaccccaggtgcactccacagagccgcgcatacggccgcaattcagccgacggaagaggtgccagagggtcacatgactcgcgttcagctgatccctttcaagggcgga

SEQ ID NO: 374685 - DNA, 122 bp, Homo sapiens
cagaagaggaaagagagggaatctacaaagctccagcagctttggtcctggtgtctggtgcgtgagcccagcgagcaccccactggcttgcagcaggcagttgacttagctgggagcctgtt

SEQ ID NO: 374686 - DNA, 122 bp, Homo sapiens
ggctcgagagcggaaatgtgagcctttgatatgccccgccatagccgccgccggccgggtcgctcttcacccaacccgcgcggagttgcctttccagggaagcgagagaatcctccaacttc

SEQ ID NO: 374687 - DNA, 122 bp, Homo sapiens
ttaatgacagtggtctactgtgtagaaacttgagattaaattgcagactgcagctatgaccggaccatttttagtgtgatgcaaactgtatcttctgcaggttataggcattttggaagcag

SEQ ID NO: 374688 - DNA, 122 bp, Homo sapiens
caggggcggctcgtagccccaccatttaaagagacagcagcgagaccgggagccttactgcggcggaggcttccgacggaggcgggaggcgggcgcggagttgccgaggtggcgggagcgca

SEQ ID NO: 374689 - DNA, 122 bp, Homo sapiens
catcagcccggggagacataatggcataccctgctgcgcaggccctgcctaatgacggggcgtgggggctgccggcagatgaaagccaccgccgccttcccgcgcacctgcttacctcggca

SEQ ID NO: 374690 - DNA, 122 bp, Homo sapiens
acagcagcaccaggaaggccctgtgtcgggcaccccaggagacaccagtcctccgcccgccgccacaggcccacggcttccagctcgaaggcactggccctgaggcaccgtcgccagggggc

SEQ ID NO: 374691 - DNA, 122 bp, Homo sapiens
ctgtaagtgaggagggatatttcgtatctgaagtttccgaatcctttgcctttttgggaccgagtgctcaacttctatgggtttcccgtgcagttctattttacctgaaagcgcctcaatgg

SEQ ID NO: 374692 - DNA, 122 bp, Homo sapiens
gtatgcactatgcctttagtttccagtgcttcaccaaagtatatttacatttcatttatacgataatggggcatgagatatacaaacacgtatcattttgtgtgttcaaaaatatttttctg

SEQ ID NO: 374693 - DNA, 122 bp, Homo sapiens
agctacgcggtgcagaaataacaggacagactcacgtggtgtaaatacagctacacagagcggtggtgcaaagtcaggtggtcacggggatttctgcttatgattctagtatggtatacaga

SEQ ID NO: 374694 - DNA, 122 bp, Homo sapiens
ttcatatctcatagtgattattacttgagttgatatttgtagggtacttagaacagtgcccggcacacagtgctagttaactgtttgttaaataaattgttagataaagctcctggcaccat

SEQ ID NO: 374695 - DNA, 122 bp, Homo sapiens
tatcgaatattctcctaatattgatgttcggggtgcggatatgtgtggacaggcaggagtcggcaaatgggttcaaatggaagctttaacaaagaaaggccctgtacgtaaacagtgtttta

SEQ ID NO: 374696 - DNA, 122 bp, Homo sapiens
gccccgcctcccctacctgaggccctcatggccggaggcgtcgcagcctccgcccaccagcgcgcctgccctgccattggctctgcgggctgcccgtctccttgctccgtcccggaggcagg

SEQ ID NO: 374697 - DNA, 122 bp, Homo sapiens
tacctgaactccaggttttcctcccgtccagaacccccaggagagagggagaagcaagcccgggacagctcagttcatctcacgcggtcaagcagagcttgagaagagcttgctgcaaatgc

SEQ ID NO: 374698 - DNA, 122 bp, Homo sapiens
cgaggccgggggggcggggggttaggggaccgcggggctactcttgggagcgcccctgtccggctggctgcgcgccggttttaaatagcatctttcggacttgtcttcgcggccccagtccc

SEQ ID NO: 374699 - DNA, 122 bp, Homo sapiens
gcgggcccactcgtgctgcaggaagtgcaggatccccgggagactgtactgggctcgggccgcccccgccgcagccgccccgtcgccggccgcggcagcctccgccagaggcccgagcccct

SEQ ID NO: 374700 - DNA, 122 bp, Homo sapiens
cagcagcagtctgggagcgagcgacagagccaccaagctgggcggcagggcattgagcctcgcgtttcaatttctgttcagttctcctgtaatggaaaattgctttgcacaaagctaaagtg

SEQ ID NO: 374701 - DNA, 122 bp, Homo sapiens
gcccccgcggtgcctgccttcctaatttggtgtgcattcgcctcgccagtcctcattggccgtggagtggctggctcggtgtaggccgggctcgcccagggcccctcattcccaggagtcgg

SEQ ID NO: 374702 - DNA, 122 bp, Homo sapiens
acttacgttgacctggctttgttacaaaatgtgtgacctctttaagtgtctcagttttgtcggtaaaatggttgtgtatgacagctcttgggaccaccctggtctttccacctgtcctcaca

SEQ ID NO: 374703 - DNA, 122 bp, Homo sapiens
cgggggctggaattcgccccctgaagcgcagagatgtcagctcctgaaaagtcattcggtcgttcagtgtttgtttccctctgtcgtaagattttaagttcgtgagaggaccttctttaaag

SEQ ID NO: 374704 - DNA, 122 bp, Homo sapiens
ctcaggtggcagatggggaaactgaggcccaaggaggggcggggagccccttggacggggcggggcactccgcccggggcaggcaggggcctttatctgctgtcctgcccctcctcctcccc

SEQ ID NO: 374705 - DNA, 122 bp, Homo sapiens
tccagcctgcagcgcgcccactggttggggttctgggtgttgggggcaagcaggggcagacgttggcagacatggtcatcaccatgggagggaggattctgggccaggcctttgcctcttcc

SEQ ID NO: 374706 - DNA, 122 bp, Homo sapiens
gctcgtagtgccctcgcggcgccccacgccgcgccactctcttccgaaatgcccgcctcgcgcttccaggcctagacccggcactctggcccaaggctggactctcacacacagggtgccca

SEQ ID NO: 374707 - DNA, 122 bp, Homo sapiens
cagagtgtggactctggtgcctccagaggggctcaggtcacataaaactttgtatatcaacgagcttctgtctcctcttgtctccttttagctgtgatgtggccccattccctggcaattca

SEQ ID NO: 374708 - DNA, 122 bp, Homo sapiens
ctgtgacaatgggatgtaaagttaggacgcagccgtgacagaaccccatgtgacattgggcgctgggctcagcccacgtgaccactgagagagcttgtcgtggggaagatgagctcgtcttg

SEQ ID NO: 374709 - DNA, 122 bp, Homo sapiens
cagggcatcgaaatctcgcgaatattggtcaatgcgtcggcctcgcgagatttctttcagcgcagtcttccctttgatctgagctgtctcaggcctcgcgccgctggatattaaacctgccg

SEQ ID NO: 374710 - DNA, 122 bp, Homo sapiens
aaagcaatttatagttcataaaaatgacaaaatgtacctgtcagagagagcgcggagagccgttctctgagctgcctgctggaagaaagaaagggcagagatgtttatttaatattctgact

SEQ ID NO: 374711 - DNA, 122 bp, Homo sapiens
ggaaccctcaactcccacaacaataaataactacaaaagccccaaaacagaggtacctggcgcaacacctcggccctggcattccgggtctgttctttccgctcttcgatactcttcgcact

SEQ ID NO: 374712 - DNA, 122 bp, Homo sapiens
ttccttatctgaaaagtagggacactagtctccatctcgtttactcgggatgggacaagacgaccaaaaaagagaggattcctcatcaggtttattactcgttgccattcttgcaatgatta

SEQ ID NO: 374713 - DNA, 122 bp, Homo sapiens
ctttataaatataagaaaaaaggctagggggcgccacctgctccatggtgaagagtgagacgtcagtaacagaagtccgtgcctgccatttgcagatggcctgtccgattatgctcagaact

SEQ ID NO: 374714 - DNA, 122 bp, Homo sapiens
aaataaattgtttaactatagagaggagacatgagtgtgagttcaggcctttggacccctcgtgttagtctagagttagctgttacacactcttaagttttctgtatttgaaacatatgctt

SEQ ID NO: 374715 - DNA, 122 bp, Homo sapiens
ctacaccggcggcaccattggcatgcggagtgagctcggcggtgagtccgagaccctgggcggggtaggcctctggacctggccgcgaccgggagcctcggaccctcctgcacccacggggg

SEQ ID NO: 374716 - DNA, 122 bp, Homo sapiens
aaaagctagcacttttttgtttggcattttgttttgttttgtttttgagacagggtctcacgcttacccagccggagagcaatggcatgatcaaagctcactgcagcctcgagctcctgggc

SEQ ID NO: 374717 - DNA, 122 bp, Homo sapiens
tggccaatgagaagatcacactatccccagaagggcctacagaacatggagcaaaaactacgtcggccaatgagaagatcacaccatccctagcaaagcctacagaacatggagaaaggacc

SEQ ID NO: 374718 - DNA, 122 bp, Homo sapiens
agcttcttactgcttcccactgctttttttccttttctgcttgtaagatgaagacactggcgatgaaagggctgagatgttttagttcccggaagtcccttggtctttttttttttttttct

SEQ ID NO: 374719 - DNA, 122 bp, Homo sapiens
gttcgcttctgtagtcccagttactcagaggttgaggcatgaggatctcttgagcccaggcgttcaaatccggcctgggcaatatagcaataccccgtctgtaaaaagaaatcaatacgtca

SEQ ID NO: 374720 - DNA, 122 bp, Homo sapiens
ttgacaggaactttggtttttaatattagtgtgatttaatttcaggctgaggaatcccagcgatgttaggtttgcttaaatcatttgtaactgagatatgagaaccaaatttgcattttgga

SEQ ID NO: 374721 - DNA, 122 bp, Homo sapiens
ctggtgctgtatctgccatcttttcacactgggtgtgacctgaagagacagcctgaggtccgtcctcactcactgtgtttcaggaactgagggtcagctggcagtgggatgaggctggcccc

SEQ ID NO: 374722 - DNA, 122 bp, Homo sapiens
ctaatacctttgccgtcctctgtactaagtcagccacagatgccggcccattatctgagccgattcgtagaggcagtccaaacctagggatgagatctcgaagaagcacacgggttacttca

SEQ ID NO: 374723 - DNA, 122 bp, Homo sapiens
agcaaacaggttctcagaggcaggcactgtgggagctatcaagatgaaaaagcacaatgccgcctgcaggagctcagggttagggaggggagaggagacatatacacaggcaaagtcaaatt

SEQ ID NO: 374724 - DNA, 122 bp, Homo sapiens
tgtgtggggccgggccacgtggactttcttttcgctccttctttttccagattccagatgcgaccactgtgtgtaaatcagatgccagctgtactgccggctctgccggcacccacagcaac

SEQ ID NO: 374725 - DNA, 122 bp, Homo sapiens
ccgccactctctctgtgtcttttctttaaccctcgccttccctccaaaacctaacagttacgatatggggaaatgaaagtctaagaaatatgattttcagcttctttaacccagatacttaa

SEQ ID NO: 374726 - DNA, 122 bp, Homo sapiens
cgggccagtgcgggaaccagatcggcaccaaggtgggcctggcgcggtgcagggcctctccgcgggtcggctgctggcgggccccgggtctcccggcgcgacccccgccggggcgcgcaccc

SEQ ID NO: 374727 - DNA, 122 bp, Homo sapiens
acacacacacacacacacacacacacacacacacacacctgcagcctcagtctgtacttgcggaaatgcctggctcaagctgggccaatcagatgttgtctcctgggagtgtggaattttga

SEQ ID NO: 374728 - DNA, 122 bp, Homo sapiens
agcccgaccacgcccgggaagggggcccctcttcaaaccgccgggaacatggaaccgcgacgcgacccctgcccggcgacgcaggtcccgctcactcaccgcccatcctcctgctccgccag

SEQ ID NO: 374729 - DNA, 122 bp, Homo sapiens
caatcgtatgtaccttatctctctctccatttctgcatgaacagtccatcctatccaaaccgttctcatttctctaccatgagataattcaccttgcattcctaaaactatgcccttgttcc

SEQ ID NO: 374730 - DNA, 122 bp, Homo sapiens
cctgcgcaggagaggtggtaggctcgggtggctggctccggggagatagcgcctgtcagtcggtgggtcggtcctcgcgccggccctccccctccccggtctccgggggaggcgcggtggag

SEQ ID NO: 374731 - DNA, 122 bp, Homo sapiens
ggactgaacattagacttcccatgattgcagaactgtccttcgctgcagctgtaaaatcgcggcaaggcaggattcatcctggtggtgggtgcaggccctgattcccgtcactgagcaggga

SEQ ID NO: 374732 - DNA, 122 bp, Homo sapiens
actggaatatgaccaggaaggaagctgtggaaaggaattgagtttgctctggaggacctccgtactggttctgctctacaatctgagaaatgcccagaacagctgaggccaatcaacagcag

SEQ ID NO: 374733 - DNA, 122 bp, Homo sapiens
ctcctccagggagttgataatgcttgtgggcagcaacggcaggtccacgctgaccttcatcgttttgcccctttgccttccagaaggatttgcccctgccccggaaaagcagcaggtgagcc

SEQ ID NO: 374734 - DNA, 122 bp, Homo sapiens
agaatgcctcgacccagccttacttcatgagggggcctctgtgttctccttactgtgggacgacgtgattactctagcacttaaaaataacaaagtaaaaataaatgcaagctgtacatgtt

SEQ ID NO: 374735 - DNA, 122 bp, Homo sapiens
caccacccacccctctaccccagccccgaaccttgcaggtataccctttgctccctggctcgaccagcatcatgacctatgacttgtgcctcatcttcccggccctggccaaggctgtcgtt

SEQ ID NO: 374736 - DNA, 122 bp, Homo sapiens
cagctggaacaagcccctcagacacgtcatccacggtcgcctgagaagcagcgccatccacggtggaggctcttggagggtctcctgcatgaagccaacgcagggcaagccgcccacccctg

SEQ ID NO: 374737 - DNA, 122 bp, Homo sapiens
cgtgcggagccctgtagcggaggggctggggggctgctctgtccccttccttgcgcgctgcggcctcagcccacccagaggccggggtgggagggcgagtgctcagcttcccgggttaggtg

SEQ ID NO: 374738 - DNA, 122 bp, Homo sapiens
cagcgccccccgctgcggctgcaggctcctacccttcctgggcgcgcacacccgcctggccgaaccggagcctgtgcctccagcacccccagataaggctggtactgcgcctgtcactccct

SEQ ID NO: 374739 - DNA, 122 bp, Homo sapiens
cccctcggctacttaccgggaggaaggacagccgagatcccggggccccgggccggaccgcggagatgccccaaactgacacggccgccatcttggagacagtgagctccagccggggggag

SEQ ID NO: 374740 - DNA, 122 bp, Homo sapiens
aaaccttacaactcacccaactgagacctaagccctctctaatatattcctggacgaggtcgcccaaccgttttggtaatggagaactacccatggaaacaagtcacttcaacttaggccaa

SEQ ID NO: 374741 - DNA, 122 bp, Homo sapiens
agggaagaaatcaactccgacttctttgcaaaactgaaatctctgtgaaatagccagatgcgcacaccaaataagggtttctaaagagaacccaagttacttttcaattaaaaaaataaaat

SEQ ID NO: 374742 - DNA, 122 bp, Homo sapiens
cctggagtcgcagagaccactcaccgaggatcatgctggggacccaggcgcccggggttccgcgtcgctctgtcccgggggccgttctggccgggctgggggtacggggggaggagccgggg

SEQ ID NO: 374743 - DNA, 122 bp, Homo sapiens
gtcgtgaaaatcttactgctggttcaagtcccagcaggctctggtcattttctgagcagacgctgttccctattccaggtcagggtacactatgctaatgagttctggcaatggtccaatca

SEQ ID NO: 374744 - DNA, 122 bp, Homo sapiens
ggaagataatgttggagagacagactagagggcatgttaaggagcttatatcttgtctcccgtagtacctgggatcaaagaggtaaggtgaatgagtgacaaggacagtaatgaaggataga

SEQ ID NO: 374745 - DNA, 122 bp, Homo sapiens
aggtctaaaaagataaatctggtagcagtatgaaaaatgcatgacagtgggaaaaagcaacgagactagttaagtggcaggggaatcatttaggtaggagactgtgccaagcagtattggga

SEQ ID NO: 374746 - DNA, 122 bp, Homo sapiens
gccctcctgctctggtgactgaggaccgccaggcaggggctggtgctgggcggggggcggcgggccctcccgcagtgcaaggccgggcctggcggggtgaggtagtaggttgtgtggtttca

SEQ ID NO: 374747 - DNA, 122 bp, Homo sapiens
gtttctcctaagcacatttattttgttcatttattaacaatctttttaaagtttcttctccgtgtccagatgttataggctctgggttttatgtggaaaagaagactgacaggatccctgac

SEQ ID NO: 374748 - DNA, 122 bp, Homo sapiens
gaattacaggcgcccaccaccatgccctgctaatttttgtctttttagtgcacagggtctcgccatgttagctaggctggtcttgaactcctgacctcaggtgatccacctgccccggcctc

SEQ ID NO: 374749 - DNA, 122 bp, Homo sapiens
ggggccaaattcacaggcactttccagaaactcccccactggccagaggttgcaaacatccggattggctctgggcacagtggccgccttaagtcctcctgaacaccccttctgcaagtacc

SEQ ID NO: 374750 - DNA, 122 bp, Homo sapiens
agattctaactccagcttcacatcattaggcgtaagcagccaattgggccgtctgggagccgtgcatcctgggagttatagtttccggctccctccttcagattacaagctccacagagccg

SEQ ID NO: 374751 - DNA, 122 bp, Homo sapiens
gagaggcagaggcaggtctgaagaagaagctgtcaatgtccctcttttctgggaaggtgccgaagccatgggcttgttttgaagtcattagtcaggaagcactatggatgtggatgcctctc

SEQ ID NO: 374752 - DNA, 122 bp, Homo sapiens
cctcccaggcagcaagccacacaccaggccgtgtccgggtctctgatgggcaagttggaacggcaggctctcctcctcctcttgcccctcccttgaccgagtcctgcgcccccagcatcagt

SEQ ID NO: 374753 - DNA, 122 bp, Homo sapiens
tcattcagtcaataaatatttattgagagcttacttactacgtgtcaggagctgttctagcgctggggatacagccatgaacaaaataaccagggtccttgtcttcctgtatagtgttgcca

SEQ ID NO: 374754 - DNA, 122 bp, Homo sapiens
ccagcggctggagcagaagtgttagcggccagagctcccagacccctacccacagccaggcgggacgcgcacagtccctccacgcggaaagaagtaccttcgccggtcaccggctcctgcag

SEQ ID NO: 374755 - DNA, 122 bp, Homo sapiens
atgcacgcccagagacaggcggagcgtggcctcgatcaccaccgagagctgacggccgcccggattcccgccctcagagaatcctggcccccagtcgttccaagaccctttacggactgcag

SEQ ID NO: 374756 - DNA, 122 bp, Homo sapiens
aggactcaatagtctttatatacagttttttaaaactctcattcatttattgtcactgtacgcaagacgttgaaaatacaaacagtaagattctgtgtggtcccatgtcttgacacactctc

SEQ ID NO: 374757 - DNA, 122 bp, Homo sapiens
cattttctaagccctggtctgcaacccactccattcagttaatatttatcaagcactggccgggcgtggtggctcacacctgtaatcccagcactttgggaggccgaggcaggtggatcacc

SEQ ID NO: 374758 - DNA, 122 bp, Homo sapiens
gcgagattccatgccattccttcacctgcaaaggatgcgaatgcaagggccgacgatgcccgcaggggaaggaaggaagccggtctcctctggactgaagccagggcaggctcagacagctt

SEQ ID NO: 374759 - DNA, 122 bp, Homo sapiens
tattttctcccctctgcaaagcagctgctagctcagactgacaggggcttgtgggattctcgacatttagactcccagaatctcagtgctgagagaatgtcagtgaagcatctggtcctgcc

SEQ ID NO: 374760 - DNA, 122 bp, Homo sapiens
cgtgctgagggaccatttggtcaactttccacctaatggtggtgtgattagaactcctagcgggtgactcatagagagtgattagaagtaaaaaggttctggaaattcccccacactcttta

SEQ ID NO: 374761 - DNA, 122 bp, Homo sapiens
agctgccccttgcttggttttggtcaaccacaaacctcctggccctcccccagtctctctcgctctgtgtctcgcctgtgggctccaaagctctgactcaccatgcagccagctcagcgctc

SEQ ID NO: 374762 - DNA, 122 bp, Homo sapiens
ggcccaacgcctgtgtttgcactcactgttcttcacccagatggctcttttcccatcaaacgagtgccccagccccgctgtgcgagtcctgagctcagaggaagtttcgggccccctacacg

SEQ ID NO: 374763 - DNA, 122 bp, Homo sapiens
gtccctgggctgtgggagtattggattccttggcctcgtgacctgcctggccaggtctcccgggagctccagcatccagactcacccctgcaagtcccacaccagtcccaccacccatgcca

SEQ ID NO: 374764 - DNA, 122 bp, Homo sapiens
catggggtgaggactcctgggggacgaggcactacagcctgctttgtgtttcctgcagaccgattagtcttatggaagcagacaagggagcaaaaaaatggcggtgggggggaccccagaac

SEQ ID NO: 374765 - DNA, 122 bp, Homo sapiens
ccctcactgcccggggccgcagccgctccgagtgccgggcccgccaagcccacacccacccggaactggcactggccctggcccacaagcacagtgcgcagccccggttcctgcccctgcct

SEQ ID NO: 374766 - DNA, 122 bp, Homo sapiens
tcttagccgtggctgctctgtctgaaacggtcatggtctcattcagctctagcatatttgcgtgttaggttggcatgaagattctcaatttagtaaatgctagacactagtataacttccct

SEQ ID NO: 374767 - DNA, 122 bp, Homo sapiens
tgcttcttggggtgtggggtgcccagggaatgggcttcctggaagcaccaaaggagcctgcggagcctggggatggggtgaggcagccggtcccaggccctgggatccaggcggcgcgctga

SEQ ID NO: 374768 - DNA, 122 bp, Homo sapiens
gggtggagaggccaccctaagcggtggcttcccccaggaagtaacctggtggtgggagaacgagccaattctctcttggctcttattttctcggtgatacaagtgagacatcacccgagggt

SEQ ID NO: 374769 - DNA, 122 bp, Homo sapiens
ccaccggaagtcagccaacaacagcgaattgcgtgcgcgtccccgagcctcggagcgccgcgccgcagtgcatcaaggagcatgcgcctaacactatgcgccatcccattttagggcagagt

SEQ ID NO: 374770 - DNA, 122 bp, Homo sapiens
cgccgagatgcgcactgggaagagaaaagagccaggacgcacctgcatttatggcgccatcgcccgggcggaatcctccacggaataaaaagtatgcagaagcaaggcgatttatgactgca

SEQ ID NO: 374771 - DNA, 122 bp, Homo sapiens
actgcaggatgtcgatgatgccaatgtgcagcagcagccgctccccgcggccgttcacagcggggatcccgcccatcctggggagagaggccgagggtaccatcagcatcccgcagagctgg

SEQ ID NO: 374772 - DNA, 122 bp, Homo sapiens
tcgccccctcccagccccgccccctcggccagcagagagtccatgctgaaatggaagtcccggctctgcagggcgtccccttgcaggccaaacttgcgcaggcttcccggggtgttggtgga

SEQ ID NO: 374773 - DNA, 122 bp, Homo sapiens
aggccccacctcctcacagggggttaggatttcaacatgtgaattttgaaaggacacaaacgttcagaccatagcaggggaggacacaggtgcaacagtcagagttcctgggtgctagagtc

SEQ ID NO: 374774 - DNA, 122 bp, Homo sapiens
cgccgcccaggtgagcaccttgccagctgtgccgaggggcaccgggggccggggagggcccgcaagctctagctggcgctgacctggggctgaccctctccagcagcctgcaggaagctcag

SEQ ID NO: 374775 - DNA, 122 bp, Homo sapiens
ggtcaaatcccactcctgtgtctgatgatgctgggcaaaagtgtccagagattcccccagcggtccacaccccgtgagctgcaccttttccagccggtggaaagaaatactgatggagctct

SEQ ID NO: 374776 - DNA, 122 bp, Homo sapiens
atcagatcgcttgagcccaggaggttgaggctgcaggaagtcatgatcgcgccactgccccgctgcattccagcctgggcaacagagcaagacctgtctcaaaaaatagatagatagacaga

SEQ ID NO: 374777 - DNA, 122 bp, Homo sapiens
tgacacgtggtagcactcggtgaacacctgctgggtgaatgtctgactgccgtgtagttacgatgtataagaggagggaggtggcagaaggggcagtccaggagccctccactgaccaggtt

SEQ ID NO: 374778 - DNA, 122 bp, Homo sapiens
aattcaccgaatccttacaatttttttttttcgcggtgtgtgtgtgttgggggggggcggcgggggggtattcctaatttccagaaactgaatctcagaaaggttaactgagcaaggtcaca

SEQ ID NO: 374779 - DNA, 122 bp, Homo sapiens
ccacgggacccctccccggagaccccgggacccctccccggagaccccgggacccctccccggagaccccgggaccccttcccgagaccccaggacccttcctgagaccccaggacccttcc

SEQ ID NO: 374780 - DNA, 122 bp, Homo sapiens
cccaggcgcgtgggcgctgccgagaggctgggagcccgggaaccggttcctggacttgagcggagcgagaaagagcgcgccgcctgcacgactggactggagcggccgggtgccctggaggc

SEQ ID NO: 374781 - DNA, 122 bp, Homo sapiens
tttctcctatggctatggaggcactgggaagaagtccaccaatagccggtttgaaaactacggagacaagtttgcagagaacgatgtgattggctgctttgcggtgagtgctagcagcctgt

SEQ ID NO: 374782 - DNA, 122 bp, Homo sapiens
tgggccgagagaaaaggtgccttttcctagggagctcttaacgttggtcctagggccgggcgcggtggcggaggtcgaagtgggcggatcacttgagcccgcgagttcgagaccagccgtgg

SEQ ID NO: 374783 - DNA, 122 bp, Homo sapiens
ggaaacgccctccacgaggagggccgggccacttcctgcccccgagcgggctctccccggcggaggctcccaccgccgctatgggtaggccatgcagcattcctgagggcggggtgggcgca

SEQ ID NO: 374784 - DNA, 122 bp, Homo sapiens
gcttccctctaaagaatcaccagagaacagggaaaataaacaaatctgcaaacaaattcccgggcagttcacatcacctcccaaaggacactgacaatagctgaagagaccacaacacacaa

SEQ ID NO: 374785 - DNA, 122 bp, Homo sapiens
atttagagagagcagatttgaaacactgtttttgtggtatttgcaagtggagatttcaagcgctttggggccaaaggcagaaaaggaaatatcttcgtataaaaactagacagaatcattct

SEQ ID NO: 374786 - DNA, 122 bp, Homo sapiens
agccccgccccgcccccggacgcccgcccctcaggcccgactccgccccgagccccgccccgcccctggccccgcccctcaggcccgactccgccccgagccccgccccgccccccggacgc

SEQ ID NO: 374787 - DNA, 122 bp, Homo sapiens
taaagccaataaaacagggaaatggtgaatggagcaactggggagaaaagtcaccaaagtcggggaatcagggaagccttccccaaagaggtggcttttgaactggggcctgagtggtgaag

SEQ ID NO: 374788 - DNA, 122 bp, Homo sapiens
agacattcacgaccgcagaagataggtaccgaagcttcactcttgagctgaggcggagatcgattggagatttgtacaaatcttagaattaaataaacccaacagcgcacacaccctgcgcg

SEQ ID NO: 374789 - DNA, 122 bp, Homo sapiens
ttggtgcctaagcacatctctgttacctcttgccacattcctcgtggttcgtttgaggcccgtcttcccaccaacaccacacagagctttttgagggctgagaataaacccaagtcatctac

SEQ ID NO: 374790 - DNA, 122 bp, Homo sapiens
tggcagtggaaaacatctgggtgatctccacccaacccccacgcctgctcagccttcctccgggtcaggccaggtcagctgttctgcccaagctacaggcacagctgctagcccactgctgt

SEQ ID NO: 374791 - DNA, 122 bp, Homo sapiens
ttggatggttcctcagtcaggtgccaggatcctgcctaggagaaaggccacgaatggcagcggaaattacatcaaaccagaaacacttcagcagggggaaaactgtgccccaggatgtctgg

SEQ ID NO: 374792 - DNA, 122 bp, Homo sapiens
acactaaaggctaagtataaaggtgggttcttggtctcactgatgtcaacaacgaaaccgcggaccctcgcgctcagtgttaacaattcttaaagctggcggttcctgagtttgttccttct

SEQ ID NO: 374793 - DNA, 122 bp, Homo sapiens
tttcttaagcaggtctgaaaagcgcaatatttgggtgggagtgacccgattatccaggtgcgtccgtcacccctttctttgactcggaaagggaactccctgaccccttgcgcttcccaggt

SEQ ID NO: 374794 - DNA, 122 bp, Homo sapiens
ctccagccccctaacctgccctgggggacatgcgttcccgggcctcgtcttcctctagcgcggatcgctacacccgtccgagccctcctcgagggcctcaccaccgggcggggggagatgga

SEQ ID NO: 374795 - DNA, 122 bp, Homo sapiens
gaaccaactttaccaagaatgccattggtaacactgaacgctgtaaaatagcttaaaaagcgcatttacattatgactacagttgtaaagagtaggttgtggaaaaggaataagtaaacatg

SEQ ID NO: 374796 - DNA, 122 bp, Homo sapiens
cagaaaccttctggaggtaaatctgcagaatggcatttttgtgagttctctgatagacctcgaggagctgtgtgggaggatctcggagtgcagcatccacctggaagtgatcgtggacaagc

SEQ ID NO: 374797 - DNA, 122 bp, Homo sapiens
gaatgtaggggtggtgactgagggcgggccctggagtgacggtcgccgagcgctggctggcggcatttctgcaccagcagaggtcaagtctctgcccagcgccgggccaaggagcttggatt

SEQ ID NO: 374798 - DNA, 122 bp, Homo sapiens
cctcccacgtttacactcatttttaaatatgtcttctatcctgtgactcacagtgtgtggcgggaagagtaaggttaagagcacagactctgcagttaaaccaagcttgctctgctacttat

SEQ ID NO: 374799 - DNA, 122 bp, Homo sapiens
ccttcggagcctccagaaggaaactaccctggtgaaagcccagctttggactctggcctccggaactaagagagcaaatttgtgttgttttggcagctgcaggacactgacccgtcaatcaa

SEQ ID NO: 374800 - DNA, 122 bp, Homo sapiens
ctcagacaacctgcccgcctaggcctcccgaagtgttaggattacaggcatgagccactacgcctggccaagaaaaatattttcaataaatttagtataggttaagtgtgcagtgtttatac

SEQ ID NO: 374801 - DNA, 122 bp, Homo sapiens
gacagccgccgctgcggccccatcggactggtgggtgccgggtgggacggcacggtgcggcgcagctcactcggcggggtaggctcggagtcccgccgctgcgctgcctccgtggccggacc

SEQ ID NO: 374802 - DNA, 122 bp, Homo sapiens
acagccaaccaggcagaacagcctgttgggaaatgaccagaaacaggattcctttctaaacggaagtctgggtcaggaagtgagtcaaagaagcagagcagccaaaggaggttaggactatt

SEQ ID NO: 374803 - DNA, 122 bp, Homo sapiens
aaatgtatttcttaaataatgagacttgaaagttgaaatgcctcctgatgcatgggctaccgagaggatgttgtattaccaggcatgagaacaatgttcatctctttgtacatctccatcag

SEQ ID NO: 374804 - DNA, 122 bp, Homo sapiens
tactctatagacaaataaactacacatttaagacttatttcctctgtcagtaaatgtgaacgctttgactaatttctcaagtgtgttgttttgacagtgaggcagatagcctgctgttttgg

SEQ ID NO: 374805 - DNA, 122 bp, Homo sapiens
ggccccgcggggttaagcaggctgcctcccttgtttatggactgtaaacacaaatgccttcgtagccagggagagagctctcaggctgagtgatgcaaccatggtgaacaagaaaagatatg

SEQ ID NO: 374806 - DNA, 122 bp, Homo sapiens
caccaggcaagaagtccatgcagatttacttttagtagttcacatgacaaataaatactgcgtttgatttccaaacattaaaccatagtatattatagatagatatagagttatcattcaaa

SEQ ID NO: 374807 - DNA, 122 bp, Homo sapiens
tgaccaggttcgcagctctgctccacgttctccttgtggcgccatgagtaggtggcgtggcgggattccatggggcagctcaggtagtagcgagagtttggggccagggaaaccttctgcag

SEQ ID NO: 374808 - DNA, 122 bp, Homo sapiens
ggacctcggatcggcctcccacgcgaagcttgctccccaccagcatccccacgttggtggcgacgctgccccggccccacggatacttccgcgcctgtcagactccctgatgaactaccctt

SEQ ID NO: 374809 - DNA, 122 bp, Homo sapiens
ctgaaatactgcctttatcacactaaactcccatgtgtacacaggacggtttccgaactccggttaagtccatcagtaccacagttttacttgtgttatcctcacccagtcttcacagggac

SEQ ID NO: 374810 - DNA, 122 bp, Homo sapiens
ccagaattttagattgatggagtcttttagagaatatttgtgagtaggtggtttccagctcgttagcctggaaatcatgtcctcaccatccttagctggaatctaggattccttttctaaat

SEQ ID NO: 374811 - DNA, 122 bp, Homo sapiens
tcaggagtttaacttctggtgattttcaggattccctagtttttctcacttaaaggaacacgccaagaaacacacacattttatttaccccttcccctctaccactccccccaccttttttg

SEQ ID NO: 374812 - DNA, 122 bp, Homo sapiens
agtacaggcacgcaccaccatgcctggctaatttttgtatttttagtagagacagggtttcgccatgttggccaggctagtttcgaactcctaaccgcaagtgatccacccaccttggcctc

SEQ ID NO: 374813 - DNA, 122 bp, Homo sapiens
ctctccccacctaaggagcactctgttttgtagctaagaactcagaagcagggaagtggacgaggactttccagaagccaagcagagacagggatggggcccagactcacgtggctgcaaag

SEQ ID NO: 374814 - DNA, 122 bp, Homo sapiens
gccgtgatggtgctgaactaggggagctgccacgggcagaagctgtgcgaggagagtgcccggcgggttgtcctcacctcactgctcgcctgcctgccctcctgctggcgggtctacttcct

SEQ ID NO: 374815 - DNA, 122 bp, Homo sapiens
cagggctccagggagcttggcttctgtagaagttctaaggaagcggtacgaactccacggcggtggggcgctaactagcagggacccctgcaagtgttggtcgggggcctcgagctgcctga

SEQ ID NO: 374816 - DNA, 122 bp, Homo sapiens
tgcccagccattgcgggctgcgggctccaagggtcgcacacgctggagagtgcaggttgccgggtccacccacagggctgtagacacccctagggtcacacagacaaggctctggacaccca

SEQ ID NO: 374817 - DNA, 122 bp, Homo sapiens
tggtaagtatttcctcaggctgactttgaggcagtggaccaaagctgcagctggagaaagcgggctggggttggggagggcttaatgggattttgagtctgtgtgagtgatttttaagctgt

SEQ ID NO: 374818 - DNA, 122 bp, Homo sapiens
tcactaaaaaggatcttatcttgttctgcttaacttccctgacattttggcccattaattcggactcattaagatgagttcagttttgccagaaattgccaggttttaagataaagaagaac

SEQ ID NO: 374819 - DNA, 122 bp, Homo sapiens
gccctttctacagcatgcgttgtttaaatgactccagggcaccatcagtgtcctgcaccgcgactggctcacaaacggggctgagtggagagggtggtgcatcacatgggcacatgggcaca

SEQ ID NO: 374820 - DNA, 122 bp, Homo sapiens
gacctgacacgaagagatctgtgctcacggtcacagcagctctgagcaaccagttccagccgtgcttttatatgtgccaaggaaagttctagagcatttttgagaaaaacaaaatactgaag

SEQ ID NO: 374821 - DNA, 122 bp, Homo sapiens
caggcgtcctgtgcgggagccggtggcggccagagaggcaccaggtcctgggtcgggggccgggggcatctgagccttcccgacaccggcctcgcgggtccagggcttggcccaggcgcctg

SEQ ID NO: 374822 - DNA, 122 bp, Homo sapiens
gtccttgcgcctttgctcacaggccctcgcctgcttccttgtgccctttgttctgagttccggtgaccccggccaggtcccaaattctccgtcgcgctccttttccagagccgccgctgtcc

SEQ ID NO: 374823 - DNA, 122 bp, Homo sapiens
tttggcaatgacttgtaagattgctatgtgaaacacattggaatgaagttataaaatgtgcgagcgtgtgacacatgactatctagaacatgattcatgattaaacacactggaaattgcta

SEQ ID NO: 374824 - DNA, 122 bp, Homo sapiens
tctttgtttctctctgcggccgtttagtgtgaaatactatccaaaaacattatctatcctcgattaatcccacaaatttgttcacacgatgcacattgtttagggcaatttacaacaggaac

SEQ ID NO: 374825 - DNA, 122 bp, Homo sapiens
attgggcctgtcatcttcacgttcaatcatagctccaatgactctgcatgcagattatttcgacagcccccttgcctctagcttctcaactacttaaaaaaaattaccctctgtgggccagg

SEQ ID NO: 374826 - DNA, 122 bp, Homo sapiens
cccagctgccgtcaacacaagtgtcaccctcagtgccgagctggctggtggcagtggtgtcgtatacacttggtccttggaggaggggctgagctgggagacccccgagccatttaccaccc

SEQ ID NO: 374827 - DNA, 122 bp, Homo sapiens
ggggttgagtccgaagcaaggtgaacgccggacatcgagacatggaatcctagaccggcccggaagtgcctctgctccgtccgccttcgaggagaggtcggcatctttgttccctgcccggc

SEQ ID NO: 374828 - DNA, 122 bp, Homo sapiens
cgaccgacttctccttgcccagttcggcctcagtccccttcagccataagatggcaacagcgccgacagccgggccccgcggcgtcctgtctcttccctgccctggcctggagccctctctg

SEQ ID NO: 374829 - DNA, 122 bp, Homo sapiens
ggttgtcattcaggctgggttgtcatgtgactgcctgtctgtgcctgctgtacaggtgagcggatgttctgcacagcaagtgtagacaggcagacacatgacaactctgtccagccaggccc

SEQ ID NO: 374830 - DNA, 122 bp, Homo sapiens
ttcctgcctgttccaagggagacggacctgtgacttccccaaagcagaccatctgcaaggcgggaaaccccggtgttcagcaagcttcctttctgtctgggcacaagccctgcccaagctct

SEQ ID NO: 374831 - DNA, 122 bp, Homo sapiens
caaagtcttaccattacagcatctctgggtctcgctgggatcatgactatttataatctccgcaaagggtggagcctgaaagggcgacaagcccccagccccaccccaccccaccccacccc

SEQ ID NO: 374832 - DNA, 122 bp, Homo sapiens
tggccccggccgcgtccacggccgcgactccggcccccgatgccactgccgaagcctccgcggaagccaccattgttccccatcccagtgcccccagggcctccgggcccccgcgctgcacc

SEQ ID NO: 374833 - DNA, 122 bp, Homo sapiens
cgtccagcagcatcgcctctgttaccaccagccagggcacagctaggggaacagtagctccgcagcttggacccccagctcagagcgccctgctgaaccagaggggaccagcctggggtcca

SEQ ID NO: 374834 - DNA, 122 bp, Homo sapiens
aaaaaagcaatattgaccaagaaataccatattacccttcacagactcattctgatagttcgttcttcacccatatttattcaaaagacctaagaatctagctatttactatgagaaactca

SEQ ID NO: 374835 - DNA, 122 bp, Homo sapiens
gccctgagaaagatcacgtctacctgcagctgcaccacctacctccagagcagctggccacgcgcctgcctggcatttcagagacagccatgatcttcgctggcgtggacgtcacgaaggag

SEQ ID NO: 374836 - DNA, 122 bp, Homo sapiens
tgggtttaaataagcagagggaaaaaggaagagaattctgggcaagaggagtagttggtacgagcaaaagtgtgggggaaggactgtgcatgacatagaagagtgcctgctggttgcgagct

SEQ ID NO: 374837 - DNA, 122 bp, Homo sapiens
ggggcgcggcttcaaggggcaacaaagccggccaccagcggcttcgtcgcaccaaacaggcgaccaacgagtaccttcactcgagccctaccatccacgccgggcagcagccagcggactgc

SEQ ID NO: 374838 - DNA, 122 bp, Homo sapiens
agacactaaacagagtgcacgcccacccaggggacactgaggtcgctgggccagtgtccccgcctggttgcaggtccctaacccctccgggagtgcagagctgcgggcaggccacactcacc

SEQ ID NO: 374839 - DNA, 122 bp, Homo sapiens
gcctcagtttccctcccaacacctatatgtcttgttggtatacatgttgtattttcacaacgaaaatgcatgagaaaaaggacacagatggcttatgtgtactgatgtgtagcattctctaa

SEQ ID NO: 374840 - DNA, 122 bp, Homo sapiens
tgctcgccccctgcccctatttaaattctggggttccagggacctccgtgcagtgaggggcgcggacgctttcaattgaaatgggagctggcgaggccctggcattttggggaacctcagcg

SEQ ID NO: 374841 - DNA, 122 bp, Homo sapiens
tggggccttccccatcatcttgcttctcgccttctggatctcctcgacttttggaagccgcgtgacctacgtcattcagattccaagagagaggtcatcctgggtgattccttagctccaag

SEQ ID NO: 374842 - DNA, 122 bp, Homo sapiens
ataaaaaagtcgggcttttggctcagggtacgaagtatatgccgcctctctatgcatagacggactgcggttaggggaacagcctcagagtccagagttgggggtttctcccccagctttgc

SEQ ID NO: 374843 - DNA, 122 bp, Homo sapiens
ccccgtttccctttgctgaactcaaaggttttcttcttcgccctttcctcaaattactgacgttaatttccttcacttactgctgctcccagttagccatgactttcttcttggtgctctct

SEQ ID NO: 374844 - DNA, 122 bp, Homo sapiens
gccgctcaggagctgggtatctgagactctactatggccaactcaggttggcaggctgcgcggccagcagccgctagcctcctggaagggcaggacaggccgagaggggactgaggtccctg

SEQ ID NO: 374845 - DNA, 122 bp, Homo sapiens
taatttctgacaaaatttcgtaagtcagcggatctaccactgtcgtttggggcccacagacgcttctggcctgtgagaggcgattgggattggggtctgcattctagtcgcgacggtaggcc

SEQ ID NO: 374846 - DNA, 122 bp, Homo sapiens
ttacttgtccctgtgcagcccgagggacccgcgagactccagtgatcatagaggtgccagcggcacccggctccaatcagctccctctagaggaagttgctctgtggccaccggatgcagac

SEQ ID NO: 374847 - DNA, 122 bp, Homo sapiens
cggctctgccgcgcctcgctgtgtgactgcgggcaaatccccaccctctccgtgctccggcgaagaaagaagagtggctcccacatcccgcctgctaacagccacgcctgctggatttttct

SEQ ID NO: 374848 - DNA, 122 bp, Homo sapiens
aaaatcattacctttggggaaggcagtatccgtgtctgcctggctcactgttttacccgtcgcacctagttattttttcaataaatatttcttgattgaataaggagagtggcttggagttt

SEQ ID NO: 374849 - DNA, 122 bp, Homo sapiens
gccccgccgcccgcccctggcgcccctctttcccgcacccgcccggagacgggaggaaaccgaggcccctgaaaacgcagctcccctacacccgaaaagacgcgaccccacccgctccagcc

SEQ ID NO: 374850 - DNA, 122 bp, Homo sapiens
gtcccaggcgcctttacccaggttcattttcagtttaggccaaaatccccgcgggttgggcggggagggggcggggctagctgggcggggctgactgcggggaccggctagggtctcacacc

SEQ ID NO: 374851 - DNA, 122 bp, Homo sapiens
atcccccacccttgtctgattcgggcgtggtgactgcctggttattgagatttgggagcacgcatatttaaccccagacagatgcccgcagacaaaattttggcttgcaagtaaggtatatg

SEQ ID NO: 374852 - DNA, 122 bp, Homo sapiens
ctgccgctgccggcttccctcaaggcctacctcctctaccagtgacgttcgccatcataccgccagcgcgacagccacctggtgccaactcactgagccgcctgccgctggggccgccgcac

SEQ ID NO: 374853 - DNA, 122 bp, Homo sapiens
aacaccaccgcccgccccagaccagccccacagcacccccggccctaccaccatccctgccgccaacacggccccgctgccggccggcttgtctttgccaccgacaggctgagcatgagccc

SEQ ID NO: 374854 - DNA, 122 bp, Homo sapiens
ttggaaaagagaaatgtgttacctgcttaacaggagtacagtttgactcttctgtttccccgatgtgttaatctaatgatttgtccttgatggtatgggagtagctggtgagaaaaaggaag

SEQ ID NO: 374855 - DNA, 122 bp, Homo sapiens
cccggagaaaaattcagcattaacgttataaaatattctcctgctccatgatttgtaaaccgcttgaggacagggaacttgatttcattcatcttaatatttccctagggcaactgacatag

SEQ ID NO: 374856 - DNA, 122 bp, Homo sapiens
ggcaaactgagggactggcgatctgcgcgctggcgaggggcaggcggagtcatgtgacgccgatccctcgaagagcccgtttcagcagcgcggacagggacacacgcacgcagccccgccga

SEQ ID NO: 374857 - DNA, 122 bp, Homo sapiens
ctaagaagagacaggatgtgtggtgtgggttcatgcccccatgtgctggggggttggtggcgttggaagaaggggctggcaagggggatcctggatggaacagacatcagaaggagagatgt

SEQ ID NO: 374858 - DNA, 122 bp, Homo sapiens
caggtcgtagtcctcctcatcatcgcacatgaaatcatcctccatgtcagacatcttggccgggagggggaggagaaattggagacaacctcctcccacaatcctccgcggctcagaggcgt

SEQ ID NO: 374859 - DNA, 122 bp, Homo sapiens
cgcatcacctgacaagtctctcaaggtctggtgtcgggaaaccccacctcttcaaagccccgcccttcgaaacaccagaaagtaacccccctgcccggccctgctttccccctaccccctgc

SEQ ID NO: 374860 - DNA, 122 bp, Homo sapiens
cctctacagggcttccagagaaacctggaaaaccagctcaggccctgccgcaaagggggtcggacccgctccgccctctccctctgggcgctgtgcttagagactcaggcctcaccgatggc

SEQ ID NO: 374861 - DNA, 122 bp, Homo sapiens
ctgtgcagtcagtacatggggcctgtgtgtcttcactaggccagagccggccgtgcctaccgggatacgtgaactaggatattcatggtggctgtcattgattagcaaaggactcgggcaac

SEQ ID NO: 374862 - DNA, 122 bp, Homo sapiens
tagattcccccctcaacccttttcacctgaaaatttcttatttgtgatttccactttgtgcgtgagcaatgtccttctactcaatgttgggaaatgctacatcttcataattttccacatag

SEQ ID NO: 374863 - DNA, 122 bp, Homo sapiens
ggctcgcgccgtccagggacagtcctgcagcagaagcagagccagaatgcaatgaatcaacgtggggccctcagccagcgcctttgggaccgggacctggcgacggaatgccgaggacaccg

SEQ ID NO: 374864 - DNA, 122 bp, Homo sapiens
ctctattatgaaggggagctgcaggcctgtgctgatgtcgtggatcgagaacgcttctgccgctgggcgggcctacctcgacaggtgaggctgagcagggcaggccccacccctgtaccctg

SEQ ID NO: 374865 - DNA, 122 bp, Homo sapiens
ttctggagtcagcttttcttgcagacagagtctgaacgtctgcgtggaaaacttcatctgcgtggctgactgggctggcccaggcactggctgggtcagccccatttctcttatgtccaact

SEQ ID NO: 374866 - DNA, 122 bp, Homo sapiens
ctttcttcagttcccaccctgcccgtgtgtggacgcacagagcctgaggtggttttgtggcgccaacacccctttcccctctccctacctgtcgtctttttgaggcatcgtctgtgtgattc

SEQ ID NO: 374867 - DNA, 122 bp, Homo sapiens
tggggtgatggttctggaggcggcgagggaaggtgtgaggcgaggagacctctcgaatcgcgcccgccccgcccagggccggattggctcccaacccaccctctttgctccagggcggccgc

SEQ ID NO: 374868 - DNA, 122 bp, Homo sapiens
tgataggaccatagtgaaaattctgatgtggccaataaaatctggagctgtgtgattttacgctcaccaacctgcagacacacttggttggcaagtgtgtcagcatgtcctggagatcgata

SEQ ID NO: 374869 - DNA, 122 bp, Homo sapiens
atagtgataatcatggctccagtcataaccgaatacattatcacctggacatgaaaagagcggttggtgggaggacaggatttatttacaaattttggacaactggataggtcttcgggaat

SEQ ID NO: 374870 - DNA, 122 bp, Homo sapiens
taacggttgaagtggaactccttctccagctccagggtctggtagcgcgtgtaggccgtccgggcccttttgccttccgggccgcctatgttgtctgcaatagaaaagtcagcggtttagcc

SEQ ID NO: 374871 - DNA, 122 bp, Homo sapiens
ggaaaaatggatctttcccgttggtctccaattgctgcctggtgagctgagggtgggagacgtataatatacaggtggcagcaaagagagacaggataaagagtaggattcaggtagatgtg

SEQ ID NO: 374872 - DNA, 122 bp, Homo sapiens
gggcctgttagactcacagtctccagagctgtgagctaaatgtcggttgcttgaagccgccgacgggggtgttttgctgtggcggccggagtggcagagactggggagatcctggccacaaa

SEQ ID NO: 374873 - DNA, 122 bp, Homo sapiens
ttcaatggagaaagccaagggtttggacgtgctcatcatgttgccccgagctggagcagtcgctaacattttggtagtcgcgttgtggcagctactgtccatgtctgagtcgccagcgtccg

SEQ ID NO: 374874 - DNA, 122 bp, Homo sapiens
caccagagtcccgggagggcaggcctggtctatatcgacagggcagcaacccactgcctacgcagtgcccggctccagcacaccaggcggcggtcagagggcagcaaggcggccagccctga

SEQ ID NO: 374875 - DNA, 122 bp, Homo sapiens
accaagccctgggccctgggtctgagcagcaccagggcaggctccactctgccaggagaacgtccctgtgggctttccagacagctctggggttaaagggtctgatggagccccctgagaat

SEQ ID NO: 374876 - DNA, 122 bp, Homo sapiens
cctctgcctgggccgcggaaccggaccggccgcgtttccgcagcccagccgccatcttaacggtgcgccgcttgtgtgggcccaccacccccggaaacccgaaccttcgacacttaggttcc

SEQ ID NO: 374877 - DNA, 122 bp, Homo sapiens
gcccacttgtttcagggaccccaggaggtgccccctggctcccaggactgtgtgtgggtccggggggtgggggggtggggagaagggtcgggcagggggtgcaggggaggaaactcctcacc

SEQ ID NO: 374878 - DNA, 122 bp, Homo sapiens
agttgccaaaatcaaggcggaggagcgcaccgccgctaggatccaggcggagaagcccaccgcggccaggacctaaggatgcagtacactgctgccaggatcttgtctgtggagcgcagcgc

SEQ ID NO: 374879 - DNA, 122 bp, Homo sapiens
gacccggcctgcgttggcctggggtgacttcacggctccactgtcagcaagcggccgtcccgtggtggatcctgtccgccctgcgaggacacctggctccatccacacctgggcctctgtct

SEQ ID NO: 374880 - DNA, 122 bp, Homo sapiens
tgccaagcactcacccgggcactcgaggttgctgcactcccgggtgtcagtgagggcacccgtgcatgtggcccaggctgggcccgccacgctgcacttccggctgcgctgttgggtcccat

SEQ ID NO: 374881 - DNA, 122 bp, Homo sapiens
ctcactctccggggagcccctttccttcctggctgcggagggcggagcccgagagaggcacgcatgcgcaatgcaacgtctgccttaggcccggaacttcggtgcctgggcgcagcggtgca

SEQ ID NO: 374882 - DNA, 122 bp, Homo sapiens
agcaggcctttttacctcgagacagaagttcttctttcttgttctcagactgggggctcacgttgaaatggctctcagtcctcagattgtccttgcatcttgttaaaaccctatctctccag

SEQ ID NO: 374883 - DNA, 122 bp, Homo sapiens
tggccacgcggaagaggtggggctagggccctggttcccactgcctggtttctgggcccccggcatccgagtcggccaaaagccgggcagaagagagcgccaaggactggcagttccggaac

SEQ ID NO: 374884 - DNA, 122 bp, Homo sapiens
aaaatattcaggttaagtcagaccagttcttatgcccatctcccaccaacaaattatgaccgaagaagcaaatgtgtggactagtacgacacatccacactaagtagactacagatgtgtac

SEQ ID NO: 374885 - DNA, 122 bp, Homo sapiens
tgactcagcaagggccggtgggattctacatggtcctgcgatatccaggcgacggagtctcgcctctaaagtggcccggggagcaggaaggtatgagcctcagctgagcgaaaccctccttg

SEQ ID NO: 374886 - DNA, 122 bp, Homo sapiens
tgttactcatattagaactatttaaaaatatttatatggatacaagtaaaccatctacctcgataagttgacagatttaaatccgtcaagctagtaaccaggaagcggacttaaagctggta

SEQ ID NO: 374887 - DNA, 122 bp, Homo sapiens
ttatggcactgcagcaggtaggagagggacggggtgtttcaggaaagcagggacacaacacgggaagctcagcgaaggaagggctttggaagttctgtagtagtttatgtttattccattgt

SEQ ID NO: 374888 - DNA, 122 bp, Homo sapiens
tcacttgtccagggccggcacaggaaggccagaggactcctgccagggtgcatgcaggatcgggggcttcttaacttaccctctgcctgccacattctcttccttcaccggatgggggagcc

SEQ ID NO: 374889 - DNA, 122 bp, Homo sapiens
acggagccatggggcctcgttggagccgaggcctacacgttgcaggggcggggcgctgggcggggaggggcggggcctaggccagataccctgcaggggcggggcggggcggggcggggcct

SEQ ID NO: 374890 - DNA, 122 bp, Homo sapiens
agaacaagcctatttgtaagatactgtgaaagcagcagctacatgaaaaaacctcagaggcggaagtttactgtaaactcagggtgagtcaacagaaccacaagactgccaagaaagttaat

SEQ ID NO: 374891 - DNA, 122 bp, Homo sapiens
gctgtagtgagtgaagcctggcatttgggaagatgggtgtgtgggtgaccaaactcaccacgcaaggcccagagcccttttgaggccctcgaaggtcccaggctggggtcatcctctccagt

SEQ ID NO: 374892 - DNA, 122 bp, Homo sapiens
cttaacatacagccagcccagagaggttaagaaattacataaggtcacacagctaggaagcgatagagctggttttccaagttgaggccgtcagattccgagtcctgtgggtgtgctctgag

SEQ ID NO: 374893 - DNA, 122 bp, Homo sapiens
gagtctggagttgcttggagctctcagaagctcccggagcctccttcctcaattccaacgcggtaaccaagattcctgctgagcttaggtcacagtgtgactgcaggaggaccagccgcgat

SEQ ID NO: 374894 - DNA, 122 bp, Homo sapiens
agacccggagaaagggtgagtgttggcgggcgcaggaagggaccggccgggagcgcgccccgctctccggggcattgtttgggcgggggcggcgcgggcacgtgcgcgcccctcccccatcg

SEQ ID NO: 374895 - DNA, 122 bp, Homo sapiens
gtttcccagattccttcactttctggagttacctccattttggacaatgctgaagcttaccgtttggggatgtttcactgactttgggaacactggcattctttcctctctcttttattgct

SEQ ID NO: 374896 - DNA, 122 bp, Homo sapiens
aggtggccagcgctctggttgggacgcaagagagcggcgaaggccacttggatgagccagcggctagggcggccaggcaaaagcagcgctttccgcgcggaggaccagatgcgctccagccg

SEQ ID NO: 374897 - DNA, 122 bp, Homo sapiens
agaaatgctatttaattaggaatctgatccaatacccgcgtgcagcaatttgccagcagacgtgtcattttgtaaggcgcagtgagggaaggaagtcgtctcgcctacctgggttttccact

SEQ ID NO: 374898 - DNA, 122 bp, Homo sapiens
tgagtgtcatgggaccaagaccagcacctttttcctcagtgagatgcacatggtagacaccgtgacatggcacaagatgcgaggtaggtagccctgcccctctcacctgcccaacccccctg

SEQ ID NO: 374899 - DNA, 122 bp, Homo sapiens
gaaattcgtcataaaatccaacaggagggcagtgaagcccttttttctcatgtctgggagcggggataccgctaggagggcaggaggtaaagtccagaggctggcgcgtggtgcggccccga

SEQ ID NO: 374900 - DNA, 122 bp, Homo sapiens
cggcgccccgaggggaactgcttcgcacttggcaataaacacacaccactgctgccgagtcggacacacaaggccggaggctgagggaactcttcgtcgcagcagcctccccaaaacaggta

SEQ ID NO: 374901 - DNA, 122 bp, Homo sapiens
tcctctctttccccagagctggagagatcaagctggctgcctcctaccctctgctggctgcggccacagagcctggggtggctgccggcctccccactctgctttcctcccctctccttgga

SEQ ID NO: 374902 - DNA, 122 bp, Homo sapiens
ctgtataggaaatagcaagaggtgatgaagacaccttttattatctatttattgccatgtcgctggtagtatttagttccacacacattgtatttcacaagatgagtctcagccgtcttcct

SEQ ID NO: 374903 - DNA, 122 bp, Homo sapiens
ccccctgctccacggtgcccagtcccatcgaccgcccaagggctgaggagtgcggccgcacggcgcggaactggcaggcagctccacctgcagccccgagcaggatccactgggtgaagcca

SEQ ID NO: 374904 - DNA, 122 bp, Homo sapiens
cctgccttttgctgctgccctgggtgtgcaggggtctgcctgggctagcctgggcacctgcggctgtgctgggccagcctgcctgcctgtccggtagggccctgcctgagctgggctgtcag

SEQ ID NO: 374905 - DNA, 122 bp, Homo sapiens
cctatggctatctcttccttagatgaaccactacctacccacccacctgccctggagacacgtggaggcttttgtgtcttctgacccagatagggtccatcgaattcctttcctgggactgc

SEQ ID NO: 374906 - DNA, 122 bp, Homo sapiens
ggcactttgaaaaacacagcccaggcaaaattcttaaaaagactggctctggtggcggggcgggtggtgaaggactcagggacaccgtgcatgcagcattgagggagttaatgcagacttgc

SEQ ID NO: 374907 - DNA, 122 bp, Homo sapiens
gaaccttaaaactgagatcccaggagacccctctcggatactctgcagaagtcagagtgacgatattagcaagcacaccgcagccatgcgaacccttcctggctcagctcccgacaaaagaa

SEQ ID NO: 374908 - DNA, 122 bp, Homo sapiens
tgtagtacttctccagcttggccagaatgtgcttgccataggtgtacttacgaagagttgcgatgtggggccggatctggggaggaaagacagtctgtgttacatggcctgagatgagactt

SEQ ID NO: 374909 - DNA, 122 bp, Homo sapiens
ggtaccttcaactcaaaatatctcaaactgagctcatcaacaccctctagccacagaaaccggctttttcaaccatgtattggctttgaccagcatcgccatccacccatttgtccaaacca

SEQ ID NO: 374910 - DNA, 122 bp, Homo sapiens
actggaccccaaagttggaccagccttcaacactggaacccgcccatgcacagctccacccggcccccaggctaagatagaccacgcccccggacatctggtccccgccggaacacccgggc

SEQ ID NO: 374911 - DNA, 122 bp, Homo sapiens
gcgggcgcccgggccggccagagggaagggccggagagcggagggaggggtctgcggtcccgcccaccgcccccggccaggcgctgcacaatctgaacttgccacgtgggagctgccgccgc

SEQ ID NO: 374912 - DNA, 122 bp, Homo sapiens
gatccgccgcccagagtgaccccgcccctgctctccggcaggtgttccacgtggccatagcgtttgcgtcacaatgacctggcggacaggtgggagccacagcgtacaccccagggttccct

SEQ ID NO: 374913 - DNA, 122 bp, Homo sapiens
gctgcatggtaggaacttgtcctagaatcatctccaaggccttcctcccaccgtcgcccacgccagcgctgatattccggcttcccacctgcctgctgccccagcctctgttctgtggttcc

SEQ ID NO: 374914 - DNA, 122 bp, Homo sapiens
atgctgtggctgctattgttcccttaaaaatatttgaagaataaaaaatattttgtaaggcgttagcctaattcgaggaaaatgcaatattgttttgcttttggcaagagcttcctgcagag

SEQ ID NO: 374915 - DNA, 122 bp, Homo sapiens
agatataaaacggagataatagcctcagagtgagtagtgccatcttgctttacggagctgcggcggcggctgccggaaagccacttccggcctgctccacggaggcgggcgcgacgccgaaa

SEQ ID NO: 374916 - DNA, 122 bp, Homo sapiens
cacagtgggcgagagtggacggtggtgctcccttggcaaactggagaggcctcaggatcccgcctcagccagccagcgcatcagccttcaccttcattgcgccacagtggctttcgtgcgag

SEQ ID NO: 374917 - DNA, 122 bp, Homo sapiens
acagagcagcctcccctcgtgaagctcccccacccgaactcacttagaacagtccagccccgcccagaaccttcgctcacagcctggcctgcttaactgacacccggggaggaaccggacgc

SEQ ID NO: 374918 - DNA, 122 bp, Homo sapiens
agctcgtggcgccggcgccgacgctgatacaatattagtgttgccccccctttcggagcccgctccgcccggctccccgatggcacgaatccatcacctggagcccgtgtcactttccccag

SEQ ID NO: 374919 - DNA, 122 bp, Homo sapiens
cctaaggccagtcctttctccgttatccgggcactgttgtacctgtcagtaaaaggaggccgctgaacttgtttctccaaacggccattgcatcagccttcggaagacaagttccatcggca

SEQ ID NO: 374920 - DNA, 122 bp, Homo sapiens
gcgcccttcttcagctgtgctctcaggcagttaccggccagacccggaccggaaccttggcgcggtgacgctagtttccggcgggctacttagagcgccgaacagctctgggccaaaggacc

SEQ ID NO: 374921 - DNA, 122 bp, Homo sapiens
ctgcagggcacgggtgccccatctgccaaggctgctcccacactccctacactcaaatcccgggtggcagccataatccccaaagatgacccccaccccaagattccaaagaagctagtggt

SEQ ID NO: 374922 - DNA, 122 bp, Homo sapiens
gtgcgcgagtgaaggctgatcccagaggagctgtcagccgctgcgggggccgagaagccccgctgctggctctagggttggagctcttccagcataggtgtgcgtggggaggactgaccctc

SEQ ID NO: 374923 - DNA, 122 bp, Homo sapiens
ccgcgggaaaaggcgcgcggaaggggtcctgccaccgcgccacttggcctgcctccgtcccgccgcgccacttggcctgcctccgtcccgccgcgccacttcgcctgcctccgtcccccgcc

SEQ ID NO: 374924 - DNA, 122 bp, Homo sapiens
tataagtgggagccgagcaatgagaagacatggacacagggaggagaacaacacagactccggcctgttgggactgcaggggagggagaccatcaggaaaaatagctaatgcctaccgggct

SEQ ID NO: 374925 - DNA, 122 bp, Homo sapiens
gagacatttatgggctttaggaatagacttaaccaaagacaatgttggtttggcccaaagcgggagcttgggccaaggattctggatacattttgaagatgagacagcagcactggggagag

SEQ ID NO: 374926 - DNA, 122 bp, Homo sapiens
aatgcaccagaccagggaggtaaacatcgaaggcacctgcattgcgcccccactgggatgcgctgtgcgcaagagacggggaccgtctgctgcaaaaccggatgatcggagacgcagggagt

SEQ ID NO: 374927 - DNA, 122 bp, Homo sapiens
cttctgcccttcaggctacctgtctggcaggggaatcccaagaacaaaaatccgaggtcccgtaactttcatgggagtgagaagtggctagggaaggctgaggaggggaggggtctggaaag

SEQ ID NO: 374928 - DNA, 122 bp, Homo sapiens
tgagctttactttttgatagaattatatgttcatacaactaacggttctctctgcagttacggctaatgttattgatactcataactcaaggcaaacatgcggggtctccaagaaatttttt

SEQ ID NO: 374929 - DNA, 122 bp, Homo sapiens
gtaaactgcatgagcccctcacaacatcctgtgtgctgctgaactgagctggggcgcagccgcctgtctgcaccggcagcaccatgtcgctcatggtcgtcagcatggcgtgtgttggtgag

SEQ ID NO: 374930 - DNA, 122 bp, Homo sapiens
cgcgcgcgcgccaggccagcaggtgatgagcgcgggggcggggcgagggccgtcggcggccgccgcttcctgggcctgagcgcgggaactctgggggccgagctcgcggcgaccccaccccc

SEQ ID NO: 374931 - DNA, 122 bp, Homo sapiens
ccctggtctcccttccccagctcagctccggggagggggtcgcgggccgcaggaggaagccggagcgcagatacctcgattgcaactcctctgagtcgacgccggcctccccccgcggctcc

SEQ ID NO: 374932 - DNA, 122 bp, Homo sapiens
tccaagttaaagatgatggttattgaactagagaagcagttgaggtgatgagaagggtttcgattcagaattgattttgaaagtttattgtactttaaaattggacattgggtatgagaaag

SEQ ID NO: 374933 - DNA, 122 bp, Homo sapiens
gatgtacccatgctccgtgtgtctgtgtctgcatgtccacacgtctgatgcacctgtgtacgtgtgtcaagcctagccacctcagctgcagggaggcagaaggcaaggcaggccccacggac

SEQ ID NO: 374934 - DNA, 122 bp, Homo sapiens
atggcctaagacttacctgctgggtaggcccgaacggcagtcccagacttaccctggcagcggaaacaataccccagagcaccgatcgctcactgcagaactgttcccgctgctagggcacg

SEQ ID NO: 374935 - DNA, 122 bp, Homo sapiens
taaggctaaatgggagagggtctggtatgtccagtctccattgggctgggcagtcttgtgcgcactgctgtgaggcatgacaagcttcccgttcttcctccacgtgatagtcacttctgctg

SEQ ID NO: 374936 - DNA, 122 bp, Homo sapiens
aggctccatgctgaaagtctagaccccatctttgcctacttttcaaggcttggcaaagcacgtgtgtcttttgatccttatcccccatgtaacataattcatgtttttaaagatatgttttt

SEQ ID NO: 374937 - DNA, 122 bp, Homo sapiens
cacccaggccagcactgtgcgggccccttcaggcttctctcaggctctcccgagacacaccggcaggctgcagtgctaccactgtggtaaaggacaaggaaactgaggctctgtgggattcc

SEQ ID NO: 374938 - DNA, 122 bp, Homo sapiens
gtggctgcacagcagtgaagggagtcacgttccctgctgccgtggcagctctctcctcggcgcctccctctcgcccgccgttgccccgggcactcacacccacttttctctccctgcttcct

SEQ ID NO: 374939 - DNA, 122 bp, Homo sapiens
ctcacctgcacggcccaggcttcaggtgagccacggggccaaggcggccaacagctgaggcgcagcccgtgaactgggggcccacttgtgcctagagggcgaggtctcggtagagccaggct

SEQ ID NO: 374940 - DNA, 122 bp, Homo sapiens
gccgggccccgcgcagggctggctatgggcgtggggatgggcgcagggccccgagcgggccggagccggggagggtccggggtccgcacctgcgtccccgccgcgcagccccccacccccac

SEQ ID NO: 374941 - DNA, 122 bp, Homo sapiens
agagtctcagtgacttgaggacctgcttgcactcccgctttccacgcccggtcccctacccgcacctgcccaagtggtctcgttcctctagaatctgaatggtggggaggggtgctcctgat

SEQ ID NO: 374942 - DNA, 122 bp, Homo sapiens
ggcgctacgccaggaccgacaggaaagttttccagtttcttaatgcaaaatgcgaatcggcgtacttttccagggggaatcctcggcagataagctggactgtcctctacagaaagaagcac

SEQ ID NO: 374943 - DNA, 122 bp, Homo sapiens
agccaaaatgtgatctcttccaggaagcctgccctaagtctgatttgaacttccttctggcgtgttccccaacacctgcacacatctctgctaacacacaggcagccggactagccttctgt

SEQ ID NO: 374944 - DNA, 122 bp, Homo sapiens
catctatacaatggtaatggcagagaccgtgcagggttataagcagtgtagcattgtagacggcctctgtcagagttagctcttaggctggacgcggtggctcacgcctgtaatcccagcac

SEQ ID NO: 374945 - DNA, 122 bp, Homo sapiens
acggacaggctccgggccaggactgcgtttggcagggctgaggggggcctctttttctctcggcgaccccgccccgcacgcgccctcccctctgaccccggcctgggcttcagccgcttcct

SEQ ID NO: 374946 - DNA, 122 bp, Homo sapiens
tctctgcagggtagcccggctcgggggtggcgaaggcggtgaatggagacccggggggggcgggggcggggccgcggcgggcggggcggggcggggcgagtcgggccgaggcccgggggcgg

SEQ ID NO: 374947 - DNA, 122 bp, Homo sapiens
aaaaactcaaacaacggcgggcgtgcctgttcgtggatggaacagggggtgtcgggaaggcgtcagggctcccggttgctgtcagtcgcccgtgagacccgagcagcagtcgctctgttctt

SEQ ID NO: 374948 - DNA, 122 bp, Homo sapiens
caaagctgatgcagaagcccagaccactcatgatggcgataatgtagcggcgagggaggccgaagcaggtgcagtccaccaccggcgggtcccgggtctgcgtggtcaccgggcgcccatcc

SEQ ID NO: 374949 - DNA, 122 bp, Homo sapiens
catgtacatctactttatatgaaagaaaaaacagttgtctgcctgtaaaatgttgagtttcgattgagccatgtttggagattttattactattctgaagggtagtgttgttggttttcatc

SEQ ID NO: 374950 - DNA, 122 bp, Homo sapiens
ttagcagctgactacggcggcccgcgcggctcactccccgcagttcgtcccgtgcgcgaccggagcctggagtttgcaaagtgagtagctagggcctcagaactataatcagagaaagcaaa

SEQ ID NO: 374951 - DNA, 122 bp, Homo sapiens
aggaggcagggctcgctggggcgtgaaaggccgggcctggcaggggccggggtaggaggccggcttggggcagtacctgtgcgtcttctcatgggccttgcacgcggccgggtcggaaaagg

SEQ ID NO: 374952 - DNA, 122 bp, Homo sapiens
agacaagggatttccaaaccctagaggaaaaaaaacagaaacggttagctacactcagagcgaagagaaggctggtgtgggtgagtcatacggtcttttccacgcagcagagaaggtaccta

SEQ ID NO: 374953 - DNA, 122 bp, Homo sapiens
aactacactaaacgttagtgtaccaagaaactaagagcgtctcaaagatgacagtctgaacgtggcaggtgaccttaaaaagccactgagttcaacccctttataaatgaactcaaaaaata

SEQ ID NO: 374954 - DNA, 122 bp, Homo sapiens
cgcctgagtttttatctagggagttagtttcggtttcttttctccaccgcgaggccttttcgatttccgcagttttctggaggtagaatataggtctgcattggtttactctgagaatctta

SEQ ID NO: 374955 - DNA, 122 bp, Homo sapiens
gaaaggggtgacggacgcacctggaaaatcgggtcactcccacccgaatattgcgcttttcggaccggtttaaaaaacggcgcacgagattatatcctgcacctggctcggagggtcctacc

SEQ ID NO: 374956 - DNA, 122 bp, Homo sapiens
tttaaaggaataatggaattcccattcttgtgagccagaagtcctgaggtagaaatgctccggagttgttaaacacaacaggttaatcaagtcatcccatagcatttccacctgtctgcctg

SEQ ID NO: 374957 - DNA, 122 bp, Homo sapiens
accctttcccaacttgtgctggcagcagttaagaaactcctttcaaatccggctgtcttgcgcctgcgcattcaagcaaagcgctcataggcggggtggggggggtggggggggttgggggg

SEQ ID NO: 374958 - DNA, 122 bp, Homo sapiens
acggttccataccccgaggagactcaactcgcgcgtccggctgtcttccgtgtcacacaccgatctgagcgcctggggaaggttgacagcctgggccctggcaccactgctgctactgcgac

SEQ ID NO: 374959 - DNA, 122 bp, Homo sapiens
ctttctgccgggcttgcccaacgagggggcaaacaccacgctcaggtggcgtggacaggtcgctgccgcctcggactacaccagagatctcagctatgagcctggacgcccgccccgccctc

SEQ ID NO: 374960 - DNA, 122 bp, Homo sapiens
aaatggcggcggagttcggtgggctgggaggtgtcgcagcgcgcacttcatttgttactgcgtgaactgagctccgagtccagaaaggaggggatggggtggggcgaactctatgacggagc

SEQ ID NO: 374961 - DNA, 122 bp, Homo sapiens
ggggatgctaaatgcttcagtaacgccacctgagtctcgggatgaagcaacattattcatcgccctttgatcatgagctacatatgtgagtgccaatgctggcgaatcgtatttggaaagtc

SEQ ID NO: 374962 - DNA, 122 bp, Homo sapiens
taaggaagcgatttcgaaacgcttcaaatcccaaaccgatcagctagtgctgatttttgccggaaaaatcttaaaagatcaagataccttgatccagcatggcatccatgatgggctgactg

SEQ ID NO: 374963 - DNA, 122 bp, Homo sapiens
accggcgcgggggcggggccgcgcgttgcctggtaactgcggcgggcgggggagcgggagcgctgtcccccgccccgccccgctcccaggtggagtccgcagtgggctttgtcccgggccgg

SEQ ID NO: 374964 - DNA, 122 bp, Homo sapiens
ccccggggatccaggaagactgctgtgtgcagctcctgggcaagggcttgctagtctatccggaagaaacagtgtacctggcggccgaagggcagcccgggggcgagcagggcggcggggag

SEQ ID NO: 374965 - DNA, 122 bp, Homo sapiens
tagagatatttttggctgttacaattagagggaatgctactaccatctagtgagtagaggcgagagatactgctaaacatcctgcaaggcataggacagccttccacaacagagaattttcc

SEQ ID NO: 374966 - DNA, 122 bp, Homo sapiens
cggaaggaagctgaggccggcccgcctcccgccaaagggccgaggaatcccgccacctaacggcaggggcaggggccacagctggcaacgcctactttaattttaaaaataatcactggggc

SEQ ID NO: 374967 - DNA, 122 bp, Homo sapiens
taactccaggccatcctgcagcgcagagggggcgctgctgccgggcatcagccgtgaggacgcgcccctggccgtgcggagagagccggcatttgcgggtcactcgggcgcccctgagtggg

SEQ ID NO: 374968 - DNA, 122 bp, Homo sapiens
aacactagtgcgccagccggctgcgagaggcggggcctagctttgggggcggggctggagcgccctctgcaggctcagagagctcagtcctcgggctgcctctgacccgttactccctcggt

SEQ ID NO: 374969 - DNA, 122 bp, Homo sapiens
ggtccaggcaggccgtgcagagctgagtttgtgtgtgcccgggtaggggcgggcacaaaccgggagcagtggagcgcagccctcagccagaggcaggaggaaatgtggaggggagagcctgg

SEQ ID NO: 374970 - DNA, 122 bp, Homo sapiens
gccccgcgtcgccatgatgacaagcgcagaaccacagtgcgcacgcgcggggcaggaccccgggaaagggctattaaagggccagcgtcgatctcgcttgtctatcacgatagtcgcggtgc

SEQ ID NO: 374971 - DNA, 122 bp, Homo sapiens
tggctgctgagtgactctcctcctgtcactgcccttgctgtgggatttaggtcttacattcgcttttatttacctatttctctcctggcttaacttttcagattcatgtaagagcaaacacc

SEQ ID NO: 374972 - DNA, 122 bp, Homo sapiens
ctgttcactatttcttagagtccgctccctcccccaaaaagaatgccagaagccttagcccgaagctccaaagaagacagtaacttgggcctggcctagccccaagggcagctcctttggga

SEQ ID NO: 374973 - DNA, 122 bp, Homo sapiens
ccagatggtgagccttgaggaagacttgtattgggcccccacaggccccaggccagtgtccgtcagcctggtgctcacccccagtgtgctgaagctcagaccctccgtggcaccctggtctc

SEQ ID NO: 374974 - DNA, 122 bp, Homo sapiens
cggagggcacggagattacggcggcgccacccgggacatccagggccccgaggccctgggcggtccccacgcgagatcgcaaaccatgacaataggcagtcacccgaggtcaaataaaaacg

SEQ ID NO: 374975 - DNA, 122 bp, Homo sapiens
ccccatttgccttttcccccagcaatagttttatgagaatataaataacctgtttcacaacgttccgtttctcacataagccttgtttggttccgaggtcattgtgatttcagtggttgtag

SEQ ID NO: 374976 - DNA, 122 bp, Homo sapiens
tccgactctagtcgtaatggaggcgggcggctttctggactcgctcatttacggagcatgcgtggtcttcacccttggcatgttctccgccggcctgtgagagtgcggccgggctgggttgg

SEQ ID NO: 374977 - DNA, 122 bp, Homo sapiens
ggattacaggtgtaagccaccgcgcctagccacaagcataattttttaaagggaggatcacgaatgacaactgtagttctactcagggcaggacaagggaaaggtctgcacactgtagggca

SEQ ID NO: 374978 - DNA, 122 bp, Homo sapiens
ccacctgggcaccaggagcgcaggcacagccggggtcctcaacagagccacatgcaaacacgagcaaacacgagcacgggcaagccttcttcccggagggaggttccttgcaaggcctgcct

SEQ ID NO: 374979 - DNA, 122 bp, Homo sapiens
gagaaatcgagtacagcagctgctggcccaggtgctaagcccgtcactgcccgggacttgcgggccaactggccactccgagtgcggggccccccgagcccacgcccacccggaactcgcgc

SEQ ID NO: 374980 - DNA, 122 bp, Homo sapiens
tccaatggaaatttggcttcaggggtgctttctagaaaaataaaaagtgaggaagaatgccgattcctctggaatgcgcgtgcctccttaatttggtagccatgtatctagttttccacccc

SEQ ID NO: 374981 - DNA, 122 bp, Homo sapiens
acaggcttttctgataaacacagatcagcactgggacccaggcaggtggaccccagagcccgcgtgcttcatcgccttgtgcccatgaggggacccaggcaagcggaccccagagcccgcgt

SEQ ID NO: 374982 - DNA, 122 bp, Homo sapiens
acatttccaaatcacaggagggagcagcacaggccactgaaattcatcacccccaggaagcggatgaccctgggcctttcttagccctgccagggggaggagtagccccagggagagccata

SEQ ID NO: 374983 - DNA, 122 bp, Homo sapiens
cgctgcacccacatcggtggacggcgcacccacgagcctcggcagccccgggctgcccgccgtctccgagcagttcaaggcccagtttccgttcggggggctgctagactcgatgcaaacgt

SEQ ID NO: 374984 - DNA, 122 bp, Homo sapiens
cttagtgtttgtcctcgaaagagtcaatgatgttatctttgacaacctttattggcactacggtacatatggaagggtcaaagtttctaatacgaccgtcagggtaaagtctaaacggtatt

SEQ ID NO: 374985 - DNA, 122 bp, Homo sapiens
tggagactcaggagaataaaccggtgcttggcgtctccagagtggaggctcagtagaacacggaattggggccagtgtggggtctctactcaccctgtcacctttcacgcctatgtcacctt

SEQ ID NO: 374986 - DNA, 122 bp, Homo sapiens
aaatgtggccctttctctgtgtagtatgtatttattcttccgtggttatcagggagggaccgcaccttcttctagagctattggccattggtacatctcagaggaattttttttctttctct

SEQ ID NO: 374987 - DNA, 122 bp, Homo sapiens
cccaacggggctaagggcgctctcaagcgagctcgttttgcctgggacgcgatttgcttccggacgtctggggagagttgcggaactccggagttcttgggcttcctagaaggataagaaga

SEQ ID NO: 374988 - DNA, 122 bp, Homo sapiens
tcatgtcagtggactagcacatggcagtcgcttggaacccactcacaccaatccagtgaccgtgtgtgggctggcggctcttctcccccaccaacggaacccctgtgtgcaccaaccttccc

SEQ ID NO: 374989 - DNA, 122 bp, Homo sapiens
tcctaggatcgctgtgacttctgagtgggagacttcgcaggaagcactctgaacagtccccggcaggtagctcgtgttttgctccaggaggtggataaggtgcagctttgcagaacagctcc

SEQ ID NO: 374990 - DNA, 122 bp, Homo sapiens
ggcctgtccctgtggccgtcaccctcccgcaactcagggcctcaccccgggtggtgcccgcgcggggctctcacgggactgtcacgtgcccttgcccccaggccagcatctcggccttccgg

SEQ ID NO: 374991 - DNA, 122 bp, Homo sapiens
tattcatgaaagggtgatgaggcaatgcagtcatctctgtgcattccagctgcctgatgacgcttaaccaaccaccagaagcaacttctaggtgaggggaggctgcagggatttaaagtttt

SEQ ID NO: 374992 - DNA, 122 bp, Homo sapiens
ttcctcgaacagtcaacagggcgcagacacagcgcacaggttccgtaatgtggcgctgtccggcagagaacatggccgcgcccttatggtgtttattcgcgtgggccgccattttgaaagca

SEQ ID NO: 374993 - DNA, 122 bp, Homo sapiens
gccatttcaccaatggaaattccgatgagaaaggaagaaacgaggggttcaaggccgcgccgttgtgagtccgctgcggaactaggaactgaaaccccgtggttcccaatgagccagcgaaa

SEQ ID NO: 374994 - DNA, 122 bp, Homo sapiens
aagcataatcttaagtgggtggggggcgcatgggggaatcccaggtttctagcgtcttagcgttaatgcaagaccaggcgatcccgggacttctgcatgctgggctcttccccctttctctc

SEQ ID NO: 374995 - DNA, 122 bp, Homo sapiens
gcaaccaattgagaatctttagccaggacacactgatagagacctactggttacttacatcgttaaataatgtcatacccattgataacagaccctgccccaaattcctctacagctccctt

SEQ ID NO: 374996 - DNA, 122 bp, Homo sapiens
gaggggcccatcagtcactgtcactcagcttggtggatggaatgtgtgtgcccacatgctcgccgggggacatctggcctgctgaggggtcaggggtcctggaggggtggcatgtagtaccg

SEQ ID NO: 374997 - DNA, 122 bp, Homo sapiens
cccctttttcccttttaatttccttttctttctgtgctttgcagaaagggcttggcctggcggccggctggactgcagatgtctcttccaggcgccctggagcctcgcagctgccgccacct

SEQ ID NO: 374998 - DNA, 122 bp, Homo sapiens
acatgagcttaggaaagttgctgaggtaattggttgagagaggtgttcaaataaaaataacgcaattggcaaaaactgttactaagactttgtagaggcaccaatcagtgacatggcagcat

SEQ ID NO: 374999 - DNA, 122 bp, Homo sapiens
cgagccacgccctcttctcattaatattaaattattgtgaatattgatgtgggggcgtggcgccttggccagctgggctagccagccaggggttcccggtttcacagagaggaaagtgacag

SEQ ID NO: 375000 - DNA, 122 bp, Homo sapiens
agtagagggttagtaataataaaaaccatcagtcctatttatggtgtgcccgcaccatgccgggcattctgctaaagcatcatccccagttacctcaattatcttcgcagcaaccccaaaag

SEQ ID NO: 375001 - DNA, 122 bp, Homo sapiens
gtgcatgcacaggtgtccaggccaggcgtgtaagcccccaggagtgcatgcgtgtgtttgcgtgcagtctacaaacatgttttcacaaagctcaaggagaagcaatcagtcatctccaagga

SEQ ID NO: 375002 - DNA, 122 bp, Homo sapiens
ttgaaaggtgacatcgtgctggcagccctcacagcccttgctcgctctctgcgcctcctccgccttggcgcccactctggccgcgcttgaggagcccttcagcctcccgctgcactgtggga

SEQ ID NO: 375003 - DNA, 122 bp, Homo sapiens
tggtggggaagcggcgagttgtctttttttcaaaagacgttttggggtatggagtttgctcgctctgcatacagaaggaattctagaagctgggatcgcaccacccaccccacgcacccctt

SEQ ID NO: 375004 - DNA, 122 bp, Homo sapiens
ataacaatatgtatgtcgattccattaagcaatactaactgacgttaagtcatgatttcgcgccataataaagatgcaaaggaatgacatttctgtattagttatctattgctatgtaacaa

SEQ ID NO: 375005 - DNA, 122 bp, Homo sapiens
atacatacatacaaatatatatgtcaggtaataaggcaggggaaaggattagaggatgtccggggcctagtttcaatagtggccgaagaagtcctcctggaaaagtcaccattcaattagag

SEQ ID NO: 375006 - DNA, 122 bp, Homo sapiens
ctcgcccctcgctctgctaccatttccttccgtttctgcttcgcttggcgatgcaaaacgcgcgaggctcacggcagagggccgaggccacgggactctcagggccgggcccgcccctcggc

SEQ ID NO: 375007 - DNA, 122 bp, Homo sapiens
cttcagttcttctgcggtgctctactcacaaaaacacatctttcaactgaaatcatagttcgctcaagatgtttctcacgggcagagttaaccccacctattttcctgttctgaaaacctca

SEQ ID NO: 375008 - DNA, 122 bp, Homo sapiens
gggttttgttcccagcctaaaacccagggggagctgagcggtctctggcccatagtaatgcgccttaatgaagaagcccttcctattgtgttagtgctttcaatgaaaaggcatcagattca

SEQ ID NO: 375009 - DNA, 122 bp, Homo sapiens
accttatcccggccccaaactggcagggtctttatcccaccattagagagaggtaagtgccgcgctagtctatttactttaaaagttttcctgtgttgaagtttctgcttttgcaaaacctg

SEQ ID NO: 375010 - DNA, 122 bp, Homo sapiens
caaatagccttcaaacctgacctgtgtcctttccccgaccgctccccctcccctgccacccgttggttgtgcatttattcccctagttcccgaagcagaaaacctgggcgtgtccctttact

SEQ ID NO: 375011 - DNA, 122 bp, Homo sapiens
gcggtgctcatcaccggtgagtgcgcgggtcgcggagcgcggggactccaggctcgagggcgggactggacactcaacaggactgactccccatgggcacagccaaggcgggctcctcagcg

SEQ ID NO: 375012 - DNA, 122 bp, Homo sapiens
aactagcgtgggtgtgacagtgggacagatttccaggtggtgtagcccccacccccagctcgtgctgtctgctccgggccgcctctgctcccggcctcccactgctctgccgtgtgcgggcc

SEQ ID NO: 375013 - DNA, 122 bp, Homo sapiens
ccacacagcggagggggagtaagcgggaccagccagcagtgccagagcccgggccgggcacgcccccctcccctttctcccaagcccctttcctcccaatcttcttcccgagcccctgtcct

SEQ ID NO: 375014 - DNA, 122 bp, Homo sapiens
ctggggacaacacctggccagcggaagcctgccaaagcccactgcagcaagagcaagggacgaagagggtatttccgggacagttagtgagcaattagagaccgggggctagagcgagcgag

SEQ ID NO: 375015 - DNA, 122 bp, Homo sapiens
ctggggaggactgcctctcctttctctcctggagacgtgtcagccttcttgctggacagccgggattgcttgatgcttcactcctcagcccacagtggatcacgagcagcagaccacctgaa

SEQ ID NO: 375016 - DNA, 122 bp, Homo sapiens
gactcagttcaaagaaagagaagttggcaatcttcagcactctgtaagtaactgtgttgtcggtatcagcccaggtggagctggtagctaacgtgcttattaaaatatcatttaattgtata

SEQ ID NO: 375017 - DNA, 122 bp, Homo sapiens
tgacccagaggtagatgtccacggccttgacgtaggagacgcgcggcatggaggcattcacgcccgtgatgatggtggtcatggtcagcaccgtcgtgatacctgcaacacccggccttagt

SEQ ID NO: 375018 - DNA, 122 bp, Homo sapiens
gcgcgcgggaggccgtgctgggacgcagagcccgaaaacctatttgaggggcgtcttgaccgaaggtgctaaatatcacatgtccccattaaagtaaaaatgcaaactgccctaatcggatt

SEQ ID NO: 375019 - DNA, 122 bp, Homo sapiens
tgcggtgggcgccggagtggggagcaggcaatcccccaggctcggagaaatcttttatcccgaaatccagggtgtcccccggtcaggatcgactcggcgccgcgttggcttcctcgctcaac

SEQ ID NO: 375020 - DNA, 122 bp, Homo sapiens
ccgccccgcgcctcccgccgccgcgtttgaacccgaggaacggcgcgggcgggtctcagccgtgtttggaccaatcagcgtctccgctcctatgatagacatgggcgtctcagccaggcccc

SEQ ID NO: 375021 - DNA, 122 bp, Homo sapiens
gacctcttggagggggtcagtaggcttgtagggggaaagacgcacacagagactaaaggacgagatggagcaaggttcaaccccctagctgagtgttggcagtgtcgggattttaacgaaga

SEQ ID NO: 375022 - DNA, 122 bp, Homo sapiens
cctgcctcccggaagtgatttcctctgggttacggcgcaggcgcaagataagctaggagccgcgcgagtcgtagtgtcgctgtttgcgggtctccgcgcgggaccggggcgcagcggggtcg

SEQ ID NO: 375023 - DNA, 122 bp, Homo sapiens
actgggccttccaccgccccccgcccccagcaaagccccccgctcggagcatgcgcgggccgcttggcgccaattgctgaccgccacagccacagccagggctagcctcgccggttcccggg

SEQ ID NO: 375024 - DNA, 122 bp, Homo sapiens
caagaggagaggtggccagtaaatgtcagctgaggcaccgaaggctgcgatgcaccagcccggtgccctgtgaggacggccacatcaatagtggtaacactcagtgagtgcgagtttgcttt

SEQ ID NO: 375025 - DNA, 122 bp, Homo sapiens
ctaatcactcaaatcatctacagatgccttccgtgcacatgccaatgccttccgtgcacacgcccgagccctgggtggcatttggggcctcgccaccactgctacccagcagctcccagcag

SEQ ID NO: 375026 - DNA, 122 bp, Homo sapiens
accccactggggggtcgtggtcagggagacagcccccaggatacccgctaacgaccgagacgcctggatcatcgctggtcaccgtctgtgtgtgtaatctgacgtgatgaaagcaaagtcaa

SEQ ID NO: 375027 - DNA, 122 bp, Homo sapiens
tccgcccacctcagccttccaaactgctgggactataggtgtgacccaccgcgccgggcgcgaaatgatttcttactgtgagtcatggtcagaaaagtttgaaagccactggtaggctcccc

SEQ ID NO: 375028 - DNA, 122 bp, Homo sapiens
cctgcgagaagattttctggaaagggccctgtggcaggctggtgggtactgatgagtccacgttcattctccactgtggcactcatcaatttttacgacctctgttacatcgctttccaccc

SEQ ID NO: 375029 - DNA, 122 bp, Homo sapiens
gtagccaatcaacacgaggcttgtaggctgccgttcctcgattggctacggctctagctccgcccgccgcacttggcgacggtgtccggcggggaggcggcggcttccggtctgggacggag

SEQ ID NO: 375030 - DNA, 122 bp, Homo sapiens
ggccttcgggatcttgagctacgaacaccggcccctgaagcggccgcggctggggcctcccgatgtttaccctcaggaccccaaacagaaggaggtgcgttcgaaaatcggggctctggagg

SEQ ID NO: 375031 - DNA, 122 bp, Homo sapiens
aaaaaaaaaaaaaaaagcaagtatcttgcatttgcaattcgtcggatgcctgcaaagttccgtgggtgtgtgatgtaggaatctggggcacgggaagttattcttgcttcatttcctgacgc

SEQ ID NO: 375032 - DNA, 122 bp, Homo sapiens
aggggatctcggtggcagcggggacagcgcggccccgagaactgagaactgagagggagacgctctcgggcctctcagaccagcattgaggagctgagccctgcgggccaggggcgcagaga

SEQ ID NO: 375033 - DNA, 122 bp, Homo sapiens
atgaagttgtcctgaaatcacagcaggtttgctggacagtgttgcacacctatttagaaccgtggtcataggtttacagtagagcatcctgtacgcataggaccttctgcagcccctctcag

SEQ ID NO: 375034 - DNA, 122 bp, Homo sapiens
gtgaacatcaccctaatccattaaactgctccagctcagctgacacataatcgatagcgtcgtaatccatctagttaaaagtttgcagaagcaaggagagagggctggagcgagatccacgg

SEQ ID NO: 375035 - DNA, 122 bp, Homo sapiens
tgtcaccctctagtggatgatctatgataatagttggcagcctcctgtggggcacaagcacgatattatccaagactcacctatctttaagacgtaaatgacagataagactgcaccacaac

SEQ ID NO: 375036 - DNA, 122 bp, Homo sapiens
ctccccagcctctgatgtcatgcggggcccgcggggctgcggggctggggggcgtgcgcccgcccacccgagcccgcacccgggcaggagagaacctcctcgccgtacccctgagagccccc

SEQ ID NO: 375037 - DNA, 122 bp, Homo sapiens
cagtccaaatgtcatagcttctctttctcccactaccctgagggccacacacacatgactcggagaaaggccacagcctgtgtgtcacaggatctccctaaatgtccagtggcccctgtcca

SEQ ID NO: 375038 - DNA, 122 bp, Homo sapiens
gtcaaatcttttcaaaatttttagacgttaaccagagttcttcagtgagccagttgccttcgtaaaataataacacccccacttactcctgatattaccatatcgtcatctttggtgggtta

SEQ ID NO: 375039 - DNA, 122 bp, Homo sapiens
agcattgggggaaccctggatgcacccaagcagggactggatgggggaggcttgagcattcgctcttttctcccacatgggttggaggccactctgcctcattatcgtcctctacatttgca

SEQ ID NO: 375040 - DNA, 122 bp, Homo sapiens
ctgggattacaggcttgagccactgcgcctggccaggaaaactcaaaaaagttgcgcctgcggctgggcgcggtcattcatgcctgtaatcccagcactttgggaggctgaggtgggtggat

SEQ ID NO: 375041 - DNA, 122 bp, Homo sapiens
agcagcccgggctgttgcgcggcgctggcgggcggggacaccaacggggagtggatactccgaggctcaacctggggcctctgcccgccctcccctgggtgcggagccggacggcgggcact

SEQ ID NO: 375042 - DNA, 122 bp, Homo sapiens
gaggtggctaggcagcagcctgggaagatgtggctgtgctagcatctatttctgcagccccgggttggggcagggatgagtgggcggcctcctacctgctgctgtcttccagggcctctgct

SEQ ID NO: 375043 - DNA, 122 bp, Homo sapiens
tcttccgggaaacatagtctttaggcgtaaaggcagcagcccggccttgaagccggatctcgcgatgtttcagggtgagccggacgcaggcgtgcctgcgcagtgcgcggaggagtgctgtt

SEQ ID NO: 375044 - DNA, 122 bp, Homo sapiens
ttcactcaattatcataatgatgctggaagcatttattctcatttttaagatgaagaactcggggttcaaagagattagtttgcttaaattcatataatacatggcaggtcatacaactgac

SEQ ID NO: 375045 - DNA, 122 bp, Homo sapiens
gagcctcctcactctcagtccctctgggaagggctggtctgggtgctcacaccccaaattcgcctttctggggattgggaagaagcatcaactcccctggttagctcccccaactatccact

SEQ ID NO: 375046 - DNA, 122 bp, Homo sapiens
ggcagcatcccgacacctcacacttcctgcctcaatgcacagaagaaagtgttctgaaggcgacgcccccagtcttggcgggaaacgccgcggaagacgcttctctcgcagaaatgccaaat

SEQ ID NO: 375047 - DNA, 122 bp, Homo sapiens
gcctgggaggtttgagtctgcagtgaccctgatggcaccactgcattcctgcctgctgggcgacagagtgagaccctgtctcagacaaacaaaaaccaaggggctgccaggtgccgaggcgt

SEQ ID NO: 375048 - DNA, 122 bp, Homo sapiens
ttccttgtctcaagcttttatttaaataaatgtatgtcctactctgggatatgaggatcacgggccattaggtgttctaagagcccatctggagaactacagcaacaagggtacacaggagc

SEQ ID NO: 375049 - DNA, 122 bp, Homo sapiens
ctggtactgactgcacgtgagggtctccaggtatgtggctctgggtaggagtttgctccacgtccttgtttgcaaaactgggacagtggccatgcttccctccattaggtgagggttgctct

SEQ ID NO: 375050 - DNA, 122 bp, Homo sapiens
ggggttattctgtttgtttttttcaggggtcccgggaggcccaaaggcctccgccgctctcggcttgaacgcgtggaaccgttctcctcgggttcccgcgcgctccaatgggggacccctcg

SEQ ID NO: 375051 - DNA, 122 bp, Homo sapiens
gcagaaggtgtggggcggcggcactgctggcggggagcgctgggaaggcgaggactaagacgagggcgtcaacgataactgggatgacgatcaagacttaaaaaaagaagaagcagaagtaa

SEQ ID NO: 375052 - DNA, 122 bp, Homo sapiens
ccttggactcccagcctgccagagaatgaagaaatacaacgcacagtacttttgaagcttcgtatttttcttggtttcacactcagctacatgtgacctccagcttggtgaggttgcctgaa

SEQ ID NO: 375053 - DNA, 122 bp, Homo sapiens
cagagctgtgagaacagacgtgtcctgcagtttaatgcacccagtctgtggtcctgggcacggccacccgtgatgacttacacacagatgcacgcagacggcttggggagcatggccagtgc

SEQ ID NO: 375054 - DNA, 122 bp, Homo sapiens
tagtgtggtggtgcagacaacacccagttcataaagggcagctcatgtttcatgaaccctcgcatgctgaggacccaagattaagtcagatgctaggatgtggaagagggcttgcttttgct

SEQ ID NO: 375055 - DNA, 122 bp, Homo sapiens
ccagtgccgccgtgaaaccctacacctccttttcccaacccagtgagccagtgggggcaccgtgacccaggagtggctgtcaccagaagctggaccaagtcaccctttccaggtgtctggac

SEQ ID NO: 375056 - DNA, 122 bp, Homo sapiens
aaaggcatagttccccttaatctatcaggcttccagctctaaagaatgtctctagtattgcggggtggggctgcgcttaaaaacgcagacgctttggttttagtaccagcaacgttaaaaat

SEQ ID NO: 375057 - DNA, 122 bp, Homo sapiens
cctcacctagaacaccgccctcgggaagctggcggggatcgactgcctggcggcgccgagcgagtcccgggttccaagctgcgtcgccagccagagagaaatgtgcctgctgaacagtcagt

SEQ ID NO: 375058 - DNA, 122 bp, Homo sapiens
ccagattctctgtggtggaggacagcctcgtttttcccaggccctcagctcaggcctaagcgaggcttgatgttgtctttatacagtagtgactgccttgaacagtaacaaaggtgagcaat

SEQ ID NO: 375059 - DNA, 122 bp, Homo sapiens
gatcttttgggtcctgagatgcgactgcttggaccgtgccggggatagataggctgcccacgagctgggtggctccccggagagcggagtccacacccaggcattctcgcagcccctgcccc

SEQ ID NO: 375060 - DNA, 122 bp, Homo sapiens
tatcccggtagagtgtgcatctttgcctgtcaaggtacgccccaactccaaggtctgccacgcacccccacccccagagcagagccacagccggcagggtgggaggtgcagggaggaggagc

SEQ ID NO: 375061 - DNA, 122 bp, Homo sapiens
tcaagcatgatctatttttatttacggacagaaagaaatattagttctgttaggttccaccgagtaaactatttgttgagagagcaagatttgccaatcctgggggtattaaggaaagaaaa

SEQ ID NO: 375062 - DNA, 122 bp, Homo sapiens
tcctcccgtaactcagaggttactggcctgggctgacccgacctgctcgccgggaccgcgcgctcacctgcggcccagcccacactccccagtgcggcccccgctctccgcccgctcgccgg

SEQ ID NO: 375063 - DNA, 122 bp, Homo sapiens
aaactaacactgatcaaacatcatgtttgcccataactcaattcctttatcttctcagagcgctgctcatggtcaaaaatgacacacctttccctgcatattttatacatcttaacctttac

SEQ ID NO: 375064 - DNA, 122 bp, Homo sapiens
gagcgagtcgattttctcgcttcaaaaattccagctgggcggagaaagcggggatggctccgagttagaatggaagagaaaacggtttacattcccggcgtcatctgaagtgaaacttttct

SEQ ID NO: 375065 - DNA, 122 bp, Homo sapiens
ggatctgacacagtgggcctggccgatggatggctcagaacacggccaggctggggcaggcggacggaagggcagggcccagggcttcattgtgcaggctgggcccacttctcacctagccc

SEQ ID NO: 375066 - DNA, 122 bp, Homo sapiens
tccagcactttttttgtgacacgccacctgtgctgagcctagcctgtggagatacaggcccgagtgagctgaggatctttatcctcagtcttttggtcctcttggtctccttcttcttcatc

SEQ ID NO: 375067 - DNA, 122 bp, Homo sapiens
gaagtcgcgcgtgcggggcttgttggcgcggcagacatagacgccggagtgccagggctgcgcgttggcaattagtaggttggtgcggcccaggacgatgacatctgtggagatgggcttcc

SEQ ID NO: 375068 - DNA, 122 bp, Homo sapiens
actgcgttcgcgctcatcagcgcttccgcccgacgcgctggtccgctcaaagggggcacacgacccacaggagccatccaccgcctcgcgccgcagccgccctcctcagcgctgtgggatcc

SEQ ID NO: 375069 - DNA, 122 bp, Homo sapiens
cgagcacacagcagggacccctgggtgacagcaggcagctccaaggttccttgtcagctccggaggccgcggccctctagccatcaccatcagaccttgctgtatgaggagcgcctggctca

SEQ ID NO: 375070 - DNA, 122 bp, Homo sapiens
ttcctgatgccaacaatgcccttttggaagtgcaatgagtaagcatgggaagaatgctgtcgaagtgacaggacgtaaccctatgtggaatctcagggcaagaggggactttaggggacact

SEQ ID NO: 375071 - DNA, 122 bp, Homo sapiens
aaaaccactgttacgcccattgggtagccccgcccttggggggggcaaagggcgtgaaagcggaagtgacgacacccggcgctccattaaatagccgtagacggaacttcgcctttctctcg

SEQ ID NO: 375072 - DNA, 122 bp, Homo sapiens
tcaatcttaaatatcccgagtatcttggaatctgcttttccctccccaccctgctgccatcgttgcccttaattcagggcaccgacacccctcagttaggctattggcccagccacccaagg

SEQ ID NO: 375073 - DNA, 122 bp, Homo sapiens
gtgtccggggcctctgtcgtgggcctgtggcggggcccctggagtgggccccctggtctccggccgggctgcagtgccatgtgcggtgtctgtgtgcgactcagtccctcggccctgtcctt

SEQ ID NO: 375074 - DNA, 122 bp, Homo sapiens
tccacgtccttaacttctcctgtctaagaccaagggggttggaggccaacacttgctcagcgcctaccatgcatattgcacattacacacattattggttctgcaataaaacaccctgatgg

SEQ ID NO: 375075 - DNA, 122 bp, Homo sapiens
cctgcgtgcgtcccaggctccgcacccctgatgctgcgcgggtgctgagcctgctccggccgggacgatggtgaagtatttcctgggccagagcatgctccggagttcctgggaccaagtgt

SEQ ID NO: 375076 - DNA, 122 bp, Homo sapiens
ggcggagatcatccacagtgcaagctctcttaggaccaagcccccagcccgaacgctgaacgcccccaacacactgctccctagacacgttcaagcgggtaccccgggccgctcactctgga

SEQ ID NO: 375077 - DNA, 122 bp, Homo sapiens
cgccggcgactgggcgtcgcgcgagtcctgcaaaatgtcaactccttgggcgaagagaggcggccgcagccagggccgcgccgcacctccccggtctctccacttttataggcgtaggaagc

SEQ ID NO: 375078 - DNA, 122 bp, Homo sapiens
ggccttccccgccacctccacccctgttgtgacctgtccttccgtacttaataaagtgcgcgtgggagtgttcacctgtgtttgagtctatgtttggggagggaggaggaccccctgctgga

SEQ ID NO: 375079 - DNA, 122 bp, Homo sapiens
agctgcatgctgggtcttttcccatcacgggaacctccagcaccacagagactgctctatcgtatggccaaaatggtagggctgcttgctcagcaattttggcttgctgcacagcccctttc

SEQ ID NO: 375080 - DNA, 122 bp, Homo sapiens
atgcatccaaatccggagagcagggagaccagccggatagcccacctggctgacgagacccggcctcgctcagaaagctcctccaagatgccaccgcgtgtgaaatgcttggggttgaatct

SEQ ID NO: 375081 - DNA, 122 bp, Homo sapiens
agctgggactggaggtgcgcggcaccatgcctggcttatgttctgtattttttgtagagacggggtttcgccatgatgcccaggccggtctcgaactcctggcctcaagcgatccgcccctc

SEQ ID NO: 375082 - DNA, 122 bp, Homo sapiens
gtgaaatcatacagcatttgtatttatataactgccttatttcacttagtgtaatgtccacgagtttcatccatatagtagcatatgttagaatttccttcctttttaaggctgaataatat

SEQ ID NO: 375083 - DNA, 122 bp, Homo sapiens
tttagggacgtttatatttgaatttccctgaaccgccgagtgtgggcggtggcgcagatccgtcccggaaacctccgggctccttcccgcctttctcaggcccggcccctccaaggggtccc

SEQ ID NO: 375084 - DNA, 122 bp, Homo sapiens
tgagactgtcacctcagagagaacgagttgtcagtcgctcattaggtcaattagtagccgcgtggattagtggaacaggtgacagcagagagagacgatttctgtgaagaacacagtctgtg

SEQ ID NO: 375085 - DNA, 122 bp, Homo sapiens
ggcgcctaaataatattgtgccccgcccccagctgcccaattctctctcgaacctgccatcgtcccgggcttcagaatccactgggcttggttcatcatggtttaaggtgaaattcggggcg

SEQ ID NO: 375086 - DNA, 122 bp, Homo sapiens
agcagaggaatgtcacaggtcagcagcctaggcctccagctataaatagtccggagggcccgagaggctcccgcccgtccagcagggctgtcagcttcctgtgtggcagcacctggcacact

SEQ ID NO: 375087 - DNA, 122 bp, Homo sapiens
gcggcgcgcagctggcagccgctcgggtaggtggtgccgtcgctgccgcacaccgggtagcggctcttgcacacgcacacgccgcttacacccggaccgccggctgctgccccggctttacc

SEQ ID NO: 375088 - DNA, 122 bp, Homo sapiens
ggattaaaggaagcgttagtggatacgctcaccgggatcctatccccagtacaggaggtgcgggcggctgctgaagaacagattaaggtgctggaggtgacggagggtgagtgaggcgggac

SEQ ID NO: 375089 - DNA, 122 bp, Homo sapiens
tttgtctcagtggagttttcttgggaaacctcccagagaacagtagggagctgaaacttacgagctagagctctgggcctgatagtgagaggcctgcccctcagccctccggagtgcctcag

SEQ ID NO: 375090 - DNA, 122 bp, Homo sapiens
gacgtgctggtgaacgtgaacctggtggataaggagcgggcagagaaaaatgtggagctgcggaagaagaagcctgactacctgccctatgccgaggacgagagcgtggacgacctggcgca

SEQ ID NO: 375091 - DNA, 122 bp, Homo sapiens
gaccgggcggggtggggctgagcattctggcccctaggcttctccgactgttttggcctccggagcaacccggtgtctgcggaagattggaagcgactctccagcaccccgccgccgaggcc

SEQ ID NO: 375092 - DNA, 122 bp, Homo sapiens
ttggctctgggggtggtgacgggagcggggcccactggggagcgatttcacttaaacggtcggacatagccgtctcgggcccctagcagtctccgcactcactgcctccttctcgaacatgc

SEQ ID NO: 375093 - DNA, 122 bp, Homo sapiens
tgccgggtgaaaactgggctgctcaggagtcacatctggctgtaggatgaacactgctttcgaggttataggcctggaaacctttgagggaaagactagcattcaggtcatgagatagaaag

SEQ ID NO: 375094 - DNA, 122 bp, Homo sapiens
aggtcgaagtgggtgaagtagaggcgcaggcggtagccggggggtgcagtcagggtccagcgccgctcctggtcattggcatactcccctggaaagccgggggatgccaggcgcccgaacac

SEQ ID NO: 375095 - DNA, 122 bp, Homo sapiens
cggcagccagcaggggtcgctgcagacatgggaatcacggtgctgaccgtgcctctgcagcgctgtcttcaggtgcttttgctgaacggtcatatcttctctaaacccagggggtgcagagg

SEQ ID NO: 375096 - DNA, 122 bp, Homo sapiens
gcgcttctcgccggggaagggacggctttggggacgtcggagagcgggcattctggaaagcgtggggtgagtcagccctgcacactggagaactagttttcagaaggaaaaacaggacgcgg

SEQ ID NO: 375097 - DNA, 122 bp, Homo sapiens
ttaatacgcactgaatgagcaaacgacagacaggcattagctcatttcctgtagtcttgccggggtaggtctgctgcagctttatcacctgctctaccaaggttaaatcacaggactgctca

SEQ ID NO: 375098 - DNA, 122 bp, Homo sapiens
cttcaccgaggccaggggatccagggtgccggagctcagggccgtcagctccaacaactccgcccggtacttggccggagcagaagcacagtgggactcgggccagccaggagcccatcggg

SEQ ID NO: 375099 - DNA, 122 bp, Homo sapiens
cccccagaaccagattgccttcaaaacgagggggacttttccaatattctcacagcggcccgggcaacaagcctagggggactttggccagaggggagagaaggggcctctgattattcctt

SEQ ID NO: 375100 - DNA, 122 bp, Homo sapiens
acaagttgcaaatcagggtctgtgcattgagtttccctccggttgtgaaaggggtctaagcgctttgctggggcctggcaggcccctccctgggctgcaaggatccgcccctctattcccca

SEQ ID NO: 375101 - DNA, 122 bp, Homo sapiens
tcggaggggactaggggcctgccgagaggtggggaccttaaagaagttgctgaccaaccacgtcctcggcgcagccaagagcccgacccgggtcaaaggcccgatggcccctgcggaactgg

SEQ ID NO: 375102 - DNA, 122 bp, Homo sapiens
ctgtccagaatctatctgttcaaccacctgaaatttccttccaccaaatgtgggctacatcgacaagaggggaaaggagatggcaaatgttgtgactggaacccattttggaagtctgagtc

SEQ ID NO: 375103 - DNA, 122 bp, Homo sapiens
cctattgccaagcggtgaggctatcgccaagcagtgagaccattgcctgtcactgtgcggcgagacaattgcttatcgccaagcagtgagtaccatcggacgcttttcacttgctattctgt

SEQ ID NO: 375104 - DNA, 122 bp, Homo sapiens
gcggaggcggcggagcgcaccgcccaccagggctcagggtcctccgaccgggtgaagcttcgctggctgccaggatccccggcagggatgcacttcagcaccgtcaccagggacatggaagg

SEQ ID NO: 375105 - DNA, 122 bp, Homo sapiens
tgagcctcaggtcaggggcgtcaaacagcagcaggcgtgagtcactcagggcagcaaacacgcgctgccagccccgccggacacctgagggccgcggcacctggcggaaaggcaagcatggg

SEQ ID NO: 375106 - DNA, 122 bp, Homo sapiens
cctaccagggtagagccttctcatgccaaaagcagagaagcacatctcactgctgcttgtcgtgggtctgcttccattcccttgactgaaggaagtcacatggccaagacaaaagctaggca

SEQ ID NO: 375107 - DNA, 122 bp, Homo sapiens
gggccgcccaggggcaccgaggcaaacacggaggcacgtaggagtccggggccatgtggtcggtttctttattgagaccacagacggtagcgcaggtccctgctgtccacatgccccttgta

SEQ ID NO: 375108 - DNA, 122 bp, Homo sapiens
tcaattagcaccttaattagagggacagccttgtccaatgtcggggccttgtcagggagccgcctgatgagcagagacaaacacaggctctgccgggaccaggcagccgcagggctgcgggt

SEQ ID NO: 375109 - DNA, 122 bp, Homo sapiens
cacagaatagaatagcatcaagacattttaaattcaatcaaatgcttataagtcacctaccgtgtgtcagtcacagtgcaaatgctgtgaatacaaggaaaggtgaattttctgcttcctcc

SEQ ID NO: 375110 - DNA, 122 bp, Homo sapiens
actagtttctatttgaactgtatctttaaaacatttccattgaagacgttaaagctctttcgaaaatacaagaatggttcaagaaatctctatgaatcatcactatcatcagttacccaagt

SEQ ID NO: 375111 - DNA, 122 bp, Homo sapiens
tcttcacacctctgccctcccattagctgaataaagtgtgcttgttctacaaaatcaaatcgcttccacttgccacatgtttcagttcctggaatcaagggcaagcatctcatcacacagca

SEQ ID NO: 375112 - DNA, 122 bp, Homo sapiens
tcgccggcttcccctcccgcgcccactaagcccgcaaagttgctggcgaaagagtccgggcgctggctgatcgagcgccgcaggccccacccccgacccccgaagtctgttactcggtctgg

SEQ ID NO: 375113 - DNA, 122 bp, Homo sapiens
gagcgtgcccagcgccttagtaccaaactttctggccggggctggcagagctcagagtcccgcttccccctaggcgcggccccctaacatctgtaacccaaatgttgcgccgcggccaaaat

SEQ ID NO: 375114 - DNA, 122 bp, Homo sapiens
ctcctcctggttcccagagatcctggccagcccggtctcaggcaaggccatgtagaatgccgggagtgataattgcgtattgtttcatgactgcaagcctgtgtccaggtggctccttctcc

SEQ ID NO: 375115 - DNA, 122 bp, Homo sapiens
gtgggcagagaggaagcgcggatgagcgaggtgggaggggcccggggtccacgtggagcacgccccttcccagcaaggggggcgttcattgcgcagagctccaccaggcaggcgcccaggga

SEQ ID NO: 375116 - DNA, 122 bp, Homo sapiens
gcgagagcctccgggctggagccccagactcgccttggcccctggtagtggaaattgccccgacgtctccaacttcccggtctcgggcaaacgggcgagtgcggcctcacccacctagtctc

SEQ ID NO: 375117 - DNA, 122 bp, Homo sapiens
gctctcagctttcaaaaatcaaggaagaaatggtagagggctgagctctgcaacttattacgggcagaacctccctccagcagcagtggagcactgacagtggaggtttatgagcaagagga

SEQ ID NO: 375118 - DNA, 122 bp, Homo sapiens
cccagtgatatatcttttttaaggtcatgcagctggttagtagaaaacgttgtatcagaacgttgctaggacattgtctacgatgacgtcatgcctctacaatctcctcattgttgggaaaa

SEQ ID NO: 375119 - DNA, 122 bp, Homo sapiens
tctaagcaacctggatttcacatataactctgctccttattgtctcaagtttctgcacaacgttttttaaatttttattttttctttttttaagagagtagtttccgtatcttttagagaaa

SEQ ID NO: 375120 - DNA, 122 bp, Homo sapiens
ccagagttcctgccttcacggtgttcacactagcgggcagaagacagacagcacgtgtggcggtgcagagggcttggctgcaagagccgataaggaggaccctggcgactgcctagtccaaa

SEQ ID NO: 375121 - DNA, 122 bp, Homo sapiens
agaagctttctctcataagctattattgtaatcctggtttgataaaaagccctgataggacgggaggtgtttggtgtgggagccatatcatgctatcagcccatctccccgcacagctgctc

SEQ ID NO: 375122 - DNA, 122 bp, Homo sapiens
attactagtgagagggtgttccagcaccatttgcttatagttcatcttaaattcaccaggcgattggggtggccatctgtgttagctcatcagccttatctagagaagaaacacacttttca

SEQ ID NO: 375123 - DNA, 122 bp, Homo sapiens
cataaattttaaaaaatatatcttttttcccagtttatttaaattgttgcctcacaaatacgcacaacaactttatctagtaaacgttcctcttgcattaacagcaaaagcagaaggtgtga

SEQ ID NO: 375124 - DNA, 122 bp, Homo sapiens
gttgtcaaagcacatgttttgctatgttgattttcagctgctatgaagtttatagaaaagcggaaagtctgaaatttctgtgacaaggctttttgttcggggttatttttaaagaaaacaga

SEQ ID NO: 375125 - DNA, 122 bp, Homo sapiens
aaggacaagtgtggaggcagagactgtagttaggaggctgatgcaagtatctatctggaacgcaacaaaggtcaggactcaggcagtgggacaaagggtgaaggtgaaagcacagacttgag

SEQ ID NO: 375126 - DNA, 122 bp, Homo sapiens
tgctgttctggtaaacagcctctctttagaactgggagcttcccagctagcttgctgcagcgcgagctgtttttcagctgaaaggcgccccctgggtcctaagcctcctaggtcatgcaaaa

SEQ ID NO: 375127 - DNA, 122 bp, Homo sapiens
tgcatccgtggtgcaccccgtgctggtggatggctcaggacggtaagcattcctctgccccgcatgatgactgagggtgtctttaggatttctgagacccacaaggagcagttcttcagcag

SEQ ID NO: 375128 - DNA, 122 bp, Homo sapiens
gcctggaggtgcgggggagaaagccggggaaaagggggcgaggtagtcccgctccagggccggtccatttgtcagggttcccccaggtctcccagatttcccagaggacctgctcttggctt

SEQ ID NO: 375129 - DNA, 122 bp, Homo sapiens
ttatggtcttgggactcggccccctcaaacatgtgcgtgccggggaccccacgcctaacccgtctctctcgttgcaagccggtgtggcacactgctctgaggagtcctcctggtaaccgaca

SEQ ID NO: 375130 - DNA, 122 bp, Homo sapiens
aaatacactgatggctttctcctccaacagctcgtgtcccgccccggcacacacatgctgcggagtcttggattctggtctgcaaggttctcggttgtacacctgacaaacagctcaggccc

SEQ ID NO: 375131 - DNA, 122 bp, Homo sapiens
tgaacctaggaggtagaggttgcaatgagtcgagatggtgccactgcacctcagcccgggcgacagtgtgagactccgtctcaaaaacaaacaaacaaaaaacaaacaaaaaatacatcgct

SEQ ID NO: 375132 - DNA, 122 bp, Homo sapiens
cattaattttgcctggtaaatgaacctgagtttgccagaatccagccaagtgagtaacatcggcctgtcagccatgggcttgacagaccttgtacgtaacaagttcccggaaaggatcaacc

SEQ ID NO: 375133 - DNA, 122 bp, Homo sapiens
cttccacactgggccaggcaggctctctcccaggagtctaactcctggagcagagaagggcggtcttctgaaggcagcacccgagaggatgcccagagtgcttccctggccctgcccttcct

SEQ ID NO: 375134 - DNA, 122 bp, Homo sapiens
gtgggttttgtgactttgaaagccgaggctgctgattgggaattaaatcccagaggacgccgctcaacacactggaaacccagcagctgctgctgttcccagcaatttttctttctctaaat

SEQ ID NO: 375135 - DNA, 122 bp, Homo sapiens
cctggccccgcctcccggtcccttgccccgcccctctcggctcaccgccctgcctccagtcggaccccgccttgccccacccgcgccccgcccccaggcgccctctagcggcggcggcgatg

SEQ ID NO: 375136 - DNA, 122 bp, Homo sapiens
gacaatacatattaagggtattagggacaatgctagggttcaatgaaagtgttcttcctgcggaggatgccggagcagagttctgggtaagtaagattttgccaggcaacacaaggtagaaa

SEQ ID NO: 375137 - DNA, 122 bp, Homo sapiens
aggttagttcactgggataaatttacagaagtgagatttcttggcttaaagattttcagtcgctttctagttcttgatgttggatgccaagccaagttgctttccgataaggtttaatttac

SEQ ID NO: 375138 - DNA, 122 bp, Homo sapiens
tgcttctggtccgggagctcggcagggctggggaatgctacctgctgggggtctgtggcccggacagctgggtctggggggccgtataggaacgtgcagctcgggtgtcccaccaccttctg

SEQ ID NO: 375139 - DNA, 122 bp, Homo sapiens
tgaccaaagtgcctccaaagacttaagcaggactcagccgatgagcaggacccagggcatcgttacctccattttcgaaacacacacggacgctcatgcacacacaccaccaccccccgccc

SEQ ID NO: 375140 - DNA, 122 bp, Homo sapiens
gagccccaagccacaggaaacctccagcaggaagtcgggctgccagggcggtggcgggcgcggtgcatcctgggagttgtagtccgttctcggaggcgcaggcgcagtggtgaaggcgggga

SEQ ID NO: 375141 - DNA, 122 bp, Homo sapiens
tagggactggcttccatcaccaacgcccacgcaggatgacttcactacagctctacggaccggcttccatcaccaaggcccacgcaggatgacatcactacagctctacggacaggcttcca

SEQ ID NO: 375142 - DNA, 122 bp, Homo sapiens
ccgcgggccgggagtgtgcaggaatgtagcaacttgcagcgaaaagtttccctgcgctgccggccgggccgcggtgcgggcgggcgcgcagaggaaggaagagccgagaggaggcggggccg

SEQ ID NO: 375143 - DNA, 122 bp, Homo sapiens
atatctcattccaagtgtctttcccgttcactttccaagacagttatctttctggcgacccgagaggctctctcttgcctggacgttgattaaccagcaaagtgtacagacggtgaagcgct

SEQ ID NO: 375144 - DNA, 122 bp, Homo sapiens
cggagaactggagactttgcagtgtccgtggcgagaagggacactcctaggaaacttgcccgggagaacaccgcgcgcttccctcgctgaggacgcgaggctgggcagatctgtctgcgcgc

SEQ ID NO: 375145 - DNA, 122 bp, Homo sapiens
tctttctctctaccactgactcacagagtttgaggttcaatttcacctccctctgagagccgcttgtcttcaagtcccagttcacagccacccatcccgggagccccacccctgttccgcat

SEQ ID NO: 375146 - DNA, 122 bp, Homo sapiens
ggggcaaaggaagacccagagagaaaggggagaggggagaggcctgggcctggctggaggcgcatcaaagccctcctttgtgtgctcctgctctggagttcctgctcggccatgtggaagcc

SEQ ID NO: 375147 - DNA, 122 bp, Homo sapiens
ctgcgtgggacccaccgaggaacttgcccagccgcgtgcatggtagctacgatgtggagacgttgacggtttccatctgccttgaattgtgatgctgccggtcagggagcagctctggggga

SEQ ID NO: 375148 - DNA, 122 bp, Homo sapiens
aggccttgagggaaaatgtccccacctgacagcatctggtggctgcggcagtcttcttctcggggggtccccgactccacccatgttgcagggctccggtctgccgtgtcaccagctgtcct

SEQ ID NO: 375149 - DNA, 122 bp, Homo sapiens
atgcagacccacggggcaggaattccgagtcccggctggagcgcgatctggaatctgactcgcttgaaacagcaccgcggtggattcggagccgggtgagcagggaactgcgcctcagcccc

SEQ ID NO: 375150 - DNA, 122 bp, Homo sapiens
ctttttctcgcctcaagagccgccaggtggagggtctccagggtgcttgtttggggaaagcggaaacagactgcctgggcgctgttaaaatgtcagcagccaaggaagaagcagcgacctgg

SEQ ID NO: 375151 - DNA, 122 bp, Homo sapiens
atactgagagttcaaagcagcatacatagagggtgtaagacaatacatgaactaccagtccgctgccatcgcctaatcttcagtgaattgggaaggcaaataaaaagagggaagcacctgaa

SEQ ID NO: 375152 - DNA, 122 bp, Homo sapiens
tcggtttataaatctctgaagaccacacccctttcttccaattgattgcatttcacagggcgtaggtgggtgttaacatagatgattaagtttcttcaaaacagaagttttacgtttattta

SEQ ID NO: 375153 - DNA, 122 bp, Homo sapiens
cttctacactacttcagctcaatattcccccagcccacaggacactcccaaaccctttgccgatgggtccttgtacctggcgagcacccttcttggtggagtatctctaagactactcagtc

SEQ ID NO: 375154 - DNA, 122 bp, Homo sapiens
gacagatcctggctgtgaggagagaggtcactgctacctgctctcggcccccggaccccacgcgctgctcctggtgacccagttgggtcggttcaccgcccaggaccagcaggcggtgaggc

SEQ ID NO: 375155 - DNA, 122 bp, Homo sapiens
cctcccccggccccctctatttaccgccatcatcagcacgcgcgagctgtcaccagggcgcgagacaaccgaacacggccccgccccctgcccgtctattggcccgcccgctggagccccgc

SEQ ID NO: 375156 - DNA, 122 bp, Homo sapiens
ccaaagagactggcatcgagaacctctgagatccggagaccagccactcatatactgatacgcgtgaagaaatcaccctgggcctgggaaagaatccccagaaggatcacaggaaacagtgc

SEQ ID NO: 375157 - DNA, 122 bp, Homo sapiens
gggagacttcatttctacccaactcagcctctctaagaagccatgtgaccttgtgcaaatcggtaacctagttgggcctcatttaacttgtctgaaaatgaaggttgggatattttctagct

SEQ ID NO: 375158 - DNA, 122 bp, Homo sapiens
accacacagtgcacacaggcgtgcacagaaacgtgcaccaagcacacacacgcatgtgtgcgcacacatgcacatacgtagtgcatgcacaggcatacagacgtgcacacacatacatgcac

SEQ ID NO: 375159 - DNA, 122 bp, Homo sapiens
aagtgaggagcccctccgcccggaagccgccccgtctgagaagtgaggagcccctccgcccggaagccgccccttctgataactgaggagcccctccgcccggcagccgccccatccgggaa

SEQ ID NO: 375160 - DNA, 122 bp, Homo sapiens
cgcaggatgaagaaggacgagtcgttcctgggcaagctgggcggcaccctggccaggaagcggagggcgcgcgagggtgagtgcgcgcccgcgcccgccgacccccggggacctgcccggcg

SEQ ID NO: 375161 - DNA, 122 bp, Homo sapiens
cgaaacatttcccacgcactggctgcgttgatggctgttggtgtctgcggttctctgtttcggcccgtgaaggcagaagcattgcttgtgttgagaaagccctgactcaccccgcagcctct

SEQ ID NO: 375162 - DNA, 122 bp, Homo sapiens
tctcccctggaggagggctaagaaatgcacctccagagggtctgtttgccattggaaccgcgtagagaaagcgtgcaaacccgtcaactgctcccgccgttcctctccctcctcaacccagg

SEQ ID NO: 375163 - DNA, 122 bp, Homo sapiens
acgtcgcatccctgaggccgtgtgcctgctccggggaagacgccgtgcctgtagccgtttcgggctttgacttggtgaggtctgcaccatcctcggtcgtatttcatgactggtcttgcttt

SEQ ID NO: 375164 - DNA, 122 bp, Homo sapiens
tgcctggagacagcggggacgcgttgcctggagactgtggaaggcccaggcaagagggcgcgtggcagcccaaggccatggcgggacacccaaaagagaaggtgattccagatgaggtccat

SEQ ID NO: 375165 - DNA, 122 bp, Homo sapiens
ccggggcggcaggagcaaaggtggcgccgttctgtacacagacatgttctagcgttctagcgtccccagtctcttccctcttcgttctgctccctgaggcacctagaagcaaaagaaggttt

SEQ ID NO: 375166 - DNA, 122 bp, Homo sapiens
ggtggaatacgaggatgtgagctcccagtccgagcaggggctgctgctggggggggccagcgcggcaacggcggcgacggctgccgggggaacggggggcagcggcgggagtccggcctcct

SEQ ID NO: 375167 - DNA, 122 bp, Homo sapiens
tatcccctgtagccccataacttggatagttgctgagccagccagatataacaagagccacgtgctttctggggttggttgtttgggatcagctacttgcctgtcagtttcactggtaccac

SEQ ID NO: 375168 - DNA, 122 bp, Homo sapiens
ataccccggatcattaggtggttctgtgtttaatgttttgaggagccgccacagcgtttccgcagtggctgtggcatcgtgcgttcccaccagcagtgcacaaggctctggttctcaggggc

SEQ ID NO: 375169 - DNA, 122 bp, Homo sapiens
cggctacgggagcggctgctctcggccagcaaggaacaccagagggagagtggggtgctgcgggataaatacgagaaggccctgaaggcctaccaggcggaggtggacaagctccgcgcggc

SEQ ID NO: 375170 - DNA, 122 bp, Homo sapiens
cgactgttggcacaaggaccgggcgcagcggcctcgcttctcccagattgtcagtgtcctcgatgcgctcatccgcagccctgagagtctcagggccaccgccacagtcagcaggtgccttg

SEQ ID NO: 375171 - DNA, 122 bp, Homo sapiens
gtccacgcgctcatccacagagtaggaatcatagtagagactgaagtcatcacccaccaccgtctcccactcctccagggacccggggtcccctttcgtcagggtcacttctcctgaacgcc

SEQ ID NO: 375172 - DNA, 122 bp, Homo sapiens
ctcgctccctctccatccaggcctctgctcttccagacccctggttcttccctgcacacccgctcctgccccagcctgacatgcgctgacaggagtgcaggccctctgagtcaaccccctgg

SEQ ID NO: 375173 - DNA, 122 bp, Homo sapiens
tgcctgggcccgcctccccgggaggggcgcgcgcccccgggccaatcggagccccagccccgccgccctcatttgcttatccccatggcaactcagagcccagctgtcaatctcctgcggga

SEQ ID NO: 375174 - DNA, 122 bp, Homo sapiens
cactgcagcggcacattcacttttatagcctgtgctttcaagtatatttatacacctctgcgcagacacaccaaatctcctgggacgcgcacacgcgcgtggtttacagacccccctccccc

SEQ ID NO: 375175 - DNA, 122 bp, Homo sapiens
aaaaaatgaaatataactagaagactgtactttgggacacagcatgttggtggacaattccgtcaaaagtgtcaatatcatgtgaatgcacagcatctatgtgtgtttcctctaaggtttcc

SEQ ID NO: 375176 - DNA, 122 bp, Homo sapiens
ggaaagagagctgctgggtgggaattcaattccaggcttatatgagccctgctgtgcagtcggcctggagacagcccagctcaggccctgcctagacccctgtcaaggaggccctgtcaaga

SEQ ID NO: 375177 - DNA, 122 bp, Homo sapiens
attgctctgccctgagttcacgctgataacgcgcccaagggcaatcacatcgtaacagcccggaattgttctcagtctagaacggacaataaaccgcccgggcagaatgtctcctcatcatt

SEQ ID NO: 375178 - DNA, 122 bp, Homo sapiens
tgatatttagaaattccaccatatgtctttagtgctaaacagatttcaccctcaaagtaacgctttgacatctgacagatgaacaggtatgttatagtacatgcagaatcttcagatttatt

SEQ ID NO: 375179 - DNA, 122 bp, Homo sapiens
ctgatgtcccggtcacctacgaggctttcctcttcttgtctctgatgtcctggtcacctacgaggccttcctcttcttgtctctgatgtcccggtcacctacaaggccttcctcttcttatc

SEQ ID NO: 375180 - DNA, 122 bp, Homo sapiens
actgaatcacactgaaaaattaaaccaggtgagagataagaatttggagatataaatatacgatgtttttaaattcagtggtgttaacactttgatctgatggaaaagttgaccttttaaaa

SEQ ID NO: 375181 - DNA, 122 bp, Homo sapiens
gacagaaggaattgcataagccagtgcttctcaaaatgtgatccctagaacaatagcatccgcatcacctggaaacttgttagaaatgcacattttcagatcccaccccaggccagctgaat

SEQ ID NO: 375182 - DNA, 122 bp, Homo sapiens
ttaactggctacaacagacagtgtgagaaacaccgctctatgtagagagaagaggccccccgggccttggccagaactacacagtatgaaggactgggagtggcaaaaatccggtctggaaa

SEQ ID NO: 375183 - DNA, 122 bp, Homo sapiens
ggagaatgaaaccaagcacagggcccttctacatgtggagccccgtgtgactgcacaggccgtgcacacctgcaactggccctgcctgccaccaggctaccactgtcagtccaaggagggac

SEQ ID NO: 375184 - DNA, 122 bp, Homo sapiens
cttcgcccggcattttgtgcagggaacgcggaagcaagatggcggcagaaagagcgcgagcgagagcgtgacccacgcttgttgcagcgggaagcaaaaagagagcatttaaaaagacattt

SEQ ID NO: 375185 - DNA, 122 bp, Homo sapiens
atgaaatgctttggtctcctgttagtgttcccaagaaaggtgctgtaagtccttaaaccacgtgaaaactttttttttttttgagacctcctcgttctgtcgccctggctggagtgcagtgg

SEQ ID NO: 375186 - DNA, 122 bp, Homo sapiens
aggcatcatgattatccctgtcttaaggatggggaaaggagacccagggtgactgggtaacgtgcctactggaggaaaagagggaggaaataaaccccagcaacctgccttctgtgcctata

SEQ ID NO: 375187 - DNA, 122 bp, Homo sapiens
aatggagcatgcagctttgggagggacgcatgtggagcagtgagggaggaaggggacacccgtctagccagcaagatcaaccgaatcaaccctggcaatcaatggcgtgacagatgtcgcag

SEQ ID NO: 375188 - DNA, 122 bp, Homo sapiens
tccagcccatgggctgcaccgtttcatcctgctttgcggctgtttctcaaacttcaacgccgggactcagggcttgggaacaagctgggaggatttgctgaaagctgcacagtatgaatcac

SEQ ID NO: 375189 - DNA, 122 bp, Homo sapiens
tcgatctggtgtacgctgaacagctctgtcagcttcttgaagatgagcacatcaatttctcggctcgacatggagccactgcccatctccggcaggtccaggtccgactcatggaaagaata

SEQ ID NO: 375190 - DNA, 122 bp, Homo sapiens
cgacaggcacttccggacgcggggcactgtgggaagttgagttcgcggggctccttccttcgcgcatgcgcacatgcactcttggtaatgcttgcaggtggcccgttcttcctctttgtcct

SEQ ID NO: 375191 - DNA, 122 bp, Homo sapiens
gccgcagccaccgcagctcctcctcctactcgcgccgggccgggactgggcccagagcagcgcctccaattgtatttaaaatgtagtttttagaagaataaccaaggccgggagcagtggcc

SEQ ID NO: 375192 - DNA, 122 bp, Homo sapiens
ggattacaggcgtgagccaccgcgcagccccaactagactttaaaagccctggaggtgggcgggtttaggctgccttgctctccgctgtgtgcccagccccagggactgtgcctagcacttg

SEQ ID NO: 375193 - DNA, 122 bp, Homo sapiens
ggacgacgcgctcaaccagatcgcgcgggaggtgagcgctccgggagggcagccggggggcgccgggcgggcgcgggggccggacggctgtcagggtctctccggcgtccgtctgtcccgct

SEQ ID NO: 375194 - DNA, 122 bp, Homo sapiens
cccggtctatgcaccaagttccaggacagggcctggtgcctgtgagggtctgcactctcccggtgaggatccccacacctgaaggaacacgactttaaaaagcaaatttaggccaggcacag

SEQ ID NO: 375195 - DNA, 122 bp, Homo sapiens
gtgcagggtgagaggtctgtctacctccttagaaggaccactgtggcttgtgcagagatccgaagtttgttctcattacaatggggacggtgagtgctagtaatgtggaccatttttcaata

SEQ ID NO: 375196 - DNA, 122 bp, Homo sapiens
catggcgaccgcccgcgcggcgccagcctgacagtccgtccgggttttatgaatgggtgacgtcacaggcctggcgtctaacggtctgagccgctggttcagacgctgacacagaccggccc

SEQ ID NO: 375197 - DNA, 122 bp, Homo sapiens
gagcaggggtaggaggctgattgcagtggactttacatgcaggagcttgggcaggaggcccggggcactgcactgcagggctaccccttgcttctctgtgtggcaaggtttcctgaccattt

SEQ ID NO: 375198 - DNA, 122 bp, Homo sapiens
gacgaccccctccccatagttgttttctgcccacgttggcagcagcccccccccgggggtcgatttggtggcacctcactttcctgctaggacttcttccgaagaggggaaaatgtgcaact

SEQ ID NO: 375199 - DNA, 122 bp, Homo sapiens
attaatactactcctacaaataaacctttccaaactgagcacaggacttggcctggagcccggggcagggtttaatgtgtgctgaggatggggtaatttatctaggagggatgagaaacatg

SEQ ID NO: 375200 - DNA, 122 bp, Homo sapiens
tgccagcctctcaatttccagcacatgctgggctcatgaactcctgttctgaggagctaacgctgtttcctccctctaggtgcctgactgacagaagttcttgcccccggggagctggtgtg

SEQ ID NO: 375201 - DNA, 122 bp, Homo sapiens
aagtttcgcccaatgaaaaaacaaaaggagagggacagaaggcgggtcggtgacgtaatgcgggttgattggcatgcaggccttggacgtccaggattagccacgcatttcgccaatccaga

SEQ ID NO: 375202 - DNA, 122 bp, Homo sapiens
gaggtcaaggtgagaggattgcttgaggccacgagttccagaccagcctggggaccccatcgctacaaaataaaaaaaaattagctgaacatggtggcacacatctgtagtcccagctactc

SEQ ID NO: 375203 - DNA, 122 bp, Homo sapiens
acgtaatagtaagcttttgtctcaacacagtaagcattcacctgtcaaaaaactgacaggcgaaggtccacaaaaaggatctgtgcagagtttagctctcttcacaaagacattaagaggac

SEQ ID NO: 375204 - DNA, 122 bp, Homo sapiens
agactatctcctttgtagcagagtgaacttgagtcacaacccgaagtcatcctggtgaagcggcttcatttgtctggggtaatacccgaggttagttgtctcatgccaaggaaatcgaggat

SEQ ID NO: 375205 - DNA, 122 bp, Homo sapiens
actcacacagtaatgtagcttcacacacagcttgggaagcacataggcatcgaagacgctcgcttcagaaatgtccctgactgctgcagcctccactatgtttcgaatgacgaatttcttaa

SEQ ID NO: 375206 - DNA, 122 bp, Homo sapiens
ctcgccagactccctgatgaggtcagtcacgcgctgagaccagagcaggggcatcatcctcgtttcttgcacagtaaacgcagctgtaacatctggaccagtggagccagttgtgggaatcc

SEQ ID NO: 375207 - DNA, 122 bp, Homo sapiens
tctgcggcatttgatattgttgactgctcagtcttcttgaaattccactgcctgggctaacgctccctgtcttattctagttttttgttgatttttctgcttattttctttactctattcag

SEQ ID NO: 375208 - DNA, 122 bp, Homo sapiens
ccgccgtcgcgggcaccgtcgccgcggggaccgctgtagcccccgctgccgcctccacctcgctcatcccgccgggtccagtaccggccacagccgccaccgccccggcccctccccccggc

SEQ ID NO: 375209 - DNA, 122 bp, Homo sapiens
caaggaggaagacccgggaacagaggctttgaagaacaagcaacatgcaggccctctgatcgggggcaccttcctgccggccccagggcaggctgtgtctttaagtacaaccatgccactca

SEQ ID NO: 375210 - DNA, 122 bp, Homo sapiens
cgattctggggcgagtgcttggcgccagggcacgggggcgggggccctgactgcctcagccgaaaaatagtctgttgtgaggaattagcacctaggaggtaggaatgaaacgctgggcacag

SEQ ID NO: 375211 - DNA, 122 bp, Homo sapiens
gcctgggaattcagggattagagaatcagtctctttctctgaagagttccaagtattgggcgttagataagcaaacaattaaaatccagtgtgcttagtgaatggtagaggatactattgga

SEQ ID NO: 375212 - DNA, 122 bp, Homo sapiens
atactcagtgtaatcagggagacatagccctggagatccccagtccaacaggtgagtcatcgaccctgtcatggggaaactcacaaactaatgcagaagtcacagtctctcttttcaggaag

SEQ ID NO: 375213 - DNA, 122 bp, Homo sapiens
ggtgcaggatataatctcctggtgcgccattttttaagcctgtcggaaaatcgcagtattcgggtgggagtgacccgattttccaggtgccgtctgtcacccctttctttgactaggaaagg

SEQ ID NO: 375214 - DNA, 122 bp, Homo sapiens
ctcgatgtcttgacctcatgatccgcctgcctgggcctcccaaagtgctgggattacagacgtgagccactgcgcccggccttgtactagactttttatttgtcttctgaaataagattgtt

SEQ ID NO: 375215 - DNA, 122 bp, Homo sapiens
cccctaccttcgaacaaaaggaatgcatgaagggtttcagtgactttgccataacaaaggcgccaccattgcggggctcgccccgcccctgggtgaaggcaaacaaattcttgcacttgtat

SEQ ID NO: 375216 - DNA, 122 bp, Homo sapiens
tgcagagggcccccaaaacagcaatacctggggaggagatacctacggcattctgagattcgggaaagcaccactgccgctgaataaaacgaacccagcaacttccgaaaacagaaaatccg

SEQ ID NO: 375217 - DNA, 122 bp, Homo sapiens
tcttccttttgctgccatcaacgtgccctccacagcacccaggctgttcgttttgaagggcgcctctaggcctgagcccagcagcccacagcgcctcctcgcctctctcccgtgctcatcag

SEQ ID NO: 375218 - DNA, 122 bp, Homo sapiens
ctctcctggagctgggaggtgtctcctggtggcacaaatttagggtcagcctggggctcacgtatgggttctccgacccactcactgtgacgggtaaattatggattctctctgtgtctcag

SEQ ID NO: 375219 - DNA, 122 bp, Homo sapiens
ctcaggtgttgtgtgcttttgtattagctggaaaagacagactctggaacttttacagggcgagaagaggccaccggctcgcgctttgtatactttgcacttgaaatcgttacattcaactg

SEQ ID NO: 375220 - DNA, 122 bp, Homo sapiens
gggctcccaaggactccacccggatccagctgctcagctatctgggcaaacagtgggcaccgggcacacagtaagggatgtgggagccggtcagattgcaaggggtgggagtcgtggagaga

SEQ ID NO: 375221 - DNA, 122 bp, Homo sapiens
tattatcttaaggaaaaaatccaaatgtaaactcatattccctgccagaaaattaaaatacgcaaacatctgcttccttaggatggcctttagccaaggttcagcctacaatgagttactgc

SEQ ID NO: 375222 - DNA, 122 bp, Homo sapiens
ggcaggcctgggctagactcctgggtctgtctcctggtgcctcagaatgccccaaggggccgggagggaaactcggaaactaggcctgtggatctgtggagcccgtaggacactggaggtag

SEQ ID NO: 375223 - DNA, 122 bp, Homo sapiens
cctaaccttcctctttagagagcctcaggttagggaacgtccagtgcgcagaagctgccccgtgggaatcccattgtccatcgcctcctaatgtttcgtcctggccgtgccctatcccttcc

SEQ ID NO: 375224 - DNA, 122 bp, Homo sapiens
ctcccatagtcacattttgggtgtgtgtcctgagccccaacactggtcacctcgcaatggcgcttggggtccctgggtgcctagagctgcaggttaccccctcttcttctcctgctctcagc

SEQ ID NO: 375225 - DNA, 122 bp, Homo sapiens
gtctaatgttctcttctccccagcctgcctccctccatccctcccgtaaggctgctcctccgcctccattaatgccaggtctttagacagcaccagcattcctactgagaacccagggatgg

SEQ ID NO: 375226 - DNA, 122 bp, Homo sapiens
gccaccgcaagcagatgttctgtaattaggggagatgtgaatgacaaggcgggagaggtacggaacacgggcgggctggcacaaagcagctgccgctaccgcttccctgtcatggatgtaca

SEQ ID NO: 375227 - DNA, 122 bp, Homo sapiens
accccaccccctcataattcccaaaactcattattgggagtgaaggccttcatttccatccgtcacagtgggaatgtcccccaacccaaaccctatcccaccctcattccctaccaaatagg

SEQ ID NO: 375228 - DNA, 122 bp, Homo sapiens
gtagggggcagggcactgcccggctggggaagcgaaagccaccgctccaaggaattgcttcgtctccccgggcctcagctctgtcatctgtgaaatgcggactggcagcgtccaccaggcct

SEQ ID NO: 375229 - DNA, 122 bp, Homo sapiens
ggctctctgggaccagcatacagcagaaggcaaggggaactgagccagggcgtctgttcacgccgaaatatctacctacatagaggagatggttagagagagagagagagagagaaataaat

SEQ ID NO: 375230 - DNA, 122 bp, Homo sapiens
cgcccccaccactccaccctaccccagcaggcgctaaaggagagctgacatgatggataacgaaaaagaagacgctgtccttctattcagggagtttaacatctggaagagccgggagttct

SEQ ID NO: 375231 - DNA, 122 bp, Homo sapiens
aagctgcagcagctgagggagcccagaaggaagataatgaggacatcccagtggacttcacgccggccatgacaggcgtggtggtcaccctgtcctgctcgctcatgctgctgctctacttc

SEQ ID NO: 375232 - DNA, 122 bp, Homo sapiens
gggccaaggagaaagacgtggaagagaatatcccagtccccatcaggcctgtgatttgcccgggctgcgtgccgtagacgggagggtgttgagaactaactgtgcgttctgtgagatatgca

SEQ ID NO: 375233 - DNA, 122 bp, Homo sapiens
acacaaaagatgtgctgctcagacctcccttaaagaaagactcactgcccagctgtaaggcgtgtggttagatgaacagcctacggctgttgggtttatcaggtttgtctaactgttgagcc

SEQ ID NO: 375234 - DNA, 122 bp, Homo sapiens
agaagatgcagggtcaggttggtggagatctgcagacactcttctgggccccccaagtaccgggagggagctcctggttccccccgcagccagcccaacagcttctcacgcctaccaggttt

SEQ ID NO: 375235 - DNA, 122 bp, Homo sapiens
actcctgatacaggagaggctgtttaccacttggagaaaaccctctatctgcctggatgccgagcccaccttgctcctccgggggctgtctgacaagggtcagtgcctacaggacagcagac

SEQ ID NO: 375236 - DNA, 122 bp, Homo sapiens
gggagcaggaaggaaagaaggtcaagccaggcctgctccctgccactccaagcttgagcacgccaaagcctgggacctccaccagaagctaatcaaaacgagaagaccccaccccattcgac

SEQ ID NO: 375237 - DNA, 122 bp, Homo sapiens
ttcctccaggaagcccgcctggatgacaggagacaataaaatccagaacccttcatcaggcgtcctgggatgtgtgaaataagtggctcaggcaaataagttgactctcaggagcctcttta

SEQ ID NO: 375238 - DNA, 122 bp, Homo sapiens
gctgggccctgtgcgactgtgcaggtcccagacccaggaagctggccctgtgtatgttatcgtgaggcagggcccccgagagcctcccatcccatgacggctagtgcggtccagtaattttt

SEQ ID NO: 375239 - DNA, 122 bp, Homo sapiens
tctctccctagttctgcgccctcaaccctgatctcccgcctcctcccacagccaccgtctcgagctcagcttcaaccatggccctccccacagggctccatcccaagccagagcgggtcagt

SEQ ID NO: 375240 - DNA, 122 bp, Homo sapiens
ggggcgagcccttccctctcactgcagaagagcttctcagctaggggggtcgtgcgggcccggagagctgcatttttaacaaactccccacactgacaatctttgccaacccttcccaggca

SEQ ID NO: 375241 - DNA, 122 bp, Homo sapiens
acgcgcccatcaagcgctgccccaagtgcaaagtctacatcgagcgagacgaaggctgcgcgcagatgatgtgcaagaactgcaagcacgccttctgctggtactgcctggagtctctggac

SEQ ID NO: 375242 - DNA, 122 bp, Homo sapiens
ttttttttttttttttttcttctcttttttgagggtcttactctgtttcccaggctggagcgctgtggcaggatctcggctcactgaacccttgacctctcaggttcaagcagtcctcacgc

SEQ ID NO: 375243 - DNA, 122 bp, Homo sapiens
ggcggacgtcgtgctggggctggtctaaggcgccctcaccgtgcttgctctcgctgccgacgctatttttccaccagctgtaggagaagcccgaagaccactggtcccccgggtagcccaag

SEQ ID NO: 375244 - DNA, 122 bp, Homo sapiens
caaaacatacataataacagctagcccttgttgggcactgttgcacacaaattgccttcacgtctatttggtctaccccctcacatgattcatttgaatgatcagtggtagagctatttcac

SEQ ID NO: 375245 - DNA, 122 bp, Homo sapiens
tagagagacatttggccacttgcctgtgactcagtgggctcttcccagcatttcttctcccgctcaccttcagcaaaatggtctgggtttgcagaggaaccttgttatctgtctagactctg

SEQ ID NO: 375246 - DNA, 122 bp, Homo sapiens
aggccaaccaggtaggcctcacttgcctcctgcaaagctccaatagctgcactctggaagcgtagatctgttttcaagtcctgagcaatttcttgcaccagacgctgaaagcgaagtttgcg

SEQ ID NO: 375247 - DNA, 122 bp, Homo sapiens
gacaggaagcgatgggtatgggcgccaggtttggggaggaggcccctttcccatagccgtcgacctgcgggccccacaggatctggccgctccagtcccggccacctgaccccttcccccac

SEQ ID NO: 375248 - DNA, 122 bp, Homo sapiens
gggacgagggcctgcacgtccccgggggactgagggctgctctgggtgaggatgggaaggcgggtgccgcttccgagggctcctctcgccaagggagagagccctagacccgttcccggggc

SEQ ID NO: 375249 - DNA, 122 bp, Homo sapiens
cttcatgacttattttaaataaataagcggcttaaaaatctccctgcgaggtcggcttgtcgctgtgaaacatggcttcccacccgtccccgccgcacacctgggcccctcaaaggctagct

SEQ ID NO: 375250 - DNA, 122 bp, Homo sapiens
tttgccaaatgtctggagaggtcatgggcccagatgagctccgacaccggctccagaccccgggctgtgagggtctgccccatccccagggttcctggtgcttccaggccaggggctggaga

SEQ ID NO: 375251 - DNA, 122 bp, Homo sapiens
caagtgaggacggggcaggggttttattgtctcctataaacagggggcgtctcggtctgacgtaactgctacgcggtacccggatggcctctttctccatcttcaggggtaggtgtcttcca

SEQ ID NO: 375252 - DNA, 122 bp, Homo sapiens
cacccgcgctgccacgcaccgcacctgctgtcccgctccgggatctccttgatggcgatgcgcaccctcgtgtggcgatcgcggcccgcgtacaccaccccatacgtgcccttgcccagcac

SEQ ID NO: 375253 - DNA, 122 bp, Homo sapiens
cactgtgcccagccataagccacaaattctagccacctttttgagttactcatcactgagcgttcccacacatatgtgcattgcatgcgtgaactcttattaatttgtcttttgtcagttta

SEQ ID NO: 375254 - DNA, 122 bp, Homo sapiens
gcctggcccggagcccctcgtgggccgcggaccgcagcaaggacccccccggccgggcaccgctgcccatgggcctgggccccttggcgcccccgccgcaaccgctccccggagagctggag

SEQ ID NO: 375255 - DNA, 122 bp, Homo sapiens
tgtcctacctgctgtttttctcaccaatccatgaagtttcacagctacatccaatgaggacggcaggtagcgaggtcctatccgaagctcttcggcgtcatgagcagccaataggagttcgt

SEQ ID NO: 375256 - DNA, 122 bp, Homo sapiens
gtttgttcctcccggtggtctcgcagtctcgctgacttcaagagtgaagcgacagaccttcgcagtgagtgtcacagctcttaaaggtggcgcgtccagagttgttcttttccccgccagtg

SEQ ID NO: 375257 - DNA, 122 bp, Homo sapiens
ccttgtccacgcgaggcaggggccccggtgaccttgggcaggcgcagcacgtgccgtgtgcgagccaattatgactggaaaacaggtggaggacaaatggaagtagtggcctttggagttta

SEQ ID NO: 375258 - DNA, 122 bp, Homo sapiens
agggacctgcggcagagacaaggcggagacactcccttgcccaggaaagccgccagagtccggcttgtacctggggaagaatccttaagacggtctggcccaacactcctttgctcacagag

SEQ ID NO: 375259 - DNA, 122 bp, Homo sapiens
gcgcccaagcgcttgctgatctcagaattgtgcatcttggggttctccagggccattttgcgccgctgcccgcgggaccataccatgaaggcgttcatgggccgtttcacacggtcctggtc

SEQ ID NO: 375260 - DNA, 122 bp, Homo sapiens
ggttatagcaggaaagcttatagacacagcacaagaaggaaatttaggaaggcatataatcggggtgtccatgttatacacagggtgttcacccaatctgcaaatgtttattaaactattca

SEQ ID NO: 375261 - DNA, 122 bp, Homo sapiens
tcataggggcgaggagggtccacagggacaagctggaagccttccaggcccgctatgccccgcctcctgtcctttcccactccgtcttcaatcttttaccctttgcatggagacgtgtggct

SEQ ID NO: 375262 - DNA, 122 bp, Homo sapiens
ggtggcctaggcctaaccccagagccgttgtcttgacgcttaagcttccggggaggggggcgataggcttcgtgactagggtagtggtatggtcactttaaatattgcagtggcttccaaag

SEQ ID NO: 375263 - DNA, 122 bp, Homo sapiens
ctgagatgggcgtcccggggtggttttcagcctggggggcttgaaagctagcaaagggcccgcagccccgtcagtgtgggcgccctgggcggcctctcctggctcctggcggccgggcttgg

SEQ ID NO: 375264 - DNA, 122 bp, Homo sapiens
cccctgttccctccaccaccctcacttctgccccccacgccactctcaggttgacagcgtcggggaaagacatcagaccatcaatccagcttttcctgccagctggggaaacaacactcggt

SEQ ID NO: 375265 - DNA, 122 bp, Homo sapiens
ggaaatacatgtgacaaagtcacagtgtgaatggacaggttaggtcccccatcccatcatcgtcactgtcttacctgactgcttactgcttatcatcctgacggtgcaggattcttccttgg

SEQ ID NO: 375266 - DNA, 122 bp, Homo sapiens
tcgggagaggtgggcttgaaaaccttgtagcttgagaagtgggtgccgcctgtacgaagccgaggcggtgccctccctctccacagctgcccgcccttcacagagtcctggcggcagctcgg

SEQ ID NO: 375267 - DNA, 122 bp, Homo sapiens
acgaggcgcagcgtggggccacggccttgggatccgggcgccaccccagcggttctgtgccgccagcaggccctgccgcatctccgggctggaggcttgactgtcagcagatgaggccacgg

SEQ ID NO: 375268 - DNA, 122 bp, Homo sapiens
agcctgctttccagtagcttataccacccacgtggagtagcatacactactttgtaatatcgtggttgtgtcgtgagaactttaagattttgcagttccttgtaggcaggagtcctgtttgc

SEQ ID NO: 375269 - DNA, 122 bp, Homo sapiens
agacgatgaagactacttggtggatgaattcaatcagcctggagtctcggacagtgaactcgggggagacgacctctctgatgtccccggccccacagcactggctcctcccagcaagtcac

SEQ ID NO: 375270 - DNA, 122 bp, Homo sapiens
caggtttctgtggctgggaacagcataacgctgattgcccaacaggctctgggctgcgggcgcccctccaccccctggcagcttctggagggggccagcggcctgtagcccccgagtcatca

SEQ ID NO: 375271 - DNA, 122 bp, Homo sapiens
tcccaaggagggggcggtgcctggagggatggtccgccccgactgcgggtttctagccctcgcgtggcgtggggacaattaggcgccacgccctgtcgcttcactgcgcgacgctcgcgagg

SEQ ID NO: 375272 - DNA, 122 bp, Homo sapiens
aacaacaactctctttgcagcatgtaggtgcctttgcaaagttctctctaagccaaagttcgtggacttccaatcttgtcaaaatcactactaattaataccttttcacttcccactgaaag

SEQ ID NO: 375273 - DNA, 122 bp, Homo sapiens
ggggtgcggggggacccgcgagtgaggccgcgggagatggggggagtgggaggcccacaccggagccacccctgccgccatcacaaccagaagcggcagtggccaccccacccgggcaaaag

SEQ ID NO: 375274 - DNA, 122 bp, Homo sapiens
aggagtcaaggccaatactctgctttctaggttgaacgactaagtgtttggtaatcatttcgggtcttgaggtatgagatgtctgcaagatatcccaggggatgcaagggtgtctacacagg

SEQ ID NO: 375275 - DNA, 122 bp, Homo sapiens
cccccatcctggccacgcctccaagcccgccgcgcaggagtcctgcgtccccaggaagtccgcaaagggccggcccctgggcttgcctgcaaatccgagttgtgtcccaccaacgcgctggg

SEQ ID NO: 375276 - DNA, 122 bp, Homo sapiens
atctgtgggattccaggatgcctgctcctgcagcattctgtgggattcagggcaccatcccgtggattccaggataattgctcctgaacccttccatggcattctgggaggccacttggcct

SEQ ID NO: 375277 - DNA, 122 bp, Homo sapiens
taagatgaagaatctgatattctgtaacagagaacatggtatttataactttttctgccacgcagacaccttgtcagtttgggctcttagaactaaaattgcagagatttgaacatgactgg

SEQ ID NO: 375278 - DNA, 122 bp, Homo sapiens
ccagcgtggggtggggccctgctttcccgcgtcaggaccgccccaccaggcgccctccgacggaagctggacttttcctaaggaaaggcaaagtcaaagtcggaggaaagatctttcttgcg

SEQ ID NO: 375279 - DNA, 122 bp, Homo sapiens
tgtcccagcctccatccaactcacccagacactccctgcctccagcacttcccaactctccggctggacctcacctttcgggatttgtcaatgcgacagaacttctggaccacttccacagg

SEQ ID NO: 375280 - DNA, 122 bp, Homo sapiens
agaccttggtggtgggtcccggtaggaggagaggacgcttgctccccacttcttggagagcgagcctttgcttggcaggggtctcagagagcaccccgagctgctcacaccccccgttgctc

SEQ ID NO: 375281 - DNA, 122 bp, Homo sapiens
cttgactgagggtgtgattcggttcagagtagctgggttgaatttttgtaaagaggttgccgtgtgtgcacttttgccgacctcaaagccaccagaaggagggagctgagtgtacctttttg

SEQ ID NO: 375282 - DNA, 122 bp, Homo sapiens
gttgaggcctcctgcaaggtctatgtgagggtgtggagtactaattagagttaaagagctcggcagctgtttggtcactggcactggcctccactgagagggacatgggtagggaggacacg

SEQ ID NO: 375283 - DNA, 122 bp, Homo sapiens
tggctagagtagggtctggagagagctcccactgtggcgagtcctgtcgttggattcccgcggcgccccgtaaggctccgccccggcggtgctaccaaaccctgttcgattttagaatcgta

SEQ ID NO: 375284 - DNA, 122 bp, Homo sapiens
aaaatccagatagaaaagctaagaactctaccggtattctaccccggaataccccgcctccgctgccaggagggagagctcccagatatccaggtcagactctcctcattcttgaattatct

SEQ ID NO: 375285 - DNA, 122 bp, Homo sapiens
acactgtctttacaatcccggagtctgtctttatggagctggttttgggcaaaatgaacccgcagaaggctttccttgccggaaagttcaaagtgagtggcaaggttctgcttagctggaag

SEQ ID NO: 375286 - DNA, 122 bp, Homo sapiens
ccgacgtgatttgaacacgcaaccttctgatctggagtcagacgcgctaccgttgcgccacgaggcctgtccaacagcgtgacttgatgggtctgttgagcagcaataacgggcggactttt

SEQ ID NO: 375287 - DNA, 122 bp, Homo sapiens
ttctgaccgtgtggtcgagtgaacagagcatgcaggggagatgcagcaggttctccccgacgcggaagagcaaggggtccccggttcctggaggagcagcgggattgccccaggctctggga

SEQ ID NO: 375288 - DNA, 122 bp, Homo sapiens
acatttccatgccaggcagaggcccccggagcgcaaaggaccagaggatcaaagagcaaacgtcaccctcagggtctaacgtgcaggtggcaggaccccggcccttcctgtgtatctgattg

SEQ ID NO: 375289 - DNA, 122 bp, Homo sapiens
gagcccccgcctcctccgcccccatgaacccccttcccacaagggggttcccactgcgcacgcgcagtgtttaacggccggtcaggaacccaacaattagtcccttctcgtccgagaggaaa

SEQ ID NO: 375290 - DNA, 122 bp, Homo sapiens
ggctggaaacaccagagggcccagatgtccgttggcgacggtcttctgcaaacgacagagcgcaagccttgcccctggaattctagagccgccgcaaagataggaactcaaaacgacccgag

SEQ ID NO: 375291 - DNA, 122 bp, Homo sapiens
catggagctatatagtactggcatcttcctttctttgcagaaatattctgtgtgtgtgtgcgtgtgtgtgcgtgtgtgtgtctgtctctctcacacatgcatgcatgcacacaccccacata

SEQ ID NO: 375292 - DNA, 122 bp, Homo sapiens
caggtcccgagccctgcgccgcaggaaggcagctaaggcttggtgagaaatcgagagcagcgccggtgggctggcactgctgggggacccagtacaccctccgcagccaccggcccgggtgc

SEQ ID NO: 375293 - DNA, 122 bp, Homo sapiens
aggccccgcccccggggagggcgctgagctccgcttggcgcctctgatctttatttctcgcgccgcggtttcggtgggaggggcgggggtgatttacggatactctctgccctcagatcctg

SEQ ID NO: 375294 - DNA, 122 bp, Homo sapiens
tccaagggggatggcgcgggtttggcgaatgggggtggggagggggtatttcagctccagcgtggaatctagagaagcacgaggaaggttctatcacgggggttgagccttagaaggtgggt

SEQ ID NO: 375295 - DNA, 122 bp, Homo sapiens
gtcaacaacttcggcatgtactactccctggccatggccaagcagaagctgcccaagaaacggaagaagcacgtgccacggccggcgcagctggagtcacccatgtactgcaagtctgagga

SEQ ID NO: 375296 - DNA, 122 bp, Homo sapiens
ccagatgggggatgcccaatggatttgctgactgatctttctggctctgccgtcaggaaacgttaagcagattccttgaagtttagggtcatgggtctcgttcttgagtccccacggcgaag

SEQ ID NO: 375297 - DNA, 122 bp, Homo sapiens
gaggctgattgaggtgtggtcgtgctgtcgcagggctccctctggatgtggccatcgccccgcctgagagagcctcctgcgccgtttggcgaggcaggtgtgacttggcaccctggcagggg

SEQ ID NO: 375298 - DNA, 122 bp, Homo sapiens
gggaccgtggatgccgccgtttcaggctcgaaaaggtttccatgccccagagcctgagcccggcagcccccgaggatgtcttggggactctgtgctccccaaagccgagaaggttaggcttg

SEQ ID NO: 375299 - DNA, 122 bp, Homo sapiens
acctcgtgatctacccgcctctccctcccaaagcgttgggattacaggggcgagccaccacgcctgacttgttgtttttaagaggatcttgctctgtcatccaggctgctggaatgcagtga

SEQ ID NO: 375300 - DNA, 122 bp, Homo sapiens
gggccccgcttggggagggcgtggagggcgccgaaggggttaacctccctggggctggaccgcggggcgagcccggggtgtggagtggggccctccccgccgcgccggccgggggaggcggc

SEQ ID NO: 375301 - DNA, 122 bp, Homo sapiens
gtccaccacggtggcatcctgcacgcagtaggcgagcatcttcccccacaaagcgagtggcgcccccggcggcgtcaccttctcatcccggccgggctccggctccttctccagctgccggg

SEQ ID NO: 375302 - DNA, 122 bp, Homo sapiens
caggtgtccagacctcgcaacgattggacgagctcaccttctcgccttccccgggcccctcgcccgtcaatcacactgcttgctcgccacctgacctctgctgcgccccctttcagtggtgt

SEQ ID NO: 375303 - DNA, 122 bp, Homo sapiens
tggggtcctcccgccaatccacagcagggctgcgtgggggccccttcctcaccctgctcccggggactggccttgccctccacagcctagagcaccatggaggggcacgcacaggagttcgg

SEQ ID NO: 375304 - DNA, 122 bp, Homo sapiens
tgtggccgtctacacggcgcgcagatgcgaatattctcgcggcgccggaagtccggggcacgtgacctggtgacagtgctgacttggctgtacagctcgatctaggttctgcggcacgggat

SEQ ID NO: 375305 - DNA, 122 bp, Homo sapiens
ctaagggcccatctcggaaacaaacctaggtgtagcacttcgatccgactcgtcccagagcggcccctgcgctccgaacattgagccattcaacaattactgggctcctgctggcgtgccgt

SEQ ID NO: 375306 - DNA, 122 bp, Homo sapiens
gaaattgagcacagcagctgctggcccaggtgctaaggccctcactgcccggggcctgagcggccgaccggccgctccgagtgcgggggcccgctgagcccacgcccacctggaactcgcgc

SEQ ID NO: 375307 - DNA, 122 bp, Homo sapiens
ggcgaagaatcgtgcgggtctgggacctgggggcccagagggagcgagctcctgcgcgggcgctcggtccgcaggtttcgcaggctcaggggcgtgcctcgttctcacccccactccggacc

SEQ ID NO: 375308 - DNA, 122 bp, Homo sapiens
tgaacacgggaggcggaggttgcagtgagctaagatcgcgccactgcgctccagcctgggcgacagagggagagtcagtctcagaaaaacaacaacataaaaacagactgatcatctgtagt

SEQ ID NO: 375309 - DNA, 122 bp, Homo sapiens
gccatacacagctccgcgtcctctccagggagaaaggggatggaccctgcaagtggagagcgggatgcttatcatacaaaggaattaaacccacttgggctctctcgccatccaggactgtg

SEQ ID NO: 375310 - DNA, 122 bp, Homo sapiens
gccgagggggcgtctgcggggcggcggtggccgggcgcgggtctgcacgtattgcgggagcgccttggtgaaaatttgcggggatcatcagtgactatggggtggatctgcttgagtaatgt

SEQ ID NO: 375311 - DNA, 122 bp, Homo sapiens
ggcgcagctggcccgggccctgcagcgggggcagggtgtctagctggttcccgcggaggtcgagggtgtgcaggcgcggacagtgtgcgaaggccctgggacccagggcctgcagggccccg

SEQ ID NO: 375312 - DNA, 122 bp, Homo sapiens
cctgagactccagggatcggctgagctcgcgggctaacgctgtgaagcctgcccagctaccgtgacgtcacgagacccccgctatctcgttggtggctatttcctctcccgctgtggtccct

SEQ ID NO: 375313 - DNA, 122 bp, Homo sapiens
cttggccagaaatccctgccttagactggggaaggtttgagagaagctcagcaaacctggcggctgctctttgggtttggcaaactcgagatttttccagcgccttgtgttcagcgaaactg

SEQ ID NO: 375314 - DNA, 122 bp, Homo sapiens
acccaagcacacacccgtgctcacacataccacatacttacacacacatgcatgcacacacgcatacatgcacacaaacatgcacacgcacacagccctggtgacctggggacaatctgcag

SEQ ID NO: 375315 - DNA, 122 bp, Homo sapiens
cccgggtctgaggagggaaggagctggtgggctgagacacctcggcctccactgacgcggcgttctcttcccgcagcgcctaggactgagggcaccgtggccccaagtgaaattccttaagg

SEQ ID NO: 375316 - DNA, 122 bp, Homo sapiens
tctacagcaagtggccctcggcagctcaggctcagggaatttcaaatgtatcacctccaccggctggacaagtcctctcaagacaggctctggggccaagggaggatgttgtgactggtgct

SEQ ID NO: 375317 - DNA, 122 bp, Homo sapiens
gctaccattgtttacaaagaatctactgtttaaatgcaggaatatggaccaccagggttgcgaacatgaactgtgccttaaatcttgaattaccctgaacttttatgagtttacttggaaat

SEQ ID NO: 375318 - DNA, 122 bp, Homo sapiens
gctcggcgcggggcggggccgggaggtcgccgcctcagtcttccgccctgggccacgccccggtcccgggtcacctctcggagccgcctccttggcccgtggaagcctcctgctctccccta

SEQ ID NO: 375319 - DNA, 122 bp, Homo sapiens
atggacaccgatgggtagtgaagcaatggttttgctgtccaacttcagaggctgctgtggcgggggtctagttctgcatctgctcaaagaacttgtaggttggattttcgtagccgttctgc

SEQ ID NO: 375320 - DNA, 122 bp, Homo sapiens
ctgggttatgtaagcgaccgcgctgggccgtttctctttcttttccggaccctgcagtggcgcctaaagtctgagagagggaagtcgcctctgtgctcgtgagtgcatggggtataaggcaa

SEQ ID NO: 375321 - DNA, 122 bp, Homo sapiens
tgaagacatgctctcacatatagaggtacacaaacacaccgtcatgcacatttcagcttgcgtctatcatgattcctgttgagagggctttcattgtctgactcataatggttcaggatcaa

SEQ ID NO: 375322 - DNA, 122 bp, Homo sapiens
cccccattggccgtgcgcgtcacgtgcccgtccagcagaacaataacgcgtaaatcactccgcacgctattaatggtccgatgttttgcagtcataatttttatagcaaaagccatatgttt

SEQ ID NO: 375323 - DNA, 122 bp, Homo sapiens
gctgctccaggtggccgagctcggaagtgctcagggcgcgcagcaggttgtggctggcgtcgaggctgcgcagtgtgcgcggtaggcagccgggcaggcgctccaggttgcggttcgccagg

SEQ ID NO: 375324 - DNA, 122 bp, Homo sapiens
tcccagcttcggaggacgactggaccggctgggcgggtttcgccagccgacccagggatccgaagaagggcgcacccagcctccccgacctaggtgtagacactgcccacccgctgcggctc

SEQ ID NO: 375325 - DNA, 122 bp, Homo sapiens
tgctgacccaggtgctaagcctctcactgcccggggcttgcgggctggctgctctgagtgcggggcccgccaagcctacgcccacccggaactcgcgctggcccgcaagcgctgcgcgcagt

SEQ ID NO: 375326 - DNA, 122 bp, Homo sapiens
ccctgcagaagcttgctccctgggttccctcctttgcagacctgtgatccaggaccatcccgtgctgcctacacacagaccatgctgcccactgagccctgtagtgggaccagggcccccag

SEQ ID NO: 375327 - DNA, 122 bp, Homo sapiens
gtcaccgtggagcgggggcacagggggaatggcatctctgggatgggtgaatgctgtgggcgcctttccacaggctcagagttagactgtggtcactggttttgtcccctgcagcctcttcc

SEQ ID NO: 375328 - DNA, 122 bp, Homo sapiens
actctatttccacaagagtttttcctgttagttactgattacccattgtgtctttttcctcgaatcacctgggaggaactatctttaaataagtgtcgtcctgtaatgcactacggccgtct

SEQ ID NO: 375329 - DNA, 122 bp, Homo sapiens
atgtgttcaccaacctggaagctctctgaataacgttgtttagggtttttgtggaggttccgttacataggcatgattgattaaatcagggggcattggtgattggactcagtctccaactc

SEQ ID NO: 375330 - DNA, 122 bp, Homo sapiens
cgaggccttctggtggcgcgcgagccgcctctacacgctcgtgctgggcttcgccatccccgtgtccaccatctgtgtcctctataccaccctgctgtgccggctgcatgccatgcggctgg

SEQ ID NO: 375331 - DNA, 122 bp, Homo sapiens
cagcccaccgccgcagactggctgggcaggatgacgatggactccacggcacccgtgagccgcccccgggcagccaaccccactcctcagtgctcctgatgcctggccctgcgttgcagcga

SEQ ID NO: 375332 - DNA, 122 bp, Homo sapiens
taaacctcattggctacgatactgccactgcgcaaagctggaaaggttctgttcgcgccccgctcccccacggatgatgactaccattacattgagggtgagtgcctgcccgtgtgtccgtg

SEQ ID NO: 375333 - DNA, 122 bp, Homo sapiens
tatggaacaaaaagggttcagggagtgtggagtggaatggggaaggagagcattttgaaacgcaaggtcagaaaggttaaaggaagcaagtatatgaaaagtgattttttgttgttgagact

SEQ ID NO: 375334 - DNA, 122 bp, Homo sapiens
gaacgtggtgcgttctgcctcactctccctcttactctccctgtgttgaacgtgatgcctcgctgacctcagcccagcctggctgagagggcctgcgtgggatgacctcaggacttgggcga

SEQ ID NO: 375335 - DNA, 122 bp, Homo sapiens
cattttttgtttgttttgttttgacagaggttctgtcgcccaggctggagtgtagcggtgcgcccgtggctcagtgcagcctcgaccttcggggctgaagtgatcctcccacctcagcccct

SEQ ID NO: 375336 - DNA, 122 bp, Homo sapiens
cataaggctcaggtacttactaccttttgctcatctccaaatctccctgtgtttcccttacgaagctttcctggagaacccgtgaagttaaacaaacattctgccaaatgacaaccaagtat

SEQ ID NO: 375337 - DNA, 122 bp, Homo sapiens
gctgctcagtggaaatcagcccccaggggaagaggggaagccacctgggaagcctggggacgggaatacatcagaagcacagaaagtgaagcaggaaggcagcagcagctcagagcaatgcg

SEQ ID NO: 375338 - DNA, 122 bp, Homo sapiens
cattcccattcctttggcttattaatcactgcaaccccacacagactcagcctcagccttcgcagcagcagcactttaattccacaaaaactcagaaagccaaaactgattagaacactcca

SEQ ID NO: 375339 - DNA, 122 bp, Homo sapiens
aagagcagggaagaggtactgcaagtcccgagcagacccagtgagctgactctgggacaacgctatgacttcaaactctaagagcatttgttgaagtcagtgccgactgaatatacctggtg

SEQ ID NO: 375340 - DNA, 122 bp, Homo sapiens
gcctttgccagaaagcttctagttacaactactggcagggaccttatgcttcagaggtctcgaaaatattcctcctgacctcagtgtccagccccagcacagatttagcttcttggatgttc

SEQ ID NO: 375341 - DNA, 122 bp, Homo sapiens
tcccacctcttccttcccactgccaaaggcctgtgttgagaaagatgtcatgcaaaaggacgacggtggccaactaaagcaagtcttccttccaccctgtggcctgcacttgagccacaaag

SEQ ID NO: 375342 - DNA, 122 bp, Homo sapiens
atctggtctccggggcccatttctggaatgtgaggagacaagagtttggggcgcgcttgccgctgtcctcacggactcctggggcagccccaggcacccgcgagaacccgcccccccaacca

SEQ ID NO: 375343 - DNA, 122 bp, Homo sapiens
cgggtgtcatcctactcttcataagttaaacactcccttcagctttccctttaaaatgtacgtcaaggtcacgggtcacatggctggtcagtagcagaagcttccatcctgattgctggtcc

SEQ ID NO: 375344 - DNA, 122 bp, Homo sapiens
ctcaccggccatggcttttctctcctcccttcttgtgtgactgaaactgaaagtatgcttcgccttcctttttggcagggcctgtacatgtattgggaaatactcactgtgcatgcatatgc

SEQ ID NO: 375345 - DNA, 122 bp, Homo sapiens
gagagagactccgtctcaaaacaacaacaacaaactctagtctcctgcacagcagctctgcgtgaattactgtttttctgttacaatttccatcttgataaatcagctctgtctaggcaaca

SEQ ID NO: 375346 - DNA, 122 bp, Homo sapiens
ggctctccgggagagttgggggctccagggcatacaagagtagtactggagtaaagacttcgcgattgcctggcaggcagggctttgggtgcatatggggccgggagtggacagaaggggcg

SEQ ID NO: 375347 - DNA, 122 bp, Homo sapiens
cgcttcgagggagtctcactggggcccgcgcagccggcacctccgctgcctcagccgtcgcggttcatcccggcccgcgctgtcgccgccgcagctatcgcctcactcccgggacgctgagg

SEQ ID NO: 375348 - DNA, 122 bp, Homo sapiens
tacttccacggtgaatggtgcccaggcgtggggggctcggccacactggagaagtgccagcggcagcgatggccactttgtccgcgggaggccatgggaggggctaggccttggggtcccac

SEQ ID NO: 375349 - DNA, 122 bp, Homo sapiens
agaccatcttaccgaaaggaaaagccagaagaatgtactctgcatgaggtaccggctagtcggtcagatatgtcatttcccaacagggagattatgtatagcttgttcagtgacttgctcac

SEQ ID NO: 375350 - DNA, 122 bp, Homo sapiens
ggccaggatgggaggaggcagcgctgccacccaccacccccggctctggggagctggactcggtgcccatcccactgaaaccatctgctgtcctggagcccagagatgcccgggcctgccga

SEQ ID NO: 375351 - DNA, 122 bp, Homo sapiens
gtagcctgacccttttcttgcccccataggctgatctactggctgacctttgccgtgggccgctccttccgaggcttcggctacggcctgacgtttctgccactgctgtcgatgctgatgtg

SEQ ID NO: 375352 - DNA, 122 bp, Homo sapiens
atgcaggccatcccgggacctgggacctgcgaggcccagttgtggagcctcctgctgtggcggggcacggggcttctggggaccaaagtctggaaaaggggccgggaagatggacagggaaa

SEQ ID NO: 375353 - DNA, 122 bp, Homo sapiens
gtcctggttagaggcacttagaatacacttctgtgacattcctgccaaaaatgtgtaatccgaatcaatcgtgaggaaaaaatcagacaacccaaatgtcccaaattgagggacattctaca

SEQ ID NO: 375354 - DNA, 122 bp, Homo sapiens
cgagccggggagaagcagatctgagcggtgccagccgggcgccgtccgcccctcccaccgcgcaccgcctcctcgcccgcgccctctcagtgcgcaggcgcctctcggaacaggtgatgccc

SEQ ID NO: 375355 - DNA, 122 bp, Homo sapiens
tgcggtcttgctgacttcaagaacgaagacgcagaccgcggccgtgagctttaaaggtggcgcggacccagagtaagcagtaagctttattaagaagcaggaaagaaaaaaacacaaactca

SEQ ID NO: 375356 - DNA, 122 bp, Homo sapiens
agctccttggtcttctcctcatgcagcttggccttgagctccgaaatgtaggccgtgtgccgtcgctgctcctgctcgcgctccagcttcgcctcctgcagccgctcgcgcagtttgcccac

SEQ ID NO: 375357 - DNA, 122 bp, Homo sapiens
tccctcatcccctcccccagtcctgaacagttctctccttgtgtactgcgggggagggaacggaaaggaggaaagagttactttcccaaattactgagtagcagtagcctccctggtgactc

SEQ ID NO: 375358 - DNA, 122 bp, Homo sapiens
ccctttcacggccagcccctcttctcaagatagttctgtttcaattacctgctaaatctacgtttagcattgcctcattatgccttgcacatagcgttcacatcgaagcactgaagtgtact

SEQ ID NO: 375359 - DNA, 122 bp, Homo sapiens
cacatgagggcatctttgcagctgagttgtctctggacctgcagtagctctgctaacttacggcagagagagcacctccagtgatgccagttcttttggcccgtgtgaaatcaattgctttg

SEQ ID NO: 375360 - DNA, 122 bp, Homo sapiens
cgtgagcacgtgctcaccacacgtccttgtcgtcttctccggggagagccctgacttatccgaggcagccacatgcccttctatcctgctggttaggacataaatgtccctgctgcacccgg

SEQ ID NO: 375361 - DNA, 122 bp, Homo sapiens
gccccccgagaccgggttgagactgcagtcgggaagcggctgcggagtcgagtggagcggcggggactccgggaacgtggggcgcgggcgagagcgccgcgcgggggccacaaacttcctcc

SEQ ID NO: 375362 - DNA, 122 bp, Homo sapiens
acgggcaggggttgttacggagttgggtgcaggattcgcctttcctgcttgtctcttctccgcccaggatttattgtctgtggagccttctgggggcggggagggagctgcgcctccgccac

SEQ ID NO: 375363 - DNA, 122 bp, Homo sapiens
aaaatgattataaggtcttaatgtgaaacagcttggtgaaatgtgtggtttttttccattcgctgccatattcagatagattttcttaaatagtgtttagcctgtaggtcaccagttttaaa

SEQ ID NO: 375364 - DNA, 122 bp, Homo sapiens
tgcagaggcatttttccttcggggacgccggaagacttcgccacacgcgcgccctctccgcggacaccaacgtgctgacgcatgttcattagcgagctgctccctccattttgtccccagtc

SEQ ID NO: 375365 - DNA, 122 bp, Homo sapiens
cctaaattccctagtatatcacctgtggaagcttgcaacttcctgaccaagtataaagggcgaaggatttgacttacagcagagacttcagaaggagtcccccataggagggacttgggggc

SEQ ID NO: 375366 - DNA, 122 bp, Homo sapiens
ctcagaacttcagaccagaaaactgaagcccacagaggctaagtacttccctgaagaagccgaaagggataaatgcaatggtagcaggcacctacaattccccttatggaaaatggtctttc

SEQ ID NO: 375367 - DNA, 122 bp, Homo sapiens
ttatgggggtgagtacggtgccccggaggcgcggctgatgtgtcttcctttctctatgaccgggtgtgcaacggacctctggtctgaccctaggagcccttcagctctggggccacctgggt

SEQ ID NO: 375368 - DNA, 122 bp, Homo sapiens
cggctctactgaggaggtcggtgagcagagtccgcagcggaaaaggcgaaggcgacgtgacgtccagcaagctcgccatgttgagaaggtaacacggcgaagccccgcccagctgggatgga

SEQ ID NO: 375369 - DNA, 122 bp, Homo sapiens
ccgcctcctcctcctcaccagcgctaaagccgggactggaccgagcggagttgtgcgtgtcgccgaaggggggtgggccgggggaggggaggttcgttccgcggagccccagccagaaccgg

SEQ ID NO: 375370 - DNA, 122 bp, Homo sapiens
tgggccaggcccagcccccgcccttaccctgcacatccgccttggtcccggccaccactgcggcagccccggactctgcctgctcctgccatggtgccgtggccctgctgggcggatggagc

SEQ ID NO: 375371 - DNA, 122 bp, Homo sapiens
ctgttaattgttctgtcggtgttgagaggaggttggggaccaggcatggcaacttcctgacgccatcttcctgattgtgggcagcagccacaatcagcaatcttatctaggtagtcatccat

SEQ ID NO: 375372 - DNA, 122 bp, Homo sapiens
ataattactgtgtttatgatgagaccgcaggtatgcgtgggtacatgccaggctgtttttcggcaagtccaccccaacgagcctgtgccagggtttatagtcatcatctttctggtgccctc

SEQ ID NO: 375373 - DNA, 122 bp, Homo sapiens
ggtcaaagcacctggacatttttgtgacttttgaagtgcattgtggaaccgtgtgaaggacgcttttctgaacgtgatgttccactttgatttgatgctgttttcttctgccagttcagaac

SEQ ID NO: 375374 - DNA, 122 bp, Homo sapiens
ggtgggaacacctatctcatgccttaatccatgccacacgcctggtcaagtcatttatctcggagttggcactgggagatagattcaacttccggggataagatattgataaataacacact

SEQ ID NO: 375375 - DNA, 122 bp, Homo sapiens
gattgctgcagcctttggcgagtttccagagttctgagaaagttgattctgaccatttgccgatgtcttgttgctttcgtggaggagagaattctcagagcttgtgagagtctctttgctga

SEQ ID NO: 375376 - DNA, 122 bp, Homo sapiens
tgttatttggtgttctctgctgcgtagcgcaggagtataaactgagcatgtagctgcttgcgaggtgttcttcaacatttacaacaaagttgattctgtgtagggttggaggctagacagtt

SEQ ID NO: 375377 - DNA, 122 bp, Homo sapiens
ctgtaatgggcaccaatgaccaggttttgaagggcaatactgtgggtcagcgagggtttccggggccccgtgggaggcgccctgctgtcagacgcgtttctgtcctcctcagcccccaacct

SEQ ID NO: 375378 - DNA, 122 bp, Homo sapiens
aaggaatggccagaggaaggaaaggagggaaacagaagcagaaaggacaggtatagaagccggagggagccagagacaaggttcagagaccacaattctgtcttttgagttcactagtttta

SEQ ID NO: 375379 - DNA, 122 bp, Homo sapiens
cggactcactccctgtgagtggtgatcctgttacactttctagccttttcaccacagacgcgttgtggatctcccccaggcctctgactctcagccctgtgggacagtgacccacggggggt

SEQ ID NO: 375380 - DNA, 122 bp, Homo sapiens
gagtcagcccgagcccgggaggaacgcctggatcgcgctctgcacagtcccgggaccaggcgggaactcagactcccgtctgcagagccgcttcccccgtcagggctcaggccgcgcgagcc

SEQ ID NO: 375381 - DNA, 122 bp, Homo sapiens
gagcccaccctctgagcctcttctgacagcttcacccagcccctgtgggatgggagagcccgttgctggcgttgctgtccccgccgtcgatggcaggaggcgtcctgaaagccagctcatgc

SEQ ID NO: 375382 - DNA, 122 bp, Homo sapiens
ggtaagctcttgaaaattcttaagctcgagcctgcccggcctgcggcaacagcatggacacggtgcagtgtcagcagcagcagcggcagcagcagtggctggcagccacgcaggtgtttatg

SEQ ID NO: 375383 - DNA, 122 bp, Homo sapiens
ctaaaatatttttacttatcaggctggcaaagaccaaaagatttgaaaacagaattggtgcggtactgtcatgctttgctggtaggagttgtagaacaatctctacagagactttgaaaaca

SEQ ID NO: 375384 - DNA, 122 bp, Homo sapiens
attccaagtaactacttcagtttcagttccgctcaccagtgctacaggagcagcgtgcagcgggtcctgcttccattcgactggctgtgcaggacggccacaaacacacgcaggtgcaccct

SEQ ID NO: 375385 - DNA, 122 bp, Homo sapiens
tcacccatacccttaaaaacagggctcctcgtaagccgcattttactgctgctattgattcggcctgttcattcctccctcgcacacgccgccgtcttctggccttgcgtcgctgaagtgca

SEQ ID NO: 375386 - DNA, 122 bp, Homo sapiens
gcatcatcatggtgctccattttgcatataacttggtgtctacatgtaggggacgtgtttcgtggtttagtgagaaagggaaagccaagacatgctatgatgacatccatatggtttcgctg

SEQ ID NO: 375387 - DNA, 122 bp, Homo sapiens
ctaaacaggaagggaggcacaatgagaggaagtgcagggtgtggcagggccctccctgcccgaggagggacacaccagccagcagcaatgggggccgacagcccaggcctctcacacccaag

SEQ ID NO: 375388 - DNA, 122 bp, Homo sapiens
agctccgacctttctggcctccagcagggaaaggtctggcttttccttttcagggagtagcgggctgggcagaccggcctcccttctcgcagcctcgcacaaggagcctgagcacgtaagac

SEQ ID NO: 375389 - DNA, 122 bp, Homo sapiens
aaggattgggtgacacttgcacaggcagtggctgggccacaatggcggaggatgggaacacggtgggtccctggagaaaacacagctgtgcttcacccaaagccccttcaggccccagagga

SEQ ID NO: 375390 - DNA, 122 bp, Homo sapiens
cgaactcctgacctcatgtgatctgcccgctttggcctcccaaagtgctgggattacaggcgtgagccactgcacctggcctcgtggtggttttaatagacaaatttgtggttggtttagat

SEQ ID NO: 375391 - DNA, 122 bp, Homo sapiens
ctcacacttagtcccgggagctgcaggtcttacctggagagacgctgcacgtggatcccgcgccgctgcggttctcagccggctctggagtgcgggcggaggcgacagggccgattctggag

SEQ ID NO: 375392 - DNA, 122 bp, Homo sapiens
ggacagcaatgacagagagcgtgtgaacgaggcccgtgaggagctcatgaggatgctggccgaggacgagctccgggatgctgtcctcctggtgttcgccaacaagcaggtaggcgcccggg

SEQ ID NO: 375393 - DNA, 122 bp, Homo sapiens
agacttaatctaaagacataaataaaaaatatccctttaaatgatgtatggaaatatgagcggacatcgagtgaggaaggcaggcagttgtgctggatctaagtaagtaggtgttctgcaaa

SEQ ID NO: 375394 - DNA, 122 bp, Homo sapiens
gggccttgccgaatttccccactttgtctcttcacgttagattgtacccctgtgttcagtcgcatttctacacaactgtccatacttctttgaaactaagcataaaaatagatagttttccc

SEQ ID NO: 375395 - DNA, 122 bp, Homo sapiens
ctctggggagggcggggcgagtgcttggggtgtggcctgcggcggggcgtcggggaaaggcggggtctcggccggcgctgacgcagccatggcggaggcggctttggaagccgtgcggagcg

SEQ ID NO: 375396 - DNA, 122 bp, Homo sapiens
agtttggttctgtccgcagcatggggcacatgtgttccagagaagctggctggaaagtaacgctgtgggcaagaactatattccgccgtagttcccaggagaaatgcaagacatgctcctgg

SEQ ID NO: 375397 - DNA, 122 bp, Homo sapiens
tggtcaacataaaagctcaggcctggaggtggccaacccagcctcccagagcctgcagcccggccatggcccagtcgcctcctccgcagagcctcctcggccacgaccactggatcttcgcc

SEQ ID NO: 375398 - DNA, 122 bp, Homo sapiens
gctgggcggcgggttttggcgtcgctagactgggctgtcttggcagctaaggcgacatcccgagcgtcctggggccaccctgctctccagggcccgccatcctggaaaagaaaggcgaacta

SEQ ID NO: 375399 - DNA, 122 bp, Homo sapiens
catctgctttctgcacgcagctgtagcactccagggcctgcgctcctgggggagcggagccgaatagacctgagccctccttgctaaagcgtccacccccaaggagaaatagtccttcccat

SEQ ID NO: 375400 - DNA, 122 bp, Homo sapiens
tattggtctccccgggcggcagtcctgcattaaagagtgtttccaaggtggaagggaggccgtttgaacgcctcgagacccccggctgcaaggagtggcaccttcctcacttcagtcatttc

SEQ ID NO: 375401 - DNA, 122 bp, Homo sapiens
gggcgtcctcccacctccagcagccctggtccctgggtgtggtcccccgaccctgcagcccggctgctgtagcgcgtttttgaagtgagctttcactgcctcccatggtttcaagatttggg

SEQ ID NO: 375402 - DNA, 122 bp, Homo sapiens
ctgagtcgggcagaatgaccacgcagcgctggccctcctgcagctcctgcgcggccttcacggccaccgccaccgtgctgccagcactgccacctgcagagagggccacgagtcagacgcgc

SEQ ID NO: 375403 - DNA, 122 bp, Homo sapiens
cactttgggaggtcaaggcaggaggattgctcaggagttcgagaccagcgtggccaacatcgtgaaactcccaactctactaaaaatataaaaattagccgggtgcagtggtgtgctcctgt

SEQ ID NO: 375404 - DNA, 122 bp, Homo sapiens
ctgactgtcattggttgttctgagactcacacctggggctcactgcccgcccgacccccacgtgctggcttgtccctgcgaatgggtagtccttgcctggcctctctatgaaccaaattggc

SEQ ID NO: 375405 - DNA, 122 bp, Homo sapiens
agtatcgactaagactttttccccctggaatcgaggctgtgtgtccgtcatcccagcccccggttggagcctgctctttgaactccgctgccttccttagcagcttctgtcctcttctgtga

SEQ ID NO: 375406 - DNA, 122 bp, Homo sapiens
ttttctctattctgcaagctcagctgcagaagcatgtgaagctaacaccaccgatgatggcgttcccagcatgacattctcttggacagcagaacgttaatcgacacgcgtgcagcagtatg

SEQ ID NO: 375407 - DNA, 122 bp, Homo sapiens
gcacatcttttatttccccctcagccctagaatcaactgttactccaaggagtactgattcgttttattggagagtggtagtatgtgaaaaccaagacctgggcactaggtgtgctcattcc

SEQ ID NO: 375408 - DNA, 122 bp, Homo sapiens
ataaacccgactcaaaatctgtcttttcctgggcagattgcaaaggattttgcatctccccgttgctgttgctgctgctcacacagtcttgggaaaacgggggaaaatcaaggaaagagagg

SEQ ID NO: 375409 - DNA, 122 bp, Homo sapiens
ccccaagcctccatcaaatctaatgacccgccttgtctctgaacacacctgtgttgtccccgagcccctcaccaaccccctctgcaacccggcccacgcatttcccatcctgaagggtccag

SEQ ID NO: 375410 - DNA, 122 bp, Homo sapiens
ttcccagatctaaatgtccacatactctcctgatctccagactgtattctagcttctatccgcaccattctgcctgaatattccagttgtgctactggttatagccactgggattttataca

SEQ ID NO: 375411 - DNA, 122 bp, Homo sapiens
cacggggccgatggggaggtcgctgcagtgatttggattctgagtctctagagaggctcacgagctcctggagttgcggggggcgggggcggggcgaagcagccaggaaagagggtctgagg

SEQ ID NO: 375412 - DNA, 122 bp, Homo sapiens
ctgtctggtggatggagcaagactccatctaaaaaaaaaaagaatatgctagttgctaagcgctgttcttagagcttgtaatttagtggaggaagacagataaccaacaaagagacaataca

SEQ ID NO: 375413 - DNA, 122 bp, Homo sapiens
gggttttgtattgttttctttccagaccccaggtccatatacagtaaagactctaaatgtcgactatgtgaaagggctcagggaaggccaaatatctatggaaaaaggctgggtttggactt

SEQ ID NO: 375414 - DNA, 122 bp, Homo sapiens
gacggtggagccgcggttcgctctctgaggccgtgggacggtgactgcgttgggcgtggacgctcctagctcgctccctccgcggctcctgggaccccaagatggcggcggcgctgaggcgg

SEQ ID NO: 375415 - DNA, 122 bp, Homo sapiens
ctgcccggaagcgcttcccgcgccggcgctctgacgacctaaggccagcgggcggaatcgcgccctctgctggagactccggtgcagcccgggaagcctcgaatccggattccggagctttc

SEQ ID NO: 375416 - DNA, 122 bp, Homo sapiens
ggcgggatgaagactggagtagggcggggtccgcgtccagctgcgcctggaaagcgagctcgggggggtgcctacagcagggtgcgcccggccggcctgggacttccaaagcgcctcccacg

SEQ ID NO: 375417 - DNA, 122 bp, Homo sapiens
tgagccctgcgtccatggtcaccgggggacggcgggtcgcgtgctggaaaaagtccagcccggctgtgactccagagcccggatgtcattccagagcccggctggacaaggacctggaaggc

SEQ ID NO: 375418 - DNA, 122 bp, Homo sapiens
gggaccacctgttcgggatgttactgaaatctgtttcttacgtttttagaggcttcgtgacggagttatcagagacattgagaggcaaattcggaaaaaagaaaacattcgtcttttgggag

SEQ ID NO: 375419 - DNA, 122 bp, Homo sapiens
cgacaaaggccaggtgtcaggagggacgaatgtggtctcattatctgctatgttgaaatgcgtttgctggtcaaagtactgtgggcacgcccccaaggctacgtcctccctttctccagcac

SEQ ID NO: 375420 - DNA, 122 bp, Homo sapiens
cggccagcctcgcctgcccggcggctcctacctggctcagcgcggccgcagctcctctcccgggcagtctcggcacattttgcgcaaacccgcccccgggtcccaccccgcgccagaccccg

SEQ ID NO: 375421 - DNA, 122 bp, Homo sapiens
gcgtctcagcgcagggagacattttcagcttggctgctgcctcgcaggcactggaaccgacggccctacctgagccactcccgggttatgcggagcctggtgtcgcctgggagaaaagggtg

SEQ ID NO: 375422 - DNA, 122 bp, Homo sapiens
ctcctggggccggcaagcctccttcccgctgtgcctggagggatatcattggaggaccgccgggcgcggtggagggctccactcgccagcagccccctcccccagccccttccactctcttt

SEQ ID NO: 375423 - DNA, 122 bp, Homo sapiens
cagtatctggggaaagttcctggagtggtgaagtcccctgggctagcccagcacggggggcgcctgagggccaggaatcctttgggagggactgtggagagcgccggtcagcagggggctcc

SEQ ID NO: 375424 - DNA, 122 bp, Homo sapiens
gtcaggggtgtcagcagcgtcactggtaagacatgatggcgctccacgactgaccagcagcgctgggaagggacacgcagaacccaccttccaaccacgcccaacacatcacagaaatgcct

SEQ ID NO: 375425 - DNA, 122 bp, Homo sapiens
taggagcagaagacgcacatcccgctggggcaaatgagcctcctgcatggggtctctggccgaagtgcagaactctgctgaactggttaggaaaggcagtcaggcctcggacacaatggaac

SEQ ID NO: 375426 - DNA, 122 bp, Homo sapiens
gggagggagattctgggacaggctgcggcgcagatgagtcttcagggccgctgagtgacgcgagccagccacagaggacaaatcctgcccaactccacttaggtggggtccgaagagttgtc

SEQ ID NO: 375427 - DNA, 122 bp, Homo sapiens
tgggcccagatctgcccgggagggcagtggctgggcttggcctggcaggggctgaatggacgaggtcagctggggccggtgagaggctggggaccctcagggtgagagcagcagctggatga

SEQ ID NO: 375428 - DNA, 122 bp, Homo sapiens
atcttcacccagcaatgagcacaactagcacccacgtcttggtttctaaacaccttttctcgttaaaaggagccacagcatcttggagaaatggctattctagttctaagatagggaaaata

SEQ ID NO: 375429 - DNA, 122 bp, Homo sapiens
ctgtggtggaagcggcagcggctgtggccgctctcccttctgctcacacagacaatatggcggcgatggagtggggagcaattttctaaaatccaaataaaaaccttcccatctctaatctg

SEQ ID NO: 375430 - DNA, 122 bp, Homo sapiens
caccttgaacttttcataaagaaaatgggtattgcacggagacggtttggccgcggccgccgcgcggggtcgtgcttaatattcaatgatctcgctcgcgcctccccctcctcttctcgcag

SEQ ID NO: 375431 - DNA, 122 bp, Homo sapiens
taaggaggactgaagcagtggaaagggcagagatgatggggtcagcccaggtctgcacagcggacagctggtgaagccaactccaggtatgccttgcccaaagccctggctctgaaacgcca

SEQ ID NO: 375432 - DNA, 122 bp, Homo sapiens
gagctagtcttggaaacggacagggggaaaatctaccattccacatctctggcagaaacccgggacttacttccatccagcggatcctctgtgccctaagaaccccccaaaccagactcgcc

SEQ ID NO: 375433 - DNA, 122 bp, Homo sapiens
tcatctgacagatgaggaaggcgaggctcagggcagctaagccaggcttcagatcctgagcgtcgcagcaccccttctctaacacttcctgatgtgggctccggcgctgttaaacgtaggcc

SEQ ID NO: 375434 - DNA, 122 bp, Homo sapiens
agcaaaggacagaagtcaagtttggagtctatgcattacaggggcccgttttggcacagccggtccctggacactcacaaaggtcttcctcacccacccacctcacccaccttcctgagccc

SEQ ID NO: 375435 - DNA, 122 bp, Homo sapiens
agggaactgaccacgggcattttcaccccattacccttccagcttattgccgactgctcccgaagggagcgaaaaggacaggcaaagggtttcaccaaaccctttgtaatgggagattcttg

SEQ ID NO: 375436 - DNA, 122 bp, Homo sapiens
tacttcctacatggtgtatatttctcatctctcatttgcttttttgaagattgtaattagcgaggtttcattaaaaataagtgaagaagtagaattaattcaggcaattaggctggctcatt

SEQ ID NO: 375437 - DNA, 122 bp, Homo sapiens
ccaacaggcgagtcttcttcataataacctactcagagataatgatgtaaaagactcccccgtctgtggcggcggctgtttgatgggtccggaaatctcttgaaggtgaatccaagcaagat

SEQ ID NO: 375438 - DNA, 122 bp, Homo sapiens
ggataaccggagcgctccccatggaccacacggagggctcgcccgcggaggagccgcctgcgcatgctccatcgcctgggtaggtttccagggaaggcagcgagcaggatcccctactctgc

SEQ ID NO: 375439 - DNA, 122 bp, Homo sapiens
ggcgggagagggggcctctattatctcggcttctcgggaggagcctcatctagtcagtcacgcagaagtttctctttcgctcttcgcgctacacacccagattggcttccagcgcgcaggcg

SEQ ID NO: 375440 - DNA, 122 bp, Homo sapiens
cctacacctagtgctctgaaaagttggttcagtgtatccaatatttaaagtctaataacacgggcatgctaagggaagtttgctattcagattaaacaatgctctgacgtgagcttcgtgaa

SEQ ID NO: 375441 - DNA, 122 bp, Homo sapiens
ggggatgctggggtcctctcacggacgacactgccttcccagcagcctctgcagtgggcccgggagcgtcctggagtccctgtcttgcaccccgggtgcgtgtctcacccacggggagcacc

SEQ ID NO: 375442 - DNA, 122 bp, Homo sapiens
catcttaataggtaagaatagataggtgcacgaagacacgcacaggaagaaggggaaggccgagaaaacagatgcacaggcgctagaagagactggccaacattcgcttattctaagggtgg

SEQ ID NO: 375443 - DNA, 122 bp, Homo sapiens
caacagggttacaagataaggttctgttaatcccacgctgccctcttcccttctgtgggacgtgttttgaggacttgtgtgttgactgcaccatgcagagcatatagcatggaggcacccct

SEQ ID NO: 375444 - DNA, 122 bp, Homo sapiens
cttccccagattttatcagtagcctcttcactcccattttccaagcccagagcagcttgacgcatttcttttccttgccctccatcacctctctgctgctgccatctcccttttggaaaggt

SEQ ID NO: 375445 - DNA, 122 bp, Homo sapiens
gcaggtccgggcgggaggcggctgaggcctggcgagaattccagcgtggcaggtgtggaccggcagtgctgggggacccagcgcaccctccacagctgctggccgggtgctaacctcctcac

SEQ ID NO: 375446 - DNA, 122 bp, Homo sapiens
aaagcttctaggtacattcttcattgtcaagttcacttagatatttattgagctccaacccgaggcacacctctttaagaaactttctcatggtttccacaacaaagatacctgtgtcagga

SEQ ID NO: 375447 - DNA, 122 bp, Homo sapiens
atgcaatcgcagatgccagcagaggtctgttggttcaaaattatagtttctttgggccagcggaagttgggcgcgggacccaagagagagaacgccccttaccgcctcacctccttcctccc

SEQ ID NO: 375448 - DNA, 122 bp, Homo sapiens
agatacagacccagcctcctagcctgatagttcaagttctcctgttctaaatccttggttcgtaggaggagaggctgagagcaagtgttgtcacccccaaggtcacacaacgagtcaagggc

SEQ ID NO: 375449 - DNA, 122 bp, Homo sapiens
tcaattcacacagccatccctcagttcaactattgcctttgaacatcatgagcaagaccacggctctttgtatttctgccacagtttcacaccagttacagattatatacattcttcacgtc

SEQ ID NO: 375450 - DNA, 122 bp, Homo sapiens
ggtatatccggagtttgttccttcagacgtccagatgtgtctggagtttcttccttctggcgggttcgtggtctcgctgacttcaggaatgaagctgcagacctttgcggtgttacagctct

SEQ ID NO: 375451 - DNA, 122 bp, Homo sapiens
agtgtttgattgtgtcaagaagtaaaggttaagaaatgttattttcccctttattgaagccgtagggtgtagtggttagtagagtagtaattctgctactaaataactgtgtgaccttggac

SEQ ID NO: 375452 - DNA, 122 bp, Homo sapiens
ccccaaccccctcccgctcgagtctagccccgggctccgcagcgaaggaagcgtcggggacgtcccacccccgcagggaactgcgcctgctgcccccgccgggccccgcactgccctggctc

SEQ ID NO: 375453 - DNA, 122 bp, Homo sapiens
agctccttgttctggcgttccagctgctgccgagcattctcgttcttctgggcgtggctgcgctccaggttcaggtcggtgttgatctggtcgatctgcagaagaagggccagtgaccttgg

SEQ ID NO: 375454 - DNA, 122 bp, Homo sapiens
cttgactggggtggcatcagaacacacctcatgggtcattaccttgtactgcctctgattcgcatatcgtcaaccagccattcccttagggatgtgagggactcagaactttatagctattg

SEQ ID NO: 375455 - DNA, 122 bp, Homo sapiens
cccgtggacgcagcctcgccctgccgctgtggtcgggtttcagtggcctcgtcctgtggacgcagcctcgccctgccgctgtggtcgggtttcagtggcctcgtcccatgggcgtgctttgg

SEQ ID NO: 375456 - DNA, 122 bp, Homo sapiens
tcattcagaaagcaattttttattgtctagtgccaggcactgaactaggtttcggagcgtcgtcagaacagcacatggttcctgcatccaggaagcttgtagagcctcaggaagaactgcag

SEQ ID NO: 375457 - DNA, 122 bp, Homo sapiens
ctggggccagatcctgctctgtagctcccacaggagaaaccatcacagaccaaaggccagcgggggccccagcactcaaggactgtttctcccaccaccatctgtggacttttccagctgtt

SEQ ID NO: 375458 - DNA, 122 bp, Homo sapiens
ttaaggtgctcccggtgacttactcgcagatgaaggtcccctgtgggatggtctgcagggcgcggaccccccagcccatcttggctgttcggtagagctgtagccgcaccctgggggtagga

SEQ ID NO: 375459 - DNA, 122 bp, Homo sapiens
agagacagcccttggggaagccgtggcaaacacgaaagggagctcttgactctgcagccccgctgccacgtcccctcgcccatcccccactgccacgtcccctcgccccgtccccactgcca

SEQ ID NO: 375460 - DNA, 122 bp, Homo sapiens
tattctccccaccgagctgtggactgccatgctcaactatggctacgtgggctgcatccgcgacctattcattgatgggcgcagcaagaacattcgacagctggcagagatgcagaatgctg

SEQ ID NO: 375461 - DNA, 122 bp, Homo sapiens
aagctcagtgctggacttccgaagaccttttacgacattgagtctcggagttggtctcagcgccggatccacttttcggcaaagtgacgtggacgtcaacagcaatggcggaaggagaagat

SEQ ID NO: 375462 - DNA, 122 bp, Homo sapiens
gccaccagaagggctccttggtctagcagtaacgccagtgtctgggaagacgccccttgccgagcggacggtggtctagcggtagcctcagtgtcaaggaaaacacccgctacttagctgac

SEQ ID NO: 375463 - DNA, 122 bp, Homo sapiens
gccccctggaagaagaggaccacattactgaggatgggtgtcctgcgattccagagcaaacggctcttctcatcacccccaatgcccgatatgaagggaacacgtcacctgcaattcaccac

SEQ ID NO: 375464 - DNA, 122 bp, Homo sapiens
atttttcactgcagagaccagccctgcccctcccgaatttaactagacgggaacccacagcgtgtcatacagcacagtggccccaggatggcagtagatgcccatgtgtaagatctctggcc

SEQ ID NO: 375465 - DNA, 122 bp, Homo sapiens
ggctcctaggaagggcagtagtcgggtggccaagaccaactccttacggaggcggaagctcgcctcctttctgaaagacttcgaccgtgaaggtaaggggccaggccgtcgcggcctcctgg

SEQ ID NO: 375466 - DNA, 122 bp, Homo sapiens
acggggcgaagcgcggtgcttcggtttccgtggccagcgaggagcccctggcccacaggtcgagagtgtttataggcgtgcgcgagcaaagcttcttagcaacttgctttaccctcttctat

SEQ ID NO: 375467 - DNA, 122 bp, Homo sapiens
gcagctcagagctggctgagtctacagcaagacagtggaggtgctgctgtgctcacgccccgcagcggagtttcagggtagagaggagaggagactcacccgacacaaatcagtggagctga

SEQ ID NO: 375468 - DNA, 122 bp, Homo sapiens
agcggaggcgtgcgcagccaggcccagcctggcatagccccattctcacgcctaaggacgcggacacagactcttggcatgacttcctgccagagctggtctctgtagggcttgggcctaca

SEQ ID NO: 375469 - DNA, 122 bp, Homo sapiens
tcgaagcccttctattttgtcctagaggggaaaccatacatggattgttcacactggaggcggatgtgatatccaacacaaagcatcacattttacagatgaggaaattggggcaagaaaag

SEQ ID NO: 375470 - DNA, 122 bp, Homo sapiens
gccgtgagaacccggggacagcctcccctcttgcggtcctgcagtcccggacccactgggcggatcagaaagtttgcagggagccagggactaggagacagacagacagcgcagggacagag

SEQ ID NO: 375471 - DNA, 122 bp, Homo sapiens
agacgctggcgctccaccgtgctcggcatgcggtcgtgcacacgcgctaggtagcagcgtcggtcaggactgtctcgaggccacactcgctcggcaggattatgcgatcacggatcagtcag

SEQ ID NO: 375472 - DNA, 122 bp, Homo sapiens
cgcgccagccctagtttatctagaggggaagggcggtgcgggaccacgtgactggggttgcggcatttctggcccaatccgagacggtttcgtagagcgccctgtagagcaattcgggttgc

SEQ ID NO: 375473 - DNA, 122 bp, Homo sapiens
tgccagctcaggccacagggcacattaggcttctgacaaagctggaggacaaggccccctcgcatgccccatcctctcctcgcccccccctcccccgagtgcctccttcgaagccctgcctc

SEQ ID NO: 375474 - DNA, 122 bp, Homo sapiens
cctctgggagtaagtgcaattgcccagtctgcagcacgggcttcctctgcgctccctactcggctcggatgccagaggacagcagaagggagaggcagtctccacactcactgagtctggga

SEQ ID NO: 375475 - DNA, 122 bp, Homo sapiens
gggtcagaggagggcgggcccgggagccgtgacgcggcgcgggtgacggctgcggcggctcgcgtgctcgcagtctgggagctctggcggactccccacctcggttcccccgccttcacccc

SEQ ID NO: 375476 - DNA, 122 bp, Homo sapiens
ataaaagaagaccccccaattagtccagaaattcagctaccaggtgagacgtccaaaggtcgctaagaaaccactaaaggattttaaatgtgtacacacgtttcgcttcttgcttcagtcat

SEQ ID NO: 375477 - DNA, 122 bp, Homo sapiens
cataataacaaattttttgaaacctctctcattgccatcttttctgaaacaaatgcccttcgatttaggtttcataatggatgttgtaggtctgtgtgattaggctttttttttgagtcttg

SEQ ID NO: 375478 - DNA, 122 bp, Homo sapiens
agccccattaaagcttgctatcacaggtcatgccgggtgcagtctgtaatcccaacacttcgggaagccaaggcaggagaatcatttgagctcaggagtttgagaccatcctgggcaacata

SEQ ID NO: 375479 - DNA, 122 bp, Homo sapiens
aggcctgggccccagtcaggtcgccaaccatcttcctgtccctagactacacggagtaggcgaatgccttgaagcccgggcggcaggggttcatgaagagggcgttgaacagggaccagaca

SEQ ID NO: 375480 - DNA, 122 bp, Homo sapiens
ccccagtgattaatgtattctgtacacagtagcacccatggtacaggaacgccccttcttcggtcacctagtaacttttcactagtcaacaccaaactgaataaccactatgttgtgagaaa

SEQ ID NO: 375481 - DNA, 122 bp, Homo sapiens
tggaccgcccgctgcgccagcagaccacggggaagcggttctggcggtagcagcgggacacgcgctgcagggcgttgtcctggacactctggggcacgatcagcagccctgggtagctgaga

SEQ ID NO: 375482 - DNA, 122 bp, Homo sapiens
gccacgctcccctgcccgcccctcccctcccctcccttcgcgtagatctgactgagaaaacgactggatctcggaacaatctgtgccccattcgctgcaggcttgctccgtaaaccctgccc

SEQ ID NO: 375483 - DNA, 122 bp, Homo sapiens
ggacacccatagtgtttctcccgagtatggattcgtttgtgtttgcttaggtctgagctccgactgaaggcccttccacacttgctgcactcataaggtcgttccccagtgtggattcttat

SEQ ID NO: 375484 - DNA, 122 bp, Homo sapiens
caccacgtggggctgcagctccacagtcaggcagagcacggcgatgggcttgccaccactcgctcggaacaagacctgtgaggaggccacgctgagtgttgggatgggcacgaggcttgtga

SEQ ID NO: 375485 - DNA, 122 bp, Homo sapiens
ccacgggccggggggtctggaaatcccgaggatgagggaaccctaccagtctccatctatcgcagccggcccggcgcagggtctccgctgggcatcaacgagcagggcctgggtatttcggc

SEQ ID NO: 375486 - DNA, 122 bp, Homo sapiens
gagaagcggggagaaagagaaggagggagaccagcctcgcggggcctgctggttccttcgcgcgtttcccattcatccgcgtgaggcgccgcgcaccctgtcgccagctcctttcactctgc

SEQ ID NO: 375487 - DNA, 122 bp, Homo sapiens
gatgaaagtggattctcaaaaacaacctcaccgttgctatggaaacgggagaaccacagccgaatctctaagcttcctttcctgggccccagcatgggtgggggcggaagaggggatgagtc

SEQ ID NO: 375488 - DNA, 122 bp, Homo sapiens
gctttcggggagtggggttcctgccagtttagttgttgagccaggtgtgggcagggcttccggctggctgtttggcagctttccccttgtacaggtccacttgctccctggggatgagaagc

SEQ ID NO: 375489 - DNA, 122 bp, Homo sapiens
atctctgctgcaagagcctcccaacccagggccttccctgccacccccggctcacaccaccgcccaccgcaggcacacttagtcctgtccacgccagacactcaatttcctgtccctggctt

SEQ ID NO: 375490 - DNA, 122 bp, Homo sapiens
gccgctggctctgggtcagccctgcccccagggcagcgctccatcatgaggctggcggggcgctgagccgtggcgtcctcgctcctgcgctgcccctctgcatcctggccccttccctgcac

SEQ ID NO: 375491 - DNA, 122 bp, Homo sapiens
cacccggagagacccaatgactgcgtttcgcacctgggcgcaagctggttactgggcacgcgctgacaacccacatctggaaaacccggtcctaactggagaataaaacttaaatgcacgtg

SEQ ID NO: 375492 - DNA, 122 bp, Homo sapiens
gttgcggttcccaggccaggagcagctgtcatgcttgggcttggcctccagcagctccagcggggacgccggtgccaccacaaggagactgcgggcgactgggggtgccaggcccagggctg

SEQ ID NO: 375493 - DNA, 122 bp, Homo sapiens
agtgcagccagcccgccagcgagtcttgtttcactggaatgttggcatcaaacttgagatcggaaatgaactcattatctgattatttttatttatgaaaatataactgctctgggagaggc

SEQ ID NO: 375494 - DNA, 122 bp, Homo sapiens
ggcagtaggaagtgagatctgagtcggaggtagtgagaatggaaacagagcagaagccaccggcttggggtgaatctgcatagcttctgaactaggctgccctcagagtaatctgcgagcca

SEQ ID NO: 375495 - DNA, 122 bp, Homo sapiens
ttgtcaaaaatgtgtgctcctgacgtttataccaaatctttgtccaatcctcagtacacacgactaacctccaccacgaaacactgcacttcaagacctaaggtacaacacaattctcagtt

SEQ ID NO: 375496 - DNA, 122 bp, Homo sapiens
tcattgctctgtaccccaataggaggattcattctcccttgagctgtgcctacttggtgtcggggggcgggggttgcattcagctgggggtgagtggaagggccacggaaggttggcaaaat

SEQ ID NO: 375497 - DNA, 122 bp, Homo sapiens
agcaaggagtggcacggctagagtgatgggtggaagtggcaatagcacacttaggcctgacggtgcaggagcactactatgtcagagaggctgaggggctgaatgaatccactgtctacaca

SEQ ID NO: 375498 - DNA, 122 bp, Homo sapiens
ttgggaaaggagacatttgagccaggcctcctgggagtattacaatggccaggctgacaccgttaaaactgggaaaggcttacaacccccaataagaacatttattctacaggctaagtact

SEQ ID NO: 375499 - DNA, 122 bp, Homo sapiens
tctccccgatgacatcctttttatcacccccagtgacagcctttttcgcattccctttgtcgcccactccttgtcctttaaccctaacccttcctttctttctcctctatcattttgccttt

SEQ ID NO: 375500 - DNA, 122 bp, Homo sapiens
acaagggagcaggaaaactacgctagcactagactgccggtcgcaagcgccgggtacacacgcagttaaacctcaatggaacgcccccgggacttctccggggcgtaaagcgcagcgccctc

SEQ ID NO: 375501 - DNA, 122 bp, Homo sapiens
gggaccaagtactactccacagctccagctcttggtggcatggacctggcttacaatcaccgtatgcgggacacagctcctcttctgactgcagcgcactcggcccgacgtgacctccaccc

SEQ ID NO: 375502 - DNA, 122 bp, Homo sapiens
gcccaagtgccatccatagtccatctccagagtcttcctccacaaactgggattcatccccgctgaaaaagcacaatctaacagcaaggtgagtatgttgtttcctaaaatgtttcattagt

SEQ ID NO: 375503 - DNA, 122 bp, Homo sapiens
cccaggactgtctctatctcagcctgtgctcccttctctctttgctgcgcccaagggcaccgcttccgccactctccggggggtccccaggcgattcctgatgccccctccttgatcccgtt

SEQ ID NO: 375504 - DNA, 122 bp, Homo sapiens
gcggcgcggcagggggccaagggatggggcacgggccccatcaggggcctgcataagtggcgtgggccgggttggtgccgcgcgcttctgtttgggccccccttggccgcgcgccgccttct

SEQ ID NO: 375505 - DNA, 122 bp, Homo sapiens
tccaggttggagatcggattgtcagcattaacgggcaacctttggatgggctgtctcacgcggatgtggttaatctgctgaagaacgcctacgggcgcattatcctgcaggtattgcgatca

SEQ ID NO: 375506 - DNA, 122 bp, Homo sapiens
gatccccctcctctgcctcccaaagtgctgggattccaggcatgagccactgcgcctggccgatgtcatatctttaggagcgcttccctgaccactctgtttaaatagcatcccccgccctt

SEQ ID NO: 375507 - DNA, 122 bp, Homo sapiens
gattcacatctggagcctgtctttctctcgtgcagcataaggcaaagctggaatggagaacgaatgagggcaggcagtgagggggttaaagcggctcaaatcactagtctgctaaccacact

SEQ ID NO: 375508 - DNA, 122 bp, Homo sapiens
aaatgcaaggaaatgtttatttttctacagcttccttttcctctcttcctgctttccatacgattgtctgcgctggactcttaagataggcgagagctgggtcggctgactcatggtttctc

SEQ ID NO: 375509 - DNA, 122 bp, Homo sapiens
ttaaacatcagcattctaaagactgaaacaaagctgcttatccactatgcataactcacacggctggaggaggccatggaagaatttttcagggggtggaaagggaggtcaggatggaattc

SEQ ID NO: 375510 - DNA, 122 bp, Homo sapiens
ttcaaaacgctagtcacatcctggagagtaagaatagggctcttgatcagacaagcctcacgcaggccaggctctgacgatcatgctgtgtgatgtgggcaagttcctctacctctctgggc

SEQ ID NO: 375511 - DNA, 122 bp, Homo sapiens
tggtgagaaagtggacgggggggcatcgggggtgttgcccgcgactggtgagggtggccacgtggatggctgtggcattcgtggatttagagaacacagagagcagtgggtacatgggagca

SEQ ID NO: 375512 - DNA, 122 bp, Homo sapiens
tcctcgctgcaaggatattctgttctcccaaggatggtgggcgacccaatgccaatcagccgattctgtgatcatctcatcccccacaggagacttgtctctcagtcaggagtggggatgtt

SEQ ID NO: 375513 - DNA, 122 bp, Homo sapiens
cagtcccgctttccctgaccgcaccggaaagtgcgcagcggcgggatcacctggcctcggcggctggtaaaacttttcctgactgcaggcgcgacagaggggccctgcccgtcctcgagtgc

SEQ ID NO: 375514 - DNA, 122 bp, Homo sapiens
atgcgagctccgctgccgcggccccgcgccccctcccctcccctccccccgccctccgcgcggtaacccgagcccccgcccctccgcccgcggagcccccgcccccgcccccacccgcgctc

SEQ ID NO: 375515 - DNA, 122 bp, Homo sapiens
cacacatcacaaataagtttctaagaatgcttctgtgtagattttacatgaagatattcccgtttccaatgccatccttaaagccatgcaaatatccacttgcagattctacaaaaagagtg

SEQ ID NO: 375516 - DNA, 122 bp, Homo sapiens
taaatgtatgtttacatgtaaatatatgtttacctacaaatatatctttaataagtaatacggtgtctgtcgcacatatattatatcgtgtatgtaatgtataagtatttatttcgtttgct

SEQ ID NO: 375517 - DNA, 122 bp, Homo sapiens
atttaggaagatgacattcctccaataggtggaaagacaataaatgcactttcttctctccgccactgaggaagaaagtctccctcttgagggaccaacactatttcctttttgctgctctt

SEQ ID NO: 375518 - DNA, 122 bp, Homo sapiens
gcatttttcctttcgaaagttgttgggaacgtggactttcccaacaattgtgtatgcgctcgatctcactcagtgggagccgccgccctggagggaatttcacaatagcctggtcagggcgg

SEQ ID NO: 375519 - DNA, 122 bp, Homo sapiens
gctctccagcgcgggggtaagggggcggggcctgggcagctgcgtgccgggagcgacccccgcaccgaagggcggatggttgtgcccggcgacggcgcccaatgagcggccaggatgttgga

SEQ ID NO: 375520 - DNA, 122 bp, Homo sapiens
ggacccgcgtgagcgtcatttccatatgtaaggggccagctcttacaaaagcgcggctctcgggggccgcgggctgcagcgcgcatcctccccgcccccgccggcccgcccccgcccgcgca

SEQ ID NO: 375521 - DNA, 122 bp, Homo sapiens
gtgggagaccctgaaaggggagacacagaaagccggggcatgtggctaggcacagacgcccgcccgcccctcgtgcttggcccaggctcagccctggggaccgccttaacagcagtccttcc

SEQ ID NO: 375522 - DNA, 122 bp, Homo sapiens
gccgtgttctcttctcccaggtggacagggcacaggcagcggagagaagccgtgtagggccgggtcccgtgttccaccaagcatgacaccataaaacactggcgaacgatcagggccaggcc

SEQ ID NO: 375523 - DNA, 122 bp, Homo sapiens
cccgccaacggcgctagccgcgatgccccgcctcactccccgcccccgggatgcagggcgcgtgctggtaatccgcggctcaagccccgcccccactgtccccattctccgctcacctctct

SEQ ID NO: 375524 - DNA, 122 bp, Homo sapiens
caagctcatgctgcccaaagtgggtctgcaaacactaactgctagtgacaccagctaccccggggcctcccaggcgtgacacgcgtgcagatgctgctgtcacggctaggaggaggacctcc

SEQ ID NO: 375525 - DNA, 122 bp, Homo sapiens
cggcgtcaataggaggcatcggggacagccgctgcggcagcactcgagccagctcaagcccgcagctcgcagggagatccagctccgtcctgcctgcagcagcacaaccctgcacacccacc

SEQ ID NO: 375526 - DNA, 122 bp, Homo sapiens
ccaccagaaccagctcctggccgcagcgccatcttgctcccgacctgccgctgccttcgccgccgccaccttatcagcagctgtcagctgaacacagccacttccgggtcaaacaccaggcc

SEQ ID NO: 375527 - DNA, 122 bp, Homo sapiens
acaacactccagggagagggaagagcaggggcagaggactgactctgcagagcagggagtcggccctgcatggctggaatccagcctctctgggccacaaggattaacttcatctcagcatt

SEQ ID NO: 375528 - DNA, 122 bp, Homo sapiens
tcctgtgattcccagctcagtagtgatgtcagggacaagagatgggatgggaaggatcagcgggagctctgccctttgtcttgtggggcccacagtaaaaggaaaccagtttccccttacgc

SEQ ID NO: 375529 - DNA, 122 bp, Homo sapiens
acaggaggaggctctgagcaaaggccactggcaagttagggcaacaccaagaaggctctgcggagagactccctgtgggttggggcctggcaggaacggtgcctgtggactgtttatggtct

SEQ ID NO: 375530 - DNA, 122 bp, Homo sapiens
aaaggactttttagttcttcggtattgaaacccctttaaacaggatgtaagttctccctacgtcatcaacaacgaatagcacacgtgctgtacagtgaaagttagaatgatacgcttcttaa

SEQ ID NO: 375531 - DNA, 122 bp, Homo sapiens
tctcagcagcaggtgcacttcctcctgtcccaggcgaacctctgcacttgtattgaaactcgaggggctgccgggcacagtggctcatgcctgtaatcccagcactttgggaggcccaagtg

SEQ ID NO: 375532 - DNA, 122 bp, Homo sapiens
cttgttctgggtgcggcatgtcctggaaatgcgaccccggggccggcaccttgttctgggcgcggcatgtccaggaaatgcgaccccggggcctgggcacgtgctgttcgccttcccagata

SEQ ID NO: 375533 - DNA, 122 bp, Homo sapiens
gcgcacacgtagcgccggctgcgcgacagggcgcgcgcgacgctgccgacggcgcatgcgcggtccggcatgccgggcggaagccccatttgatttctaatgctatttatttatgtatccct

SEQ ID NO: 375534 - DNA, 122 bp, Homo sapiens
cggcggttttcacgcgcgcactcactcagcgcgcccgggggtctgaggtcgccgctacggcgcctcgccccgggcagcagcaaccagcacgcaggcacccctggaacaggcgggactgcctt

SEQ ID NO: 375535 - DNA, 122 bp, Homo sapiens
atggtgagggtgtcaattctaaactccagcacccatgtgtaaaggagtttctccctgtcccgtccttttctgaatgtatgtttgtgtggagggggttaggaagagggggtgtcatgcattat

SEQ ID NO: 375536 - DNA, 122 bp, Homo sapiens
ctccgcaccagtgcgtggaggtgtcaggctcccgctgcgggaggcgggagatttaaaccgcgcgacctggcgtccgcgttcgcccccctcgggcgccggcctgaccccgccaccggcccgac

SEQ ID NO: 375537 - DNA, 122 bp, Homo sapiens
ccgcggggctgggctaggcggccgctctccccgcccccccgcggcaccccgggtggtgagcgccgcgcgagcccggagcccagacggaccccagccccacaagcccaggaacaggagcggcg

SEQ ID NO: 375538 - DNA, 122 bp, Homo sapiens
agacgccacacaaaatgggggtaaccgcgagaacaaagcagggtacccaacggggtgtggcgggacacctgggcgcacgccgccagcgcccgggagagcgaaggcggggagagaggaaccac

SEQ ID NO: 375539 - DNA, 122 bp, Homo sapiens
ggaacttgaggggatgggattcactctaaggagtcctgggcggtcggagctttcccctcgcgtgacccagcctaagggggaagtggagaaaaacagctcgacagatttgttgcttaaattca

SEQ ID NO: 375540 - DNA, 122 bp, Homo sapiens
ggcaattagcgacgcgctcccccgcggcggtcgccccggcaacccagtgctgtaggttgccgtagaaaccgtggctctcctgcgctgaggctcctcgcctgagaggataaactgcacgcgcc

SEQ ID NO: 375541 - DNA, 122 bp, Homo sapiens
ctggtcctgcctgttccgtgccttctcccgcaaggcttcttcaacagcacaccgcgaaaacgtgcaggcatcgcccccagcacaagggtcgctgctagggaagctgcccttcgacagggcgg

SEQ ID NO: 375542 - DNA, 122 bp, Homo sapiens
ggacccccacccctccgcactgtgaaagactaactcctgcaactggaaagcgggggcgcccgccgacgaggaggccaccgtgccaagccggcagaggtcatgccaggcgccaagggccatgt

SEQ ID NO: 375543 - DNA, 122 bp, Homo sapiens
cctgcccagctcctcctggcctccctgcctccggtcttgcccagctcctcctggccgtgccgcccagagagtcgtacttccacacagctgggcctcaccctccggcctggctccactgcctg

SEQ ID NO: 375544 - DNA, 122 bp, Homo sapiens
tgcgagttgttagagccctttgaggaggtaatccaggaatagctattaaaattgaaaacgcgtgtgacctttgacccagcaatctttcctctcggaatcttccagaagtaaaaggaacagta

SEQ ID NO: 375545 - DNA, 122 bp, Homo sapiens
gcatacccacgatggaagtgctaacctttacgtcccccaacagacggtcttccaaggtcccgtgtgggtacctggtgcctgcaaccgtgcagctctgcaagccagactgggacagcactttg

SEQ ID NO: 375546 - DNA, 122 bp, Homo sapiens
tagcggtcgcttggcgggtgggtccgcaggcctcgccgggagccgggcctgggtctggggcgctggcaggccggccgggaggcgcgccgggcgggaacgcgcagctctggcgggaagtgcgt

SEQ ID NO: 375547 - DNA, 122 bp, Homo sapiens
ctggtgacccccagttccctttaaatcagcgacatgtcattacaaggcggaagtcctgcccgagaggacagtccccaggccttgctaagcatgcgtggtatcaagaggtgcattgaggcgct

SEQ ID NO: 375548 - DNA, 122 bp, Homo sapiens
aaagaaagggtgatattactttcgacatcctggaatcttacaccccactgtgacatggttcgtaatttccaggaaagcagagggtaatattactccccatattgcaaggagtgtacacccca

SEQ ID NO: 375549 - DNA, 122 bp, Homo sapiens
gaacttggccaaggtcagggagctattgagtggcagaactggaatttaaccaagttccgtcggcatccaaagccctatgctcataatcacagcttattttctgcatctatgagacctccact

SEQ ID NO: 375550 - DNA, 122 bp, Homo sapiens
cccagaatccactgggcccctccccatgctgtcaccggagatgccaaggcccagagaacacgaggactcccaagattgaacatcagggctgccccgggcggtgcaagagcaagttgcccacc

SEQ ID NO: 375551 - DNA, 122 bp, Homo sapiens
tcctgcccccaacacagatagcgcccctgttgttggtaatgtgttggtatagcaacactgcgtgaaaagtgatgaaaagtgaaataacattcctggagccagttgctcactcttgccaaagt

SEQ ID NO: 375552 - DNA, 122 bp, Homo sapiens
tattcctccgactcactgctggaggctagatcattcctcattttcatgatttcctatccacgctgagaagctcttcaactccagcctgcccaccccgacgtgccatcgaccaggaagcaccg

SEQ ID NO: 375553 - DNA, 122 bp, Homo sapiens
cgtgtgcctgttctgcagctcagtcaagtacagccgccctcggaaagtgcaaagcagccacgagacagatcgggctttgttgctaatttcccagggtgaaaatttacaagcctgcgagtgca

SEQ ID NO: 375554 - DNA, 122 bp, Homo sapiens
cccaggtcgcattctatgggcaggcaccaaggccaattgcgtttcccacaaagccccgcacggagcaggtgacacagtagatgcctaacgtgtgtccatgtaatgaaccaggggcttgtgta

SEQ ID NO: 375555 - DNA, 122 bp, Homo sapiens
gcgggagaagcagcgcgagcagatggagcagatgaagcagcgcatcgcggaggtgcgagccggggagcctcggagcatgcgcgctgcccaggtcccctggcggccccgcgccacgctccggc

SEQ ID NO: 375556 - DNA, 122 bp, Homo sapiens
caacaggagagaggatggcagagcagcaaaaatggtggcctgcctgcatcctctaggagccgtggcccagggaagtggagagttgccccccacctaagagttaggcggggctggctgcgcta

SEQ ID NO: 375557 - DNA, 122 bp, Homo sapiens
ggaggcccgggaggtggctgaggggtccaggcggcgggacgactctggccttttgaagaccggggtgggtgctctctgtaagtccggggcggaggccacgcggccctggcgagggggccccc

SEQ ID NO: 375558 - DNA, 122 bp, Homo sapiens
attgaaggtaagaggacaggacacatccaggacagagatcaaacaggctcagtttcaccacgctgtgtggcacagggagacaggtctgagctgatgtcatcctgtgctgtgtggccaggcag

SEQ ID NO: 375559 - DNA, 122 bp, Homo sapiens
aggtgggctgcaatgggccccgggcgtgctgggtgtgcctggggggacctgggcagacctcgggttggtactggcagccgtcatacctgttcccaggccttccattccagggatgtcgtccc

SEQ ID NO: 375560 - DNA, 122 bp, Homo sapiens
gttaagtaaaaagtacagttttttaaatggtcccagtccctacccactatgctacgcaaacgagaaaccccggtcatttagctctaccctccccgctacccccagtgcaggtcccatctcaa

SEQ ID NO: 375561 - DNA, 122 bp, Homo sapiens
ggtgaaaccaacgaagtcaggaagcctaaagacatatatgtacagatatctaaccctttacgctaattatttagatttttaataaatctatcttaatgtttaggtatgaagacgggaggaac

SEQ ID NO: 375562 - DNA, 122 bp, Homo sapiens
ccctcggagccgcgcaaagcaggggccttcagtgggtgccgttcaccttccagcctaatccgtgagaaagcgagtgaaagcgcctcccattatcccagccccaggaccatctgacgatggga

SEQ ID NO: 375563 - DNA, 122 bp, Homo sapiens
cccgcagaccacgaggtgggggccgctggggagggccgagctgggggcagctcgccaccccggctcctagcgagctgccggcgaccttcgcggtcctctggtccaggtcccggcttcccggg

SEQ ID NO: 375564 - DNA, 122 bp, Homo sapiens
cgcggcaacgatctctgggagtgatcgaggcattcgggctgccccgtgcctcccgggcagcgatctaacgataaaacctgacagtgtcctggggaaaaccccacatccaccgctagcgctac

SEQ ID NO: 375565 - DNA, 122 bp, Homo sapiens
tggcacgtaccagtccactttctgtctctctgaatctgacggctctaggtgccttgtttacggaatcccgcagggtgtgccctgttgtgactggcttatttcactcagcataatgacctcgg

SEQ ID NO: 375566 - DNA, 122 bp, Homo sapiens
atcagcaagaagcaatgtctgattttgataccacccatttgctatgaaaatataagaaggcgtcatcttcaaagcaacactccagttgggcttcttcatcgtttagctgcatgatttcttct

SEQ ID NO: 375567 - DNA, 122 bp, Homo sapiens
cagtctcctcattgcccagctgcggaccctaagctgagccataaccgtcctaccaacccacgtcagcagaagagcccagtgggagggcgtgtgttcacttctgctcctctgggcaaagacgc

SEQ ID NO: 375568 - DNA, 122 bp, Homo sapiens
ccggctgcgaaggttctgctcggtacacgcgatagacacctgcatgctggctggccgaggcgggggagggggctccgaggggacgggaggggggagcagggaagcccgagggctgacgaccg

SEQ ID NO: 375569 - DNA, 122 bp, Homo sapiens
gccggggcatccacagacctggtgtgttccctctgtgcacacttgtgactcacacccctgcgagctcggataacacgaagacacacctgttgcagagcgttaaagctggaaggtggacaaac

SEQ ID NO: 375570 - DNA, 122 bp, Homo sapiens
atgtggcctctgtgcctttccactcagaggcagcacgtgtttttgtggctctcagagatgcggaagtctgcaggtgcaacatcatcttaccacgcctcgtaggagctggactgccgcaggac

SEQ ID NO: 375571 - DNA, 122 bp, Homo sapiens
gggcgccagtgcctcaggcttggggcggctgttacttgggaatagctttgtgggtcactgcgggtgaatctgcacacagaagatgtggctcaaaccgaatgtgtatcgcatttgaaatgttt

SEQ ID NO: 375572 - DNA, 122 bp, Homo sapiens
tgccaacacacagacttcaatggacagcaggcaaaatggggaggcatccccagagcaagccgattctctacacactgccttcccttcctgtaagactcatcaaaaaggcaccccaaccttgc

SEQ ID NO: 375573 - DNA, 122 bp, Homo sapiens
ccttggagggggggaaatggttctcatatgcagaaagtttacctttatcctgcttttgtgcgcagctcacccctgccctgcaaccccccactcccagcccaggggactcagtaaacaagcag

SEQ ID NO: 375574 - DNA, 122 bp, Homo sapiens
cgggaggggacccgcggctgaggggacaggtcctgcgtgcgggctggggagacaggcgggcgagggtaggggtgcacaaggctgtgtggtttgtgggctgttgtgcagggtgggtccaagca

SEQ ID NO: 375575 - DNA, 122 bp, Homo sapiens
atgccttcctttcagttgcttctgcacacaaggcaggctccacgtatgggcagcaatccacgctgtccaatttagtggcccaagaaagcccctgtccctaacatgcttctccctgaactctc

SEQ ID NO: 375576 - DNA, 122 bp, Homo sapiens
attgaccaggcggctgagtttcgcggggtctgcgggtttagggcgccgacgctctgcaaacggcagcggaggccttaacgcgtcgcggccgggagaatcggagcgagccaggcttgagggcg

SEQ ID NO: 375577 - DNA, 122 bp, Homo sapiens
tgcctaaatctgtctccacgtggggccggtcgataaaacaacacttcccagaatacgctgcgatccattcgcggtctgcacccggaaagtacacctcccaggggtctgtgcgcgcctccagg

SEQ ID NO: 375578 - DNA, 122 bp, Homo sapiens
gtgggacggggtcctgcagcgggtccttccggcgggtgacattcagccggcggttcggggcgacggactctccattccagaaccatggcccaatttgtccgtaaccttgtggagaagacccc

SEQ ID NO: 375579 - DNA, 122 bp, Homo sapiens
aaggtcaatttctgcttaaatttttagactacgtagcatcttaaatccatttatccatttcgtatttagcaatattcattttatgtaattcatgtttaagaaaaccaaaatctgatgcctac

SEQ ID NO: 375580 - DNA, 122 bp, Homo sapiens
tgctcctctcgtgttgatcctttcatttcctcctgccggggacagcggttctaagtttcgcgctactcttttggactaatcgtttacaacaggcctgagcactcagcccctctctcactttt

SEQ ID NO: 375581 - DNA, 122 bp, Homo sapiens
ggttttatttatggaagggcaattgggattcacacccagctaaccctgaacagtccctcccgagcccaggacgcacttacaaaggggcgcttgtgtaaaattccccatcagacacactaatt

SEQ ID NO: 375582 - DNA, 122 bp, Homo sapiens
acagggctgaagcatcccttagtggctattcagggaaccattatcctgaagatctaaacacggtatgattctctcagaacgatgtcgggctggctagcttcacacgtcctctccacacctac

SEQ ID NO: 375583 - DNA, 122 bp, Homo sapiens
ctccgcgctcccagcctacagggcccgggaatcaacacagcggttttccctgttcccttccgccctgaatggcccttggggacacaaccgcctggtaacggatttctcggcgctactggcgg

SEQ ID NO: 375584 - DNA, 122 bp, Homo sapiens
ttcccacggccccgcccattttacagattaggaacctgagctggaaaaggccaggctgtccggccagtctgcagaggacctggtgcagccggggctgcggtgcggagggccgggtggggtta

SEQ ID NO: 375585 - DNA, 122 bp, Homo sapiens
catttcggcatctgtgatctacaggccactgggatttccacgctttaggttgagtcgctgcgccccctcttgaccactaaaggatatgacaatcttcgaccgaggggataaagacaccgtgc

SEQ ID NO: 375586 - DNA, 122 bp, Homo sapiens
ctcatccggcagaactgtcgccttgcttctctgaagcggtgaatgccctggggctggggacgcacaggctcgctggcccacaaccaaagccgcttcctctggaggaggaagtccaggggtgc

SEQ ID NO: 375587 - DNA, 122 bp, Homo sapiens
tttaaaatccatgcccttaccacctgagttcattccttttaattgttttgcatctatattcgaggcagcctccctccctcaaatggccactctctcctacctctgagtcttccctctgatca

SEQ ID NO: 375588 - DNA, 122 bp, Homo sapiens
atcgcggccggaccggcgcgcgcacgcgcgggggcttgtcgaggaggccgcgcccgcgcgcgggaaaatcggcccctggtgaccgttacccattcggtgtccacgcgagacgccggaagggg

SEQ ID NO: 375589 - DNA, 122 bp, Homo sapiens
ccaaaggctggaattaggggctagaagtctggcacccaccgcctggccaggtgttcgggacgcgaccaggtgggcggtcgccccgccccgggagcgcggcttaatagctgagagcccggggg

SEQ ID NO: 375590 - DNA, 122 bp, Homo sapiens
cacgccgcactgaggatgaacaagccaggcgtagcaatggagaagttaatgtgaataagacgaaacgcacaacaggaagttgttcccagttgctttttaggagagatattatacatactcag

SEQ ID NO: 375591 - DNA, 122 bp, Homo sapiens
cggttcacctttaacacctctccccactgcgaaggacaaaggctttctcactatcccgtccgtatgttttgttttattctgttaaaagacgttatttctgtgttgttcctaaagcagcagcc

SEQ ID NO: 375592 - DNA, 122 bp, Homo sapiens
accttccactcggaatgctccaagcagggcactcccggggctttgtttctatcactaggacgcgtccccacgcccaggctgtccctgagtccctgccacaggcgcagatgttggcgggcgcc

SEQ ID NO: 375593 - DNA, 122 bp, Homo sapiens
tactcttccttaggtcccttttccaactcagtctcgttctcacatttttagaaaggacaacgggatctttaaattctctcggtttgtgttgggaaaggacccaaattagtgtgcttcctcat

SEQ ID NO: 375594 - DNA, 122 bp, Homo sapiens
gtgccaatcactggtgtaaggttttgtagggaatgaaatgtcacccccgatgactgacgacgattccttcagctcagctgtggtcagtgtcctccagggacggtgagaaggaatgttcagag

SEQ ID NO: 375595 - DNA, 122 bp, Homo sapiens
aaaggatgagccttccttgggccttcggatctggtggggctgccactttgggaagggccccgggcttcggaagaaagcaaaactagccttgtggcgaagaaggagcccagctggccccaggc

SEQ ID NO: 375596 - DNA, 122 bp, Homo sapiens
ggaatttcctgtgtgaggaaaacgtggccacagggttgtgctgtacccacccttccccggcgagatggccctcggcctgtgccgctgcttccaccctcgccactccatggcagcttttggtc

SEQ ID NO: 375597 - DNA, 122 bp, Homo sapiens
caagcctcccccgggaccctggggcatacctgagggcccaggggccatgcctgcctggggcgggtgtgaggcctgagattcccgtcccacatttctgggcaggctgtgggtggcctgtccta

SEQ ID NO: 375598 - DNA, 122 bp, Homo sapiens
aaataaaggtctgaggatgaagccagctcacttgtaatcctgttaaagaatgagagtcaccgtttaggtccaatgtactgggaacatttgctagctcagaatgcaatattggtagaatttgc

SEQ ID NO: 375599 - DNA, 122 bp, Homo sapiens
gctttgggctccaatctgcagccacttctttgatacgactttgggataggtggactcacccgaagtattgttttacatgtactatttgcctcaatttccctgtgatggttttgtccatcacc

SEQ ID NO: 375600 - DNA, 122 bp, Homo sapiens
tctttgagagcatttgaggttccagaacacctccattcctgaggggagtctcttgagcagcgatttggggctgcgccagttgcttggtccttcttcctttggaccaaaggtacagaagccca

SEQ ID NO: 375601 - DNA, 122 bp, Homo sapiens
ggggctctgggaaagggggttagggatgaggctcagcctctcatctgcccagctggtccccgccacctcttccactctcagctggactcccctgccaggggtccagatcctgccagagtagt

SEQ ID NO: 375602 - DNA, 122 bp, Homo sapiens
agatttcttctggcaatgacaagataaatgcagtctgaccacagtgctgatcaacttctacgcaaggaggaggagaagaattccttaacacataggtctgtagcagtaagcagatagaatcc

SEQ ID NO: 375603 - DNA, 122 bp, Homo sapiens
gaactagcgctatgatggcctgttgtgcggggacaggcgggttgtggtgaaagctgcagtcgtgaaaaaggctattgtttaatctaccccgtccctcgctgaagctatggcaacaaattccg

SEQ ID NO: 375604 - DNA, 122 bp, Homo sapiens
gttttaaaggatacagatgaagagatacacagggtgaggtatgaaggaaagggcgtggagcgtccacggcttctgtgccctgccaccctccaggaacctgcacatgttcagctatctagaag

SEQ ID NO: 375605 - DNA, 122 bp, Homo sapiens
gtgatgcccagcagcctccaggtgcatctaggagggaggggttggacagcttccccctcccgtttctgagctgccctgagagccccaacccacgtcactggcgtccaggagcctgtctggac

SEQ ID NO: 375606 - DNA, 122 bp, Homo sapiens
tggggtggctctgagtccaagctggaggggactttgtggtcattgggatttgtagaaaaccggcccagaggatgggtcctcaggaccacacagggaggctgccctaacacccctgcccctgc

SEQ ID NO: 375607 - DNA, 122 bp, Homo sapiens
ccgcagggtagaaaatgatgtgggttccactcagcgagaggacctaccatatcgaaaacacgtttaggttctctgagtatgcatgcgaagccgccatgtacactgcgtttcttgctccaggt

SEQ ID NO: 375608 - DNA, 122 bp, Homo sapiens
catttgctagttttgtcttttcattgctctgtgcctcggtttctctaggcaataaagaaccgaataatagtatccacctcctaggattgttctgagtattcaaggagaaaatatatacaagg

SEQ ID NO: 375609 - DNA, 122 bp, Homo sapiens
tcacaaggtagattcaaatgccgttcactcacagcatataaaagaaactgctcggctgggcgtggtggctcatgcctgtaatccctgcattttgggaggttaaggcaggcagatcacgaggt

SEQ ID NO: 375610 - DNA, 122 bp, Homo sapiens
tcctgttatttctgcacatttgaccatttgcttcagcaaagtgacacattttcagtgtcccgtgcaaactaagctccactccctattctaggcaaaactttctttttcatgccacccacctg

SEQ ID NO: 375611 - DNA, 122 bp, Homo sapiens
cctgaccataaccaccagtaaagtcaatggccaatctgcctttagttggtccatttgatccgtataatcatgtaaattaatgctacttttctccttcgtgtaataacagaacactgctgatc

SEQ ID NO: 375612 - DNA, 122 bp, Homo sapiens
actcaccactactagggtcctgtggggtgcgggggtcccgaggaaaagaggtgaaaaggacgacgtggagctggggatagtgttgatggaaataatgcttccaggcaaccacaagagctggc

SEQ ID NO: 375613 - DNA, 122 bp, Homo sapiens
tctgtctccctctacccggcgcggtcacgtgacacgcctgactgccctgtggctgcgacccggacctggaatttctagagctcacggttcagggcaagcctggggcatgtagcagggcagag

SEQ ID NO: 375614 - DNA, 122 bp, Homo sapiens
acctcttcatttctccacatattttttcttcagagatggcctctcctttccaggttaccccgcttacctcaggcttgggctgttttctcctcttggaggtcaccacatcactctaattttct

SEQ ID NO: 375615 - DNA, 122 bp, Homo sapiens
ttgcagctcctgcttgcaggctgtccgattctttccttaacttgagttccctgagcatagcgactgtgtcctattctttagggcccccaggccctggcttagggtggggacctgggacttgt

SEQ ID NO: 375616 - DNA, 122 bp, Homo sapiens
gaagatggagctaaacttccccaggagatgctattgcctcagagaatcaaaacctgcccccgcctggctttcctctccaaccagtcactgtcccccagcttggtccctccgtaaacagagcc

SEQ ID NO: 375617 - DNA, 122 bp, Homo sapiens
tcttactggcccagacccagtggggcaggggaacagaggtgtaggggacattcctgtgcacgagctggcagcttcactcaccctcctggagcagcaggagaagaagcagccaaggaaaggca

SEQ ID NO: 375618 - DNA, 122 bp, Homo sapiens
ggcagacacaatcgtgctgcagccctggcctgtgtttttctttcccacaaagaccaacaccggtgctgctgacatcatgacaggtttgatcatttttattttgcggtgagcgtggtgtcatg

SEQ ID NO: 375619 - DNA, 122 bp, Homo sapiens
acgtagatgctgtcccagccacccacactcgctgccgggggaagaaccaggtaaggttcccgcacatcgccctccatgaagcaggagcaggagcctcactgcggggctgggagctgccttcc

SEQ ID NO: 375620 - DNA, 122 bp, Homo sapiens
ctcaccggatgttggggcttcctgcaatgaatagttctctgactcctgctgccttcatcacggtgctgttgttcataaaaggagtcaggcagctctgccgggtccctggctcagcactgtgg

SEQ ID NO: 375621 - DNA, 122 bp, Homo sapiens
cctctgcggcgtgtcatgggcccgcgccgccggagccgaaagcccgaggccccgaggaggcgcagcccgagcccgaccccgacccccggcccctcccggcggggcccctccttaggtaaccg

SEQ ID NO: 375622 - DNA, 122 bp, Homo sapiens
atgtctagtaaaccttagaaattcctccaatcacagcacccatttgacataggtttgtaacgctgatcttatataccttgtgtgtatcttccatgaactcaatgtcagtacttttcatgtga

SEQ ID NO: 375623 - DNA, 122 bp, Homo sapiens
aactgtcggacatagattactggctacaaatagttctactttttttttgagacagggtctcgttctgtggaaccaggctgaggtgcagtggtgcgatcacagctcattgaggcctcgacctc

SEQ ID NO: 375624 - DNA, 122 bp, Homo sapiens
acctgccagaaccgacccggaaaccaaagcgtgacagccaggggttgctagagcggccggcgcggcgcagcgaaccatcgagtttagccaggcgcggctagaagggcagggaggcggtggga

SEQ ID NO: 375625 - DNA, 122 bp, Homo sapiens
atgtcccggatggtctccacgccgtggctgtcactcagcatcttctcattgttcctgatgcggaaacatttcagagcctccaaggacagagaaaatatatagggcatccaggtcctgtccat

SEQ ID NO: 375626 - DNA, 122 bp, Homo sapiens
ggatttctctgagcagggcccgttgcgaaccccctttatgtgaaatgcagcatttcagcgcggagcgcctccgggagccttgccgcctgcctttcccggctgagtccctttggtgcagagcg

SEQ ID NO: 375627 - DNA, 122 bp, Homo sapiens
cagccagcctagggacccctgctcttttgctccgacctgctgacctgcagtgattctaaacgaagtgactctcataggctgtaggggcaaggagaccttccagtgatcaagatgtcagcatc

SEQ ID NO: 375628 - DNA, 122 bp, Homo sapiens
ctgcttcctcatctataaagtggattcatagcctctgccatacaggggtgtcaggaggatcgcaaaacacccaacacagctcccagcccttagtcaaaataacagtaataagaatggcttac

SEQ ID NO: 375629 - DNA, 122 bp, Homo sapiens
aacagaggaggaggaaggcgggctcagctcctgccacccagcagcgggggagatgcagcccgggactaggctgggccatggggacagatccaggccccgccccctgaccttgttctctgccc

SEQ ID NO: 375630 - DNA, 122 bp, Homo sapiens
ggcagtggttcctcccctcacgtggccccagcgtcccagaatgtcaccagggtcacaggacgggagagggccttggcaaggcctctgaagattacaaaatgaccctgaactcctcccatgta

SEQ ID NO: 375631 - DNA, 122 bp, Homo sapiens
tttatcctaaaccttgtcagcaacagaagttaccccccagcaatcatacaaacctaataacggcttccctggcttaatttgatctgctccaatcacaaattccaatccacatactttcttct

SEQ ID NO: 375632 - DNA, 122 bp, Homo sapiens
tccgcattaagatatgcaaagccgaggcgcccgcgcagccgccttcgcctctcggcccggcgcgtaattggtgtcaactgtttgattgcgataattgctactgtctggggaggtggcttcca

SEQ ID NO: 375633 - DNA, 122 bp, Homo sapiens
aaaattcatgtctccaccctacaataagaaagctaataggtgacagagaaaggcaatccccgcccaggctttaacaggatctttaccaagtggtctcacatcactgttacgctacgaaggtg

SEQ ID NO: 375634 - DNA, 122 bp, Homo sapiens
caggatggcgccgatggcagacggatgaaattggagctctcagagagtgctactcaccggcgcggaaagatggcggaaagaggacgggaggggagagcgcacggagttatgggaagcgggag

SEQ ID NO: 375635 - DNA, 122 bp, Homo sapiens
gcgggaggtggggccggggggaatcactaatcactcttagtttctcagattacattcattcgaagtatacctatgtagtgtctgacaagaaatgctggcctaattcttcaaggattgttaat

SEQ ID NO: 375636 - DNA, 122 bp, Homo sapiens
gtggaggcaggtgcacagcagctggaatctgcccccaggccctttcccgcttcccatcatcgggaacctcttccagttggaattgaagaatattcccaagtccttcacccgggtaagagaaa

SEQ ID NO: 375637 - DNA, 122 bp, Homo sapiens
atgtacgtctttgttttcaacatctttgcttctttttctttttctaatcttgtccacagccgaagtctttgcttaattcttacatgtagacaataagctatttcaaaaccaatagtatttaa

SEQ ID NO: 375638 - DNA, 122 bp, Homo sapiens
ctccctctgtatgtgcccaaattttctcttttttataaggactccaatcataaggtattacgatctacctaaatgatcccattttaacttaagtatctctataaggaccctatttccaagta

SEQ ID NO: 375639 - DNA, 122 bp, Homo sapiens
agagacggctcctgtaatggcgcctgcgtcagacactaacatggcggacatagtcgtgcgcggcgcaaacgtcagcacctctaccccagccgctcagaaacagcagaggagagcagggccgt

SEQ ID NO: 375640 - DNA, 122 bp, Homo sapiens
ggcctactcctcacagcacagtgtctagaggcaaactctacagcagtctataaatactctcgtacacgtgcccagcgagcggcacgtgtagaggcctactcctcacagcacagtgtctagag

SEQ ID NO: 375641 - DNA, 122 bp, Homo sapiens
gttctaattggaaacgtttcaactgtttatgttacaagaagtgtcagggtcatttgctaccggagagctgacttttcattggctgcttaattgagtacctcggagtccaccccacgtgggag

SEQ ID NO: 375642 - DNA, 122 bp, Homo sapiens
cattaatacaggaggaaatacaaaggcccaaaccttcctcgtaccagatcttccatcatgcgacttttctaactttttcagtggcttctgtgactgtttaatgttatgggatgattatgctg

SEQ ID NO: 375643 - DNA, 122 bp, Homo sapiens
ggggcctttctgtcacatctgctcaatttttcttcaaatctaaaattgttctaaaaataacgtttactttaaaaataagtgttttttcaaaaacacttttttgtgtccttatcttctgctcc

SEQ ID NO: 375644 - DNA, 122 bp, Homo sapiens
gagccaagcgcagagaggggcaggcggtgccggtggaggatgcgcgaggccctcccgccacgcgcatccacgggggccgcagggtactcacagttgaagtcgggcatcttaggcaggatcat

SEQ ID NO: 375645 - DNA, 122 bp, Homo sapiens
tgtcagcatgacgatcaccacgcagccgctctcccacaccatctgcggacaaagaaggcccgtggccgcggtgtgactgtctcatcaccgcgtgacatgtgtaattactgcactcggaagca

SEQ ID NO: 375646 - DNA, 122 bp, Homo sapiens
atgaagtgtggacgaagctcatgtccaatgaggatgcgggcttcggatacttggccttctcgccgggaaacaagtgctttgggatctgccaaacacttcccttagttccagcctcccgcacg

SEQ ID NO: 375647 - DNA, 122 bp, Homo sapiens
tcttattaaaatatgtagtttttaagactttttttctgacagtattatgtaattttttagcgtgggtagatgggagtgtcgcttgtatgttatcgtacagctgacatgtatttttgtctatt

SEQ ID NO: 375648 - DNA, 122 bp, Homo sapiens
ccggggacgccgagcgactgcggggtttccctcagcgtcctgctatccggctgcccgccgcgctccttggtagtgtccgtgggcgcgcaggccttgaagaacctcctcgtggcgggaccccg

SEQ ID NO: 375649 - DNA, 122 bp, Homo sapiens
ctgtgggacaggctgcttccttctcatggccttcagatgcccttctttacctgatcccaacgtacccccagttctccactctgagatcacgagccacaccccataggcctccatacttttgc

SEQ ID NO: 375650 - DNA, 122 bp, Homo sapiens
aatgaacttccaacataacagacacaccatcaaaacagaattttcattttaagccaccagcgtgactagtttcatactcagcccaaacagcactactccccagctctctctgctaaaaatta

SEQ ID NO: 375651 - DNA, 122 bp, Homo sapiens
acactcatagacattacagggcaaagaaaagtctgcaataaccacgctgtgtctgaacgtcgccttattgctcagtgtgacccaaatgtaaccagaccaaatccatcagcagctgaatgtaa

SEQ ID NO: 375652 - DNA, 122 bp, Homo sapiens
ccacccaggcactagggcaactgctcagccccatcgcagcaagggcccgaggaacgagcacgtcagctgtctccagggcctttctcatcatctcccgtgcctgccgtgctgtctcttaccaa

SEQ ID NO: 375653 - DNA, 122 bp, Homo sapiens
acatttcagttcacaataaccctattctttcagttaccaaggcagaaatgaaataatcttcgtctcttcctttcctagcccacatttaatcagttagtaaacccttcaaaatacagtcatgc

SEQ ID NO: 375654 - DNA, 122 bp, Homo sapiens
ttttaaaatgttgactacattctggggaaagaaggctcagcagccacctgcttttttgcccgggtgggtggtccggccccgagccctcctgactctctcgccaatgcccagaggcgccgcag

SEQ ID NO: 375655 - DNA, 122 bp, Homo sapiens
aggcaacagttgataaaggaaactcagctaagaatagcacagctaaccatctcgtctttccgcctctccttcctcccagaccaaaccaaccaccagagttactgaatggataactcacacct

SEQ ID NO: 375656 - DNA, 122 bp, Homo sapiens
gggggctggaaacgggcttacatcactgtcagggcaggagaggaaaaattgcaaagtaaacggcaagatgttgccgcgatagcgagcaggaaaatctgcagtgcttaggagaatgcgggacc

SEQ ID NO: 375657 - DNA, 122 bp, Homo sapiens
gtagagacttggtcgggaggcgccggcccagcgaggccgctgggactgtgcactgaggggcgctgaccgttggacgcgcgctccccgcagaccctcgctgaaggagcagggggcggcgcgcg

SEQ ID NO: 375658 - DNA, 122 bp, Homo sapiens
gcaccgtcccgccgggatgcgggacgtgttgagctactcgttgccctcttggttccgagccggggtccttgctttttggctggtgtgttggggggagtgtctgcgcctccccgcccacaggg

SEQ ID NO: 375659 - DNA, 122 bp, Homo sapiens
ttacccttgtggtagtgggcgcatggacgtttacagttgggcggggcaggatttaaattccgccagtggtggaccagtattggtgataggagagatctgggaagaattattaagctgtcgct

SEQ ID NO: 375660 - DNA, 122 bp, Homo sapiens
ggacttaactcctgtctgcttctcccaaaacaccaagaaagatgctgaacacagcaggctcgagataaacactcgtaagaaagcgtttctctgcgataattacatcaaattttgatctaaac

SEQ ID NO: 375661 - DNA, 122 bp, Homo sapiens
aaccactcgcagcgctccagatgctccatgccggatctcgtcagccaccgtcctcctctccgtgccctctcggccaccgtatcgcccttcgcccggacctgcgcctccacctcccttcgagc

SEQ ID NO: 375662 - DNA, 122 bp, Homo sapiens
tcctggtcaaacaaccggtcatccttactaccttcggagtttccttgtggtgctgaaaaccgtacttgagaatgaagatgatatgttgctctttgatgagcaggagaagggaattgtaacta

SEQ ID NO: 375663 - DNA, 122 bp, Homo sapiens
tttggtcggtaatggtctggttgttgtagttgaagtcctccaggcgcacaccagaacggccgcctcctccagatgtcttgttcagggccagtgccaaggcccagatggcatcataggccagc

SEQ ID NO: 375664 - DNA, 122 bp, Homo sapiens
cttttcactctaatctcctacccgtctgagcaattcagcaggagataggggcattaaggccgtattattccaaacaacatttagctgaatggtagctgaagattgtgacagcaaaagacaaa

SEQ ID NO: 375665 - DNA, 122 bp, Homo sapiens
tcaaagaggagtagtctgaaagcctgaactccctaccaccctgagggggtgcgggtgcggcggggccggctgggggcttcccccaccccctgctcctgcgccctccccccgcttccccctcc

SEQ ID NO: 375666 - DNA, 122 bp, Homo sapiens
cagtccctacccggactctggttcctatgctttattatgtgcagcaagtcactgaaactgcgagatttcttcatgtataaaatcagaatgataatatgtttctcaaaagtttgtttcaagaa

SEQ ID NO: 375667 - DNA, 122 bp, Homo sapiens
cgtagtagaggccggggtggccgagtaggtgtggacggtgcggaagggtgaggcgtgtggcgagcagaagggaaaagagatctctggggagtttgggttcccacttgacgttgggggacaca

SEQ ID NO: 375668 - DNA, 122 bp, Homo sapiens
gatggagaactgatcctccatgacttcagtgatgaataagcctccacgtctcccccactgcgggtgtggcaacaaagaatccccacagcaaaattaggtttcacattgtgtgtgtggttttt

SEQ ID NO: 375669 - DNA, 122 bp, Homo sapiens
cccactcggtggggccaggccacgccagggagtttatagggactccacggcgcggtggctcgcctgggctgagaggctgactaacgcgctgacacggcggcacggggctttacaggccacgg

SEQ ID NO: 375670 - DNA, 122 bp, Homo sapiens
gtagccgggggagggggactggcgcggtcagagcctgcgaggaggtgcggggcgccggggcgtaggggagcgcgccgggccctgcccgagatcagataacagccggcgggggagggggtggg

SEQ ID NO: 375671 - DNA, 122 bp, Homo sapiens
agccggtacttgaggttcagagtacccgagatgagggggctacccagagagggagggtcccggagtctgcatggtgattccctttagacattgtctgaagactaggctgggcaaggtggctc

SEQ ID NO: 375672 - DNA, 122 bp, Homo sapiens
aggaggagcggaaggaagaccatgacctgcctccagaggccccgcagacccaccgggcctcggagccgccgcctcccaactcctcgtccagcgtgcacccggggcccctggcctcgatgccc

SEQ ID NO: 375673 - DNA, 122 bp, Homo sapiens
acgccgccgcggcgagccaggcggcggatagcgggcttggtgattccttggatattgtcacgcaataccttacggtgacgcttggcgccacccttacctagaccctttccgcccttaccgcg

SEQ ID NO: 375674 - DNA, 122 bp, Homo sapiens
cagcccgcacccttctggcggctcccgcgaggccaactcagactctcagttccagttgcccgcgagcctcagacacgcagaagctaaagcgccctcatctaattatttgcagaactattatc

SEQ ID NO: 375675 - DNA, 122 bp, Homo sapiens
gagagagcgaaggattttgtgattttgcctttggagtaaacgtgcccataagcccctctgcgctctttggaaacaagaacccagacgcagaccctgggcgctgtacccgtctgttggccgcg

SEQ ID NO: 375676 - DNA, 122 bp, Homo sapiens
gccctggagacaaaatgcctggaaacgttccttttcctgtggccctagagccggtgtccacggtgggggctctctcacggtttctgagcccacagtacaatctgtgatgacacacagcttgt

SEQ ID NO: 375677 - DNA, 122 bp, Homo sapiens
ctcttactgcatttccacatgcctagaaaacctctcctctacaatgttccagtgagactccgatgtcagctttcataaaataagttgttcttaccaactattccacattatttttaaaactt

SEQ ID NO: 375678 - DNA, 122 bp, Homo sapiens
cggagctcctgcaaggactcccccaaatgtgtgaccaggattactgtcccattctgagaccgtcagagacatctctgccgggacacatgccagtgattgaaaacacagcaagggccccacta

SEQ ID NO: 375679 - DNA, 122 bp, Homo sapiens
caggagaggtaactggggtcccgggcctagcgaggcggggcggggaggcgcaggtgtcaccgcgggcgcccagctgcttacgtcacaacccgcggaaggcgccgtgcgccggttgctataca

SEQ ID NO: 375680 - DNA, 122 bp, Homo sapiens
tctcactagatcacgaaacatagacacagacacacatacacacacaatgacacacacatccgtaagtggctaggaatgaggccccttcgtaaagcatccttattgtcctcatcctattttat

SEQ ID NO: 375681 - DNA, 122 bp, Homo sapiens
tctgcagttcaaagtgtagtcagcaaaaaaagcatacacgctatcgcactgggaggaaatcggtgtctttgaaatcaaataccctgccattggcatatccaggcttgaaactcagctgcagc

SEQ ID NO: 375682 - DNA, 122 bp, Homo sapiens
taatggcagcatcacccacctggtgatccgacccaacggccgagttgcgctcaggaccctcggggacacggggttcatgcctcccgacaagatcactcgatcctgagggctccggcctctcc

SEQ ID NO: 375683 - DNA, 122 bp, Homo sapiens
cccctcccccttgatgaggtcctgaccaaatgcaggaggagcaattccagcaccgaggggcgagcagagccgcctgttagcactcctgggagggcccggagtggtccctgaatgatggattc

SEQ ID NO: 375684 - DNA, 122 bp, Homo sapiens
aaagcctgaggatgcacttagtctggagcgacaacccaaggcaacgccggcagacagcaccgcctgcctcagagcagccgtgggtgtgtacccttgtgggcgcaaaaacccaagtacaacag

SEQ ID NO: 375685 - DNA, 122 bp, Homo sapiens
ccttcaggtctccacacctgagtctcctcacagctggtccctggactggaaaattgtcctcgccctccctcagagaacctggggtggagcagagctgcctgcaccagctgctgcctgtgtcc

SEQ ID NO: 375686 - DNA, 122 bp, Homo sapiens
gccaggcctgcggctgccgggaagccccctcgggagcgcgcacgggaagggctgtgggggcgctggccggctgcgacgtcagacccccgcccctcggcgcctgccggacccagctccattcc

SEQ ID NO: 375687 - DNA, 122 bp, Homo sapiens
aaaagcgggtgcaggatggggctgaagtggattctcctcgcggtgttggaatggacctgccgtgtcatgggaagcctgtctacgcacttatcctgcatgggattttcaagccgtttatacca

SEQ ID NO: 375688 - DNA, 122 bp, Homo sapiens
cgcggccagcagcagctggtagaaggcgcaccggatggcgtaggacatctgcatggctctcggggctcggggcgcgcagcaacgaccacccggccacagactacgccagcggccgcaagccc

SEQ ID NO: 375689 - DNA, 122 bp, Homo sapiens
tctgctttgcattttcgttagtaattacaaaggtctttttaaaccgtaaatgccttgagacggcatggaccctgtcttatccctgtagttccaggaccttgcacatgggagatgctcagtaa

SEQ ID NO: 375690 - DNA, 122 bp, Homo sapiens
ctgggagctggcaggtgaggacccaagagtgttttcagcaacctggctgacctggtcatccgtcagtcccaccttagcctaggcctctacacagcacagatcacagctcatcccattgtggc

SEQ ID NO: 375691 - DNA, 122 bp, Homo sapiens
acacactggaagcatccacagctgttttaaattggttttggtttctggaaatagcgcactcggtacggcagcatctctggcctccagccggggttaaccctgacctgaacgccctgtttagc

SEQ ID NO: 375692 - DNA, 122 bp, Homo sapiens
gtcacatctggttttctatcactttcagtctgaagtgtgttcttcccttggtcagagtcacgctgccaacttggtgccaggtttgactggcatggcaaactgctgacctcagaggctaacaa

SEQ ID NO: 375693 - DNA, 122 bp, Homo sapiens
ggagctgtctgagtcttttgtaaatgcccctcttgttagaacactcataagaccctttcccgtaggaggatcctcccttacccagagcaagagcacagcactccacggtttccctgctggag

SEQ ID NO: 375694 - DNA, 122 bp, Homo sapiens
gcgctggggtccgggctccgggctggccccgccgcctccgcgtgcccagagcgccggactcgctcagcagctgcagtgactgtgtgtctgtgtcatgtctgtgcagccgggggggaccgcga

SEQ ID NO: 375695 - DNA, 122 bp, Homo sapiens
atcatccagtccattagcctcctggaccagctggataaggacatcaataccttctctatgcgtgtcaggtaaagtgcaggggccacccataatactggagcctttggtctgtagttcagtta

SEQ ID NO: 375696 - DNA, 122 bp, Homo sapiens
gccgggaggcggggctgggctccagggggcgtggccgggctcatgggggcggggcctggacgcagtctttgctcagtcggcttcctgggttcctgcctccgccctccacccagctgggtccc

SEQ ID NO: 375697 - DNA, 122 bp, Homo sapiens
cacccatgaccctctgctgtctctccctgttcagctgttggccggccctgctacctgacgcgccagaagcacccagccctgcccagcaaccggccccagcagcaggtcctggtgctggcgga

SEQ ID NO: 375698 - DNA, 122 bp, Homo sapiens
cgccgcaacgcccagggtgtggggcggagtaagatgtgaaacctcttcagctcacggcaccgggctgcaaccgaggtctgaatgttgcgaaagcgccccagacgccgccgctgctttccggc

SEQ ID NO: 375699 - DNA, 122 bp, Homo sapiens
tgagaactgagtttttaaaaccacttacaatctggaacatttccttttattcctggtgaccggggaatgcagaggtgtggctgttatctctttctgactgctgcagcccacagggagagcta

SEQ ID NO: 375700 - DNA, 122 bp, Homo sapiens
gaagccagctcggcgtttcttctaattcagtagccctcaacctttagggagtcacagaaccgtggcaaaaccgaagaacgaaacgcgcgcccgcgcagtacagcggacgaactcggctttgc

SEQ ID NO: 375701 - DNA, 122 bp, Homo sapiens
aggttgcagtgagccaagatcacaccattgcacaccagcctgggagacagggcgagactccggctcagaaaaaaagaaggtgagctggtgagtggggtgagatatttttaggctaatatatt

SEQ ID NO: 375702 - DNA, 122 bp, Homo sapiens
atgtgttagtctttgcatttcattgagggctcctagccatgtgagctggaaaacattcttcgtgtgtgcgtgtgtgtgtgtgtgtgtgtgtgtgtgtgtgtgtgtgtgtgtgtaaaaagata

SEQ ID NO: 375703 - DNA, 122 bp, Homo sapiens
gatgaacatctcatcagataatttctaaacctacaaaatcatgggtctcagagcccactgcgaaactcctaatacacacacacacacacacacacacacacacacacacgggtggttagagt

SEQ ID NO: 375704 - DNA, 122 bp, Homo sapiens
attagcgggcagttggaaagcccgcgaaacgctttttccgcctgggaggccggacgatcgcgattgggcaggaggaagaggaggtgctccccatctgggcccccacctttttttcatgccaa

SEQ ID NO: 375705 - DNA, 122 bp, Homo sapiens
gaactgcacttgggtgggctgggggtgtcccccaaggttagccacaacagtagtggtggccgtgttggtggtgccagtctcgtgggtctcacagggtgggttggagcacaccaaggtgacag

SEQ ID NO: 375706 - DNA, 122 bp, Homo sapiens
caaacgtgccacagtgatcagaattgggacactgtgaatggggcatggggcacgtattcccggcaaagagaacagcatgagcagggccctggagatagctagaggtagtgcctggcagctgc

SEQ ID NO: 375707 - DNA, 122 bp, Homo sapiens
tggtgcctggcacatagtaagtgctccataaatgttcattgttgtcatgggagtatataccggttaaaggttgtgagcatgagctttgcagtcagttcctggatcccctacttaataattat

SEQ ID NO: 375708 - DNA, 122 bp, Homo sapiens
tagttcaggcctgtatcttttttgtgggccactggaatcataataatgatcacttttgagcgcatctttgtgccggatactgcaggagaacctttatatacagtagctcacttaatcttcac

SEQ ID NO: 375709 - DNA, 122 bp, Homo sapiens
atgtgcgctgcccagacccaaactggaacaggtgtggggaccctgggagagcagcctgagcgcgagcacagacgtcccggcagcgctccagcctcagcgtggaccagccccagcgtggacca

SEQ ID NO: 375710 - DNA, 122 bp, Homo sapiens
atgggcaattgacttagggcagaatccaattccaacatgaactaactgtgtggcacgggccgaagcccttgaccattcagtatctgcatgatgggaattttgatagcagtatcagaaacagc

SEQ ID NO: 375711 - DNA, 122 bp, Homo sapiens
tcatgagcgcgaggctgccggtgttgtctccacctcggtggccgcggctgttgctgctgtcgctgctcctgctgggggcggttcctggcccgcgccggagcggcgctttctacctgcccggc

SEQ ID NO: 375712 - DNA, 122 bp, Homo sapiens
cacaagtaaagtttgatccaccacttctagtaaacacttggtttactggagtggggtgagcgtggtgcttctcaaacgaagggaaggaaggtgaatgcggaacaaaagtaaaaaatatcatg

SEQ ID NO: 375713 - DNA, 122 bp, Homo sapiens
tcccataaccccttgttaggctctgcccctttactccacagaaactgctcttgctaagatcgccaaagaccacagaatctttccatttctcttgattgaacagttttttttttttttttaaa

SEQ ID NO: 375714 - DNA, 122 bp, Homo sapiens
tcccagagccagggactcagcccttggagagtccccagagagtccagaggttgccacctgcgaggggctggaacgcactgggctatcctccgcgagccctggccgcgggaacaatgggagcg

SEQ ID NO: 375715 - DNA, 122 bp, Homo sapiens
caaaatcccaagtgtttggaaaaatcacggtggtaggtcattctgagcctttattcatcacgaattacaatggcacttgttatctgaggagaggctggctttccagttgctcagagaaatct

SEQ ID NO: 375716 - DNA, 122 bp, Homo sapiens
cccggtgcgcctgggccgtgtccgggcccacgccggacccgccggcacctcgatcttgcgcgtggccccgcacccagccctccccggagctcaggtgcactgggccgggagacaccgctggg

SEQ ID NO: 375717 - DNA, 122 bp, Homo sapiens
agaatgcattccccatgtctaggaaacctggggtagggactgggggaaggagacattttgcgtctctctggctcccagcacaataagaaatgtcagcctcggcttggcgactgcgagcccgc

SEQ ID NO: 375718 - DNA, 122 bp, Homo sapiens
gacagctcctgccaccctgatgctcaggtttcatcatcccatatactctgggtcttgttccgactctacaaagaaaaggtgccacgaggactgtgacagagtatgactataattcggtagag

SEQ ID NO: 375719 - DNA, 122 bp, Homo sapiens
taaatagctacagttagtctatgtgtcattccctagttacactttaattattcacatgtacgtatatcactaaattgacctgggatggcatttgtctttttattagaaatgaggtttcctat

SEQ ID NO: 375720 - DNA, 122 bp, Homo sapiens
ccctatatcagtcccctctctggtgttcattgcctctctcttatctcttttctatgtggtcgctcccttatatctctatcacttctttactagtccgtcttgaccccttctcatagcctccg

SEQ ID NO: 375721 - DNA, 122 bp, Homo sapiens
cacgccaagcgcaagacagtcactgccatggacgtggtctacgcgcttaagcgccagggacgcaccctttatggctttggcggttaaggttgctgatttctccacagcttgcatttctgaac

SEQ ID NO: 375722 - DNA, 122 bp, Homo sapiens
agctgagtgacaggcggcggggtgatgattggcagctgccgagctgcctggactaggacccgggcgggggcgcagaggtggtcgcaggaggcgccccacaccccgggccttgcgccctgagc

SEQ ID NO: 375723 - DNA, 122 bp, Homo sapiens
aggtcttccctctcgcgaagtccaccatatcggggtgactgatgttgacgtacaccctctcgcccctccggagctgcaccaggccgccgaaccccacgctcgtgtaccagagaggcccgtac

SEQ ID NO: 375724 - DNA, 122 bp, Homo sapiens
gacgtcacaggcggtgccaggcggggatccacgagctctggatgcttgcttggccggaagcgacgccccgcaaggacccgccccgccccgccccgccccgcgcgagccggtagttgcgcctc

SEQ ID NO: 375725 - DNA, 122 bp, Homo sapiens
gcacgctcttttcgcgaggtgaccccaaggcgcggaccccgcgcaaaccaaacgaaccggcgcctggggaggctggtagctgcataccttgcagattccgaggaggaagtgcaggacgaggg

SEQ ID NO: 375726 - DNA, 122 bp, Homo sapiens
gccgaccactggaagtcgtgacgggggctgaagaacaagtcgccaagagcaaaggtgacccggggtggcacaagtgtctgggatgtgcaacatagagggtgtagcttcctgggtggctgggg

SEQ ID NO: 375727 - DNA, 122 bp, Homo sapiens
gaccgactttcagaaggcagtcactccggagcctgcttccctccggcggtgaacaagaaacgccttgtagaaccctagctggagccgaacactttccctaacaagatgtgtattgcgaggac

SEQ ID NO: 375728 - DNA, 122 bp, Homo sapiens
gtgcaccttcaagaaggccgggcacgtttctgggcgggcgtggggggtgcctgatatctccgctctattttacagttactcccctgctggtgcctccctccttggcgcgcttcccacctgcg

SEQ ID NO: 375729 - DNA, 122 bp, Homo sapiens
aaaatcacagactcctgagccggctgcctgcagatgggtcaagaaagaggcagaccacaacgtgaactcccttctggcagccagccaccgtcctccccaggcaccagaccccaagcccacct

SEQ ID NO: 375730 - DNA, 122 bp, Homo sapiens
cctgggcaaattttcccaaactccggcctcggtttcccgggttaccgtggaggcgacaagcgggtccactcctatcaggtgtcctcactggtacagtcgtaatcccttaatgaaggggattg

SEQ ID NO: 375731 - DNA, 122 bp, Homo sapiens
agggccggaggggtggtgaacgccgtcgtggtgatggtgagggccttagcgaccaccacccgagtgaggccccctcaccttcaggcccagagccgaggggaggagcctcccccagggccggc

SEQ ID NO: 375732 - DNA, 122 bp, Homo sapiens
aaatacagcttcagcggcggcacagcacaggaaccagccaggacttccacatctgactgacggctcaaatccaccatgcacaagatgagccccctaaaggtgcataggtttgtcatactata

SEQ ID NO: 375733 - DNA, 122 bp, Homo sapiens
catagctgggtgctctacaatgtttgaatcactctttgattaaattatttaatcttttcgcggtgacgcccataaatttttaatagaaaaaaagaggccctgggaaccccacggactaaagt

SEQ ID NO: 375734 - DNA, 122 bp, Homo sapiens
aactgtcctccctcccgcgaggccgccccgtccccctccccgcagaccgccccccctccccgcagaccgccccgtccaccccccgcgaggccgccccgtccgcccccccacccggctcctct

SEQ ID NO: 375735 - DNA, 122 bp, Homo sapiens
ggaagttctttcccctcggctgtcggcggagtctttgggtgtggtggatggaagaggagccgtctgctgagagaagaggaggaactccgctgtctgagtcagcacaggtccaccgaagacca

SEQ ID NO: 375736 - DNA, 122 bp, Homo sapiens
catcctgctccgtcccacctgggatgtgaatcagccacgcggcctgcccgttagtcacttcgtcttggttaacagctcgactgcagtggtattatggtgcttgggttcaagtcacccttact

SEQ ID NO: 375737 - DNA, 122 bp, Homo sapiens
tgttcatccgcgcccgagggcggacccgcccatcacctagcaggtgatccctggcggccccggccgtctctgatgaagtatcttctgcattaagactatgaagcgcatgctgctctacctga

SEQ ID NO: 375738 - DNA, 122 bp, Homo sapiens
aattaatgtcataataatactaatatgttatctgtcttttttcactctcactttctcacacgtgaacagtggcattttccaggtgacagagtgtgtgataatgaacctaactgaatgcagaa

SEQ ID NO: 375739 - DNA, 122 bp, Homo sapiens
accctttgagggtgctaaaagaggtagctattgctcctctcttttttcagatgtaaaactcgggtgcagagaggctgcatgatccatacaaggatacgcagctaagtggcaaaactggagtc

SEQ ID NO: 375740 - DNA, 122 bp, Homo sapiens
tctggaaacatctaagactttgtgtttttgatattctgaagttagtcacggtttgtctagcgatgtgtgttaagaattttatcctggttggtactcagtggattcagtttgcttatgtgttt

SEQ ID NO: 375741 - DNA, 122 bp, Homo sapiens
caggtgccaactaggggtggagctgctagacctgcttgcctgggcctggctcacagagggcgcctagtaaatagtgcttggaggaaaggataagagtgtgtgtgtgtgtgcacgcgcacacg

SEQ ID NO: 375742 - DNA, 122 bp, Homo sapiens
cgtatagagcaggcccagtaaggggcccccagagtccccgccgtccgaggcgagagcggacgcggccacaataaaggcatcttattgggacaggaaatcgggattttccgagtccggtttcg

SEQ ID NO: 375743 - DNA, 122 bp, Homo sapiens
gtgcactacctcaggcgcaagcctgcacccaccgcaccctcattcactcccatctctcctcgcccagtcacgcccttgttcgctcattcaccggttacactggggttttctgactcgcactt

SEQ ID NO: 375744 - DNA, 122 bp, Homo sapiens
tcctttgactttaggaacagcagcatggatgaggaaattgagaatccatactggagtgtgcgggccctagtgcagcagtacgaagggcaacaaaggtccccgtctgaatccagctgctccag

SEQ ID NO: 375745 - DNA, 122 bp, Homo sapiens
gaaggggatgctgacgggctgaaggcctgcagggagggagcgcgccgcccgggagtctggcgggcagatcttggcagacacctgtcaccttggcccgcgctaccttctggagattttcccca

SEQ ID NO: 375746 - DNA, 122 bp, Homo sapiens
agcagtggcagggatggagagctgcacgtagcaagggtcaggacggccagcaggtggagacgtcagtcgcagccagctgcttcctccagaccagccgccccgccgcggggagcaccccggga

SEQ ID NO: 375747 - DNA, 122 bp, Homo sapiens
gttcttgggcgtaattactctggatgggtggaggcctatccaacacgaactgagaaagctcgtgaagtaacccctgtgcttctttgagatctcattcctagatttcgaccgcccttaggtat

SEQ ID NO: 375748 - DNA, 122 bp, Homo sapiens
cggcagtgacaggggccccagaagcacgttggcaacatggtgaggctgcccagtgttcagcgcaaagaaagaattcagctacgacagttgagcagagctcaacagccatctcagagcacaag

SEQ ID NO: 375749 - DNA, 122 bp, Homo sapiens
acttaatttagcagcaaaattttagttaagaatttgtaagcaaaaaagcaaaatggataacggatgaattcccagaaacaaatgtcgcggagcagatgtgtataacagcaatcgtctgtcag

SEQ ID NO: 375750 - DNA, 122 bp, Homo sapiens
agttttcccatgagactgcttgtggtccatctaaaaatgaaaaaataatcagagaaaatgcgcaaagccttttctaactacagttatgaaatgatggcttaaagaggtatttagaaaataag

SEQ ID NO: 375751 - DNA, 122 bp, Homo sapiens
gtattttacacgtaaagcgcatctcactccggactagccaggtttcaagcacgtgatagccgcacaaggctggaacccaggcctggggaattaattcttgtcctcggtgctcaaaccattct

SEQ ID NO: 375752 - DNA, 122 bp, Homo sapiens
cccggggtggcgggcgccggggctcctcggccgctgcaccggagcgcacggccgagcccgcggcccggcccccggcgaagtcagcccccagcctcccaaacaaagactcgcaaagttcggaa

SEQ ID NO: 375753 - DNA, 122 bp, Homo sapiens
tatttaaagctaaaattttaaagaatgtaaaagcacaatgtggtagagcagaaaaaaaaccgggccaagcccagttctaagccttggcctgccccaaaccagctggaaagcctaaagcaaag

SEQ ID NO: 375754 - DNA, 122 bp, Homo sapiens
tccttatcttctttgcctttatcagttatctttgtttcttcctcagccagttgtttcctgcgcttctctcgcctttcttccagctcctcatccctcaggaattccaggtgattgacaatgga

SEQ ID NO: 375755 - DNA, 122 bp, Homo sapiens
ggtcaagtccgggaagccgcaggaggcggactcaggcgcagcacccagcagtgagcacggcgtcgtgcggtcgggacctggacttctgggtgtgggaggaatttgagtgcaaaggttaaggt

SEQ ID NO: 375756 - DNA, 122 bp, Homo sapiens
ggaggggaagcactgactctcggcagaggcatgagcctgattttccagtccggggaggggcggagggagatggcactggggacgcccgggcgatggggcctgactcagagccagaaccacag

SEQ ID NO: 375757 - DNA, 122 bp, Homo sapiens
ccacaagaaattcatgctcacaacttcaactgtgcacagcatgataacacaagtctaccacgttctttagtcagtgtctctgtcgcaggctagaccacaccttcctcattgattgtggcagc

SEQ ID NO: 375758 - DNA, 122 bp, Homo sapiens
ctgcctagggttttctatactattctagtctgctcgatgacgacaggctgataggccctgcggtttcttctgagtgtgtgttcttttttttcttttttttttttttttctgagtgagtttta

SEQ ID NO: 375759 - DNA, 122 bp, Homo sapiens
gccgcaggcgcccacagggccacccagcagctcccccgctgccccacctcgggcaggcaacggattccccaatccctgcagatagagacaggggcatccctgatctcacgcaggcacagtgg

SEQ ID NO: 375760 - DNA, 122 bp, Homo sapiens
cgctggaggtccaaaaccaaggtgtcggcagagccgcttccctcgggggctcggggggagcgtgcactccaggcccttctctcccccacccgctcatgtggccgccgtccttggcgtgccct

SEQ ID NO: 375761 - DNA, 122 bp, Homo sapiens
agctctgccccctctgatttcacgctcacacattaacgagagctgacactggagattagacgcagacagctggaatgccaggtctttgttgcagcatggacaggagccaacgtcgttcaacc

SEQ ID NO: 375762 - DNA, 122 bp, Homo sapiens
atgagtacggacagtttgccaaggtcactcagatggggtcattaactgtgaatcaaaagtcgtctgggccagggatgaggggaccggattcctagtgtcaacatcaccactaacccctaagt

SEQ ID NO: 375763 - DNA, 122 bp, Homo sapiens
gctgccaacaggagggcctgactttataaacctggaagatctaaacctcagggaagactgcggagctggagggagagaggtgccacttaccccaacctggaggtggggggcagggagcaggc

SEQ ID NO: 375764 - DNA, 122 bp, Homo sapiens
ttttctccctcttctctctgcttctaaatgttataactattatcctggtctccttgcagtcgtttttcttaccctcttagaggttttctaaaacagccatatagccatctgtgataattccc

SEQ ID NO: 375765 - DNA, 122 bp, Homo sapiens
gccacacatgtggttaacagcagaggttggactaaagcccaggtctgactcttcaacccacgcttgttcctctttgctcctctgtttcttagaatatgaatggcatgtcgaaattccaatgc

SEQ ID NO: 375766 - DNA, 122 bp, Homo sapiens
ccttgggctccgggagggcactggccgaggccggcgtgccgtgggcgctggggagggcctcgtttttctttttgactctgttgtttttgtgacgcttagttcttaagcagacaggaggccgc

SEQ ID NO: 375767 - DNA, 122 bp, Homo sapiens
agtaatttgcagatggttcctggtagcgacagggtctctgaggcggagcctgggtcttcgcgtaggatctgccagcctgggttccccggcaggtcagagaagctttggggcggggccaaggt

SEQ ID NO: 375768 - DNA, 122 bp, Homo sapiens
gaagtaaatgacttcatgaatgtgaaatgtttgataaattaaaggaaaatatcttcataacgtgaatggaattggtgtattcatttatttgtatggttgtcatagttgttttttgcagatgt

SEQ ID NO: 375769 - DNA, 122 bp, Homo sapiens
ctccgtccctcttctaggaccccaaaagctctcctcggccccaggaccccgcagaggtcccgtagtcccatctctgagaccccacaaagcctttcggacccctcaggtggcccttaggcctc

SEQ ID NO: 375770 - DNA, 122 bp, Homo sapiens
cgcgcctactactgtgtcagggtttgataatgagggaactagccaggaattcagcttgtacgttgttgtccagactaagatgcctgtgctactgtttgttagatggaaaagttaaaatacaa

SEQ ID NO: 375771 - DNA, 122 bp, Homo sapiens
acaaggagagttgagtgatctgagcaagcgcagatctggaattctaaaatcgcagggaaccgggggcctgaaaagtcatatatattcctgccaaacagtcacctagcatgcacttgggtcct

SEQ ID NO: 375772 - DNA, 122 bp, Homo sapiens
cttctgaggggtcatgtagcacatgtttggtagccaaacgctgtcattcacgaccaggagcgatggctgcaatgcctttttctttgctttgctttccggtgccgggagccttgcctcccgcc

SEQ ID NO: 375773 - DNA, 122 bp, Homo sapiens
tgggtctcttcatcctgtccccagcttcacccagcacagggccaggcaccgagtaggcgtcggtagatgtttgctgaattgaattgaatccccacggcagctctgtgaggcaggtagggcgg

SEQ ID NO: 375774 - DNA, 122 bp, Homo sapiens
catgtgtacagcaaatttggtttttggtttttggttttttctcagatatccctatgcctacgtgagtgtttggcccctgtaaactctcagcacatgtgttaaatgagtaaatgtacaggtgg

SEQ ID NO: 375775 - DNA, 122 bp, Homo sapiens
gtccttttaacattcccaaagcccaggctgcaccaagagcagttaaataagaatatctgtcgtaagaccagacattaggtcctaaaacaggacccatttcacatcttgggaaccccaggctc

SEQ ID NO: 375776 - DNA, 122 bp, Homo sapiens
catcgtgggcatcgttgctggcctggttctacttgtagctgtggtcactggagctgtggtcgctgctgtaatgtggaggaagaagagctcaggtaaggaaggggtgaggagtgtggtctgag

SEQ ID NO: 375777 - DNA, 122 bp, Homo sapiens
ccctccccccagagtggaagggtcagggctgataggaggtgctggcagcccctcagctggcgctgctcccatgccagaagaatgtcatcagctgcggaaggttgacttgagatgaagcaaga

SEQ ID NO: 375778 - DNA, 122 bp, Homo sapiens
ccgagcaatgatcgggcagccttcccagccggaggaggctcagagactccagcgcagccgcgtcggggaggaagatttatggacagggaagggaaagtaacagacagaaacggacgtgaggg

SEQ ID NO: 375779 - DNA, 122 bp, Homo sapiens
gcttgcgtggctggtaacttgtccactacaccattgaaacagctttgcctcctggctgggcgcggtggctcacgcctgtaatcccaacactttgggaggcggaggcgggcggatcacctgag

SEQ ID NO: 375780 - DNA, 122 bp, Homo sapiens
aggtcccgattgcatccgagccccgccttcccgcgcccctagctggcggccgcgactctgcgcctgcctgggagacagaccaaactgcagctccctgcagaactggctcctggagtcccgcc

SEQ ID NO: 375781 - DNA, 122 bp, Homo sapiens
ccctgcagaagtttccaaagagactacggggctccgggagagcaggcgcttttaaatagccggcccctggctgccagccagtttgtagctgcaatttgagcttcccaacacccaactcaggc

SEQ ID NO: 375782 - DNA, 122 bp, Homo sapiens
tgccgatagttttataggtaaggaaactgaggcacacagtaatgtgcccaaggttgaattcggtaagatacagagccagaaaagctggatagcctgcctcagatccataccactaggccatc

SEQ ID NO: 375783 - DNA, 122 bp, Homo sapiens
gagcgaactctcccagtggctctcctcaccgggatccccttccacgcctcctccccgtgccgcgcctcagtccgcactgctcattggccgcgtgccctgccaatccgatgcacgtcggctag

SEQ ID NO: 375784 - DNA, 122 bp, Homo sapiens
gtggcactaggaccgcggcggcgcggccctcgcagccaccgcctcgggcgtgaggcggagcgtagctgttcctggatcctgggcctggctcctcgacccgcccctggaggcggaccccactt

SEQ ID NO: 375785 - DNA, 122 bp, Homo sapiens
acattgtcttccacgaaaccagtcccgggtgccaaaaaagctggagagtgctgatgttttcgaggtcattaccgttgcatgtatcagtacttcatttgccttatgacgggatactggtctgt

SEQ ID NO: 375786 - DNA, 122 bp, Homo sapiens
ctgagtaccaggagctgatgaacggcaagctggtcctggacatcgagatcgccacctacacgaagctgctggagggctaggagagccggctggaatctgggatgcagaatatgagtatccac

SEQ ID NO: 375787 - DNA, 122 bp, Homo sapiens
aagccttcaagcagaagtccaaccttctcagacaccagctggtgcacaccggggagcggccgttctactgcgcggactgcggcaaagccttccggaccaaggagaacctcagccaccaccag

SEQ ID NO: 375788 - DNA, 122 bp, Homo sapiens
atgtctgtcgaggttgtatgtctgggggtgcactgtgcatgtctttcgagggtgtatgtccgggggtgtactgtgcatgtcatgtctgtcgaggttgtatgtctgggggtgcactgtgcatg

SEQ ID NO: 375789 - DNA, 122 bp, Homo sapiens
ggagggggcaccctgcacagctaccgcgtcatcgtgcggaccacgcaggtgggccgggatcgcgggatcaggacgtgggttgcctccccgacaccttgtatgcatcctgagtgcccttacac

SEQ ID NO: 375790 - DNA, 122 bp, Homo sapiens
tggctgtgcagtggaaactccgggggaattttgaagaacactgacacccatcttccaccccgacactctgatttaattgggctgcagtgagaacagagcatcaatttaaaaagctgcccagg

SEQ ID NO: 375791 - DNA, 122 bp, Homo sapiens
gcggatctccagcagtggcgttacttctagcggctggataccgggttctccgcgagatcgcgagatcccgagatattctccccgcacggaagcgacgactggcctggccagaggactcgcgt

SEQ ID NO: 375792 - DNA, 122 bp, Homo sapiens
atctcattagttctcataatgtaagagggatggaggccttcaaattaaacacaggtgtcccgagtaaccacaatgattcagaagtgttgcaaagggtcagggacacctctgtctttttattc

SEQ ID NO: 375793 - DNA, 122 bp, Homo sapiens
gcgctggccaggccccggctccaatgtcagcgctctcgcggggcgcgggagtcacaagctcggattcctgggcaggccaagctctccaagactgggctccacgttcccagctttgcaggcgt

SEQ ID NO: 375794 - DNA, 122 bp, Homo sapiens
caatcaacggacgtgaggagactccttgctacaatcagaccctgagcttcacggtgctgacgtgcatcatttcccttgtcggactgacaggaaacgcggttgtgctctggctcctgggctac

SEQ ID NO: 375795 - DNA, 122 bp, Homo sapiens
ctgctgtgactgggtgcaggtctgagcagaggctttcggagtgagctgagcaggcgagcccgagcacggcctctcagggagcgagcccataggctggggagccgtccctggagatgcccctg

SEQ ID NO: 375796 - DNA, 122 bp, Homo sapiens
ggatctaaagacaagtcaccatcctgcttgaaggcaacaaaaagcctctgtccagctggtcgcagctgatctcccccagtatctccgcagtccttcccgaggccttctgcgtccgccccgcc

SEQ ID NO: 375797 - DNA, 122 bp, Homo sapiens
aactgtcagcaacacaagccatgaataccaacgcaaaacagactctcactgtagatcacacgggaaaaaataaaataaaaaggtaaaatccttaacggtggtagtatttaaatgaccatata

SEQ ID NO: 375798 - DNA, 122 bp, Homo sapiens
ggccccggctggatgtggcagacccagggggtgctgctatcctgggagtagctggggcatcgcgggtggcatcgagtgtggggctcgaagcggaggccagaagagtcgcagttacttcctgg

SEQ ID NO: 375799 - DNA, 122 bp, Homo sapiens
ggactttgggttctcggacagaggccttaggacacggggcgggaagctggctctccagaccgaactagggctctggagttgccaaaatctggaagcaaagtcaggaccacttgcatattgtc

SEQ ID NO: 375800 - DNA, 122 bp, Homo sapiens
agagcaagcctgctccttccagaagcacgagggtcctgtggcggtttttgcttcaaacaccgcagaacacagagcaaaccccatgacgccgtccttcaactaaacagcccaaagcagcaaac

SEQ ID NO: 375801 - DNA, 122 bp, Homo sapiens
ccacttgcacgaaggcacactcaccaatatccagaatacaaatcagactggcttgtcccacgtgggacgtggtgatgatgataataatacttttatattttcttagttctttactattatta

SEQ ID NO: 375802 - DNA, 122 bp, Homo sapiens
cggagcacaggtggggagaagcggctgacggtggcgtggccccgcgtacctgggtgtggacgccccgccgccccgcaggggaaagctcctggagtctggggtctgctgccccgagctctggg

SEQ ID NO: 375803 - DNA, 122 bp, Homo sapiens
agaaatgaagtttgcatagcatttcagagagtcagggcctcctaacgcagccacacaccccggagcctgggcaggtctgggaaaagccccagggagggactcccccagggtgcccaccccag

SEQ ID NO: 375804 - DNA, 122 bp, Homo sapiens
cagcctcagggctacagtgccctcctcctccaggaagtcttcgtgcaggcccctcactcccggaactccctcggagctttcaggatccctgtgtgcctgtgggatagcactccgggctgtta

SEQ ID NO: 375805 - DNA, 122 bp, Homo sapiens
tggtgtggtcagtgcccagggctggtctttgcaccctgtcctccatccagcccggcccagcgcttgggcttgtcctggacacctaacacccacctgccctcgtggccagcagtggcctgcgt

SEQ ID NO: 375806 - DNA, 122 bp, Homo sapiens
gggcgggggcgggggcgacagcaggtccccgcggggcctgcatgaggaggctccggcgcccgccctagtaaatctttcttgggcctagaaaacattggtccgacgaagaaaagttgagacta

SEQ ID NO: 375807 - DNA, 122 bp, Homo sapiens
ctgggaaaactgagcacgggcacagtgcgggagcgggtgggtgcccagggcagccaggggcgcacgggttgggaggcgccaggcggcccgccctccttgcacgggccggcccagcttccccg

SEQ ID NO: 375808 - DNA, 122 bp, Homo sapiens
gatcccaccaagccagcagcaccatcagaagaccataattcagaagctggctgcagctggcgaagttgaaggttcaaagcattagggtggtgcttgcagtggtctcgaccaaaaggaacaaa

SEQ ID NO: 375809 - DNA, 122 bp, Homo sapiens
aaagccgcggagctggtggtggctacagttggtgttgggggcttaggcgagggacgttaccgggaagttgcaggcgggaggactcttccccatccagtcacctgacaggtgggttgactgtt

SEQ ID NO: 375810 - DNA, 122 bp, Homo sapiens
tggatttgtcaccatcaacagtgtgcaccctcctgcatcccctagcacagggggcgaaggcggagccccactcggtttccttggggttgagggacgcactcaccttccccgagcgctgcgcc

SEQ ID NO: 375811 - DNA, 122 bp, Homo sapiens
tactggccgccatctctgctcactgcaacctccctccctgattctcctgcctcaacctgccgaatgcctgcgattgcaggcgcacaccgccacgcctgactggtcttcgtatttttttggtg

SEQ ID NO: 375812 - DNA, 122 bp, Homo sapiens
agggcagatagtaatgcctttgccatagtgttgctgtgaaaaattcaagaataggccgggcgcggtggctcacgcctgtaatcccagcactttgggaggctgaggtgggaagatcacgaggt

SEQ ID NO: 375813 - DNA, 122 bp, Homo sapiens
gcggcaggacaaacaggaaaaaggaagagtgaggcaggaagggtttaaatgcaggctcctcggaggacaagtcgccgccacacccctgtctgccgtcccgccagccgccctcacgcggcgcg

SEQ ID NO: 375814 - DNA, 122 bp, Homo sapiens
caggatccgtggctttggggttcccatggtccggcctgcgcgtatagggcatttcctgggcgcgaccggcctcccccggacccacctggcctggagtttccgcacccagacctccttctcac

SEQ ID NO: 375815 - DNA, 122 bp, Homo sapiens
agaatattgtctcagagttctaaaggttcgctcaggggaagcgacgggccaatcacagcgcgggataccggcccgccggccaatcggcgctgctggtagctaggtgggcggggcctgcgccg

SEQ ID NO: 375816 - DNA, 122 bp, Homo sapiens
gccagatgaggctgggcggtcaggaggccaccgggccgggacggagcacccaggcctgcgcgccaaaccctcggccttggcccccagaggcctcagggcgcagaaacccggagactgaggcg

SEQ ID NO: 375817 - DNA, 122 bp, Homo sapiens
ggctggcagccagcatcacgtgggcagatggggagagcagcaggatctgcccgcaggagacgcccctgttgcactccctgacccaggaggggaagcgccggcctgagagcagtccagaggac

SEQ ID NO: 375818 - DNA, 122 bp, Homo sapiens
ttggtcgttcaactaccagcaaaggctaaagagaggctggagcccccaggacagccagaacgctgacactgcaaagggcctctgtccttactggggaagcccagtcctgctcagctgtcttc

SEQ ID NO: 375819 - DNA, 122 bp, Homo sapiens
gacggacctggcgtcaggccggacctacgatctgtgcgtgctcgccgtgtatgaggacagcgccacggggctcacggccacgcggcctgtgggctgcgcccgcttctccaccgaacctgcgc

SEQ ID NO: 375820 - DNA, 122 bp, Homo sapiens
gcgcacatggccgccagcaggcagagttactccggtaaacacgccagggacggcggcgcgcgcgggaggcaacccagcggggcaacccccgcctttacctgtccgagcctgcacgcgccggc

SEQ ID NO: 375821 - DNA, 122 bp, Homo sapiens
cgggtgggacgggaagggggcctgacgggtcagggggcgggacgcggcagggtcggagggcggcggcaggctccgggacgggggtccgggcccgtggctggggcagggcgccggcggccgcg

SEQ ID NO: 375822 - DNA, 122 bp, Homo sapiens
gaaactcagagtttccatgctgcctccagacagtgggcaggctaaggcatggctggctgacgatccagagggacaaagagcattaccaatgaccactaagttgagtagctgcttccctcctt

SEQ ID NO: 375823 - DNA, 122 bp, Homo sapiens
ttccttgtgggtctataaaaatctgcagacaataggagcttaggaaaatgtcatgacagccgtcacccctcccagtaaaggactacttaacaagtgaagggacccaattgagaagttctgaa

SEQ ID NO: 375824 - DNA, 122 bp, Homo sapiens
cacaaggctcggcagttgcctggtaacgcccgctggaggagtcccagtgtaataaggtcccggagaagtgtcactggccctgagtgggacccggtagcccgttcgctccgcgccggcggcct

SEQ ID NO: 375825 - DNA, 122 bp, Homo sapiens
cgtggtgctgggccagcacttcttcaaccgcacgacggacgtgacgcagaccttcggcatcgagaagtacatcccgtacaccctgtactcggtgttcaaccccagcgaccacgacctcggtg

SEQ ID NO: 375826 - DNA, 122 bp, Homo sapiens
tttacgatgtatccaagtctgacggccccagaaacgggtgtgcagggcgcccattgggtccgcggtatgactgcagaaagagcctgggagatcgaggggcgcagagtggggccggaccaggg

SEQ ID NO: 375827 - DNA, 122 bp, Homo sapiens
tgaactaacgttgagaacatcagagatcagggtgggcggtagggggttggggtgacagaacgttgcatgtttaaagcatgcaatgcagtgattggtgctttgattatctcttaaacagggtg

SEQ ID NO: 375828 - DNA, 122 bp, Homo sapiens
tctttaggtggtgtggctcctatgccatgtgtgagataggtcgccatgattctgcctgtacgcataatacaggcagcccttcttgaagtttttgccacatgtacctcttcagccacatttta

SEQ ID NO: 375829 - DNA, 122 bp, Homo sapiens
gtgttttaccgaggatgctctcttgccctctgctccacctgggcgtgtagacggatgtctcggctcactctaaattcaggctggttgcctgagtggctcaagtccaggggcatggctttcac

SEQ ID NO: 375830 - DNA, 122 bp, Homo sapiens
tccacggtgatggggctctggaggctggggtgctccacgtggcaggtgtagacatctccacgctggggagtcatttccagcatcaccaggatctggaaagtccagtcaccattcctaataag

SEQ ID NO: 375831 - DNA, 122 bp, Homo sapiens
cagttcttattcttcttcctggcccgctgtgagtgatgcttagggctacgcttggccctccggcgtcgggtcaaggcatggccccggccatcatggccaaaggtgaccaggaggggccggag

SEQ ID NO: 375832 - DNA, 122 bp, Homo sapiens
acgccactgagcgcctcccaaaagccttggaatgaatgaatttaaaaactatattagggccggactgcggtggctcacgcctgtaatcccagcactttgggaggccaaggcgggtggactac

SEQ ID NO: 375833 - DNA, 122 bp, Homo sapiens
cagccacatagaaggagtttgctccaggaaagctagcagatttctatcttttcaaacagacgcagcagaatgcactttggcttctgagaaaagtccacatcttctttgggatggggcactct

SEQ ID NO: 375834 - DNA, 122 bp, Homo sapiens
ccgtccttaccctgccagcgcctgggccagcaccatggtcgcgaaacccagcatggatttcgtcttggggacgctatggctccagttctgacactcaagaaacgatggatggagaggagaac

SEQ ID NO: 375835 - DNA, 122 bp, Homo sapiens
accatcttccatgctatgcggcaccctatcatattcttctctggcctcatcagtgatattcgtgagatgcaggaggcccgtaccctggcccgcgcccgtgcccatgctcgcgaccaagctcg

SEQ ID NO: 375836 - DNA, 122 bp, Homo sapiens
aagtgggggaggggaggagaaaatgggtgcagaggctctggtagtacactattatctatgcgatgttaagatggcatttgagaaaaacagttacatagtcacttgcctttatatgtgcctaa

SEQ ID NO: 375837 - DNA, 122 bp, Homo sapiens
cagccagggccccagaccccaagccgccccggaagctggtggagcaggacacggagttcccggaaccagaacccccggcgcctgcatagacgctggctgtgctgctgactggccgggcgtgt

SEQ ID NO: 375838 - DNA, 122 bp, Homo sapiens
gggagcagaggggttccctggctgtggagctcctgcagcggaagccagagtgtccatcaccgtcttctcttcacccacagcgagaaaggagcatggcgaatgggccggtatctgccccgatg

SEQ ID NO: 375839 - DNA, 122 bp, Homo sapiens
gaggggaggggagggaggggagcgagttactttttagcttccgctaagtacttggcggctcgccaggcccggagaattgtgggaagcgaaaacctccccagtataaactgccagctttaagc

SEQ ID NO: 375840 - DNA, 122 bp, Homo sapiens
gagcatcagaatcccctagagtgtttgttaagacagactgcggccgggtgcggcggctcacgcctgtaatctcagcactctgggaggccgaggcgggtggatcacttgaggtcaggagttcg

SEQ ID NO: 375841 - DNA, 122 bp, Homo sapiens
ggagtcagaataggtgggccttcccctgctctttccccacagatggttcttggaaaggaacggggaatggtgccaggagtcagatttcgatcccagttgcccgggttctgctggtgtgattc

SEQ ID NO: 375842 - DNA, 122 bp, Homo sapiens
ctcagcctccccgagtgctgggattacaggcatgagccacctcgcctggcctataaactacgactctgatgaccgcatagtatttaagcaagaaaacaaccaaaatgttctagctaaagtgg

SEQ ID NO: 375843 - DNA, 122 bp, Homo sapiens
ttcaagcccccagtttgggttcctttggagttgtcatggaaacacggaggctagaccaggcgaggcgggtgggactaaggaaaggaaggaaggagaactctctggagtctcccccaccaaga

SEQ ID NO: 375844 - DNA, 122 bp, Homo sapiens
gcagtgttgaagaaacacgcaaagaggcctgagtatccatgacctcagtggtgcgaaacccggccaacttaaacatggcggctaaacccgaacagcaaaacgttgctgacgccaatgaagtc

SEQ ID NO: 375845 - DNA, 122 bp, Homo sapiens
aaatccttgcttaagaagacatgacaagtaaagatatatgaatttacatgaagagggttacggcgtctgaaagacttgaaaaactgtttttgaagttaaatacatctactgtgcaggcactg

SEQ ID NO: 375846 - DNA, 122 bp, Homo sapiens
ggcaacatggcgaaaccccatcactacgaataatagaaacaaattagcacggcgtggtggcgcgactctatagttccaagtactcggcaggatgaggtgggaggattgcttgagcccaggag

SEQ ID NO: 375847 - DNA, 122 bp, Homo sapiens
gcttatgttgctgaaagccacttaaagtcactggcccgaacatgtgatcccactgcaaaccgagttctccctatgtgactcactgaatgacacagtgtgagctatttgacttccggtttcct

SEQ ID NO: 375848 - DNA, 122 bp, Homo sapiens
acacacgcacgatgttatataatttctgttcttaagtgcctggttggaatatgctaatttcgggagcacactactgcctgccattttctggtggaacagtcttttaaggagatttctacaaa

SEQ ID NO: 375849 - DNA, 122 bp, Homo sapiens
ctgtgtatgctgggccccaagccggctcagcttcctgtgtggctgagagaggaagtttaacgggtgacgtccccggacagaggccctgcccccacccccgtgagaaacccaggcatcctgcc

SEQ ID NO: 375850 - DNA, 122 bp, Homo sapiens
ccacggtcagccccacccagggctcaggctccgcccccgggcctccatagccccgcccaccgcccacccatccagcaccgcccttgttgtcatggtgatctccggctctccagggtgtccag

SEQ ID NO: 375851 - DNA, 122 bp, Homo sapiens
cttgatatctacacttgtcttagatcacatgccctgcttcagctggtaatgggactgcatcggttccaagtgtggcaagtaagttttcggctctgaagaactgacactagctagatttgtat

SEQ ID NO: 375852 - DNA, 122 bp, Homo sapiens
ggggaaggggcggagcgaacagaggtgggcggctcccgtcctatgacgtcagccgtaaggcgctgctgtcgtaaaaggacgtccggtccgtctcctagtgtccggaatcggctgtcagcctc

SEQ ID NO: 375853 - DNA, 122 bp, Homo sapiens
cactgggggtgctgcaggtcgcgtttcaccctggcacgccctgcctgccccgttacgtggcgatttgtgatggggatcataataaaacttagcctgattagaggcatgtgggaagcatgccc

SEQ ID NO: 375854 - DNA, 122 bp, Homo sapiens
ggggttactaggtgaacactgccggagggagagcgctctgaaatccattcttcagccgcacgtggaaaatggacagctgtgactcttaaagagaattaaagcaacaaagcatctcagcctgc

SEQ ID NO: 375855 - DNA, 122 bp, Homo sapiens
cccttaagaccccttgctaaaggtaagctgatatcctggggtttctcatcaagccaaacacggagcaccaggtcgctaaacagcagctacagcttccgtcagctcttcccctactctcatca

SEQ ID NO: 375856 - DNA, 122 bp, Homo sapiens
tgccccccaccagcaggcagcagtgacgtgtctccatggggccttaaaccttcagggccacgttgtgatttatcttcacacagcgcttggcgcatgcgggcctctaacgaatgtttagaatt

SEQ ID NO: 375857 - DNA, 122 bp, Homo sapiens
ggactcgcccccgccgcttcggctgcgactgtcccggtcgttcccggcagaagtggtcagcgagggaaagagaagtgacttctccatgggtttcaagctcccagctgttttgcggcagcccg

SEQ ID NO: 375858 - DNA, 122 bp, Homo sapiens
cgatgtaaaaccggcctcctggttcgactaaagggacgtcaatctaccaaaggtttgccgcgctctctggctggaggccgtgcgcatgctcggcacgcaaggccgattgggagttgtagtcc

SEQ ID NO: 375859 - DNA, 122 bp, Homo sapiens
ttttcctccatagatgtgagaaattcacagcccataaattctgtggctgggagcagccaccgtggcaggcgggtacctggcagggtgcacaggctgctccattcccccctggcacatgcacc

SEQ ID NO: 375860 - DNA, 122 bp, Homo sapiens
ccgccccctcctgccccttcatgcatgcgcggaggccgcctgctagcaaggtaggtggctcggcggcgagagccgtcaagggcgcattggagagtgaccctcggacccggctgccgccgtcg

SEQ ID NO: 375861 - DNA, 122 bp, Homo sapiens
gccccttggcacttcggccccggacttgctcctcctggcaggcctgggtgcttgtgaagccgggtgccagagggcccagcacggcacggcctttgattctgttttctgtaaatcgacgacaa

SEQ ID NO: 375862 - DNA, 122 bp, Homo sapiens
catcagggagggtgaggaagaggcgtggccgggcctgggcctctggacgcaggggacacacgcggtccaggccctgagtggacagagaggacgctggtggggtgtcgggaaccctagctggg

SEQ ID NO: 375863 - DNA, 122 bp, Homo sapiens
cccccgagccagctcctgtggggttatgagcacctggtgaccaacccattttgtactcaccgacagaagcctcagtccttcccagtcccaagaagcacccacctgcgattccaaagctgtaa

SEQ ID NO: 375864 - DNA, 122 bp, Homo sapiens
cagctgcggaggggccgcggatcgatccagacctgcctcggctgcgacgcgcacgaaaaccgcgcgcaccgcaaacccgcttcagtctccaagaggaaagcaagaaacaaggctcgggtttt

SEQ ID NO: 375865 - DNA, 122 bp, Homo sapiens
gggagtcagagtttagtttcatgctcctagatttaagaagactataaattaattcttctacgaatccagattatcacaggggaaaacgacatcagctattacttactagcattactgtgacc

SEQ ID NO: 375866 - DNA, 122 bp, Homo sapiens
tggcatcctgccttccaggaagcctccggcccggggcagggaggggtgggcaggatgctgcgtggcagaggtggggagaaacagtcaacccgcagctgaccctcctgcccagtgcctggtcc

SEQ ID NO: 375867 - DNA, 122 bp, Homo sapiens
ttcaagtgttttcttcctggtaaacaaagttctgtggctggctttggagattttaggacgcggttgcttagtaatattggggaaaacacgaagtccccacctcagccccattttgtgcctcc

SEQ ID NO: 375868 - DNA, 122 bp, Homo sapiens
accaatcagctccgccagctcatgaatatttatgaccttcgctgagtcaaagctttgaaccgagtttggggagctcagcagcatcatgcttagacttttcaaagagacaaactccattttct

SEQ ID NO: 375869 - DNA, 122 bp, Homo sapiens
acaccctaggtgagtagggaagtggctgtttcctaggctgctatgatgtgcgaacatcaacgtatgtgtttttgcaaacggctcctttttcactccagcctgccagccgctcgcaattctcc

SEQ ID NO: 375870 - DNA, 122 bp, Homo sapiens
gggagggcacccaagcatttatccactcaagatgcccccttcatattttatccttggtgtcgtggcagcagtgctaataggacatgagccttcttgccccagtaatggcccattacggcttc

SEQ ID NO: 375871 - DNA, 122 bp, Homo sapiens
gcgggaggccgaagtacgtggacctgaccgccctgggctgaggactttcctcaccggaagcgctccagggccgtttacagccaaaagctctgagccctccttggggagggccatggtctgtc

SEQ ID NO: 375872 - DNA, 122 bp, Homo sapiens
cagaacctgtgagcaagttctttaaatcctcgaagcttgcgattcctcacatgtaagtggcgtgttaataatgagtaactgatatggtatgaagaagctgtgagctagtgcgtataaaagga

SEQ ID NO: 375873 - DNA, 122 bp, Homo sapiens
tccgtgctgccgcgcccatttctcgcgttctctctttctgggggcccctccgtccatatccgcacagaactggcttggatttccaccccccaggagccggggtcaccagtgcctcgcgcacc

SEQ ID NO: 375874 - DNA, 122 bp, Homo sapiens
ccgactcactaggcctcaccgttcctgccgagacccagctgtccaccaagccctcttctccggcaacctgcagcaggtccaagccctgttccaagatgaagaggccgccaacatgattgtgg

SEQ ID NO: 375875 - DNA, 122 bp, Homo sapiens
ataccagggcttgtgttctcagtcagggaagtcctggatcctttatttaccagccactatcgttagtgtgaaacatattttactggggggccattgttttcaactgtgctgctgcactaggc

SEQ ID NO: 375876 - DNA, 122 bp, Homo sapiens
acagaacctcctgggagtagtccagcatgcacggatttcacctttctgggaatcctgtgtcgcctgttgtgaaagtttcatttggaacgatgtcttcattcctccatatacatgatcatgga

SEQ ID NO: 375877 - DNA, 122 bp, Homo sapiens
ttctttcttggacataacttcatatcattgaaatagtctacaaaagacaccagctcaagccgcgagggcgttgaattgtccggatttggggtggcggttaatgctcctcttctggtgcctcc

SEQ ID NO: 375878 - DNA, 122 bp, Homo sapiens
gtgaggagttcttggctagggtgagcacttcccaagtgccaggcacgtgactaaacacttcgtacacaaaatatcattcaatctccccaactccaggaggcagaggaaagcatatctcaaaa

SEQ ID NO: 375879 - DNA, 122 bp, Homo sapiens
tgccagggcctcataaggaatcccaggccccagtcatgctgtgcctgagcctacagcctgcgcagggtgaattctccactttgggactgagggaagggacctccttccccacagacgcttcc

SEQ ID NO: 375880 - DNA, 122 bp, Homo sapiens
agtgcagaaaaatcctactgtgtctttggggaaatgcatatctttggggaaatgcataaccgtggagtgccatggtcattttgtcctgtcacaggtagtgaatgcacactttgtctcctctt

SEQ ID NO: 375881 - DNA, 122 bp, Homo sapiens
ctgctgagaggaaacctcacctgaaattcacttgtcccagtcctgaagcctgtccccaagcggttccctcttggaggggagcatcaaaccccatttctccagggccacctctaccctcctgg

SEQ ID NO: 375882 - DNA, 122 bp, Homo sapiens
aggccgggtctggagaggcctcggcgctgctttcccaccttgggctacgctccaggctggcgtggggcttgaggacatccttaaatgttgcaacaagatgggaatataataccattcccctt

SEQ ID NO: 375883 - DNA, 122 bp, Homo sapiens
ttgagacgttaagacttgagacaggccagaggagctctcagggccggagggaggccaggacggctgtagcctctctgtggttctgcctggaagacggaaggcaggtggttggctctagtcat

SEQ ID NO: 375884 - DNA, 122 bp, Homo sapiens
gctcagtagcagcccatctgcagttggcttggtctttggtgacaaacttgcctttgttcccgggcctgcttttctgcttaatctgggtgttgcccagagtgtccttttgttctgagaccact

SEQ ID NO: 375885 - DNA, 122 bp, Homo sapiens
agagagccacaacctcgtggtgacaaacagatttagaatctgcggctgaaattcagactgcgctgcagagctgggcattgtctgccaagggacccagtccagtaggagagaaagaataagtc

SEQ ID NO: 375886 - DNA, 122 bp, Homo sapiens
gatagttctggagagatgaatagataatttgcatctctaaacctatatcattagcctcaacggaagtgacttagcatttcgaaaagctgacaaagtagagtaaaatcccccagccagtataa

SEQ ID NO: 375887 - DNA, 122 bp, Homo sapiens
ttgctctctctatgtttcttctgaaaacaattccagatcatttaatgcagaaaatgtccccgagagagaagagaaagagttggtaaatatagagatagcatgtgtaaggggagaaattatgt

SEQ ID NO: 375888 - DNA, 122 bp, Homo sapiens
acacaaacaaacacacacacacacacacacacacacacaaataaccagaagcccacgtggcgacggggtctccctagacacctctcccagctcgcccgatggaccaagcaggcagtggcagc

SEQ ID NO: 375889 - DNA, 122 bp, Homo sapiens
tagacctgaggggcttgtctccaatgtcctttcacctgtctttcaagtccctctgctgaccgcacaaagactcccgtggccccggcagcagctcggccttctctacatctaaccacgtttac

SEQ ID NO: 375890 - DNA, 122 bp, Homo sapiens
gtggcggactctcagctatcagagggctccatcactccatcgtaaggaggcagctggtggcgagtcctgagcagggatgtgatccgacgggcaggcggcgcccgggacagaagctgacgtca

SEQ ID NO: 375891 - DNA, 122 bp, Homo sapiens
gtcggacgggcgcctactccgcgggtatcaccagcttgcttacgatggcaaggattacatcgtcctgaacgaggacctgtgctccttgacagccgcagacacggcggctcagatcacccagc

SEQ ID NO: 375892 - DNA, 122 bp, Homo sapiens
cattaaaatgttatttttcttgactgctgaggaattttgcacccctttaaattctgcgcccgcgtcctggttgggagatgtggggaaaatcctgggagcccaggacagggagaggcaagtcc

SEQ ID NO: 375893 - DNA, 122 bp, Homo sapiens
cttggaccccaatgccacggccaccagctggagcgaagctgacacggagccgtgtgtggacggctgggtctatgaccgcagcgtcttcacctccaccatcgtggccaaggtagggcctcccc

SEQ ID NO: 375894 - DNA, 122 bp, Homo sapiens
cccggggctgcgcagaggtcagactgccgcgggcagggccggagcctgctctgggggtcgcggaggtgtctcgagagttgaggacccgacccgggcgcgcgcgggcgcaggtatggggaggg

SEQ ID NO: 375895 - DNA, 122 bp, Homo sapiens
tgaaggaggatggggaggcaaaatgggaagaaggggacctatttcctgaggttgttgtgacgacttggctgacaacacacggagaggatggaaccagttctgatactagtttttaggatttg

SEQ ID NO: 375896 - DNA, 122 bp, Homo sapiens
cagctccctcctcccaaaacatgaattatcatttccactgaatgcaaatgagctgccttccgtggggggacagccagctgcaagctggacaataaactgtttcatagagacgcggcccgatt

SEQ ID NO: 375897 - DNA, 122 bp, Homo sapiens
gtcatcccggaagtgctacggttgcatcgtgtggggtgggctgtcatcccggaagtgctacggttgcatcgctggaccatcctcaacactggaccagaccagaaggggaaatcatgggtgac

SEQ ID NO: 375898 - DNA, 122 bp, Homo sapiens
tctaggagttcagggtggccccagttagcaaccagcaaggacctcagtcttacagtcccacggaactgtcaagaccagaatgagcaaagatagtgatgcacccccagagctgccaccaagga

SEQ ID NO: 375899 - DNA, 122 bp, Homo sapiens
tgtactcaaatgtggccgtccttgggatttacagcaattaacgaattacgggagtgcgcacgaggcagcaagctctcggcagccgggctccggctcgggctcggcctggggctggggactcc

SEQ ID NO: 375900 - DNA, 122 bp, Homo sapiens
gaagtgtgtgccatattcagggcagcccactggggtgcttaggaggagcagcgtgaacaccgggaaaagagcatctggagagacctagatagtaggctgttgctagtgctgtttggctaaac

SEQ ID NO: 375901 - DNA, 122 bp, Homo sapiens
catcacccggggctgccgtcctcatttcgagctctttctagagcttggctcccgctgaagcgcaacttccgcgcccaaaccttgcttttacgacgggcggtccgcgtccaaaggtctcttac

SEQ ID NO: 375902 - DNA, 122 bp, Homo sapiens
ctggcgcggcgccccggaaggaagccggccccggcgcccccgcggcccgccccggccccgcgctcaccagccatcgcaccacaccctcacggcgcgcctgccccccgggcccggctgctctg

SEQ ID NO: 375903 - DNA, 122 bp, Homo sapiens
gttcttccttctaaagagtgactaggggaccaagaaacttttcctaaccccttgctttggcgattgctatggagttcagcctgctcctttttaaccttgcctccactacaatttttcctttc

SEQ ID NO: 375904 - DNA, 122 bp, Homo sapiens
aatagtttctacctgactgggtgctttgacaatcttatcacctagtgcatgtagagggatcggcacagtgcttgggattcaatgctcagggttgtactatctattgctattgttattcaccc

SEQ ID NO: 375905 - DNA, 122 bp, Homo sapiens
tggaactgggtcccagggagcagccatggagggggctgagcgtggcctcactggtgcggccgaccttggatgtggttgggaacccggagtttgatctggctttaggctgaggatgttgaaaa

SEQ ID NO: 375906 - DNA, 122 bp, Homo sapiens
gttccatgccaagttcaccctcgagtactcctgagcaccccagctggggccaggctgggtcgccctggactgtgtgctcaggagccctgggaggctctggagcccactgtacttgctcttga

SEQ ID NO: 375907 - DNA, 122 bp, Homo sapiens
acggctcttgcctcaaagccacccactctgcggtgacgtccgacgcagacagcgcacacacggattacgttggaactcatagccaggagcggcttgggaattcttgggtgtattagtcactt

SEQ ID NO: 375908 - DNA, 122 bp, Homo sapiens
aagtcgagagctcaccaccccgggcgttcgtcactgcagacatcactgcagacacagagacggccattagagctcaccaccccgggcgttcgtcactgcagacatcactgcagacacagaga

SEQ ID NO: 375909 - DNA, 122 bp, Homo sapiens
cgaggcgggcggccgggccacccgctcgccgcctgcccccctcggctctccgcgctcccccgccccccagccgcccgcagcctagccgccgccccgcctcactcgcggcccgcccccggcct

SEQ ID NO: 375910 - DNA, 122 bp, Homo sapiens
ggatgctttgtttgtcttcggggactgtattaccagcatgtaactgattaggctttaaaacgctctaggttacctgaggcccggaaggtgcttcatcacctctgagtctgttctcctctgcc

SEQ ID NO: 375911 - DNA, 122 bp, Homo sapiens
tgccacaggcttgcctattgcctctgagtgacagaatcaggctaggtggagtggagtctccgttcccatttccaagtacagggtccgctcccctcaactaccggctcctggttgcctgtgcg

SEQ ID NO: 375912 - DNA, 122 bp, Homo sapiens
gcgggcgggagagaggccgggagctcgggcggccggacggaggagggacgaggcagcgcgcgggggagcgcgccctcgccctggcccctccgagtcttcgactagtccttgcaacttcttgg

SEQ ID NO: 375913 - DNA, 122 bp, Homo sapiens
ggatagagaagccttaaaaggcaaacatggcccccaaaaacgtttgggaggaaccagggacgggctgagcaggcaactggaaggcgacggaccatggggatgagctcacagtgtagtaagat

SEQ ID NO: 375914 - DNA, 122 bp, Homo sapiens
gcaggcatcatcgagttccatcctgagaactcgatcacgtcctgggtgcatgtgcgcgtacgcgcgcacacacatgtacacacgcacacgcatgcatgcatgcacggtggggcacccaagcc

SEQ ID NO: 375915 - DNA, 122 bp, Homo sapiens
gagagccgcggtgagggcggggcccgggtgggcggtgccctgagcggggctcctagtgggcggggctctggggtggcggccgttgccgggctacgggagagcgcggagccctgcgctgggag

SEQ ID NO: 375916 - DNA, 122 bp, Homo sapiens
cctccccagagttgcctaactcctaggccctgaaagtgccagaacaaaggccgactcccccggcgcctccctcggggactgagcaccctgggccctgctgacgaagcaaaccccagactcag

SEQ ID NO: 375917 - DNA, 122 bp, Homo sapiens
cccaacagccaatctaatttagtatattcatggtgccagcaggtgtcagtgaaacagtcgcgtaaaccatttatttatttgtatctgttggctcggagttagaccctggtggaagagctcat

SEQ ID NO: 375918 - DNA, 122 bp, Homo sapiens
gagtgcacatatagcccaccctcgaaggtaggcgggtaatcgagctattggctggagccccgccccagggcgaggaggagaaggaggggcaggagggtttggttgagctgcagctgtttgtc

SEQ ID NO: 375919 - DNA, 122 bp, Homo sapiens
gtgacatgtgaaagttatatgaaattcaatttcagtgtccttaagtagagagagatgtggcggatggcatgcagccatgtgcatttgcttactagtgtctatggctacttttgcactgcaac

SEQ ID NO: 375920 - DNA, 122 bp, Homo sapiens
aaacagcctttctcttggtcttcgtctgcatcctccttttcaaaatatcttgatttcccccgcgcacccctgacccggctgcagcaccggccctccgagcgggaagagccccgtgaaggctc

SEQ ID NO: 375921 - DNA, 122 bp, Homo sapiens
ccgcctgctaggagctgcgctgaggtcccagataggcgacgctggcggggtgcccctgagcgaaggcagcccatgtgtgggacagcagcaggagaccagggtccagggacccacctcccacc

SEQ ID NO: 375922 - DNA, 122 bp, Homo sapiens
ggcttaaagtctgacaccttccactttcatgactggggtgtccggagccatcatattagacgtccacctgccttccatcatatgttgaggaggagtctgcaactatgtggagaggggattct

SEQ ID NO: 375923 - DNA, 122 bp, Homo sapiens
tcctcatccagggcttgcgggcgaggcctgttttaagtctccagtaaccgagcggaggcccggcaggcgcgacccgggctgcgtacgtcagagctgcctccgaagtggtaaaatgtgctgcg

SEQ ID NO: 375924 - DNA, 122 bp, Homo sapiens
aaccattccccttccttcatcatagctaggtgatctgtctccactgtgcttttagcaacacggccttgaaaaagagactctgagagactcactccagtcatgcagaattttgggacaatagt

SEQ ID NO: 375925 - DNA, 122 bp, Homo sapiens
gaagaccgcagcctgcctgggacggccgccctgggcgctcagaagccaggagatgtccaacgaggcccttgggttcctgatcctctgcccaagaactgggtttccgtaatgcctctgctctg

SEQ ID NO: 375926 - DNA, 122 bp, Homo sapiens
actctctaacttgttcttacactgacaccattaactgccctaaatgccaggcacctactccgccagcccagtggaaacaagcctgtattagtaaaccgcgattgggtttagaattgggactg

SEQ ID NO: 375927 - DNA, 122 bp, Homo sapiens
ctgcagattcggccggcggggaggggatgcggaaccagtcgcgcccaaacctcgggtcggcgacctggcgccccgccacccccaacactgccccgaggcccggtgacaatgaagcggccgga

SEQ ID NO: 375928 - DNA, 122 bp, Homo sapiens
aatgatgggcggggcttgaataacagacccgccctcttccaggctggccacgcctccacacgtggttccctggctgctccttgtggctccacctcgcgggttttcccgcgcggcgtccacgc

SEQ ID NO: 375929 - DNA, 122 bp, Homo sapiens
gtaacgactaatctagcccatcatttggatggaggtattaggagacttttgctgcttctacgggtttctatgggctcctgaggagtgaggacagtgtgtcctatttctctactgcctcgacc

SEQ ID NO: 375930 - DNA, 122 bp, Homo sapiens
gaggcgggaggggccgcccgggatggagacgttgcggccggtggccacagaaacttgagccgcggcagagaaacctctgctccggtctctgcgtcctcttcccacactcccgtgcgctgctt

SEQ ID NO: 375931 - DNA, 122 bp, Homo sapiens
cacgcaggtggtagtagtccaggtggtcgtaaactcctcctcatagcttatgggtggcggcggctgggctgaagactgcggacaggacatcccgcccggccgcctgtggtcaccctcccgcg

SEQ ID NO: 375932 - DNA, 122 bp, Homo sapiens
ctctacctggtggccctatgggagcctatggccatttagtgtgaactctagtctgtaaaacgaatatcatgcccactatatcgactaatcaagcccatcctgtaccatagtctggaaaaggc

SEQ ID NO: 375933 - DNA, 122 bp, Homo sapiens
gcgcgggcaggaacttgggctgcgtgcagcgctcgtgggccagcgcgagttccaggtgggcgcgggcttggcgggcccacacttggagcggccggccagccggcggtgccagccctgggcag

SEQ ID NO: 375934 - DNA, 122 bp, Homo sapiens
ccttcaatcgccgactagaagctcgcccggtgggcggagccgtgccagctcagggcagagcgaggaggcagaagtctccgccttcctcaagcttggttgagaagtccacctgcagttgcaaa

SEQ ID NO: 375935 - DNA, 122 bp, Homo sapiens
tccaagcctggccagagaaacctgagtgggcctacagggagaggtgttgaggagggtctccggagggaaaaaatccgccagagttttccgggcccttcagattccctccagcgcccccaccc

SEQ ID NO: 375936 - DNA, 122 bp, Homo sapiens
ctccaggtcccggcccctgcacactctgagaattacatcacagcacggtaagcgtcactgcgtgctgctccacaacgtgggacggccctgagtcacggtcccccgagttcccatccacagcc

SEQ ID NO: 375937 - DNA, 122 bp, Homo sapiens
gcgccattcacataggatacgacagacatggcgcccgccccctccgcccccccagtacaacgtgggggccctgctgccacgccctcgggtctgacctgaccccaggacaagctggcgggtca

SEQ ID NO: 375938 - DNA, 122 bp, Homo sapiens
cttgttctgttcaatgactagagagactcaaacgatgtcaccagatgacagcaactcatgcgtgttaaactcttcgtaaaacaatgttagctgtacccccgccccccccccaaaaaaaacac

SEQ ID NO: 375939 - DNA, 122 bp, Homo sapiens
accaaatactcagttctgggtgtccattggcgggaacctcaggcgcctgtgcttacgcttcgcgatgtacttggaaggcggtttgtcacagtaccagggcttgcagtccatgcccggggacc

SEQ ID NO: 375940 - DNA, 122 bp, Homo sapiens
cgccctgctcaggccaaggtcctctgagagttccaagcttctccactccctataaaaggccggcggaacagccagaggagcagagaggcaaagaaacattgtgaaatctccaactcttaacc

SEQ ID NO: 375941 - DNA, 122 bp, Homo sapiens
ccatacaggcctccctgctgtttctccagcatgctagttgtactctacctcagatctttgcgctagctattcccactgcccagaatgtgttcttctggatgtccatatggctaactccctca

SEQ ID NO: 375942 - DNA, 122 bp, Homo sapiens
aggtgttacccaagcctgtcagcactccccaccagtaagccttgtgtcctcattttacagcgcgagtcatggctggggccttagtggcaacaagtgctgagatcagcgggctcagtagcagg

SEQ ID NO: 375943 - DNA, 122 bp, Homo sapiens
ccccagcagggtgcagcttcttacagactgggtctctatctcctcttacccaggagcacacgatttggccgtgatttggccggcccctgaggaaaggggtgatttggccggccccgaggagc

SEQ ID NO: 375944 - DNA, 122 bp, Homo sapiens
atccccatatgcagcagttattgacgtaacagagagatttaccctgaagaaaagatgacccgaggggacatgctatactcttcaaataggagagtggctttcatccgtaaaagtttctgtgg

SEQ ID NO: 375945 - DNA, 122 bp, Homo sapiens
agctggacccaccctgtgtgtgtgattgccctgagcccacagaaagacacctccagagtgcggattgagaagcctttattgtgggaggatcggggtgtcctagggccccgggagacgggatg

SEQ ID NO: 375946 - DNA, 122 bp, Homo sapiens
taataaagagagatgggcgagggagctcggccggcgcgcgcccctcctctgccctccccccgggccgaatagattacagctctgtattcagaaacacgcgccgcgcgcattcctcctcgcga

SEQ ID NO: 375947 - DNA, 122 bp, Homo sapiens
cctttcctccttctcagcccagctgactgctactcatccttcgagtcccaacacaaagctcgcctcctctagaagccatccctggctcccctatgtagtaaccggtccctccaaagtgttcc

SEQ ID NO: 375948 - DNA, 122 bp, Homo sapiens
gaggagccaggtgagcaggaccctgtgctgggcgcggagtcacgcaggctcgaggtgagccggaacccttgtgggcccgggctgcgctcccagccgccagggggcgagaggcggcggggcta

SEQ ID NO: 375949 - DNA, 122 bp, Homo sapiens
ctgtgagagcaggtgcagcagggatttgccaggtgacttcacggagggtgtgtgaacaggcggcagctctgcccttgcgcagtcctcgtgaccgttcggccagtttaagctgattagatgtg

SEQ ID NO: 375950 - DNA, 122 bp, Homo sapiens
agacattgtgctaaaatgcagcagcactcagtccagttcctagcagcaaaagtggaatgacgtctccacggacacagtggccctgcccaccgcagcagcaccagcaccagcacaagtggctc

SEQ ID NO: 375951 - DNA, 122 bp, Homo sapiens
accttgctcttgaggaggagctggaaggagagcgtacgcttgcaggacaggttggggttacgctccgagtcgttgactcgagccttcaggacccacgtctggttcagcactgtgaacctggg

SEQ ID NO: 375952 - DNA, 122 bp, Homo sapiens
ctggctgtgcatccagcgtgcacgaccggtgtggcctgggctccagcctggagtgtggaccgggtcggccggcgtgtgcctcccctgtgagggtgccctggcgggtgtgagcccggcgggct

SEQ ID NO: 375953 - DNA, 122 bp, Homo sapiens
gccagccggagggtggggcccaggcattcctgtggttggaagccaaggctggaggccaatcgggcctcggcagctgctgacgccaccaccgacgcggcgaggcccctccacacccatcctct

SEQ ID NO: 375954 - DNA, 122 bp, Homo sapiens
aaaagcttaaactgagaagggaccaaggctgtactaaaatctgagacctgacttccagcacgagtcttgattgcttttttttttctcgagttcgaggcggagcccgcgaaccccatctcctc

SEQ ID NO: 375955 - DNA, 122 bp, Homo sapiens
aagtttccagcagaagtcccagacatcgaggaacacagacaatccatccccactatgtaccgtctgaattctagctctacaaaatccatgggaatgttaaaatggatgttgtttcatgacac

SEQ ID NO: 375956 - DNA, 122 bp, Homo sapiens
gaacccggctgcggagctcatgctgcggcagagcttccagcaggatctcagtgctcagtgcgatgggaaactcgggctgggtctctgtggccaatgactcctgagcctcgccggcacgtttt

SEQ ID NO: 375957 - DNA, 122 bp, Homo sapiens
ggggcccgggtgggaggggtttggcagcggcaggcgcggcggcggcggcggaggcggaggcggccccgggctcgggcggctgggatggagcagaagagcgcggagcaccggagggcacgcag

SEQ ID NO: 375958 - DNA, 122 bp, Homo sapiens
tggactgagggcccctcccccatgtccaactctcctctgtgtcagaccctcctttcctcccggagcccctttcagtgcggggccctcgttcccccaaagtgggaaccccttccttctcaggc

SEQ ID NO: 375959 - DNA, 122 bp, Homo sapiens
attgtggcccactgcagcctcgacctcctgagctcacatgatcctcccacctcagcctcccgagtagctgggaatacaatgtgtaccaccttgcccggcaactttttggttttggttgttat

SEQ ID NO: 375960 - DNA, 122 bp, Homo sapiens
tctgggcagcccgtgctgaacagaggctgggatcgggcggtgggcccggtgcacctgacccgcggggctgggaacaatggctgggccggcgtggcctggcttgctgcccctgttcatctctg

SEQ ID NO: 375961 - DNA, 122 bp, Homo sapiens
ccgcctgggcggcggtgagaggcagggccgggagccgggccgctgggtttgggcctggcccgctcgccgcaatattgatggcccgtcagtgcagccctgattcctgtgctttcagttaaaag

SEQ ID NO: 375962 - DNA, 122 bp, Homo sapiens
tgtatttttcgttttccagattcattcatttaacaaatatcagttgagcactttccatgccgtagggcctgtacaaggcacatagcattctagacatctgaagcatcaaaactaatcatttt

SEQ ID NO: 375963 - DNA, 122 bp, Homo sapiens
gagagcagaaatcagaaatggaaactgaaactgaggggaggagccagctgagccgacttacgaatctcctatccctgccccaagaaaaagaaccacgtgtgctaacagggaagcactctttc

SEQ ID NO: 375964 - DNA, 122 bp, Homo sapiens
atccgctattgatatctagaatataaagcgtgaaatggttctgattgaagcttcaatcaacgcaggaaacaattgagctccctgggagtcggagaaaccagacctatggtttccatggtgac

SEQ ID NO: 375965 - DNA, 122 bp, Homo sapiens
tgctcacacagtgccttccactgagtttcatacactcctaggaatttaacacctactgaacgaatggaaatgattctcagttgtgtttatacactgagaaaattttaaagtttccctatcca

SEQ ID NO: 375966 - DNA, 122 bp, Homo sapiens
cacgctttttgtagaatctgcaattggatatttggatagctttgtggatttctttggaaacgggagtatcttcatataaaacctagacggaaacattctcagaaactcctttgtaatgtctg

SEQ ID NO: 375967 - DNA, 122 bp, Homo sapiens
acggtgcagatcctcatcggcctcatccacctaggctttggcagcgtgctgctcatggttcgccgcggccacgtgggcatcttcttcatcgagggcggcgtccccttctggggaggagcctg

SEQ ID NO: 375968 - DNA, 122 bp, Homo sapiens
gggcagcctggagcctggggcaggaggacagcaggggtaggagagggatccatgcacgagcgtgttcacacgtgctgctgagggaggctgtcccactgcgggatccctccgcggagccgtga

SEQ ID NO: 375969 - DNA, 122 bp, Homo sapiens
agcgcgacactagaaagagggacacaagcgaaaagacaggtggcccccaacagcgcgcagcgaactccactgccgctgcctccgccccagagacacgttgcaggccagagcggccggggcgc

SEQ ID NO: 375970 - DNA, 122 bp, Homo sapiens
ttgttgtcattagtgtataccctgtctccttgccgtttatgggtccttctttcaagcagtcggattttctgtctgacatagtataagtttagaggaaacaatagcagctgtaagataatagt

SEQ ID NO: 375971 - DNA, 122 bp, Homo sapiens
gggtcaccgcgtcccgggactgaccacctgtccggtgcgccgctcagagaccggggtggccgcagcctccgccacttgcccttgactttacacttccgccgaagcctacgaacttgccaacc

SEQ ID NO: 375972 - DNA, 122 bp, Homo sapiens
cgctgcacaccagcctgggcaacagagtgagaccttgtctcaaaaaaaataaagactcttcgtgaagtagtgttaagtggacccaggagaaaaatgaagatgacctcttaatggcccttcaa

SEQ ID NO: 375973 - DNA, 122 bp, Homo sapiens
caaataagcaataagtgaatttgctgatgagcttctcctgcagctgggtattgtcatgcccgttaccctcctgcccaccatatacccgcctaccagtccaccagcccttccaaaggctggct

SEQ ID NO: 375974 - DNA, 122 bp, Homo sapiens
gcagatgagccctgaaaatcccttttcaaggttgcaggttttcaaagaactgagtgcatgcgtgacgtctagttagcaaagggtctcttggctgtattttaaattcaggcccagttagccac

SEQ ID NO: 375975 - DNA, 122 bp, Homo sapiens
ctctcatcaaagacacctctcaagtggtcaagcacagcagcccgagcaggtggcaaagaacggagcaggagaagaccacagcgagcatgttcccgggctgagagttggtggcccagaatggg

SEQ ID NO: 375976 - DNA, 122 bp, Homo sapiens
atgaatactggacttggagctacagcaagtcctggaccgtgactcttatggggggaaattcggatttttggttttactaagccgtgtgtggggaggtgtccggcgtcctcctcctgggacgg

SEQ ID NO: 375977 - DNA, 122 bp, Homo sapiens
acatttagtgggtatgtcttcagaatgcttttcagatgactctgaacagaggcagggctgcgattgtgtaatgctgggtagttaagaggaaggaacgaccacctgtggagctggagaaattc

SEQ ID NO: 375978 - DNA, 122 bp, Homo sapiens
gaagcacaatgctaccataagcagatactaacagagcacagatgctggcgctgatgtcagcgtaaatgctgtcccgcaccagaaaaaaaaaaaaaaaaaacctcccaaagtactgtgcctgc

SEQ ID NO: 375979 - DNA, 122 bp, Homo sapiens
ttagatgtacttcttaatcctctctattcagtaaatggcaaatgcttttccagctatccccgttaaaaaaaatcctagagtcatcaaacccattggcagatcgtgttagttccccatcagtt

SEQ ID NO: 375980 - DNA, 122 bp, Homo sapiens
aagccgaggccgccccggaaccagagagccaggcgggaagtgcacaaaggcacgaggccacgcccaggaggggcgggccctttggccggaagggggggggccggcgcgcggggccggtcgcc

SEQ ID NO: 375981 - DNA, 122 bp, Homo sapiens
ctggatgagatcaatccccagtctgttgttacgagtgccaaacaggatgagaatatgactcgatttctgggaaagcttggtaaggacttggtaaaggatagagggaaaatggggaaggacta

SEQ ID NO: 375982 - DNA, 122 bp, Homo sapiens
gggactgccagatcaggggaccctttgcgtcctggagccttgggggctggatgacgtcgccgggcacctgaggaccccgcccattcctccctcggttccccagggagcgggcggccggcggg

SEQ ID NO: 375983 - DNA, 122 bp, Homo sapiens
gagtgacatggaagcaactccgtctgctgcagctgaccccctcacactgagttcacagtgcgccctccctccctcccatctgggggtagtgccttatgctgggtgttggagcagagtgaggg

SEQ ID NO: 375984 - DNA, 122 bp, Homo sapiens
aaaatgcgtggcttgcgtcacagaggagcgtttctggaacgcgctcgcagcacgacaccgcggtgtgtgcaagcggaacgccgccctgtccttgagccttttggctgagattgggagggcag

SEQ ID NO: 375985 - DNA, 122 bp, Homo sapiens
agctgccccctgtgtacgtgaggaaggagcggaagcgacacaaaacagacccctcaggtgcgcatcccgagggcgtcacatgacctgggggggccctggcctgcagaatccctgcatgtcag

SEQ ID NO: 375986 - DNA, 122 bp, Homo sapiens
ggccccacacattcccagatgccttagcttcattcttcacttctacaaagaaagaccactcgtgggaaaagctcacacaatgcttttgtatgggacacctggagattgttctaacacactgc

SEQ ID NO: 375987 - DNA, 122 bp, Homo sapiens
aaatctcaggaagcccttggggcagaagatggagaagaaaggggggctggagagaaaatacgagtctgtatctacactgaggttttttgaaacacacctcccaaatggaagtgtgtataatg

SEQ ID NO: 375988 - DNA, 122 bp, Homo sapiens
ggggtgcggtcagtcttgtttgtgctgctctccggtcaaagttcatggcgcttctccccacgcctttacttttcttgggagattcccagggaccaccatgttagagcctttggggaggaccc

SEQ ID NO: 375989 - DNA, 122 bp, Homo sapiens
tgcatttctcccagccagaggcacctggcacagacgttgcagggcctgggtttcgggatccgagctcggcaagtccagcgaggccctgcccgaaagaagccgcccagctcccaaacggaggg

SEQ ID NO: 375990 - DNA, 122 bp, Homo sapiens
ctgcacccgctcacctggcggagcagcagcgccccctgccggtggtccggggctggccggcgcgccctaaggccggactcttagcttctgccaccacctggtggccatttctggaagcgcag

SEQ ID NO: 375991 - DNA, 122 bp, Homo sapiens
tagacatgtgtgtttgtgcacatgtgcaagtactgctatagaataagccaaacacctaggcgtgggactgatctgtactatgatatgtaacacttgagcttttagcaggtaatgacacacaa

SEQ ID NO: 375992 - DNA, 122 bp, Homo sapiens
gccaggacctgtccatgatttagctggtaagcctggccagacgcaggggggcagtcagggcgaggggcctgatccagaggggaagggctagaagaggaaggggtggggcttccttgggatat

SEQ ID NO: 375993 - DNA, 122 bp, Homo sapiens
gcctacctggtccttcttgagagtgatctgccctatctcgcggttccccacgaaggatctcgtcacgcggtgcacacgttctccagcccggacccgaatgatgaagtttggagggaaaaatc

SEQ ID NO: 375994 - DNA, 122 bp, Homo sapiens
gtcaacccaggtggcccggatgtgacatccctgacttgcgcattggtctgaccagcaactcgagatccacggagggaagcaggcgcaggctctgtgaggaggcaaggtgggggcaggctgtg

SEQ ID NO: 375995 - DNA, 122 bp, Homo sapiens
tcctgaccttcccctctcaggtaaattatgtcaacataaagaacttttgacttatctttccgtgcagttaacttttcttcatttctctgcatgaaactgagcttagaaaaataatcagtggc

SEQ ID NO: 375996 - DNA, 122 bp, Homo sapiens
tactcccaggcctttcagaaccacctggttgatgggcggatgctgaattccctgatgaagcgagacctggagaagcacctgaacgtgtccaagaagttccaccaggtcagcatcctgctggg

SEQ ID NO: 375997 - DNA, 122 bp, Homo sapiens
gctgatcgatgaaggagacaagctggcccacggggaggtcaatacaatcgatgcggacctcgacgaaacggaagaatctcgcaggttcctgcgtgctgggttccactcaaaatgtttcagga

SEQ ID NO: 375998 - DNA, 122 bp, Homo sapiens
ccaaccttctggacaggacactggcacaacaggcacaagtcaggtctgtgctgggaaaggcgggctctacagccaccctaagaggtgaccataagtatttgatgtaaattgagatcttacca

SEQ ID NO: 375999 - DNA, 122 bp, Homo sapiens
aggaagccgggctcgataatgatcttgccctctttgtcatgaaccacagggactccgaggcgccgggccaccgggggactatagtagactcggatgcccgtcttgtcaggagccgtgtagct

SEQ ID NO: 376000 - DNA, 122 bp, Homo sapiens
tgtcggggcaacatgcaggcagagagggtgagtaggcaggtttatgtgacacagaagctgcgaacggaggctggggcaggagatacatatttgggggccatcaatacaaaggtcatggtgct

SEQ ID NO: 376001 - DNA, 122 bp, Homo sapiens
tcatcattttgtctatgaagaagagtcttcctaaaggattagtcagcacacagccagatacgtgggggcttttactagtgttttcaaggcttgtgaaacattcttgtaatttaagtattttt

SEQ ID NO: 376002 - DNA, 122 bp, Homo sapiens
gcgcttctgcaagaggcagctgctggctgagcctggtgcccagggaggtggtgacgaggacgcactccttccagttcactgggcgactctaagggacaccaatacagggattggtgggccgg

SEQ ID NO: 376003 - DNA, 122 bp, Homo sapiens
accggacccgggggaaatggggtaccaacggctgggccccaggagacactcggaggggtccgcgggctcggcccggtccctccgctggggggttaccagccggccggcagcgagatacccag

SEQ ID NO: 376004 - DNA, 122 bp, Homo sapiens
tcaagtgtgaaatcgggtcattcacgaggaaacgggatctttgcagaaagctgtttggcgcgtgatctagaaccacaggttccgcgggggagcgggggcctgagtcggaagaggggctgcag

SEQ ID NO: 376005 - DNA, 122 bp, Homo sapiens
tcattccatggaaactgttcctggtgtggtctccgagcatctccgtgttgataaaccttacgtgaccacagcaacttttggtattgttgaccattccctccttctcgaaacacttaacttct

SEQ ID NO: 376006 - DNA, 122 bp, Homo sapiens
gaacatgaaccccctcctccccctctggaagaagcaacctcagatccaacagcagagacacgcagcagaacaaaatctgggcattggtccctgtgtaggatggcttcccgttattttttttt

SEQ ID NO: 376007 - DNA, 122 bp, Homo sapiens
gcgtgcacgtgcgtggcggataccgccccctctgctctcttggccaatgagaaaaagctacgtaactctccaccgcccggtggcgggtcacgtgactgcgtctccccgccctctcaccccgc

SEQ ID NO: 376008 - DNA, 122 bp, Homo sapiens
ctcgatcttctgacctcgtgatccgcccgcctcagcctcccaaagtgctgggattacaggcgtaagccaacttgcccggcccaaacttttaaatattgtctacagttggcataatcctcaga

SEQ ID NO: 376009 - DNA, 122 bp, Homo sapiens
tcatctgtaaaatgagtatggcaataataacaaatacacctcagagagttaaaaatggaacgaggtaatatgtgtaacatttagcacaatgtctggcacatttgcaaagtgccgaaaatgtg

SEQ ID NO: 376010 - DNA, 122 bp, Homo sapiens
tttcccctcagctggctcagccgccgccgaaagcttcggccgactccacagccagccaagcgcagcacgtcacttccggacagggaagcaccgccttccccgcccggacttgttgcgaattg

SEQ ID NO: 376011 - DNA, 122 bp, Homo sapiens
cgtttgctctgaagacatttccttgtcaatctctcccgccacattaaaaatctgtcattacgattgcatcgccgcctggctcctgagatttctgactgctttattgctctcctcattttttt

SEQ ID NO: 376012 - DNA, 122 bp, Homo sapiens
cagaccagagatagggtgccaggctgaaagcagctcttacctgttgccctgcactgaggacgaacgaatgacaggtgggtacttgggttaggacctggcatttatcccttctcctctgactc

SEQ ID NO: 376013 - DNA, 122 bp, Homo sapiens
aaggcttagtgggagacccagcaacaggtggcaccaggtctgggaaagattcctagaaagcggagcgggtctcggagggggaggatttagccccaggcgcccgcgatcagcgaacgagcgcc

SEQ ID NO: 376014 - DNA, 122 bp, Homo sapiens
cgcggcagcttggcgccaagaagctcagcctggctgcgcaggggaagctctttgcttgctcgtcaccgtggcaacgcgcgcggccgtttccggaggcggtggccaaagtgggcggggctagg

SEQ ID NO: 376015 - DNA, 122 bp, Homo sapiens
tgaaatggtcctttcttatcgcagcatcaggctgtgtgagtcggcctgtgggctaccaagcgagagacatttattttcttgttgttctaggggttggaaatccaagatcaaggtgtcggtag

SEQ ID NO: 376016 - DNA, 122 bp, Homo sapiens
ggggttgggttctgtgcaggtgtggaggcgtcaccagggctgaattcatgggcacctccccgcagacactgtaggcctattcaatagaacctgctctccagtcaaggctgccaactcagagg

SEQ ID NO: 376017 - DNA, 122 bp, Homo sapiens
cccaacgtctgggctgtgcgttgtaacgcagttggcggggccttcagcttgggatgagggcgaaggggctcgggatgggtgggaaagcaaggaccgggcaacaggtggggaggtggcggact

SEQ ID NO: 376018 - DNA, 122 bp, Homo sapiens
cgcctcagggaatgccagcccccacttcttctgtcacctctcccccatgggccccgttaacggatacagggaggaaggcatttcctgcctagatgtctccgcccccactgccatggagacca

SEQ ID NO: 376019 - DNA, 122 bp, Homo sapiens
tgcagcgtctctccaacagtggtctacactcgagacactcgtcagcgtttaaaaatagagcgtgtgtgagtgcagcgtctctccaacagtctacaaatggctttgctgcttttcatttcttt

SEQ ID NO: 376020 - DNA, 122 bp, Homo sapiens
cacaaaccgtggagcggctccagcctgactggcaagtgtggcttgcaaaacgcggaaaaccgagacacgcccagagataggaggagggaagtgcaggccccgtccaataagtattcaggccc

SEQ ID NO: 376021 - DNA, 122 bp, Homo sapiens
gtctgtggcatgatggaggtgccggtaaagcacccaggctcttagtttctttcccaatctcgtgcagtcagtgccctgtatcagttcccagaggcaactgacagcctctctgccactgttgc

SEQ ID NO: 376022 - DNA, 122 bp, Homo sapiens
aaggggttcttggtggggtatgggatcttccgcgtcttggacccagcgggccgcaggtcccgcagggccatgtggatggagaagttgccgagctggcagatcacaaagatggcgagcgccag

SEQ ID NO: 376023 - DNA, 122 bp, Homo sapiens
agccgactactgggttcaaatctcttgaaggtcaggtcggcatggctgagccaattcctccgcttgcaagactcagggttcggagtctgccaatttggaattcacgtgactatgtgttaagt

SEQ ID NO: 376024 - DNA, 122 bp, Homo sapiens
tgctggccaatactgcttcctggcagagccaagcgccgcccacctgacgcctcagtgctgcgggtggtgagacccgtcgctggctcccaccatggtcaggtctcctctttcctcccaaagct

SEQ ID NO: 376025 - DNA, 122 bp, Homo sapiens
tatccgccaaaactttgttataagttgtgcaactgggttcgcccaaggcaccggagcctgcgcgcaatcgcacaggtacgcggccgcccgcggtcctcaggaagaaacgcttcgccgccgcc

SEQ ID NO: 376026 - DNA, 122 bp, Homo sapiens
aggatctgaggcgctgggtaatgactgcatggccagggtcagggttgtcatctgcaggctcgacggaggtgaacgcccccgtctcagtcttcccttctgtctgtgggcgtcacggtggcccc

SEQ ID NO: 376027 - DNA, 122 bp, Homo sapiens
cgttatccccctgccatggcgacccaaagtgctgggattacaggcaggagccaccacacccggccacagcatctgtaatatttgtaaataaatttctaacaaagagtagagattgtggtttc

SEQ ID NO: 376028 - DNA, 122 bp, Homo sapiens
gggatataatctcgtggtgcgctgcagtccgaaaagcgcaatattcgggtgggagtgacccgattttccaggtgcgtccgtcacccctttctttgactcggaaagggaactccctgacccct

SEQ ID NO: 376029 - DNA, 122 bp, Homo sapiens
ttggagtagcagggcaccaccttgcgcaggttgtccagggctgcgttcaggtcgtgcatgcggttgcgctcccgcgcgttcgccttctgccgccgaagcttggagcgctccaagcgcgcctt

SEQ ID NO: 376030 - DNA, 122 bp, Homo sapiens
tactgccactgccgtgtccggccggcctgagcagagtggggtggggctctgcacaagctacgccccccacctccctggcctccgggtcgcgtcagaaacagccgcggggcaccacgggatat

SEQ ID NO: 376031 - DNA, 122 bp, Homo sapiens
ctttatttccaacctcagataagtttctccttttctttctgtctctctcaatattttccccggtttcatcctcctccccgcgcccccgtatcagtcatccttttataatttatccagttttt

SEQ ID NO: 376032 - DNA, 122 bp, Homo sapiens
ttcaggttttgttaagatctttttggtgtccattttaattgacctgtttagtacaaaaatcgatatatgtcctatatagaaaattagaggctgggggcagtggctcacacctgtaatcccag

SEQ ID NO: 376033 - DNA, 122 bp, Homo sapiens
tgccgattggccagttcgccctccggtatgcagatacggtgggagtcacgtgctaggggccgggacgacttcctgttggaggccaacgcggggcggggaagggggcgcgagcgccccgtctg

SEQ ID NO: 376034 - DNA, 122 bp, Homo sapiens
gcgtccccggatgccgctggcatttgtggcaggccctccgcccgcattgtgttgcagccgcggaccaggtgcccttgatggaggacctggagcagatcttcctgcgctcttggcgcgagtcg

SEQ ID NO: 376035 - DNA, 122 bp, Homo sapiens
gctctgccccaagaccttcacccactcctccaacctgctgctgcaccagcgcacgcacggcgccgcccccgccccgggtaccgcctccgcggccccgcccccccagtcccgggagcccggca

SEQ ID NO: 376036 - DNA, 122 bp, Homo sapiens
gccggcgcgagcgcgttttcgtggcgcctgccccgccccctcactccaagcccgcctccccggccccgcccgccatggcccaaccttcatccgctcagagataaatcagcgcgcgaaagtgg

SEQ ID NO: 376037 - DNA, 122 bp, Homo sapiens
ccgggaaagagagcgcctaacccagggccaggcaccgccacgatttccttcaccctgacacggcccccagcccagccgatacctgtgtgaggccacagctgacctcgattgggctttgagaa

SEQ ID NO: 376038 - DNA, 122 bp, Homo sapiens
cagtgcggcatctgtccactgggggcgtctttttcctcgaattgcgctagggctccccagcggctaacagtagccacctgcgcttgtgttcgcgttatgtatcgtttccatccttcgtggct

SEQ ID NO: 376039 - DNA, 122 bp, Homo sapiens
aatatggaggagggatcccaggtgcacagatgcagtgagccatcatgccagcacataggtcgcatgttatggtaatgaagctgttgcctctcccacagtggagactttagcatagtaagttg

SEQ ID NO: 376040 - DNA, 122 bp, Homo sapiens
cgctgctgctcctactcctcacagtctcgtcgagggtcccggagacgggagtttccgggccgctggtccaagaggcaatgccagtttcggtacctttgtgttttcgtccccgaagtagtagc

SEQ ID NO: 376041 - DNA, 122 bp, Homo sapiens
cctttcaactgcagctgggatggctgtgataaaaagtttgctcgttcggatgagctgtcacgccaccgcagaactcacacaggggagaagaagtttgtgtgcccggtgtgtgaccgacgttt

SEQ ID NO: 376042 - DNA, 122 bp, Homo sapiens
gctttctgatctcccacagcccttgtgtttgatggtcaggaaaggagaatacccttggatcgtcttatctccagaccaccccgaggctggctggacttaaggggtgaggaaagacaagatgg

SEQ ID NO: 376043 - DNA, 122 bp, Homo sapiens
aggaggcagctctgttgtatcaacactggcctgttgtgggtgaagacaaacctgccccaccggccagcctgctcagcccccgccccacctgtgccctctgccatgaccttaagttcccagca

SEQ ID NO: 376044 - DNA, 122 bp, Homo sapiens
ccaggtcagggatagtgacctcccgctgatctgcagccacgggcaccacctggggctgcccgtccctgtccttgtactgaaccacaaaggagtcgaattcaccctcagggactgtccatgag

SEQ ID NO: 376045 - DNA, 122 bp, Homo sapiens
gctgctgctcccccgcaggttgttgtgcaccagctctgagatgatcatcttctcaaaggccgccgcatcggctaggttccggcctcggggcggctcagggcccccatccccgggagggaaat

SEQ ID NO: 376046 - DNA, 122 bp, Homo sapiens
ccccattccccctcccctaaccacttcagcctatggaaagaaaattctgctttccacttccgtgagatcaccttttacagattccacaaatgagtgagatcatgtagtatttgtctgtgtct

SEQ ID NO: 376047 - DNA, 122 bp, Homo sapiens
gcccgggctccttcattctccaggctcctctcagaacacagcaagggtggctgactccttcgaacgtccattaagcacaatgcaacggggcgaggcagtagggggtttgctgagcccggttc

SEQ ID NO: 376048 - DNA, 122 bp, Homo sapiens
cggggctcgaagaggagccaagcgtttccccaggtcctagttatgcctccaaataatattcgtagaaaaacaaaacagaaaaaccctccagacttttatccacaaataaagaagaaacatat

SEQ ID NO: 376049 - DNA, 122 bp, Homo sapiens
ccaggcaaaaattcggcctggttaaactggaaagaccaggaaagcccgcccacgggcgtccggggaacgcctgcaaagtgccagcaccctaccaacccaggcgccgcacgggtggggtcgcg

SEQ ID NO: 376050 - DNA, 122 bp, Homo sapiens
atgaggcacaagaacaagaggccaccttatgctgtggccagcagaggcattcaaacattccgtcagcaggattccagccaacctccgaagctcacttttataagccagccccaggcatccca

SEQ ID NO: 376051 - DNA, 122 bp, Homo sapiens
ttcttctgtccagctttgactgtttaagaagtcaagttatgttagacctagattgtattccgaactagagctagactataaaacttttttgagaatgatagaaatgtttaacccaaatttgt

SEQ ID NO: 376052 - DNA, 122 bp, Homo sapiens
ctacccgcagccccggccccaaccagaggccccacttcagcccaccaggcaggactgcagcggggcacgccccacggaccccagccccttggagatcccaaaccccatgcctgctgctccca

SEQ ID NO: 376053 - DNA, 122 bp, Homo sapiens
agccctcggcctcggcttttatgctagggaggtcctcccaccctgctcctcagtgactcacggcttctccctctcaccccgcccccactcgggattgcacaaagcctgggaaagtgggaagg

SEQ ID NO: 376054 - DNA, 122 bp, Homo sapiens
ttactgacccctccccatccaggggacagacagaatcggaactttgggctcctgaaaggccgagggaggggggtgttaagatccagccccgtgcttccgaagtgcagaaggagctgggaaag

SEQ ID NO: 376055 - DNA, 122 bp, Homo sapiens
tgtcgccatggctcccggcacaccctgacatccgtaggcgccatcctgacaacacgctgccggccgcaggcctcacaccacagcaattctcactcgggcctccctgaccctcgacctgtggg

SEQ ID NO: 376056 - DNA, 122 bp, Homo sapiens
agcaactgacgattgggagctcttaccttttggagtcccttctatcccattgaaagtgtgcgggtggtggtataaaaatgtttcagctgctctgcgcttcagccccacccataatgacatct

SEQ ID NO: 376057 - DNA, 122 bp, Homo sapiens
ctgccttcacccgtttccacttggcccgtcggttctggaaccagattttcacctgcacctcgctgagtttgagggcgtgggcgatctgcgagcgctcggtcaaggagaggtactttttgcag

SEQ ID NO: 376058 - DNA, 122 bp, Homo sapiens
ctgcctccagtctctgctcctctgccaagcccaccacaatgcaaaagcagcagctgctggcgctcacattttcagaactctttcatgtacattatgccatttgatcctttaccggaacccca

SEQ ID NO: 376059 - DNA, 122 bp, Homo sapiens
aaaggttttcgcttttccctgggatcgctgggaagtgtagtcttcccatggcaggcaatccggcttccggggctggagaggggtctgggatgccctctgccgaggtggagtccgccctgcaa

SEQ ID NO: 376060 - DNA, 122 bp, Homo sapiens
cgcaacctctccttggcctggctgcttagcctacttcccttgggcctctgtgggcctgggcggccatgtgtaggcctccttccctgcctcgatccctccggcgccgacggagttaagcggga

SEQ ID NO: 376061 - DNA, 122 bp, Homo sapiens
tagtcctgtttttggtatgacacttcaccctgctcccatctgcacctgacatccgcagttcgtagctactgtggttcactgctccagagatccagcctccaatttttagtctggcttgggga

SEQ ID NO: 376062 - DNA, 122 bp, Homo sapiens
cagactgcatgccatatgtagaaaaaggctgacttttattttcctgcagagcatcttcctcgggagagcagggagccccaagtcatcgagttaagagcaggagaatccccttgactaggttg

SEQ ID NO: 376063 - DNA, 122 bp, Homo sapiens
catttggcagaaaagcttatgaagaatgtgaatattataaagacccccaactactgatatcgtacagttttagaacagcatctctcatctaaataagaattggtctggagttctttatctcc

SEQ ID NO: 376064 - DNA, 122 bp, Homo sapiens
catagtagtcaattagcttttggtgatgatgagtcacaggaatcaaaacattttgcaaagcgtttggcagacgaccaaatgctctagcttgagctaccgagatgtgacattttagaaaatgg

SEQ ID NO: 376065 - DNA, 122 bp, Homo sapiens
atgaattttctgtaattgctgacccaagaggaaacactctaggacggggaacgacaattacgtgagtatgaccaattccttataagaattaatagtcatggtgaggatcttgactctccagt

SEQ ID NO: 376066 - DNA, 122 bp, Homo sapiens
ctacagccacgcggcaggccagggcaccggcctctactccaccttcacctacatgaaccccgctcagcgccccatgtacacccccatcgccgacacctctggggtcccttccatcccgcaga

SEQ ID NO: 376067 - DNA, 122 bp, Homo sapiens
agccgctcctcacagggtgctgtggctccccgctgcaaaggggcgggtcctggtagggggcgtggcctggccgacttgcggggcggcggcgccctctgccggcagactcgggaacggccaca

SEQ ID NO: 376068 - DNA, 122 bp, Homo sapiens
ggaggcctctcacccgcacaggtaccccgggtgcagcgcgggcacctgaagccccgtccccgctccctgctgcccagccacccctttgtggtcacgggccgggcctaaatggaacatttggc

SEQ ID NO: 376069 - DNA, 122 bp, Homo sapiens
ggagcctgtagctgtgcactgaatacttctattccaagcgggtcagtctttccagctcaccgctgggttctttcccttaccgtggtctcccaggcacttactgctgagaccccactcaggct

SEQ ID NO: 376070 - DNA, 122 bp, Homo sapiens
cacctgccaggggtgccctagatggctgagcggagccaggcaggggctgccactctcacacgccagctctcggaccccctgaggggaaggcacagtcactggtggggcctcctgtcttggcc

SEQ ID NO: 376071 - DNA, 122 bp, Homo sapiens
caagtcatcaagggaggtctgcactgttgaattaggctaattaggctaccattacatcaccgtaagcctaggtgcactctgcagtggtgttctctccatttcaaaacaagaagtcaggttaa

SEQ ID NO: 376072 - DNA, 122 bp, Homo sapiens
tctccgtttctgttggctgagctgtggcttagggcctgtgcatgttctcccttaccatcccgggtggcctctgtcctctgtgaaggtgattgtcctgttgtcactgtaccttccccatgcat

SEQ ID NO: 376073 - DNA, 122 bp, Homo sapiens
gcgcatagcacgggattcatgcagtggtctccttcacatcagaagcagtatattctaacgcggtggctcccaagccacattcatgggaaaccctgctgtttcattgttaaaataatagtgct

SEQ ID NO: 376074 - DNA, 122 bp, Homo sapiens
tccaaatcacctcgcagcggggctcgcgccggcagctgtgggcctctgagaagtgaatttcggagctgccccttctgagagtttccggcgacctcgctgagagtgagaggaagtccctgcgg

SEQ ID NO: 376075 - DNA, 122 bp, Homo sapiens
tggaacaggactcaggatgcagccctggtctacactggcgggaccccttgcgtggcagggcgggaggtggtcgggcgggccaggccccggtgagtgacagcggtggggaggctccttggggt

SEQ ID NO: 376076 - DNA, 122 bp, Homo sapiens
caccttccgcacctactgccaggagagactcatgcctcgcatcctgttggccaatcgcaacgaaggtgggcgggctggtgggtgccctgagactgctcctccgcctggagccatagccaccc

SEQ ID NO: 376077 - DNA, 122 bp, Homo sapiens
cgaggagggcctggccaccctgcacagcgtgctgctccgcaagcagccgttcctgtggcgcgctgcgctgctctgctctgctacaccagccgccacgctgtgcgtctgtccttccgccagct

SEQ ID NO: 376078 - DNA, 122 bp, Homo sapiens
ggggagtgggggcccctggagcggagaactcgcccagcctggcccccagccagcccagcccggccggcgtgagctcatctcccgcctgagcccccgcccgctgccactccctctctcctccc

SEQ ID NO: 376079 - DNA, 122 bp, Homo sapiens
aatccagggaactcttttatcgtatttaatcttgtcatttgaaacttttgtccactgtctcggcacttcctcatttttgtagtgtctatcataccatgctttctgtccatctttacacacct

SEQ ID NO: 376080 - DNA, 122 bp, Homo sapiens
atagaagcgttcagactacaactcccagcagccacgaggagccctagggcttgatgggaacgggaaaccttctaacctttcacgtcccggctccgcgggttccgtgggtcgcccgcgaaatc

SEQ ID NO: 376081 - DNA, 122 bp, Homo sapiens
aaaggcggagcgtgtcttgtcgccttctagctgcaccttttgtggactgcagcatggaaccgtccaaggtgtttgtccaccccgaaatggaaataaatcttttttattctaaacagtataca

SEQ ID NO: 376082 - DNA, 122 bp, Homo sapiens
tggtgtgactgatacactgctttttatttttgagcacttctttcatactgcttccaacctcgctgaccactccttctcagtggagaaacttctcctcttcccaatctctaaatgttgaggtt

SEQ ID NO: 376083 - DNA, 122 bp, Homo sapiens
ggactggaggctgactgtgcgcagtgaggcaggagagccagccagccccaggtggtgctgcgaagtgtagattttattagcattgtgggatggtgaggccgcctgagcagcagacgattgcc

SEQ ID NO: 376084 - DNA, 122 bp, Homo sapiens
ctgctccgccctgtggatcctgccacctaggcttgcctggactcccagctggctgtgctccgctcaggaggaggctggtcccgtctccttaccccatggcctggagactctccacgcggcta

SEQ ID NO: 376085 - DNA, 122 bp, Homo sapiens
tcaaccgccttctcatcaatcgcccacatcacctgagacgtaaaccatggctgaatcatccgctacctccacgctaacggtgcctcaatattcttcatctgcctcttcctacacatcggccg

SEQ ID NO: 376086 - DNA, 122 bp, Homo sapiens
ctggtgatcatcagagtttccagagttgcagaaaattctccccccaaaaaaccaagtaagcgtcaataagacttcccacaaactctcaccagccctattttcccggggggcaggtagactgt

SEQ ID NO: 376087 - DNA, 122 bp, Homo sapiens
agggaggcggaggctgtgagggactccgggaagccatggacgtcgagaggctccaggaggcgctgaaaggtgggggtagctgccccctctccattccccctcaccttctccggctcgctctt

SEQ ID NO: 376088 - DNA, 122 bp, Homo sapiens
gctgccgcccttgggcccctgtcttctttctgagcctgggatcggtgggaccctggtctccgccctgccaggactcctgcttagctcagaggcctcaccttgaacttcttccggaactccct

SEQ ID NO: 376089 - DNA, 122 bp, Homo sapiens
tccattaggtatttatggggtgagtagggtggggcagatgtgtcccggaatggggcacagcggacaggaagtaacggtttataacaacgtgaacgcttctgacgtgtagcgggagcttcaga

SEQ ID NO: 376090 - DNA, 122 bp, Homo sapiens
aagaagtttgagttttgtgatcaagttctgctgaagagggatcaatatgtagttgtcccacgaagctgggactctatctgggatagagttaatgagggctgcaaaaatagcatcttcatgga

SEQ ID NO: 376091 - DNA, 122 bp, Homo sapiens
taagttcagaagcggggcaggcagtggcctgggaactacattacccaaaagacacagcggcggacacaagcagcgagtgtagccaatgaaggcctagcagagcggcgtctacgggggttcgc

SEQ ID NO: 376092 - DNA, 122 bp, Homo sapiens
gcccagagaagaagagctgagaagagatggggaggtgggatctgcaccccatgcccaccacggtgctattggggagaaagtgctggactctctgggcttcccctgtcaagaaaagggtttgg

SEQ ID NO: 376093 - DNA, 122 bp, Homo sapiens
aagcgccgcggcctcaggcgaacgaacgggcggtgtagtgcaggtccgccatggctgaggcgtcacggtggcaccgaggcggtgaggggtcctcttaaggagtgggagggacaggggcgatt

SEQ ID NO: 376094 - DNA, 122 bp, Homo sapiens
gcattagaaaatatacagaactgacaacacagctgaggagaaagctaaactaccgtagtacggatcttccttgctaacagaacctgattttgttaaacaaccagggctggagcaagggcaag

SEQ ID NO: 376095 - DNA, 122 bp, Homo sapiens
gaggttcagagaagtgaagcgacttgcccaatggcacccagcgaggaggcgcgggcgccccggttactccatcccagcgagaagacgaggctgcctgggtcctggttttctcgggcgggggt

SEQ ID NO: 376096 - DNA, 122 bp, Homo sapiens
gaagccggaggtcggcggcctcacgtcgaaagagggctgaaagcaagccaaccaagaacacgacacacagcgaaaagctctgccaagaatgaaggacaactgaaggcattttcagacagaga

SEQ ID NO: 376097 - DNA, 122 bp, Homo sapiens
catatccattcatccatcccactgcgggcgcagcaccatatccattcatctgtcccactgcggaggcagcaccctatccgttcatccgtcccactgcgggcgcagcaccctatccattcatc

SEQ ID NO: 376098 - DNA, 122 bp, Homo sapiens
tcgtcagcgatgaccacggtaaccgttgggtagaagcggcggatactggtgatgagagcccgtagccgatcataacggaggaaggtcttggtggcaatcgtgactagagcgctgatgttgta

SEQ ID NO: 376099 - DNA, 122 bp, Homo sapiens
gctgggcagcggccaatgagaagggagggccggcgggtgtggggcgtgggcagtcgcgtccgcctgctcccagagacttgcacgcctcaatctctgcgtgtatctgactggtgttttaatta

SEQ ID NO: 376100 - DNA, 122 bp, Homo sapiens
gccattgcactccagcctgggaaaccaaagcgaaactgtctcaaaaaaaaaaaaaaaacacgagcactgatcagggggcgtctgttacctcggcctcaggctgtggcccctgccagtcccca

SEQ ID NO: 376101 - DNA, 122 bp, Homo sapiens
ctagccggccgcccgcagcctatttctgaagcggaggtttgtctagagctcagcggggcccggcggaagcgggggccgcgcgtcccccggcgggcggcgcccaggtccgggtcccgcggttc

SEQ ID NO: 376102 - DNA, 122 bp, Homo sapiens
cccggtcggccagactaggatgtacacgttggtaaacactgtagttcaaaacacgcttcacgcttcacggctgaaaaaggcagccccgacaatggagccttgtccccggcagcaactctaac

SEQ ID NO: 376103 - DNA, 122 bp, Homo sapiens
ggtcagacccagactctgggactgcaacaggcctgcctatttgtgacgagaactgacactcgtcccggccagattctctggctgacatttcccaggtctcgttcagcatgaagcccacgtcg

SEQ ID NO: 376104 - DNA, 122 bp, Homo sapiens
tgtctactggtggctctaatactgctttgtgctgcctgccacacttgccctttgagcctgcgaatggccgctagtgagcaagctctgcttcagagcagtctagttaggtagaacagggactt

SEQ ID NO: 376105 - DNA, 122 bp, Homo sapiens
ttgggtttggtaagagaaaaaaggagggcgaaaaccccggacactcctcctgtctcccgacgctcgttctggccgtctggccctcagtactaagcaggccctgacctacttgtcttactctt

SEQ ID NO: 376106 - DNA, 122 bp, Homo sapiens
gcttgcacgcggacaccaggtggcgctgtcgtctatcagctatgtgggctgctccctctccgtgctctgcctggtggccacgctggtcaccttcgccgtgctgtcgtgagtccccttttcta

SEQ ID NO: 376107 - DNA, 122 bp, Homo sapiens
tgtgttccaataaaactcaatttacaaaaacagacagctagcctgtgggctgtagtttgccgaccccgatctagattctagaggaataaatggaatacatattcactacattatttcctgaa

SEQ ID NO: 376108 - DNA, 122 bp, Homo sapiens
ccagcggcggtcgggttactgggatggttctcagtgagccctccctttccccagtagtttcggtttctcaacagtttccttttcctggcatttgtcaaatcgggatttggccggggccagat

SEQ ID NO: 376109 - DNA, 122 bp, Homo sapiens
gctgaccgagacacacaggctgggaatctcagacccactccacaggtgggccttcgagtccgggttctgccctctcctttcccactcagcaggacagtggcattattcctgtcactgcggta

SEQ ID NO: 376110 - DNA, 122 bp, Homo sapiens
acatctctttgctttgatttctgtagaaacatgtcccctgtgttaagtggtgacaagcctcgtgggggttttgctcaggcgacaggctggaaatgcatgtgtggcaggcgggcttgtgagat

SEQ ID NO: 376111 - DNA, 122 bp, Homo sapiens
catttctatcattcatcgattattccctaatattaattgggcacaactatgactcatttccgaccccgcaatgggctctcttggtctccttctccacctttctttccctcttcctcttttta

SEQ ID NO: 376112 - DNA, 122 bp, Homo sapiens
ccacgcgggcttcctgtcctctttattcccagctctttttcgcgggataagcgtgtctgacggcttaagtgcagtctccctgcgtccctgcctgagctttccagctcccaattacttcgcgg

SEQ ID NO: 376113 - DNA, 122 bp, Homo sapiens
atggctgggttctggtgagggacctcttcctgattacatcttcacacggcctttccctggcgtgtgcacataggaaaagagacccccatgtcttcttctctttttaaaagagcactaatccc

SEQ ID NO: 376114 - DNA, 122 bp, Homo sapiens
gcgcaggggaagcgagaagctgcagcaaggaccgctgggcccgcaccacgtgggtgcggtcggtccacaagcctgtgcttctccctagcgtcccgcgctgtttggggactaacggagggatc

SEQ ID NO: 376115 - DNA, 122 bp, Homo sapiens
gccccatgagacacaaattcaggctgagcaagaagaagcaatacagcaaggtatgggccacggacatctgtagcacttgattatgaaatttacttgtgttttcaggaataggagtgctattg

SEQ ID NO: 376116 - DNA, 122 bp, Homo sapiens
gtcaggaggggtggagaggaaaaaggcctggcaaaggaagctgaggttctaggttcaaatcgggctctgcctgacagcctttctcagcgggctctgctcttcaggccttgattggcccatct

SEQ ID NO: 376117 - DNA, 122 bp, Homo sapiens
gtggcacctgctgaacggaggttggatgtgggcatcatcgtggtcgttgagtgtggacgccgagaggcttcacacaggacggagggtggatgtggcacctgctgaaccaagggtggatgtgg

SEQ ID NO: 376118 - DNA, 122 bp, Homo sapiens
tgcccagtgcacaggagacgctcagaaaacgctagtttcccaacacccagtgaccgcccccgctgtttggaatcaaagtcagagaagccaaaagacccagagtcccgctgcttgcaaagccc

SEQ ID NO: 376119 - DNA, 122 bp, Homo sapiens
atggaagacaccctgggaactggactctgtgacccacagcacctcaggccgtccctggcccgggcttctggcacccagttggtagacaggaccctgcagagggtgcaccatgcagctgcctc

SEQ ID NO: 376120 - DNA, 122 bp, Homo sapiens
aagggcaagtgaaagaacaccaaagcaccaaggtggccgtttgatgtggctggccgttagcggggattgggctgaaactgcatcctctgctcaaataaggtctattagccactggtgacttt

SEQ ID NO: 376121 - DNA, 122 bp, Homo sapiens
tgttgggggcttaagatttttttttttcaaatgcatttttagtcactaaaaattaactgtcgtaccatctagaactatactgtccagtaccatagcctctagccgtatgtagctatttgtat

SEQ ID NO: 376122 - DNA, 122 bp, Homo sapiens
gcaccgcgcgggtgcagccacgatggaagggggtgcgtacggagcgggcaaagccgggggcgccttcgacccctacaccctggtccggcagccgcacaccatcctgcgcgtcgtgtcttggg

SEQ ID NO: 376123 - DNA, 122 bp, Homo sapiens
aagggcaaggtactgagggctccccaccctccctgttgccaggcaaccggcaggggcctccgcccgcggggacccaccctgttgctaggtaaccggcttatgagccccatcctggtgtgagg

SEQ ID NO: 376124 - DNA, 122 bp, Homo sapiens
tcccccaccccttcccggcgggcgcgacccgctaggaggccggttcgctccggttgatcccggactccctttgttcgtgcgtccctaaacggctgccggcctcgcgccccttggccccgatt

SEQ ID NO: 376125 - DNA, 122 bp, Homo sapiens
actaaggatctaaggacctgctcatctccagatacttgcattgagatggggaaggcagagcgttccagatagtatgtggtcccccaggaagcatcaccccctggttattctcattgtcctcc

SEQ ID NO: 376126 - DNA, 122 bp, Homo sapiens
caaggtatttcatattatattacattaaactggtaacgcaaaagtaaggcatatacagtacggaatagagaatctcattgtctttgccattttgtaataattaacggaatagagaatctcat

SEQ ID NO: 376127 - DNA, 122 bp, Homo sapiens
attagccacatttctagtgctcagcagctgtatgttgctattggtgactgtaatggagaacgcagttacagtacgtttacattatatgcaaagtcctgttagacagctctttaatgagggag

SEQ ID NO: 376128 - DNA, 122 bp, Homo sapiens
ggcagtgctgctcacaggggccaggcccctcagagcgcgccccttgggggtaaccccagacgcttgttcccgagccgactccgtgcactcgacacaggatcccgcacccagggcgatgccgg

SEQ ID NO: 376129 - DNA, 122 bp, Homo sapiens
actctgtccactgtgcccccaggccagagcctcgcatggtgatgaatagagtcgtactgacgtggaaaatcagatactcagcacctttccttcaagacagataggggaaaagctgaggaaac

SEQ ID NO: 376130 - DNA, 122 bp, Homo sapiens
ggttcagagccccgacactgaaggcagggacagcgttgttgatctgagcctacaacaggccgagaaacagatctttcccacccggattctttctcccaaaccaacttttatttatgtattaa

SEQ ID NO: 376131 - DNA, 122 bp, Homo sapiens
gtgttcaggaatgtgagttttgatataacaatatctgaatttgaatcccagctttgccaccgattagctatatgaacttggggcaattatttaacttctttttgcctcaacattattacatg

SEQ ID NO: 376132 - DNA, 122 bp, Homo sapiens
ttcacctctcgaacccgggcccagcccattggctgcagccgaggggtccaccgagggcagcggctcctgacaggacctgttttcccaactccctggacagcttccctgcgggatgggttggt

SEQ ID NO: 376133 - DNA, 122 bp, Homo sapiens
ccggaggcagcagacaaagactgggcagcaccgggcacgttcccgctcctggcccctccccgggccgcacttccagaatgggagtgaattgcctcccaattaaagaagcaattttttaaaaa

SEQ ID NO: 376134 - DNA, 122 bp, Homo sapiens
caagaaggtgacccggaccactggcatctctgtggatccgaggaggcagaacaagtccaccgattccctgcaggccaatgtgcagcgtctgaatgagtattgctccaaactcatcctcttcc

SEQ ID NO: 376135 - DNA, 122 bp, Homo sapiens
acacgcctttgaggggcagagacagaaagaccgcagtcttcgtctgctgccagctgtaatcgctaacctgaagaggcattccggtagcaacgggagcggatagcgcggctggttgcttcttg

SEQ ID NO: 376136 - DNA, 122 bp, Homo sapiens
aggccagtgggtgcatgcaccatgtgcgagccgaagcagggcaaggcattgcctcacctgcgaagcgcaaggggtcagggagttccctttccaagtcaaagaaaggggtgacggacgcacct

SEQ ID NO: 376137 - DNA, 122 bp, Homo sapiens
gatgcctcccatgaaacccaggaacctgagtccttctcagcctggtcagatcgcctggcccgggaacatgcccagaagtgccagcagcagcagcgagaagcagagggatcccgtcgaccccc

SEQ ID NO: 376138 - DNA, 122 bp, Homo sapiens
aggagagaaccgacctagccaccaggccctaagctaaaaattatctgcaatgagacactacggacttccaaagtcacccaggacctcctacctgaaggacccttggctgggagggcagcttg

SEQ ID NO: 376139 - DNA, 122 bp, Homo sapiens
gcgaccgcgggctccggccccagcccaggcacgtgcgcccaggccgcggggaggcgccggcgcctcccggaacgcgctcctggcctgcgagtgctgcccgctcagtctccgggtgggaagtg

SEQ ID NO: 376140 - DNA, 122 bp, Homo sapiens
cccactcgggcctctttcctcccagagatggggcaggatagaaaccagcgtgtgtgcagacggccatcttagcttccattcaacggctctgaccgaacggggaaggccagggtgttactgat

SEQ ID NO: 376141 - DNA, 122 bp, Homo sapiens
tggccagaaaagtggtaggtgatgcaaaacaaccaggcaagaacgcttttctcccatcctcggagagagctccttgacaaagtaccatagcagtcactgggcagagaggatatactattgta

SEQ ID NO: 376142 - DNA, 122 bp, Homo sapiens
ccaggatggatagcaggggtgtgagcagtgggcattgcagtgggtcttaaaggaatcatacggagtcagtggtgaccagagtgtgtatacgtctccgatttgcctaatcccagcagtcttgg

SEQ ID NO: 376143 - DNA, 122 bp, Homo sapiens
gaggtgcatggtgtcgggctgacaggcggtggacccaggtggcgagtctcacgtccacctcgctgggctgtggtgtccggcatcctgggacgctgctgtgaaggtattttgtagattgctca

SEQ ID NO: 376144 - DNA, 122 bp, Homo sapiens
cattgcaagaggcgcccggcttggtttcctcgctttaggaaactctcttggggcaggccccgccccacatccggtgcggcgacgccacttccgcccacgtcatggcagtcgccagactgggg

SEQ ID NO: 376145 - DNA, 122 bp, Homo sapiens
tggaaagtgggagtggggtatatctatgctgccctcattactaggcatttgcagacttcacgcttttggctccatttggtgctgtcattaattagtcagtattaaccttagaatactttaga

SEQ ID NO: 376146 - DNA, 122 bp, Homo sapiens
ccacacacaccccaagttatctgctctggctttgcagttaaggggctttgaatactgtgccgtatttgacacgatacttgttaatgctcacaaaatgcagggtctctgtatcacaggtggtg

SEQ ID NO: 376147 - DNA, 122 bp, Homo sapiens
ctgcggcgaaggaggctcatctattataaatgcacattcggggctgacatcagcgacgagcggcgggcgagcgccgacgagcggtccctgcgcgctgcccgcccggagcgcagcccccaggc

SEQ ID NO: 376148 - DNA, 122 bp, Homo sapiens
ttggagcccgtcaaccccttcgtctcctaattctcaaccccccttttttttcttcttgcacgccagtaaagtgcaaggcccccaaatgtaccgctcgttgatgtatcacccagctcgggagc

SEQ ID NO: 376149 - DNA, 122 bp, Homo sapiens
ggggagcgctcgggcagccaccctgtccccgtctggagccccgcgctgcgtctaggagggcgcaacacgcagtccccgcgggggccagagctcggagccccctagtgcatgccccctctcct

SEQ ID NO: 376150 - DNA, 122 bp, Homo sapiens
agcccgagcccgtcctggccacaggcagccgcatgttcctgcgcttctactcagataactcggtccagcgaaagggcttccaggcctcccacgccacaggtactgtccccggttgtgggagt

SEQ ID NO: 376151 - DNA, 122 bp, Homo sapiens
gtccctccccactgccatttattccttccttcattcaaaccttatgtggctgctacttaccgtgtgttaagtgttcactttttttcttggaattcaaaaaaagaaggacagtatttggggca

SEQ ID NO: 376152 - DNA, 122 bp, Homo sapiens
actttaaagctgctgtttcagtgaactcctctagagtgtcgttcaaataacaattcctgccgagccctctggtggtggccacagggcaacacagtccttgcaaaaaagcttgttctgtgctg

SEQ ID NO: 376153 - DNA, 122 bp, Homo sapiens
ccctgtcccctccctgcacacatgtgtcggtccctgggttgggagggccttgatgggaagcgggaggggccgggcacggggcctggcacgtagtgggccttcattgaaaggccatccctctt

SEQ ID NO: 376154 - DNA, 122 bp, Homo sapiens
aggccacgcccctgggcggtgcgcgcgggcggtgggtaggccgggcaggctcacgtgatgcgggccccgcggcccgccatataaacccgcgcgcccgccaggcgctgcggccgtcccgggcc

SEQ ID NO: 376155 - DNA, 122 bp, Homo sapiens
cccactctccctcagagcaaagctgaagccccagcccagagccttccgtccagaggttctcggataagcagccctcaccatggtttcccccgtcaggctgctgaccagagccagcctgacca

SEQ ID NO: 376156 - DNA, 122 bp, Homo sapiens
gagagacagtctgctcttacccagtccttgctgggcctgtgccccggggtcggccgtctccgttacctggttgggtggggtcacagtgcccagagttcagattcagctcatgtcacccctac

SEQ ID NO: 376157 - DNA, 122 bp, Homo sapiens
ctcgggaattgtagtgtgtttctgcaagccaatgggatccggggaaacatgataaggatgcggtcgaggctgggaataggctgagggagctggagagggtgggaccacgcaggaggcagatc

SEQ ID NO: 376158 - DNA, 122 bp, Homo sapiens
gtaagaaacagtgagcccagcctcgttcacacttgataaagccaactcagtgatccctctcggaggggataacaccccattttgttttcttgaatacacaagacattgcagctctagtctgc

SEQ ID NO: 376159 - DNA, 122 bp, Homo sapiens
tggtgctttggagacagaggacatgggatagtgactcagattgggagggaacatgccccccgggacagatttctatgttgctggttatgatgaaatactttccactgaccacaagctatata

SEQ ID NO: 376160 - DNA, 122 bp, Homo sapiens
tgagctcctccagcgacttgaggtcgtcgaaggcgttgcgctcgatggtggctacctgggcgtgcatgagccacagcttgcgcaggctggtgagaccctggaaggagcccgggcggatcagg

SEQ ID NO: 376161 - DNA, 122 bp, Homo sapiens
gcctctctcttcccaacttccactccagcccagtgaaaaacctgtgactttagatgcaatcggtactattaataaatagcacctaggagggcaccgagaccggcacacagctggaagctagc

SEQ ID NO: 376162 - DNA, 122 bp, Homo sapiens
cacggggctcggggcctctgcctcccccaccaggaggctgcagaggccaaggtacagccacggtaacgctggacgcagcatcttccccagccctgcagaagcagagaggccacttccgtcgc

SEQ ID NO: 376163 - DNA, 122 bp, Homo sapiens
caggtagcaaggttgtactggaagaggccgagtctccatgcttgccacttcagagatccacgagccggcctgtcagagaaccctcgtctgctccaatgcagtccctcttcctcatcggggaa

SEQ ID NO: 376164 - DNA, 122 bp, Homo sapiens
agaggccttctgccatcttggtccccagacccggccttgccactcagtgtccctaccactcgagaccctggctccaaaacgccactcatcccacagcaaatcatgttggtcgtgctccgttg

SEQ ID NO: 376165 - DNA, 122 bp, Homo sapiens
gccgcggggtctcagaggggctgcccattcggcgtctctaggacgctgttgcccgagagacgacggcagtcgctgactggagaatgagcctacgcgcctggcaagaagctgagctgtgattg

SEQ ID NO: 376166 - DNA, 122 bp, Homo sapiens
attaatttgaaagcttattttgggattagaaaaggagagtgaattagatggtatctacgtcgtaaagggtcaggcacgtgagcagtgctcagtacataggacctattattaaaatatgatga

SEQ ID NO: 376167 - DNA, 122 bp, Homo sapiens
agggccttctgggaaatgtagttttagcttcatctgagcctggaaatctcttctaggggacggacctgctagggttcatttctgctgccaattctccaaactcaatggaattctgctttgaa

SEQ ID NO: 376168 - DNA, 122 bp, Homo sapiens
ctcctccgctgccgcagcccaacgctactacttgacctcaaccgccgctgcagctgcgcacgcccaacgacagcctcccgccgtgcgctgtctgggattggcctgctggtgccaggccacca

SEQ ID NO: 376169 - DNA, 122 bp, Homo sapiens
ggtgcatgtcgggtggctggctgaccacccagtgggcatagcggctcagcgtccagcaggcgatggagcggaccaaggccttcttatccgacaggcactggatcaggtgcgggatcagctca

SEQ ID NO: 376170 - DNA, 122 bp, Homo sapiens
gccttgggacttttcagcaacgacattccacacgtggtgcggttcagcgcgctcaagcgccggttctatgtaacaacctgcgtgggcaagagtttccacacctatgacgtgagtgacttctt

SEQ ID NO: 376171 - DNA, 122 bp, Homo sapiens
aacggccaggaacgagctctggcagcaggtgggcctgactccagcgatggcttcgagccgcgaaaccacagcagcgaattgtgaactccaagggtagccgacaggtgggagcagcctcgcca

SEQ ID NO: 376172 - DNA, 122 bp, Homo sapiens
tttgctcggctggcaggagctgggccgggtcgggaggctgtgctggctgcactggccctgcggcgggccccagagcccagtgccggcaccttccaggagatgcgggccctggccctggacct

SEQ ID NO: 376173 - DNA, 122 bp, Homo sapiens
gctctctggggcccaaacagcacaccgaagaatgaaaatgtccctctgccgagagcaagtcggccctgctgccttcccatttcacccttccactaatgagcaccaggaagcgcccctcccag

SEQ ID NO: 376174 - DNA, 122 bp, Homo sapiens
aagttaagagagggagggctgagaggtgggcaggactcaccaaggagctgcaaacccaaacgagaaatctagggagcaaaaggagaggaaagagtgagcttgagccaagacatcaggccaag

SEQ ID NO: 376175 - DNA, 122 bp, Homo sapiens
cagccttgcagctggggccagggtctgtggtgctgatccatctgctgggccgtcacctcccgagagagcgtgtgttcctccaaccacgcgtgtcttagcaccagtctctggcaggagccagg

SEQ ID NO: 376176 - DNA, 122 bp, Homo sapiens
cagaggccacgtgaaaagacggtgtgtggaaacaggtgggacccactgctaagctggatgcgcgagtaggacaaaaaaattggcccccactcccgggcctcacccagacacaaaagaaacgt

SEQ ID NO: 376177 - DNA, 122 bp, Homo sapiens
ttccctgagacttaatgacctggggcaccccggactttcttaatcgtagctccacccactcgagccgggtgccttcgcgtttcccgtttttaaatgagatagtggcacacccggtggcatcc

SEQ ID NO: 376178 - DNA, 122 bp, Homo sapiens
gttcctaataagtccctggggcttttcgggatgcttaagccaagggcgtggggccgagagcgacactaggataacactaggcaaggctgagcaacccaggctaccaacagcacggacttgaa

SEQ ID NO: 376179 - DNA, 122 bp, Homo sapiens
gttgttttcttacaatagactacaagtgtgttaaaggctgggaatatgccttcaccttgccgcttgcaatatgcctgatttatagtatgtatattggatattattttaattaattaccattt

SEQ ID NO: 376180 - DNA, 122 bp, Homo sapiens
ggaatttaccgcgtaggcgcggattaaacttggacgggaagaccaggactctcgggcttccgcgtccgcccggcagctagcgctccgcgggactgggaactctgcagccggtcccggtgtga

SEQ ID NO: 376181 - DNA, 122 bp, Homo sapiens
cgcgtcactgcgcaggcgcggcccgcgagcgtggggtatctcgaggtgccgggttgcaggcgctcaggagcgctagggtttgaggcctgctttctgctcgcgccagcagagcactacctgag

SEQ ID NO: 376182 - DNA, 122 bp, Homo sapiens
atccaggagagggcatgcaggcatcaaccccgcgacacagatggctgctgtcacacgctgcggtagtggtcacatggctgtgcctacatgctgtgaagtagggaaacatattccctggcttg

SEQ ID NO: 376183 - DNA, 122 bp, Homo sapiens
ctacctggagaaccgggcccagcagcactggggcagtggagcggtagtgaagaagctgcgcgagctgcagcccggggagaagcgctgtgtggtgggcactttgttcaagtccatgccgctgc

SEQ ID NO: 376184 - DNA, 122 bp, Homo sapiens
tccttctagaatcccaacccacttcctcttttcattctcattttctgtcagaatgagcagcgagctggtcttagaaggtgcacctaagagagaggccgtcaccttcatgacaggaaacagaa

SEQ ID NO: 376185 - DNA, 122 bp, Homo sapiens
ttaaacttttattttattttatttcatttgagatggagtctcactctgtcgcccaggctgcggtgcagtggcacgatgcattttaaacttttatattcaattgttacaaaaatattaagagc

SEQ ID NO: 376186 - DNA, 122 bp, Homo sapiens
acagcttcgaagttatcaggaacacagacttcagggacatgacctttatctctgggtatgcgaggttgctattttctaaaatcaccccctcccttatttttcacttaagggacctatttcta

SEQ ID NO: 376187 - DNA, 122 bp, Homo sapiens
tgtgccctcttcccgacacgcaggcccgggggagccccggaccccgcatcccccagggcgcggaaactggcgaggccccaggagctcccatttatagctcagtttccactgagcgcagtccc

SEQ ID NO: 376188 - DNA, 122 bp, Homo sapiens
acatctttgtgaattagaacataggatacttttcatattttacagatggacaaaatgaggcgcagaggggctgacatatccagcaactcacagtaaggggtaaagtttggactaaaggctgt

SEQ ID NO: 376189 - DNA, 122 bp, Homo sapiens
agcgggcttgttaggcatgcagcctcagattctgccccttccaacattctgaatcaaattcgcttttttcaggtcctcaggtgattccagtgcaaaacaatgtctgggcatcactgctataa

SEQ ID NO: 376190 - DNA, 122 bp, Homo sapiens
taactcccactgtcttcagtagatttatttgatcagtatccctgtgtgtaaccaatctcccgtctctgccaccagcctctctcccacatggatcccctccttgcctcacttggactccagca

SEQ ID NO: 376191 - DNA, 122 bp, Homo sapiens
gcaccctggccattcgacattgcctgcggcgggagctgccagctttttggaattcctaatcgctcctggccccggtgattggctgctcagctctgaccccacttgggctgccgcctggttgg

SEQ ID NO: 376192 - DNA, 122 bp, Homo sapiens
cccgggcccagcggagccgagggcgggtggtgcgggggttcctgggtaggttcgtcccgacgggccgcgggcggattgaagggagggttgggcccgccggcagccccggcgggtccaggccc

SEQ ID NO: 376193 - DNA, 122 bp, Homo sapiens
ccatctgtgaatgaactcccgctccgggtcgcaccgacccaccctcacgtgtgagaaccccggtctaggaccctggttctccaactcgcctgtatatgttttcaaaatgcttgacctctcac

SEQ ID NO: 376194 - DNA, 122 bp, Homo sapiens
ttcaaacacactgaactacttgcagtgctaggagcaccttcatttcctttgtttggaatgcgcttcctgtctccttccccgatacttcctctcagtctgcccacctcacttgcttttggtag

SEQ ID NO: 376195 - DNA, 122 bp, Homo sapiens
aagtttctgctcttccgcacaccagacttgccggtgtggtctccaggaggggttgggggccgcgtcctcagggggcgcgcggccgaggctgttcccagcgcgggaacgggagggagaacctg

SEQ ID NO: 376196 - DNA, 122 bp, Homo sapiens
tccacgcgtggatgggccatgagactgcggcccgcctccctgtgttacctgtatgtaccacgttgtcagtgtccacgtgtggaggggccatgagactgtgcggcccggctccctgtgttacc

SEQ ID NO: 376197 - DNA, 122 bp, Homo sapiens
atgttcgtttggttattactacaaatccccacgtttatttcttttcaagagaaagttgttcgaaatgtgaacgttttccatctttacctgactggccaggagtaatcttataaaaatttgaa

SEQ ID NO: 376198 - DNA, 122 bp, Homo sapiens
tgcaaagtctcacaagatttccttcctataaacccttttggaggaagtaactgtggaatgcgttctagtgaaatgagagagtaaaccaagaaataggcagacaggtgatacaggaatcacca

SEQ ID NO: 376199 - DNA, 122 bp, Homo sapiens
gtgtccggtcaaggttaggccccaggtaggtccgctttccggacgtgggcagggtagccccgagactaacctatggagtgaacctggccaggggaccctacttgtcagatagggagctccga

SEQ ID NO: 376200 - DNA, 122 bp, Homo sapiens
tgggtgaagccaccaaaggcatttatttttctctctactgcagtctatttatgagtaggacgaacttttctcttctttttaaagatgactgttgactacaatggctcactatttgtgtgcca

SEQ ID NO: 376201 - DNA, 122 bp, Homo sapiens
acatgccggtgtggaagtgcctctctggggtttgaaacctgtgtccacagcagggacttccggggggtggaggtagggagtcaggtaatgctgggtttccagaagaaaaaatgcagtaattt

SEQ ID NO: 376202 - DNA, 122 bp, Homo sapiens
gatgccttcctccaagagtaatctcaaccaggctgtctctggtctttttatctggtttagcggggctagggtgagcaaaaggcaaacaaaagctctggagataagcagaataaaaactggct

SEQ ID NO: 376203 - DNA, 122 bp, Homo sapiens
gagattccgaggagggcctcgctacccgccagttcccgcgcctcggcagtccgccgcgagcgtacgtcactcgcccgccgccaatcggcgcccggcaggtcacctctcctcccagggcccgc

SEQ ID NO: 376204 - DNA, 122 bp, Homo sapiens
gggagggcggagggcgggggccttcggggtgggcgcccagggtagggcaggtggccgcggcgtggaggcagggagaatgcgactctccaaaaccctcgtcgacatggacatggccgactaca

SEQ ID NO: 376205 - DNA, 122 bp, Homo sapiens
cacgctcccctccctcagcgctcagaagaagccacttgaccctccacggccgaggacccgcgctctttagccccgcccctcacgcgggggccaatgaagtggcgcgccttcgccccatgtgg

SEQ ID NO: 376206 - DNA, 122 bp, Homo sapiens
ggtcctccagcgaggactccagcgtatccgccattgcgcccggcaacagaaagcggcgcgcgcagggacgtcacatcaacgcgcaccgccccgccctgcggctccgccccctgcccgccgct

SEQ ID NO: 376207 - DNA, 122 bp, Homo sapiens
ccacttggctcagcggcgccccgtagtccggcccgatgcgcatgcgcacagtcggagccccgctccggggccacccgaaagagccttgcctctactggccgcctccctcatagaccccgcct

SEQ ID NO: 376208 - DNA, 122 bp, Homo sapiens
tcccacaaagagagccgacagtctgataacctcagctctttggaattaggctgttggtggcggctgcagtccttgttccgatggtagccgcaccaccccagcccaggatggctgtatttcca

SEQ ID NO: 376209 - DNA, 122 bp, Homo sapiens
tggggctgccccagagaggccctgggcgggggagggcagtgcccagatttatccaccaatcgcacaggctgctggcactgagcacgttcttatctgcccagcccagcatgggggggtggcca

SEQ ID NO: 376210 - DNA, 122 bp, Homo sapiens
gagatgattggctgtgacaatccagacgtgagtgtcgcctgcaggattcgcgccatggggcggggtcttgtgtggggcagggctggcggatgttggcatttcttgtgttttgcatacagaac

SEQ ID NO: 376211 - DNA, 122 bp, Homo sapiens
actcctgtgaagtgcctacagtcgtcacatccatagagacaaaggcagaatgctgggtgccggggctgggggggtggggagctgttgtttagtgggtagagtttcggtttgggaagatgaat

SEQ ID NO: 376212 - DNA, 122 bp, Homo sapiens
atacacttataaacaagtggaaattttgcatcctactgcaccattttatacatgatgagccgtcagtaataggattattaaacaaaaaccgtctcaggcgctggcgttaaccttttttaaaa

SEQ ID NO: 376213 - DNA, 122 bp, Homo sapiens
gtctggagtttagttaaaagtaacgtgtcattggtggtttattagctttaacagacgttccgtgctgttgtaaaatgttcactgtcagggaaaaaggatgaagggcacacagacactgtatt

SEQ ID NO: 376214 - DNA, 122 bp, Homo sapiens
aaatactacctgtgttacacagggagtccagggcaaaagacattgtgactcctaaccaatcgtgagaggtatgctcacaagtgtatcagctcaaaccactgtaattgttcctacaactcccc

SEQ ID NO: 376215 - DNA, 122 bp, Homo sapiens
agcgcaagcgttgctttttaaaggattttccggaagccttggcgggaacttcctgccaagcgtgagaacgctgcgaacttcccggaggccaaaagttgagggggctgagcggagcgtgattg

SEQ ID NO: 376216 - DNA, 122 bp, Homo sapiens
tttaactctgacaacaacctcaccaaggaagttctatgtcctctttttctttttttaagacggagtctcactctggcgcccaggctggagtgcagtgacagctcactgcagcctccgactcc

SEQ ID NO: 376217 - DNA, 122 bp, Homo sapiens
agcagcaatcagaaacggggcagcctgtttgcatctatgtgtgctccaaagaggtgggaacgcacaactgctgcacagaaacacccacgggcaaatgagggctgagaaatgacatttcctaa

SEQ ID NO: 376218 - DNA, 122 bp, Homo sapiens
ttccatcttcatcttcaaagaatccctgtgacataaagcacaattagagctatccctgaacgtaagcccagggcttaccacctaggaagcgttcttttattacaagggggaaaaaaaggaat

SEQ ID NO: 376219 - DNA, 122 bp, Homo sapiens
ggagaatgtaggagaggtggggcagtgggcaaacctgccccagtgggtgccccttcggcccgctcctttacacgcatcgaatcagtccttgggaccacccccgcggggcaggcttgccagct

SEQ ID NO: 376220 - DNA, 122 bp, Homo sapiens
gcagtgctgggttctagcaggcactctgctgaatggggccctaaagtcctggctgctacccggccagtttctttctcacatcctagcagattgtgagacagcgggggcaagtgtccttgtgt

SEQ ID NO: 376221 - DNA, 122 bp, Homo sapiens
ggctcagtggcttctgcgggcttcgaggagcgggatgttgcgggctgggtggctccggggcgcggcggcgctggcgctgctgctggcggcccgagtggtggcggcgttcgagcccatcaccg

SEQ ID NO: 376222 - DNA, 122 bp, Homo sapiens
tgcttttatataaaaaatcacctttaaaattacttatccgctcaattccttagccttttccgtttcctattttccagaaaacgcatctttattattttagaaatgagaaaagtgaggcttag

SEQ ID NO: 376223 - DNA, 122 bp, Homo sapiens
tctgtccattttggaaaaaagaggatcccctcaagagcaaataggcggaaacaatgaccccgcgcccggagtttttctgagctcctaaatagggagagagacccgacaaaacaaacaagcga

SEQ ID NO: 376224 - DNA, 122 bp, Homo sapiens
gggataacagagtccacccggtggttgtgagaattaaatggactggcacacacagaatgccgggcccagtgcccggctgtgacactcagtgtcgtggttattactagactggtgctcaccac

SEQ ID NO: 376225 - DNA, 122 bp, Homo sapiens
gaattttcaaaaatatatttttaaaatatatttaaaaaagtatttttaaatatagtcctccggaatgcaaaaggacaatactactttcagctagtactttttaagtgattattttccgccac

SEQ ID NO: 376226 - DNA, 122 bp, Homo sapiens
gaagggcacctgaaggtcacggactgcagagttgggagagttaggcggtggggttgggggcggggagaagtgaaataagagcgctcagaagggccatgctaaaaagtcggggaaatctgata

SEQ ID NO: 376227 - DNA, 122 bp, Homo sapiens
aagggtaccagcattttccgtttgatggatagtaccaaattgccctccaggaatgttatacgctcaccagaactgattataataaaacgtctacatatttgttagttttataagcaacgcgt

SEQ ID NO: 376228 - DNA, 122 bp, Homo sapiens
gtttagctcttgttgcccagactggactgtagtggcttaatctcggctgactgacacctccgccttctggttttaagcgattctcctgcctcagcctcttgagtagctgggatgacaggcgc

SEQ ID NO: 376229 - DNA, 122 bp, Homo sapiens
ttctcaacccagttatatctgtgaaaagagaatgtcctttaggaatttaccaacttttcacgcagttgtagcattcattgtgggtgttcagtaaatatttgcagaaagaatgagtgaatgag

SEQ ID NO: 376230 - DNA, 122 bp, Homo sapiens
agaaccagcgacaggctcaggctacatagccctgggcccatggctgctgcggctgcctttcgaatttgccagggaagctgagcatccttctttgcacataccgggccacttggctcagtgtc

SEQ ID NO: 376231 - DNA, 122 bp, Homo sapiens
aggcggcaggaagacggcgccgggatcttcctgtcctgcagaagaggatgacacagacagcgggaagatggcgcctccaggatctttccgtcctgcagaagaggatgacacaggtggcggga

SEQ ID NO: 376232 - DNA, 122 bp, Homo sapiens
ccagatacctgcacggacaggatgcctttgtgcaacactttattgggaaagatttacacacggtgacctgtcataggccaagcgatgagaagagggcgccaggagcgctggggtcccgaggt

SEQ ID NO: 376233 - DNA, 122 bp, Homo sapiens
gtggctgagcctagcagggctgctggctggacaccacgggcccaaatgggaagtctgagacgtgcctccgttttgtacatccgcccaacgcgagcagccctggcaggctcaccgaggggaga

SEQ ID NO: 376234 - DNA, 122 bp, Homo sapiens
ccaagccaaggcacaatgtccctgccccccataagactgcccagcccctatggctctgatcggctggtacagctagcagccaggctccggccagcactctgtgatactctgatcaccgtagg

SEQ ID NO: 376235 - DNA, 122 bp, Homo sapiens
cacggaccagtgacgtcaagtgggaggcggcttgcttgcaggggcaggaggatttctccgcgcattcctcacagcccattttgtcccaactttgttttagccaccagagcgcgtctgtgcgg

SEQ ID NO: 376236 - DNA, 122 bp, Homo sapiens
agcgaggtctcccgcaggagccggacctcctcctccagccgccgcagctcttgcagctgccgaacgatcacctcagcctgctggctcagggcctgtgacccctccagcccccaggaccttca

SEQ ID NO: 376237 - DNA, 122 bp, Homo sapiens
agaagggcgatgggaacgtagccctccaagttaaacacggaaaaggtacgttaagggcaccgggccagaagtaacctggcagcggggcgccggggaaggaggtgggggagtgccaggttaac

SEQ ID NO: 376238 - DNA, 122 bp, Homo sapiens
tacttgggaggctgaggcaggagaatcgcttaaacccgggaggtggaggttgcagtgagccgagatcacacctgggcaacaagaacaaaactcagcctcaaagaaaaaagaaaaattagtta

SEQ ID NO: 376239 - DNA, 122 bp, Homo sapiens
cgagccgcgccggggatcggaccaggaacccgcagctttcattggctgcgggagtcggaccgctccacccttttctccccgccgccgcgcgaggcgggggtgccagggactgggtgccggtg

SEQ ID NO: 376240 - DNA, 122 bp, Homo sapiens
aaaagccagcgtgcgagagcctctgaagccgtggctggggcgctggggtggcagctgccgcgggagcatcagctaccggcgtgaggcgaggcagggcacgcgcgccgtccgcagccccgttg

SEQ ID NO: 376241 - DNA, 122 bp, Homo sapiens
ccctggtaatggtgactctgccctggagcttctgtgaatattttgtgttaccattgccagcgttgatccatcccatccactcaagcctttgtccaggggcctggcgcatccagttcataaag

SEQ ID NO: 376242 - DNA, 122 bp, Homo sapiens
gcgtgcccacgtccgggtacttggtctcctggaagaggttctcgagagcttcgagctgctcgtcagtgaagatggtgcggtgccgccgcttccgccgacagtgcagctggttgagaagctgc

SEQ ID NO: 376243 - DNA, 122 bp, Homo sapiens
aagaaaaaaagcgggggttgaaccaaatatccatccctccccaaagacccaaatcagaaccggactggcccaaccaggtcagttaacaagcctaaggaaatagaaaaatggcaaagagtgct

SEQ ID NO: 376244 - DNA, 122 bp, Homo sapiens
ctgcagttgtggaactccagcgcgctctcgatgcggaaggtcttctcacaagtgccgcagcggtacctgtactcgccgtccacctggtcagagggacacgccgtgagtgagatggcccagcg

SEQ ID NO: 376245 - DNA, 122 bp, Homo sapiens
ctcacgtacccgttccgtacttccccgttcgccacgcagccattcgcccgcaccgtgcggcggcagcagcagcctccgggctccggccgcatcttcctggcagcaccaggcgcaaggcaggc

SEQ ID NO: 376246 - DNA, 122 bp, Homo sapiens
acaacatgggtttgaaatcagcaaatcttaattccctgtgcaaatgtgagtgatttcccacgtccctcacaggaaggtgagaaacaggaggcaagacttagtctggagtcccagatgggagg

SEQ ID NO: 376247 - DNA, 122 bp, Homo sapiens
cgcccccggcctgagggctctgggcggcaccttaacccggagggcctggaggtctgcacccgaccgccttgtgccaggacggtcaggtccacgccctcccccaccgtggctccctccatctg

SEQ ID NO: 376248 - DNA, 122 bp, Homo sapiens
acccctgaggagccagccttttcttctactgccagctgcgaaccctggtcctcggaaaatcgacataataatccctgacgtttgctcttcagtctcgcggcatttaaggtatctccgagccc

SEQ ID NO: 376249 - DNA, 122 bp, Homo sapiens
ggggtgcgggagggaagggtccgcgcgagctcggctgcgcgcagctcagcgggtcccgctcgaagtctgtcggtgccaccgcctgcatttgcaaaaagagtttaaaggcaaagacacgcctt

SEQ ID NO: 376250 - DNA, 122 bp, Homo sapiens
gtatttgtacaaggtgacaccctgttgcataccacacacctcctccctgagtgactcagccgctgagcaagaaacctctgaactgttcactaatacagtcaggtagaggttgagactccact

SEQ ID NO: 376251 - DNA, 122 bp, Homo sapiens
tctcatgtggtacataccatgtagttcgtgttcctatgttcacatgatgcaggcttcatgcgttacacctaagttctaggtggtttttctggctatgtgtgtctgtgaagcggaactatgga

SEQ ID NO: 376252 - DNA, 122 bp, Homo sapiens
ggggtgggggcggggagccctaggagctgggcaggcgctgctcagtccctggccaggtgacgtccgtaagtttcctggtcttcgatggttctcgaatgaaaaatggggggaaagacattgag

SEQ ID NO: 376253 - DNA, 122 bp, Homo sapiens
ttccttccggaagcgaggctgcaactgctccagatacccagcaggaaggccacgtgacaacgggaggggcactcctgtgtgtgtaggggcgagggggtggcggtgccagggtcctgcagttc

SEQ ID NO: 376254 - DNA, 122 bp, Homo sapiens
aaggcaatttacttctgcagaagggtgccaatcgtgcctggagtggtcgcaagagcataccgggcatgggaggagaaggggttcttatccctaatgcagctagtccctactactgtgtcatt

SEQ ID NO: 376255 - DNA, 122 bp, Homo sapiens
ggcatcaaagtgtttattgtacatctaatagcaagcttgggcttgcctagttaagaaagccgacagattatgacaaacatagagcgcatttttgtaccaagagatgtcaggcctttgtgttc

SEQ ID NO: 376256 - DNA, 122 bp, Homo sapiens
agctcgccactctgattggtcacctctgctccaaaactggcttcaaaattccacggactccgcccccagtggcccccagccctatcctgacttgcaattggctgaactttcagggggcgggg

SEQ ID NO: 376257 - DNA, 122 bp, Homo sapiens
gctggggatgtgcgtccctctgaaagattcccccggaagctgaagggcgatgtggcgttccgtacacggacggtccctgtcgcaggcctcctacttgagggtccagggcttacactgtagtt

SEQ ID NO: 376258 - DNA, 122 bp, Homo sapiens
cagccagctcagggggatgtggacgatcaatgcaataggccgcctggggaaccagatgggcgagtacgccacactgtacgccctggccaagatgaacgggcggcccgccttcatcccggccc

SEQ ID NO: 376259 - DNA, 122 bp, Homo sapiens
ctgcgaacttcccggaggccaaaagttgagggggctgagcggagcgtgattggggaggggcgggcctgggagaccttgggcgcctcctctgaaagcctcttggtaggtatccggttgatggg

SEQ ID NO: 376260 - DNA, 122 bp, Homo sapiens
tcctgccgcctgcctccggagggaggggtccctgccctagcacctgtcataggaggcagccggagcgcacattctgatcgcataatcccgaggcttgtgactggcagggaggggggctgaga

SEQ ID NO: 376261 - DNA, 122 bp, Homo sapiens
gctgcgccaggccgcgcgctcggccttataaaaaaggcaccgccgcgggggcggggcctgcgcgacagtgagaagtggccccgcccttcgcctcgcccctcgccccgccccggccgcctcgc

SEQ ID NO: 376262 - DNA, 122 bp, Homo sapiens
ctcccttcccaatgcacctgggagcctgtgtgctgatggtgacctcatttcggaggaaaccggagcagcacttcctgcccccttgccctgcactccctgccttcctccctcaccggccaacg

SEQ ID NO: 376263 - DNA, 122 bp, Homo sapiens
gggtccggcggggtggccgggcggccgggccagagtggcgggcgcggggggtggcgggggcggggcggcggcgggggcggcgggcgcgggggcggcggggggcgagggcgcggcgggcgcgg

SEQ ID NO: 376264 - DNA, 122 bp, Homo sapiens
cgccatacacatgtgccagcccagagcctcttcctgtccgcaccggtcggtgacgccaggcgcagacgccgagagatgacgtataccccacgtaccgcgcatgctcaaggacgagcctgcct

SEQ ID NO: 376265 - DNA, 122 bp, Homo sapiens
gtacttcttctataaggtaggagggtcgccgctccccctcacggtgttagcaacaggtcacgcacagggtggcacgacccttgtctgagccacttgatgccacaagaggtcattgatctccg

SEQ ID NO: 376266 - DNA, 122 bp, Homo sapiens
ccaggctgggataaaagggctcagggccagagcaccccattcactcacttcctgaggtgccgaaggaccctgtgctgcctgtgactttggtatgtgtcctctgggaacagaagcaggggatt

SEQ ID NO: 376267 - DNA, 122 bp, Homo sapiens
ctgcgaacctcggactctgagacatctccagcctgagactgcaaagtgggtgaagaactgcgagaactccccacatacagacagtacttccccggtggccacgaggacgccaagccggagat

SEQ ID NO: 376268 - DNA, 122 bp, Homo sapiens
ctacatcctggatccctggatgggtgacctttactgaaaggcctatgcctatgagctagacgcttcctgcagttcccctgggggcctgggtcttcagtatcaaaaatacctccttgggccat

SEQ ID NO: 376269 - DNA, 122 bp, Homo sapiens
gtaggaccagcaggaattgggttggcactgtcacagccccagctgtcctcaagaaaaaaccgagtgctaggcgcagtggttcacgagttcaggagtttgagaccagcctgggcaacaaggcc

SEQ ID NO: 376270 - DNA, 122 bp, Homo sapiens
gtgaagaccaatttagagccaaaaattaaaggtgaagcctggtgagcgtggtgccgatgacgtgattgtagcagccgtggagagctcgtctctgggcctcggctctacacacctggcctaaa

SEQ ID NO: 376271 - DNA, 122 bp, Homo sapiens
tgccctgagtgaggagcacaagtcactccaggcctcagctccgggctcctgagtgtcacccgctgcgttgggcgccagtgcttgcaggacgggtttccttttctgcgagccggcataacaaa

SEQ ID NO: 376272 - DNA, 122 bp, Homo sapiens
agagtggtcgggtgtttcagattccacggtgggccggggtcttttcctaccctcgggagccgtctgaatttctcctctgccgagttcctgcgggtgtccttcgcccaccggcccgggggagt

SEQ ID NO: 376273 - DNA, 122 bp, Homo sapiens
ttttgaatggggccctcctcgcggcgtcagccctcattaacatgcgccgcggccattggccgagcccgtcccatctgctctctgataggctgagaggaggtttgattttttttttttttttc

SEQ ID NO: 376274 - DNA, 122 bp, Homo sapiens
atgtgcccgctgtgtggggctctccctcattaccctctgcctcgtctgcattgtggccaacgccctcctgctggtacctaatggggagacctcctggaccaacaccaaccatctcagcttgc

SEQ ID NO: 376275 - DNA, 122 bp, Homo sapiens
gtacatagtttaatcattgtattgcactgtgaattttccactctaacctagagattcctccgtattagttcaaagagatctttctcattccttttcgttagactttttcctttaattgatac

SEQ ID NO: 376276 - DNA, 122 bp, Homo sapiens
atggccctcgcctggccctggctgcggagacccagcctggagaaaaacgtggctgggcttcggccgccgagcgagggagaaccgcgcccccggggtggggcttgggggccgccctgggactc

SEQ ID NO: 376277 - DNA, 122 bp, Homo sapiens
ccaaatacattttcttgtaaaaaacaagaagacatgttttgcctagtctgttagcaaatacgttacagggcacctgctgtgtgccaggtcttagcctcacagtcatgaaccaggctgaccca

SEQ ID NO: 376278 - DNA, 122 bp, Homo sapiens
gtatacttaataaagcccgtgtttatctttctctttagaaccccctctaagcagacccatcgctttattgctttaaaacatacactaagtggtgagtggagctggggcgagggaggtgcgga

SEQ ID NO: 376279 - DNA, 122 bp, Homo sapiens
gttgccacgagaccgtcgccaggcaaccgcgtgtacacatactccaggcgggccggggcgcgtcaatatggcggcgcagggctccccctcgagctctccgtcagacgactctaccacctcgg

SEQ ID NO: 376280 - DNA, 122 bp, Homo sapiens
aagtagtcacagagtacttggagtgcctgcgggatggaaagtttgaaggaaaaatgtagccgtatatcattggcattcatgagaaaattcagattagatgtttgaaaggcaggtccccagga

SEQ ID NO: 376281 - DNA, 122 bp, Homo sapiens
cctccaccctccttcactcacatagtaaaagttagctactgcctgcaacataccaggcaccgtacaacacgaaactgtaggctccccctccaggaagtgacaatgtcattcctaacctgttg

SEQ ID NO: 376282 - DNA, 122 bp, Homo sapiens
aggaaggaaggaagaaaaaaatcatttcaagggtaggcgacgggagccttgcggtttagccgctagtcaacggatgggggggagtggtagcaaaaacataaaaatggggacaagagagaaac

SEQ ID NO: 376283 - DNA, 122 bp, Homo sapiens
tgctgttaccaacatcacattactcaccatcatataagccagagtgaagccagtcagatccgcttaactctttactggtgacattacttagaaattaaaaaacaaaaaacaggcccctttaa

SEQ ID NO: 376284 - DNA, 122 bp, Homo sapiens
gaagcccatctagtccatgttctaccctatacaatgatctcatcttattcattttcaggacgttatccctgggcctctgtgggatggctagggggcagttaaaggaagattttgcaaaaaag

SEQ ID NO: 376285 - DNA, 122 bp, Homo sapiens
ttcgcttcactttggaattcactttgagctggtatacgtggtgtaccggtattgtcgtaccggtattgtaccaaagggactttaccgactgcttgattggcttctgtatatggggctaggtc

SEQ ID NO: 376286 - DNA, 122 bp, Homo sapiens
caacacgcaggcgcgctccggctcgctcaccacgcacggaagtgcgcctgcgccaggagacgccccgcccagcccctggccgactataaagtgtcgagcttctcctcgcgagagacttagtg

SEQ ID NO: 376287 - DNA, 122 bp, Homo sapiens
cgacacctgccaggcccaatgtgacaagatgcatcctgagtcctgtgtgccaagccttggcggggcaaagttggggcccggaggacggtaagacacagcaactgcgagttcccagagacaga

SEQ ID NO: 376288 - DNA, 122 bp, Homo sapiens
aagggcccgggctctagactcaaatagtccccagttgggactaactacacacttggtgggcgacctcaagcagatttcttaatgtctctgaacgctggcaatgttttaatctataaaagagg

SEQ ID NO: 376289 - DNA, 122 bp, Homo sapiens
acacatcacaggcgccgactcagcctgaacccaagtcaccgatcccttgcttttcaaaaacgacagcgacgaaaacaacggcagggcgtggtggcaagccccagctccttccctacttcaca

SEQ ID NO: 376290 - DNA, 122 bp, Homo sapiens
agaacacgagtgccttttttgcctgggatggcatcaaactgggccagcaggtcattttcacggttgaaaatggaatagttcaagatggcttctaggctgggcaatgaatcctcggtaataat

SEQ ID NO: 376291 - DNA, 122 bp, Homo sapiens
ccaaatcctgtccacttagcacgttctgataactccagtgttcacactccagcccatctccgccatgccctcccctgaggctcctgctgccaggccactgctatgccattgtctcttgagtg

SEQ ID NO: 376292 - DNA, 122 bp, Homo sapiens
ctgacaggacgaagcgttggcacagctaaggctgcccttcttgccccccagctccacactcgcagaagggctcacagcaggtcatggttgtcagtaacaaaccctgacctactgaacaggat

SEQ ID NO: 376293 - DNA, 122 bp, Homo sapiens
ttgcgttctggaaatggttccgctgaggaagagggcctggttctttgtggaggctaagtgcggccttttggggtctcctgcctaggggtctgtaggtggctgttctctgagcactggctcac

SEQ ID NO: 376294 - DNA, 122 bp, Homo sapiens
ataagcctgggaacagcagttcatgtatcttagtgatggtggtccttcgaagctcttacacgccgttttggacagcaattggactttctttttaatctactctgttgcatggatatagtgag

SEQ ID NO: 376295 - DNA, 122 bp, Homo sapiens
tcccgattcgagagaggcaggcatccgcggcagcagcttccaacccagacaggcttaagccgcgcgagggtgcccgggtgggtggctgcgcagggccctacctgggcgggagcggctgcaga

SEQ ID NO: 376296 - DNA, 122 bp, Homo sapiens
ggagaaagcggggtcctgatctcagatctggaaagccaaacataaaataatgtttacatacggggtgcatgtcactagaggatttatgcattgcattgtgtcaaataatatgtcaaagtttt

SEQ ID NO: 376297 - DNA, 122 bp, Homo sapiens
accgtcgcagacttatttgcataagcacccaaacactgcttacgtcactgcgccggagtccggaccccgccccgtcttactccagcctttcccagctagggaggaggatggaaagggaaagc

SEQ ID NO: 376298 - DNA, 122 bp, Homo sapiens
taatgaggagcccacactggcccttctgatcccagggatgcgggaaacttgccttccaggcgcgagtgtgagctcccggagggcgggactctatccctcccacccctcctcctgccttcccc

SEQ ID NO: 376299 - DNA, 122 bp, Homo sapiens
gtgctcggggctccgcagtctctaccggctcacccccaatccccagtaaccccgagaccacgactgcaacgactcctggactcctcggccacccaaggacgtttgtatcaaggctgcgcgtc

SEQ ID NO: 376300 - DNA, 122 bp, Homo sapiens
cgcgtggcttccgcctgcgcgggcgtccgctccttccttgtctcgttcaggccccgcaggcgcccccggggatgcctggactggccaggccggcccccatctgagctccacgttctggacgc

SEQ ID NO: 376301 - DNA, 122 bp, Homo sapiens
tcttaagccctctgctcctcttgctttcccgctccagcaagtgagagtggactgggttgccgtgccgggcgggtgtgggtcgccgggcaactccggagtctccccttccccatcggccccca

SEQ ID NO: 376302 - DNA, 122 bp, Homo sapiens
tctcggggcctgcattttcctgctcgcgagcttggcccagtagacacctacgatgctgtccgggcctcccaccagtcctgtcgcacagtgggcacacttcctcgacagcctccatcttcgag

SEQ ID NO: 376303 - DNA, 122 bp, Homo sapiens
cttcggggatctcaggttcagagcatggaggtgctgccaagtgggccgcgtcggggagcccggagtgtgggttgtttctgcgggaaagagagggttttgtgaattttctcttggaatggcag

SEQ ID NO: 376304 - DNA, 122 bp, Homo sapiens
gacttggagtctggggtggggtggtgtgggtcccggatctgggtacgttggggagagaagcgtgaaaggatccgaggttgagatgggtctttgtgtcaacccggcctcccctttccctcttg

SEQ ID NO: 376305 - DNA, 122 bp, Homo sapiens
cgctgaagcagtcacacatgcctgtctgccagttggagttctggggtgccggaccgagaccgactcccacaacgaccatcggcgcctcatgtgttaattttttaagacacctaattagagcc

SEQ ID NO: 376306 - DNA, 122 bp, Homo sapiens
tagtagactattagtagttaagtttttggaaactcaaaagtttacatggaattttgactgcgcagggtgtagacattcttaactcctcacattgttcaagggtcaactgtataaattctgag

SEQ ID NO: 376307 - DNA, 122 bp, Homo sapiens
gatgggagtgggcctgcccggtcaggcggcccctggagaaggagggcaggctgcatcggacgccctgggtggttatggctcgaaagaagaattgaactgtgaggcagagggtggcctggttc

SEQ ID NO: 376308 - DNA, 122 bp, Homo sapiens
acacccgagaggctgcaggtcggcgcgagaggctgtttgcatctcggcccgggcgtaggtcgcctagcgacctaacgccgagggctcggggaagggatcccagacagagccaaaatggaagg

SEQ ID NO: 376309 - DNA, 122 bp, Homo sapiens
aatgaggaagagggtaacagtattgttaactggccatgaattttaatccctgttgtgtgtcgccgaatagtttacaaactctttttgcactggggttttgtttctcccactccccgcatgat

SEQ ID NO: 376310 - DNA, 122 bp, Homo sapiens
agctgagctcaggcaggcctgctgcctgcatcagggcaaagaggtggaggaagagaagcccgtggcgccgcaggatggtgttaggccctttcacagtagccccggaacctttcaaatttctc

SEQ ID NO: 376311 - DNA, 122 bp, Homo sapiens
ctcccaaccgaaggctatgaagccaccgaaaggcggatggatgtggaccaagacacgcagcgggaaatcatctcaaaaacagagccagggacacacagctgggtgtggatggtgcacggtgg

SEQ ID NO: 376312 - DNA, 122 bp, Homo sapiens
aggctatataatagaaaccattttaatattaatagtccagtcatttgaagattaagggcccggggtttgctttggcatgcagaaggaatactggttacctgcaattctggttttcagaaggt

SEQ ID NO: 376313 - DNA, 122 bp, Homo sapiens
taatattgacaaacccaaaacaacatgaattcggaactgttttgtttagaattctaaaaacgattctgctatttggtggggtgctatgcacctggatgtggaattaagaggtgcatctcctt

SEQ ID NO: 376314 - DNA, 122 bp, Homo sapiens
gtggctctgggtcacgcctttcctgttggccaggggttggtgctgttgagcaggggagggcgttgttcaaggatatctatttgcacaataacctgtgcaaaggtagctagaagacttgaaac

SEQ ID NO: 376315 - DNA, 122 bp, Homo sapiens
gtcccagtagggccccagactcatacagcccagagctcctgacacaactcacagtgcatgcggacatacacacactggcattcatgcggcaaagatgtgttgacacgtacagaccagaagac

SEQ ID NO: 376316 - DNA, 122 bp, Homo sapiens
gagcgctgaaggaggggatctcaaggaggtagaaagttcaatggttaccaaagcctgtggcgggacagggggaaaaagggaggatggttaatggctagaaatacacagtttgatggaagaaa

SEQ ID NO: 376317 - DNA, 122 bp, Homo sapiens
ccagcacaccctccgcagctgctggccccagtgctaagcccctcactgcccggggctggccggcccgccactccaagtgtggggtgccaagcccatgcccatccggaattctagctggcctg

SEQ ID NO: 376318 - DNA, 122 bp, Homo sapiens
gactcgcgtaccgtgcggctgctgaaggagctgcggcgggccctgggccgcatggtggagcggagcctgcgcagcgagctggctgcacttccccccagcgtacaggaggagcacgggcagct

SEQ ID NO: 376319 - DNA, 122 bp, Homo sapiens
ctcagcccgacagttcggtgactccttgcgtccccgcggtgtccatgaacagaggtaaagcgccctgataggtttgctcggaactgtcatgtttttagtattgaaaggtttctggggatact

SEQ ID NO: 376320 - DNA, 122 bp, Homo sapiens
ctcgggttgcacgcgggggaggcacaggaaggcctccgaggatttgttctgcttggctgccggctcgctatgccagcccccagcccggccgcagccccctttgtctctggccgccagagcca

SEQ ID NO: 376321 - DNA, 122 bp, Homo sapiens
ataaaataattggtatctggaattatattctaaatgaaaaaaaccacatgggatttgaaacgtagaaacagggcaacttcagaaacaccagactgatgtgaattggagcatatttatagttc

SEQ ID NO: 376322 - DNA, 122 bp, Homo sapiens
cttctgctcttgctgctcttaacgagtccccaaacaagcttttctcattttattttgcaacgtaattcagctctccagctgcacctctacatgctgttcagggctgcttctgcccaccccaa

SEQ ID NO: 376323 - DNA, 122 bp, Homo sapiens
agggaaaatatgtgtttgaaataatgccttctttaattactggtttagtcacaagatttccgcatccaacaatggaaacatagggcccagctgcatttcattttttttaaagggcttatgat

SEQ ID NO: 376324 - DNA, 122 bp, Homo sapiens
ccacaacatggacctcaggggcggcccccacgatggcgtcaccattccccgctccaccagcgacactgacctggtcacctcggacagccgctccacgctcatggtcagcagctcctactatt

SEQ ID NO: 376325 - DNA, 122 bp, Homo sapiens
ctctgctccctcctaacgtgaaaccagccgacctgggatacattttcttaaccagcaaggcgtggcggggttggggggcgggggtgtttcgatgctccacgctgaggggtgagcctcaggca

SEQ ID NO: 376326 - DNA, 122 bp, Homo sapiens
tcggggcactgcgggccaccaagcggacttgcagcggcagcgggcgccccgcgcccgagacgcgccgacgtcctgccagccgcccatcgcggcccacgtccagcagctcccgcggcgcccgg

SEQ ID NO: 376327 - DNA, 122 bp, Homo sapiens
ggtgtataattccaagagtttgaaggggctcttttgagttacaaggtatggaccaaaactcgaggccctgaagttttactgtgggtggtgagagaagtacatgatataatctcttctaatgg

SEQ ID NO: 376328 - DNA, 122 bp, Homo sapiens
ataaacgttttagagattaaggcttcactctcatctgaactactgagaaaatttagcaagcgaatttcccccttgtctttaacttacaagaattgccccagtgtattgttcctgtagtcatg

SEQ ID NO: 376329 - DNA, 122 bp, Homo sapiens
taaaccaaaaagtatctgagacaggtcttgatcaatttagacaatttattttgggctgggcgctatggcttatgcctgtaattccagcactgggaggctgaggcaggtggatcacttgaggc

SEQ ID NO: 376330 - DNA, 122 bp, Homo sapiens
aacatattttgtcactctcctgctacactaagataatatttatacatacgcagttttttccgtcaaaatgaaattatttacagttctgagtatgtttgccattcaataaacatttgagtgtt

SEQ ID NO: 376331 - DNA, 122 bp, Homo sapiens
gtgttttcaaaggtgctctgaagcttacgctccactagtttcacagtaaatcgccccttgcgagggcgctttttttttttttttaatgtgttctctgaatcgctttccccctttaacactgc

SEQ ID NO: 376332 - DNA, 122 bp, Homo sapiens
agaggagttggggcagccttgcgcccccgggggaccaagggaggtacctgcatctgggggcgcctgctgtccattccagtgccctgtggcaggggccacgggcctgagacccctgcccgagg

SEQ ID NO: 376333 - DNA, 122 bp, Homo sapiens
gcagggacgagctggcgcggcgtcgctgggtgcaccgcgaccacgggcagagccacgcggcgggaggactacaactcccggcacaccccgcgccgccccgcctctactcccagaaggccgcg

SEQ ID NO: 376334 - DNA, 122 bp, Homo sapiens
tccccgcgcttcctgagctcaccggggcggctctgatttgtcaggcacagccatgaggcccgggctgtgggctggccaggggcatggggtttggcctgggggtcgtcatgggggcatgggac

SEQ ID NO: 376335 - DNA, 122 bp, Homo sapiens
cagggggtggcgcttgtcagggaggcttgggctgcacaggagcccacagaggcggggagtcgtggggaggctcaggcatggcgggctgcaggtcccgaaccctgccccgcgggaaggcagct

SEQ ID NO: 376336 - DNA, 122 bp, Homo sapiens
gcgccccctacacgacgacagacgcgtcccccagcccttctcctgtcctaccacttgtggcggccatgaaggggacccccagctccctggacaccctgatgtggatctaccacttccacagc

SEQ ID NO: 376337 - DNA, 122 bp, Homo sapiens
tcatttcacctcttctttctcccacgggttcctttctggaagcctcttttgcctacacaccggcaggtaagccatctctgccccagtggggttcagaccccccgggacgggcccttctctca

SEQ ID NO: 376338 - DNA, 122 bp, Homo sapiens
tcgcacctccccagtgaatctgtctcctccaagacacctagccttccttcagcaactcagcgtttctacctatattacggactttgtaacctttcaaataagcacagaacccttgctcccgg

SEQ ID NO: 376339 - DNA, 122 bp, Homo sapiens
agaagtatgactaccatatcttccataaagcggaaattcagcactccttttgaaacctcacgaaaattactgcaatgatctaaattagggcttggaatcctgggggaagggaagctttataa

SEQ ID NO: 376340 - DNA, 122 bp, Homo sapiens
gtgcactgcgggaaaactcgcagggcctggctcaagggaggcctggcattttctcctccccgcgctcaggcggagaaaggtgcggtccaacccgcggaggctcgacccggaagccgccgtgg

SEQ ID NO: 376341 - DNA, 122 bp, Homo sapiens
taggatgtagctcctaaagccagcacccattctcctacttcatttttatgacctcgggtgcggggaagaagagcaaaactgaaaacaaaggattgaaaaagccccatatacttaaaagagtc

SEQ ID NO: 376342 - DNA, 122 bp, Homo sapiens
ggcccgcgctcccgccaccagcgcacccatgatgtactcacggagaggggtacgcagaaccgcccgtcccgccggagccgacacccggagcagtgcaaatcaactcccccagcctagcggcg

SEQ ID NO: 376343 - DNA, 122 bp, Homo sapiens
gtatgtcactcggctcggcccactacccaatactatcccacccattcctaacaggactcccgagaagggcggccacctctgccagagaggcaatggatttctcaccagtgttcatgtgtggt

SEQ ID NO: 376344 - DNA, 122 bp, Homo sapiens
tgaggacagttcacagcacccggcccacgatcacgcccccgtctttccgcagcacatccgcgtgggctgggagcagctgctcaccaccattgcccgcaccatcaacgaggtggagaaccaga

SEQ ID NO: 376345 - DNA, 122 bp, Homo sapiens
atcagagcagtctgtcagagcacatgggagagcgacagccagtcagaatgtacaagagtgcggggaggggtgcaccaaaagactgactccctacagaaacttttgccgagtgggagcaggtt

SEQ ID NO: 376346 - DNA, 122 bp, Homo sapiens
ctcataatctctttccgggccgccatattaatcatttcctacttgttgtcagaaaccagacgtgcatttcatagatgtggtcgttgtgtgtttgatgtgaattgttttgttttgtttgtttt

SEQ ID NO: 376347 - DNA, 122 bp, Homo sapiens
tgtccggtgagtttgtccacccagcaggcaactgaggcccggaggggctggccgggtcaccgctgggagcgcggactcccaacaggcagtgggcagcgagctcaagttgggcacgcacgtgg

SEQ ID NO: 376348 - DNA, 122 bp, Homo sapiens
gaggggggcgcggctgttcctaacctcctccttaggctttgcaaaggcgaaaaccggagtcggaacttggcggtgggcggccaaggaagagaaggcggaggagtaggggaggttctggacac

SEQ ID NO: 376349 - DNA, 122 bp, Homo sapiens
cccgcagccggcgccttcctttcgaatacacgccaggccccgccccaagcacagctcctgcgtcctcattggacatcatgggcaatccaagcactggagtccgagtccgcgcactcgttacc

SEQ ID NO: 376350 - DNA, 122 bp, Homo sapiens
gaggggaaatgaatttgcagcagggccaagctgggaggctgtgcaagtacatccagggcccgccttcctgaagaggccccaggctcaagctcaagttcgctgactcagacccctcccccaca

SEQ ID NO: 376351 - DNA, 122 bp, Homo sapiens
agtgccagacagtgggcgcaggtcagtgggtgggcgcaccgtgcgcgagctgaagcagggcgaggcattgcctcactcgggaagcgcaagggctcagggagttccctttcctagtcaaagaa

SEQ ID NO: 376352 - DNA, 122 bp, Homo sapiens
ccgagaatccagcggccgccgccaagcaggtgcgagccgtcgggcggggcgcgcgggaggcggagaggatgggcccctgaaccaccccgcgcgccccacctcagcctcccggggcgagccag

SEQ ID NO: 376353 - DNA, 122 bp, Homo sapiens
ggacagaccgcaggcccagaacccccgccctattccccaccccgacccagcaccttcatgcggtcgatgttcacctccagcttcagctgttccaccgtcttgcgggcctcggcaatcttggc

SEQ ID NO: 376354 - DNA, 122 bp, Homo sapiens
gccctgtgtggcttggagggcaggtgcagtagtagcctccagggctagggttgcaggagccgccattgagacatggccctgagtgacaagctgtcatctcctcactacaggtgggtcctgaa

SEQ ID NO: 376355 - DNA, 122 bp, Homo sapiens
ggtcaggactgggcaggttaatattccatcccctagactagaactgcaggaacatgacaccgtgaagatgaacaacaatgtgtgtccccttccatgcttactgaaaaacacgacaccgatgc

SEQ ID NO: 376356 - DNA, 122 bp, Homo sapiens
aggtaatttggtctctttctatagcttccctaggccagtcaagtttgagaataaggtctccgtaagtggcctgtcctgggagagaggaccaagtgatttgtgatttggaagcactgtggtat

SEQ ID NO: 376357 - DNA, 122 bp, Homo sapiens
ctcctgacctcgtgatccacccgctttggcctaagtgctgggattataggcgtgagccaccgtgtttggcctgaccccacattttctttttcccgtactgttggtgggcatttaggttgatt

SEQ ID NO: 376358 - DNA, 122 bp, Homo sapiens
ctaaacaaagccaggcagccgcccaggtgggtgaaggctgcagattgcgctcaggcgtgacgccggggtgcaggtgggagcgacgcccgggtgcgtgggtgcagcgctcgcccgcccgcggt

SEQ ID NO: 376359 - DNA, 122 bp, Homo sapiens
ccgcccccggctgcagggtttggggtccaccggggcgcatttctgatcccagtggctcttcgggtgctcttggccggaagaactcccagacctttcactcctggcctggccgatccacgaag

SEQ ID NO: 376360 - DNA, 122 bp, Homo sapiens
gtgtttgagaaggtccccctgcgggtaaagaacttcagcgtctggctgctctatgactcccggagctgcacccacaacacatacagggaatactgggacctgaccaccatgggccggcaccg

SEQ ID NO: 376361 - DNA, 122 bp, Homo sapiens
tctctttttgcccttacttctccttctgaaaaccatctgcctactaccatctctctggaacgtctccttgtccccagatgtgactattgttcttaatagagaagggagcctcctccctgcaa

SEQ ID NO: 376362 - DNA, 122 bp, Homo sapiens
agggcaagtgtggtaattagagtcaggctagagggcttgctctggacctgccagtctggccgccacccaggtggacaggtgggtgtgcctttgagtgcgacctttctctgccgctggacagt

SEQ ID NO: 376363 - DNA, 122 bp, Homo sapiens
cttggctgtggtggagagctggactcaggtctctcttgggggccctggggaccagagccacgatcccggtgccctgatgtccccgtctcttccccaccttcctctcccccagtgtctgcctc

SEQ ID NO: 376364 - DNA, 122 bp, Homo sapiens
caattgtgtctttcactctcggatacggttttccggctgactctcattctcaggaccaatcgtattcgaatgagcagactggctttcctctgggcgttgcttcatttcagtctacactggca

SEQ ID NO: 376365 - DNA, 122 bp, Homo sapiens
atgtgaacaaaagctggctgcagtacaatgccacttccaaaaaatttgacagatgaaatgcgtcatattagatgcatatgtaagtatgtaaaggacaaaactcgtggattcaaggctatatg

SEQ ID NO: 376366 - DNA, 122 bp, Homo sapiens
tctttgaggtcaaccccttgtagatagctggggtcatggtctcattttctacctgggcttcgttgacccttccagaagaaaaaaggcatctttgtgtcctttgggaagtgcttaaagcagta

SEQ ID NO: 376367 - DNA, 122 bp, Homo sapiens
aggaatgggattcatgctccaaaagtatccagcctgcacctgggagcccctcggagatgacgccttccttcctgcccctcccaccctgcacccagcaccagctagagacagcctggtgcagc

SEQ ID NO: 376368 - DNA, 122 bp, Homo sapiens
acagaagtccagggtgctgccatttctttttgaaaaacatcccagaggaaagaagctccgcggagagttcctgaaatgcagagagccagagaagccgaaatgatgaaaagtcaggtactgtt

SEQ ID NO: 376369 - DNA, 122 bp, Homo sapiens
gtgactcacagagggtcagcagctggaggatcagcaccagggccatggtgggcagatacccgctagagctggagccagggcttggtcgcaccctctcccctcccaggaaatgaggcaacatc

SEQ ID NO: 376370 - DNA, 122 bp, Homo sapiens
agagtctccacccttggctctccgagctagtggacagggaaagcagtctcagctttgccccgttggaagttctgacccacagaacccacgagcttcccccgtggaagcgaggcgagggccgg

SEQ ID NO: 376371 - DNA, 122 bp, Homo sapiens
cctgaggacggaggcacagccagacgcaccaaggggggcgacccagaggggttgctcgagcgccgtcacccagggccagggggcgtggcctgaatggggcgtggccagggcgggatctgcgg

SEQ ID NO: 376372 - DNA, 122 bp, Homo sapiens
ggtgggaacgctgtcgccacagtttgcagtctattcattcagaataacccgccagtcagccgactgctcagagctcggaaagacccagctccaaactaggagtttcgagattttaattggca

SEQ ID NO: 376373 - DNA, 122 bp, Homo sapiens
tacaggtgttagctcgataaatctcttgcatatcttgtcttaccttggcatcttcttctccgaggacctgaactcatacacttggcttggtctctaatatcaagacagctttcagtagtgac

SEQ ID NO: 376374 - DNA, 122 bp, Homo sapiens
acgtccctggggcgcacgggtcgcgctctgggccagcttttgtctaccctgttctggggtcgccttccccgccggacccgcgcctggcgctcacgtggccagtaaataacagtcaaatccag

SEQ ID NO: 376375 - DNA, 122 bp, Homo sapiens
ggccccgggcagtgaggggcttagcacctgtgccagcagctgctgtgttcgacttcgcgccgggccttcactgcctccccgcgaggcaggcctcgggacctgcggcccaccatgcctgagcc

SEQ ID NO: 376376 - DNA, 122 bp, Homo sapiens
agctcctatctatgaatatcactaaaccctctccatgctaacttataggacaatgaggtacgtaagaatttgtctgaaatagctggttcccaaggggaagtccatggatagacaggctcagg

SEQ ID NO: 376377 - DNA, 122 bp, Homo sapiens
cttcctccgccccttcctttttctctgtgcatcctcagtgacgcggggcacagctctgcccgggggcctaccagagcccacctggaccccacactgggtcagccctggtgcggaggaggccg

SEQ ID NO: 376378 - DNA, 122 bp, Homo sapiens
tgcacattctccaacccttgtttgcatatcgcaggccggggcctgggtggtgatggtggccgcgtgaagttaccgggactgacgggcccgggacaggctgcacggcagctcgcacatggagg

SEQ ID NO: 376379 - DNA, 122 bp, Homo sapiens
gacgcttggccccctccctgtcccgcagcaagaagcgcagctccctcttccggaagatcacgaagcagtcgaacctgctgcatactagccgctcgctgtcgtcgctgaaccgctcgctgtca

SEQ ID NO: 376380 - DNA, 122 bp, Homo sapiens
aattggaatcgtctctttattcatgagtagtctattttaaataaacatgctgagtaaatacgtagagaatataaatccttagataaatgttcatttttgtctccttcctagactatatcctc

SEQ ID NO: 376381 - DNA, 122 bp, Homo sapiens
agatcacaatcatgccagactttttacctcattagttttctattgtctgttctgaggcatcgcatacatttctatctccaggcaaaactggttcttgtctgcattgcgtttccatcccttcc

SEQ ID NO: 376382 - DNA, 122 bp, Homo sapiens
gagtgagcggaggtggggaggacttcggtcattgaggcggagcggaactcagcagctccccggaacgcctggggtttgagagcggggcccagggctctggagggtggaggcaaaagtggccc

SEQ ID NO: 376383 - DNA, 122 bp, Homo sapiens
tgggatgaccaggatcccaagcctcctgctgccacaatgtttataaaggccaaatgatagcgggggctaagttggtgcttttgagaaccaagtaaaacaaaaccactgggaggagtctattt

SEQ ID NO: 376384 - DNA, 122 bp, Homo sapiens
cccagttccccctctgcagctgcccggcaaccccgccttgcccgggaagggcctgcgcgccgcccccgctcacctgttgtgcagacccgagcaagctgggcttcgccttctccaggtcgggg

SEQ ID NO: 376385 - DNA, 122 bp, Homo sapiens
tttacctttccctaacttgatctttcagtaaggacataaattaataatgacaagaatcagcgcctttttgcctaagactgtcagcttttgtcatgtttcccagaaaagtccaccactggcac

SEQ ID NO: 376386 - DNA, 122 bp, Homo sapiens
gcccacccggctgcacagggaaagcttgcgacgtctgttcttcctcttgctttatttcttcgtttccttgcctaagcctgggaacctgcactgaccctgccctccctaccccctcttgacct

SEQ ID NO: 376387 - DNA, 122 bp, Homo sapiens
tctgaaaggccctggctgcagtgctgctcgaaacagagaacaacgtcacctgggcagcatcggtgctgaggaagtcgcctgttaccctcgatgctgtctccttctgctgtttgcgtcagtca

SEQ ID NO: 376388 - DNA, 122 bp, Homo sapiens
gcgccttctagtgggcgcggaggaaactgcgggggcgcggagcaaacgcgggaaggtcctcgctcacagcccccagtccttagcctccaaacactggcatctcaaccgcctgctcccacgac

SEQ ID NO: 376389 - DNA, 122 bp, Homo sapiens
gatgaactcagacttggtcaccacagcttttcacattatggcaataggaagactggaggccggacacattggcttacacctgtaatccgcacactttgggaggctgaggcgggcagatcgct

SEQ ID NO: 376390 - DNA, 122 bp, Homo sapiens
tccccaggagggaaaattttgagagactcctggctttcccttctctctcttcttcctcaccgcaggaggtggaatgccttacttgattggcgagacggaaaaaggactcagtgcctcttaaa

SEQ ID NO: 376391 - DNA, 122 bp, Homo sapiens
aaccgcggcggcgcccggtgcacactgggagttgtaggccgcgggcattgtgggagttgtcgtaaaagcctgctttcttgccgtgatggccgccgccgaggcagggagttgagggtttctgc

SEQ ID NO: 376392 - DNA, 122 bp, Homo sapiens
cattactgtctggaaacggcttgcggggacggtggaggataacagggggcgagcaccgcccgcagccggagtagccctcgcgttttttccttgacagcgcggccgagcgccgctgcgggttg

SEQ ID NO: 376393 - DNA, 122 bp, Homo sapiens
atgaaacagagggttggactaagtgggctgtggtccgacttgtcctgctgggctgtggctcggagatgctgtctgcaggggttctcggctttacctcagcattctggcaggaacaattgtga

SEQ ID NO: 376394 - DNA, 122 bp, Homo sapiens
gagctttgggaagtaaacaagtcccggcgctttacgcaggcgctgggggcccagccaggccgccacactcgcttcgctggtgacgggaggcacaggcttccagatgtgaaacgctaacaggc

SEQ ID NO: 376395 - DNA, 122 bp, Homo sapiens
cccttggggtgagtgggatctcagccccaagttcagtgtgggctgctcccacaactggcacgtttacctggcctttgttggggactttttgcaatattatggtatctcagtgacttccccca

SEQ ID NO: 376396 - DNA, 122 bp, Homo sapiens
gccagtccggggactgcagtcagctatttaaacctcccgcccaccttttctttagacccgcgtctcaccccgggccggaagggctcctgcgcaggcgtttgtagccacttttaagttttatc

SEQ ID NO: 376397 - DNA, 122 bp, Homo sapiens
tatcccatcccacaggagccttggcgaaaagctccccggccggcgcaaggccagacttctcgcctccactgtgttgattgcggttgccagggcagcggcgcattgctccccgcctcgtcctg

SEQ ID NO: 376398 - DNA, 122 bp, Homo sapiens
ggcgggaggacgagcgctacctcagtactacttctgggtctcccgcgcgggctgaggaagcgcctttcgccgccaagcccgccccgcgcatgcgccgactgcggctcgcgcgcgcgcttcgg

SEQ ID NO: 376399 - DNA, 122 bp, Homo sapiens
aggcagaagttgcagtgagctgagatcgtgccacttaaaaataaattttttttggccgggcgcagtggctcatgtctgtaattccagtactttgggagaccgaagcggcacggcagatccct

SEQ ID NO: 376400 - DNA, 122 bp, Homo sapiens
aaatgaatacagactagatactttaaccacaataaatattttggcctcttaaaatcctagcgaaagacataactgaaagaaagaaccaagcagggaaaaatgttttcacagcaccacagagc

SEQ ID NO: 376401 - DNA, 122 bp, Homo sapiens
cacataggtttggtgtacagtggcgtgggcccagataacaaagtgcttgtgcacacagctcgaaactagctcaacaatactatcttgtgtaccaagtgcccattcccacagctcagctagtg

SEQ ID NO: 376402 - DNA, 122 bp, Homo sapiens
cacccctgcaacgagtgctggcccctccctgcagtggatcatggacgtgctcgtctgcaacgggctgggcatctactgcggcatgaagacccttgagtggctgtccctgaagacgtacaagt

SEQ ID NO: 376403 - DNA, 122 bp, Homo sapiens
cgcgtgcgcagtcgcccagactcgccgtgtgcagtgggagtggctagccagtctcgctagcgcaggcgcaggccctcccgcccaggcccttgcgcaaggcaggccatctccccgcagcgtct

SEQ ID NO: 376404 - DNA, 122 bp, Homo sapiens
tggggcggtctagggtggcgagccgggccggctggagagcgggtctgggcggcgccttggcgggaggagggactgccggacccacgcggcggcccgccccctgcctagccgcaaggctgtcc

SEQ ID NO: 376405 - DNA, 122 bp, Homo sapiens
ggcgacgtatagggaccggcctgacttgctccggaagtagttccttctgctgccctgtcgcgtgtgctgccccggctcctggaggccgtggtctcgggagtgcaagtgggaacagagctgag

SEQ ID NO: 376406 - DNA, 122 bp, Homo sapiens
acctgtgtagagaaagtccaagtctgtgctgttgtcagaactgagtgtgtttgttccacgcgggcacctgtccccatcgatacgaaggctggagcctcagagatggaacgtaactcacacgg

SEQ ID NO: 376407 - DNA, 122 bp, Homo sapiens
cacgtggagggacccggcccgcgccttctgcccctgctgccggccgcgccatgcggtgagcgccccaggccgccagagcccacccgacccggcccgacgcccggacctgccgcccagacccg

SEQ ID NO: 376408 - DNA, 122 bp, Homo sapiens
tggcaggtaaaaataaatataacttcagagttcagtcttctcaacccatcctaaatctaacgcatgaatttacagaggtgaggttcagggttcgttgtttgaaaagctccacaggtgttaaa

SEQ ID NO: 376409 - DNA, 122 bp, Homo sapiens
cccacccctgggagcgtctccctctcgagctgcccctcaaccccctcgcatccttgcctccgggccagcctcacccactcggggtccgaccctgaccccggccccggccccggccccggccc

SEQ ID NO: 376410 - DNA, 122 bp, Homo sapiens
cgacaccagcccgcctcggcctccagcacagccgctagcccggcccatcctgcgaaactgcgggcccagaccacagcacaggcctccaccccaggccagcccccgccccagccccaggcccc

SEQ ID NO: 376411 - DNA, 122 bp, Homo sapiens
cacccacccaccagtgcaagaaggctgcagccccggtgggcctggggcgggggcggaggccgggcccaagctgcagggtgctcggcctttccctgcgcccggctccgaccgaagcgcataat

SEQ ID NO: 376412 - DNA, 122 bp, Homo sapiens
atgtcctcaaataattttgaaaattaaaattaacattttaagatcaataattggggaagtcggcaaagtacaaattgtgaaacaatgatgaatgtaaaaaaggggtctaattctctcactgt

SEQ ID NO: 376413 - DNA, 122 bp, Homo sapiens
accacaaacttcaattctcctttcaggtagtgggaagagaggtctccaatgtgcagattacgccacagctcatagccaagctgccttcctgctcaggcctctgagggtgaaactaactgccc

SEQ ID NO: 376414 - DNA, 122 bp, Homo sapiens
aaggagatccaaagaaaacaccagggaaatattgtgatattgccacagctgtgcctcaatcggaaaaaaaaaaaaaaaagcctgaggcttccccttctctttaacgcttcttcagcactttg

SEQ ID NO: 376415 - DNA, 122 bp, Homo sapiens
ccggagctgggctacacggtggtactaaggaggcagcgctagtcacctgacctacaaggtcgggcttctgttagttacctaagagatgttaccaggacaagcagcagcctggtgggaagatg

SEQ ID NO: 376416 - DNA, 122 bp, Homo sapiens
ctgtccagggagggcctcgaatgccagctgagtccagactatactgtgtattatagaccgcgtgtaggaaacaggttttaggtgatgtttatccatgataagccagttgtacacaggtgttg

SEQ ID NO: 376417 - DNA, 122 bp, Homo sapiens
agctctgagagactggtgccgcatttctctccctctctaagaagtttaggggatgccacacgctgttctgggtattcccacatgtaaagatgcagacgatgtagaggattgtctagtggggg

SEQ ID NO: 376418 - DNA, 122 bp, Homo sapiens
cgcggcaaccacagagaagccggactgggccacgtctaggaagaggtaggaaaggatcggcgcatcatttctccaatgggaaaggatgtgtttgcggaccaataagtcgccagtataacacc

SEQ ID NO: 376419 - DNA, 122 bp, Homo sapiens
gcaagtacacaggagaggtctgtcttcccaagggacagctgggggtaggtggccacatcccggatggtacctgtgaatgaccatcacacgctctctgagccccctggggtgcagggggcagg

SEQ ID NO: 376420 - DNA, 122 bp, Homo sapiens
gagaacaatgagctccgcgctgatctgagtagagccactgctgggagtcacgggggtccccgatgggaaactttgacatgactcagatacagtgacttgctggaccttcctagaacagcaca

SEQ ID NO: 376421 - DNA, 122 bp, Homo sapiens
gctcctcctgcctgtggcctaggccccgcccctcccgctgcttattggctgctacgtgaacgagacaaacgcaagcaacaaccaatgggagtggcccacggcgcgtctttcccggggaagcc

SEQ ID NO: 376422 - DNA, 122 bp, Homo sapiens
accgggctgtgtctaggcagggcagagctgggcggggcagagactggggctggaacagggcgagtggctgttatcaaggtggtcacagaagggatcacaattccaagtgtgagactagctgg

SEQ ID NO: 376423 - DNA, 122 bp, Homo sapiens
tgtcgctgccgccgccaccgccggggccgctgccgttgaggaggagacggaggagaccgacgttgttaggtaggaccttgcggaccccgctcctccaagcctgcctgccccctcccggacgg

SEQ ID NO: 376424 - DNA, 122 bp, Homo sapiens
ctgtctcactcagcttggcattcctagggcaccgcctggcacccactcaaacacagtgcacgttgaggtcattaattaaaggatgactaatctatcaggtggctgctgcacttgggcgctga

SEQ ID NO: 376425 - DNA, 122 bp, Homo sapiens
ttttgggatcggagctctcgcgatatttcacggaacttgggcaaatgacaaatctgaaggcgccgcgttgatgctgatggcgcagccagacccgccccgtgtgttgcagcccgtgtaatacc

SEQ ID NO: 376426 - DNA, 122 bp, Homo sapiens
agcctgtgtgtgtgtatatgcaaacctctgatctgtgtgcagccacttctccctcccctccgcaggtgtccctgagtcacagcccttccttctcaaagaattgccccaatttgccttataag

SEQ ID NO: 376427 - DNA, 122 bp, Homo sapiens
cggagaccatctcgaccatcaacacccggtgcgtccacctccatctcgctcctgcagcttcgtaacaaccctagaaaccgaaaatgcttaagttcccggactttggtgttcgccgcaccgga

SEQ ID NO: 376428 - DNA, 122 bp, Homo sapiens
ccctgccacacaaacctgatcacactcccaccatggggacattcagctacagacaatccacgcccaaagcaacagggtcgcacacgcagggcctctatcggtcacataagcacaagtgcacg

SEQ ID NO: 376429 - DNA, 122 bp, Homo sapiens
cgaggggtggggccaggcggcgggagggatcatcttccgggagcgtggctaggggcggagcgactgccgcgcgatagtcagggagctgtgcgggtcctggttgcaagagaggtggggagagg

SEQ ID NO: 376430 - DNA, 122 bp, Homo sapiens
caggacaggtgacggcctaagtgactcactgctcttgatttcattggtggctccggaggacggtaatttttattttggttacccctgaaaggagaaggcggcatctaattctagggagactt

SEQ ID NO: 376431 - DNA, 122 bp, Homo sapiens
agaagcccccagggccccggccctcgcgcgtaggggactggagaccctgcgcgtctcctccgcgccttcctgcccggcgcctgcacctgctccccggctctcgggcccctggctggagcgag

SEQ ID NO: 376432 - DNA, 122 bp, Homo sapiens
aaccactgaactgggctggccacggtggctcacgcctgtaatcccagcactttgggaggccgaggtgggaggatcactgaggttcaccagttcaaaaccagcctgggccaacatggtgaaaa

SEQ ID NO: 376433 - DNA, 122 bp, Homo sapiens
ctcaccacttttgttttcatctcggagactgcatatcgtgaattgcgtaagtcactgagacgaataaatcattgagagaagctaatcaatgtccctggaagtttatatttcatcttctctta

SEQ ID NO: 376434 - DNA, 122 bp, Homo sapiens
tatttcttagcggaaagaggaacagtggcccaaggcggcgcattcccaggcccagaagcgcgtgccccagatgccttcaccctccacgcctaacccggttggcgcaggccctgggcagcagg

SEQ ID NO: 376435 - DNA, 122 bp, Homo sapiens
atttccttcagagccaggtctgaatgtcttccccttggactgaagtccctgctgttagagcgggggagccggcggcgatggcggcgtcctcgtgctgcgctcgtgccggcgtcagggtcccc

SEQ ID NO: 376436 - DNA, 122 bp, Homo sapiens
tcacttaggtttctttttccaattttgccaatttccattatcaggaagtgatatgctcatcgatgaagctaaaagatatctctgcctcaaagtgtataaagcatacttgatttagtgtttaa

SEQ ID NO: 376437 - DNA, 122 bp, Homo sapiens
gcctggagtgtcgctagggagtgggtggccgccaccagtctagggatgggggctgtggttcgccgggacacggggaccacggctcagactagacggcgggtacgagagcgagggaggcaggg

SEQ ID NO: 376438 - DNA, 122 bp, Homo sapiens
atgctggaggcgccggcgctcgctggccctgcgcgctcggcgcgggctgcagctggagggcgagcgcgccgcccgcacacccacctcccgcactcccgcccctcgcgagggcgtcccgctat

SEQ ID NO: 376439 - DNA, 122 bp, Homo sapiens
cgcccaagacccctccccagctgcccggtggcccccggggcctcgcccgctgccgctcgtcgggaacctgcacttgctgcgtctgtcgcaacaggaccggtccctgatggaggtaagtcagg

SEQ ID NO: 376440 - DNA, 122 bp, Homo sapiens
cgggagacgaaggatgggatgtgaggcggtcctgccttgccgccttctgtccctagtctccgggtccccgccctccagccgcctttgattcgtgactgggtcacggtcctcactcattcctc

SEQ ID NO: 376441 - DNA, 122 bp, Homo sapiens
gtaaaccgaagaaagttgaaagccattcctgctggcccttagtctccactttcatccccacgacggcctgggaaaccatacagagggcaggctcttgtcttcatccctggcccaggcgctca

SEQ ID NO: 376442 - DNA, 122 bp, Homo sapiens
aggctggccgcttgtctaaagctacgactcgcccacgtgactctcgccggcggggaggggcgtggacccaagaagtccctgtgcgcttgcgcagagaccgaactaccgctttccccgtaacc

SEQ ID NO: 376443 - DNA, 122 bp, Homo sapiens
aaactgttacagtcaaaaagtaaattaatttagggaaaaaagactgaagatttcaaggtacggggtcctaaaagtaaagctactgctttgcaggttttgttaactgggcgcgggtgtggggg

SEQ ID NO: 376444 - DNA, 122 bp, Homo sapiens
ctccaggcaaatcccttggcctccctacgccttcgtttccccacctgtgagggtcaggatcgccacctcatgagcgcattctgagggtggtcaatgcatgcgggtccacttttctccctccc

SEQ ID NO: 376445 - DNA, 122 bp, Homo sapiens
gggaatgttggtcttactaagatgggaaatgaacaagaagaaaaccccaatatttaacatcgaacaaatatttattgagcatctattatgtgctagtcactaaggatatagcagtgaataaa

SEQ ID NO: 376446 - DNA, 122 bp, Homo sapiens
gcagccagtggcagagggaacccagtcccacccccccaccgccaagtccgggcccggccgcgtcctcacctgtagaaggtttgcatgtgacgatacttgggcggcacggccatgcagcgtag

SEQ ID NO: 376447 - DNA, 122 bp, Homo sapiens
ggtcctgttccatccaggaagccacacgctgtccccaccatccagcctgggggggcagcgcgattcggcacctgcagccttggtctgggggcaacgcctaacccggtgcccccctcccagtc

SEQ ID NO: 376448 - DNA, 122 bp, Homo sapiens
gggcagggggctcccgagagcagggcgagctcctccagcgtcgcctgagcacggggcctgcgcgtggtaggccagcaggcgactttgattggaagctggctcctcccaggcctgcagctgcg

SEQ ID NO: 376449 - DNA, 122 bp, Homo sapiens
caagctgcggacctttgtggtgagtgttacagctcttatggcggcgcgtctggagttgttcgttcctcccggtgggtctgtggcctcgctggcttcaggagtgaagctgcagaccttcgcga

SEQ ID NO: 376450 - DNA, 122 bp, Homo sapiens
tggctgtcttctctcaggcagagcatgtgcctctgggatgatgtctgtgccagtgtctggcgctacagggccatagggtgagggattctcattcccttacctgcccccttattaacacgtag

SEQ ID NO: 376451 - DNA, 122 bp, Homo sapiens
tggtgccagctgccaaggccagcctgccctgcactcagaaaatccctttgctaaggcaaacggtcttcctggaaaggtgagtgcacgtcagggtcttcagcctcgtttgtggcggttccctt

SEQ ID NO: 376452 - DNA, 122 bp, Homo sapiens
tttttaagcccgtcggaaaagcgcagtattccggtaggagtgacccgattttccaggtcccgtctgtaacccctttctttgactcagaaagggaactccctgaccccttgcgcttcccaagt

SEQ ID NO: 376453 - DNA, 122 bp, Homo sapiens
ttttagaacagcgtccgctttctaacgaaactcctgcctccgtctaaggcggcactctaacgctcgtttcagagatagcaccacgttggaaggaagaataaaaatgaaaacctcatgagctc

SEQ ID NO: 376454 - DNA, 122 bp, Homo sapiens
aaatagaaggctgggtgaatttctgtgagctctgacaagtacaaactgttttcttagactcgttgaggactgagtgttgtagttgcctcatcactgtggtgggccctgccctgaaaatgaac

SEQ ID NO: 376455 - DNA, 122 bp, Homo sapiens
cccggggagggaacattgctccagtagggtcacttccttgggaatctgaccctaggagcacgcatttcctgaagccctgcaaaggtgatggtggtccaggcaggaaagcgttccttcagccc

SEQ ID NO: 376456 - DNA, 122 bp, Homo sapiens
ctgcaggcggaagagcatggaggcgtacttacttctgtgtaacacagggtgtgtgaagatcgctcctttccctttacttttcttcttcttgccctggattccctcccagctccaaccttttt

SEQ ID NO: 376457 - DNA, 122 bp, Homo sapiens
ctgaccccgtgtgatcgcagcctgctgtatgtgagagacgcagttgcagtgaggaaagcacgtgcccctcactccacatttgtgggcaaaatgtcaggaatccaaggaacactattcttaga

SEQ ID NO: 376458 - DNA, 122 bp, Homo sapiens
agtgccagagagcctttctataggaatacaatgtgagcagcttcagtggggcatatctgccgaccagcctggggttagagctgagcactacctgagtgagtggcaagttgactgtaacaaga

SEQ ID NO: 376459 - DNA, 122 bp, Homo sapiens
cccgaccgccctgcacaggcgcggcccgtcctgccgtcgcccccgtcgtccccgccccggcgccccagccgcatcccccgcccccgacttccagcagcttccagcggccccctccccacctc

SEQ ID NO: 376460 - DNA, 122 bp, Homo sapiens
aattttttcaaaaagacacctctgaaccccgcaaacacaatggaaacggctgggagatcccgccttgcgccgggggggccatttggcccgtgacattgtgtttatttgtatttttagcaaga

SEQ ID NO: 376461 - DNA, 122 bp, Homo sapiens
aacgaatgggaaacagctcagaggctgaacccagaccccgcaggtgcacagcaagggagccgagtttcctccagcgcttgaaaaaaaagtgtttactttgccagcggaccttgtcgcaggag

SEQ ID NO: 376462 - DNA, 122 bp, Homo sapiens
gagaggacccgggtgtaacctttccagaactctgatcctgcacataccactccttggtgacgggaggggggagaaggacgacggggacgaggtccgctcttcaccaagagggaagccgcaga

SEQ ID NO: 376463 - DNA, 122 bp, Homo sapiens
ttccccaagggtcggcggggatgcttcttccgcctggtcctagtggcagcggattctttccgcccccaacgctcgcccgcgccccgcgtggcagaaaggagttcctcagctgctgtatctgg

SEQ ID NO: 376464 - DNA, 122 bp, Homo sapiens
tatttggtcccaggatttccccaaggtttaaaggcacttacttgttgatgaactcatatccggacatgatgttgcctagttgatcagatccgcccagctggaccctgcatccataacgctgg

SEQ ID NO: 376465 - DNA, 122 bp, Homo sapiens
ggtgatccacccacttcggcctcccagagtgctgggattacaggcgtgagccaccgcgcccggcccattaatactgttaattcgagcagaatgttcttggccccgccccaacagccccattg

SEQ ID NO: 376466 - DNA, 122 bp, Homo sapiens
cctgaatatccgtgcatcctgggaccttgttaggatgaactcaccagaggcgaggctctgcgttgctcaatgcagagactcttacccagggtgtcagcctctgaaagatacacgtgcctggg

SEQ ID NO: 376467 - DNA, 122 bp, Homo sapiens
aaaagcaccatgcactaagcagagaaaggtctagggaggctcaaatagaaaaagagacaccgcaggactagacctaggctgagctttcccagccccagcctcaggaagggacaaaagaagtg

SEQ ID NO: 376468 - DNA, 122 bp, Homo sapiens
gagtcattcttttgttgagtccaggaaattaaagagaacattattcgtgtgctgaaaatgcggagtgcatagtgactacatgatacatcaggaggctttgaatttgttgatgtgaaggtagc

SEQ ID NO: 376469 - DNA, 122 bp, Homo sapiens
tttacataaatggaatcctaccctatgtagtctttcatagtctggcttctatcacccagccgagtgtctttgagctgcactcacaggctttatcactccttgttgttgccgagtatattata

SEQ ID NO: 376470 - DNA, 122 bp, Homo sapiens
gttttctacttacttggtccctggatcgtcgtaggaggccaccagcaccagtgcaccccccggaatttctttaaggaatttcactaggtgcataacatctgggggaggaaggaaaaggtgct

SEQ ID NO: 376471 - DNA, 122 bp, Homo sapiens
gtacaaccgatatgttcattagaattctttgcatttaatgttgatactgtaagggtgtttcgttccctttaaatgaatcaacactgccaccttctgtacgagtttgtttgtttttttttttt

SEQ ID NO: 376472 - DNA, 122 bp, Homo sapiens
gagcgctcaagtttgtccgtaggtcgagagaaggccatggaggtgccgccaccggcaccgcggagctttctctgtagagcattgtgcctatttccccgagtctttgctgccgaagctgtgac

SEQ ID NO: 376473 - DNA, 122 bp, Homo sapiens
ttttgacggtgttagccctggaagcgaggcagccagttaagcggcgtaagctaagagacgcggggttccggtgcggtgccctccggcccggggttacctactccacatgtgggtgtttttcc

SEQ ID NO: 376474 - DNA, 122 bp, Homo sapiens
cggcgctggctccagaaaggcggcgggtgtggggcgcagaggcctatctcgcgccctagccgcggcccgcgccccgccgcagtccccggggacggtactcacacacgcagagctccaccacg

SEQ ID NO: 376475 - DNA, 122 bp, Homo sapiens
gagggaacaccacattctaaggctacacatccagaaggagcttgagcaatccaggaagggcgcagggtgcggtggctgatggccggggtggctgatggccttgaggaccagctaagaaactt

SEQ ID NO: 376476 - DNA, 122 bp, Homo sapiens
acggaaacagtactcaggaatcaagagtggccaaacgctgccaatgggagataggaaactcgttgatcattggtagagaaactcggcacaacgccgagtcacggtacacggtgtcttcggcc

SEQ ID NO: 376477 - DNA, 122 bp, Homo sapiens
ggggaaataaaaaagcaggcatggttgatttcccgctagcgggaacgatctggcctcagacgtcaccagcatccctccacccccagtccaacgtctcctgtccccaacagcctagctacagg

SEQ ID NO: 376478 - DNA, 122 bp, Homo sapiens
tagaattcagcacataatttggacatcaaagatgtcaatcagagccaagcatgggggaggcggaccctgtttagatctctgaagctcaggcttttgcaatctctgttaacgaaacctatgcc

SEQ ID NO: 376479 - DNA, 122 bp, Homo sapiens
cgggcctctgccgggagggcgccctggcgccaaacccgggcgggcaggggggtggagagccgattgagtttattcccattcagaatttagaggctggtggagacagagagtctcctaaatgg

SEQ ID NO: 376480 - DNA, 122 bp, Homo sapiens
acagctggatctgagaagaaactctggcggaaagtaatctcaattccagcctccttcactcgttcctccaggtcgtccagagtcttgggtgggaataaaaaacaagttggaaaaacacgggg

SEQ ID NO: 376481 - DNA, 122 bp, Homo sapiens
caaatttcccctcacaggctggtggctgaactgaaccccgagcgccggggaagagttgtccgggagagatgagcgcacagccgccaacttgctggcatcagctctgcagcgtctgcggcagc

SEQ ID NO: 376482 - DNA, 122 bp, Homo sapiens
gggcctcgatctcattccgtaaagtagggacaggacccctggaccacagctcctcctacgcggtacctgcgcacgccgcacctggcgtcttcccgatgagcttctcctcaccccacagcccg

SEQ ID NO: 376483 - DNA, 122 bp, Homo sapiens
gccactgttagactggaaagcaaatctagctttgtgattggctcatggtcctgtcaatctcgatctgaactgtgttgctaggtgaagattccaacttcctgggcagagggtcatgtagtgga

SEQ ID NO: 376484 - DNA, 122 bp, Homo sapiens
ggggcagagctgctctcagggcccggccaggcgggggcggggccgagaccatgttgggggcggggccaggcagcgctgggggcggggccggactcaccgaactgctggatggcgcggtcggc

SEQ ID NO: 376485 - DNA, 122 bp, Homo sapiens
aactctttagcactggttctgggtttggattctctgctctgcacacgcactcaccggcaccgcactctgcacatacactcaccggtgccacactctgcacacacttcgtgtggcaccggtga

SEQ ID NO: 376486 - DNA, 122 bp, Homo sapiens
tgtgggccttgctggcttgcttggtgacaagtgcagctttagtgtgacgggcccagactccgactggcacgttctttgtgaactgtgatcttgggcaaggtctctcattcttgaactctgaa

SEQ ID NO: 376487 - DNA, 122 bp, Homo sapiens
tcatcaacgacatccggccgccctgcatcaaggagcagatgctgggcaagggctatgagacggtggccgtgccccggctactcgaccaccagcatgcccacatccgcctacccgtctacaga

SEQ ID NO: 376488 - DNA, 122 bp, Homo sapiens
cctcacccctggcctgttcctccccctcccagggcccctcccggcctctctacataaagccgggggtactgggcctcaggtcaggcctatggccatggccttcacagacctgctggatgctc

SEQ ID NO: 376489 - DNA, 122 bp, Homo sapiens
gtggcccggcggggctaggaaagcgtgaaatctcgcgcgattgcgctgcgaagtcggggacggggcggggctggcggcgggggcggggacccggagcgggaagatggcggcggcgcaggagg

SEQ ID NO: 376490 - DNA, 122 bp, Homo sapiens
acagggcgggactgcggtcagctttgggaggccatgggacacctccccgtgtgtttcttacgggcccaaagctcctcctggagctcctctggaagggcaggaagccccacggaggcaatgtg

SEQ ID NO: 376491 - DNA, 122 bp, Homo sapiens
acccagcattctgaaagcagattgagtattaatcccaacatcccaactgggtggagggagcgggtatttcaggccaagactgcatgagcatggtcagctcagagacaggtcctattggcaac

SEQ ID NO: 376492 - DNA, 122 bp, Homo sapiens
gctccctaaaccacttttcgtgttcatccgcctccatccgagatcgaaacgggacctcgtcggccccgtaggggcccgacaagaagagggaatccctgcagaccaacagcgggctatattga

SEQ ID NO: 376493 - DNA, 122 bp, Homo sapiens
gcctcggatctcattcctctcaatcgcactgatgcccatgtgacagcacgttgtctccaccgagactaatcccttatcaataagagctttcagcacggcccagaccagattactctgtctca

SEQ ID NO: 376494 - DNA, 122 bp, Homo sapiens
tttccagagcgtgaagacttctgtggtgtgtggagaggataactgtaatctgcacccgcacgccaagcgctcgctgccatttgcatggccaagcagcccacgttatgctaagctctccatta

SEQ ID NO: 376495 - DNA, 122 bp, Homo sapiens
atccatgaattcagagatggcaggaaataccctgagctagtgttggataaagagctggatcgggaggaggagcctcaactaagattaaccctgacagcgctggatggtggctctccaccgcg

SEQ ID NO: 376496 - DNA, 122 bp, Homo sapiens
ccaggttgcaaaaggggcacaaactcctgtcagtgtccccggaggccaggggaggtgcagcggcgccgcggtttcccccaccccctccccggacacggcaaactcttccccggcaggagcct

SEQ ID NO: 376497 - DNA, 122 bp, Homo sapiens
tgtcacccaattaggagctctcagcttacgaggcaattagcataggttgccagggctgcacgaggagtggatttctgctttgtcattctgactctggcagttagcccgcccgctcggcgcag

SEQ ID NO: 376498 - DNA, 122 bp, Homo sapiens
gatgactcaggacagctttaatatctctagaccactgttttcaagccatgaattctgaaacggggcctatccccgccattcctcactgcttagcacacagtagctaaccgggaagtacattt

SEQ ID NO: 376499 - DNA, 122 bp, Homo sapiens
gtctttccaaaaggcataggaaatcagcaagtttccaccaaatataccaaaaccctaagacgcgagccagcccaagggtgcaaggttctgcggctgcaggtgatgtgcgtgtgtgcgagtgt

SEQ ID NO: 376500 - DNA, 122 bp, Homo sapiens
gacctgcggttcacctctctcccagcctcccccacgagcaggcagttactataatatgctcgcgcagttcgctgggtcatattgaattttgcgtaggtcattacttgggaaaaaaatgacag

SEQ ID NO: 376501 - DNA, 122 bp, Homo sapiens
ctgcctgagccaccgtgcgtggccccgtcgcccgggagcccgctgtggcctcctctccctcgcctgtaccgccacctcgtggagcagtgtggaatcgccagcagtcagtcagggcgggcttt

SEQ ID NO: 376502 - DNA, 122 bp, Homo sapiens
catgaaacatctattattgctactattgtgtgtttttctagttaagtcccaaggtgtcaacgacaatgaggaggtgaattttttaaagcattattatattattagtagtattattaatataa

SEQ ID NO: 376503 - DNA, 122 bp, Homo sapiens
ccagacgccggcaacctgacttctgagtgtttcccggcaccgtgaacacaatagacgacacgtgatacggtgcggcctctgcgcccgggaagcttcgccctctgctggcagacggcgggatc

SEQ ID NO: 376504 - DNA, 122 bp, Homo sapiens
agctgtgtggggccttgaggaggagcagctaattcagtcccccaggttagaaatgaaactcgttgcattcggtgcattggcattggctttctcgaggatattttcacaagtttaggggaacc

SEQ ID NO: 376505 - DNA, 122 bp, Homo sapiens
tgaggcttccggaggcggggatcgaaccctaggcttgagcatggtgctgcccagtccgctcggaggcccgaccagcaggacgagctcttcccggcgaggtgcggtaagtgggaccatcaggg

SEQ ID NO: 376506 - DNA, 122 bp, Homo sapiens
gcactcggtaaaaggtatttaaagcgcatgtagtttacaacactaacagcccgccgcccgcgagcacagcccgtctggtcatccggcggcctcaccgttcaccacggttggcggccctggtc

SEQ ID NO: 376507 - DNA, 122 bp, Homo sapiens
aaaaaagaggaagaaggggaaaaaaaagtcaggcgaaacacaacacatttatctatcaaccgctagacaagacaaagaggttttaacaacagtttgaaaagagcggcctgtgaatggttact

SEQ ID NO: 376508 - DNA, 122 bp, Homo sapiens
gcgtgtcccgaccactaaaagccccaaacatgacgaagtaaaatgggcaccgtcaaaaaccgcatttgaagacagtgcgcatgagcgcatggttaagttttcagacgttttgcaagctggat

SEQ ID NO: 376509 - DNA, 122 bp, Homo sapiens
cctctcctctcctttcctttcctttctttgtctgtaaagtgacggtgataatagcagcctcgaaaggtgattaccaggtttcaaggaaagattggaggcaaagcgcccaggacacagtaggc

SEQ ID NO: 376510 - DNA, 122 bp, Homo sapiens
agcacgcgcacaggaacgtgtgcgggacagaggacatatgtgctcagccggcaggagcagcggcctgtgtgagcccctggggagaagcagccccccacccaggcctgtgtcccagaagtcgg

SEQ ID NO: 376511 - DNA, 122 bp, Homo sapiens
ccttcagggtgtcctccgtgaggacgtaggggtgctggctgcgcatgttccggaacttctcgagcatctctggctggtactcgtcaaagtcaaaggcctccaccgggcccgagggcgtgttg

SEQ ID NO: 376512 - DNA, 122 bp, Homo sapiens
atgtggctgctggcccagggaggagcgttacggacaactgttaagtggaaattgtctggacgtaatgcagttcatcagctcaaaagctgtgggtctggctgtgtgagccaacagcgctagtg

SEQ ID NO: 376513 - DNA, 122 bp, Homo sapiens
gactgcccctgaaatcgctgaccctgattcccctctgtgatataaaattttcctgagaaccgagggctgtgtctgcccactagtggtcaggtggcagagctggtgggacccagacattccct

SEQ ID NO: 376514 - DNA, 122 bp, Homo sapiens
tcactttcccttctttgctccaggagctccctggatcctggcgctggcatttgtcgcttccgtgtttccccacagctgtcatgcgcatagttttcccacaggttgcgtttggggttccaatc

SEQ ID NO: 376515 - DNA, 122 bp, Homo sapiens
caccatttccacctttaaagatttcagtacaacactgaagaatcacctacaagccatccacgaataaacaaaggagatctctggcaggggagggagaggaagaagcgggggaaggagacgtc

SEQ ID NO: 376516 - DNA, 122 bp, Homo sapiens
taagaatgatgagagcctcagcaggacaatgcccggccccgtgatggctgtgtcactgcacggggcgggctcccatccacgccccttctcagaagagtcgggagcccccactttcctcttgg

SEQ ID NO: 376517 - DNA, 122 bp, Homo sapiens
ctgggggagcaccggcggggagggcagaccagctctgtctcaccttgctgtcggagtccacgcgctcatccacagagtaggaatcatagtagagactgaagtcatcacccaccaccgtctcc

SEQ ID NO: 376518 - DNA, 122 bp, Homo sapiens
gtactgaaactgctctaatttcattggtggcttaagattgagcccactttctgctctagacgaatctgattttgatttttgtgcttgttgttccattaaagtgaaggaaaattaaattaaca

SEQ ID NO: 376519 - DNA, 122 bp, Homo sapiens
gtccgcacgtcacgctcggagaagtgcctccgcgagcagccgcctgtaccagcctggccgcgcagcctgacgtcacaaagccagccacgcgcctgcgcggcccacaggccccgcccctggac

SEQ ID NO: 376520 - DNA, 122 bp, Homo sapiens
cacaaagggcaggacccagaggccaagccccagcagactaggacacagccattccagtaccggccaggaagcgaaagtgccctcaggccagctcaaaggcccctgagcccggccatggcccc

SEQ ID NO: 376521 - DNA, 122 bp, Homo sapiens
cttttaacctcaccctcctcagaatgaagactattgaaaagagatgaacttaatttaagccgaggaaaacaaagaagtctttgtggaagaagtggcatgtaaattggtttttgaacagttga

SEQ ID NO: 376522 - DNA, 122 bp, Homo sapiens
aaggcttaaccaggcggagagggagttgggtcgggggaggcaacattttaagaaaatatgcgaggggctgatacgctggagcggccgaagtacaatacacagttgttcttgtgggtctaatg

SEQ ID NO: 376523 - DNA, 122 bp, Homo sapiens
ctctgttttctttacagggtacagctctgccggggggggaaaaagtggtaccattttgggcgttcttgagcttcagaatgcaaccagacatgtccttgaatgtcattaagatgaaatccagt

SEQ ID NO: 376524 - DNA, 122 bp, Homo sapiens
gctccttccctggctgcccaagcctctggacacccaggctctggctctgcctgctgctgacgcctgcaccagcagagccatcacttcgagcccagctctcaagccccctggtggcccctggc

SEQ ID NO: 376525 - DNA, 122 bp, Homo sapiens
acggccgggagcttggcggccggcaacccagagaacgccacgggcacccgagccttgtcccggcccggggggctccaggcctgcccgcaagaggagctttaatttgtccaaactaacacagg

SEQ ID NO: 376526 - DNA, 122 bp, Homo sapiens
ggcagtcggaatgagaaagcggtaaagagcgaaaaagaaaggaggcggccagtccgtaggcgtgactttaactcaggaagcacacagagcgcagattttgcggataactggcttgacaagca

SEQ ID NO: 376527 - DNA, 122 bp, Homo sapiens
tttccctttaactgtctgtctctgtgtctatctgtccccccagctacatggaggctgctccggacaggggtacagcctgtgtgagtgctgccagctttgctgcccaccaggcccttacctgg

SEQ ID NO: 376528 - DNA, 122 bp, Homo sapiens
gcggcctcatggggcctttgcctgggcaccctggcacctctcccaggctctacctatctccgacttcattcctgagctcttgaacaggggtaaggcaaactttttctgcaaaggaacacgtg

SEQ ID NO: 376529 - DNA, 122 bp, Homo sapiens
gaccctgggctcgctatgcagtccgtatgtgatgttgaaccctttacacacagcactagacggttttgaacctatcaaaacactgcttcacttaaatttcaccaactccttaaaatcctagt

SEQ ID NO: 376530 - DNA, 122 bp, Homo sapiens
cggtgttattccgcgcttgcggcaaagagaacacactttcttgatttggcggatggaagacggaggggggaggccaacagtgaaagtgggcattgctagttctttgtgtgcatgctacacat

SEQ ID NO: 376531 - DNA, 122 bp, Homo sapiens
ccacatccttgaccctaacccatggcctatttcacctctattcccatcttctcaggctcccgccaactctatgtcaccagtgactcagcacatgcgcagatgcccactggaagggccactcg

SEQ ID NO: 376532 - DNA, 122 bp, Homo sapiens
catttacagcactgagtctataaacatgaaaacaacaacacagatccgtaacatcccaaacgttgtgagcgctttctttaagatgttctttgccttttcagaaacataagaaattcctacta

SEQ ID NO: 376533 - DNA, 122 bp, Homo sapiens
agaggccgcgccgggccgcgctctgattggctggaggccgcggccctcgcccaggccgcccgcccagtctgcccgccccgtccgctaagtgcctgggctctcccgctcgcgtcccagtctgc

SEQ ID NO: 376534 - DNA, 122 bp, Homo sapiens
agcctgcagctccgccgttttccaccagggcgcgcgcctgcaccacttcccggagcagagcggccttgcgagtcccacctggctccctgtcctacccaggcgcccatttgaggcctgacaaa

SEQ ID NO: 376535 - DNA, 122 bp, Homo sapiens
agtttaaatttgcaaaaccatcccgttttttcagacaaacttgagggtcgaggtcggagtcgaccatgtttcgaaggtgtgtggccacgcccagccaggtcagccccgcccccaggccgtca

SEQ ID NO: 376536 - DNA, 122 bp, Homo sapiens
agaccacgcagcaataccagtgacagaaatgaacagctatgtgccagggacggcactgtgcgcatgtaacacatctcaaccaatctgctcaacgaccagcaggcatcgtacgaccccgtgtt

SEQ ID NO: 376537 - DNA, 122 bp, Homo sapiens
gggctagggaagtggtcccagggcaagggacgctgggtgccagcatcttctcagactctacggggataggcaaatttctccatctcccggagcctcagcctcctcgcctgtaaaatgtgggt

SEQ ID NO: 376538 - DNA, 122 bp, Homo sapiens
taattttggttggaaccagcacggattcccaagtcgtgactgcaaaaagtgagtaatgcgcgctggctgcgtcatggctctagtcacagttcattccgaactgagaaggaatcgtgacttcg

SEQ ID NO: 376539 - DNA, 122 bp, Homo sapiens
cccatttgcactgctgctgtcccatcagctgctctgaagctccatggtgcccagaatcttcggtaaggtaacccttgccccaggttgagctaatgcctactgttatccctaatgtacctctg

SEQ ID NO: 376540 - DNA, 122 bp, Homo sapiens
ctcctccctcaggaatccacctatccgcctctaggaccttggctccaactctattgtactcgtctcctccctcccattctccttttggtctcagctccttgatctaagcctcccagagagac

SEQ ID NO: 376541 - DNA, 122 bp, Homo sapiens
tggattaacataggtgggagatgctcgggactttgggactataaattggtggatattttgcggcattaattggcctggtttgtgtacgtagcaagtaaagctttgttaaattctatagcttg

SEQ ID NO: 376542 - DNA, 122 bp, Homo sapiens
gaggacgaatgctatggagtgagatagatggttgcaggcacgaggcgggtgtcatgaaagcgcccctttggcccagtagcaagcaacccagaagtgtgcttatcttgagtttattggggttt

SEQ ID NO: 376543 - DNA, 122 bp, Homo sapiens
gctgaggagagccgctgcggcgttccactgtcacgtgagggggccggtcctcttcggcggcggcactcagtgagtgacgccaagtggccaatcacaggccagcctcgcaggccacgtgaggc

SEQ ID NO: 376544 - DNA, 122 bp, Homo sapiens
ccacccggcgcgggtggcggagagatcagaagcctcttccccaagccgagccaacctcagcggggacccgggctcagggacgcggcggcggcggcggcgactgcagtggctggacgatggca

SEQ ID NO: 376545 - DNA, 122 bp, Homo sapiens
gttattagaatatacatataacaaaaggttaacatttttatctctgggtcccattattatcgcttatttttttgtttatttgttttgtttaccagttctttctaatttatctgcaatgaaca

SEQ ID NO: 376546 - DNA, 122 bp, Homo sapiens
ctgcgcggagagcccgaccccgcggccaagccggccgcccgccagaacgaaaaaacggcccgatgagatgctgcttcccaaaggccaccaaggggccagggccctcagccaggacagaaagg

SEQ ID NO: 376547 - DNA, 122 bp, Homo sapiens
tcctggttcagaaggacgcggagctctcccgcagtggccgaggctcccgcagcgggggagcggagatattcatttgcctatttccagcactgctatctcagtggtatctgcgctcacagaac

SEQ ID NO: 376548 - DNA, 122 bp, Homo sapiens
agagcctaggcttgctagaggcacagagggagtttcaaaggcctcaatcacccaggacaccggcaagtaacgctttgcgcgccgcggccgtgacctcggcaggagccgggggctttgttgtc

SEQ ID NO: 376549 - DNA, 122 bp, Homo sapiens
tctcaaactgtcagaacagcatgtcctctacgagggaggctgagggtttatatagagagacgctgagtgatgattggttccttgctccatgcgcggcgctgctggaaaaggactcctcgtat

SEQ ID NO: 376550 - DNA, 122 bp, Homo sapiens
ggtgctaagcccctcactgcccggggccggcagggccagctggcgctctgagtgcggggccgccaagctcacgcccacctggaactctacctggcccgcaaacgcggcagacagccccagtt

SEQ ID NO: 376551 - DNA, 122 bp, Homo sapiens
gctcgggagcagggaggcgtaggggggccggcctgctgtgatgacattccaattaaagcacgtgttagactgctgacgcgggtgatgcgaactggagtctgagcctgcccgagcggagctgg

SEQ ID NO: 376552 - DNA, 122 bp, Homo sapiens
ggagtccgcagggcagggagcgccgggtgcggcccagtccccgcgcccagcgcgttggcgcgcacaccccgtttctgcagactcaggttttctggccccgcctctttcgggcccagctgatc

SEQ ID NO: 376553 - DNA, 122 bp, Homo sapiens
gtcaaggatgcagagcttaaagcaaggcagtggcttccatgagcctaaacaccttccctccgcacgctcggtatcgcgacgggggagagcaaaacctttaaacaaatgctccagttttcccc

SEQ ID NO: 376554 - DNA, 122 bp, Homo sapiens
tgttgctcacacaaatcctgtttggtggtctcttcacacggacgcgcatgaaaccttggtcgtgggccctcgtggtagagcccatgtcccccaagatttctttggctgtgttaccttagatt

SEQ ID NO: 376555 - DNA, 122 bp, Homo sapiens
tcgcctcctccgctgtctccctggagttcttgcaagtcggccaggatgtctcaggtacagcgcgtgcacagccaggctgcgaaggtgcagcgggcgggaggcccgttgggggctcagccggc

SEQ ID NO: 376556 - DNA, 122 bp, Homo sapiens
gacttgtctcgggctgcagctgctgtgaggacaagccatggtggctttggtctctgtgatcgcagtgactgccccagatgcattcctggcatggccttattcactggctgtgagctacagcc

SEQ ID NO: 376557 - DNA, 122 bp, Homo sapiens
cctcctcattgcctgggaggcagatgtgatggctggagctcacgcacctgccttgtcccacgaggaggaggccatttactgaggatatggtggatggaaggagtctgggctgcagacacccc

SEQ ID NO: 376558 - DNA, 122 bp, Homo sapiens
aaccccactttgtcttcgttcagtcctcagctttttggatatgaatcgtctgagccagtgcgtacctaaaatataaacaaatcctcctgtactccatattggtctctccttcctcagtttac

SEQ ID NO: 376559 - DNA, 122 bp, Homo sapiens
cctccgccgagcggcgtctttgtgtgcgggggtgtgggaggcgagcgcgagtccgcgcagcgccgccgagtgcccgctccctcccagggcgggtgggggcctctccgcgccgcccgccgccg

SEQ ID NO: 376560 - DNA, 122 bp, Homo sapiens
gctggggagaaggaagggggtgggggtggcggtgacgcaggggcgcaggcattgacgcaccggccaggctgggcccaaaatagcagcaactccagctcagaggcgccctcccgggttccctt

SEQ ID NO: 376561 - DNA, 122 bp, Homo sapiens
agaagactaggaggattaattctattcatgaagaggaagcacatctcgagagaagatgcccggactggggactggaaacccacggtccgcctctgtgacaccagcatcaagcctgaggcctc

SEQ ID NO: 376562 - DNA, 122 bp, Homo sapiens
cgccgcgcttgcggaggtttgtttttcacgctccaaggcgcaatggtaggtacggcagtgcgggcacagagcgggtgccgaccgcagggtcacaagggtagagcgggaccctgggggcttgg

SEQ ID NO: 376563 - DNA, 122 bp, Homo sapiens
tttccccaggccctaagcaggatgctgaggcagccaagaggttcatcctggacatgtacacgaggatgtacaccgggtgcgtggacggccccgagggcagcaagaagggcgcacgatcccga

SEQ ID NO: 376564 - DNA, 122 bp, Homo sapiens
ctgaggcaggaggtggtaactggatgcggagaccaggttcctcgagggggctcacgaaagcgcggggctccgtggaaaagggaatgagagtccaagggggaaggcgtctgtgggggaggact

SEQ ID NO: 376565 - DNA, 122 bp, Homo sapiens
agcatgcacctcaaaattctcccagcctctgcccattatccagttctaaagccacattcccgcttttaggtgtttgttacaacaacacttcccttcaaggtaccaaaatctgtattcgtttc

SEQ ID NO: 376566 - DNA, 122 bp, Homo sapiens
cttcggtggaaggtcattttgtatccaaggtgacagctctctctggggataggtatgtgacgtggaggtagataagtggatggtgtggggatgagcccagggcccatggggcccttaaggtg

SEQ ID NO: 376567 - DNA, 122 bp, Homo sapiens
gaccttaggtaatccgcccgcctcggccccccaaagtgctgtgattacaggatgtgccaccgcgcctggcccacacatgcttctgatgtacagcaggcacagccccttctgcacttacgaca

SEQ ID NO: 376568 - DNA, 122 bp, Homo sapiens
aggacctcctgcagcaccccaaactggaagtggccgctgcagacccaaggacgaggggcacgcgggagccggcagccctagtggagcggttggagatgttgaggtgggagggtcacccaggt

SEQ ID NO: 376569 - DNA, 122 bp, Homo sapiens
gctcccaagctcgggagagcacccaagagccggcgtcgggaaagcggaggtccctgcctccggcagccaaatccctcaactgaaggcacctcaggggctcacctggactgcactcgcttcca

SEQ ID NO: 376570 - DNA, 122 bp, Homo sapiens
tcttttctaaagagggattttccctgctccaagggttatcctttttttggttccgagcagcgagtgcttctgggtcctgaagtcctcttctttgtttagggagatccaggacgaggagctga

SEQ ID NO: 376571 - DNA, 122 bp, Homo sapiens
tgctcagtaggattttgtgaggctgcctgtccgcgcctggcccttctgaaatcgtccaggcgcggacaggcagcctcaatcaagacaacggactcaaggggttaccgggaggcggatccgcc

SEQ ID NO: 376572 - DNA, 122 bp, Homo sapiens
ggccgcatgccctcggaccctgccccacactagggcaggtgggtgtgagagacagggcgccgcggctccagggaccgaggctgccccgacaaacctgttgcttgggtttgggtttgggtttg

SEQ ID NO: 376573 - DNA, 122 bp, Homo sapiens
cactacattcagggccaaaagaattgcttaggatgatattcacgatcagcagcagggatgcggggtggacaggttagggaagcagatctttaaaacaacaaaatgccccgcacgctctttta

SEQ ID NO: 376574 - DNA, 122 bp, Homo sapiens
ccaagggagagcgtggtgcgggggcgtggggaaatcgggttgccccagccgttactggtccgcgcagtcagggcatcctccgcatcctccacatccttccatggctctgaagaataaattca

SEQ ID NO: 376575 - DNA, 122 bp, Homo sapiens
ggaggggtcccgctgcgtgaagggaccctagggagggcgacgtggaccacgacagacaaacgggcactcgaagacccccgaaaatcggccccagcgagccgcccccgcccccaaggcacgat

SEQ ID NO: 376576 - DNA, 122 bp, Homo sapiens
acttacagggtggcttgcaaatatccaaaaatgatagaaaactgtctacaatgcataaaccgttctttctttgaagtaaaaaagggtagacaaactatttgtccacgttttccctctacctt

SEQ ID NO: 376577 - DNA, 122 bp, Homo sapiens
ggaggcctggcagtcagcagtggccatgtatccccttcccaccaggtgttaaggtgctcccggtgacttactcgcagatgaaggtcccctgtgggatggtctgcagggcgcggaccccccag

SEQ ID NO: 376578 - DNA, 122 bp, Homo sapiens
accaggcagagaaacgggtgggggacagttcccaggcctcctctccagcccgctgtgcagcgagttcagttgcttcacgccctaagccagcgagtacccatcaacaaggctgtcagtgactg

SEQ ID NO: 376579 - DNA, 122 bp, Homo sapiens
gctgtgtcaatcacaccctctgtgttgagcagtacagtaaatcacaagagaaggtggtggcgaatccctgctcacactggaagttgctctgtggaccattcgaagaagctctggactgatca

SEQ ID NO: 376580 - DNA, 122 bp, Homo sapiens
cagcatattttcaggagtgctaccacacatttaagctgtttcttaccttttgcttcctagcgcctcaaattctaattctctcaagtagggcgtgctgttcccccgtttctcatccctaggat

SEQ ID NO: 376581 - DNA, 122 bp, Homo sapiens
ttgccgaaggctctccctgtgtgacctagtcctccctccttcccccgctccccggccaatcgtaagcatcacacgtgccgcctcggtgactctgacaaactgtacactgcttggcccggctc

SEQ ID NO: 376582 - DNA, 122 bp, Homo sapiens
atgtgctgccggctgagagggggaggcagcctcgatctgagggccccggcgctgcggccacgcccatcgcctccagcccggctcgcccattggctaaccaggctccggtgcgttcgaccaat

SEQ ID NO: 376583 - DNA, 122 bp, Homo sapiens
acttcctgcttcccctcctttctctcccttgttcattggctcacagggggtagcagtgctcggtccattagatgcaatggcagatgcctgatgccccggtcagagcactctgcctgtggcta

SEQ ID NO: 376584 - DNA, 122 bp, Homo sapiens
aggcatttctatgagaacaaaagaaaaaccaatgttagtaattagaataaactagaaactcggtttttaagctcagaaagcagccaggtgagaagatttctgggttttggctgaaagcatct

SEQ ID NO: 376585 - DNA, 122 bp, Homo sapiens
caacatagcaatcaaggtacagccactcggtgatatcgctcctaatattcacggaagaagcgtatgatattactcccaatatcgcagggagtgcacacctcttctgtgatattgcccctggt

SEQ ID NO: 376586 - DNA, 122 bp, Homo sapiens
ctccagcctgggcgacagagtgagactccgtctcaaaaaaaattttttttcctcattgtacggcattggctgcatccacagatgccaacagggggctttaattgtctgtcagttctgacggt

SEQ ID NO: 376587 - DNA, 122 bp, Homo sapiens
gggtgtttcttctaagcagttaagtaggagatgatgaaacctcccttccgtggggggaggcgggaccagcgccccgtctttatcagccagtgctcataaatgtggaccatgaactttcccac

SEQ ID NO: 376588 - DNA, 122 bp, Homo sapiens
cttctccctcgctcttcgaggtgactcgtgggaccctgcgtcctagtgctgggtgtgaatcggctatttcacacccagttcttcctcccctccgccacacgcagtcacattcctggagctat

SEQ ID NO: 376589 - DNA, 122 bp, Homo sapiens
atgcagggtgcccagtggccttcgcagactcgcagatcccatcccaggaaatgcacgggccggtgtggccaggacagaacagagggaccactctcagtccagccctccctgcaggcggctcg

SEQ ID NO: 376590 - DNA, 122 bp, Homo sapiens
cctgattgctttacttttgcactgggcctgtgtgtttcaggctgggagccaggcttggggcgtggagcagaagcagagagaggtgggcatgccaggggcggggccacctagtgtgtgaggtt

SEQ ID NO: 376591 - DNA, 122 bp, Homo sapiens
aagactgccactgcatatgagcagtcctggtccttccactgtgcacctgcgcggaggacgcgacctcagttgtcctgccctgtggaatgggctcaaggttcctgagacacccgattcctgcc

SEQ ID NO: 376592 - DNA, 122 bp, Homo sapiens
tctggccttgtggaaggtaccaggcagcagcagcagaatgggcaagggctggggctgagccgggtttccaggacaaagggggaaagggcccctgtctttcctccggggtccctttgtcaagg

SEQ ID NO: 376593 - DNA, 122 bp, Homo sapiens
cgaactcacctagacccttgcatcaaaggactcggggactctgctgcagtcatcctagcacggtcgagaggagtaggaaggtgcccagcggctcagcctttaaggaggtctattggtcacca

SEQ ID NO: 376594 - DNA, 122 bp, Homo sapiens
gagccatgacacagtgagtgggaggttggtatcctacagcaaacgggactgaaggtgaatcgcaatctagggtagatctgttgctcaacaaagttaaccccagtagaagtctctgctttacg

SEQ ID NO: 376595 - DNA, 122 bp, Homo sapiens
tggctgcacatttttgcattgagcatagtgtctgacaccctgtgcattgccctggctgagcgaggaggctccatttgtttatttttcaagcatagatgctattttctcaggactgtagagta

SEQ ID NO: 376596 - DNA, 122 bp, Homo sapiens
cagtttccagaaaaaagagatctatgttggcctttttctggaaagggaggtcctccccctcgacttggtacccctcccaagctccggaatacagacacacgcttgggtacacccacacacca

SEQ ID NO: 376597 - DNA, 122 bp, Homo sapiens
cctcccgcaagatatcaccgggtaatgtagtccttcgcgaccaagggcaggacagctggacggcgcacagcttcctgggagatgtagtccggctgctcgcgggcgcgcgagttcgaccgacg

SEQ ID NO: 376598 - DNA, 122 bp, Homo sapiens
gtctctggggtctctcctccattctagcccgtcagatgagcaccggagaccctgtagtgtcggggctggagtcagaggacctgaattttgtgcgaagccacaacatttaccaggcttgtcat

SEQ ID NO: 376599 - DNA, 122 bp, Homo sapiens
agcggggacgcagcttgacacccatttcctttggctcgcatcgcggtcgcagagcccaatcgcggggaaacgggccccccagaaaaacaggcaacgacccccagctctttgctacagggatc

SEQ ID NO: 376600 - DNA, 122 bp, Homo sapiens
gttaacaaaattacaaataattattggtacgtctcaacggaaccagggagggttgtggtacggaggcatttaggacccaggggaaagctaggctccgtatagaaggacagagaatcgggcgc

SEQ ID NO: 376601 - DNA, 122 bp, Homo sapiens
gcagcagcagccggatctgtgccccaatcctggcatgggttcagggggcattggcagttccgctgtttctgccagggatacaaccacgcttgctgctgaacggacagtatagctgggccagg

SEQ ID NO: 376602 - DNA, 122 bp, Homo sapiens
ctttgtcatcttgtgtaggcaagccgtgaacagtggtaaggcgttcgcgagtcattgtaacgtaggcaggccgtgaacagtactaaggcgttcatgggtgtgtcactgtaacacaggcaagc

SEQ ID NO: 376603 - DNA, 122 bp, Homo sapiens
gaggaggcgagcaagaggctgggcctgcctccggcccgcgacccccgcccgccgcgcgcgcgcccgcccgctcccctcgccgcggtgtcccccacgccggctcgcaccctcgcgcgcaccct

SEQ ID NO: 376604 - DNA, 122 bp, Homo sapiens
tgcctatgctcttaatgtgaaagcgaaatatcctcatggctggccacttgattgggcccccgtatcactctgttctcattgtctctgtccctcttcctggtattttaaatacacaaagcata

SEQ ID NO: 376605 - DNA, 122 bp, Homo sapiens
tccgaattctgagtgactcttcactgtccatgtgtctaggctgttcctgccatagccgcgcggggtctgtgtgtggtcaggaggaaagaagcccccacagggagggcccgcgtcaggccccc

SEQ ID NO: 376606 - DNA, 122 bp, Homo sapiens
cgaagctggccttttaatcgcacagggcaggaagctggtggtggcgcccagctgcacaggcggcaccatgtaactgccagataatacttgcgcgtcacagagaggtccatgttacacgcctg

SEQ ID NO: 376607 - DNA, 122 bp, Homo sapiens
caagcaggctgcctttctccggtcccgaggctccagccttgccgcccttcttcctgatcgcgcaagcgagagctggttcgcagcaacgcagtgtcttttgtagactgatattctggtccttt

SEQ ID NO: 376608 - DNA, 122 bp, Homo sapiens
gctggaagtcttggttctgagagcaggctagcctggtcatagttctcatcgtttccgcaccgtctctaaaaaggtgtcgctttgcaaataacatttaactcgtgttctccccagggtgagat

SEQ ID NO: 376609 - DNA, 122 bp, Homo sapiens
tcccagaggaagcagataaagcggaaggctccccgtggctttctaaagcgagtcttcaagcgaaagaagcctcaacttcgtctggagaaaagtggtgacttattggtgagattccatccctt

SEQ ID NO: 376610 - DNA, 122 bp, Homo sapiens
ccctgccgtgtgcccaggcctgtgctggtgctacagagatggacaagagtggtcccgctgcgaggagctcaccgtatagcactctttctgagatatgtccagaagcatttacctggggggac

SEQ ID NO: 376611 - DNA, 122 bp, Homo sapiens
tgtaagtagcaggacactcagtgccatgtcattcaagtttccagggaccacacaggcatgcgcttctgtgaggagtcgagaccttcaagctctgcattcactgcagagaactattcccttgg

SEQ ID NO: 376612 - DNA, 122 bp, Homo sapiens
tcacccaggcgtgtgtgtgtgcgcgcccccacgcccctgcccacaggcctgcattgaaggcgcttccgctccccggagagccctgtcctgatgacccaccctctgctcattttcatgtgatt

SEQ ID NO: 376613 - DNA, 122 bp, Homo sapiens
aaaagcaaggaggtcttgaacaggccaaaaagagaaagggagacattttagagggaagcccggtgcaaagaagggaatttcactaggtggaccaaaaccagatgtagggatctaggagtttg

SEQ ID NO: 376614 - DNA, 122 bp, Homo sapiens
ctttaaccttcacagcctccaagtcccgccctggcacagactgggattcctccgcagccccgcctcccaggatgggaactccagcaagcccccacctacaggtcagggctgcggggaggggg

SEQ ID NO: 376615 - DNA, 122 bp, Homo sapiens
gggagggagggagggagagagagagagagacaggcaggcagtggctgtttttttgaacggcgatgcccacagagggggagttatttttggagaggagggggtcttctcactgctcccaattc

SEQ ID NO: 376616 - DNA, 122 bp, Homo sapiens
atagctgcggttttgggcgaggagagctcagagagtttcttgcatatggccctgtgatggcggccatggccctgcatagacacgagctggaatctgcaggtggcagccaggacgctgcgtgt

SEQ ID NO: 376617 - DNA, 122 bp, Homo sapiens
aaacaaaaataaaataaataaaataaaataacaggtcctcaaggacagagggatgaaacacgactccctcaatgtgaagacctgcagtgtaccaggcaccgtttacacatgctatcacttca

SEQ ID NO: 376618 - DNA, 122 bp, Homo sapiens
accataaaaataactggatggttgtattaatctgttcttggattgctataaagaactacccgagacttaatttataaagaaaactacctgagacttaatttataaagaaaactacctgagac

SEQ ID NO: 376619 - DNA, 122 bp, Homo sapiens
aaccaaccaataaatgctccatccgaaaaatatttgctgactaaacaaatggtgagaaaacgtgaggagttgtttgtttgtagaagcagcagggtttcttttatacttgaatgcttggatga

SEQ ID NO: 376620 - DNA, 122 bp, Homo sapiens
actcacagacagctggcaatgttatgtctaatgaacattttcatcctcagcatccatctccgagacaaggtcggggatatgggatgcccaggtaagacattgacagatttgtattttcatgg

SEQ ID NO: 376621 - DNA, 122 bp, Homo sapiens
aagaagaaataattgaagggcatactatgcggcaggcatgctgtttgcctgcccaaaagtcgtatttacgtaatttcccagcttccactacagctgcgacagggatgtgagatccatgctgg

SEQ ID NO: 376622 - DNA, 122 bp, Homo sapiens
gaagtgaggagcccctctgcccagcgcgtctgggacgtgtgcccaagagcttattgagaacgggccatgatgacaatggcggttttgtggaatagaaaggcgggaaaggtggggaaaagatt

SEQ ID NO: 376623 - DNA, 122 bp, Homo sapiens
gatagctggacccagagcggcaaagcacggctgggagcacaaagcgttaggtcgtctcgccggcctctcagggttcactacactccgcgtagcctcaagcatcggccatgcgggccgcgcgg

SEQ ID NO: 376624 - DNA, 122 bp, Homo sapiens
ggcctggcagcgcggaacggaaggacgctagggggcctgcgtgtttattgtttccacggtcgcttcctggaaaagatgatgagcagtcccgggccgcggaggggcgcggcgggcgcggtaaa

SEQ ID NO: 376625 - DNA, 122 bp, Homo sapiens
acggtgttggggactcgcgcgctgggtccagtggttcttaacagttcaacagttctgtagcgcaattgtgaaatgtttaggaccactagacccggcgggcgcggcgacagcgacggagcgtc

SEQ ID NO: 376626 - DNA, 122 bp, Homo sapiens
ggagtgccagcacaacggcgtgggcacccacaactgcgagcacgacgaggatgcgggcgtcgtgtgcagccaccagaaccccgacctgtaggcaacacgccgctgccccaggccatcccgcc

SEQ ID NO: 376627 - DNA, 122 bp, Homo sapiens
catcatggactggaaaactgagctgtgttgaggtcgacggtctgctagtgcagagccaagcgtggaacccgggtggtctgacctcacttcagggtccttctccttgatgactgccgagtcag

SEQ ID NO: 376628 - DNA, 122 bp, Homo sapiens
tcgcccagcccagaggagaggtccctgtttggccttggttccagcccggctcattcaattcgctgaatgtcgggtctcccggcccgccccgcgattctccgggaattggccttggccgcggg

SEQ ID NO: 376629 - DNA, 122 bp, Homo sapiens
ttttggtgggaggtagactgcatgaatcaatgtacagccaagaggactgcttagaactggcgcctgactgcttaggttgcttgcactggaggagggcaaagaaactgagggcaagcacagag

SEQ ID NO: 376630 - DNA, 122 bp, Homo sapiens
ctttttcaacactggctgacaagcaacatgttttaaggagccccccattaaatccttactcgcgggactctcgagttcaagccagcattttgtcgccacctccccccccaaccccgcccgca

SEQ ID NO: 376631 - DNA, 122 bp, Homo sapiens
tttatgtatttcattttggcaatattcatttgtcaaagaataagcctagaggtttgttgtcgttgttgttgtttcatcacagctgagtctactaatttaccaggcaagggaacacaaaccaa

SEQ ID NO: 376632 - DNA, 122 bp, Homo sapiens
ttatttggcatttttgtcattttggagccacagaaataaaggatgacaagcagagagccccgggcaggaggcaaaagtcctgtgttccaactatagtcatttctttgctgcatgatctgagt

SEQ ID NO: 376633 - DNA, 122 bp, Homo sapiens
tgagaaagaaatccggcccctgttgaattaattttgtgttctttcaacaggtagatggaacgcagctgagaggtaaggcgacaaggtggcttatccaacatgctcaaactcaggtatccaga

SEQ ID NO: 376634 - DNA, 122 bp, Homo sapiens
agcgcacacacttctgcctcaggtttcccatgaagagctgcagtcctaccagcgcaaagacgctcaggcagaagacagtgaggatcatcacatccgacagctttttcaccgactggatcagg

SEQ ID NO: 376635 - DNA, 122 bp, Homo sapiens
cagcaggaggactcgctagagagctgctcctcaaaactcctagtactgtagttgagcaaacggcattgggaggaaactgctcactctaaacttgaagttatcgggtgccacacgcagagctt

SEQ ID NO: 376636 - DNA, 122 bp, Homo sapiens
cttgtgtagaaagtgatcctcacacccctttttcaaaatgttatctgggcccttagtgaacgaatgtgtgcatgtgcgagggtacatgtgtgcatctgtgtgtgtcccacacacaacccaga

SEQ ID NO: 376637 - DNA, 122 bp, Homo sapiens
taaaaataaaagagacaatttttttttcctgttaattagcttcctgaggtacaagtaagacggcaccaacatgttaagataagagagaaggctatcttttggaattctactactgtttcagg

SEQ ID NO: 376638 - DNA, 122 bp, Homo sapiens
cgtgatccgcccgcctcggcctcccaaagtgctgggattacaggcgtgagccaccgcgcccggcctcactgagtttttggcctggaggagtgtgtttatttcagcaggcccaccccacatca

SEQ ID NO: 376639 - DNA, 122 bp, Homo sapiens
aagagaagccttaggtaaatggggccagcttgaagatcaaacaggtttggcagcctctcccggcctctcttttctctcctacagctttatagctacagctgccttgatatcaatattgactt

SEQ ID NO: 376640 - DNA, 122 bp, Homo sapiens
ccaaatgatctttagggacagacagtaaattatatcccttgctaaaatacctctcggtagcgaaccaccaaacgtttcttttttaagccccgcctctcagccgttacgcctagttcggctgt

SEQ ID NO: 376641 - DNA, 122 bp, Homo sapiens
tccatggtctttggcccggccccagggatcctgctctctggagggggtagagatcaaaggcggctccttccgacttctccaagagggccaggcactggagtacgtgtgtccttctggcttct

SEQ ID NO: 376642 - DNA, 122 bp, Homo sapiens
tgagggcctggcagaggtgggctctgacccacccctcatgggctgggggccgtggtgagtcgcccttcctgcccacacgccccctcctcacaggccatggcgggagccggcgtcatctcagg

SEQ ID NO: 376643 - DNA, 122 bp, Homo sapiens
ttataaactcagcatagattgcgcagaattttgagaggggagaaactatagctttcctttcggatgccactggtgggtagcctgttttgcctgtttgttcttatgttaaagaagggctctac

SEQ ID NO: 376644 - DNA, 122 bp, Homo sapiens
atcctagggttcgggtgcagggacggctttggggggcacttttctgaccctgcgcttcttcgggacccagcctttgtccccatcagccgcctcccactttacggcagacgtacccccgttca

SEQ ID NO: 376645 - DNA, 122 bp, Homo sapiens
cctcacagttctctgagctctgcacaggccacattattcggatctgtactctcagggtcacgggaaggtgggcaaaggtgagcagagcagctgagaagtgcacatggtaggttacctggaaa

SEQ ID NO: 376646 - DNA, 122 bp, Homo sapiens
gcgcgcccctgtgatatctcacaggcccgccccttctgtagaaccaatcggaactcgaggcgcagcggctgggtattccaggagagcgcatgcgcagacgcatggccacagactgccggtca

SEQ ID NO: 376647 - DNA, 122 bp, Homo sapiens
cagttcctccaaataaaatacaaagtttgcaaatactgccaaccactcgggtcatgtcggcggagatagctacaactccagaggcaagaacttctgaagacagtcttcttaaatcaacactg

SEQ ID NO: 376648 - DNA, 122 bp, Homo sapiens
attctgatctctttcctgcagagacaaaaggggccggtagctctgggctggatgagctgacgcagttctgaagaaaggactttgttattgaaggtgtgagcctggtctctgcacgtgtgatt

SEQ ID NO: 376649 - DNA, 122 bp, Homo sapiens
tgcactgaatcataatgaagtggccctgggggcaagagatccagtgactcatctgaaaatcgaaatgacaataactcttctaaagcctggtgactaccaggtaatcaggaaaccctcacaca

SEQ ID NO: 376650 - DNA, 122 bp, Homo sapiens
tcattttgtgctcctgggcaagtggtggctggcacgcacacatttattgagtgcctgtaccgtgtcagtagctatgcaaggttgagaggatacagagatgaaaaaaatatatttcctgctct

SEQ ID NO: 376651 - DNA, 122 bp, Homo sapiens
gcaaggggcggggccgcatatcctgacataaagatggggagaccccagggtgggcaaaaccgatcggctgcaactcgaacttgctatgcaaactcgctaactactcgcgcctctgaggctca

SEQ ID NO: 376652 - DNA, 122 bp, Homo sapiens
tgtgttcaggatgtgccatgggctgggtggagaggagggcattgtgagcagctttcagggcggattcacccccaacaagtcttaggggagcgtgctgatgtaactctcttcctttgctctgt

SEQ ID NO: 376653 - DNA, 122 bp, Homo sapiens
gctcttgttgaaggccatggcttgtggcttctagatatttgcttatgtggggtcttctgccgggatcccctgcttccaccacctggaaaaatcatgctcatcgttcagtgacaaaatcaggc

SEQ ID NO: 376654 - DNA, 122 bp, Homo sapiens
cagtgtactttggaaagaacagacctcaaatgcacccccatttactggctggtattttaacggaaatcaatatgtgaagttaagcagtgacgataaaaaaattacaaaaatcacaaagcaaa

SEQ ID NO: 376655 - DNA, 122 bp, Homo sapiens
actgtgcagccgcctaggagccagactgcttactcggcaggaatcggcggctctgggccccgtcggcgagcggccaacaggcgcgcgcgccccgacaccccgcacccgcgccccgggcgccc

SEQ ID NO: 376656 - DNA, 122 bp, Homo sapiens
caggccgtctgctttggtgttctcccgtgacaagtgctcggttggtctgtcctgtcagagcgagtatgatcgttgagatctgtccaccggcagaactaggccgagggttggtgtctgggact

SEQ ID NO: 376657 - DNA, 122 bp, Homo sapiens
ctcagttaccaagccttctccttagaaagacttcctttcaatgcaagcagcagaaaaaagcgactcagcttaaacttctcctggagttatgggaaccgcctccttcctctgtcgctaatgga

SEQ ID NO: 376658 - DNA, 122 bp, Homo sapiens
agggtgcaagagcgggaaaagtgcggagtagggaattcttttgctgcgctgcctcctacgcggagcctgctttccactgctgaaaagtgccgggccttgggaagtgtttttcttttcattcc

SEQ ID NO: 376659 - DNA, 122 bp, Homo sapiens
gcccggcgttcccacgagcccctcgcccacccgggatgcacggtgttcccacgagcccctcgcccacccgggatgcccggtgttcccacgagccccgagcccacccaggatgcatggcgttc

SEQ ID NO: 376660 - DNA, 122 bp, Homo sapiens
agctgcgcctcctccaactgctgggaaactccgcacttcaatattggagcatctctttcccgggcaggtagaattggacagccgagtggggagtgacagctgacagctgacggggctgttaa

SEQ ID NO: 376661 - DNA, 122 bp, Homo sapiens
tcaggtccgggctcctgataagggcagaagcgggttctgcgctgcccccaaccctgtaaccgccaggaaagcgcttggtgagcgtcgggactgcgcaggttcctcgggaggtggctaaactg

SEQ ID NO: 376662 - DNA, 122 bp, Homo sapiens
acatgttagaagggccctgatctaaaaaccagccgagagcagcaagctcaaaggagggtgcgcggccggcaaggctcaggacctgcaggccatggagtggcgaggctgccatggagtggcga

SEQ ID NO: 376663 - DNA, 122 bp, Homo sapiens
gtaaccatgcaatgtcttcttctcggtgacacaggagtgccccagcctctcccaatcacgcgggagtgctgtctgctcactctagtggcgcccagacccctgagagcctgtcgagggaaggt

SEQ ID NO: 376664 - DNA, 122 bp, Homo sapiens
ggggataatactgcttccccagggttcctgtgagaagaagcaaagaccaaacacataaggcgcaagcctggtgtctgaccccactttagacaccacccagacagagactcattatctccctc

SEQ ID NO: 376665 - DNA, 122 bp, Homo sapiens
gccccaacaatccatccacataaaaggttccaaagaggcgacaggggctaggacagctgtcgttagttcagtgccaaggcgccaagcttgctaagtgcgggcagaagccatttaaggattta

SEQ ID NO: 376666 - DNA, 122 bp, Homo sapiens
taagatagactagtaacaaccattgaaaatggtctcaccttggccaggtgtggtggctcacgcctgtaatcccagcactttgggaggctgaggcaggcggatcatgaggtcaagagatcgag

SEQ ID NO: 376667 - DNA, 122 bp, Homo sapiens
ccactcactatcgatatgaccttggataagttacctaacctttctcttactgtccttttccgtaaaatggggataacagatagtagttatttctatgagtggttatgagaaccaagctatta

SEQ ID NO: 376668 - DNA, 122 bp, Homo sapiens
tgccccggcgcgcacccctcccactcccatccactcggagccacgtcccctgcccggctccggccggctcccaccgtccccggccaccgtcttcgcccctgcccggcccccgccccttccag

SEQ ID NO: 376669 - DNA, 122 bp, Homo sapiens
tttgtgactggacatacacaaggcaagcattctgttcaaacagcaaaaagaacattggtccgtgaccattagcgtagcaggtcctgatgaaggaattcccctcaatgagaaatgaggcaggc

SEQ ID NO: 376670 - DNA, 122 bp, Homo sapiens
tgggcctggcgatcccggaggacggggtccgagggtcccggagtgggaaactgcactcctcgcgtccgagtcgcagcgagcgtgggctggggagggcagaggccgggtccctgaggaaggcg

SEQ ID NO: 376671 - DNA, 122 bp, Homo sapiens
tagaattaccgtatgattcaacaattctactcctagatatttgcccagaaaaactgaaaacgggactcaaacaggtactcgtctgcaaatcttcacagcagcattatttctaatagccaaaa

SEQ ID NO: 376672 - DNA, 122 bp, Homo sapiens
ggtgctgacgtcagctagaggcagggcaccgcggaaggttgaatccacgccctggctgtgcgcaggcgccgtagggggaaggcctggcacgctccagccaaccagggcgtcacctgcagctc

SEQ ID NO: 376673 - DNA, 122 bp, Homo sapiens
tggcctcttgccgacggagccgcaggccccgcccccgattggctggggatctcttcccggcgcctgattggctagtggtctccactaaggtcagggctgtgtcacacacacgggcgcacgtg

SEQ ID NO: 376674 - DNA, 122 bp, Homo sapiens
gcctcagtctgtgagtcttccctgggacctgtttccccaagtggtgccgaggcaaatggccggatgacgacatttcaagggtgttattggccatctgaaggatctgggactttccctttttt

SEQ ID NO: 376675 - DNA, 122 bp, Homo sapiens
tgtccgaagttttttctttctagagagttcgtggtctatgcacgacttgatgagtgaggccgcggaccttcgcagggagtgttacagctcttaaaggtggcgcatccgcgttgttccttcct

SEQ ID NO: 376676 - DNA, 122 bp, Homo sapiens
caggcgtcgcccatttgtgggcaaaacccttcctctgcgcacgagttatctcggcccaaacgggcttcagagcagtggatgcgggacgatctcggttttatgaactatttgcatgtgtacaa

SEQ ID NO: 376677 - DNA, 122 bp, Homo sapiens
tgccagggtggcaccgggtgagtggcagtttcgggtggtcctggagaagggtcctggcatcggctggtatgagtctctgggtttccgagcttcaatgagggctggattcagggtgtgggctg

SEQ ID NO: 376678 - DNA, 122 bp, Homo sapiens
agcagccggctggctgccctgcagaggccaggtctgcccagcaaacccaggaaggtgtggcgtccccgcttcgcggccaagatggtgctggtgctgcgccatcctttgtgtgcccgggaagg

SEQ ID NO: 376679 - DNA, 122 bp, Homo sapiens
gggcaggcagcctcagtgtgccgggtggacagcaggaaggcgagttgtctggggaagcggcgactcagcaacttgagttcccaaaggttgcacagtggaggtggtgatggtgctggtagtgg

SEQ ID NO: 376680 - DNA, 122 bp, Homo sapiens
caggctggatgctcgatttcctccgcttctctctttgccgagctttccgcgacggccgctcggaggacttctgcaggatccgcaacagggcagaggctattattcatggactatccagtcta

SEQ ID NO: 376681 - DNA, 122 bp, Homo sapiens
tttagcactactctctctcctagaacgagagccccttgaagtccaaagctaggtcttaatcgtctttttatgctctggatatgtagtgcctgtgtaaggtgttgtagggcctccataagtat

SEQ ID NO: 376682 - DNA, 122 bp, Homo sapiens
ccccgcatggtgttggtgtagactgatgcttgggaagcttcagcaccttagacagctccccgcagtatgcggaccccttctcagcattgagcagaagtggagagtcacagtgttataaatgt

SEQ ID NO: 376683 - DNA, 122 bp, Homo sapiens
tgtgctatcccgacgccgtggctgtgctctccagagcatgatccgggaacgtgcaggaggcggccttctgtgcccggctttcgcactgctcctcggctcccaggacaggcttccagtcactg

SEQ ID NO: 376684 - DNA, 122 bp, Homo sapiens
ctctccttctgtgtgccccgggagagcacttgctgagggctagcaaggctgtttgtgatccgggaggctccctgggaggctgggggctagagagacctcaggctggagttccaggtgccccc

SEQ ID NO: 376685 - DNA, 122 bp, Homo sapiens
cctgctccctaatgccccacgttcccttcaagctggtgtccaccttcaagaattactactcgttggtgctggacagcgccctggaccgcgagagcgtgtcggtctatgagctggtggtgacc

SEQ ID NO: 376686 - DNA, 122 bp, Homo sapiens
tgcccttccgcccacgagtgcgccatgtttcagcggagcggcgtgtgggagaagccacgtcgtgttgcacacgtcggagttgaatgcatttgtaaatcactaagtcaagtaggctggctgca

SEQ ID NO: 376687 - DNA, 122 bp, Homo sapiens
ctcagaatgtctacacccggctgcagagaccggggtggctactcactgtgccagaattcacgtatttctttttcttcattttctttttcgggtttaccacctgcaggaaaaaccagttacca

SEQ ID NO: 376688 - DNA, 122 bp, Homo sapiens
tttaggagagtattggggagcggtctggtctctcagggatggcactctgtgggtctgtatcgcggtaggagttggaatgaggtgcagggtgggcttcaggaatggctggatccaggtatcat

SEQ ID NO: 376689 - DNA, 122 bp, Homo sapiens
agacctgttggtgtagtacttactccatttccacatgtccatggagaacatgttccaggacggccccttctccctcaccgctcatttcacagaggtaagatggggcaggtggactgaaccca

SEQ ID NO: 376690 - DNA, 122 bp, Homo sapiens
ttcctccttcaggagcgctgcagtgggcctaagtgcctcctcccgggactagtacggggacggtcgtgagatctggacaacattcgccttttaatatttattgatcttttgtgacacgcgcg

SEQ ID NO: 376691 - DNA, 122 bp, Homo sapiens
cactctgcttgttatgtctgcaagtggatatttggacctctttgagggcttcgttgcaaacggggtttcttcctttcatgctagactaagaagagttctcaggaacttttttgtgttgtgtg

SEQ ID NO: 376692 - DNA, 122 bp, Homo sapiens
tggcctctgccctccggcgctgggaagtccgggcggcgaggcagcctctcccggggcgttcgggctcctccggctctgccccgatgtcgttattacggccgtttgcagcctccgtgccaggg

SEQ ID NO: 376693 - DNA, 122 bp, Homo sapiens
cgtaccccaggagctgtgcctagtccaggagaggctggggggcgccccatggaggtgagacgcggagacacctgcccgcgccctcacccctcaggcctgagggaggaaggacttgaggtaat

SEQ ID NO: 376694 - DNA, 122 bp, Homo sapiens
gagacatcggggtaatgtgcacagaggcaaggctatgtgaggatgctgcaagaaagtagccgtctgcaagccaaccagaaaggccttgggggaaaccaaaactgctgacaccttaatcttgg

SEQ ID NO: 376695 - DNA, 122 bp, Homo sapiens
taggccacacccctagggatttcagccttttgatataagaggagtggcctgtgcagaaatcggttagattctgtgaaattccagccaggagcaggggctgagagactgggtaataaactgat

SEQ ID NO: 376696 - DNA, 122 bp, Homo sapiens
caagctgtgaagaaaccatttgggcaaaacataccaccttaaaatatggcactttgctgtcggctctaagggacctctccttccctctctaaatattttcttgtttccccatcccctggcta

SEQ ID NO: 376697 - DNA, 122 bp, Homo sapiens
cgacgcccactgtgtctcacgcttccttccgtgtgtgtgggaaccctttgtgtgcctgcccggcacgatgtcggagaaggcagaaacgtcccgagcctgtgaggatggtgtggtggatggtg

SEQ ID NO: 376698 - DNA, 122 bp, Homo sapiens
tgcccggagccaaggccccgcccccagagagaacctgccccgcctccctggcccgggccccgcctccttggcaagcgagtggcgctttcaccttagcaaccagcgcggctcccaccatggct

SEQ ID NO: 376699 - DNA, 122 bp, Homo sapiens
catcctctcccacctccatacctttccagctcatcccacctctgccaccaaaacactcatcgcggggtcagagggagtgccaaaaaaggtaaaaagaaacgcaagaaagaggctactgggga

SEQ ID NO: 376700 - DNA, 122 bp, Homo sapiens
gcgggaaacgcgtgctcgctgctccctgtgtccggcgcgagtggagctgttgtaaaatggcggccgaagctcacgccgctggcagcaaacccgatccagttccactcgcctccgagcgcgct

SEQ ID NO: 376701 - DNA, 122 bp, Homo sapiens
aaaggctggattctgatcgtctaagagctaaaagggaccacagaggccatccttactatccgtttacagctgaggacactgagggttaataacttaccaaggccatgcaattagtggcattg

SEQ ID NO: 376702 - DNA, 122 bp, Homo sapiens
ggaagctatataatgatatcgcgtcacttccgctctctcttccacaggaggcctacacgccgccgcttgtgctgcagccatggtaagactggaatccgtgccgtgatccagcggcatcgcag

SEQ ID NO: 376703 - DNA, 122 bp, Homo sapiens
tagggatcacttgcatggttgtctgtctatccctatggcaccaacagtggttcacagcagcgcctgtactgtgcagtagtggctgtcggtttcccatggtccttctaacaactggaatttgg

SEQ ID NO: 376704 - DNA, 122 bp, Homo sapiens
caggaaggcccaccacggaactttctggggtgatgggcacgttctatttgttgatctgggcgacggttacacaggtgtacacatatataaaaattagtggagctgaacacgtaaggtctggg

SEQ ID NO: 376705 - DNA, 122 bp, Homo sapiens
ctgactggccgaggtggcagcgaggagaagctgtcccggatgcccggagtcgccccgggtcgaagccagccaggctcaccgctgctcagcccctgccagccaatgtagcccctaggggacct

SEQ ID NO: 376706 - DNA, 122 bp, Homo sapiens
ctgagagaacccacatgttagctgggattcacacactgaggctctatatagctcaggatgcggggaactcccccaaacccattcctgcataagcagcggtccctcagggaagtgagaggtgt

SEQ ID NO: 376707 - DNA, 122 bp, Homo sapiens
ggtcaacgccctgaacttggcgccaggatctttaaaacccggaagttcctgtggttcatccgcgaaccttgtcctccggtcctcgcatcagagcacttagcattttgcttccctagggcagc

SEQ ID NO: 376708 - DNA, 122 bp, Homo sapiens
gggccagatggaagcctcttcctggggcacaggctcaggtgctatgctccaggccaacaccgctgggtcctcttcccactgctctgtggccagggcacccactgggagggcagcacagtctg

SEQ ID NO: 376709 - DNA, 122 bp, Homo sapiens
cttgatctccctacctcgtgatccgcccacctcggcctcccaaagtgctgggattacaggcgtgagccactgcgccccaccccattttggtgtgatctcagctcactgcaacctacccctcc

SEQ ID NO: 376710 - DNA, 122 bp, Homo sapiens
aggaaaaagcaggaagaaaaggagaactgccctgagaattacaaagagcattaagtacagcgtgtagttctctacaattattcaaggaatgcaggaaaagaaagaagactgagtgctgtgcc

SEQ ID NO: 376711 - DNA, 122 bp, Homo sapiens
caagtattttaaacgtggcgatgatcgtgggctacttaggctccattgagcttccttccacgagctccaacctggagtccgacagcttgcaagccatccgcggctgcatgcggcgcctgcgg

SEQ ID NO: 376712 - DNA, 122 bp, Homo sapiens
acagggcctggggaggcagtaactggtgcaggggaccgagcagggagcagagagtggtcccgggtgtctgagcccaccctctgtggcactctgcttctgtttgggtagggaatgtcctgggg

SEQ ID NO: 376713 - DNA, 122 bp, Homo sapiens
gcactctctccggatgctggaggctggaggcagtgaggcagcaacagcgcgagggcgaggcgactttggagctgcctcatgcagcgacctcgccttccgctgcgcctcctcccagaacccaa

SEQ ID NO: 376714 - DNA, 122 bp, Homo sapiens
atccctagcccgaaagcttggtgatcaggagacagaagaagaatctgagacagctttctccgcacttcaacaaattggggagcgacttggccaagacaggtttcaatcttacatttctcgtc

SEQ ID NO: 376715 - DNA, 122 bp, Homo sapiens
ccacgaatagataatggttgccatgatgggacccaccgtcccacagacaaagggttcttgcgaagccacgactaatttagtgcaaaccgaaataaatatcggcccacagagatcctttacag

SEQ ID NO: 376716 - DNA, 122 bp, Homo sapiens
accactcagatgtcgatgaagcgagctatgttgtgtaaataactcagttatcttctctatcgttactagtccttttcctcttatacgtagctttttttttttttttcatcctggtgaactta

SEQ ID NO: 376717 - DNA, 122 bp, Homo sapiens
cgttgaccatgagtagaaagacgctaggactcgcggtcgccatggcaggtctgggggtgccggggggacccacctaggccgcgcgcggttgctaagagacgccggcgttgccctagaaacag

SEQ ID NO: 376718 - DNA, 122 bp, Homo sapiens
agtcccagcgtcctccctctcgggagaaccctggcctggcaacagctgcggacatcttcccgccagtcttcaaactcaaacctcccggcccgccccggaaccatagagttctccgtggctta

SEQ ID NO: 376719 - DNA, 122 bp, Homo sapiens
ttcccccccaaattttagcggctttaagttatttaaaatagatataagctataagctatacgatatagatatatatagatcacctaaatgaaagaaaattcggtttgtggttaaaaaggggg

SEQ ID NO: 376720 - DNA, 122 bp, Homo sapiens
ctgaaacccggccccgaaggccgccgcctcaattcagccctgccaaatgaccccggcccgcgaagacatattgccacagccccgtaaggaatcccgccagagtccgcctcggccctgccccg

SEQ ID NO: 376721 - DNA, 122 bp, Homo sapiens
agaatgaagattcttggggtgaagaattacagccttagcatggagcaggcctcggtgcatcggctttcagctaggcatgcctgccaatgttcaacgtcctcctgggatacggaaggcaccgt

SEQ ID NO: 376722 - DNA, 122 bp, Homo sapiens
atcttatcagactacaactggccaacatctgccactgcactttacccccagcgatttgagcggcgctgtgaggtgcagatgcaaagggctcagagccaggggagaatcacagaagacacaca

SEQ ID NO: 376723 - DNA, 122 bp, Homo sapiens
gcaagctccccggtgaaacaaataccgccttcaaccttcgtattctgtggtgactcatctcgcacgtgacccccctccctcttcaaggtgtgttgaccgactacagtttaagcctgtcgtcc

SEQ ID NO: 376724 - DNA, 122 bp, Homo sapiens
ccagaaccttcttcagtgaggaggttatacccggaggtctcgacgctcgctcgtgctgctcgtgttgccgctgggtacgtttgctgccagtgctgatccagccggaggcgaagagaagcact

SEQ ID NO: 376725 - DNA, 122 bp, Homo sapiens
gcctcaaagcagaaaatgaaaagtcgatctgggggaagatttttaaataagtgggtcagacggatggagaggagatgaggcgatcaatcttagccccctgacagctccctccgattgcatca

SEQ ID NO: 376726 - DNA, 122 bp, Homo sapiens
ggctcttgctgtttgctggtggcagcctctccacaccccctaacccccagccactctccccggcgttctgtggcccacacccctcatgactcaccaggctcagcaccccaggggccgggtga

SEQ ID NO: 376727 - DNA, 122 bp, Homo sapiens
ttggccgtagtgttcatatagtcatggtgaatcacgatggcgtattggccgtagtgttcacgcagtcatggtgaatcaccatggcgtattggccgtagtgttcacgcagtcatggtgaatca

SEQ ID NO: 376728 - DNA, 122 bp, Homo sapiens
ccgcgcgccagccaccgtgagtgctacgacccgtctgtctaggggtgggagcgaacggggcgcccgcgaacttgctagagacgcagcctcccgctctgtggagccctggggccctgggatga

SEQ ID NO: 376729 - DNA, 122 bp, Homo sapiens
ccactctccactcccctgagggtgctgggtccttacaagaaccagtagagcagctgtctccggaagcgcagccccaaggaggcattggtgatttgaagcatcagctcctgctgtggctggaa

SEQ ID NO: 376730 - DNA, 122 bp, Homo sapiens
gtgagccaccgcgcccggcccagaccaggtcagtttcttaagtgatctgagctataatggcggtaacagagcactgtgagagcccgcagaaagctcctaacccatctgggatgagacctagc

SEQ ID NO: 376731 - DNA, 122 bp, Homo sapiens
ctgggtcacggtttcccaaggacatggaaacccttgctgaagcgctggaaccgctcggcacgaggcgtacgtcggtgggagctgtgtcagcccgctttcggccgtgtagctgctcccatcca

SEQ ID NO: 376732 - DNA, 122 bp, Homo sapiens
gtcctgggggtggggatgctcaggaccctccccacagtcctattccccactcagcctgcacgcccccacggaagagagaagcctggaattggcctccacctgcgccgagtggggagcaggcg

SEQ ID NO: 376733 - DNA, 122 bp, Homo sapiens
tctcagcaaggtggcctcttggaggacgctgtgcccgcgtcaggcgatcctgtcgactgccgccaagacccggcttccggctttgaggggccacgccccgctcgcactccctggcggaacct

SEQ ID NO: 376734 - DNA, 122 bp, Homo sapiens
tccagacctcgcccacgatccaagaccccctgagtgccctccctgtccagacctcgcccacgatccaagaccccctgagtgccctccctgtccaggcttccaccacgatcgctctgggggtg

SEQ ID NO: 376735 - DNA, 122 bp, Homo sapiens
caacactcatgacgtatctttatttctagcacattaacaaaatatcacaaataaattgtccgcagcccctgcggccccgaagtacgagtacccccggccactggcccccgcagaccccgcgc

SEQ ID NO: 376736 - DNA, 122 bp, Homo sapiens
tagtcacccagccagatgagcgcatggagttgggggtggggggtgtcaaagcttggggcccggaagcggagtcaaaagcatcaccctcggtcccttgttctcgcgtggatgtcagggccccc

SEQ ID NO: 376737 - DNA, 122 bp, Homo sapiens
tgtcatttagtcatttaggggcctgccagaggacagttataaaatctgtggtcattctgccggcagcgtatagttttcacccagagtccagatcccaccggcaaaactctgtctaacacagg

SEQ ID NO: 376738 - DNA, 122 bp, Homo sapiens
gcagacaagctggtgtagaaggaactgcgtctttgaaagccgtccaccacatgtcttccccggccattccctcagcgtcccccaacccgctctcgagccctcatctgtatcataaggtatag

SEQ ID NO: 376739 - DNA, 122 bp, Homo sapiens
ggaaagggagaggtagagataagggagggaatgctggtagtgcttggtgaggaggggacccggagaggaaggcatgcctcctaccctggattccatgcaggccctcccagggagcagccccc

SEQ ID NO: 376740 - DNA, 122 bp, Homo sapiens
agcgggtggctacagtggtttacgttgttgcacggggcgagtagaacgtatccttctttgcgtccaaaatctggttccttgttggatttgaacagattatgtggctcgtcggggcgaaccga

SEQ ID NO: 376741 - DNA, 122 bp, Homo sapiens
ggtgtggttggtgcgcaggtcggcgggtgacgcgcggtctttgcacactgggcaggtgggcgacacctgcacctcccagcagcggctcacgcacccgcggcagaagttgtggccgcagcgca

SEQ ID NO: 376742 - DNA, 122 bp, Homo sapiens
aaaatctattacttaccatttttattgaaaagagttgatatgcctggcacacaatgaccccgaagatggtgcagcttggatagtgaatgtgcaagttagctatgcagagtgtacttcctttt

SEQ ID NO: 376743 - DNA, 122 bp, Homo sapiens
caagtccctgcacaagcaggtcagagacccacccacatgccgttcctgggctacgccacgcgccatcccccggggctgtggacgcacccagcccccgacagacaggcgccctgagagctccg

SEQ ID NO: 376744 - DNA, 122 bp, Homo sapiens
cggcggcgcggctccagcgaggccggcgcctgaggtctctaaggctgcgcccgcccccgccgggcttctaagctgtccagagcggggagcctcagacccagccgagccccacttctgggctt

SEQ ID NO: 376745 - DNA, 122 bp, Homo sapiens
agtgaaatacggggagctggtggtgctcgggtgagtcctggggtccctggtcccgggcagcggcgcgggcggggagcgcccgcatcctggagcggggctggcggggtggctcggtgctcttt

SEQ ID NO: 376746 - DNA, 122 bp, Homo sapiens
ggaagtgcatcacgtgcctcatggtgacgttatcttctcttgcccacagattgaggagagcgaagacgagtggggggtgccccactgcctgaccctccggggccagcggcagtccatcatcg

SEQ ID NO: 376747 - DNA, 122 bp, Homo sapiens
tctggacagagtttccgggggcggatgggtaattttcaggctgtgaaccttggtgggggtcgagcttccccttcattgcggcgggctgcgggccaggcttcactgagcgtccgcagagcccg

SEQ ID NO: 376748 - DNA, 122 bp, Homo sapiens
gcttcggcgacgcctgggtccccagcttcagccgtggccatcacagggctggagagtcaccggtcgggcggcacccggcctgggacgcgtagaggcgcacgtgtcccggcccggagccgcca

SEQ ID NO: 376749 - DNA, 122 bp, Homo sapiens
ttaaccgcgctcagctgcctggaggccacgggacccgatctctggggatgctcgagctggcgcttgcggcttcccgctgcgcgtagtgggggactgaggctccaccgctcccccggtgccct

SEQ ID NO: 376750 - DNA, 122 bp, Homo sapiens
cgccttgctgctgcttttcaccccctgcaccatggggatgcattgggtcaagtcacacaacgtcagaaaactcaaattcgattaaaaactcaggtctgctactgggctcctgggaaagtgca

SEQ ID NO: 376751 - DNA, 122 bp, Homo sapiens
acctattcagttgccaggcgacatcgttgccaggcgactccagcagcgtccgcggcgccgcggtcgacataatcagcacccactgcgcaggcgcaaacagcccaaggctgcggccggctgca

SEQ ID NO: 376752 - DNA, 122 bp, Homo sapiens
caggaactaattctcaagtgtctgccttaacagaaaagccacaaagaaacatggtaagagcgtggcagataacatccacggtgctatcgggaggtgacaggtgactgacctcagccttggtg

SEQ ID NO: 376753 - DNA, 122 bp, Homo sapiens
agcatgtaaggtaatggggcctagactgtgacttttggcacgtttatgagtgacatcccccgggagggcaaggataaccatttgacctggtctgtcatattcaggaatagacttcagtttag

SEQ ID NO: 376754 - DNA, 122 bp, Homo sapiens
agcttcggaggagtcatgctccgcggtttccgcgctccgctgttctcagaccacgtttgtcggggctggaccaggcaaagagcattccccaggacctgcggacagaggcagagactgccacc

SEQ ID NO: 376755 - DNA, 122 bp, Homo sapiens
gatcagtgtctcctaataccttaaatccaccaccagtttctccaaaccccgacacttctgcgagactcccgcagcggggcagaagggtctgccttgcagcatgcttaaccatcttgagcccc

SEQ ID NO: 376756 - DNA, 122 bp, Homo sapiens
gtggcgcgggcctgcggagcggtttccgcggagaacccgtgccagggcgcatctgtgggtcgtggagtcgggcgcttccttctataataagcctcctcaggaaggttaaaatgaagcaattg

SEQ ID NO: 376757 - DNA, 122 bp, Homo sapiens
tggcacagtgacgtggcagagaagcctcgcagagaagctctttctcccagcctgctaagacgcgtctgtctcacccgtcttctcctctcaggcccctcccgggtaagagtccatctgtcaga

SEQ ID NO: 376758 - DNA, 122 bp, Homo sapiens
cagtccccagggtgggggtgccaggagcccttgtcctccgtagcaggtctcagaggctgacgatggggaaatcgcactggtgaagctgccgtggggtcaggaggaacctgcgataagacgcc

SEQ ID NO: 376759 - DNA, 122 bp, Homo sapiens
caaaacgtgggatccttggaggtgttttgtttttccactttttgttgttaaaaaatgggccgaaagtatcctctgggtcagtttctgtggaataaactgtaaaggcaaacggtgggacgccc

SEQ ID NO: 376760 - DNA, 122 bp, Homo sapiens
tactattattttgagagggtctggctctgtcacctaggctggagtgtggtggtgttatctcggctcactgcaacctccacctcccagcctcccagactcaagccatcctcccccttagcctc

SEQ ID NO: 376761 - DNA, 122 bp, Homo sapiens
tggtaagcagcccctctgtgaggtgcttgggaggaagaaaggacacttaaacatggttcccgtcctggatgagcaggcaagtcctgaacccaaaacttaggagtaaggatttctctggcagc

SEQ ID NO: 376762 - DNA, 122 bp, Homo sapiens
cggcacatggcagcaggtgggggcgactcagagtggggggcgcccccagaacaggggcggcgcaggccggtcactcgccctctcctcctcgggagccccccgcatgatccagacggagccgg

SEQ ID NO: 376763 - DNA, 122 bp, Homo sapiens
tcgctccacgccaaagcccattggtcggcaacctgtccctcctgctcatgtgatgcggcacgtgacgcagccacgtaaggccgctgcgctcacgtgacgcggtcccggaagttgaccggggt

SEQ ID NO: 376764 - DNA, 122 bp, Homo sapiens
atttcccaggctcactctgtttccttgttgcaagcctgccccttcctgttggagcccgcacggacagctctcccggaacactcgggacggaacctgggtcttcctcatctatatcccatttc

SEQ ID NO: 376765 - DNA, 122 bp, Homo sapiens
ggatctggccgccctcagggctccggcgccaagttcagagccacgcgcagtgctcttggccgggaggaggctgtgctgcaccagcacctcttgctccacatctccagagagcccaggtgagg

SEQ ID NO: 376766 - DNA, 122 bp, Homo sapiens
tcacgggggaaacgtgggcggtgtcccaacttcggaggacctgggcgcggagggctgtggcgtgaagaccgctctaaaaccgagatgactagaggttccgtttaaccgattcctgccgggga

SEQ ID NO: 376767 - DNA, 122 bp, Homo sapiens
agcaggtcacaatccattttgaattttgctgtgtcctgcagaactgatctaaacacgcagcgacttcagcttcccttgcaatccttgtgctttgtcagctctttgggtgaggggtaggaggg

SEQ ID NO: 376768 - DNA, 122 bp, Homo sapiens
cgacgcccctcacttctcccccagacccaattgcagggactttagtcctctggagtgctgcgtgtgagttaccttgtgtgtctgtgtgcgtgcctagaggtcaagtgtaactggtgttcgtg

SEQ ID NO: 376769 - DNA, 122 bp, Homo sapiens
actcaccggcatgactgaggcagcggcggtgtggcggcggtgtggcggcggtgtcagcagcgcctctctggattcggagggcgggttcggctgcgcttccgagagtgcgcactagaggcctg

SEQ ID NO: 376770 - DNA, 122 bp, Homo sapiens
cccaatctacctctgggcttttctcaagctctccctaggattactgcggtttcctcctggcgcctctcgtcttggacagccatgcccccctccatgctgcactaatggctcagcctggggcc

SEQ ID NO: 376771 - DNA, 122 bp, Homo sapiens
ggaccccgccgcccgggtgcctaggcacgattccagggatccagggtaaagcggttcgcgcgggaacaggaggatatgtcaggcacaggctattccccatcactatagccacagaggactgg

SEQ ID NO: 376772 - DNA, 122 bp, Homo sapiens
aatacatgaaagatgtacattgcttcagtctggaaagacaggaccactggaggtggggggcggtccttccaggtcatgggcagattcacagattttctgattggtgattagttgaaagcctt

SEQ ID NO: 376773 - DNA, 122 bp, Homo sapiens
ctctttccatcagatggccagcatcttgtggtgtcctggccgctcccggaggacccatgtcgctcaagccacccgctgggacctgtgccagctgcttagccatgccaggcctcattaggctg

SEQ ID NO: 376774 - DNA, 122 bp, Homo sapiens
gcgagcagtgcggcgcaaggagtcggagggcgccttttggggatgggaagccaccactgccgcgactgcggccagactccgggagacgctgaggtccggcccttaagccggccgactccgcg

SEQ ID NO: 376775 - DNA, 122 bp, Homo sapiens
ctgccagctgacccgtgggaggcgggactggcctaacagttctctaatccaaggtcagctcgggtgcggaggccatagccccgcttggcggcaggagcagcatggagcatagacgctgttgg

SEQ ID NO: 376776 - DNA, 122 bp, Homo sapiens
atgactagggccgtgccttcttaatgcttagatactatgtctgacctccagaacctacaacgacatcattggtctcccagatacaaacacatcttatatgaccctggtaatgctgaaagggg

SEQ ID NO: 376777 - DNA, 122 bp, Homo sapiens
cccgtgccaacacctgcccctgcttcgcagccccaagaggaaggccgcgtctttccccctcgctgtattgggaagctacgttccgggctggccaaatgggccccaattttccaaaacccaaa

SEQ ID NO: 376778 - DNA, 122 bp, Homo sapiens
tactctctgccccgatggggcgagagctccgggaacctgccccctgcccggagcggcgctcggagccccgctccacctccgctcactcgaccgctaaatccctgggattcgggagataatct

SEQ ID NO: 376779 - DNA, 122 bp, Homo sapiens
ccagcatttgctacagatggcttctccctcagtttgagatcccagggaggtcttggtgtgcggggggctggcacacagaccccggaaggaagaggcgactgccctgactgttcaggaagctc

SEQ ID NO: 376780 - DNA, 122 bp, Homo sapiens
attaattatgctgttaatctccagtcttagacctattggttccaggatcctgctgagacccgaatgaagcaggatgggaacattcttaagtatgcaatgcaaaaggaagagtcacaaatgtg

SEQ ID NO: 376781 - DNA, 122 bp, Homo sapiens
caggtgatattagactttcagaattctgacccacagtaaccatgagttccactgtgaattcgtacatatacatacatgaatgtacgtgtaacacaagcctgtgtttcacagaatacttaccc

SEQ ID NO: 376782 - DNA, 122 bp, Homo sapiens
gggtgacggacgcatctggaaaatcgggtgactcccacccgaatattgcacttttcagaccggcttaaaaaacggtgaaccacgagattatatcccacacctggctcgagggtcctacgccc

SEQ ID NO: 376783 - DNA, 122 bp, Homo sapiens
gttccggcggccacgtgttccggagctacgacgagcagctgcggctggcgatggaactgtcggcgcaggagcaggaggagaggcggcggcgcgcgcgccaggaggaggaggagctggagcgc

SEQ ID NO: 376784 - DNA, 122 bp, Homo sapiens
tctgggccagggctgaaggcagggcctgcctgggtggcagagggcctcagcgggccaaggcgaagccaatgcggttgttacgccgatcaaactctgtgtagaactttcggatgaaggtggcc

SEQ ID NO: 376785 - DNA, 122 bp, Homo sapiens
atccaattgtctatcaaaacaggaactcaacggattggagcctactgggcttgagagccccgctgaggagtccggaggttgggacgcaactactgccgcgtcccctcccggtccccggccac

SEQ ID NO: 376786 - DNA, 122 bp, Homo sapiens
ttcaagtgattctcctgcctcagcctcccaagtagctgggattacaggcatgcgccaccacgcccggctaattttgaatttttaggtttctccacgttagtcaggctggtctcgaatttccg

SEQ ID NO: 376787 - DNA, 122 bp, Homo sapiens
gaagttgacgtcctcctcacagaacacgcccatcacaaagccacgggtggccaaggcagtcggctccagggaaaggcaggcaacatgactgtggacagaggacaaggtctgaggtggggagc

SEQ ID NO: 376788 - DNA, 122 bp, Homo sapiens
ctcgggtgatctgcctgcctcggcctcccagagtgctgggattacaagtgtgagccaccgcgcctggccccattctgaactttattaatggctcatgtaaatctgaacttcaacaatcttga

SEQ ID NO: 376789 - DNA, 122 bp, Homo sapiens
cctctcccatcccctccccttcccctagtcccaccgaccccaagcgctgcttcttcggggcgagtccaggacgcctgcacatctccgacttcagcttcctcatggttctaggaaaaggcagt

SEQ ID NO: 376790 - DNA, 122 bp, Homo sapiens
cacggcaagtggatttccgggtcaagaggtccgcgctgggtacatcaccatggaagcaatcggtttggtcacgtggtgcccttggttacgcccggtggcagctgtggggtctagggctcaga

SEQ ID NO: 376791 - DNA, 122 bp, Homo sapiens
cggaaaaaatcccggtacgcgggagccctgagcttctgcggctggaatgaaccaagtgtccgcccggccggggagaggcgcgctgcgctctcggaaatgactcgctccaatcccgcttcgcg

SEQ ID NO: 376792 - DNA, 122 bp, Homo sapiens
caggcattgcatacacgggcatcacatagcacggcatcacatacgcagccatcgcataggcgggcatcgcataggcaggcatcaaatagcacgcatcacatacgcaggcatcgcatacgcag

SEQ ID NO: 376793 - DNA, 122 bp, Homo sapiens
cgggggtgcggacgctcagctgcgcagcttcctgctttaggttgacccccggagcaaaaacgtcggatatgaagcccttcggtgcattaaatgtctctcagtaagaattttggagaccctgc

SEQ ID NO: 376794 - DNA, 122 bp, Homo sapiens
ccgatccggcgacccgccacccccactccgcgtctctgcctgcggggactccacggagttcgataattacctagagctccaccgcgccgccattacaccggacgtacgtcacttcctcttcc

SEQ ID NO: 376795 - DNA, 122 bp, Homo sapiens
cccctctgcccagcctctgggccaggcctggctgcagctgctggacactgcccaggagagcgtccacgtggcttcatactactggtccctcacagggcctgacatcggggtcaacgactcgt

SEQ ID NO: 376796 - DNA, 122 bp, Homo sapiens
catgcaccagacccgctgctgcctcccacacagcggtcggtaattgcagcccccacccagcgcagtcacctgccgcctcggggactggcagcaagactatcgcgttgtatgtcatcatgtca

SEQ ID NO: 376797 - DNA, 122 bp, Homo sapiens
gcggcggggtccccttccccgcggaccggggtggccccgcgacctgcagtcgccagtgggcgggccccagatatcagacgtcttaacagtgccccaaccgcttttatgcagggtgattccac

SEQ ID NO: 376798 - DNA, 122 bp, Homo sapiens
aggggactccattatctgtactcttcccggggtgggtctaggtctggctcctcctgaggtcggttgtccacctcaggggcaggaggccaggggttttctgggggctggggtcctgccggcca

SEQ ID NO: 376799 - DNA, 122 bp, Homo sapiens
cacgtcgtcctctaatacccagcatcctgtctctccctaggaggctccatggagataatgcggctttgggaagcggccatgattctcctgtcagggaccagtgagctacgcaaaagctccct

SEQ ID NO: 376800 - DNA, 122 bp, Homo sapiens
ggtgaacacgaagtacagctcgtacagctccctgggggagtcggggggcacggtcttctccgtgagcaggcactccagcaggtacagaatcgtttggatcaccgtgatctccggcactggcg

SEQ ID NO: 376801 - DNA, 122 bp, Homo sapiens
cccacaatctcttctacgtcgtgcaacattcaagcaggcggcctccttcccgcgctttcgcgcccacaggctgggccaatcacagtgccgcacttttcatactgcccgacaggcggtgggcg

SEQ ID NO: 376802 - DNA, 122 bp, Homo sapiens
aaagagaattgcgtttagacaaatgactactcctgattctcacccccatcttcaatgtttcgattctattcccatatatgaatgtctttgcgcagcccaaagtagggccagcagttacaccc

SEQ ID NO: 376803 - DNA, 122 bp, Homo sapiens
cgtgctgcctgatggcgaggggggtgatggggggaaaaggggcgccgcttaaaggggccgcggtcctaaagatggttttgagaagcaggaagccaaaataccgagagcggaggtttagaaag

SEQ ID NO: 376804 - DNA, 122 bp, Homo sapiens
ggccctgagatctgagcatgtcccacatacgaggcagaagctgtatggccttgggccgtgcgtggtggctcacgcctgtaatcccagcactttgggaggctgagatgggcggatcacttgag

SEQ ID NO: 376805 - DNA, 122 bp, Homo sapiens
tgtttccgaagcgcctctgcgttccgggcaccaagggagagtgagttctgaccgggttgtcggggggtcagggactctgccctcagccactttggctgctggttctgccgagccactgcccg

SEQ ID NO: 376806 - DNA, 122 bp, Homo sapiens
cgttcacgctttcctccacaatggtcccacgcagctccagttttgtgaaccactcggctccgtgtaactggtcaaacagttccggaatcatctgtatgtagtcctgtctgttggtcagcatg

SEQ ID NO: 376807 - DNA, 122 bp, Homo sapiens
cccttcagtagaaccttgtcctaccaccacctgtgatcacagggacttggatgtcacctacggtggtccctgcatacaaatctcattgtggtatcaagagactaattttcagacctgtccag

SEQ ID NO: 376808 - DNA, 122 bp, Homo sapiens
tcacctcttccctgctcgtcactgaacggagcttgatgaccccatccttgagttcctgctcgccgatgatagccaccagtgggatgcctgcctcctcacagtactgtaactggttcagtagc

SEQ ID NO: 376809 - DNA, 122 bp, Homo sapiens
ccgccgctcttatatttttttctgtctggagggccaacagcgttcgaaactccagtggagcgcgcggcgtctccactcgcccggacacacccgcctgccgccccgccccgccgtccctccgc

SEQ ID NO: 376810 - DNA, 122 bp, Homo sapiens
cacagccaggcacagccaggcacagtggccgatgcatgtaatcccagcactttgggaagccgaggtgcttgagctcagaaatttgagaccagcctgaccaacatggccaaaccctgtctcta

SEQ ID NO: 376811 - DNA, 122 bp, Homo sapiens
acaggcacacttccccatcagtcctccgtgggcttctgaagccacggggtgccctgcctgcgtcctttcaccctgtggtttcagcatcgtcggcgatcttggccggagtcctttgtgtgcac

SEQ ID NO: 376812 - DNA, 122 bp, Homo sapiens
ggcctcagcagcattagcctgggtctcgggcggtcctcgagactctgaactgcgaagggacgcagaggcagggcttccactcacaggctggctgtccactggccgccactcacacgggacac

SEQ ID NO: 376813 - DNA, 122 bp, Homo sapiens
gaaaggctccacattcagtggctctcctctccaatactttctttacagagtgatgtcatccggaaacctcaaggccaagtggatctgaactcccgctgccaaattgttcgaggggagggttc

SEQ ID NO: 376814 - DNA, 122 bp, Homo sapiens
caagaggggtcctcccttgtcttaaaggtgccgcagccgccggcccccccacgcccagcccgccccccccagcctggcctcggaggccagaacaggctcggcaggtcccctcttgccacgtc

SEQ ID NO: 376815 - DNA, 122 bp, Homo sapiens
gaggcttttccttcttgcccttttcggagtattgcaaaggagctaaaactggtgtgcaaccgcacagcgctcctggtcgtcctcgcgcgcctctccctaccacgggtgctcgggacggctgg

SEQ ID NO: 376816 - DNA, 122 bp, Homo sapiens
cgccacgcaccgtgcctgtgttgtcttgtgggaagcctgcggtactgcggtggcggggggcggggtgcagttgtcatccccgattcacagatgagaagctccagacgttggtcctggggcct

SEQ ID NO: 376817 - DNA, 122 bp, Homo sapiens
cacgtacgtgctgaacttccttcttctcattatcaactacaaacgactagtttacttgaacgaggcctggaagcggcagctgcaacccaagcaggactgacgcccgacagactccaccctaa

SEQ ID NO: 376818 - DNA, 122 bp, Homo sapiens
gacgggaaacagccccgagggaggcgggtgtggctactgctggtactggggtcctcatgccgatccccgagcttggctctgtagcgtcgagatgcggcgctggcagaggcctggaacgctgg

SEQ ID NO: 376819 - DNA, 122 bp, Homo sapiens
gtttgccaggtggaggtggtgggcagaaagtagagtcatcagttcattctggtttgtccacggctttcctggttttagcacgacacgtcccgtgtccggggaggtcatgtgcgaaagcttca

SEQ ID NO: 376820 - DNA, 122 bp, Homo sapiens
ctcagtcgcgacggcggccgccgcaatagcggcattttcgggggcgcacgcgcactgcaccgtccgcggccgttcctaacctcaggcagcggctgtggcagtaagcccctcgggtgcgcacg

SEQ ID NO: 376821 - DNA, 122 bp, Homo sapiens
aaggacgcgagtgcacagcgtggcacagagactctaccattgctctttgggcctccccaccgagtaggacctggctgaagaccacctctcgcagagcgctctggacagctgaccttctgtcc

SEQ ID NO: 376822 - DNA, 122 bp, Homo sapiens
ccaggcacgggcctcggcacctgctgtgctctgtctggggaagcgggcacagagatgaagcggccccacggcggtccctccccaagaaaggggtggacctgggaccggagccagcacagggg

SEQ ID NO: 376823 - DNA, 122 bp, Homo sapiens
tggctccactcactccagatcccggctttcttggagccatagatgccaaaggggttgcagcgcacttgcacgaagtacacggtgccgggtttcaggccggccaggcggcaggaggtctggtt

SEQ ID NO: 376824 - DNA, 122 bp, Homo sapiens
cctgacccccaaaaattatccgcatggggtactctggggccatccttttagtccaggcatcgctgccactccagcaaacctcaatgggagattcccacaaccccaggtcccagcactgctgc

SEQ ID NO: 376825 - DNA, 122 bp, Homo sapiens
agtcgagtgggtagaaacagcacacgtaaggtcgggtgtgcgtgaggagatgcgaacacccgcaggtctctgtctcattccactagagggagaagacactgagtgtagactctcaacgcaca

SEQ ID NO: 376826 - DNA, 122 bp, Homo sapiens
gcccaggacggagactatcaaaggccacacagcgcacagcctgcggacaggggctacgaccggcccaaagctgtcagcgccctcgccaccgaaagcgggcaccctgactctcagaagccccc

SEQ ID NO: 376827 - DNA, 122 bp, Homo sapiens
gtctctggtcatcagagatttctattaattctgtttgaataactgcaatagcaacacttacgaagtgcctgctgtgtgccagatactgttcgaaggactttatatatgctgactcatttaat

SEQ ID NO: 376828 - DNA, 122 bp, Homo sapiens
ggatgggagatgttttggtggtgctctggggtaaaaaaagtactggggcatattgactctcgctctccaagaagagtatgaaataatagtagttattgtggtaactgtaaaaaagagtcacc

SEQ ID NO: 376829 - DNA, 122 bp, Homo sapiens
tcgtgtgtaagtaagagtacataggccacgaggaagcatctgctgtgtgattgggacgcacggatgccgaggtcttcggcctggctccctgagggaacttttgctccctctgtagttctgga

SEQ ID NO: 376830 - DNA, 122 bp, Homo sapiens
ggcggagaagccaggggctctggctggacccagaggctggcgacacgcggggtgaaggaacgaggtctccagtcccagtgagaagccgtgacaagtcttaatgtgccatttcaattcaaagg

SEQ ID NO: 376831 - DNA, 122 bp, Homo sapiens
ccgtgttccccccaggtctgtccacccgcaggcggtagaaacacctggagcgatggaatccggccaggtgctgcagctctgacacggcggtgggagggaaggagggaggaaggaaaggcggg

SEQ ID NO: 376832 - DNA, 122 bp, Homo sapiens
acaggtttgtcaagcataccacgaaagtaatatatcagagaacgcaggtcttaccttgtacgtgatcattccttcctagaaatagaaagaacaggcaaagcagttcaatccccattcgtttc

SEQ ID NO: 376833 - DNA, 122 bp, Homo sapiens
cgcccaggcgtcagaggcggaggcccgaggccgctatacagattgcggggctggcgggcgcggcccggcgctctgcatagcggccggcagggtgcaggcggccgggcggcgcagagctggtt

SEQ ID NO: 376834 - DNA, 122 bp, Homo sapiens
tttatgaaagattgataaaaacaagataactgcttacctgcatattccagttcagggtcacggttgaccagatcctgtcccagcagctgaggatacaaggcaggaaccagccctggacagga

SEQ ID NO: 376835 - DNA, 122 bp, Homo sapiens
tacttaaattccaattgttcacaacatggtttctaaaaaagcctgtcttggaaacatatacgtcaaactcatgaacctaattttcacatcaaaccagaaacaaatcaggataatagttctcc

SEQ ID NO: 376836 - DNA, 122 bp, Homo sapiens
gtgctcaccgtctgccagaggcagctgcagtcggagctgctcttggtgaaaaatgaaatgcgcctgagtctggaggacggcggcaaggtgtggggaggggggaaggcgcgaggtccccccgg

SEQ ID NO: 376837 - DNA, 122 bp, Homo sapiens
cgtggaagtagtcaatacaaacagggaacagactccctagctactcgggagtctgaggcacgagaatcgcttgaacccaggaggtggagattgcagtgagccaagatcacgccactgcactc

SEQ ID NO: 376838 - DNA, 122 bp, Homo sapiens
agggtggacagtggccagccacagtgtgggtgtcacgctgagggcattgtgtcccacagacgtgagcggctactccagctccctgcgggaggccctggtccccctggtcgccgaccacaagt

SEQ ID NO: 376839 - DNA, 122 bp, Homo sapiens
catatctgtaaatgccacagagagattgtttcctgagtgctattttggaaaatataatcacgatttttgtgtgggaagaaaagacactccccacagacatcagagcagacacatccccccag

SEQ ID NO: 376840 - DNA, 122 bp, Homo sapiens
cctcgctccaggctggattcccccctgaaatgttggtccgggaaaaccagcctgggtcctcgcgcgcccttctgcacggggaccccagcccacccccgtacggacacgccttccaccatctc

SEQ ID NO: 376841 - DNA, 122 bp, Homo sapiens
cggacccccaggaccccgggccagcgctgggctccccgaggaaggcgctgctcagggcttcgtccttgctgttctgcaacactgacacccacctgcggagattgaacggggtgggatgggga

SEQ ID NO: 376842 - DNA, 122 bp, Homo sapiens
gttaacgaactttaagagatacgaacacttttgaggcgccttttttcttttggcgggagacgggggacgggggtgggggggtagtgtccagcagcctcagaaaaaaggaggaagctcaaaaa

SEQ ID NO: 376843 - DNA, 122 bp, Homo sapiens
ctaaacctcctacaccctgttcgtccgcgagaacaacagccccgccctgcatattggcagcgtcagcaccgcagagactcgggcaccaacatccaggtcacctactcgctgctgccgccccg

SEQ ID NO: 376844 - DNA, 122 bp, Homo sapiens
ttccacgtgggcctcacagcggagcccaaaccctaagcaagccccaccggctgcagaatccgcaggaccaagtaccaagggaacccaaggccccttgttcagagtcactaagaattcccaga

SEQ ID NO: 376845 - DNA, 122 bp, Homo sapiens
ctggttgtcatagcgactgcaatttcacgcaccaaaatggttttctcagaacacagacttcgagtagcactttttttcccaacatatattttagcacatgaagaatttgttgccatttccag

SEQ ID NO: 376846 - DNA, 122 bp, Homo sapiens
accattactttccatttctgccttcacactcacccacctccaggactggattaggggaaccgtgtctttcccctagggtccatcatattcattcaatggttatggtatacctgtttgaagta

SEQ ID NO: 376847 - DNA, 122 bp, Homo sapiens
ccagggcttcaggggaggccaggtaaggccaagatggggccggggctggtcagaaagatccgagcgttgggagccggtggaagaaaagagcgcgcgggcgacagtcaaacaggccttggggc

SEQ ID NO: 376848 - DNA, 122 bp, Homo sapiens
gtatctcagaaaactgctctaccctgaggcctgacagcaggagggggtcttgccggggttcggacggggaaaagccttattcattgacggtattctacagtagtcaccccaatcatgttacc

SEQ ID NO: 376849 - DNA, 122 bp, Homo sapiens
ccccacgcctacaggcaggtttttctgtctcctttgcagaacactatgcgtttgttacaacgattaaatgaagaacacagaagtctctggctctgccgggcagaacgcctcttaagagtatc

SEQ ID NO: 376850 - DNA, 122 bp, Homo sapiens
cttattgatggagctgaagctacgatggaaatgaggggctcagtcccagtgtcaaagggacggaccccaagcccaaacccaccggagcgggggaagactgagggacgaatcacagacagaaa

SEQ ID NO: 376851 - DNA, 122 bp, Homo sapiens
tcattgtctgcggctgcattgtccaacaggtgagccactagccactttgtagttactgagcgcttaaatgtaactagttcgaagatgtgccgtaaatgcagcacaccagatttgaaaagctt

SEQ ID NO: 376852 - DNA, 122 bp, Homo sapiens
tcccagtgaaatgaactgtgctaaaaacccgacaggcatcttccctgccctccccgctcccgctcgtcttctgcaatcctctaacccaggttctactctgtgaaaggggccaaagctgtgag

SEQ ID NO: 376853 - DNA, 122 bp, Homo sapiens
cagcgcgatgggtgggctgagcgcgctacctggcagggcggcgggtctgggatccttctgcgcactggagaccctcgctgcctctaggtaagcgtggagttcccacgtgcaggggcttaagt

SEQ ID NO: 376854 - DNA, 122 bp, Homo sapiens
agctgcgccgggagcaggcccgggagcgagagggacaggcacgcctgcaggcactaagtgcggccactgctgagcatgccgcccggctgcaggccctggacgctcaggcccgtgccctggag

SEQ ID NO: 376855 - DNA, 122 bp, Homo sapiens
taaaaggaaaaaaaagaattttgatggttagtcacccaataaatgttctggttggccgggcgtggtggctcatgcctgtaatcctagcactttgggaggctgaggcaggtggatcatttgag

SEQ ID NO: 376856 - DNA, 122 bp, Homo sapiens
gctctgaggagtaatgtatgctttttcatatctccccagtaattaggcaatttttatgtacgagatggtttatagcacacacacctacatcattctgacctttcttctgtttacctgcagcg

SEQ ID NO: 376857 - DNA, 122 bp, Homo sapiens
cagagctgagggattataacagatcactaaccatgttatttgagcacctgcatccagccacggctgaagctggactatttagtcttctgaatttcacaagccagtaaatgactttccaaagt

SEQ ID NO: 376858 - DNA, 122 bp, Homo sapiens
tcaacgtctagcggccccgcgggactggggactgagcccaggaggtttgcacaagccgggcgatttgtttgtaactagcagtgggagatcaagttggggaacagatggctgaggctgcagac

SEQ ID NO: 376859 - DNA, 122 bp, Homo sapiens
cccagtgcttgcgtccatcttcaggatcatctatgggaacagcaccagtgcccagtgccacgctgaggaatacagctactttccaaagccttctgcactttggagttcaactgcagaaacct

SEQ ID NO: 376860 - DNA, 122 bp, Homo sapiens
acaaattcccacaggaaaggaacgagaggacctggctgccgaccctggcacctgcctggacgctgcactgaggtccctggcgctgcactcctgcgaactcacagacgcagcaaaggggcccc

SEQ ID NO: 376861 - DNA, 122 bp, Homo sapiens
tcctacttcctaatcccccccatacaatggcttaagatagccaaaacgtttattgtagaacgtttattattcctacaagcttatgtctcacttcccctaagcctctgtacttacagtcaagg

SEQ ID NO: 376862 - DNA, 122 bp, Homo sapiens
gaggggaaaggagaggcgagacccagtatgttcacaccgcgagtgggtgggcggtgctcacgcaggcggagaagaacgggcgcagcgatgcggaagaaatcgcggccccgcccgccttgctg

SEQ ID NO: 376863 - DNA, 122 bp, Homo sapiens
gctgccaccattcacctcctcccactctccaacacacatatacacataacactgtaacaacgtagcatgactgtgtttccctgtatataacatgtggtttgggaattcctttgcatcacata

SEQ ID NO: 376864 - DNA, 122 bp, Homo sapiens
tccacccgctgtgacgcgcccgcgaggccgccattgggctggctttgcggagggcgcgggcggctccgcccgcacttctcggcctttcctaactgcggcagatgggagggggccggagagcc

SEQ ID NO: 376865 - DNA, 122 bp, Homo sapiens
gcctcggctggcccgggctcacaccaggaatgcggccgcagctgaaatgggggcaggagtcggctcacaccgcaaggcagagcaacattccagacgccggcctggaaaacagcgctcccctc

SEQ ID NO: 376866 - DNA, 122 bp, Homo sapiens
tcctggtgcagggggcgagcatggccgctccgcgaggtgagccattggctggggtgtcggcgagtgtgttcgtggagcgcgtcctggggacgactcccggcattatcggccaggttgagtcc

SEQ ID NO: 376867 - DNA, 122 bp, Homo sapiens
ccggttgctgacgtggaaggcagacacgggcgggtggtgggacacctgcgtgcagggaggcggctctgtaaacagccccggaaacaggtaatcccaggaagcgagagcccagcttcccccaa

SEQ ID NO: 376868 - DNA, 122 bp, Homo sapiens
cgcgggtgctagaaaagcgaagcacgcgttaccatggagactgcggaatggaaaagcgttcggtttcttgtttcctagccgcgaatggggtcgtggttccttcgacctcgcctggggagaaa

SEQ ID NO: 376869 - DNA, 122 bp, Homo sapiens
cctctccaggcttatcctttgtagtcagggaagctgttaagattgtcagagaaggccgggcgcagtggcttacgcctataatcccagcactttgggaggccgaggtgggtggctcacctgag

SEQ ID NO: 376870 - DNA, 122 bp, Homo sapiens
catggtacttgctgtggccaggtacttggatccgtgcctctgggagggtctcttctgtgacgccatcacatccaggctctcggaggtggctgcactgtcttcttggatggtctggagctcgt

SEQ ID NO: 376871 - DNA, 122 bp, Homo sapiens
ggctgggatgtccagggtctgagcatctgagcagggacagatgaggttgaggttggcccacggccaggtgagaggcttccaaggcaggatacttgtgtctcagatgcggtcgcttctttcat

SEQ ID NO: 376872 - DNA, 122 bp, Homo sapiens
cctgatatgggacaagcctccaagaaacagatgacagaggtggccccaggcctcccaacccgtgggaagagccaggctgagccttataaaggactgctctttgtccaaacacacacatctca

SEQ ID NO: 376873 - DNA, 122 bp, Homo sapiens
tctgtaagtggtcctttaattctgaagttggagttggtgcccctgccatcacaaacaacacgagagccaattgtgagtcagtctcagtagccatcagcctggcagctgcccatcccataacc

SEQ ID NO: 376874 - DNA, 122 bp, Homo sapiens
tgcccggccccactccgggcctcaggcccccggacgccgagccgccgccgccgtttcagacgcagaccccaccgcagagtctgcagcagcccgccccgcccggcagcgagcggcgccttcca

SEQ ID NO: 376875 - DNA, 122 bp, Homo sapiens
acggaatgctgggggcgaggggccacagcaatattgagcttgcatgggcccccgataaagcggctgcttgctgcagttgctctgtcgccgaaattcgaggtgcagccccagaatggaggccg

SEQ ID NO: 376876 - DNA, 122 bp, Homo sapiens
gttccttctctctgggattccttccctgacttgctgatgccccattctttccttggctctcggggagttctgggacctgggatctatcctttgcaaagtagggcatgtctgtgaacacccac

SEQ ID NO: 376877 - DNA, 122 bp, Homo sapiens
gagtatttccagtcctgttggtagccacccaaaatgtttgagggagttagactaaaagatcgtcaaggtcctttgtagacgaaaagtactatgactccagtgacggaatgacatggcagtca

SEQ ID NO: 376878 - DNA, 122 bp, Homo sapiens
gctcgccgctacccacccggacccccagaaacgccccgccgctgccgctccgccgaggaccgccaggaaccccacttaccagcagcagctccctggggtgcaaaaagggcagtgcggatcag

SEQ ID NO: 376879 - DNA, 122 bp, Homo sapiens
tcctggccttttttccggtttttccacttgattctagactcttgagtccacagattctggcgctcccgtcttcagtcgctgacttgccctcagaagcctatcttgggaggccacacaccagt

SEQ ID NO: 376880 - DNA, 122 bp, Homo sapiens
cacctgtgattccagattgtagtcctattaacaataaccaaggctgggtgtggtggctcacgcctggaatcgcagcactttggttggctgaggcgggcagatcacttgaggtcgaaagttcg

SEQ ID NO: 376881 - DNA, 122 bp, Homo sapiens
cgtccccagcctctgattggatggcagcctagcccgaggggtcgctggctgctggccctgcgagcaggagcccccgggggctgggcccgcgctcaccaaacttctctgtgagcgtgtgttcg

SEQ ID NO: 376882 - DNA, 122 bp, Homo sapiens
ctcttatgatggcttacatttgttttacccgctttctcccttttgactgctaagtctgcccgtcaaatccttattttaaataaaatctttcttgaccactccaggcaaaagtaacctgtcct

SEQ ID NO: 376883 - DNA, 122 bp, Homo sapiens
tggggagagagaaagaaggttagggccttgtttaatgaagaacctttctgctatgaaagacggattacagacaaggagaagatactttgtgagtctatgaaggaattctgcttcgcaggctc

SEQ ID NO: 376884 - DNA, 122 bp, Homo sapiens
tgcacccgaactattggggcataattacagtaagttaaaagacaaaaaaaggagaaaaaacggtcaatttgaatccttgaagatagaaaggcgaattattaactttcccaaatttgttttct

SEQ ID NO: 376885 - DNA, 122 bp, Homo sapiens
agtccgtgacgtcaaagagcctggaccaatcagagcacaccggactgcgttttttccgaacgccagcagcagggtcagaagggaggtagtcgccctccgtcgtggcctggcgtggattccga

SEQ ID NO: 376886 - DNA, 122 bp, Homo sapiens
agcctcaggccaagtgctgttttgtggcagctgcagcacaaggtcccctcacactgacaccgaggccgcctgtacttttctcagcagggctgcttgtgtgtcctccctcccctatccctcct

SEQ ID NO: 376887 - DNA, 122 bp, Homo sapiens
cggccgccggggccgcagacacagcccgggccgcagccgagccccgccgggcccgccccgcgccctcagccccgcgacctcgggctccgcgcctcctgcccggcctctaggcaaggggaagc

SEQ ID NO: 376888 - DNA, 122 bp, Homo sapiens
agagggacacgccgtgagtgagatggcccagcgcagagtccacagatgccgagcccccgacgtgctgcccgggcgactccacgcctgtgtctgttatgactctgacctccaccaccctcccg

SEQ ID NO: 376889 - DNA, 122 bp, Homo sapiens
ggatctgaataaacatttctccaaagaaaatatggtcaatacaaatggtcaatggccaggcgtggtggctcatgcctgtaatcccaggactttgggagtctgaggcaggaggatcacttgag

SEQ ID NO: 376890 - DNA, 122 bp, Homo sapiens
tcattctctaccccacttgcgttaagaagcagtgaataagcggtaggttgacagagctaccgtcttcctgtttttttcctccaattttccggcagttactcccagtcatgcccgagccctca

SEQ ID NO: 376891 - DNA, 122 bp, Homo sapiens
tcaacaatgccattactgaccacttactagaaataaaacagtcatttgttgaatacaacccgtttctttttacaagtgtagtgaaaagtgttttctttcaagaaaccccatgcatttataga

SEQ ID NO: 376892 - DNA, 122 bp, Homo sapiens
tggcgggtgttctggaggttggaggcctggtgtccggcctgcgccggagctggagggcggcgaggctgtgccaaaccccgcggcccctcagggagccgagagggacctgacggccgcgctgc

SEQ ID NO: 376893 - DNA, 122 bp, Homo sapiens
agttttctgtcccatgggataatattttcgtatttgtcctcataaccttgtcctttatgacgtttcactttgttccgcttaccacgaccttttccaggacatgtcttcctgggtcgtgcaca

SEQ ID NO: 376894 - DNA, 122 bp, Homo sapiens
tgcgggcgccgcgggacttgggtgacgcgtccctttccagctcagcggtgtgtgaggtgtcgcggccccgccggcgattggctgttgagaggcgagtacgcggcggccgttggtcgctggcc

SEQ ID NO: 376895 - DNA, 122 bp, Homo sapiens
tccccctcctcctccagcaggagaggccgcggcttccccaaccttcccaccctaacccaccgcacccaataggctggccgctcaagccgcccaggtcccgcactgcccctcttacccggccg

SEQ ID NO: 376896 - DNA, 122 bp, Homo sapiens
tggtcgtccaaggcaagagaataggctttaaagtccctggctcggttaaaaagctggttgcgtagattcctgtcaatgctcaggatcctctgccttgtgatatctggagataagtcaacgcc

SEQ ID NO: 376897 - DNA, 122 bp, Homo sapiens
attaaatcccagcagcgaacactctcgagcagcacagatggcaaacaaagggagcatggacggggaggtgcacagacgcactggcggagtggctgtggccgctgcagtgatggttctgaaca

SEQ ID NO: 376898 - DNA, 122 bp, Homo sapiens
tccgccccctccgcaggctccacccacggctcagctttgagcctccctgggcggaatccgcggttcctcggcgctcattggttatcagaaatttagaaccactccacttgggagacaaaggg

SEQ ID NO: 376899 - DNA, 122 bp, Homo sapiens
ggaggaagatgcctctcaccgcgaggatgagcggctgcgtgagggaggcaggtggccccacgggcaatggggacaagaaccatgtcctgtgtgcaccgggtgccaggagaaccccggccttg

SEQ ID NO: 376900 - DNA, 122 bp, Homo sapiens
gtagctgggagtacaggcgtctgccaccatgcctaatttttttctatttttaggagagaccggttttcaccacgttggccaggatggtctcgatatcctgatctcgtgatccgcctgcctct

SEQ ID NO: 376901 - DNA, 122 bp, Homo sapiens
ggttttggccacgttgccgctcaaggtgcccagccctggggccccagggttgagtttgaccgacctggacgccaggctctgtgcggagttcctcctttcgttcaagtattgaccgagcgcct

SEQ ID NO: 376902 - DNA, 122 bp, Homo sapiens
tcagccgtgcactgggacagttctgtgggcagtggcaggaagccttcagtcggtgaacagcgtgaagacagcctgatgcatgcaaggcgtggggatgtgattgtgtgagcagatcaatacct

SEQ ID NO: 376903 - DNA, 122 bp, Homo sapiens
gagctccggcagccaggtggggactgaacaccaacgccgcggggaggcgtcgcacatgcgcgctcctaggcggagccccgcctcccacgccctggatcgtcacttccggcgcgagaggccgg

SEQ ID NO: 376904 - DNA, 122 bp, Homo sapiens
gcccagcctccgcggcctttgtggcgtcacagccagcctgaagaatggttgccttggagacgtaaacccaagagccctgctcctggagctgagaactgcagcgcggaggcttcggagcgagc

SEQ ID NO: 376905 - DNA, 122 bp, Homo sapiens
gtcgccatctccggcccgccgcgcactccctctcagtcctctgcctgccttctccccttgcgcctcaagggtcattggcggaccccaacccctccccgtgaagtcgttgtgaattttcaagt

SEQ ID NO: 376906 - DNA, 122 bp, Homo sapiens
ttcccagttcccaccagtccaactgcgaggagtgcgacgtgagtctgagtctgatccctccgaaaaccgtacttccggcgctgtctcggaggcctcccgtcccctcccttgtccgtcttcta

SEQ ID NO: 376907 - DNA, 122 bp, Homo sapiens
tggtcccagccgcgcacaggggagcgtggacggcagaggggctcggcgggagccgagatccgcccgtcccggctgcccctcggcctccctctgctcccacctaccccctgacacccatagaa

SEQ ID NO: 376908 - DNA, 122 bp, Homo sapiens
tccatttcaggaaatggttagggatcctgatatcaggtggctgagcagtgctgttcttggcggggacaggttcaacctggggctgggtcagggctcatgaggtgaggtctgttcttccagag

SEQ ID NO: 376909 - DNA, 122 bp, Homo sapiens
gcctcaggccccctgccatgagatgccatctcttcccgtccccctttcccgcacacaagacgctgccgctctaaatggcagtcgtggcagctgggtgcaggctgaagcacctgccactctcc

SEQ ID NO: 376910 - DNA, 122 bp, Homo sapiens
accacccccaacgcaaggccacgcctcgccacgccacagtgctgagtgcacatgaggcggcgtccctgtgctcggcccacgcctgctcctgggccggatgccctggcccccacaaccaacta

SEQ ID NO: 376911 - DNA, 122 bp, Homo sapiens
gccgtcatcatctactggtgtgcacacagctccccattcgggagattccagcacgtgtctcggggcattctagtcatgaacgccagccccacaagggcaggattttcacctgtcttgttcac

SEQ ID NO: 376912 - DNA, 122 bp, Homo sapiens
ggtgtcagggagaacacattcctttttcgaggatggaaagctactgattgtactgaagctcgcattcctctgccaactgctggaacaggaaaaacaaccatcatcctgactgccagcagtct

SEQ ID NO: 376913 - DNA, 122 bp, Homo sapiens
agccagtgtcatctgccggttctcttagggctcccggaaagaaggagggctagccgcgtgcgttcgcgccgcgcctccttgcgtttctgttccccaaatagggcctctccttctcccgccgc

SEQ ID NO: 376914 - DNA, 122 bp, Homo sapiens
tcggcaagctgcgccgccgcttcgggttgcttccggatctggtacttgggcagagctccccggggttcattgtcttcgcttcacaggatctgtttgagtcctgtccaccggatcctacgggg

SEQ ID NO: 376915 - DNA, 122 bp, Homo sapiens
aacttcattcaaagctttggcttcaagttctacccgttaaggcctcaggaagttcattgtcgacattgaactcagtcactaaaatgacctcaaggctaagggatagaccacagctccacttc

SEQ ID NO: 376916 - DNA, 122 bp, Homo sapiens
cggctgaggctgattcagcccattacatcaattccgcagctgctgtcttcaatttggaggcgccagagagtgcttgatctaaaagatggtgggaaatacaaaggttgagcaaaacctacctg

SEQ ID NO: 376917 - DNA, 122 bp, Homo sapiens
caaaacctgacagatctgaaaggagagagataaaaaaatcgataaaacttagagtgatgacgaaaaaagagatgatatgtattgccaaaatcagaaatggaagaagggatggcactacagat

SEQ ID NO: 376918 - DNA, 122 bp, Homo sapiens
catgaggccagtttgaatccaagcagcctggcttcaaactccttgttccggaggaggaaccgcaagtcctcccaaggccttggagaaaagtgagctaaaggcagaacgtgggccgataacgt

SEQ ID NO: 376919 - DNA, 122 bp, Homo sapiens
gagagaaggagagaaggaggggaggtgggagggggagggttgctagagccccttggtgagcgtgtctacagccagactgctctagggcacctttcaaagtggcttctgggtccacatctcag

SEQ ID NO: 376920 - DNA, 122 bp, Homo sapiens
ggtcaatggcttagagggcttctgcggcccagccttcctgtgaacccataatcaaacacccggactgccccaaacaccacctcccctccccactcccgcccgtggctggggccaccacgcct

SEQ ID NO: 376921 - DNA, 122 bp, Homo sapiens
ccccgaattacaaacaaaaaccttaacgccgttgctcgcgggttagaaggcagctgtgcgcgaaaaacaccaaagattttcttcaagcttgaggaaggtcgagaagataaacagtttttaaa

SEQ ID NO: 376922 - DNA, 122 bp, Homo sapiens
ccggggagagggcggcgggcgacggagccactctgtgcctgtggtcctggtgctggaggccggggtgagaaggcgcaggcttcttgtctccaccgaggcctcagtggggctgtttagctgtc

SEQ ID NO: 376923 - DNA, 122 bp, Homo sapiens
ggggagaggcgggagtgggaaccggtgctgcgtgtggcgcttgcgggccagctggagttccgggtgagggtggacttggtgggccccgcactcggagcagccggccggccctgctggccccg

SEQ ID NO: 376924 - DNA, 122 bp, Homo sapiens
aagggcatgtggagtccacagcgccccctcgccctaggcggggtggagacagcgagacgacgcccatgatcagctggttacaaaactcgaggaataagaagtttaatatttattggtctgca

SEQ ID NO: 376925 - DNA, 122 bp, Homo sapiens
ctcgcttgcccaccccgaagtccctcagggtggcgatggcaaagcgcaggagctgcttggcgcgctccccgttgctgaacgccacgcctggggaggtcaaggcgggggtggagagaggtcag

SEQ ID NO: 376926 - DNA, 122 bp, Homo sapiens
atgtagacaaaagaagagcagtcacagatcaccagccaggtaactgggcagattggctggcggcgagagggtatcaagtatcgtcggaatgagctcttcctggatgtgctggagagtgtgaa

SEQ ID NO: 376927 - DNA, 122 bp, Homo sapiens
ggatttcactatgttggccaggctgtctcgaactcatggccccaagtgatctgcccacctcggcctcccaaagtgctgggattacaggggtgagccaccacgcctggcctctttattttttc

SEQ ID NO: 376928 - DNA, 122 bp, Homo sapiens
ctcttattttcttctcatctaatgtggcacataatagggccttatactaaaggagctccacggtttacgagacctagagctaccggcgagatactttacttcattccctgtggtgaaccgtg

SEQ ID NO: 376929 - DNA, 122 bp, Homo sapiens
ccctgtcggtgcgtaggggaagagggaagggagagcattaggacaaacacctaatgcatgcgggtcttaaaacctaggtgataacctagatggtggatgggtgcagcaaaccaccatggcac

SEQ ID NO: 376930 - DNA, 122 bp, Homo sapiens
ggagacacagcctgagtggcaggaatacagagcctttggagagtggctccctctcagctccgtcatgcaagaacactctctgcacccagcccattctgccaagtgacttaaaggaattaaaa

SEQ ID NO: 376931 - DNA, 122 bp, Homo sapiens
aaaacataactttttcttggctcttaagacagaagcccagtcggtaaacagtaaggctcgcggtgctagcattttcatcgcaaagtatcctacctgtcagcgtaattctttggtctggaggc

SEQ ID NO: 376932 - DNA, 122 bp, Homo sapiens
gatggctagcgcctgcgagtgcagggtctgtggagcccgtgcccacctggaacccatacacgcccgcgagcaccatccgcagccccggtgcccgcctgtgcctcttcctccatacctccccg

SEQ ID NO: 376933 - DNA, 122 bp, Homo sapiens
tatgaaagcacaaatttgggggcctgcaatgtatacagccatattggaaaaaattggactcgattcttactgaaataaccagtgttgggctgtgaaggtatttttctgtgggaaatgctttg

SEQ ID NO: 376934 - DNA, 122 bp, Homo sapiens
taatgaacacctttgtctgaattgtgcatcctagctctgtgatggtacttcgcatcttggcgaatgaataggatcctggaaatcaggaatccacatgttctgtcttcattctcacaagtggt

SEQ ID NO: 376935 - DNA, 122 bp, Homo sapiens
ttagagtataaagtcacaaattagaatattacaaccaccatccatatccaatcaactcatcgctcatctggatggggtcctctcccactttcttcactattgtgtgtgtccctctctcattc

SEQ ID NO: 376936 - DNA, 122 bp, Homo sapiens
ccgtgttgggtttgaatctgccctctgccactaactagcttgacactcagtcccccttaacgtcagtttctcacctgtgcatttcctgtggagagaaactgagagcacataaatgtccaggc

SEQ ID NO: 376937 - DNA, 122 bp, Homo sapiens
actgggtctgggcaggccttgaaccaggttagaactggagcctggacctagtccagaacccgaccagatctgccttaaaaaccacagggcctactccagcacataatgggcctattgtgaag

SEQ ID NO: 376938 - DNA, 122 bp, Homo sapiens
ggtccgggcaccgcgaccgcggcccaggcccgcccggccagctgcgcgtaccgtgtagagcgtcaggtcgacatgtcgccacagccaccggtcgtccaccagcctcttccagcggtgacaga

SEQ ID NO: 376939 - DNA, 122 bp, Homo sapiens
gggtcaactccaagtctcacctttctaggaatcccgggcgcagcgcgggggtcgggactccgacctgtatttccaggcggaggtttccctgggtcaggcggccactctctgccagagattgt

SEQ ID NO: 376940 - DNA, 122 bp, Homo sapiens
tcctgcttcccccgaagcacatgactgccactctatgtcctgatgaaagtccctaccccacgtaaccccacaataaatacaaaatcagttggctggatccctccagagtgtgagattctgcc

SEQ ID NO: 376941 - DNA, 122 bp, Homo sapiens
agccagtgctgatgaacagaaaaggggccatgttataaaaatgagtagcccaagggcacacggacgagttggctccgtccatcagagaaccctggcccctgccacgggtagggcatgggcgg

SEQ ID NO: 376942 - DNA, 122 bp, Homo sapiens
ggctagtaaagtaaaaggagatctaagcgtggcccgtgctgagcttccggggatgggccacgcatggcatgcattcatttgtggacatttccctgggaaccttacgtattgggtccatgtga

SEQ ID NO: 376943 - DNA, 122 bp, Homo sapiens
ttttcccgcaagccccaaggacacagcagggcatgaaacggcttcccatccggtgtgtggcgggggagccacggagcgtggtgggggtgttgtgctcatcagtgtggtgtgtcttgcagttt

SEQ ID NO: 376944 - DNA, 122 bp, Homo sapiens
acactgtcgtgcaaccagtggggcctcgtgtgctgcagtgcgtgcatcgctggcccagtgcgcgggtccgccagacctggtgagcttgcccataaactatcctaggaattcctttctcaccc

SEQ ID NO: 376945 - DNA, 122 bp, Homo sapiens
gggaacttgcgaccccgcgtctcgagctggccgtccctggccttgggctcaccggggcctcggcccccaagacctgacaactggagtccgcgaccacaactgggagaactacaactcccagg

SEQ ID NO: 376946 - DNA, 122 bp, Homo sapiens
gccagataaccacgaataatacccaggatagtaaccattctgtggcctgagctggccagacgtcatgccccgaaggagctaccaggtgtgggcgctgcaggacccctgcctggggccgcccg

SEQ ID NO: 376947 - DNA, 122 bp, Homo sapiens
gtggtggggcgcgggcaagaccagccactgatcagtcccagcacgctgccctcacttcagcgtgggttcccgaatggatctggggggcagtgacagcctctgcctccagctagctagtgtta

SEQ ID NO: 376948 - DNA, 122 bp, Homo sapiens
atcatctaatcagagctatataatctgatttctaattggcatccagcataatatagaacccgttatagtttaatgtaaggaagacaatgatctcaatcatagaagacactaagaacagattt

SEQ ID NO: 376949 - DNA, 122 bp, Homo sapiens
gtgggaagtgaaggaaaagggactctgcgcccttgcccacttagaaccctctgccaggaacgccctgctgggatgcggctccaccagctgctcgatatcactgctccccccaccgcaagccc

SEQ ID NO: 376950 - DNA, 122 bp, Homo sapiens
gagaagccgtgtaatgaaataacgtcacgcctgcccctcaccattactctgaccagggttcgaaggtcacacttagagcctaaggggaaatggagaagtgcaaagggacgagcagaatggct

SEQ ID NO: 376951 - DNA, 122 bp, Homo sapiens
gtacgtgtgactttgaacagtccttttaaaatgtgaatgtgcaaacattcaacgcggtctcgttaaagtgtagatttcaattcagtagatgtggggtggggcagagattctccattttaagc

SEQ ID NO: 376952 - DNA, 122 bp, Homo sapiens
aatgtacaagagtgcggggaggggtgcaccaaaagactgactccctacagaaacttttgccgagtgggagcaggttcccaggctacgtggacagggaccggatgggaggggaagtcgatgct

SEQ ID NO: 376953 - DNA, 122 bp, Homo sapiens
gttccctccctagtctctgttcccaatgcgattcctcccagatcctcctcctttccctcccgcctgtcccctcggtcccaaccccaagcgtcgctgagtcttcccagtcttccttttctaca

SEQ ID NO: 376954 - DNA, 122 bp, Homo sapiens
tggggcagggagtgcacccttcaaaacccagaggtacatgacacacattgctttacaaagcgactgttatcagataacaggggttgaggaaacggaagacaaattttgtctggggagagaat

SEQ ID NO: 376955 - DNA, 122 bp, Homo sapiens
aaagcccaaacaataggaccatttatcatttaggtgaagccaaaagctggattgagtagtcggtgacagagggctaacacagatagattctgtgctccactactgcctctttcttcccctgc

SEQ ID NO: 376956 - DNA, 122 bp, Homo sapiens
gaatgttttttgttttttaattataatgtacaatctgttctgagatgatttccatctagacgcaggtgtcagatgagatgacaaggtagtggctgatactgatcttcccacacaccacaaat

SEQ ID NO: 376957 - DNA, 122 bp, Homo sapiens
gttgtagcttagagattatctagttcagggctgctcaaggtgtttcctgcacatcagtgccgtccaagagctgtttgttactaatccataaggatataaatatggaaactgagagtaagcat

SEQ ID NO: 376958 - DNA, 122 bp, Homo sapiens
aggccagtaagagttagactgagatactgatttgtgattccaacctgagtaactccaactcgaacatccctactgactgaactggttcctttcagcatatctccactggctcgaaggaatcc

SEQ ID NO: 376959 - DNA, 122 bp, Homo sapiens
gaccagagagcagcagcgttgtctctaggcgctcagtgcacatgctgttggcagatctggcggggaaaatggtgcaggcatggcctccctttacctctccagacccccaagcctggactcaa

SEQ ID NO: 376960 - DNA, 122 bp, Homo sapiens
tggagcagagaggtcctcgccgcgctgttcactgcggaatgcgcacagaggttccggccgcggtgttcactgtggaataagtggagaggtcctggccgttcttgtcactgcggaatgagcag

SEQ ID NO: 376961 - DNA, 122 bp, Homo sapiens
gacgacctcggcgaccaggggcgctgagcactcacctaggagcgggaggcgtttcattggcggtggccgcagtggtggcggtggcggagagcgcggcggagtgagtgcggctgtggacccgg

SEQ ID NO: 376962 - DNA, 122 bp, Homo sapiens
cagctgtgctacagaaacattaatcttgagaattcacttgctcttttcatgtgtgaaatgcggggttaggtcacaggtgatcaccaaggtcacttccgtcaaagcacttcagtgactcagaa

SEQ ID NO: 376963 - DNA, 122 bp, Homo sapiens
attaatactactgcacttcagatgaatgagtttataatctatccccaaagggcgtataaacgaagacaacaacataaggaaaggaactttcctgttcaaggcacttcattctttttctcatt

SEQ ID NO: 376964 - DNA, 122 bp, Homo sapiens
tggtgaccagggaaaacgggaggacttcaggatgccccgaaccctgattgtataattcttcggagtctttggttgcaatggaagtagattggtctaaactaaactaatactgcctaaaagga

SEQ ID NO: 376965 - DNA, 122 bp, Homo sapiens
cttccaaggccagggcccgctccccttcctggggctgccaggagcctagagcgtgggaaacggctctgctgtgtgtccggggccaaagacacgcaggggcggtcgtgccagccaggctctcg

SEQ ID NO: 376966 - DNA, 122 bp, Homo sapiens
tgtctgcggctcatcctgctgcagtatgacagtgaaccacctggacaggcgagggcgtcccgtcagaagaccagtgagaatgcagccagcacagggccgcggggttcctccatctgcctgcg

SEQ ID NO: 376967 - DNA, 122 bp, Homo sapiens
acggttagttccctgatacgcagtcggaagtatgtacaggcacgagcaagcgcccgtggccgggttgcctcccttaactgtcttttgctgcgctcaggaagtgaaaactaattttagtattt

SEQ ID NO: 376968 - DNA, 122 bp, Homo sapiens
cagcactgccgctgggcgttctatctcaggtggtgtcccgtctacgctctcaagggtggccgcgcctgaacctttactcgtgaagagtgacacacaaaccaaggccaaactaaaaaacaaaa

SEQ ID NO: 376969 - DNA, 122 bp, Homo sapiens
ctgcctctagcaaagggacgcggggaagctcagcagaccttaggcctcccaagggcgccacggtggttcctttgagcccagagtcagctcttaagtccataggccttcctgaagcttctgaa

SEQ ID NO: 376970 - DNA, 122 bp, Homo sapiens
ggccaagattcacattttctatctataaaaagcaagctttctgtgatgtgtagccacccacgtcttatcttagggctgatctgaagattaaataacctaactctttttctcaagagcttttg

SEQ ID NO: 376971 - DNA, 122 bp, Homo sapiens
ataagatgggccaggcacggtggctcacgcctgcaatcccagcactttggggggccaaggcgagcaaatcacaaggtcaggaatttgagaccaggctggccaacatggtgaaaccccatctc

SEQ ID NO: 376972 - DNA, 122 bp, Homo sapiens
ctggagaagtggttttcgtgtctctccccggggcgtgcgggggaaatcccggggcggcaacggctggtgctctcaggtcgttccccgcctcccgcgccccccgcggccaccctccagccagc

SEQ ID NO: 376973 - DNA, 122 bp, Homo sapiens
aggcagaggcaggggcagagggaggtgggacccagaaacagagagacagagacagacagacggagacagagaggcagagatcaagaaaaagacagagacatccagagacacagaaggaaaga

SEQ ID NO: 376974 - DNA, 122 bp, Homo sapiens
catgtcacactcgatcatgaagcgggtcacatcgtaaggcagccggcagaggcaatacaccggcaccgaggccatcttcgctcggccctggagcgttctgcggccggccaggttcgtcgtgt

SEQ ID NO: 376975 - DNA, 122 bp, Homo sapiens
gaggtgaagccaatccaccctttctgggctaggggaagcccagatggtcttccgctcgctcggggtgaggcactccccagggtcccggcctggctgcccatcccccaccaagtctcccaggc

SEQ ID NO: 376976 - DNA, 122 bp, Homo sapiens
aaggaaccgggtagacatgagcacaagactctcatcgacttttggggaaaacaaaaacaccgataaaaatccaggcggtgaaacgagcagcaacagccccagggacccgggagctggaggcc

SEQ ID NO: 376977 - DNA, 122 bp, Homo sapiens
aacatgttcttcagcttatatgataagtacagagtgtgataagtctatttttaggcatggcgaatataagcatcccatatataatcaggcagaaatgtgagacagccaacctttttggctat

SEQ ID NO: 376978 - DNA, 122 bp, Homo sapiens
atttgctggtttaaatattaccaatctaaaaaatatatttaaaaaaaatttcagttaacacgagatttatagagaaagttactaggtcttgaaggcaaggcagttggttcctatgccataga

SEQ ID NO: 376979 - DNA, 122 bp, Homo sapiens
taatatccgaagaaagttgcgcctgtcccaggttaagcccttcttgcaaggcttcaaaaacgccgaagtctctcaaaatactttcacacagagaagtagcagggggtgcgtgtccaaggtgg

SEQ ID NO: 376980 - DNA, 122 bp, Homo sapiens
ctgcatttccttcccttgttttacttataactgctagaagaaatatgaacttaagatacacgaacacggagtcctcaggatgctttcttgatacaaacaatatctagatatcctggtcccca

SEQ ID NO: 376981 - DNA, 122 bp, Homo sapiens
gctgtgcgaggcgctcgcggactggtgcaggttctgggtgggcgccagctaggcaggccccgcactgggcgcagccggccagcgcctgctgggcttcatccagggatgagctccctctgggc

SEQ ID NO: 376982 - DNA, 122 bp, Homo sapiens
gcccgggactatgcaggagccctcatcaggcgagtgccccgcgtccccctgattgccgtgcgcttccaatcgccttgcgttcggtggcctcatattcccctgtgcgcctctagtaccgtacc

SEQ ID NO: 376983 - DNA, 122 bp, Homo sapiens
tgccttccccagcgccaactctcccaagcaacttttagcccacataatggggtcaggacgcggccgcccccattcggagcctggcatccccccacacccagatttggctgaggatgcccagg

SEQ ID NO: 376984 - DNA, 122 bp, Homo sapiens
gtctgggtgcctgcctgcgtgtgtgttacggggagggctgtgtgtgcacgtgtgcttgtgcgtgtcggggtgggggaggagtgtgtgatcggcagaaggaaaagcaggagcagctccctcag

SEQ ID NO: 376985 - DNA, 122 bp, Homo sapiens
aaacacggacgtcagaaaactggttcagtagggatgggtgctagaaggctacggaaccgccgaaggcccaggagaaacccggaacgtgttaaccgctccaactggagccggacgaaaaaacg

SEQ ID NO: 376986 - DNA, 122 bp, Homo sapiens
tcttgcagggggtaaaaacccttcaaaagtatcagatgtggatcaacagtaaacactcaacgaaaatttcattccgcaatgcctcaggcttcttacattttctgaacccagaaaacaccaaa

SEQ ID NO: 376987 - DNA, 122 bp, Homo sapiens
agaaaaagccctacatttgggcttggcaaaaacaggcattatatgcagtcttttgtgcatcgttttgagcaagttaaaaaatttcactgagacacatatggttgctgtgagaatgacagatg

SEQ ID NO: 376988 - DNA, 122 bp, Homo sapiens
gctagagtagccgcgaagagaacacttccggggcggggctatctggccctttcctttccgcgtgtagaatgtggggcgcctgtaaagttaaggttcacgattccttggccaccatttccatc

SEQ ID NO: 376989 - DNA, 122 bp, Homo sapiens
gggggcctgcccaccctggctcccccatcgacgtccgagtgcccttccccagcatccaggcggtcaagatctttctggagtcccacggcatcagctatgagaccatgatcgaggacgtgcag

SEQ ID NO: 376990 - DNA, 122 bp, Homo sapiens
cgtatgttagtcactgatctgtattgagcacccactgggtacagaacactatttcctgttcgtgctagttgagaataactttgaaagctttagatggagataccaggtgttgttatttaaac

SEQ ID NO: 376991 - DNA, 122 bp, Homo sapiens
gtagaagtctctgctttacggaataaagcaactcaaatgggtaaggaagcctgtggcttacgggtggcacagataggaacaggactgagtctcatggcaagagaatgtgaattatgcaaaag

SEQ ID NO: 376992 - DNA, 122 bp, Homo sapiens
gcgcccccagatcctaggcccacccgcccccaccttcctcctccctggtttacgggaggtcggctctgtcaccctccagacctgagtccccagcccggccttcccaaaagccccctccaaaa

SEQ ID NO: 376993 - DNA, 122 bp, Homo sapiens
aagggctgccgacgccattttgcagggtgggctgcgcagactcttggcgggaggccggcgcgcttgagcgggagaggacgtggaagggttggaggtggggagtgcgcgttacgactggaaag

SEQ ID NO: 376994 - DNA, 122 bp, Homo sapiens
gccctgctttccttaacccttctccccctcagttccaggggtcacgggaggcctatctggcggtgaggactaagagggtacgagggtcgggggctaaagagctaggcatccagacgaggggt

SEQ ID NO: 376995 - DNA, 122 bp, Homo sapiens
tctcgaattcatttgctttccttaacgagagaaggttccagatgagggctgaaccctcttcgccccgcccacggcccctgaacgctgggggaggagtgcatggggaggggcggccctcaaac

SEQ ID NO: 376996 - DNA, 122 bp, Homo sapiens
cacccccaagtttgagaaatgccactctgagggattttcagtttcacttttctggaaagacgttcctttctctccttcctcttctcgggtctcagcgatgccccctgtgtctcccaccccta

SEQ ID NO: 376997 - DNA, 122 bp, Homo sapiens
ggcgggaggttataaatagcggccgccatcctgcttctcttcagacacacttaatttagccggcaggcacacggatgcttatttttaaaaaaagaacttgttttattgcgctcgaggtgacc

SEQ ID NO: 376998 - DNA, 122 bp, Homo sapiens
gattcgattccttttcaggagaatgaaggaatctgcaaggggttgttgttacacaacttacgtgagattgtggtaaagtgccagcaatgagcctggagtagtccacttctcttcctctcctc

SEQ ID NO: 376999 - DNA, 122 bp, Homo sapiens
gatgagtaaataaagaccagaacatgggcacacgtgtacacacatacacacacgcgcgtgcgcgcataagtgtggggttatttgcatgttctcactgcagacctgctgtggaactctgggtt

SEQ ID NO: 377000 - DNA, 122 bp, Homo sapiens
aaggcctacagctccccgagcaccacccccgaggctcgccgccgggagccccaggccccgcgtcagccctcactgatgggccccgagagccagagccccgactgcaaagatggggccgcagc

SEQ ID NO: 377001 - DNA, 122 bp, Homo sapiens
aagagctgtgcaccaggatgatggggcagaagcagtgagggaggaaggcaggaggctccccgggcctgaaatacttggagactgcccgctcaccaggaaggtgggggtcccagccccagatc

SEQ ID NO: 377002 - DNA, 122 bp, Homo sapiens
gaagcactcgctccgcatttgctcccagcccccaggcctccattccactttgtctctgtgcgctgggctcccctgtcacctccccacgtgggtgggcatctctgcgtgtcttcagcgtgtgt

SEQ ID NO: 377003 - DNA, 122 bp, Homo sapiens
tttctagaaaagtaaggagtggaggtaaaaaaaaaacacagcagagacacaggtatgctacggaaccaaaggtgtgccaatggtactgacagtttaattcagaaaaaaatgaatcagaaaat

SEQ ID NO: 377004 - DNA, 122 bp, Homo sapiens
tggttttgtcctgcgaagggaccccactcaggttaaggctgcgcaggaaatccaccttcacgttctccagaaacatcttcaggttgaaggtgtgctcaggcagcccacctccaggcaccccc

SEQ ID NO: 377005 - DNA, 122 bp, Homo sapiens
ttagccttctgtgaccctggccagactcagaatttgtgccaatgcaggacaagctcactccgagcagcgtgtcagtagctggggcctatgcatgccaggcaaggccaagctgactcaaagag

SEQ ID NO: 377006 - DNA, 122 bp, Homo sapiens
aggaagactttgaggaaataaaggttgtttggaaaaatcccggtgtgattgtttcgcacgcgtgatgggtagaaaggatgaagtgtgaaggcccctcgccccctgcatcctgccttagatta

SEQ ID NO: 377007 - DNA, 122 bp, Homo sapiens
agggggcagaggtccaggtcgagagaccagtgtgtgccgaggtcctggagtggagggtcacggcgcacggcaggtaaagagctggaaaggcatggaagctgaccctggaggtggagaggcgg

SEQ ID NO: 377008 - DNA, 122 bp, Homo sapiens
ggtgcgagcattcttctgtgaatccattacgggtctcaaagtcctaatgcagggaacacacgctcccgtaggcttctcccaacgctggcaaaatagaaacctctaaaatctggtcagccctc

SEQ ID NO: 377009 - DNA, 122 bp, Homo sapiens
gccgctgcccaaatcctcgcaggcagctcatcaacgcaattgcaactccggctggagccccggacctgcaagcctgggtgtccgtgggtccgtctgcccagccatctgctggtggcacctct

SEQ ID NO: 377010 - DNA, 122 bp, Homo sapiens
gctatctctcaacatacagaacatttctccttagaactgcaatccggtttagaatgtcatcgttgctgctgcctcccttcctttcaggagcacattcgcctgcgtgcgcactcacacacacg

SEQ ID NO: 377011 - DNA, 122 bp, Homo sapiens
ttttttaaaaaaagttcccttctccacaagcaaacttgaatgtctgagttattcttagggcgtttttggacagacactacaaccctcagttacacatcacttggcttcatgaaaaggtaaca

SEQ ID NO: 377012 - DNA, 122 bp, Homo sapiens
agacagggtctcactgtgtagtccaggctggcgtgctgtggggcgaaactcatgggctcacgccatcatcccgcctcagcctcccgagtagctgggtctacaggcgcaggccaccatgcccg

SEQ ID NO: 377013 - DNA, 122 bp, Homo sapiens
gtgcgtgtatgcctgtcgcgaaattcaatggaatgtcatcctgcgcctccctggatatgacgaacaatatcacgggggatgtaaaacttctgagatattgggagtgatatcatcctctcccc

SEQ ID NO: 377014 - DNA, 122 bp, Homo sapiens
cagaagccgcacccggaaatgaaaccaccaggacctctgggatgcctggcggaagagaggcgctctagttccgaatgcggtccggaaaccagaactagagaactctatgacccacctgagct

SEQ ID NO: 377015 - DNA, 122 bp, Homo sapiens
ttaggaggagactggcaaaccctgaatggatgcatgctgtagagtaagaaaatcccctgccgctacagccacctgctgggaagtctctctaatggctcttttttttttttaatcttttttct

SEQ ID NO: 377016 - DNA, 122 bp, Homo sapiens
aatgctgtggaaactgtggcaaagcagttggtactctgtcaagaacagagagagagacatcgggtactgaagccaggggaccagttccttggtgttgctttggcattgatgcctgaagtggg

SEQ ID NO: 377017 - DNA, 122 bp, Homo sapiens
cctccggaaggaaagggacttgaactcacgacccacgcagctccagggactagaaactcacgatcgattgggaaaccagaacctacgaagcagaggcttggggcgagcgacgggagagtcgc

SEQ ID NO: 377018 - DNA, 122 bp, Homo sapiens
ctaatgggccgtgttgccttcgcgactgcaggttttcttgcccttggtttatcttttgcccgtgttcctttaaggatttaatgagatatgtatgggggcaggcttccagccagtctagtgct

SEQ ID NO: 377019 - DNA, 122 bp, Homo sapiens
aaaatttattgcgcatagtgaaaaaaacaacgctttcacagtgcagaagagacaacccagcgggttgctaatgctggttcgggcagcctgcttttattcttttatctggccccacccacatc

SEQ ID NO: 377020 - DNA, 122 bp, Homo sapiens
tggtgtcagcagaagtaaaaggagttgaggtggccctgggaaaatttcgggaggcctcatcgagttttggagtctgcttcagggcccctaagatctacgccctggagctcttgtttttattt

SEQ ID NO: 377021 - DNA, 122 bp, Homo sapiens
ctttgagatgtctgtcagctgcgagttacctcttgacttttattcctgaagccgaagagtcgagtttcacggtgattcctaggaaaggagggaagccccctccactcccacccccgtaccct

SEQ ID NO: 377022 - DNA, 122 bp, Homo sapiens
gcagctcagaatgtgcttaggccgacgcgaaaacaagtaagtacaatgtgaatattgatgcgtaccagtcaccatgaaaacacagaacggggaacacctgctgccgcccacctgaactgagc

SEQ ID NO: 377023 - DNA, 122 bp, Homo sapiens
tttaagggtatagttgcaacccttgcttatgggaagagaagcaccttcagcctctgaccccgtgtttctgtcttgctgtgtggcatccagctcgctgtctgcgtgtctctgagccatggagc

SEQ ID NO: 377024 - DNA, 122 bp, Homo sapiens
gtagagctccaggttgatctggcggttgatggcggcctttagtcctggtggtagtcctggcgcacctgtgaggtggacgcggtcgtcatggcggcgactaaggagaggcggctgcgttcgcg

SEQ ID NO: 377025 - DNA, 122 bp, Homo sapiens
tcctgagtgccccgagacctttgtctacttctcctccttcccggtgctgcccggaccgttcgtccagagggaggcccggtgccttctggcccccctagtttgcccccttttgcaccgacctt

SEQ ID NO: 377026 - DNA, 122 bp, Homo sapiens
ggcgagctggggtggggcaggagggggacgcggctggctggaggggctggagctaggccacggatactgctgctggtctcaggactcctggtggtccggagctcatgttagcgtccccagct

SEQ ID NO: 377027 - DNA, 122 bp, Homo sapiens
ctgtgcaatggataggagctatgtgaagctggcgtatgggtggggtttgcaggcttcgtccggcttcatcgccggctgctgacccggcaccaattcctgttctgcaggtctcaccgcagagg

SEQ ID NO: 377028 - DNA, 122 bp, Homo sapiens
tctttccgggtccttgcacgcttcgctccaactcctgcagagctgagccggaggggaatccggaagggacacgctgaacaggtaagactgtgctgcctggggtgcctactggcatcgattcg

SEQ ID NO: 377029 - DNA, 122 bp, Homo sapiens
ataaaccaagccaaatagccaagtcaaactgcctccaataagaagggcatgctctatgcccggcatgcaatcttcccaaccctgtggaatgggaagctgcattttcccctaattctacctgc

SEQ ID NO: 377030 - DNA, 122 bp, Homo sapiens
ggatacagccctaattttgacacggaatgcagctaatgcaccttgctatagatgtacgtccgttggaaaagtgtgtgatgggcacctgatctacaccaagagaacagggctgtctgcagaag

SEQ ID NO: 377031 - DNA, 122 bp, Homo sapiens
acaaactaactgctggactgcagcgaaacccgacccctgtttggaggcactccaggtttccggaggattgtcatctccatagctgcggcaagaaactaaataagacccatttatgcacagtg

SEQ ID NO: 377032 - DNA, 122 bp, Homo sapiens
ttaagaactgtaacacttaccgtgaaggtccacagtttcactcctgagccagtgagaccacgaaccccaccaggaggaagaaattccgaacacacccgaacgtcagaaggagcaaactccgg

SEQ ID NO: 377033 - DNA, 122 bp, Homo sapiens
cttgcctcgtcctcgggttcggggctagccggcgcggtgcttcctgggagttgtagtccacgaccgccgccgccgcgttgacggggaacgcatccgaaactacaactcccgctgggcggcgc

SEQ ID NO: 377034 - DNA, 122 bp, Homo sapiens
cttggaaggcagcactgccagcctgcgctgcttcctgcaactccgggatgcaaccccaggcggcgctatagtgtccgagctgtgccaggcactgagcagtagtcactgccgggtgctgctca

SEQ ID NO: 377035 - DNA, 122 bp, Homo sapiens
gacttccaggttcttctgtttgcttactccctatccgggggcccaaggcgctgtctccgccgcccaagccccgcgtaaacctgggtgacctcggagacatccgttggagcatgagttcccga

SEQ ID NO: 377036 - DNA, 122 bp, Homo sapiens
ttaaaaaattccttggcactggctcagagtgtaaataaaatatttactaggatttttcaacgtgtctttgccagttttctggaaccctttctacttgtctgctgaacgtaggcaacagcatt

SEQ ID NO: 377037 - DNA, 122 bp, Homo sapiens
ccagaaatcctcgcggcaaaggttaaacacgtgactactccctagtgggtgtggccgcagcgacaggcttgggtggcgggagtttcaagtttcaaaaacaaacttctggctgggagtggtgg

SEQ ID NO: 377038 - DNA, 122 bp, Homo sapiens
gcgccggggcggggcgcgcgtcctcgcgggtctgaatggaagggtcgaggtcgtcgtcggcggcgagcagatcctgaagccagaactccaccccggcgcccgcgccatgcggcgggagaggt

SEQ ID NO: 377039 - DNA, 122 bp, Homo sapiens
gcttggccaatgaaaagaggtctacccgagagtgcgacgcgcaatgggcgggacttccggcgtctcccctcggcggttgctttcgctgccctcaagagaactcagcttgccggaagctggtt

SEQ ID NO: 377040 - DNA, 122 bp, Homo sapiens
ggcgcgaccgcggactttggggggggttgtcccgaggggcgggggtcgccggtcggcccgcggaggggagggggagggcggcggtgggggggttgggggagcaggggccggggccgcgcgcg

SEQ ID NO: 377041 - DNA, 122 bp, Homo sapiens
tgaacaatcccatatcaacccaaggacattcaatatggatgaccccttgaacattccaaacgtgctcctgcctttgtacctggtatacacatcacttggtgtatattctacctgtaatatac

SEQ ID NO: 377042 - DNA, 122 bp, Homo sapiens
actatatattgtagactatgtattattctaacatgtaggctaatttacatgacttgttatcgccccaataacaatgttattagaaatggaaataaattgaagtgatttatgcctgttgactc

SEQ ID NO: 377043 - DNA, 122 bp, Homo sapiens
cgcagcgggcgcgcgggccagcccagggatactgagccatgagcaaccaggcccacctaccgccgcgccatccaaaggtaacaccacagaccacgggccatgtgtcctgagcagcgcacact

SEQ ID NO: 377044 - DNA, 122 bp, Homo sapiens
ccagtacgcacctccccggagcgccccgccgccgccgcaccctgctcggccccctcgtggcgccgactctagctgcggccctcggagcagccctgaaaggtttaaagggccgagcggccccg

SEQ ID NO: 377045 - DNA, 122 bp, Homo sapiens
tttgctgtcttttttaccctagtagcccttggccctttgtaattttccactattccttggcgaacttttcaggttcattattatcttatgacttgctgcttttatgtatgttagttagctat

SEQ ID NO: 377046 - DNA, 122 bp, Homo sapiens
gagccgcggagccattctcaggcgggcgtgttactactgttttgcacagtgtgggcttggcgggtgtttgtggagcggagccggaggcaggtaagcagttattatagccgctttcctaataa

SEQ ID NO: 377047 - DNA, 122 bp, Homo sapiens
tgtaaggagaagaaaggcagatcccgcggcttgggagtgagcagagtggctaaatccagacggccgcgctccgccctccctcccctctcccctctcctccccctccacaccagggcccaggc

SEQ ID NO: 377048 - DNA, 122 bp, Homo sapiens
tagagcagtcctttcatgttggttttgtctcttccagttaacaacacaaaagaattacgacgattcatcctctcaattttatgtagctttcagaagccaaatgagcaacaggatcatcttgt

SEQ ID NO: 377049 - DNA, 122 bp, Homo sapiens
caccgtggcaacgcgcgcggccgtttccggaggcggtggccaaagtgggcggggctaggccggagctgctggtgggaggcagccacttgagatcaccaggcctcctgtagaccggcgggtgc

SEQ ID NO: 377050 - DNA, 122 bp, Homo sapiens
tggagttcaggatttctcaatctcagcactattgacattttgggcaggataattctttgtcgtgagggctgtcctgtgcactgtaagatgtgtagcagcatccctggattctgcacactaga

SEQ ID NO: 377051 - DNA, 122 bp, Homo sapiens
atggttacttatagcaaagttctgggccacaggctatgaatcatcaatgacagtgaccttcggggctttgctagctcacatgacactggttaagtggtttggtttcattttgcctgttttca

SEQ ID NO: 377052 - DNA, 122 bp, Homo sapiens
gaggtcacgagggaaggcttttccacccgagaccccaggccctgcaggtcactgcaaagtcgtggggcgggggagtgcgaggttgggggagccccggggcagacccgagggaacctttgcgg

SEQ ID NO: 377053 - DNA, 122 bp, Homo sapiens
agaatgagctttcccaacacaggagctgcgtcctatgcatactcagtcccatgtgcctggcgcagtgtgtggcctgagactgacaccagcatgtgttcacagccgtttcctcaagctgactg

SEQ ID NO: 377054 - DNA, 122 bp, Homo sapiens
ctcttcttcaaatgcggcggtcacctgtgacccacattcataactccctcagccactagacgacaaaagaagccctgagtttaggctgactgagattttcattctagctttgctatacattt

SEQ ID NO: 377055 - DNA, 122 bp, Homo sapiens
gtataagtccagccatcaggtgacaggaggagcggctgagccagggctggattcggggaacgctcctcttcctcttcctcccacctccccaagctagggtgtcaggaatgtatcctaacctt

SEQ ID NO: 377056 - DNA, 122 bp, Homo sapiens
ataaccagtcaggagacatgctcactctagatgtgatctagactagcatggcagaggatacggagcagagaatccagactgaaagcaagatctctaaccttggaccaccgaaactggagatc

SEQ ID NO: 377057 - DNA, 122 bp, Homo sapiens
tgcagccccagatgcagggtcagacctctgctctactgctcctagcccctgctgtgacctcgggcaatgcacctgggtggggtaggatgtgtaagtccactctgtcattagcacagtcttcc

SEQ ID NO: 377058 - DNA, 122 bp, Homo sapiens
cccaggctaggtctcaagagaggctggaagccagaggcctgaggccagtcccgttgctgacgcggatgtggtccagctggggccctgacaggtgtggccactggtgaggccagaggtaaccg

SEQ ID NO: 377059 - DNA, 122 bp, Homo sapiens
ggtaggcagaacacctgaggtccggagttcgagactagcctggtgaatatggtgaaaccgcgtcattttactaaaaatacaaaattagcctggagtagtggtgcatgcctgtagtcccagct

SEQ ID NO: 377060 - DNA, 122 bp, Homo sapiens
ggcattactgaattatgggcatcacaaaacgaatccactgtgcattttttctttatgtgacgtttttacaatcttcattttctgctttgcagccactgagctatagagatccacacttcatc

SEQ ID NO: 377061 - DNA, 122 bp, Homo sapiens
cggcggtccgagtggacctcgggcccactgcggcccaactgctaggacatggcgccttcgcgaaaaagctgccagggcccttaacccacccggacaaagaggccccgttttgcaaccccgtt

SEQ ID NO: 377062 - DNA, 122 bp, Homo sapiens
ctactaagtatcccgcagatctagcctgcagcacctgaagagacaaggaaatgagtaagacgggcttcatcttcaggaaggtttcttgccaggaatcactgttgttgccatttttaatttta

SEQ ID NO: 377063 - DNA, 122 bp, Homo sapiens
ttttctttgcttgtcagaagcaggaagcctttaaaaacaaaacaataacaacaaagaaaccgctctctagttcaatatgtgtggtgtgataaatggggaaagatctcaatcttttggacaaa

SEQ ID NO: 377064 - DNA, 122 bp, Homo sapiens
acccagtgaggtgtttatctggggggctggtgtctttcacgggccagaaccttacagatgcgtttgggcctggagggctcctaagaagagagttagcttggcatttcctaaactgtgctcca

SEQ ID NO: 377065 - DNA, 122 bp, Homo sapiens
caaacttgatgagtaggttttaaaaatctgaattgcagaggcggagccgccaccctgccgcgactttcagtctccgaccatggcctcacgctggtggcggtgtgcccggctcccccggcctt

SEQ ID NO: 377066 - DNA, 122 bp, Homo sapiens
ctcccgcctttgccgtcacgcctgccgccgccatggaggagccgccgccaccgccgccgccgccaccaccgccaccggaacccgagaccgagtcagaacccgagtgctgcttggcggcgagg

SEQ ID NO: 377067 - DNA, 122 bp, Homo sapiens
caccccgccccagctgtgtcctcggcgcccagcctggggcagccgtccccgtgagccccgcgaggggagcctgtcccagccacctcgccgcttcaatttcctccaggtccacaggcccagcc

SEQ ID NO: 377068 - DNA, 122 bp, Homo sapiens
ccgtgccgctcggaggggacattaaaaaatttcttagtgtttgcccgcaaaggtattgtgcgttgccttggaggctgagatatgggggaatagacaagtcctttgttctgaggttcatcttc

SEQ ID NO: 377069 - DNA, 122 bp, Homo sapiens
caacctaggggggtgtccgggcggggcctgtcagcagcgacccgcccccgggcacacgcgcgtcaggggcagcaccgccaagctgcctgtgcagccccatccagcaggagtcccgcggctgc

SEQ ID NO: 377070 - DNA, 122 bp, Homo sapiens
ttggactctgcccaggatagcctcacaccctatcctacacgactaggaacttgcacagtccgcctcgggcagcccaaagctcctctgcccaccctggctcccagagccctccaaaacaaaag

SEQ ID NO: 377071 - DNA, 122 bp, Homo sapiens
tctgttctgtgagctcttgtgtgtgtgtgttggtggggggagcgggggggtggggaggtgcgggcacgatgtcccaggaggacagagtttgcattgatgaaaacccttcccagccctttgat

SEQ ID NO: 377072 - DNA, 122 bp, Homo sapiens
cgggaagcggagccaggtccagaggcggggctcaggcgggactgagttgatctatgggggcggagccaggtcaggaggcgggactccaaagggactgagggctgtgggggcggggcccggtc

SEQ ID NO: 377073 - DNA, 122 bp, Homo sapiens
cggacagccagcaggatccggagaggccctggagcgcctgcaaaccccgtgggacccaggcgtccaggcaccgcgcccaggagagccagctctgagcatccccggggggccactccttctgc

SEQ ID NO: 377074 - DNA, 122 bp, Homo sapiens
aggacaaatgggtgcagagattcaggctggccaaggctggcacaaggacattcccagtggcgagagcatgagcaagggtcacggatgtgccaggaggggaggcggagagatgcctgggacca

SEQ ID NO: 377075 - DNA, 122 bp, Homo sapiens
aaagttttcttctatcttctccagcaactttattctaggagccccctaggttttagggctcgacttgttttttctgtctttgatttgtgtacccttgaatacattattatttccctttgcct

SEQ ID NO: 377076 - DNA, 122 bp, Homo sapiens
cccgcggccaccatggccggacgggctccctaagccaccgaccccagcccgcggcgccttcgagccttctcaacagcagttctttctgctgaacagcatcttgtagtctgcagtccttttca

SEQ ID NO: 377077 - DNA, 122 bp, Homo sapiens
ccaaaaaagattttttaaaaaagaaagaaagaaagaaaccagagttttttttcagtcacccgaacagggttatgaaattgttcttctggacatcagcaccgggaattcatttttgaggtcaa

SEQ ID NO: 377078 - DNA, 122 bp, Homo sapiens
aatagctggcgctcttccactaataaagttttattgaaataaagcatttaaaaaggcgcccgtcattcttcccccagcgaccaatcgaagagtagaatgcctgcgtccctcactggagcttc

SEQ ID NO: 377079 - DNA, 122 bp, Homo sapiens
catggccccgcgccggctcctgggtcccgctccggatcccgctccgagtcccagatcccgcgccggctcccgctctggatcccgccccggcctcggcctcggcccagcacccggccgacccc

SEQ ID NO: 377080 - DNA, 122 bp, Homo sapiens
gctggcggagaggccctgcactggtgcgctcacacagccctgtgtttttgtgttttaggtcggtaggctccacgacaaaagtcaacccttctgtaaatcacctgctgtggttatgatgctct

SEQ ID NO: 377081 - DNA, 122 bp, Homo sapiens
tccagagacctatgtcttcttaaaacagtgaggcccttttcttgcttactgcccacctgtcgcttaggggccagggcatggccaggaggagggcaggggaaacaggagtgagtggacgtgat

SEQ ID NO: 377082 - DNA, 122 bp, Homo sapiens
agcatgcgtgaaaggtgctgtgaccgccctccgggttgtggctggtggccttcggtgtttcgggtttggcagttcactcaccaaggtgatctgatggagtgcacttcgcacgattccaagta

SEQ ID NO: 377083 - DNA, 122 bp, Homo sapiens
gcagcgaggcaggaggaagaagggggcactggggggctgaaaagcaaacccagaagaaagcgaaaacattacctgctgaccagcagaggtgagagagcgagacaggtaagcgacaggtgaac

SEQ ID NO: 377084 - DNA, 122 bp, Homo sapiens
aactagacgtggatgaatgtaggaccagcatcaccctctgctcgcaccattgttttaatacggcaggcagcttcacctgcggctgcccccatgacctagtgctaggcgtggacgggcgcacc

SEQ ID NO: 377085 - DNA, 122 bp, Homo sapiens
gactcaggctagcggcccggattaagaacagcggggctacgagtcgggacactgccgggccggggctcacaacaaggaagtcactgaatctccagcgagctgcagctggactgtcggcccag

SEQ ID NO: 377086 - DNA, 122 bp, Homo sapiens
tgtttcctcagatgtggaactaagaagtggcagtagttgagaagttcattttgggccatgcgatttgaggtgtggctattcaagtataggaggtaggtggttacacattttttaagctatta

SEQ ID NO: 377087 - DNA, 122 bp, Homo sapiens
aatctcttttcaagccagtgctattattctgctcatgctaaaccagggcagaggccacctcggcagcccaagcttgactacagataaaggcagagccaggcaacttgaagaggaagttctgc

SEQ ID NO: 377088 - DNA, 122 bp, Homo sapiens
tccacggcgttcctctaaactaccgcattcccccaagaagggatttctctagaagagtggcgccgcgaggacgatcgaacacagtcctccgggtcgcttaagcgggggggaggggggcgggg

SEQ ID NO: 377089 - DNA, 122 bp, Homo sapiens
tataaaaacaagggttgttttgtcccctgtcggagtgaaacctcagagaccaaagttcaacgctttcaggttacgggaatggaaatggtgaattccctgtatcagctgcctccagcccaggc

SEQ ID NO: 377090 - DNA, 122 bp, Homo sapiens
gggacagaaggacagccggagtgcagagtcagcggttgagggattggggctatgccagcccgattagaagggttgggggggctgagctggattcacctgtccttgtctctgattggctcttg

SEQ ID NO: 377091 - DNA, 122 bp, Homo sapiens
gggcggccgcggagggaggcggtgtgcggagtcgcactgggacccgcggacggactgaaacgccgacggcggcccgggccccgcgcgctgaagatgaacagagcaggtaggaggcccggcga

SEQ ID NO: 377092 - DNA, 122 bp, Homo sapiens
cgtgccctgagtcccagtgacggccccctggacagcggagcctgctgcagcgacgcgacgcgctgggtacacaaacataaacattgcgccacccgcccgggtgccgagtcaggaacattctg

SEQ ID NO: 377093 - DNA, 122 bp, Homo sapiens
tctctttactgtctatctctctctgcctgaatgtcactgttttgtttgctgctgcattcccgatgcctagaagaatgtctggcacatgcaggctttcaataaatatttgttgagtgggtgaa

SEQ ID NO: 377094 - DNA, 122 bp, Homo sapiens
gaccatctcttgtgcaagatttcccaaatctaaaacatggctcagatcacggttcagcagcgaaccaaggcaggctgatgcaaagacagcactgaagaggcattttgactgcaagtgccacc

SEQ ID NO: 377095 - DNA, 122 bp, Homo sapiens
gacttttgcctgcaaaatctcatagaatgtggtgttgtgtacgtgaatccatcagatcaacgcgacggacactccccaagggccaaatcggaccgcctctcactaggcggaaagttttgaaa

SEQ ID NO: 377096 - DNA, 122 bp, Homo sapiens
cgggcgtagtactcatcggggctcagggcgccccagaagttggaccacagcttgccgtggcgggacagcatgggggcgatcaccttcctgcggacaggtgggggtgagggctgggcagacgg

SEQ ID NO: 377097 - DNA, 122 bp, Homo sapiens
taaggaaggggtctgggggcagggccaggcgactggaggcggggctagggcgtggaagggcggggccggctgcgggacgggcgttctctggtcagacttctgcgttatggaagaggggctgg

SEQ ID NO: 377098 - DNA, 122 bp, Homo sapiens
cccgaggccggcgggcccccgcctccctcctcctcctcgccgcggcccacgtgaggggggcgagtcacgcgatttccgggaacccgtcaggaaggacataaacaaaacaaacccgaggcagc

SEQ ID NO: 377099 - DNA, 122 bp, Homo sapiens
cagggggagagagtggcgacagaggcggcggctgaggtgcagagcctccctaacggcgagcgggaggagagcggctggcgggcggaggccgggccggacgtgacgtgcgtgggagggggcgg

SEQ ID NO: 377100 - DNA, 122 bp, Homo sapiens
ctcacttagtggagtttggagcctgtgtctgtcctcctagtgtgttggggtcgaccagagcgattggcagggaccgtcagagacagaggtttaagcaggaagagagacactttcttctgaaa

SEQ ID NO: 377101 - DNA, 122 bp, Homo sapiens
gtctagaggacgtctcaaagccatcgcatttggtaccgtctgcactacaggtgcaaagggcggggaaactgacagcgttactgtcctggggcggacccgcgggactactccctaagacgttt

SEQ ID NO: 377102 - DNA, 122 bp, Homo sapiens
ttcccagctcatcttgttctgagtcaccctagatttgggacattcattcgccaccagtaccgggcggtgtatggcctgagatttgggggggcttgtgctgctacaaattggggctgaatttg

SEQ ID NO: 377103 - DNA, 122 bp, Homo sapiens
ataaattccacttttttagccctgactagttccaaggtttaaaacaaacctcagtgactacgaatctattgtcagaattttcgggtaaaagagagcagatagtctttatttatttttattag

SEQ ID NO: 377104 - DNA, 122 bp, Homo sapiens
cctgagcgggggaccgagtggggacagagagggtcctgggaggacgagaggcctgaagaacgaggagttagctcaatgtggagaaagcgccagggacagggaaatgcaatcagtgccgggga

SEQ ID NO: 377105 - DNA, 122 bp, Homo sapiens
cctctcctggcctgctgtgcgctctgccaaagtcttcgctcgaccccgcacatcttgctccgttccctagtccagatcccagctggaggggccagctgcagccacccctaagaatgaggaaa

SEQ ID NO: 377106 - DNA, 122 bp, Homo sapiens
ccccagacgcccgctaggggcgcgcgcgagccaggggagccacgagggccctgcggggagcgagcccggcagccccgcccaggacgccatgagttctcctgctcttactcccctcccttttt

SEQ ID NO: 377107 - DNA, 122 bp, Homo sapiens
aaatcatttttaggagtcactcaataaacagatcagcagtggctgggatgcctctctgatcgatgtgagaggcctagagggaagctgggagacagggcagctgtcttccatatcagctagag

SEQ ID NO: 377108 - DNA, 122 bp, Homo sapiens
aacttgccctgctttgcccagacccagcgcttggtggactggtaaaagtagtgatggcagcgacttggacccctggattgacaatgccttgttccatcctcgggtttctgcttcctgactgg

SEQ ID NO: 377109 - DNA, 122 bp, Homo sapiens
gcttctgctgccctctaattctgaaatatatttgctttctccggtagggggcatgaggagcgctgaggacagttgggacaatgtcctgcaaggcaggcgagagtgcagtgaatgtcagaaca

SEQ ID NO: 377110 - DNA, 122 bp, Homo sapiens
ctcaggaggcttcaggcagatgtctggggtaacggccatgtaaagacttgaactggtcggcggctccgctccgcactgccgggcgccgcctcgccatggacgcgcgcgggggcggcgggcgg

SEQ ID NO: 377111 - DNA, 122 bp, Homo sapiens
ctgattctttgagagagggactcactttttttggaggtgaagaaactactatctcaacagcggtcacggccaaaggatactacaggaaccaaggagaaggcctgaggccagttgggaaccat

SEQ ID NO: 377112 - DNA, 122 bp, Homo sapiens
gaagccagttctgctattccattctcagtaatattcttacatctccacagatccagggtccggagttttttacacttggctcctatcatgctagctatcacatcatagtcttcaatctggaa

SEQ ID NO: 377113 - DNA, 122 bp, Homo sapiens
aggcagccgcccccaccagcacccactctgtagacccaggcgtctggctcccagcacccacggaaagagcctggctaggaaactgcagcctggtgcctggcagacagttctcattctcccca

SEQ ID NO: 377114 - DNA, 122 bp, Homo sapiens
ggactggaatccgagaaaggaagcgctcgatgggacggcctgagtgccggaggggactcacgctgctgctgctccagcgccagcttgcacttgtagtaactgtagaattcgcctccgaaaag

SEQ ID NO: 377115 - DNA, 122 bp, Homo sapiens
ccttctccttgtacccagttacagaattaaactctcttctttcctagttcatctgcatctcgttactgggccgtgagaataagcagcctgaccctcggtttggtctgggaacatgcctagtc

SEQ ID NO: 377116 - DNA, 122 bp, Homo sapiens
tggaatattcccgacctggcagcctcatcgagctcggtgattggctcagaagggaaaaggcgggtctccgtgacgacttataaaagcccaggggcaagcggtccggataacggctagcctga

SEQ ID NO: 377117 - DNA, 122 bp, Homo sapiens
tcctcccaccccgccgctctgggccagcaaaggtcgtcagtgacagggatcagttgtgggcggcgagtggtccctctgcacacggtatctgggccgagtctggattcattagagtccccggc

SEQ ID NO: 377118 - DNA, 122 bp, Homo sapiens
gagtggtttcgtttcctttttcactgggtttggagaggaaactggcataggtgagagccgcggtgctgcaggtcttgccagaccatccccaagggcttggagcgctccaagcaggaagatgc

SEQ ID NO: 377119 - DNA, 122 bp, Homo sapiens
gccgcatctccacgccgcttaattcgtccgttgcccaaatgacccctccgcgctccagagcggagatcgcggccgtacattttagaagagtgccatcaataccctcagagttgagctggggt

SEQ ID NO: 377120 - DNA, 122 bp, Homo sapiens
gaaggagtgtggcccaagttctcccaggagtcctggacgtgcaagtgcatgggagaaaaacgcagcagtcaccacagctccagggcagtggccgggtagcccacacttctcctgtccctgca

SEQ ID NO: 377121 - DNA, 122 bp, Homo sapiens
aagcccacaggcctggtctctccaatccccatcaggggaggccccagctcccacgacgcccgcctcggcagccataggcctgaggaccccagcaacccccggacaagggccgcgaccccgag

SEQ ID NO: 377122 - DNA, 122 bp, Homo sapiens
tcttggcccagcaggccagtgggcagggccgcgggaaggacgggcgctgcaggggctccgcgcgctcaaggtgctcgcgggctcccgggcccagccgggctgaggtggcgtgggcgccctgc

SEQ ID NO: 377123 - DNA, 122 bp, Homo sapiens
ttctggtcggcccagaactgtttgtgcctcctccctcatgaggaatgatgtcagtggggccgcggtcgccgcccacgaagagtgtaaggctgcgaagtcggggctttcccgacgccccctcc

SEQ ID NO: 377124 - DNA, 122 bp, Homo sapiens
gaccttttaagattctaaatccccccacctctgagcctgttcttcattggaaatgcaagacgaccggatgacatgagggaggggcagctcttaaggcttgacctaatttccagtgctgctca

SEQ ID NO: 377125 - DNA, 122 bp, Homo sapiens
ggggcagggagggaactgttaacaatagccttttcagcaaatgattctgggtcaagtcgacgtccacatgcaaatggacaaagatggacccctactttatgccatattcaaaaattaacttg

SEQ ID NO: 377126 - DNA, 122 bp, Homo sapiens
tgaggacggctcggctcccagggcagcaggaaggagcggacgccgcagccgtccggaactcggacagaggatgttgacagggagggaggacaagcaaatgaagacttcctgcagcagagaca

SEQ ID NO: 377127 - DNA, 122 bp, Homo sapiens
tgccatcattgcttctcggatcatcgtaaaatttctccaaactacagttgccattatagtcggtggcgaggggcttcccatctcctgtggtactgtctggataatgaatccccgcttcagga

SEQ ID NO: 377128 - DNA, 122 bp, Homo sapiens
gtgcagacaccaccgccagtatcctgtaaaccaggagagcgccgggagatcccagctcaccgtcagaggcactggaagcaaggaagcctggctggaaggtcctggcaagctatggccagaca

SEQ ID NO: 377129 - DNA, 122 bp, Homo sapiens
ctctggaagcccacatccaggcccacccttgagattgtatcttctcggaggatgtttccccgttagtcctcactgtatgttgtgcctcacctggaagatggggtggagttgctgagctgctg

SEQ ID NO: 377130 - DNA, 122 bp, Homo sapiens
gtatttttagtttttagcacttcatatatcacttattccaaatcaattgaaatcagaggccgggcgcagtggctcacacctgtaatcccagcactttgggaggctgaggcgggtggatcact

SEQ ID NO: 377131 - DNA, 122 bp, Homo sapiens
ttggcggccgcgcgtgcaggggttgggctgacggggggtgtcggcctccagtgggctgaccgcgtcaccccgtcaggccctgcccaaacctcccagtggtcgtcaccccgccagacctccca

SEQ ID NO: 377132 - DNA, 122 bp, Homo sapiens
caggccatcgctgtacatatttagaaagtacctatcactcagacactttgaaaagcgtggcgttccagcgcaaaccaacccgaacgggttggaagggggcagtcctttcttcccgcaagttc

SEQ ID NO: 377133 - DNA, 122 bp, Homo sapiens
ctgaccagaaagagccgacagggggcgttcctggatgatctggggctgtcaattgcgagacgcggaggattgtgggacttgtggtttttctcgcatcatttaagctttctggactacatgtc

SEQ ID NO: 377134 - DNA, 122 bp, Homo sapiens
cctaatccccagttacactggctttctgggagattccagaatgtcaggtgcccattcccccgatgggcctttgcaccgacccatccctgaacctggaccatgtgtctccctgctcttcaacg

SEQ ID NO: 377135 - DNA, 122 bp, Homo sapiens
gcgggggcaaggaagaaattaagccaatgtagcgcggaagctcggcaggggggcgggacccggctggcactcaggaggttggtgaaataggggcgtggtctccctcgggggcgtggcgatcc

SEQ ID NO: 377136 - DNA, 122 bp, Homo sapiens
cagcctctcctcttccaaggtttacttacgcaagcttagctgcaattttccacagatactcgtcctggttccgggccaccttccccagtaagagacctcctgaggcgggagctgggggttga

SEQ ID NO: 377137 - DNA, 122 bp, Homo sapiens
aggttcggctgcagtcccgggcggaggttgccgggcggggcggcagggtacccgggcgagcggacatgcaccccacccagcggtgcccagcccgcaccagttagcgcccaactcgccaactc

SEQ ID NO: 377138 - DNA, 122 bp, Homo sapiens
tcatatcagaataattccaccactgtttatgttcacctttacacaatacattgccaaaaacgacttcagagccctggatctatttaataatgaagatttattttaagggtggtatcctgcct

SEQ ID NO: 377139 - DNA, 122 bp, Homo sapiens
cctgtcaaacgaagggaggctcctccaggggcccctcgcatttagacattccagaagcctcgtcacccgcggccggggctgcccccaagtgaggtgacgcggcagccccccactcacccctc

SEQ ID NO: 377140 - DNA, 122 bp, Homo sapiens
ccgcccgcaggcttgcggggaaacttccttattattgtgacgccgaaaacggagaaaccccgggtccggcgagaggggctgtgacagtcggagtcccaagctgcggttcggctgctgccgag

SEQ ID NO: 377141 - DNA, 122 bp, Homo sapiens
tgctggaggaggtgggagcggttgctgaagcgcttgccgcagtcgtggcaggggtaaggccgctctccggtgtgcgtgcgctggtgctgcgtcaggtgcgacacctgggtgaaggccttggc

SEQ ID NO: 377142 - DNA, 122 bp, Homo sapiens
ttctgccgtccacgcccattctgaccgccaggcggcgccttggtgcctggtgccagaggccgcaggaccagcagtggccaaggccggcgcttacagtcccagggatcagaggggacggtaga

SEQ ID NO: 377143 - DNA, 122 bp, Homo sapiens
tttgaataaaataccagaaactattcagaaccaccaatgacatcagatgtactggctgcccggctcccttctgcacttgccccttaataaattcctttaatcctcgaaacgatcccgcagag

SEQ ID NO: 377144 - DNA, 122 bp, Homo sapiens
ccaagttatccggaggaatctgtgtcgccgctggatagtggcatttaatgcctgcagtgtcgggggtggcagcgctcgggccggacgtggcgaggccaagcgggcagcgctgctctggtgcc

SEQ ID NO: 377145 - DNA, 122 bp, Homo sapiens
tgccacagccctgcctctgaacttctgcctaccctaccaagagaaaatgttttcactggccgggcacggtggctcaagcctgtaatcccagcactttgggaggctgaggccggtggatcatg

SEQ ID NO: 377146 - DNA, 122 bp, Homo sapiens
ccaaatcccaggagaagaggggcggacgggaagcgacagtggccgcgagtccccggcacgcgacgggctctcaacctggcacgccgaatcctcaggacagccccgctatcacgcaactactc

SEQ ID NO: 377147 - DNA, 122 bp, Homo sapiens
agaagccaggagagggctggggtgataatggggaggaggataaaaaacagccacccaatgcgtgccttccctgtgccaggcccttgtcctgaaatgttatctcactccatcctcccaacagt

SEQ ID NO: 377148 - DNA, 122 bp, Homo sapiens
ctatcgccgggaggaaggggtgtgtgtggcgcctgcgcagtggcggtgaccaccggctcgcggcgcgtggaggctgctcccagccgcgcgcgagtcagactcgggtgggggtcccggcggcg

SEQ ID NO: 377149 - DNA, 122 bp, Homo sapiens
aaagggagaggcgagctctccctaagggagggccctgcgccctccagcctcggcgcccggcgatgcgggtcagctcagggatgtcctctccgtgctgggctgaagcaaagcccagcacccaa

SEQ ID NO: 377150 - DNA, 122 bp, Homo sapiens
acccggatcacatgatgcgctaaatgtagggtgggccggtgggtggaggctgccgagttgcgagccccggtctagtgtggggagcctcgccaggcccgcatcgaattaccccggggcccagc

SEQ ID NO: 377151 - DNA, 122 bp, Homo sapiens
ggcacattccagctgagagccggtgagagtcgcgcgttccagggttgggatgctaggccccggtggcgtgcgtttgtgagtgggatcttccaatccgtaagttacacagttccgtggaaaaa

SEQ ID NO: 377152 - DNA, 122 bp, Homo sapiens
tgagttccttgaggacagagtactctgatggaggaagggcacagagggaaaagagagggccgtccactctggacatgatcagtgtgtgtggaggttgccccacctcgcacccacccactgca

SEQ ID NO: 377153 - DNA, 122 bp, Homo sapiens
cacagggacccggtcactctttctgccacaaagatgccgatgcttggacatctccagtttcgaggaactcacgtaggagacacgccttcacttccacctttgccaaaccccgaccccttcac

SEQ ID NO: 377154 - DNA, 122 bp, Homo sapiens
ataacttacaaaagctctagaagacacaaactgaaacaccacaaaagtaatatctatgaccgtttaccaagctttaagaagtaagtaaaacccttgccttcatattttcttcagaaccagga

SEQ ID NO: 377155 - DNA, 122 bp, Homo sapiens
ggcactggtgccttaaagaatgttaggttaggttaaagatctcccgtctccaaattgaaccggaagggcatcctggccatccacttagcgatgtgaacttttgtctaagtgtttcagaactg

SEQ ID NO: 377156 - DNA, 122 bp, Homo sapiens
ctgcctggcattaacaccatggaatctagactcacatggcctttcccttgcatattccaccggccgggagaggatctcccagatctggggcaatggggcttctcactgtccaaaacgctcaa

SEQ ID NO: 377157 - DNA, 122 bp, Homo sapiens
taaagaccaggagcctggaattttttactttccgcaggtagagactgtaaagcacattgacggcagactcctataaactaagaaacttgtaaactggtacctggaaggcaattaggcagaag

SEQ ID NO: 377158 - DNA, 122 bp, Homo sapiens
taaacttcagtaacagttaaaccttctttaattatggattagccattaacatttttgaaacgtggaccatttaacctcggcctaccccctccaactgtcctggtgatgagttcattagctaa

SEQ ID NO: 377159 - DNA, 122 bp, Homo sapiens
gggtgaaggatgacacccagcggctgtctgggctactggacggatggtgatgctcttgcccgagggcaggtgcctcagagtgagtaaggaaatcaagacttcagtcacaggcatgttacgtt

SEQ ID NO: 377160 - DNA, 122 bp, Homo sapiens
ataaaaggtgaaatttaaaggcataaatccaagacaagaacaaacaatgcctgcaatcttcgcagactgccctgtgaaggctcagagtgagtcaagagtggaaaaagtagatttctcatcaa

SEQ ID NO: 377161 - DNA, 122 bp, Homo sapiens
ccactgcactttagcctgtaagagaattagacctcatctctagaaaaagaaaaaagaaatcgctgagtcagagaaaatttgtatttttaattttgattttgtcaaactgccccccacagagg

SEQ ID NO: 377162 - DNA, 122 bp, Homo sapiens
cacccacacatgcacatggctggacacaggcacatactaaatatgcaccagcacccatatcgtcacacacttgcatctctggcagccagggttctattctcctgccaacagcagagatggga

SEQ ID NO: 377163 - DNA, 122 bp, Homo sapiens
cagcggcaactacgtggggaactcggacttggagctggagcagatcagcatctactacaacgaggcctcttctcataagtatgtgcctcgggccattcgtcgacctggagcccgggaccatg

SEQ ID NO: 377164 - DNA, 122 bp, Homo sapiens
taatctcagcactttgggaagccgaggcgggcagctctcttcaggtcaggatttcaagaccggcctggccaacatggtgaaaccctgtcttcactaaaaatacagaaattagccaggtatgg

SEQ ID NO: 377165 - DNA, 122 bp, Homo sapiens
agggggggcgcttaaggtggagctgggagtggcttcggaagtctccatgctgggggccgccggccttggcggatgcagggtccccctgctcgctgggacccaggttggagccgccccagcgc

SEQ ID NO: 377166 - DNA, 122 bp, Homo sapiens
gaaaaacaaaatgaaggacaactgaaagtactgtggaaacaattggagaggaagaaacgacgtagtgagagaacgacatctagtggatgcaggtggtagtgctgctgaccagagagatctgt

SEQ ID NO: 377167 - DNA, 122 bp, Homo sapiens
ttgggggtgggggccaggccgcgctgcacgctttgggactagtgtccaggtggccgctggcgcagagacctcagcacgggaggcctgagcctgcttccctctgaaacggaaggcgtagctcg

SEQ ID NO: 377168 - DNA, 122 bp, Homo sapiens
aaggggtgacagacggcacctggaaaatcgggtcactcccacccgaatactgcgcttttccgacgggcttaaaaaacagcgcaccatgtgattatatcccgcacctggctcggagggtccta

SEQ ID NO: 377169 - DNA, 122 bp, Homo sapiens
cctgtgagtctcccgggcgggcgggcggtgggggtgcgaggccggggggtgggtgcgaggcgtgggggaggtgcgaggcgggcggggcggggggcgcgaggcgggagggcgcacgcgcagaa

SEQ ID NO: 377170 - DNA, 122 bp, Homo sapiens
agaggtcagagccgcattccagacctgcttttcccacggggccacgcgtgctcttctgaacggaagtcgttgtgtctggtgtcacagttggtctgtgggtgtctgccctccctggcctagca

SEQ ID NO: 377171 - DNA, 122 bp, Homo sapiens
cgccacactcctcctccggcatgagcgaggtgcactcccccggcgagcactcgggtgagtcgcccctcgaccccaccggacaagctatctccgtcccgcctggcacaccccctgccctccgc

SEQ ID NO: 377172 - DNA, 122 bp, Homo sapiens
acgggcagaggagtctggaacaggacggtttgtgcgctgcctgcgagcaccgtgcttccacgactagatgcctctgtggtgaaagccaaaaggagtattttactgcacacaaattctcagaa

SEQ ID NO: 377173 - DNA, 122 bp, Homo sapiens
tactgttctcttcatctaaatcgcaggacattattctcggcttcatttccacatagcattcggcagtggacaaggagtaggcggacccgaacctgaacctgacagctgatgccgtgaagtgg

SEQ ID NO: 377174 - DNA, 122 bp, Homo sapiens
cattctctctctccttttagctgcaaagttttgtcgggcagcttctttgctgtgcccagtcgtgggggtggggaaggaacagctcagtgtctgtgcaccctgggaactcagagctgggatgg

SEQ ID NO: 377175 - DNA, 122 bp, Homo sapiens
gcagagggcggggctatcggggatcgcagttccgacctggccagccatgccgttctctgtcgacccctgcaggccaccaggagaataacaacttctgctccgtcaacatcaacattggccca

SEQ ID NO: 377176 - DNA, 122 bp, Homo sapiens
ctcgcgctccgccgcccgggagatgcttcctcgcgcggcgcagcgctgaggccgtgcgtgcgccccggctgcgctgcgcgctccccacatacacaagctctccatgtgagctgacaggcgag

SEQ ID NO: 377177 - DNA, 122 bp, Homo sapiens
ggtaaacaacgtataaggtgctttttctcaggccaaagagccataatagtttaaatttcccggtcctcaagagcggaccgggtgggcaggagaggaccctggggtggtgatgtgtaaactgt

SEQ ID NO: 377178 - DNA, 122 bp, Homo sapiens
gaaagaagcacgatgcagttcttaatggaaagcatctcctaacaggcacccacgtgcacgcgatacacccataggcacacatatgacatgcacacacacataggcacacacatgaagtgcgc

SEQ ID NO: 377179 - DNA, 122 bp, Homo sapiens
attctgtcactggtcagttgtcatttctcagtgacaaatgagaccacatgcactaaagcccgtagcccaatacttagcactcactagatgctcaatagatgttagttcctgtcactttgtct

SEQ ID NO: 377180 - DNA, 122 bp, Homo sapiens
ctgccttcggagcgcacaaagcagagctgcagggctcagatgaggacgagcacgtgcgagcgcctaccggccaccaccaggctggtcactgcctcatgtgggcctgcaaagcctgcaagagg

SEQ ID NO: 377181 - DNA, 122 bp, Homo sapiens
cagccccagacaagggcacagaaacagccaggccacaccaactacagcagctattccaagcggaagcgcctcactcggggccgggccaagaacaccacctcttcaccctgtaaggggcgtgc

SEQ ID NO: 377182 - DNA, 122 bp, Homo sapiens
agaagaaaggacaaagagagaccggggagagggtctgctgcgtcaagctggctttgaggccgagcaaggagccaatgaccttgggtggaccttggccacaccttggctgttgaccccggccc

SEQ ID NO: 377183 - DNA, 122 bp, Homo sapiens
gacagaaatgagaggggaggggatagaggattcctgaacagagaccgcacccatgacccacgtgaccctgggaaatgcttctatccctgagaggaggctcagcacagaaggaggaaggacag

SEQ ID NO: 377184 - DNA, 122 bp, Homo sapiens
gaaatacaaattaaaaccactatgaagtatcattacacaccaactaaaatggctaaaatacgaacaataggaaatttaataaggatggagaagtgagtcctcatacaatgctggtgcaaatg

SEQ ID NO: 377185 - DNA, 122 bp, Homo sapiens
atgtcacgttggtgcatgtggctttgaactggagccgttcgcgtttcctgcagagagcgccgcaaatcccacttgataacttctacaacccacaacttttttttttctcacattcactctta

SEQ ID NO: 377186 - DNA, 122 bp, Homo sapiens
aattttctgcccatgtgtttttcatttggcaacaggttcgccggtcacgtcaggttactacggtgtcagaagatctttcttatctgactcagacttccacaacagtaaacagttttcaaatg

SEQ ID NO: 377187 - DNA, 122 bp, Homo sapiens
ttggtccaaattcacaagtgttcatctgacaggccatattggagagtaaaggtaattgtgcgtgggccttctgaatgcatggacgtggaatttagctacaggatgaatgttctcctgcttcc

SEQ ID NO: 377188 - DNA, 122 bp, Homo sapiens
ctgaaaatttctccttccagcctgtcattgaaatccattcgatctgcgcctgtgcgttatcggggttctcattcaaattcctttgctgcagaataagcacgaccatttcaggtgacatagga

SEQ ID NO: 377189 - DNA, 122 bp, Homo sapiens
cgcgccaacaacttctcccgcgaagtgcaagaaggcgaagacagtggcgcgcggtgatgacgtcaggaggcgcgagctttgcttccgtcccgcccagaggcgggaggtgcgacgcctgccca

SEQ ID NO: 377190 - DNA, 122 bp, Homo sapiens
cgcgctcgtgcccgggctccgggggcgcgcccgcgctcgggcacccacccaactggcacgcgcgggagctggacgtcatcccctcgttaacattcatagccttcctccgagcacgtgggctt

SEQ ID NO: 377191 - DNA, 122 bp, Homo sapiens
gccggtagacgcgcagaaattccacctgtgcgcgctgcccggcgcccctggggcccctcacggggtaagtagagactcatctgggagaggtgaaaattccccagaattattgacacacacgg

SEQ ID NO: 377192 - DNA, 122 bp, Homo sapiens
cgcgagctttaccgccttgtttgccgcgaccagacataactacttctgataagggaaaatcgccacaagaaaatgtaatgaaactacattagaacgcaaggcagagaagtatttatactgac

SEQ ID NO: 377193 - DNA, 122 bp, Homo sapiens
gggagtaactccactgtgacgttaaaattggggcggtgcgagtaagtcgtttcctgctgtcgtcgtgagatttaaagacacctcgcgagacctcacctaaatcagtcacggggtctgccttg

SEQ ID NO: 377194 - DNA, 122 bp, Homo sapiens
attagtgaaagaaggggcgggattcagacctaccccacacatctggtggcctcagcgcctcgcacgtcacatttgtcagtgtgcactctgagtgcggcctcccctccctagtcactaactca

SEQ ID NO: 377195 - DNA, 122 bp, Homo sapiens
ctagaggtgattttctttctaatgctagaccttcctttgattcttttaattacaatgagacggaaattttaggacactaagggagacagattattcaaaggcttttgcatgccctttattct

SEQ ID NO: 377196 - DNA, 122 bp, Homo sapiens
ccatctcagctcttcactgtctgtcttcttgtcctcctgtggccaacctcagaagccctgcgtttggggaggggattgttaatgccttggttatacttttggaagaatagatggactcctgg

SEQ ID NO: 377197 - DNA, 122 bp, Homo sapiens
aactttcctaaggataaatgtgtgagtcttctaactcacacatttatcaatgaacaaaaccggattcacaagtacactggagactttacattttgggcaaggatattaagctaacgggagtg

SEQ ID NO: 377198 - DNA, 122 bp, Homo sapiens
ccgtcctcacacatcgaatgtgacggtattgagataaatgctaacaattagggacccccccggtgaagagtacacagcaggaaggaagctctttgtaccccttttgcaacttttcagtaaat

SEQ ID NO: 377199 - DNA, 122 bp, Homo sapiens
aagtgctttggaggtgcagaaggagaggttaggcttacgcctagacttcgggggagggggcgcaacatttgaggagggaaaaaactgggaatttttagtttttgccattgcttagaacatat

SEQ ID NO: 377200 - DNA, 122 bp, Homo sapiens
gcatcagtgtaaaagagtttgaaactccttattgacaaaacacggcccactgtgtatcctcgagattagtctagcccatgaattcaatgttaagttcatgaaactcatatcccttgcaaatt

SEQ ID NO: 377201 - DNA, 122 bp, Homo sapiens
taatgaagtccacggtgggggtcacatattccccgcacctgagggtttccgccgcgcttccgggtgttcaatgccgtttctgtttccccacagacccgcagtactcatggtcgcccacgcag

SEQ ID NO: 377202 - DNA, 122 bp, Homo sapiens
agctgtcccacccagcatggccatgcagccttgcgaaggcaagggcacaggctcctgtcacgcctgacagctgtggctggtgtggggtggggaaggccaggcaggacaggagggcagcagca

SEQ ID NO: 377203 - DNA, 122 bp, Homo sapiens
gctgcgctaaggggtcactggcggggtcttttctcacggtgaacctgtctggagggtggacggggcaggtgggagggcccgtgtcagggagcgtccaatgccctcgcgccatgcaaatggca

SEQ ID NO: 377204 - DNA, 122 bp, Homo sapiens
gctctgccacccacatccctcacctattgccctggaaggccccctgaggccaaggccatacgtccataagcctgccaacatccaaggagatgcctgctgagaccactagactccagagctgg

SEQ ID NO: 377205 - DNA, 122 bp, Homo sapiens
cgagtgatcccaacagtgttcctacagctgagcctctcacggcagcctctaaacacccagcgtctggtgcgtgtccctgtttccggcgtcccgtgtccacatttccggtgcccggtgtccac

SEQ ID NO: 377206 - DNA, 122 bp, Homo sapiens
ttgggagtgaaagccccagaaggcagcatgtagtgaaacagtaaagggattctgggaatacgggcgtgcacaaaacactgacagcatctgctgcctttttaactggattcttactacttccc

SEQ ID NO: 377207 - DNA, 122 bp, Homo sapiens
cccctctctggctcttcagtcactctgctcttctgcaaatggcagtgtccactgtgggtgcgggtgccaggctgggctccttccctcatttgaagctgcatattcctactcgaggctctgga

SEQ ID NO: 377208 - DNA, 122 bp, Homo sapiens
cgataaataaagtgggctcaagaggcccaaccaacctcttcccaaccgagcctcaagtaacgcttcccttagagacctagattctcacaaggaagcaggtgatagacggtgcatcccaacca

SEQ ID NO: 377209 - DNA, 122 bp, Homo sapiens
tgcagctccacacacgcctgggggagacgacgtgatcccactcgccccactccagcacttcgtgcatgtggaccgtgtgtatgtgtgagtgcatatactacgtgtaatgtgcatgtgtgtga

SEQ ID NO: 377210 - DNA, 122 bp, Homo sapiens
tccaggggccgcggcgcagggggagggcggggctgtgccccccggaggccctgcccgccccgccccgccccgccccgccccaagacccgggttccccctggaggccgccaccgcccgtccct

SEQ ID NO: 377211 - DNA, 122 bp, Homo sapiens
ggtttgtatacagcagtgaagtgctagtttgcgtctgttatcatctcaacatgttaaggtcgtgttcttacctttgaataagcattttgatagttgtaagggcctttccgttttcttattgt

SEQ ID NO: 377212 - DNA, 122 bp, Homo sapiens
gaagtcagaccgtttctctgggctgctcctatcacaaaatccgaatttgcttggaacaagcgccctcttaatttgcccctctcagttctctgcagttgacagcttggaaaaggaagcgaaac

SEQ ID NO: 377213 - DNA, 122 bp, Homo sapiens
ctgtgaaattctatgggatttgacaaatgcatggtggcagatctccagcgattattaaagcgtaacacagaatgcttctcttattcaagctcgtcttccctccacatagagggaatcaatcg

SEQ ID NO: 377214 - DNA, 122 bp, Homo sapiens
gatgcggcccaaatcagtccttaaaaacacacagagagcgcctctggcagcagccgcccacgcccccggccctgcgcaccgggcttgctccgggaggggcgcgtgacgccaccgcggggcag

SEQ ID NO: 377215 - DNA, 122 bp, Homo sapiens
atttatttatttttttcaaatcctttccaccttcctgtggctggatccgcacatgcagaacgcattgttagagaaggccaactgcatgtagcaggtcctcaaagaagaatgaataagtgagt

SEQ ID NO: 377216 - DNA, 122 bp, Homo sapiens
tgaacagacagctggataagccaggccaacctcctgtgacacagcatctctcagtggtgccgcatctaaaggacaggcttttgccatgtgggcattgccatcctcacaccctgccttttgaa

SEQ ID NO: 377217 - DNA, 122 bp, Homo sapiens
cgcccccgcgctcggggcctgggctgccgccgtgtgtcccactcaggtagttctggatggcggaggcgcagtctagccgctccatgacggtcatgaggtagtgcagctcctgcaggctgccg

SEQ ID NO: 377218 - DNA, 122 bp, Homo sapiens
gcaaaggcacagccccgcatgggatgacagcagactgggagctctggcatggctctgagccggtgtccaggatactgtaagcctggaccaagtgaaggagggccccctcgttatctaaaaag

SEQ ID NO: 377219 - DNA, 122 bp, Homo sapiens
gccagcagtgacaaaggaagagagtctgtggtctcatagagcttatcatgggtttctaggcgaatttctctcaacagaaaaggtgaggtctgagatggtctctaggaatttgatgttcaggt

SEQ ID NO: 377220 - DNA, 122 bp, Homo sapiens
ttttaattaaaatttgagtccacctaacaagccaccataaaataagcattattactgttccgttgaatgcagattatttgaattgcaagatatccagtgtacctgtcacttagactttgtgc

SEQ ID NO: 377221 - DNA, 122 bp, Homo sapiens
tcccgtgcaacaaaaagcctctgttccacccagaagagctctgagcagagagggccccgccgaggcctgccgcgacggactcacagatgggcgcctggagagagcgggctttcattaggtca

SEQ ID NO: 377222 - DNA, 122 bp, Homo sapiens
atgtcgattacataaatgatacactctaaaaaacatttatgaatacgcattaccattattcgtggtgtctcagatctctgatgagtatggttgtgtgtgtatctgtgtaagtacacaaatac

SEQ ID NO: 377223 - DNA, 122 bp, Homo sapiens
acaaaatgttttcttaaaggcaatatttgaaaaaaagaaaatacctacacctaatgagaacgtgatcatgactccaatggtggctaaaaaacaaaggctgctgatcagctaactgatgcagt

SEQ ID NO: 377224 - DNA, 122 bp, Homo sapiens
ctggacaggggaagtgacccctggcggagggtcgggcgggacgcgggggcgggtcctggccgcagccctgcccagagagtgcgggcggaagacggggagagcgagaggctggcggcgacagg

SEQ ID NO: 377225 - DNA, 122 bp, Homo sapiens
gatggcattccaggtgtggtggtgcacagttacctgccacaagagcttcatggtgtggcacgttcataattcaccatcgcctgggattttggctcggaaaggagaaccagccctaccccggc

SEQ ID NO: 377226 - DNA, 122 bp, Homo sapiens
ggcagcgtagacgctcggggtttgcaccccacggcgcgcgcgccggcacacacgcccctccgcacccaccgcgctcacaccgccgctcacactggcagcagcgctggctcacaccggcgctc

SEQ ID NO: 377227 - DNA, 122 bp, Homo sapiens
cccagcggtctggcggagcccttagcgcgcagggccgccgtctgcgggcgctcacgcccccggggatccaccccaaggagaacggtcctgagggcctgccgggcctttccccccgcggattt

SEQ ID NO: 377228 - DNA, 122 bp, Homo sapiens
agtaacgcaccgccccccactccccggcaaagcttgtctgcatagtgagaccaccacagtcgctcacacacgaagaggtatggaaagctttgctgcttacataatgaggaccctggggagag

SEQ ID NO: 377229 - DNA, 122 bp, Homo sapiens
gggcatgtaacgttattccagaaactggtatttgccttctctgcttctaatgcgcaggctcggcctccgccatattaaaggtagctggagccttaagagcgggatgtggagggcggaaagtg

SEQ ID NO: 377230 - DNA, 122 bp, Homo sapiens
ttaattgttgaaccctaacaataaaagttcagaaaaatgtaattagcaggttgctctctgcgcaaaagtaaactacaaagaggggacatttgtctatctctacacgcccctccccatgcctg

SEQ ID NO: 377231 - DNA, 122 bp, Homo sapiens
gcggagcggttgtggccagcattgagctggctgcttttctgtaggagcctgaatctcagtcgagcctggaaggacatgcaggtgttagggagccaggattgcctgcgttaggcacggggctg

SEQ ID NO: 377232 - DNA, 122 bp, Homo sapiens
ggacccaacctgtgcgaagccagtgggcctggcccggggcacgctgcacgtcacacacttcgtaggtgcgcacgctgtgctgttcctcatccaggccgctcagttcctcccactgtgcagag

SEQ ID NO: 377233 - DNA, 122 bp, Homo sapiens
gccggtttgcgcaacggcctgcgaaccaccaggcgcgtccccgccggcttgggtccgccccgaagcccagtccctcggcctggcccgctatgccctgcacactggcggagtctggcgtggcg

SEQ ID NO: 377234 - DNA, 122 bp, Homo sapiens
gttgcacgtgtcacttaccacccccatacggccctcttcctgactgtcgcctcccttcctcgcttacagaccagttacttaatctgccacatgacgagatggtatctgggatctctaacggc

SEQ ID NO: 377235 - DNA, 122 bp, Homo sapiens
tcaattccatcgccaagtccaaggttccctgtgcagacaccctgggagctcagtggcaggcgttccattcacagggcgtcaaacagttacagctggagttttgctgcagcgagacacggggg

SEQ ID NO: 377236 - DNA, 122 bp, Homo sapiens
caagccacaggagggcttcagcctgaagctcagaggtgatgtgcttagatgtcacagagccgggaggggaacaggctgggctgcagagaggaggccaggcacagtcacctcgtgttgctgtc

SEQ ID NO: 377237 - DNA, 122 bp, Homo sapiens
gttgcctagacaggcacacacatgcagtcactcccaagccccctttggtgctctgctcagcgcctgcttagcggaaggagtccctggagagcaggcactcctggactggggttgtagcccat

SEQ ID NO: 377238 - DNA, 122 bp, Homo sapiens
tcaaaccccgatcttatttcctcctttgactagaaagctctctggtggtaccccctctatcgtctctcatcctacccagggcctccgagtccctgctggctcaggctttgaaagcccaggcc

SEQ ID NO: 377239 - DNA, 122 bp, Homo sapiens
aagtggctggccctggggacagggtggcctccatcctgatctggccaaaagtcgggtggacgcaaaggggtggtttttaggacagctttgctcagcgtcctacaaagtctgggggttgagta

SEQ ID NO: 377240 - DNA, 122 bp, Homo sapiens
cgaggcacactcccaccgcaggagcaacctgtacatgcctgcacactcactgcacacatccgtgtgcaacacgcacactcagaccgtgcatgcctctacatacctgtattccccatgtgcat

SEQ ID NO: 377241 - DNA, 122 bp, Homo sapiens
acgcttaaatgttgcatttattaaggaaatgttaaataagaaaaaaacaaaaagtcaaaacggtgtcacggatgtcaagagcacttttgtggcgtaaaccgtgcagtcacgagctacgagtt

SEQ ID NO: 377242 - DNA, 122 bp, Homo sapiens
cacagggcagcttgaggatgccccgctgcttccctggttgtggataagccaggcagctggcggatggcgcggcacgagcgctggctgtgcctgctgggcactgccttcacgcgctcccaatc

SEQ ID NO: 377243 - DNA, 122 bp, Homo sapiens
tccgcaaatggaaaccaggaatcgggagcgcgtcagctatcgtagggtagacttaaggcccgcagaaaattaaaagcaaaagagcaggcggaattcaggggctttcacggatcatcatcata

SEQ ID NO: 377244 - DNA, 122 bp, Homo sapiens
caatcgcagggcaaaccgagctgcctgtgcgcgcccgagaactccccgagaaattaacttcggctcaagtgaaaatagcagctgttgtccagaaatggcccgggagtagcatagaaaggaga

SEQ ID NO: 377245 - DNA, 122 bp, Homo sapiens
gcctgtcttggagattttcctggggaaatcctgaggtcattcattatgaagtgtaccgcgcgggagtggctcagagtaaccacagtgctgttcatggctagagcaattccagccatggtggt

SEQ ID NO: 377246 - DNA, 122 bp, Homo sapiens
cctcttgggtgcagactggccctcccactccgaccgcaggtcccccaccggccacacagacggctacgctagaacccagccaaacaccggggttgccaggatggtcccacagctttcctttc

SEQ ID NO: 377247 - DNA, 122 bp, Homo sapiens
gatggtgccaccacggtggcttaccacctgcccaggcgctgtctgtaccactaccgagcccgactcaccctctgaggacaaccaagcagggttcagaggaggggcctaggggcagaaggggg

SEQ ID NO: 377248 - DNA, 122 bp, Homo sapiens
cacctcctccgcacacatatccctcagccacccaccccctgatccgcccagggccgcctccgccccgctttggcccatctgccatcccctggccacctgcgtacccagccgggtgacttctc

SEQ ID NO: 377249 - DNA, 122 bp, Homo sapiens
ggagtttcccgtgatggcaggcggttggcgcggtcgtttgtgctcagaggccaacaagcgcgtggattttctgcttcagtgcgcccgggactgccaccccggccccggggatgtcggacatc

SEQ ID NO: 377250 - DNA, 122 bp, Homo sapiens
agcctggtgaatggaggcatggcggggactccactcctgtcctgggctcccacggagactcgccccacactctgtccagcccccgcccaagggtcgcgaggacgaccccactcctgcgggct

SEQ ID NO: 377251 - DNA, 122 bp, Homo sapiens
ccccgcggtgccgtagcagacccggcagcttcaggcacaaatgctccgcttgggaggagacgagacccacttccggaagcggcggcgcggggcaggccgggtaagaacggcacgcgggaggg

SEQ ID NO: 377252 - DNA, 122 bp, Homo sapiens
cacacacacacagagagactacagacatctttactaattttgtcactctttctagctcttcgctttggtttttgcagcgtccctaattcttgaaaaatcgcttaggttggctgaagggtggt

SEQ ID NO: 377253 - DNA, 122 bp, Homo sapiens
cggacccgcagcccccgggttgtgaggcggaagccaaaggggcgaacccagcggagccggcgtgcacagaccctgccccgcggtccaagaggggtgcctccggcccgggacagcggggctcc

SEQ ID NO: 377254 - DNA, 122 bp, Homo sapiens
gtgcaggccgaactcccaccgctaatcgccgtaatattctcctcggcgtgtgcaggcggccggggcgatgttccaggaatattaattctccacagccggctcactcccgccgcacgcatgcg

SEQ ID NO: 377255 - DNA, 122 bp, Homo sapiens
atcaaataattaaaacccagcagaaattaataaaaaatattcctcataaatgtattagtccgttttcatgctgctgataaaagcatacccaactgggaagaaaaagaggtttaattggactt

SEQ ID NO: 377256 - DNA, 122 bp, Homo sapiens
cgaactcctgacctcaggtgatccacccgccttggccgcccgaagtgctgggattataggcgtgaaccaccacgcctggccaggactttttaaaagactatatcttctgaacttgcctcctg

SEQ ID NO: 377257 - DNA, 122 bp, Homo sapiens
cccttcaatctctggctgtgcctgggacactccctatagccggagccttccttcagttagcgtcaggttccgggttcatccacggggtgcctatgctggtgcctcactcctttttctctcct

SEQ ID NO: 377258 - DNA, 122 bp, Homo sapiens
ctcggttagtctcggggctggagaaggtcaaggtagtggacagaggcccccggctgccgccgcgggttccgcgacgctgaccgtgtatgtgacccaagagacttctttaccaaggccagcac

SEQ ID NO: 377259 - DNA, 122 bp, Homo sapiens
gcagagatgatgggatagagcagtgccacccaccctgccttgtttaccctgcctccccttcgctgagctgtctctgtccctggctgcctctgaagcttgcttcacgcaatgagatgtcaatg

SEQ ID NO: 377260 - DNA, 122 bp, Homo sapiens
aacaccaatatttggaaggagtccttgtggtttggaaaaattgaaacgggcatagtctttcgtctctaggaaccccatatggatggcactgcctatgtgcaaagttgcagggtggggaccat

SEQ ID NO: 377261 - DNA, 122 bp, Homo sapiens
catccagcgggtgcacgggtgggaacgtccggccggggctgccgatgagggagcgtacgtcgtgctttttggagccagtggtggacgcgccggtgtcgtacttgagcggggtgccctggggc

SEQ ID NO: 377262 - DNA, 122 bp, Homo sapiens
actatcagtgctgctactgcgactgcaactctgtacagagtgggtgtgtggacatacatgcgtgtacacatgcacgggaatactattcagtcttaaaacagaaggaaaccctggcatttgtg

SEQ ID NO: 377263 - DNA, 122 bp, Homo sapiens
tccaagatatatgtaaccaccaaagtacatgcttaatgacctagtgaagtgagcttaagccgcctcccagacacctgtaacgaagaccatctcgggaaagctctgggttaggcaactcgatt

SEQ ID NO: 377264 - DNA, 122 bp, Homo sapiens
aggagtcctctccagaaatggcatacccaactgttcttttagtctcaagagtcacattgtcggccagggacagtggctcacacctgtaatcccagcactttgggagaccgaggtgggtggat

SEQ ID NO: 377265 - DNA, 122 bp, Homo sapiens
aatattgaaacccggtgcgggggagggaaattagctgatgtggatcccagcgagtgaaggcggagccagagccagaaccacggccccttgacccacagtttatgcctgtcctgctccccttc

SEQ ID NO: 377266 - DNA, 122 bp, Homo sapiens
gcactggcgcgggcatggcagctcggcctcaagctccccacagcctccactcagagcactcgctggctcacagcccaggagatctaaaaactcagggagaaaatgggggaaacagaagacag

SEQ ID NO: 377267 - DNA, 122 bp, Homo sapiens
cgccaacttcctttctccccagagcctctggagggagcattgctgtgcgccctttgtgtccgcggtaggggagctccagtcgtcacaccgcaggctggaggttacgcttcgagtcgcttacc

SEQ ID NO: 377268 - DNA, 122 bp, Homo sapiens
tggttcccatcttggggtcctcagattagtaatggagtccccgatctatttttagtatatcggacatcctaatggaaattacgcggtataagactgaacgagttactacgatgtcaagttgt

SEQ ID NO: 377269 - DNA, 122 bp, Homo sapiens
cattcttggagatttccaaccttttggatggccacctgcacatacaggcccaataacccacgtgcccccgctggctgcaaagtcaaacaaagttcttggggaagaaaaaataaaagaagacg

SEQ ID NO: 377270 - DNA, 122 bp, Homo sapiens
gacgaggttttatgctcaactaacattttatttcccacagccgtggtctttgctaagtgccgtttagcaccctgcggcgtgtgctttgggttttagccctggtctcatcgtggccccagggg

SEQ ID NO: 377271 - DNA, 122 bp, Homo sapiens
atggactcaaaggccgggcgagctgagatcagacaacaggcgctggacgcatcctaactacggctgggtggcggggctgagagacgggctggggttgggggtggggttctcagttggaggtg

SEQ ID NO: 377272 - DNA, 122 bp, Homo sapiens
ctcaaaatgccgccggaagtcagaggtttgccctgttcctctgtagacccaggcagcttccggccgtcagattagtcgtcagtgcgcagacaccacccttcgtggacacgccctctaggcgt

SEQ ID NO: 377273 - DNA, 122 bp, Homo sapiens
agggactgtggggcactgatgacaatgtggcccttcatcaccaaggagctggctgggcctcgtgagagctggtggaaagaaagcaggatgtctctggccctcctgtcttcctagacttgaag

SEQ ID NO: 377274 - DNA, 122 bp, Homo sapiens
gcattcccccggcgcgtgtgggaccgaggtggacatggatccgcaggtgagtaggggcggcgcaggtgtcctgccctggggatggggacgaaggctgaccgctccgatgctgtcgcgccccc

SEQ ID NO: 377275 - DNA, 122 bp, Homo sapiens
ccggtcatagaacatccagggtcccccggggtgaagtaaactgtgggcgcggacgtagcccgggttcctggcgccccggctgggcgcccatctccacggcctcgggtggtgcaggtgtttag

SEQ ID NO: 377276 - DNA, 122 bp, Homo sapiens
ctcgtgattcctgggtattgtagtcagtttcctgggaaagagtcgctcctagtggcagctcgcttcgccagaaaaactacaaaacccagaatgcagcgcaaattccccttgtccaataggaa

SEQ ID NO: 377277 - DNA, 122 bp, Homo sapiens
agcgcctcctggctaagcggcctcaccaactcggttgcgcaaaccgcgctcctggctgagcggccgctgtgcgcgccccgcctgctggaccacttcatctgtgagctgccggcgttgctcaa

SEQ ID NO: 377278 - DNA, 122 bp, Homo sapiens
gaccgcgaacacgtggttcatagacgtgctaacaatgtaccctcaaggaatcgctgctggcggagaagaacactacgtccacagaacgccaccgggcactgcctctggagcgtggcttcaac

SEQ ID NO: 377279 - DNA, 122 bp, Homo sapiens
ttgaccatggtgacacctcagaacggctaggtagcaacatgatggtgtttaaaggcagctcggaacttggctggagctgcgaaaactcaagatttgtggaactgggaagagacagctgagat

SEQ ID NO: 377280 - DNA, 122 bp, Homo sapiens
tggtggcagatctccagcgattattaaagcgtaacacagaatgcttctcttattcaagctcgtcttccctccacatagagggaatcaatcgacttttgtatactgatttttgaatttgcttc

SEQ ID NO: 377281 - DNA, 122 bp, Homo sapiens
ccttgccgcaggtgcaggactcctgcaatgtactctggggttaccagtctgtttggggtgcggcctgcaggcgtaaccatggagtaacttcgggagccaaactgacttttgcggggcacgga

SEQ ID NO: 377282 - DNA, 122 bp, Homo sapiens
cccgtgattgtggcccatgctcacagaggccaaaacaaacaggcccaggaagattcttaccgtggccagtggagagcccggcctggcagcacccctcaggcttcgccgctgccttgtgtgca

SEQ ID NO: 377283 - DNA, 122 bp, Homo sapiens
ccgatctttcttgcgtgggcaggattgccaatcctcattctgattcctgactgcagggttcgtgcatggatcgcgggatgcccgtgtgagtgggttattagggcctttcagaaactcgattg

SEQ ID NO: 377284 - DNA, 122 bp, Homo sapiens
tctgccctgcaactacagaccgagaggaagacaaacgcccaggagggagaatccaggcctcgctgaccgtatcggagcaaagggaacacctgggcacagctgcctgagcaaggacaagatgc

SEQ ID NO: 377285 - DNA, 122 bp, Homo sapiens
taccaccatgcgcggctaatttttttgttagctgggactacaggtgtgtaccactattcccggctaatttcttggtattttagtagagatggggtttcaccatgttggccaggatgggcttg

SEQ ID NO: 377286 - DNA, 122 bp, Homo sapiens
gtactgcggaggaggaaggggcttcctgtcaggttccagggccacgaggggccccagacccgggaggaggcggcgccagcccgtgagaggccgttagtctggcctggggcgccccaaacgcg

SEQ ID NO: 377287 - DNA, 122 bp, Homo sapiens
ttccatcagtgccccattaatatgctgccctgtggcatctgcccaggaggccctgccaggcgtgcacaggtgtgcattggtgtaccctggcatgcacaggtgtgcactgatgtgccctggca

SEQ ID NO: 377288 - DNA, 122 bp, Homo sapiens
ctcctcctcaccccagaggctcccggctgcacacagctggccagagtgacggtgttcaaccgcctggtgcctccttttcagaaccacccctcccagccaacagagcccggtctgtgcgggct

SEQ ID NO: 377289 - DNA, 122 bp, Homo sapiens
gggtgtggctggggcgggggctcagggaatggctgtgatggcccagtgtccaggaggctccgggccccaccccccgccttgctgcatgaccttcacagtgtcacttaccggccctgacttgc

SEQ ID NO: 377290 - DNA, 122 bp, Homo sapiens
aggcaggcccggcgtggtggctgctggagggcttggcacttgccgagttagcagagactccgccgcgccggggaacccgcccctattctgcccaggctgtttggcagtggggacctgcagag

SEQ ID NO: 377291 - DNA, 122 bp, Homo sapiens
ctcaagcccaaaacactgatgccccaaggtcccccagaggcgggtgagcaaaggcagccacgctatccacctccatgccgccacctgccggctgcccaggagaactgagcccggggttccgc

SEQ ID NO: 377292 - DNA, 122 bp, Homo sapiens
tgccccagcctcaagccgctctgcttaaatccaaaggactggctttggagcaagcgtaggcgagattattttaaaataataatttatgctggcggaaggtttttatttgttggtttgctatt

SEQ ID NO: 377293 - DNA, 122 bp, Homo sapiens
cctccccgcgggggggatggagccggatttttcccgctgttgctccacggggcccggacgcgtgacctgagcccacggcaccccgggggggacggcgtcctccccgtgcccccgcctttcct

SEQ ID NO: 377294 - DNA, 122 bp, Homo sapiens
atccacctgccctgttttttcagggtttggtgatggggagggccgagagtgccctgtatccgtgacaggtcagtgttccacatggatcccatcacatgggtatcccttaccccattccccac

SEQ ID NO: 377295 - DNA, 122 bp, Homo sapiens
cttccacaacttccttcttctcccgtaagtccttggtggtgatttcggagctggtgtctacggctgcctctgacatagggggtcacgcggatgatccaatgcaggggattaaaaagaagcga

SEQ ID NO: 377296 - DNA, 122 bp, Homo sapiens
ccagccaggcccatcacctggtggccgaaggcttctgagccaggcccatcacctggtggccgacggcttctgagccaggcccggcacctcgtggccgacggcttctgagccaggcccggcac

SEQ ID NO: 377297 - DNA, 122 bp, Homo sapiens
gtcagggtcctgggagagcagaggctggggaaggggagcagccaagacagaacgcacgtgcggccatgtgtggatgtgagtgtgatggtgcacgtcccaggactctggaagggatcagaacc

SEQ ID NO: 377298 - DNA, 122 bp, Homo sapiens
cctctggcgccacctaatggcataaaacaaactcatcaaattcatattgctttgaaaaaacggcagccattcaaatccagtattttttaagcctcattattgataagacagagacatacatc

SEQ ID NO: 377299 - DNA, 122 bp, Homo sapiens
ggatctcccgacctcaggtgatccgcccgcctcggcctcccaaagtgccgggattacaggcgtgaaccaccgcgtgcctggcccgcctggaagccattctatggactccctgcaaacttgca

SEQ ID NO: 377300 - DNA, 122 bp, Homo sapiens
tcagtccctgatgtccgggtatccagtaggtgtctgaccagggcctccagagtgccagctcggagccgtcgggaggaacgtgggggaggcatagggacctggagaacacagagagatgatcg

SEQ ID NO: 377301 - DNA, 122 bp, Homo sapiens
tgttgggtaaatatttgtggaaacccggggatgccggccggaaagcagggccctccacagcgcccaggccccccagccccggccgcccaccccgggaccctggcccacagggagctccgtgg

SEQ ID NO: 377302 - DNA, 122 bp, Homo sapiens
ttgtaaatgatgcttcagaagtgaaagagccattctgttctttgtgttacctccttcccacggaggcaaggggtgtcagctcctgtaaggctccatctgtaagccttgagtcatctctgttt

SEQ ID NO: 377303 - DNA, 122 bp, Homo sapiens
gctcatcagggaggctaaggcccagtgggagcccaccaggcgggcgggggggcgtggctccgccatggcgggctgcaggtccccaaccctgccccatggggaggtggctgaggcctggtgag

SEQ ID NO: 377304 - DNA, 122 bp, Homo sapiens
cagccgtctccgccgcccgagcatccttgaggtgggacgagcaggggcttggatccctgccggccgtctggtgtgtgaggcttgcacggcccctggctgccccgcgcctcgccggagcccga

SEQ ID NO: 377305 - DNA, 122 bp, Homo sapiens
catctacttccggcccctaatgagattggaggagtacagtgagtgatctctaaccccttgcggtgacctgactccccaacacacacacctcccctctgtgagctccacgtggtgccgtggaa

SEQ ID NO: 377306 - DNA, 122 bp, Homo sapiens
ctctctaatgaaaaaaatgaaaagtttagtgtatctgttttttatttttctattacaaaacgctgaggaacttaggaatttgcaacttttagtgatatataaatcactgctttttttttaat

SEQ ID NO: 377307 - DNA, 122 bp, Homo sapiens
caggctcggcgccggcttgcccagttccccggttaaccacactctgtccagccccgtagacgtgcacgcacactgtctgcccccgttcccgggtagccactggactgacgacttgagtgctc

SEQ ID NO: 377308 - DNA, 122 bp, Homo sapiens
tcttaacaaagatgtacacttcgggtttctggagtacagttctgtccacgtgcacatctgcggtgaggttgagggctgcagtgatattgaaagtctctttggccgcctgattcccgggtatt

SEQ ID NO: 377309 - DNA, 122 bp, Homo sapiens
tcggaaactccaatcattctaccaggactattggggcctggggtagcccctcgggagccgcgtggacgagccctggccaggtgggagcgaagagcctcggcgactgccagtcctcccgcccc

SEQ ID NO: 377310 - DNA, 122 bp, Homo sapiens
cacgtgcactcacgtccactgcggccagcctgccctcccgcagaccctgcacagcctgctcgtccaggatgcccacctccagcagctcagctgcactcaccgccccgcccatggagcggaag

SEQ ID NO: 377311 - DNA, 122 bp, Homo sapiens
ttccgacgatattgtcattgcaccgtctctgcccacgaagaactttccagtttaggtccccgtcactgtctccacgccgtgatggcagcgctgccgaggacataggaaccacgactggaaag

SEQ ID NO: 377312 - DNA, 122 bp, Homo sapiens
cgcgcgcacacacacagacaggcttcgcttctgtgagtgcccaaagactcgcactccacacgctgctctgcagctcccactcctacatcccggcctcccggtacaccaggagctctggtccc

SEQ ID NO: 377313 - DNA, 122 bp, Homo sapiens
attgcaacgcctccgctgatgggaaaaactactccctccgctactgcggggtggcagtgacgtcaacgaattagctgacctgttttttcgggcttcgcggacataggagtcccgaaggccga

SEQ ID NO: 377314 - DNA, 122 bp, Homo sapiens
ccggcgggccagacactcaacgccgccgccgccgccgccgccgccgcgctgcaaaccgctcggctggaggtctaggctctgagctggctttaaagttgctgccttttccgcgcgtccctcct

SEQ ID NO: 377315 - DNA, 122 bp, Homo sapiens
ttctttggcacctttcttcggagacgcagtcgttccccggctcaggccccgctagggccccgcctgggcctgggatccattttccgggccccccccaaccgcccccccagccgctcccttcc

SEQ ID NO: 377316 - DNA, 122 bp, Homo sapiens
aactacagagaatccaagtgagtaaggcagcatctcaggtgagaaagtacttaaagttgacgatgggaaataaaacttcacaggtcagtcccaagtcactgtgcaccctagcagcccaggaa

SEQ ID NO: 377317 - DNA, 122 bp, Homo sapiens
ctctcggcgcctgcctggctccccttccgaggccgcagcgccctgccatgctggcctccccgcgctctccctgagacccaagccgactcccaggccgaccccgccgcctgcgcccagctgtg

SEQ ID NO: 377318 - DNA, 122 bp, Homo sapiens
ctccgtagtgggcggggcttcaccccgcgtcctttaaaggaaaggtgatgggcggagccacgtttttctactgttgggattcagttccgccgacagaaaatgcggagaacgcggaggaagtc

SEQ ID NO: 377319 - DNA, 122 bp, Homo sapiens
ggcagggctgggtccttaaatcacccaaaatgtgaatactttcaaagacgcacaagaaagcgatgaccatctcctcatctcaatccagtttgtactttctagtggccagcactgttttttct

SEQ ID NO: 377320 - DNA, 122 bp, Homo sapiens
gaaagcttctcacacttagatcctcactggcattttctctaaagtaatggaatgttttctcgctctcacctttcctcttcttcgcagacacaggagaaaaaatatttcaatctgctcttaca

SEQ ID NO: 377321 - DNA, 122 bp, Homo sapiens
aacctgagccctcagcgaggcctaagttagggtctgagtgagagggccaggggcctcagccgtcatggaaacccgagccttggcagcagcggcacccactccaagttccggggagcggggtg

SEQ ID NO: 377322 - DNA, 122 bp, Homo sapiens
attctgaccaccaccaaaagctgcggttctccaaaaaattagcaatggctggggagaatacgaatgatttttatttttgctaatatgcatttttttatttttaagaatgagcactttcaggc

SEQ ID NO: 377323 - DNA, 122 bp, Homo sapiens
ctcctacccctaaactcacaatgcccgaggaacggatcacctgggcgaacctggacacatcgtcctgggattttccacccaggaccaggaccaggtgttggggcaccccgtcttctatgcga

SEQ ID NO: 377324 - DNA, 122 bp, Homo sapiens
ggtggcccgagcgcaggcggcgctggcggtcaacatcagcgcagcgcggggtctgcaggacgtgctaaggaccaacctggggcccaagggcaccatgaagatgtaaggcggggctgaaccgg

SEQ ID NO: 377325 - DNA, 122 bp, Homo sapiens
caagacgagcactggataaccccgtctgggcaagtccctagcagatggcgtgcacagaaacgggctgcagagagaggacggtgcctccaatgcttggactttcctctgatgccagcctcagc

SEQ ID NO: 377326 - DNA, 122 bp, Homo sapiens
ctgcctggcagttcacgcccagcctacttctctctgacgcgctcctccctcggtgccgcccgtgatgtgtgttagtatataatcagagaaactcacacgcggagttttaaataatgcctgcc

SEQ ID NO: 377327 - DNA, 122 bp, Homo sapiens
tgatctcagagttcctcctggctgtgccaggatgtgctctcagagtccttcttaacacatcgctccaggggacttttatctgtcaatcagaggtgatcagaggcaacccttgccactgattt

SEQ ID NO: 377328 - DNA, 122 bp, Homo sapiens
cttccctcttccccaggtcctaatgtttaaggtcctgggtcagggtgtcttcttctggtgcggagatggttgttatgatgatgatggggggagggaggagggggaggaggaggagagggaaa

SEQ ID NO: 377329 - DNA, 122 bp, Homo sapiens
cacaaaagttggaaatgtacataaaaaaagacatttaggtatttgcatttttatctttttcgtcttttgcaacttcatttggtgagtataggtgtggaatggagagtacagggaaagcaggc

SEQ ID NO: 377330 - DNA, 122 bp, Homo sapiens
ccccggccccgagccatttcctgagagaccgcgcccagggacaagcagcgccccgggccccgactccaggcctgcagcggctctgggaggactgcgacctccactcaccttcgcgggtctga

SEQ ID NO: 377331 - DNA, 122 bp, Homo sapiens
ttccaactgataaacatttagattgttctcaacgtttcacacataaaaacaaaactgcagcgattattctttgcacgcacatctctgcataatataaaaacatttctgaggatttctagaat

SEQ ID NO: 377332 - DNA, 122 bp, Homo sapiens
ggactgtgcggctgcggcggctattgtgttcttggtggaccggttcctgtatgggctcgacgtctctggaaaacttctgcaggtcgccaaaggtctccacaagttgcagccagccacgccaa

SEQ ID NO: 377333 - DNA, 122 bp, Homo sapiens
taacaggagacccaggattcaaaccatgtctgacttcagagcccctgccctcctgcatgccggactctgcagagagacttcagggttcagggagccaattgcccatcagttctctaggacag

SEQ ID NO: 377334 - DNA, 122 bp, Homo sapiens
gatgggcggccgggcagagacgctcctcacttcctagacgtgatggtggccgggaagaggcgctcctcacttcccagactgggcagccaggcagaggggctcctcacatcccagacgatggg

SEQ ID NO: 377335 - DNA, 122 bp, Homo sapiens
catagagagacactctctgtctctcgattacaatcatgatttccagaatggagaagatgacgatgatgatgaagatattgattatgtttgctcttggaatgaactactggtcttgctcaggt

SEQ ID NO: 377336 - DNA, 122 bp, Homo sapiens
agggaacgtcctagcgccatctggtctcgcacacatgcttgggactcacggtggggatcccgggcctccaccagccctagttgtcggtgcccagcttgggaggcctgggcgggagtcattca

SEQ ID NO: 377337 - DNA, 122 bp, Homo sapiens
agcgggtccatgcaggggatcgggatgttctgaagcccccactgctgtgcctggaacacccgtgtctgccgctcacccctgaggacttgggacctcagggggtgagtggcaggggtggccgg

SEQ ID NO: 377338 - DNA, 122 bp, Homo sapiens
ttaggatggaagcctgcattaaggtacagggtggtagtccttcttcttttctttacctcacgtttctactcttctttgcctatcttgatagctgctattttgattccacgggagtccatggg

SEQ ID NO: 377339 - DNA, 122 bp, Homo sapiens
tcatctatcaacgtagtaggcactgtcctaggcgctagggattccatgcagagcaaaaaacgtcacagtccatgccttcacatggccttcatggaccaccgcgggtgttctttttcccccga

SEQ ID NO: 377340 - DNA, 122 bp, Homo sapiens
tggtaaggccaaggtccttgaaaagcaacaggtgatgtcattggcctccaaccaataaagcgtactagcaaaaaggagggtgggagagggaaggcgagatgggcatgaggagtgagtgctga

SEQ ID NO: 377341 - DNA, 122 bp, Homo sapiens
agtaaaccacaataatcataaaagatgactgtaattaagactctttctgaaaccagaaaccgcgagttcatgcccccacctcaagagcccgagcttccccctctctgaaccgcccccacacc

SEQ ID NO: 377342 - DNA, 122 bp, Homo sapiens
taaggcccgagaggctgtggcttcagaaatgaaggtcatgggcgactcgggccaatgccgcgtccttgacctgggcgaagtgagcggttgcactcacgagtgtggacggcccttccctacag

SEQ ID NO: 377343 - DNA, 122 bp, Homo sapiens
accatttccaacggtaagtcgtacaaaaggtccggggaggcgtacctgggcggcgagaggcgagagaactccgcgcgggctttccagtgcccaggcccctgccggctccgaagccgaaatcc

SEQ ID NO: 377344 - DNA, 122 bp, Homo sapiens
gatttctagcctccagaactgcgagcaaatttaaggcacccagtctgtggttctttgttacggcattccagcaaactaacaagcttcatttaaagatggaggacaagctatagttcctgtca

SEQ ID NO: 377345 - DNA, 122 bp, Homo sapiens
cctctacaccttctgactctggctgggcctccccttcagcctccggggcctctatgccttcggccccatcactctgtcctggatcttggtcacctcctgccgcagcttcaccctgcaagttg

SEQ ID NO: 377346 - DNA, 122 bp, Homo sapiens
tcggcgcccgcgcgggcgactctggcgcgccagaccgcagcgccaggcgccctctgccgccgggaagccgaatcctcccgtcctaaccctaactcgctggctgcccccgcccgggcctcggc

SEQ ID NO: 377347 - DNA, 122 bp, Homo sapiens
ccaggaggcttcttccttcatctccctaaagctcctgcagaagtaagttactctcccaggcgtgtcatttccttcaccccagctctccctccagggcagcaccccattttgcaggctataaa

SEQ ID NO: 377348 - DNA, 122 bp, Homo sapiens
gcccggggtccccagacagcccatagggaagcccctctttcggattcccgcagtgtgggccggccctccacctggactggataaaggggggaaagtgacccctcaccacaaggaccattatc

SEQ ID NO: 377349 - DNA, 122 bp, Homo sapiens
gccagctggaggacaggggggctgtcgggttctttgtgtggaggtctccagaaggctgttcgtgctgtaggcaaattccacaagacctaggagccaggaccccaggtgccttgatgctggag

SEQ ID NO: 377350 - DNA, 122 bp, Homo sapiens
ttctgataggggcggtcccccggatggcaatgggttcctgtaggctgtttggggtgaagtcgggggtgggaggactagtaggaccaaagccaaaatgtgtccgttctgagaaagaaagttct

SEQ ID NO: 377351 - DNA, 122 bp, Homo sapiens
gcaagctacggaacaggtggcggggctgcagcaccccaatgaccgatcaaccgcaaaggccggaaatgcgtcagccgttctgagcccactggctgaagccaggcaactctttcctttctagg

SEQ ID NO: 377352 - DNA, 122 bp, Homo sapiens
tttacttgtgagaagcaaaggtgtatattgttaggtagaaacacagacttgttttgctatcgttccagagtgtacatatgtgtaggaggatgcatagagaaactgagggctgaaatggatac

SEQ ID NO: 377353 - DNA, 122 bp, Homo sapiens
aaatgacacaaaaatttcttcctcaaaccaccttgttgaagtttctccagggaccaaagtcgatgatttgtaaattcctttactcttaaaataaaaggcattttcataaaagaaaaggtgat

SEQ ID NO: 377354 - DNA, 122 bp, Homo sapiens
tgcaactgagttttaattttggtctagctaatgaaaaaaatgtttcgagggcgggctagccgtaaagatccagctcctgttctgtggcctggaactttgcagcatcagagaaatcatgggct

SEQ ID NO: 377355 - DNA, 122 bp, Homo sapiens
gcttgttgagcgtttccagcgcttagaagactataacaatgatagtaatcataagaatgacggtcatttacggagggctcacgctgtgccaggccctgccctaagcactcaaccttcctagc

SEQ ID NO: 377356 - DNA, 122 bp, Homo sapiens
gcaacgcacaaagtaccgttccgaggctcaggtccacacggcgctgtgaggctgaaggggcgcgctagaagttcccttcacaggacgccacctcacctgaaaccccccttttctgctgccac

SEQ ID NO: 377357 - DNA, 122 bp, Homo sapiens
catgactcactcccaggtgggagggggcggcgagctggggcggcctctgggaagggcgggcggccttggccaggcccctcaccgccacccccacggccggatgagaagtgggagacggggag

SEQ ID NO: 377358 - DNA, 122 bp, Homo sapiens
cagaggtcctcacggcctgcggcccggggagacctgagactcctaagctgagcacgtcagcgtctctacctccaccgcagacagaaagaccgggcggacccaagactgcaagctcaagccct

SEQ ID NO: 377359 - DNA, 122 bp, Homo sapiens
ctccggattgttgggaggagggtcgaagcgtagactggccacgcccgggtcccgctctctcgttgcacaactgcaagctagatctgggcatcgaaggaggaacgctgcaacctccaacccct

SEQ ID NO: 377360 - DNA, 122 bp, Homo sapiens
ccaaagtgctgggattacaggcgtgagccacaatggctgggcctcagatttagatttagacgtagatgtggatgcatatgtagatatacatgaggatgcagatgtggatgtggatgcagatg

SEQ ID NO: 377361 - DNA, 122 bp, Homo sapiens
ttggagctcgccaaagccgccccgggctctgtggtttccagagcagatgcggaggcggcacgtcctcgtgcccttgctccagctgcgcacacgacctcagcctcctctgccccgctgggcgc

SEQ ID NO: 377362 - DNA, 122 bp, Homo sapiens
gccccgcggaaggacgacgacgctcaccttgccgctgcaaggtcgtgcgcagctccgcctcgtagttgtgtctgcacaccttgtccaccgcggcccgctcctgctccaagaagtccttatag

SEQ ID NO: 377363 - DNA, 122 bp, Homo sapiens
catccttggctgtggcctgtccatgctccagccgctcgtacaggtcctggtcgatgatctcggctttcagcagctctcctggtgtcacggtgtccctcagcccagaaaaggtgaccctggca

SEQ ID NO: 377364 - DNA, 122 bp, Homo sapiens
agggtgggtggtgggaaaggacctctgatgccgggaccacgaaggagggtctagggttcccggagcgcagaggcgactctccagggtggagatgagggcaagaccggagcacggatgccggt

SEQ ID NO: 377365 - DNA, 122 bp, Homo sapiens
cacccagaggcccagcagcatgactaccacctggaggctcagtagcacaaccaccacaaccggcctcagggtcacacagggcaaacgacgctcagactcttggcacataagtctggagactg

SEQ ID NO: 377366 - DNA, 122 bp, Homo sapiens
tgaactgggccagccaggcaagagatctgggggaagaattttccatgcacagagaaaagccgctctaactaggttggaatgttggaggaactaaaagccaaaatgatccatcttgtctaatt

SEQ ID NO: 377367 - DNA, 122 bp, Homo sapiens
ggacacagggatagataaggtatgaatctctgcagagagatggtgaatcgaatgtcaccccggaagtttctccagcattcccttggatttcatgccagactgagaggagggaccatctagag

SEQ ID NO: 377368 - DNA, 122 bp, Homo sapiens
caacaatggggcactctatgacatctgcttccgcaccctcaagctgaccacctccacctacggggacctcaaccacctggtgtcagccaccatgagcagagtcaccacctgcctgtgcttcc

SEQ ID NO: 377369 - DNA, 122 bp, Homo sapiens
agtcctcacatgcattctgtaacacagggcaaacagctgtcccagaaaaaaagtgaggcccgagtttgtacacagtgatgggacgttgcacagacagacttctccgcagccagttcccatca

SEQ ID NO: 377370 - DNA, 122 bp, Homo sapiens
caccaaatcagcatctacacccaggacagacagccagcgtggacttgcatgatccgccatcgcacaggagggaaaggtaatgattaaaacacaatgtgccatcctgggaagagggccagacc

SEQ ID NO: 377371 - DNA, 122 bp, Homo sapiens
tcaccagcccccgtactgtgacctctacccctttcttccttcagggacctgatttcccatcgccttctgtccccctaaaggcttcagatcctgaggaggcgtcccaggcccaggaaggtgag

SEQ ID NO: 377372 - DNA, 122 bp, Homo sapiens
gccgcggtgcgactgaggcgtggcgtctgctggggcacctgaaggagacttgggggcacccgcgtcgtgcctcctgggttgtgaggagtcgccgctgccgccactgcctgtgcttcatgagg

SEQ ID NO: 377373 - DNA, 122 bp, Homo sapiens
gttaagtctttggactatccctttcctccttgactactgctttgacgtacctaaatcattcgtcttacatgtcagaggaaattagttttggatagttctcctttctgctgtacctcatgggg

SEQ ID NO: 377374 - DNA, 122 bp, Homo sapiens
ttgtcaagagagtcctccagtttctatccaggaatgttcacatccaaagggttggacccacggatcattctgaatcttcctgcccctcctcactgcttaaccctgagaaccacaaatataat

SEQ ID NO: 377375 - DNA, 122 bp, Homo sapiens
cacaatctgactaacattcttggcactcagagcccagggtctaccctgagcttgtgcgtccgagttgcgttttgtacagtagaggttctgtatcccttacccgaaatggttgggaccggaag

SEQ ID NO: 377376 - DNA, 122 bp, Homo sapiens
ttcaagatcagcctggttaacatggtgaaaccccatctctactaaaaatacaaaatttagcggcttgagccacctcacccggctgaaaatttttttaagacaggctctcactgtgtcaccca

SEQ ID NO: 377377 - DNA, 122 bp, Homo sapiens
acaggcgcatgccaccacgcccggctaatttttgtatttttagtggagacagggtttcaccgtcttggccaggctggtgttgaactcctgacctcgtgatccaccggcttcagcctcccaaa

SEQ ID NO: 377378 - DNA, 122 bp, Homo sapiens
tttaatttttgttacagcagtttcatatgaaaggaatttgttttagcaccagttatgttgcgtgctagatttagttgtaagacaactcagattgaggtatctaaaaatttttatatcagtag

SEQ ID NO: 377379 - DNA, 122 bp, Homo sapiens
cgtgggtcgagttgcttggcggtcgtggttccggaggttcctcgggatgtcggtggccttcgtaccggactggctgaggggcaaggcggaagtcaatcaagagactatccagcgggtgagca

SEQ ID NO: 377380 - DNA, 122 bp, Homo sapiens
gaagtgtcccaacaaatgtcgggttagacctactttgagaaacacattccaatatgagatcgaacctgacaattttgcatgctaacctggactgtttcttattagagcaaaggggatgggct

SEQ ID NO: 377381 - DNA, 122 bp, Homo sapiens
gcctgcccctccctggacctcagccctgggacttggccatagtgagcctcatctgtgaagcgtgttcaactccagctgaataccagaaatgcaatgtccctgtttacttccaattcaggtag

SEQ ID NO: 377382 - DNA, 122 bp, Homo sapiens
aaacgcagactctccagagtcaatgtctacttcagccagctcaagggcgcgacaacctggcgccgagcatctcaggccgccgcggggaccccccctaagggactcgggaacacctgcctacc

SEQ ID NO: 377383 - DNA, 122 bp, Homo sapiens
ccgaaagccaagcgggagccccaggctgcgcagggcgggggaataatgggtgcccagctccgggccaggaagcccagggaaccactgcagccaccaccgcggtcaggagacagcccccgcac

SEQ ID NO: 377384 - DNA, 122 bp, Homo sapiens
cgtccaggcagctcatcagagcctcgttagctgccttaaaagcccattttatttccgcagcgggcccgctggtgaaggcagaaggctcagtccgtccgcctccacctgctgccacggcagcg

SEQ ID NO: 377385 - DNA, 122 bp, Homo sapiens
tagaataaggactgaaaagatgtcataggtttcagcagctggtttcatgacctttgcaaccgcagttttggtggagtgtttgggctaaaacctggcagcagcattttgagaaatgtgtggaa

SEQ ID NO: 377386 - DNA, 122 bp, Homo sapiens
gcaaaggaggaaaaaaatcccaacaagccacagccttgatcctgagtgggcagtcagaggcgctgccaactcaaggttgcaacacacacattgggccaggttgcaatccccccatcccctta

SEQ ID NO: 377387 - DNA, 122 bp, Homo sapiens
tccgaaccctctagtcccctacgccgtctcgcatgcgcttatactcttcgctccggccgccgcggccccgcccctgcgcactgggatccctctagcctgccgcgcctctcgctggtcatctg

SEQ ID NO: 377388 - DNA, 122 bp, Homo sapiens
gagggtacactgtgtaagggtgtctcctttgtggactgattcgagtggctccctcccaaacgaaggctcacccttgtctgctttttggtatggctaatggttatgttgaatgtaatgtgttc

SEQ ID NO: 377389 - DNA, 122 bp, Homo sapiens
ttgttcatgctcgggctgagcccaggacccttgctgctcaccttccagagccgcctcccccgcccccactgcagatgtggagctgaccactgagaaatgcaccatatttggagggcaaggag

SEQ ID NO: 377390 - DNA, 122 bp, Homo sapiens
agcaccagatcccacgcagcactaaacacatcagttttaccctctaacatagatgaggcacgccgccccatgaccctggacaggggatgcaggagaacagacatcaggtggttactgctccc

SEQ ID NO: 377391 - DNA, 122 bp, Homo sapiens
tgtgatccgcccgcctcagcctcccaaagtgctgggattacaggcatgagccactgcacccggctgaggtttaggttttttcaggttctctcaacagcaacccactggaaggtaagtgtggg

SEQ ID NO: 377392 - DNA, 122 bp, Homo sapiens
ccaggcgagaactacggactcttgaaatggtcggtgaaaggggcgaaagcaccaggaaatcgtgcttcaacagtccatgactgaaaggagggcctgaaactgtggccataggcgggcccttt

SEQ ID NO: 377393 - DNA, 122 bp, Homo sapiens
tgaccacttgtcaccccttcctcagatggcagggtggaggcatgggactcaagctaccaacggaagcgaacctggatccttcccagttctctctgtcaggatctggaacttccatgcagtca

SEQ ID NO: 377394 - DNA, 122 bp, Homo sapiens
gtgtccagagctccaggagacgacgctgttgtaaggatggaggatacaaagcagaggatgcgctctcaaattcagttcttcaccgctgcgtccacattcacgtcgggaaacttggtctcagc

SEQ ID NO: 377395 - DNA, 122 bp, Homo sapiens
agctgttgttccctcgaatctaaaattgcctccctctgattgccgctatacaaacccaggcggctgctcgcttcccccatccagttgggtctatttcaagaacacgctgattagcgctgatt

SEQ ID NO: 377396 - DNA, 122 bp, Homo sapiens
gcaatttcgtcccctgagctcaatgtgctgagcatgggaggtcggggttctccctggtaccgtcgatactcagagagcttctgtagcctccttcctggaggcgagggctggttcccgcctct

SEQ ID NO: 377397 - DNA, 122 bp, Homo sapiens
ctatgcaaggagagtctgaacagaatctggggtgctgctatgtgcagggccgggcgccggcgctcacctgtccagctcgccccgcagcctctggttctcgcccatggcgagggcgtttgtcc

SEQ ID NO: 377398 - DNA, 122 bp, Homo sapiens
ttccatgaaatactcccagaggagtgacctccttcggttgcacagtgctgagcttgtcttcgtgtttctggaatgctgctccaggatttctttttcaaatggtcaagtcatgctggttgttt

SEQ ID NO: 377399 - DNA, 122 bp, Homo sapiens
gctcactggccttcatctgcacatagttctgcaccagtgcagccagcaggaggcgcgcttcgtcctcactgagcgtggccgggtctgctgggctgctctccagggcagacctgtggagggga

SEQ ID NO: 377400 - DNA, 122 bp, Homo sapiens
cagagataacgctaaacacgtgttgattctaaatacctcctttaatctatcaatgtggttcgtgccattaactgattgcctaatattgaactaattttgcattcctgggatgaacccaacct

SEQ ID NO: 377401 - DNA, 122 bp, Homo sapiens
aaaaaggtagtgacttaggagagaatgctgttaatatgagtggtattagtggtgagaagtcgttaggccatggatgtatttcataggactggccaagagaactacagctaaattggagtgta

SEQ ID NO: 377402 - DNA, 122 bp, Homo sapiens
ctttcccacctctataccttgcctgtgccttagtgtcctcttttttccagttcacctgtgcgaatccgacccacctcccagagcctggctgaaacgtcactccctgcatccaacatctgatc

SEQ ID NO: 377403 - DNA, 122 bp, Homo sapiens
acttgaataacatctcaaaatagactgggaagacaaaatgtactacaaggggccaggcaccgtggctcatgcctgtaatcctagcactttgaggggctgaagcaggcggattgcctgaactc

SEQ ID NO: 377404 - DNA, 122 bp, Homo sapiens
aaagaggggctgagactggacgtgggggccttgcctgccccgtggagcttcctcaggcaccggctgcctctgtccatacctccactttcctgggtgcagtcttcagggcttggaccagtact

SEQ ID NO: 377405 - DNA, 122 bp, Homo sapiens
caggtcaggggcttccatctcagattcctggggaggagttagcatggctgcctgagggagcgccccacagccaccactcagagaccagagctggcacgtggagggtgggcctgtttcttcag

SEQ ID NO: 377406 - DNA, 122 bp, Homo sapiens
ccatctgccgccttcccaacgggaagagggcagaggcgccggcgccatcgcgaggtcaagcgtgacccttggccacccaggtgtgagttgtgaagaggaggactcatcagacggctgggcca

SEQ ID NO: 377407 - DNA, 122 bp, Homo sapiens
cagatgtggtcaggccttccttgatcttaagttgaaaactgattcaattttggggaaatccgtgggtggggagaggaaggaaacagctcctagacccatcagaaggcatggtcctggtgttc

SEQ ID NO: 377408 - DNA, 122 bp, Homo sapiens
actccaatctgggcaacaacagcaaaactccatctaaaaaaaaaaaaaaattacagctctcggtagtgtttgaagaagcactttgcacctcctcattgacaatgccccaggaagggcttatg

SEQ ID NO: 377409 - DNA, 122 bp, Homo sapiens
gcaccagggaggcatggggcaggggaggggcctaagggcctggtgaatgaggcatggggccgggcccgtgctgacctgcagcagcacatggcagatctccacggagcccttctgggcggctg

SEQ ID NO: 377410 - DNA, 122 bp, Homo sapiens
gaagcccggctccgggccagcatccgagagcccggactggaggtgagttcgcagccggaacgttgcaggcacttgtttcctcagtggatgcctttcggcgcgccgccgcccggcgccgcggg

SEQ ID NO: 377411 - DNA, 122 bp, Homo sapiens
ctctaaaatgcctctagctggaaaggagtattctttcctatgaactccccaagcacccagcgtttccctaccttagcacctaactcattttaccttatattgtatttatttgcttagaagct

SEQ ID NO: 377412 - DNA, 122 bp, Homo sapiens
atgtcctccttagtcaggaccagggcttcttggggcctctttactagaaaatgaacaaggcgacattacctgtactccttgattggtcagaagtgggagcagcctgatagcattagaaatat

SEQ ID NO: 377413 - DNA, 122 bp, Homo sapiens
tgtaatgattgccatctttactaaaaccacccagatgaagcactatattagattaatatgcgtcacatcagtttggttcttgttttccaaaattgtcctttccatctgcatacctcttttat

SEQ ID NO: 377414 - DNA, 122 bp, Homo sapiens
ggggagaggccgcctccccattggctgccagtgtccacagccagggaaggggagagggggcggcagcctctccctcgagcacttcggtgtgtgcaccaggaaggtaacttcctgccctgtct

SEQ ID NO: 377415 - DNA, 122 bp, Homo sapiens
tttgattttgcaatgcaatttgcatccttgaaactgccagtctggagggggacggggtagcgtgagggagtgaagttgaaagtgcctcctattagctcaccctttcaacattaaacagagac

SEQ ID NO: 377416 - DNA, 122 bp, Homo sapiens
ctttgcccctagccactaggagggctgttcctagggaagcagaaagcagccagaggactacgaactcacagatttttaaggcccattatgtctaagagaggggatgaggatgtgtaagacaa

SEQ ID NO: 377417 - DNA, 122 bp, Homo sapiens
gcactgtctttgcaacatattcagatggcggcgggcagcttgggcgccagcatgggctggcggggctcccctggacggccctcaggtcgcttacagcattgtcccaggacttcctcggcctg

SEQ ID NO: 377418 - DNA, 122 bp, Homo sapiens
tccacgttcccggggttggatgtggaaggcagctaccccgacgggtgtgctctctgcatacgacgggtgctaacactagcatcacagatgcagtgttattagtactacggaggttattatca

SEQ ID NO: 377419 - DNA, 122 bp, Homo sapiens
ttcttcccatcttgtatgcacataatgtcacacaattcaagaggtggagtctcttccctccgcttgacttggtttgtgatttcatttggcagcggaaagatacaatgaaagtgatgttctga

SEQ ID NO: 377420 - DNA, 122 bp, Homo sapiens
tgccgagctccggaaagttccacaggtcctccgcagccctggggagcaggacccagaaaccgacgcgacgggtggggcgctacccgggccggccctaatccccttccattgttctgggagcc

SEQ ID NO: 377421 - DNA, 122 bp, Homo sapiens
tggggagaactcgagtgggtgaaggaatccgtgtgcgcacccttctcctcctgttcgccccgccctttggccacacagaaacgcttccaggccaaccgacgaggaaggctagagggactctg

SEQ ID NO: 377422 - DNA, 122 bp, Homo sapiens
ttaagggtagcggcctactcagtcagcggccaattaccgtgagctttcgggattccgccgcgcggtccacacttacctgccgggctctctgcagtgcatctttgaaagcgtcgttaactcct

SEQ ID NO: 377423 - DNA, 122 bp, Homo sapiens
ataattccaaagtcctctctaatcctataaattttctccttctacctgagggtcttgtcccgccccccacatcttctccgcccctcacgcttctgagagcccaagcagggttacccggcgaa

SEQ ID NO: 377424 - DNA, 122 bp, Homo sapiens
ctccgattgtgtgagctttgttggagcctgcgtacgtggatttatcgctgccacggtctgcgtagctccagaggtttaaccataggatagagaaaccaggtaagtcctacattggcttcccg

SEQ ID NO: 377425 - DNA, 122 bp, Homo sapiens
gagagtgggctgagagagggatggagtcaaaagaaaacagcttctgacatcagactcatgcgctgactcatctgacctctgatgcttactagctaggtaacctcttaggcaacataagtttg

SEQ ID NO: 377426 - DNA, 122 bp, Homo sapiens
cggctggctttcctctctccttccatctcccctctttcgcttcccttccctctgcgcccgcgcgcgcctcccagcacgctggtcagctcctcttgctcgcaagcaggtctggccccagcggc

SEQ ID NO: 377427 - DNA, 122 bp, Homo sapiens
atttgctagacttggcctcaacctggggtggtgggcagagtgtgcagatatggatgcagacgacatcaacagcacaggatgaaaactgtgttggccagcctctgaggaggatgtgtacctct

SEQ ID NO: 377428 - DNA, 122 bp, Homo sapiens
tatatatatatatatttctatagtggtatcagagagccctaaaatccaaccacatgccttcggggaaaatgcattatgatctgtacagcacctaacattaatcctacaaatatactacacaa

SEQ ID NO: 377429 - DNA, 122 bp, Homo sapiens
ccaaagatgtgagacagtagaaataccaaaagcaaaagacatttttaaattctctgggaacgttcagaaggccttcgtgtgaatgccagctctcggccgccaacacacacatgtagaaggta

SEQ ID NO: 377430 - DNA, 122 bp, Homo sapiens
cacccagctactggttcatttgagtagatcggagtcagatgagtacatgtttacgggaggcgcttggttacgggatccagataggaatctttatctgagctgcttgtcagtttgttcgtctg

SEQ ID NO: 377431 - DNA, 122 bp, Homo sapiens
ggcttctgtgaaatttgcaaaggacgttcccatccctcatccacatgggaccctctatgtcgcccgtagtatggggaaacagcacagggacagtgacaaacgcctttgtctcagagctcaca

SEQ ID NO: 377432 - DNA, 122 bp, Homo sapiens
cctggacccgcctgctcccaggtctgtgctgctggtctgggtcactgtgataatcgagcgcgtcgcccgctcgccaccttgcggccatttctgtccactgcagcttcgtgagcccgtggtca

SEQ ID NO: 377433 - DNA, 122 bp, Homo sapiens
atatacactgagatcattttatccccctaccttccactgcacttcactgacacttaaccccgaagacatttgcattggaaacttcgcattatctgtttgaaagtcctctcagttcaagccac

SEQ ID NO: 377434 - DNA, 122 bp, Homo sapiens
cacacgggaaaggggtgcatggagcccgctccccggtttacagaagcagcccggagctaccgtcatttcatcttcacgcggggtctccagcgcgcctggatcgttccctagccaagccaagc

SEQ ID NO: 377435 - DNA, 122 bp, Homo sapiens
tcagccgctgcggtgatcatggaagtagacctaagagaaaaaaacttgtgcaagttcacacgtggagtagtatatgaccatggtttcagagaactgaagcagttctttttagattcttcaaa

SEQ ID NO: 377436 - DNA, 122 bp, Homo sapiens
gtgctcccatgagctcatgtctgtgctgcgatgccctatatttcctggcgcccacacactcgctctccctctctccccctctcctttgctccctgctgtgtgcctttttctctcctctttct

SEQ ID NO: 377437 - DNA, 122 bp, Homo sapiens
agggcggaggcgacactctcaggtgagctcctgtaggacctggctgggaccgcggagtctcgctcagcctcaactgtctctgtccgcggtcccgggtccccggtggcggcaagagaggcggg

SEQ ID NO: 377438 - DNA, 122 bp, Homo sapiens
ccgcgccggcgactgcgggcggagtttcgcgagggccgaagcggggcagtgtgacggcagcggtcctgggaggcgcccgcgcgcgtcggagcagctccccgtcctccgcagccgtcaccgcc

SEQ ID NO: 377439 - DNA, 122 bp, Homo sapiens
tattggccccaggagacttttcgagggtcctgcacagctgctggcaggctttggtccttgcgggctgttgtctggagtcccgtgcacctcgggagatcgctctgttctcgcgtcgcctgagt

SEQ ID NO: 377440 - DNA, 122 bp, Homo sapiens
ttgggttaatcccatccgtgtctcaaggcctcagcagtctaggggtgcagaagggatccccgtgacacgtttgggagttttgttagcttctcactgggtaactgcacgatctcagcactttt

SEQ ID NO: 377441 - DNA, 122 bp, Homo sapiens
ttcggagccggtcggctcggcggctgcaggtggggcggccgggcggggtcgcacccaccgcgcggggcttggccctgagctgctgcttctcggggccagtttatttacagagttgagataag

SEQ ID NO: 377442 - DNA, 122 bp, Homo sapiens
tctggacacatctcacccccacccatattcatcgtcacttacaatattcatttacaatagcgcctcctcttcatggaggcctgccacagtctgagtaaacaaaagtgatcttgtccctgtgg

SEQ ID NO: 377443 - DNA, 122 bp, Homo sapiens
gaataccaccagaagggcctctctacagagaggagagtggatgcactgcccaggctctaccgtgagtggctgtgtgacatcaacaagtcacttaatctgtgtctcagcttcctcttctgcca

SEQ ID NO: 377444 - DNA, 122 bp, Homo sapiens
aacagggaatttttttatttttaaatttatttttacttttatagaccttagggatacatgcgcagttttgccacagggatatatcacataatgttgaaagtctgcacccaacttctgaataa

SEQ ID NO: 377445 - DNA, 122 bp, Homo sapiens
acttcttgccttaagaaaagagaagaaatgaaactgaaggagtgtgtttccatcctcccacggaaggaaagcccctctgtccgatcctccaaagacggaaagctgctggctgcaaccttgct

SEQ ID NO: 377446 - DNA, 122 bp, Homo sapiens
ctttggaggctcgcgccctcttggaatagcaggttcctgcatgtgccagaaatccggtcccggcaaagctagacgctctgcaatgacaggcgttcccagctagggactcctggctgcttgga

SEQ ID NO: 377447 - DNA, 122 bp, Homo sapiens
ttccgcggggaggttcccatgggagcagggcctgtgctggttccaccaggtgcctttgggcgcatcagaaaagggcacatcttggccaggcgccatggctcacgcctgtaatcccagcattt

SEQ ID NO: 377448 - DNA, 122 bp, Homo sapiens
cagtctctcagtagatagaaatggagctggtgaccagcagcttcccgataagatctcaagcgttgggcgagtgggctgaagcatgcgcactgagaggcaaaatggcggcgtctaactggact

SEQ ID NO: 377449 - DNA, 122 bp, Homo sapiens
ctcccagagtgcttagagagaacacgcgcgtcgtggcctcaaaacttgctcccttagtcccgcctcctcacttcagtgattggattttccacttccgcgcctctggaattctcttcacccat

SEQ ID NO: 377450 - DNA, 122 bp, Homo sapiens
gaaaccacgctgcccgggtggaggagcgccagagggaagcaggccccatgtcctccctcccgcaggaagtgcaccaggcccgtcctttccacccaggctgtacaaaagggaggaggagcact

SEQ ID NO: 377451 - DNA, 122 bp, Homo sapiens
agattgggaggcttcatggaggaagaagggttgggacttggatgtggtggggtagggtgacgctataggcaacccatgaaggtgcacggcagagatgtacagacagtggcttgttccgagag

SEQ ID NO: 377452 - DNA, 122 bp, Homo sapiens
agtcatacactaagttcatcctgttccttttcataaactcaaacgctctcaaagcagcagcgcgttgagaagccccaagagtctgcgcggaaccagtgcgcaggcgctctgaggggcggaag

SEQ ID NO: 377453 - DNA, 122 bp, Homo sapiens
cagggagtgcagagtgtggggcagttttccttccctgaccaactctctcaattcagcacacgagtagcccacagagtgtcaggcccagtatagccagacacattatcagataattattagag

SEQ ID NO: 377454 - DNA, 122 bp, Homo sapiens
cgctgggcagctctgcaccggcatcgccgcatctctccccattgtgccgggaccacgggacggtagtcaagggaaaatcctgactcagggtgtggggttcatgaatgagaagagctttgggc

SEQ ID NO: 377455 - DNA, 122 bp, Homo sapiens
ccattccaaacgaaaacaatcgcttgcagaactacctcacgtgctcaaaccaaaagcagccggcaaatcccatttctacactcaccaacctactcccaccacaaccatctggcttttttcga

SEQ ID NO: 377456 - DNA, 122 bp, Homo sapiens
tggggtcctctggggcattccagggtgagaggttgtcactgccacctgggccatgtgggccggcaccagcattttgtggttacgaattctacagtcacaaatatctttgggcaaatcccctt

SEQ ID NO: 377457 - DNA, 122 bp, Homo sapiens
agtgatagggtttacatgacctggcgcgtgagagccgtgggcgtggttgtgcgtgtgacacgtgtgttttggcttctcccaccgccacgccccttggcccctatggtctgcaggagatgatg

SEQ ID NO: 377458 - DNA, 122 bp, Homo sapiens
ctctcctgcctcagtttccttacctgtcaaggggtggtcataggacgtccttggtcacaccgttgtgggacccacctgggctagagcgcgggacgcgcccaggacagtgactgctgctggaa

SEQ ID NO: 377459 - DNA, 122 bp, Homo sapiens
cactgctctgcagatatagaatgagcgccgggcagcggggcatcttccctgctcccttgccggaacttgtctgcctgccccactcaccaggcctgaggcaaggctcaaaactgccaccctct

SEQ ID NO: 377460 - DNA, 122 bp, Homo sapiens
tgactgatcactgtcttccactctttctatcagggcgacaaagctaggtgagcccgagtgcggagaatctggcctgttccactctcatagtcagggggatcgtgtaggtcctggttcagaac

SEQ ID NO: 377461 - DNA, 122 bp, Homo sapiens
ttctacagggcgtctgagagcccagaaacctatttttttctaaaagattgaagtcgcccccgacattatgtatattcacctgtgtttccagactttgggagcaccatttatgatcatttttc

SEQ ID NO: 377462 - DNA, 122 bp, Homo sapiens
gaccagcgccgccgggaatgggagaggccgtaagctcctccggaagcctcccgcccagcccgagtgaggatcctgggggaccccacccgccaggtgtgatgctctgaagaaggcccccaaca

SEQ ID NO: 377463 - DNA, 122 bp, Homo sapiens
aggccatcttggttaatgagagctctgcgcctgctactccttgccgcggcctctggttcacgtcctctcgccctcctccgctggggatgtgcggggcctccggtgagccgcagctccctcgg

SEQ ID NO: 377464 - DNA, 122 bp, Homo sapiens
aacctgcgtctgcaactcgcgggaacaatgtgcaagtgtggaaagctcccgtagtttattcgttcggtgctcaaagggtctcggtgctgcccagcaaccctggagactgcaccctgctccag

SEQ ID NO: 377465 - DNA, 122 bp, Homo sapiens
ggagacgtaattactcagtgctttgaagggacatccaaggtgctcactcttagccatagccgttggtttcctggatgctgactgtgaagattctaaagtgcttcctagggtgggcggtggtg

SEQ ID NO: 377466 - DNA, 122 bp, Homo sapiens
caatgataggaagagccgacatcgaaggatcaaaaagcgacgtcgctatgaacgcttggccgccacaagccagttatccctgtggtaacttttctgacacctcctgcttaaaacccaaaagg

SEQ ID NO: 377467 - DNA, 122 bp, Homo sapiens
atggcgtcgggggcgggacctccgggatctggcttccgcgggccgccgccggccctgaaacgtgagggatagctgagatgaggcagctactgggatggcccccatgcgcatttacatgcagt

SEQ ID NO: 377468 - DNA, 122 bp, Homo sapiens
agagcgaaaagaggtagagggctggttgtcgctgcgagcgggtcggcctaagcgacagtacgaagcggctacacccgcggggtgaggtgggcctgtattccatgatggcggtggtcgtggct

SEQ ID NO: 377469 - DNA, 122 bp, Homo sapiens
aagctgagaattcgtgaatagggcacaggggtgtctggacagggatgaatgtagctcccacggccgagacagccgctgatgaaagggcagcaggcgtccaaagaaacaggggaacttggaac

SEQ ID NO: 377470 - DNA, 122 bp, Homo sapiens
aaaaaaggccaccccgaaacaacagctagtgaaaaaaaaaaaaaaatcttgttctgataacgtcttttccctggcttgcttacagtggactgtggagtaggaatgactctagagccgtttca

SEQ ID NO: 377471 - DNA, 122 bp, Homo sapiens
gagttcgtggcgctcccgaggcgtggcaaaggcctaaaaacggtcctggccagcggaaggcggcaagaggagcagcaaggctccacgcgaggcggccggcggctggagtcccagtcagcctc

SEQ ID NO: 377472 - DNA, 122 bp, Homo sapiens
tgagcctcgatggcgagaggcccaggatgcgccaccaggccgggctcacttctttgacgccgaataaactgacaaaacaattagctggccggctggggaaggtggtgggtgactcaaatgcc

SEQ ID NO: 377473 - DNA, 122 bp, Homo sapiens
tgggaccgccatgcccgcccccaggggagagcgtcaggggaccactcagaccgttagactcggccaccggcccttgagctggcaggacccaaacacccacatcaggttccccgaggaacctt

SEQ ID NO: 377474 - DNA, 122 bp, Homo sapiens
cgccatttgaggtgggcgtggctattaggacgctcagagagcccagcgcggtgaggaaagcgacgaacttaggagccctggtctgggtccagccaccccttactacctatttgaccttcatc

SEQ ID NO: 377475 - DNA, 122 bp, Homo sapiens
ttaaaaggtgaaagagtttatcctgttggcttttcgtaggcattgttgagaaagaaataccgaggtagaccaaacagcttggggaattgatccatgattgtgttttattcttttctttactc

SEQ ID NO: 377476 - DNA, 122 bp, Homo sapiens
cggcttggccaatgggctgcgcaggggctttggaacgcagtgttgccatcggcgtgcgcgcgtgtgtgcgagtgtgacagcggctgtggctgtggccgtggccgtgggaggcgggcccggcg

SEQ ID NO: 377477 - DNA, 122 bp, Homo sapiens
tggtgcagaagtcgttctcttatttttatttaggttttatctttcgaagagcaaacgagccgggtaaaagtggtaggatgtcagttagacccacgttgatacccggaatcaaactcacctat

SEQ ID NO: 377478 - DNA, 122 bp, Homo sapiens
aagcagggaagcagagccctggggagaatccagactcacagctgaggctagagtcctttccgtccccctgatgccagggtcagctttatctgagtagctgagcctgtaggggagaggtgatt

SEQ ID NO: 377479 - DNA, 122 bp, Homo sapiens
acaagcctctctacttcatagcaaaatctggaagggagagaaatcacacactttgatcttcgcaaaaagcaagccatggaagacagctctgttcctcactgcccctgagctccctgccggcc

SEQ ID NO: 377480 - DNA, 122 bp, Homo sapiens
aaccgggaagtttttcgcctcacgtaacccagcacagccgtcccggggcagggcacgcctcggggtcagaccccagcctgggcttccccgtggcccagtgatgtccctcgcaggaaggagat

SEQ ID NO: 377481 - DNA, 122 bp, Homo sapiens
tgaggtggcacccagcagtgccaggccacttgtctcagctaataaaattcccctagcagccgttccaggtgcccagcccctaagtgccatctggcacccacatcttgagatctgccgcttct

SEQ ID NO: 377482 - DNA, 122 bp, Homo sapiens
gctgggaacggtccaatcaggcacccagctggagcggacatgacgtcttccgggaggcggcggggtctttgtctcgctgcagcgggtgctgcaggtctggccttcacttttctgcgtcctct

SEQ ID NO: 377483 - DNA, 122 bp, Homo sapiens
cctgggctgtttaatacacttggcactcgtgctgcctaccagctgcctggatgttttgagcgtttctaataatagctctccttctacttcagttcttcttagttctctagctctaggaaatc

SEQ ID NO: 377484 - DNA, 122 bp, Homo sapiens
cgggtggggctccgaggtctagctggtctgggggtcagtcccggcctctgtctcccaccgcgcccctcgctcccctggacaccgcctggtgtgtggggctcagacccccccagtccactgcc

SEQ ID NO: 377485 - DNA, 122 bp, Homo sapiens
aaggccaaggcagacagatcagttaatctcaagggatggagaccagcttgggaaacatagcgagaccccatatctaccaaaaagaaaaaatatattagccaggcgtagtggcgcacacctgt

SEQ ID NO: 377486 - DNA, 122 bp, Homo sapiens
cagagtgagcctgcagagctacagcacgagggattggggttagggcagcagcagcacttccggtgggagtcggggaggggcaggctgtggggggaggagaggaagagaccgcggccctggtg

SEQ ID NO: 377487 - DNA, 122 bp, Homo sapiens
gtacaatagttaagagtgatgatgtcctttcagtgcttctgtttaccggtttttctgtggcgtgacaggcatcagaagtgctgcagcagctggtcctaggtagttggtcttagttttactct

SEQ ID NO: 377488 - DNA, 122 bp, Homo sapiens
ccttcccgagaaaggcagggctggatgggcattttgcaaaacccacagctgccactgggtcgggttacacagagctcagagcctttaactcctgcctgactccctgccagaaagcaggggtt

SEQ ID NO: 377489 - DNA, 122 bp, Homo sapiens
ctttaggtaaagcactccagcacttggactcaaattcaatcttccgtggcatagacagcccgtgcaacttgtcccctgcctttcttgacctcccccgacaccctcatcccacatccccctaa

SEQ ID NO: 377490 - DNA, 122 bp, Homo sapiens
tgggactttgagaagagggaggacagaggcctctgtcgcactaacgctctcgtggttgctcgactgttgtatctgtgatacattatccgactaaggactctgggctggcagggccttctgcc

SEQ ID NO: 377491 - DNA, 122 bp, Homo sapiens
tttttactgttttcattgtaactaatccattgtcagtgatcagccccccccccgccccctcgcccatccttggggcctccaatgtgttccccaacagctgccggaatggtcttcctaaaagg

SEQ ID NO: 377492 - DNA, 122 bp, Homo sapiens
atgggggaagggacgagctctggcgcggggcaggcgggtgctggggaggtggagacagcgcgctcccgagccctggaccactccctctgccccgcgcggggccgagctccacggcacgtgct

SEQ ID NO: 377493 - DNA, 122 bp, Homo sapiens
ttatctttcccagtccctcactcagtcagcaaatatttgttttagaccacctagtacagtcgtctctcagtctatgcagggattggttccaggacccctgtttataccaaaatccacgcata

SEQ ID NO: 377494 - DNA, 122 bp, Homo sapiens
aaggctcagaaaacagaagatccctagatcaaaaccaagttccaattccataacttcaggcgttcaccttgctcattgtcccggatgagagggggcatcctgaggcctagccattcatggag

SEQ ID NO: 377495 - DNA, 122 bp, Homo sapiens
gagccccggggcgaacggtgcgggcctgggccttgtggaaaggaggagtgaccgcccgatcgtgcagcagggcatccccctgacctggtagtacttaggtgggtaggatgattgggggcggt

SEQ ID NO: 377496 - DNA, 122 bp, Homo sapiens
tgtaaaccaataaattaggcggagccgaagagctctgggccgtgagcaagcctccagctccggtcccctggacctgccttttaaatgcttattctgtctctttctaactcctttgtctccgc

SEQ ID NO: 377497 - DNA, 122 bp, Homo sapiens
tgctatttacttttttgttgttgttttctccggagctttattgcctaccctttattttcacgatgtgtttgtgcattctgtaaaaagtgggaaacactgttctccggattgtgtgggtgatc

SEQ ID NO: 377498 - DNA, 122 bp, Homo sapiens
actgggggagcacttgacaactctgaccagctccctgcagaaacgctttagaagcgtccacgatttagccaaacccagagtgcccaacggacgcgccaaagaagaaaaacggacggacgtgc

SEQ ID NO: 377499 - DNA, 122 bp, Homo sapiens
ttggagtgaagatagatggataaaaatctgtaaagttccttcaaaaactgtattctgtggcggctagtggctgctgctttgcatttaacactactatcctgaacacagctgatctctctaca

SEQ ID NO: 377500 - DNA, 122 bp, Homo sapiens
gtgtgtgacaaaatgaccagggcctgccctagaagccagtcattgtctgtgaacatgcaccggctgactgattcaagcaatacctgtgtggataaagccacccggagcctcatctcacttag

SEQ ID NO: 377501 - DNA, 122 bp, Homo sapiens
agccgcggagaagcagtgttgtcaacggtgctgacgtgcggtacttaatgagaagttgcccgtgtttttttcgctttatttgtgacgaaacattcgcggtgcacttctttttcagtatccta

SEQ ID NO: 377502 - DNA, 122 bp, Homo sapiens
atgagaactcattaaggcagcaatttatactgtggtggtgagtgagagaggagccatgggcgggaaaagctgaccagagagcagcgagggatgggaaccagcccaggttttggatagaggaa

SEQ ID NO: 377503 - DNA, 122 bp, Homo sapiens
ttcttgcggtcgggcttgctgatgtacttctgcttctggaacatcttctccagcgccttccgctgcacgtcggagaagactgctcgacgcagcatgccccgccgaggcttcccgcgcgcggc

SEQ ID NO: 377504 - DNA, 122 bp, Homo sapiens
taaagccccactcgtgactacatctgtgctttttgccatcctgggcgctagagggaattgcgctgcaattcattaaattgcctctcagtctcaacagatgacaaaccccttgcccttgcctc

SEQ ID NO: 377505 - DNA, 122 bp, Homo sapiens
gaactcctggtggtgggaagagggacccaatggacaaaaccgtttttgtttttgagagggcgccagatttgaaacagtgagaggtcccacatctggtgctgaaactcagagcaacagttcag

SEQ ID NO: 377506 - DNA, 122 bp, Homo sapiens
ggggagctgcccaattgcagggagggcagatgtgatacgcttgctcatgtcctctttgcccgaataccagggtcaaacagcagtttccaggtcctcatggccaatgaccttatagttctgac

SEQ ID NO: 377507 - DNA, 122 bp, Homo sapiens
aggaaatcaataagagccagcaataactccactgaaagcaaatctttcatcactcatacacgacagagaccgcacccctgctccaggtgctgtatctcttatgtattcattcaccattcact

SEQ ID NO: 377508 - DNA, 122 bp, Homo sapiens
tttttaaaacgccctgtatgttccttaacactgcctgtaggaatcctgtagccctagccccgtgggatttccttctctctccgcccgttctccacattccccacttagtttcacattccttc

SEQ ID NO: 377509 - DNA, 122 bp, Homo sapiens
tgtaaccgatttggtgcgtgtttgcaataacctttacgcagatatttcccacaaaacccacgaccctgtcacagaagaacagtagcctacttgcagcagagaatataacgcacaaacacgca

SEQ ID NO: 377510 - DNA, 122 bp, Homo sapiens
aaggattattccatttgtaagattatttcttgttttcttagtttttctgtgtaagccttgcgtaagtgaatttcttttaaaaatgatttggcaacaaaagtatattcggcatgtagtattta

SEQ ID NO: 377511 - DNA, 122 bp, Homo sapiens
tttgtctggataaaaggtacgtatgcttccttgctaagtttcagctttcttttttacaaccgtgatcccagcccttgaaagccacatctcattcacctttactgggaaggggaatgtggtta

SEQ ID NO: 377512 - DNA, 122 bp, Homo sapiens
tatcactttgtcccgtatgttgcaagtatttgtgccagtttgcagtttgtcttttaacctcgtttctggctccctgtgccatataaagcaagggtggagggagcaacttggagaaagcacca

SEQ ID NO: 377513 - DNA, 122 bp, Homo sapiens
cgaggggctggacggcactgagaatgtgcggagaccagcatgacatttagacggctagagcgaaggaggcgggaacgtctgcaagtaggtgtgtgcaaggtggcttttccatcagcatgtgt

SEQ ID NO: 377514 - DNA, 122 bp, Homo sapiens
aggctgaaagagcaattggaacaattagggtggcagagagcaaaaagccaaggttacaaccgtccaagaaaggaagaagatatttgccgaggctgtagaaaaaaacaggctacagagttgca

SEQ ID NO: 377515 - DNA, 122 bp, Homo sapiens
cactgccttaatgagttgtaacgctcaccgcgaaggtctgcagcttgactcctgagccagcgagaccacaaacccaccagaaggaagaaactccgaacacatgcgaacatcagaaggaacaa

SEQ ID NO: 377516 - DNA, 122 bp, Homo sapiens
taccctgtctggagggagaatgactcctgagtcattctcagtcttcctccccagctgctgcgagttcatttgttttaactttccctctcccaagataacatattccgggggccagtgaaaag

SEQ ID NO: 377517 - DNA, 122 bp, Homo sapiens
tagtttcagacaagtgctgtgaaatgagtggacagtcgactagactcttctgtagattggcggctggggcagaaagagccctgggaaacttttccaagaaatgtaaatagaaatacctgaag

SEQ ID NO: 377518 - DNA, 122 bp, Homo sapiens
tcctgcactccggtacgggcactgctgcctagaaatggcacctgggctgctcagagtttacgtgagaccaaatttttaaagaattaggggacctgtcttataatggttaattatggtttatt

SEQ ID NO: 377519 - DNA, 122 bp, Homo sapiens
gtgcttaggaaagggtcaggcccatcgtaggagcaccatatgcctgcagccttttcactacgaattagaataaggactatgtggttgtctctggaccttatcaagacaccttagtgtctgac

SEQ ID NO: 377520 - DNA, 122 bp, Homo sapiens
atgtcaaggtcatgacatgaggcttcggggactctcattttggaggtgcagacagggagccgctctggcccagccgtccccaccaggataggctgctgagtcctggccatccccgaggctgt

SEQ ID NO: 377521 - DNA, 122 bp, Homo sapiens
ttcccctgttctggcagcagcacttctgatcatggtccaggcaactctggcctcagaccccggtgacaggctccagggagctgcagctcttcctgaggatatagcagaccatctacccaagc

SEQ ID NO: 377522 - DNA, 122 bp, Homo sapiens
tcgtcacctcaaactcagtgacaagtcggccacagacgaactgagccatgcttgggaggacgtcaaggccatgtttaatggcggcacgcgcaagcggaccttctccctacaaggaggcggcg

SEQ ID NO: 377523 - DNA, 122 bp, Homo sapiens
ttctttaaagctcacattttatagtatcactgctacaaactatttaatgaaatgtggcatcgggtgaaaagaggcatttgtttgatccttgaacgaattaatctcacgtacttccctgtttg

SEQ ID NO: 377524 - DNA, 122 bp, Homo sapiens
agagctggtggctctggttctcttcacctggggagagacttcaccgtcctggcaggagctcgggggagcccttccccaagtgtgagcagcatccctcgtttctggatcccaggttcaggtag

SEQ ID NO: 377525 - DNA, 122 bp, Homo sapiens
atgacccagtggaggagactgataaggcagatgcatgagtacaacccctgagaatgttaacggtggagaggattcagaacacaagtggagaaactggccttggagagaacattaataaaaaa

SEQ ID NO: 377526 - DNA, 122 bp, Homo sapiens
tgaaggcctccatcatggcgtgggccagtttcttggcctcgagcttgctctcgcactccacggcgtggcagtccatctggtaggacaggtcatcattgatctccctgtagacccaggcgaag

SEQ ID NO: 377527 - DNA, 122 bp, Homo sapiens
ataggagtcccccttaatgtgtcttgccgtgtggctgtaccattacgcgtgtgctcttgccgtgtggctgtactgtcatgtgtgtgcccctgctgtgtggctatactgtcatgtgtgtgccc

SEQ ID NO: 377528 - DNA, 122 bp, Homo sapiens
ggcagaaatcagccaggccagacctgacgaagctcgaggggttgggcgctgccggcgggccgtgaacagtgccatagggaaagctgaatgcaaggcgagaagtgcagagtggacttagggga

SEQ ID NO: 377529 - DNA, 122 bp, Homo sapiens
tatcagtgtggagacaagcacagcacacagacattttaggaaggaaaggaactacgaaatcgtgtgaaaatgggttggaacccatcagtgatcgcatattcattgatgagggtttgcttgag

SEQ ID NO: 377530 - DNA, 122 bp, Homo sapiens
cactgacgagaaactcacagattgaagtggatgccaacgggctaggatcccagctgtagccgggaaaagaacgtcccggcatgaccctgccacctaccttcatcgtagttatagcctcgaac

SEQ ID NO: 377531 - DNA, 122 bp, Homo sapiens
tttggcaggctgcgtttggaccagaaccagccccgggtggtggatgccagtccaggccagcggatccggatgacctgccgtgccgaaggcttcccgcccccagccatcgagtggcagagaga

SEQ ID NO: 377532 - DNA, 122 bp, Homo sapiens
ggcccacagtagcagcggctggtggtccctgcagccggtcagccctaagagcgggcacaacgtgtggcctgggtaccacagggccagaagagagggacaggggccctgctcctgtcacctgc

SEQ ID NO: 377533 - DNA, 122 bp, Homo sapiens
gaggggaggaatacaaaaaaacgaggacgctctcctttcaggaaatggaattctaatgtacgcgttcctatttctgaatcggaggtactaaaaatacccccgcgacagcctgaggaagctgt

SEQ ID NO: 377534 - DNA, 122 bp, Homo sapiens
ctaccagccctcctggaagaactggggaggagagagccgggggtctgggagcaggccccgcgggcggctgcagctcttctgggtagagcctgttctgcccccaacctccctcagcctgagct

SEQ ID NO: 377535 - DNA, 122 bp, Homo sapiens
ccctcccacccatccaagagtacatatctttatcttactctttgtaaaaataattggggccgggcgcggtggctcacgcctgtaatcccagcaccttgggaggccgaggcgggcggatcacg

SEQ ID NO: 377536 - DNA, 122 bp, Homo sapiens
acttaatccccagtgggatcctattgagaggtgtggtgtttggaagcatatagggaaggacggcttcatcctcacaaatgggatgagtgtccttaagaggcctgagggagcttgttctcccc

SEQ ID NO: 377537 - DNA, 122 bp, Homo sapiens
ctttccactgaaatgttccttgaaatcacgtggctgggtgtgcagttgtaagaaacgccgcgtagaggccagcctgcccttggcgcagtttctcccggtgggtcccatcttgggcatctcca

SEQ ID NO: 377538 - DNA, 122 bp, Homo sapiens
tcccccagcccacaggaatccaatgcagtcccttatctgccctgtcaatcactcaatcaccgcccagtgcttggtgggcaccgcacgccctcacacacactcaaacacatgctcacacatgc

SEQ ID NO: 377539 - DNA, 122 bp, Homo sapiens
gcgcaacgtcacaggcgggagctgacaccacaatgctactgacactatcgctgggggaggcgattggcgcgcgccaggccgggggcgggaggaggccgcgggttgagcgagcggagagagag

SEQ ID NO: 377540 - DNA, 122 bp, Homo sapiens
cctccgcgagcagcactgtgactcctcttccacagcgcaggacgtcgtggccctgagtcccgagtgacttgtctgtggtcacataggtggtggggccactgccagaaccatccccctcccca

SEQ ID NO: 377541 - DNA, 122 bp, Homo sapiens
tctcaccttgggggtgcagggagacacactggttatctgtgcagaagcggactgcctcaccgtccatctctgcttccttgatcctccagcactgctcccagccactggctcctggaagggcc

SEQ ID NO: 377542 - DNA, 122 bp, Homo sapiens
cactgaggctgtgagtaatcattttttggtcatatgatgcccctggacacactataaatgcgtatactgtttttcttgttactctgcctgctgtcagtttaccttatagactcaaatttatc

SEQ ID NO: 377543 - DNA, 122 bp, Homo sapiens
tgccagcagaggtctgttggttcaaaattatagtttctttgggccagcggaagttgggcgcgggacccaagagagagaacgccccttaccgcctcacctccttcctcccctcatcttcctat

SEQ ID NO: 377544 - DNA, 122 bp, Homo sapiens
aacagggagagaacatacatagtgggagtttatcctgtccctttgagacaggatagcccacgctgaagcccagagtggccacagcacccgagatcagggagaataaagctgagcaatgagta

SEQ ID NO: 377545 - DNA, 122 bp, Homo sapiens
tctgttggaaccacctatatgtcttgagaaacaaaaccacaggaggaaaggaagaaaaaccgatcaataccgtctgtgcctgatttcctaatggattttgttcgttttttcaggggaacggt

SEQ ID NO: 377546 - DNA, 122 bp, Homo sapiens
gggctgccccgccggagccgacctggggctagaggcaggagccgcatagcggacaggctccggggtgaccccgggacgggacgggacggagggacgcacaggtagctgaagggcgagaggcc

SEQ ID NO: 377547 - DNA, 122 bp, Homo sapiens
acccaccaaaatattgactcaaatcctgcagctatttgatttcgggctttaaattgatctcgtattccctgtgggactccaactgcatctaaatagacgtgagagtcgaaagacccataagg

SEQ ID NO: 377548 - DNA, 122 bp, Homo sapiens
cctgaatcttaattagttcatagccatatgaatgatcatctctgagcacctttcactttccgctctggggcttctctgatgctgtgacttgcaacacctaaacgaacacacaattcactgaa

SEQ ID NO: 377549 - DNA, 122 bp, Homo sapiens
ctttcttgccttggttttcgaagaatgtgacctggagggctggtgggcggtgcggcgcgccgcggcgcatgcgcgttccggtctgttttccctgagttaaagcgcgcgggtgccagccggga

SEQ ID NO: 377550 - DNA, 122 bp, Homo sapiens
cttttaggagctgcattcgcgcgttcaaatataaggccaatagagacttattttgcatgacgatgcacacgcatgtatactgtattgaatttttagagcattcctattcgcatatgagatgc

SEQ ID NO: 377551 - DNA, 122 bp, Homo sapiens
gaggcggggcagagcaggaggtgctgggcagaaggggtggggtagggggcgagggcagagcgccccctcgtggctggggcgcctgcgcaaaccagctgcctcacgagcactggagcttgcgt

SEQ ID NO: 377552 - DNA, 122 bp, Homo sapiens
gaggaggagggagaagacagcaggaaagcttgagggcccacggtgctgcagacacacacccggctgtggtctctcccctccctctccccaaagggaggcctgccaaaggacccacgagaaag

SEQ ID NO: 377553 - DNA, 122 bp, Homo sapiens
cttcttctcaagattctctccttgagtctttgttctgcaagttctctccctcgaatcatgcgttcctggtgatccttagtctgcatctgttccctctcatttacctgctttcttctctgtgc

SEQ ID NO: 377554 - DNA, 122 bp, Homo sapiens
ccctccgagttcccactccgcacctccgagggcgtgaaaaccacgggagccgccccaccccgcgcgcccagccccgccccagcccagacaccgccccccgccagtcttccctgcggcgccca

SEQ ID NO: 377555 - DNA, 122 bp, Homo sapiens
gcttccaacgcactccttgggtgccctgtcacttacatggaggcttatttgcccggaagacgtcagaaatacttgtggccgtgggtgaaagtgaagcctgggttacctggccaccagagact

SEQ ID NO: 377556 - DNA, 122 bp, Homo sapiens
gccgccgccgccggtcccggagccagagaagaaacagcaaccggcgcgcgccaaaagtatcgtcacttcctgtattggcgcgtaatgatgatataatagccgacctccggcccagaactcga

SEQ ID NO: 377557 - DNA, 122 bp, Homo sapiens
gcacaaacaagttcttaaaagcattttgctgtggaagggaacagagaaatggcacagggccgcccgtggatgttgcactaaggaagggtttcatggtagaagggttccctggcaaggactac

SEQ ID NO: 377558 - DNA, 122 bp, Homo sapiens
tctaggctgatagccttgcttctggactgcagctgcttagtcctaccttgatcatttgggcggtggaaacaaagtcattttatttttattgatttatttatttttttgagatggagttttgc

SEQ ID NO: 377559 - DNA, 122 bp, Homo sapiens
ccccgctcctctgctccctgtggcctcctgacatacatcaccggccattcacagctgcgtcgggtagggtgcctctcgccagcgtcactcattaaggtatcatccaacccagtgtggagggg

SEQ ID NO: 377560 - DNA, 122 bp, Homo sapiens
tgtactctagcttcctgcagttaaaggagccatgtctaaccataagactggatgcttccacgtcccaccaaaatggagtttgcctgttttgaccacaaagctgccaaaacattacaaatagt

SEQ ID NO: 377561 - DNA, 122 bp, Homo sapiens
tggcggtgcggggcgctggcgacgggacagggtttttgctgcccggggcctagtctacctcggcacgcttttctctgaaggagacacgcacttgcacgacgtgggcctctgtgcagctctac

SEQ ID NO: 377562 - DNA, 122 bp, Homo sapiens
gggaacttcattttgttcatctataaataaagaaaaagaaggaagaaataaagccttatgcgtattcccagggctagatagattcaagtggttaagacagcttgatgaattcttcatggagg

SEQ ID NO: 377563 - DNA, 122 bp, Homo sapiens
ggctggctcaggagctgactggctgtggtcacaagaaatctgccaaacatgccatgatgtcgccagcccacatgggaccaaagaccccttgccataccccaagatactgaatgtcccaatat

SEQ ID NO: 377564 - DNA, 122 bp, Homo sapiens
atattggagtcttagctgttttgtatattggagtcttagcttatttgtatattggaggtacgcataaaattgtttggataatagtctactgcttaacaaaataaggcttgagaaaacaaccg

SEQ ID NO: 377565 - DNA, 122 bp, Homo sapiens
aaaggtgaggcgggagctccgtggccctacagggatgaggcctcatgcacagggcatctgcgacccaccaaggccgtgatttacaaaacaatgtgctttagaaactgctggaggaagaatga

SEQ ID NO: 377566 - DNA, 122 bp, Homo sapiens
ggtccccaagagacccgcggagggaggcggaggctgtgagggactccgggaagccatggacgtcgacaggctccaggaggcactggaagattttgagaagaggcgaaaaagaaagtctgtcc

SEQ ID NO: 377567 - DNA, 122 bp, Homo sapiens
gatatgaggagctcctctgcctggctgcccagtctggaaagtcaggagcctctgcccggccgccatcccatctaggaagcgaggagctcctcttcccggccgccatcccatctaggaagtga

SEQ ID NO: 377568 - DNA, 122 bp, Homo sapiens
ccccatcccatccaggcccaatcggtggcctcacctggcacaggggatcggcctgaggagcgtgtgggcctcactacagcacaaccccaggcccggggtgggtgagccgacccactccccat

SEQ ID NO: 377569 - DNA, 122 bp, Homo sapiens
ggccaagagccgcccggccgctcccccgcccctccccctccgctctccgccccagcccggcggctccgccccctaggtgacgtcactggccaggccagccggcgccattttgaaagtggagt

SEQ ID NO: 377570 - DNA, 122 bp, Homo sapiens
tgggagcagttgttgagtctgagcccacaggggacgcactggcccacagatgtgctgggacggccctggggaccggaaggtggacacctggacccgccctgtgctgtccaagcaggctctgt

SEQ ID NO: 377571 - DNA, 122 bp, Homo sapiens
ctcttgcgcgcctgcgcaacgacaagactgtcgggatttgtagtccaccgacaaagtgggcggactgcgtgcctttcccctttctgcctggcaaagcgcttgccgggacctgggaggagctg

SEQ ID NO: 377572 - DNA, 122 bp, Homo sapiens
ggaatctgcccatcaaccccagatcagcttctctctccctgccttccttcacccatgtgacggcatgtgagatgaaagccaagttaatatggaaattattattaataatctggtggtggaca

SEQ ID NO: 377573 - DNA, 122 bp, Homo sapiens
ctgtatatattgttagaagcagaaatctctaagtttacttttaaaacatgatccttgcctcgaaaccttgtagaataatataatgtccacataataccaagttatgaaaagaaacataccta

SEQ ID NO: 377574 - DNA, 122 bp, Homo sapiens
gggctgagtgtgagaccacgggagagagttccacgtacacacagcacacggccaacaacacgctcacacgggctgagtattagtaatattattgtatccacgtcagcttcctgactttgtaa

SEQ ID NO: 377575 - DNA, 122 bp, Homo sapiens
tctgtaatccttgcactttcggaggccgaggtgggcagaggccaggagctcaagacaagccgggacaacctggcaaaaccctgtctctcctaaaaatacaaaaaattagccggtgtggtggt

SEQ ID NO: 377576 - DNA, 122 bp, Homo sapiens
agaggcagctccttcctgccttcctggatcgctggggggctgagtgctgcgcaagagtctcgccattacctgtgggacgggggcgttagtgagcttgtcagcaggaacacgacaggctcaga

SEQ ID NO: 377577 - DNA, 122 bp, Homo sapiens
atggtggaggggaccaagttccggagcctgctcctcaacatgctgcaggtaactggacgccggccaccaccgccccgcgccccctgcccctctgcgttcggtgagttattcctagcgagaag

SEQ ID NO: 377578 - DNA, 122 bp, Homo sapiens
ttcaggaaaggcgaatcagccagcggccagagccgtggtaatggagctcagacacgggatcgggtgtctggagggccccactataaactgcgggtcacatccttcaacttgattcctcgctc

SEQ ID NO: 377579 - DNA, 122 bp, Homo sapiens
tgggagtttcagagttgtcctggtaataaagcttgtgtgctgtgtttgagtgggctgttgcgtgaacaccattcctcaacttggtgtcctcagtaataatcaggctgttttaaatgtagctc

SEQ ID NO: 377580 - DNA, 122 bp, Homo sapiens
ggccctcaggttcctgttcagcccctgctgctatcttctatcatagcagcacaggacagacggtgcccggccctctcctgacccccgccctcctgggcagctgcacctgttcaccatgggaa

SEQ ID NO: 377581 - DNA, 122 bp, Homo sapiens
actctgctgtggggaagggctgatgcaggtgtggagtcaaatgtgggtgcctcctgcagccgggtgccaggaggggtggaggggccaccctgggctttgtccgggagcctggtcttcccgtc

SEQ ID NO: 377582 - DNA, 122 bp, Homo sapiens
aactctaatcctctctcccttcccgccccgccccttcatcaacccttgcctcagtggaaacggacatttaacatggaatgttcatggcagtaaccctagccgtctccacgtcatctttttgt

SEQ ID NO: 377583 - DNA, 122 bp, Homo sapiens
cgagcgagaagcggagccgatccccaagatgaaggtgctggagagccccaggaaaggcgccgcgaacgcctcggggtcgagcccagacgcccccgccaaggacgcgcgcgctagcctgggca

SEQ ID NO: 377584 - DNA, 122 bp, Homo sapiens
caacacacagcgccgcaagctgaaccacatggaagagggaacctctcttaactgttggagcgcgaaaggacctttcgctctcgcaaacaaggtaaatttcagccctcaagcagcgagaccac

SEQ ID NO: 377585 - DNA, 122 bp, Homo sapiens
aggcagctctatatcgactgatgggagaaatgtcgtattttgctaagtgaaaaaaagcaacgtgcagaagagtgtagatagcatacttccacaggttaagactatatagttgaatatgaaca

SEQ ID NO: 377586 - DNA, 122 bp, Homo sapiens
ccttccctgccacccccggctcacaccaccgcccaccgcaggcacacttagtcctgtccacgccagacactcaatttcctgtccctggcttgtggaagggcctagccgcctttccatccctg

SEQ ID NO: 377587 - DNA, 122 bp, Homo sapiens
ctttaagtgaagatcaagtcggtcgagaggacagcgcacttgcccgctgggccgcagacccggccaacacagcctggatggagagtaagttccccagctgcccacagccagaatcctcacca

SEQ ID NO: 377588 - DNA, 122 bp, Homo sapiens
ctgtgaggccatgagcaagatatttaatctctcccagcctcagtttctggaagattctaacgatgggatttttacaaacagtttatattcattgctgacagtcttgaatacaatgggaaata

SEQ ID NO: 377589 - DNA, 122 bp, Homo sapiens
ccataggttcaactttcagtccctggtctatctagtatccgtgtgtacagctgaaaaaagcgatacaatcaacagcccaaattttgctttgttctgtgacctgagaatagcaggacccctcc

SEQ ID NO: 377590 - DNA, 122 bp, Homo sapiens
acaagtaaaagcaaaattgttccttaaaattgcaacatttgggcccagcgcggcggctcacgcctgtgatcccagcactttgggaggcggaggcctgtaatcccagccacccaggaggctga

SEQ ID NO: 377591 - DNA, 122 bp, Homo sapiens
agagcactccggagccctcaataaacaggcaggagacagtcgcttcacatgggctttcctcgtcatcccacacacagatggcagagtgaagcggagaaaaatgcctgaacaggctcatgatg

SEQ ID NO: 377592 - DNA, 122 bp, Homo sapiens
gcattttagcaaccaagggggtgtggctaagcgagagagcggcttccctggtggcccgggcgcgcggtcttgtcatcttgttgctccttgtgagcgctgggtagagaaagtgagggggtaga

SEQ ID NO: 377593 - DNA, 122 bp, Homo sapiens
ccccgcgtgcccgccccttctccccggccgcacccgagacctcgcgcgccgccgctgccacgcgccccccccaccgccgccgccgccccagccccgcgccaccgccccagcccgcccagccc

SEQ ID NO: 377594 - DNA, 122 bp, Homo sapiens
tcggccagcgcagcggaccccggcaggacgctgttaggtttcccggggcaacagaaggcgcgcgcgctgggcccggcgattggccaggcgacaggccgtcgtccagcgccttctccccgctg

SEQ ID NO: 377595 - DNA, 122 bp, Homo sapiens
ttcaaagtcacacggtcagcaggctaggacagcagaacagctggctctacccctcactcacgagctgtctgaccctgagcaagtcgcctgttctctctgggaggaaagcctggcggggcagg

SEQ ID NO: 377596 - DNA, 122 bp, Homo sapiens
gacagtcttggtgactacccggcttagcgagtgagggaatatttggcacagcagcgaaatcgggagtgtggggtgcgggcatcgcgtggacacgctgtgaactgggatttggagcacgggtg

SEQ ID NO: 377597 - DNA, 122 bp, Homo sapiens
tcctggcctttaggaagctttcaaggtgcaggtgtcctccaaggtgcaggtgtcctccagcggagtgtcccctccgtgaggtgcctcccagcacaggtgttcccctcggcgcaggcgtcccc

SEQ ID NO: 377598 - DNA, 122 bp, Homo sapiens
gactgagccctcctgaccctgatgacagtcctgtggaagaacctggtaactcctgcacatcgcaggactcacagacctctgggagaaagtaaatatgaatgggtgctaatcttaaacacacc

SEQ ID NO: 377599 - DNA, 122 bp, Homo sapiens
gcttataggtcctggggcatacatggcacgcctggaggccacacacaccaggtcagggagcgcaggcagggagggagagagagagggaccagtggactgacgcctttattgggtccaaggcg

SEQ ID NO: 377600 - DNA, 122 bp, Homo sapiens
agctgttttcccgcctcagcctccagagtagctgggattacaggcgtgagccactatgcccggctaattttgtatttgtggtagtagagacggggtttctccgtgttggtcaggctggtctc

SEQ ID NO: 377601 - DNA, 122 bp, Homo sapiens
aggaaaatggcgagttttacgagcttgccaagctgctcccgctgccgtcggccatcacttcgcagctggacaaagcgtccatcatccgcctcaccacgagctacctgaagatgcgcgccgtc

SEQ ID NO: 377602 - DNA, 122 bp, Homo sapiens
gcgcttgttaatccgcagtgtgacaacgttctggttatgacttactagaggaattgctcacggatacattagatgaatacccagggcaaaccacgagaagggcagaattcagtgatctcctt

SEQ ID NO: 377603 - DNA, 122 bp, Homo sapiens
tctcctgaacatcctctgtacctccagcccaagcatgaggcatgcatttgaacagaacatcgggtgtgcctacacaccatccccttcttccacacgggctacctccctctccctcctcctct

SEQ ID NO: 377604 - DNA, 122 bp, Homo sapiens
agtatggacgtggacaatggcagtggcccctggctggcccaagagccgggtccagatacgcgcgcctgattccaggcgtcataaccaacccggggccgcgaggctgggatcaggcaccccgg

SEQ ID NO: 377605 - DNA, 122 bp, Homo sapiens
tcgctcaagtacaacatttggaggcccgagtgagaaacgccacgaggcaagagctgggctcgctccgggcttccccagaaggacggccggcttgtgggggggtgccatctgaaaaaaaattg

SEQ ID NO: 377606 - DNA, 122 bp, Homo sapiens
actgagggcgcccctctgtcggcacaggacgaggcccgcatgagcaaggacggctgctgccgcttctgcccgccgcccccgcccccgtaccagaaccgtgagtgcccagcctgctgggcggg

SEQ ID NO: 377607 - DNA, 122 bp, Homo sapiens
tcgtgaggaagggctcatgccccttatttatgggaaccatttcattctaacagaataaaccgagaaggaaaccagagctgggactgctgccgtctgtccggtagagtgaagcaagggggctg

SEQ ID NO: 377608 - DNA, 122 bp, Homo sapiens
tccttctcttgcctccactatgcctttaaagaagtaactgtggctgggcacagtggctcacgcctgttatcccagcactttgggcagatcactttaggtgaggagttcaagagcagcctggc

SEQ ID NO: 377609 - DNA, 122 bp, Homo sapiens
gcttttaaaacactctttattctcgtctccaatttctacatctactctcgcctcacctaacggtagaacttctagaaaagattgtctatacaggcacttggatctccagggaatcatctctc

SEQ ID NO: 377610 - DNA, 122 bp, Homo sapiens
gtggtggtggagaagaaagcttgggtgggttggtagccagatggagacgcaactgttccgcggcggcagatcttcagttgcggtgcggagctgagcaggtatccgagagcgactgcatcgcc

SEQ ID NO: 377611 - DNA, 122 bp, Homo sapiens
gccctatgcgatgacgcaaggagcgaaaaaatgggtctggcgagcgcttcgccggtgccacgtctccccctagtggtcacaccaaaacgtggcccgatcatctaaagagaaaaccctctttt

SEQ ID NO: 377612 - DNA, 122 bp, Homo sapiens
gcatctggccgggtgcctgcagaaccaggcaagaactgcccatgaaagctggctggctgccgggaactcgttgtctttccatttaaacagacactggctgtctgttgagtttctggaaacat

SEQ ID NO: 377613 - DNA, 122 bp, Homo sapiens
caaagctttcctgaggaaaatcgaccccaaggacgaggctctggccaagctgggtatcaacggtgcccactcgtccccgccggtgagcaccccagcctgtctcccccagagtgtgtgctgct

SEQ ID NO: 377614 - DNA, 122 bp, Homo sapiens
gtggcaacatttcaaatgattttaagaagcctgcagagctaacagtagctcagaagatttcgtttctggagtgacgttgagcatggtgtccccaagcaacccagtgacctgtgaggggaagt

SEQ ID NO: 377615 - DNA, 122 bp, Homo sapiens
gggttggcagggggagctctgaggttccctttaatctgagactctgtgctaaaggtgcagcgatgggggtgagaggagcacagagaagagagaccacagagaaggaaaatcagggtagcctc

SEQ ID NO: 377616 - DNA, 122 bp, Homo sapiens
ctcccgcccaggtttggtcgccatctttcggagcgtcctttcccgcgagtgctgcagtcccggatctcaggcgtccgttagctacagaggccaattcctaacccgcgcggctcgaatcccgg

SEQ ID NO: 377617 - DNA, 122 bp, Homo sapiens
cggtgactctgaccttccagatctaggggggcctggggagcccccaatccagcctgggcacgtcccctcccctaggccacagccgaggtcacaatcaacattcattgttgtcggtgggttgt

SEQ ID NO: 377618 - DNA, 122 bp, Homo sapiens
gaagggtaaccggagctcaggggtgggcaaggctggctggctctgggggccttagagaagcggtagaaatccagtgggtagaaggggcattccggcaaaggagaaagggccacgccgagtgg

SEQ ID NO: 377619 - DNA, 122 bp, Homo sapiens
cgagagcccggggcgagtgggcctctgctcgtgggtggttctcgtggaggtcagctcccgcgtgtctccgctcgacagggtgcttgggcaggtaagggtccgctcagtagcccaaccctctc

SEQ ID NO: 377620 - DNA, 122 bp, Homo sapiens
ggctcccatacctgctcagaccagcttgtcaccaagtctgcctcatccttaagtggatcgcgataccccagaagagcagctcctgcctgaatagggctaggaggggaaaaaaaagaggaaga

SEQ ID NO: 377621 - DNA, 122 bp, Homo sapiens
tgaccacggagaacaggtccactctcatccccacttggtgcaccatggaggctcagactccgtcctcaaggctggcaagaagacagggtgagacatgagccccctgatccaggtgacgggag

SEQ ID NO: 377622 - DNA, 122 bp, Homo sapiens
tatgaaggacacattccattcaggacctggaggagtgaatctctgtgagtaggcttatcacgaggggtgggagaaggccttttgggggccagttcacagtaattcacttttttctgggcttg

SEQ ID NO: 377623 - DNA, 122 bp, Homo sapiens
ccggatttgcgagctttttctctgccaagcctttcttcctacttactgcctgcttggtggcgcagctccggcctctaaggccttttcttaactctttatgcacctgattgccttgttgatct

SEQ ID NO: 377624 - DNA, 122 bp, Homo sapiens
gtcaggcgaatcgatgtggctcccccagccccttcctgggagcatcctagagagatagcgcggaaatacacgcggcccggtggtcccgggagcagccacggtgcccagccccgcggccttgc

SEQ ID NO: 377625 - DNA, 122 bp, Homo sapiens
agattgacaaggagctgctggaggcgcaggaccgagtgcagcagacggagccccaggtaccgggtggggcagagccagggaccaggggtggtgtcggcccaggcagaacggggctcctcgag

SEQ ID NO: 377626 - DNA, 122 bp, Homo sapiens
gaaatgaggctggggcggggtggccagagcagccgcagaggctgacgcgggtttggagaacggaagagatgatttgcatggcgcctggtgattggctgatggccgggggctgggtctgagag

SEQ ID NO: 377627 - DNA, 122 bp, Homo sapiens
ttcagagaccaagagcgcgaaggggcgggcgatgtggcaatccgtctgggatgtgaaaagcgtggagcgcatttagaggaattcgacgaaaacacaggaaatcactcctctcccgctcctgg

SEQ ID NO: 377628 - DNA, 122 bp, Homo sapiens
ggatttatatccagaatatatagagaaatcctaaaactcaacaacaataaacaaacggtccgattcaaaaatggacaaaggacttgactagacattcgtgcaaagaaattacacaaatgatc

SEQ ID NO: 377629 - DNA, 122 bp, Homo sapiens
ctgacagccgtctgcctgttctacggctcggccatctacacctacctgcagcccgcgcagcgctacaaccaggcacggggcaagttcgtatcgctcttctacaccgtggtcacacctgctct

SEQ ID NO: 377630 - DNA, 122 bp, Homo sapiens
tatcacgaagggggcggagagtcgggcagaaaccgtctccgccccccaccggagaattgccgctatcttcaggtttgcctgagagggcgagttaccgggaaaggagcatcacaatggcagcg

SEQ ID NO: 377631 - DNA, 122 bp, Homo sapiens
ctcagcaggttgggaatctgaattcaagaggaagacagataagcatgaaagacagcacctcgctgtgctcacggatggagccaggtagcaactcccagctgcgcctggatgtctcaggattt

SEQ ID NO: 377632 - DNA, 122 bp, Homo sapiens
tgagagagccgtgcacggccaggatgtgtatgtgcggcacgagcacacatgtctcccacacgccaacaccagaccatccctttagctgtttgcagctggaagaagacaaatcacacatatgg

SEQ ID NO: 377633 - DNA, 122 bp, Homo sapiens
atcctcataacacttgttaaacctatccctgtttattatttgtctgttttcatctctcctcgccagcgtgtaagttcacaacaggagggagtttgttctgtgttaacagccttttccatcca

SEQ ID NO: 377634 - DNA, 122 bp, Homo sapiens
gtgaagaaactcctttcatctcagcaggtagaggaggactgatgacacgagctgccatggcgggaggaggggcagtagttattgatatggtgagccccatctctcagttttcatgacaggtc

SEQ ID NO: 377635 - DNA, 122 bp, Homo sapiens
tacctgttcccagattttacacaaaccaggcggattcacgccggtgccaatgtcagtggccgcatccctccggccgcatgggggagccagagcttagcaggtgacccgacctgggcttgagc

SEQ ID NO: 377636 - DNA, 122 bp, Homo sapiens
tcaaattcttgcagaataaaatgtaaccacaaagctacctgaagtgtctacagtgtaattcgagaaagcatacaagaatgaaaacactcaagaaaccatataaaaatatggttattaaaaaa

SEQ ID NO: 377637 - DNA, 122 bp, Homo sapiens
agtccttttctgccaacagcctggagcgcgctggattgaatgacgctctcccagcacagccggcatttgcagtgcattagaatcttgccgtcacttgcacacgtcaccaagttactttagtg

SEQ ID NO: 377638 - DNA, 122 bp, Homo sapiens
ggttttacgtctttaaaagagttgtcaagtggaaaacacccaccagagggacataaaccccgaagactgccacgcttaaagacgccggttgggatgacagccgggtggaaagacatgatttt

SEQ ID NO: 377639 - DNA, 122 bp, Homo sapiens
ccagatggggagaaagtaatattttgcagcacagtacagggtaaactgggtccaggtgggcgtagccgccgcgacaccttcacgtgaccgcggacagcttaaggaccccgcatccagtgcgc

SEQ ID NO: 377640 - DNA, 122 bp, Homo sapiens
cggggtgctgggctcggcgggagtccctttgaggagtttgctcccaggtaaaagggcagacgttgctcccgacctccccggagtctgcggccggaaaagcgtctccgtttcatggtctcggt

SEQ ID NO: 377641 - DNA, 122 bp, Homo sapiens
ctggttttccgagccgcagtgcggaccacagccccatagtgtgagccccaggagggcccccggtcccatctgccccagccctcggggaggccccgtagcctcccgcctctggactccactct

SEQ ID NO: 377642 - DNA, 122 bp, Homo sapiens
ccgtcccttcccctcggtctgatctcccagacaactccaggaccttgttggggtgcaggacgcccttcccgtcaccccgggacgtgggaagtgcaggccctgccggtccaagtccccacgaa

SEQ ID NO: 377643 - DNA, 122 bp, Homo sapiens
cacctggcgagagcagttctggccggccgtgtgtgaacactttggggtggaagccactggcgaggagtccaggtgagcaagtgcccgcaggtgcggtgggtggcctgggcgggtcctgtgcc

SEQ ID NO: 377644 - DNA, 122 bp, Homo sapiens
gcaccctggccactccgggggccacttccccagcctggccaatggcgcggcccaggatggcgacacgcaccccagcaccgggagcgagagcgactccagccccaggcaaggcggggaccaca

SEQ ID NO: 377645 - DNA, 122 bp, Homo sapiens
ctgcccatccctcgagcgcctctgcgtgttatgactcagagcccacgcgctagtacgcctcgcccacccggcgccggggcaaaggggcacctccgcccaccgctttctccagacccccgcaa

SEQ ID NO: 377646 - DNA, 122 bp, Homo sapiens
attcagatgtataaagcaccttaagcattagccaccacccttaggactgggcagacccttcgcttcccagaaaggggcagtatgtcaggtcactgggcagtgtgatagaacaatgaataaga

SEQ ID NO: 377647 - DNA, 122 bp, Homo sapiens
attccattcggttcggttcaattccgcaaaaataattgaactgataaacagttcaggcttcggccgggcgcggtggcccaagcctgttatcccagactttgggaggccgaggcgggcggacc

SEQ ID NO: 377648 - DNA, 122 bp, Homo sapiens
ctctttatctatagggagaatcctcaagcggggagacacacccttcctgcagaggcgtatcgccagccacgacaaggcgagccgcgtttctccccacactccccaaaaaggcgatgaccctc

SEQ ID NO: 377649 - DNA, 122 bp, Homo sapiens
atccggcggccgcggcccccgcctcggagcagcgcgcgcgtgtgcccggggatgtgggtgcgcggaacttacgtctcggaatttgttccactgtccgacttccttgtcatactgagagattg

SEQ ID NO: 377650 - DNA, 122 bp, Homo sapiens
agccccgcccctgcaggtgaacggcggcccagtccctgcaggtgacccgcggaccctccccgcccgtcctactaccgtcataggaccgcctccgcaggcgcactggagccgattgcgcaggc

SEQ ID NO: 377651 - DNA, 122 bp, Homo sapiens
tagagagaagcaaggatgaggtaagaacggaaaatgcagaataatatataagtctacacacgcgctgttggtttcagaaagcagagagccaggctaatgttccccaagaagtccagaggatc

SEQ ID NO: 377652 - DNA, 122 bp, Homo sapiens
atgactatgcctgtgggagcaacggctaccggcgcgcggccttctgggagttgtttgttgcgcggagcgcgggcacgtccgccggccaccggaagcaccgccattggccggtgcgtgcaggt

SEQ ID NO: 377653 - DNA, 122 bp, Homo sapiens
ggctccggtgcccgcgatcggcggggcttggctgggcttggctgggcttggctgggctaacggccgggacggaggaaggtggccgacttccgccccgcgcgcgctcgccccgcctctgggcc

SEQ ID NO: 377654 - DNA, 122 bp, Homo sapiens
gcgccattctaatcagaagagttgacacaatcaaatagccacacggcacgaagacgcatgcgtggcgacaacaacaacaaaaaccacaacccacattacttgagggctcgggcgtgcgcaaa

SEQ ID NO: 377655 - DNA, 122 bp, Homo sapiens
aggtgaccaggccctctggcgggaggggaggttgggtcccagtctggccgcaagccgggccgtgggagggagacaagctgtggatcctgattataaatgcagcttctgctacccccgtgaca

SEQ ID NO: 377656 - DNA, 122 bp, Homo sapiens
gggggacctggggacatctgtggtttcgactcaatggactccgcccttgagtggctccgacgggagctggtgagtctggtggggtgggcagctttgcccagggccttcaggctggtcctcct

SEQ ID NO: 377657 - DNA, 122 bp, Homo sapiens
gctggtctgtcccgggggcagggccgccctccatcctcctccagtgggtttctctgggcacgggccgctggcccatcaccaggcagagccaggacgctagactccaggttttctcctctgca

SEQ ID NO: 377658 - DNA, 122 bp, Homo sapiens
agcaccgccccgcagagcggcaggctgacagccaggcgcgggcacgagcagtgctctcttcggctccgctggcgcgtgcccttctcgggctccaaaaatcagcagtgctccgggcgccccct

SEQ ID NO: 377659 - DNA, 122 bp, Homo sapiens
tctcccctcctcccgtctcctttgtcgtgttcccgctcccacgaaaccgcatcctgagaacgtgcaatacccaaaccagaaagcaatggaagccattttcaaaagaaaaggtagaacaaagc

SEQ ID NO: 377660 - DNA, 122 bp, Homo sapiens
cacgtcagcagccaccccccacccccccgcccggcagcccgcccgccccgtccgcccgcccgcccaggcctcccagccccgtgttgcgcgctcactcgtgggcccccgcccgctggtcctgc

SEQ ID NO: 377661 - DNA, 122 bp, Homo sapiens
agctctggtctgatctaggtcaccattgggcttcctgtgctgtcatctgctgcctcttgccgcagattcctggtggtatgtctcagcctttgcatgaaacacaaccatgaaacactaagtgc

SEQ ID NO: 377662 - DNA, 122 bp, Homo sapiens
gcctccacccaagcagctgaagggtcacacacagctctttccgggtgggaccacgtgtcccgggtggctacgtgtgctgagacacgagccccgggccctggcgcccttggcaccaccgaggt

SEQ ID NO: 377663 - DNA, 122 bp, Homo sapiens
ttgacctccagatgccctggtgtccctggctcagcctctttctgccaggttgggagcagtcgggaattctgtcccggtccaacgtccccctcggcccccggggacgcagaggctgctgtcgg

SEQ ID NO: 377664 - DNA, 122 bp, Homo sapiens
ttcctcaagcaccaagtgataatccctttttctggtgtcctgtgatgccttctataaacccgatggagaatttaggaacatgcagagcatgcccctcacctctgaaatgaagatcatggaga

SEQ ID NO: 377665 - DNA, 122 bp, Homo sapiens
acctgtatggaagccctcgaagccaggccgaggtcctacaagacggagcccgagaggtgccggtcttaagctgactgtgaccacgttaaattaaggattcataggaaggaaggcggtgtcga

SEQ ID NO: 377666 - DNA, 122 bp, Homo sapiens
gccttcctgaaagtgtgtgcagccacatgtacgtgtgtgcatgcctgtgctgtggttgtccgaggcgcacctgtgtgagttcctgtgcaggtgtgccctgcggcccaggatgagggagtgag

SEQ ID NO: 377667 - DNA, 122 bp, Homo sapiens
caatgctttaatccacttggaatttattcttgatgtgaagggtcagcatcatccactggtcgggagcctgatccttggagccaggcagacctgggttgagtccatctccgcctgtttccagc

SEQ ID NO: 377668 - DNA, 122 bp, Homo sapiens
acgtaatttttcaccctcttcccaggtgaagactttattttttcaacagatgacatccaccgttgtatcctgaaccggggaatgtcagttgtaagagccggcagtctctgtacccaccacct

SEQ ID NO: 377669 - DNA, 122 bp, Homo sapiens
tccttgcctccactgtgagacaaaccccagccacatctccagcacacaagaacttccaaacgcctaaaccgcagtggccaggcgttcctccaggcccgccgcccccaggagcttgctacaag

SEQ ID NO: 377670 - DNA, 122 bp, Homo sapiens
cttccacagaaacttcaattcccagaggcaggggcggtagttacgcagtggaggctacggcggttgcgtcttacgtcatcgaactgcggccatttcgaacccgcaatggaagaaaggggagg

SEQ ID NO: 377671 - DNA, 122 bp, Homo sapiens
agttcttgggatgaccctggctctcccgcgccagccgctctgctgccaagcgcaagcattcgctcccagatgcttcgcccagttctttgcaaatgtcatccaatcagtgtccaggtgttcac

SEQ ID NO: 377672 - DNA, 122 bp, Homo sapiens
ctctccaactgctgctcctaaatctcagaatatatggtgttgcttgcttctcctccgaaccgccccctcccctcagggtggggatagggcatggaaatggcctttggaagttaatgggattc

SEQ ID NO: 377673 - DNA, 122 bp, Homo sapiens
tcatttgcctgttcttggacttcccactaatggagtcacacagtgtaccatcttttgcctcggacgtcttttgcctaccgtcatgtttcgaggtgcgtccaccccgttgcctggatcagcat

SEQ ID NO: 377674 - DNA, 122 bp, Homo sapiens
ccaaaattatgagccctgattcttggctgaactcccactgctgcaatggaatattagtcccggagaccacccccaactagctggagctgatctcctccctcctccaaccccccagtgtggcc

SEQ ID NO: 377675 - DNA, 122 bp, Homo sapiens
cgcgctgtcccggcccgtaaaggaaggcaagcaacagaggcaaagaaccttctaccttcacgctccgacacgctgctgccatcttgtcgccggccactccacgggatggggatgggggcgcg

SEQ ID NO: 377676 - DNA, 122 bp, Homo sapiens
tcctcgcctctcagcaccacaagccccggcatgcggcgcgcggccacagtgagtgctcaacgccaggcccatggcagccctgggagcagccgcccaaagcctcctcaggcggcagcgtgtcc

SEQ ID NO: 377677 - DNA, 122 bp, Homo sapiens
gagggcaatcatacctgtcatgcgcggttcgcaggcggcatcgagagatgcacaggcctccgtattttctgtactaatttgccacatatcgggcacttcatgtgtgttccatttacacacat

SEQ ID NO: 377678 - DNA, 122 bp, Homo sapiens
acttggtgattatgctggtcttggtcctctgccatcctctcatcttgctccacactctcccggtgggaaatctcttccaagctcatggcttccaatgtcacctatgtgcccagcacctccta

SEQ ID NO: 377679 - DNA, 122 bp, Homo sapiens
cgtgtggatgcactttcctgctttctcagggtgcgcgcgggcacggagcgtcactcggtgcgtgcagacatggagcgccactgcacgtaagattactctttataccacacgcgacttttaac

SEQ ID NO: 377680 - DNA, 122 bp, Homo sapiens
tatcttcctcgcattatcgcagggttgggccgaggcccgcgcatgcctgcagaaaacctacggccgcgaggggtcgggcctcctcctgctcctactcccgagaggctccggcaatgagaata

SEQ ID NO: 377681 - DNA, 122 bp, Homo sapiens
tggctcccgtctctcccggccaatgggcgtggacagcgtgcgccatgccaagggaggctccgacctgcccaggccctgttggcggccgctgcggcagctccattactcatgccgagggcgtc

SEQ ID NO: 377682 - DNA, 122 bp, Homo sapiens
gtagtaatcctttttggaatggaagccatagatcattcaaactcccaatccttttctttccgagacagcatctttatatgaaaattgtcatagcatgatgtaggctgatttaaaaaaagaag

SEQ ID NO: 377683 - DNA, 122 bp, Homo sapiens
taaatgaagtcatagttttaatggctctcacatgaacttctgtgctggggtctctactgccggtagcatagagttttatttgcttggtatgtctccataaagatcttactaaaaggaaaaat

SEQ ID NO: 377684 - DNA, 122 bp, Homo sapiens
cttcttgttccaggtgaatgaaaactttgccattgatttgatagcagagcagcccgtgagcgaggtggagactcgggtgatagcgtgcgatggcggcgggggagctcttggccacccaaaag

SEQ ID NO: 377685 - DNA, 122 bp, Homo sapiens
atcagcctcttccctttgttttccacttagtaggaagggccttccccgcaccagctgcagcgggcagagggtcactttccacacaggcctgtcctgggggcactagccaaggctgtgggtgg

SEQ ID NO: 377686 - DNA, 122 bp, Homo sapiens
agctgggactacaggtgcttgccactgttcctggctaaactttttattgtcttcttaaaccgtaaattccatgaggagcgagcatatgacttgaatatctttattccccaattggatttaac

SEQ ID NO: 377687 - DNA, 122 bp, Homo sapiens
agattggacgtctttgggaaccattactcggcccatcacatctgagtatgttgaagtcaccgaggatcaaggagacagcactgctggagagggcgatagtgaaccaggaactacaagagtca

SEQ ID NO: 377688 - DNA, 122 bp, Homo sapiens
gaagcagccattttgcttgtagtccggaaggactgcaaatcccggcatccctcgcggcagcggccctctacacacaacaaatcccggcatgcccccgagcggcctgaggtggagggttctag

SEQ ID NO: 377689 - DNA, 122 bp, Homo sapiens
ggaagaggcggttgggaggcggagcccggcgcgttaacccttctgctgctgcgtgctcgccgcggagtttcccttgccggcgactctctggctctggccaagcgcttagacacacaggctgc

SEQ ID NO: 377690 - DNA, 122 bp, Homo sapiens
aggatgggagggcagtactgggtggggacaggcaggggcagagcaggaacccctcaaccccgctggaccctggcgctgccctctgtaggcccctcctattcaaggtgcttggcaggaattcc

SEQ ID NO: 377691 - DNA, 122 bp, Homo sapiens
ctggaaatgtggcctccaggagaaataaaagaggatacaagacacggatcactgatgccacggctggggttgtgacgtctttttggaaaaccagttgttggttaccaggtggatatctcaga

SEQ ID NO: 377692 - DNA, 122 bp, Homo sapiens
tctggtgttggcggaagctgacctcgctcacctgctgtgtttgttctttgctccgcaggccgccttccaggagaatgtggggagacaggtatggctgctttcaaacacctttattccaaaaa

SEQ ID NO: 377693 - DNA, 122 bp, Homo sapiens
agaacacataggcatacgtggaaggttgagccatggcatttgggaacccgcctaaccccccggggctgggcacagagtccagggagcacacagcctgggggtcggggagagaacgaagggac

SEQ ID NO: 377694 - DNA, 122 bp, Homo sapiens
ctgctgagcagcctggaggggcaggtggccacgctagcacctagcacggtcctcaggccccgccccagcggatctgctgcggagtggcttagagcagggctcttgggccgcagggtggggag

SEQ ID NO: 377695 - DNA, 122 bp, Homo sapiens
agtcgttccctctacaaaggacttcctagtgggtgtgaaaggcagcggtggccacagaggcggcggagagatggccttcagcggttcccaggctccctacctgagtccagtgagttccaggg

SEQ ID NO: 377696 - DNA, 122 bp, Homo sapiens
ctcagccaggcctgagtcggcctgggtcccgaggtcaaggtcggggtcagggtcggggtccggtcgtacgccctagcactgcctgcggtggggcgcgcacagtcgagcgcggggcctccccg

SEQ ID NO: 377697 - DNA, 122 bp, Homo sapiens
ccttcccgacaagctgggccgcctccttggttggacagggcccattctctaatattttttcggcttgtgttgcgaccaaggtacatacaggtgtcgggagcacacgtgaacaaacgcaaagt

SEQ ID NO: 377698 - DNA, 122 bp, Homo sapiens
ggatcctcagggcgctctcccagcaaagcagtggccgcccgggcggcgggatccactgtccggcagaggtaaggaaccctgcagttcgttcgcttccagactcggagataggacccagaacc

SEQ ID NO: 377699 - DNA, 122 bp, Homo sapiens
ttccgagaaggcccacatggtgaccggtcaggggcccggctccgccgcctcttcaggtaacgggcaagctgagcagcagtcctgaggcctcagcagtatggagtggccgctccccacaggca

SEQ ID NO: 377700 - DNA, 122 bp, Homo sapiens
catgtcgcccgcaacaaggatcacaaggtttttctgctgggactgcaggttgcagaaagacgctatctcttccgagagagtcttcaaataacgagttctctggccaaatcagcccttacata

SEQ ID NO: 377701 - DNA, 122 bp, Homo sapiens
gggtcagaggtggtcagagctgtgcccccacatctgaaacaccttctcaggtcccggcttcgagaccccatcaagccaggaatgttcggttatgggagagtgccctttgcattgccactgca

SEQ ID NO: 377702 - DNA, 122 bp, Homo sapiens
taagaccttactctcgatcatataatacattcactttctattttaaagttatattatagccgggcacagtggctcacacctgtaatcccagcactttgggaagccgaggcaggcagatcacg

SEQ ID NO: 377703 - DNA, 122 bp, Homo sapiens
tgcccattaccatgatgtaatccagtttacagcagagctttgaatgagaactcagcgccccgggcactgtgggaggaacccgggctggtggagggctctggtgtctcgccgccatttatcct

SEQ ID NO: 377704 - DNA, 122 bp, Homo sapiens
ttccgcaggagctcgggcagccttcactgggagcaatcgctaatcactgcattgagtttacgggtgcccctgggcacacttaacccagggcaatgaatagttattgcgcggcctcccgctcg

SEQ ID NO: 377705 - DNA, 122 bp, Homo sapiens
tttcaaactctgggttaatgtacacaggatccgctgctttgcaacccacactgtggcatccgggttaaatcgaatgcatttctgccaggaaggacaaagacagctgatgagtgacagaggac

SEQ ID NO: 377706 - DNA, 122 bp, Homo sapiens
tccgcacgctcggtcgcgggccgtgcgccctcagatgaagcccgtgcgggccggccccagcggcgccccacctccgggccgcctcccaggcccgcctcggccctcctgcctctcagcgatcg

SEQ ID NO: 377707 - DNA, 122 bp, Homo sapiens
agttcacacactgagccactcgcacatgcgagcacattccttccttccttctcactctctcggcccttgacttctacaagcccatggaacatttctggaaagacgttcttgatccagcaggg

SEQ ID NO: 377708 - DNA, 122 bp, Homo sapiens
gccagctccctcgtcgccacgggcagagcccacagatgacgccgactgcagcgatgcctgcgactgggtcagctccgagcaccgggccagattgccagcgtgaccctccccagacgccgggc

SEQ ID NO: 377709 - DNA, 122 bp, Homo sapiens
tcccagctcccaccagctctgtggagtgcacagccctagctacacgtctcacactgatggcgtcacggcagtggctggtccagatgggctgccgctgccatcaatcacatctctgaagaggt

SEQ ID NO: 377710 - DNA, 122 bp, Homo sapiens
ggcaatggtgatggagtaatagcagagcctgacaatgaccacaggcagggaggatgctgacgtgcacaacagccaactcactcaccacctgcagagcctgtgaggtgtgcactggcccactg

SEQ ID NO: 377711 - DNA, 122 bp, Homo sapiens
tgtgggacttgagtatgtgaagattttggtatacgagggggttcctggaaccagtcaccgcgtatgacaaggggcaacagtacttctaagtatttattaatattttaaagcactgtttgctc

SEQ ID NO: 377712 - DNA, 122 bp, Homo sapiens
ccctggactccatgttgcctggcccttgatcactgtttacctgcctgtctctggggcttacgcaaggcctcagagctgccctgctgccttggtcccgccccactgtcctctgtaaccaaagg

SEQ ID NO: 377713 - DNA, 122 bp, Homo sapiens
agggaggaaggaagggagggagggaaggagacaggaagggaggtaggttggttggtccgtcggtccgtcggtcctagaccaatcagagtttgcatttcatttcagcaacttccctgggagag

SEQ ID NO: 377714 - DNA, 122 bp, Homo sapiens
gtgacaggcaaagggctggtcgtggcccttctggggcagatgtggacatggtgagctctgcgcggcagccacacacacagcccccaccaccttcttgagggcctggcaccaagcacctgagc

SEQ ID NO: 377715 - DNA, 122 bp, Homo sapiens
ggactaacgcccaaacctgttgcacaattcgggtccctttcacccagaaatgaacaagggcgctcaggaacggaaaagcgcgcggcccggtctctgcgggccgcggccgcacccggcagacg

SEQ ID NO: 377716 - DNA, 122 bp, Homo sapiens
tgtaatggcagatcccaaagaatctggaggatcttgaacccctaaattctgctggtgcaccgttgccaggagatgcactcttcctcccctcgctgagaaggttagtcttccttcccttgcct

SEQ ID NO: 377717 - DNA, 122 bp, Homo sapiens
ggtccccatgcgcggtgcgctccccctcctagggccgtaattgccgcagccatccctacgcgtctccagcccccgtcgtctttgtccattcggttccgaggccgcgcttggactggggcgcc

SEQ ID NO: 377718 - DNA, 122 bp, Homo sapiens
ttctgtgttgcggggttgggcgggcggagggcgcgtcccgtgctgtgttgcggggttgggcgggcggagggcgcgtcccgttctgtgttgcggggttgggcgggcggagggcgcgtcccgtt

SEQ ID NO: 377719 - DNA, 122 bp, Homo sapiens
agaaatacgggataaacagctaccatgttgagagtggcggcgctacccagacaaccaaggcgaccgccatcttatgagggctggactcgcgaggtgagcgcggcggaggcggggaaccgcga

SEQ ID NO: 377720 - DNA, 122 bp, Homo sapiens
ctgtggccctggggagacctcagctggcccagtagaggcagtgctggcccatggttctgccggaggcgcctccatgtttgcgggtgcaccgcacgccttctccctctctgtccccctccccc

SEQ ID NO: 377721 - DNA, 122 bp, Homo sapiens
ttcacccaccttctttccccggtccacccgcagactgtgcactcctggaaggggagagggcgccggatgaggatccccaaactccacaacccggggtgcatccggcgccaatcccagcgcca

SEQ ID NO: 377722 - DNA, 122 bp, Homo sapiens
ttggttcctccatgcacttagccaaggaggagcatcacttatgtctcatggacctgcctacggggatggcaaggtcaggtgctcaaatgatgtgggtttccttctcccctgacaaaccacta

SEQ ID NO: 377723 - DNA, 122 bp, Homo sapiens
cagcgatccccggtgtcgtgccctccctaccaggctcaagctggctgctcttggctaggtcgggacggggcgcccggcggccgtggctcagtcccaagctacaccggccgcgtcttccaggg

SEQ ID NO: 377724 - DNA, 122 bp, Homo sapiens
ggtctcccagccagcgacgtcgtgggagaatcaggaagtcaaagccacacagccgagaagcggcagctggcgtctcggaggccgtcacgcgctgtcactccgcgcccttcggagttgccgct

SEQ ID NO: 377725 - DNA, 122 bp, Homo sapiens
atatcgcctctctgcctgcccaacgaggggacaatacactgtttcccagactacgtgactcggaaaacttccccgtcagggaaagctgagtctttaaatttacaaaacacccactcgccccg

SEQ ID NO: 377726 - DNA, 122 bp, Homo sapiens
ggctggtacacaaaaacacgcctctccaccacgtgaccatcctcctctctcccagtatgccgctgctctctcaggggcatttggatccccgttttgggtcgtaaaagagctgccgagggagg

SEQ ID NO: 377727 - DNA, 122 bp, Homo sapiens
tttgaactagaaagacagaaattgctgcaggaacgatggatgtaagatggaagtggaaaacgcctagcttctgtaaaggtttttgattttgttacagttactgtttttgttgtaactctatg

SEQ ID NO: 377728 - DNA, 122 bp, Homo sapiens
cgcttggtcttgtggggcagcatgcctcgcacggtccaccggaagatgcagctgggggtccggaagctgcagctgggggtccggaagtgttaggagcctcgcgaagggttggtgttcatctg

SEQ ID NO: 377729 - DNA, 122 bp, Homo sapiens
ggaaggggtccctagaggagacaagacactgcatgaggacagagaatgccctggagaccacgggagcatacagaagagttcagagggagcaggaacaaactttccacttcatcttgtggcat

SEQ ID NO: 377730 - DNA, 122 bp, Homo sapiens
cccgggccgcggctaattatcgggagcttgatgttgataagtaaagcgccggagtgcgggcgaagcatgtgtggggctccgggtccctgtctccgccgccgccgcccgcgcctcccgccgct

SEQ ID NO: 377731 - DNA, 122 bp, Homo sapiens
acaccgattctaacacagaccctcacgggcccccgcggggctcagacaccgattccaacacggaccctcacgggccccgcggggctcagacaccgattccaacacggaccctcacggggccc

SEQ ID NO: 377732 - DNA, 122 bp, Homo sapiens
gcccacagctgagcctccaggcgaggcatggcaggtcagtgcctggccgctgagcatccacgggccacagggcgggatcctcccggcccccagggactgcagcctctgcggccacgggtgca

SEQ ID NO: 377733 - DNA, 122 bp, Homo sapiens
gcccaagtggtgactggcttgtagcctggcacatgcgtcatggttgggcccgtgtgcatgcgaacggcttggtaatttcagtgcttcccttctcatttctcatagctgcactagaaccgtgg

SEQ ID NO: 377734 - DNA, 122 bp, Homo sapiens
gtctagaactcaaatctttgaactaatagaaatctctgatataagctgggtgtggtggctcgtgcctgtagtctcagctgctgggcacctgcagaccagcctgggcaacatagtaagaccct

SEQ ID NO: 377735 - DNA, 122 bp, Homo sapiens
ctttcacataattctgtaggtcttttcccagatatgtatttttctctctaacttctaactcgctgaagtttccgcccatgtgacttccagcgtgagttaccagaaaccacaagagagagaga

SEQ ID NO: 377736 - DNA, 122 bp, Homo sapiens
agctcacccgggagcatgcatgcgacccatgatggcggcgatcaggcaacgaaaggagagcgagagtggaaacgccgcaggaagccacccaacacgcaggaagtgacctcacacgtccccgc

SEQ ID NO: 377737 - DNA, 122 bp, Homo sapiens
acacccccgcaggtgaaataaataacgatgagtgacacccccgcaggttttccgggactccgtgggatccgcggcttacacggcttgccaggcaccaagggctttccaggatccccaggtac

SEQ ID NO: 377738 - DNA, 122 bp, Homo sapiens
aatcaacagagtgaagagaaaacctacaggataggggaacaaatctgcaaactattcatccgacaagggatttttaataaccagaatacataaagaactcggtccagcgaggtggctcatgc

SEQ ID NO: 377739 - DNA, 122 bp, Homo sapiens
caggctgtgaaaggacgtggagcaaccgtaaatgcacgtgactacgtgaaagaagcctgtcgcaaaaggctacgcaatgtaggattccgactgcatggcattctggaaaagacagaactgtg

SEQ ID NO: 377740 - DNA, 122 bp, Homo sapiens
agtagaaccataagaggttatgacttcccttgtggtcaccaggaggctgggctgagccggcgtaaatgatggcacttgctagggtcacagaaatgcatctttaagtgcattcaattacagac

SEQ ID NO: 377741 - DNA, 122 bp, Homo sapiens
aaaatggatgaggatgggaagaggccctcctgctgaggcccctgtgcttggccctcaggccgtccccttacccatctcccctgctctagtctaagagcacctaagaaagagactcactctag

SEQ ID NO: 377742 - DNA, 122 bp, Homo sapiens
ggaaagagtccccaggccgtggggacgagagcaacaggcagggggcgaggcttacattgtcgttctgaaaggagtggaggaagttccctcctagctcgccgtcatctcgaggggtgcctgga

SEQ ID NO: 377743 - DNA, 122 bp, Homo sapiens
aaagaaagacaaggacaccgcggcaacgacgccgagatccgggaacctccgcgaggcccgcggccactcccgagcccccgggagatgacttcacctcgcggagctcagagagccgggggtgg

SEQ ID NO: 377744 - DNA, 122 bp, Homo sapiens
gctgtcctcacagcccagtcagcagtgtccatcagctctgtgcacagaggtgcaggcagtcgggacccacagagaggagggctaaaccgcagggctggaggagggaccccacttagagggca

SEQ ID NO: 377745 - DNA, 122 bp, Homo sapiens
ggcctcaggtacagccatctctcttctggtttgggtttgcttggggttgagggctgggagcgtgactcgggagagatgcttagatgtccctgggtgatgctatgtgtggaggctccaggaga

SEQ ID NO: 377746 - DNA, 122 bp, Homo sapiens
aacccgcccgctttccacggctggtcgcctggtgaggagttgagactctgcgcctccgcccggacccacatggcttgttacctggtcatcagttcgagacatctcagcaatgggcactaccg

SEQ ID NO: 377747 - DNA, 122 bp, Homo sapiens
ctgtcaaacccgaggagcctgacaggcgcagcgtcaccagcgtcaccgggccatagtgagcggccaagccagcgtcaccgggccatagtgagcggccaagccagcgtcaccgggccatagtg

SEQ ID NO: 377748 - DNA, 122 bp, Homo sapiens
gtttgaaatcgcgagtcatgtttcgggggcgagaccgggggtccgaagcccgggaggcggcgaggagatgcggcggcgcggggatgcgggcggcggacgcgggcccagctaccgggcccgcg

SEQ ID NO: 377749 - DNA, 122 bp, Homo sapiens
tggggcagtgagagagtgggggcgggcatggagctgaaagatgttgccaaatccactgggcggtggcgctttgtgagatgtggcgacctgtaacagcgagggcagccgggacttctcacctg

SEQ ID NO: 377750 - DNA, 122 bp, Homo sapiens
caggacaagaatccaggacatggggctccaccggctcctctccttttgctggttgagaagcgttcttccagcagcagctccagattctccacaaaatggggttgggtggctgtgggaagggg

SEQ ID NO: 377751 - DNA, 122 bp, Homo sapiens
gcctagagaggggagggcagtctccgagtttcggaggggcttggagtgagtggacgcactcgggaattgtaggaggacgaggtgagcagccgggtcggcttttggatgagagccccgctagg

SEQ ID NO: 377752 - DNA, 122 bp, Homo sapiens
accaggtcgaagacgttgcggcgcgcgtggtaagcgttcaggcagtgggtgaactgctcccgctccgcctcgctcagcagcgcggtcagcgcttggtgcagctggcgcacgttggcagacag

SEQ ID NO: 377753 - DNA, 122 bp, Homo sapiens
cccgatggtccaatcagctctgggaggtcccggacctttgttatttcaaaggccgggctgcggagaacaggactggagcggttgcatcccgagggccaggacagtggaccgctcttgctctg

SEQ ID NO: 377754 - DNA, 122 bp, Homo sapiens
tcccgccccaactcaggttctgccccaccccgccccaattcacgtcctgctccgccccgacgtaggccccgccctggcccccgggccccgcccccgtctgacgcaggccccgccccctctcc

SEQ ID NO: 377755 - DNA, 122 bp, Homo sapiens
ggaggaggcgaatagttggttccttaccaagaacccggcagcaggcccaccctcccgtcgcggatagtggacaggagctgagaaaatacatggaccaaatgaaaatgactccttttgactga

SEQ ID NO: 377756 - DNA, 122 bp, Homo sapiens
gttgggtctggaccaacaagacacgaggaggcagcagcccacagccgacccctcatgccacgcactgagcagggttccgcatggacgctggtcttgcctcccaggcgcctgaactagcggag

SEQ ID NO: 377757 - DNA, 122 bp, Homo sapiens
attcctcataactgtgttatctcctgagtctcagagtggttaagtgacttactccagcagcgaaaagctgttcttttctgtgagtttctagaccaggacggattgcaggaaagtgctgggga

SEQ ID NO: 377758 - DNA, 122 bp, Homo sapiens
gtctcgcttgttcgcctctcaccgggtcgcttttccattctttcttgcccaggggaggagcgctacatctgctggtactgctggaggacgtttagataccccaacagccttaaggcacacct

SEQ ID NO: 377759 - DNA, 122 bp, Homo sapiens
tgcggcccacagaccacggctgcacgccgcagcccagcagccaggacgggctgtctcccacggccacccactgggggctggtcagcactgcgacaggccaggctcccccaccatctgcataa

SEQ ID NO: 377760 - DNA, 122 bp, Homo sapiens
tcctgttactcaacacttgtcttattatgctgcaaagccagagcagagccgaggtgataacgcgggcacggcaggcccgggctttccaaacctgctcatttttagcccctgggaatcaaagt

SEQ ID NO: 377761 - DNA, 122 bp, Homo sapiens
ttcattcaatttggtcttccttcggcagtaaccctaaactcaagtttcacatttctccttcgataacattaaggtcgctcggtccggttactgcacacctccaattttagcgtccaagaaac

SEQ ID NO: 377762 - DNA, 122 bp, Homo sapiens
gttccaacctctcggctcgggaagggactaacgcgcagctggcaccgggtcggaccgggccgctccccagccaagccccctctcgctagcactcatgggcaccggggctttggggcgacccg

SEQ ID NO: 377763 - DNA, 122 bp, Homo sapiens
taatgctagagtggttgaatatgagcccctcagaaacaggcaccaggtcttttatgtttgcgtttggtatacagtacagagcctgacacatagaggttctcagtaaatgatgaatgaatgaa

SEQ ID NO: 377764 - DNA, 122 bp, Homo sapiens
tgggtaaatactcaattcatcttctggcgccaagaaaattaaggacaggtgatccaccctcggcctcccaaagtgctggggttacaggcctgagtcaccgcatctggttgcctcaataattt

SEQ ID NO: 377765 - DNA, 122 bp, Homo sapiens
tcagtgcacacatgcatcttgttgcctcactccacatgtgacatgcaggcaagaaatgtgcgaagaatcagggcccctgcctttcaaactcactatcagcattcctgcaatggcatgtcaag

SEQ ID NO: 377766 - DNA, 122 bp, Homo sapiens
caacttccaatggggagactgaagcccaaagcaggctccagcacccaaacccatagcctccgggccttccccgcagtcactctgctcctgtgggagcacatttctgtgttccttagtatggc

SEQ ID NO: 377767 - DNA, 122 bp, Homo sapiens
atccccaggctggggctggattctgagctctacatttctacctcccccctctccaacccccgctatttctatgtcctcactgataaggaaggagctagggtccttgtggaggccggggcgag

SEQ ID NO: 377768 - DNA, 122 bp, Homo sapiens
caatcactttcaaactctgttgtacttcatgccagcagtttcactccctgggtgtgcaatcgtatggggcagatgccttcgaaggagctatcggacccagatgaagaacatataatatacaa

SEQ ID NO: 377769 - DNA, 122 bp, Homo sapiens
gcgccgccagcctgagggctataaaaggggtgatgcaacgctctccaagccacagtcgcacgcagccaggcgcgcactgcacagctctcttctctcgccgccgcccgagcgcacccttcagc

SEQ ID NO: 377770 - DNA, 122 bp, Homo sapiens
caagactccgtgggcgtattaccctccgagccatgtgcgggatataatctcctggtgcgccgtttttaagcccgttggaaaagcgcagtatttgggtgggagtgacccgattttccaggtgc

SEQ ID NO: 377771 - DNA, 122 bp, Homo sapiens
gaacgagttcacggagcatgtcgacatgcagcatcccaacgtgattctcaaccccctctacgtgtgtgcagaatgtaacttcacaaccaaaaagtacgactccctatccgaccacaactcca

SEQ ID NO: 377772 - DNA, 122 bp, Homo sapiens
aattttgctactgctcattgtttgggtccacgctgcttttatgagctgtaacactcgccacgaagatctgcagtttcactcctgagcccagggagtccacgagcccaccgggaggaaagaac

SEQ ID NO: 377773 - DNA, 122 bp, Homo sapiens
gtcgcagctgatctcccccagtatctccgcagtccttcccgaggccttctgcgtccgccccgccccctcgggctgcacaactcccaaagcccaccccaggcaaaaatcacgtccagaatctc

SEQ ID NO: 377774 - DNA, 122 bp, Homo sapiens
acatggccttctccctaggggagcctggcctccttgtgggtcagatcaaccaacaggacccgctgcgccgcttcgatggctatgtcagcgagagcgccaccagcaagaagatcgcccacagc

SEQ ID NO: 377775 - DNA, 122 bp, Homo sapiens
ctcctggggtaccccccacccacgtccctgctgcaggctcccagtgtcctgccccggcgtcgagtgcgccctgctggctccccgacctctcccgcgatctgttcttgttaggattttgtttc

SEQ ID NO: 377776 - DNA, 122 bp, Homo sapiens
taccgctccctttagagggactcttggtcatatagaagttccccgcttgaccctccttgacgactgacagtacgaccctcgtttctaggggacttcgcccgtcttggtctccttccaggctc

SEQ ID NO: 377777 - DNA, 122 bp, Homo sapiens
cctcaccctcgtaggacgagcgccactcggccttgtgcttcttgtgcttcttgcccatggcggcgccggcggcgggcccgaggcgggggctgggaacagctggcacccggtcggaccttggc

SEQ ID NO: 377778 - DNA, 122 bp, Homo sapiens
ctggttcctgaatggacctcaggcgccctgggacctgtgctcttgctggaacccacataacgccggaagcggacagaccgacttgcctgtttcacggtgcccgcttcccatgagtcgaaacg

SEQ ID NO: 377779 - DNA, 122 bp, Homo sapiens
cttacaggtaggcatgtaaattgcacacatcttgtgtactgctcaattcatttttatgtacgcatatatccatgaaccaccgagactgagatcaagagctagaacatttctcatactccaga

SEQ ID NO: 377780 - DNA, 122 bp, Homo sapiens
gaccatgtttcctgaggacctggagggtatcgcacctacagccagcaacgccgtgcagcacgctcggagcgcacccaagagggcagatcagaggggcgcacgcggatccccaaaatcctgaa

SEQ ID NO: 377781 - DNA, 122 bp, Homo sapiens
ttccagtagcagcggagtggccaatgggaccgggaccagggctgggggccggggggccgccgccgcggggaggttcccggctcaggtgcccagcgctcaccagcccagcgcctcgggcggcg

SEQ ID NO: 377782 - DNA, 122 bp, Homo sapiens
acgcgtcagggccacgcggaggtgacgggaacgggaatgagcatgcgcattctgacaaagcgaagccaaaggtggccattttgactaatgtcaacggtttttcggttttttttgtttttttt

SEQ ID NO: 377783 - DNA, 122 bp, Homo sapiens
acttacaaaaagaatgatcttagacaagttacttaacctatcctaattcagttccctcaacgtaaaatgaggaaaatgtaactccttgatgtaagagtataaacaacacaggaagagtaggg

SEQ ID NO: 377784 - DNA, 122 bp, Homo sapiens
atcccgggcggcctggtcattggccagcccctggccacgtggtccctcgtaccaatcgatcgaattctagtcgcaattctctgtctgtccctcggctctggggagaaagggggggctgtggc

SEQ ID NO: 377785 - DNA, 122 bp, Homo sapiens
ctgaggccggggctggtggtgcaggacacacccagggcgtggggtcccaggcttagggatcggcaggggtggctccccaaccaccaggaccccggcaggatgggcctggcgcttctggaggg

SEQ ID NO: 377786 - DNA, 122 bp, Homo sapiens
aatacaatttacaccttgtaaagacgccactcccctggcccaagcactagttgtaaaagtcgatttgatcacaaagtgaccctgcgtggttgttttgggagcgcagtggctgaaggcgaagg

SEQ ID NO: 377787 - DNA, 122 bp, Homo sapiens
cagcacggactcacccacacacagcatgacctcagcgtcctaatagccctcagaacagcacggactcatccacacacggcatgaccgcagcgtcctaatagccctcggaacagcacggactc

SEQ ID NO: 377788 - DNA, 122 bp, Homo sapiens
cctgggctcgggggctcgccgggtgggcggatgctcatgtgggtgagcagcccccgaggccggcccgagcccgccgctgccgctgccgctgcgatgaggctcccggctctgcgcgtcggtct

SEQ ID NO: 377789 - DNA, 122 bp, Homo sapiens
ggcgacccctctcccgcggcggccgggaccccgcgcccaccgcgtctggagcccacctggcggccccactggctacatttccgacctggaccccggccggctgcgggaaacactcggcgtct

SEQ ID NO: 377790 - DNA, 122 bp, Homo sapiens
acaagagccagcctggcacactgcactgggcattcctggtgcccacacttgtgttttccccggcttcagtggcatgtcaattggttcatttactttatctgatgttactttatgtgctggta

SEQ ID NO: 377791 - DNA, 122 bp, Homo sapiens
aaagcaaagcgcgttactgctccgcgagggcgcgcaggggagccggggtgccagggcgcgcggcgacccgagggacagccctactccgctccttggcaactaacaatgctgccctgcctcct

SEQ ID NO: 377792 - DNA, 122 bp, Homo sapiens
ctggcttacaagccagagaggctgcccctccgcgttctggaggcagcatgccggggagcacggtgcctgcagggccggtttctgggaggatctgcttcctgctttgcagttggtgccttctg

SEQ ID NO: 377793 - DNA, 122 bp, Homo sapiens
gaacgcagtggggccgcgagcggcaaaaaacaggcttgggaaaggcgaagccagcaaagtcgaagacaccagagtggcaccggttttgtgagagcgcccaagcttgacctcgggctacgctc

SEQ ID NO: 377794 - DNA, 122 bp, Homo sapiens
tgacacgcgtgtacgcagctcctccgcttgcggggctcctggcatctggtgcagcacctgcgcgtgtttagtgctcagtaagatgccccctgaaaaaacaaacacaaaccgggaattggagc

SEQ ID NO: 377795 - DNA, 122 bp, Homo sapiens
gccagtggggatgtggagggccaggagtgccagaaggtccaaggtgttggtgtggtgtcacgtccaaggcaatcccaaactggccccagaacccacgtgtctaagtcctaccttcgtcgcct

SEQ ID NO: 377796 - DNA, 122 bp, Homo sapiens
aggggacggcgtcagcgcccgcgggggttcgcagggcagccccggggcgacccccacccccgccacggtcaagtgtcgatacagtgttgccagccgggtgccaactatgaataagtccaagg

SEQ ID NO: 377797 - DNA, 122 bp, Homo sapiens
gggcgctccgctggctgtgcaggcggccatggattccttgcggaaaatgctgatctcagtcgcaatgctgggcgcaggggctggcgtgggctacgcgctcctcgttatcgtgaccccgggag

SEQ ID NO: 377798 - DNA, 122 bp, Homo sapiens
cacaaaccgcggagagctgtgagtgcagcaggcagtacagggttagcctgcacggaggaccgagtgaggttgacacggacagcactgaggctgggagcggcgggattggagaggtcttctcg

SEQ ID NO: 377799 - DNA, 122 bp, Homo sapiens
gaaaacccctgtcaaggaggtggagcgaggggatggtgtccgcctcctgttcctccctgccgttttttagagaagcctgaaccgggacaaaacacgccgagacctacagacacaaagccggg

SEQ ID NO: 377800 - DNA, 122 bp, Homo sapiens
tcagtgcagggtgggagctggtgccgaaactctagagcgcggaggcggggccatgcggggcggggccggagcggaggaggggctctcccgtgcggccagccccgcccctcacccgggtaccc

SEQ ID NO: 377801 - DNA, 122 bp, Homo sapiens
acaacctctgggcgccgctgtcgaccaaaaggaagtgaaggcttctcaattctgcaggagcgtcaggcagggtgccttcctgctttgtccggtgcactgagcacagacgctgctcctgttca

SEQ ID NO: 377802 - DNA, 122 bp, Homo sapiens
ccccatctaggctactgcccagaagctgaaacataactcaagagagtcatgaccgtgttacgggaaaacccgttctggagctgggacctactcctccttaatggctgcctccagaaacagga

SEQ ID NO: 377803 - DNA, 122 bp, Homo sapiens
cccacccctcgtgcgttcatccctgtatctctctgactccacccgcctgatcacagcaggcggcgccatcctgctgcctggctgaccacagcaaacttgttttggcagtgcgcggaacatcc

SEQ ID NO: 377804 - DNA, 122 bp, Homo sapiens
ccgcgcgcgggacccagctccggcccgcccctcgcaggtggagagcgcggggatcccgcacgggccgccctctccgggtgtcccctccacacgtatacccagtgtcccagcgcgcagctcga

SEQ ID NO: 377805 - DNA, 122 bp, Homo sapiens
ttgcgggttttatttgtttaattttattctgtgttttctcttggctctttgggtctttcccgggtacactagatggctccatcccaaggcatcttgtcataaaacagctttcccccacccca

SEQ ID NO: 377806 - DNA, 122 bp, Homo sapiens
ctcaggaatcgagtccagggggctaacaccaccgggctgaatcgtgtggagggcggatggcgggaaggcggaaggagcaggagatggaaaagatggtgccaaactgcggctttcagaagtgc

SEQ ID NO: 377807 - DNA, 122 bp, Homo sapiens
ggcacgaccctgggcagagctgacttgggaagcagtgaggacgccagccagtgttgggggcggtctggggctggctggggtgggggtaaatgcctctgcatgaggattttggctccatgtcg

SEQ ID NO: 377808 - DNA, 122 bp, Homo sapiens
cctagtgatattgttcctaatatccagggacggagaggatgatatcactcccaatatagccggggttgtacaccccttgtgtgacattgctcctaaagggcagcgggggagaggaagatatt

SEQ ID NO: 377809 - DNA, 122 bp, Homo sapiens
ggctgagagttgcaccatcagcctccctggttctgaggcctttggacttggactgaaccacgataccaacatcccagggtctccagcttgcggatggcctgagtgggatttctcagcctctg

SEQ ID NO: 377810 - DNA, 122 bp, Homo sapiens
ctgtagcttcacgttcacacttgcactgaaacgttccacttggaacactcagcatgaggacgggagtggggagggctcgaaaagcaggtcggcacaaagtccaggacaggaggcggtcgcca

SEQ ID NO: 377811 - DNA, 122 bp, Homo sapiens
cacccatccccaagttcagagacaccctgctgtcaaacaacagtgtaactccggctggtccgatggtagtgggttatcagaacttattaacatttgtgtcactaaaattggtatacaacctc

SEQ ID NO: 377812 - DNA, 122 bp, Homo sapiens
tggagcatacctgagaattaccctattctaagtgtgtttggagtcccaggctaaggaatccgggagtagccaacactgagattcactacttatctatgaaggacagccatatccctgcccca

SEQ ID NO: 377813 - DNA, 122 bp, Homo sapiens
tttagggaaagtgctatggattattttacaccagtgtcgtttcaccaaaaaacgtgatgccgatggctcccttttgtcacgggtttcaaaggctcaccctaacgttcacgtgcattttccca

SEQ ID NO: 377814 - DNA, 122 bp, Homo sapiens
ctgcccacagaaaactcatgaggttcagacctcaagctacagagggtgggcagccctggccggggagctggcagaagggctctgtggcttctgaagggttcgcagtgatcagagtgtgagcc

SEQ ID NO: 377815 - DNA, 122 bp, Homo sapiens
ctggtggggccagagagtccccagctagggacctgcacgtggacgtgggcacctcagtagcggagcatctccacgaaacggggcaccacaggatccctgtgcaagggctgggggcacgctct

SEQ ID NO: 377816 - DNA, 122 bp, Homo sapiens
cctctctgtggggccatcgtgtgcatggcggtgggcctgcctgcatccctggcctctgcccgtttagatgcctgtggcagcccctcctgcaaccaaatcagcttcagacactgccagtggcc

SEQ ID NO: 377817 - DNA, 122 bp, Homo sapiens
ggttctgtgagtcaggcccagaagggtaatggggttgttttcttgggaggcacatgggcacgggtagtattattaatatttcaagccaattggaaaggattgatgtttcattataaaaatat

SEQ ID NO: 377818 - DNA, 122 bp, Homo sapiens
ccggtttgagaagatcagcaacatcatcaaacagttcaagctgagctgcagtaaattggccgcttccttccagagcatggaagttaggaattccaacttcgctgctttcatcgacatcttca

SEQ ID NO: 377819 - DNA, 122 bp, Homo sapiens
gcagagccctggaacaggccagtcagtttcgcccatggccctcaccctggtgcctgttggcgtggccggggtttctgattcagcaggtctggcctggctgggattttgcttttctaaagtgt

SEQ ID NO: 377820 - DNA, 122 bp, Homo sapiens
tggcctcgtgacgtcatgggccattccacgtgcggagcagcgcgggggacgcaaggcgggcggcgtgaccactgctaaacaggagaggggatttaaagggcccagcagagagtcggaggaga

SEQ ID NO: 377821 - DNA, 122 bp, Homo sapiens
ataacgaagaatcactaaacaaggggaccccaggaagtacagcgtggccgacgctggtcgcgtggatcttgcgagggaatctaggtttctacattttgccaagaaaggagaggctccctttg

SEQ ID NO: 377822 - DNA, 122 bp, Homo sapiens
tggccccacggatggcggtggccacctccttggagcacttaacacccagaccgacgtggccgttgtagtccccgatagcaacaaatgccttgaacctggtgcgctggccggcacgggtctgc

SEQ ID NO: 377823 - DNA, 122 bp, Homo sapiens
agtgggcatcgtgtttgtggacagagtttctccgtgtcgtggccatttcgattcggaactcgggtgaccgctgctgttcccagcctcctgggccgctgctttactgcggtggggactctggt

SEQ ID NO: 377824 - DNA, 122 bp, Homo sapiens
agacgtttttctgccctgcagggacaacaacggggtggacctcgctgcacagatctacgtcgttattacagcaacacaagacacggcgaggtgcgctcccggcacggaaaggtgtaaacagt

SEQ ID NO: 377825 - DNA, 122 bp, Homo sapiens
ggaaactgctgctggacacctgaaacacacaaggagggacacctgactcctgctaactgccgcaagaccccgcatgctgttaggtgctattcatctggagcccgcaaaatgtgacgtacagc

SEQ ID NO: 377826 - DNA, 122 bp, Homo sapiens
ctgctgcctgggccgacttggtcaatttttcatgaaactggggacttttcagaaagtttgcgaactattcagaggctgtgccaaaccctggcaaagtttgcagaaagtatgcaaaatgcatg

SEQ ID NO: 377827 - DNA, 122 bp, Homo sapiens
ctgtaagcgccctacagtttgcatgggaaggcaacagggacttcccttttgcactgtctgcgggtaccgctgttccagccctgagaggacgaggggacgctgcgctgtggggaaagtccggg

SEQ ID NO: 377828 - DNA, 122 bp, Homo sapiens
accctgttacaacatgcatgctctcatgccctggtccagagccagatgtggtccagctgccgcaggctgggtgtgaaactccaatgcttggctcattctccattagctgggaatggccaagg

SEQ ID NO: 377829 - DNA, 122 bp, Homo sapiens
aaagcgctcaaaaacctacattaaataatgaactgtgatataaccagactacaggaacggcgggtgtggaggaaaactgagtcccaattgagaccaatgccctacagaattgaaaagaagta

SEQ ID NO: 377830 - DNA, 122 bp, Homo sapiens
ggtaatagaagtcataggcctggagcacctggtaaaagaactcggccaagctcatgccctcggggctcttgagccgcagctgcacgctctgccggctcagcagcgtccccatgcggaagtga

SEQ ID NO: 377831 - DNA, 122 bp, Homo sapiens
cttagagggaggtgctgtcactacccccatgatacagatgaggaacaaatgacagaagttcggtcattttcccatgatcacgcagagctaatgggctcaagtacagggccaggatttagaga

SEQ ID NO: 377832 - DNA, 122 bp, Homo sapiens
aaaatgaagcgagtttctttagttcacaatttctcagaggctctgctcggctggcatgctcgagaacatcctgggagggctgaggctactggccatgagctcttgtcttagaaaagctgtga

SEQ ID NO: 377833 - DNA, 122 bp, Homo sapiens
gtctgttatttgaatagtaattgattgagaaaggttctaattgtcctgctcttcaacccccggggtgctgttacagttcttgtatcagaccttaaaatagaaaagaagttgacaggtaaaca

SEQ ID NO: 377834 - DNA, 122 bp, Homo sapiens
cccagagacagcaaagcttgccgggaataaagcaaagaccagactgcctccctcctgagacgcctcggcaccggcaactgtgcttctccagcccaggctgcctcctccttggcggcaacgcc

SEQ ID NO: 377835 - DNA, 122 bp, Homo sapiens
gtgtcccgggggctgctggcctctccgccggcctcggccacccgcaggcagtcactgaggcggatgaccttccgggcagcctcacaccgacgaggcttctccgggccctcctgcagctccag

SEQ ID NO: 377836 - DNA, 122 bp, Homo sapiens
gaacacgaacacaaagctgacccagaggtagatgtccacggccttgacgtaggagacgcgcggcatggaggcattcacgcccgtgatgatggtggtcatggtcagcaccgtcgtgatacctg

SEQ ID NO: 377837 - DNA, 122 bp, Homo sapiens
cgctgttgcggcagctggagacgaaccagctggacatggacgccacgctggaggagctgtcggtgcagcaggagacggaggaccagaactacggcatgtatgtggccggacccgcccgtgcg

SEQ ID NO: 377838 - DNA, 122 bp, Homo sapiens
gcctcgtgggtgccggctgagaaggcgcggagagttggccgaggggtgagtggcgggggacggttctccacccactcggcgctgctcgccgcctgcttccgtgtcccgggggcggcgcacag

SEQ ID NO: 377839 - DNA, 122 bp, Homo sapiens
catttgaataccggccattagggagaatcgccctgtaaacattgatccagtgattgaggccggtcggcttgcttctgttctgccccgcggtgtaattcagctaataggttttgtttgtctca

SEQ ID NO: 377840 - DNA, 122 bp, Homo sapiens
ctggagttagatgaccccaaatagtcaaacagttaccaaagtagaagaatcacaaggtttcggctagcataatattgtttttttttttttttttgatggggtctcactgtgtggcccaggct

SEQ ID NO: 377841 - DNA, 122 bp, Homo sapiens
tgaactttctgtggaatggcttcgttctctggatctcatagcaaaggatcagccgtttcacggccacaaacaggcaggtgccagagttcctcttgagtgtggccgtggccatgagctggcag

SEQ ID NO: 377842 - DNA, 122 bp, Homo sapiens
taaatcacacatagggaccctttctgagagctcactgtgtttcctcaagatatctgcaaacgaggctctgaaagaagtccacccgaacctttcatttggtggaggaaggatgcatcactggc

SEQ ID NO: 377843 - DNA, 122 bp, Homo sapiens
gtcaactctgagtcagccaaacagctgaggtcattctctacttgtcaccaccgatgaggacggagagccaacaccaccagtcagtcacccaagctggaaatttaagcatcatcatttcttct

SEQ ID NO: 377844 - DNA, 122 bp, Homo sapiens
tgcgggtccagtcgggatctcagctggaggggagggggcgcggagcagacacgggggacacggccccaattccaagctgaggggaggggacttgcagcaagattggcgagggaaggcgggac

SEQ ID NO: 377845 - DNA, 122 bp, Homo sapiens
ttgcttggggcatcctgtgctctccactgcccttacctgaacagacggctcatgcagacccggagtttaatagggacaacagtaaatctgagaggctgtgtgtgtcccacgcgctcctgttt

SEQ ID NO: 377846 - DNA, 122 bp, Homo sapiens
ggtcgggaaggtgagctccgagcttccggaagcactgggttcccaactcaagtatttatgcggtgcttgtttccttgggacgcgctccctcccgccctattgccggaagactgctggttgcc

SEQ ID NO: 377847 - DNA, 122 bp, Homo sapiens
catcggtgggaacttccgcggtccccatcccagggcgcacagggtccagctcctcggcgccgactcctggaaacaatgaaaggtgacgggctgaaggggaaactttgcgactggttcagggc

SEQ ID NO: 377848 - DNA, 122 bp, Homo sapiens
agtgtgatttgaattttaaaacactgagctttgccggtggaagagttcccaagtttattccgacctacggaagcccaggaggaccaggattaccgctgccgctggatgcgtccagggccggg

SEQ ID NO: 377849 - DNA, 122 bp, Homo sapiens
tcagcttggctcactggtgacgacgtatccaaaatgccgtatttaacacattggcttgagcggtagagcagctctcagatggcttccaggactggctgagctggtgttgaggcctcattcac

SEQ ID NO: 377850 - DNA, 122 bp, Homo sapiens
cctgcgggtccgggagcgcgcagaacagcggggagggcttctccctcttctgggtaggggcgcgctaggtggagccccacctcccctccgcggagacccaccctccgagccgggagaggcgt

SEQ ID NO: 377851 - DNA, 122 bp, Homo sapiens
tagccacggacttaagcggcaattgagctcctcaaagtgggtgagtgcaaatcaaatgtgcgctaaatgtcagatacactggatgtggaagaagaaatgtcaaatagtgtcaaatagttcat

SEQ ID NO: 377852 - DNA, 122 bp, Homo sapiens
gctcgcaacatcttgctgccttcgggagcaccggcctggctctgctcctctccccactggcggcttcaatcagtgtcgcggtggtcgcgcatcgcctttatataggcatgggtcagagtggg

SEQ ID NO: 377853 - DNA, 122 bp, Homo sapiens
tcttaggctccggggggcctgcggcggcctgggaggcagacccccgcgggcaggtgtggccgtgtcccgaccgcgcgaggaccgaagttggcggaagcccctgtgcggtgccttccagcccg

SEQ ID NO: 377854 - DNA, 122 bp, Homo sapiens
aggcagggtgcaggtgtgaagttcggtctaaaacaaagcccctcgccacagggtactcgccggactcccagctcgccctaaggctcccccacccctgcagtcgggccgggaccgcccctgag

SEQ ID NO: 377855 - DNA, 122 bp, Homo sapiens
aaaatgcaaatgtttatttatttatttatttattttattttttgagacagagtctcgctccgttgcccagacttgagtgcagttgctccatctaagctcattacaacctctgcctcctgggt

SEQ ID NO: 377856 - DNA, 122 bp, Homo sapiens
cactgatctttctactgatcccatagtttcaccgtttccagaacgtcatataattggaatcgaacagtacgtagacttttcggattggcttcttcttttagcaatatgcatttaagtttcct

SEQ ID NO: 377857 - DNA, 122 bp, Homo sapiens
ctcaatctatgatacccaccagtgccatgtggggtggaccccacgtatgtaggcagcatccggaccgcaggggcagggctggcctgtcccctcagcgcctgctccatggaacccaagaggct

SEQ ID NO: 377858 - DNA, 122 bp, Homo sapiens
acagaggcccaccctccacgtcgtccttgaagagttcctccgtgccgaacttgaggatgtcgtccagctcctgcttggtcatggaccccgacttggagccgaggccgggccgcaccaccagg

SEQ ID NO: 377859 - DNA, 122 bp, Homo sapiens
ccctggctgtaggcgatagaccacgccttcctaatcagcgggcgcattccctgacttttgcggaaatagcggtccaaaaccgcgtctagcattagcaaaagcacgtggtctccgtctccccg

SEQ ID NO: 377860 - DNA, 122 bp, Homo sapiens
gccctgggggagccgtagcgggcgcggaaggggcggggcctaacggtagggggcggggctcgtcaaagggcggggtttagagtccccgaggctacacagccaaagccggggggctggcctag

SEQ ID NO: 377861 - DNA, 122 bp, Homo sapiens
gtcaacgtgcccacgtgctcgctgtgtgggaagactttctcttgcatgtacaccctcaagcgccacgagaggactcactcgggggagaagccctacacatgcacccagtgcggcaagagctt

SEQ ID NO: 377862 - DNA, 122 bp, Homo sapiens
aaaaaatccttctaaggtgaacccctccggacccggatagcgagatggggctcagccttgcgcctcgggggtcgtaacagacggcaaggtggaggtggcttcccggccccgcagccggacct

SEQ ID NO: 377863 - DNA, 122 bp, Homo sapiens
atttacatgtatgatcctcatgtgtatttttcaatcctgactagaatgtttttttccctacggtaaacacctgtctagttcacaatattccttttctaataattttcctcccacacagtcag

SEQ ID NO: 377864 - DNA, 122 bp, Homo sapiens
gggagactccatcctactccaccccacgctcccgctgtccgagtcgcccccagcacctggcgccggcaatccccggctgatgcagccaaaagcgggcctggtccccggaagcgccctgagag

SEQ ID NO: 377865 - DNA, 122 bp, Homo sapiens
gggaagtggtaactgagctggggcctggttgtgcagggtgggccacgtgcctgccttccccgcctgctgggcctccctcttgtccaccatccgcctctgcctggctgactgtccattctgtc

SEQ ID NO: 377866 - DNA, 122 bp, Homo sapiens
gacggcgcaaccactcaccggcatgactgaggcagcggcggtgtggcggcggtgtggcggcggtgtcagcagcgcctctctggattcggagggcgggttcggctgcgcttccgagagtgcgc

SEQ ID NO: 377867 - DNA, 122 bp, Homo sapiens
tcctgcaccccaacccagccctgggtgaatgtctcatggcaacatacaagatgggtaccccggaagccagtgcccaggtcactggcacacacctaggtggggtctccaccgggcctgctcct

SEQ ID NO: 377868 - DNA, 122 bp, Homo sapiens
gcagtcaccctcagctccccttccttgcccgcctctccccccgccgccccaccagttaaacggatgaccaaagacctttcttatgccggaagcaaaaaccaaaactttttgttggctttttc

SEQ ID NO: 377869 - DNA, 122 bp, Homo sapiens
aaggcggcgcagggccaaaaactacctaaagacacagctcccgcaggcgcgcccaaggtgcggaggaaacgctccatgtatggggacaaaatagtgtctgtccagaacgtacatcttgggtg

SEQ ID NO: 377870 - DNA, 122 bp, Homo sapiens
caccgccagccttctttctcctacggcctttggattctgaaaactcgctgtggggagggacgtgaggcttcggcaccaggaacccctgcgggctaagacggtgttggccaatcacatccagt

SEQ ID NO: 377871 - DNA, 122 bp, Homo sapiens
tagccagaaggaatgtccagtcttgagttagaaactgatgctcaaattaatggcaaaggacgtttttgaaacaactgtgaaactttgcataaaaactaaatagtagataagatgaaaatgca

SEQ ID NO: 377872 - DNA, 122 bp, Homo sapiens
catcctcagagctgttcccactggggtccctctatcctgcagcagatggtgccttcagggcgtgggtttctggacagagctgtgggctgggggccgtgagcatgagcagactccccacaccc

SEQ ID NO: 377873 - DNA, 122 bp, Homo sapiens
atcgcggatgggaggctcgccaaggcgggtgtcctggggaaggcagacattcggcaggcacgtcagggactgtctttgtcaccatcagtcgcttgcctgccctgcatgacccccagctgtgc

SEQ ID NO: 377874 - DNA, 122 bp, Homo sapiens
taagctaccttctgtaggttcattcttaggctccgcagccggatcgccacagggtgcctccgtatctaaggagtcgcttcactgcctaccttttcgtactccaaccctctcttactcagaca

SEQ ID NO: 377875 - DNA, 122 bp, Homo sapiens
ggcaggaagccccggaggggccaaggatcttggcgtggggcggcccggggcggggacaaccgttccgccagcgctcgggctcggcccggagtggggggcccggctggcaagcgcagtaggcc

SEQ ID NO: 377876 - DNA, 122 bp, Homo sapiens
ggcaaccagcaggccctgcgggcccagctgcaccagctgcagctccacgccgccgtgctacgccagggccatgaacctcaggtcagctcccacccaggcaggagactggggggctggggagg

SEQ ID NO: 377877 - DNA, 122 bp, Homo sapiens
ggactgtttgggaggatgagtatgcacggccttgggatttgtcctcaactctgctcccatcgcaggcctgtggggtttaacaccccatggtggctctttcctggattgctatgcaatctttg

SEQ ID NO: 377878 - DNA, 122 bp, Homo sapiens
ttcaaacaaaaaactttcagctcttgtcttccctttaaaaatggaatcacttcttgacaacggcagaccgtgcagagcgcaccagcgcgagcggggcttcctcgagtctccaaggcccgggc

SEQ ID NO: 377879 - DNA, 122 bp, Homo sapiens
ggttgagctgttatgccacatcgtttccctgacttggtctccatgcagggaaaatcatggcgtcttatttagcctgtgcctcaggactgatgctggcagaactgtttaaacaacaaataaat

SEQ ID NO: 377880 - DNA, 122 bp, Homo sapiens
tgtctcaaataaaacaacataaacctaaaagcataactcaggtccgagcacagtggctcacgcctgtaatcccagcactttgggaggccaagatgggcgaatcacttgaggccaggagtttt

SEQ ID NO: 377881 - DNA, 122 bp, Homo sapiens
gagaagcaccatggagtgtccaaacaggtcagattgagttagcaggtccaggactccctccgcaggagggcctccaagctcagttctcttgggttgcaaataagaccctggaatcacagcag

SEQ ID NO: 377882 - DNA, 122 bp, Homo sapiens
ctgcactcagtcggactgaacgtagccagaggaaaaaaaaatcatcaaggacaaaggcctcgacctgttgcgctgggccgtctgttccttctaggcactgtatttaactaactttaaaaaag

SEQ ID NO: 377883 - DNA, 122 bp, Homo sapiens
ggtggcgcgcattcgcccactcggagaccgagaggcaggttttctgcctgcacagcctcccgcccaaggccagacctgctggaggcccaggccctggagatggctgtcttcagggagactct

SEQ ID NO: 377884 - DNA, 122 bp, Homo sapiens
acacacatatacttttgtttcagtcacatatatacacacgtacacctgaaacaaaagtttcgaacagcaatacttatttttactacatgtaattcacagtatttgctattccattctatttt

SEQ ID NO: 377885 - DNA, 122 bp, Homo sapiens
tacttcatgttccaacaagtacgagtcaagcctcaggactttgctgccattaccatcccacggtctaggggagaagcccgggttggggctggtttccggcctatgctgccctcccagggggc

SEQ ID NO: 377886 - DNA, 122 bp, Homo sapiens
ccgttcataggaatttgcctgcacacatgtaaaattttctagaaggatatgcacaagcaacgggtaacagtgtttgtctctagggagaaaaaaatgaggagaactggtcactgggataggaa

SEQ ID NO: 377887 - DNA, 122 bp, Homo sapiens
atctaggcttttaaaaaatataccacatgacttcatgcctctaggctattgctcatgccacggcatcccttctgggttttttcccctctttatctacttggtgaatttgcatccttcagtat

SEQ ID NO: 377888 - DNA, 122 bp, Homo sapiens
cagggaggcagaggctgcagctcaccctcaggacacggcactctcctcactgtgcacctccgggtctccttggtgtcagagcaggcagcatggtcccccacaggggcatgtagcaccctgcg

SEQ ID NO: 377889 - DNA, 122 bp, Homo sapiens
tcagtgctggtccgatgacctgctaattcactggcagcgtagggctgtctgttgtttttgcgcaagttggtgtgaacaaagttcacgatgtctggtcgaataggagccttgaatacagcggg

SEQ ID NO: 377890 - DNA, 122 bp, Homo sapiens
gtcctgagagacacgagcagaacatgcccctctctgctggaggctgtgtcattcaggaagcgacgtttatttcttcgggttcacatgcggcctcctgtccagctggaggacagggagctaga

SEQ ID NO: 377891 - DNA, 122 bp, Homo sapiens
cttttgacagagcagttttgaaacactctttttgtaaaatttccaagttaatattgagagcgattggaggcctatagtagaaaaggaaatatcttaatacaaaaaacagacagaatccttca

SEQ ID NO: 377892 - DNA, 122 bp, Homo sapiens
gggggcccccagcccggaatcctgggggctgtaacaggtcctcggaagggaggctcccgccggaatgcctggggaaatcagtcatatgcagaactcatcagccaggccattgaaagcgcccc

SEQ ID NO: 377893 - DNA, 122 bp, Homo sapiens
gggccccacgacctccacgctggactggtgcgaggagaactactccgtgacctggtacatcgccgagttctgtgagtgtggcctgaggaggggagtgggggcgagagggcaccgggctgagg

SEQ ID NO: 377894 - DNA, 122 bp, Homo sapiens
aactggagacctgaacaaagttactctcgaacatgggcagcggacggaggggcaggtactcgcccttctggagggtcttttgcagctcccccagaacagggacccacttcggggtgccctgg

SEQ ID NO: 377895 - DNA, 122 bp, Homo sapiens
ttgggaatgggcaggagacctgcttcctctctccagaggttgcattttcccaagcttgaacgcttcatgtgcctactctgcaggactgaggagtttgctctgtggtgtgaaaacctaaggaa

SEQ ID NO: 377896 - DNA, 122 bp, Homo sapiens
cctacaagaccctgctggcctgccccttcctccctttccagcctcactcatgtgtctctccgtgaagcagctccattggtctcctatcagtgcctccaaagcttgatatgtcttctcgccac

SEQ ID NO: 377897 - DNA, 122 bp, Homo sapiens
ggcatgagatattctatctgttcattctgagtggaatatccttactacttatgaacctagcgaactttaatgaactgttccccttctggactaggagctcttagcacagagtagagacctgg

SEQ ID NO: 377898 - DNA, 122 bp, Homo sapiens
ggctgtgtgtgctgggcctggctcgcagccaaccgagacggccgagcagctggacgaggccgtgaagtactacaccctagaggagattcagaagcacaacgacagcaagagcacctgactga

SEQ ID NO: 377899 - DNA, 122 bp, Homo sapiens
cccctgtgttccacaccacacacagccccgacgccccacgctcctcccagggccaggctccgtgtgccccacccaggcacccccaggcacactaaccgatgccgtcgggcagcctccgcagc

SEQ ID NO: 377900 - DNA, 122 bp, Homo sapiens
caccctggtcacccctgggcctcggtcctgccccgcccctctgctgtccctcagtcccaccggcagcttgatgggcagagtggccatccacagggcgtctgcgcccttcctctgccgggcag

SEQ ID NO: 377901 - DNA, 122 bp, Homo sapiens
atctccactacctcccagtatgaagctatagattcactaggtctcccagaaatgcagcttcggcttaaacccttctcctctcctcctcagccctgactaaccctccctctcccacccaaact

SEQ ID NO: 377902 - DNA, 122 bp, Homo sapiens
ttgccttctcgggcctgcacgtggtggtggtggtgtaggtgatagagcaggaaccccgggcgttggaggatggggtggggtctgtgctgtgctgctgggaggggctgcgctgcgctggcgca

SEQ ID NO: 377903 - DNA, 122 bp, Homo sapiens
gtgctcaacgattacctggcggacaagagctacatcgaggggtgagcggacgggctgagtcggggtggcggggaggtttctccgcccggggccggggccacgtggcgcagcgtgtcggctgc

SEQ ID NO: 377904 - DNA, 122 bp, Homo sapiens
ggcggcgggacggcgagtggccctctgtggatcatcccctccacctaacggcagcaacgacgcatccatgaggcaggtgggacaggtatttacgtcccttcctagtttacagaagagaaaat

SEQ ID NO: 377905 - DNA, 122 bp, Homo sapiens
tagcaacccccttccctttgctaccgattgttatggggtggcacagaaccctattctgcacgtggagaggtaaacagaagtcagctgaagcctccaggtctttttccctatggcttccttct

SEQ ID NO: 377906 - DNA, 122 bp, Homo sapiens
tctccccaccctcgggtcatgagggcaggaccaggcctgctcacacctccctgctgggggcgttccctggctctagcaggggtccctctgtccctacatgccacaggacctcttcaatctcc

SEQ ID NO: 377907 - DNA, 122 bp, Homo sapiens
aatgcttgtgtttggacacaagcaattatccctaattattctttttcttttgagcctgcccgtcccgccggcgagcccgccgcggaacaggccccgtaatcctccctggtcggcggatctca

SEQ ID NO: 377908 - DNA, 122 bp, Homo sapiens
ccgcccctctcccgactgaccctgggacttggagcccggcactcactttcccggtcttgccggcgtggttacacttcggacactcccagcagtttggaagctcgtcgttgaccacaccctct

SEQ ID NO: 377909 - DNA, 122 bp, Homo sapiens
tcgtgctgtgctattctttaaggcactcaatgttctcatagcacctgaatttgtatttaccggtcagtattcctttcagatgttaaattacagggaaaaccgtacaatttactaaggtgtca

SEQ ID NO: 377910 - DNA, 122 bp, Homo sapiens
aactgtacactgcaccacagaaatccataggcagccaagagttgcaaaattgacaagcttcggaataagacagtaaatgttcttcatcacttcaccaatggcagatttttagatggccggtc

SEQ ID NO: 377911 - DNA, 122 bp, Homo sapiens
gaggaagcgcatcctgaagctgatggcaccgtgtgggggcagcgggcgggcaggtgcagacgtttcacgcatgtctccactcacactgcttgccacattctgtttcagtgacgaaatcaggg

SEQ ID NO: 377912 - DNA, 122 bp, Homo sapiens
cccgccaccttacaccccgcccctctctcttaaagccctaggaagattactggagtttggcgccaaccgtgtttttttttttcccttccaaaggcgggaactagttgtgggcgctgcgacgt

SEQ ID NO: 377913 - DNA, 122 bp, Homo sapiens
ctcggggttcaggcagagggtctggtgcatcttgagccgacagggtgctggttcatcttgcgcccggctctctggtgcagttttgtgggattcagaggtgggtcacagagcggcttcctaga

SEQ ID NO: 377914 - DNA, 122 bp, Homo sapiens
tcagctgtcggttccatagaggaccttccagataaggaggcccctccagcccctgactgccgagcttgatttccaggaagggttgtggaagtcaccgagtgccctccatgcacctgtgaaga

SEQ ID NO: 377915 - DNA, 122 bp, Homo sapiens
attgtaaccagtgtcctggggaacctgggctctcatgctcccctcgggagctttcctaaacgctgaaatgacggagtggccaggaccaagcaggcctgggtgagagtgaggggagatacagg

SEQ ID NO: 377916 - DNA, 122 bp, Homo sapiens
ccgagcccctgcagcctccttgctgcgcaatgtcccggggcccccctcccgtggccgcttcgccctcctggtgacgtcctgctgcaactccccgagcactgcctgtcttcccgctctccagc

SEQ ID NO: 377917 - DNA, 122 bp, Homo sapiens
cagactttgcttcatggtctccagtctcttgggttctctgtgaaaaccttcgtgttttttcgtagcctccagagtcacccttcacacagcctctgcttctaaccgcagcccccgcagtagtt

SEQ ID NO: 377918 - DNA, 122 bp, Homo sapiens
ggacccgacccgcgctgcggccgcgctgccccgctcctctgggcgcctccccgagggcctcgctcgtctgacccgcagtactctccgccctgctcctcgtgcctttggtgggcgcgtggctt

SEQ ID NO: 377919 - DNA, 122 bp, Homo sapiens
ttatgaaatttctacgggcaaagactcgaatgccctttaactgggtgcgcacatgggcatcgcatagttttccagagtaacccaagatactggggtggagagaaaaatggaaccagaagaca

SEQ ID NO: 377920 - DNA, 122 bp, Homo sapiens
cgcctgcgcaccacaccggggtcgagctttggggggcaggaaccgcggcgggtgggatgccgcgcctgcgcacggggtcaagcggggccatagtggaggcgcctcgcctgcacaaagcgcac

SEQ ID NO: 377921 - DNA, 122 bp, Homo sapiens
ctgttttcgtaacaaggtacggacaaaaaggcttcttcctaatggctagcatcagaataacgctgaagctgaaagatgacttggttgagaaaatacattcctaagtgtttaggttagtatct

SEQ ID NO: 377922 - DNA, 122 bp, Homo sapiens
gtgttgaactcctgacctcaagtgatcctcttgcttggcctctgaaagttctgggattaccggtgtgaggcaccgcgcctgccctgcttctgcgtgtttaaatttccagggtctcttggtta

SEQ ID NO: 377923 - DNA, 122 bp, Homo sapiens
cagctgccctgaggagtggggtctgctgggtttccaggacaatctgcctttcctctttcgcggggcgtgtatttactcagtggctttagaactcgccaggtgagtggagacttaaactgtaa

SEQ ID NO: 377924 - DNA, 122 bp, Homo sapiens
agagcagcccctccccctcctctgtctggagccggtgctctgcggcggggcgggagggctcgcatccccatagtgctgggttacagtgaaggtacgccccgcgctctgctctggagaggcag

SEQ ID NO: 377925 - DNA, 122 bp, Homo sapiens
gccttgacacatagtaggtactcgacacagatgctggcttcatgatgaagcaattgtcctcgaattaatacaaaagggaagattcagactcagcgagccggtaccattcgtctagggacaca

SEQ ID NO: 377926 - DNA, 122 bp, Homo sapiens
aaggtatctctatcagtgaaacttctgggaccaatgccctctaccacaaacctgctatctcgagatattccctaccatctgtagatactgggaacacaaggcaggggcagtgtgtaacataa

SEQ ID NO: 377927 - DNA, 122 bp, Homo sapiens
caaactcctgacctcaggtgatccaccaacctcggcctcccaaagtgctgggattacaggcgtgagctaaaaaataatttaaaaataattttgaaaagctaataggcagtattaggagaaac

SEQ ID NO: 377928 - DNA, 122 bp, Homo sapiens
aatgaatgcaaatgaggacgtaggtgcctcgattcggctgtgactggagctatggggaaccgtctgtcgagtgttttctcaaccttgagtgcagtggggctgcattaacgatggaaagaaag

SEQ ID NO: 377929 - DNA, 122 bp, Homo sapiens
aactcgggggcagctctctgaggggcggcgatcgagtcatgctggcggggatggggggcgcgggcgcccccaacccgcgttatctgggcgctcccataggctagcccggtctcccggtaccg

SEQ ID NO: 377930 - DNA, 122 bp, Homo sapiens
catcttcatagtgttttatactctataaggtgctttctcttttgatctcgtaaaagtattcgtgcccatgttcaaatctgactgcctcttaccagctgtgtggcctgggccaattactggaa

SEQ ID NO: 377931 - DNA, 122 bp, Homo sapiens
agcctcaagctgctcctgcagcgacatccccaagtccgtgtgggtacaatgtgccagggccggccgccaagcccaggagcctccccacagcacatccacacacgcgcttgttttatttttat

SEQ ID NO: 377932 - DNA, 122 bp, Homo sapiens
tcaaaatgtccaggctgtccagcctgaatcataagcatagcaattcttaatattattctgcgcagcagaaggggtaagtggtaacatctcactaatcaaaacacacaggagttactgtgtct

SEQ ID NO: 377933 - DNA, 122 bp, Homo sapiens
atgcaagatattgagtgggtttgctggtgaccatggtgacagctgtcctcagactgcctgcgtgggagttggggcaggtgggcagggcttgcttgctgtggccaggctacggactgagcaga

SEQ ID NO: 377934 - DNA, 122 bp, Homo sapiens
ccgcggcgggaacgaggcaggtggctggcggccggagtctatgcactctcgttttctcggcggagccacttgtgtgtgctggagcgaggacactgactaacaacggcggcagtgtctgcgga

SEQ ID NO: 377935 - DNA, 122 bp, Homo sapiens
ggatgagaagtccaagatatgtctcacagggctaaataaagttaagatgtcaactgggctcgttctttttggaggctctgaggggagaatctttttctagaggccacctgtattctgtggcc

SEQ ID NO: 377936 - DNA, 122 bp, Homo sapiens
tacatgcattcataatcaatgcatattcaacatgcatttataaaaactctttactgcgaccgggcacggtggctcacgcctgtaataccagcactttgggaggctgaggcaggcagatcacg

SEQ ID NO: 377937 - DNA, 122 bp, Homo sapiens
tgacctcgcgatctgtccgcctcgacctcccaaagtgctgggattacaggcatgagccaccgcgccctgcggagtagaagttctttggataaacacattctaggagtggggtcaaaatgtgc

SEQ ID NO: 377938 - DNA, 122 bp, Homo sapiens
catccgtgcacgcgtcggagcacggccagccttccgccacgagccagctgggaagggccgcggccgcctaaagccccagtcaacccagcctgtgtctgagcagacagggcgaacaagcaggc

SEQ ID NO: 377939 - DNA, 122 bp, Homo sapiens
aggtcaggccaccctcacctttcagacaggaggcacttggttctctaagatgaagaagggcggctcccacccagaacattctgtgtcacggagaagaggtttcccaatagcatcttccccaa

SEQ ID NO: 377940 - DNA, 122 bp, Homo sapiens
catcgtatcggttcctgttcagatgacatggggaagatgatggttcagccactggtactacgagaatgtttgtattacccacatttgaaatgatttgctatgatttttatgaagattaaaaa

SEQ ID NO: 377941 - DNA, 122 bp, Homo sapiens
tatactaggaatccaaactaaattggtttaaagctaaaaggggagtttttaggagcttagcgacctacagggacaagaaggccagagtgtccctaaacctcaggaacacctggaaccagggc

SEQ ID NO: 377942 - DNA, 122 bp, Homo sapiens
ccagacctcttttatctttgagataataccgtgtgacgacaaaggctgggtattgttatccgaatctctcacacagcaacactgaggagacattgactcatttcttttacgttgctttttaa

SEQ ID NO: 377943 - DNA, 122 bp, Homo sapiens
gaggctacgcccagaggcggctcagccaatcacagtgcgggcaggcggtggggacagagccgcctgggtggcatcctggtgggggactttagaggtcaaactggcaaccttgaggcggccgc

SEQ ID NO: 377944 - DNA, 122 bp, Homo sapiens
ttaggacacggccgttgatcactacagacccttagtcactgtactcacaccaaaggcacgcggaccacagacagggggatcacagactcccaccaggtacctcccaaatgcctataccccgg

SEQ ID NO: 377945 - DNA, 122 bp, Homo sapiens
cgcagaggcttcccaggccatcccgagcatccagcacccacccttcccttctcctctccccgctgcaggagaatccctacctatgcagcaacgagtgtgacgcctccaacccggacctggcc

SEQ ID NO: 377946 - DNA, 122 bp, Homo sapiens
tcgatgcgtctggactcataaattgctcacgttacatccaatatgcagtgtatgatatgacgtgtcatggaggtgtctgcaaaggcaccacaaacaccaacatctgggttacttatttgtct

SEQ ID NO: 377947 - DNA, 122 bp, Homo sapiens
aaaaaaatgttcagtgttttcattttacttctcttgctgcttttgggctctgactgggcccggaagcagaagttgcaaaacattatgagaaaacttttgctcttttcttttttttcttcaat

SEQ ID NO: 377948 - DNA, 122 bp, Homo sapiens
acctcgtgaaccacccaccttggcctcccaaagtgctgggattactggtgtgagccactgcgccgggccaaaatctcacattttcttaaataaggcaataaggaaaagctactggctttgag

SEQ ID NO: 377949 - DNA, 122 bp, Homo sapiens
ttcgtcatctgtaaaatgggggtaatataatgcctaactggcatgatacacagtgcctggcgttcgtgaatggcagaaacaaccactaaaacaactcattacaaaggactaagaaacgtctc

SEQ ID NO: 377950 - DNA, 122 bp, Homo sapiens
acggggctccaggagcaacatcctgaggctgccgcgcagctttgaaagcacttgctccggcgatttgaaagcttaccgaaacaaaaggctcccagcacctgacaaatctccccacaaacacc

SEQ ID NO: 377951 - DNA, 122 bp, Homo sapiens
gaacacattagagcctaggagacagatgtaaattatctggaaagccatgaaaaaccaaaccgaactaaactaaggaaggaatcattgtcttcataattctcagggaaaaagaaaaccatgga

SEQ ID NO: 377952 - DNA, 122 bp, Homo sapiens
gtgaggttctggggtgaccaggggtttccctggggaaggtggccggggccaagatgctctcgagccagtttagaggccagggcccttcctggccatctgtcccgtggcctagccgacactcc

SEQ ID NO: 377953 - DNA, 122 bp, Homo sapiens
tggcccgcaccctcaacctccgtccagagcggtcggttggccagcggagctggcttgggtcggagcccggctgcctcgccgcgtgtgacagcccagggagggagcagagggtggggcgggga

SEQ ID NO: 377954 - DNA, 122 bp, Homo sapiens
cattagcaaggggttaaggaccttaaggacggagcccaggcagcaccgggaagccagctccgctcagaagaagggtggcgaccacgggagagctagaaagggaggaccatgggaaacagggc

SEQ ID NO: 377955 - DNA, 122 bp, Homo sapiens
atcccttcaaagaaaaacagaatgaacgtgcattcttaccggaagtacatacgcagctcacgtaagagagttctgaacttattggtatgtaagacaatgtggctgtaagttgataaagtcaa

SEQ ID NO: 377956 - DNA, 122 bp, Homo sapiens
tctccgatatctggagtaatgtcattctctcctcctttgaacgttaagaacagtatcacacggggggtgtacaccccctgcgatattgggagtaaatcaggctctcccccgacccttgatat

SEQ ID NO: 377957 - DNA, 122 bp, Homo sapiens
tttctgctgattctccaccactacttccacttaccatttctccttaattccctgaaaattcgtatgaattcaagtgttgacaaatgaattgcatgagcaattaacagcccattctgcaggga

SEQ ID NO: 377958 - DNA, 122 bp, Homo sapiens
gctgggactggaggagcgggaagcgcagtatcgggaccacggctctgggaccaggaaaaacgcagactctccagagtcaatgtctacttcagccagctcaagggcgcgacaacctggcgccg

SEQ ID NO: 377959 - DNA, 122 bp, Homo sapiens
aacgctccccgaggtccgaggccagtacggggcggagccaggacgcgggccagagtcccccgaaggacggtgcctctctggccccaagaagtacagcttttattttgcagcaatctgagcca

SEQ ID NO: 377960 - DNA, 122 bp, Homo sapiens
atatagtttgcccccgggctcgggtctgagtctcaggcacgaaccaataaaatcaaagggcgagcgaggttgccgccctctgtctttttcaccaatggcacgacaagatggcaaagaggcgt

SEQ ID NO: 377961 - DNA, 122 bp, Homo sapiens
ctgccatctaaacacaatcaaaaagaaaagccaacaccaaagcaaataaaatgaatgaagcgttcctgctgcgggcagcccttaccattgggagcagaggccccctccggaccctcgccggg

SEQ ID NO: 377962 - DNA, 122 bp, Homo sapiens
ctcttctcaaaaacagtgcaacccctaagcgtttattaaagagggagctgtgcacgtggccggtctaaggccaaggccaatcacaggacccacttacaagtccatggagttttcatcccatc

SEQ ID NO: 377963 - DNA, 122 bp, Homo sapiens
gcggttgcagggaaccgaaatcggacacaacagttgcagtgaacccgactcagggttgagcgcatcagcgctaaacccaagacaaaggctgccctgtgtcttccgtactcagcgctctcctt

SEQ ID NO: 377964 - DNA, 122 bp, Homo sapiens
aacagtgacaacaactgcatgcccgagagcatgcgttgaggagcagtgggagggtgatttcggccaagggaattaagttgcaaaaggaggctgggtgcattaaaacttgcaatcccgcctgg

SEQ ID NO: 377965 - DNA, 122 bp, Homo sapiens
ggcgtaggaccctccgagccaggtgtgggatatagtctcgaggtgcgccgtttcttaagccggtctgaaaagcgcaatattcgggtgggagtgacccgattttccaggtgcgtccgtcaccc

SEQ ID NO: 377966 - DNA, 122 bp, Homo sapiens
aacatgaggaacagaaaacagaagtgaggtacagaaacagctggatgggtggcagctcggcgtttgccttctgcgaacacggtttcaacggctggctacatttgattggccgaaactcggtg

SEQ ID NO: 377967 - DNA, 122 bp, Homo sapiens
ctcaatctcctgacctcgtgatccacccaccttggcctcccagagtgctggcattacaggcgtgagccaccactcccggccgcagtgtacctatttttaaaacactaatgaagttggggaat

SEQ ID NO: 377968 - DNA, 122 bp, Homo sapiens
actggtcacagcggggcccggtcaagccagggcggcagaggcagcggcctgatgccttgtcgcagcccgggccctctgttccccggaaatcacagtcacaggctagggccaagaaaaatgac

SEQ ID NO: 377969 - DNA, 122 bp, Homo sapiens
gagcctgtgtccgcccggcagccgcccgcagctgcagagagtcccgctgcgtctccgccgcgtgcgccctcctcgaccagcagacccgcgctgcgctccgccgctgacatgtgtgccgctca

SEQ ID NO: 377970 - DNA, 122 bp, Homo sapiens
cattaacacacaccatgtctccctagggtccccctgggagcggaggtttgaagggcgagccgggagacgtggggcctcaggtatgtgggatccttgccttcgctgtctggtgggcgcctccc

SEQ ID NO: 377971 - DNA, 122 bp, Homo sapiens
tcacaagtatatagagctcttatcctcagtgtctaagccaatgcctgatactattacgtacgatgtgcattaactatgattccactaaaagatccattgtaatagtcatagaatcttagagt

SEQ ID NO: 377972 - DNA, 122 bp, Homo sapiens
agtgatgctgggacagtcgtggaatctgtgggttgaggcttccaaacttcctgggaaggacggtgagtgtccacgccctcctccccccttcaccccctcgcgaccccctcctctctcctccc

SEQ ID NO: 377973 - DNA, 122 bp, Homo sapiens
caagcgtggttgcaggatgaccttgggtcactctgggatgtaagggttttccagactccacgccgggttctgacactggcccccgtgagctcgggcccgtgtggtcacaggccagttgtcag

SEQ ID NO: 377974 - DNA, 122 bp, Homo sapiens
aaagctatgtacaataaaatcctacataatacaaactagcattgcaagaactcattcagtcgctgaactccatgttccagtaactgactttgacatgctagttatgacacaaattacaactg

SEQ ID NO: 377975 - DNA, 122 bp, Homo sapiens
attaaatttttttggccaccactagcagtaaactttcagagtatcatcactgaatgttaacgggattttcatgacctttaccacatcaggagcagatgaacaattccagattctccatatcc

SEQ ID NO: 377976 - DNA, 122 bp, Homo sapiens
ctcctcccgccgcccaagatggtgagtgagctgtagttccgtggcactatagccaggttccggctgtatccgctgccatcctcctccaggcgcggcctcggagggcctcctgctcctcctgg

SEQ ID NO: 377977 - DNA, 122 bp, Homo sapiens
tggctgtggggcctcggcaggttgctgggcctcagttgtgttttccgtcaaggtgcctctcggttccgcgtgtcactcagcggaagcagctgtcagagtggtgggcgtggctccgcgcctgg

SEQ ID NO: 377978 - DNA, 122 bp, Homo sapiens
tgccattgaatccttcaacctcctaccactgcttctagctgtcagttccagaatttgaaacgcggtggaagaggctagtgggtgtacagaaaaaccttccttgtgaagcagggcagtttcct

SEQ ID NO: 377979 - DNA, 122 bp, Homo sapiens
aattgtcatagacctggagatagaagcccagtttcaatgtggggttgcccaccccggggacggggagtggacagcactccaagaatggtctggggtttatggcctggttcattctgatgggt

SEQ ID NO: 377980 - DNA, 122 bp, Homo sapiens
ttttactaaaagatcttttctcatcctatcagcaaatcgttaagaaaggcttagccattgcgggggctccaacttaaggattcccccggcccactaaaaggctaggcccggcctgtagccca

SEQ ID NO: 377981 - DNA, 122 bp, Homo sapiens
aaaatgatagatgtggcccatattatgtttctgtgtgatagactgctctggatcaagagtcggcaaactatggccctcgagtcaaatctggcccgttgcttgcttttggaaataaagtttta

SEQ ID NO: 377982 - DNA, 122 bp, Homo sapiens
gatcttgtttggaacaggccgccctgtgcatgatttggtcccatgcagaatcacacagcccggttggtgactttgatggctgtcaggcactgctcgcgtctgcagccctgtctgcagagagc

SEQ ID NO: 377983 - DNA, 122 bp, Homo sapiens
cctcctcctcctcctcgtacttcggtgaacacttttgcacaacttacccagctgatcactcgcgccccctcgcttttccatttctctttccccaaccccgtcaccccctgtctcctccgtcc

SEQ ID NO: 377984 - DNA, 122 bp, Homo sapiens
cttaaagcaaaagtacaccagagctcactggcatccacagaaattgagtccatatccaggcgcctttgaagagttaatgctgttactactgtcatcccccttggtaaattcagatgtactta

SEQ ID NO: 377985 - DNA, 122 bp, Homo sapiens
actgaggaggtttgaggcgcgcgctctgggcagggtaagccaagtctgctgacttatcttcgtgtccttttctttctaatttgaaaggacaggggtctttttttgaggccagtgtctttatg

SEQ ID NO: 377986 - DNA, 122 bp, Homo sapiens
ggcctggacgggaagcagcaagccggattagtaccggattaggcgagccggtgcctagctcgcgtccgtgaagctccctccagcgcttcggcacgctctttgacccttccccgtgccctctc

SEQ ID NO: 377987 - DNA, 122 bp, Homo sapiens
atgccccttgtgccaggtggctctcagaatctggggactgtaagagccaggatcagcacccgtcagtcacatgctgagcccagcactgacaatgaacgtgttctgtctatgactcaagatat

SEQ ID NO: 377988 - DNA, 122 bp, Homo sapiens
tgcatctcagtcacctccactccatccctgtgcacaaacacaggtgtgctgggctctgagcggtaccacctcacctccacgtgcattgtggtcctcttggggagtagctggcaggttaacag

SEQ ID NO: 377989 - DNA, 122 bp, Homo sapiens
caaaaattcaccaattccggaaacactgcgaggcagcagcgtgtcttacacagacggaaccgccgttcccctgccatgttcaggcgggtcggcaggctttgttcgttattctgagtggcagt

SEQ ID NO: 377990 - DNA, 122 bp, Homo sapiens
gacgagggagggaaaatgatctgatgtctagaacacgtggatacggagtcagcaacagagcgcagtgcctggagcccacaggcacacccccccgccccgccactgtggtaccgaaatgagcc

SEQ ID NO: 377991 - DNA, 122 bp, Homo sapiens
cctccccagccaagtacgcaaacccgccccggcccggcagccgcggctcccggccacccgcgccctctcggggctccgctcgctcggctctcgtccctctgcctgtcctgccccagcccctc

SEQ ID NO: 377992 - DNA, 122 bp, Homo sapiens
atacctgataaacaagctaaatttcccttgccctgctcacagctggaagaggtagccctacgtccttcaggctgacaaagtcctttcctcatttcttcacttctcctttcacccaattcagg

SEQ ID NO: 377993 - DNA, 122 bp, Homo sapiens
aaggacagaaaagcgaggaaagtctatgccgccagcgaccggcaggaggcacgtcgggcacgctcgtcaccgtttcctggcacgtgaccaccgccctgccctgtcgctttagggcctgtcgc

SEQ ID NO: 377994 - DNA, 122 bp, Homo sapiens
aatggcaaaatgcctcattatgtagagctcttccccttcctaggcattttagcctctattcgtttctccgtgcaggtattctgaagcagactgttagctgaatgagagagaagcaggtgggg

SEQ ID NO: 377995 - DNA, 122 bp, Homo sapiens
gaaactggaaactctggcctgtcggctacttttgctcgtaccagcaggtgtgcactgccgcgtcaatctccaacaaagccggaaaagcagcctggcgcatgtgcaaaggaagtccctcctac

SEQ ID NO: 377996 - DNA, 122 bp, Homo sapiens
ctcccttgaacaactgaatgggttacgtaaacaacggtgagtcagtgtaagaacgtccaacgcccctcctccaagtgggctgacaacatcctcatgagtgcatttcccttctgcacagctcc

SEQ ID NO: 377997 - DNA, 122 bp, Homo sapiens
aaaatttatagttgtttgtaaccccaaaatcaaaattctcagcactttcaaggtgatttgcgggcatgggctcagcagcaaaatatttgagtcactccaggaacatgttctgtgctgagtca

SEQ ID NO: 377998 - DNA, 122 bp, Homo sapiens
ggcccacactggacagggcagctgctgggttgctactctcgcctccgccatgattccgcccgcagactctttgctcaagtacgacaccccagtgctggtgagccggaacacggagaaacgga

SEQ ID NO: 377999 - DNA, 122 bp, Homo sapiens
ggctaagtgacatttttgccagatgactcccccttttcggagtacagcgacatcagtgggcggacacacgccatggcggagagagtagacagccactctcctctcagcccggctgctgcccc

SEQ ID NO: 378000 - DNA, 122 bp, Homo sapiens
ccagcgccactggagcatgcattgcagaaggtgccaatacctgctgacagacaacagaatcgagtcctgagggcgatgggggaggacccagctcctgctggcccagggtcagccattgactg

SEQ ID NO: 378001 - DNA, 122 bp, Homo sapiens
cctcatgccagtccccatgctacactgacaccaggaagatcttttataacacagagcgctcgctgatcaggtaatatcccactacacaactggtctgagcttcccattaacttctcccctca

SEQ ID NO: 378002 - DNA, 122 bp, Homo sapiens
ccagcagagctacaggaggcccgaggccccttcctgttcactcttgctctatagacgccacgctgcaaagcagatgtgcagggacaccacctgaagacccagcctgcagctcagccctacac

SEQ ID NO: 378003 - DNA, 122 bp, Homo sapiens
agcactggtccgacaggtgcgtagacgtgccgatcatggtgaaggccgctgcagagcccgcgagactcgcgttagcgggggacccaccttgcgcccttgacattcatccagtccccaccccc

SEQ ID NO: 378004 - DNA, 122 bp, Homo sapiens
ggaaatttactttcctaccttgtatttatttccttcaggccatggagtcctttatttccacgcctcccactctgttaggactcccttgggtgggagtgccacctagtgccactgtgaggctc

SEQ ID NO: 378005 - DNA, 122 bp, Homo sapiens
agacggtccatctttctctatcagccgtttagcagcctctactttgatttggggcaaatgcgagatgggaccaggagagagctccccacacccccaccaccacgtgggcagtggttctgttc

SEQ ID NO: 378006 - DNA, 122 bp, Homo sapiens
agtgcagcaaaatagcgaacgtgcaaaactggccaaggggagacctctagtggttgaacgcgtcttttaagttcggaaggccgagagcaaagtttggcctttactcgtagctacgtagtccg

SEQ ID NO: 378007 - DNA, 122 bp, Homo sapiens
agggcctgcgggggatacagccaggcgcctcccttctccagactcggcctatccgactggcgtgagtcctgtggttttcatcacattgcactgtgggaaaggcccagggccctggcatatgg

SEQ ID NO: 378008 - DNA, 122 bp, Homo sapiens
gctcccctgtggactcaagtgcaccctaagggttcttggggaatacccagggagcctgttcggaagctttaacaatggttcctccgtctggacaggtccttttcaacaacatttggagcagg

SEQ ID NO: 378009 - DNA, 122 bp, Homo sapiens
ggctttgaaattggggtttaatcctatctcaactgtgagtacaggagagtaggttctacacgatgtctacatttcaagtataaggttgctcagaaagtgtggctggcacatacttggaagct

SEQ ID NO: 378010 - DNA, 122 bp, Homo sapiens
tcctccgccggctcagggaagactggttaaattccaggtcagccctacagagccagggttcgccggcaaagaacaaaaaaacaattgtctcccttatatccgagcaaatagtctagactggg

SEQ ID NO: 378011 - DNA, 122 bp, Homo sapiens
gaccaaaaaagagttcgcggcggggctctccgagcatgacattgttgtgggataatttggcgaagggagcagatagccctttctggctgacatttcttgtgcaaaacatgctgaatacgatt

SEQ ID NO: 378012 - DNA, 122 bp, Homo sapiens
tgctagggccaccataacaatgccaaccacaaacgggtggcttaaatggcagaaatgcatcgtctcacagttctagaagctgagaatctgaagaaggctagaagtcagggggttggcagggt

SEQ ID NO: 378013 - DNA, 122 bp, Homo sapiens
cccgggagagcgcagggaggggcgtgggtgccccttcgcccacctccgcccccgtcacctcgacagctgtcccgctcttggaattcattggcttcctctacccggcctcccaaacaccaccc

SEQ ID NO: 378014 - DNA, 122 bp, Homo sapiens
tttacctagagcccccccattgacagcatgtggacttggaaactctggagaggccactttcgaggctgtgaaagcaggaaagtcactgaacttaatggagcctctgttccttcatctgtaaa

SEQ ID NO: 378015 - DNA, 122 bp, Homo sapiens
atcctagtagggagaaggggtgggcggggtcaggcacagggggcggagccagccccacggcggaggagagcccagtccggtctccgcctccgtgacgtcccgggaagcaccgcccacagctg

SEQ ID NO: 378016 - DNA, 122 bp, Homo sapiens
ctcagcgcgggccagaatcggggactggaggcctctggccatggcgcctggagacggggtcgcgcagaccccggacacccgaggggggcgcagcaggccagggcaacccgccgcgaggcggc

SEQ ID NO: 378017 - DNA, 122 bp, Homo sapiens
gaaggccactgggccagagccgctgggtgccagcattaggaactaaaacatcaccaatttcggaggaactaagtccagtagaatcctacaaataggggtgtatcttctctaatgactgcttc

SEQ ID NO: 378018 - DNA, 122 bp, Homo sapiens
tgccgtggtggctgcctgcaaaggaacaccggcctatgggaaccagaccctggggcttcccgcgagcttctcttcctccagccagcaaaacaggaaaagcctggcccagggacggagggaga

SEQ ID NO: 378019 - DNA, 122 bp, Homo sapiens
aggaggacacgagccgcgcgggcttggaacccacgaagacccgcaaacccagggcgccgccgtctccgaccacctgctgccgcggcaggccatcagcagaatttatacccagggcgcgagcc

SEQ ID NO: 378020 - DNA, 122 bp, Homo sapiens
acacagcgaaaccccgtctccaccaaaaaaatacgaaaaccagtcaggcgtggcagcgcacgcctgcaaatcgcaggcactcggcaggctgaggcaggaaaatcaggcagggaggttgcagt

SEQ ID NO: 378021 - DNA, 122 bp, Homo sapiens
aggcatagtgtgcaccccacttgtttctggtatttttcccaagacgtccgggctccagcccgttttggcagtgggaatcctgtgccaatacatccaagtcttcatggacggtggaaacaaaa

SEQ ID NO: 378022 - DNA, 122 bp, Homo sapiens
gtgtcttctcaactgcaaccagagacagacagcctctagaacagggagtgctcagccaggcgcgatggctcactcccgtaatcccagcactttgggaggccaaaacaggtgtatcacctgag

SEQ ID NO: 378023 - DNA, 122 bp, Homo sapiens
cactggaatggctagcaaaatggatcctgggcccccaacccactcataacttcagttggtcggggatggagagctacactccccatgtgttccggttttgttagagcatttcttaggaaagg

SEQ ID NO: 378024 - DNA, 122 bp, Homo sapiens
gctgagatgtgcggccaacatggtgaaagtccatctctaaaatacaaaaaattagccaggcgtggtggcgcacgcctgtagtcccagctactcgggaggctgagacaggagaatcatttgaa

SEQ ID NO: 378025 - DNA, 122 bp, Homo sapiens
ggagagtgtcaaaacactccccaggtgattctgacattagccggggcccggaaccacccccgacctactgaatctgggactccaggagaggcccagccactagtggtttaacaagccccttg

SEQ ID NO: 378026 - DNA, 122 bp, Homo sapiens
cagaaggccaagtccaggggtggacggcggacacagagcccttggcagcctccaggctcacgtggggcacacctccgactgcaccgcatcccggagagctgcatgctctgctcactgaggtg

SEQ ID NO: 378027 - DNA, 122 bp, Homo sapiens
cagatacagctgcagtggaacagaggcctgtgctgaggcaacgaggtggggctgagctcccgaaggcagggccttccccgactctccccctggcccctgcccggggtcatggctgagctccc

SEQ ID NO: 378028 - DNA, 122 bp, Homo sapiens
ttcctcctcgcccaccttacgctgggacttgcaccccgagtttaggggcttagccatttccggaactcgggctagtggactctggggaatcaggcgctgggagaggccttcgcagctgcgtc

SEQ ID NO: 378029 - DNA, 122 bp, Homo sapiens
cggcaatagcctgggtcgcaggggccggcgggagttggagttctgaatgcgccaagcccgcggtcgctgtcaaacctctcgccgctacggactacaactcccagagggctctgcgacggcca

SEQ ID NO: 378030 - DNA, 122 bp, Homo sapiens
cgggcgtgagctcatcccgggcactcggcgcccagaatgcgcagccagcggcctcccgtgcgccagccctcaccctccgcatccaggcagcaggcgggcgggcaggctcatctttgccgtgc

SEQ ID NO: 378031 - DNA, 122 bp, Homo sapiens
acccaggctgtactgcatttatggaccttggtcgtggcagctacaagttaacctgaggggcgtgccacctctggagcattctctgtgctcgaactaatcccgggatttacagttcctgtgct

SEQ ID NO: 378032 - DNA, 122 bp, Homo sapiens
tgggaggaaaggtgaaggtcctgtgcctgggagggcccaggctgaggctacgggcacctgcggtgatgctaatcctgagagtcccctgggtgctcggatttagggatctgctcccagcctca

SEQ ID NO: 378033 - DNA, 122 bp, Homo sapiens
ctactaagctgctggttacagaaccactttgctaaacagtgattttatacatccccactccgtggtggcttatgagaaattcaatccctgattgtagtcctcaagcaaaataacactgacaa

SEQ ID NO: 378034 - DNA, 122 bp, Homo sapiens
agctcgtagaaccctgaagcaggcccggaaggtagcgagtctcctttctcagaaagctggcgcccagagagagcccctggcaggtcgcttgctcgccctgaatctctagtgcccctcagcaa

SEQ ID NO: 378035 - DNA, 122 bp, Homo sapiens
cacgggtctcccttgctttaaccctttccgggactcctggctgcactcagggtcaagtcccggctccctagccaacctatgtgactcctcgtggtggtcttgcccctttcaccctcctgacc

SEQ ID NO: 378036 - DNA, 122 bp, Homo sapiens
cggtgactggcaggcaggccctggcagaagccgatctctgctgagagtacgtcggtgatgcgcttgccttgattttactcagaggcccgaggacttgctttcaggttcagggacagataata

SEQ ID NO: 378037 - DNA, 122 bp, Homo sapiens
gccactgggcctggcgctgtccgcggtgctgaaggaggcgcccgctgcccgccccgcccgcgcgcccgcccacctcccggggcccctctcgtcgccccggtccccacccccgcctctgcccc

SEQ ID NO: 378038 - DNA, 122 bp, Homo sapiens
tgttcaattcccacctatgagtgcgaacatgcggtgtttggttttttgtccttgtgtaaacgcatttttaatttaaagagtgttgtgaggccgaagcgggcggatcatgaggtcaggagttc

SEQ ID NO: 378039 - DNA, 122 bp, Homo sapiens
gcccatactacagcgcactgtcaggtaacagctgggttcccagcaccctggaaagtgacccgtttggctatgtttttagccccttagcaacacggccagctctcaatgaccaagagtccatc

SEQ ID NO: 378040 - DNA, 122 bp, Homo sapiens
aaccaatcaggaagaggatctgagggaacgccggccttttactttcttgagtggccaatccggttgtaggctcacctcccccttctactcagagcactgctgcggccgccgccattttagcg

SEQ ID NO: 378041 - DNA, 122 bp, Homo sapiens
ctaagcgatgttgtgtgctgctgtggtttcgattgcaagggagaagaagttgggcagttccggattgggggagactaaagaggttcgtgcctgagctaatgcacattcctgggttgagagaa

SEQ ID NO: 378042 - DNA, 122 bp, Homo sapiens
cagggtcttcactcctggcgtctcgcagtgcttcagattacacagggtcttcacgcctggcgtctcgcagtgcttccacttcaggtacactggtcagaaaagaaaaggaggctcttagggat

SEQ ID NO: 378043 - DNA, 122 bp, Homo sapiens
ccgatgcccttccgcccctaacctcaaaagctgcttttgcgtctcgatgttattgagagccggctctgcggtcagctctgagctaggcgctgtgagaacgctcagtaagacagtgtctcgtc

SEQ ID NO: 378044 - DNA, 122 bp, Homo sapiens
gggagaaggagaaacggaggggtggggtgatggagcgccccctccctaaaataaacccaccggcccctacgatctctgccccagagagggaaaataaaatcaggggaaataatagaccaacc

SEQ ID NO: 378045 - DNA, 122 bp, Homo sapiens
gacgccgcggcagggccggccagggccccacgagttagggagttgccccgcacccctaaacgctcagcacccatttacggttgaaagtacgcacttgacgcgtccgggcgcctccgcggtga

SEQ ID NO: 378046 - DNA, 122 bp, Homo sapiens
aaaataccacagcagtattgactgctctggtaagcctcaaagtcaaccccccaccgagaccgtccaaggggagcctgccctcctctgcttcagggaagaccttcatggccaggggtctcagc

SEQ ID NO: 378047 - DNA, 122 bp, Homo sapiens
agcggactaagctggcttgaaggactaataccattggatgccgcccgccatgtggcggagcgtggtgcctgctgggaggtgtagtcctggcggggggtggggttccgctcccacgttcctgg

SEQ ID NO: 378048 - DNA, 122 bp, Homo sapiens
caggcaggctacgcccacgcgacccctcccgtttccctgctttggccaatggaggagctacgaatggcacgacctgctcgagcttggcagtctccagttgggctgtgcatggaagcttggga

SEQ ID NO: 378049 - DNA, 122 bp, Homo sapiens
ttgactagtcttctcctgtaacaagtagctcccagggaattccacttccacaggagacaacgttaggcaaggggggactcaggatgacagctcagtgtgggtgcataggaggtgtctgtggt

SEQ ID NO: 378050 - DNA, 122 bp, Homo sapiens
ccaattttgcatcgctcatctcccatacacacgcacagccttccaaacctggctttcaggcggcgctttctggagcctggctgtctattgtcagcacgcagaagcccccgaaacctgtgaag

SEQ ID NO: 378051 - DNA, 122 bp, Homo sapiens
cagatctttgatttagcaggcaaccaaaactaaagcacccgacgacttagttgctccggtcgtgaagaaaccacacatctattatggaagtttggaagagaaggagagggagcgtctggcca

SEQ ID NO: 378052 - DNA, 122 bp, Homo sapiens
gcaccgcggctgttcccagtgtttctccccctcccctttactcatcccctcgcccaactccgcagtggcgttcgcgccagccccttgagagacatctgagttcagccaatcaccgtgatccc

SEQ ID NO: 378053 - DNA, 122 bp, Homo sapiens
gaaccttcagtctcccccatctgttacactagagggctgcaggactctatccaccgcccccgggttatcattcagggccccatcatcttggatgctgccctgcgtatttggcagcaatggtg

SEQ ID NO: 378054 - DNA, 122 bp, Homo sapiens
ccactaccagctgctcagccggcccgccttccccgccttcagcttcagaggctgccactccgcttccaagacacctgaaggccacacccacctagggctgcctggggctagggggctgggcc

SEQ ID NO: 378055 - DNA, 122 bp, Homo sapiens
aaaatttttttttttttaagtaagggatgtaacatggtcagattggcattttacaaagatcgctagttgtcactgaagagataaattggaggggactgagattaggcattcagattccagtt

SEQ ID NO: 378056 - DNA, 122 bp, Homo sapiens
gcggagcccggagcagatctcagccctgtctgtgtataaacaagcgctgctccaaggagacgccaggacgaatgtcaggacatagggaggaaaggacagtggaatcccacaactcagacacg

SEQ ID NO: 378057 - DNA, 122 bp, Homo sapiens
tggttagatttaactcggtcaattctgggcttacaatgttaagtgagtccaaacccttgccgcttggcacctggggccggcttgctttgagggaagaccccaggctctgccataatcatgtg

SEQ ID NO: 378058 - DNA, 122 bp, Homo sapiens
aatctgtcatggtagcatgaaaatagccacagatagcatgtaaataaatgagcatgactgcgttccaacaaaactttatttacaaaaacaggtggcatttgaccagcaggccacagtttgtc

SEQ ID NO: 378059 - DNA, 122 bp, Homo sapiens
aaataaaaataaataaataaaacacctggaactcaaaaccagcctagaaagccacaaggccggccccgcgcgtactgcacccccgccgcccgcctgccagcgccccgcgccacatggagccc

SEQ ID NO: 378060 - DNA, 122 bp, Homo sapiens
ctgctatgcattgggtggggaatttattacaattgcctgaaaagagagtctggctgacatcgtattactgggggaatgtgcttgtgtgcccaaaactgacagaaatcctgtgtgtctgctca

SEQ ID NO: 378061 - DNA, 122 bp, Homo sapiens
tacgaaatgcaattgcgaaaggggcgggcgtctgcctctcggggctatgaaatgcaatcgcgaaaggaggagacatagaccacaggtacagtgtgcacacgagcttccttgtaggttctcct

SEQ ID NO: 378062 - DNA, 122 bp, Homo sapiens
cagaagccaaactggccagatgcctggaatgagctccccgcgttcatgagggctggtttccggcagtggcattgggaggctttgttaacattggttcttgtgcttgtctgccttgtttaagt

SEQ ID NO: 378063 - DNA, 122 bp, Homo sapiens
tccctctcctgtctacgaatctgaggacctccccaggatcagagctctgggcctgatacacggccggggttcctacgggtttgtgagtgggggtggaagatctgcagaggcacttagggctg

SEQ ID NO: 378064 - DNA, 122 bp, Homo sapiens
gttcagccctgtgagcccccagttgcttcacatgtagtatgtgactcatggataaggccacgttcaccctgattcatctatgatgagctaacgcctagctggctcgtggttggaccttagaa

SEQ ID NO: 378065 - DNA, 122 bp, Homo sapiens
acgccgcagctccccccggagcttctctatcttgtcttggttctcatccatcccacccagcgagaggccagtagctctgttcactgcgtgtcctcagtccagagctcaggagccatacagag

SEQ ID NO: 378066 - DNA, 122 bp, Homo sapiens
aaacccgctgacagctccaggggcgcggggcaggcctcgctttcgaaagcagcgccacagcgttcctattggtcttccattccagccaaccagcaggtttccctgtgatccacccctcaact

SEQ ID NO: 378067 - DNA, 122 bp, Homo sapiens
ctgcgacatgtcacctggatccagcgcttcgtagcatgttgtgatttctctgcctccgcccgctttctctcgtggaaccggttggaagctagttacagacgtcaaaacaactcacccttgca

SEQ ID NO: 378068 - DNA, 122 bp, Homo sapiens
agggacctgtgagggtctgtttacagaggctgggcaggggccgcttggctgtggggtgtgcgctgccccggcacctgcttgccctccgcgctcatctggggccgcagcatgcctatggttcc

SEQ ID NO: 378069 - DNA, 122 bp, Homo sapiens
gccagtggccgggccaaacttctagttggagacgagactcagctttccgctggtacaatgcggagcggagcacgagggtcgcaggtgcagaacagcgggaagatgcgctcccccagggggcc

SEQ ID NO: 378070 - DNA, 122 bp, Homo sapiens
gctggagaagtggtctgggactgtgggcactgctgtcccttgcctgggcccactgtgccccgcgggacgctcagggccccccacccaccgaggaccccagcccctcacccccgcttgcggtc

SEQ ID NO: 378071 - DNA, 122 bp, Homo sapiens
gaggtgggggtgggagtgtacacatggtacgtgaagttacaagtcatgctagttcccagtcgttggactgatggattttttgggtggacattcagaaccaaagagaaaattacagagccaca

SEQ ID NO: 378072 - DNA, 122 bp, Homo sapiens
aaattaattaactcacataccaagtcatctatctcaccatactaagaattagcaggaagtcgacacgagacaatggctttgagagtgaacaccttcttaggggggaagcaaatggggcagac

SEQ ID NO: 378073 - DNA, 122 bp, Homo sapiens
gagtgcaggggttgccgaagagtttacttcggttctgattcagctctcgaaagttacgtccgtatcacccgttaaataaagactccccgctcccctcatccccagttcatcgccgagcattc

SEQ ID NO: 378074 - DNA, 122 bp, Homo sapiens
gcccaagtaccgcgggccactgcactgcctggccacggtagcccgtgaggaggggctgtgcggcctctacaagggcagctcggccctggtcttacgggacggccactcctttgccacctact

SEQ ID NO: 378075 - DNA, 122 bp, Homo sapiens
acgacggcaaggattatctcaccctgaatgaggacctgcgctcctggaccgcggtggacacggcggctcagatctccgagcaaaagtcaaatgatgcctctgaggcggagcaccagagagcc

SEQ ID NO: 378076 - DNA, 122 bp, Homo sapiens
atgtgttgcttgctagaagtgtttccaggaaatcttgctcacagggaggccttatcgccccgcccccgcatcttccttggttcttgcgccctctgctggtcatattgagtcttaaccatgct

SEQ ID NO: 378077 - DNA, 122 bp, Homo sapiens
agatggggacatgaagccggccaaggggcagggcagtcagagcaagggcagcggggatgacgggaaggacccgcggaggcccaagcgaccccggaccatcctcaccacgcagcagcgaagag

SEQ ID NO: 378078 - DNA, 122 bp, Homo sapiens
ggaggaagaagcggcgctgcctgagcgtcggtcctcagaggagggacccaggggcccgggcgccctcagagcaggccgcagcacgccggtctttgagggaccctcggattcccgggatctgg

SEQ ID NO: 378079 - DNA, 122 bp, Homo sapiens
ctgtgctttgtacaaaacggtcagctccgtgagggcagagctgggagcccaggacaggcccggcccgcggtgggcgctcaaggaggcctggggaatggcagtgaccgtgacaggttccctaa

SEQ ID NO: 378080 - DNA, 122 bp, Homo sapiens
gtggttggggccaggctgtctgatccggatgggggacttttccctcggggcaggtgagagcgcctggagaggcccctgcccccgcgcacgcgtcctagcggttgccgggcaacgcggcccgg

SEQ ID NO: 378081 - DNA, 122 bp, Homo sapiens
atacctcatcatttttttagaagatgatgtgtttgtgtcatgcgtaataagcataatcaacgttagctttaaataaattttgttttgagtgccatgaaaatgtaacattttcagagtggaaa

SEQ ID NO: 378082 - DNA, 122 bp, Homo sapiens
accgcagagcttatttcgtgggtggtgtgttgccaccttcctgactctcagtatcccgtccgtcctcaggcctgctgctgggacgcgctggaagcgagcacccaagtcaggtactcgaatgg

SEQ ID NO: 378083 - DNA, 122 bp, Homo sapiens
actcacccagcacgtagcctgagcgctttctcagtgcgtctgtggggctccctgtctatgcgttcaggatttctctgataggtctgggggctgaggcctctgggcctgctgtgtgcctgtgc

SEQ ID NO: 378084 - DNA, 122 bp, Homo sapiens
tgtttaatttaccagtttgcagtggatgcaaacgagcagaatatgccctaaaaggccgggcgcggtggctcaagcctgtaatcccagccctttgggaggcctaggcgggaggatcacccgat

SEQ ID NO: 378085 - DNA, 122 bp, Homo sapiens
ccggtcgggggaagctgggcagccggcgcgcgcctcctgggccctaggcgctctcgctgccgagcccgacaaagcaaagcccctctcggaggcaaagccccagcttgccgcgcgccgcggtg

SEQ ID NO: 378086 - DNA, 122 bp, Homo sapiens
caaaattttaagcatagatctgtttctaagtcaagatagtttctttctgagacagggtgtcgctctgtcgcccaggctggagcattggcacgatcatggctcactgcagcctccacctcctg

SEQ ID NO: 378087 - DNA, 122 bp, Homo sapiens
tcgttcatctccttcaccttggcctccagctgaatcttgtttttgatcagctgatcacagcgctcctcagcatctgccaggttgtcttgttcctgaaggtgaggaacagaggggaggctgtt

SEQ ID NO: 378088 - DNA, 122 bp, Homo sapiens
gagaaaacataaacacctctcctctgttggcatggggataccctcaaatttggtggctctcggctgcccccacctgccataaatcagataggaccgcagctacccagctcagccctggtaaa

SEQ ID NO: 378089 - DNA, 122 bp, Homo sapiens
tgggagactggagtttatttcatctctgcaatctcgaccataagagacaggtacgccccacggggccagttcagagacctacccctaggtgcgcattctctttctcaggggcgttccatgct

SEQ ID NO: 378090 - DNA, 122 bp, Homo sapiens
cagtttagcattgttataaaccattccattcgaaaagcactttgaaaaattgttcccgagcgatagatgggatggtttatgcaagtcatgctgaatactcctcccctcttctcttttgcccc

SEQ ID NO: 378091 - DNA, 122 bp, Homo sapiens
ccgggcgcggcatggtgggctccgtgggcctggtggtgtccgtcgggggccaggagcccacgcgaggctcggatttaaaggtcccgcggcctcgggccccgccccgccccggggcctcgagc

SEQ ID NO: 378092 - DNA, 122 bp, Homo sapiens
cctgtaatattccacagctgatggctggaaatggggaaagctttctcgaaaacactcattcggggcttactgaggtcatcaatcagctattttcaaatgtcaactttgaaggcgaaaggggg

SEQ ID NO: 378093 - DNA, 122 bp, Homo sapiens
gacaaaaaagcactggagatataacctgatctgggctaggtcacccctcctcaggcatcccggtggtgctctgctccaaggaggtcaccacattgacactgaacccacatgacagctcagaa

SEQ ID NO: 378094 - DNA, 122 bp, Homo sapiens
cattacacgttttgaagctatataattagatattaaatttaaaccatgtaaaattgccatcggcaactgtgtaattacacatgaagccgtattgtcatttaactgtcttggtagagggtgac

SEQ ID NO: 378095 - DNA, 122 bp, Homo sapiens
acgctgttctgcagcttgcttttttcatttaataatatatcttgggagagttctccatctcgttcctttgaagactacacgtcattccattcaatagaaggagtacattggcccctatggga

SEQ ID NO: 378096 - DNA, 122 bp, Homo sapiens
cccacattcgttgcatcggcagggcctcactgaggcgtgtcctctcaagtgcttggcgaacgctgcgctgtgggtgaagcagcgcccgcactcgctgcagaggtagagttcctcagcagcgt

SEQ ID NO: 378097 - DNA, 122 bp, Homo sapiens
ctgtaagccaagtatgagcttacacaaacaggttatataacaagtggagtggtgcgcctgcgttccaaactcgctgagtcacgctggcctgcatatctgcctcggcctattcttgaccaaag

SEQ ID NO: 378098 - DNA, 122 bp, Homo sapiens
ttgagagaccccaggagtccttgtatacaaaactgggttctggacccgggctgttcatctcgtgatactggcagtggagacaccagcaccaccaccctcccccatgcccgctctcactccag

SEQ ID NO: 378099 - DNA, 122 bp, Homo sapiens
atttttagactcgtgtcaaactccccctcagaccctgggtggggagtcccggtagaggggcgtctgcgagggctctaatgagcctgcggccggcaggtcctgctctccaggcagctggccct

SEQ ID NO: 378100 - DNA, 122 bp, Homo sapiens
gctactttaaaggcaaggctgtcctgattcacccaccctctgagcccctgtgttgagaagcgagttgaaggatggacatggttacatgctcaaaatctccaggtgctcaatccctcacacta

SEQ ID NO: 378101 - DNA, 122 bp, Homo sapiens
ggctcccaggaagcggacgcccggtccccacacagcgccgcggccgcccctccacccccgcgggagcccctgccccacgctaataaaatgtgttgcgaggctgacgctggtgtgtatgcgag

SEQ ID NO: 378102 - DNA, 122 bp, Homo sapiens
tcatcctccgggcgcagatggcggggagatgggggaggcagcggagtccagcggccagtacgtcttctgtctgttgtttgtccgtgtgtccctctcgtcttggctccttggcttgttctggc

SEQ ID NO: 378103 - DNA, 122 bp, Homo sapiens
gaagactcccataatattatctagatggactgtcaatggttcagacttctcagaaataaacggttgtcttcaccaaagaatccagaccagctgaaatgctgcctaaaggcaaggctgacttg

SEQ ID NO: 378104 - DNA, 122 bp, Homo sapiens
ttctatttgaccccatttttctatcctttctgttttgaagggcttggaagcagttccaaacggagggaaaaatgaatcatcacctttccgtacatgcattttggattgtcagattggatttg

SEQ ID NO: 378105 - DNA, 122 bp, Homo sapiens
tcattccagtttcttctaccagtttcctaaatcttgtcactttactcatgctaaataaaccgctttacacaaccttactaaattttactttctattcccagatgctttactgcttaaagatc

SEQ ID NO: 378106 - DNA, 122 bp, Homo sapiens
gatttcttgcgcctcttgttccctcagttatttcataaaccaggaccgcaactatactgtcgtgtagcgcggccaccccacagcggtccctgacgttaacccttgccgtgactgctagaaga

SEQ ID NO: 378107 - DNA, 122 bp, Homo sapiens
gccctgcccacagcgtgaaaacaggagccccggccagccacggctgggcagggccagaagcgcctcctccaggatcctccccgcgctggcccgccccacaggagcaccgcccctaccaggag

SEQ ID NO: 378108 - DNA, 122 bp, Homo sapiens
acggggcggctgggcagaggtgctcctcagttcccagacagggtcacagccaggtggaggcgctcctcacttcccagacggggtggcggccgggcagaggcgatcctcacctcccagacggg

SEQ ID NO: 378109 - DNA, 122 bp, Homo sapiens
accccaaagttgtcaggagccccaacttctgcagaatcacctccctgccaggaaagagagcggggagaagctgcagttgagaagatactaaacaggaaagtcagcgttttaattaaacagga

SEQ ID NO: 378110 - DNA, 122 bp, Homo sapiens
actaagatattggcttggtttcatgatggttttactccactctccaaaaaaatcaggcttcgtgaaatttgaaatgcaattagatttatcgttagcgtgattcactgactatctggtttcct

SEQ ID NO: 378111 - DNA, 122 bp, Homo sapiens
ctccaccgtacaactcgaagatgtttttggacatacctggaatactctgactgatgtcaccggaaatgagtaagattttctgcatatactgggaatatgtgtcatgtaacgacggtcaaggc

SEQ ID NO: 378112 - DNA, 122 bp, Homo sapiens
aagaaggtaagcatatttttctttgtagaaattgatgcagaaaaagagtatcatgacatacgagcatgatagactctggtttgcaagtaaagttcagtgtagatatttaggtgcttagcatc

SEQ ID NO: 378113 - DNA, 122 bp, Homo sapiens
cctgactagagaagcctctttgtagaagaatcaatcgcattcctcccctcgctgaaatctcgtatcctatttcaaaaagactcagaaatgcagccattcctggagggactttttcacaagat

SEQ ID NO: 378114 - DNA, 122 bp, Homo sapiens
ttttagaaaccttgtgttctcctgggaatgagttctgaatggtgggtggcagaggaaaagcgctgaatatctagagtgagcccagaattcacataggcatagtcatggcagggaaacaaatg

SEQ ID NO: 378115 - DNA, 122 bp, Homo sapiens
acgggcactagagtcagacaaatggctggttcaagtgctgtctttgtccctcgctgactgcggcatcttggtcaagtttctgatcctgtgagcctcaatgatttcaatggagaaatagaaga

SEQ ID NO: 378116 - DNA, 122 bp, Homo sapiens
cgcagcggggcgcaggggccggaacgggaccgagcgtgggttgcatgggcctcgatgggacgggccggggcgcgatgggtggggcgggggcgaggtgaggtgaggggtggagcgggggaagc

SEQ ID NO: 378117 - DNA, 122 bp, Homo sapiens
ttcgctggaagcaggaggcgcgggcggggctggaccaggagacctgacgggaggatgctccgtgtgtgtgtgcgtgtgcgtgtgcgtgtgtgtgtgtgtgacagagagagagagagagagaa

SEQ ID NO: 378118 - DNA, 122 bp, Homo sapiens
agaagtagcaggcagcaaacaagagaacagggcacctgctgaggccagagcaccactggccgctactgttggcaacagaatttaaatgccccgcacctcacagcaaggaggccaaacgggct

SEQ ID NO: 378119 - DNA, 122 bp, Homo sapiens
gcctctgtggtctgcccccccgcagtaggtggggctacttactgtttctggactatagatcgtgtagaccttgaatcctaccacttcatgcactctgaattaactgatcaacgtcatgtggg

SEQ ID NO: 378120 - DNA, 122 bp, Homo sapiens
cctcgcggctggggctctcatcacacttgttccccaccagcatgatggggatgctctccacgtcccctttgatctcgcagatttgttcgtagatgggcttgagctcctccaaggactgtcgg

SEQ ID NO: 378121 - DNA, 122 bp, Homo sapiens
ggccccggtctaacctaagacccccaagttccccctcaggctcccgcaccctccaggacccgccattcccagggccatccaacttccccaggacccgcgagtgccctcccaaccaccttggg

SEQ ID NO: 378122 - DNA, 122 bp, Homo sapiens
ttaagcaggagctaggggaggagagtacccggctggccaaggagaaggagcagagccccacggcagaaaaggatgaggacgaagagaacgatgcctctctggccaactcctccaccaccact

SEQ ID NO: 378123 - DNA, 122 bp, Homo sapiens
tgagacctgggtgctgccactctgctgacggccacgcatggtttttgtccaggtgactcgcgactcgcgcacctacagcgttggggtgtgcacctttgcagtcgggccagaacaaggaggct

SEQ ID NO: 378124 - DNA, 122 bp, Homo sapiens
caggacagagagaggggcgtgcccctcggctgtgaagtgggcatgcccgtgtgatgcccccgcccgtcgtctcaccggggcgcaccgcgctggtcctcctccgccagtctcccgagctccgg

SEQ ID NO: 378125 - DNA, 122 bp, Homo sapiens
cacctgaggccactctccctggacggggggcgggcggcactgagaggcggccataaaaaccggagtttatttaataaaacaagagcccacgcggcagcagttgcctccaagatgaatgacaa

SEQ ID NO: 378126 - DNA, 122 bp, Homo sapiens
cactcactggggctcgtgctcgctttgggcgctcgccccaaatgatcctggcggaaaggacgtgctttttctgggtttcaacaggtattgagcggggtccctggttaccccctcggggctgc

SEQ ID NO: 378127 - DNA, 122 bp, Homo sapiens
aggggtgtggatattccaacaggatgcctttctgttttgcagcaaaatttaccgagtttccgcggaacgtgacggcgaccgaggggcagaatgtggagatgtcctgcgccttccagagcggc

SEQ ID NO: 378128 - DNA, 122 bp, Homo sapiens
cggggagccgcgcgggatttagctctgcgtccagtccggcggagcgccagctgcagtggtcgtacccgccgggttcgcgctggttggccctgccgccacgtcgtgcggcgacaacctcgggc

SEQ ID NO: 378129 - DNA, 122 bp, Homo sapiens
agagctgggcatgcacagccaggttccctaaggctgggctgggggaggcgtgtgtgtccccgggcagtccctcagtcccctggccctccttcccgaccggctctgggcatctgcaagggagc

SEQ ID NO: 378130 - DNA, 122 bp, Homo sapiens
gcagctcttcgagattcacaaagtgttaatctgttgcctagaattccagagagttggaggcgcccagtgtgaactgtgttccgcctaaaagaaaaagcgaccagcctaagatcatgagcgca

SEQ ID NO: 378131 - DNA, 122 bp, Homo sapiens
gtgtgggatatagtctcgtggtgcgctgtttttttaagccggtctgaaaagcgcaatattcgggtgggagtgacccgattttccaggtgtgtccgtcacccctttctttgactcagaaaggg

SEQ ID NO: 378132 - DNA, 122 bp, Homo sapiens
cgcgggcccgatcgataccggcgggcggacgtgctcccgccgccgacagcagccacagggcggtgcagtcagctgtccggccgctcggtcgcacttctcatcagctcaatacccgcagagga

SEQ ID NO: 378133 - DNA, 122 bp, Homo sapiens
cagaaggcacttgggagcaggggtgggcgggaactgcgctctgcctgtctctgctgccaccggtgggagacgcagcgtcgctcctcctccctgccgtagatttcaacgacaagattttgaat

SEQ ID NO: 378134 - DNA, 122 bp, Homo sapiens
gggtggggcgggggtcgcggccggcccgccacagcgcagggacccagccggggtctgagccggggccaggctttccggcccaaacagctgttgccggcacccccagctcttttgtctgcaaa

SEQ ID NO: 378135 - DNA, 122 bp, Homo sapiens
cccacaccaccgaacccactgcccttcccacccccacagcccttttatgaaatcagacaacgtggtaggtggaaaacagcagggcctttcctctgggttttcaaccagaagtgatattccac

SEQ ID NO: 378136 - DNA, 122 bp, Homo sapiens
aactatttctaaaacagtggccctctacaatttaaaagtcagccacagtgccatcttcttcgaaatttgattgaagatgtactcctggacatttatacaagtcaaatgttactcctccccca

SEQ ID NO: 378137 - DNA, 122 bp, Homo sapiens
gctagaaggggaagaaggatggcagttcctggacagggtgtactcctagtcacctggagtcgtacagccagggaccgatggatggcaacttggtcagaatgttgaggacagaagcacaagtc

SEQ ID NO: 378138 - DNA, 122 bp, Homo sapiens
acatgcccaagagaaaatttaccttctgacggatgctcaaagccacagtcgacaatggcccggagcaactctggcttgagcaggaagtcacgaaagccagagctgtggatggagacatagga

SEQ ID NO: 378139 - DNA, 122 bp, Homo sapiens
tcttcctcccaccccacactgtggctcctgctgtaccaggttgcagacgcagtaccagggcgagtgtagtgcgggaagcaatggctcctgctgaaccaggattcgaacgtggggcaggcagc

SEQ ID NO: 378140 - DNA, 122 bp, Homo sapiens
ttggctgtacccctccgtgtcctgcaggatctttcaatatttttatcttgttgctacttacgcacaagtctgatttccgtatcagacttccagagttgtggggtaagccttctattcatttt

SEQ ID NO: 378141 - DNA, 122 bp, Homo sapiens
gtcacccgtcaaggggagaagcctccgcgcccagcaaggacgctgcaggaccccctaccccgggtttccgcacggctccatccccagtgcgggcagcttctatggctcctttccggactctc

SEQ ID NO: 378142 - DNA, 122 bp, Homo sapiens
cgttgtttctcaaacctgttgtccagggtgcccttatattgaggaacagctcagggactgcgtcacccatggcacaaaacctcctcagccgaagccggggcttccgcatgtgcggtttcctc

SEQ ID NO: 378143 - DNA, 122 bp, Homo sapiens
ccgcggcctattggctgccacgtcccggcgccagaagccccgcctccctgacgggggtcacgtgatccctttcaaagatggccgccctgttgttttgatgaataatacttggtggggcgagg

SEQ ID NO: 378144 - DNA, 122 bp, Homo sapiens
ccccaaagcggaaaccatccagatgtccatcaggcgatgactggatatgtaagatgtggccgtgcagacagtggggtgtttcagccacaagaaggaacacaaggtccaccagttgatgactg

SEQ ID NO: 378145 - DNA, 122 bp, Homo sapiens
gccagccgcttccccggtctttgccaagtgggtttacgaggtctgaggcgtgttggggcgcgctcacgttctcgcaaaaggctcctccccagggctcaattccccgactgcgggaagccctt

SEQ ID NO: 378146 - DNA, 122 bp, Homo sapiens
tttaaaaaacaaacaaacaaaaaactacacaaaagtactattgtctcatataaaaagcctcgtcagatttatttttctgctcatcttttttctatttttctatcttatgtcactaccaccca

SEQ ID NO: 378147 - DNA, 122 bp, Homo sapiens
caacgctaggatttacatagtttggacatttctgtacttcatttattctttcctaaatgacgtaggcctcgagctatttcaagtttgcatttgtacagaactgttaaatgcctaggagtttc

SEQ ID NO: 378148 - DNA, 122 bp, Homo sapiens
tacattgttctgagaattaaatatggctgcttacatagcaaggaagggctcaacagaggccgttagtggtagtaataatacatgctgaaaaaaaacaactggtgaagaagatactgaattgt

SEQ ID NO: 378149 - DNA, 122 bp, Homo sapiens
ctgcctgagaggttccgctattccctccgtctggaatacccaccactctctcccaccccgcgcttgcatccggcaatactgtatcagcctcagggcctctgctgtcccgctttctgctctca

SEQ ID NO: 378150 - DNA, 122 bp, Homo sapiens
gtacacgcagacgcaaaccttagagtagcacactacggacattcatgccaaacccggccgcgtctgctctctcgtgatgcgcctgagctgtttgaagggaacgagattgattaacaatttaa

SEQ ID NO: 378151 - DNA, 122 bp, Homo sapiens
gtatggcaactctgcattctgaagcagccaggctgctgttcagccatagctcctccactgcggtaacatagacattcgcctacacatgcccagcctaatgtctccttaatgttcgtcctctt

SEQ ID NO: 378152 - DNA, 122 bp, Homo sapiens
tgtcagctgccacacgtggagggtgaagggcagggaaaatcacattttgtgggggactgtcgacattcttctgaatggaattctttggcaaacttgaggaaaaggaaaaaaataatgtggga

SEQ ID NO: 378153 - DNA, 122 bp, Homo sapiens
ttttttttttttcctgatttttagtagacacgggtttcacgatgttggccaggctggtctcgaactgctgacctcaagtgatccgcccgccttggcctcctaaagtgctgggattataggcg

SEQ ID NO: 378154 - DNA, 122 bp, Homo sapiens
agctgagcctctgcctacacgtttatgagttttatacactgggttgcccgcatgctttcccgtcatcaatttcctcaacccagcagcagcgctgtcctcctgccaggctctcttgttttggt

SEQ ID NO: 378155 - DNA, 122 bp, Homo sapiens
gctgtccagccacacccttggcattctctcccaatctgaggtactgagagttaagcacttcgatgtagcagtttggcggggtggagcgcggggggggacacaattcacagctgaaatatttc

SEQ ID NO: 378156 - DNA, 122 bp, Homo sapiens
acactttcactaaaagcagcactagtaagtagcaggccttgtcttgtatttcagtagccacgtcaaaacttctgagccaggcgaaatagaaagaggggtcctagggtattttatgcccaggg

SEQ ID NO: 378157 - DNA, 122 bp, Homo sapiens
gccttcccggcgtgccacgcgcggaggggactcttaacgtgaagcgctgggtgactcagccgcgtggccgcgcggtccggggcggggggcgcgcgccgctgcggcacagccggtcccggctg

SEQ ID NO: 378158 - DNA, 122 bp, Homo sapiens
ggtgctgcctgacctctatccagttaatctatgatcagggtggctgttgattctgtggtacgctatgcctgtttgattctttatgacagaatgtgatttgccttgctctattttcatcacag

SEQ ID NO: 378159 - DNA, 122 bp, Homo sapiens
ggttataaacacactcttcatttttccctctatgttcctaccttgctcatggttcagtggcgagcttcacgaaggcttttcattcaagtttgacttctttttccgcttcatttgttgccgag

SEQ ID NO: 378160 - DNA, 122 bp, Homo sapiens
gcgcctgcaagcccacggtgactggctggaagtgtgaccgctgtctgcccgggttccactcgctcagtgagggaggctgcaggtgagggcgaggggcggcccagtatggacacattgcactg

SEQ ID NO: 378161 - DNA, 122 bp, Homo sapiens
ccatttaacagatctcactgatgcagaaatttcttcttcacattttaatatctctgaaatcggaatatacttttcattgaataatgtttgaaaattgttggatttttttcccccatatttga

SEQ ID NO: 378162 - DNA, 122 bp, Homo sapiens
tcgccttggcccaaatcccgaatgctctgaggtgccctgacataactctcgttagaatcgcgtgatctgaaacaagagttccgctgcttctctcgagttttcccctactcagacagctgctt

SEQ ID NO: 378163 - DNA, 122 bp, Homo sapiens
tgctcctcacccatccggtctcactgggacgccacgttcctcagggaagccagtcgggaacgttttttttgtttgtttgtttgtttttgagacggagttctatgttatccaggctggtgtcg

SEQ ID NO: 378164 - DNA, 122 bp, Homo sapiens
ctgcggtatcaccccaggaaggggttggtggaagaacaggaggactccaggacccccccacgtctactctgaatgggaaacaccccaaggatgaaagctctcacccccaattctaagtttcc

SEQ ID NO: 378165 - DNA, 122 bp, Homo sapiens
ggctgccaccccagggcatggacaacaccacccattccccccactcaggtctccaccggccggaagccaccctgggctccacttggctcctggacgtgagagctgggcagggccttgaagac

SEQ ID NO: 378166 - DNA, 122 bp, Homo sapiens
agagcccgacaggcctgaaacgcccagacacacagatacagggacacacgggaggggggccgccatggcactccgtgtctcgcctggtgctgggctctgtgccatctccagtgaggggctct

SEQ ID NO: 378167 - DNA, 122 bp, Homo sapiens
acgtgtcgctctgtccctgcgggaggattcggggcccctttgacaggcctccttctatgccggtttcctggggcctcgagcttcctgggttccacgtctctagtaaccagtagagacgggcc

SEQ ID NO: 378168 - DNA, 122 bp, Homo sapiens
gctccgtctgtccccagcaatgcaccccacgcccatgtcccccactccctatgatgctctcgcgccttctggagcagcagtggtaccagctggaggctgtggaaaaattgagaggagacaaa

SEQ ID NO: 378169 - DNA, 122 bp, Homo sapiens
gttagatggggatgtgatgagccggaactgtccggaagctgccgcagtctctcgctgacgcggcgcaccgcctccagcccgctcaccgtctccttgcctgcccattgtagttcttatcctct

SEQ ID NO: 378170 - DNA, 122 bp, Homo sapiens
accgagagtggcccgccccacactgtgccctgccccacgctgtgccccgccccacactggcgtgggcagacactttgaggagctgagttaacaatgggtttctaaaggattagccgaaaaca

SEQ ID NO: 378171 - DNA, 122 bp, Homo sapiens
aggcccgatcccccagccactaagtggccccctaaacagaaagtgtgaagaggctgccctcgctgctcataaggacctgggggaagaggaaagtgtcccaaggtctttcctttctgactcca

SEQ ID NO: 378172 - DNA, 122 bp, Homo sapiens
atcacagctcactgtaaccttgaactcctgggctcaagggatcctcctggctcagccttccgagcagctaggactacaagcatgcatcaccacaccggaatgattttgttatttttcataga

SEQ ID NO: 378173 - DNA, 122 bp, Homo sapiens
ggccacaggaaacatcacatcaatgttagcgattgttaggtattataattgttcatgttacgttattcaacgtgccaagggttacccggctggtaaggggtggcatcagggtcaggacaggt

SEQ ID NO: 378174 - DNA, 122 bp, Homo sapiens
cgagccctgcccatccccgaatcctgggagccctgcgtggggagtgtcgagggcctgggtcggggggcaaactagtgtggaggtaaagttgtgggagtctccaaagtgcgggggggctgtga

SEQ ID NO: 378175 - DNA, 122 bp, Homo sapiens
tgccaccaaacccaaagccacttccagagccggagccaaagccactactcaggccaaacccggagccacttcctaatcctccgctgatgcctccagtgctggtgctaccgctgaccacagct

SEQ ID NO: 378176 - DNA, 122 bp, Homo sapiens
ctgaagaaagtgcggagcacagggcacgcgggccgctcactgcccttccacgcgcccccacgtttctggccgctgcgctccttgccgtgcttttacaatgccacaggccactgggggagacc

SEQ ID NO: 378177 - DNA, 122 bp, Homo sapiens
ggcataaggacaataatctcttctttctcttatgtcagaaatcagcctgagcctgagtaccgctaaggctttaatcacgggtcccgagagccctaagtcttctctttgcttgctgatctcgt

SEQ ID NO: 378178 - DNA, 122 bp, Homo sapiens
cgggacctgcaacccgccatgcctgaccctcccctacccccccacccccatgggctcccgcgtggcctgagcctccccaacaggcgccggcagcccctgctccgcggcccctggtgccatcg

SEQ ID NO: 378179 - DNA, 122 bp, Homo sapiens
gagcctgcagctctggggctaagtctgccctggggggaaagggctccacgctcacacgcacgcgctcgcacacacacactcacacctggacgcacacggaggcttgcggacccatactcaca

SEQ ID NO: 378180 - DNA, 122 bp, Homo sapiens
gggccgcccggacagggagcttcgctggcgcgcttggccggcgacaggacaggttcgggacgtccatctgtccatccgtccggagagaaattacagatccgcagccccgggatggggccggc

SEQ ID NO: 378181 - DNA, 122 bp, Homo sapiens
gaaatctgcgcgatgcattgagcctttaaactttcctgtgcgccctgcccagatctcgaccgccgggacccagggctggcgctgggttcttgggagagtacaatacaggggatcgcgaggaa

SEQ ID NO: 378182 - DNA, 122 bp, Homo sapiens
gtcggtcagtgcagacttcaagtgtgtctgtttgatgtggtgtgattgtgctggccttgtcgaaaaagatgtgatgcttctcagaacctgttccatctgtatgccattgttcatgccttaag

SEQ ID NO: 378183 - DNA, 122 bp, Homo sapiens
agggcgccaacctgcagcgagggacagcagcgcaaacacacccgcccagcaagagactcacggtaaccgccatgtcgacgcaaaccagccttcagcagtccgctacccttttttgatttttt

SEQ ID NO: 378184 - DNA, 122 bp, Homo sapiens
ccactcagcttcacaccccgggggccccaggagtgccggaggcggggaccaggcgggaagcgtgggggcaggcggaggggccagctcagttcataacactagtttatattctgccgctgttt

SEQ ID NO: 378185 - DNA, 122 bp, Homo sapiens
taacgggtacgtcctagagtttgatctcttctctgtgcaggggcgaaactcgaccccagccgagaactacactgtccttgcgcggggccctctgcgccccggaaggcgcccagtcccggttt

SEQ ID NO: 378186 - DNA, 122 bp, Homo sapiens
tgtgaataagtagtttagaagaaacaatctataagggcccggaagacttccggccctttccgcctttaactagactacatttcccagagtgctgcaagaactgggtgtgactcggaatccct

SEQ ID NO: 378187 - DNA, 122 bp, Homo sapiens
tcgggactctggctctgtgcgccgaagccttgcccgcccggcttctccctgcagcagccgcgcccccgccccagatgcccggagaaggcggctcaggcccagcccaacttcgcgggtccagg

SEQ ID NO: 378188 - DNA, 122 bp, Homo sapiens
ctcgtaaggtgggtgcatactttatcacagctccccaagacatgcaggagactcactccccgggggtaagtggtggatagaggatagcaactttctggttagatcactggcaggattcactg

SEQ ID NO: 378189 - DNA, 122 bp, Homo sapiens
gagtctccggggaggggggcgtggggtcactcactgatctccatgctctggaacaaagagcgtttgcagttgcacgtgcaggagacattgggctgcccggcggcggcggcggcggtgctgtt

SEQ ID NO: 378190 - DNA, 122 bp, Homo sapiens
agcgcagactcctacttgctcagtgacttcgcaagctcgtgggagggagctgggcgcgcccgagggcacctgggctgaggttccagtagctggctctacctgcgcttcaggtgagcggctgc

SEQ ID NO: 378191 - DNA, 122 bp, Homo sapiens
ctcgcacaagccctcgtctgctacgggattggggtaaattggcgctggatccagagtgcgcgcgagaggcactggcgggcgggcttggcaccggcgggcgggcttggcaccggcaggcgggc

SEQ ID NO: 378192 - DNA, 122 bp, Homo sapiens
ttatggattgagtgagagatcggcggatcgtgatttggctcatccatggggaggccccagcgatctcattcgaacacctgggctggtgccccggctggtacgccgtgttacaagcaggctct

SEQ ID NO: 378193 - DNA, 122 bp, Homo sapiens
accccggacgccatctggtgcatctgctccccacgagcgcgggcacctggggcgagagagcgctgtcagccggccaggcgctggggtccgcgcgagcccgagctctccctcgctgcagctca

SEQ ID NO: 378194 - DNA, 122 bp, Homo sapiens
atggccacgtgcacgcaccaccctccgcgccgagcccagctacgagctccggggcgtgcccgcggtccccaggccccgcccacccccgtcccacctggatgactctccggctgaggcccgtc

SEQ ID NO: 378195 - DNA, 122 bp, Homo sapiens
ggggtgtccaaagaggaagaatatagctgacagctaatacaattaggattcatttagggacggaaaaatgcaaagataaaacaataagagttaacacatatacaatgtcttatatgcctaag

SEQ ID NO: 378196 - DNA, 122 bp, Homo sapiens
cctgagcctcaaacctctctcttttttatgaggaacaccggttaattacaggatttaaggcgtaccctctccgggatgggactatctcatccccagatctttaatttgattataactgcaaa

SEQ ID NO: 378197 - DNA, 122 bp, Homo sapiens
tacctagggtaagaaggaaagtggccctctgcttgccctagcaccccctcctgcactgcccgcaggctatcacgtgctttcagacctggtgagcgtggaaactcccggctgccccgccgagt

SEQ ID NO: 378198 - DNA, 122 bp, Homo sapiens
ccaggcaatgcagggtgaactccaggtcctggctgctgcagcacaggtccgagttgattgcgagccgcgacagcacgtgcagcggcacggacgggtcgtctcccgcgttgaacaccttgacc

SEQ ID NO: 378199 - DNA, 122 bp, Homo sapiens
tccaagtgactaggaagaggtttgtcctggtacttcgctcagcgttactttcaagaaagccggggtctcgggcaagtctcgccggcgcgagcctggtccaccgttaccctgacacccgcgca

SEQ ID NO: 378200 - DNA, 122 bp, Homo sapiens
tttctctgcacagatcttcgggtatccaacctatctgtgcctccttcagccaggagcctccggatctttccagacttctttgcaatactgcctcatgcactgaatccatttctcgcatagcc

SEQ ID NO: 378201 - DNA, 122 bp, Homo sapiens
aaagaagagcttggaattttttttcccttgaccttcctcgtatctcactgggtaggcagacgtaagatctctcatctctacttcagtttcaacattttccaaatggcgctagtcacagaatt

SEQ ID NO: 378202 - DNA, 122 bp, Homo sapiens
cattgtttgctctggaaggagctgaattatctatgctcttccctccttcagtcaaggagacgtgggaggaaaccgggatggggatcagcagcctggaggccgcctccgctggaaccgcgccc

SEQ ID NO: 378203 - DNA, 122 bp, Homo sapiens
atggcaaaagcgacgctatcatgtgcttcccatagctttagggctttgccagaactatgacgttgaggagggtggggtaaaggggcaggaagcgtttatgttctgccaatccaacagctgta

SEQ ID NO: 378204 - DNA, 122 bp, Homo sapiens
cccaaagaagcaagagcaacactgttacaaaactgtctggttttgtaacaatttccccgccgccggccaatgaacagcgtggcggcacgtcacgtggtaccgttttatataacactttgctg

SEQ ID NO: 378205 - DNA, 122 bp, Homo sapiens
ccccaattacagttcctgccatggccaggcagcataggcggaagggcagatggggcgccccggggaaaacagatctccggccacatccaaaacacaccagccacaggcgggtgagagaagca

SEQ ID NO: 378206 - DNA, 122 bp, Homo sapiens
actcacactccactgcatggacagccagcattttgtctgttcctcagtttgtggacatctcgcccccttgtttccaccttggggatatggaggaagatgggatgagcgaagccctgtgatcc

SEQ ID NO: 378207 - DNA, 122 bp, Homo sapiens
cttggctggtgaggattctgcccctccccgctggcgtttgtttactttctttcccttggtcgctccccgcagttgactgattatgtctgtgcctgtctttccccctccccatagttctagcg

SEQ ID NO: 378208 - DNA, 122 bp, Homo sapiens
gacgataaacgaagggacccgtgagaaaggggcaaagaggtgtctcaataaaataagcaacggcctgctgtgggaggattcgggtctcagtataggctgccactgtcagctttgcaatattc

SEQ ID NO: 378209 - DNA, 122 bp, Homo sapiens
ctcactcatttcttcaggacatatcattacaggtctttgagttgtagttaggactttacacgtatgaatatgctgctaacacgcctggaggacttaactgttgacaacagggctccttttgc

SEQ ID NO: 378210 - DNA, 122 bp, Homo sapiens
gccccccactaggccaagtggagggggtccctccgtccaatgggcctggccagggccctacgccgcctcagcggcgccctggattcgggagacagccgggcgggcgatgaagaggaggccgg

SEQ ID NO: 378211 - DNA, 122 bp, Homo sapiens
ttccttctcgagcctcagtttccccagctgtgcagaagaagcaggttgtctcgcaggacccgcccagcgctaacgcaacgtgattcgctctggcaggagccgggggctgcccgcattgctgc

SEQ ID NO: 378212 - DNA, 122 bp, Homo sapiens
cctgcgcaccacccagtctgaaggcgacgcccctgcacgaaggagtcaggcctaggggctcgggacccagggcgacactcaattttctaacaggagccacagcccagaagctgagaagcctt

SEQ ID NO: 378213 - DNA, 122 bp, Homo sapiens
agtttctggggcaccggcaggggtcgttgggccgactggctggggctgggcggagttgctcgcagcttccctcacctctccgccctgcccccgcgcgttgcccttcgccagtgcctccctgg

SEQ ID NO: 378214 - DNA, 122 bp, Homo sapiens
ctcaccttccccccttttcccagagccatcttcccagcccaacgtccccatcgtgggcatcgttgctggcctggttctacttgtagctgtggtcactggagctgtggtcgctgctgtaatgt

SEQ ID NO: 378215 - DNA, 122 bp, Homo sapiens
cctctaaaaagatgctttaaaaatatgtgtgtaattgcatgcaattgtttataaaatgaccgtcgtgtcaaggaggaaaatgcatatccattttgataccagttgagtattatactctcagt

SEQ ID NO: 378216 - DNA, 122 bp, Homo sapiens
taagtgaatatctaagtgggtacacccgaagaaagaactcagacctgtatgggaattcaccgttcaagcagaagggtgtttccctttttaaaaaagtcattgcctttccatgttgcttttga

SEQ ID NO: 378217 - DNA, 122 bp, Homo sapiens
ccgcggccgctgattgcctattgtgcgtcccctctgcggccgcccgcgcgatgcactctgcgagctggccccttcgtttctaaatgagcagccagcgccgcagacacgtgccaagggaaggg

SEQ ID NO: 378218 - DNA, 122 bp, Homo sapiens
gatggttttttgtttgttttttgtagtgatgagattttctgatgttgcttaggctggtctcgaagtcctgagctcaggtgatctggccagctcaacctcccaaaatactaggattacaggcg

SEQ ID NO: 378219 - DNA, 122 bp, Homo sapiens
cacgcagggaccccctgccacggggcacgcacatggggaccccctgccacaatgcacacacgcaggaagcccctgccacggtgcacacacgcagggaccctctgccacagcgcacacacatg

SEQ ID NO: 378220 - DNA, 122 bp, Homo sapiens
cgctggttcatgggacggcagcgcacgacaaccttcaccgcctcggaggccatggcgccgcgcccaggaccaacgggaccagagctgacccccgccccgccggggactcccagcagcccggg

SEQ ID NO: 378221 - DNA, 122 bp, Homo sapiens
tccacggcacggaatattacgcagctgtcaaaaacgacgtgtaggaagagtttccagtaacgcagggagatcccgtggtgagaaaaggctggttcaaaaacagaatctataggatgtccttg

SEQ ID NO: 378222 - DNA, 122 bp, Homo sapiens
atcttgtctgccagcacccttttcttcctttgttccttttcctctctgtgttattgcctgcggcagccagtccttcatactagatagagttcagataaagcaaacgtttggcaaaaacatac

SEQ ID NO: 378223 - DNA, 122 bp, Homo sapiens
tctccccaggcatcccacctcccccttaccccgcaacctctgccacgtagcctggtggcccggttgcacctctggttctctggaggcgcctgtgttgcctctctgtcttaggtatgggttgc

SEQ ID NO: 378224 - DNA, 122 bp, Homo sapiens
tggggacgccccgcgggagtcgttctgcggctccccctggcgtcggctggggccaccgcccgggctcccacctcaaccctgcaatatggggttggggcagagtggtctgctgcccgctgccc

SEQ ID NO: 378225 - DNA, 122 bp, Homo sapiens
agcctcaccctctcttcctccctcaccagggccccaccggaaaccaacaactggggctggcgctttgctaggttgagtgtttcaactggcgtcccagaggcctaactaggcgaagctcagcc

SEQ ID NO: 378226 - DNA, 122 bp, Homo sapiens
ctctgaaacggacaagatggctgccacctcttcgcgcctcttagtcccacccactcagggcggaggtctgcgtcatgtgaccctccccttcttggctccgcctcctaccgcagtgcttgacg

SEQ ID NO: 378227 - DNA, 122 bp, Homo sapiens
tggctgaaggttgggtcatcaccagggaaaggctggctggtggccacctggcgctcccaccggacggcatcactttggtaagtttctcatgctccgagcctggcccaccctgttgtgaagtg

SEQ ID NO: 378228 - DNA, 122 bp, Homo sapiens
gagcggaagtgggcgtggcctggtggcgtgggcgcggggcgggggtgcggggggcgtgtccgcccgggcgcggcccagtgaggcggtggccgagtcctctggcctcagacgcgtaggctggc

SEQ ID NO: 378229 - DNA, 122 bp, Homo sapiens
aggcggggcagctgacctgctgatggggtgactttcttcatcttcttgcccacaggacagcgggctgggaagccaggggccgccgggacctggggctggaaaccacatctgcccacagccgc

SEQ ID NO: 378230 - DNA, 122 bp, Homo sapiens
attcacttctgttggctgacgtggcccctgagctctcttcctgtgcttagttaggccgcgcgaggccagaggttgagtggggaggcttccagcccctgccttctgtcccagcttcaggctgg

SEQ ID NO: 378231 - DNA, 122 bp, Homo sapiens
cataactaagagaggagtacccagtaaggcagtgttgcaggaagacaaacccttcctctgcgacagagcccacagaggtcactgctggaacaatggggaaaggagaaactgaatctctcctc

SEQ ID NO: 378232 - DNA, 122 bp, Homo sapiens
ctcagaggagatctgggtctctgggcctgcggtggggacggtcatgatgcccactgcctgcgaggctgcaggacccagctcagtgctaacctgcgccgggcgcctaccgcgcggccccccag

SEQ ID NO: 378233 - DNA, 122 bp, Homo sapiens
ggggaggcctcaggaatcttagaattgtggcagaagaggaagcaaatacgtctttcttcacgtggcagcaggaaggagaagtgccgagtgaatggggaaaagccccttataaaaccatcaga

SEQ ID NO: 378234 - DNA, 122 bp, Homo sapiens
tccacacaccctgagaacaagtttcaagtgcgtgtgtcgtcgatcaggagggccaggtggcggcgagggcgggtcgttagtggcagccggagcggcagggaggcggcagccccgcttcacgg

SEQ ID NO: 378235 - DNA, 122 bp, Homo sapiens
cgattggccgacaggctgacgggaacgtttacggtcagcgtgtgtcagcgacgtgcaacccggaagggaagaaggggcgtgtcaggctgcgcaggcggccagtccattggctggaagagacc

SEQ ID NO: 378236 - DNA, 122 bp, Homo sapiens
cctagacggttctgcagggcctggcatggccaggctgcttcctccctaagtaagacaacacggagagacagctctcagctacccctacctaccaagtggcacaggccagctgaagcgttcat

SEQ ID NO: 378237 - DNA, 122 bp, Homo sapiens
gccgtccccatccccaccctccagttctgctgtgaacagggataacgggacaccctaaaacgccaaaaggcggcaggcacgctccccaccagtgctgcgtccccccacgtctcactgcaggc

SEQ ID NO: 378238 - DNA, 122 bp, Homo sapiens
cctttatacccccttactcctgctgtaatacaatactggagtaatcctggagccagtacccgaccccagcagcttcttgatcactgaagaaataggaagtagatctctggtgggccaggtct

SEQ ID NO: 378239 - DNA, 122 bp, Homo sapiens
atgatctaaaccattacacttagaaaaagcacacttcaggaaaaacaatctgcaagctagcgagtggttgattgggcttcaatgcgttctcattcctgaaggaaatcccaaatcatgaaact

SEQ ID NO: 378240 - DNA, 122 bp, Homo sapiens
gcaatatggagtaacccgtctctacgaaaaatacaaaaactggccgggagtgggggcgcacgcctgtaatcccagctacttgggaggctgaggcagaagaatcgcttgaacccaggaggtgg

SEQ ID NO: 378241 - DNA, 122 bp, Homo sapiens
ctgtgtgtccccagtacctagaacataaatatagaactaaatataaacgtatggagctgccgctattcttatacacagccaaagtaactatgtatcacaaggaaaactgttgctgaattaat

SEQ ID NO: 378242 - DNA, 122 bp, Homo sapiens
agtgggagccgcggtggagccggcagaggtgcagcacttacccccattcacccctatggacggctccagtttagctccagcgatcgccagcactattccgaccatgaaccagtctttcctca

SEQ ID NO: 378243 - DNA, 122 bp, Homo sapiens
ttaagagtagggttgtgccttattcaactgcatacatagctcctagcacagtgccttattcggtaggcatctaagcacatttcttaaattaattaatatatctttaaagatatcatatttta

SEQ ID NO: 378244 - DNA, 122 bp, Homo sapiens
gggaaatgctaatggatgagcaggctcagtgtgtgtgcagacaacattggtgctctgccccggtcccctgcaatcccttgtccccattttgggggccctcctggctttgtgggcttttactt

SEQ ID NO: 378245 - DNA, 122 bp, Homo sapiens
tgggcagcctgtccgggaactgactctgcccaccagcacctcctggtgacaaggatggtgcggtagtggcgggcattcggaagcccctctgggggacagcctgtctctgccctggagctggc

SEQ ID NO: 378246 - DNA, 122 bp, Homo sapiens
cagtgaatggtaaaatatcaattttacccaacctgcccttttgtagaaggggcaacacatcggttaagagagtctctgaaatggggaagaaggttaatctaccctgagagaaatagcacaga

SEQ ID NO: 378247 - DNA, 122 bp, Homo sapiens
tgcgtccatggtctagtggcagccgggcgcgtgaggagcggcaggccttgaggctgtcgtcgagggctcctccaccaccggccggctcccaagccagcgttgcgcagatgcacggccagctc

SEQ ID NO: 378248 - DNA, 122 bp, Homo sapiens
tctgggggtgggggtaagggtcttggaggagctcccagaaaaatggaactcccagccgggcgcgatggctcacgcctataatcgcagcaattgggaaggctgaggcgggcagatcgcccgag

SEQ ID NO: 378249 - DNA, 122 bp, Homo sapiens
aggttgtggctgtgttccagtgaaagtttatatacaaaaataggaatcctgcccaaccttcgctaacccctgttctagaacacaagtttaggttacaaagcagcctgaatttttcagatcat

SEQ ID NO: 378250 - DNA, 122 bp, Homo sapiens
ttttatgagtatgcaatccagaatatgacaatcttattgacatgcgtcaacgcgagcttgcgctcaatagctatttgccgaaggaatatacggactagcggcccgaccactcctcgcccctc

SEQ ID NO: 378251 - DNA, 122 bp, Homo sapiens
atggaatgtgagcagtcttactgctaatcaagatttatggtggagaccaggacgcctggccgctcattggatttgcagaccctccaagctaacagcggcagccttgagattaagtgcaatgc

SEQ ID NO: 378252 - DNA, 122 bp, Homo sapiens
ttggggaggactgcttgtgccctgggatctgaatctgttctcactgagggccaggaggagcggggagggaggactcgcgtgctgggcctagtggcctcatccagcctatggtggttgagtga

SEQ ID NO: 378253 - DNA, 122 bp, Homo sapiens
tgggaatcctcctggggactctgtgggagaccggatgcacccagatacgctattcagttccggaagagctggagaaaggctctagggtgggcgacatctccagggacctggggctggagccc

SEQ ID NO: 378254 - DNA, 122 bp, Homo sapiens
cggccgtcactcacgcactcacgcgggaggaatgcagacggcagggctgccctgtggtcacgtccccgccccaccgacggaggtaggcgcccaggtacccagcctgtgggccttgggagccc

SEQ ID NO: 378255 - DNA, 122 bp, Homo sapiens
gggtcccgagaaaggagggccccaactccaggagatgcggcccaggagctgagaacacgtcggctccgggagaggacagggcttcagggaccttagggccgcccccagcaccgggggaggtg

SEQ ID NO: 378256 - DNA, 122 bp, Homo sapiens
tcttccccagcagaggggtcgggagttccggtggattcagtgttcccatcaatggtgagccgcttcggagcaaagccaaacacagctcagaactgcacaagttcaggcaccagacacagggt

SEQ ID NO: 378257 - DNA, 122 bp, Homo sapiens
gcagccggcgtggggtggagcggccgtgacacggtgtgaggagccagtgtgagcagcgagcgtcagatggaccgggaccccgcccacgcacagcaccctcgtggcctcgctggcctcctgca

SEQ ID NO: 378258 - DNA, 122 bp, Homo sapiens
tgtagcacagtgttcccaacagggtacagtacatgcctaagtgcttgttgaatgaacaaacgacgaaatctgcctcctagttccatagctgtggtttacacataaaagcaaatttcagacag

SEQ ID NO: 378259 - DNA, 122 bp, Homo sapiens
cagggcttcaaatgtcaacctgaggacccaggacttgatcctagagtccttaaagagccacggagggtctggagagggcaggaccacctcccagatcatggagcatttatcccagcgctcag

SEQ ID NO: 378260 - DNA, 122 bp, Homo sapiens
tgacggttgggagtggtggaaattggaaggataccaggaggtatttgggaaggccaatggcgtggctcctttgaggaaataaaacactaagcatgagccggctccgcctcttctgtctccgc

SEQ ID NO: 378261 - DNA, 122 bp, Homo sapiens
tcacaccactacactccagcctgggcgacagagcaagaccctgtctcaaaaaaaaaaagacgggagaaacttgacatgttttttttgttgttgtttgttgttgttgttgttggtttgttttg

SEQ ID NO: 378262 - DNA, 122 bp, Homo sapiens
atccgaggatcccatttgcggccgggggaatggcagagatcgccccccaggtctgcccggcgctcagggaattggtggcagcgtctatttcagagtttatggtaagaggctggagccggcac

SEQ ID NO: 378263 - DNA, 122 bp, Homo sapiens
gccggggtaggagcgacggtcgaggtctggcgtcccgtgggctgggctcagctgggtcggcgcggctccgggcggctagctcgctccggcttcagcacgctggacagcgcccgcgcctccac

SEQ ID NO: 378264 - DNA, 122 bp, Homo sapiens
gacttggtcgaggctcctttcttagaggaatttcagggactcacagccacatttgctgagcgagaactgtgggacgccccggcccctccctgggggccagccttccagctgaggagcccatc

SEQ ID NO: 378265 - DNA, 122 bp, Homo sapiens
gaaggcgagggggcgctggtgcccctgcaggtgggcagggaaaccgccctcttcaggacgcgcttgtatttctgcatcctgtgtcctgagcctggcgcgggaaccgccactcaaaccctcag

SEQ ID NO: 378266 - DNA, 122 bp, Homo sapiens
acctcgtgatccgcccgcctcagcctcccaaagtgctgggattacaggtgtgagccactgcgcctggccagcagtttttataacagtatgaaaacagactaatacagtaaattggtaccaag

SEQ ID NO: 378267 - DNA, 122 bp, Homo sapiens
catacagaaacaatgcatcacgcggatgcttgtttaaaatgcagaatttcggcatcacctcgacctactgaatcaaaatcttcaatttaaccagacccccaggtgatttctatgcactttaa

SEQ ID NO: 378268 - DNA, 122 bp, Homo sapiens
acgggccacggatgggagcccagggcagggggctggagccctcgggggtcagagcccgtgcgccttccagggcggaggcggtcagccgatggaccaggcggtgccgcagcgacagagggggt

SEQ ID NO: 378269 - DNA, 122 bp, Homo sapiens
gctttgtaaataaagtcgttctggaggtgggcacgtagctgcacgtcccgtatggcaccacgcgcacacacacggctgggactcttccttttcagtgaaattgttcagtggggcaatgggcg

SEQ ID NO: 378270 - DNA, 122 bp, Homo sapiens
tacacacacacagttgtttgttcttcgattgtgaatgtgcggctctccacacgaaccgcccgaaagaaagcctgggtcgcttttgaggagaaggagtttcttgacccttccccgcaaacgct

SEQ ID NO: 378271 - DNA, 122 bp, Homo sapiens
aggctgttggagaaactgcctctctcagggtgttctggcaacctgcctctgtgggtggggcggggggggggcatgtatttgatctgccatatttatcttagttttatttttttaatttttag

SEQ ID NO: 378272 - DNA, 122 bp, Homo sapiens
tatgttaaaaggatcaacgaagggcaggtgggacactgtgttcttccaaatgtgataccccgagaagtccacagcatcactcacataatattccaaagggactaaataaatctaatcacaag

SEQ ID NO: 378273 - DNA, 122 bp, Homo sapiens
gccaagtgcggttcgggagagttcgggccggtcccatggagaagttggcgcctggaggcgcgggcgcaggccggagcggccccggctttcgcggtcccgggcgtgcggcacgggcaggggct

SEQ ID NO: 378274 - DNA, 122 bp, Homo sapiens
caagaggcggtgcctcagtgcagctgctgctgtggagagctgttgggctgtggagcaggacgtggatcagcactggacaagactttgttcaagtgcatgtagatacaggacgagcttactct

SEQ ID NO: 378275 - DNA, 122 bp, Homo sapiens
agcagtggaggtaaaaaacactcggcagtggcgacaaaaagcagcggcggcaaaaagccacggtggcaggggcacaatagtggaaatggggtagaaggacaacacagcttggcattcctgga

SEQ ID NO: 378276 - DNA, 122 bp, Homo sapiens
agaactgttaacagaactgtagcaggtgcgtaatccaccagaaaaactccagcctggcagcggtgggattcgaacccacgcctccgaagagactggagcctaaatccagcgccttagaccgc

SEQ ID NO: 378277 - DNA, 122 bp, Homo sapiens
caacctgcgggcccacctccagacccacttggacgtcaagaagtaccagtgccaggcgtgcgctcgaaccttctcccgaatggccctgctccacaagcaccaagagtcgggctgctcagggg

SEQ ID NO: 378278 - DNA, 122 bp, Homo sapiens
cacggctctggcccaatttctccactttttcacttcgatctaattggtcttcaaggttcccgaggctgcgcaccagtttttgatgtcgattgaacagggctccagattaatcacttgtcctc

SEQ ID NO: 378279 - DNA, 122 bp, Homo sapiens
tccaccacccgcgatgctgccccaggtctagcagaagacaggtgtaaggccaggcgggtgcggtggctcatgcctgtaatcctaatgctttgggaaggccgagacgggaggatagcctgagg

SEQ ID NO: 378280 - DNA, 122 bp, Homo sapiens
atgtggcactcagctgagcccccagccagctgaatgtccttgggccagtggctgtacctccgtgtctcagccttcccagcagcgatgcagaagtaattgacccaccttgcagggtggtgaat

SEQ ID NO: 378281 - DNA, 122 bp, Homo sapiens
aaatgagtacagaggcatatgagtaacatgcaatccatgagtacacaggcacagaagtaacgcacgcctcataaatgagcacacacgtgtatgcgcaacacgcaccccgtgaacgagcacac

SEQ ID NO: 378282 - DNA, 122 bp, Homo sapiens
aggctgtggggagccaagagtcagggggtcccagggtgaggatcactaggccacccaagacggcggttacctggggcctggaacttccaacctgggagctccaccctcacccagcccctcct

SEQ ID NO: 378283 - DNA, 122 bp, Homo sapiens
cctgtcacttgttgggagcatgagcagctttctgtctggaacattaataatgatctaaaacggcctatttaatatgttacaaggcacttgagtatggttgcatgtccaaatataaatgtttt

SEQ ID NO: 378284 - DNA, 122 bp, Homo sapiens
tgtgaccaggcctaataactaccctctgtaaggttcttgtatcggttcgaaccctgcgagcgcgccgacacacaacacgaggcggtgtggagcaacatgctgtttttttttttttttttttt

SEQ ID NO: 378285 - DNA, 122 bp, Homo sapiens
agagaaatgataaaaagcagggccaggcacgacccttcagcttgttggaaaacatttgaacgtggcttctgtctgacccagaaataacatttctacaactgaaatctgtttagacagtcatc

SEQ ID NO: 378286 - DNA, 122 bp, Homo sapiens
aatttatagggccaatgcacacgatagagcacttgggtcatagaaagcactgagctcattcgggttgaaagtcatccactagttatcctcttgtgccctttaacttttctaaggccaagggg

SEQ ID NO: 378287 - DNA, 122 bp, Homo sapiens
gccccacgttactcagcagcaggagagaagtccacattttgatgggggaaatggggagttcgggaggggtgatgacatagactgattatttaagaataggtgacagacaaggatgtggcatc

SEQ ID NO: 378288 - DNA, 122 bp, Homo sapiens
gggacagactggaggggtctctatccagaggggtgacctggacacagtgaagctggttcccgcagagtcttaaagggttactggggagccctgggacagtgaggaggggacacaggagagga

SEQ ID NO: 378289 - DNA, 122 bp, Homo sapiens
agtgccctgcggcgacatcaagagggaaaacgggatccacaggctggaagcgatgctctacgccctggaccagatcaacagtgatcccaacctactgcccaacgtgacgctgggcgcgcgga

SEQ ID NO: 378290 - DNA, 122 bp, Homo sapiens
ccttctccgtaaagcctgcgggagcatttcctcccatctccatttaccacgggaagattccgaatgtgaagacaaggggagaggaagagtcaacgtgccgggcccgggcggctgcgccccag

SEQ ID NO: 378291 - DNA, 122 bp, Homo sapiens
aggcgtctcccgaagctgaagagcttcctcatggtggcgacttctcagacgcccaccacccgctcctgagccgcggcggctcctcgtggcctttccacccccactccgccccaaatccgcga

SEQ ID NO: 378292 - DNA, 122 bp, Homo sapiens
cagggccgctgctggctatagacattcaggtggccggtgtcccttgcagccacaggtttgcggggtggagagagagcccggggccgctgctggctgtggatgctcaggtggccggcgtccct

SEQ ID NO: 378293 - DNA, 122 bp, Homo sapiens
aactagggtgatgttaaaggcctcaggaatcaacctaaaaaggcttccacaggtcaaagacggaacaatttgagtatcaataggaataataactacaaggatttgaaacacacgtcacatga

SEQ ID NO: 378294 - DNA, 122 bp, Homo sapiens
ctaggttgaatgggtttctgctccctgcaatcaagtgaaccctaatataaatggagtgggcgttcccactagctatgggtcacccccttcgaaagcacgcctccagccatcagtgctgactt

SEQ ID NO: 378295 - DNA, 122 bp, Homo sapiens
cagccaccctctcttctcacatcttcttggctttatgatccttgcgtgtagtctttgagacggtggcaggaggggctggcggcagtgtcgccaaggactgattgtcgcgtgcctcgcctcct

SEQ ID NO: 378296 - DNA, 122 bp, Homo sapiens
cccctgctcctgcctttctgcctgcaaatgggtgcgcgtcacccctccccgtcagggtgtcgccaggcctccgggaaccgaactcctaaatgttccttgactctgtcctttcctccccctgt

SEQ ID NO: 378297 - DNA, 122 bp, Homo sapiens
gttaaaggggctcagttccttctaaaggcttcaggagagaatcattgcctggctcatggccgattccttcaactgcagcttcttgcttctatccccacatctcctactatggttattctact

SEQ ID NO: 378298 - DNA, 122 bp, Homo sapiens
acagatgctgctgtcataccctggctggctggccgggccagcccctgccagcccctgacacgcgcacacactcacgccacaaggatgtgccggccccggctgcacagctccacctcctcgcc

SEQ ID NO: 378299 - DNA, 122 bp, Homo sapiens
cctgctggaaggacagtgaaggagagggggagggaaggctaggggaggccccaccgcccccgccctgccccaccagcctcctccagtgctggtgtaaagtaggaagtgggttctagtcctgg

SEQ ID NO: 378300 - DNA, 122 bp, Homo sapiens
gtcacaattcattgactctcctctcttctctgttcttacactcaagcctagcggtgctttcgccaggcagcagcagcctctcctgcgagttttaggcatgtatgcagctcagtttgatcgag

SEQ ID NO: 378301 - DNA, 122 bp, Homo sapiens
tgtagatacgctaaccttttatgaaagtatagaccaagaaagaatgaggtaattaaaaggcgaaagaggaattcgatatgatgggacctaggcaaggtcagagatctagtgtggcagctgtt

SEQ ID NO: 378302 - DNA, 122 bp, Homo sapiens
ctggggagcctgccagccacatggctgtacaggtgtgtgattaaatgaaggggtcatcttcgttttctccgcttctacatggcttcagttgtattcgtttacacaagtgcgtgctgctgttt

SEQ ID NO: 378303 - DNA, 122 bp, Homo sapiens
ggtcccttttggtaccagagacttgtgaccctggactcgaacctcttctgcccaagcactcgcctgctggcaactctggctggagggcttggcccagcttctggccccacagccccctgagg

SEQ ID NO: 378304 - DNA, 122 bp, Homo sapiens
gcttcaaggtctaagagcagaaacacagcagggacctgggtgttctagactctcacaaatcgagaagtagaaaaggctgcatatcttatggttctaactccctgaattctctagatgggaaa

SEQ ID NO: 378305 - DNA, 122 bp, Homo sapiens
tgttccaggctgtgggactgaagcactccctgccagtcctcctctgcaactcacctttgacgatacagaatggctgctaggaaaattcatcctaaagttttctgtgctgtgttctttccaac

SEQ ID NO: 378306 - DNA, 122 bp, Homo sapiens
tcaacccggccggccgtagccgccagtaccgtgtggaagcgtgagagtcgaggggtggcacgtgactggcggggcggggcggggctgaggcggtggaacgcgcaggctagtggctgtgtttc

SEQ ID NO: 378307 - DNA, 122 bp, Homo sapiens
tcgctgaaagaatcaaagacaacgaagacgctgcgaagggccaaggtcttcatcacagatcggggttccctgacgggctctgacaggatcttttgtcaggagcagagtgttcgggcagttct

SEQ ID NO: 378308 - DNA, 122 bp, Homo sapiens
tggttcctgccggtgggttcatggtctcgctgacttcaagaatgaagccgtggaccttcgcgatgagtgttacagctattaaaggtgagtgttacagctcttaaagatggcgtggacccaac

SEQ ID NO: 378309 - DNA, 122 bp, Homo sapiens
agggagcatttgaagggaaccttgaaggacaagcaggatcctgaggcaacgcagatggggcggtagggtgtcccgggctctggcaagggttctcaccttccgctggcttggatttcctgatg

SEQ ID NO: 378310 - DNA, 122 bp, Homo sapiens
gcccactgccatagagaaacacattagcagcatttgaaactggcccaataaggctgggtgcggtggctcacggctgtaatcccagcactttgggaggtcgaggcgggtggatcacctgaggt

SEQ ID NO: 378311 - DNA, 122 bp, Homo sapiens
aagtacctagtgtataaaatagtaccctttactctccctgtgagctgccttgcctgatctcggccacatctgaagaatcaacatacatataacctttaggttggcttacatttgccgtcatt

SEQ ID NO: 378312 - DNA, 122 bp, Homo sapiens
aaacaaccattaaagctgtggtacattacttataataagtactcaatacatgtttcttcacgttttcagtgccttacattaattttaaaatttgaacttttagatgcactttcacttaggat

SEQ ID NO: 378313 - DNA, 122 bp, Homo sapiens
agtcgcttctcgtgcccacaaatcacaggaatgttgggggtgggggtgagaggaggacctcgccgctgtggaatggggacctcagcgctggagactccaaagcaaacctttctgggaaaagt

SEQ ID NO: 378314 - DNA, 122 bp, Homo sapiens
ggaaggcagggcctgcatctctgctgttttattctcacttccttactgcaccttgcctatcgctgggtagcctgcaagtgttggtcagttggtcagttggatgggtagatggatggatggat

SEQ ID NO: 378315 - DNA, 122 bp, Homo sapiens
gcggcgcgctcgcctgtcccctccccaccccggccgccgggcagcgggaacagattccagcgcgcacttacccgcagctccttcaagcgctccgggagcaaagacgcagaggcggggagggc

SEQ ID NO: 378316 - DNA, 122 bp, Homo sapiens
aagctttccaacccagttttccaaccacagcagcaccaacatcggcatgtctggggtctccgagaacgaggtccttaatgcacttagactctccagggcatttatcacggttttttttttct

SEQ ID NO: 378317 - DNA, 122 bp, Homo sapiens
tcatgcccagctttggattttcataataggagggtaacatttagaggtcttttttacattcgtgcactaacctggtacaaatagaagtaagctgtttgctgttttcttttaggtgctccaaa

SEQ ID NO: 378318 - DNA, 122 bp, Homo sapiens
gggggttcggggccggctgcagactctcaccgcagcggccaggaacgccagccgttcacgcgttcggtcctccttggctgactcaccgccctggccgccgcaccatggacgcccccaggcag

SEQ ID NO: 378319 - DNA, 122 bp, Homo sapiens
cccactcacccgtgatgcccacggtggacactgggcccacgcgctgcccctcgtggaggccgtacagatgcatcttgtatttgcgcccgggctccaggccccccacggtgacctcgctctcc

SEQ ID NO: 378320 - DNA, 122 bp, Homo sapiens
cgcctgcgaaggcgtagggtagaagtgtgaaaagaaatcccagctctcccagggagactgcgtgtgaaagagcccggctcccccaaaagctccaggccgcgttttgcaggcttccgcatctg

SEQ ID NO: 378321 - DNA, 122 bp, Homo sapiens
tttttaggtggctactttgtcccccctcacctcgtctgggttcaaatattgagcccagaccgtgtgctggaccctgttttcctggggatacagaggtgaaccaaacagatgacagtacttac

SEQ ID NO: 378322 - DNA, 122 bp, Homo sapiens
ggcggggatccacgccgaggctccacccctccttagggcaggtatgaccgagagctggggcgggagcgttgacctgtcgggtaaagccagccctaccgctcgactcagttgcacgcgcaggg

SEQ ID NO: 378323 - DNA, 122 bp, Homo sapiens
gtgagccactgcacccagatccaaggagcattttaaaagatgcacaaaatcactagttatcgggtaaatgtacgttaaaaccacaataagatgccactaaatatcctccagaatgcttgtcc

SEQ ID NO: 378324 - DNA, 122 bp, Homo sapiens
gaagccaccctcaggggccgagcgctcgggggcgtgtacgccagccttgggggtgctatccggacaccaacaatgtcactgctgctgccagcctcagtttctccatctgtgaagggcgcatg

SEQ ID NO: 378325 - DNA, 122 bp, Homo sapiens
ccagaacctctggcaagccgcccgactgcaactgctgaccctgcagagctggctgctggacgcaccgtgctcgctgcccgcagaagcggcactgtgctggcgggctccgggtggggacccct

SEQ ID NO: 378326 - DNA, 122 bp, Homo sapiens
agctcagcctctcggattccccgggacccacggcttataatgcgcttaaatcccacgcctcgcccgagagacagcacgtcaccgtcaccgtcaccgcctagcgcccctgacccgctcccact

SEQ ID NO: 378327 - DNA, 122 bp, Homo sapiens
ttgttaccctggttcctcccagcgctcagctttcccaccgagcttcgttttagacttcctcgggtgtcctttgataatgcatcccccactttcgcacgctctggcgttctttcaccggggtc

SEQ ID NO: 378328 - DNA, 122 bp, Homo sapiens
gaatcacattttggagaatcagacttctgacttattaatagaatttcccccctccatccccgtagacagcccccattccacttcagccccacacctatactcacacagttgtctacagagga

SEQ ID NO: 378329 - DNA, 122 bp, Homo sapiens
gccaacactcttattttacaaaggcataaacaagcatttaatgcacacgtttgcccggcgcggtggctcacgcctgtaatcccagcactttgggaggccgaggcgggcggaacacctgaggt

SEQ ID NO: 378330 - DNA, 122 bp, Homo sapiens
agcaaagttccctgcgcttgcacgctaaggcggactcccaagttgactcatccattgtttcggaaaggagatctagcggagggaagtggagcgggccaggagccaggagacctgtgttcccg

SEQ ID NO: 378331 - DNA, 122 bp, Homo sapiens
tcccctgtgaggcggcggccgggcgctgatgggcactgacggtggtcactaggccgactccgactagagtcctgttagcttgaagaggccgtgaggcatcggtcaccgcattgttttagtgg

SEQ ID NO: 378332 - DNA, 122 bp, Homo sapiens
ccgagttttacaaataaaacagaccaggggtaggacaaggcagtgcgtggttgggggcagcgcctttcactcacgtgtgtgacaatgagggcccgtgagctctgagacggtgacttccaaac

SEQ ID NO: 378333 - DNA, 122 bp, Homo sapiens
gaagaaccagagctggttcccaggcacccggcagggggtgtgtggctgtagggatgagagcgcggcacggcacgggaccctgcttcgtgtcacctgcggggctgcaaactggggcggggatg

SEQ ID NO: 378334 - DNA, 122 bp, Homo sapiens
atgcatgtagagtgtgacggtgactgggaaacctggggatgcacgtagagtgtgcggtgacgggggaacctggggaggcacgtagagtgtgacggtgacgggggaacctggggatgcacgta

SEQ ID NO: 378335 - DNA, 122 bp, Homo sapiens
cttcttatatccgtgtgcccagggctgaactccttattttcctttctccaagggcagagccgagtcttcagtccctgttggtctttccccacccccacttccagcccaagagccaggaaagg

SEQ ID NO: 378336 - DNA, 122 bp, Homo sapiens
gggagaagtctgagaattcagctcatgagaggatgcatttgagtttcccaccatggcatccgatgaggatgtcaggtgggcagctgggccatgtgcagtgcatcgggccagaggtgagcctg

SEQ ID NO: 378337 - DNA, 122 bp, Homo sapiens
ctggcctggcgggggttgacccccacctccctcccagacggggtggctgccgggcggagacgctcctcacttctcagacgtggtggttgccaggcagatggtctcctcacttctcagacggg

SEQ ID NO: 378338 - DNA, 122 bp, Homo sapiens
accggccctgcttaaaccagcacagggaaatgtcttgccccacttccaccaaaagtgactcgcttgtgacacaaggtcccctttatattatcataataaaggaggaaacgccagtttagagg

SEQ ID NO: 378339 - DNA, 122 bp, Homo sapiens
cactgtgagttttctacaaacataaacccttgtttaggccaaggcgtgaatacaacttgtcggtcccaaaccaacatcaatatcacgtgggaacttctgagaaatgcaagttgacacgagac

SEQ ID NO: 378340 - DNA, 122 bp, Homo sapiens
cccatctctcccatcccactcacctgtccatttcctggtttggacatggttttgcgggctcggtggaccttgggctgtccctctgggctcgtggtggctggagggggttcagaccctgctgc

SEQ ID NO: 378341 - DNA, 122 bp, Homo sapiens
tgagatgattcctgcttctgcgaaggctccccataaacagcctcataagcaggtaacgtacgcacaccttccttctgatgacctctgaccttcgtcgtcgccagtgaccactaatcatacct

SEQ ID NO: 378342 - DNA, 122 bp, Homo sapiens
aatgttgggattataggcatgagccaccatgccccaccagagcggtgcatttgtgacaatcgatgaacctacactgacaggtcatgatcacccagagtacatagtcacctctgggttcacac

SEQ ID NO: 378343 - DNA, 122 bp, Homo sapiens
agcattgtgggtattgtagttttctgcacacgggcactaaaggtaggttagggtgatttacggatgctgcaaaagaatccattgcttactacaccgaaggtcaatgcctcttgacaccctaa

SEQ ID NO: 378344 - DNA, 122 bp, Homo sapiens
atggtttggctctgtgttcccttccaagttgtaatcaccataatccccatgtgtcaaaggcgggaccaggtggaggtaatcggatcatgggggtggtttcctccatgctgttctcatgatag

SEQ ID NO: 378345 - DNA, 122 bp, Homo sapiens
tgcgggggtaactgcacacgaatgcctttctctgctttgcttagtgtggggaaagcccttcgtgtcaggccaataactggcacttcccggaacgctgtggtgtcagcaaagatgagtcagaa

SEQ ID NO: 378346 - DNA, 122 bp, Homo sapiens
gccgactgccgccgcgaccctggcccggaatctccttgcctgcccgctctccttagccgccgggatggctttgcggcgccaaccaatcgcctacaaagatcatttcctcgggctgcaattca

SEQ ID NO: 378347 - DNA, 122 bp, Homo sapiens
cgtaccttgtatagtcccctcccacactgaatagggcatcatggaaatcagagagtgtgacggctgcttggggttaggacataaaaacgtggagattcctgtcttactctctcctcgatcac

SEQ ID NO: 378348 - DNA, 122 bp, Homo sapiens
agggaagctataaatctagagctttaatcatgtcttcatgatcattcagcaaagagcgaccgaggatttattctaccgggacggccaagggaagactgcgggggtttgtcgtgggggatatt

SEQ ID NO: 378349 - DNA, 122 bp, Homo sapiens
agccaccatgcccggcctcactgaagggatttttttaatgtcacgtggttctcacaggtgcgatgtgttcaggagcaagtgaagattacgacggatgcttaaaaacaaacgtaaaattccag

SEQ ID NO: 378350 - DNA, 122 bp, Homo sapiens
gatgggttccaggagccacatgcaaaacccgtctccataattttacagtgaggtgtcctacgtatttaagtttatcctctgtcaaaaattatatattgggataacttctaaagagcaactga

SEQ ID NO: 378351 - DNA, 122 bp, Homo sapiens
tggcatgatcacatttactttttttttttttttttttttgcctaagatttgcagcccttacggcctagactgtctttaaggttttttagagtcccagagcactgtagccctcagtggtgagg

SEQ ID NO: 378352 - DNA, 122 bp, Homo sapiens
tcactttttctaccgttatatgctttgtctgccatatcgcatttaaacctcatgtcagttcggtgaagtccgtatagttctctttatgtttttaccattacactactacattcccctggggt

SEQ ID NO: 378353 - DNA, 122 bp, Homo sapiens
ccaggggctcgcctgccgccgccgaagaagccgccgaggccgaggggccaggccgaatcacgtactgattcacaatgacctcatcctctggggccacgcggggaaagcccagctccgagctt

SEQ ID NO: 378354 - DNA, 122 bp, Homo sapiens
ctcaggtgattcacccacctcggcctcccaaagtgctgggattacaggtgtgagtcatgacgccccactttcactggcattttaagaggtaaaagaaagagttgttgaggaggtctgcttgt

SEQ ID NO: 378355 - DNA, 122 bp, Homo sapiens
tacatcaggtctcaaagcagccggagccatgcctttcagatgctccagtgacatctgtcccggaggcagccatccacgggaggcagctcaacaccctccagatctcaggaccccaaccccca

SEQ ID NO: 378356 - DNA, 122 bp, Homo sapiens
tagcggtctgaccacaacactaagcaccaagaatgctcattcatgttccagacactgatccgcagtgcaggcaaggtgctcaaaggggagacttgagtttctgctgcatgagctgcaccaac

SEQ ID NO: 378357 - DNA, 122 bp, Homo sapiens
gaggcacgggagctatctagtggcaggcccacggtatatgtttgctgctttctacaaatacgagatcaaaggaaaataaagcaggggtggttcctgtcagtgtggagcgagacccgggaaag

SEQ ID NO: 378358 - DNA, 122 bp, Homo sapiens
gaacagtttccccctcttgattttcatacttctttctcttcaaacctttttagcatgtctcgactttgctgttcttggttttctaaaagtagaagtttgtctgaataaggcggggggaaatt

SEQ ID NO: 378359 - DNA, 122 bp, Homo sapiens
cctctcatcctttcattcatccatctgggcgcccagccagactccactgacatgagctgtcgcctgatcaacaggtggtattgcctccccgctgctctaatgtggtccaggcaccggcagct

SEQ ID NO: 378360 - DNA, 122 bp, Homo sapiens
ttttaacacatgaaattggggaagacacagttcagcccataacagagtgtgtggaccaagcgtggtggacgcatgccacaggatatacacagcatcagaagcactgggttccatgtacataa

SEQ ID NO: 378361 - DNA, 122 bp, Homo sapiens
tattctagtagctcctgctgctgccacatggcagctgggaataccagtagtctcagcactcggtcagtaccgtgcaagctcccttgggaatgctgataaatcctggcatgatacagcagtat

SEQ ID NO: 378362 - DNA, 122 bp, Homo sapiens
gctgggcatggtggcgtgcacctgtggttccggctacttgggaggctgaggcaggagaatcgcttgaacccggcaagtggaggttacagtgagctgggatcgctctactacacttcagcttg

SEQ ID NO: 378363 - DNA, 122 bp, Homo sapiens
acggctcaggggagtgcatgggcgaggacgcgtggcggatatactgggtgcactggaacacgcggaaggccaggctggccaggaagtcccgggcggacagcaggccggccacaggccgcagc

SEQ ID NO: 378364 - DNA, 122 bp, Homo sapiens
tgcttatccgcctggtcgttgttagcattgtatgagctatgcatgtacaagtactttgcacgttgaaaactgctatccagatgaaatgaatgtatcatttaggaaaaaggttttaaaaaatc

SEQ ID NO: 378365 - DNA, 122 bp, Homo sapiens
tcagaggccacacctgtgctcggggagctgctctggaagacggcactgagcgcctggcgccggccacgccccgtgtgctcatttcattacccactttcacggccggtgcccaatgggacgtt

SEQ ID NO: 378366 - DNA, 122 bp, Homo sapiens
aatgaatagtcaataaatcaacaggtccggcgcgctagcccctgggtgctcaggcccgggcgcgccacgactgaaggagtggctaattactcaaacacagttgaaaccaaaggaggccggag

SEQ ID NO: 378367 - DNA, 122 bp, Homo sapiens
ctaatttaatgggggcgtgggggcaacacaggcaccagaatatagcaccgggatgtgcaccggaaaaggcccgggggtaattagtacccgagggggagaggggccgtcattgtaatcgcaca

SEQ ID NO: 378368 - DNA, 122 bp, Homo sapiens
ccccaaaatcttctacattaagcaggaacccttcgagcctaaggaggagatatcaggaagcggaactcagcctggaggagcaaaggaggaaaccaaagtgttttctggaggggacactgaag

SEQ ID NO: 378369 - DNA, 122 bp, Homo sapiens
aagtcaattctgtactatacatgcttcataaaagatgaatataaatgcattagttagacacggtgagctaaattagaaggtcaggcagggctgggagggctgaaaaatcacacaaccaatga

SEQ ID NO: 378370 - DNA, 122 bp, Homo sapiens
cctcctcacaaaggccaggatccccagtggcttaaccccagaagggcgctcggtgtgccacgccgccgatggctcctgcgggtgggaaggaggcccgggaagagcgtggattcctcccagcg

SEQ ID NO: 378371 - DNA, 122 bp, Homo sapiens
cccgagggggcgtgtgtaggggcggggctgcgggcggaggagcgcggacgctccgggtatcgcgagagttgggcgggccgagcaatcgcagcagtctattccctcactctccctggaggagc

SEQ ID NO: 378372 - DNA, 122 bp, Homo sapiens
gcccccttgtgagggctcgaggcctttactggatgggcaggatgcgggcagcagctttgtcggctgccaacccaactcctccgacagaacggcaggtggcccctgtcggaaggggggtgtct

SEQ ID NO: 378373 - DNA, 122 bp, Homo sapiens
gcccctcgacgcctcagggttgataggctgggtagaggcttcaaaggacacccccacccccgccaacacttcaaaaacccattcctacccctctctgcctcagtttctctctagggaaaagg

SEQ ID NO: 378374 - DNA, 122 bp, Homo sapiens
caagtccgagtacttccccacactgtccagccgtcggctcatggccaacgaggaggatgccgacatgttcggcttcgtgtaccaggatgagtttgtgtcatcacagctcaagatcccttcgg

SEQ ID NO: 378375 - DNA, 122 bp, Homo sapiens
ggtgatccgcgccccgcggcctccgaaagtgctgggattacaagcgtgagccaccgtgcccggcctaaataaaattttgaagaggctagaaccccgcacttgtgccttgagcttactgacct

SEQ ID NO: 378376 - DNA, 122 bp, Homo sapiens
cccaggcgggggcgccccaggggcgggtgcccgaggcgcgggtgagtgcccggggggccccggggctcccggagtaactctctattgtaagttcttgcagatacagcgctaggaaaagggga

SEQ ID NO: 378377 - DNA, 122 bp, Homo sapiens
gcctctgatccttgagtcagccatggatgctatggcagaaatcgataaggcaccactttccgcagtgaactgctagaccatatagattgcctggagggaaatactgagttccctcccaggct

SEQ ID NO: 378378 - DNA, 122 bp, Homo sapiens
ccagagcctctgcctcttcctctgtctcctgtgggcagcgctcaggaccaccctcttctccgccgccttctcgctcagcggctccctgcccttgctccggccgcccgctcacctgcacttct

SEQ ID NO: 378379 - DNA, 122 bp, Homo sapiens
ggaggctgaggcatgagaatcacttcaacctggaaggcggaggttgctatgacctgacatcgcaccactgcactccagcctgggtgacagagtaagactctgtctcaaaaaaaaaaaaaaaa

SEQ ID NO: 378380 - DNA, 122 bp, Homo sapiens
ccttgcagtaaacgctctcccctcggctgaagcagcgctcggccagtggcgtgtggcagtcgctgcacttgagacacttgctgtgccagtggcggtccagagccttgaggatgaagcggtcc

SEQ ID NO: 378381 - DNA, 122 bp, Homo sapiens
agggaggggctcatatcggctggcacagccaccacgggtaccgaaacttggggacgtgcccgaccatgcctcctccggtggcccgggggccaccccgcattgcttagaagtctcgcttcccg

SEQ ID NO: 378382 - DNA, 122 bp, Homo sapiens
aacgtaaaagaaagggacaggaagtgaatgagagtactggaagtgcccggacgaagccgacgctcgcaggaactgaggattctaactgcccacagagcctgatgttttgtcggaaacgtaaa

SEQ ID NO: 378383 - DNA, 122 bp, Homo sapiens
agcaggaaactgtcccagacagacgaaggggctcgagagacaagacccagcatgggatcccggaccaggagaaacaggaacaattggagcatgggggcgacaggccgagtctggattcggga

SEQ ID NO: 378384 - DNA, 122 bp, Homo sapiens
agaactgccggtgctcaccacccccctttcccggggggaaactgaggctcagagagatgccgctggacttgctccaagtcagtcaatgaggcagaaccaggagcgccccaaccccagcgcca

SEQ ID NO: 378385 - DNA, 122 bp, Homo sapiens
gtcttgaactcctgtgctcagtcagtcttcctgctttggcctcccaaagcagtgggatgacgggcatgagccacccggcgcccagccttgttcttcagcttgacggtagagctgcctccatc

SEQ ID NO: 378386 - DNA, 122 bp, Homo sapiens
gcccacagctcgcccatggatacgtaggtgaacaggtaggcagagcccgtgcgtggcacacgtgccccaaattctgcatagcatagggctgccagcagggaggccacagcggccacaccgaa

SEQ ID NO: 378387 - DNA, 122 bp, Homo sapiens
atgcctgtccacgcctccactcccgggccacttccccgtggggcgggcagtggggcagggcggggtgggaatctgctgcaaccagggaagggaattgccccccgggcacagagagtttggag

SEQ ID NO: 378388 - DNA, 122 bp, Homo sapiens
tcccccgctcctagagatggccatgtctccttgcaagaatacatggctttcatgatcagccgcgaaactgagaacgtcaagtccagcgaggagattgagagcgccttccgggccctcagctc

SEQ ID NO: 378389 - DNA, 122 bp, Homo sapiens
aattctgaagtaatcacgtctttgctctcctcctcacgcacacgcgcccgcggatacactcgtctcccccagagccgctcccgggctgccgaggctcgctctgctcccagtgccccctgcga

SEQ ID NO: 378390 - DNA, 122 bp, Homo sapiens
cgctcgaggggcggggcctggagttagagcatctccacccgccgagcctagttattagagcgcctcgagaggcagagtctggagttagcgcgtctcgaggggcggggctgggttgttagagc

SEQ ID NO: 378391 - DNA, 122 bp, Homo sapiens
gaaggccgtgggagaactcgatcctagcctgtgtcagctggatgtgtttacgtggagaggcgtggccactttttaggtcacctgaagcagtttagcctttggatagaggaacctgcctgaat

SEQ ID NO: 378392 - DNA, 122 bp, Homo sapiens
tgggcggggccccttgggccgtcgccaccactgtagtcatgtacccaccgccgccgccgccgcctcatcgggacttcatctcggtgacgctgagctttggcgagaactatgacaacagcaag

SEQ ID NO: 378393 - DNA, 122 bp, Homo sapiens
tcgggattcgctgttccggggcgaacaaagaacggtcgggggtgaccccggatcatggcgcgcccgcagtatctgtggccactgtggaaacagccctggcgtgtccgggacgcgacgcggcc

SEQ ID NO: 378394 - DNA, 122 bp, Homo sapiens
cctgccgcctcccccgcacggccacgaaggggcggacggcgacggcaggaagcaggacatcggcgacatcctccaccagatcatgaccatcaccgaccagagcttggacgaggcgcaagcaa

SEQ ID NO: 378395 - DNA, 122 bp, Homo sapiens
gtttaatgtgagtgagggctggcatgctgctggcagctctcaacagtgaagcctgctgctcgataaggcattattatcagagcctgggggcatccagggagcaaaagattagctgactgagc

SEQ ID NO: 378396 - DNA, 122 bp, Homo sapiens
agccccgcagacaagcacctcgggagactggcgaggggcgagctcgcagcttgttagccccgaagccctgcccagggggaaaccctgctggagggagtctaacccccgggccagttaatgtt

SEQ ID NO: 378397 - DNA, 122 bp, Homo sapiens
gccccttacacatcatagcgcttcccacggctcctcaccacagctctgccatggaagccccggaccccctatgcgggagcaaagctccaacagagaagaggcttgctggagatcccgcagct

SEQ ID NO: 378398 - DNA, 122 bp, Homo sapiens
cggcctgcactggagtcaccttagcaccaactccgttcgcaggagtgtgtgcttttccagcgtgcacttcaaaacgtttccagcctctcccgtgacccggttccggctctgctgccacattt

SEQ ID NO: 378399 - DNA, 122 bp, Homo sapiens
tccagtggggcttgcaaggggcagggaccctccacacacatctgggctcatgcctccaatcgtctttggtgtggactctcccacaaagctcattcagaagacctgcccttaaccatcccacg

SEQ ID NO: 378400 - DNA, 122 bp, Homo sapiens
tccagagatgtttctctgtttatcaaaggggcgcagagtcacagtagcactttggaccaccgtagaatggctgactcacttgcctcatcagtagaggggcacatgttcctatcaaacagtga

SEQ ID NO: 378401 - DNA, 122 bp, Homo sapiens
gggcttcaagaaatgaagccgtggaccacagtggcgagtgttacagctcgattagagaaacgtgcggacccaaagagcgtggggcggcataattaaagcaaaagtgaaagcgaaagtaaagc

SEQ ID NO: 378402 - DNA, 122 bp, Homo sapiens
acttgctttggttttgcctggtttgaggcttcgtaacgtgagcagcgttcacagtgagtccgtgaatggaaatcacgccacacaggagctgtgactcaggcctgttctccgaaggggtgagg

SEQ ID NO: 378403 - DNA, 122 bp, Homo sapiens
gagaaactctgggtttgctggttgtcttagcgctgcccttggctgaaaacaacaagtctccgaacagagacagataattacaagccagaagataaaatgacacctacattggtgataccttt

SEQ ID NO: 378404 - DNA, 122 bp, Homo sapiens
tttttgtcttcgacgctcagggtctgggcgcctcgcatttgcagtctgttgtgacagacacggggagctccgcgtgccagcctgtggctgccctgctgtgggggtcctggggccggcgaggc

SEQ ID NO: 378405 - DNA, 122 bp, Homo sapiens
cgcccagacacggtgcggctgaggctcccggagaaacaagcagggaggctgagcaggcagcgggcgctcagggcagtgtcgccagcacatggatatttatggacatggaaagccatgagcct

SEQ ID NO: 378406 - DNA, 122 bp, Homo sapiens
tagccgagggcagcgcccgtcaggggggcaccgcggagcaaggtaagatccagcccccggcggatgggccctgcgcatctccacgacgttatttggcgtttttgcaacagatctgccagcgc

SEQ ID NO: 378407 - DNA, 122 bp, Homo sapiens
tcctgtccaccagccccgcagggtggcttacagctttttaatgcgtctgacttagagaagcgtcgggttgggggaaggcaagtctaccagagacaaggatctcctgtacctcccgtttccct

SEQ ID NO: 378408 - DNA, 122 bp, Homo sapiens
taggtatagaaaagaatggtttctggagtcacatagtaacagtttaaatcctggctctgccgtttcacatgctgtatgactttggacagattatttaaactctgtgtgccacaattcttcgt

SEQ ID NO: 378409 - DNA, 122 bp, Homo sapiens
gccccggtaaggagcccgtgcgggggtccgggagccgggcttccgggtggctggccggcccggctcttacctgcaccacccatccctggccctgcagcagagcctgctgaccatggaggaga

SEQ ID NO: 378410 - DNA, 122 bp, Homo sapiens
acgtggcctgttactcggacaaggtgggaaggtgtggccccaccccctcctaagacattacgatgcggagaacccccaagcccaccctcaactgtgttcactggaaacagcccagcaagggc

SEQ ID NO: 378411 - DNA, 122 bp, Homo sapiens
tgtgaggttcgatctgcgcatgtgcctaggtgaggtgccgagccgcgagaccctgcagagcgcttcctttgttccggagcgagtaggacgcgctacctcctggaggaaagaagcgactgcgt

SEQ ID NO: 378412 - DNA, 122 bp, Homo sapiens
cctccacctacttcccccacacggccatccgctacccacctcatctcaacccccaggacccgctcaaagatcttgtctcgctggcctgcgacccagccagccagcaacctggaccggtgagt

SEQ ID NO: 378413 - DNA, 122 bp, Homo sapiens
gagacgatcccgtccgggatcccatccggctcccatccggaggcgatcccgtgaaaggatcgcgtccaaaataaaagggcccgagacctatgcttatgtaattcctaatccgtgatcttttc

SEQ ID NO: 378414 - DNA, 122 bp, Homo sapiens
gccccccccttcccccagaaaccccaaaggatgtcggtgatagagagttccaactaatgacgattgtgcgccgcatctggggaagggatacagaaaaaaaccctgcaaacaccgtgaggatg

SEQ ID NO: 378415 - DNA, 122 bp, Homo sapiens
agggtgtcccgggagtgtgggtgtcccgggggcgtgggtgtcccgggagcgtgggtgtcccgggggcgtgggtgtcccgggagtgtgggtgtcccgggggcgtgggtgtcccgggagtgtgg

SEQ ID NO: 378416 - DNA, 122 bp, Homo sapiens
gcgcctcagctttttgcccgacgactggaagcagagctgtatgaccggcggccggcgccacggtctccgtgcccagttccccaagcccagacaacccacagacagcgcagccaaaagcctct

SEQ ID NO: 378417 - DNA, 122 bp, Homo sapiens
ttccacgaaccatttgagactaagtggctgacctgattcccctgaagccctgaatactttcgtgtctgcttcctgaaactagggcactttcttgcatccggaaataccgtcaatcctcaggc

SEQ ID NO: 378418 - DNA, 122 bp, Homo sapiens
ttaatatctttctcttttgtgcctttttagcgcgaaaagtgtatgggaagactaggtgctcgttagcggctcggttagaactacattgcccacaatgccccagggaacatttgtagctctag

SEQ ID NO: 378419 - DNA, 122 bp, Homo sapiens
aatgccagaggcaggagacagatgggtccaagggccagagagcctgctccagtggctcctcggagtgagatgggtcagagagggaggcaggagaccagaaaataccaaggaagaaaaatcta

SEQ ID NO: 378420 - DNA, 122 bp, Homo sapiens
tatgacgttgaggtaaaagtacgacatgttcgccagggataccaagagttgagccagcaccgaccctgctgtgtaggcggccagcgtgacgctcctgcagtagccgctcactctctggtagt

SEQ ID NO: 378421 - DNA, 122 bp, Homo sapiens
tcttagggtttctcttctcaacctggacttcccaattttggctctcataatcactgctttcgctacatctcctgggaatcatagaacttaattggccagtctggcttctttgtaaacactac

SEQ ID NO: 378422 - DNA, 122 bp, Homo sapiens
ttggtcaagaactaactcagaagaaatatcatttgtttatttaatcatgaaatctttatacggtattgttcactcagtaacattttggggtaaaactcttcccagctaaatgacagctaggc

SEQ ID NO: 378423 - DNA, 122 bp, Homo sapiens
tccagctggaactgcaggcgacggttctcctcctggagctgcagcatctctgtctccaaacgctggggctgctttgccacaggagactgtagggaaagaggcccagagccacctttatggtt

SEQ ID NO: 378424 - DNA, 122 bp, Homo sapiens
aggcatgctgagcgcccatgcgtgtgcgcaggtcctacgggccgtgtccagacccagccccggggtcaggtgacacctgtagttgggtgagcgctcacacaggcacctccaggtaaggggga

SEQ ID NO: 378425 - DNA, 122 bp, Homo sapiens
ctctgggcaggcagagccacttccgccccggaaagcgaggccgccaccatcttttgggtccgggaggtgagtcagccctgcacccccacgacccctcttgaaccttttcagcctgtgcttgg

SEQ ID NO: 378426 - DNA, 122 bp, Homo sapiens
tgagagggaacccaacgttattttacattagtcttcctcttagggatgaagggaccccaacggttggttaaatccggtaaagagctaacttggtgttgctcaacccttctcacactacaagt

SEQ ID NO: 378427 - DNA, 122 bp, Homo sapiens
tcccgctccgggccccttgcaaatggcggacaagatggcggcgggtcagctgacgacgagcgcccggtcccagccgagccggccccggaagccccgcctcccagaaagccccgccccgccac

SEQ ID NO: 378428 - DNA, 122 bp, Homo sapiens
ctaccccttcctcggacccagcccgtgcccaccttgggtcccggcagcctgggaggggtgcgcctcttggggctcatcccccacaacctccacgctctggaggtgttcaggttccttcgagt

SEQ ID NO: 378429 - DNA, 122 bp, Homo sapiens
gccctggtcgactgagctcccacaggagcgcctctgctgcgtctcggggctgagtgtggacgcgccgcgcgcggccccgccagggctggtagtttgcagaccgtccctgccgcggcccgctc

SEQ ID NO: 378430 - DNA, 122 bp, Homo sapiens
gaaaagaaaacgtctgcttagtaaagacagtgctttcccttattgtttttaagttcaaaacgctctagagactcagatattggaatgaatctaaatcaagtcgtgattgaaatcagtagtct

SEQ ID NO: 378431 - DNA, 122 bp, Homo sapiens
atgctgttttaacaccaatttaaatatcttcccatttttttagccttcatatttctacttcgagtaaatatatacacatacaaattaaaccattttcttataacttattataaagatcagaa

SEQ ID NO: 378432 - DNA, 122 bp, Homo sapiens
tcaaggatggacatgcaggacagaacaagccgtgcagagagaaacccatggagatgggcacgcggatggacagcagagcgggcagaaggtgcggccttcccacaaacggcgggggccctgga

SEQ ID NO: 378433 - DNA, 122 bp, Homo sapiens
tctcacccgccccgagagcgccaggcctcccttcttctgattggccgagccgagtcgtcacgagccatgattggctcagggccaaccaccccgccccttcacctagggctcggcccaggttc

SEQ ID NO: 378434 - DNA, 122 bp, Homo sapiens
gggcccaggacccggaggatgcggtggggaaaccaacttaggcccccacggcactgggggcggcagagggagagccaggccctcaggcagtgcacaccgggagacggagcggggctctcgct

SEQ ID NO: 378435 - DNA, 122 bp, Homo sapiens
ttggaacttgaaagcaaggcaggaactcaagccttattttttgttttagtccctagatggcgctaagagcaatatttaggtatgctcactgatggtttgatctcttggggtctatgtgcaag

SEQ ID NO: 378436 - DNA, 122 bp, Homo sapiens
tgggcagagtaccccgcgagtgcggagattttcaggctgtaatcttcagtctgggaaaggcgatgggaaggaagggcgatgcagaatagaggtggtccacttctgactcccccctcacccgc

SEQ ID NO: 378437 - DNA, 122 bp, Homo sapiens
tatagagtgaccatgctacaggaagtgagataatgggctaaggaatttttcctagtgctacggaggatggttattttctttgttcagtttaaactctagaaaccaaaggagaaaccagcact

SEQ ID NO: 378438 - DNA, 122 bp, Homo sapiens
aaccgcgcgcactctctttcaaacatacacactctctcacttaaagacacatttagttttcggcaaaacggcatctcagcgtgcgattgagaccggcatcccaaaccccacttttgagcagc

SEQ ID NO: 378439 - DNA, 122 bp, Homo sapiens
cgggtgcagtctcagggtgaggacggagctggggccgacgcagcctcgggagttggtggacgggacaggtgcggcctgtggggaagaagggccggccagggagatgcggtctgcaaggggag

SEQ ID NO: 378440 - DNA, 122 bp, Homo sapiens
gaagaaagataataggaatgctaattccttcttgatgaaacgaccacaacacgctggagccggccttggaccctacgtttcaagattggcctgcttccagcgtctgccagctccactgcaca

SEQ ID NO: 378441 - DNA, 122 bp, Homo sapiens
cctgtaagcctgggtgcaggagccaatgggcagggccaggctgtgtgggtggtgggctgccggcagctgacagccacctgctcagctctgagaagggccaaaggaagtcaagcagaaaaagg

SEQ ID NO: 378442 - DNA, 122 bp, Homo sapiens
gatgcttttaataaaaacaacccccactgcagtctcaccctccaagtgggtgtgggaggccgggctggcccagcagaagcccccaggcctggactccatccatctgctcagacaacagcagg

SEQ ID NO: 378443 - DNA, 122 bp, Homo sapiens
agtgatccacccacctcgacctcccaaagtgttgggattacaggtgtgagccactgtgcccggccacacaccagatttttttcaagaacctgactttcagccgggcgcggtggctcacgcct

SEQ ID NO: 378444 - DNA, 122 bp, Homo sapiens
gccaatcgggacccgaaggatgaatcaagcgctatgatgtcatgcggcccgggagccaatcgcgggacaatagaactttcgtgatcgtaaattccagaatccgatgcggtggagagcctagg

SEQ ID NO: 378445 - DNA, 122 bp, Homo sapiens
cgggagctcctggtgttgggggcaggcaagcagacattctgcctgagactccttttagaacgtgaatgagaagcagcacgagagttgctgtcagactccccgattgctccatcttttttctt

SEQ ID NO: 378446 - DNA, 122 bp, Homo sapiens
ggcattttacatccacagtctctttcaatcaacacgtccatgcggaggagagcttcttgtcgcccattataaaggtcagaaacaggctaagggaggataagtcactgcctaaggttacagtg

SEQ ID NO: 378447 - DNA, 122 bp, Homo sapiens
tgggagatgctgctgtcccagaggcggccctctctgaggatggagatgccagcttgaactcggacaatgcccacctcagaaacctgggccgagaggctccccacaaattcgacagatggtaa

SEQ ID NO: 378448 - DNA, 122 bp, Homo sapiens
ccttcactcccctgacagcatgttcggctgagacctgatcagggattggcggcaggagggcggagaaacgggagggtgggaagagagaaggtcgaggattgggccgaagcttgaggaacccg

SEQ ID NO: 378449 - DNA, 122 bp, Homo sapiens
cttagacattaaatttgattttggtgttgctgtaaagaatacagatcttaggcaccagctcgtaggaggggtggtaaacaaggaggacagcttttaccaggttgcctttggaagcaaaactc

SEQ ID NO: 378450 - DNA, 122 bp, Homo sapiens
gaggtgacttttgtggtacttgagaccatatgattcctatcattaccaaccaatattttccgattgtttttgccccatgtgacttctctgtgattcctcctggcaaggaagttttacaggaa

SEQ ID NO: 378451 - DNA, 122 bp, Homo sapiens
tggggccggtgacccagcggaaagggcagaaacgctccccgaggagggaaggcaggtgcgcggatgggacctttgcccggacgatccccaggctggacaagtgctccctactcctgccttgc

SEQ ID NO: 378452 - DNA, 122 bp, Homo sapiens
acctgccagttaattggtctttcaagtttctccgtttgtttggaaaaatggaaactgttccggaatgcatgctactggaaatcaggattttccacttattttggcgagtactaaatcagtga

SEQ ID NO: 378453 - DNA, 122 bp, Homo sapiens
agaacgattactgcctttaaaaagtcgtgaaaatgatcgtgaaccgtaccccacacggagcgcgcgtctaccccctaaggcggtggagacgcccccagcttccgccgccagctcgcggggca

SEQ ID NO: 378454 - DNA, 122 bp, Homo sapiens
cattggtctcgtgctgcagaatgagttacaaatagtgaatcctcagcaatactgtctccccgtggactggaatttggacccgctgctgtggcgggcagctttgacccaatgaggaccacgcc

SEQ ID NO: 378455 - DNA, 122 bp, Homo sapiens
tcagggtctgcgggcaagaggcgcacgggggtcgaccagggctccctagggctagatgtgcggccaagcacccccggggcgtcgtccgcagacccgccgtcgggggcgcgccccgagctccc

SEQ ID NO: 378456 - DNA, 122 bp, Homo sapiens
gagcctctggtgattggctccctcaccgtgcgtaagatcaaagggcctaaaggtcagccccgacacccggagctattgtggctccggccggttgcgcgggccctcggaccctcagagaggcg

SEQ ID NO: 378457 - DNA, 122 bp, Homo sapiens
ttgcggagttccagaggcacttccagaaacctctgttggaaagcattgtttacccaagctcgcattacagagtcccctttcccccaaccagaaacttgaaactttctccctatttcccgcga

SEQ ID NO: 378458 - DNA, 122 bp, Homo sapiens
ctgcccaaggcacagaaaggacaagtaggacctatggaagcccagccaaggcccagcaggcgctcagtggctaatcctcctgaaaactaattacctcactgcgcctgcccactggactaaat

SEQ ID NO: 378459 - DNA, 122 bp, Homo sapiens
gacataataaaaaaatagtattgtaatatcaatccgttccaaactctatggttagaaaagcggggaacataactggcgacacacgtagggaaggctctttaaaagggacctaaaggtcaact

SEQ ID NO: 378460 - DNA, 122 bp, Homo sapiens
tattcatggaacagcaaacgcctgtttaataaagaactttgaccaaggctataaatgccacgtacattattttcagtattgttggttatatttaaattttccttacaataaagcacactttt

SEQ ID NO: 378461 - DNA, 122 bp, Homo sapiens
gcacagccctcagccacagccctctctcactgccccccacacacatgtcctccccagacccggagaaaggcaaacactgtggccattcagagcccagcccaagggagggctgccccctccca

SEQ ID NO: 378462 - DNA, 122 bp, Homo sapiens
ctcagacattactgggaggcccaccccacagcctgccacagaaagcaaagcccagaaaagcgcttcctcccagacaccctccccgcagctgagtccgccctgcaccttgacaaacagctgga

SEQ ID NO: 378463 - DNA, 122 bp, Homo sapiens
acctttacccacacaaatatccacttaagagtacatgaaggacaggcgcagtggcttgagcgcctgtaatcacaacactttagaaggccaaggtgggtcgatgatttgagctcaggagttcg

SEQ ID NO: 378464 - DNA, 122 bp, Homo sapiens
cctcttagaaaaacaaaaaacaaagcagattttcacagctccgcgcatatttcccttctccgcagtgatgaaagtgtttgcactaattttccagggagaccagaaaatatgtatagtgtgtt

SEQ ID NO: 378465 - DNA, 122 bp, Homo sapiens
tttgggagactgaggagggcggaccacaggtgaagagattgagaccatcctggccaacatcgtgaaaccccatctctactaaaaatacaaaatttagctgggcttggtggcatgtgcctgta

SEQ ID NO: 378466 - DNA, 122 bp, Homo sapiens
gcgggggtgacagcgacggccccgagcccgcagatagtggagcagaggggtccagggaggcgctgcaccgacgttggggagaatgtatgtcctggcaatcaaagatcttttcctccgtgagc

SEQ ID NO: 378467 - DNA, 122 bp, Homo sapiens
cctttcagattctaccaaaagtgtgtttccaaacggccccatcaaagaggatgttcaactcggtgacttgaatgcaatcatcccgaagcagcttctgagaatgcttccatgtagctttgatg

SEQ ID NO: 378468 - DNA, 122 bp, Homo sapiens
gataagggctaacagagttggctttgtgggaagggacaggcagccctctgcccagcattccggtgagcacacagctgtaatttacatagcaattctgccagctccaaacacactgatgagct

SEQ ID NO: 378469 - DNA, 122 bp, Homo sapiens
cccgtgtgtccagcagctcaagcaggtcagcccaggcctcgttgagactgtccttccactcggccacggtggcccgtgcagcatggcccccagcaatgagcccattggccagcgcattggcg

SEQ ID NO: 378470 - DNA, 122 bp, Homo sapiens
tttaaaaaatagaaactctagagctgaaatacgaatgaaaaaaaattgaaaatgcagtagcgtgtcaacagcagatttgatcaagcaaaaccaaagagtctgtgaactcaaagatggatcac

SEQ ID NO: 378471 - DNA, 122 bp, Homo sapiens
cgtgacccccatgatggggagtgtcaggaggcactctataaatgagaaaacgctgcccaccgggcatctggctatcactcctggggccctgtggccttggacagggatgctggggctccagg

SEQ ID NO: 378472 - DNA, 122 bp, Homo sapiens
aacttcggaagcactaagataagtgtatccaccacaggagcatctttattttgaacaaaccgggtcaattcagaaaccagctcccctgggggcaagtttggctctgtgctggttgctggagt

SEQ ID NO: 378473 - DNA, 122 bp, Homo sapiens
acactcacgctggtcttcctgcaaagaagaccagcaaatagcaggacgaggggaggagggcggggaggatgcatcagcagagagcccaggatgtttcactagcaccaaaggctcaagactag

SEQ ID NO: 378474 - DNA, 122 bp, Homo sapiens
gaaggtcaagtcacagtccaagatggcatccaaggccaagaagatctttgctgaatacatcgcgatccaggcatgcaaggaggtaggacctcagggcagaccctccgctcctccaatcccca

SEQ ID NO: 378475 - DNA, 122 bp, Homo sapiens
ccaccacggctgcgtccttgtaccaggtgatggagggcggcggcacacctgtgggcaagacgtgggcccaccgtcaacctgcctcctgcctcctctccgcctaggaggggtgcttgggagga

SEQ ID NO: 378476 - DNA, 122 bp, Homo sapiens
gccgccgccgccgcgagcccggacctgcccgcccgacctggcggcgcagtctcgcgggatcgctcagctctcgctccccgtgcggctctcgaggcagctccagtcccggacgcaaccccgga

SEQ ID NO: 378477 - DNA, 122 bp, Homo sapiens
ctgggctcctcatagcaaggtggcttagtcccagaaagcagtgatctgagagggatggtccggagaggaagtgttacaagagacccagactgaagctgcaaggcttttctggcagagccttg

SEQ ID NO: 378478 - DNA, 122 bp, Homo sapiens
agtgtcctgtggagagaaaacagggttaggggtcggcagcctgggtcaggagccagaccacgcgagcggccgcacccagggagaggccgcggggcctgttggggctgggtttcaccgccgca

SEQ ID NO: 378479 - DNA, 122 bp, Homo sapiens
gaccggccctgccgcccggcttcaaggcccgcggaacagcggaggacgaagagcgggacccgagccctggtaagcggcggcgtctccgctgcccaccaggcccatctacccactccctggcc

SEQ ID NO: 378480 - DNA, 122 bp, Homo sapiens
tcagaatcgcgggcctggtccccacccccaacacgcttgtatgcccgcccctcccgacgccgccttgctgggtgccaagaaccaaccgaagcagccagaactcctcagtgaaaggcctgctt

SEQ ID NO: 378481 - DNA, 122 bp, Homo sapiens
aagcccccactcagcaagtcagggctgcctttgctggggagcagatctgccactggcccacgtggctgctgcaggaaatctgacctctctctgtggcactgcagccgggacagcatggccag

SEQ ID NO: 378482 - DNA, 122 bp, Homo sapiens
gaaaactgtatacaacatgggttctacaaaaagtgtcaccaatcatcttatgtacgagagcgagatctgctatgacggggagaatagcgtggtgatcctctgcttctccttggggagtaact

SEQ ID NO: 378483 - DNA, 122 bp, Homo sapiens
gaatggctgatgtcaggcctctgagcccaagctaagccatcatatccccagtgaccttcacgtatacatccagctggcctgaagcaactgaagatccacagaagtgaaaatagcttagctga

SEQ ID NO: 378484 - DNA, 122 bp, Homo sapiens
ggccttccctgaacaccctaatgcagaatgatctaactcaacaaccacatttgtctaattcggggttatgtttgttcctttaataacagttatcaccatttattcatttttttgtttttttt

SEQ ID NO: 378485 - DNA, 122 bp, Homo sapiens
ggcgctggggagaaggcttcctccttgtccgcacttctgggtcaacagccttagatggggcggggggggggggtgcggagctgccgaaaccttctcgaagatcccagggagtctctgtcccg

SEQ ID NO: 378486 - DNA, 122 bp, Homo sapiens
catctcgcgttcctgcgccggacgctgtctttgggaagctccaggcgtaggttcgcattgcgtgcgggaagccccctgcccacatgaaaggctcgctgtcgggctgtgggtcccggctcccg

SEQ ID NO: 378487 - DNA, 122 bp, Homo sapiens
tccgggagtcacccccagacgcgcggctccccttccttgtcctccgcatgacgcccgtgccggagcccacgtgagcctttgccaaggagagattcagagatatgagcagaaaaactggaaga

SEQ ID NO: 378488 - DNA, 122 bp, Homo sapiens
cgctgcgctttccgccgacctcccagagcgtcccgatgtcgccggcggccagaccatgcgcgagacagcccaggcgccagagacctccatcccctgccagggctctggactctccaggcggc

SEQ ID NO: 378489 - DNA, 122 bp, Homo sapiens
cggagcgcctctcagcccccttgtggcccatttctcctgaccgagcgcgggtaggactagcgactggcctctgggggtggtactggaacggagtatgtcgatcattcagaaaaattttgagt

SEQ ID NO: 378490 - DNA, 122 bp, Homo sapiens
tgagaagtgaggagaccctctgcctggcaaccaccccgtttgagaagtgagaagcccctccgcccggcagccacaccgtctaagaagtgaggagcccctccgcccggcagccaccccgtctg

SEQ ID NO: 378491 - DNA, 122 bp, Homo sapiens
gggactgaagggctggtagggctggaggcggcagcgcgcggcacggggaggtcaaggcaccgacgaaagcgcacagcgagcgcgaaggccccgcggccccatctgcgacgtcccctcacggc

SEQ ID NO: 378492 - DNA, 122 bp, Homo sapiens
gcccaggagcccagtgaccgttgcgtaagccacgcgccacccaggtgggcagggtggtgacgcgaaagcccggatagacttccgcgcaggggcggggcggggcgaggaggcggcagcgcgtt

SEQ ID NO: 378493 - DNA, 122 bp, Homo sapiens
cacgcccatagccacgcgttcgggcctctttcggtcatcttttcgcctctagtgagcacacgatttaaggatgatttggctcgtcattttgctgaggattttgtctagataatcattccttg

SEQ ID NO: 378494 - DNA, 122 bp, Homo sapiens
tcacagcaggccgtgcctgtttggggacagggttctctgaggggtgcagtgctcagatcccgggggtatgtggcggggaatgcggggaccacgcagagcccgaggtgaagcttgtttggtgg

SEQ ID NO: 378495 - DNA, 122 bp, Homo sapiens
tagctggggaggcacaggccaccccttcatgttgcccaggtggtggccatccccgccccacgcagggctgtttgtgctgggtaatcaaccgcattgctttcatttcctggcgtgtgagatca

SEQ ID NO: 378496 - DNA, 122 bp, Homo sapiens
ctcacagccttacatggtgggttatctgcattttacaggcgagggacaggctcagagaggcgacacaacttgccccatgaggcacagccagcgcgtggctgacatgggaggcagagggcata

SEQ ID NO: 378497 - DNA, 122 bp, Homo sapiens
aggaggcggagggatggctggcgcggctggcccgggtgccctggtggtggcctgctcagtcgcagccgccgctgcgtcaagctgggcccgactgccttcctcagcctcaccgcctcctccct

SEQ ID NO: 378498 - DNA, 122 bp, Homo sapiens
gcatcgcgccggctgcggctttccaggggccggccacccgagttctggaattccgagaggcgcgaagtgggagcggttacccggagtctgggtaggggcgcggggcgggggcagctgtttcc

SEQ ID NO: 378499 - DNA, 122 bp, Homo sapiens
ccctgtccccggagggccacgcagtaccttttgtgggatggccagatgcctggtgggcagcgcttcatgctgaacatgtacacggcggcctccgcggtgctgaagagacggcagaagcacag

SEQ ID NO: 378500 - DNA, 122 bp, Homo sapiens
gcaacactgcatgaaaccagggtgacttgcaccccatgggactctgtccataaatgaaaacggaaaagtgccttgaaggcagtgacccgcttatgccagccagtcagagacgcagcctagag

SEQ ID NO: 378501 - DNA, 122 bp, Homo sapiens
gtgtgtgggcgtttggtggtcaccaagactgggcattcacctattgcaaacttccagcaacgtgcgggacagcgctattgcgcccaaagtgccaaggcagcccctgttgagaaacagtgcaa

SEQ ID NO: 378502 - DNA, 122 bp, Homo sapiens
gggtctgccaaaggcctcgacactgcacgtgcgctcacacagtgcattccctcacatgggcggggcacccttttgaggcccagctccacgccctcagggtgctggaggcaccatgtgccaag

SEQ ID NO: 378503 - DNA, 122 bp, Homo sapiens
agggcatttgtggctgggtggggaatgtggactgtgaactcacactgtccgcaaactgggcgggcactgtagtcctggaccccaccccaagcgtggggtggggcttgtccaagccctgagaa

SEQ ID NO: 378504 - DNA, 122 bp, Homo sapiens
gtgtgccccgacccactgcctgggcaggggtaggagctgggttatagccctggcaggaagcgagggcaggaggcactcagggtgaagacaccaactcacaagcccacaggacatggggctag

SEQ ID NO: 378505 - DNA, 122 bp, Homo sapiens
ccccacccccgctcctggagcaagaagatgcagacgatacttttcccggaggcaagagggcgtcttcacgcaggcaccgagaagctcccactagtgtatgccttaatggtgccgctcttgtc

SEQ ID NO: 378506 - DNA, 122 bp, Homo sapiens
tccccgcctccgccgggggcatgggaaggaaagggaagggagggggatgaggccgccggacgctggggtttccccagccaccctgagaggaactgggactttggggtccagactgccagcgt

SEQ ID NO: 378507 - DNA, 122 bp, Homo sapiens
tccatgaatgttggcatccaagggggttcctggaaccagtcctcagtggataccaggtgacgactatgcagtatatacatcagctttccagtctgtggtggggccacttgggaactgaggtc

SEQ ID NO: 378508 - DNA, 122 bp, Homo sapiens
ccaggagcaaggtcacctgcgcagcctggtcctgggggacaactgcctctcagagaactacgaagagacggcagccgccctccacgccctgccgggcctgcggaggctggacttgtcaggaa

SEQ ID NO: 378509 - DNA, 122 bp, Homo sapiens
atactctgtccaagcacatctgggcggggaggccgtggagggaccgaggtgacacagagccggccctgtcctcggttctgtctcgggtcacctgaggcatcttcaccgcggcagctcgggcg

SEQ ID NO: 378510 - DNA, 122 bp, Homo sapiens
ggctgccaagcccctgccgttgtccggcaggcacccggctcaggagttgttgacaaacaccgcaggcccaggcgcccaggccccatgagggaggagcccagcctggcccctaggggccaagg

SEQ ID NO: 378511 - DNA, 122 bp, Homo sapiens
taaagttatttctttattccccaccacatggaatcttccacgtctgctgtgattctgatgcgatgaaatgaccagatgcagcggcttcctgacacatttccttccccagcagatgtaaagta

SEQ ID NO: 378512 - DNA, 122 bp, Homo sapiens
gtctttggccgccgccgaaccccgcgcgccactcgctcgctcagagggaggagaaagtggcgagttccggatccctgcctagcgcggcccaacctttactccagagatcatggctgccgagg

SEQ ID NO: 378513 - DNA, 122 bp, Homo sapiens
gctggtcgggaatggggaggtcgcccctgggagggcaggcgttggttccaagccggttcccgtccctggcgcctggagtgcacacagcccagtcggcacctggtggctggaagccaccctgc

SEQ ID NO: 378514 - DNA, 122 bp, Homo sapiens
tgcaggtgagggcttgggaacacctggttacatgcaccccagatcaagactgtccacgtccggtgcacccctgaacacagcaggagggaacttggggatccactgccctcgctcactgtaag

SEQ ID NO: 378515 - DNA, 122 bp, Homo sapiens
agcggtaggtgaccaaagtctcctctgtaacccctaaggtcgggctgagaatcgaggctccgagactgtcagctacttgctcaaggtcacacagcaagtctgggaggatggggggatggaat

SEQ ID NO: 378516 - DNA, 122 bp, Homo sapiens
ggaatcggagcctagggctctctttgcctgggccaagggagcgggggcgatggctggagtcgtgtagccgaggagaagcccgtaaatctgagacggaatcaaagagaagcgcgaaggatggc

SEQ ID NO: 378517 - DNA, 122 bp, Homo sapiens
agcttaatgtgtggggggtatgcaaaagtgtatgcacaaggtgtgagctcatgtgcaatccgggtacaaagtagctaattaaagatggctcaagaattggtcataagggaggtagaaggaaa

SEQ ID NO: 378518 - DNA, 122 bp, Homo sapiens
agacagaatagactacactcaaactccaggggaaccgttcattgggcttggacacgaaggcgggaccctgccgacgcagtgattggatgcatgtccggccagcgcggtgattgggtacaggt

SEQ ID NO: 378519 - DNA, 122 bp, Homo sapiens
ctcatataaggagcagatgggccgcgattccattgactttgccgaggaggaagctgaagccgggaggacccgccccaggcctcagccagcaataagatgagctgaccctggaacccagctcc

SEQ ID NO: 378520 - DNA, 122 bp, Homo sapiens
ttttgcacacatagttttggaaggtgcccaaaagactgtccagagtgtcccagccttctccgacagtgccgggaaacaagaggtggctgctgccgtttgcaagtatggatgaaggcctgagt

SEQ ID NO: 378521 - DNA, 122 bp, Homo sapiens
gggaggggtaggaacagcagcaaactctggtcttatctgaaatcatggtctgttgtccaccgggggcctgggaaacagccacccccttctgctccggggccagcggcctgtcctcgggttca

SEQ ID NO: 378522 - DNA, 122 bp, Homo sapiens
gagccagggaaggaaccctcttctttccctctaacgcctcagttccgccacgcggccggccgaggtcggcgctgtaaaatgctcctgctcctttaagagaatgaacagtccaggccgggcgc

SEQ ID NO: 378523 - DNA, 122 bp, Homo sapiens
tgcgagggggcggatctgtgcccatcgaagcggcccgaggcagctcgagttctgagatctcgctggctcttctcctctcggattttcggggtgctcccttagggaatctttcggtcccatct

SEQ ID NO: 378524 - DNA, 122 bp, Homo sapiens
ggggcctccattagacacttcacagatacgatgaatgcgcttctccctcacaaagacacacgtgaggggagtgaagttgtttgcagtctgggtttcacagtcctccggcccaagaatgtcat

SEQ ID NO: 378525 - DNA, 122 bp, Homo sapiens
ttacctatctcttaactacttgagaggtgacagcgtgcggcagccctcgcagcccttgctcgctctcagtgcctcctcggcctcagcgcccactctggccgcgcttgaggagcccttcagcc

SEQ ID NO: 378526 - DNA, 122 bp, Homo sapiens
ttttttttttttttttttttaaagctccacagttgactactggctttcagccctcactggcgtcatctggcatgaataaaatgcttccttcagttccagccacagctgttcgagtttcctgt

SEQ ID NO: 378527 - DNA, 122 bp, Homo sapiens
ccagttggtaggcccaaggtaaccagcaattgactggatataatggaagagtggtgcattcgggggtatctgtattaatgggacccacatgatatggatgagagctattagggtgagaaaaa

SEQ ID NO: 378528 - DNA, 122 bp, Homo sapiens
agagcactgaaatggggcttggcaggtcttccctttggaggaatatttttctgccccagtcgtcgtgttgaagacctgctaccccacggctgtctctggctaagtgagccagtattggcccc

SEQ ID NO: 378529 - DNA, 122 bp, Homo sapiens
gttcttgagacgtgagttggccgatgctcccggctgaataaagccacttctttctttaaccgggtgtctgagggcttttatccgcggctgctcctgctacaccttgagaggaatgtgctcat

SEQ ID NO: 378530 - DNA, 122 bp, Homo sapiens
agtcgaaggctccaagtacggcatcatcagcctgcgaactctgaagatcccttcgttccacgtgtacgtgctcagaaacctctacgtccccaaccggaaggtgaagtccctgtgctgggcct

SEQ ID NO: 378531 - DNA, 122 bp, Homo sapiens
aatcagcagggaataagaaagacaaagactctcatacctcccatggagcatacattatagcgctgcacagaaccccacgcaatttaggtggtgggcaaaggtcaacagaggcaacaggacat

SEQ ID NO: 378532 - DNA, 122 bp, Homo sapiens
gtgcccgagtcggagaggcgcgttcgaggacccccacacggcgagaatctcgcccttacccgaagacctcgacccacacacatccagtggggctggggccggtgcctctggacgctgccatg

SEQ ID NO: 378533 - DNA, 122 bp, Homo sapiens
agtgggcctagacccctcctcccatggctagaagtggggcctgcaccatacatctgtgtccgccccctctaccccttccccccacgtagggcactgtagtggaccaagcacggggacagcca

SEQ ID NO: 378534 - DNA, 122 bp, Homo sapiens
gaaggatgaactagttaacctcagaagagcctttccactccgaccatgctgggaatagaccgccataataaacagtcttttccgctgcctctttagccaacgtcccagctggaggagcacgc

SEQ ID NO: 378535 - DNA, 122 bp, Homo sapiens
aggagagagcacctggccgggctgctccggggcctccacggaggctgatcccaccgtggccgcggccacggctgccacttatcctgccatcttgctgctaggctctgagctgggcacctgat

SEQ ID NO: 378536 - DNA, 122 bp, Homo sapiens
tgaacaagaagatcagttgaatactgccttttgtattgtgtctaaagggatagtgttaagcggtaggtgactaataacaacctagttgttgagccatcgtaccgcccccgccagggcaaaaa

SEQ ID NO: 378537 - DNA, 122 bp, Homo sapiens
tgctagctaaaggtaaattctggaaacatagctctagggttagtagggttgtaatccagacgttgagtctgtcctgaagttttcaagtgagcaatacaaggggaattgaaatagagaagtgc

SEQ ID NO: 378538 - DNA, 122 bp, Homo sapiens
tcagagtatgaatccttagccttctcagagcacatgcactgtttgctcaatctgaaaacacgtaattatttaacttgccttctaaagtaacaccacaccctggatatgatgcaagacccagc

SEQ ID NO: 378539 - DNA, 122 bp, Homo sapiens
tgcttcaaggcagggacagggttggtctggtgccctcgctcccgccgccctgcgcagagtcggtgctcagtaagtatctgtaggatgagggaataataagtgctcccagaagagaggccgcg

SEQ ID NO: 378540 - DNA, 122 bp, Homo sapiens
gttcagagaactacatccgggtttagaggccgtacgtttgcgatatagcccaatagcagtcgttatggtgggggaggcggggcgagacctacgacgccggcgagcagtggccgttacggccg

SEQ ID NO: 378541 - DNA, 122 bp, Homo sapiens
caggccctccgccctcccctggcctctcgggacggccgcgcttacctgaaccgaactgtacgcacaagcgcgctcctgactccaggtgcacaccgtggaggcctgaaacgagagccatgacc

SEQ ID NO: 378542 - DNA, 122 bp, Homo sapiens
tccctgatgccaaaaaggttggggactgcttgtctagtggtattgaagaaagtgaaatagcggcactaaagaataaattagaagttgaattaagggttccgaatgatgggaacacacttgag

SEQ ID NO: 378543 - DNA, 122 bp, Homo sapiens
agcctgccatacctcccgagtgtttattcagcttctctctgaatgtggataagctcttaacggagtgatctttccagtggttctttcgtgggaggtaaaatggcaggtgaatttgggccttg

SEQ ID NO: 378544 - DNA, 122 bp, Homo sapiens
cgcagcgggggcgcgcacagaccttagcctcggcgtccaaaatggaccaggggcaaggcgcggacgccgtccccgcccccacgcccccagcacttgcctgctgtgactcgaagctgcagcta

SEQ ID NO: 378545 - DNA, 122 bp, Homo sapiens
aggactctctccacgtcccctaatcccatcccccgcctctgggtgacgctacaggagccccgaggacacagacgcccccagaccttaccacgttagctcgacctcaacactcctgcccactc

SEQ ID NO: 378546 - DNA, 122 bp, Homo sapiens
aaaggacacaaatgaggagtcaaatgaagagtgcatagggtgaggtgtggaatggtctgtcgcgcaggagtctctgtccctgtggagtcagtatgtgccaccctaaacatgttcgccagctc

SEQ ID NO: 378547 - DNA, 122 bp, Homo sapiens
gtcaagtttagagatgcaccaacctggaggactccatgctgttgagctgttcacaagcagcggacacttccaactccatcttcccaagaactaaatgggtgtcttctatagtgtatgtgcaa

SEQ ID NO: 378548 - DNA, 122 bp, Homo sapiens
ccaaccccaccagggcccagcttgagaggacacctctatggtttgccacaaaactctgaccgaaggactgtgctggcgtcctcctcctccacctcccaggggtgcaggtggcagtgcccctc

SEQ ID NO: 378549 - DNA, 122 bp, Homo sapiens
cagcctcggccccccgacccccaccagcggcgcgccccagggatgccccccgctgggcaccgcaggcaggacccagagcagcgaggcccagatgccgggcaaccccccaggaagcgcgctgc

SEQ ID NO: 378550 - DNA, 122 bp, Homo sapiens
ggcagcatcgcggaaacgactgcgaacacgtgcagatgcaaaggacaacccaggcctaggcgccccgcgacctgaggcgccgccggaagccccgcccctgcccggaagcgcttcccgcgccg

SEQ ID NO: 378551 - DNA, 122 bp, Homo sapiens
gttccttcctgtgagggctttccgctaggccggcgaaggctggtgagaaagccggctctgcgccctgccctgtgctggccgccctcacctggcgctttgtaccctgaggcagctccggactc

SEQ ID NO: 378552 - DNA, 122 bp, Homo sapiens
gctcggcgagccccccgggctgcgggatctggggtttattttagtccggcgccaggtttacgacagactcggggggcggagcaacatcccaaacgagcaaacaatggtcattgacatctttt

SEQ ID NO: 378553 - DNA, 122 bp, Homo sapiens
tggctctgtgtgtgtgtttttgagaagttcatatgtacatgtacctcaggtaagcttgggcgtgctggactggagtgtggggttggctctgtgactctctgagtgacagtgagaggaggctt

SEQ ID NO: 378554 - DNA, 122 bp, Homo sapiens
cctctcttctgcctcttttcacttttggcgactagaaacaattccagtaaatgtgaatctcgacaaatcgaggactgaagagggagcgaacgagcgaacaactgagcccaagccggtgagaa

SEQ ID NO: 378555 - DNA, 122 bp, Homo sapiens
cgtgtccgagctggggctgcctctgggcgaaaactctaccgacaggcggcacgcattccgcgcccgctctgcctacttgaggagggggtgtcactcctgcccgcaatggaatgttcagaacg

SEQ ID NO: 378556 - DNA, 122 bp, Homo sapiens
gtcgtgtgctttgggctcaacgacatggctcggcgggcagccaggtaggggggcctggggcgcgcgccggcaggacgcggcggccgctcgtcgccgccacctcggccgcggcagctgagcct

SEQ ID NO: 378557 - DNA, 122 bp, Homo sapiens
tgcaaggaggaggctcctacaaacagaatttagcagaagtaagcacttcatgcaaaggcccggcatcagccagcactggagatgtctggtcaccatataaatatcctgaagatgagctttgg

SEQ ID NO: 378558 - DNA, 122 bp, Homo sapiens
cacttaattcttgcaaatacctctcggtgctgacttcaaggaacttggctggctttgggccgcagaagtgaaaaacacaaagctctccacaatgttcaagttgttttcttcttaatgttacg

SEQ ID NO: 378559 - DNA, 122 bp, Homo sapiens
tgccacctccgtgtcggggtccctaactcctctctggtctcggggacgcatgcatcttttcgtgatcttgatgaaaccaacttgctgaaatggagcctggagacccttgcattgtctacata

SEQ ID NO: 378560 - DNA, 122 bp, Homo sapiens
gcagtggtgcagccacagcttattgcagcttgacttcccaggctcagatagatgatcctccgacttcagcctcctgagtagctgagactacgggtgtgtgccactatgcctggctaattttt

SEQ ID NO: 378561 - DNA, 122 bp, Homo sapiens
agtgtggattacccaccaactgtggccagtgctattctaatgctgggaatgcagtcaggacgacatgattgatgctgaaccagtttcctcagtggtctcttggttgcaggcaacaaacacaa

SEQ ID NO: 378562 - DNA, 122 bp, Homo sapiens
ctcttgaagttataggacctttcatggttccagagaggctggccgcccctacaagagcttcgatgtccttgtgctttagggaggagccagagaaacagaggtcaagctctggcactagcacc

SEQ ID NO: 378563 - DNA, 122 bp, Homo sapiens
atatatatataaaaccttcactaggaagtgaagattaattcctctccaccttagtgtgggcgggacttactaacttgcttccaaagaatacaatatggaggccgggcacggtggctcacgcc

SEQ ID NO: 378564 - DNA, 122 bp, Homo sapiens
gggttccttccactgtaaatctggggtcttggattaggtgacctgcagctgccctttgcccgactccagcagctcctccgactcggcctccccgagagcagcccttcccgagtgtccctgat

SEQ ID NO: 378565 - DNA, 122 bp, Homo sapiens
agcctaacatcaactcttttaattgtcatgacaattctatgagatgggcacttatcgccccgtttcacagacaggggatgcagagggtacagaaaggtacagtggcttcctcggggtcactg

SEQ ID NO: 378566 - DNA, 122 bp, Homo sapiens
agggaacaaattgtacaagggataagatacattttatacatatttcactaaagatgttcacgtattgtctccaagtctctgttaatatagataactaggtcatgcagacaacctagtccttt

SEQ ID NO: 378567 - DNA, 122 bp, Homo sapiens
aaattgaagccatcctactgaacatacacttattcggcagtgaatgtgcatgccagacatcgggctatgccctgaggacagacacgtaaaagacattccttgttcttaagaaactgagagtc

SEQ ID NO: 378568 - DNA, 122 bp, Homo sapiens
tcggagcccactcgagtaagctttgacttcctccctgccagtcatgctggacacagggctcgacaaacacaagagacgatcctcggaccatcctaactcaacgactggagactgaggtggcc

SEQ ID NO: 378569 - DNA, 122 bp, Homo sapiens
gacacccagagaccggcaacggcaacgcctaggtcgggatccaggtttgggagaaccattcgcgcggtagtcacacacacactatgcttctcacgcccactgctgcaaacaccttcgtggga

SEQ ID NO: 378570 - DNA, 122 bp, Homo sapiens
gccgccgtgttctgtttgacccagaagttccgggcatccacggccctgtaaacaggtcaacggcccaagggcctcctgccctgtcctgccttggacacttccctgagaagccccttccactc

SEQ ID NO: 378571 - DNA, 122 bp, Homo sapiens
tgaaggtgagggagcctcagaagtgtcagacagctgattctaaacatcttcttggtccaccgccacgcccaccttcaataagccgagaagaggtgaggaggcgggtggctgggtgccaatca

SEQ ID NO: 378572 - DNA, 122 bp, Homo sapiens
gatgggggcgagggtcaggggcctcagcactgaatgccgacatcaccaaaaacatggcaacggccggggaagcacgggtccaaggcccaaatctgagggagtgccaagtcaccagatgccag

SEQ ID NO: 378573 - DNA, 122 bp, Homo sapiens
gttgtgagttaggctgtcagaacagtgcgggctagaggcgcacacgtttcatctaggcttcgggcggggcgcagcaggtgggtgaggctgcggtggtggctgctgcccagggtgggaggctc

SEQ ID NO: 378574 - DNA, 122 bp, Homo sapiens
ccgagacaagccgggccggcacagggtgggcggggcgcctgggcccgtgggctgtgggtgcgcggggtgggcctggccgggcgtccgggctgctgctgcggagggcaaggccgcccggccgc

SEQ ID NO: 378575 - DNA, 122 bp, Homo sapiens
acaggaccccagtgctgtgtacacctggaccaacacaggccgtggacacaggcctgaggccgcttcatgaaggctgcttagtgccttgtctgggttccctgtgatcagctcctggagacctg

SEQ ID NO: 378576 - DNA, 122 bp, Homo sapiens
cacgcgctcccgtgtttcctgtgtggagcgtgcacgcgctcccgtttcctttgtgtggagcgtgcacgcgctcccgtgtttcctgtgtggagcgtgcacgcgctcccgtgtttcctttgtgt

SEQ ID NO: 378577 - DNA, 122 bp, Homo sapiens
tgacagagggtcttagcgtacccgttcacatgaattgtaaaaacgcacttacatgccattcgttctttcatttgtttagtagaatcgtttgaacccgggaggcgttctttcatttctacgtt

SEQ ID NO: 378578 - DNA, 122 bp, Homo sapiens
catgtctctcgttatccctcaattctctcttacaggcagccaagcaagatggctactagccgttctagggccaggtgcagtggttcacacctgtaaatcctagcactttgggaggctaaggg

SEQ ID NO: 378579 - DNA, 122 bp, Homo sapiens
tcaggagccttacctggatttcctcacccacctgccttgtgtgagtcggcggctaggatgcggtccaagcttctgagtgtgccagcacagctgagtctctatttatgcaccagggcatacct

SEQ ID NO: 378580 - DNA, 122 bp, Homo sapiens
aaacagaggacctgcttcaagtctgcaaacctttgtcatggaagcaaaatggatgtttcacgccaagtgtgagaaagcctccatcaccagggacaggggggtgccttgatgcttgatgctgt

SEQ ID NO: 378581 - DNA, 122 bp, Homo sapiens
ctttttttctctgccttttttccacctggctactctgggacctctcccctgtagttgctccgcctggccgcccaccccccagcccctgcaggcagtggggctgttgacacatcccaccatcc

SEQ ID NO: 378582 - DNA, 122 bp, Homo sapiens
atcggtttccggtcagtggtgtggtaccgggtacccggagacgtgtatcggacggtgggccgcagccatggccgagagaaaacctaacggtggcagcggcggcgcctccacttcctcatcgg

SEQ ID NO: 378583 - DNA, 122 bp, Homo sapiens
ccgggcgccgtctcctccacatcccacaccaggtcctgcccatgactttccccctctcagcgccgtcctcagtggccacaccaagaacgaggccatgtcttcctgggaagggcctcagatgt

SEQ ID NO: 378584 - DNA, 122 bp, Homo sapiens
tggggttgggctttaagacgcttacttggcaagtttacttagcgctggtgtacttggtgacggccttggtgccctcggacacggcgtgcttggccaactccccgggcagcagcaggcgcacg

SEQ ID NO: 378585 - DNA, 122 bp, Homo sapiens
cccctgtgacacatctctcagtaaagatgaacatgagcgtgtggggaaactgaggcagcccgaagctcggagagcccagcccaccaccatgtcacatagtctcctcaagccaccttcatact

SEQ ID NO: 378586 - DNA, 122 bp, Homo sapiens
ggggccctggcagcagaggcctttccttgccccacctaggaacagggaagcttctggagccgcgggggtccctgggctaggggtgtgtaggaccgggcggggaatggagcggtaaccggagg

SEQ ID NO: 378587 - DNA, 122 bp, Homo sapiens
gcgagactcccagtccagtggccgcctggaaattgcggagtggaatgcagccactagagacggcgcctgagcccccgcccggggccccgttagttgagaaggaaaagatagcctctggagct

SEQ ID NO: 378588 - DNA, 122 bp, Homo sapiens
cactcaaactggccagtccactgcaaatcctacccgaagggtcccgcgcccacccaaactcgccagtggaaatgggtttccatccgtgaaatgagcctgcaggtgatggggaaactcggcca

SEQ ID NO: 378589 - DNA, 122 bp, Homo sapiens
acaaaatggctcccaatccaggcaactggcacatgtggaagcagaataccaaagcaaatccgtcttccaaccatcagcttcgactccctccagctactgtatttacatttaccttgacagag

SEQ ID NO: 378590 - DNA, 122 bp, Homo sapiens
agtaaataaaggtgctgtatcaatggagaatattcaccacttcctgtgtaaatttaattccgaaggacagcgtgcacctgagtaatgtagataaaaagaccctgtgagtctaggggctgtca

SEQ ID NO: 378591 - DNA, 122 bp, Homo sapiens
gggaaaccgttagtcaccctggcgctggctggatgtgaggccacaaacgccaggagagctcggggactgtgccaaggggtgcgaggcctggcggtcaccagaagagagaggaaggggatggc

SEQ ID NO: 378592 - DNA, 122 bp, Homo sapiens
cagcaggacttcagtataggttggaaagcagtagctgccagggcaacctgagataacaaacgccctcatcgcaagttaggagcaaagctgagctgcttgcagggttcgctgagccaaagcat

SEQ ID NO: 378593 - DNA, 122 bp, Homo sapiens
ccttatttgtcattatcatcgacttcattttttattttccttaccttctctgtctttctccgctttgtttttttttcttgcctttttcggccttgacagcatcatttttgccacatcagctt

SEQ ID NO: 378594 - DNA, 122 bp, Homo sapiens
attggatgggtcctgggttaggaatcagaggcttgactgagcctgggcagcacatgcccccgctagacctagcttttgtgatctgtaaagagttaaaggtggtgcttaagctccctggaaat

SEQ ID NO: 378595 - DNA, 122 bp, Homo sapiens
ttgcttttcctccttcttcctctggcctcccggtctgtagttccacttcataagagacctcggcccgccccccgccccgtctcacccgcagctccgttccaccccgccctgctccctcccac

SEQ ID NO: 378596 - DNA, 122 bp, Homo sapiens
ttactgtttagagatgagggaaggtggcacaggataggctaagtaactcgcccataaccacggctagtaagcggtagaccaactccagctcagcccagctgcaaaagtggagctgttaatct

SEQ ID NO: 378597 - DNA, 122 bp, Homo sapiens
gccctgttttttttttttacggggtagggggaagtggacgctccgggcggtgctgttgagcgaggagctgttaggagctggtcaaggctcacaccccactaccgcctccactgctcacgtct

SEQ ID NO: 378598 - DNA, 122 bp, Homo sapiens
ggagccctgagatgccatgggaggcctgaggttggccacgggggagctggcctccagggacgggagagattgtgtcatgtgccacacgagaccaacgtggaaaagtctgaagggccttggga

SEQ ID NO: 378599 - DNA, 122 bp, Homo sapiens
tgtagctttccatacagtgaggacctgccaactggctcacaaattgctttgaccttgtgtcgctttgtctcagtgcacttttctctactatctaaatagtattccttctgcctgggatagtc

SEQ ID NO: 378600 - DNA, 122 bp, Homo sapiens
tctgccaagatggaactgagagccgtctcggtggtgggagaggacagcctgcctggggctcggggggaggaagctgttctcggggccttttctgaccagctctgagcactctctgggaccaa

SEQ ID NO: 378601 - DNA, 122 bp, Homo sapiens
gccactccaagtgtggggtgccaagcccatgcccatccggaattctagctggcctgcaagcgccacgcgcagccccggttctcgcccgtgcctctccctccacacctcctcgcgagctgagg

SEQ ID NO: 378602 - DNA, 122 bp, Homo sapiens
cgcacccaggtcgctggagcaggaggtcccagatccccgctgtaaggctccgtgggcgagcgcccaggtggggctgggcgaggtgggggttcccggcgccggccccgcgcgccgccctcccc

SEQ ID NO: 378603 - DNA, 122 bp, Homo sapiens
tggctaccgggataggcgagcgtggcacaatgagacttgcagggtgggggcaggcagagccggagccagccggaggaaggagtcatacatggtggggcggctgcctgagggatggctgagct

SEQ ID NO: 378604 - DNA, 122 bp, Homo sapiens
cccccaaccccctgacagtgactcttgaaaggggctcaacttttgcttctgtgggagccccgaggaccagaaccagacctgccctgagaaggggctagacctcccatctttcagagtctcac

SEQ ID NO: 378605 - DNA, 122 bp, Homo sapiens
ggtgcaggctgcctgaatgctaatgttgctgcaaggaccctggggcactggctggttgcacgctggcagtgcaccctctccctgggtggctacacctttgcgcagatgccgctgcccatgag

SEQ ID NO: 378606 - DNA, 122 bp, Homo sapiens
gaaaatccagctggacctgactttggattgcagatcacgggcgtccgaaggctccgttctcgggaaaccaagctgggaatgaggaggggacgtggcggaggcgcaccccaggggcgctgttc

SEQ ID NO: 378607 - DNA, 122 bp, Homo sapiens
cgggtaaaagcaccgtgtcaaatgtcagcaatggcccggtccattagggtgcaggggctgcggggccagtcttggggtcagtgtctcgccagctgcacaaccagcgggcagaggtgtcactc

SEQ ID NO: 378608 - DNA, 122 bp, Homo sapiens
ggctccttaggtcacaggcggcagggccagagaaactcccccgcccctacgtttaactcgcggaaacaagggcccagagagcccagacgccagcccaaggtcacacagcgaagccccggcac

SEQ ID NO: 378609 - DNA, 122 bp, Homo sapiens
atttcactccagagctgtcctttcttgcctgtgtggcctcgggaaagtgcttgacttccccggaccacagaacataggtaatgaggaggattaaatgaatgagagctccgcgtgaatacatc

SEQ ID NO: 378610 - DNA, 122 bp, Homo sapiens
ctctggcagcaaagccaagctgggtaacttccaagggacagctggtcctgttgggtcccgcggggggcacctgcgaggtggcgtgaacaccatgcagtgcagagcagggtgccctgggtggc

SEQ ID NO: 378611 - DNA, 122 bp, Homo sapiens
aattctgtatctcattcatgtgcccagagtcttcaaagaatgctcgtgttagttacctgacggctctggagaagtgacatggatattcgtgtgcataaccatggctcccttccaaacagaca

SEQ ID NO: 378612 - DNA, 122 bp, Homo sapiens
tttgcaccccacgggccggggtccccgcgaggggaaggggcgggggcggggggcggtgcacggaaaacccggggagcaaacgtgcccaatgctcaccaactcctcgtagctcctgttgtgct

SEQ ID NO: 378613 - DNA, 122 bp, Homo sapiens
gcctttcctccggcccgtaaatacaacgaatgaacctgcaggttggtagctcctgggatccgaggttggagtgccacaggaccccaacctgctctcaccccgggacagggaaatacgaacag

SEQ ID NO: 378614 - DNA, 122 bp, Homo sapiens
tttttatctaagaagactcttggccacagtcaatctccagaggttgttggggtaaatgcacgggatgccaagatgcaaccaggtcagtattgcaagtctgagaaaaggggttctcgttagcg

SEQ ID NO: 378615 - DNA, 122 bp, Homo sapiens
gagacatggaacttggctggtctgcagggaaatgccactgttttggccgggagtagggggcgggagtggcgggagagggggtggccggctggggaggagccagcctggtggagaagctgccc

SEQ ID NO: 378616 - DNA, 122 bp, Homo sapiens
ggcctcggctggcagttgcctgggagctgactgacacatcagccagcgctgccacaggctcgcacatagtgagggcgtgcttctgtgcgtcccatggaagtccatggcccggggtttggtac

SEQ ID NO: 378617 - DNA, 122 bp, Homo sapiens
ggaacggcctcagagccaccaataccaaaacaacgactgggagaatgtgttcgggtgccccgtgactgtcaccaatgtcgggtgagattctgtggggtgcttcatgaaattccagggggtgg

SEQ ID NO: 378618 - DNA, 122 bp, Homo sapiens
cgctctatctgcaaaaggcagagcactgcccgtgaaccctgtctttctcgtcctttaccacgagtgaccagaaccacgtggggattctcaaccacggccgtggtatacctctcctgtgcttc

SEQ ID NO: 378619 - DNA, 122 bp, Homo sapiens
gaaaggaaggctgctctcaacagctgcctgattggctaaaaaggagaagatgaggactctcgtacccgattggtgggttcagatccttccaccaacaatgactccactgggaccttgaactt

SEQ ID NO: 378620 - DNA, 122 bp, Homo sapiens
accgccagcggttgtcagtggcctagaggcagcggacgcaaacacggggagaggtgcaatcgtctcaagtgactcggcgggcggggcccacaaccggaagcgggtgggcgaccttcacccac

SEQ ID NO: 378621 - DNA, 122 bp, Homo sapiens
cgtgcagaccaccgacggcaagctgcccaaggtcaccaaggacatggagtgcatggatggcgccctgcttgtcaacaccatgttcttcaagccacactggaatgagaaattccaccacaaga

SEQ ID NO: 378622 - DNA, 122 bp, Homo sapiens
ctggaaaatcgggtcactcccacccgaatactgcgcttttccgatgggcttaaaaaatggcgccccaccagattatatcctgcacctggctccgagggtcctaggcccacagagtctcgctg

SEQ ID NO: 378623 - DNA, 122 bp, Homo sapiens
ccggaagaggtatttcctgtatcaggcttcacactgtgtccctcgtagataccgttgcttcgctggcgccacctactgcttcaaggggtgcagggtggctcaagtgtttcagttctaacagc

SEQ ID NO: 378624 - DNA, 122 bp, Homo sapiens
cggcggccccacgggggcctgttggttggcaaccgatttgcttcctccggtgcgtggctgcggggttgcacctgtgaagcgaagacaacctgctaggaccctgataggcgtacacctctcac

SEQ ID NO: 378625 - DNA, 122 bp, Homo sapiens
ccgtgacggcattcaacagcaccttgactgcattcaacaacactgtgactgtcacagcaccgtgacggcgttcaacagcaccgtgactgtgttcaatgccaccaaattgttgacttttaaaa

SEQ ID NO: 378626 - DNA, 122 bp, Homo sapiens
atgaagacagcactgctaccaagtatgcccatggaagtttctgtacctaataatggctcacgtactaaaagtctgtcataagagaggtcttatgagccttgacaaagtcatgagagacatcc

SEQ ID NO: 378627 - DNA, 122 bp, Homo sapiens
ggccgaggctcctagctcctctctccgcgagcaagacaggctgcgattcgccgagcgcggcgcaagtcaactgcgcttcgcgccgcagtcagcaaccaatcacaagcctccgaagaaacgcc

SEQ ID NO: 378628 - DNA, 122 bp, Homo sapiens
atggccccggcccgctcaggcgccgtgcgccgccgccatctgcgcccacacacccagcgtcgccgctgccccgcccccgcatgccccgcccctccgaccctggctccgccccacgcgccggt

SEQ ID NO: 378629 - DNA, 122 bp, Homo sapiens
tggctccacccttgactggaaggatggcctcgtgggacacacagatcagagttatgctaacgaggctgccgagtgccagtttgcctgctggggacaccacactctaaaaatcctgccgggca

SEQ ID NO: 378630 - DNA, 122 bp, Homo sapiens
ctgggctaaagaaaccctgggatgcccattctgcctgaggcccccccatcgctggggcaccgacctcaaggaacagcaggagaggccaccatttgtcccgacattcagctcccggggaaacc

SEQ ID NO: 378631 - DNA, 122 bp, Homo sapiens
ctcggcctcccaaagtgctgggattacaggcgtgaggcaccgcgcccggcctcctcctcccgttttcaaagtcaccagcgtagcatcctgattcaagatcacattgtcttcttttttttttg

SEQ ID NO: 378632 - DNA, 122 bp, Homo sapiens
atcacaagtgcctgcccggtagccgcccacatatggcgaaccacagagtgatccgagattcgtctgcaagaacaggggagaactaaggtcccaagcagcaaaagttaaaatagcaaagctga

SEQ ID NO: 378633 - DNA, 122 bp, Homo sapiens
cataaatgcctggaaaggggcaaggtaacagatgaggacagctgggtgaatactcttcgtcgtccaggcaattcagaaagtgccgctgcaagggaaacgtccactgcaaaccccagcaagtc

SEQ ID NO: 378634 - DNA, 122 bp, Homo sapiens
gcagttatttgccccatttattttcatgataagatttcaaaagaaaactcttaatacatccggtgagggcctttccacttgaaaaaaaatgccaaacatttaacctgactgaaaatgtatca

SEQ ID NO: 378635 - DNA, 122 bp, Homo sapiens
gtgaccttgggaagcgactttgcctccttggggctcagtttccccacctgtaaaatgggacggcctcatcctggggcataatggggacgtttaacgcggttcctggggcaaagagaatggga

SEQ ID NO: 378636 - DNA, 122 bp, Homo sapiens
cagagccatcacccccatccacaggcttggttctggccacctgaatgagtgtgtagccaccgtggggaagctgcagtaggcagccgtcatctcattctccttagacctggtgggcatgccct

SEQ ID NO: 378637 - DNA, 122 bp, Homo sapiens
ggccgggccgcagccggagcctgagccgcgcgcgcgtccttcctccgcgccggccgtactcgcctcagcagagtgaaggctgcatttcccagggcccctcagattcccctgttaattaaatc

SEQ ID NO: 378638 - DNA, 122 bp, Homo sapiens
tttatttgcttcatttttccttcatagctatccctttttttttgtcatcaaagatatgtgcgttttttataaaaacactttcttgtcccctgctgactacctctggaagcttcttgttgacc

SEQ ID NO: 378639 - DNA, 122 bp, Homo sapiens
tccatttgagtgaatccctcccagcccccagcaagccctcggaacgagcccactcccaggcgctctctcctagtgtgggagtggccacgcccctgctgggagtgactcacttgggttcagag

SEQ ID NO: 378640 - DNA, 122 bp, Homo sapiens
gcattccaccctcacccctgcttctggcttcctaagcaaactgtacaatctacttaagtgcgatgtccatgtgagtctttcaaaatatacctgaatccagccaggcaaccctagattttcag

SEQ ID NO: 378641 - DNA, 122 bp, Homo sapiens
ctgagtccacttgccaccgggggcgggtggcacccaggcggcggggaggcgggggaggggcgcagtgacagccgagccggctttgaggaaccttgcagaggaagtggcttcagaactgcttt

SEQ ID NO: 378642 - DNA, 122 bp, Homo sapiens
aacgtcgaagtagatacaaagactggaaggaaatccactacatcttgtcagtggctctttcggggtagtctttattttgattctgtatgcaattattttgttttgtcactaagttttctata

SEQ ID NO: 378643 - DNA, 122 bp, Homo sapiens
tcaagatcctacactattaattaatggctaatggcaagggaatcttgagatcctgtacggcggctgacccataaaatctacctagttctaaaattctttaacccacccacttaacaaaaacg

SEQ ID NO: 378644 - DNA, 122 bp, Homo sapiens
cacggagccaagccgcacctctcccctcatgaggcaggagcccggaggaaacagtatgcccgtcaagggtctctggcgggactgattcgcactaggggcccaacaggcaataaggacccagc

SEQ ID NO: 378645 - DNA, 122 bp, Homo sapiens
ggagggaagaggcggtggcggcgcgggctgctgggcgagggctgctgggctagggagccgcggagagctcgcgcggaaggagggcggagcctctattgtgccggggcggcggagatgcagcc

SEQ ID NO: 378646 - DNA, 122 bp, Homo sapiens
ggctcctttatgatttacacacctggcgtaagttaggcctttttggtatgctgaaacacgcgggagattatttcttgagcaacagtgaattaagcgcatttattcatttttaaataaagtga

SEQ ID NO: 378647 - DNA, 122 bp, Homo sapiens
cccgtgggaatcctgacagcctggctcccagggggttcactcaggtcccttcaacccactcggccctctactggcctccagacagctcaaggtgcgataacgggggagaagcccgctgaggc

SEQ ID NO: 378648 - DNA, 122 bp, Homo sapiens
cgaaccagcgctgagggcggcgctgtgcgtgctgcttgtatccgttgcagtagtgtagaccgaggtctcactcgggttgtgggcacctccgggtaggtgacggcccactgggaaggggcgcc

SEQ ID NO: 378649 - DNA, 122 bp, Homo sapiens
catctgctgtttctaattcctctgcaatatttgtatttgctgcctccctccgacaaagagcgggggcggggagcagtgctccctacttagcgacgtgtgatctggttggctggcggggcccg

SEQ ID NO: 378650 - DNA, 122 bp, Homo sapiens
cgttggtaaacactgtagttcaaaacacgcttcacgcttcacggctgaaaaaggcagccccgacaatggagccttgtccccggcagcaactctaacggccaccttctttcattccttaacct

SEQ ID NO: 378651 - DNA, 122 bp, Homo sapiens
tccctcgctccacgccctccagggggccgcatgtgcacttgccctgcattgcctggcccccgaggttccagggtcccaactgtctactaaccggcttcccgacagggtgagggtgaggtcgc

SEQ ID NO: 378652 - DNA, 122 bp, Homo sapiens
tcaggatggcgtcccccaggggagggcgcgtggatgggagcggggctggggctttggggccggtgaggcaggtgcactcaccagtgtctgctgtgtggttagacctcgtcattgtgtagttg

SEQ ID NO: 378653 - DNA, 122 bp, Homo sapiens
gaggcagctgagttctagccgatgtgctatgaatgaaagtgtcatatgctcattccaggccgggacatagcatgagttttctcccttcaacagatccagtggtcatgtgttgaaggtggtag

SEQ ID NO: 378654 - DNA, 122 bp, Homo sapiens
caacccctcttccccccctgactcttaggacctccatcgcaggggggcgaggcgtaggcgcgctggttaggaggggctggctcctaagaccagttagaatggcaatcattaaaaagtcagta

SEQ ID NO: 378655 - DNA, 122 bp, Homo sapiens
ttaagcagtgggtggttggttaatggatacaaccattttttgtagctctctttctgcacacgtctctgcaaagtactatggagattatcagagttgagtatcataggatgatgacctcacct

SEQ ID NO: 378656 - DNA, 122 bp, Homo sapiens
cgcgcgccgcgatgaggtaatgccgggaccacgcggagtgggcggggctgacggggaccccgcagagctcagcgcttcttctctccccacctacccctcacctttgaccttgatgtacaccc

SEQ ID NO: 378657 - DNA, 122 bp, Homo sapiens
caaaggcgcacgctgattggccggagggccgtagtcatgcaggacgcgcgactctaggggcgggaccagacaaggggtgactgccgcgcggcgcgggggaggagaccttcatctgttcacgc

SEQ ID NO: 378658 - DNA, 122 bp, Homo sapiens
ttgcatttcaaaccggctgcacttttcagggagtcaactctgacctgtgaaccctaaacccggaaccgctcggcgggcccgcaaaggggcctcagcagctcggtggccccgcggagtgtggg

SEQ ID NO: 378659 - DNA, 122 bp, Homo sapiens
gccggtgttgcccagctctggcagtttgccaggagctcggccgtggggcgcggtgtctggcgaagcatgccggggaggaggcagcagggctgggcaggcagggccctgggatccgagggtgt

SEQ ID NO: 378660 - DNA, 122 bp, Homo sapiens
agggaaagtttctgccatcttaaatgtcatacacagagatgaaaagatgcacagactgaacgtgcatcaccagctcaggacggccacccaagaagaaccttgggaactggttttttggtaaa

SEQ ID NO: 378661 - DNA, 122 bp, Homo sapiens
tatagtcagttgaacccactgttaccattgttcttatcccatgggaagcagttggttacacgattcttattttataagaaacagctgagaggcactatggattagtcttctgaagtgaagga

SEQ ID NO: 378662 - DNA, 122 bp, Homo sapiens
cccctccccttgaccctttgctcctctctcctcgtgcccatccctagactgtcagctccacgggaagaggccccgcagccaggacctgccagcccagagcccgctcaccgtgagcggttgaa

SEQ ID NO: 378663 - DNA, 122 bp, Homo sapiens
tagaggcagtgcccaccagtaccccccaggaagaggtctcctgcacccctttccctaccacgtgcactgcgtgttgtctaattcctcaaggtattaactgcagggcatctctcactttctct

SEQ ID NO: 378664 - DNA, 122 bp, Homo sapiens
ggacaggacttggcattcaaggagttatataaaacttttttccctgggtaactccgagttcggaagcagcaattctcatacattgtatcaggagcttgtttaaaacacagattcccagacct

SEQ ID NO: 378665 - DNA, 122 bp, Homo sapiens
actctagtcagaatcagtattttaacaatggaagcaaactgggaaagctaagcagtctcgcgtctttacacacatggaaactatgaccatatatattatacttttccttaacattttacaaa

SEQ ID NO: 378666 - DNA, 122 bp, Homo sapiens
accaagctgccttgctctgaaatgctctcctgtcctcacaatctctgggtggccttgccacgtgcccggctgaattgtgaatatcggtttgtctgagtctcctccctaggacaggaaacggg

SEQ ID NO: 378667 - DNA, 122 bp, Homo sapiens
cagagttattagccctttaatgctgtgcacctcatagggttgttacccacatcagcgtcacgtaagatgctgtggaggaaagcagtttcagaacaatcagtgatgacagctactgtgaatcc

SEQ ID NO: 378668 - DNA, 122 bp, Homo sapiens
tggccgtggaggtgggaacagcggcggcatcctcccccctggtcacagcccaagccaggacgcccgcggaacctctcggctgtgctctcccatgagtcgggatcgcagcatcccccaccagc

SEQ ID NO: 378669 - DNA, 122 bp, Homo sapiens
taaggtgcgcgctgtcccatgtgataagatccgaggtccgggcagggcggcgcaacctcccgaagtgaagcctgcgaggtcagcggccagaaaaaaacaattgatattcatgtgaaactgca

SEQ ID NO: 378670 - DNA, 122 bp, Homo sapiens
ggtgacagcatcaacaatgagggtggcgtcagtccaaggttggacgggcagtgagtgggccgatgtccgcgaagaagcattttgtgcaaggttgtgggtttgcagtcttttttgtggttctt

SEQ ID NO: 378671 - DNA, 122 bp, Homo sapiens
gctggagttttcttcacctgacttttcagaggccctttagaacagagcagatgggacctacgaaacctggagatgtttatagcagccccattctcttctctcctgaacaaccttctgggaag

SEQ ID NO: 378672 - DNA, 122 bp, Homo sapiens
tctggagcctttgttctagaggaagctgcatggagtgtgcagtctggcaggggatgcccacgtgcagtcgtggtgttcattgccagcgcatgcagttcagaggaacgtgggcggtcggagga

SEQ ID NO: 378673 - DNA, 122 bp, Homo sapiens
tgtgtggagtgatgaccacaaggacttcgactgcaatactcgccagcccggctgctccaacgtctgctttgatgagttcttccctgtgtcccatgtgcgcctctgggccctgcagcttatcc

SEQ ID NO: 378674 - DNA, 122 bp, Homo sapiens
ggctgcctacctcacgcgccaatgccagccgcggggccttccacgcacccagtgcgcggacggcagcagctcctatgctcctatgctcacacagcttgaccccagtacagcgccaggcatga

SEQ ID NO: 378675 - DNA, 122 bp, Homo sapiens
atggcagttgccggcctagattcaagtaaagcccagaagtactcaccgagtcactcgacccggtcgtgggccacccctccagcaacccctccctaccgggactggacaccgtgctacacccc

SEQ ID NO: 378676 - DNA, 122 bp, Homo sapiens
tgtgccccgagggcggccagggacccctctccatcactgccatggttcggagaccatgtgcgttgtgtgcatgcgagcgctcctgcaggcgtgagcatggggccaggtgtgcacgtggacgc

SEQ ID NO: 378677 - DNA, 122 bp, Homo sapiens
accagccaccccgcgaaggcgtccaccaattaacccctcccagcttctggtctacagtaacgggtccccaacgccgcgtcttaaccaggcccgaaccgaccaccgccaaccttccctgacac

SEQ ID NO: 378678 - DNA, 122 bp, Homo sapiens
cggcgcgaggggacgccgttgcagccgtctttcttgaggtgtctgtgcaggtggtcggagcggacgaaggtcttgcagcagctgtcgcactggtaggggcgcaggcccgtgtgcacgcgcat

SEQ ID NO: 378679 - DNA, 122 bp, Homo sapiens
acgccgggagagaacccggatgagggggctagtgtagtgcgcgaggcacgacgggaacggcgagacccggataaagggatcgcggcaccggttcgagaaccctcggcggcggaggcggcggc

SEQ ID NO: 378680 - DNA, 122 bp, Homo sapiens
gtgctgagcccccagaccagtcctttcggaccggctctcccggggatgccccggagaggccgccgctttgcgactttagtgaggggctttcagccccaatggacttctaccgctttaccgtc

SEQ ID NO: 378681 - DNA, 122 bp, Homo sapiens
atcactagggccgccctgggctggagcctcgagttcctcatgtgcagctcctcctagtgtcgctgggtggtgctgtgcttatggttttgggtctagacccggtttccctctcattttatgct

SEQ ID NO: 378682 - DNA, 122 bp, Homo sapiens
gactctcattcctgttctcacacagagctgtgtaacagagaaccttctctgcttcgagcacggcaggtgcccaagccttctgccctgctccccctctctaatccttgctatctgggtgctag

SEQ ID NO: 378683 - DNA, 122 bp, Homo sapiens
gctctcctcgcaggtgtccagctgctccgagagcagcgcgtgttcgcgttgcaggtactgcgcgcgctccgatagcggctgctcggcacccgcggccgccgcaccacctggctggctccctg

SEQ ID NO: 378684 - DNA, 122 bp, Homo sapiens
tggtcaaagtgaaacatttcacaggggtttgggctgtgagaaacatcctgcctaaccacccgaccacaaggcagacaaaggcccaactaaagaaacatccctctcatatcttcctgggcaaa

SEQ ID NO: 378685 - DNA, 122 bp, Homo sapiens
cccagaccaactgcaacctcactgacagttacttgctccaaactcgcccctagtctgcaccggttagcttcaggcccatcatctcttacttgattggctgatgaaatgcaacgtcattgctc

SEQ ID NO: 378686 - DNA, 122 bp, Homo sapiens
cctccccatgggcgagcaaccctaggcaggcaccagagggcgctcgcggtctgcagaaaacgctggctaaggggggagcgcggaaagaggtgggcactgtgggtgcagacagctggggtccg

SEQ ID NO: 378687 - DNA, 122 bp, Homo sapiens
ctcatctctgcgttctcccagcagcccggggaccaggctaggtgagggcctggagacaggcgatccgggtaacttacctcctcccactgcagcagcagctgcccgttctagagagagagtgc

SEQ ID NO: 378688 - DNA, 122 bp, Homo sapiens
gaagtgaaaccgtctcctagagcacatcctgtggattatgtggatgtggggagcggcgaacggtcccccaaaggctgtactcctggagcaggcaacagacacctcaggaacctaagacggga

SEQ ID NO: 378689 - DNA, 122 bp, Homo sapiens
ttttcccttatcaagtaacagagcggggatgtgccctgactttcagttttgattaccagccgaatcctgaagagacacgtaagtcttttgaagtttatctcttatccttaagtttcttccat

SEQ ID NO: 378690 - DNA, 122 bp, Homo sapiens
ctgcgtgaggggctggggcccagggagtccgaggggtctctgtgagggcgctggggtgtccgagcgagcagggaactctggaaggggacaggagccgggggagctgcaggcggccgccgtct

SEQ ID NO: 378691 - DNA, 122 bp, Homo sapiens
ttttctattgaatgaagaaaaaatatgtgaactccctacttttgttgactcactacaagtcgataccaatgatcctgaataaatggtttgtcaaacaacagggccttgttgtcgtttgcatg

SEQ ID NO: 378692 - DNA, 122 bp, Homo sapiens
tcgaaaggaagcgacgcatgagttgtttggtgcggtgggtagatacctcgagtttctcctcgcccaccgtaggccccgacccctaaaaaggaaacttttgggacgtcagagtgagaggagaa

SEQ ID NO: 378693 - DNA, 122 bp, Homo sapiens
gcgcccccatctgttttcctcgcggtttcggctgctgtgagttggttttcaagtcggagacgcagtcactggggactaaggtgaggactgacgaccccttcctctatcactcagcccgaggc

SEQ ID NO: 378694 - DNA, 122 bp, Homo sapiens
tggtttatctgtcttgttcccctctgtgtttgtaccatggagaagccattagactccattcgagtgcaggatccacaaaagggcttcgcagtggggatatcaggtatccactgacctcaaac

SEQ ID NO: 378695 - DNA, 122 bp, Homo sapiens
agataaagacgaatttctgtgcttaacttacccttgtgtctcccttcaggaaagagcacacgaatgccccatggaaaattacaatcaaacatcaactgatttcatcttattaggattcttcc

SEQ ID NO: 378696 - DNA, 122 bp, Homo sapiens
ctcggcccacacagcctccgggtggacctgcaggggcctgtttgtgctgtaggcttgacacgtccaggtatctctgtgtgtctgtgtatctcagtgtgagtgtgtgtgtgtgtgcacacttg

SEQ ID NO: 378697 - DNA, 122 bp, Homo sapiens
gctacttgagaaggcctttccccacagggtgacttaaatgtcccaggctggaaggtggagcgagaagtggatgcccccagggctctgggtcacactccaggtcagtaaaacagcgagtttcc

SEQ ID NO: 378698 - DNA, 122 bp, Homo sapiens
ctccaagaggcccttcatagtacttcaaaaggcatgtagacagtgtgccctctgatgcatcgtgaccataaaagcaaaacctgctgggcctcttgctacttgccacctcatactttttcagt

SEQ ID NO: 378699 - DNA, 122 bp, Homo sapiens
gtaccacattaaatgcatgtttgagaaactagagcgggcccgggccaccacaaaaaaaatcgaggacctcacagagctggaaggctgggaagagctggaagataatgagaaggaacagataa

SEQ ID NO: 378700 - DNA, 122 bp, Homo sapiens
cggactttaatgacaggcaagtctgagaagcttccagcaccacggcctgactgacttctgcggggctggagggaacggtgggtcccagatttgggaccacccttctgcagtgaacacctccc

SEQ ID NO: 378701 - DNA, 122 bp, Homo sapiens
gcagggggcagtggctgaagcggggtcgggtgtctgttcttgatctggatgggagtcccacgctccagtcacgcggtgccaattcatcccacaggggacttgagatctgtgccctctcccca

SEQ ID NO: 378702 - DNA, 122 bp, Homo sapiens
aagttgccgggcatgttcattccctcccgcaagcctaaggcagagtcataagctcccctacgatgcggcaaagtctcaactaatttatctaccagccttaagaaggagctgctgcttctaaa

SEQ ID NO: 378703 - DNA, 122 bp, Homo sapiens
tgcctacattaatcactctcccttgttttaattgcacattacattcttttctgtccttcccggacatctttgctagcacagtgagtgcagggaggactgtcacggactctctcccctcttga

SEQ ID NO: 378704 - DNA, 122 bp, Homo sapiens
agatttttcactggatggctgttccccattccttgcttatctttcttgctctctgggcaacgcatttggaacattctctccccagaacattcctatcactggactaggcacaatgatatggt

SEQ ID NO: 378705 - DNA, 122 bp, Homo sapiens
caggctgtcaagcagttccacgactgcaagatcaagttcccgctgccccaccgggtcctgcgccttcagcacaagccacgattcaccaccaagaggcccaacaccttcttctaggtgcaggg

SEQ ID NO: 378706 - DNA, 122 bp, Homo sapiens
gcctgtcttgcgctcttgtggaggttgaggtccagatgctgaatagaacagtattgagttcgcctctagtgggaatggtaagctaggactatctatttgatgtgtgtagaggatcaggcaaa

SEQ ID NO: 378707 - DNA, 122 bp, Homo sapiens
tgggaatggcacccctcctccagaggaagcatttcccaaatgccccaggataggagttggcgcggaaggagagccaagccggcgatgaagacattctccgctggacacaggaacgccaagag

SEQ ID NO: 378708 - DNA, 122 bp, Homo sapiens
aatcctcacagcagcctacgggaagttctccccctcatggacggacaccaaacggaaccccgggggctgcctggccaaggcctaggagccaagacacgtggacccttctgcccgactgctcc

SEQ ID NO: 378709 - DNA, 122 bp, Homo sapiens
ttctttcttcttcattgagtagacttgccattttactcatattttagtgatttttcactgcgttcatgtcccgtgtctttttttttttttttttttgacggagtcttgctctgttgccaggc

SEQ ID NO: 378710 - DNA, 122 bp, Homo sapiens
tttgggaccctcccggatgtgcgtggggggagtcactccttcagggagcagtggggacggcgccccgtgctagctggagggattcccctcccccaactctccatccttccccaccccttcca

SEQ ID NO: 378711 - DNA, 122 bp, Homo sapiens
tggggaacaagggtggacgagcgcaggccggtgctcagatgtgggtcagcggcaccgttccgttgactgcagtcccggcgccctggtagtgctggtgcacgccgtgcaggcgaccgccgggc

SEQ ID NO: 378712 - DNA, 122 bp, Homo sapiens
tctaaactgagttgtattttcaagtactcttaaaatactttaaaaaattttaaattgagccgtttaattctttgcttaaaggtgatgggtattttattttctgtatggcaccacgtgatttt

SEQ ID NO: 378713 - DNA, 122 bp, Homo sapiens
ccaggttgacttttcttcctccatttgttttgttttattatttgccaccaggaggggtttcgggaaatgaccaagcgtctccacaatttaggggcaggtcagggtaccttccactgtgcttc

SEQ ID NO: 378714 - DNA, 122 bp, Homo sapiens
gcttgaaacagccaaggtggattttgtcactcgtgctgtattgagtgtcagcttggagcccgtgcggacagatcatgaaggttgccaatggacatagtaaaggcagaggggtctggtcttcc

SEQ ID NO: 378715 - DNA, 122 bp, Homo sapiens
ctgtacgccggccccaagcctcactggctccgagcccgtccggagtttccgcggccgccccgaggccactaaccgtgtctgcagtcgcagtagccccagtccaccttgccacgggcgtctcc

SEQ ID NO: 378716 - DNA, 122 bp, Homo sapiens
gtccctcaaggctgcccaggccaggcaggggtttctctgcagtctcagctgggtgaggcccggccgggcaggcaggagggaggaaggcacagtctcctgaggcggagttggggactgacggg

SEQ ID NO: 378717 - DNA, 122 bp, Homo sapiens
cttcagtttgggtacctcctgaacccgcacatcatcagttatggtccccacaaccacggccgtcttgttttcccggccaggaagcttcatcttccggatcttagggtggggaggatgtacgt

SEQ ID NO: 378718 - DNA, 122 bp, Homo sapiens
tgggtgacgtcccttctaaccatggccggggccctgggtgacgtcccttctaactaggtccggggccctgggtgatgtcccttctaactaggtccggggccctgggtgatgtcccttctgac

SEQ ID NO: 378719 - DNA, 122 bp, Homo sapiens
tcatacacactttactcatttaacttcacctacggtctgtctcccccagaatataaatgtcgtcagagcaggaatcatggtctcttttgttcatagttgtatccctatcacctaaatgagtg

SEQ ID NO: 378720 - DNA, 122 bp, Homo sapiens
gccaaattcattgtggaaaatagtttttagttttcctgctctttgcgcaggcatagtcatcgggatgttctttaagtttccatttgacagtggattgaggcttccagctgaaagcaaaacca

SEQ ID NO: 378721 - DNA, 122 bp, Homo sapiens
atatttgtcttaaatccagcagtcaaaggaagtggtgctgcagttgacactcgtggaggccgcgtcaaatccaggcactgagatgacccctcccatttcaaacacagggagactggcgtgcc

SEQ ID NO: 378722 - DNA, 122 bp, Homo sapiens
agccacagcaccaaaaagaattctcttcggcaaaggcagcaggactcaacaggaagcagacgtttgcgttccgttacttgaggaaaaccaaatgctgctgacatttctacccagagagagtt

SEQ ID NO: 378723 - DNA, 122 bp, Homo sapiens
gaaaacccctttatcactttggtctgtctcagtgtctgtggctccctgtctgtttttagacgtgactgtggccagcgaagggccacctcggacctgccgtttcgtcacctggcccctctgtt

SEQ ID NO: 378724 - DNA, 122 bp, Homo sapiens
gatcgcctacgacacgtctgggcacccgactctctggctgccaagcagcaagctgatggccgtcaatgtcacctattcatccacaggtcaaattgccagcatccagcgaggcaccactagcg

SEQ ID NO: 378725 - DNA, 122 bp, Homo sapiens
tgttcaggactttcacaggtgagggctggaaacctctcttcagctcagcagtccatcccccgtccctcccatctgcaaccctagaagcaaagatgggtaaggaaagctgggaacaaggagag

SEQ ID NO: 378726 - DNA, 122 bp, Homo sapiens
cggcaaaatgtgtcaaagcgcctttagaaacttactaaatcatcagtttccttacggggtcggcacgcttgtgcacaaaatgagaaaggtaaagatcagaaaggttgcagcacaactctaaa

SEQ ID NO: 378727 - DNA, 122 bp, Homo sapiens
tcaatcactgcctttcattatgggtagactcctaaatccaatagaatgctttctgttgcccgtaagataataggaatttgttggctccgataactgaaaagtgcaaatcctgggaaaccagc

SEQ ID NO: 378728 - DNA, 122 bp, Homo sapiens
ggtcggacttgcagctggagctagggcctggggtggccggagccaagccctcgagcccttcgcaggggcccggcctggcaccccccatcatgcctgtcagtactgtgtccaggtcgtagtag

SEQ ID NO: 378729 - DNA, 122 bp, Homo sapiens
acccttccgaggaccgggaaagcaagtgtccagcaatggggagcctctccattagcccggcggcctccttgactgccaatcagcaagcctgagaggtagtgccagcagaagaaccgttcggg

SEQ ID NO: 378730 - DNA, 122 bp, Homo sapiens
tctcctccaggggttcaatccctcttaattattgcatatcaaagttagttcaaagggccacggcagagcaggatgtctgtatcaaaggcaaactctgataatcacctgcatttcctaccttc

SEQ ID NO: 378731 - DNA, 122 bp, Homo sapiens
cgtcgtggatggcgagctgcaggcgtcggggggtgacgcgggtcttcttgtctcgggccgcgttgcccgccaactccaggatcttggcggtcaggtactccagcaccgcctccaggtacacc

SEQ ID NO: 378732 - DNA, 122 bp, Homo sapiens
acccatgccctgtgatgacagacccgtgatctctcttctgagagggaaacaaagacctcacgtttgacggggccaagaggcagccgtgggaatctgctgctcactttcaacactgggtgcct

SEQ ID NO: 378733 - DNA, 122 bp, Homo sapiens
cggtccgcctgcactgtgacgtgggcagcagctggggcgggcagtgcctcggtctccgctcggggacgcggtgattttcttttttttttccgactgccggagcccgtggtggtggtgctggg

SEQ ID NO: 378734 - DNA, 122 bp, Homo sapiens
atccgtgaggagccaagacaagtcacaactgcaagtgagggggttgccaaagaggttgatcgataggacctgggaggaatccagggtccaaggagggaaggaactcaagttgcagctgaaat

SEQ ID NO: 378735 - DNA, 122 bp, Homo sapiens
agagcgacactgtggactaagccgtgtcctccaaagtcataggtgaggccccagcccccacgggactgtatctggagctaggacattagggagggaattaaggttaaatgaggttgtgagga

SEQ ID NO: 378736 - DNA, 122 bp, Homo sapiens
ttgatgcatgtccctgtcctggggtggggggaggggaccgtgcccaggaacagcacactgcggaggcccagaaaccatgctgagaaccaacagaatgtcttgcttctgccaggagaggaggg

SEQ ID NO: 378737 - DNA, 122 bp, Homo sapiens
tcgcctcggcttccagttgacagagatggaacttacccgggtttttccagctccagagctcggggtctcgatgcagacccaccgtccggggatttcgggcacgttgtcgcccgcgttacaaa

SEQ ID NO: 378738 - DNA, 122 bp, Homo sapiens
ggagatgggcgtggtttgtgggcggggctctgctctacgccggaacctgggtctctagggcgtctgcgcaggaaggtgcgttgagatggcagttgccggagttggaggccgggcggcgacgg

SEQ ID NO: 378739 - DNA, 122 bp, Homo sapiens
gttggcgggggcacgtgtgggccgtggcttgggctggtcagagtggcgtgagctgcccggcgcctgccctgcccaagtgaccagggaagtgtgtgtgtgtccatgtgtatgcgtgtccgtct

SEQ ID NO: 378740 - DNA, 122 bp, Homo sapiens
ctcctgcctctggcctctgcactggcactggctgtttctgctcccgggaaatcaccccgccgcctcttcaggcctttaaggtctcaaatgtcgcctccccggagcagtgctccctgtcctcg

SEQ ID NO: 378741 - DNA, 122 bp, Homo sapiens
ttgcggcctatctgaggccatgattgaaaggaaaatacagacgtctgggtgttcacaccacgtctgcccccagatctgttccctcagccaccacaaacgggggtcagagctgagcccgcaaa

SEQ ID NO: 378742 - DNA, 122 bp, Homo sapiens
gcgcagagccacagtgcccgggcggtaacggtgaggctttttcacgccgccggtagccggcgcgctcttgcgagcagccttggtagccagctgcttgcgtggcgctttaccgccggtggatt

SEQ ID NO: 378743 - DNA, 122 bp, Homo sapiens
gcaccgccttaagaacttcaacactcactgcgaaggtctgcagcttcactcctgagccagcgagaccacgaacccaccgtaaggaagaaactccgaacacatccgaacatcagaaggaacaa

SEQ ID NO: 378744 - DNA, 122 bp, Homo sapiens
ctatttgctagttttccttctaagagtcaggtccctcagctgcagatctgttggagtttgcgggaggtcaactccaaaccctgtttacctgagtattaccagtggaggctgcagaacagcaa

SEQ ID NO: 378745 - DNA, 122 bp, Homo sapiens
ctcttaattgcacttaaccagcattgtacccagcattgacctaaatgcctaacaccaattcgttcgtttaatcctcagaactacctcatgagggaggactcttgtttctccattttatagac

SEQ ID NO: 378746 - DNA, 122 bp, Homo sapiens
gctcaggagttcgagagcagcctgggtaacatggcgaaacccctcccccccccccccccccgtctccaaaaaatacaatagccagcgtggtgcagccgtctgtagtcccagctactctggag

SEQ ID NO: 378747 - DNA, 122 bp, Homo sapiens
aaacaaatagaaggcgtagacagggctgcccaccttagacctggcccctgcaccagccagcgacagggctctctacatcgccagagtgggctaaagaaaggtttttcagtgctcgctgtttg

SEQ ID NO: 378748 - DNA, 122 bp, Homo sapiens
ctgatgtgccaggggtcacagtctccctttgatgggctcccttctgagtagagaagataacgagtaatgagatgcagcaagatcttggctgagcagatccattcttgtttatttaattactc

SEQ ID NO: 378749 - DNA, 122 bp, Homo sapiens
ctccccacgcccgcttccccgatcccttgcccacgaatcctactgaggaagccgcttaaacgaggccctctggtcagagaagagaagctactctgaagtagcaggtcccaaacactgaacaa

SEQ ID NO: 378750 - DNA, 122 bp, Homo sapiens
gtgccctggagaaccaggtcgcgggaggcggagccagtcaacagggcttcaccgagggggcgaattctgtacacggttgtgaaggagggtggctgtgcacgcgtgcaggctccgagtgcaga

SEQ ID NO: 378751 - DNA, 122 bp, Homo sapiens
aacaacatcacgatatcaacaattccagcaccttacactcctgtaacctagcgcaatttccggagagccttcaggttcatctcaacggatcctcgcaaaaacctgtggcctgggctgagcag

SEQ ID NO: 378752 - DNA, 122 bp, Homo sapiens
agggttagaaatggcaacactccataaggattagcttgtgggggttaaggaaaggacctacgctcttctgggatgactagcaagttttgaacttgaaaaagggtggtgtcatttatgaaact

SEQ ID NO: 378753 - DNA, 122 bp, Homo sapiens
aacactggaagctctgaggcgctaacagacattgtttgagaagatcgctgtgctgacacccggagctttccgcttgcagttggggctgggtaggttagaggaaagctaggcttgtcaccgcc

SEQ ID NO: 378754 - DNA, 122 bp, Homo sapiens
tgcaatcactgctcgctgcagcctcgatcccctggggtcaagcctcctcacatctcacctcgcaggtagctgagactacagatgcgcaccaccaggaccagctaagttttgtatttttttgt

SEQ ID NO: 378755 - DNA, 122 bp, Homo sapiens
caggtggacagtgttgctatgaagagaaagcctcgattgtccctacagcaaaccgccacacgccagacctctgctattgtgcgccctccatagaaatgcaaacgagcggcgtgcgccggccg

SEQ ID NO: 378756 - DNA, 122 bp, Homo sapiens
aacctgcagagaaagggctggctgagagcagcagtgtttgcatgaggctgatcaaagtcacgctggggatggaggatgctttccaggcacagctgcaagtggcttctctcctctccctccca

SEQ ID NO: 378757 - DNA, 122 bp, Homo sapiens
tggaaaccaggccccccgccctgccttccgcaggtagaggccccagagaggggaaggggccgaccacctgctcccgagccattctcgggctcggccagccattgggctgggaacctgtcaat

SEQ ID NO: 378758 - DNA, 122 bp, Homo sapiens
gagccaccgcgcccggcctcggtaaaatgttttataaaggcagtttctgccctctccccgcgtcccccacccccctccacggacctacttacccagcctctgagccgcagtgccctcctctg

SEQ ID NO: 378759 - DNA, 122 bp, Homo sapiens
tcaccaaatgccactgctcccaggagtttgacaaaacaaccgctgtaaactcatttcagacgtttgaaacaatacccaatcactgcatccaccctcgaggagcgccccagaggaaatggcat

SEQ ID NO: 378760 - DNA, 122 bp, Homo sapiens
cggaaaggggactggaaggcgcagcggcctccctctgggaattttgccgctttgtgcagacggaggcagggtccaccctcagctgagcgcagggacccctcactaccttccccccatgcctg

SEQ ID NO: 378761 - DNA, 122 bp, Homo sapiens
gattatgacgtcaattttattataggtttatgaggccttgaaacactgtaaagacaaatgcgtagcttaaggaacaatcatctttagccgagggaaaaaaaagatatttagaaatgttgcta

SEQ ID NO: 378762 - DNA, 122 bp, Homo sapiens
gctggcagtgaagattcccctcttctctaaacgtgcctagggcttaacgcagaggggagccgggagtccttcaagaagccacgaaggcttcaccctggcacagacccagagcaggcaccctt

SEQ ID NO: 378763 - DNA, 122 bp, Homo sapiens
caggcaggtgacgggggcgctgtggacacaggttgtgtaggccttgaccttccatgataccgcatgcttagacgtaaaatgtggccttcgggccatctacctggagatttttctctctggaa

SEQ ID NO: 378764 - DNA, 122 bp, Homo sapiens
agagaagtagagactcttcagagactcttctccgattccagcctgtgctcagggcttggccgggagggaatggctggccagcatggagctggacaaaggcctagaggctggccaggctaatg

SEQ ID NO: 378765 - DNA, 122 bp, Homo sapiens
aggatccggggacagggcagtgcaggcagtagttttccatcctccactcagaggaggagacgagggggcaggagccttcttcacaaaggagaatgactttctaggctgcctcagaacaccca

SEQ ID NO: 378766 - DNA, 122 bp, Homo sapiens
tcgggttacaggtgactgttgccagatttgattttattggcaaataggtcctggtgtgtccggacaacagaaccgcgggatgcttctggaagcacaaacacgccagcgcaccaaagggtaac

SEQ ID NO: 378767 - DNA, 122 bp, Homo sapiens
tgtcttgcagcgtggttcactgcccaggaggacccccaggacccactgttggtgacatcccggccgccttggtgctgattcctgggctctgacctgagacctctgggttctgagctgtgatg

SEQ ID NO: 378768 - DNA, 122 bp, Homo sapiens
ctgagccttaattgacttgctcccacttttctcttgtaactgtctttctttctacaaattcgcttcttaaagatgtcacatttttctttaagaaaagttgacattcagtaaccaaactcttt

SEQ ID NO: 378769 - DNA, 122 bp, Homo sapiens
tacagagccctcctaataaaagtcatgttctataatgaagttgtacaggtagccaggtgtcggtctccagcctgagaactctggctgttgttccttgtgtcgtcccatattcctgcctggcc

SEQ ID NO: 378770 - DNA, 122 bp, Homo sapiens
ctgagcagaaggattgcaattcgggaataaatgtgccatggcacccaaggggtggggacgcggagtactcagggaggcaaaggaaagcagaggcttttaaaggcaaaacgaggaggattgca

SEQ ID NO: 378771 - DNA, 122 bp, Homo sapiens
tcacagttgagaggctggatcacatcaggatgcctcttcacatattacattccttcattccgtgtgtttaaccagattgtagaaagctttaaaactttatacttgctatggaacattcgact

SEQ ID NO: 378772 - DNA, 122 bp, Homo sapiens
gtccagttcagcacgggggctctcctttgagcctcagctgctctgtggaagcagcacacccggctgtagccacctctggaggagctgagcattgggacaaaggcccggctttgaattggggg

SEQ ID NO: 378773 - DNA, 122 bp, Homo sapiens
cggggtcgctgggggactcggccccccgcccgcagaggggggtagcccgcgcgccccgggcgtgcccattccaaccaatggggccggtcccggcagcaggtggcaggccctgaacccgcccc

SEQ ID NO: 378774 - DNA, 122 bp, Homo sapiens
aaccgccgcgacaaaaaaaagcccgcctcctccccgcgggcctcaggtggaatgctctaacgacagctcccaggcggcggtggaagaaacgagaaagtttcaaccgaaccttgctgttctaa

SEQ ID NO: 378775 - DNA, 122 bp, Homo sapiens
ggaaggggagagaagcaggagtcgggagactgcacaggccagaaagtctgcggagcgggccgcgcccctggcccgcccgggctccaagtcccgcgtcgccgccctggcggggacggtgcagc

SEQ ID NO: 378776 - DNA, 122 bp, Homo sapiens
ttctcttccagctgctgctggtggccacaggctggcaccagggccctggactttagaagccgttgctgccctctctgtcacctgaagcggggccctctcccatcccacccttgccccgcctc

SEQ ID NO: 378777 - DNA, 122 bp, Homo sapiens
gcccgggggcggggagcggtgtcagagctgttcctggtgcccgcccgcggacaggcgagacgtgggccgccatggccgcacgagtgaccgggggccaggagagccagtctctccccagcctc

SEQ ID NO: 378778 - DNA, 122 bp, Homo sapiens
gagctcgcgtgattggctgctcccgtccccgtcccccaccttcccggcggtattttgaggcgcaggcagggtgctgaccagcggaccatcttccatggcctctgccgcgctggagctgctgc

SEQ ID NO: 378779 - DNA, 122 bp, Homo sapiens
ctttttctgctctgcaggactgagcagctaggcgcgagcgaaaacaaacagctggggctgcgagcgcccccgccccggccccgagagcacgccggcccagtcccccacctggggcgcccgtc

SEQ ID NO: 378780 - DNA, 122 bp, Homo sapiens
cagtcaggattccgctcacgagccgtagctccgcccaccgaacggagccccgtccataggcggaagtcccgcccatagagtgagttcccacccacctggcgtagtcccgcccatagagccaa

SEQ ID NO: 378781 - DNA, 122 bp, Homo sapiens
cgcgccctggggcgggcctgcccatggcctgccgggaaatgtagtttctgatgccctgcccgcgccgcctcgccgctcgccggccgggcgccccaagcaactacaacttccatcacgctctg

SEQ ID NO: 378782 - DNA, 122 bp, Homo sapiens
gctttacctaagtgttcacacttaatctgtacaaccaaatgaaggtacataatacaccctcgctttacagatgaggaaacttgagctcagagctcagtttgtccaaggctgccaagctggta

SEQ ID NO: 378783 - DNA, 122 bp, Homo sapiens
cctgccccgaagcgttgggacctaggcagaaggaggccgcagcgtcactgagcccactggcgcccctgcagtgaaacctcgcagccgccaggaggcggtggccgccccccccagccagcgcc

SEQ ID NO: 378784 - DNA, 122 bp, Homo sapiens
cctccccccagcccgcggagccgcggctaaggcggctccagcgccggctcctcctccttccggagagttgggagaccaactccctccgctggccgggcgcctctcctacctcggcggagctt

SEQ ID NO: 378785 - DNA, 122 bp, Homo sapiens
cacagatgtttatagcagctttatagctaaacactggaaacgatccagccgtccttcaaccggtgaacggcgaaacggactgtggcactctcctctgtggagcacaccacagagacgaggag

SEQ ID NO: 378786 - DNA, 122 bp, Homo sapiens
tttttaaacccatctgtattcacaaggaaattcaatccacatgtttctgattcatttacacgtaaatcatccaaatgttgttttgcaagagcctttttgcagcccaaaagctcctggagtcc

SEQ ID NO: 378787 - DNA, 122 bp, Homo sapiens
tgacgccaaacctgcgattcccaagcggcagcgcggcctcccgagccgggttgacgctggcgtggcggccatgtttattgagggcacctggcttctcccgcttgcgccgccgggtgagcctg

SEQ ID NO: 378788 - DNA, 122 bp, Homo sapiens
gccgttctgggccaggctctgccggggccctgggccggcggccggctgccggctggctctcggcactgcaagtccctggcactcctgtggggctttgtccaccagccctggccccatgctgg

SEQ ID NO: 378789 - DNA, 122 bp, Homo sapiens
ctgtcactggacgccaaggagttttcggtggctcagctgggtaaccggggatcaccatggcggcctcattggtggggaagaagatcgtgtttgtaacggggaacgccaagaagctggaggag

SEQ ID NO: 378790 - DNA, 122 bp, Homo sapiens
acgggcggagaaagctcactgatcacgtcgacctagcaagcgagcgcacgctggagaaaacgctgggatcaacacgcatctgccaggcccagacggcagagggggcactgctggaaaggccg

SEQ ID NO: 378791 - DNA, 122 bp, Homo sapiens
gagtaatatcatctccccctctggagattatgaactggttcacagaggggtgtacaccgtcggtgtacagagaatgtacacccgtcagtattggagtaatatcatcctcttcctccctgaat

SEQ ID NO: 378792 - DNA, 122 bp, Homo sapiens
aaaggaggtgacaaagagatcctgccccagcagccccatgtccgtgtcacagggtcaccccgccccccaccagctgccctccatgggccaccgtaccctcccaggagggtcccaggcacacc

SEQ ID NO: 378793 - DNA, 122 bp, Homo sapiens
agcagtgccaagctgcccagcgaggctaagcaatcacggggcttcgagaaagaacgcgcgcgtgtgtggaagttttaaatgccacgaagtgcagagtgcaggacattttccaacaagtttac

SEQ ID NO: 378794 - DNA, 122 bp, Homo sapiens
ctgctaagcgtggccgggtaagaacagctcccaggtaaaaaagctgcacacgcgaaacgccgagtctgaaaaaaccacccccgccgaggcgaggcagttgtgagcgggatgcctgagaagtg

SEQ ID NO: 378795 - DNA, 122 bp, Homo sapiens
ttggagagatgctggaattccacaggttaccttgagctgtgtttaatttagatattcttacgtgtagtttctagtgctgtgcctggtattttcattcattctccaatatctgctgagcgcca

SEQ ID NO: 378796 - DNA, 122 bp, Homo sapiens
gcccggagccctgcgggggacggctggtaggccctgctggatgagtcattctccccaccccgggcacgtgctggtggcggcatccacccggaccccgccttccccccacccaacccccggcg

SEQ ID NO: 378797 - DNA, 122 bp, Homo sapiens
tgctaaagagcaagggaagggcgggcagggagtggggccagagatgatgggcatgctgctcgatgtggtgccttacccttgttctgcttaaaacatgtgagcagttctttaaagttgacaac

SEQ ID NO: 378798 - DNA, 122 bp, Homo sapiens
ctggctagtccttgcggaagcagcgtccgggccctcgggtaacgtttgaagagctggcagcgtctcaggctgctgcgtggcgaaggggcggaccgggggacgggggggtgggcccttagggg

SEQ ID NO: 378799 - DNA, 122 bp, Homo sapiens
atgccacaaattttttttctaaattatcatttagtttttacattctagttcttacatttacgtctacaatcaatttggagttcatttttgtgtatgatgtgaggtaagggtctaagattact

SEQ ID NO: 378800 - DNA, 122 bp, Homo sapiens
acaaagtccggggactataaaggccggtccggcagcatctggtcagtcccagctcagagccgcaacctgcacagccatgcccgggcaagaactcaggacggtgaatggctctcagatgctcc

SEQ ID NO: 378801 - DNA, 122 bp, Homo sapiens
accgtcaagacaaatccacacccgctctcccctcccgcccgactcggggaggccgcgggacgccgcagcagcactagcaggaggaggagaccgctcgctggacaccccacccctgtggcaca

SEQ ID NO: 378802 - DNA, 122 bp, Homo sapiens
tgtagaaaatgcgcgctctccgttacttctcggttactttgcccagcacaaaggacgacgcgaataccaacagactggacgagtcggtgactacagtttgcattaagaggcggcgccttttg

SEQ ID NO: 378803 - DNA, 122 bp, Homo sapiens
tcaccacagaggagtggaactgaggccccccagatgttgcctccggtgtccaagccacagcggtctggctgttgggaagatggccaggaatggactcataccattggcacattaggctaatc

SEQ ID NO: 378804 - DNA, 122 bp, Homo sapiens
caattttagggatctcatataagtggaatggtcatacagtattcatccttatgtgtctggcgtatttcacttagcataaagccttcaaggttcatccaggcactgtgatttgaagagctgtg

SEQ ID NO: 378805 - DNA, 122 bp, Homo sapiens
cgtggagacgcgcggggccttttcccttctgtctgcctttccggcctgttgacacggagacgcgcggggccttttcccttctgtcttcctttccggcctcttgacgtagtctacttttactc

SEQ ID NO: 378806 - DNA, 122 bp, Homo sapiens
ggtgctcacagagacccagcagttgccaggcttccccgtcccatgaaacagtaccccccacgccataaaacagttccctgggttgctctcggagcccttctgctccagcccccatcagcttc

SEQ ID NO: 378807 - DNA, 122 bp, Homo sapiens
cttggcctaggatggggcgcggccagaatgccttgcttaggggcgaggcccacagcgccccgatggctgcccagcgagcaactgagcaaccaggctgatgttacaggttctacaggttgggt

SEQ ID NO: 378808 - DNA, 122 bp, Homo sapiens
gacggagacagagggtggttccgggattcacagtgcagaggcggccagagcagtgcacagcgccccgagaaatgggcccggattccctgggattgaagggaaacattttggcgcggggtccc

SEQ ID NO: 378809 - DNA, 122 bp, Homo sapiens
atggggaacgcaggggactggggcagccctaaccggccaccttatacgtgggctggggggcgtgttagggaaggaggaggtgatgtctaaggtgacacttggaagacgagtgaggggtggcc

SEQ ID NO: 378810 - DNA, 122 bp, Homo sapiens
cctggaaagcgaccatgctcattggtccataggaagccagcctccccgcgacctcaagtgcgaggcacgccccctccaagaggcacacgcctattggtccataagggggtaggcttacccaa

SEQ ID NO: 378811 - DNA, 122 bp, Homo sapiens
ctgtccccaagcatcctcgcagcctggtgggtgtggcggccgcctcaggcgcagccaccacgtgctttcacaggaggactggtgtttgaagtgaaagttgtttttccttacgtgagaggtgg

SEQ ID NO: 378812 - DNA, 122 bp, Homo sapiens
caggcagtatgtgacagcagctgcaaatgcagtcgcctaccgaggtcaggcagacagcatcgtacacaggaagccgactcattgtaagaaacacagtgatgcaagcacagtggtcagtggca

SEQ ID NO: 378813 - DNA, 122 bp, Homo sapiens
gcaaagccaaacttctagccattttctgaacaaagttggctgctgcttcacatctgggctcgagtcctctgcctgtctgtgtaaaaggtcttatctcatctgtcctttgaacatctactcat

SEQ ID NO: 378814 - DNA, 122 bp, Homo sapiens
ctgctgctgctgttgctgctgaagctgcgatgactgaggcagctggggcagctgctgacccgccgggccgccgcctccggcctgccctacgaaggacacaaagttggccccgggaccctggc

SEQ ID NO: 378815 - DNA, 122 bp, Homo sapiens
gcagaggctagcaggtctgtctgtccaggacaaaggtggtcctgctcgtggggcagggcccgaaccgaaggaagccctgaggtgggacgtgggaggtgggacgtgggaggtgagggagcaga

SEQ ID NO: 378816 - DNA, 122 bp, Homo sapiens
tcctgagcgcccagctgcagcctcctgcgagcacatcatgttccgcacgtctcgctggttcgaggacgcctcgtctgttgctatggaaacagagtagtcaaatcagactgcgacggaggact

SEQ ID NO: 378817 - DNA, 122 bp, Homo sapiens
gccggtagccggcctcgcaggagcactggaaggagccggccaggttggtgcagtggtgctcgcagccgccacggctggaggcgcactcatccacatctgcgggcgacccgggaccactgagg

SEQ ID NO: 378818 - DNA, 122 bp, Homo sapiens
acggctgcagccaatgagagaccggggcgcctcggtggggtgagacagggcgctcactggcggaaccccgggggacgcggtgatgggaggagtgtgggaggggcagtggaactggagtcagc

SEQ ID NO: 378819 - DNA, 122 bp, Homo sapiens
gcttgcgggcccagacgtgagagagctttccgctgaagatgacgggcctgctttccagggcggcttgtcgaaagcccgggagcatctggccgcttccgcctcaaccatgggctggggttttg

SEQ ID NO: 378820 - DNA, 122 bp, Homo sapiens
accttcgcctccgactcagtgtagacgtcgccatcccggttccagatttccgcgctccaacgcctccgcagcagccatcttgccagagggccgacgccttttgactctggcgccaacccgta

SEQ ID NO: 378821 - DNA, 122 bp, Homo sapiens
tttctggactgggcagggggccccagggcttcactcacccagcttggtgatagaggggtccgagaggagctgggccaccagccgggaaaaggcctgggctccctgccctgttggtggctgcg

SEQ ID NO: 378822 - DNA, 122 bp, Homo sapiens
aaattctagagaaggaaacgaagtccttcctcctaataccaccaggcatatggccgccaccgccaggtggaggtatcggagaggggcagttcagggggagagttgagagggtgaccgaggcc

SEQ ID NO: 378823 - DNA, 122 bp, Homo sapiens
tttacattaaaccatgctttgatcttggaaatacactgtaaggcaataaatcaatagatacggataattcacaggcttctaaataaatggaagttgattgtttttatctgtgagccaaagta

SEQ ID NO: 378824 - DNA, 122 bp, Homo sapiens
ggtggatgtctcagtgcacacacaggaacgtgaaatggctgagccggcccagagaggcagcggagcgtgtgcggggtggccggcggagaagcagcaggatcccaggcgggagggcacggcct

SEQ ID NO: 378825 - DNA, 122 bp, Homo sapiens
tgagaggcctttacctgggactggagtccataggactcatgctgaggacccgtgtcactgcgggtggcccgggagcagcctccatgaccctgcacccctgccctgcagcccggcacaccctg

SEQ ID NO: 378826 - DNA, 122 bp, Homo sapiens
ggggtgagagagaaagtctccagccaaatgcgggagacttggcaggtcgacaggagcagccgggccaggcagtaactgcacttgctgtgtctagtctattgttgtctcagaaggggggggta

SEQ ID NO: 378827 - DNA, 122 bp, Homo sapiens
cccccacctcgcccgagtccggggcggccccggtgtcccctccgagcctgctgcactccacgtccccctaccagggctccagcccccagggaaatctccgaccaggcccgcccaggaggtgc

SEQ ID NO: 378828 - DNA, 122 bp, Homo sapiens
acaggcatccagcaccacgcctggctaatttttaaaattttttctgtaaagacaaggtttcgctatgttgtccatcctagtctcgaacgcctgggttcaagcaatcctcctgcctcagcctc

SEQ ID NO: 378829 - DNA, 122 bp, Homo sapiens
gtagtatgaggggagtcctggttcactgggccaggcctatgaacaggtgtctgcagtccccggaggcgcggggtaggggcggccggggccaggcacccacctcttccccaattccaccctgc

SEQ ID NO: 378830 - DNA, 122 bp, Homo sapiens
atggatatggctcttgctctggaaaggatcaccttgataggagcaaacaaagctggtcttcggtgccctttaatctcccctcccagccttccaccttccacactttaagagtcgtccctgcc

SEQ ID NO: 378831 - DNA, 122 bp, Homo sapiens
cttttcgtaagtcatggttttcttaaaattagtgttttccaggctgagagtgtggagccccggtgagggaggcagcatggtgtgggagcctgaaggccgtgactttgggacctgccagggac

SEQ ID NO: 378832 - DNA, 122 bp, Homo sapiens
ttccctggctgactttgaggcacctgagtcattgtgggtagacaaaagggggagggagaacgggagcttggggtcctggtctcagaccccatgctgtctccaagtctgtgccctctgggctg

SEQ ID NO: 378833 - DNA, 122 bp, Homo sapiens
atactttctataagagataaaggaacacggattaatgacgtataatactcttgagcaatccgttgaatatttttgaaagaaaaataagaattcataagaaaatgcagagaagccagagtggg

SEQ ID NO: 378834 - DNA, 122 bp, Homo sapiens
ttgctgtgcagaaatcctgcctcccaaatcctcatttatatctatcttttagttatatcccgattaccagtcgccagtatgagtcctggactcctcttctacctgtagcagtagctccaggg

SEQ ID NO: 378835 - DNA, 122 bp, Homo sapiens
ttggccttgggtttgaagtacatgaaggagattgtcccataaaaaaccaccaccactgtgcggtgggctgagcaggtggagaaggctttgcaccggcctgcagcagagggtaccctaaggat

SEQ ID NO: 378836 - DNA, 122 bp, Homo sapiens
aagtaatattttactaacattttcatttgcatctctctaattgctagccagtaactacttcgtatatcttttagcctttcagtcctcttgtgaattttctgttcacctcctttgcccttttt

SEQ ID NO: 378837 - DNA, 122 bp, Homo sapiens
aggggcccagtcgtgcttggtgcagtccagtagggttcccacgtacgttttgttcctccacgtgacattgaccactaggacacctgcaggaggcaggggatgaaaaaggatcatagttacca

SEQ ID NO: 378838 - DNA, 122 bp, Homo sapiens
gcctgcagacggcacggaggaggcggcagagggcggtgagcagacagatggcgtgctgggcgtacatggggaggcctgaccctcgtccttgtccagagctcctgccagggcctcggcgtcag

SEQ ID NO: 378839 - DNA, 122 bp, Homo sapiens
taaaaagtgcattttgccatggggagggtgggcatttaggatcttagagctatatggtagcgctttatccagactatcccctaattgtatagaggagggactcagatattcttttttttttt

SEQ ID NO: 378840 - DNA, 122 bp, Homo sapiens
gtcctctggtccttctttctgtctgtgcctccgtctttgtctcaacctctcaggcttgctcgctccctgcccagattttgtggcccaggctcctggctgtctgactccgggtttctgtcccc

SEQ ID NO: 378841 - DNA, 122 bp, Homo sapiens
cagatggaaaacttctctcccgagatcactgcttccagaattagagaaagggcttctggacgtgttcagggtggatagttcaagcctgaatttcaatgagatgggaacactttttagtataa

SEQ ID NO: 378842 - DNA, 122 bp, Homo sapiens
gagggtttgcgcggcctgtttgccaagcctgggtaggcgggacagggggattcccaaggccgatcagattctatttactgccctcttccccaaccccggggccacctctgaggcatgaaccc

SEQ ID NO: 378843 - DNA, 122 bp, Homo sapiens
caggtcagctcccagctgagtctcagtgcattggtctggcctccaggactgaccaggccacgtgaggggggcaacaggggcttcgggatgcagtggggtcacacaggatctctccatcccca

SEQ ID NO: 378844 - DNA, 122 bp, Homo sapiens
aaggcaagtcaggcggctgcgaacacctggccaggcagccccgccagctgcctcgctgcgcgatggcatcttgagttcgggccctcctatcggggccatatcccattccaccctccctgccc

SEQ ID NO: 378845 - DNA, 122 bp, Homo sapiens
ctaaatgcttttcaaatcttcactcatttaatcttcgaaacagccttatgaaatagatagcgtaatagtatctctagtttacaaatgaaactctgtcaggcatggtggctcacacctgtaat

SEQ ID NO: 378846 - DNA, 122 bp, Homo sapiens
ggggggctctgtgggcagtggggatattttaggtggggcttcgttccctgcccccagccccgaactccaggcctcatctctcctgatggtggcgaaaacgagaacctgactgtggaatttac

SEQ ID NO: 378847 - DNA, 122 bp, Homo sapiens
gaaggcggagcttgcagtgagccaagatcgcgccactgcactccagcctgggtgacagagcgagactccgtccccgcccccagaaaaaaaagatggaggtcatttaactacagagaggcttg

SEQ ID NO: 378848 - DNA, 122 bp, Homo sapiens
cacgccactgcactccagcctgggtgacagtgagagatcctgtctcaaaacaaccccaaacgacaacaaaacaaaacaaaacaaaaaatggggcctggtgtacctggaagctggggctctcc

SEQ ID NO: 378849 - DNA, 122 bp, Homo sapiens
ttgtgccaacatttctcaagaatgctatcatgcatgaggtctactcacaggggtacatgacgctgctcgggatcagctctggtcagttcttcctcttcaatatcagactcccctcctgaact

SEQ ID NO: 378850 - DNA, 122 bp, Homo sapiens
acgccctgttcttctccaagccctcgcccggcgctgcccggtcctcagggcgcgacacgacgctgcccgctgaggcgtcagagcttggggctgcttgtcacgtttcctccacacccagcgtc

SEQ ID NO: 378851 - DNA, 122 bp, Homo sapiens
aggttactggctgacagcaggccagttgggtagctatcaagccatccttttagacgaccccgaaataaagctgcaaaccaccagaactctaaaccctgctccactattccctgccaccgagg

SEQ ID NO: 378852 - DNA, 122 bp, Homo sapiens
ccctgcccaggcgggcgagggctggacaggagagggtgtgggcgcaggcctctgggcgagcgtgccaggctccgactgcggccgctttataaggccgactgtccctgggcttggggccagcc

SEQ ID NO: 378853 - DNA, 122 bp, Homo sapiens
cgggcgggcctcccctgtctccgacccttggccccctcaggtcagcctccagctccctgccgacccggcttccctgggccgtgctcccttgagtcccagtctccctgggtccctcgtcccca

SEQ ID NO: 378854 - DNA, 122 bp, Homo sapiens
actagtggagatcatccatgtacacctacacacggtacagcttaccagagtgagctcttacgtaaaattagatcgtccagtataaaaagcgaaagggtcacactggaaatgcaaaactcagt

SEQ ID NO: 378855 - DNA, 122 bp, Homo sapiens
gaccagagggagaccagccactgggtcccggcctgtggttaattttggaaccatttttctcgtatttatttagtgctatttgatgtgtttcccaggcatccattgccggaggccagtatgtt

SEQ ID NO: 378856 - DNA, 122 bp, Homo sapiens
aagcatacactctctcggaaacaattaattatgatctttgctgaggtacaacaatgttatcgtcactagggactttaaatagcgcgacaatttaagattatttgctccgggaacatgtaggt

SEQ ID NO: 378857 - DNA, 122 bp, Homo sapiens
cagtttccacccctccctcaaggcggcggtcctcttctatccgcagtcccggacctggagcgggtcagaccccgacttccgcccctgactccccaggcggtcacatgaccgaagcggctggg

SEQ ID NO: 378858 - DNA, 122 bp, Homo sapiens
agagggcggggcgggaggcagagggggcggggacagaaaggtcaggggcgtggcgaaggtcgctgctttcctgctacaacgggcctactttagctaaaacagaaacgtaaggccaggacggg

SEQ ID NO: 378859 - DNA, 122 bp, Homo sapiens
actggggcctcgcagtgttgccgaggctggtctcaaactcctgacctcaagcaatcctcccgcttcagcctccacagtagctaggattattggcacaagccaccacacctggcagacttttc

SEQ ID NO: 378860 - DNA, 122 bp, Homo sapiens
gatgtgatttgactgacattttaaaaggatctcactggctactgtattgggagacaagaacggaagcagggaagccagttgtaagactgctctaacaactcaggccacagtttaaatcagta

SEQ ID NO: 378861 - DNA, 122 bp, Homo sapiens
tccattttctgagacctgcgcccaggcctgtttggtattcagagacgcctggcccacactcgccagctctcagctctgcccgaattacttgattaaaacgcatatcaactattatgtgattc

SEQ ID NO: 378862 - DNA, 122 bp, Homo sapiens
tacgggtctgcagcggaccgggaccgggacccggacccggaccgcgccgggcggaggctgcgggttctctctggccatctgctgggccggccccgggaggctctgagtaccaatgagtgcaa

SEQ ID NO: 378863 - DNA, 122 bp, Homo sapiens
ccgggccgacccggcctcagtccctcaccttgattctccagtggcctgagccaactctggcgtcaggagagttcctccttgccccagctgagcgacagggcgcggccgggggcttggggctg

SEQ ID NO: 378864 - DNA, 122 bp, Homo sapiens
tagcctgcagtttcacaggtatatgaggcatctcctggaacccctagactcttttgcaatcgtttgacttcttctaaaagttctattcttcgagccagaacataattaactcttccatacct

SEQ ID NO: 378865 - DNA, 122 bp, Homo sapiens
tgccggccggtgcaaagggaaacctggcccacgaggtgcccgtcctgggagccaggcagacgcggccaagtctcagagtgaagataaacaggctgaagataaacttgactttgggggtctca

SEQ ID NO: 378866 - DNA, 122 bp, Homo sapiens
atggctccattttatgggagcccataaactagcaattagccttctacaccagaaactcttcgtggaaagaacctatgaagtgaaaatctaccaaatctaatgcaaaatctcttacaccactg

SEQ ID NO: 378867 - DNA, 122 bp, Homo sapiens
atccgtggcctgggcgcaaacaactggctcctgaggaccgtttagtccaagggtggaagtcgcagaacctggcgcctagagtggcctgcgggccattcagcccatgggagccaggatgagtt

SEQ ID NO: 378868 - DNA, 122 bp, Homo sapiens
gacctgacctacacctgccgcgacaacaaggactgcctgattgacaagcggcagcggaaccggtgccagtactgccgctaccagaagtgcctggccatgggcatgaagcgggaaggtaggcc

SEQ ID NO: 378869 - DNA, 122 bp, Homo sapiens
aaggaagatcattttatcacacttgtcaggctgctgctactgcagccgtgtgcccttcggcgggcggctgtagctgtagctgttgtgacggctacggcggaggctgcggccgcgcggggaat

SEQ ID NO: 378870 - DNA, 122 bp, Homo sapiens
gcgggaggtgagatttaaacaaagcctcattgctgttcccaggattatccgagccttgtgcggccccgccctgcctcacagagcagggaactcccaaccctgggctgaggccaggcctttgg

SEQ ID NO: 378871 - DNA, 122 bp, Homo sapiens
tgtacactttatttcagactacaggtttctgaacataataaaatctttggcttgtagcggcggttcagtctcgcagtctgtggggtcgtatttctcaacaagtctccggaaaacgaaagggg

SEQ ID NO: 378872 - DNA, 122 bp, Homo sapiens
tcctgccggtctctctctttccagaaaggcttccggaacctttctgcattgccttctgcccggacgtgcggaagcgaaggccggaagtccttagccggtagcttccgggtttcctgggctac

SEQ ID NO: 378873 - DNA, 122 bp, Homo sapiens
ggtgaaacatggggaaaaagaacaacagagctaattagacgagctgagctgtcagagtgccgctgaatggctcagcgccaacaaacaaaaggaatgggttggcaatcagcgggatcggtgga

SEQ ID NO: 378874 - DNA, 122 bp, Homo sapiens
gcaacacaaagtacgtaagttctcacgagagtatatattcacttatatgaagtatatacacgagagtgtatgatttcacttatatgaagttctagaagctctagaagaggcaaggccaataa

SEQ ID NO: 378875 - DNA, 122 bp, Homo sapiens
gcgggggaggattgtgactaaagtttatccataaaagagttaaccagacacatttcccaacgcacactctctcgcttttatgggaagcgccctcagcaaataaaccccaggatatcaaattt

SEQ ID NO: 378876 - DNA, 122 bp, Homo sapiens
aaagggactctgggcagggctggcttcacgggcgtgcgatctgtgaagtcacagagggcccgcacttaaaaggactaacgcgctgctgttgcactcttgaatttgaacaagggtctctgcat

SEQ ID NO: 378877 - DNA, 122 bp, Homo sapiens
gaagtgatggagtgagctgagctgccaggcttcctggagtgattcttggatgctgggtcacgtggttaggggccctgatgggactgaactggaaggaaccagaataggacagaaccaagccc

SEQ ID NO: 378878 - DNA, 122 bp, Homo sapiens
aacaaagctcaacatttttggattaataaatactgttttgagacatcagtatctgacaatcgctttcataaacaaaagacttgtgcaaactccacaattttgcttcagactaagccaaactg

SEQ ID NO: 378879 - DNA, 122 bp, Homo sapiens
tatttatggaactttgttacagcagccccaggaaactaacacaagggttctgagtgcagtcgggctctggtgcctttcagaggctccgaggttttgtttgtatcctagtaaaacaccttttt

SEQ ID NO: 378880 - DNA, 122 bp, Homo sapiens
gctgacttttggaagcgaggggagactcagggggtgaggactatactgggaatggcttcccggagcagagagagcacctgcttcagcaccacccagatggatagtaccagagccagggagca

SEQ ID NO: 378881 - DNA, 122 bp, Homo sapiens
gagctcacagtcccagaatgttccaccatatcatccctcctcccccttcctcaggatatgcgcccctagagagcaggaactatgactttccgtctgagcttccaacccatttgggtcaaggt

SEQ ID NO: 378882 - DNA, 122 bp, Homo sapiens
cgagatttgggggaacgaagccggtgcggcgagcggacggaaactgggaggaaggcgcggcggagtggaagcgcgagcccagaacttaacttcgcggggccatccacatcgaggctcctcgg

SEQ ID NO: 378883 - DNA, 122 bp, Homo sapiens
atggggcaaaataatcagggtggaatcagagtctctcagggtcaaacttggttccagctgcgtgtggtgaaagcaactagaggcagagctatcaagggctgtgacagatgagcagtggtctg

SEQ ID NO: 378884 - DNA, 122 bp, Homo sapiens
ggcatgcgtgcacacaggacagcgtgtgcatatggagcactgacagcagatgcatgaacacgttacctctgctatttcactcttgcaaaattctgtggggtgtgtgtcatcatccccatttt

SEQ ID NO: 378885 - DNA, 122 bp, Homo sapiens
ctgctgtgctgactgtgactgattaggagacactgttaaaggagagggatgactctgaatcggtgaacaatgctgtgactgggcattactgggagctggaggaaggccatggttctggagtg

SEQ ID NO: 378886 - DNA, 122 bp, Homo sapiens
tagatgataaaagccatatgcaggcattgaagtgtaaccagcaaggttgttgctgtctggcgatatgcaagaggaaagatccatttcagagcccgtgacacaatttactccagcctccacgt

SEQ ID NO: 378887 - DNA, 122 bp, Homo sapiens
gaagagaagagagaggacgggggtgcaggcagcacagagaaggtggaaccagaggaggaccgggagctagcccctaccagcagggagtccccccaggaaacaaaccctccaggagagtcaga

SEQ ID NO: 378888 - DNA, 122 bp, Homo sapiens
gaggaggcctctgggctgtggagcgaaagtcagatccaccgcctactgcggggtaggggccgcagtggggaccgccagccctgtggtccctctcgcgctgactggcgtaaagttgtggccga

SEQ ID NO: 378889 - DNA, 122 bp, Homo sapiens
tggcagctgcgcatgaacttcccgtacttctacgtcgcgggctcggtgatcctcaacatccgattgcaggtacatatttagagccatgactaagctaacggcctccggggccagcatgatgg

SEQ ID NO: 378890 - DNA, 122 bp, Homo sapiens
gtgtgtcttcaaacagagcaattatcaatatacaagtttatatttcaagaaacctgctaacgtattactcttcagaagataatgatacacataaattgtaagtgtttcctggaaaagctatg

SEQ ID NO: 378891 - DNA, 122 bp, Homo sapiens
agggaaaactctgcccagataaaagacccgcccagggaaagccccgcccagaaaaagtcccgcccagggaaagccccgcccagaaaaaaaacccgcccagggaaagccccgcccagaaaaaa

SEQ ID NO: 378892 - DNA, 122 bp, Homo sapiens
ttttatcccacctcttggtgccagctccaactgcccccttttcatatctcctcccctgggcgccccaggttcactggccataacttgctgtgttagcacaaaaatagcccttccctttcagc

SEQ ID NO: 378893 - DNA, 122 bp, Homo sapiens
tttacaattccatactttctgtataccctcctcagtttgctgagtcgcctgaatgtctttcgagtataaaattttactgccacctactgttaacttttaagaactgcaacaaaatgagggca

SEQ ID NO: 378894 - DNA, 122 bp, Homo sapiens
gggcattggagcagctgctcctgcagctgagaagagcccagagctgctgcggaggcaagacgccgcgacagccagcggcgagagcggctttatgaagtaccgggtaaccgccggatgggcgc

SEQ ID NO: 378895 - DNA, 122 bp, Homo sapiens
tctactcttgttcccttggtttgtttatccctgcaacggtgacaaatgtcttagttattacggctttgtaataagtctcaatacctggtaggccatgtcatcccatcttactcttttgcaag

SEQ ID NO: 378896 - DNA, 122 bp, Homo sapiens
gcgccctccccagggagatggtggggaggccgggcccaggcaaccggggcggggccggggcgccaggcctggttgcaggcgctgccctcgggggcctggggattcccagggggctcctccgt

SEQ ID NO: 378897 - DNA, 122 bp, Homo sapiens
accactgagttgcacccagagcttgcattactgagcgctttaccagttaggaaggtttcgcgtattccgtactttaaatctaaggtgacttgactgtaaggcctgcgagtatttcctggacc

SEQ ID NO: 378898 - DNA, 122 bp, Homo sapiens
ccaagcccgcctgatctacctttccctaatcaaacccacttttctgtggcacactttccccgctttgtggtagtgaatgattaattcctctgctttgcctccagacaaaaaccaaaccagcc

SEQ ID NO: 378899 - DNA, 122 bp, Homo sapiens
aaagcaaggggcgagcgcgagtgcgagtgaggcaaagatagagcgcatgtctcatccctgcgagcagccactagacgctccaccaccatcttttgcatgtgcaacatttgcagccggacaga

SEQ ID NO: 378900 - DNA, 122 bp, Homo sapiens
ccataaaattctcagcccttccctctgcctctggcctctaccccatttccatgtcctccccgagcacctgtgagagggacgcaggtggcctcactggcctgcaggctcttagctttcctggg

SEQ ID NO: 378901 - DNA, 122 bp, Homo sapiens
gcatatattctgtcagtgaacctgacaagagaattatggttgagtgacctacacagttgtcgcttgtaatggggctggcagcttggactctgcctcaagggaaatgaggagaaaaaaaaaat

SEQ ID NO: 378902 - DNA, 122 bp, Homo sapiens
ttacagctagcagtttaaatccataatttttccacccacaatccctctttgacattccggcggtgcggccggctcagcgagactgaactaaaagtctcacacttcattgaacaccattatgc

SEQ ID NO: 378903 - DNA, 122 bp, Homo sapiens
gtgtgcgcccgctgggtgtgtgcccaacagtggtgtgtgcgcccgatgggtgtgtgtgcccgacagtggtgtgtgcgcccgccgggtgtgtgcccgacagtggtgtgtgcccgacagtggtg

SEQ ID NO: 378904 - DNA, 122 bp, Homo sapiens
aaaactaattctgattacatcctgcattgttttgttgcaaattcttaccagttatttttacgcaattggagtgtccttaaaagtggtgaatcttaaaatttgccagtggattggaaaaaact

SEQ ID NO: 378905 - DNA, 122 bp, Homo sapiens
ttgtacccctgggccggcgtgtagcgggaactcccatagtgggcttataagagggcaaagcgagtctgcacaacagctgaaaagcattaagctcagagacctcagagtcatctctgggcaaa

SEQ ID NO: 378906 - DNA, 122 bp, Homo sapiens
aagcccagggctcttttcctgacactttcccttttgttcccattgtttagacggggccaccgaggcttcaccatgagaccgacgctgagcgcctgttccgggacccaggctgtgggtcaggt

SEQ ID NO: 378907 - DNA, 122 bp, Homo sapiens
accaagcagcacttctgcagtaccctgttggttggaatagttgtagcccaaacccgaattcgaagggaggagaatagataacatccctgggtgacaggaatgtcaaagtcccaaacagcata

SEQ ID NO: 378908 - DNA, 122 bp, Homo sapiens
gttcaattcttggcccctgaagttagcggaagggaacgggcatgttttggaaaggcccgccgggaattccctcagaaaccaggcgaagctccctgctgggccaggcccccctcgtgtgcttg

SEQ ID NO: 378909 - DNA, 122 bp, Homo sapiens
gcgtgcgcagcttcagaggtgcagtttggaactgccctccccctttcagtgtaggactggcgacactcctttcttcctgcaggtagcaatctccagggacctccctcaaccctgtggagggc

SEQ ID NO: 378910 - DNA, 122 bp, Homo sapiens
agtcgttgttatgtgttatgtatttatgtggcatccaccacacgcctccgagatcctgggcgttttgaggttaaaaatgttcaggcttggagaacctacccctggaggagtgttagggtttc

SEQ ID NO: 378911 - DNA, 122 bp, Homo sapiens
taaaacatttcgcgatgaacacagccagagctacggtttccttccatccggcacaagaagcgcttctctgcccaaggccaccccgtcctccattccatcgcggggactttggtggctgggac

SEQ ID NO: 378912 - DNA, 122 bp, Homo sapiens
gctcaggctccctctgtcccctaacccagacgccgcgatgcccggcccttggttgctgctcgctctggctttgaccctgaacctgaccggtgtccccggcggccgtgctcagccagaggcgg

SEQ ID NO: 378913 - DNA, 122 bp, Homo sapiens
ggagaggtagccgcagagtggacctgcaggtacttggatctccagtgggagctgccctctcgaaggcaggacagcggtggcggcaggtacgcgggggtggggatagggcccaaaaggaaggc

SEQ ID NO: 378914 - DNA, 122 bp, Homo sapiens
gggccctaggatggatgacactcaagatactacagatgtgggtgcaggcatgcacacacacgatggaatatggccattcctacacaggtggggtagagagtgggtcagcagcctggcacctc

SEQ ID NO: 378915 - DNA, 122 bp, Homo sapiens
tattctcatgctgctgcaaacagcgggtctccctccacattgccctccctgatcctaccacgcacaggaaaggattaatccatccctgtggtttgaagccaatgatctggaagtgggtggca

SEQ ID NO: 378916 - DNA, 122 bp, Homo sapiens
gcccagcaccgggaaaaacaggactcctgattcccttgctcaggaattgggagtgcgggtcgcttctaagggcgctttctgctctgtaatcccagcgctttgggaggccgagacgggaggat

SEQ ID NO: 378917 - DNA, 122 bp, Homo sapiens
ggtcccacgcagctccagttttgtgaaccactcggctccgtgtaactggtcaaacagttccggaatcatctgtatgtagtcctgtctgttggtcagcatgtcctgcaggtcccagtattcct

SEQ ID NO: 378918 - DNA, 122 bp, Homo sapiens
tgccccacggggttccggctctgcacccagccccgccctgctctgtggcccacacggcggcgattacctgctggaaaggggaccaagggaaggaaagagcgtgaaggcctgaagtagtgtgt

SEQ ID NO: 378919 - DNA, 122 bp, Homo sapiens
gccgtgagcgcgggtccggtctccggtgacgtggcggtgaggaggcggagccaagatcagcggcgggagggtgggggaggaagagcgaggtgagcgcggacgtcagagtggagagcggaagg

SEQ ID NO: 378920 - DNA, 122 bp, Homo sapiens
gggaaggggggcgagtgcacccaggtattggggggagcatcaaatcggagtggagggggccggtgtcaccgagctatccccaaacctcgaacggccaaggccgagtcacccccgccccaccc

SEQ ID NO: 378921 - DNA, 122 bp, Homo sapiens
ctgagaagagaggtgaccgtggctggaacaagtgggccatctccccagccccggcaaccacggccacccatttgcacccctgcgcccattttgcagatgcgaagattgagtctccgacgggg

SEQ ID NO: 378922 - DNA, 122 bp, Homo sapiens
tccccacaagcagagggagctggctcccgcattggccagcccagagaggggcccccagagcgcagtgtcgggctgaagggcttctcgagcatgcccagagcggacgccgaggccgaggaggc

SEQ ID NO: 378923 - DNA, 122 bp, Homo sapiens
ctaagcctcacatgtttaaatctatcccattagctattcagaagcatgctaaaaataaaacgctaaggcatgcaatgcctgaaaaatactttgtttatacttcccttttccttctgcctcac

SEQ ID NO: 378924 - DNA, 122 bp, Homo sapiens
gttgccagtagtgttacaggcctgataatgatctctgtgttggtaggaggtcttccactccgggtctcacttctttcttttcatccctgctaatatttcctgggatcatctcccaaataaac

SEQ ID NO: 378925 - DNA, 122 bp, Homo sapiens
ccacgcccctgacggccaatgaatgaggccgtcggccacactgccccgcccccggcatctcggctttgcccaataaggaccacccggagggtttaaccgcttcgctcctggggctctggcaa

SEQ ID NO: 378926 - DNA, 122 bp, Homo sapiens
cccggggctaaacagcaggtgattggttgatattgacagccaatgcggctgcgaggagctcgggcagaccaatcacaggccggaaggggcgggacctcccacgccgaggatagattgagcgc

SEQ ID NO: 378927 - DNA, 122 bp, Homo sapiens
gagctcccaagtgctctccaggaacaccaccctcccagcacctatgcatgttcagtgacccggaagctcactgaggattgttcaagagtttttacagagcttaatctctatcgcccctctcc

SEQ ID NO: 378928 - DNA, 122 bp, Homo sapiens
acctgccggtgtgtgtctctggggccagggtcagggcgaggcccaggggtggacaggggccgtgtagcatgccccagcctccccaagctcctgctgtatgtcgtccatgtcacgccaattaa

SEQ ID NO: 378929 - DNA, 122 bp, Homo sapiens
ctgcggaaggatggagctggccgccggaagcttctcggaggagcagttctgggaggcctgcgccgagctccagcagcccgctctggccggggccgactggcagctcctagtggagacctcgg

SEQ ID NO: 378930 - DNA, 122 bp, Homo sapiens
cgggccagtggctgcggagggtgtactgggtcccccagcagtgccagcccaccggcgctgcgctggatttctcaccgagccttagctgccttcccgaggggcagggctcgggacctgcagcc

SEQ ID NO: 378931 - DNA, 122 bp, Homo sapiens
gacggtttatagttcaaaagagccaggaaagcttcccttctgcatttattccagtaaattcgccaacccttctcgaagggagttcttgctagcccctaactaaaatttcccccacctccacc

SEQ ID NO: 378932 - DNA, 122 bp, Homo sapiens
ttctgaaattctgggagtgtctccctagccgggtccctggctggcctctgccagctcctgcgagacttaggcctcggtttccttttgatagccgtggacagtgcaggcaggtgcccatctga

SEQ ID NO: 378933 - DNA, 122 bp, Homo sapiens
cctgctgggaaatgcctttttggaagatctcggggacagggtcacccagggccggctatgcgctcaccaggcactcctcccagggcgggccatctccctcctggcagcctgggagtggcact

SEQ ID NO: 378934 - DNA, 122 bp, Homo sapiens
attgatcccatatgtctggcaggagctgcagaggaattcactggagatggatccagataccgagagtgccacagtaattggaaacactttgtagacgaaaacatacacgcggactggccagg

SEQ ID NO: 378935 - DNA, 122 bp, Homo sapiens
taaaatattgctgtttccccaggcagggcagatattgatttttttcttctctaaccattccgattgacccggctcccccacccagcgaatgggggagggagggggtgggggtgaggaagtgg

SEQ ID NO: 378936 - DNA, 122 bp, Homo sapiens
gggggtgctgatgtacgagatgatggctggacagcctccctttgaggccgacaatgaggacgacctatttgagtccatcctccatgacgacgtgctgtacccagtctggctcagcaaggagg

SEQ ID NO: 378937 - DNA, 122 bp, Homo sapiens
cccctcaggtgggggtgattcccagggtgcacccctgggctacaacattggggagaggagcgagatcgcggaagccgagggtgcagagttgcccttttaagcgccctccaccccctcgcctg

SEQ ID NO: 378938 - DNA, 122 bp, Homo sapiens
aattacgaaactctctgtaaggtttggggatgaggaattaggtagaaagctgagtgggctcgtggttggcaggtttagatggcatttgtaggattctttggaattaggaggcaatgtatgca

SEQ ID NO: 378939 - DNA, 122 bp, Homo sapiens
gcccacattgcctgggcccccaagagatgcggtgagaggggcttgcctggagctgaagggcgtgggcctgattgaggtggccggggtgtgcccagacatgcaggctgagcccagccaggtcc

SEQ ID NO: 378940 - DNA, 122 bp, Homo sapiens
ggaagggagacttgatgtgtattgctatcctcgcagcgagctattctgtgtcacccctgacgccaccgtacactcactccgccttccagcgcgctcccgcgcgcgcccgcccagccacctcc

SEQ ID NO: 378941 - DNA, 122 bp, Homo sapiens
ttcttgctgtgccataacatggtggagggcacatatgcaagagggcaggagagagagagccggagagagcttgcctctataacaaagagataagcaactcactcccacaacagcgacattaa

SEQ ID NO: 378942 - DNA, 122 bp, Homo sapiens
tcccctcccccaacctgtgggcccacagctcgccagctggcccttgaacccacttccctgcgcctctggctgcctcaatgtcactggggattagtgtgcatttgcggcttttggcggacact

SEQ ID NO: 378943 - DNA, 122 bp, Homo sapiens
acttgtttctatcttaatccagcaagttgcatcgagttgtcattgttcctccttccaaggcggaggtgacaacggtgcacatcatccgcgaatacgtggaaggacagacacacaccagggga

SEQ ID NO: 378944 - DNA, 122 bp, Homo sapiens
cttagctcttgacagaagtcaccctctaaagttagatctgagcaaagagtcttaattggccgatagatcccaagtgacttttggttcacatatggagagcagttttgttatgtcaaatccca

SEQ ID NO: 378945 - DNA, 122 bp, Homo sapiens
ccgactcgccctcgcggaaggacagctcgtccccgaactcggcgctgtagtcccagagagcgtacactgccccgctgttcatcagccccatactctgctcgacgtctgaaacatgccacgga

SEQ ID NO: 378946 - DNA, 122 bp, Homo sapiens
ggcccccttaaggttgaagcttctttagcagcttacaccctgcagaggccgaaacggagacgagtgtggtagtgatggggtttcacgactctgccgtcggtggcgaacggtgtccgtggcaa

SEQ ID NO: 378947 - DNA, 122 bp, Homo sapiens
ggcctgtaatcccagctactcgggaggctgaggcaggaggatcacttgagcccaggaggtcgaggctggagtgatgcaatctcagctcacccagcctgggcaacaagagtgagaccctgtct

SEQ ID NO: 378948 - DNA, 122 bp, Homo sapiens
ggtgagagctggaatctctgcacgggccttggtgagtaactgctgcgagttctgttcccgcgcggcgccagttcaaagaacttaggttagatcacgcttagggcccaacaggactgtgccag

SEQ ID NO: 378949 - DNA, 122 bp, Homo sapiens
ctcaggtgatcagcctgctttagcctcccaaagtgctgggattataggcataagccaccgcgcccggccaatgtttattcttctaaggatgtctgatatggcaaaaagttaaactgattttt

SEQ ID NO: 378950 - DNA, 122 bp, Homo sapiens
gccttcctgccccgttggccacgggccggtcttcctcgggacaagcgacaatggtgtgggcgttgtgagaaaaagggcccgcggggctgggccggctgttcgcccccgggcagccctggctt

SEQ ID NO: 378951 - DNA, 122 bp, Homo sapiens
aggaattggcacagcactcagcagacaatataagctaatatgtactctgtctacaccctgcgttttagggagtcaatcgaaagcctccactcacgtgaccactccactacccggcgccaaga

SEQ ID NO: 378952 - DNA, 122 bp, Homo sapiens
agcccttgggggctgcaaatatcagtgctgctgccgccgcccttgccaatgttgttagcccggtgacagcgagacgtgtctaagggccagtgccctggcctctacttcagaacgcagtgccc

SEQ ID NO: 378953 - DNA, 122 bp, Homo sapiens
ccagcacacccagctgctctgggtgctgacagcatgatcatctcagcaatgagtggggtccggggctcgcttggtaatccagtgattttaaaagaagttagcggccgccttgcaggatgccc

SEQ ID NO: 378954 - DNA, 122 bp, Homo sapiens
ggaatattattttgtgagcatttcctcgtgttttccaatagccttcaaagtcagtgccttcgctgctcattgtcgcacacctaagcagcaagtcattattgtactttgtggttggatatcgt

SEQ ID NO: 378955 - DNA, 122 bp, Homo sapiens
cccaggaatgcttctgagagcccaggaagctgcgtgaggcccacgctgggatctaaggtccgcctggagcctcctcatcctgtctgcaaagccccttcttactcctcccccgctcgagctgg

SEQ ID NO: 378956 - DNA, 122 bp, Homo sapiens
gcagttccccgaattcgctctcgcaggtggggctgcaaatggcctgggcgtagaaagttgcgggaaggtgttgatgtctttcgggagttctggagggacgcgggagggcgcttttttggaga

SEQ ID NO: 378957 - DNA, 122 bp, Homo sapiens
gggcaccgccccgcgcccgcccctcgtcccctccccgggcgccgaggcccggccccgcggcgctcccgccccaccgggccctgcccccagccccgggagccgccgcttcctcggcaggcggg

SEQ ID NO: 378958 - DNA, 122 bp, Homo sapiens
gcctctccgccccactccggggactgcagctacccggaccttgcaagccacccttccgagcgcccccaacccgctcgggtgccctccctgcagcgcccccaactgcccgctggcggaggagc

SEQ ID NO: 378959 - DNA, 122 bp, Homo sapiens
tgcaatttcaaattgaaggccagacagctcaggagaaatttggagagtgagtgaggcctacgcaaccccctcgagtcatgttttgtggacgaccgcccgtacttactgctgaggacctctgg

SEQ ID NO: 378960 - DNA, 122 bp, Homo sapiens
ggggtgggacgaagacgctcactttgggaggcagctcggcaatcactgcagtgagggacacgtgtcagcccggtgcccgccactcccgcccccttcggctccctctctgtcccggtggctgg

SEQ ID NO: 378961 - DNA, 122 bp, Homo sapiens
agacacccaggtaccccttcccggggtgaggcccaggcccccgtgtggccccagtctccccgtcatcctgggaggctttgaagcgggagctgcagtgaaagaaacagaagggagcccggcct

SEQ ID NO: 378962 - DNA, 122 bp, Homo sapiens
acctcgcaggcctgaagccgcccgcctcgacccggggcgtccagcgtggtgaagtgcgggcgtggagctcgccctctatccggctggaagggtctgcgttttgatttgtgaggatctctgca

SEQ ID NO: 378963 - DNA, 122 bp, Homo sapiens
gcgtgaacggggaatcctgcgattcatctcgggcttccggccctcaccacccctcaaccccgtccccgcggagctcggagccagaagcagggacaagctccctcaaccgagccaacggtcct

SEQ ID NO: 378964 - DNA, 122 bp, Homo sapiens
cgcccaagaggtccctaataaacagacacaggttactgcagattttgaactggccgtaagcgcatttcccttgtgtgagagagagtgctagaaaactaacttcaggcctctgagagagttag

SEQ ID NO: 378965 - DNA, 122 bp, Homo sapiens
tcgagagggagagagataagggactatggtgccaataagcaaatggagagttcaaacatacggaatgacactcatacattactgaattgttaaatcaccccagggtggtaactcagcctgtc

SEQ ID NO: 378966 - DNA, 122 bp, Homo sapiens
tccccctccgccactctctggtctcctttggtagctttatcattacatttgatggaagggcgactctcccctctcctattttcagctccacattaccttttgtattgtcctctccccttcct

SEQ ID NO: 378967 - DNA, 122 bp, Homo sapiens
attgagcgtcctggagagcgggcgccaggccggctgaccgcaggctgcgtgtggggtcctcgccctcccgggcttgggaccaggccgctttccccatgcgccagcccctgccacacgctgcg

SEQ ID NO: 378968 - DNA, 122 bp, Homo sapiens
agaaagggccacgcaagaactatctaccaatttccatgagagacgaatggctacctgctccgagatgagctcctggccagggacatggcggctgtgtttcatgtggtttcccccagctcccc

SEQ ID NO: 378969 - DNA, 122 bp, Homo sapiens
aaggtgagtcttagagtgactcaggcccatttcatgtgaaagacattcagaggaaagctgcgagggaagtggttttggggtctttaatatagcttattttaatcaaagcatttcagaagttt

SEQ ID NO: 378970 - DNA, 122 bp, Homo sapiens
agcgtgcattgcggatgaggcggtacacgaccgcggtgaactccccgtcggggatctgcgcgccgctcaggccagccataaccaccacggctgttatgggtgcggttactatggcaacagag

SEQ ID NO: 378971 - DNA, 122 bp, Homo sapiens
cagtctgcagaccaaacaaataagacggtaactaaaagtaacatacaagaaaacatctcccggcgctaccgtgccagtcaagaactaaatagaccaccctctgggaccacaggctcgccaag

SEQ ID NO: 378972 - DNA, 122 bp, Homo sapiens
aagttcaggccagtccctggctctgcccttcagatctttgagctgtgtgctcaggagcagcgcaagcctgtgcggctggagagtgccgagcggctggccgaggcggtgcaggagcgacagca

SEQ ID NO: 378973 - DNA, 122 bp, Homo sapiens
cccgccggcccgcgtggcccccgcgtaactctggctgcagcacctgctcccgggcgactccgggcagcccgagacactcgtgctgcgggtaagacccagcttctgtttgtgcacaagtaaca

SEQ ID NO: 378974 - DNA, 122 bp, Homo sapiens
ccctgggcagggcagcgtggggtggaagagggcgctcgacgcgcgtccgggactgggcggcgccacctcgttcccaccctccgtggggctcccggggaggcttgacttagcgaacaccctgc

SEQ ID NO: 378975 - DNA, 122 bp, Homo sapiens
cgcaaggggggctatccttcaggcctgggcaccgacttccagagaccccagatgggccctcgctcctcagcagcactccaggaatgaatggccacctccaggcaagagagctactacctcgg

SEQ ID NO: 378976 - DNA, 122 bp, Homo sapiens
ggggcacaggcagcgacctgccttcctggctcagcgacacgtaggtgaagaaggcactggcggcccggtagcgcttctgagagctgtccacaacagggtcggcgtccaccaacacctcgatc

SEQ ID NO: 378977 - DNA, 122 bp, Homo sapiens
ctcttgcattctacctgggcttgagtgcattgtagtggagagaccacgaattggatgctccgcatgatctgactggagtcctgactctgttacctacccaatagaggactttggagagttac

SEQ ID NO: 378978 - DNA, 122 bp, Homo sapiens
ccgcatcctcggggcgtgcaggtaaagggttacgcgtgtcgggaaggctcacccgcagcccgggccacgtgacgcgcgggcccaatgacagcgctggggcggccgctgcgagctcggcgggc

SEQ ID NO: 378979 - DNA, 122 bp, Homo sapiens
ctagtaaaatataacattctgaatatatgggaggtacagcacccttctatataaagttgacgtggtatgactactgctagtaagtgaaagagaatgtggggaaaagaatcgtcacaacgtga

SEQ ID NO: 378980 - DNA, 122 bp, Homo sapiens
cacagaaaaatgccaactaatacatacagaaggaatggtagaatgggaaagtcactatctcgcaaacatcataaaatcataaaaatcaagttaggcaggaagtatcaatggatactgaaact

SEQ ID NO: 378981 - DNA, 122 bp, Homo sapiens
gcatccagcctgtggcaccaacgttaccgatttggctggggcctccctcccgctgcatgacgtccacaaggctcagcaaatgggctttctccggggccacgttccatggcacgtcaatggtg

SEQ ID NO: 378982 - DNA, 122 bp, Homo sapiens
gggggactgggcaggaggggtcgggctcagggaactgcaactcccagcagcccccaggtacggggcgtggcgggagagctgggcgagccagaggcgaccggaaggatctttctagtccagcc

SEQ ID NO: 378983 - DNA, 122 bp, Homo sapiens
tgtcccccacccctccagatgctgaccctggaggaagaattgcactgggcccactggccccgggaaaatgtccctcagccaggtgcttagcccctggtaatctgaagctcaggcccttcctg

SEQ ID NO: 378984 - DNA, 122 bp, Homo sapiens
gcagcctggcctcttccagggtagcccctcactcccctctctcttgtcctaggataaggccgaggagggctgacgagttccagctctggggatgccctatcagctgtgtcaccttgaacaaa

SEQ ID NO: 378985 - DNA, 122 bp, Homo sapiens
gtgtctgtggaagagaccatctacatcgtgggggggtgtctccacgagctggggcccaaccgcaggagcagccagagcgaggacatgctcaccgtgcagtcctacaacaccgtcacccgcca

SEQ ID NO: 378986 - DNA, 122 bp, Homo sapiens
gcttgtttctccatcttcactgtccgttcactgcagtgccgggtgaggccagtgtgtggccggtagattcccgggtacctcttctttgcccctccttgctgtatctggtcacacagaaatgg

SEQ ID NO: 378987 - DNA, 122 bp, Homo sapiens
gtttcaaggagccatgagtgtgtgagagagaatccccttcctctttcctccctcctcttccggctagttcaggactcccctgtgatggggtaattcagtgggtcccacttggcggagctgat

SEQ ID NO: 378988 - DNA, 122 bp, Homo sapiens
cttcctggggctgaaggaagtgagtgcagccacaggccaacacttccttggctgaccagacgacggaaaatgtgtctggctgcgttcaggtgtttttccaagtttgaaaccctggaaagttt

SEQ ID NO: 378989 - DNA, 122 bp, Homo sapiens
ttaatctctgtgtttcagttccctgtgtgtaaagtgtggatagtaacagcatctacctgtcggttaaaggagttactatgtaaagacagtacactgatgcttggcgcaaaagggtaagtgct

SEQ ID NO: 378990 - DNA, 122 bp, Homo sapiens
cctcagagaggaatgtgcatcttttgttcttagctactcagcttcggccgggtctggcggcgcctttgagtaacatgggcaacgcgcgccctcttctggacaatccactaattgcaaattct

SEQ ID NO: 378991 - DNA, 122 bp, Homo sapiens
ggatgaggaaacaggctcctcagaacaagagagctgccaaaggactcaattagaggtcaccgagctgatatttaaaacttgatgctgtgctgtctccactgtgtcggttggctgggatggaa

SEQ ID NO: 378992 - DNA, 122 bp, Homo sapiens
caacaccgaaacaaaggcctttaattggtttcagagttttaagaaaacttgttaagcaaccggactttgagagcaagcagaaatgggtgtgaatcaagacatcccaaatgggtgaccttgtg

SEQ ID NO: 378993 - DNA, 122 bp, Homo sapiens
ggctgaggccagcgtggtggagggagccagcgggagcgctgcactttgatgggctctgagcgcctccgggcacccgtagttcagctgcttctctccacccctccaaagggcgggagagacag

SEQ ID NO: 378994 - DNA, 122 bp, Homo sapiens
agtgcttagaggaaaggcacccagtatagacacaaagtttgcaaaaatccaaaatgcccacggaacacctgccagtcaatttttagttgtgaagaattatgtttatataatttattacaatt

SEQ ID NO: 378995 - DNA, 122 bp, Homo sapiens
agaactttgttcattctcattgttctctcctataggcttcaccttgttgacttttgtcagcgatttaaacatcttctctgaggtggttctgaaaaccctctgtatttatgactgtgccttaa

SEQ ID NO: 378996 - DNA, 122 bp, Homo sapiens
tcctggcctgctgagggaagctgcgtggggctgcgggcggaaggttccctgccccaagcccgtgagagggaggacgggaagggcctcggccgggcagtctgcaacaccagcctctcagctgc

SEQ ID NO: 378997 - DNA, 122 bp, Homo sapiens
gccttgtcatacttgcttccttccctttcagtttacatatgctcctttaatccctgttcccgcctcgcacctctgcctggctctacttgcaagtcacaggcctccgttcctctttgcctgca

SEQ ID NO: 378998 - DNA, 122 bp, Homo sapiens
tataggaaggagaatgtcttcttttgtatgtgaaagcatccaatggcagcattagtgtggcgcttgtgacagtaatattggagctatatatttagctactctctatagcaaatagttgcact

SEQ ID NO: 378999 - DNA, 122 bp, Homo sapiens
ggctctgattggtaaagttgctataagaagcctgagaaccatgtaatttatctctagctgcgagatatcaatgccttatgctttgtgtttgcttccaccgtgtagagttggggaaagcatat

SEQ ID NO: 379000 - DNA, 122 bp, Homo sapiens
gtgtatagacttgcacaaggatagtatggccctatagcccctcctcttaactgcactatacggcctctactaaagcgtaagtgagggaaatagaccaaacaaaactgagagtttgtgggtgg

SEQ ID NO: 379001 - DNA, 122 bp, Homo sapiens
cagctaattttttgtatttttagtagagacggggtttcaccgtgttagccaggatggtgtcgatctcctgacctcgtgatccgcccacctgggcgtgagccaccacacctggcccaaaggca

SEQ ID NO: 379002 - DNA, 122 bp, Homo sapiens
cagcatgagtcaattcgtccctggcgccaggcatggtggctaggggtacctaggaaattgcgatccttgctaggggctggcagatgcagaccaggtgcgaaggcagctgggactaggcattc

SEQ ID NO: 379003 - DNA, 122 bp, Homo sapiens
gctggagggacagcgacctgggccgggtgctgaggcgaggctggagacgccggagcacggcgcggcggaacaggatatacacccaggggtccaggatctggttccaggtggccacgcgcaag

SEQ ID NO: 379004 - DNA, 122 bp, Homo sapiens
gaaccctcacgggctaaacccctctttggggttcacctgccttgcatcaagatgactacccggaaactggcagtatccagctattgtcatccagttaacaccctccagatcttccctcccag

SEQ ID NO: 379005 - DNA, 122 bp, Homo sapiens
aggatgtaaaaaagcttattctcaggcaagagaccctgagctttgccctcccaggcctaccgcaggatgttatttgtaaaatgctttcttctcagctatactcacaaaagtgattaccagca

SEQ ID NO: 379006 - DNA, 122 bp, Homo sapiens
ttaagacttgcagccacttgcgtgcataaacgtgaagggaatcgcagcttgcaaagctctcggccagggaacatgagcttcaaataagagggcaaatgctgtttttaaaaataatatttcct

SEQ ID NO: 379007 - DNA, 122 bp, Homo sapiens
ctgccaaaccacgtgggtatgctaagatttcaaagttcctccaagagtgaatgatttgcacgtgtgaggactaaaccttaaaatgtgacaatcccttctttattttacaaatcaggctttga

SEQ ID NO: 379008 - DNA, 122 bp, Homo sapiens
agaaactgatttattttcgtcattttcacagcggccaaggtacatgaggatgtagcttatcgcccttttaagggactctcccacgttcgactctaagcggaagtacccgctcagggctccgg

SEQ ID NO: 379009 - DNA, 122 bp, Homo sapiens
ttcagtgacgtgatgtgagttaggcagacaccttcagcctcttagaaccacagtcatgttcggcagtgttcagaaatctgcatttttcctggatttattccccatgaacactccacgactta

SEQ ID NO: 379010 - DNA, 122 bp, Homo sapiens
agatcctgcacggatacacctgcactcctcagtccttgggcggtcgatgggactgggcgccgtggagcagggagtggtgctcggtggggcgggggaggctcaggcatggcgggctgcaggtg

SEQ ID NO: 379011 - DNA, 122 bp, Homo sapiens
ctcgtagcagtaggtgggcgtggtggccgtccacacttcgaagttgtgtggcgtcgtgcacgagatggggtagattaaggcttgcagggtcttcttgtaaacgtggtttttctgcagggagg

SEQ ID NO: 379012 - DNA, 122 bp, Homo sapiens
caagaaaagacttttctgtgaggacaccattcctgcccaccactgtctgtcggcaatggacgagagatgccacagctgcaccactgcctccagtgacttgaaacacagtgttgtgtggctgc

SEQ ID NO: 379013 - DNA, 122 bp, Homo sapiens
ccggcccgctgaggctctcccggcgctgcgtccacagggccttcacctcctccgcgctcgcgcactctgggttccagttgcctctctcgggtcctgcccatgcctcccccgctcctaaccca

SEQ ID NO: 379014 - DNA, 122 bp, Homo sapiens
aggtggctcagagcagcccttgccagccctgagaggctcagcaaggagctcaaggtcacacggcaagcagaaactgccagtgtctccctgcccggccagggcggctcccgctttctggcctg

SEQ ID NO: 379015 - DNA, 122 bp, Homo sapiens
cccgtggcagagtagcccccgccctctttcttctttcccccagtcacttccccagcgtcccgtcctactctgagccccaggaagtgtgtggtgtgtgtgtctgcgtgtgtgtgagcatgtat

SEQ ID NO: 379016 - DNA, 122 bp, Homo sapiens
gcctgtcttcagatgtgagttggcaatgatttgtgtctctcaaaagccatcgtcgggcatcgtgtttcctgaataaaagaagcttcccttaagaagtctccgcctttgaactaagcgcgctt

SEQ ID NO: 379017 - DNA, 122 bp, Homo sapiens
cctggatgggaggcggggagggttcatgtctttgaggggtggggggtctggggggcacgacgctgctcagggcctctatcagctgcctcgggggctcagggcttcccgacctagcccagatt

SEQ ID NO: 379018 - DNA, 122 bp, Homo sapiens
caccaccgggagaggtctgttctccagggggcaccaagcagtaggcctcacctgaaagagcgatcggacagatgcaggggccggggtggccgcggcggcttctccgggggccggtgctcccg

SEQ ID NO: 379019 - DNA, 122 bp, Homo sapiens
accagcccctgccctagagtcaaacgtgttcattcggtcagcaaatgggccttgcgcacccggcagccacggattccgggctaccgctggtgccgcaggtgagcgaggcaggtgtgtgcccc

SEQ ID NO: 379020 - DNA, 122 bp, Homo sapiens
tgtgtgtgtgtggacacattttccttttcggttgctctgtcctttggttcgtgctcgcctcgctttttccacactcctgctctctggctctctgtgtctctcgctctttcgaaaattttcct

SEQ ID NO: 379021 - DNA, 122 bp, Homo sapiens
ggccattaatttatttctctctcattcttagcaaactgtgaagtcatccaaaggtggtcccggatcagcggtgagcccctatcctaccttcaatccatcctcggatgtcgctgccttgcata

SEQ ID NO: 379022 - DNA, 122 bp, Homo sapiens
ccagacacaagcatctgaggatggcacctgcagcccgagacctgcctggggagcagcaggcggccctagagtgggagactgtcaaaaccagagggacaaagcaagaagtgggcctcctgggc

SEQ ID NO: 379023 - DNA, 122 bp, Homo sapiens
acggctccaccctctctcccctggaaaggacaccatgagcactgaaagcatgatccgggacgtggagctggccgaggaggcgctccccaagaagacaggggggccccagggctccaggcggt

SEQ ID NO: 379024 - DNA, 122 bp, Homo sapiens
cgcagattgcgggggagtcccacctggagccggggcagccgtgaactaccgaggaggaggcggaggagacggcggctgttccagaggagggagtcgtcataaccggctactgccgctcaccg

SEQ ID NO: 379025 - DNA, 122 bp, Homo sapiens
accagggccagggaaggagggcaccaggacgggcagagccaagggggttctggaagtccccggccctggtgggagagctcctctcttaggttcctggttcagaaaaggcacctggggagggc

SEQ ID NO: 379026 - DNA, 122 bp, Homo sapiens
ccgtggaaaatgtgtgcaacaaacagatgagacgtctttgttactaatagggaacatccacgggtgaaatatgccaattaaagtacagcacaaataaaaaagacccaaggataaaacactag

SEQ ID NO: 379027 - DNA, 122 bp, Homo sapiens
ccctcgactgtgagcccctagggttgtatactcacctcgcatgcaagtttgaggattaagcgacataagctaagtaaaatgactggttggtgcttaataaaatgtatcactattattcacgg

SEQ ID NO: 379028 - DNA, 122 bp, Homo sapiens
cactccatacagtttgctggctgactgaagaaatgaatttcaggggcaaggactcctttgcgccttcccaaatgtattcatttattcaattcaataaatatttgttagtcccaatttatgca

SEQ ID NO: 379029 - DNA, 122 bp, Homo sapiens
ctgggagcgaggggccctcggctcacaccctccacggtcaggtgcgcgcggcgtgctcggcggcagcctcagctgcccctgcgcttggccgtcggcccgcttcccatggggtgacatccgcc

SEQ ID NO: 379030 - DNA, 122 bp, Homo sapiens
ttttggttataaaaccggaagagtgtttaacctaatgtcctgctgcgggcttgctttccacgggcctccgggtctgttaaaatgatcaggcctcattatttaggaagctgcctcagccaggc

SEQ ID NO: 379031 - DNA, 122 bp, Homo sapiens
cccgcgagtggcctcgcgcccagaccgtgcggggggctgttcgggtggaggcgggggagccgccgggacaccaaaataggagctgcttgtggggtggagcggcactagctggcggcttccga

SEQ ID NO: 379032 - DNA, 122 bp, Homo sapiens
cccctcctaatgcgcgcatccgctgtataaagtgcgactgcttggagagcactctagcctcgtctaaagcagctctgggatttcgacagagctgggctcagaagccagttgttggcgctgtc

SEQ ID NO: 379033 - DNA, 122 bp, Homo sapiens
aagaagtgccacaatatgccatctgcaagtaggagacccaggaaagcaggtggtgtaattcggtgagagtcagaagggttgaggatcaagggagccaatggtacaactcccagtctgaggcc

SEQ ID NO: 379034 - DNA, 122 bp, Homo sapiens
cttggggggctcccccagcagtgagacctgtggcgggaaggcaggattcgagagggcccccgggagagggaaccctgcggaacaggaggctggtgtggtgccgcgcgcagggcagggcctta

SEQ ID NO: 379035 - DNA, 122 bp, Homo sapiens
tgctatgagcagtggtcacgacggcgaggcagtgactcagagaggagccttcctgcagagcggagacgcccaccccaacccacccggccagcatcagcggctgacttcgagtccccttcccc

SEQ ID NO: 379036 - DNA, 122 bp, Homo sapiens
ttgccagttggatccctttcctctgaaaatgctctggcttttctgtgccttctaaaaatgcgaggtcacaaagaatctttggcttggccagggaagattatattaggttggtgcaaaagtaa

SEQ ID NO: 379037 - DNA, 122 bp, Homo sapiens
gctagcaaagagcaaggaaagagagaaaacaacaaagtggcgaggccctcagagtgaaagcgtaaggttcagtcagcctgctgcagctttgcagacctcagctgggcatctccagactcccc

SEQ ID NO: 379038 - DNA, 122 bp, Homo sapiens
gggcccgcgtggatctctaaggtgagcgctggcaggccggcgtgtggcaggcaggcaggccgcgagggctggcaggagagccggtcgcgtgccgggtgtgggcgggcgcgtgggccagacag

SEQ ID NO: 379039 - DNA, 122 bp, Homo sapiens
cagccactggtgacctgtggtggacgtagaatgtgggtaagagataaacttatgctacaccgctggggttcaggggctaatttgttaccacagcatagtcaaccttttctagcaccccattc

SEQ ID NO: 379040 - DNA, 122 bp, Homo sapiens
tcaacaaactgccagcaagtgcaagaccgaatgaacaaaaccccacatttcctgggcccccgagccttagggtgagattttttcacaagctgccagcacctaagctgtttaggaagcttgca

SEQ ID NO: 379041 - DNA, 122 bp, Homo sapiens
tgcgtagatgaacaatgacctcagacaaggtcaaccagctcccgccaaagaacagagtaccgggccctgggacccctgcacaggtacgggccagaaaaccagcgaaccttcttcacctcaca

SEQ ID NO: 379042 - DNA, 122 bp, Homo sapiens
cccacagcttctgctttaggcaatggggacacctgggaaacacagtaagtttctgctccccggaacactaagtcctcacgtgggaatcccaacaaagatggctcagaaaatgaagggacacc

SEQ ID NO: 379043 - DNA, 122 bp, Homo sapiens
ttccatattgcttccgtagcttgcaatggatgcttaggacataacgatgtcttacatactcggctgtgggaatgtgatgtcagaatcctcagggctggggtgtgggtggtgttgtttgccta

SEQ ID NO: 379044 - DNA, 122 bp, Homo sapiens
aacgcgcccatccttgctccttgggaaaatgtggatagttaacgtgaccaagcaggacagcgcggcagcctccctcgtgttaaacccacgttgtactcatcctgggggtgcctaaaacgtgg

SEQ ID NO: 379045 - DNA, 122 bp, Homo sapiens
actatttaaccactggctctctggggagaaaagtcctgatttgaggtgtttgccaatttccgcagtgtaaatactcccagcattgctgacttcaggctacagggtggcattgctgaacccag

SEQ ID NO: 379046 - DNA, 122 bp, Homo sapiens
cgggataggcttcacctctgcctgtgctgcgtgcctgcccctgtgtccgggaggtcagggcgccctggtacctgagctgggcctgctgtcgctgtccagggcctcccctgaggctgtgccca

SEQ ID NO: 379047 - DNA, 122 bp, Homo sapiens
ccacagagaccgaatgcatcaattgtttcacttatggaacattctgggctctgagaacctcggagtaggagtgaatcaatcgtacatccaagcagataacagctcaaatcaccagctcagca

SEQ ID NO: 379048 - DNA, 122 bp, Homo sapiens
tgcccctcttggtcccctgaatgtggcctccctgttcttctgaagccactgatggcctgacgccatggtggtattgaatgggctccgatcaggtgacatccagcctgctagccctgcacact

SEQ ID NO: 379049 - DNA, 122 bp, Homo sapiens
tgagccgagtgcaggtggctccccgggcaggtccttctcctacaaggcagtagtgtctgtcgccggccgggccgcgttggattccgcggcccgcgggagcatggcctccaggcccctcttcc

SEQ ID NO: 379050 - DNA, 122 bp, Homo sapiens
agattgcatgtttatttacttagaaagactttaggggaagccaatggagactggaggggacggggcaaggccctcccaaaccactccttggcaatccctgcctaagatggcttaacccctca

SEQ ID NO: 379051 - DNA, 122 bp, Homo sapiens
caggagacgagtcaagccctcatcctggtgctgcactgctgaggatccctggtgatcaagcggcagtgtcaggggctgaggctggggcaggctgctctctctgtctccgccagaggcactgt

SEQ ID NO: 379052 - DNA, 122 bp, Homo sapiens
gactatagtccgttcgagatcctcgaaggccggggaagcgagtcttgtgaggagagaaagcgagtgggcagccagcctgccgactccactgccgctggctggcccttctcttccctctgtcc

SEQ ID NO: 379053 - DNA, 122 bp, Homo sapiens
tcgctgctgccgccaagggtctaaggcctacctggcccacttgaagacaaagaacgagaacgttggtgctttgcccacttctgctctgccggattatgctgcagcttcctcggtggccgctc

SEQ ID NO: 379054 - DNA, 122 bp, Homo sapiens
taggaatgtagccgggtaaaggaggaaggctgcttcaagtcaaagggcatccatggtgggcgccctctcaggcctggacccagcacctgcaggagtcggcccctttaattctcctctgccgt

SEQ ID NO: 379055 - DNA, 122 bp, Homo sapiens
ggaggaaaaatacaccaagtgcttttgctgtggacagcagtgttatggcaagcccagcaccgcacacccttttctgaccacggcacctccatcttccttgggagaccacctccccaccccag

SEQ ID NO: 379056 - DNA, 122 bp, Homo sapiens
aatgcccatacggtttttaaagactcaccctcactgcctgctcacaggcatcgtgtccgccgaccgtagaacctgaaatccgtagtaaacacccctccagcgctttggttcagctcagctcc

SEQ ID NO: 379057 - DNA, 122 bp, Homo sapiens
aacaaacaagctaggtgctaattaataaagatacgagttttggccgggtgcggtggctcacgcctgtaatcccagcactttgggaggccgaggcgggcgaatcacgaggtcaggagttcaag

SEQ ID NO: 379058 - DNA, 122 bp, Homo sapiens
ggtggtgatgatgacaccatgtcagtcattagtggaatcagcagccgggggtcaacagtacggagtaaaaaatcaaaaccatctacaggaaaacggaaagtggttgagggcatgcagctttc

SEQ ID NO: 379059 - DNA, 122 bp, Homo sapiens
gaacgggggagcttcgggcgtagagtgtggggagtgggggatctggtgcaaattagggtgcgtgaaagaagtcacaaaaagcgcagaggccaggcttcccgccctaatccggcctttgtctc

SEQ ID NO: 379060 - DNA, 122 bp, Homo sapiens
acccgacttccattttctctcgctttaaaggaaaaccagatcagctgttttgctcccgctcgggctccgcggccccctccccagctgccgctcgcggtcccggtggcctctcctcccccgcc

SEQ ID NO: 379061 - DNA, 122 bp, Homo sapiens
ctgggcttggccaggggcccgaatttccgcctggggagtgttggatccacatcccggtgccggggagggaagcccaacatccccttgtacagatgatcctgaaagtcacttccaagttctcc

SEQ ID NO: 379062 - DNA, 122 bp, Homo sapiens
ccgggccgcccaggggggccaaaaagtttgcacttgttagcggcgacctcccgctcagcccgggcgggcgatgcgggcggcgcgggcggccccctcccccggcccgcgtctccgggacggct

SEQ ID NO: 379063 - DNA, 122 bp, Homo sapiens
agtcagccttccgcgcaagccggcgaaatcaaagtgcgtccggggttagaggtcagaggtcggagccgcgggtctttctccttcttcggccagcccaccaaaacgtcaatttagaatgagac

SEQ ID NO: 379064 - DNA, 122 bp, Homo sapiens
gcgggggagggccggcgccccgggagccgccgggcttggtgcggaagaggttgctctttccgaggcggcccacctgctgtctgacaagttcgactagcaagacattgtggaagctgccgctg

SEQ ID NO: 379065 - DNA, 122 bp, Homo sapiens
tttatctttcaccatcctcacacgcttgctttcttcctcatgcttataactccatgtttgcgtaacactgacacagcttcaggcatcacattcacatgcaaggcaagatgaagagtcaaggg

SEQ ID NO: 379066 - DNA, 122 bp, Homo sapiens
gcgctcagcttccctgggcctctgctgcttcctcagtgccatgaggaccgcgctcgatggcgtccaggggcctctgggtttgactttcatggctatgaatctcggaatgaataaagagccca

SEQ ID NO: 379067 - DNA, 122 bp, Homo sapiens
tccactcagtttgtcacaggcctgatgagcaaggatatcttgataaaggtgataactggccgaaaagcagttggggcgcccaatggcgcagccttcagaagcaccttctgtgtttttggaac

SEQ ID NO: 379068 - DNA, 122 bp, Homo sapiens
gaaggcgtccaccaattaacccctcccagcttctggtctacagtaacgggtccccaacgccgcgtcttaaccaggcccgaaccgaccaccgccaaccttccctgacacgcctttgccccacc

SEQ ID NO: 379069 - DNA, 122 bp, Homo sapiens
tgagggcacagcctggggactgcgcgggcccagccggcggagccccaacctggagaagcccgctcgccccaggaggcctccattaccagcgtccgcccccacacccccgaaaccggctgtgt

SEQ ID NO: 379070 - DNA, 122 bp, Homo sapiens
atgggaggatttctttcctgccaagaatttatgaattttctataggagcttggttctgttcggggaagagggaaggaagccagccagagcagccccttggcttcagggaatgcagggatgca

SEQ ID NO: 379071 - DNA, 122 bp, Homo sapiens
gcaagactttgactcaaaaaaaaaaaaaaaaaagaaaagaaaaaaacattgaaaaatgggcgtcactagcagaaacagaaacaacagcagtggggagcgaacgttctgagaaatagggtcaa

SEQ ID NO: 379072 - DNA, 122 bp, Homo sapiens
gctcaagggagataaaattcaacctcttgggccctcctgggggtaaggagatgctgcattcgccctcttaatggggaggtggcctagggctgctcacatattctggaggagcctcccctcct

SEQ ID NO: 379073 - DNA, 122 bp, Homo sapiens
ccggcgctatgggcactccttttgtcaaatgagagacgcagcagggcggcccctgagccgcggtttagccaatggagaaggcgagatgggcgggctgggagtgcccggcggcgggtcctcag

SEQ ID NO: 379074 - DNA, 122 bp, Homo sapiens
accttttgtgaatttctctgtagctcccacacctcctgggtgggtgtgcctagtctatgtcgggggagctaggattaagctttcgaatatcacctctttgttctgcagatgggaaatttatg

SEQ ID NO: 379075 - DNA, 122 bp, Homo sapiens
ggtgacactcaatattacattcatcctgaatacacttgcagaattactgcatttgattcccgtttccccggatctgtgcttttgtaaatgctccagagcaaaatttccaactggatcagtgt

SEQ ID NO: 379076 - DNA, 122 bp, Homo sapiens
cccttcctgaccctgggtttggaggtctcctgcccccaggccgagagtaggtgctcccaccgctacctgccgcatcccgcacagccccctgcccgccctgcgagggctggggcactcctgtc

SEQ ID NO: 379077 - DNA, 122 bp, Homo sapiens
gttactgaattatcactgatttaaatctgaatggctgcacgtgccccatggtggacagcacgagtggccagcatgaaaggggagcccccgggagcccaccccctcttaggacgtggcacagt

SEQ ID NO: 379078 - DNA, 122 bp, Homo sapiens
ggttttccttaccaaaaaacaaagtgtgcgtaaaacctaaaattgtccactagtagcggacgaaagatcggcaacaagaatttgagcctggagctgaggggaagatgcttccctgcaggcac

SEQ ID NO: 379079 - DNA, 122 bp, Homo sapiens
gttagccattcaaaactacaaggttgcaaaaaggtataaatgaaaaaaaaatccctccttcgtggctatcaccaaggacaacattgcttggaaaggactgaaacattttatatctctaccag

SEQ ID NO: 379080 - DNA, 122 bp, Homo sapiens
cagggctgcacgaggagtggatttctgctttgtcattctgactctggcagttagcccgcccgctcggcgcagggcgtggcttctcgtagccattaggaaacagcaaccctttcacctcagtt

SEQ ID NO: 379081 - DNA, 122 bp, Homo sapiens
aaccagccaggatctagggagcccagccgctggctcagggatgcctgcagatgctggagccggcctggccttggctggggctcagggagctgtggaggctcatcactgactttttctgcaaa

SEQ ID NO: 379082 - DNA, 122 bp, Homo sapiens
gcagctgaaaggtgcttgtacctctgatttcaccccagagttggagttctgctcaaggaacgtgtgtaatgtgtacatctgtgtccatgtgtgaccatgtgtctgtgaggcagggaacatgt

SEQ ID NO: 379083 - DNA, 122 bp, Homo sapiens
cctaactccactagcagcccaattcctcacctgtgcccccaattcctcacctgttcccatcgagccaccgctctctgtagagccgttggctcacctgtacccatcaccattgcctctgctct

SEQ ID NO: 379084 - DNA, 122 bp, Homo sapiens
gagattaagaaatatgatcaaagtcacacagctagtagttaaccacgccaaggtctgaaccgaagcctgcgctccaaatcagttacattccctctcattatatatttttatcacacacagaa

SEQ ID NO: 379085 - DNA, 122 bp, Homo sapiens
gggcaattaagaccccggccgtgtgcgtccggcctcagcagccccgccgctcggcggacacgcagaccccgccggcccgggcgcgaacactcagcgcacccccgttccacttggtcccgccg

SEQ ID NO: 379086 - DNA, 122 bp, Homo sapiens
gctgctgatgccctcccctactggtgtcagacctcacgagctgctcgcggctcagggccccgctttcacccaggatcagaccccacgagctgctcacagctcagggtcccactttcgcccag

SEQ ID NO: 379087 - DNA, 122 bp, Homo sapiens
gctgtattctcccgaagagtggtaactgtagctctgagaagcggggctggctccttgaggcgaggacccatactgcgcctgaacacaaggcatggctggaaatgaaacagggtgataacaca

SEQ ID NO: 379088 - DNA, 122 bp, Homo sapiens
ggagttcgctcagacggtgagatttggggcgggtccgaggcagcggcgggacgctacctgcgaccgggaccatgaggagctgccagacccgtggggccggtaacgagagcagtcgcggcacc

SEQ ID NO: 379089 - DNA, 122 bp, Homo sapiens
ctggcgcgcagagggtggtgtgagtgcgcggaacgcggcgcgcctgagggctatagctagcgcaggccgacgcgcaggtgaatgggagccctgtgggtctcgaccgccgagagagggggagc

SEQ ID NO: 379090 - DNA, 122 bp, Homo sapiens
gaagctagatgtcttaattcccaaataggactcgctgctaactctttgggcataccttcgcgattcaaggctcttgggtttcccgctttggccgcctcgccaaacccaagtcttacactctt

SEQ ID NO: 379091 - DNA, 122 bp, Homo sapiens
tttgcgattgtaaacagaaaattagtcatttaaagtctgttagctgtgcactccaggaggcgggggacatgaagtgagagcaggtgactggtgcatttccatttgtgctacaacaactagga

SEQ ID NO: 379092 - DNA, 122 bp, Homo sapiens
gtcttacagatcctctggatagtcacagtcatctaagggtcactgtactccaggaccagacgcctccttaacaaacatataaataatattacataaaatgtggccaggactctgactagaag

SEQ ID NO: 379093 - DNA, 122 bp, Homo sapiens
ggccgcatcagctgagcgcgcggcgcgtgtcacgtggtgtgcgtgtcgaaggtcacggcgcgctcacaatggagctctcggagtctgtgcagaaaggcttccagatgctggcggatccccgc

SEQ ID NO: 379094 - DNA, 122 bp, Homo sapiens
tctggctacagctcttgggctgagcagggattaggctcgggtctgcgatcccaggccctgcggcctcccagaggcttggttgagagctctggctctcactcccccacctccacccagcacct

SEQ ID NO: 379095 - DNA, 122 bp, Homo sapiens
caaggttgtgtgaagaacaacggaaacccacctctgaggccctgggcacctggcacctgtcgtgttgggcatgaataaagcttcgcagctcagtcctgcaatctccatgagcctagacttgt

SEQ ID NO: 379096 - DNA, 122 bp, Homo sapiens
ccaggaggggcaaagtggacaaagccagggctggagaggggagacccaggatcagcaccacgttccacggggatggcacagaagcctgagaggccacggccaaatgtggaaattggctttgc

SEQ ID NO: 379097 - DNA, 122 bp, Homo sapiens
ctggctgttcggggtttggcgtgccaccacttgggacttgttgtaacccgtctccactcccgccccctccagcgctgcaccttgtctcggggaggcgcggttcgagccggaatcagcctccc

SEQ ID NO: 379098 - DNA, 122 bp, Homo sapiens
gggcctgcatgtcacttcgtgtggtgtcgccggccctcccgctgtgagatggaaatggctcgcctgctctgtgccccactacgcttcatgcaggggtccatgtgcagctcgtgggcacgaat

SEQ ID NO: 379099 - DNA, 122 bp, Homo sapiens
gggcccgacgcgaccccagccctgagccctggccgcgtcccccgaccccgaccccgaccccgtcctgagtgctgacccctgacactgatcatgcaccccgtcctgaccctgacgctgcactc

SEQ ID NO: 379100 - DNA, 122 bp, Homo sapiens
gacagacatccttctctgggcctccatgcctgctcctctgcaaacagggcaggtcctgcccgggctgagcagagaatcgcttcctgtgcagttgctggccgcccctgcagatgcagaaccct

SEQ ID NO: 379101 - DNA, 122 bp, Homo sapiens
tcacagacgcactgtccgtccacacagaggcccctgttgctgcagtccctggggcattggcgatcccggcagtcttcccctgtgtagccgtcatcacaaacacacatgccattcacacagcg

SEQ ID NO: 379102 - DNA, 122 bp, Homo sapiens
cagcctgtctgggctcttcctgcatattccgctatttatttttggcttcccctgaaatgacgtcagtgaggaaacttgtgagcagaggagctatggattccatcacaggcatttggtggatt

SEQ ID NO: 379103 - DNA, 122 bp, Homo sapiens
ggagatcccccatcctcagccgacctggacagttccagagggcggagactgagactgggacgagacagctgcccaaggccaaggccgtgtatggcgagacagctccagctggcgtgaaggag

SEQ ID NO: 379104 - DNA, 122 bp, Homo sapiens
tgggctggggagtggggtcctagcagcagggactggaggtgagctgaagcagataagggacgggagccttgtggcgaaaagtgacccacctgagggagaggcgcttccaaggaggaagcgtc

SEQ ID NO: 379105 - DNA, 122 bp, Homo sapiens
tagcagcgtgagctggccgctgggcatgtggggagcccgcctgaggcctgatggggcagccgcctgggcttggggctctactggctttaaccactggggtagagagtgttttggggggtttc

SEQ ID NO: 379106 - DNA, 122 bp, Homo sapiens
aaagggcgggaggaacaaacaaactctggacacatgatttctaagtattgtaacactcaccgtgagggtccgcggcttcattcttttaagtcagtgagcccaagcaaccaccaattccggac

SEQ ID NO: 379107 - DNA, 122 bp, Homo sapiens
ccctacctcttcttctgggcctcgctttccgttccatctgatcccggggctgagacaacgcgtcctgcaccctaactctgtgtctgtgacccccagggactccgcgctgctgacaacgaccc

SEQ ID NO: 379108 - DNA, 122 bp, Homo sapiens
cagacagtcgtaaacgccatgtgtttacgcgactggagcaagcggacgccggccccgctccgtcattgcaggccacgcctccactgaaccagggccacgcccccgagatgacggcgaagctc

SEQ ID NO: 379109 - DNA, 122 bp, Homo sapiens
ccccaagcccctggcttgttgctaagaaaattcactgcccggtccagactcagcccttttcgccctttaagggtcgcgcgtgggaggcagctctgagaccccgggtagcgctggagccacag

SEQ ID NO: 379110 - DNA, 122 bp, Homo sapiens
ccatcccggccaggcaggtggacaggagctgtgagagcacgtcccaggtgtcagcccaggcggccctgttgggcaaggcctcgcatgccgacagagtgtcccctggctgggcgttgaggacg

SEQ ID NO: 379111 - DNA, 122 bp, Homo sapiens
ggatggagcttgggtctgcagggctttgcagccacacagcgaggtcagtccggggccagccgcgccatcatggtaatggtggcctcgccccatccatgtcatccatgtcacatgaggacgtg

SEQ ID NO: 379112 - DNA, 122 bp, Homo sapiens
gaaaggggaggaattttagatggtaccatggacgtgtttgtgaatggtacagccccatgccgggagattcgactgctcagaggggaagcgtggaatggtgcggtcctctccagggagatttc

SEQ ID NO: 379113 - DNA, 122 bp, Homo sapiens
tcatgtccgtattcaaattggcctgtgctgacactaggctcaaccaggtggtcctatttgcgggttctgcgttcatcttagtggggccgctctgcctggtgctggtctcctacttgcacatc

SEQ ID NO: 379114 - DNA, 122 bp, Homo sapiens
gttgcatcactctggctctgacctgtctgcgtttccctggaaaggcatggcagcatggaccggggcggggacgggcttgcctcgaaagacatgggagcgcggaaggggaggcaggctcgcct

SEQ ID NO: 379115 - DNA, 122 bp, Homo sapiens
gcctgcagagcaagtgatgtctccccaccgaacagaagggaagatcgagacccaggcatgcggacagagagcacaggcttaacagagcctctgagccagacctggcatcctgggaaccacct

SEQ ID NO: 379116 - DNA, 122 bp, Homo sapiens
cacaagcgcagaaaagaaactcctggccgtcggtcggcccccgctcaacagcccaataaacggaagagcttctagtcaccgcccaccttgctcggctctgaccggaagctaggcgtcacctc

SEQ ID NO: 379117 - DNA, 122 bp, Homo sapiens
aaggctcctctcaccctcttaagacaaagccaggcagaggagagcgccttagtggtgagccggctatttatatcacagcgtgtttcccaggctacgaatttcactctgcgcggaaggggccg

SEQ ID NO: 379118 - DNA, 122 bp, Homo sapiens
tttacagaaagcgccggaaggaagtcggaagcaagatagcgggggctttggaggaatagccggacaattctgggaacccaggagctggggtctgtctggatccagctttccctcccgtcctc

SEQ ID NO: 379119 - DNA, 122 bp, Homo sapiens
aactggcacctaagactgtgtaataggacacaggtcttgcaagtcctcctccccaggcaccgcccctgtgctcccagcgcctctttgcagctttaattatcctttcagcgccgttcccccgc

SEQ ID NO: 379120 - DNA, 122 bp, Homo sapiens
gccgggcatggtggcaggcacttgtaatcccagctactggggaggctgaggcaggagaatcgcttgaacccaggaggaaactgcagtgagctgagatcgtgctgctgcactccagcctgggc

SEQ ID NO: 379121 - DNA, 122 bp, Homo sapiens
agctaagcctttggagatgctgcagctactgttctgatcctgggaggtgcatttctgaggcggacagtcagcactgacaagacaagttggagggaacgagctggctgagggctggggagcag

SEQ ID NO: 379122 - DNA, 122 bp, Homo sapiens
ctggggcccggaaaagaccatctcttatgctggttgcatgattcaactttactttgttctcgcactgggaaccacagagtgtgtcctactggtggtgatgtcctatgaccgttatgcagctg

SEQ ID NO: 379123 - DNA, 122 bp, Homo sapiens
aaagtggcgggtcgggccctaaacccacgatgggagataccacattcggccacaagagggcgcgtcacattttctccaagagaagctgggccgctgatgaaggacgggctccgggcctccca

SEQ ID NO: 379124 - DNA, 122 bp, Homo sapiens
ctcaagtaatcctcccacctcagcctcccaaagtgctaggattacaggtgtgagccaccgcgcctggctcctcaaagatgttaatcctcttgatggcaattgactaataccagaaaatgtca

SEQ ID NO: 379125 - DNA, 122 bp, Homo sapiens
aagggcacttagtacttagcgttgcctcaatccacagtctcagttccttttgttcagatacgagtcgttacttaattcagtggtctcaaccctggctgcagaggagaaatcagctggggagc

SEQ ID NO: 379126 - DNA, 122 bp, Homo sapiens
ggctgcaggtgcaccaggccgtccagggagcccgggcctgccgggtatgccaggccgcagcgtcagcatcggctacctcctggtgaagcacagccagacggaccaggagcccatgtgcccag

SEQ ID NO: 379127 - DNA, 122 bp, Homo sapiens
ttagattgattccacatcttggaatcgtgctattgtgaatagtgctgcaatgaacatagacgtgcacgtgtctttattaacatttgttgacattttaaaacatcaaaacaatctcaacctta

SEQ ID NO: 379128 - DNA, 122 bp, Homo sapiens
tttttattgcagttgaagcagactcggacgggatggtcccagccacgagaaggaacagcccggcggtcatgggagcactcatcacagaagccctgtccgcaggcccggcagtggtgcttgga

SEQ ID NO: 379129 - DNA, 122 bp, Homo sapiens
ggcttgtgttacaggaagctcagcaggcttcgaggccaaaagggctgtgtgagcccagtccgggcacccacagttctcagaaagctgcatgcctcctaacacccagggagaagcaggctggc

SEQ ID NO: 379130 - DNA, 122 bp, Homo sapiens
aacccagacataggagataaggaaaaaaacagaggcagattttcccccctgcagagatttcggagatcgaagctcagaaatccagttacatttgaatgtcgcattacctgcccacttagtgg

SEQ ID NO: 379131 - DNA, 122 bp, Homo sapiens
gtcgtggagtgtgggttagctgggggtctcctcctctccagacacgtggagacggggggccgtgacacacacccagaccccagcggagtcactgcagaggatgcagggagagcagacggcag

SEQ ID NO: 379132 - DNA, 122 bp, Homo sapiens
aaccctcaatcttctgatccggaatcagacgccttatccattaggccacgcggccgcacgcgggtgctaatttgcacacatcaagactgaagtgtagtgaggaaacgttgagtttctgtttt

SEQ ID NO: 379133 - DNA, 122 bp, Homo sapiens
cagtgccgccgctcacccctatcaggaagggccgctggtgcggacggtcggcctccggcgcggggctctcgcagtcttcgcctcccgccgaagccatctcggcctccgctcccgcgcatcgg

SEQ ID NO: 379134 - DNA, 122 bp, Homo sapiens
agcggtgccagccgcacctccgcgcggccccggcacaagcagccaatgaacacgcggctgcgcccggcctcgcgcctccattggctgcgccccgccacccgctgccccgcaggttcccaagc

SEQ ID NO: 379135 - DNA, 122 bp, Homo sapiens
ccctctgagtaggagcttcctccctggctgctgccccacctccttgcatggtggggtgggcgggacatcaggcacagctgtctctaggctgaggcaaagcctctttcttcccacaggtgcag

SEQ ID NO: 379136 - DNA, 122 bp, Homo sapiens
taaccgcgtagcgctgaaaccaccattcacaaatgcaaacccctgtcttctgtggataaacggtggcggcgcgcgtccgagcgtccccgaggggctgtggggagcccccggggagagcagga

SEQ ID NO: 379137 - DNA, 122 bp, Homo sapiens
agccccaccctagcagaggcctggagctccctggtgtcagctgctctctgccctgcaggacgcattgggcgtctcgggcacaaaccacagaggggcctctggctgccacagccaaaaaggag

SEQ ID NO: 379138 - DNA, 122 bp, Homo sapiens
tggttgcaaaaccttgatctgtgaaagcgggcgttttggaagataccggaagtagagtcacggagaggtaggatccggaagtggggctgcctctttaaataacaaaaatctgaggttctgtt

SEQ ID NO: 379139 - DNA, 122 bp, Homo sapiens
cctctcccacaccaacctccagcgcgcgaagcagagaacgagaggaaagtttgcggggttcgaatcgaaaatgtcgacatcttgctaatggtctgcaaacttccgccaattatgactgacct

SEQ ID NO: 379140 - DNA, 122 bp, Homo sapiens
tctatgaatggttctttatgtttcctgtattttacatgacttatctcagattcttcataacgggtgctaaaacgttattaagccacattttaaataagggaattaagctcagagaggaagag

SEQ ID NO: 379141 - DNA, 122 bp, Homo sapiens
tgactcaataaccagacactttctcacaaccaaaagactgctttataaaaattcagtgttcgctggagagttctttcctcccacaacgctaaaggaggaaaccttatttatcaagtaaacta

SEQ ID NO: 379142 - DNA, 122 bp, Homo sapiens
cctagtgatgaacactaactactggtccttaaagggggaccattttcctgcaaaccgtggcggtcgctgagctttgctcaaagattctttaaccaaagtcagggaagaggggtgttcgctgt

SEQ ID NO: 379143 - DNA, 122 bp, Homo sapiens
aaacttcacgagctggtttcagcgtcattgctgaaggctcttggaaacattgcttacacccgtggttccaatggtgatttttctcattccttttacattgattacctgcctccttgagtgag

SEQ ID NO: 379144 - DNA, 122 bp, Homo sapiens
tttttaaactgtttccataccctttctttttcttgctttttgtttttgccattgtgtttacgtttgagacacaaccagtcattggtggcaggggcatagagtggtcagtctgaaagggaggc

SEQ ID NO: 379145 - DNA, 122 bp, Homo sapiens
cccggctctgcagggccctttacaaacagagcaaattgatggcttcgtgaacaatttctgcgagcatctgcgggtgccgggctgtgcggggcccctgccctcctgcagttcacagcccgtgg

SEQ ID NO: 379146 - DNA, 122 bp, Homo sapiens
aataatgctttattctggaaaagatctgtacgaatctgcaaagcagtgaaaatgtgtggacggcttctgtttcttcagccgcaagggaggccacccttcattgccggaggaaggcccgccct

SEQ ID NO: 379147 - DNA, 122 bp, Homo sapiens
tgcccatggctcctgaagggaagtcgtctgtgacatcttttctttctttacagcaggcctcgcatggctggcctcttgctccacttgtagcaaggcgcagagggctctctgagctcatgcca

SEQ ID NO: 379148 - DNA, 122 bp, Homo sapiens
ataacggaattgcgttataatatacaattatgactcgtttcccagcaaacacgtgcacatcgagcactgcagaatgttctccctgatgggggcgggggctggccagggttgagtgccacttt

SEQ ID NO: 379149 - DNA, 122 bp, Homo sapiens
tccccacctccccagcagccgctgcaggagcagaaaccacattcaccagggcagctgcgacgtgctccagaacccatctacggacggcccgcagcccctgggaaggcctcggcggcacgtgg

SEQ ID NO: 379150 - DNA, 122 bp, Homo sapiens
gccagcacggcggtgtggagctgtgagcacccggccacaccatgaggacagggcctggtgcgggcccgggaaccacacgacctccaggttctcccaccccgggacccgggtccgatggaaga

SEQ ID NO: 379151 - DNA, 122 bp, Homo sapiens
tctttccttcttcctttgtttcctctttcctttctttttaattatagaagtgctatagttcgtggatatatttgaattattaaaacaacaattgtgatagattgaaattcctcttgactacc

SEQ ID NO: 379152 - DNA, 122 bp, Homo sapiens
gagatatctcgactggtgggtttgcacttgagcttgtggggctggtgggcagacgtctgccgggccttccagccttcagcttcatgtgtgggacgcggagccccatgagcttgaggggctgg

SEQ ID NO: 379153 - DNA, 122 bp, Homo sapiens
aagcactggatctgctgaatcttcagttttctgtctgaggctggcttgaggcgagggatgcggaagaatgttctccaagggggtcattcactcaaggcaccatccctggcagggagagaaac

SEQ ID NO: 379154 - DNA, 122 bp, Homo sapiens
ccactgttgatgtgagaactagcaagaagccacagcaggcttggatatacggaacagactcggcctgatgcacacttcattcttgttcctcactgtcattttcttagacatggagactgtcc

SEQ ID NO: 379155 - DNA, 122 bp, Homo sapiens
acacacagtattgttggttcttattgactgaacttactttggttgccttttaggtgagcccgtggtagcagcagaagcaggcattatgggataacgattgtgtaaagaaacagcttcttcat

SEQ ID NO: 379156 - DNA, 122 bp, Homo sapiens
cagctctccaatggacgtgactgcagacacaggtgcagttcgtagccctcgagcaggctgcgttgttggtgggggtgggtcggctaagcgcatactttggtaagtctgcaaaatccccaccc

SEQ ID NO: 379157 - DNA, 122 bp, Homo sapiens
gacaaagtttgggattagaaatccctaaaccactacctaaaccttttgtggccccaaagccgattgtgttcttcagaggataagagattgggctcaaataatctggatatgcaatgctgggt

SEQ ID NO: 379158 - DNA, 122 bp, Homo sapiens
aacgtattactctatttttacatgacatcttattgctaatggactataggcctaaaacaccgtcatagacttgggcaggaagaaacacatggtgtggatgttttgatacatctcagaaatta

SEQ ID NO: 379159 - DNA, 122 bp, Homo sapiens
cggttgggtgcagttggagctgtcggaagcatttcccgagagaaacaccatggtcccagccggggccgggcgaggtccggctgtccagggccacctcccgggctggcgcggaggcgggagcg

SEQ ID NO: 379160 - DNA, 122 bp, Homo sapiens
gttaaagctccaggctgaggctgggctgtttccagactctccccattctccccccaggatcgcagagccacagtttcttttctagtccttgctaccatcccattactggcatctccatttct

SEQ ID NO: 379161 - DNA, 122 bp, Homo sapiens
tgggcagggagctgaggcagggaggaaaagtctcccaggagccactggttgaagggtggacgggaactgaggacagggccagtaccgtgctctgtggaactgtccagacctgccgggagctg

SEQ ID NO: 379162 - DNA, 122 bp, Homo sapiens
cccgcacccgcccggcacggcccgtgggggaggggagggagggaagggcgcccctccccccgcgcccgccgacccgccagccctattacctgtcattgagctggtcctcggtgcccggcagc

SEQ ID NO: 379163 - DNA, 122 bp, Homo sapiens
atttcaaatgaagcaatattgtgttggtgtggaagtggctgttggatttctggagaaacccggtccttatacccatggcaaatttcaggcttctgttttgggtgttgatttttatcacttca

SEQ ID NO: 379164 - DNA, 122 bp, Homo sapiens
ggccgtcggcattggggacagaggctgcagctgctttctccctgttttctccaatcttgccggtcccccatggccccaggctgcctttgcctcgcgtgtcatcctggccccccaaagagttg

SEQ ID NO: 379165 - DNA, 122 bp, Homo sapiens
accgtccaggacaggctgagggagtcaggggtcgcatctgtcacggtcagctcctccaggcgaggcttgatggggggttcaggggtgggaggttctgtcgaggctggggccatttcttcatc

SEQ ID NO: 379166 - DNA, 122 bp, Homo sapiens
cccaaccccccgccccgcattaccatatggaggccgagtccctgcgaatcacagcagcagcgggaggtatttgaataagccccgcaaccccgcgcagaccccaactcctccgagagcagcat

SEQ ID NO: 379167 - DNA, 122 bp, Homo sapiens
cttctccagcttcaccgaagccagggatccacaggagagcgcccgtgttgacagcgtgagcggcgacccggtgtcggcctggcgtcccgagcctgtgcactgggccgttttctttttctttt

SEQ ID NO: 379168 - DNA, 122 bp, Homo sapiens
gttattgttttataaatgttcattttctagaagctcactgtttctttctttctcaacagtcgactttacactagccacactcattatcatcatgtggcagtactgctcttcctctgcctttg

SEQ ID NO: 379169 - DNA, 122 bp, Homo sapiens
gtgtgcacagcctgagcccggccctgagcccgtctctgcccacagagccagtggcttgaacgccccccggagaagctgccccacatccacagcgcgctcctggggcagcctcgggggctggt

SEQ ID NO: 379170 - DNA, 122 bp, Homo sapiens
ttccaattacctgagaatgtaggtgatgcctttcacctggagtcctcgaaacaatttcaacgatgtctgcatccttaatgttttcccacaaaataagtgtgtccataagtctctttatgaca

SEQ ID NO: 379171 - DNA, 122 bp, Homo sapiens
ttcttttttgcaccagaattgcatataaatgcataccacatactccattaggagaacacacgctgcgtgtgagtgtgtgagggaaaatttgttttcacaacaagcagaacatcaaaatagct

SEQ ID NO: 379172 - DNA, 122 bp, Homo sapiens
ggagcccggtgcacggagtgggagtagggctgcggcgggcgcagccaagcggctccgctgcgccggttaaaacattctcccagggggcatctctctgtccttggccagatggtctcgacacg

SEQ ID NO: 379173 - DNA, 122 bp, Homo sapiens
cgcgggccgggacatcggggcaggcaggggctgggtgggccccatggctccaggacagggcgcccagggaaggcagctagccgaagcgctggctgcaggaggaccggggcggcaggctccgc

SEQ ID NO: 379174 - DNA, 122 bp, Homo sapiens
ggcggattgaagcgagctgggctgtgagcaagggacacccacagcctggagaaacagccccgctctcttgcgcgctgtctgctccagccgctactgggggctctaagcagcgcgatgctgct

SEQ ID NO: 379175 - DNA, 122 bp, Homo sapiens
agtgcaagggcagggagttttcattatttagggaatgcagccctggtgtagaggacacctcgcggagacatctcgagtcccgcaggtgtctgagctgcgctgcgcgccccagccgggaagcc

SEQ ID NO: 379176 - DNA, 122 bp, Homo sapiens
tagaaaccctgacctccctttgctggcaatatggccacatcaccacaatctgcctggaatcgaccataaccataaatatttgggagtcattggcattatgtggcattatattctgtttaaag

SEQ ID NO: 379177 - DNA, 122 bp, Homo sapiens
cactgcgagttcagctcattgccgagggccctgactgccgctgcacaaagaggcaggtgccggcggggacgctgcctgagctcccgtggctgtcctccctgggggccctgcccacttcagag

SEQ ID NO: 379178 - DNA, 122 bp, Homo sapiens
gccgtgctaggggtgtgattgatccgctttgcttcactcaggtccgcagagtgttttaagcgcctaccgtgggccagctctgcccaagctctgggaatactgagaaaatgagaggtctcagc

SEQ ID NO: 379179 - DNA, 122 bp, Homo sapiens
accagctcacaggaaacctactctgtgccctggggcaggtgcaggcagcagccatggccccgaccagctcacaggaaacctagtctgtgccccagggcagtgcaggcggcagccgtggcccc

SEQ ID NO: 379180 - DNA, 122 bp, Homo sapiens
ttttctatcaagagcaccaggaaaggcagccagcaagttatatcagattatcagagaaagcgaaaaccctctaggagttcaggggaagaaatctcctccgagtggaggaaaatcagagaagg

SEQ ID NO: 379181 - DNA, 122 bp, Homo sapiens
tgaagacgcgccacgccccctcccctatctgagccggacagggagccggggtggaaactgcgcccgcatcccagcgccaagcagacgtgaactctgcgcccgttccccgggaccttcagcgt

SEQ ID NO: 379182 - DNA, 122 bp, Homo sapiens
gctggctaatttttgtattttagtagagacggggtttcaccatgttggtcaggctggtctcgaacttctgacctcaaataatcctccggccttggtctccgaaagtgctgggattacaggcg

SEQ ID NO: 379183 - DNA, 122 bp, Homo sapiens
cctcaatgcctaaggaatctatactttttacaagccccctgggatgtgctgcttcgtctccgggtacccacttgtctactggtcgtaaaggggtaagtgtggccgggcttggtggctcatgc

SEQ ID NO: 379184 - DNA, 122 bp, Homo sapiens
tgccccctgcgaaggcgagggccagggatgggcaaagtgggaagggggcacacgcttccccgcctgggcttctttcacacaatgggctctacagccttcgcttgtgtcagcctgcgctggtg

SEQ ID NO: 379185 - DNA, 122 bp, Homo sapiens
cctggtcgataggagcgccagagccggtgtttcagcgtgggtggctgtctctctctaggacgctggagctacggaggctacacaaacggacaagaagagaagggccctggtcctccccacac

SEQ ID NO: 379186 - DNA, 122 bp, Homo sapiens
ccggagtgccccgtgggggcgctgtggcacgcagcggggacgcccagaccccggccaccgcgacccagggaaagggagacctgttgagcgggtatgcagggtgattcctattccacggacag

SEQ ID NO: 379187 - DNA, 122 bp, Homo sapiens
caggtgtgtctgtggcaagcctcaaggccccaccattgtgtgtgctgtcagcaaagtgctcggcaggagggcgaatgcgcatgttaaacatatgtaaatcctagaaaccgaggtagcttcct

SEQ ID NO: 379188 - DNA, 122 bp, Homo sapiens
atgcataagcaccaaggctggctagaacttacaaattcattataattatttaaagactcacgaaagtcaaaggaaatatgaagttctgggcttcatttataggatttagctcaattagtgag

SEQ ID NO: 379189 - DNA, 122 bp, Homo sapiens
cagagaaaacgtgacgaaaaccagtctgtaaaacccgagcctgggagaggggcttcggtgcgcggggggaatttgcagacgctccctgctggcggagatttcctgacctgtccttcggcgcg

SEQ ID NO: 379190 - DNA, 122 bp, Homo sapiens
tcctgttttgaatttggtccaggctggaacagccccactacacctgttaacacacgcagacgcacacttcccccttcataattgcttagcttcttgttgcctagccagatttcccctcagct

SEQ ID NO: 379191 - DNA, 122 bp, Homo sapiens
cccttgggtgtccttcctgcggctcccttcggtcacaggcaggtgacacatctgtgtcaccgcatccatgcaaaacactctgttagaaaaaagacaggaaggaaactgttccatctcacgag

SEQ ID NO: 379192 - DNA, 122 bp, Homo sapiens
aaaagccctaccagagagaggggcctccgcagggcccgggttccatccgagtgtcaggtgcggccctcagttcccaaccctcgaggcaccaggggcgacagcgcacaggccccagggctgag

SEQ ID NO: 379193 - DNA, 122 bp, Homo sapiens
gagggcgcagctcggccttaaaaacctgtacttgcgattctaagaccagcgcgggttttccgtgccccaccttgtctgccggtggagactgagcagtcagcccgctgtaatagcgaggccga

SEQ ID NO: 379194 - DNA, 122 bp, Homo sapiens
gatattttttaatatctattaaatggatattatggaacaaagaaaaggagagagaagaaacggaagagaaagacattaacattttccagaaataaaggagaaagaagaaggtattgaagaat

SEQ ID NO: 379195 - DNA, 122 bp, Homo sapiens
aagggtagccaacacacaataaaggctcccaaaatgatccctagggtcttggtggctttgcgctccctagcggccatgagtttcttcttttccagcagggcgtcggagactcgcactttgac

SEQ ID NO: 379196 - DNA, 122 bp, Homo sapiens
ggcgctgcccatcctcatacagtcacctcagtccagaaaacagcgattttaatttgaaagcgattttatgtatgagaggggaaaggagccccaaagagaagggacgcagggcaaaaatcatg

SEQ ID NO: 379197 - DNA, 122 bp, Homo sapiens
cagcaatgaacacagattgaaaatcagttaaaagccagtgagaacaaatgtctcttaaatcgaggatggaacaaagggaaggtgggggcacatcccttaatgtcaataggcagaaagctgca

SEQ ID NO: 379198 - DNA, 122 bp, Homo sapiens
aagtccaaggttatgcctggagcaagcaccaaagttgagacaagtgcagtgggtggggcacgccctaagagtaaggccaaggcaatacctgtttcacgatttaaggaagaagcccagatgtg

SEQ ID NO: 379199 - DNA, 122 bp, Homo sapiens
gcagctgttaaggccacattaaaaaaaacctctcaattctaggctgggtgcggtggttcacgcctgtaatcccggcactttgggaggccaaagtgagtagattgccaggtgtttgagaccag

SEQ ID NO: 379200 - DNA, 122 bp, Homo sapiens
ccaagcgtgcggtgagggctgcgggagaatggtttcattttgacttcagacagcccaactcgtcaggatctaacggggattaactgggagagacatggggagcagctggcttagtctcccgc

SEQ ID NO: 379201 - DNA, 122 bp, Homo sapiens
gcgagcgccatttccacgcgtgctgtgcaaagatggcagcacgaacacgatcgtcacaatcgtgagcgccatttccacgcgtgctgtgctaagctgtatttcaccctcacgccaggcaacaa

SEQ ID NO: 379202 - DNA, 122 bp, Homo sapiens
ctcgccccaatgagcaccgcgagctgcgccctctcctccaaaaaccaaatatctccaacccgcactccccattggccacactctaccccgcgtcctaacctacgctcggcctttcccgaccc

SEQ ID NO: 379203 - DNA, 122 bp, Homo sapiens
ggaagattgaaagcccttcatcatgaaatagcattgcaattattgacttacattagaaaacgaatataagtgttgtcactagctaagattcctttgggaggtaaaaatctgatgcattgtga

SEQ ID NO: 379204 - DNA, 122 bp, Homo sapiens
agctccccttttgcccaggccagccctcctgctctccatgtggataatcttcccatggcccgtgtggcctggccacagccctgcgacaccattcatgccattggtgcagaagcaggtggggg

SEQ ID NO: 379205 - DNA, 122 bp, Homo sapiens
ctccagtgctgttagtagtgctttctactttatgggtgactgcactgtctgtctgtccgtcggcgtgtactcttcaggctgcccaggcctcctgactcctgctccaagagccccccagccct

SEQ ID NO: 379206 - DNA, 122 bp, Homo sapiens
cccgggtggctgcggtacggaagcagggccccaggtgaggagcaggcgagggtgagtggtcgcccgagaaggaaaggccgccctctccgctgcccaggggtgcttgggtgggagcgggggct

SEQ ID NO: 379207 - DNA, 122 bp, Homo sapiens
agaagcacaactacgagagtgcggcggaggccatccaggccgtgagagacaagtgaggcgcgggcggccaccctggcggggcgggacaggtgcggggagggggagggtggcctccaccgggc

SEQ ID NO: 379208 - DNA, 122 bp, Homo sapiens
tttcacaagatgcaaaaccaggaaacaagttcattggagacaccactgctctacaaaggacggaaagtgaggtgaactgcaaggaacagaaaggtaatctcacacttgggcaaggcgtgatc

SEQ ID NO: 379209 - DNA, 122 bp, Homo sapiens
gccctgagaggacaaattcttgaagactccatccctgtaaagaatgtcacactgctgctgcgtatggttgtggtgtagtttggatgtttgtctcctccaaatatcgtgctgaaatctgatcc

SEQ ID NO: 379210 - DNA, 122 bp, Homo sapiens
tgccccactcactcaagaaagccctctccccgagagcacaccccgcacagaagtctttcccgctgcggctccccagggcaccaccaagctcccaagtcggccccctgctcttccgtcccacc

SEQ ID NO: 379211 - DNA, 122 bp, Homo sapiens
cctgccccctcgtcctgtatgcaataaatatcagcgcacccagccgttcggggccactaccggtctccgcgtgttgatggtagtggtcccccgggcacagctgctttctctttatttttttg

SEQ ID NO: 379212 - DNA, 122 bp, Homo sapiens
cccgccccctcttccgacctgcacggccggaaccaatcgtgacacaggagctggagatttcgcgccaaacctgaccaatgaacggcgcctctccaagagccccagcccacggaaagggattt

SEQ ID NO: 379213 - DNA, 122 bp, Homo sapiens
tcactcaccacagctcggagagccaggcctcgtgctccagggggcagctggtagcagcggcggtccccaaaagctgggcttgacttagctgcatccctgcaaagcagagtcatcagggtggg

SEQ ID NO: 379214 - DNA, 122 bp, Homo sapiens
gaaaaagacagaaccaatcaaactggtgttgaaccgtgttatggtgacaaagataaacggcggcattgttttgctacctggaagaatatttctggttccattgaaatagtgaaacaaggttg

SEQ ID NO: 379215 - DNA, 122 bp, Homo sapiens
gatcatccaacaactttcattccaacaaccgagggtggtgtgaggcagagaggctttctacggggtgggttgggcgccacaccttgcgcgccccggggcccaaggagacgaccctgaagagg

SEQ ID NO: 379216 - DNA, 122 bp, Homo sapiens
gtactaccttcttaggttccttcgtttctttcttggctgcctgtccgggtctctttgtttcgggagcgggtgagagagacagaggtggctgcgtgggacccgagtcggcacgatcccaccct

SEQ ID NO: 379217 - DNA, 122 bp, Homo sapiens
tgttcatataataatctgtcaactctgtgatttgcttattatgtgaattaactccataatcgctctgagattgaattcagtgacaccgtttaactgcttctggtttgggggcttttactcga

SEQ ID NO: 379218 - DNA, 122 bp, Homo sapiens
ggagaggtgcagatagtcccctctgggcgccttccgaggttgggagggcattctggcccccgcccctccccgccgcaatctgtcgggacccgccgggtttccatatgaagggtcgagccggc

SEQ ID NO: 379219 - DNA, 122 bp, Homo sapiens
ggccacgtggaggtggctcctcattgggggcaggacgccttcctgttgtgagtcaggtgccgttttctctgtccgtgttcaggccggaagaactcccgcacaatgctgctcccactcctgcg

SEQ ID NO: 379220 - DNA, 122 bp, Homo sapiens
gagggaaccttagacatttccgagatagggtcaagacctgcgcttgacaactcagttcttcgcgccaaactcggcgtccccaggagtgccccagctcgccgcgtgggagacttggccttgta

SEQ ID NO: 379221 - DNA, 122 bp, Homo sapiens
ccttgcgtgtggcgctgcgcgaccccacccggcggcaggacccgcgtccccgtctagtcacgttcattgggccacggagaccacctcgctcgccgcccgctgttggcttttccctcccacac

SEQ ID NO: 379222 - DNA, 122 bp, Homo sapiens
tgattacagcaacataaaggcagcatatgaggccatgaagaatgtggcctgtctgatcaacgagcgcaagcgcaagctggagagcatcgacaagatagctcgctggcaggtgtctatcgtgg

SEQ ID NO: 379223 - DNA, 122 bp, Homo sapiens
ggaaagagagggagagctcttgcgaggcagaacaggctgctgaaggacagacctggctggcgcggttaataagaggcctgcatcccgtagcctgaacaaatattgaagtagctaaagtttct

SEQ ID NO: 379224 - DNA, 122 bp, Homo sapiens
ccaaggactcgtcatccccaggcggagtgccacctacatgccaggtgggaggcggcgttgcggaggagccgctgagggtgaaacgaaggagtccgggccagttcttagcctttttcaggatc

SEQ ID NO: 379225 - DNA, 122 bp, Homo sapiens
tcccatagacacactgcccctccacccatgcagtgctctccctgcctccctctgccccttcgccaacctggaaagctccccccacaggcccactccgtgtccccagccccttctcccctctg

SEQ ID NO: 379226 - DNA, 122 bp, Homo sapiens
ttgcttaatcctccctgaaatacacaaagcagcaccatcctcttcactctatcttactctcgctttaaggttattgtctccaaggagtccttcccataaagggctcccatagagccctttct

SEQ ID NO: 379227 - DNA, 122 bp, Homo sapiens
gatttcaggaactatgtactttctgatggcctgtcttccattgtgggtagaatcagtccacgttccaaagagacacatgggaaataccacatagtcctcattatagacccccaagatccctc

SEQ ID NO: 379228 - DNA, 122 bp, Homo sapiens
ggacccttttcacaagatggcgccaaaagcgaaaaaggaagcgcctgcccctcctaaagccgaagccgaagccaaagcaaaggctttaaaggcgaagacggcagtgttgaaagatgtccaca

SEQ ID NO: 379229 - DNA, 122 bp, Homo sapiens
ggggcatttcttactgtctcaattattcactgtggtcccctggtgcctggcattctgttccgtcccttcagcattcaacacacaggcactgaggttggtaatgatcatagcactatttattg

SEQ ID NO: 379230 - DNA, 122 bp, Homo sapiens
ctgactctgccgtcagcagccaacatcttagctgccccctgcctcaacgcccagcccagacgcaggcagccctgggagagcgtttcagaccaaggacgtagtctcacccagacagatagggt

SEQ ID NO: 379231 - DNA, 122 bp, Homo sapiens
aattaaatcaaaaaaaattttaagatatttgaaataccgtaaacaggtagttacaatgaccgtatatatatcattttaaagtctttagcaacaatgtgagttggagaaactgcaatttgaga

SEQ ID NO: 379232 - DNA, 122 bp, Homo sapiens
ggcaccgacggtggcagtcggcgtgtcacctctcctgccatccgcagggcgcagcgggcacgtggcccctccagataagcagagcccggggccccaactcgcttcctcatggcgggcggggg

SEQ ID NO: 379233 - DNA, 122 bp, Homo sapiens
tgcctcttgttttcggccaagggagacgttgaggtgtccctcaggacaggacttcatttgcgtgggaggggagaagggcgcttctgactactttgcattggtgtgtgggctggacacagtga

SEQ ID NO: 379234 - DNA, 122 bp, Homo sapiens
gctggcatggtcaggttcccgtgagggccctcctccgggttgcacactgctggcctcttgcggtatccgcacaaggaggaaggggcaaggcctttctgggacctctttttcttttattttat

SEQ ID NO: 379235 - DNA, 122 bp, Homo sapiens
cgctttttatgtcagccagagcggctcgttaagagagcgaaggccaggggctgcacaggtcgcatcccgtgagcatgaggtcagagaacctgcccctggggcaaaccgcgaggggtgggacg

SEQ ID NO: 379236 - DNA, 122 bp, Homo sapiens
tgtctgagccacagtggacagagctgtccagagggaatttcctgaaggcaaagcttcagccggaaaagacaaggtcaccaattccaggaagtgccccacctgtcggacatgatgacttcaca

SEQ ID NO: 379237 - DNA, 122 bp, Homo sapiens
cccaggtcccagccagtgccaagctgtgcacagcaaggataaagcagaaacaacctctctcgtggcatgtcccccagctgggcaaaggtccatacacacaaaagaaacagcaatgagctgcc

SEQ ID NO: 379238 - DNA, 122 bp, Homo sapiens
ggccccgccccctgagtgacacggctggcgcgggcgggcccgtcccccctgcccctgggtcgctctttttaagctcccctgagccggtgctgcgctcctctaattgggactccgagccgggg

SEQ ID NO: 379239 - DNA, 122 bp, Homo sapiens
tgtgttattcattatgaactccgcaacaaaatatgaaatctccttataggtatccacatccggggcaatttgctgtcgtagaagtttcttgatgagaataccttcaaatgcaaatatggtta

SEQ ID NO: 379240 - DNA, 122 bp, Homo sapiens
tggacgtggcgctgactcatctcggctggggcgacgttctgagttctgtggcttccttgtcgtcttggctgccatggccgcggccggcttgctcactgagccgcgtgtgccggcatctgctc

SEQ ID NO: 379241 - DNA, 122 bp, Homo sapiens
cccgcggagcgtgctgggggcgggtcgcgccgggccgggccgctagtgcgcatgggcgggcgtcctcggctctaactgccgccactttccacacgctgggagggccgttacctcagagatac

SEQ ID NO: 379242 - DNA, 122 bp, Homo sapiens
agacagggcatggactcacacgaacgacgcggatgctgctgcgggcagcgtccagggtgtcgtagaaggcccgcaccacctcctggaactccccggtgttctctgccagacgctccaggttg

SEQ ID NO: 379243 - DNA, 122 bp, Homo sapiens
tgagcttcccatgaggatgctggatccccaatcctaaccatgcagacgtctgagggtcgccgccattaacgggaatgatatggcccttcctcccccactccctcctctcttctcccctttca

SEQ ID NO: 379244 - DNA, 122 bp, Homo sapiens
ggaagggaagaaggggcgtgtcaggctgcgcaggcggccagtccattggctggaagagaccggagccgggctccgggcccgaccagaggagggcggtgctgcagggctggtccgggaggtga

SEQ ID NO: 379245 - DNA, 122 bp, Homo sapiens
ggtagagccattgggacaatggacgaaataatgtcctgaggggcagattgaactcttttccgggggaattcaatctacaaggattgaagatttaaaatataaattgaatggcagcttgaaca

SEQ ID NO: 379246 - DNA, 122 bp, Homo sapiens
agtacctggcacagaggataaccaggaaacgttagctgttagtactagtccagttagaaacgaatctggctacaattattgcagcaataaagcaatggttgacttaaacaaatggtagttat

SEQ ID NO: 379247 - DNA, 122 bp, Homo sapiens
ggaggggtgaagaaacctcatcgtaacaggcctggtactgtggcgctccgtgaagttagacgttatcagaagtccactgaacttctgattcgcagacttcccttccagagtctggtgcgaga

SEQ ID NO: 379248 - DNA, 122 bp, Homo sapiens
cccatcctcctcctgtgctccacagcacgctgtgcagacgccacacacacagactctgtccgtgtgtgccctcaggcttcagtccctgcggtatcgcccatgcttagaggccgcccagtgct

SEQ ID NO: 379249 - DNA, 122 bp, Homo sapiens
acgcgcgccctgcccctggctgtaacctgagcagcccgcgtgagggtcagtggtgacttccgggattgaattggctgggaagccggtcccatttcaacagagacctggggcagcgcggtggg

SEQ ID NO: 379250 - DNA, 122 bp, Homo sapiens
ttggccatctgctcttcagccttgaagcaggacctcccttgggctgtgggcgcgctgctccgttgcaggctctgtggtgctcacacagaggtgcatgcaggcctgcgacagcgctgaggggg

SEQ ID NO: 379251 - DNA, 122 bp, Homo sapiens
tggctgtgccgcggggccacggctgaggctctgagtgtgtttattaactgtcaaatgggtcggagcagagccccccgccctgtgaggttatctttcggataaaaaatgaggcagccgtctgc

SEQ ID NO: 379252 - DNA, 122 bp, Homo sapiens
taatagacctttttatgacctatttgcggtcgtcattggctgcggctggtcatgtgcaggcgccgctcgccttcacggcctttttcctgatttccccggcgaatttccccccgcattctgct

SEQ ID NO: 379253 - DNA, 122 bp, Homo sapiens
cggtgagtgttacggctcttaaggcagcgcgtctggagttgtccttcctcccggtgggctcgtggtctcgctggcttcaagagtgaagctgcagaccttcggggtgagtgttacagctcata

SEQ ID NO: 379254 - DNA, 122 bp, Homo sapiens
ctcatgtcattgatgatagactccaggatggatgacagcgtcaccatagggtctgtgcggcgtcggtggatggacttatgaggtatattcaaatagtcacaatgaacagtggttccaactcg

SEQ ID NO: 379255 - DNA, 122 bp, Homo sapiens
tacaaagaacagtttctctttcctgtcagtaaaacgctgtttccagagcctgccaggtttcgccccagtggccacacctatgcctggcaggtgctggtccgagcccctagcgccagcaaaag

SEQ ID NO: 379256 - DNA, 122 bp, Homo sapiens
caaatggatttaggcaatgtagcaagagactttagcaaagatagttaaagcacagaaagccggagagaccagaaatttaaatccgaatgtgctggggaggaggacttctgattgatgaaaca

SEQ ID NO: 379257 - DNA, 122 bp, Homo sapiens
ccgtggagggcgtgaggcagagggcgacctcccggggtgctcctgagctgagccatcaagcgcggggagcagcggggctgccctctgcctgtgcacacctggcccgggaggagccggccgga

SEQ ID NO: 379258 - DNA, 122 bp, Homo sapiens
tttagcgcaagctggccaggaactgcggcctggagtggggactgcagacaccacagtgcccgggcttcccactccacaggaacagctgcagccaccctggctgcactcctcgggaagcagga

SEQ ID NO: 379259 - DNA, 122 bp, Homo sapiens
tctccatgtcagatctttcatctcttagtagagacttctacacctttctgttattccacccgaagaagttatggtcacctggttctctttccttcaccaaatcgtctccatttttcttctcc

SEQ ID NO: 379260 - DNA, 122 bp, Homo sapiens
atgaatagtattatgaaacagatttttagaacagaatagacgtgcttgctttcatagagacgtatttgtgagtatctgtctgtagcttatgtctccctaccactgctttgggttgcaggtag

SEQ ID NO: 379261 - DNA, 122 bp, Homo sapiens
gcgaaaagagtgaggaggcattgcccaggcccctggtacctgccgcggagggagcgaagccggccttgtgcggtcttcccgcgcccctcctctccatctaaccgtggaaccgccctgctcgg

SEQ ID NO: 379262 - DNA, 122 bp, Homo sapiens
ataaagctgaggttctggccctccccagtgctcctgacacacccagactctacagacacccggccaggggagccaggccttgtcccaaagctggggccactcgatgagacttcatcctctcc

SEQ ID NO: 379263 - DNA, 122 bp, Homo sapiens
tgaccacgaatactctgccaactgcctcctgagtgaccgagacagctcagtctagagtctcgactacccggggtgacccaatagtcccgactccccgagacagggacccggagacgtgggct

SEQ ID NO: 379264 - DNA, 122 bp, Homo sapiens
gggggatgacttgctcagtgctgtgctagggagtggcagagccacccaggcccaagtgcccggctcctcatccacatctctttctattacaccaaacccagagcgggcaggcagggcagaag

SEQ ID NO: 379265 - DNA, 122 bp, Homo sapiens
ctgaaattgtcttgtccattcactgttacgtaatatctgtctctgccactagaaagtaagcgccatgcaatccggatcatgttttcttatttccaccttctgccgtggacctctggcattct

SEQ ID NO: 379266 - DNA, 122 bp, Homo sapiens
agcgcggccgggcgggcgagcgcgggcttaccttgctggtcgccgggcgggcgggctgcgcgcgtccgccccactcgcactacacgctgcagctggccccgctctgtttttctgggactcag

SEQ ID NO: 379267 - DNA, 122 bp, Homo sapiens
tcctgctcactgcagtcagaaggcaggaatctgggaatccccgagaagtgaaggcactagcgagattgggggagttctctggcactgcttggtcccctgaaccacccagcttggcctccacc

SEQ ID NO: 379268 - DNA, 122 bp, Homo sapiens
ttaagaaattttgcttaaaatttgtgtttttgtgatggattaatggctataatttgaaagcgtggctacattgttgagtatgtatttgtcagagttaacccatcagatattaaaagtacctt

SEQ ID NO: 379269 - DNA, 122 bp, Homo sapiens
agatgcgcctgaaggaggcgggcacagtgggtatggcactgcgcgggccacgggtgctcccgcctagaggaggacgttcagccggtgtgggctcagagcgggggccgtgcagcagccgtggg

SEQ ID NO: 379270 - DNA, 122 bp, Homo sapiens
ggagagaaatcccaagaggcagcccttcctcaccatcccattaaagaccgggctggttagcgtccagctcagggagaagggcgctagtgcctaacctcactggtccctctcccggaggccct

SEQ ID NO: 379271 - DNA, 122 bp, Homo sapiens
tgccctgtgtcccagctgccccatttccaagcagcatgacctcagaaaggtcgctttgcgcgtctggccctgactgtgtgcttatctgttaaatgctcgatcggcacgagaggatgggtaac

SEQ ID NO: 379272 - DNA, 122 bp, Homo sapiens
ggctcccggcgcaggcgctcccgctgcagagccgctcctggcgcgggcgtgcggtcccggcggggtgcagacacctgctgcggctccctgcgccccctgccacccgccagcaggcctcgccg

SEQ ID NO: 379273 - DNA, 122 bp, Homo sapiens
ccagccgcccagctaccgcgcccgaccgctaaccagcgcggccagcttctaggcaagcgccgggggctctggttcccggatctccgtgttccgctccaacagcttcctgggtggcttggggt

SEQ ID NO: 379274 - DNA, 122 bp, Homo sapiens
gaacacagcctagacattccctctcttcccccctcactatacgagctggctaggcctccacgtctcccacccggttgcctgacagacaagcgaggtcagggagccccctgggcggtggccag

SEQ ID NO: 379275 - DNA, 122 bp, Homo sapiens
agctgttgagcctgggctgacttatatcagaacccattgtgccgcctttcgtgtctgcaccggtactcccactgggaaagcagattccaggtcgtggggcattcagtctgcagcctggtggc

SEQ ID NO: 379276 - DNA, 122 bp, Homo sapiens
ccactctgagcctctcagacctaactgttcaggcaccccggggagacaaccccacagccccgcaggccactttgtgcctggatttgaggaagaaaggagctgctgtacttaaactctggggc

SEQ ID NO: 379277 - DNA, 122 bp, Homo sapiens
aaacggacttacccggccacctgttgagaatccatgtggggtcggctggctccggagttgcgcaaggtggacacacaaaaccaaaagccggagttgggaaaagaaaattctttctctgacca

SEQ ID NO: 379278 - DNA, 122 bp, Homo sapiens
ccgcaggtgtgcgggagtctgtgtctcccacggcgcagcccgaggagcctcccctgctgccggagcccccagacaaccggtccagcgccccgtaagccctgggcccacggtcaccacccgct

SEQ ID NO: 379279 - DNA, 122 bp, Homo sapiens
ctcgtggtcagggccggcctgcggaccggatcggggtcgctcgtggtcagggccggcctgcggaccggctcgggctctaattccagctcggtgctcttcagcaagtcactctctgagcctca

SEQ ID NO: 379280 - DNA, 122 bp, Homo sapiens
cggcggaggccacaggtgaacacacgcgggctgcagggctggcctgggttcccgccacgccgctgtggagcagcagcaaggccagtgctgtgaagtgcaggcctggctcacagacacggatt

SEQ ID NO: 379281 - DNA, 122 bp, Homo sapiens
cccacagttctctccaccctaacaaattgtgttcacttttctctcttcctttctggctatcgtacatgcatatatataattgttccagaggcataaccatggtgcaaatagaagtttgcatt

SEQ ID NO: 379282 - DNA, 122 bp, Homo sapiens
acctgccccaaggctgttcacggccacggccggactctcccagtggctcctgatgggtgccgggctctgggtacctaaatgtccgtcacctgcgcctgctctgggcctgccaccccgtgagg

SEQ ID NO: 379283 - DNA, 122 bp, Homo sapiens
ttctcttcctctgagagaggctcttccgctcctgatgcaaaccatgcctcagcagcttcacgctacgccccagtaaccccctgggcaccgctgcaggtaaacggggcacctaatgtgagcct

SEQ ID NO: 379284 - DNA, 122 bp, Homo sapiens
cccgtgcaccgccagagagaacctgctgcagctcccgttctcctgggcagatgacagtgccgcctcccccatgcagcccacaggactcctagggcagcccctgttttggccgccaaggccac

SEQ ID NO: 379285 - DNA, 122 bp, Homo sapiens
cccacccccgcctgtggtccccgacacactctagttccttcttctcaactttgtgcccagcgggctggggagctggagcctgggacgggggctcagggctatttcctgggggcactacggac

SEQ ID NO: 379286 - DNA, 122 bp, Homo sapiens
agtgcttgtataataagaagtgtgttctccatggaatttttcaacaagagagttcccactcgattcctagtttatattctggtatggaccacaagtctgggaggcaagtggattttaggtgt

SEQ ID NO: 379287 - DNA, 122 bp, Homo sapiens
cctatgtcgtctttccgtggatctgtgtccttgcctctctgaatatcatctccgatcttccgtcctctgttctctctttccccctgcgcctgcagatctgaaggaccttccgcagtcaccac

SEQ ID NO: 379288 - DNA, 122 bp, Homo sapiens
gaatttgtttccacatcattttggcaacccatgaggcagcttacaccaaatttttcttctcgcttacaggccaaagagttttattgtgcatggcctgtcaagcatagagttgcttacatggg

SEQ ID NO: 379289 - DNA, 122 bp, Homo sapiens
tgaggagcgtctctgcccgaccgcccatcgtctgagatgtgagaagcgcctctgcccggccgcgaccccctctgggaactgaggagtgtctctgcccgaccgccaccccgtctgggaggtga

SEQ ID NO: 379290 - DNA, 122 bp, Homo sapiens
tgcctcatccgtccattgtcagtctctcatcagcctttcacggtcaccccatcagcattacgaccccaatcaaagtactctggaaagacaatgatggagagaaatcctcccaaggggcagaa

SEQ ID NO: 379291 - DNA, 122 bp, Homo sapiens
tcttctttcccataggtgactgccaacagccagcccaatgtcgaatccagaaatgcaccacggacttcgtgtccctgacttctcacctgaactctgccgttgacggctttgactctgagttt

SEQ ID NO: 379292 - DNA, 122 bp, Homo sapiens
atgtgtctggacgctctaccttccccaaaataacctcaattttttaaaaaggccaggcagcgtgcatcaggcctgtaattccagcaccttggggggccaaggcgggcggattgcttgagctc

SEQ ID NO: 379293 - DNA, 122 bp, Homo sapiens
cgagtccaggctgaggcgaggcagggcttctggtctctgccactcagtgggacccaaatccgtggggagatgtgcggggaaaggggagcagtggagctgcatggtctggggcgggacaagtc

SEQ ID NO: 379294 - DNA, 122 bp, Homo sapiens
gctgggcgctgggcttgctgggcttgccaagccaggccgtacagctcaggtgggagcgagcgctggcccggatcggagactgaggtccctccgcctggcccggggcgccgaactctgaagga

SEQ ID NO: 379295 - DNA, 122 bp, Homo sapiens
aacccccgcctccccccatcacacgccaccatgactacacgatgcagggacccccgacgacgtcccaggcattcctacagtggtcgcctccacaagctgagtccctgacctcagacccttcc

SEQ ID NO: 379296 - DNA, 122 bp, Homo sapiens
agggcggggtgacgggtgatcccagtcctcgcagtgaactctggggcgcagaattcaaaacgcttgcggtcgccgagcgcagccccgccctgggttatgtaagtgacagcgctgggccgttt

SEQ ID NO: 379297 - DNA, 122 bp, Homo sapiens
agctatcacatgagagacggtgattggcatgcgtctgcactgggggagagccggctcccccgggacccgccgccatctgtcactctctactccaaaaaaaaaaaaaaaaattaaataaataa

SEQ ID NO: 379298 - DNA, 122 bp, Homo sapiens
acgtccgcagcggtcagccaggcgcggcgccgggagcggcctcgccgctgggccaccgcccgggtggtactccctgctcctggagaaggagtggatggatatatatgctttctagaaggttt

SEQ ID NO: 379299 - DNA, 122 bp, Homo sapiens
cacccttctgcgttgccccgctcaggctccctcttttgacgcttcaccgggcaccaggaccgccccgacccaggctggagcctatccagatagggactccccaggctgctctcccctgcacc

SEQ ID NO: 379300 - DNA, 122 bp, Homo sapiens
tgacattctggtggccaaacgcatgcgaacactgtcctcccgcattcagtgagtgtttaccggaagccaagctctgtcccaagcactgtgctgatgatatctcatttcatcctctctgtcac

SEQ ID NO: 379301 - DNA, 122 bp, Homo sapiens
cgtgccaggccctggtcacgggaaattcataacaatcctggactcaggagatggcttcatcgggaggctgtgggacttatacaccatcaccacactctctccagcccccaacacccaaattg

SEQ ID NO: 379302 - DNA, 122 bp, Homo sapiens
tccaatattgagaagactgtggcatccagaccttgagtttctgatctttcttcctcacatcgatgtgtaataaaggaggaaagacaaatggatctgagcctcaggacctgtggttcttttca

SEQ ID NO: 379303 - DNA, 122 bp, Homo sapiens
ggttggggaagctgcagtgggtggccggcgagccgggaacaatgcccaaattttggggaacgcaaggcagagttctttctgccttgcgggcttagcgaatgggtgtcctggaggaggggacc

SEQ ID NO: 379304 - DNA, 122 bp, Homo sapiens
ggggccgcagaccggtcctttaaaggttggaagtggccccgaggcgccggcagccctgggcggtcccgggaatcgcacaggacccggctcccctcgcctaagctgctggggggcgccatggg

SEQ ID NO: 379305 - DNA, 122 bp, Homo sapiens
gtccttaaagagataaccagaatcagcttttctactgtattttcaacaaacctgactaaccggcacttttgctgggagatgtttgtcaaagatgctgtaagattctatacaattaggaaata

SEQ ID NO: 379306 - DNA, 122 bp, Homo sapiens
ccacagattctcattgttttcttccttgtcaaagagttcccatcggtatgcggaatatcacgtgcacttactacagaagaggcttcccgccctggggaaagagacgattcggccctggttta

SEQ ID NO: 379307 - DNA, 122 bp, Homo sapiens
cagggactgatctgattcaaggcttgggttcagtcactgtaaggtttgacctacttctagcgtgtccctatttctggggtgtagctcttcaatgaatcccaaagctttgagtgtttatcaaa

SEQ ID NO: 379308 - DNA, 122 bp, Homo sapiens
tgtccgtgacctggtccagcgtcttcccggccacctcaatgccgttcacctccaggacctcgtcattcacagccagcagcccggtgctctccgccaggcccccgggtaccatgcgcgagatg

SEQ ID NO: 379309 - DNA, 122 bp, Homo sapiens
cgccggggcggcgttctcatgcttccagtacatgggccggggaacctcgggctcagcgggcgcgcagcgcggagagctgcgccgagggggaccacagccgcagtgggagcagaggctgctgc

SEQ ID NO: 379310 - DNA, 122 bp, Homo sapiens
ttcagtccggggctgcagcagaaaagccatttgctgagtcacccagcagcatgcacagcccggagcttcctctggctatcaagagtccccactcagttccacttcccggccctgcagcccca

SEQ ID NO: 379311 - DNA, 122 bp, Homo sapiens
aagtcccagtaaatgatcttctttgatcaaaaaagtgagccagacactaaaatattgtcacggaagaactgaaggcagggagatgctcaaatcctcccaagtctggcattcagtgcaccacc

SEQ ID NO: 379312 - DNA, 122 bp, Homo sapiens
ctgattgcagctgataggtcaatggcaaagagcagcgtggccttgctaccctgctaatggcgcttgattttccctcaagacctaaaaatacatgagcagcagcaagacagaaaacagaagac

SEQ ID NO: 379313 - DNA, 122 bp, Homo sapiens
gtatatttttcagagagttgagctatagacagccatggaaagtagtagttttttttttcacgttagtgactactgtactttgcagtactttataatcttaagtttaggaggctttagttttc

SEQ ID NO: 379314 - DNA, 122 bp, Homo sapiens
gaagggcagaaggaggagcaacagcgggaacatgagctcaaccatctctgccggctgcagcggcaccagagcgggatgctccagcgttgctcgccgactatggcttctctttctagacacgc

SEQ ID NO: 379315 - DNA, 122 bp, Homo sapiens
taaccaagtcagacttaataatacacccacatgggctccctctggctggtcatcaggaatcgcctaatgctcttggctaagagcccatctgtctctgcagccaggatggatgcacaccacct

SEQ ID NO: 379316 - DNA, 122 bp, Homo sapiens
gagcaggggaacgcctggagccacgacctcacactttgccaagacaccaaacaaagacagcggcaccccagcccagccacaggatctcaccaggtggagtctctcaccagtgtggcgggggc

SEQ ID NO: 379317 - DNA, 122 bp, Homo sapiens
cgttccgcatggactccctgtggagcgagtctgggttttggaagaagctgtccgtggcctcgtctagtctccactcattctgcgttaagcagtagatagcagttctctcgccagcctgagtg

SEQ ID NO: 379318 - DNA, 122 bp, Homo sapiens
aaagctcttcaacaggaatggtaatgtttcatttattaagctggtttatgaatatacaagcgtttactatattaagatttgagcatgtcgcacataaaaataattggtgaccatatctccgg

SEQ ID NO: 379319 - DNA, 122 bp, Homo sapiens
tacttcgtagtcattttcaaataggggagaatttcctgaagtatgcagcatctgctctgccgggtttgcaatctgtgcacaggtattgcagttaatgagccaccggcttgccgcttccaggg

SEQ ID NO: 379320 - DNA, 122 bp, Homo sapiens
tcctgagaaacggccctactcaccttctcctctttgaccgagccccacccacacctgccccgggcctggccctgtccttgtcactgaaggacagtccagagtcctgcctgcaggtcagaggg

SEQ ID NO: 379321 - DNA, 122 bp, Homo sapiens
aactgatgcctggggagctgtgtgaggtgtgcggccccaggacgtcagggcctgtgagaccgggcaccgcggctccaccatttcgtgggttagggcgtgccacacagcaccaccggcaaggg

SEQ ID NO: 379322 - DNA, 122 bp, Homo sapiens
agcagggcacgatcgtgggcatgaggctggcgagctgcaacaagtcgtgtgggacgaacccggatggcatcatcttcgtgtccgagggcagcaccgtgaacctgaggctgtacggctacagc

SEQ ID NO: 379323 - DNA, 122 bp, Homo sapiens
tagctgactgaagtgcatgcaaattgaaataaaatggcagccctgggacattctaaaacacgacacatgaggttgccagggtaacccaccaggaggctgtcttggcatcttctggaataaaa

SEQ ID NO: 379324 - DNA, 122 bp, Homo sapiens
catccaggggaccccaaaacgccctccgccgccccagtccctggcctgtgcgcgtggacgcggggtccctactcacagccacttgatgccatagcacacgccggtctggagcgccagggcga

SEQ ID NO: 379325 - DNA, 122 bp, Homo sapiens
cacctgggcagagctccctgctgttggcggggctcaggctggaaggcccttgggggagcgcggctggggggtaaggggttaagcggtggcgtccacatctgggagccattggcgcattcctg

SEQ ID NO: 379326 - DNA, 122 bp, Homo sapiens
ctgtgccagcatgatggggagggcgacgcgcatttctcacacggcagggagggccacacgcgtttgtttctcacacgatgggcagggcgacacatgtttgtttctcacacggcggggagggc

SEQ ID NO: 379327 - DNA, 122 bp, Homo sapiens
tattcccaaataagcattagctttgggatctgtgggctagcagtttgggcttggttcagccggatgattttctgggctctgttgtgctcactcactcgtgtcgatagtgagccagcaggttg

SEQ ID NO: 379328 - DNA, 122 bp, Homo sapiens
tcccaaaatactcagatgggggtttccattttccttctataaatcaaagttgctggtgctcgcagcccccgtgcagggtggctggggctgtgtatcacaaggcagcccaagaccccctggtc

SEQ ID NO: 379329 - DNA, 122 bp, Homo sapiens
gccctgcgcgccgagtgccggtggcttgcctctcagcgcctggatgggatcaggtggcagcgtccgctaggctcgctcctcccggctctgcccgccccccgccccccgccccccatcgcaca

SEQ ID NO: 379330 - DNA, 122 bp, Homo sapiens
cgagtgctctggtgtgctaatggtcagcagagcggctcccagctccctcctgcagcagggcgtttggccgcagcccatggcaggagctggtggggccgcgtcaggcagccccaggcatgggt

SEQ ID NO: 379331 - DNA, 122 bp, Homo sapiens
gccacctggagccaggcccactttctccatggctgccgtggccttaagggccacgaggctcgctgtgcaggcttccaaggagaggacgcggtaccctgacctgactggatgctgccccttac

SEQ ID NO: 379332 - DNA, 122 bp, Homo sapiens
ttgttgaaggagagatgcttcctaattgagatttcccattcctgagtggagacattattgcgaattgttacgcagtcagccattagaagtacaatttctgccgtcattcatttgattttatc

SEQ ID NO: 379333 - DNA, 122 bp, Homo sapiens
gcgtattgccaaaggtgtgctgtcatcatgacattaaaagagaatttacagaaataaatgcgcatttactgaaatgccaaagcgaatctcttttggagcagctgactgttcttaaatatctg

SEQ ID NO: 379334 - DNA, 122 bp, Homo sapiens
ccgtgctgaccaggctgtgttcccgctgtggtcagagcagctccgcccagcacagctttccgcttccctttgcagggacagagcacctgagttgcaggtgcttaagcgagcagccgattact

SEQ ID NO: 379335 - DNA, 122 bp, Homo sapiens
ttttttaaaaaagcttttgtccaggccaagtgattctaatgtgtagacagggcagaataccgctccctgtgcgggggaaaaaatccccaacatctgaaattcctcaaatccctcagattctc

SEQ ID NO: 379336 - DNA, 122 bp, Homo sapiens
ggacaggaagtttcagcatgggagaataggcgcgtgcacccagaagagcagaaggcgggccgctgctctgcctttaccccagagacgcagttgctgcacacacggagctgcttgttctgaaa

SEQ ID NO: 379337 - DNA, 122 bp, Homo sapiens
cgcctggccgccgtccagtgccctcgccccagccccggcccgctcagccgccgccccagccgagccccagccaccaacgccaccagcgccatcctccgttccgcgcctcagcagcctctggg

SEQ ID NO: 379338 - DNA, 122 bp, Homo sapiens
tgtggtgtgcgagaccccgagctcgaggccgagccaaggctgggcagaaagttgcaatcacgtgctgtcggagcccactggagcgcacagcccgctccccctgggacgcccaggcggaggac

SEQ ID NO: 379339 - DNA, 122 bp, Homo sapiens
ttcatgacagatgacagggagtgtgaaatgcagtattttttaaacttttttgttacaatccgtagtaagagatctttttatagcaagactccattgatggctgagtatggttgtgtgcacct

SEQ ID NO: 379340 - DNA, 122 bp, Homo sapiens
cagctggagcggacaggacggcttccgggatttggcggggcctttgtctctggctgcagccggagctcctgctctcctcctcactgctcagtgtcctctgctcctagaggcccagcctctgt

SEQ ID NO: 379341 - DNA, 122 bp, Homo sapiens
agacaaggttatatctactccattttcaagagaaataacccctctggttcccatgcaaatcgcttaaattccttcatcaccagaatctctccaacaggcccaactccagcccagctgtgaac

SEQ ID NO: 379342 - DNA, 122 bp, Homo sapiens
ctgcccatggcagagatgactgtccattaccagaagcagtgcgagctctgccccacgagccgaccacattcgcagggtcccgtcccgggccgcagagagcagccacctccggtcctggctcc

SEQ ID NO: 379343 - DNA, 122 bp, Homo sapiens
gggcagaggcccaggccccttcctgtcactcagagaagctgctgctcccagaaaacggggcgccagcctcccatgaacactgtgtcccaaccccggtcctctcaggattcctgtgtggaaat

SEQ ID NO: 379344 - DNA, 122 bp, Homo sapiens
cagcgtagtcggcgcggctggtcaggcccggcagcacgtcgccctcggatatgggcaccacgtgcgagacgccgtgcccgctctccaccaccagccccgaggtcttgccgtaggagtagatg

SEQ ID NO: 379345 - DNA, 122 bp, Homo sapiens
attatatctccctcgccctttgactcttcctggtacaggccagtgcttagcacattaggtcgtagaacagaaagtaggattggccgggttcagtttgaggtttatcacttgctgtgtgatct

SEQ ID NO: 379346 - DNA, 122 bp, Homo sapiens
tgctaatcggctaccccgagtggagcgccggggcggcaggcgtgggatggctgcgggtggcggggccggcggagagggagctgcaccgggcggggcactgggactgtggcgggcacccgcgc

SEQ ID NO: 379347 - DNA, 122 bp, Homo sapiens
ggaggtgtcacagaaaaaaaactctatattgagttttagagttagagctttggcatcagacgtagttttgagttgactattctactgcttgttagctgggtagccaaagctcaaaaaaaatt

SEQ ID NO: 379348 - DNA, 122 bp, Homo sapiens
cttgtgtggtcttggtctatctacaaccttaaagcctcagtattctcctccgtaaattggcggggagcaatatcacccttgcagggtgatggttacgggtaaactacatttgaaacgttttt

SEQ ID NO: 379349 - DNA, 122 bp, Homo sapiens
acagttcccacaggatgaccttgggcactcctggattttgagctgccctggctaaggagccgcaccccagtcctcgcccgcagctcaccggaaatgaagttgtctggcctgaagacctgccc

SEQ ID NO: 379350 - DNA, 122 bp, Homo sapiens
ccaaacgaagatgacggtcatcggaacagtaattaataacagtcaggggcccgaccccgccgcccgcccgccggccaagccctaccgcggacacttacactgcacagggccggagagtccca

SEQ ID NO: 379351 - DNA, 122 bp, Homo sapiens
tcaatttctgcttaagccatcaatctgtggtattttattatggcagcctgtgcagacaaacgcagcttatattaggtgctgggtcatcacaatactctatgggagctgcgacactagagcca

SEQ ID NO: 379352 - DNA, 122 bp, Homo sapiens
ttttgagacgtcattttggcggggggacccctcgagtttgggaactgtttatcttaatttcgcttctgttctcaggattgtgacagtgcctgctttaaagcaggcgttgaaggggaatgttc

SEQ ID NO: 379353 - DNA, 122 bp, Homo sapiens
caacttgattccatgtgccagctattcagagtcagaagagaaattcttttcatccgtctccggatttaaatggtaagggaacatgagtcatcttcctcatggcccatggaagaagcacgttt

SEQ ID NO: 379354 - DNA, 122 bp, Homo sapiens
attgcaaagggcttcctcgctaccaagcacgttcacttgctcgacctcatccctgccatccgtaggcctgtcccttgaatggggattcaagggcctaggtggccagctactgcagcaggtcc

SEQ ID NO: 379355 - DNA, 122 bp, Homo sapiens
aatggaatattactcacccttaaaaaggaatgaagtactgatacctgctgatttagaggacgaacctctaaaacatgctaagtgaaagaagccagacacaaaagaacacatattgaattatt

SEQ ID NO: 379356 - DNA, 122 bp, Homo sapiens
actaccaaagcaaagagagcttactgctttaaaaaaaaccaggtggctccgccctccgggcgcgaggcccgggtgggccagagaggcaggtcctcgtccctcgggcccgtggcgctgtcgtg

SEQ ID NO: 379357 - DNA, 122 bp, Homo sapiens
cgagagagggaggcgggggttgtgtaacgctgggagccatgtttgcagcctcccgggatgcgcggccgggcggaggcccggcctgccgaggagctgcgcggccatccccgcctgggccaggc

SEQ ID NO: 379358 - DNA, 122 bp, Homo sapiens
gggagcatgagagatgtgccaggaggaccaggagccccatctgatccagggagccctgctcggccaggggggccctggagtgggaagagaatgcaaaagatggggtgaaagataaggggaca

SEQ ID NO: 379359 - DNA, 122 bp, Homo sapiens
gagggtgagggactgtcctcgggaggggcgtggccagacgggggtgctgggtgtcaggggcgtggccagcttctggggctgaggcgtgaggggcggggccatctccgggggagggggaagtg

SEQ ID NO: 379360 - DNA, 122 bp, Homo sapiens
ccagaagagattgagattgattttgaaacactcaagccatccacacttagagagcttgagcgctatgtcctttcctgcctacgtaagaaaccccggaagccctacagtacgtatgaaatgag

SEQ ID NO: 379361 - DNA, 122 bp, Homo sapiens
ggactttcccaggaattccactggaatgtaaacagtcttcagatcccaggcagaaaccagcggatatcctgagctgtccaaagtcccatgttggatcccaaagatttgatttcttttttttt

SEQ ID NO: 379362 - DNA, 122 bp, Homo sapiens
tgctgagcgccggcaggcggggccggggcggccaaaccaatgcgatggccggggcggagtcgggcgctctataagttgtcgataggcgggcactccgccctagtttctaaggatcatgtctg

SEQ ID NO: 379363 - DNA, 122 bp, Homo sapiens
gccgcagatcgctgtggtgggcggccagagcgccggcaagagctcggtgctcgagaatttcgtaggcaggtaggcgcggcgcgcccccaggcgccgacccccgacccccgggatccctggag

SEQ ID NO: 379364 - DNA, 122 bp, Homo sapiens
ccaccggcatggcaaggccaagcagagcatgcagccgggagtgccgcggtaggccaggtgcgggcggcaacagcgacatggagagctcagcacactggcctgggaaggcgcagaccccactt

SEQ ID NO: 379365 - DNA, 122 bp, Homo sapiens
atggccacaacctcaaagtgtaaattcttcagggttgacatcatgctttgggtcacaatgcgttaaatctgtggcctttgcatcgaagccatgctttcaagatgtaaaacctatggagctga

SEQ ID NO: 379366 - DNA, 122 bp, Homo sapiens
aggagttcaagcgggcagaatcagatgagaacagcactcattacttcatacggacattgccggcccatgggattcctcctttgaagaggaatctttggaacttgaactgtctcttccagaag

SEQ ID NO: 379367 - DNA, 122 bp, Homo sapiens
gcaagctggcctctgaaacaaccacaactgcttttcaatgccagctgtgtccaaatcactcgaagtgtgagttagaaacccagggacccctctggaattctgcttttgggtctgagtgcccc

SEQ ID NO: 379368 - DNA, 122 bp, Homo sapiens
ggctgtcgagcgagcgccgaggcagcagcagctgctgcagcaacacgcggaaaaagttggcggtcgcctgttccggcgaagggcggctgccgctgcctccggcgaggagcgaggaggcgggc

SEQ ID NO: 379369 - DNA, 122 bp, Homo sapiens
cacgtgtggctactgagtgtcggacatgtgaccactggcacggaggacctgaatccttcacgttaaggacaatgtaaacagccacacatgcctaggggctaccacactggacatggcagagc

SEQ ID NO: 379370 - DNA, 122 bp, Homo sapiens
gggagattactgtaaactacaaactggagactgagcattatacagttatgtgcaatgggacggcctgcgttctctgtcttgcatctgctgtgctcaccacagtgctgctcaggcatgagggc

SEQ ID NO: 379371 - DNA, 122 bp, Homo sapiens
ccacacagatggcatcccccacctagtcctcagccctagtactgtcttctttggagccttcgctctgtagaacttggaaaaatccagaaagaaaaaataattgatttcaagaccttctcccc

SEQ ID NO: 379372 - DNA, 122 bp, Homo sapiens
gcccccgaggttgggcccgcggtatgggcagtggaaactgcgcatgcgcggcgtcagggtcgggcggaagttgacgccgccgtgccgccgccgcgtgacgcatttcctgtttgttgttggag

SEQ ID NO: 379373 - DNA, 122 bp, Homo sapiens
cgatgggcaggagtcgaggatcccaaggttatgatcactacctcccgagaccccagttcccgcctcaagatgtttgcaaaggtactggtgagcagggagtgagggagagacacccaggacac

SEQ ID NO: 379374 - DNA, 122 bp, Homo sapiens
aagtctatctgccaggcaccgcggtgactgcagggaagcctgagctacagagggctcctccgggacggggaagctgccctgaagacgctggcagcagagcaacgatgtgtgctccgccgcag

SEQ ID NO: 379375 - DNA, 122 bp, Homo sapiens
tatggattttgcagcctcatctctgggtcggaaccattgtctctgtatttttatctgtgccgtgagaatacttagccgatcagcctctttgctaaggcttcagaaagatgtgtggatgagga

SEQ ID NO: 379376 - DNA, 122 bp, Homo sapiens
ggctgagaggaggtttgattttttttttttttttcttgccgagtggccctgggaggcgcgcggaggccctgggcaggcggaaccggatcccccagctcctgctccactctggcctcgcagac

SEQ ID NO: 379377 - DNA, 122 bp, Homo sapiens
gggagcgcggtgattgggtacaggtctcggccagcgcggtgattgggcgcaggtcccagccggcgcggtgattgggcgctggacccggcccgtgccatgattgggctcaggttccagccgga

SEQ ID NO: 379378 - DNA, 122 bp, Homo sapiens
cgtgggggagagttgggggacgggatccctggttctagcagggtacaatagacctgtggacgcgggccagggggtggcgtgtgggagcttcttagcctatccccggtggctgcattgccccc

SEQ ID NO: 379379 - DNA, 122 bp, Homo sapiens
agggtcacacacggcccctgcccgctccgctgcggccatctccgcttccgcttccgcttccgccgaggcttctttccgactcaggcacggctctgtgccgtagctttcgaccccaccgccag

SEQ ID NO: 379380 - DNA, 122 bp, Homo sapiens
acacttatcaatctggggcctctccgaagatgctgagaccagggccagtctcagctgcaacgccctgcttggaagccactatgggatgattctgcaacagatatcatgatgcaacagatgcc

SEQ ID NO: 379381 - DNA, 122 bp, Homo sapiens
accccaggccctgctcctccctctgtacccctcacctgtggtggcagggcatagtaccagcgagtgcgaggaagggttgggggagctggtgaccccaggtctcccccactggggcccagaca

SEQ ID NO: 379382 - DNA, 122 bp, Homo sapiens
gtagccaagggcaggtgagggaggagggactctgagcctgggccaggggagtcagaaggccggagccctgaagggccccacagccctccccggccctgctgtctccatacaattctgtggcc

SEQ ID NO: 379383 - DNA, 122 bp, Homo sapiens
cagagttcgagccgcacatcgtgcccagcaccaagaacccgtaggtggtccgcggcggcgcggggaggcccagggcaattaggacagcccctccgctggactccgccagtgctgcagcccct

SEQ ID NO: 379384 - DNA, 122 bp, Homo sapiens
aagtagcttcagaaaagttggcctgaaaatcccacccccagagtgggggaggggaaagcacgatggttcacattggtttccaaacacctttcaaaccactgctttggccttgagtcgaggat

SEQ ID NO: 379385 - DNA, 122 bp, Homo sapiens
tggtgttgtgagatgcctgtgtcagaagacactgagttcctcactcgcctcctatcatgccgatgatcacaggagaaagagcagggcacatgcatgccagcatgctgaagggaggccaaaac

SEQ ID NO: 379386 - DNA, 122 bp, Homo sapiens
acggctcttctctttttgtgtttctttctccaggtggagaagtcagaactggcccccactcgaggggccgtgatggagcagggcacgtcctcgtcaatgacaggtaacagcttcctgctgaa

SEQ ID NO: 379387 - DNA, 122 bp, Homo sapiens
gtgtgtgccatcacaaaacgtgagacggagaagggacagacttttcaccttagtcctggccgcccatattcagagaggccgactgtcttgttcattgctgcctggcaaaaacctacattcat

SEQ ID NO: 379388 - DNA, 122 bp, Homo sapiens
tgagcgatcccgaggaggactgaaaagagacgtggaagcagggttgaggtgtggcgggaacgggccgcgtccactccccgcacccccgacagcgcacctgagccccgcctcggccgcacagc

SEQ ID NO: 379389 - DNA, 122 bp, Homo sapiens
agcggcgcgggcgtccgacaaggggtgcggggcatgtccggggcagccccgggatgcagccgcccggggagcctccgcgcctctgcgccgcccggccgcaagcccggactttgcgaactgtt

SEQ ID NO: 379390 - DNA, 122 bp, Homo sapiens
cctgggctaccgcgtggctgcccggaatccctgatggggtcaccagtgtttcacgtaggacgcccccaaccctctgcctggcattacttccaattatagatgtgaagagaaaagaaacagaa

SEQ ID NO: 379391 - DNA, 122 bp, Homo sapiens
tagaaaagattgtctatacaggcacttggatctccagggaatcatctctccaagtgtatacgcatgtcggggacgccaaatgccctgggcccgccccagtttctatccaaccagccctcctg

SEQ ID NO: 379392 - DNA, 122 bp, Homo sapiens
ggcggtgggcacggccctacaggcgcccccggccagcactgccgcggccgttgttagccccgcctttgcgatcggagatgctgagggcgtccccatctcacaaacaggtaaaccaagattca

SEQ ID NO: 379393 - DNA, 122 bp, Homo sapiens
ctattaacttcatcacaacattttatgttataataccttggtcacagagattcctagccccgaattttctgtgggcttaaattcctccttcacagattccagtaataggatgcttataaaga

SEQ ID NO: 379394 - DNA, 122 bp, Homo sapiens
aggaagccctgcagctttggaactaagctacaccagcactgggaagttctcctttggaaacggtttttagggtgtgcacctctcagcctgagtccgatctcacagagactgtgtgagctgct

SEQ ID NO: 379395 - DNA, 122 bp, Homo sapiens
aactacttttgacttatccaaaatatggtacaagtttgaatggcatgcaaactggatacacgattccaaaatagttttttttattccttctccgcttgtcaggggactgtcaccatccaacg

SEQ ID NO: 379396 - DNA, 122 bp, Homo sapiens
aatcagagcgcgctgcttaacacgctcccgggtgactcgtacgtagtcagtgctgggaagcgctggtctacagtcatgtttctcaagcttgaatgcacatccgaatcccccggaaggtttgc

SEQ ID NO: 379397 - DNA, 122 bp, Homo sapiens
gttggtggctgaaactagcaccacccagtgccagcaaggagtaattgcaggttccagtctcgaccggttatgtgcttgcaacaaagctgagcctgcagagttcaagtgacagtgggatggca

SEQ ID NO: 379398 - DNA, 122 bp, Homo sapiens
caccccttctcctggccaggttggagtcccgccacaggccaccagagcggagcagcgcagcgccctgtctcccagcctgaggtgcagtgctgcatctctggtcagttgggagtctgagatga

SEQ ID NO: 379399 - DNA, 122 bp, Homo sapiens
ggggcaggaatgggggatgggggcttgccattaacagtaaacagtgatctttgaaagcaacgagtgggcatcagtattccagggcctttattagttttgtttgtaggctatattctccatta

SEQ ID NO: 379400 - DNA, 122 bp, Homo sapiens
ggaagggaagtgatttgatgcaaggctagtcagtgtgctccttgcttgggccaggtggcccgagtctagcccttaccttaacctcctcctccagctgcctcttgaggtcctccagctgctgg

SEQ ID NO: 379401 - DNA, 122 bp, Homo sapiens
gaagatttaaaacacacaaggaaccgtgaaaccaaaccagaaaagccctgctgaccgagccgccccttctagaggccgaacaggcatggaaaccctgagccgacacaggcacttacccagca

SEQ ID NO: 379402 - DNA, 122 bp, Homo sapiens
tctcagaaaaaaaaaaaaagaaaaaagaaaaaaagggtaagaatgggagctttatttatgcgttatatgtttaatacaaattcaatgtattttgttgtgttcaatacagttaatatctggag

SEQ ID NO: 379403 - DNA, 122 bp, Homo sapiens
gtgaaatatactgcgcggtgtcaactccccaaaaccataaaactaactttatggacctcacgtgactttctcgagccagtgaggggtatctgtctgacttctcggcgatttttacgatctaa

SEQ ID NO: 379404 - DNA, 122 bp, Homo sapiens
gggtgggaagttagactctgcctcttaacaggaggagctgaagagtcacacgggaaaggacgcaaggaagggatggaaagtggggacatttttgcaatcaatccatcatgttcacattttac

SEQ ID NO: 379405 - DNA, 122 bp, Homo sapiens
ggggcgtgggagtctcggagtcgtggggaggggcgcagggccggggcggggcctcagggccgtgggaaggggcgcagggccggggaggggcacggggccaccacatggggaggggcgcaggg

SEQ ID NO: 379406 - DNA, 122 bp, Homo sapiens
cctgtgtcctcgactttcaaatacctctgtgagactttctactcttcccttctaaaactgcgcacactgtcccaacatgcatccccagtataattctctcatacctatcccagaccccagcc

SEQ ID NO: 379407 - DNA, 122 bp, Homo sapiens
attacccccatcaaaaatggggtccataaataagcatagggaataagtatttgtacagggcggtggagtttttaaaggatttttctgcaggatcaggttgttggtctgtgattaaatattga

SEQ ID NO: 379408 - DNA, 122 bp, Homo sapiens
gaagtcaactgctcattcattcaacaaatatttattgcgcgcccgcttagtgccaggcaccggaggtgccccgagcaagaagccgctctcgctgatccgtttccgctccccaagtgtccggc

SEQ ID NO: 379409 - DNA, 122 bp, Homo sapiens
cttttcattgggacggcggacgaccgcctgctgcgcccgcacgccttctaccaggtgcaccgcatcacagggaagaccgtgtccaccaccagccacgaggccatcctctccaacaccaaagt

SEQ ID NO: 379410 - DNA, 122 bp, Homo sapiens
acaactctaacacgaaactgggccaggactgcaggtaggtcccgtccaatgcgacacgctcgcgacggcccacgcactgccagaaccagccctgccactaaccagcctagtaaggaacgcag

SEQ ID NO: 379411 - DNA, 122 bp, Homo sapiens
atccgcccccgcgttggggactttgcctctcttccgcgagactcttgtcatcgccgcccgcggttaagagttggggctccgggtcgggctgcctcagttcagatcttgctcctccacttagg

SEQ ID NO: 379412 - DNA, 122 bp, Homo sapiens
ggtccaggatccatcagacacgattggtggacttgtcaccgctgcagccacttaggaaaccgttcggcctcacctgacgaagctgaaaatgtgcttccctgagacccgacaactctccttct

SEQ ID NO: 379413 - DNA, 122 bp, Homo sapiens
cagtaagtcttgagcaggatggtgtgggggcaagctctgtccatccgccactccccactccgctccctgtgccccccgcccccgccaccataccacacatgtcaccatactgtggctgctct

SEQ ID NO: 379414 - DNA, 122 bp, Homo sapiens
cgaggcccctggagagcgcaccggagagtcccaggcgcttgtccccagccggactcggggcggggagggccaacaactttctcccaagtcccagccggcactccttcccaccggcctgtgtc

SEQ ID NO: 379415 - DNA, 122 bp, Homo sapiens
aatcagaggaggaaggagagagtgcagaagctgtcagaggcgagagatcttggctggagccgccaaaaaactggcaacatgagttagcgtaactgagtaaacagcaaacaatctccaaatga

SEQ ID NO: 379416 - DNA, 122 bp, Homo sapiens
caggatcagagttattggccaggtggcttccactttgcaagtggctcacctcgtctcttccgtcactgggcaaggctgctgggggagccaccagagggctgtgttgctcatgaccagggccc

SEQ ID NO: 379417 - DNA, 122 bp, Homo sapiens
caggagatcgcagatgctgcggatgcttctgagccccggtggtgtgtcccagcctctgaccgcctccctggcccgccagcggattgtggaggaggagagagagcgggccgtgcaggcctaca

SEQ ID NO: 379418 - DNA, 122 bp, Homo sapiens
gatccccaccgcagccgtgaccgtgatcgtgctactgggggctggtcctcctccaagaagcggccccggctgggggaccttggaggaggaagtcgggacctgtctccagagccagcacccga

SEQ ID NO: 379419 - DNA, 122 bp, Homo sapiens
aagggtcatgattttgcattcctaccagcccactggcatatgagtgtctctccgacacttcgtcaaaagtgtattaagttgaaaatttttgctattgtaacgagtaagaaatggtattttag

SEQ ID NO: 379420 - DNA, 122 bp, Homo sapiens
gccaaaaaggttggggactgctacctcagaacaccgaagacccggcgctaagggcagcctcgcacccagcccgggaaggaagtgccgataatagaaccacctcaaagttacctttattgagg

SEQ ID NO: 379421 - DNA, 122 bp, Homo sapiens
gttccgggttcccaaccaatcgcatcaagccacaacagagggatctgccaacccgggcaccgcttcagggatctagacccagtgagagtcacacaaccccagcacctgtcgacctcacactc

SEQ ID NO: 379422 - DNA, 122 bp, Homo sapiens
tcatcccacgcggctccgctgtgagtcgggcgtcccaggagctgccggcccacccatccgcgggtttcttccgttgggggagccctccagactcgtagaatataagagagcgcccctcccta

SEQ ID NO: 379423 - DNA, 122 bp, Homo sapiens
aatttgtaccacaactttattttgaaaacacaagttttgctagaactggttagttttgagcgggcttagggaaagggggctgttttaagtgtctgagcagaattgaaaaataagtggaccct

SEQ ID NO: 379424 - DNA, 122 bp, Homo sapiens
agcaaggcagaatcattcaaaacatgggatccatatagaagataccgaaaaagggatccgcggtggtagaaatgttgggaaaggctgccaggatggacccttgcagataggaaaagctaatc

SEQ ID NO: 379425 - DNA, 122 bp, Homo sapiens
acaacagagaagtatctgatagggctgccaggtttatggatgcagcctgtgaccttggaacgatgtttttaaatctaaaattactgatctaagtagtattaaacctcagactccacctgttc

SEQ ID NO: 379426 - DNA, 122 bp, Homo sapiens
ggccttgggatgtgccagtttgttgtgaagcacagagaggcgtggtgcccaatgggtgcacgtcccagttcctgcctctgaggcagctccttacaagcaccccctcacccctagattctctc

SEQ ID NO: 379427 - DNA, 122 bp, Homo sapiens
agtcacagctggctctgtgtgttgggctggaaatgagggcctgctgggtcagggcagggccgaagctgagtgagatggggaggcttgggttggtggtaaggacaaagtaaagtgatgctgac

SEQ ID NO: 379428 - DNA, 122 bp, Homo sapiens
ctgtccacttaaagacttcgcgagagaagccccacgactcataggtgtcttagaataagccggaaaagaatccagaactaaaaagccgccttgcagacgcaaagaactccctgatttagcct

SEQ ID NO: 379429 - DNA, 122 bp, Homo sapiens
ttccttccaaaagcagaaagtcacaatgactctagtattttaaaatgaagaacccacgtgcggaggagtgaagccaatatagtaatatctgaatgccatctaaaaatgttttgagtggtaaa

SEQ ID NO: 379430 - DNA, 122 bp, Homo sapiens
ggggaggggtcagtgtgaatcatcaggtcagtgccttgctctgaaggctgctgcccaaaacgcacctgatcctctgcctcacaatggactcagaaagccacagagggcccagcttgccaggg

SEQ ID NO: 379431 - DNA, 122 bp, Homo sapiens
cccgggaccccgttccccagtccatcagagtgaaggctgtgaagctcctcttgggattcccgcatttaactcagcggggctgtcctaagctgagcgctggttctgaggccgcctccaaatcc

SEQ ID NO: 379432 - DNA, 122 bp, Homo sapiens
gtagaaagggcacctggccatattccccaagggagcttgtaaactgacttttagccacctcggacttgattcaaatccttgaaacaaatcctggcgctttgggaggcccaggcaggcggatc

SEQ ID NO: 379433 - DNA, 122 bp, Homo sapiens
gttttcttctgcgtctggacaggcaccagctcctcagcagaggagcctgctagcttctgccggcagccgcagcacattcagagcgttgacagagcaggggctcctctcgctgtccctggaag

SEQ ID NO: 379434 - DNA, 122 bp, Homo sapiens
atcaggagagccgctgctggggtgatggagggagtgtgctctgaggggcaagggctgctccgaagccctgctaatgtctctgtgtggccatgctgtattttcagcttgtcatcatggctggg

SEQ ID NO: 379435 - DNA, 122 bp, Homo sapiens
aagatatgatttctgctctctaggaacttacagtcctgtttaaagacacgaagagaaaaacgagatgccaaaccacagtgggagtttagagaagactgtgatgagagttggagcattcttgg

SEQ ID NO: 379436 - DNA, 122 bp, Homo sapiens
aatgtaaatacgagcttccagaacaaatgctacaacacaaaacagaaacacatgtgcggccgcgcggcaagcgagcgcgcggcggggcgggaggcgcggggcgcggggcgcgcgcgccccct

SEQ ID NO: 379437 - DNA, 122 bp, Homo sapiens
ctggaagagtctctggacggccggaatcggcgcctgggtacaggactcctgattggaacacgattagaagagggaaacgcaccttgttccttccccgcttcttgctcccttacctccccaac

SEQ ID NO: 379438 - DNA, 122 bp, Homo sapiens
gggggtcccctccccgggggcttccccctccgcccgagaagttctgggagccggaagcagcgtgttgttggaagctagcggctccttgaaggctgagtcgctgggttctcctccccgccggc

SEQ ID NO: 379439 - DNA, 122 bp, Homo sapiens
tccactgggaggcctggccccagcagcatctggagggccggtggcgcgggaatttgaaaccgttgcgacagacccgttaggcgattcctgtgggggagacgttgtctgctgggagctgggct

SEQ ID NO: 379440 - DNA, 122 bp, Homo sapiens
gtacatcggctactaccagggcagggtgggcctcgtgcacaccaagaacgtgctggtggtcggcagggcccggcccagcctgtgctcgggccccgagctgagcacctcggtgctgctggagc

SEQ ID NO: 379441 - DNA, 122 bp, Homo sapiens
ttgaattgagaaaccagtttagtctaggcctatttgttctaagtaatatgtctactcttccgtgagtaacaggctaaaaaaaaatgtctgtatacacatgaaggtaatcaaacttgttaatt

SEQ ID NO: 379442 - DNA, 122 bp, Homo sapiens
gggtcaccagttctggggccattacaaaggatagggcagaggggcagagtttggggcttccgtctcagattagtcggttgagaatctgaacaaaggtgggtgaaggctcggaaccccggggt

SEQ ID NO: 379443 - DNA, 122 bp, Homo sapiens
ccggtgggattcgacttggagccttggttctgttccctccccaggtttgactatggagagcgcttctgggacatcaaaggcaagctcttcagctgccgctgcggctcccccaagtgccggca

SEQ ID NO: 379444 - DNA, 122 bp, Homo sapiens
agctggggactgctgagcagctggggctgcccagaaggagggcaaagccatctgaggaaacgcccagggcagaaggtcctgccaacccccctctgacccggtctcctccgagtcctctcctc

SEQ ID NO: 379445 - DNA, 122 bp, Homo sapiens
gggactggctgctcctctcaatacaaagactacccaaggaataaaagcaacgtctatcaccgaactactactcccagcggcccccgcgcgggcctgcccatgggaggtggcgctcgtctccg

SEQ ID NO: 379446 - DNA, 122 bp, Homo sapiens
acctctgctcccgtccccgtcccgcggctactcagttgcccgctcatgggaggctcgcgacggaaaataaatcccctcagagtgaacctgggaggccgagaggacccagcctgggatctctg

SEQ ID NO: 379447 - DNA, 122 bp, Homo sapiens
ggcgggggtgggggcgggcgggccggcggccgcagcccccacccgagggcccccgcacctcgggccctacttgtagaatcagtacaaaataggtgctacctaaacgttccttctacctgaat

SEQ ID NO: 379448 - DNA, 122 bp, Homo sapiens
gatagcaacaaacgctttgaacctggtgctctggccagcacgggtctgcttctgcaccggcgtaaccttcaaaatctcgtccttgagagaggcccccaggaaaaagtcaatgatctcagatt

SEQ ID NO: 379449 - DNA, 122 bp, Homo sapiens
taataaagcgggcagcaggatggtggtggatgcggccaactccaatgggcctttccagcccgtggtccttctccatattcgaggtaagttattgtgtgtttcactgaatcggaaccttccgt

SEQ ID NO: 379450 - DNA, 122 bp, Homo sapiens
gtagaacagcagccgagcttcctgtaatcttgtttataaactgttgatgcatgtcctgaccgcatcacaagagggttcacagggaagccgtcagtcttggggcagaatctgcagggcaccag

SEQ ID NO: 379451 - DNA, 122 bp, Homo sapiens
aagggacttgaccgaggtgattacatcggtcttagtacaacaggcacttaaagccaaagccgtgattcgtagtctcaccctggcttgagttaggtttcttttttatttttttttgaggcgga

SEQ ID NO: 379452 - DNA, 122 bp, Homo sapiens
acacacacacacaaatatccctggaatgcccccacagaacttcctgggtggttgcctacacgcccctctcttagacaataagctctctaaagagtctttttaaagacaagagagcagtcaac

SEQ ID NO: 379453 - DNA, 122 bp, Homo sapiens
ctaacagaggcaaagcaacccagacaatctagtctcattcaacacacaccccatggctgccggtgggaacactgttgctattctcatcccatattcctcctgcaaatgtgcaggctaatgtt

SEQ ID NO: 379454 - DNA, 122 bp, Homo sapiens
tcctttcggtggtagttggggaaggctatgcagatttgctctgttgtgacgcgttggtgacggtgcccagcctgcggttccccacagcatcgcaggcgctcggaaatcctctcccgtgcctt

SEQ ID NO: 379455 - DNA, 122 bp, Homo sapiens
ggttcatctcactagggagtgccagacagtgggtgcaggtcactgggtgtgcgaaccgtgcgcaacccgaagcagggcgaggcattggctcactcgggaagtgcaagggctcagggagttcc

SEQ ID NO: 379456 - DNA, 122 bp, Homo sapiens
aagatcccggggtggaaagtgggcgacccttgttcctgccgggaagtgcacacgaggagccggccagaaacccaggcgccggcaggggtctgaagaggactccagccccggaagcccgtggc

SEQ ID NO: 379457 - DNA, 122 bp, Homo sapiens
ccgcgatacccgggcgatcggcggcgcaggtggagcctggagcagggcaggcagcggggccgcgggccagacagaaaagaggaagacagacaggaaagaggacagaaaagagaagccagacg

SEQ ID NO: 379458 - DNA, 122 bp, Homo sapiens
agacttacctgaagatcagattcaatcagaaaaatgcccaatgcaatcactgcatctctccgtctttcatctaactggaagatcccatggaaatccactggacacatgcaaagaagcttttg

SEQ ID NO: 379459 - DNA, 122 bp, Homo sapiens
gataatgtcttcaagcttcatctgtgttgtagcatgtgttggaatttcccttctcttcatcgctggtaacagttcattggatggagcacatctgtctgttgatgcatctgttgatggacaca

SEQ ID NO: 379460 - DNA, 122 bp, Homo sapiens
ggcgggtgtgaaatatcccagccgcacgcacacagagtggggtgtgaaatatcccagccgcgtgcacacagggcgggtgtgaaatatcgcagccacattgttgttgaaagccgttgccgggc

SEQ ID NO: 379461 - DNA, 122 bp, Homo sapiens
aaactgtgttctcagggaaggtaccctacagagcgcaggtccccacccctgagcgtgcatcggcgtcccccggagcgcttgttgaaacaaggattcccgggcctccctgaggctgtgattcg

SEQ ID NO: 379462 - DNA, 122 bp, Homo sapiens
gcccaaggccacattctagtaaggggcaggattggcattcaaacccaagtccaagacacccgctaagccacagcctcaggccactgccattcctggtgggtggggcgggtgtgattaagatg

SEQ ID NO: 379463 - DNA, 122 bp, Homo sapiens
agcctggttccctggcaattattatggcggttactactattttaataatattagcagttacggttggtatttttgctattacaattaatggcataggggctgtatcgcccctgtcttcctgg

SEQ ID NO: 379464 - DNA, 122 bp, Homo sapiens
ccagtcggagacgttggaatgcggggacgagctggaccactggtcaggggactcaggggacggggtgaggaaggggtgctcaggcacctgtagctggtggctgggggtgttgtccacaggcg

SEQ ID NO: 379465 - DNA, 122 bp, Homo sapiens
caccacttcgcagttttccctttctagtctgaacatttaatatgtcggggacaggccgggcgtggtggctcacgcctgtaatcccagcatgtggggaggccgaggcgggtggatcacttgcg

SEQ ID NO: 379466 - DNA, 122 bp, Homo sapiens
gacgtggtttttcactcccagataaggcacctgtcctcagcgggcacgcccctcagctcccgctaactaaacagtcaggaattgctgggcacccgtccgtccgacccttctctaagaacatc

SEQ ID NO: 379467 - DNA, 122 bp, Homo sapiens
gctctcagtatcagcccagtggctccctgccattggctcagtgcaatggaccggcaacgccgctcactataataacactcatgcctgccagcagcagcaactccgagtgcaggcgccgagcg

SEQ ID NO: 379468 - DNA, 122 bp, Homo sapiens
gtggtgctcgtgagctgccagagggcaaaatgatctcagaacccagaccttacatgggttcgactttatttagaaggaactacggctcttctaccacacaattcgaagtgtttggtgagcta

SEQ ID NO: 379469 - DNA, 122 bp, Homo sapiens
tctgtctttctaaatgtgccatcatcttgtactcattctgcatttgatggctatttgagtcgtttccagctcttaggagcatcactggtctgcgtggcctgtgtatgggcctaagtgtctct

SEQ ID NO: 379470 - DNA, 122 bp, Homo sapiens
aaaatcaaaaaaggccaaacaatgggcacaagatggctatgcagctgtgcagccttcccgcggggcgcatgcgcatgcgtgcactgcacaggggcgctgtgggctaccagggcgcaggccac

SEQ ID NO: 379471 - DNA, 122 bp, Homo sapiens
actggcccaccaaagggcctggtacaaatgaggattgttggaacgtctttcccagctgcacgtggagaacccctaattctttttttttctttttcttttgagatgaagtctcgcgttgtcgc

SEQ ID NO: 379472 - DNA, 122 bp, Homo sapiens
cgacaatcaagagaccgctaggtaggcgagtcggcaacccgtcctcccccaactcacgcccgctgcagctgcacattcaaaatggcgctgccacaaactgcagttagaagaagagacgccgg

SEQ ID NO: 379473 - DNA, 122 bp, Homo sapiens
ctgctgagctgtcgttcaggccttggcaactgacgctctgcagaacggaccaggagtgtgcggtggtggagtccggctggcctgggttgcagatttaactttcgcctctgcctctgtgtgcc

SEQ ID NO: 379474 - DNA, 122 bp, Homo sapiens
gccacaagaggggacctaggacagggcgcaggagtctctggctggcggggcaggagggcgcggcagactccggctgccgcctggttttggagggctggccgctgtgctttgcagggcccacc

SEQ ID NO: 379475 - DNA, 122 bp, Homo sapiens
tccagttccgccaggaaaccgccgcctggagctgtgggtcgcgcacattaacgcatccagcggaaaaatgaaggagacccaaattcaaagttaaagtaatggtgacccgagaggtgccttga

SEQ ID NO: 379476 - DNA, 122 bp, Homo sapiens
cactggctgactgcagaggtaatgaaataaacttcaaagactactcataagaagggataccgactttgcaaacatagtttggaaaagttgctaaacatgttgccgggcactgtggctcatac

SEQ ID NO: 379477 - DNA, 122 bp, Homo sapiens
agacagagcatgtggttttatgagccccagatggtgtaatgggtgtcacgcatgtctttacgtggggaggtcaggggttcaggttccatctggagccatctcagagacacttcatatccgag

SEQ ID NO: 379478 - DNA, 122 bp, Homo sapiens
gggctcaggcatcccttgtggcttctcagtcatttctgggaggtgcggcgggtggtggggcgtgcggggggtaggtggggcgtgcggggggggaggtggggtgtgcggggggggcgtgcggg

SEQ ID NO: 379479 - DNA, 122 bp, Homo sapiens
tttgcttggtaggatgaggatgggcatttccaacatattgcaactggaaacagtgttccacgtttagaactcctcttcgcctcatgagctaatttggcacattactggtctgagtgagctgt

SEQ ID NO: 379480 - DNA, 122 bp, Homo sapiens
agattcaaagcagctctgttgacacggaagccctgttctcacctgggcctcaccctgtgccgccctagtccagatttcaccggtctgagtgcgttggaaagtaggggaagggtggaaacagg

SEQ ID NO: 379481 - DNA, 122 bp, Homo sapiens
gcttgcctttgaaacttgaaactctcggtctaaggttccttaggagcgtaaaaggcacagcgttttctgatcgcagcttcaggtctcccgcccctgtcccggtacctctcctgcaggacgga

SEQ ID NO: 379482 - DNA, 122 bp, Homo sapiens
ggtgctcggctcgggagaacagcgagctctttcttctcatgcagtcaggctgaaaaccctcgccgctaccggagagtcatgtcaggcatttagcggcatcgatccagcccgcctctggctgg

SEQ ID NO: 379483 - DNA, 122 bp, Homo sapiens
caataagcacaggctctgccccctttctcccttcatcctccggggaacaggctttgcagtcggaggcctgagcgccccggtacctccgctgcactacgtagagctgccaccaggtggagctg

SEQ ID NO: 379484 - DNA, 122 bp, Homo sapiens
cctgctccccctcggaggggctgaggctggaggcgggcccggcacgttcccaagcaggggcgggggctgcttttgctcatttctgaggagctctgagaagagacgaagttctgagccaggga

SEQ ID NO: 379485 - DNA, 122 bp, Homo sapiens
ttgcgaggagtcctttggtttccagttacctcccccacaggcgcacacgctggctgcttgcgttggcagcgacacacatccatggtacggctggttttcactcggattgattatgggaaggg

SEQ ID NO: 379486 - DNA, 122 bp, Homo sapiens
gcaactccttcagtctctgaccttgaaatgagattccccccaacccaccccccacccccccgcaagagcaagaatgagcagctcttcggctccttcagccagggagcaaacaagaagtggcc

SEQ ID NO: 379487 - DNA, 122 bp, Homo sapiens
acgtttccaactcaacaggtacaaaacctccttcatccagagggtcacacgggccgctcccgtgccacagacgcaccccaggaatgatggtatatatggaacttctgctcactaaaccagct

SEQ ID NO: 379488 - DNA, 122 bp, Homo sapiens
gggccaggggagtgggctctagaaggatgacctttcaactgcgacctgctgaggaggagtcggcaagggtggccgccgaccagttctctttcccgcccacctccccaaatcccaggagaaga

SEQ ID NO: 379489 - DNA, 122 bp, Homo sapiens
ccgtgacgccacgggcgcgcgccggcggccgcgcgggaggggtggaggtgagcgggtttgcgccgtgatctgcagccccagatcgccagccatgctcagcctccagtcgccggccgcggttg

SEQ ID NO: 379490 - DNA, 122 bp, Homo sapiens
acctcgtgatgagcctgccttggcctcccaaagtgctgggattacaggtgtgagccaccgcgcccggccaaattctgtagtttcaaagtaatagtccctattttcaggaaacatgtttttct

SEQ ID NO: 379491 - DNA, 122 bp, Homo sapiens
tatacaataagggcaagacgttttcaaagaaagtatacaattctgtgaactttggcactccgacacagttttgaggaagagactggggttgtgctgttgtttgaattttgagtagattatat

SEQ ID NO: 379492 - DNA, 122 bp, Homo sapiens
tgagaagggaccctatcctgcagtatcagcatcgtgtgtcatggcacctgataatggctccgtttttatttaagttgctttgtaatagtacaaaagagggaaggatataaccttaagggcca

SEQ ID NO: 379493 - DNA, 122 bp, Homo sapiens
taaaggggaaaggtggaaagcttcattacttacctcgtaacagcagactgccaccacgaacgataaccacttgccacaggggaattcacaattccaggatgtttttcatttgcttgcggagt

SEQ ID NO: 379494 - DNA, 122 bp, Homo sapiens
gggcagcgcgagcgcaagggacagggagggtcgtggcgacactcgcgccagctcccgggacggctgggctcgggctggtcgccgacctccgaccctccactagatgcctggcagagcccggc

SEQ ID NO: 379495 - DNA, 122 bp, Homo sapiens
tgccagccccggggcaggaccctgtctccggccctcgaccccgctgggccgtaccctccccgttcacctcccccacccgggccgcggctgctaggagagttcagaacaaaaggcggcggggg

SEQ ID NO: 379496 - DNA, 122 bp, Homo sapiens
ttctggaaaaccaaagaccaagtgggaggcttcccatactccccagctcctcctataacccggaatatgacccaaatcccatcacgagagcttctgccttgcaactcaaggcttcgccccag

SEQ ID NO: 379497 - DNA, 122 bp, Homo sapiens
ctgcgcgcaaagggcagcgggacagcgggaacgcggcctgctgctcacgcacctctcttgcggcctgttttcggcagtgacagctcagatgtccaagtcgttgccacttggtccccgcgtct

SEQ ID NO: 379498 - DNA, 122 bp, Homo sapiens
agagcgagaccccatctctacaaaaaacagaaaaattagccgggtgtggtagtgtgtgcccgttgtcccaactactaaggaagctaaggcaaggaggtcacctgtgcctgggaggtcaaggc

SEQ ID NO: 379499 - DNA, 122 bp, Homo sapiens
gcggcggcccctgagaggaagcggcgaagatggcgagatcgcccgcgacgtggccagggacgtggccgaactgccggcgcgcgcgcgcgcggggcaccctgggagagcggggccaggccccg

SEQ ID NO: 379500 - DNA, 122 bp, Homo sapiens
actccctgctttgtaaagcgctgctgggtctcctgggaaacagcagcgtgcctggcactacgcaaggcccgcacagctgcgccgttgttgtcaccagccgcagttcccaggttgcacatgcc

SEQ ID NO: 379501 - DNA, 122 bp, Homo sapiens
ccacttgctgattgggtagctcctgaaccattgttgtcctctgattggttgttcccttttcggctctgcaacaccgcctagaccgaccggatacacgggtagggcttccgctttacccgtct

SEQ ID NO: 379502 - DNA, 122 bp, Homo sapiens
aagatggaaaacctaactaggagcatgcgccggtaacaatcgctgagtcttgaccgatcccggcagccgtacttcaaccattcgtgcactgctgagtgttcaaactgtgtgcaaataaggca

SEQ ID NO: 379503 - DNA, 122 bp, Homo sapiens
gccgcgaagtgggcggagcgagccggagtcggatggcggctacggcggctcattgttttccgctgcaggggtgctgaaggggggacgcgggtcggacgcgtccggctgtggaagagagcggc

SEQ ID NO: 379504 - DNA, 122 bp, Homo sapiens
tatgaaagaatataagtttaataagatagtgccaaaaataggaataattgttcaagggtacgaaaggaaactggtaattgagaacaagtaaaccaattaatgggtggattgaaataaacttt

SEQ ID NO: 379505 - DNA, 122 bp, Homo sapiens
tagttcaactatgccatattgccctcttcttgcccactcaacaatcatttctccaagtgccgatggtgggccaggcaatgcattaggtggcaaggattctgcaatgatcaagatacagtccc

SEQ ID NO: 379506 - DNA, 122 bp, Homo sapiens
ataagacttttaaataaaacgaatatatttataaattgatgccacccataatttaaacagcgaaactacacaaacttaggatttcactgttacttgttataaagcaaataatttgaccagta

SEQ ID NO: 379507 - DNA, 122 bp, Homo sapiens
tccggattccctcagcctgctttctgatcatatgcctgttcctgccacgcagcattaggccgggtgtgtgaacatagaggggggctggggagggaaggggggagcctttccctgggaggctg

SEQ ID NO: 379508 - DNA, 122 bp, Homo sapiens
gcctgtatttgaaatgatgaattatgaaaaatattaaaataacttgtaatattaggaaagcgcagaggaaagtttaaaactttctgcttaattcagcaagacttaaaaaaagtgaaagttta

SEQ ID NO: 379509 - DNA, 122 bp, Homo sapiens
ctgctctagagagatgagaactggctgtgagggacacttttacacaaagctctgaggccacgtggggaagagtacagggcagagtgagctcagtgggaggagaggtctctgccagaatgcct

SEQ ID NO: 379510 - DNA, 122 bp, Homo sapiens
gtgggagctgcagctgtcagaatcctaatcccttctgcctggactcgttaccagtggtagcgagtgtgtatagtagtaaactgtgctgcgatgctagcctttcagtcactaccagaggtccc

SEQ ID NO: 379511 - DNA, 122 bp, Homo sapiens
atccaatgtggctgcagagtaactctctgcagagtagttaatgggttaaattaggaagaacgtgacagaagggcaaaagcacacaactatagtattaggaatgggaaagctcaggaaaaaac

SEQ ID NO: 379512 - DNA, 122 bp, Homo sapiens
ctcaggtgatctgcccacctctgcctctcaaagtgttgggattataggcatgagccaccgcgcccagccggccaaggtttttaacatgccaatttgtatttaataagcttgctataggagga

SEQ ID NO: 379513 - DNA, 122 bp, Homo sapiens
gacctcagcccccaggagacgtgcctgccccgccgtgcacagacctcagcccccgggagacgtgcctgccccgccgtgcacacacctcagcccccgggagacgtgcctgccccgccgtgcac

SEQ ID NO: 379514 - DNA, 122 bp, Homo sapiens
tctccagaatacaatgactcgggtctccaggctaggttgggcgggggttgaggggaggaccgacggatacaggatctgtaaaagtcattctgaaattcaaggcgagggtaaagggaagataa

SEQ ID NO: 379515 - DNA, 122 bp, Homo sapiens
aaaaggaagaaaagagtatttcgtgaggctcagatcctcggaggaggaggagaatacgttcgtttgcaaattatctgctgactggcacctctcctggggttaacttgccgctgccacctacg

SEQ ID NO: 379516 - DNA, 122 bp, Homo sapiens
cggcaactaagggaatacagagctgtggcttcccttggcctggctgtggccaggctgagacgatatccatgaaagaggcgtggaacctgccagggagagtgcggagggtgcatgaagggtct

SEQ ID NO: 379517 - DNA, 122 bp, Homo sapiens
ccaccgcggtgaggaagcaactattaccggactattccccgctctgacctgtcaggccatcgttaccctgctgccccagcccacctttccatcctaggagctcaagagaggagattcccaca

SEQ ID NO: 379518 - DNA, 122 bp, Homo sapiens
agtctgggacctccaggaaggagatcaggctgtgtgcttcagcccctgcccttccagttccgctttggattttgttgaaatgttgcatgttcaggcggcgacagactgacagctgtcatcaa

SEQ ID NO: 379519 - DNA, 122 bp, Homo sapiens
cctttgagtagagacttaggtgagccttgcatatgtctggtggaagggcactccaggaaccgggaatagcaaaggcaaagggccctgagtcaggagcacgtctgccagatgccaggaacagc

SEQ ID NO: 379520 - DNA, 122 bp, Homo sapiens
cagtcgggatccttcctccctgtccggcctcatcgctcagcctccctcctcaaggcaccacgtgtctggccagactgagctgcacttgctgttttttcctgagttgtcttattcattcctgc

SEQ ID NO: 379521 - DNA, 122 bp, Homo sapiens
tgggattttatcctgtgaactagatgaagctctcagggcctcgtttgctcccagacaggccgacctcctcaatggttctcacgaaagcaagtgtgaaagtgagccaggaggagaccaccagt

SEQ ID NO: 379522 - DNA, 122 bp, Homo sapiens
tgtgacgcagaaaattctagatgcttaagtgcagctcttgaaatcgttttccttcttcctcgtgatctaacatttaaatcaaggaggagccaaaggggtgtgtataaactgcctggctagaa

SEQ ID NO: 379523 - DNA, 122 bp, Homo sapiens
agttgctgctgtaataaaagtctactttttgctaaaagcgtcgtgtgttcgcgcctttcccgccagggggagcgggcccggggcggaggcggggcccaggtgggagggggacccgggacgga

SEQ ID NO: 379524 - DNA, 122 bp, Homo sapiens
aaaagctagtggccgctcagctcgcaggcgcagtgggtgggtgcgcgtggggagcaggcgcgcgcagggggcgggaccgggccgaggttcccgcgcgcggcgagagtttcgggttttggttc

SEQ ID NO: 379525 - DNA, 122 bp, Homo sapiens
ccaggcccgcgcagggcgggagcggccccttagaggccctgcgcgccggaggcaagggggcggcgcgaggtccctctcaacccatgtgaatttaagaagagttttttctaattctgtgaaaa

SEQ ID NO: 379526 - DNA, 122 bp, Homo sapiens
ggtgagaggcgggaggcatggggggactgaagtttccagttggccagtgagcgaagaaggcgttggctgtaggccactatgatttgctaggagaaatttgaatgggtatgccagggcaattt

SEQ ID NO: 379527 - DNA, 122 bp, Homo sapiens
cggccaccagggcgccggcagctggagactgggagagccgccattcatgcagagggactccgggccattttgctgtcaactctctttgatgcctggtcttgaggacctgcaaaaaagaacta

SEQ ID NO: 379528 - DNA, 122 bp, Homo sapiens
gtaacatgttttcagaaacccaaattccaggatggtggcacggctgaaaagactcctcagcgttatctgttttcccaggcgatgccttgccgtctctttcctgtttcagtgcttctctagag

SEQ ID NO: 379529 - DNA, 122 bp, Homo sapiens
gaaggactgtgtgaccaggtctccacagccctcagtgtccactggggcttggccaggggccgcacatgactcagattcttctgcctgggtctctgcctcccgcaggaggggatgggcaggag

SEQ ID NO: 379530 - DNA, 122 bp, Homo sapiens
ctccagccagagagcagggattctgtctgccatgggggaactgagctgcagacagaagaccgactaaagtccatttggggccctactctgaaaaggctgcctcagtattaggtttctgtcag

SEQ ID NO: 379531 - DNA, 122 bp, Homo sapiens
taaaggacagtttttcaatttgaaggtagaaattggataatttcacatagtaagttgggacggtgagatgagaagggagttcctgacacaaccccccttcggctcccatgtacccccaggca

SEQ ID NO: 379532 - DNA, 122 bp, Homo sapiens
tggatccaaagagagccaacagagttcacaatttacatattttcggtagtagcaaaaatccgaacaagaggcgatgtatttatttacactctcgatgtttccctgcgcggtcggtgtacccc

SEQ ID NO: 379533 - DNA, 122 bp, Homo sapiens
cagcgaatcatactcttggtatcccatcaagcctcatgcaaatcctaccatgttgtggggcgggggttgggggatgtctgttactttctctttctctgtaccaaggctgaccagacatttac

SEQ ID NO: 379534 - DNA, 122 bp, Homo sapiens
cgcaggttagagtctcagatgcattgttacagctgcacaaactaccctaccccgacagtgcgtgggtgccggagccttggtccataagggagccttgtgggcagtggcttaggcaagagcct

SEQ ID NO: 379535 - DNA, 122 bp, Homo sapiens
ttctcatctccctggcacttcattgttagaaaattagaacttggaagctcagagaggtgacgtgattagcctaaggtcacaaagctatttcataagaaggatagggctaaaactgtttagtc

SEQ ID NO: 379536 - DNA, 122 bp, Homo sapiens
agcagcagaggtgtctgcaattacaccctctaatcccctactgtcagatatgaccctttccgcacatacctgagggccctctggtaagattgatctcttcctcagtgaccaaataatccact

SEQ ID NO: 379537 - DNA, 122 bp, Homo sapiens
attccaatgccacctgtctgtggctgggccttcttctcagtggctggctccatagtcctccgtggtgggaggcacgaagagagggggaatgggggctcacagagaagagggaaccccgctgg

SEQ ID NO: 379538 - DNA, 122 bp, Homo sapiens
cattttttaaaggttcttgcgctcggcaaggggagcagatagatgctcaggagcgaaagacgcagagaattggatctggcgcctcctaacgcagcccgcacaggagcgaagggtaagccctt

SEQ ID NO: 379539 - DNA, 122 bp, Homo sapiens
gcggaacgcgcttccactgtctcgaaagcagcaccttctcggatttgagcctttgcggcgcgcctgggctgagatctgagaaatgcgccctgggccacaggcagcagcggaggcggggaagg

SEQ ID NO: 379540 - DNA, 122 bp, Homo sapiens
gtatcgagcctgaccaccgcaagccaggaagcaggtgaagtgcccagcgctggagtgcagcgtgccacgaggagggcggtcggtgcttccctcctcgggctgtgggcacatggggccccgca

SEQ ID NO: 379541 - DNA, 122 bp, Homo sapiens
atttgtggaagagaagagagggctcgttgattacaggccctggaagagaagtgaccttcacggtttaataagggcaaaccagccaagtgtgctccaatctgctgttatcaagaagcccccaa

SEQ ID NO: 379542 - DNA, 122 bp, Homo sapiens
ggtcccaagccctgccctgcgggaaggcggctgaggcccagtgagaattcgagagcagtgcgggccggtcggcagtgctgggggacccggcacaccctctgcagctgctggcctgggtgcta

SEQ ID NO: 379543 - DNA, 122 bp, Homo sapiens
tgaagccagccgcagctggcccgggcagctgctcctcctgggcccggggccccggacgctcggacaaagccaggcagcgttggcagccccagacccgaccccaaaggcctgagactggggtg

SEQ ID NO: 379544 - DNA, 122 bp, Homo sapiens
ccttctccctctgtttttctcttaggtctccaaagctcctgcctttctcttccagctgcccgtggtctgtgctgctgcatacctctcacccctctatttctccctctctgccttttgtcttc

SEQ ID NO: 379545 - DNA, 122 bp, Homo sapiens
agaagaatgactcaatcattggtaggaggaaggagaggctttgcttcatattgggaagttcgctgacgcaaattcttgagttatgtgtattgcaggtggagaaagtggtgattctgaaggtg

SEQ ID NO: 379546 - DNA, 122 bp, Homo sapiens
agtgatcctacggagtaagctggccatcagatgatcaactcaagctgtcacttaattacacgactctctatctgtgcagagcaggggtttgcacactgtggacagagatatggatgggattc

SEQ ID NO: 379547 - DNA, 122 bp, Homo sapiens
aggggacccggggcgagcgcggaggggactcggggagggcgcggggacgcggaggggacccgttagggacgcggaggggcccgttggggatgcggtggggagcgggcgtggtgcattcggga

SEQ ID NO: 379548 - DNA, 122 bp, Homo sapiens
actcactcgatgacagttgtcaccgccatcattgttattagcgtgggccagggagggctgcgtaaaagcagctggtggaggagggagagatgccgtgggaccgtctgggttcgcatgcgtga

SEQ ID NO: 379549 - DNA, 122 bp, Homo sapiens
aagacagccaagacagaaaggaaacggcagcgcaaccgagggaaggagtcaccccactcccgcccctgggaaacataactgagaaagcaattaggagactccggaatgtgtgtagacatctc

SEQ ID NO: 379550 - DNA, 122 bp, Homo sapiens
ttggtacagcattcagagacacctccatattcctctccccttactaaaggttccttcttacggcaccctgcatttttccttcatgactttatcacagtttgtaattgtctatttattttaat

SEQ ID NO: 379551 - DNA, 122 bp, Homo sapiens
aaaggacagtcgggctaaggcttgggcagccgggaggaccatgatgcagggccagccgggcgggaggagagactcacctccagctccttgaagaccatgcacctgcgtgcccagtccacgat

SEQ ID NO: 379552 - DNA, 122 bp, Homo sapiens
gcaaggggggaattagaaactgctctagaaggattttaaacaactggctgttctctccgccgccacccctccccccgcgccgcccgcgctcagctcctcactggagagaaggcgccgggagg

SEQ ID NO: 379553 - DNA, 122 bp, Homo sapiens
ccacctgctacactaacaaaactggctctactagacaacatccatatttgagaaatattacgtacagtaaaagaaaaatcacacgcttaaaactgacagagggggaaagtatttaaaattaa

SEQ ID NO: 379554 - DNA, 122 bp, Homo sapiens
gcctggtgtccctttaagcagggagtacaaattctcatccctccctcctgctctccctgacgtcagctggaaggcgtgtgagtgagtgaggggctgaggtaccgcccgcgcgagcacacaca

SEQ ID NO: 379555 - DNA, 122 bp, Homo sapiens
ggaactccgcagtttgcgtagacttgaatttcctattcctcggacgatccatgtggaatccgtgagtagtgcgactcctttacgcaactggcgttatccgaagtgaatagctaggtggcgcg

SEQ ID NO: 379556 - DNA, 122 bp, Homo sapiens
taccttgttttcttttttcagcatttatgtatctttttaaaagcgtgccacacacatctgcgtacagtcacaggcttatgatcagcagagatctctaggatgaaactatttaaatctgaaaa

SEQ ID NO: 379557 - DNA, 122 bp, Homo sapiens
agccggtgcgccagtgtacttacaatacctggccgccgagatcttagaactggtgggcagcgccatacgtgacaagacccgcagcatcatcccccgccacctgcagctggccatccgaaacg

SEQ ID NO: 379558 - DNA, 122 bp, Homo sapiens
cccagcccagtggttctgggataagaagaccccgcagaggggcccagcgccgcgttcctacgagacacctgagctgcactgtgtttccacgggctaggagagcggtgactccccagcctccc

SEQ ID NO: 379559 - DNA, 122 bp, Homo sapiens
aagaaatatagaaaacacctaacattgctggaaactgaagaggtgttcaactcatttatccgaccttgaagccagtagagtgcaggagacatctgagtgttgtcaaggatcaacaaatctgg

SEQ ID NO: 379560 - DNA, 122 bp, Homo sapiens
tcatgcagctactaccataatcagaatataaaacaattctgttaccccaaaagatttcctcgtgctctttgtaaccagtcttattccccatccctgatacttggcagtgatctgttttaggt

SEQ ID NO: 379561 - DNA, 122 bp, Homo sapiens
gttgcccctgggcaaagacgtcctgaagcgcacttgaggggacgggcacccaggccctggcgcacctcgcactgtgcacacggggagaagggcacccaggccctggcgcacctcgcactgtg

SEQ ID NO: 379562 - DNA, 122 bp, Homo sapiens
aatctgagggggccagtgatctttgcaagaccccatagggacggcgggttgacggggggccgtccctgggttcgccttcccagtccggactcaccgcccgccggagctgccccggagccgcc

SEQ ID NO: 379563 - DNA, 122 bp, Homo sapiens
ggcggggcctgctggctgtggtggggcccgcccggcgtgggaggggtctgcgagccagggcggggctggagtggggtggggcctgcgagctgggtagggtcttggggagaagacccccggag

SEQ ID NO: 379564 - DNA, 122 bp, Homo sapiens
agccaacctcccatccctgataatgcaggaatgttcctccggctggtggacctctgccagcgtaagtgagcgtcccagccaccaacagagtaaacattactcaactggctggggctctgtca

SEQ ID NO: 379565 - DNA, 122 bp, Homo sapiens
gtgggtgacctgcaggtactggtcagcgctgctgttctgctggtcactgctggatgctgccgacacggagtcagattccgtgagggatggctcgaacctgggcttccctctgggcttcagag

SEQ ID NO: 379566 - DNA, 122 bp, Homo sapiens
aactaactttgataggtgcctctcaataaatggtgcctttgtctcaataaatagtaaatgcgtggagtgcacaacggaatagcatcagtaagacgaaacataataaacaggatggatcggga

SEQ ID NO: 379567 - DNA, 122 bp, Homo sapiens
agaggagggagtaggggcgaggaggcctcggcggcccttgggctctgcgggctggggactcggggtgcccgcgacacgcgcggaggcgcgggctgggttggccacgggcagggagcgcagcc

SEQ ID NO: 379568 - DNA, 122 bp, Homo sapiens
agcgaaatcgaaaaagagaagtgggtgttccaacagtagaggggatcattgacgcaaattcgtccttttatgttcccacacggctcaagttggggaatataagtcctaaaaacaggcgcacc

SEQ ID NO: 379569 - DNA, 122 bp, Homo sapiens
gcccgcggcaagagttgctgagtaccccaccccccgcccccagatcctaaggcagcccctcgagctttccaaacgtattgtatccagccctcccgagagtggagttgcaccaaggacaaaca

SEQ ID NO: 379570 - DNA, 122 bp, Homo sapiens
aagccaaggccatgcttttcctgggcagtgcctagtgatctagctctgcaggagcatttccgtgcatgcaagattcctctaacaggcagtctttgctctggagctccccgattttgttggcc

SEQ ID NO: 379571 - DNA, 122 bp, Homo sapiens
gctcttccttcgcttcgttgacctttcactttgttctgagtaggatggcaccatctttaacgaaaagttggccagtcccggcgtgtttctccccagacaatgctgctccagccctgctggct

SEQ ID NO: 379572 - DNA, 122 bp, Homo sapiens
tacctaagagagaccaaaagcatttccttctgtaaagccctgcagctgagggcttacatccgcctggtccaatcagttcatttccaaacaaaggtaggaaatggctgcatcctagtatttca

SEQ ID NO: 379573 - DNA, 122 bp, Homo sapiens
accatttactgagcatctactacatgccaaaaagcgagatgggtgctgtgaaggcagaaacggatttggagataatctccgccaggcatactgaggtcaaggttttcgttcgtttgtttaga

SEQ ID NO: 379574 - DNA, 122 bp, Homo sapiens
gggctgaggttttcttgctcctgtggatgtataggaagtcaaaggtcctgcccagccctgcggtcccctcagtcaactctgtttcggagaggtaacgatttggattgccaacaaatcaagaa

SEQ ID NO: 379575 - DNA, 122 bp, Homo sapiens
cgagtaaacttacaatccccaaaatgcgttgagggcatcggaaagagtaaagtcacgttccgctggaaaggatcacttcttaagttcacatgaacctattctttgatcctccttcattgctg

SEQ ID NO: 379576 - DNA, 122 bp, Homo sapiens
aaaaaaaaaaaaacaaacccacggaagtggcccgtacggggatcgaacccgcgaccttggcgttattagcaccacgctctaaccaactgagctaaccggcctccttggtgggagggtctttt

SEQ ID NO: 379577 - DNA, 122 bp, Homo sapiens
ctgtgttccttcccctgtaaaatcaaggccccaacatgcacttcataggtcgttgtgagacggggacaacagcacctgccctggctacctcctagggctcttgggagacccaaatgagttgt

SEQ ID NO: 379578 - DNA, 122 bp, Homo sapiens
ttccaggcgcacgtcggccttaagaaatagcacaaaacaggcccatccttattcagaagccgggccccctccatcactcaaactgggcctttcaggtcacatgccggaggctgctgcagaca

SEQ ID NO: 379579 - DNA, 122 bp, Homo sapiens
ctggcctatgctaggtattagatacactacatggtttcaccatgttggccaggctgttctcgctctcttgacctcgtgatccacccgcctcagcctcccaaagtgctgggattacaggcatg

SEQ ID NO: 379580 - DNA, 122 bp, Homo sapiens
gaaagcaaatccttctaaagaaacagtgtatgaatgatcctagtggttggagcacacaagcggcattgttccaccatccccaaagaatggaatggtagcatttctttaaagagaaactgcta

SEQ ID NO: 379581 - DNA, 122 bp, Homo sapiens
tgccacacgctcagcacgcttccagggagcccttgatgggtgggcccagcgctgttcccacggcaccaagagagacaaggtctccaccaatacagcgtgagcagggagggggcagacgagga

SEQ ID NO: 379582 - DNA, 122 bp, Homo sapiens
agggtccggaaggagggcggggctgtgcggccggcggaggcccccgaaagttccagaaagcgggtggggaggtcggcgcgggaggctcagatggctggaggcggcgggcacgcacactgcgg

SEQ ID NO: 379583 - DNA, 122 bp, Homo sapiens
ggttccgcggcgcggaggcccctgctgaccgcatctgcacggagccaacggcgcgaggggcgggaggcggcgtggccacaccccacagcccacccgttcctcggaaagtcgaacacagcgac

SEQ ID NO: 379584 - DNA, 122 bp, Homo sapiens
aaccaggatggcttcaccagggaggcagaacaacaaatgcccatgacagagggcatgcaccgtgaataaaagaatcaggattttaaacagaaaggcagaaagaagaggacttccaaacccta

SEQ ID NO: 379585 - DNA, 122 bp, Homo sapiens
tttatgtccgtcatcttggcttcctcggaagctcagtcatctgtcatccctgagacagaccgttggaaggctcgggatgggggagccaacaatgcagacacatacgcatgcacatgttgtgc
